United States Patent Application Publication US 2022/0213167 A1 - sequence listing, part 13

SEQ ID NO: 262189 - protein, 13 aa, Homo sapiens
  CDR3 for alpha chain variable domain of TCR clone 131095 (TRAV12-2, TRAJ20)
CAVYPSNDYKLSF

SEQ ID NO: 262190 - protein, 15 aa, Homo sapiens
  CDR3 for beta chain variable domain of TCR clone 131095 (TRBV12-4, TRBJ2-5)
CASSLYPRGGETQYF

SEQ ID NO: 262191 - protein, 12 aa, Homo sapiens
  CDR3 for alpha chain variable domain of TCR clone 131096 (TRAV1-1, TRAJ9)
CAVPTGGFKTIF

SEQ ID NO: 262192 - protein, 14 aa, Homo sapiens
  CDR3 for beta chain variable domain of TCR clone 131096 (TRBV4-1, TRBJ2-2)
CASSQAVNTGELFF

SEQ ID NO: 262193 - protein, 15 aa, Homo sapiens
  CDR3 for alpha chain variable domain of TCR clone 131097 (TRAV40, TRAJ45)
CLLGDLGGGADGLTF

SEQ ID NO: 262194 - protein, 13 aa, Homo sapiens
  CDR3 for beta chain variable domain of TCR clone 131097 (TRBV7-9, TRBJ1-2)
CASSLEQNYGYTF

SEQ ID NO: 262195 - protein, 13 aa, Homo sapiens
  CDR3 for alpha chain variable domain of TCR clone 131098 (TRAV8-6, TRAJ49)
CAVITNTGKQFYF

SEQ ID NO: 262196 - protein, 13 aa, Homo sapiens
  CDR3 for beta chain variable domain of TCR clone 131098 (TRBV10-3, TRBJ2-7)
CASKLAVNYEQYF

SEQ ID NO: 262197 - protein, 13 aa, Homo sapiens
  CDR3 for alpha chain variable domain of TCR clone 131099 (TRAV17, TRAJ5)
CALRGTGRRALTF

SEQ ID NO: 262198 - protein, 13 aa, Homo sapiens
  CDR3 for beta chain variable domain of TCR clone 131099 (TRBV7-2, TRBJ2-2)
CASSLAVTGELFF

SEQ ID NO: 262199 - protein, 15 aa, Homo sapiens
  CDR3 for alpha chain variable domain of TCR clone 131100 (TRAV26-1, TRAJ48)
CIARWSWFGNEKLTF

SEQ ID NO: 262200 - protein, 12 aa, Homo sapiens
  CDR3 for beta chain variable domain of TCR clone 131100 (TRBV19, TRBJ2-5)
CASSISEDTQYF

SEQ ID NO: 262201 - protein, 14 aa, Homo sapiens
  CDR3 for alpha chain variable domain of TCR clone 131101 (TRAV30, TRAJ33)
CGTVAPRSNYQLIW

SEQ ID NO: 262202 - protein, 16 aa, Homo sapiens
  CDR3 for beta chain variable domain of TCR clone 131101 (TRBV3-1, TRBJ2-5)
CASSPGQCNGFGTQYF

SEQ ID NO: 262203 - protein, 15 aa, Homo sapiens
  CDR3 for alpha chain variable domain of TCR clone 131102 (TRAV16, TRAJ57)
CALSGGQGGSEKLVF

SEQ ID NO: 262204 - protein, 12 aa, Homo sapiens
  CDR3 for beta chain variable domain of TCR clone 131102 (TRBV6-6, TRBJ2-3)
CASSSRGDTQYF

SEQ ID NO: 262205 - protein, 14 aa, Homo sapiens
  CDR3 for alpha chain variable domain of TCR clone 131103 (TRAV1-2, TRAJ16)
CAVNRFSDGQKLLF

SEQ ID NO: 262206 - protein, 17 aa, Homo sapiens
  CDR3 for beta chain variable domain of TCR clone 131103 (TRBV7-8, TRBJ2-6)
CASSAGTGGSGANVLTF

SEQ ID NO: 262207 - protein, 14 aa, Homo sapiens
  CDR3 for alpha chain variable domain of TCR clone 131104 (TRAV1-2, TRAJ16)
CAVNRFSDGQELLF

SEQ ID NO: 262208 - protein, 16 aa, Homo sapiens
  CDR3 for beta chain variable domain of TCR clone 131104 (TRBV20-1, TRBJ1-4)
CSAPGQGLLTNEKLFF

SEQ ID NO: 262209 - protein, 14 aa, Homo sapiens
  CDR3 for alpha chain variable domain of TCR clone 131105 (TRAV26-1, TRAJ38)
FIADNAGNNRKLIW

SEQ ID NO: 262210 - protein, 13 aa, Homo sapiens
  CDR3 for beta chain variable domain of TCR clone 131105 (TRBV7-9, TRBJ1-2)
CASSLKQNYGYTF

SEQ ID NO: 262211 - protein, 16 aa, Homo sapiens
  CDR3 for alpha chain variable domain of TCR clone 131106 (TRAV30, TRAJ24)
CCTEIVDADSWGKFQF

SEQ ID NO: 262212 - protein, 15 aa, Homo sapiens
  CDR3 for beta chain variable domain of TCR clone 131106 (TRBV18, TRBJ2-1)
CASLPDRGRDNEQFF

SEQ ID NO: 262213 - protein, 14 aa, Homo sapiens
  CDR3 for alpha chain variable domain of TCR clone 131107 (TRAV17, TRAJ31)
CATVLRNNNARLMF

SEQ ID NO: 262214 - protein, 14 aa, Homo sapiens
  CDR3 for beta chain variable domain of TCR clone 131107 (TRBV7-2, TRBJ2-7)
CASSPKTSFYEQYF

SEQ ID NO: 262215 - protein, 11 aa, Homo sapiens
  CDR3 for alpha chain variable domain of TCR clone 131108 (TRAV13-1, TRAJ6)
CATLGSYIPTF

SEQ ID NO: 262216 - protein, 13 aa, Homo sapiens
  CDR3 for beta chain variable domain of TCR clone 131108 (TRBV6-6, TRBJ2-1)
CASSLRQGDEQFF

SEQ ID NO: 262217 - protein, 12 aa, Homo sapiens
  CDR3 for alpha chain variable domain of TCR clone 131109 (TRAV12-2, TRAJ31)
FAVNTPDARLMF

SEQ ID NO: 262218 - protein, 12 aa, Homo sapiens
  CDR3 for beta chain variable domain of TCR clone 131109 (TRBV12-4, TRBJ2-7)
CASSLGGYEQYF

SEQ ID NO: 262219 - protein, 12 aa, Homo sapiens
  CDR3 for alpha chain variable domain of TCR clone 131110 (TRAV3, TRAJ20)
CAVRDHDYKLSF

SEQ ID NO: 262220 - protein, 15 aa, Homo sapiens
  CDR3 for beta chain variable domain of TCR clone 131110 (TRBV9, TRBJ1-6)
CASSVAVTGDSPLHF

SEQ ID NO: 262221 - protein, 13 aa, Homo sapiens
  CDR3 for alpha chain variable domain of TCR clone 131111 (TRAV36/DV7, TRAJ37)
CAVFSSNTGKLIF

SEQ ID NO: 262222 - protein, 14 aa, Homo sapiens
  CDR3 for beta chain variable domain of TCR clone 131111 (TRBV7-8, TRBJ2-3)
CASSLEAGTDTQYF

SEQ ID NO: 262223 - protein, 13 aa, Homo sapiens
  CDR3 for alpha chain variable domain of TCR clone 131112 (TRAV27, TRAJ41)
CAGEGHSGYALNF

SEQ ID NO: 262224 - protein, 16 aa, Homo sapiens
  CDR3 for beta chain variable domain of TCR clone 131112 (TRBV29-1, TRBJ2-7)
CSVEVVGTSGSYEQYF

SEQ ID NO: 262225 - protein, 13 aa, Homo sapiens
  CDR3 for alpha chain variable domain of TCR clone 131113 (TRAV12-1, TRAJ29)
CVVNGPGNTPLVF

SEQ ID NO: 262226 - protein, 15 aa, Homo sapiens
  CDR3 for beta chain variable domain of TCR clone 131113 (TRBV4-3, TRBJ2-1)
CASSQESAIYNEQLF

SEQ ID NO: 262227 - protein, 18 aa, Homo sapiens
  CDR3 for alpha chain variable domain of TCR clone 131114 (TRAV2, TRAJ20)
LQVREADAAVYRDCKLSF

SEQ ID NO: 262228 - protein, 16 aa, Homo sapiens
  CDR3 for beta chain variable domain of TCR clone 131114 (TRBV5-1, TRBJ2-5)
CASSLALLRAGETQYF

SEQ ID NO: 262229 - protein, 13 aa, Homo sapiens
  CDR3 for alpha chain variable domain of TCR clone 131115 (TRAV21, TRAJ27)
CAARPGNAGKSTI

SEQ ID NO: 262230 - protein, 14 aa, Homo sapiens
  CDR3 for beta chain variable domain of TCR clone 131115 (TRBV7-6, TRBJ2-3)
CASSLGTVTDTQYF

SEQ ID NO: 262231 - protein, 17 aa, Homo sapiens
  CDR3 for alpha chain variable domain of TCR clone 131116 (TRAV26-1, TRAJ53)
IASSESRWEGSNYKLTF

SEQ ID NO: 262232 - protein, 12 aa, Homo sapiens
  CDR3 for beta chain variable domain of TCR clone 131116 (TRBV7-9, TRBJ1-5)
CASSPQGQPQHF

SEQ ID NO: 262233 - protein, 17 aa, Homo sapiens
  CDR3 for alpha chain variable domain of TCR clone 131117 (TRAV23/DV6, TRAJ58)
CAARLLRGETSGSRLTF

SEQ ID NO: 262234 - protein, 16 aa, Homo sapiens
  CDR3 for beta chain variable domain of TCR clone 131117 (TRBV19, TRBJ2-1)
CASSKAGPSSYNEQFF

SEQ ID NO: 262235 - protein, 11 aa, Homo sapiens
  CDR3 for alpha chain variable domain of TCR clone 131118 (TRAV3, TRAJ21)
CAVGNFNKFYF

SEQ ID NO: 262236 - protein, 15 aa, Homo sapiens
  CDR3 for beta chain variable domain of TCR clone 131118 (TRBV7-3, TRBJ2-1)
CASSLGQGPFGEQFF

SEQ ID NO: 262237 - protein, 11 aa, Homo sapiens
  CDR3 for alpha chain variable domain of TCR clone 131119 (TRAV1-2, TRAJ31)
CAVNNNARLMF

SEQ ID NO: 262238 - protein, 11 aa, Homo sapiens
  CDR3 for beta chain variable domain of TCR clone 131119 (TRBV29-1, TRBJ2-5)
CSEDRTGTQYF

SEQ ID NO: 262239 - protein, 15 aa, Homo sapiens
  CDR3 for alpha chain variable domain of TCR clone 131120 (TRAV3, TRAJ22)
CAVRDRGGSARQLTF

SEQ ID NO: 262240 - protein, 13 aa, Homo sapiens
  CDR3 for beta chain variable domain of TCR clone 131120 (TRBV12-4, TRBJ1-2)
CASSLRQGKGYSF

SEQ ID NO: 262241 - protein, 11 aa, Homo sapiens
  CDR3 for alpha chain variable domain of TCR clone 131121 (TRAV1-1, TRAJ16)
CAAGDGQKLIF

SEQ ID NO: 262242 - protein, 15 aa, Homo sapiens
  CDR3 for beta chain variable domain of TCR clone 131121 (TRBV28, TRBJ1-2)
CASIPQGSDDYGYTF

SEQ ID NO: 262243 - protein, 21 aa, Homo sapiens
  CDR3 for alpha chain variable domain of TCR clone 131122 (TRAV1-1, TRAJ6)
CLLLLRCERLERTGGSYIPTF

SEQ ID NO: 262244 - protein, 13 aa, Homo sapiens
  CDR3 for beta chain variable domain of TCR clone 131122 (TRBV10-2, TRBJ2-7)
CASGAGGGYEQYF

SEQ ID NO: 262245 - protein, 15 aa, Homo sapiens
  CDR3 for alpha chain variable domain of TCR clone 131123 (TRAV29/DV5, TRAJ42)
CAAKTDGGSQGNLIF

SEQ ID NO: 262246 - protein, 15 aa, Homo sapiens
  CDR3 for beta chain variable domain of TCR clone 131123 (TRBV5-1, TRBJ2-2)
CASSSQGGNTEELFF

SEQ ID NO: 262247 - protein, 17 aa, Homo sapiens
  CDR3 for alpha chain variable domain of TCR clone 131124 (TRAV3, TRAJ6)
CAVRAGPRAGGSYIPTF

SEQ ID NO: 262248 - protein, 15 aa, Homo sapiens
  CDR3 for beta chain variable domain of TCR clone 131124 (TRBV20-1, TRBJ1-1)
CSASWDRFLNTEAFF

SEQ ID NO: 262249 - protein, 15 aa, Homo sapiens
  CDR3 for alpha chain variable domain of TCR clone 131125 (TRAV10, TRAJ42)
SLLHLWGGSQGNLIF

SEQ ID NO: 262250 - protein, 17 aa, Homo sapiens
  CDR3 for beta chain variable domain of TCR clone 131125 (TRBV4-2, TRBJ2-5)
CASSPGRWRNFQETQYF

SEQ ID NO: 262251 - protein, 16 aa, Homo sapiens
  CDR3 for alpha chain variable domain of TCR clone 131126 (TRAV38-2/DV8, TRAJ47)
CAYRSAIMEYGNKLVF

SEQ ID NO: 262252 - protein, 14 aa, Homo sapiens
  CDR3 for beta chain variable domain of TCR clone 131126 (TRBV19, TRBJ2-7)
CVSSIFAGTYEQYF

SEQ ID NO: 262253 - protein, 17 aa, Homo sapiens
  CDR3 for alpha chain variable domain of TCR clone 131127 (TRAV38-2/DV8, TRAJ38)
CAYRSARGAGNNRQLIW

SEQ ID NO: 262254 - protein, 13 aa, Homo sapiens
  CDR3 for beta chain variable domain of TCR clone 131127 (TRBV6-5, TRBJ2-1)
CASRGRVGNEQFF

SEQ ID NO: 262255 - protein, 15 aa, Homo sapiens
  CDR3 for alpha chain variable domain of TCR clone 131128 (TRAV8-3, TRAJ41)
CAVGSNSNSGDALNF

SEQ ID NO: 262256 - protein, 17 aa, Homo sapiens
  CDR3 for beta chain variable domain of TCR clone 131128 (TRBV25-1, TRBJ2-1)
CASSAYGQGRGVYEQFF

SEQ ID NO: 262257 - protein, 13 aa, Homo sapiens
  CDR3 for alpha chain variable domain of TCR clone 131129 (TRAV3, TRAJ20)
CCEAFCNDYKLSF

SEQ ID NO: 262258 - protein, 15 aa, Homo sapiens
  CDR3 for beta chain variable domain of TCR clone 131129 (TRBV19, TRBJ2-6)
CASVRRDSGANVLTS

SEQ ID NO: 262259 - protein, 15 aa, Homo sapiens
  CDR3 for alpha chain variable domain of TCR clone 131130 (TRAV2, TRAJ9)
CAVAALNTGGCKTIF

SEQ ID NO: 262260 - protein, 14 aa, Homo sapiens
  CDR3 for beta chain variable domain of TCR clone 131130 (TRBV7-8, TRBJ2-5)
CASSATGGQETQYF

SEQ ID NO: 262261 - protein, 13 aa, Homo sapiens
  CDR3 for alpha chain variable domain of TCR clone 131131 (TRAV12-3, TRAJ13)
CALSSGGYQKVTF

SEQ ID NO: 262262 - protein, 13 aa, Homo sapiens
  CDR3 for beta chain variable domain of TCR clone 131131 (TRBV20-1, TRBJ1-1)
CSAPPGGHTEAFF

SEQ ID NO: 262263 - protein, 14 aa, Homo sapiens
  CDR3 for alpha chain variable domain of TCR clone 131132 (TRAV12-3, TRAJ9)
CAMSPNTGGFKTIF

SEQ ID NO: 262264 - protein, 16 aa, Homo sapiens
  CDR3 for beta chain variable domain of TCR clone 131132 (TRBV7-7, TRBJ2-1)
CASSLASGTSYNEQFF

SEQ ID NO: 262265 - protein, 14 aa, Homo sapiens
  CDR3 for alpha chain variable domain of TCR clone 131133 (TRAV16, TRAJ31)
CALSGRNNNSRLMF

SEQ ID NO: 262266 - protein, 12 aa, Homo sapiens
  CDR3 for beta chain variable domain of TCR clone 131133 (TRBV11-2, TRBJ1-2)
CASSREGDGYTF

SEQ ID NO: 262267 - protein, 12 aa, Homo sapiens
  CDR3 for alpha chain variable domain of TCR clone 131134 (TRAV8-3, TRAJ26)
CAGDNYGQNFVF

SEQ ID NO: 262268 - protein, 12 aa, Homo sapiens
  CDR3 for beta chain variable domain of TCR clone 131134 (TRBV11-2, TRBJ2-1)
CASSPGNNEKFF

SEQ ID NO: 262269 - protein, 16 aa, Homo sapiens
  CDR3 for alpha chain variable domain of TCR clone 131135 (TRAV3, TRAJ6)
CAVRDGTGRRKLHTYI

SEQ ID NO: 262270 - protein, 15 aa, Homo sapiens
  CDR3 for beta chain variable domain of TCR clone 131135 (TRBV9, TRBJ2-1)
CASSLAGSSYNEQFF

SEQ ID NO: 262271 - protein, 14 aa, Homo sapiens
  CDR3 for alpha chain variable domain of TCR clone 131136 (TRAV1-2, TRAJ8)
CAVREDTGFQKLVF

SEQ ID NO: 262272 - protein, 16 aa, Homo sapiens
  CDR3 for beta chain variable domain of TCR clone 131136 (TRBV19, TRBJ2-3)
CASGTGLNDGTDTQYF

SEQ ID NO: 262273 - protein, 15 aa, Homo sapiens
  CDR3 for alpha chain variable domain of TCR clone 131137 (TRAV26-1, TRAJ44)
GIVRANTGTASKLTF

SEQ ID NO: 262274 - protein, 16 aa, Homo sapiens
  CDR3 for beta chain variable domain of TCR clone 131137 (TRBV7-7, TRBJ2-1)
CASSLASGTSYNEQFF

SEQ ID NO: 262275 - protein, 14 aa, Homo sapiens
  CDR3 for alpha chain variable domain of TCR clone 131138 (TRAV1-1, TRAJ27)
CAVIYNTNAGKSTF

SEQ ID NO: 262276 - protein, 15 aa, Homo sapiens
  CDR3 for beta chain variable domain of TCR clone 131138 (TRBV7-2, TRBJ2-1)
CASGSGLAGGNEQFF

SEQ ID NO: 262277 - protein, 13 aa, Homo sapiens
  CDR3 for alpha chain variable domain of TCR clone 131139 (TRAV26-2, TRAJ43)
CILRAVNNNDMRF

SEQ ID NO: 262278 - protein, 13 aa, Homo sapiens
  CDR3 for beta chain variable domain of TCR clone 131139 (TRBV5-5, TRBJ2-3)
CASSWTGGDTQYF

SEQ ID NO: 262279 - protein, 14 aa, Homo sapiens
  CDR3 for alpha chain variable domain of TCR clone 131140 (TRAV35, TRAJ13)
CAGRSPGGHQKVTF

SEQ ID NO: 262280 - protein, 14 aa, Homo sapiens
  CDR3 for beta chain variable domain of TCR clone 131140 (TRBV19, TRBJ2-2)
CASSMVGLSGELFF

SEQ ID NO: 262281 - protein, 15 aa, Homo sapiens
  CDR3 for alpha chain variable domain of TCR clone 131141 (TRAV26-1, TRAJ29)
CIVRVEGSGNTPLVF

SEQ ID NO: 262282 - protein, 14 aa, Homo sapiens
  CDR3 for beta chain variable domain of TCR clone 131141 (TRBV7-7, TRBJ2-7)
CASSLGRGVGEQYF

SEQ ID NO: 262283 - protein, 15 aa, Homo sapiens
  CDR3 for alpha chain variable domain of TCR clone 131142 (TRAV12-2, TRAJ50)
CAVHGLETSYDKVIF

SEQ ID NO: 262284 - protein, 16 aa, Homo sapiens
  CDR3 for beta chain variable domain of TCR clone 131142 (TRBV5-4, TRBJ2-3)
CASQQPGAGGADTQYF

SEQ ID NO: 262285 - protein, 14 aa, Homo sapiens
  CDR3 for alpha chain variable domain of TCR clone 131143 (TRAV21, TRAJ58)
CAVRGETSGSRLTF

SEQ ID NO: 262286 - protein, 13 aa, Homo sapiens
  CDR3 for beta chain variable domain of TCR clone 131143 (TRBV24-1, TRBJ2-3)
CATSTGGTDTQYF

SEQ ID NO: 262287 - protein, 13 aa, Homo sapiens
  CDR3 for alpha chain variable domain of TCR clone 131144 (TRAV3, TRAJ36)
CAVSLGGANNLFF

SEQ ID NO: 262288 - protein, 17 aa, Homo sapiens
  CDR3 for beta chain variable domain of TCR clone 131144 (TRBV11-3, TRBJ1-5)
CASSPLTGLRGNQPQHF

SEQ ID NO: 262289 - protein, 17 aa, Homo sapiens
  CDR3 for alpha chain variable domain of TCR clone 131145 (TRAV3, TRAJ42)
CAVRDRDYGGSQGNLIF

SEQ ID NO: 262290 - protein, 15 aa, Homo sapiens
  CDR3 for beta chain variable domain of TCR clone 131145 (TRBV18, TRBJ2-1)
CASLPDRGRDNEQFF

SEQ ID NO: 262291 - protein, 16 aa, Homo sapiens
  CDR3 for alpha chain variable domain of TCR clone 131146 (TRAV3, TRAJ10)
CAVRDMRAGGGNKLTL

SEQ ID NO: 262292 - protein, 14 aa, Homo sapiens
  CDR3 for beta chain variable domain of TCR clone 131146 (TRBV6-1, TRBJ1-3)
CASVQGGGGNTIYF

SEQ ID NO: 262293 - protein, 15 aa, Homo sapiens
  CDR3 for alpha chain variable domain of TCR clone 131147 (TRAV17, TRAJ22)
CATVAPSGSARQLTF

SEQ ID NO: 262294 - protein, 19 aa, Homo sapiens
  CDR3 for beta chain variable domain of TCR clone 131147 (TRBV7-2, TRBJ2-3)
CASSFLSRNWGGGTDTQYF

SEQ ID NO: 262295 - protein, 15 aa, Homo sapiens
  CDR3 for alpha chain variable domain of TCR clone 131148 (TRAV23/DV6, TRAJ18)
CAARYRGSTLGRLYF

SEQ ID NO: 262296 - protein, 14 aa, Homo sapiens
  CDR3 for beta chain variable domain of TCR clone 131148 (TRBV7-3, TRBJ2-1)
CASSLAGGTNEQFF

SEQ ID NO: 262297 - protein, 13 aa, Homo sapiens
  CDR3 for alpha chain variable domain of TCR clone 131149 (TRAV12-1, TRAJ16)
CVVNGPDGQKLLF

SEQ ID NO: 262298 - protein, 12 aa, Homo sapiens
  CDR3 for beta chain variable domain of TCR clone 131149 (TRBV11-2, TRBJ2-2)
CASSLGGGELFF

SEQ ID NO: 262299 - protein, 11 aa, Homo sapiens
  CDR3 for alpha chain variable domain of TCR clone 131150 (TRAV3, TRAJ17)
PRGAAGNKLTF

SEQ ID NO: 262300 - protein, 14 aa, Homo sapiens
  CDR3 for beta chain variable domain of TCR clone 131150 (TRBV19, TRBJ2-1)
CASPTFVLSGEQFF

SEQ ID NO: 262301 - protein, 14 aa, Homo sapiens
  CDR3 for alpha chain variable domain of TCR clone 131151 (TRAV35, TRAJ22)
CAGLSPGSARQLTF

SEQ ID NO: 262302 - protein, 13 aa, Homo sapiens
  CDR3 for beta chain variable domain of TCR clone 131151 (TRBV20-1, TRBJ2-7)
CSATHTSGYEQYF

SEQ ID NO: 262303 - protein, 16 aa, Homo sapiens
  CDR3 for alpha chain variable domain of TCR clone 131152 (TRAV12-3, TRAJ53)
CAMSPGSGGSNYKLTF

SEQ ID NO: 262304 - protein, 12 aa, Homo sapiens
  CDR3 for beta chain variable domain of TCR clone 131152 (TRBV11-2, TRBJ2-2)
CASSLGGEELFF

SEQ ID NO: 262305 - protein, 17 aa, Homo sapiens
  CDR3 for alpha chain variable domain of TCR clone 131153 (TRAV8-6, TRAJ52)
CAVSLQFGGTSYGKLTF

SEQ ID NO: 262306 - protein, 18 aa, Homo sapiens
  CDR3 for beta chain variable domain of TCR clone 131153 (TRBV4-1, TRBJ1-4)
CASSPRTGGAWTNEKLFF

SEQ ID NO: 262307 - protein, 16 aa, Homo sapiens
  CDR3 for alpha chain variable domain of TCR clone 131154 (TRAV29/DV5, TRAJ48)
CAASIFGNFGNEKLTF

SEQ ID NO: 262308 - protein, 16 aa, Homo sapiens
  CDR3 for beta chain variable domain of TCR clone 131154 (TRBV7-2, TRBJ2-6)
CASSERRASGANVLTF

SEQ ID NO: 262309 - protein, 11 aa, Homo sapiens
  CDR3 for alpha chain variable domain of TCR clone 131155 (TRAV2, TRAJ13)
RASGGYQKVTF

SEQ ID NO: 262310 - protein, 16 aa, Homo sapiens
  CDR3 for beta chain variable domain of TCR clone 131155 (TRBV2, TRBJ2-1)
CASSVGGSLSYNEQFF

SEQ ID NO: 262311 - protein, 13 aa, Homo sapiens
  CDR3 for alpha chain variable domain of TCR clone 131156 (TRAV20, TRAJ21)
CAVEGYNFNKFYF

SEQ ID NO: 262312 - protein, 14 aa, Homo sapiens
  CDR3 for beta chain variable domain of TCR clone 131156 (TRBV3-1, TRBJ2-5)
CASSQGADQETQYF

SEQ ID NO: 262313 - protein, 12 aa, Homo sapiens
  CDR3 for alpha chain variable domain of TCR clone 131157 (TRAV27, TRAJ37)
CADSGNTGKLIF

SEQ ID NO: 262314 - protein, 18 aa, Homo sapiens
  CDR3 for beta chain variable domain of TCR clone 131157 (TRBV7-9, TRBJ1-1)
CASSKPWDTVGMNTEAFF

SEQ ID NO: 262315 - protein, 16 aa, Homo sapiens
  CDR3 for alpha chain variable domain of TCR clone 131158 (TRAV3, TRAJ37)
CAVRGKGSGNTGKLIF

SEQ ID NO: 262316 - protein, 12 aa, Homo sapiens
  CDR3 for beta chain variable domain of TCR clone 131158 (TRBV7-9, TRBJ2-7)
CASSLEGYEQYF

SEQ ID NO: 262317 - protein, 10 aa, Homo sapiens
  CDR3 for alpha chain variable domain of TCR clone 131159 (TRAV38-2/DV8, TRAJ40)
CASGTYKYIF

SEQ ID NO: 262318 - protein, 14 aa, Homo sapiens
  CDR3 for beta chain variable domain of TCR clone 131159 (TRBV7-9, TRBJ2-1)
CASSSRDSLYEQFF

SEQ ID NO: 262319 - protein, 14 aa, Homo sapiens
  CDR3 for alpha chain variable domain of TCR clone 131160 (TRAV12-2, TRAJ13)
CAVKQTGGYQKVTF

SEQ ID NO: 262320 - protein, 15 aa, Homo sapiens
  CDR3 for beta chain variable domain of TCR clone 131160 (TRBV6-3, TRBJ2-7)
CASSSPGTVFYEQYF

SEQ ID NO: 262321 - protein, 11 aa, Homo sapiens
  CDR3 for alpha chain variable domain of TCR clone 131161 (TRAV8-3, TRAJ49)
CAVGGGNQFYF

SEQ ID NO: 262322 - protein, 14 aa, Homo sapiens
  CDR3 for beta chain variable domain of TCR clone 131161 (TRBV18, TRBJ2-5)
CASSPGVSQETQYF

SEQ ID NO: 262323 - protein, 18 aa, Homo sapiens
  CDR3 for alpha chain variable domain of TCR clone 131162 (TRAV21, TRAJ52)
CAVRPSPAGGTSYGKLPF

SEQ ID NO: 262324 - protein, 15 aa, Homo sapiens
  CDR3 for beta chain variable domain of TCR clone 131162 (TRBV7-9, TRBJ2-7)
CASSSSGLAVYEQYF

SEQ ID NO: 262325 - protein, 14 aa, Homo sapiens
  CDR3 for alpha chain variable domain of TCR clone 131163 (TRAV12-2, TRAJ17)
CAALFKAASNKLTF

SEQ ID NO: 262326 - protein, 16 aa, Homo sapiens
  CDR3 for beta chain variable domain of TCR clone 131163 (TRBV20-1, TRBJ2-2)
CSASASGIPGAGELFF

SEQ ID NO: 262327 - protein, 15 aa, Homo sapiens
  CDR3 for alpha chain variable domain of TCR clone 131164 (TRAV12-1, TRAJ44)
CVVFVNTGTASKLTF

SEQ ID NO: 262328 - protein, 11 aa, Homo sapiens
  CDR3 for beta chain variable domain of TCR clone 131164 (TRBV7-8, TRBJ2-6)
CASSAGTGGRW

SEQ ID NO: 262329 - protein, 14 aa, Homo sapiens
  CDR3 for alpha chain variable domain of TCR clone 131165 (TRAV1-2, TRAJ8)
CAVREDTGFQKLVF

SEQ ID NO: 262330 - protein, 16 aa, Homo sapiens
  CDR3 for beta chain variable domain of TCR clone 131165 (TRBV5-1, TRBJ2-2)
CTSSLWDTTNTGELFF

SEQ ID NO: 262331 - protein, 15 aa, Homo sapiens
  CDR3 for alpha chain variable domain of TCR clone 131166 (TRAV21, TRAJ32)
CAVYSYGGATNKLIF

SEQ ID NO: 262332 - protein, 18 aa, Homo sapiens
  CDR3 for beta chain variable domain of TCR clone 131166 (TRBV7-9, TRBJ2-1)
CASSTGLAEGSSYNEQFF

SEQ ID NO: 262333 - protein, 14 aa, Homo sapiens
  CDR3 for alpha chain variable domain of TCR clone 131167 (TRAV17, TRAJ54)
CATGANQGAQKLVF

SEQ ID NO: 262334 - protein, 12 aa, Homo sapiens
  CDR3 for beta chain variable domain of TCR clone 131167 (TRBV7-9, TRBJ2-7)
CASSIKREEQYF

SEQ ID NO: 262335 - protein, 12 aa, Homo sapiens
  CDR3 for alpha chain variable domain of TCR clone 131168 (TRAV12-2, TRAJ10)
WGVTGGGNKLTF

SEQ ID NO: 262336 - protein, 16 aa, Homo sapiens
  CDR3 for beta chain variable domain of TCR clone 131168 (TRBV4-1, TRBJ2-3)
CASSQRAGGAHRYAVF

SEQ ID NO: 262337 - protein, 13 aa, Homo sapiens
  CDR3 for alpha chain variable domain of TCR clone 131169 (TRAV8-3, TRAJ44)
CAVVPGTASKLTF

SEQ ID NO: 262338 - protein, 13 aa, Homo sapiens
  CDR3 for beta chain variable domain of TCR clone 131169 (TRBV19, TRBJ1-2)
CASSVPGQDGYTF

SEQ ID NO: 262339 - protein, 15 aa, Homo sapiens
  CDR3 for alpha chain variable domain of TCR clone 131170 (TRAV23/DV6, TRAJ44)
CAARTLTGTASNLTF

SEQ ID NO: 262340 - protein, 17 aa, Homo sapiens
  CDR3 for beta chain variable domain of TCR clone 131170 (TRBV24-1, TRBJ2-1)
CATSDVSTSGTYNEQFF

SEQ ID NO: 262341 - protein, 21 aa, Homo sapiens
  CDR3 for alpha chain variable domain of TCR clone 131171 (TRAV1-1, TRAJ6)
CLLLLRCEILERTGGSYIPTF

SEQ ID NO: 262342 - protein, 13 aa, Homo sapiens
  CDR3 for beta chain variable domain of TCR clone 131171 (TRBV10-2, TRBJ2-7)
CASGASGGYEQYF

SEQ ID NO: 262343 - protein, 13 aa, Homo sapiens
  CDR3 for alpha chain variable domain of TCR clone 131172 (TRAV8-1, TRAJ39)
CAGLNNAGKMLTF

SEQ ID NO: 262344 - protein, 17 aa, Homo sapiens
  CDR3 for beta chain variable domain of TCR clone 131172 (TRBV19, TRBJ2-3)
CASSIDPAGGGTDTQYF

SEQ ID NO: 262345 - protein, 15 aa, Homo sapiens
  CDR3 for alpha chain variable domain of TCR clone 131173 (TRAV21, TRAJ53)
CATLNSGGSNYKLTF

SEQ ID NO: 262346 - protein, 18 aa, Homo sapiens
  CDR3 for beta chain variable domain of TCR clone 131173 (TRBV11-2, TRBJ2-3)
CASSLGGASRGVPNTQYF

SEQ ID NO: 262347 - protein, 12 aa, Homo sapiens
  CDR3 for alpha chain variable domain of TCR clone 131174 (TRAV13-1, TRAJ21)
CVAKEGFNKFYF

SEQ ID NO: 262348 - protein, 14 aa, Homo sapiens
  CDR3 for beta chain variable domain of TCR clone 131174 (TRBV5-4, TRBJ1-1)
CASSLDSRRDEAFF

SEQ ID NO: 262349 - protein, 14 aa, Homo sapiens
  CDR3 for alpha chain variable domain of TCR clone 131175 (TRAV8-4, TRAJ13)
CAVTLSGGYQKVTF

SEQ ID NO: 262350 - protein, 15 aa, Homo sapiens
  CDR3 for beta chain variable domain of TCR clone 131175 (TRBV19, TRBJ1-1)
CASTSGQIQNTEAFF

SEQ ID NO: 262351 - protein, 17 aa, Homo sapiens
  CDR3 for alpha chain variable domain of TCR clone 131176 (TRAV4, TRAJ42)
CLVGVLNYGGSQGNLIF

SEQ ID NO: 262352 - protein, 12 aa, Homo sapiens
  CDR3 for beta chain variable domain of TCR clone 131176 (TRBV20-1, TRBJ2-1)
CSAQYTYNEQVF

SEQ ID NO: 262353 - protein, 10 aa, Homo sapiens
  CDR3 for alpha chain variable domain of TCR clone 131177 (TRAV23/DV6, TRAJ57)
CAASSTLSQG

SEQ ID NO: 262354 - protein, 14 aa, Homo sapiens
  CDR3 for beta chain variable domain of TCR clone 131177 (TRBV25-1, TRBJ1-1)
CASTHLGGITEAFF

SEQ ID NO: 262355 - protein, 21 aa, Homo sapiens
  CDR3 for alpha chain variable domain of TCR clone 131178 (TRAV1-1, TRAJ6)
CLLLLRCERLERTGGSYIPTF

SEQ ID NO: 262356 - protein, 14 aa, Homo sapiens
  CDR3 for beta chain variable domain of TCR clone 131178 (TRBV7-3, TRBJ1-1)
CASSLKGGNTEAFF

SEQ ID NO: 262357 - protein, 14 aa, Homo sapiens
  CDR3 for alpha chain variable domain of TCR clone 131179 (TRAV8-4, TRAJ9)
CAVRINTGGFKTMF

SEQ ID NO: 262358 - protein, 15 aa, Homo sapiens
  CDR3 for beta chain variable domain of TCR clone 131179 (TRBV10-2, TRBJ2-6)
CASSEQGTGANVLTF

SEQ ID NO: 262359 - protein, 12 aa, Homo sapiens
  CDR3 for alpha chain variable domain of TCR clone 131180 (TRAV12-3, TRAJ20)
CAMVRGDYKLSF

SEQ ID NO: 262360 - protein, 13 aa, Homo sapiens
  CDR3 for beta chain variable domain of TCR clone 131180 (TRBV23-1, TRBJ1-4)
CASRGKFNEKLFC

SEQ ID NO: 262361 - protein, 14 aa, Homo sapiens
  CDR3 for alpha chain variable domain of TCR clone 131181 (TRAV21, TRAJ52)
CGRAGGTSYGKLTF

SEQ ID NO: 262362 - protein, 14 aa, Homo sapiens
  CDR3 for beta chain variable domain of TCR clone 131181 (TRBV19, TRBJ1-2)
CASSVFGYNYGYTF

SEQ ID NO: 262363 - protein, 13 aa, Homo sapiens
  CDR3 for alpha chain variable domain of TCR clone 131182 (TRAV2, TRAJ15)
CAVASQAGTALIF

SEQ ID NO: 262364 - protein, 16 aa, Homo sapiens
  CDR3 for beta chain variable domain of TCR clone 131182 (TRBV18, TRBJ2-3)
CASSPRAGAGTDTQYF

SEQ ID NO: 262365 - protein, 14 aa, Homo sapiens
  CDR3 for alpha chain variable domain of TCR clone 131183 (TRAV3, TRAJ40)
CAVRDRRGTYKYIF

SEQ ID NO: 262366 - protein, 16 aa, Homo sapiens
  CDR3 for beta chain variable domain of TCR clone 131183 (TRBV7-3, TRBJ2-2)
CASSLKRGTLSGELFF

SEQ ID NO: 262367 - protein, 16 aa, Homo sapiens
  CDR3 for alpha chain variable domain of TCR clone 131184 (TRAV3, TRAJ37)
CAVRPHCSGNTGKLIF

SEQ ID NO: 262368 - protein, 14 aa, Homo sapiens
  CDR3 for beta chain variable domain of TCR clone 131184 (TRBV25-1, TRBJ1-1)
CASTHLGGNTEAFF

SEQ ID NO: 262369 - protein, 21 aa, Homo sapiens
  CDR3 for alpha chain variable domain of TCR clone 131185 (TRAV25, TRAJ7)
TATQTTDVGTYFCPGNNRLAF

SEQ ID NO: 262370 - protein, 14 aa, Homo sapiens
  CDR3 for beta chain variable domain of TCR clone 131185 (TRBV11-2, TRBJ2-2)
CASSLGRRVRELFF

SEQ ID NO: 262371 - protein, 13 aa, Homo sapiens
  CDR3 for alpha chain variable domain of TCR clone 131186 (TRAV13-1, TRAJ11)
CAASIRGYSTLTF

SEQ ID NO: 262372 - protein, 17 aa, Homo sapiens
  CDR3 for beta chain variable domain of TCR clone 131186 (TRBV4-3, TRBJ1-2)
CASSARLQAGGSVGYTF

SEQ ID NO: 262373 - protein, 15 aa, Homo sapiens
  CDR3 for alpha chain variable domain of TCR clone 131187 (TRAV2, TRAJ15)
CAMEDRGQAGTALIF

SEQ ID NO: 262374 - protein, 13 aa, Homo sapiens
  CDR3 for beta chain variable domain of TCR clone 131187 (TRBV10-2, TRBJ2-7)
CASGASGGYEQYF

SEQ ID NO: 262375 - protein, 11 aa, Homo sapiens
  CDR3 for alpha chain variable domain of TCR clone 131188 (TRAV2, TRAJ13)
CASVGYQKVTF

SEQ ID NO: 262376 - protein, 11 aa, Homo sapiens
  CDR3 for beta chain variable domain of TCR clone 131188 (TRBV5-6, TRBJ2-5)
CASSLERTQYF

SEQ ID NO: 262377 - protein, 20 aa, Homo sapiens
  CDR3 for alpha chain variable domain of TCR clone 131189 (TRAV1-1, TRAJ4)
CLLLLRCEGLLSGGYNKLIF

SEQ ID NO: 262378 - protein, 16 aa, Homo sapiens
  CDR3 for beta chain variable domain of TCR clone 131189 (TRBV28, TRBJ1-4)
CASSPPYRGRSEKLFF

SEQ ID NO: 262379 - protein, 12 aa, Homo sapiens
  CDR3 for alpha chain variable domain of TCR clone 131190 (TRAV17, TRAJ53)
CAGGGSNYKLTF

SEQ ID NO: 262380 - protein, 16 aa, Homo sapiens
  CDR3 for beta chain variable domain of TCR clone 131190 (TRBV11-2, TRBJ2-3)
CASSFQGRGAFDTQYF

SEQ ID NO: 262381 - protein, 14 aa, Homo sapiens
  CDR3 for alpha chain variable domain of TCR clone 131191 (TRAV26-1, TRAJ38)
CIADNAGNDRKLIW

SEQ ID NO: 262382 - protein, 17 aa, Homo sapiens
  CDR3 for beta chain variable domain of TCR clone 131191 (TRBV7-9, TRBJ2-3)
CASSPTVAGDLTDTQYF

SEQ ID NO: 262383 - protein, 14 aa, Homo sapiens
  CDR3 for alpha chain variable domain of TCR clone 131192 (TRAV13-1, TRAJ44)
CAAKATGTASKLTF

SEQ ID NO: 262384 - protein, 14 aa, Homo sapiens
  CDR3 for beta chain variable domain of TCR clone 131192 (TRBV19, TRBJ2-2)
CASSTLHRSVELFF

SEQ ID NO: 262385 - protein, 14 aa, Homo sapiens
  CDR3 for alpha chain variable domain of TCR clone 131193 (TRAV2, TRAJ23)
CAVGLRNQGGKLIF

SEQ ID NO: 262386 - protein, 14 aa, Homo sapiens
  CDR3 for beta chain variable domain of TCR clone 131193 (TRBV19, TRBJ2-1)
CASPTFVLSGEQFF

SEQ ID NO: 262387 - protein, 14 aa, Homo sapiens
  CDR3 for alpha chain variable domain of TCR clone 131194 (TRAV25, TRAJ44)
CAVFPTGTASKLAF

SEQ ID NO: 262388 - protein, 19 aa, Homo sapiens
  CDR3 for beta chain variable domain of TCR clone 131194 (TRBV7-3, TRBJ2-7)
CASSLTGVAGGWPSYEQYF

SEQ ID NO: 262389 - protein, 15 aa, Homo sapiens
  CDR3 for alpha chain variable domain of TCR clone 131195 (TRAV10, TRAJ6)
CVVRPRTGGSYIPIF

SEQ ID NO: 262390 - protein, 15 aa, Homo sapiens
  CDR3 for beta chain variable domain of TCR clone 131195 (TRBV20-1, TRBJ2-7)
CSARDRVSGMDEQYF

SEQ ID NO: 262391 - protein, 16 aa, Homo sapiens
  CDR3 for alpha chain variable domain of TCR clone 131196 (TRAV3, TRAJ37)
CAVRVRGSGNTGKLIC

SEQ ID NO: 262392 - protein, 11 aa, Homo sapiens
  CDR3 for beta chain variable domain of TCR clone 131196 (TRBV11-2, TRBJ2-2)
CASSLPGELFF

SEQ ID NO: 262393 - protein, 16 aa, Homo sapiens
  CDR3 for alpha chain variable domain of TCR clone 131197 (TRAV3, TRAJ37)
CAVRPHGSGNTGKLIF

SEQ ID NO: 262394 - protein, 14 aa, Homo sapiens
  CDR3 for beta chain variable domain of TCR clone 131197 (TRBV2, TRBJ2-1)
CASSDRAYDNEQFF

SEQ ID NO: 262395 - protein, 12 aa, Homo sapiens
  CDR3 for alpha chain variable domain of TCR clone 131198 (TRAV21, TRAJ33)
CAKMDSNYQLIW

SEQ ID NO: 262396 - protein, 14 aa, Homo sapiens
  CDR3 for beta chain variable domain of TCR clone 131198 (TRBV2, TRBJ2-7)
CASSLTSGGYAQYF

SEQ ID NO: 262397 - protein, 12 aa, Homo sapiens
  CDR3 for alpha chain variable domain of TCR clone 131199 (TRAV13-1, TRAJ48)
CAANFGNEKLTF

SEQ ID NO: 262398 - protein, 17 aa, Homo sapiens
  CDR3 for beta chain variable domain of TCR clone 131199 (TRBV24-1, TRBJ2-1)
CATSDVSTSGTYNEQFF

SEQ ID NO: 262399 - protein, 15 aa, Homo sapiens
  CDR3 for alpha chain variable domain of TCR clone 131200 (TRAV12-3, TRAJ42)
CAMSGHGGSQGNLIF

SEQ ID NO: 262400 - protein, 14 aa, Homo sapiens
  CDR3 for beta chain variable domain of TCR clone 131200 (TRBV7-6, TRBJ2-3)
CASSLTGGTDTQYF

SEQ ID NO: 262401 - protein, 14 aa, Homo sapiens
  CDR3 for alpha chain variable domain of TCR clone 131201 (TRAV12-3, TRAJ6)
CAMSATGGSYIPTF

SEQ ID NO: 262402 - protein, 15 aa, Homo sapiens
  CDR3 for beta chain variable domain of TCR clone 131201 (TRBV7-2, TRBJ2-3)
CASSSTGLETDTQYF

SEQ ID NO: 262403 - protein, 16 aa, Homo sapiens
  CDR3 for alpha chain variable domain of TCR clone 131202 (TRAV13-1, TRAJ13)
CTAFFLVVTRKLPLEL

SEQ ID NO: 262404 - protein, 15 aa, Homo sapiens
  CDR3 for beta chain variable domain of TCR clone 131202 (TRBV7-8, TRBJ2-1)
CASSLADSLYNEQFF

SEQ ID NO: 262405 - protein, 15 aa, Homo sapiens
  CDR3 for alpha chain variable domain of TCR clone 131203 (TRAV26-1, TRAJ29)
CIVRVEGSGKTPLGF

SEQ ID NO: 262406 - protein, 14 aa, Homo sapiens
  CDR3 for beta chain variable domain of TCR clone 131203 (TRBV18, TRBJ2-5)
CASSPGVSQETQYF

SEQ ID NO: 262407 - protein, 14 aa, Homo sapiens
  CDR3 for alpha chain variable domain of TCR clone 131204 (TRAV29/DV5, TRAJ36)
CAARRKTGANNLFF

SEQ ID NO: 262408 - protein, 14 aa, Homo sapiens
  CDR3 for beta chain variable domain of TCR clone 131204 (TRBV19, TRBJ2-7)
CASSIRLGDHEQYF

SEQ ID NO: 262409 - protein, 16 aa, Homo sapiens
  CDR3 for alpha chain variable domain of TCR clone 131205 (TRAV30, TRAJ24)
CGTEIVDADSWGKFQF

SEQ ID NO: 262410 - protein, 15 aa, Homo sapiens
  CDR3 for beta chain variable domain of TCR clone 131205 (TRBV18, TRBJ2-7)
CASSPSSTGNYEQYF

SEQ ID NO: 262411 - protein, 16 aa, Homo sapiens
  CDR3 for alpha chain variable domain of TCR clone 131206 (TRAV4, TRAJ22)
CLVGDLYSGSARQLTF

SEQ ID NO: 262412 - protein, 16 aa, Homo sapiens
  CDR3 for beta chain variable domain of TCR clone 131206 (TRBV7-9, TRBJ2-1)
CASSDVAGVSYNEQFF

SEQ ID NO: 262413 - protein, 14 aa, Homo sapiens
  CDR3 for alpha chain variable domain of TCR clone 131207 (TRAV16, TRAJ39)
CALSKNNAGNMLTF

SEQ ID NO: 262414 - protein, 16 aa, Homo sapiens
  CDR3 for beta chain variable domain of TCR clone 131207 (TRBV19, TRBJ2-2)
CASRSPGTGATGELFF

SEQ ID NO: 262415 - protein, 14 aa, Homo sapiens
  CDR3 for alpha chain variable domain of TCR clone 131208 (TRAV29/DV5, TRAJ36)
CAARRKTGANNLFF

SEQ ID NO: 262416 - protein, 14 aa, Homo sapiens
  CDR3 for beta chain variable domain of TCR clone 131208 (TRBV12-5, TRBJ2-5)
CASGSRTHHETQYF

SEQ ID NO: 262417 - protein, 13 aa, Homo sapiens
  CDR3 for alpha chain variable domain of TCR clone 131209 (TRAV12-2, TRAJ52)
CAVGGTSYGKLTF

SEQ ID NO: 262418 - protein, 14 aa, Homo sapiens
  CDR3 for beta chain variable domain of TCR clone 131209 (TRBV7-6, TRBJ2-3)
CASSLGTVTDTQYF

SEQ ID NO: 262419 - protein, 15 aa, Homo sapiens
  CDR3 for alpha chain variable domain of TCR clone 131210 (TRAV8-3, TRAJ7)
CAVGSISYGNNRLAF

SEQ ID NO: 262420 - protein, 17 aa, Homo sapiens
  CDR3 for beta chain variable domain of TCR clone 131210 (TRBV5-4, TRBJ2-4)
CASSLGGRRGAKNIQYF

SEQ ID NO: 262421 - protein, 16 aa, Homo sapiens
  CDR3 for alpha chain variable domain of TCR clone 131211 (TRAV12-3, TRAJ53)
CAMSPGSGGSNYKLTF

SEQ ID NO: 262422 - protein, 15 aa, Homo sapiens
  CDR3 for beta chain variable domain of TCR clone 131211 (TRBV20-1, TRBJ2-5)
CSAEGTGGLQETQYF

SEQ ID NO: 262423 - protein, 14 aa, Homo sapiens
  CDR3 for alpha chain variable domain of TCR clone 131212 (TRAV13-1, TRAJ9)
CAAGALTGGFKTIF

SEQ ID NO: 262424 - protein, 16 aa, Homo sapiens
  CDR3 for beta chain variable domain of TCR clone 131212 (TRBV12-4, TRBJ2-3)
CASSFGTGGISDTQYF

SEQ ID NO: 262425 - protein, 14 aa, Homo sapiens
  CDR3 for alpha chain variable domain of TCR clone 131213 (TRAV1-2, TRAJ16)
CAVNRFSDGQKLLF

SEQ ID NO: 262426 - protein, 14 aa, Homo sapiens
  CDR3 for beta chain variable domain of TCR clone 131213 (TRBV2, TRBJ1-1)
CASSEGLLNTEAFF

SEQ ID NO: 262427 - protein, 14 aa, Homo sapiens
  CDR3 for alpha chain variable domain of TCR clone 131214 (TRAV2, TRAJ9)
CAVEDRSGGFKTIF

SEQ ID NO: 262428 - protein, 12 aa, Homo sapiens
  CDR3 for beta chain variable domain of TCR clone 131214 (TRBV28, TRBJ1-2)
CAGATGGRGYTF

SEQ ID NO: 262429 - protein, 17 aa, Homo sapiens
  CDR3 for alpha chain variable domain of TCR clone 131215 (TRAV38-2/DV8, TRAJ38)
CAYRSARGAGNNRKPIW

SEQ ID NO: 262430 - protein, 13 aa, Homo sapiens
  CDR3 for beta chain variable domain of TCR clone 131215 (TRBV6-5, TRBJ2-1)
CASRGRVGNEQFF

SEQ ID NO: 262431 - protein, 13 aa, Homo sapiens
  CDR3 for alpha chain variable domain of TCR clone 131216 (TRAV2, TRAJ39)
TTVHNNAGNMLTF

SEQ ID NO: 262432 - protein, 16 aa, Homo sapiens
  CDR3 for beta chain variable domain of TCR clone 131216 (TRBV24-1, TRBJ2-3)
CATSGYRDGDTDTQYF

SEQ ID NO: 262433 - protein, 15 aa, Homo sapiens
  CDR3 for alpha chain variable domain of TCR clone 131217 (TRAV1-1, TRAJ36)
CAGHLNWGKQPLLWD

SEQ ID NO: 262434 - protein, 17 aa, Homo sapiens
  CDR3 for beta chain variable domain of TCR clone 131217 (TRBV7-8, TRBJ2-6)
CASSAGTGGAGANVLTF

SEQ ID NO: 262435 - protein, 14 aa, Homo sapiens
  CDR3 for alpha chain variable domain of TCR clone 131218 (TRAV16, TRAJ26)
CALSGCNYGQNFVF

SEQ ID NO: 262436 - protein, 13 aa, Homo sapiens
  CDR3 for beta chain variable domain of TCR clone 131218 (TRBV7-3, TRBJ2-5)
RASSIGFFETQYF

SEQ ID NO: 262437 - protein, 13 aa, Homo sapiens
  CDR3 for alpha chain variable domain of TCR clone 131219 (TRAV12-2, TRAJ20)
CAVYPSNDYKLSL

SEQ ID NO: 262438 - protein, 15 aa, Homo sapiens
  CDR3 for beta chain variable domain of TCR clone 131219 (TRBV18, TRBJ1-2)
CASSPGNGLGYGYTF

SEQ ID NO: 262439 - protein, 14 aa, Homo sapiens
  CDR3 for alpha chain variable domain of TCR clone 131220 (TRAV21, TRAJ35)
CAVMPIGFGNVLHC

SEQ ID NO: 262440 - protein, 15 aa, Homo sapiens
  CDR3 for beta chain variable domain of TCR clone 131220 (TRBV19, TRBJ2-7)
CASSPAGSGEALRYF

SEQ ID NO: 262441 - protein, 13 aa, Homo sapiens
  CDR3 for alpha chain variable domain of TCR clone 131221 (TRAV1-1, TRAJ9)
CAAKNTGGFKTIF

SEQ ID NO: 262442 - protein, 13 aa, Homo sapiens
  CDR3 for beta chain variable domain of TCR clone 131221 (TRBV20-1, TRBJ2-1)
QCSNRRVPNEQFF

SEQ ID NO: 262443 - protein, 16 aa, Homo sapiens
  CDR3 for alpha chain variable domain of TCR clone 131222 (TRAV3, TRAJ5)
CAVRNLMDTGRRALTF

SEQ ID NO: 262444 - protein, 16 aa, Homo sapiens
  CDR3 for beta chain variable domain of TCR clone 131222 (TRBV12-5, TRBJ2-5)
CASGPRTSGNQETQYV

SEQ ID NO: 262445 - protein, 14 aa, Homo sapiens
  CDR3 for alpha chain variable domain of TCR clone 131223 (TRAV23/DV6, TRAJ22)
CAASVSGSARQLTF

SEQ ID NO: 262446 - protein, 15 aa, Homo sapiens
  CDR3 for beta chain variable domain of TCR clone 131223 (TRBV6-3, TRBJ2-7)
CASSSPGTVFYEQYF

SEQ ID NO: 262447 - protein, 12 aa, Homo sapiens
  CDR3 for alpha chain variable domain of TCR clone 131224 (TRAV8-3, TRAJ20)
CAVGANDYKLSF

SEQ ID NO: 262448 - protein, 15 aa, Homo sapiens
  CDR3 for beta chain variable domain of TCR clone 131224 (TRBV6-1, TRBJ2-3)
CASSERGGITDTQYF

SEQ ID NO: 262449 - protein, 12 aa, Homo sapiens
  CDR3 for alpha chain variable domain of TCR clone 131225 (TRAV2, TRAJ10)
CASTGGRNKLTF

SEQ ID NO: 262450 - protein, 14 aa, Homo sapiens
  CDR3 for beta chain variable domain of TCR clone 131225 (TRBV7-2, TRBJ2-2)
CASRGQGAAGELFF

SEQ ID NO: 262451 - protein, 15 aa, Homo sapiens
  CDR3 for alpha chain variable domain of TCR clone 131226 (TRAV12-3, TRAJ6)
CAMSATTGGSYIPTY

SEQ ID NO: 262452 - protein, 16 aa, Homo sapiens
  CDR3 for beta chain variable domain of TCR clone 131226 (TRBV20-1, TRBJ1-2)
CSASMGQGVANYGYTF

SEQ ID NO: 262453 - protein, 19 aa, Homo sapiens
  CDR3 for alpha chain variable domain of TCR clone 131227 (TRAV26-1, TRAJ52)
CIVRAHRNAGGTSYGKLTF

SEQ ID NO: 262454 - protein, 16 aa, Homo sapiens
  CDR3 for beta chain variable domain of TCR clone 131227 (TRBV12-4, TRBJ1-5)
CASSRPVGGSNQPQHL

SEQ ID NO: 262455 - protein, 12 aa, Homo sapiens
  CDR3 for alpha chain variable domain of TCR clone 131228 (TRAV8-4, TRAJ37)
CAKSSNTGKLIF

SEQ ID NO: 262456 - protein, 14 aa, Homo sapiens
  CDR3 for beta chain variable domain of TCR clone 131228 (TRBV7-9, TRBJ2-5)
CASSLDTAQETQYF

SEQ ID NO: 262457 - protein, 13 aa, Homo sapiens
  CDR3 for alpha chain variable domain of TCR clone 131229 (TRAV27, TRAJ29)
CAGAHSGNTPLVF

SEQ ID NO: 262458 - protein, 13 aa, Homo sapiens
  CDR3 for beta chain variable domain of TCR clone 131229 (TRBV27, TRBJ2-7)
CASSFSQGYEQYF

SEQ ID NO: 262459 - protein, 13 aa, Homo sapiens
  CDR3 for alpha chain variable domain of TCR clone 131230 (TRAV3, TRAJ36)
CAVRDTGANNLFF

SEQ ID NO: 262460 - protein, 13 aa, Homo sapiens
  CDR3 for beta chain variable domain of TCR clone 131230 (TRBV12-4, TRBJ2-7)
CASSFVPTAEQYF

SEQ ID NO: 262461 - protein, 14 aa, Homo sapiens
  CDR3 for alpha chain variable domain of TCR clone 131231 (TRAV8-2, TRAJ4)
CVVSPSGGYYKLIF

SEQ ID NO: 262462 - protein, 15 aa, Homo sapiens
  CDR3 for beta chain variable domain of TCR clone 131231 (TRBV4-1, TRBJ1-4)
CASSDTGGTNEKLFF

SEQ ID NO: 262463 - protein, 13 aa, Homo sapiens
  CDR3 for alpha chain variable domain of TCR clone 131232 (TRAV23/DV6, TRAJ58)
CAARLIRGSRLPF

SEQ ID NO: 262464 - protein, 13 aa, Homo sapiens
  CDR3 for beta chain variable domain of TCR clone 131232 (TRBV2, TRBJ1-6)
CADSGSYNSPLHF

SEQ ID NO: 262465 - protein, 14 aa, Homo sapiens
  CDR3 for alpha chain variable domain of TCR clone 131233 (TRAV12-3, TRAJ48)
SHLPLTGGGNKLTF

SEQ ID NO: 262466 - protein, 13 aa, Homo sapiens
  CDR3 for beta chain variable domain of TCR clone 131233 (TRBV12-4, TRBJ2-5)
CASSPGTEETQYF

SEQ ID NO: 262467 - protein, 13 aa, Homo sapiens
  CDR3 for alpha chain variable domain of TCR clone 131234 (TRAV12-2, TRAJ52)
CAVGGTSYGKLTF

SEQ ID NO: 262468 - protein, 14 aa, Homo sapiens
  CDR3 for beta chain variable domain of TCR clone 131234 (TRBV19, TRBJ2-1)
CASPTFVLSGELFF

SEQ ID NO: 262469 - protein, 13 aa, Homo sapiens
  CDR3 for alpha chain variable domain of TCR clone 131235 (TRAV29/DV5, TRAJ31)
CAASRNNNARLMF

SEQ ID NO: 262470 - protein, 14 aa, Homo sapiens
  CDR3 for beta chain variable domain of TCR clone 131235 (TRBV20-1, TRBJ1-1)
CSAQTRIGGTEAFF

SEQ ID NO: 262471 - protein, 14 aa, Homo sapiens
  CDR3 for alpha chain variable domain of TCR clone 131236 (TRAV8-4, TRAJ54)
CAGSEVLGAQKLVF

SEQ ID NO: 262472 - protein, 17 aa, Homo sapiens
  CDR3 for beta chain variable domain of TCR clone 131236 (TRBV4-1, TRBJ1-4)
CASSQEGPRGVEEKLFF

SEQ ID NO: 262473 - protein, 13 aa, Homo sapiens
  CDR3 for alpha chain variable domain of TCR clone 131237 (TRAV13-1, TRAJ9)
CAASGTGGFKTIF

SEQ ID NO: 262474 - protein, 13 aa, Homo sapiens
  CDR3 for beta chain variable domain of TCR clone 131237 (TRBV12-4, TRBJ2-7)
CASSLERVREQYL

SEQ ID NO: 262475 - protein, 12 aa, Homo sapiens
  CDR3 for alpha chain variable domain of TCR clone 131238 (TRAV1-2, TRAJ29)
CSVPSGNTPLVF

SEQ ID NO: 262476 - protein, 14 aa, Homo sapiens
  CDR3 for beta chain variable domain of TCR clone 131238 (TRBV18, TRBJ2-5)
CASSPGVSQETQYF

SEQ ID NO: 262477 - protein, 14 aa, Homo sapiens
  CDR3 for alpha chain variable domain of TCR clone 131239 (TRAV12-1, TRAJ3)
CGVARYSSASKIIF

SEQ ID NO: 262478 - protein, 15 aa, Homo sapiens
  CDR3 for beta chain variable domain of TCR clone 131239 (TRBV7-2, TRBJ2-6)
CASSREGSGANVLTF

SEQ ID NO: 262479 - protein, 14 aa, Homo sapiens
  CDR3 for alpha chain variable domain of TCR clone 131240 (TRAV9-2, TRAJ39)
CALYIYNAGNMPTF

SEQ ID NO: 262480 - protein, 15 aa, Homo sapiens
  CDR3 for beta chain variable domain of TCR clone 131240 (TRBV28, TRBJ1-3)
CASSMGWASGNTIYF

SEQ ID NO: 262481 - protein, 14 aa, Homo sapiens
  CDR3 for alpha chain variable domain of TCR clone 131241 (TRAV12-2, TRAJ13)
CAVKQTGGYQKVNF

SEQ ID NO: 262482 - protein, 15 aa, Homo sapiens
  CDR3 for beta chain variable domain of TCR clone 131241 (TRBV27, TRBJ2-1)
CASSNGGGSSNEQFF

SEQ ID NO: 262483 - protein, 13 aa, Homo sapiens
  CDR3 for alpha chain variable domain of TCR clone 131242 (TRAV26-1, TRAJ40)
CIVRGTGTYKYIF

SEQ ID NO: 262484 - protein, 11 aa, Homo sapiens
  CDR3 for beta chain variable domain of TCR clone 131242 (TRBV7-6, TRBJ2-5)
CASSSQETQYF

SEQ ID NO: 262485 - protein, 14 aa, Homo sapiens
  CDR3 for alpha chain variable domain of TCR clone 131243 (TRAV12-2, TRAJ33)
CAVKRARSNYQLIW

SEQ ID NO: 262486 - protein, 13 aa, Homo sapiens
  CDR3 for beta chain variable domain of TCR clone 131243 (TRBV7-6, TRBJ2-7)
CASSLDHTHEQYF

SEQ ID NO: 262487 - protein, 14 aa, Homo sapiens
  CDR3 for alpha chain variable domain of TCR clone 131244 (TRAV1-2, TRAJ16)
CAVNRFSDGQKLLF

SEQ ID NO: 262488 - protein, 14 aa, Homo sapiens
  CDR3 for beta chain variable domain of TCR clone 131244 (TRBV27, TRBJ2-2)
CASSLGDTTGELFF

SEQ ID NO: 262489 - protein, 12 aa, Homo sapiens
  CDR3 for alpha chain variable domain of TCR clone 131245 (TRAV12-3, TRAJ20)
CAMVRGDYKLSF

SEQ ID NO: 262490 - protein, 14 aa, Homo sapiens
  CDR3 for beta chain variable domain of TCR clone 131245 (TRBV7-3, TRBJ2-3)
CASSPGASRDTQYF

SEQ ID NO: 262491 - protein, 17 aa, Homo sapiens
  CDR3 for alpha chain variable domain of TCR clone 131246 (TRAV3, TRAJ42)
CAVRDRDYGGSQGNLIF

SEQ ID NO: 262492 - protein, 15 aa, Homo sapiens
  CDR3 for beta chain variable domain of TCR clone 131246 (TRBV6-6, TRBJ2-7)
CASSYSYEGSYEQYF

SEQ ID NO: 262493 - protein, 13 aa, Homo sapiens
  CDR3 for alpha chain variable domain of TCR clone 131247 (TRAV4, TRAJ42)
CLVGGGSQGNLIF

SEQ ID NO: 262494 - protein, 15 aa, Homo sapiens
  CDR3 for beta chain variable domain of TCR clone 131247 (TRBV6-3, TRBJ2-7)
CASSSPGTVFYEQYF

SEQ ID NO: 262495 - protein, 18 aa, Homo sapiens
  CDR3 for alpha chain variable domain of TCR clone 131248 (TRAV13-1, TRAJ52)
CAAKNANAGGTSYGKLTF

SEQ ID NO: 262496 - protein, 15 aa, Homo sapiens
  CDR3 for beta chain variable domain of TCR clone 131248 (TRBV6-1, TRBJ2-3)
CASSERGGITDTQYF

SEQ ID NO: 262497 - protein, 17 aa, Homo sapiens
  CDR3 for alpha chain variable domain of TCR clone 131249 (TRAV22, TRAJ53)
CAVEFSNSGGSNYKLTF

SEQ ID NO: 262498 - protein, 14 aa, Homo sapiens
  CDR3 for beta chain variable domain of TCR clone 131249 (TRBV18, TRBJ2-1)
CASSPGTSETEQFF

SEQ ID NO: 262499 - protein, 17 aa, Homo sapiens
  CDR3 for alpha chain variable domain of TCR clone 131250 (TRAV3, TRAJ42)
CAVRDRDYGGSQGTLIF

SEQ ID NO: 262500 - protein, 20 aa, Homo sapiens
  CDR3 for beta chain variable domain of TCR clone 131250 (TRBV28, TRBJ2-1)
CASTPIGRSPGLAGGNEQFF

SEQ ID NO: 262501 - protein, 14 aa, Homo sapiens
  CDR3 for alpha chain variable domain of TCR clone 131251 (TRAV23/DV6, TRAJ4)
CAARSAGGYNKLIF

SEQ ID NO: 262502 - protein, 14 aa, Homo sapiens
  CDR3 for beta chain variable domain of TCR clone 131251 (TRBV19, TRBJ2-1)
CASPTFVLSGEQFF

SEQ ID NO: 262503 - protein, 14 aa, Homo sapiens
  CDR3 for alpha chain variable domain of TCR clone 131252 (TRAV1-2, TRAJ16)
CAVNRFSDGQKLLF

SEQ ID NO: 262504 - protein, 15 aa, Homo sapiens
  CDR3 for beta chain variable domain of TCR clone 131252 (TRBV7-9, TRBJ1-6)
CVSSSPGRGNSPLHF

SEQ ID NO: 262505 - protein, 11 aa, Homo sapiens
  CDR3 for alpha chain variable domain of TCR clone 131253 (TRAV26-1, TRAJ27)
CIDHNAGKSTF

SEQ ID NO: 262506 - protein, 18 aa, Homo sapiens
  CDR3 for beta chain variable domain of TCR clone 131253 (TRBV7-9, TRBJ2-6)
CASSFPGAGISGANVLTF

SEQ ID NO: 262507 - protein, 14 aa, Homo sapiens
  CDR3 for alpha chain variable domain of TCR clone 131254 (TRAV1-2, TRAJ16)
CAVNRFSDGQKLLF

SEQ ID NO: 262508 - protein, 14 aa, Homo sapiens
  CDR3 for beta chain variable domain of TCR clone 131254 (TRBV7-2, TRBJ1-1)
CASSFVTGTTEAFF

SEQ ID NO: 262509 - protein, 21 aa, Homo sapiens
  CDR3 for alpha chain variable domain of TCR clone 131255 (TRAV25, TRAJ41)
CAGLRTQIPDIQNPDPAVYQL

SEQ ID NO: 262510 - protein, 16 aa, Homo sapiens
  CDR3 for beta chain variable domain of TCR clone 131255 (TRBV19, TRBJ2-7)
CASSPALGQGLYEQYF

SEQ ID NO: 262511 - protein, 15 aa, Homo sapiens
  CDR3 for alpha chain variable domain of TCR clone 131256 (TRAV12-2, TRAJ20)
CAVKGGFGAGTTVTV

SEQ ID NO: 262512 - protein, 17 aa, Homo sapiens
  CDR3 for beta chain variable domain of TCR clone 131256 (TRBV11-2, TRBJ2-1)
CASSLYPPGVEYNEQFF

SEQ ID NO: 262513 - protein, 17 aa, Homo sapiens
  CDR3 for alpha chain variable domain of TCR clone 131257 (TRAV3, TRAJ6)
CAVRDGPRAGGSYIPTF

SEQ ID NO: 262514 - protein, 20 aa, Homo sapiens
  CDR3 for beta chain variable domain of TCR clone 131257 (TRBV28, TRBJ2-1)
CVSTPIGRSPGLAGGNEQFL

SEQ ID NO: 262515 - protein, 14 aa, Homo sapiens
  CDR3 for alpha chain variable domain of TCR clone 131258 (TRAV36/DV7, TRAJ44)
CCGANTGTASKLTF

SEQ ID NO: 262516 - protein, 14 aa, Homo sapiens
  CDR3 for beta chain variable domain of TCR clone 131258 (TRBV25-1, TRBJ1-1)
CASTHLGGNTEAFF

SEQ ID NO: 262517 - protein, 13 aa, Homo sapiens
  CDR3 for alpha chain variable domain of TCR clone 131259 (TRAV20, TRAJ37)
CAGCSSNTGKLIF

SEQ ID NO: 262518 - protein, 12 aa, Homo sapiens
  CDR3 for beta chain variable domain of TCR clone 131259 (TRBV19, TRBJ1-5)
CASSIAQQPQHF

SEQ ID NO: 262519 - protein, 11 aa, Homo sapiens
  CDR3 for alpha chain variable domain of TCR clone 131260 (TRAV3, TRAJ21)
CAVGNFNKFYF

SEQ ID NO: 262520 - protein, 16 aa, Homo sapiens
  CDR3 for beta chain variable domain of TCR clone 131260 (TRBV7-6, TRBJ2-1)
CASSAPGPSSYSEQFF

SEQ ID NO: 262521 - protein, 18 aa, Homo sapiens
  CDR3 for alpha chain variable domain of TCR clone 131261 (TRAV12-2, )
CAVEDIQNPDPAVYQLRD

SEQ ID NO: 262522 - protein, 15 aa, Homo sapiens
  CDR3 for beta chain variable domain of TCR clone 131261 (TRBV7-2, TRBJ2-2)
CASRRPGQNTGELFF

SEQ ID NO: 262523 - protein, 13 aa, Homo sapiens
  CDR3 for alpha chain variable domain of TCR clone 131262 (TRAV20, TRAJ37)
CAGCSSNTGQLIF

SEQ ID NO: 262524 - protein, 21 aa, Homo sapiens
  CDR3 for beta chain variable domain of TCR clone 131262 (TRBV4-2, TRBJ2-3)
PCSQKTRPCISVPAAPDTQYF

SEQ ID NO: 262525 - protein, 14 aa, Homo sapiens
  CDR3 for alpha chain variable domain of TCR clone 131263 (TRAV9-2, TRAJ52)
CALYIYNAGNMLTF

SEQ ID NO: 262526 - protein, 15 aa, Homo sapiens
  CDR3 for beta chain variable domain of TCR clone 131263 (TRBV2, TRBJ2-1)
CASSELAGSYNEQFF

SEQ ID NO: 262527 - protein, 14 aa, Homo sapiens
  CDR3 for alpha chain variable domain of TCR clone 131264 (TRAV1-2, TRAJ8)
CAVREDTGFQKLVF

SEQ ID NO: 262528 - protein, 14 aa, Homo sapiens
  CDR3 for beta chain variable domain of TCR clone 131264 (TRBV29-1, TRBJ2-5)
CSVETSGGGETQYF

SEQ ID NO: 262529 - protein, 11 aa, Homo sapiens
  CDR3 for alpha chain variable domain of TCR clone 131265 (TRAV12-2, TRAJ36)
CAVDGANNLFF

SEQ ID NO: 262530 - protein, 16 aa, Homo sapiens
  CDR3 for beta chain variable domain of TCR clone 131265 (TRBV7-6, TRBJ2-3)
CASSLRREMGPDTQYF

SEQ ID NO: 262531 - protein, 14 aa, Homo sapiens
  CDR3 for alpha chain variable domain of TCR clone 131266 (TRAV8-6, TRAJ9)
CAVSSYTGGFKTIF

SEQ ID NO: 262532 - protein, 15 aa, Homo sapiens
  CDR3 for beta chain variable domain of TCR clone 131266 (TRBV2, TRBJ1-2)
CASSESRTVNHGYTF

SEQ ID NO: 262533 - protein, 14 aa, Homo sapiens
  CDR3 for alpha chain variable domain of TCR clone 131267 (TRAV29/DV5, TRAJ36)
CAARRKTGANNLFF

SEQ ID NO: 262534 - protein, 12 aa, Homo sapiens
  CDR3 for beta chain variable domain of TCR clone 131267 (TRBV5-1, TRBJ1-2)
CASSQDTYGYTF

SEQ ID NO: 262535 - protein, 14 aa, Homo sapiens
  CDR3 for alpha chain variable domain of TCR clone 131268 (TRAV13-2, TRAJ17)
CAENSKAAGNKLTF

SEQ ID NO: 262536 - protein, 16 aa, Homo sapiens
  CDR3 for beta chain variable domain of TCR clone 131268 (TRBV5-1, TRBJ2-5)
CASSFQGLADQETQYF

SEQ ID NO: 262537 - protein, 12 aa, Homo sapiens
  CDR3 for alpha chain variable domain of TCR clone 131269 (TRAV21, TRAJ31)
CVLAGNNARLMF

SEQ ID NO: 262538 - protein, 16 aa, Homo sapiens
  CDR3 for beta chain variable domain of TCR clone 131269 (TRBV12-5, TRBJ2-5)
CASGPRTSGNQETQYF

SEQ ID NO: 262539 - protein, 15 aa, Homo sapiens
  CDR3 for alpha chain variable domain of TCR clone 131270 (TRAV12-3, TRAJ6)
CAMSATTGGSYIPTF

SEQ ID NO: 262540 - protein, 16 aa, Homo sapiens
  CDR3 for beta chain variable domain of TCR clone 131270 (TRBV7-2, TRBJ1-2)
CASSSNQDRRGHGYTF

SEQ ID NO: 262541 - protein, 16 aa, Homo sapiens
  CDR3 for alpha chain variable domain of TCR clone 131271 (TRAV30, TRAJ24)
CGTEIVDADSWGKFQF

SEQ ID NO: 262542 - protein, 15 aa, Homo sapiens
  CDR3 for beta chain variable domain of TCR clone 131271 (TRBV6-3, TRBJ2-2)
CASSFLATLTGELFF

SEQ ID NO: 262543 - protein, 13 aa, Homo sapiens
  CDR3 for alpha chain variable domain of TCR clone 131272 (TRAV35, TRAJ44)
CAGLSGTASKLTF

SEQ ID NO: 262544 - protein, 17 aa, Homo sapiens
  CDR3 for beta chain variable domain of TCR clone 131272 (TRBV11-2, TRBJ2-1)
CASSLYPPGVEYNEQFF

SEQ ID NO: 262545 - protein, 23 aa, Homo sapiens
  CDR3 for alpha chain variable domain of TCR clone 131273 (TRAV8-6, TRAJ38)
CAVRNAGNNHIQNPDPAVYPLRD

SEQ ID NO: 262546 - protein, 15 aa, Homo sapiens
  CDR3 for beta chain variable domain of TCR clone 131273 (TRBV4-1, TRBJ2-2)
CASSEGQGITGELFF

SEQ ID NO: 262547 - protein, 14 aa, Homo sapiens
  CDR3 for alpha chain variable domain of TCR clone 131274 (TRAV12-3, TRAJ10)
SHLPLTGGGNKLSF

SEQ ID NO: 262548 - protein, 12 aa, Homo sapiens
  CDR3 for beta chain variable domain of TCR clone 131274 (TRBV14, TRBJ2-5)
CASSQLKETQYF

SEQ ID NO: 262549 - protein, 12 aa, Homo sapiens
  CDR3 for alpha chain variable domain of TCR clone 131275 (TRAV2, TRAJ31)
CAVEDNNARLMF

SEQ ID NO: 262550 - protein, 16 aa, Homo sapiens
  CDR3 for beta chain variable domain of TCR clone 131275 (TRBV10-3, TRBJ2-1)
CAISGVGDGGGGELFF

SEQ ID NO: 262551 - protein, 16 aa, Homo sapiens
  CDR3 for alpha chain variable domain of TCR clone 131276 (TRAV30, TRAJ24)
CGTEIGDADSWGKFQF

SEQ ID NO: 262552 - protein, 14 aa, Homo sapiens
  CDR3 for beta chain variable domain of TCR clone 131276 (TRBV12-5, TRBJ2-5)
CASGSRTHQGTQYF

SEQ ID NO: 262553 - protein, 16 aa, Homo sapiens
  CDR3 for alpha chain variable domain of TCR clone 131277 (TRAV12-2, TRAJ40)
CAVIRGGTSGTYRYIF

SEQ ID NO: 262554 - protein, 14 aa, Homo sapiens
  CDR3 for beta chain variable domain of TCR clone 131277 (TRBV20-1, TRBJ2-5)
CSARDGRAGETQYF

SEQ ID NO: 262555 - protein, 14 aa, Homo sapiens
  CDR3 for alpha chain variable domain of TCR clone 131278 (TRAV13-1, TRAJ35)
CAASKGGFGNVLHC

SEQ ID NO: 262556 - protein, 13 aa, Homo sapiens
  CDR3 for beta chain variable domain of TCR clone 131278 (TRBV27, TRBJ1-4)
CASSLMGDEKLFF

SEQ ID NO: 262557 - protein, 19 aa, Homo sapiens
  CDR3 for alpha chain variable domain of TCR clone 131279 (TRAV26-1, TRAJ52)
CIVRAHRNAGGTIYGKLTF

SEQ ID NO: 262558 - protein, 15 aa, Homo sapiens
  CDR3 for beta chain variable domain of TCR clone 131279 (TRBV29-1, TRBJ2-1)
CSGRDRKSSYNEQFF

SEQ ID NO: 262559 - protein, 12 aa, Homo sapiens
  CDR3 for alpha chain variable domain of TCR clone 131280 (TRAV12-1, TRAJ34)
CVVAGATDKLIF

SEQ ID NO: 262560 - protein, 14 aa, Homo sapiens
  CDR3 for beta chain variable domain of TCR clone 131280 (TRBV7-9, TRBJ2-1)
CASSPRDSLYEQFF

SEQ ID NO: 262561 - protein, 14 aa, Homo sapiens
  CDR3 for alpha chain variable domain of TCR clone 131281 (TRAV13-1, TRAJ13)
CAASRVGGYQKVTF

SEQ ID NO: 262562 - protein, 17 aa, Homo sapiens
  CDR3 for beta chain variable domain of TCR clone 131281 (TRBV15, TRBJ1-5)
CATSRAPPGTRNQPQQF

SEQ ID NO: 262563 - protein, 14 aa, Homo sapiens
  CDR3 for alpha chain variable domain of TCR clone 131282 (TRAV29/DV5, TRAJ20)
CAATIRSNDYKLSF

SEQ ID NO: 262564 - protein, 13 aa, Homo sapiens
  CDR3 for beta chain variable domain of TCR clone 131282 (TRBV19, TRBJ2-2)
CASSIWSTGELFF

SEQ ID NO: 262565 - protein, 12 aa, Homo sapiens
  CDR3 for alpha chain variable domain of TCR clone 131283 (TRAV13-1, TRAJ48)
CAANFGNEKLTF

SEQ ID NO: 262566 - protein, 20 aa, Homo sapiens
  CDR3 for beta chain variable domain of TCR clone 131283 (TRBV28, TRBJ2-1)
CASTPIGRSPGLAGGNEQFF

SEQ ID NO: 262567 - protein, 14 aa, Homo sapiens
  CDR3 for alpha chain variable domain of TCR clone 131284 (TRAV12-2, TRAJ40)
CAVKIPSGTSKYIF

SEQ ID NO: 262568 - protein, 15 aa, Homo sapiens
  CDR3 for beta chain variable domain of TCR clone 131284 (TRBV20-1, TRBJ1-4)
CSARREWGVNEKLFF

SEQ ID NO: 262569 - protein, 14 aa, Homo sapiens
  CDR3 for alpha chain variable domain of TCR clone 131285 (TRAV12-3, TRAJ10)
SHLPLTGGGNKLTF

SEQ ID NO: 262570 - protein, 15 aa, Homo sapiens
  CDR3 for beta chain variable domain of TCR clone 131285 (TRBV7-6, TRBJ2-2)
CASRRTSGNTGELFF

SEQ ID NO: 262571 - protein, 16 aa, Homo sapiens
  CDR3 for alpha chain variable domain of TCR clone 131286 (TRAV8-4, TRAJ12)
CAVSDRGLDSSYKLIF

SEQ ID NO: 262572 - protein, 13 aa, Homo sapiens
  CDR3 for beta chain variable domain of TCR clone 131286 (TRBV7-3, TRBJ1-1)
CASSQDWGAEAFF

SEQ ID NO: 262573 - protein, 14 aa, Homo sapiens
  CDR3 for alpha chain variable domain of TCR clone 131287 (TRAV26-1, TRAJ38)
CIADNAGNNRKLIW

SEQ ID NO: 262574 - protein, 14 aa, Homo sapiens
  CDR3 for beta chain variable domain of TCR clone 131287 (TRBV27, TRBJ1-5)
CASSPSGSNQPQHF

SEQ ID NO: 262575 - protein, 16 aa, Homo sapiens
  CDR3 for alpha chain variable domain of TCR clone 131288 (TRAV4, TRAJ22)
CLVGDLYSGSARQLTF

SEQ ID NO: 262576 - protein, 16 aa, Homo sapiens
  CDR3 for beta chain variable domain of TCR clone 131288 (TRBV7-9, TRBJ2-3)
CASSPWRDVGTDTQYF

SEQ ID NO: 262577 - protein, 16 aa, Homo sapiens
  CDR3 for alpha chain variable domain of TCR clone 131289 (TRAV3, TRAJ10)
CAVRDMRAGGGNKLTF

SEQ ID NO: 262578 - protein, 15 aa, Homo sapiens
  CDR3 for beta chain variable domain of TCR clone 131289 (TRBV11-2, TRBJ1-6)
CASTGFGTAVSTLHF

SEQ ID NO: 262579 - protein, 14 aa, Homo sapiens
  CDR3 for alpha chain variable domain of TCR clone 131290 (TRAV1-1, TRAJ27)
CAVIYNTNAGKSTF

SEQ ID NO: 262580 - protein, 17 aa, Homo sapiens
  CDR3 for beta chain variable domain of TCR clone 131290 (TRBV9, TRBJ2-2)
CASSVGGQGTDTGELFF

SEQ ID NO: 262581 - protein, 16 aa, Homo sapiens
  CDR3 for alpha chain variable domain of TCR clone 131291 (TRAV30, TRAJ24)
CGTEIVDADSWGKFQF

SEQ ID NO: 262582 - protein, 14 aa, Homo sapiens
  CDR3 for beta chain variable domain of TCR clone 131291 (TRBV2, TRBJ2-5)
CASSEVLAQETQYF

SEQ ID NO: 262583 - protein, 13 aa, Homo sapiens
  CDR3 for alpha chain variable domain of TCR clone 131292 (TRAV12-3, TRAJ13)
CAMSSGGYQKVTF

SEQ ID NO: 262584 - protein, 15 aa, Homo sapiens
  CDR3 for beta chain variable domain of TCR clone 131292 (TRBV3-1, TRBJ2-5)
CASSANLGGPETQYF

SEQ ID NO: 262585 - protein, 14 aa, Homo sapiens
  CDR3 for alpha chain variable domain of TCR clone 131293 (TRAV8-2, TRAJ4)
CVVSPSGGYNKLIF

SEQ ID NO: 262586 - protein, 15 aa, Homo sapiens
  CDR3 for beta chain variable domain of TCR clone 131293 (TRBV5-5, TRBJ1-5)
CASSSTPGSNQPQHF

SEQ ID NO: 262587 - protein, 13 aa, Homo sapiens
  CDR3 for alpha chain variable domain of TCR clone 131294 (TRAV12-1, TRAJ42)
FVVNDPRQGNLIF

SEQ ID NO: 262588 - protein, 15 aa, Homo sapiens
  CDR3 for beta chain variable domain of TCR clone 131294 (TRBV20-1, TRBJ2-3)
CSARESRGQGYTQYF

SEQ ID NO: 262589 - protein, 14 aa, Homo sapiens
  CDR3 for alpha chain variable domain of TCR clone 131295 (TRAV30, TRAJ26)
CGTEIVSYGQNFVF

SEQ ID NO: 262590 - protein, 20 aa, Homo sapiens
  CDR3 for beta chain variable domain of TCR clone 131295 (TRBV28, TRBJ2-1)
CASTPIGRSPGLAGGNEQFF

SEQ ID NO: 262591 - protein, 11 aa, Homo sapiens
  CDR3 for alpha chain variable domain of TCR clone 131296 (TRAV8-3, TRAJ16)
CAVVPCQKLLF

SEQ ID NO: 262592 - protein, 14 aa, Homo sapiens
  CDR3 for beta chain variable domain of TCR clone 131296 (TRBV7-8, TRBJ2-3)
CASSLEAGTDTQYF

SEQ ID NO: 262593 - protein, 13 aa, Homo sapiens
  CDR3 for alpha chain variable domain of TCR clone 131297 (TRAV17, TRAJ9)
CATAITGGFKTIL

SEQ ID NO: 262594 - protein, 16 aa, Homo sapiens
  CDR3 for beta chain variable domain of TCR clone 131297 (TRBV15, TRBJ2-1)
CATSRNLAGGYNEQFF

SEQ ID NO: 262595 - protein, 14 aa, Homo sapiens
  CDR3 for alpha chain variable domain of TCR clone 131298 (TRAV38-1, TRAJ29)
CAFITPSGNTPLVF

SEQ ID NO: 262596 - protein, 13 aa, Homo sapiens
  CDR3 for beta chain variable domain of TCR clone 131298 (TRBV19, TRBJ1-4)
CASPTQGNEKLFF

SEQ ID NO: 262597 - protein, 12 aa, Homo sapiens
  CDR3 for alpha chain variable domain of TCR clone 131299 (TRAV3, TRAJ20)
CAVRDHDYKLSF

SEQ ID NO: 262598 - protein, 15 aa, Homo sapiens
  CDR3 for beta chain variable domain of TCR clone 131299 (TRBV9, TRBJ1-6)
CASSVAGTGDSPFHF

SEQ ID NO: 262599 - protein, 14 aa, Homo sapiens
  CDR3 for alpha chain variable domain of TCR clone 131300 (TRAV12-2, TRAJ13)
CAVKKTGGYQKVTF

SEQ ID NO: 262600 - protein, 17 aa, Homo sapiens
  CDR3 for beta chain variable domain of TCR clone 131300 (TRBV27, TRBJ2-7)
CASSPLRGRRWKGGQYF

SEQ ID NO: 262601 - protein, 14 aa, Homo sapiens
  CDR3 for alpha chain variable domain of TCR clone 131301 (TRAV8-2, TRAJ4)
CVVSPSGGYNKLIF

SEQ ID NO: 262602 - protein, 15 aa, Homo sapiens
  CDR3 for beta chain variable domain of TCR clone 131301 (TRBV4-1, TRBJ1-4)
CARSDTGGTNEKLFF

SEQ ID NO: 262603 - protein, 14 aa, Homo sapiens
  CDR3 for alpha chain variable domain of TCR clone 131302 (TRAV8-2, TRAJ4)
CVVSPSGGYNKLIF

SEQ ID NO: 262604 - protein, 15 aa, Homo sapiens
  CDR3 for beta chain variable domain of TCR clone 131302 (TRBV4-1, TRBJ1-4)
CASSDTGGTIEKLFF

SEQ ID NO: 262605 - protein, 14 aa, Homo sapiens
  CDR3 for alpha chain variable domain of TCR clone 131303 (TRAV12-2, TRAJ13)
CAVKKTGGYQQVTF

SEQ ID NO: 262606 - protein, 15 aa, Homo sapiens
  CDR3 for beta chain variable domain of TCR clone 131303 (TRBV27, TRBJ2-1)
CASSNGGGSSNEQLF

SEQ ID NO: 262607 - protein, 11 aa, Homo sapiens
  CDR3 for alpha chain variable domain of TCR clone 131304 (TRAV1-2, TRAJ20)
CAVANDYKPSF

SEQ ID NO: 262608 - protein, 14 aa, Homo sapiens
  CDR3 for beta chain variable domain of TCR clone 131304 (TRBV7-9, TRBJ1-1)
CASTPLQSYTEAFF

SEQ ID NO: 262609 - protein, 14 aa, Homo sapiens
  CDR3 for alpha chain variable domain of TCR clone 131305 (TRAV8-4, TRAJ8)
CAVSLNTGFQKLVF

SEQ ID NO: 262610 - protein, 13 aa, Homo sapiens
  CDR3 for beta chain variable domain of TCR clone 131305 (TRBV7-9, TRBJ2-3)
CASSPGSTETQYF

SEQ ID NO: 262611 - protein, 16 aa, Homo sapiens
  CDR3 for alpha chain variable domain of TCR clone 131306 (TRAV30, TRAJ24)
CGTEIVDADSWGKFQF

SEQ ID NO: 262612 - protein, 13 aa, Homo sapiens
  CDR3 for beta chain variable domain of TCR clone 131306 (TRBV2, TRBJ2-5)
CASSALRGETQYF

SEQ ID NO: 262613 - protein, 10 aa, Homo sapiens
  CDR3 for alpha chain variable domain of TCR clone 131307 (TRAV8-3, TRAJ43)
CAVALADMLF

SEQ ID NO: 262614 - protein, 14 aa, Homo sapiens
  CDR3 for beta chain variable domain of TCR clone 131307 (TRBV4-2, TRBJ2-1)
CASGLDRAYNEQFF

SEQ ID NO: 262615 - protein, 12 aa, Homo sapiens
  CDR3 for alpha chain variable domain of TCR clone 131308 (TRAV30, TRAJ43)
CGTEERGNDMRF

SEQ ID NO: 262616 - protein, 13 aa, Homo sapiens
  CDR3 for beta chain variable domain of TCR clone 131308 (TRBV27, TRBJ2-7)
CASSFSQGYEQYS

SEQ ID NO: 262617 - protein, 13 aa, Homo sapiens
  CDR3 for alpha chain variable domain of TCR clone 131309 (TRAV2, TRAJ15)
CAVASQAGTALIF

SEQ ID NO: 262618 - protein, 16 aa, Homo sapiens
  CDR3 for beta chain variable domain of TCR clone 131309 (TRBV5-1, TRBJ1-1)
CASSSGGNSLKTEAFF

SEQ ID NO: 262619 - protein, 15 aa, Homo sapiens
  CDR3 for alpha chain variable domain of TCR clone 131310 (TRAV6, TRAJ4)
CALGGLSGGYNKLIF

SEQ ID NO: 262620 - protein, 13 aa, Homo sapiens
  CDR3 for beta chain variable domain of TCR clone 131310 (TRBV19, TRBJ1-2)
CASSVPGQDGYTF

SEQ ID NO: 262621 - protein, 15 aa, Homo sapiens
  CDR3 for alpha chain variable domain of TCR clone 131311 (TRAV3, TRAJ22)
CAVRDRGGSARQLTF

SEQ ID NO: 262622 - protein, 13 aa, Homo sapiens
  CDR3 for beta chain variable domain of TCR clone 131311 (TRBV18, TRBJ1-1)
CASSGGRNTEAFF

SEQ ID NO: 262623 - protein, 15 aa, Homo sapiens
  CDR3 for alpha chain variable domain of TCR clone 131312 (TRAV17, TRAJ56)
CATEPFTGPNSKLTF

SEQ ID NO: 262624 - protein, 15 aa, Homo sapiens
  CDR3 for beta chain variable domain of TCR clone 131312 (TRBV28, TRBJ1-5)
CASSRTGGYVQPQHF

SEQ ID NO: 262625 - protein, 19 aa, Homo sapiens
  CDR3 for alpha chain variable domain of TCR clone 131313 (TRAV3, TRAJ6)
CAVRDRNPSRSGGIYIPTF

SEQ ID NO: 262626 - protein, 15 aa, Homo sapiens
  CDR3 for beta chain variable domain of TCR clone 131313 (TRBV18, TRBJ2-7)
CASSPTFMDSYEQYF

SEQ ID NO: 262627 - protein, 15 aa, Homo sapiens
  CDR3 for alpha chain variable domain of TCR clone 131314 (TRAV12-2, TRAJ43)
CAFDMRFGAGTRLTV

SEQ ID NO: 262628 - protein, 11 aa, Homo sapiens
  CDR3 for beta chain variable domain of TCR clone 131314 (TRBV19, TRBJ1-1)
CASSIGSEAFF

SEQ ID NO: 262629 - protein, 13 aa, Homo sapiens
  CDR3 for alpha chain variable domain of TCR clone 131315 (TRAV13-1, TRAJ52)
CAAGGTSYGKLTF

SEQ ID NO: 262630 - protein, 15 aa, Homo sapiens
  CDR3 for beta chain variable domain of TCR clone 131315 (TRBV7-2, TRBJ2-1)
CASSSGLAGGNEQFF

SEQ ID NO: 262631 - protein, 14 aa, Homo sapiens
  CDR3 for alpha chain variable domain of TCR clone 131316 (TRAV1-2, TRAJ8)
CAVREDTGFQKLVF

SEQ ID NO: 262632 - protein, 15 aa, Homo sapiens
  CDR3 for beta chain variable domain of TCR clone 131316 (TRBV28, TRBJ2-6)
CASSLAGSGANVMTF

SEQ ID NO: 262633 - protein, 12 aa, Homo sapiens
  CDR3 for alpha chain variable domain of TCR clone 131317 (TRAV3, TRAJ27)
CAVRDGAGKSTF

SEQ ID NO: 262634 - protein, 13 aa, Homo sapiens
  CDR3 for beta chain variable domain of TCR clone 131317 (TRBV10-3, TRBJ1-2)
CASNADLNYGYTF

SEQ ID NO: 262635 - protein, 12 aa, Homo sapiens
  CDR3 for alpha chain variable domain of TCR clone 131318 (TRAV13-1, TRAJ21)
CAAKEGFNKFYF

SEQ ID NO: 262636 - protein, 16 aa, Homo sapiens
  CDR3 for beta chain variable domain of TCR clone 131318 (TRBV6-1, TRBJ1-2)
CASSGAWQGRSHGYTF

SEQ ID NO: 262637 - protein, 15 aa, Homo sapiens
  CDR3 for alpha chain variable domain of TCR clone 131319 (TRAV17, TRAJ57)
CATGPSQGGSEKLVF

SEQ ID NO: 262638 - protein, 15 aa, Homo sapiens
  CDR3 for beta chain variable domain of TCR clone 131319 (TRBV12-4, TRBJ2-1)
CASSLLATGNNEQFF

SEQ ID NO: 262639 - protein, 13 aa, Homo sapiens
  CDR3 for alpha chain variable domain of TCR clone 131320 (TRAV3, TRAJ27)
CAVRPLGAGKSTF

SEQ ID NO: 262640 - protein, 15 aa, Homo sapiens
  CDR3 for beta chain variable domain of TCR clone 131320 (TRBV4-1, TRBJ2-7)
CASSQNTGRLYEQYF

SEQ ID NO: 262641 - protein, 16 aa, Homo sapiens
  CDR3 for alpha chain variable domain of TCR clone 131321 (TRAV30, TRAJ24)
CGTEIVDAESWGKFQF

SEQ ID NO: 262642 - protein, 15 aa, Homo sapiens
  CDR3 for beta chain variable domain of TCR clone 131321 (TRBV20-1, TRBJ2-7)
CSARDRVSGMDEQYF

SEQ ID NO: 262643 - protein, 14 aa, Homo sapiens
  CDR3 for alpha chain variable domain of TCR clone 131322 (TRAV23/DV6, TRAJ4)
CAAPSSGGYNKLIF

SEQ ID NO: 262644 - protein, 13 aa, Homo sapiens
  CDR3 for beta chain variable domain of TCR clone 131322 (TRBV7-9, TRBJ1-2)
CASSLKQNYGYTF

SEQ ID NO: 262645 - protein, 12 aa, Homo sapiens
  CDR3 for alpha chain variable domain of TCR clone 131323 (TRAV29/DV5, TRAJ49)
CAATDTGNQFYF

SEQ ID NO: 262646 - protein, 15 aa, Homo sapiens
  CDR3 for beta chain variable domain of TCR clone 131323 (TRBV11-2, TRBJ2-2)
CASSSDRVNAGELFF

SEQ ID NO: 262647 - protein, 13 aa, Homo sapiens
  CDR3 for alpha chain variable domain of TCR clone 131324 (TRAV8-3, TRAJ28)
CAVGAVGSYQLTF

SEQ ID NO: 262648 - protein, 15 aa, Homo sapiens
  CDR3 for beta chain variable domain of TCR clone 131324 (TRBV7-2, TRBJ2-1)
CASSFQADEYNEQFF

SEQ ID NO: 262649 - protein, 14 aa, Homo sapiens
  CDR3 for alpha chain variable domain of TCR clone 131325 (TRAV10, TRAJ34)
CVVSGKHRQAHLWY

SEQ ID NO: 262650 - protein, 14 aa, Homo sapiens
  CDR3 for beta chain variable domain of TCR clone 131325 (TRBV19, TRBJ2-1)
CASPTFVLSGEQFF

SEQ ID NO: 262651 - protein, 13 aa, Homo sapiens
  CDR3 for alpha chain variable domain of TCR clone 131326 (TRAV16, TRAJ48)
CSPLNFGNEKLTF

SEQ ID NO: 262652 - protein, 11 aa, Homo sapiens
  CDR3 for beta chain variable domain of TCR clone 131326 (TRBV7-9, TRBJ2-3)
CASSPTDTKYF

SEQ ID NO: 262653 - protein, 15 aa, Homo sapiens
  CDR3 for alpha chain variable domain of TCR clone 131327 (TRAV26-1, TRAJ23)
CIVRVAGYQGGTLIF

SEQ ID NO: 262654 - protein, 18 aa, Homo sapiens
  CDR3 for beta chain variable domain of TCR clone 131327 (TRBV28, TRBJ2-1)
CASSSTSGRANSYNEQFF

SEQ ID NO: 262655 - protein, 14 aa, Homo sapiens
  CDR3 for alpha chain variable domain of TCR clone 131328 (TRAV12-2, TRAJ17)
CAVLFKAAGNKLTF

SEQ ID NO: 262656 - protein, 14 aa, Homo sapiens
  CDR3 for beta chain variable domain of TCR clone 131328 (TRBV12-5, TRBJ2-5)
CASGSRTHQETQYS

SEQ ID NO: 262657 - protein, 16 aa, Homo sapiens
  CDR3 for alpha chain variable domain of TCR clone 131329 (TRAV3, TRAJ18)
CDVRDGRGSTLGRLYF

SEQ ID NO: 262658 - protein, 15 aa, Homo sapiens
  CDR3 for beta chain variable domain of TCR clone 131329 (TRBV7-9, TRBJ1-6)
CASSSPGRGNSPLHF

SEQ ID NO: 262659 - protein, 15 aa, Homo sapiens
  CDR3 for alpha chain variable domain of TCR clone 131330 (TRAV1-2, TRAJ30)
CAVRPHGNRDDKIIF

SEQ ID NO: 262660 - protein, 16 aa, Homo sapiens
  CDR3 for beta chain variable domain of TCR clone 131330 (TRBV28, TRBJ2-1)
CASSSPEYPRDNEQFF

SEQ ID NO: 262661 - protein, 14 aa, Homo sapiens
  CDR3 for alpha chain variable domain of TCR clone 131331 (TRAV17, TRAJ15)
CATDRGQAGTALIF

SEQ ID NO: 262662 - protein, 14 aa, Homo sapiens
  CDR3 for beta chain variable domain of TCR clone 131331 (TRBV7-2, TRBJ2-7)
CASSPKTSFYEQYF

SEQ ID NO: 262663 - protein, 13 aa, Homo sapiens
  CDR3 for alpha chain variable domain of TCR clone 131332 (TRAV13-1, TRAJ5)
CAASDTGRRALTF

SEQ ID NO: 262664 - protein, 12 aa, Homo sapiens
  CDR3 for beta chain variable domain of TCR clone 131332 (TRBV28, TRBJ2-3)
CASSLYRDTQYS

SEQ ID NO: 262665 - protein, 10 aa, Homo sapiens
  CDR3 for alpha chain variable domain of TCR clone 131333 (TRAV16, TRAJ26)
CAPEEPWSEF

SEQ ID NO: 262666 - protein, 15 aa, Homo sapiens
  CDR3 for beta chain variable domain of TCR clone 131333 (TRBV7-2, TRBJ2-3)
CASSLTGTSTDTQYF

SEQ ID NO: 262667 - protein, 14 aa, Homo sapiens
  CDR3 for alpha chain variable domain of TCR clone 131334 (TRAV27, TRAJ22)
CAGVSVLGKRQLTF

SEQ ID NO: 262668 - protein, 19 aa, Homo sapiens
  CDR3 for beta chain variable domain of TCR clone 131334 (TRBV2, TRBJ2-7)
CASSDDETSGRANDYEQYF

SEQ ID NO: 262669 - protein, 18 aa, Homo sapiens
  CDR3 for alpha chain variable domain of TCR clone 131335 (TRAV26-2, TRAJ45)
CILRLWGYSGGGADGFTF

SEQ ID NO: 262670 - protein, 17 aa, Homo sapiens
  CDR3 for beta chain variable domain of TCR clone 131335 (TRBV28, TRBJ2-3)
CASSPTPAGGRVDTQYF

SEQ ID NO: 262671 - protein, 14 aa, Homo sapiens
  CDR3 for alpha chain variable domain of TCR clone 131336 (TRAV17, TRAJ16)
CATADFSDGQKLLF

SEQ ID NO: 262672 - protein, 13 aa, Homo sapiens
  CDR3 for beta chain variable domain of TCR clone 131336 (TRBV27, TRBJ1-1)
CASSLSIGAEAFF

SEQ ID NO: 262673 - protein, 13 aa, Homo sapiens
  CDR3 for alpha chain variable domain of TCR clone 131337 (TRAV17, TRAJ9)
CATDYTGGFKTIF

SEQ ID NO: 262674 - protein, 16 aa, Homo sapiens
  CDR3 for beta chain variable domain of TCR clone 131337 (TRBV7-7, TRBJ2-1)
CASSLASGTSCNEQFF

SEQ ID NO: 262675 - protein, 17 aa, Homo sapiens
  CDR3 for alpha chain variable domain of TCR clone 131338 (TRAV2, TRAJ22)
ILQVREADAAEQRQLTF

SEQ ID NO: 262676 - protein, 16 aa, Homo sapiens
  CDR3 for beta chain variable domain of TCR clone 131338 (TRBV2, TRBJ2-5)
CASSETHGVGEETQYF

SEQ ID NO: 262677 - protein, 18 aa, Homo sapiens
  CDR3 for alpha chain variable domain of TCR clone 131339 (TRAV26-1, TRAJ42)
CIVRPITEEAKEISSLEK

SEQ ID NO: 262678 - protein, 16 aa, Homo sapiens
  CDR3 for beta chain variable domain of TCR clone 131339 (TRBV7-3, TRBJ2-2)
CASSLKRGTLSGELFF

SEQ ID NO: 262679 - protein, 17 aa, Homo sapiens
  CDR3 for alpha chain variable domain of TCR clone 131340 (TRAV3, TRAJ38)
CAVRDCLNACNNRKLIW

SEQ ID NO: 262680 - protein, 13 aa, Homo sapiens
  CDR3 for beta chain variable domain of TCR clone 131340 (TRBV23-1, TRBJ1-4)
CASRGKFNEKLFF

SEQ ID NO: 262681 - protein, 10 aa, Homo sapiens
  CDR3 for alpha chain variable domain of TCR clone 131341 (TRAV23/DV6, TRAJ57)
CAASSTLSQG

SEQ ID NO: 262682 - protein, 14 aa, Homo sapiens
  CDR3 for beta chain variable domain of TCR clone 131341 (TRBV27, TRBJ2-1)
CAGSIAETYNEQFF

SEQ ID NO: 262683 - protein, 15 aa, Homo sapiens
  CDR3 for alpha chain variable domain of TCR clone 131342 (TRAV17, TRAJ10)
CATVLLTGGGNKLTF

SEQ ID NO: 262684 - protein, 14 aa, Homo sapiens
  CDR3 for beta chain variable domain of TCR clone 131342 (TRBV7-2, TRBJ2-7)
CASRSQGAAYEQYF

SEQ ID NO: 262685 - protein, 17 aa, Homo sapiens
  CDR3 for alpha chain variable domain of TCR clone 131343 (TRAV1-1, TRAJ4)
CALYNKLIFGAGTRLAV

SEQ ID NO: 262686 - protein, 16 aa, Homo sapiens
  CDR3 for beta chain variable domain of TCR clone 131343 (TRBV7-3, TRBJ2-2)
CASSLKRGTLSGELVF

SEQ ID NO: 262687 - protein, 13 aa, Homo sapiens
  CDR3 for alpha chain variable domain of TCR clone 131344 (TRAV1-2, TRAJ20)
CAVRDGNDYKLSF

SEQ ID NO: 262688 - protein, 14 aa, Homo sapiens
  CDR3 for beta chain variable domain of TCR clone 131344 (TRBV7-2, TRBJ2-3)
CQRLRGGGRDTQYF

SEQ ID NO: 262689 - protein, 16 aa, Homo sapiens
  CDR3 for alpha chain variable domain of TCR clone 131345 (TRAV3, TRAJ3)
CAVRDRAKSSASKKIF

SEQ ID NO: 262690 - protein, 16 aa, Homo sapiens
  CDR3 for beta chain variable domain of TCR clone 131345 (TRBV20-1, TRBJ2-4)
CSATSLAELAKNIQYF

SEQ ID NO: 262691 - protein, 11 aa, Homo sapiens
  CDR3 for alpha chain variable domain of TCR clone 131346 (TRAV21, TRAJ34)
CAVTNTDKLIF

SEQ ID NO: 262692 - protein, 13 aa, Homo sapiens
  CDR3 for beta chain variable domain of TCR clone 131346 (TRBV20-1, TRBJ2-1)
CSARSPSGGPPTM

SEQ ID NO: 262693 - protein, 13 aa, Homo sapiens
  CDR3 for alpha chain variable domain of TCR clone 131347 (TRAV13-1, TRAJ39)
FAASIWAGNMLTF

SEQ ID NO: 262694 - protein, 15 aa, Homo sapiens
  CDR3 for beta chain variable domain of TCR clone 131347 (TRBV7-9, TRBJ1-1)
CASSLLEQGGTEAFF

SEQ ID NO: 262695 - protein, 16 aa, Homo sapiens
  CDR3 for alpha chain variable domain of TCR clone 131348 (TRAV4, TRAJ18)
CCVLLVGGSTLGRLYF

SEQ ID NO: 262696 - protein, 12 aa, Homo sapiens
  CDR3 for beta chain variable domain of TCR clone 131348 (TRBV6-3, TRBJ2-7)
CASSLTPYEQYF

SEQ ID NO: 262697 - protein, 15 aa, Homo sapiens
  CDR3 for alpha chain variable domain of TCR clone 131349 (TRAV8-2, TRAJ16)
CVVSDGFSDGQKLLF

SEQ ID NO: 262698 - protein, 13 aa, Homo sapiens
  CDR3 for beta chain variable domain of TCR clone 131349 (TRBV20-1, TRBJ1-1)
CSAPPGGHTEAFC

SEQ ID NO: 262699 - protein, 11 aa, Homo sapiens
  CDR3 for alpha chain variable domain of TCR clone 131350 (TRAV2, TRAJ13)
CASVGYQKVTF

SEQ ID NO: 262700 - protein, 16 aa, Homo sapiens
  CDR3 for beta chain variable domain of TCR clone 131350 (TRBV6-1, TRBJ2-5)
CASSDTLDRGAETQYF

SEQ ID NO: 262701 - protein, 17 aa, Homo sapiens
  CDR3 for alpha chain variable domain of TCR clone 131351 (TRAV13-1, TRAJ52)
CAASSGAGGTSYGKLTF

SEQ ID NO: 262702 - protein, 13 aa, Homo sapiens
  CDR3 for beta chain variable domain of TCR clone 131351 (TRBV14, TRBJ1-1)
CASSREFGTEAFF

SEQ ID NO: 262703 - protein, 15 aa, Homo sapiens
  CDR3 for alpha chain variable domain of TCR clone 131352 (TRAV3, TRAJ12)
CAVRDIRDSSYKLIF

SEQ ID NO: 262704 - protein, 16 aa, Homo sapiens
  CDR3 for beta chain variable domain of TCR clone 131352 (TRBV27, TRBJ2-2)
CASSFRGLVRTGELFF

SEQ ID NO: 262705 - protein, 13 aa, Homo sapiens
  CDR3 for alpha chain variable domain of TCR clone 131353 (TRAV29/DV5, TRAJ31)
CAASRNNNARLMF

SEQ ID NO: 262706 - protein, 12 aa, Homo sapiens
  CDR3 for beta chain variable domain of TCR clone 131353 (TRBV14, TRBJ1-1)
CASSLLKGLAFF

SEQ ID NO: 262707 - protein, 15 aa, Homo sapiens
  CDR3 for alpha chain variable domain of TCR clone 131354 (TRAV12-1, TRAJ33)
CVVNGNLDSNYQLIW

SEQ ID NO: 262708 - protein, 13 aa, Homo sapiens
  CDR3 for beta chain variable domain of TCR clone 131354 (TRBV9, TRBJ2-7)
CASSKTRTYEQYF

SEQ ID NO: 262709 - protein, 16 aa, Homo sapiens
  CDR3 for alpha chain variable domain of TCR clone 131355 (TRAV26-1, TRAJ53)
CIVRVAMGGSNYKLTF

SEQ ID NO: 262710 - protein, 14 aa, Homo sapiens
  CDR3 for beta chain variable domain of TCR clone 131355 (TRBV7-2, TRBJ2-7)
CASSPKTSFYEQYF

SEQ ID NO: 262711 - protein, 13 aa, Homo sapiens
  CDR3 for alpha chain variable domain of TCR clone 131356 (TRAV12-2, TRAJ12)
CAARMDSSYKLIF

SEQ ID NO: 262712 - protein, 12 aa, Homo sapiens
  CDR3 for beta chain variable domain of TCR clone 131356 (TRBV11-2, TRBJ2-1)
CASSPGNNEQFF

SEQ ID NO: 262713 - protein, 14 aa, Homo sapiens
  CDR3 for alpha chain variable domain of TCR clone 131357 (TRAV8-3, TRAJ9)
CAVAYNTGGFKTIF

SEQ ID NO: 262714 - protein, 16 aa, Homo sapiens
  CDR3 for beta chain variable domain of TCR clone 131357 (TRBV20-1, TRBJ1-4)
CSAPGQGLLTNEKLFF

SEQ ID NO: 262715 - protein, 14 aa, Homo sapiens
  CDR3 for alpha chain variable domain of TCR clone 131358 (TRAV2, TRAJ37)
CAVDFTSNTGKLIF

SEQ ID NO: 262716 - protein, 13 aa, Homo sapiens
  CDR3 for beta chain variable domain of TCR clone 131358 (TRBV12-5, TRBJ2-3)
CASGDRQSDTQYF

SEQ ID NO: 262717 - protein, 11 aa, Homo sapiens
  CDR3 for alpha chain variable domain of TCR clone 131359 (TRAV2, TRAJ13)
CASVGYQKVTF

SEQ ID NO: 262718 - protein, 14 aa, Homo sapiens
  CDR3 for beta chain variable domain of TCR clone 131359 (TRBV6-3, TRBJ1-1)
CASSNLLPGAEAFF

SEQ ID NO: 262719 - protein, 12 aa, Homo sapiens
  CDR3 for alpha chain variable domain of TCR clone 131360 (TRAV1-1, TRAJ15)
CAVGQAGTALIF

SEQ ID NO: 262720 - protein, 15 aa, Homo sapiens
  CDR3 for beta chain variable domain of TCR clone 131360 (TRBV2, TRBJ2-3)
CASSDFEKATDTQYF

SEQ ID NO: 262721 - protein, 16 aa, Homo sapiens
  CDR3 for alpha chain variable domain of TCR clone 131361 (TRAV3, TRAJ37)
CAVRPHGSGNTGKLIF

SEQ ID NO: 262722 - protein, 16 aa, Homo sapiens
  CDR3 for beta chain variable domain of TCR clone 131361 (TRBV9, TRBJ1-2)
CASSVEEKVSTYGYTF

SEQ ID NO: 262723 - protein, 12 aa, Homo sapiens
  CDR3 for alpha chain variable domain of TCR clone 131362 (TRAV12-2, TRAJ20)
CAMVRGDYKLSF

SEQ ID NO: 262724 - protein, 14 aa, Homo sapiens
  CDR3 for beta chain variable domain of TCR clone 131362 (TRBV4-1, TRBJ2-2)
CASSQAVNTGELFF

SEQ ID NO: 262725 - protein, 15 aa, Homo sapiens
  CDR3 for alpha chain variable domain of TCR clone 131363 (TRAV17, TRAJ37)
CATDGGSSKTGKLIF

SEQ ID NO: 262726 - protein, 15 aa, Homo sapiens
  CDR3 for beta chain variable domain of TCR clone 131363 (TRBV28, TRBJ2-5)
CASSSGRTIQETQYF

SEQ ID NO: 262727 - protein, 17 aa, Homo sapiens
  CDR3 for alpha chain variable domain of TCR clone 131364 (TRAV12-2, TRAJ52)
CAVNPYAGGTSYGKLTF

SEQ ID NO: 262728 - protein, 13 aa, Homo sapiens
  CDR3 for beta chain variable domain of TCR clone 131364 (TRBV29-1, TRBJ2-2)
CSTTGVNTGELFF

SEQ ID NO: 262729 - protein, 11 aa, Homo sapiens
  CDR3 for alpha chain variable domain of TCR clone 131365 (TRAV21, TRAJ48)
CAVGGNEKLTF

SEQ ID NO: 262730 - protein, 15 aa, Homo sapiens
  CDR3 for beta chain variable domain of TCR clone 131365 (TRBV6-6, TRBJ2-5)
CASSPGGGLEETQYF

SEQ ID NO: 262731 - protein, 16 aa, Homo sapiens
  CDR3 for alpha chain variable domain of TCR clone 131366 (TRAV3, TRAJ10)
CAVRDMMAGGGNKLTF

SEQ ID NO: 262732 - protein, 15 aa, Homo sapiens
  CDR3 for beta chain variable domain of TCR clone 131366 (TRBV11-2, TRBJ1-6)
CASTGFGTAVSPLHF

SEQ ID NO: 262733 - protein, 15 aa, Homo sapiens
  CDR3 for alpha chain variable domain of TCR clone 131367 (TRAV16, TRAJ16)
CALQGGGSDGQKLLF

SEQ ID NO: 262734 - protein, 14 aa, Homo sapiens
  CDR3 for beta chain variable domain of TCR clone 131367 (TRBV12-5, TRBJ2-5)
CASGSRTHQETQYF

SEQ ID NO: 262735 - protein, 13 aa, Homo sapiens
  CDR3 for alpha chain variable domain of TCR clone 131368 (TRAV12-3, TRAJ33)
CAMSVNSNYQLIW

SEQ ID NO: 262736 - protein, 18 aa, Homo sapiens
  CDR3 for beta chain variable domain of TCR clone 131368 (TRBV11-2, TRBJ2-6)
CASSLNPFLGTGANVLTF

SEQ ID NO: 262737 - protein, 13 aa, Homo sapiens
  CDR3 for alpha chain variable domain of TCR clone 131369 (TRAV21, TRAJ11)
CAVPNSGYSTLPF

SEQ ID NO: 262738 - protein, 13 aa, Homo sapiens
  CDR3 for beta chain variable domain of TCR clone 131369 (TRBV3-1, TRBJ2-7)
CASSLRDGYEQYF

SEQ ID NO: 262739 - protein, 13 aa, Homo sapiens
  CDR3 for alpha chain variable domain of TCR clone 131370 (TRAV2, TRAJ15)
CAVASQAGTALIF

SEQ ID NO: 262740 - protein, 17 aa, Homo sapiens
  CDR3 for beta chain variable domain of TCR clone 131370 (TRBV7-9, TRBJ2-1)
CASSLVASYPSYNEQFF

SEQ ID NO: 262741 - protein, 14 aa, Homo sapiens
  CDR3 for alpha chain variable domain of TCR clone 131371 (TRAV13-1, TRAJ44)
CAAKATGTASKLTF

SEQ ID NO: 262742 - protein, 13 aa, Homo sapiens
  CDR3 for beta chain variable domain of TCR clone 131371 (TRBV15, TRBJ2-5)
CATSQIGEETQYF

SEQ ID NO: 262743 - protein, 14 aa, Homo sapiens
  CDR3 for alpha chain variable domain of TCR clone 131372 (TRAV17, TRAJ6)
CATVASGGSYIPTF

SEQ ID NO: 262744 - protein, 19 aa, Homo sapiens
  CDR3 for beta chain variable domain of TCR clone 131372 (TRBV4-3, TRBJ2-7)
CASSQEFIGWQVTPYEQYF

SEQ ID NO: 262745 - protein, 16 aa, Homo sapiens
  CDR3 for alpha chain variable domain of TCR clone 131373 (TRAV26-1, TRAJ37)
CIVRGAGSGNTGKLIF

SEQ ID NO: 262746 - protein, 17 aa, Homo sapiens
  CDR3 for beta chain variable domain of TCR clone 131373 (TRBV4-1, TRBJ2-7)
CASSRDPLGVRGGEQYF

SEQ ID NO: 262747 - protein, 13 aa, Homo sapiens
  CDR3 for alpha chain variable domain of TCR clone 131374 (TRAV17, TRAJ42)
CATSRGSQGNLIF

SEQ ID NO: 262748 - protein, 15 aa, Homo sapiens
  CDR3 for beta chain variable domain of TCR clone 131374 (TRBV6-3, TRBJ2-7)
CASSSPGTVFYEQYF

SEQ ID NO: 262749 - protein, 13 aa, Homo sapiens
  CDR3 for alpha chain variable domain of TCR clone 131375 (TRAV13-2, TRAJ13)
CAERPGGYQKVTF

SEQ ID NO: 262750 - protein, 15 aa, Homo sapiens
  CDR3 for beta chain variable domain of TCR clone 131375 (TRBV6-6, TRBJ2-7)
CASSYSYGGSYEQYF

SEQ ID NO: 262751 - protein, 15 aa, Homo sapiens
  CDR3 for alpha chain variable domain of TCR clone 131376 (TRAV16, TRAJ10)
CALMELTGGGNKLTF

SEQ ID NO: 262752 - protein, 14 aa, Homo sapiens
  CDR3 for beta chain variable domain of TCR clone 131376 (TRBV5-5, TRBJ2-7)
CASSLGQGTYEQYF

SEQ ID NO: 262753 - protein, 15 aa, Homo sapiens
  CDR3 for alpha chain variable domain of TCR clone 131377 (TRAV12-3, TRAJ17)
CAMSPSLAAGNKLTF

SEQ ID NO: 262754 - protein, 15 aa, Homo sapiens
  CDR3 for beta chain variable domain of TCR clone 131377 (TRBV6-3, TRBJ2-7)
CASSSPGTVFYEQYF

SEQ ID NO: 262755 - protein, 13 aa, Homo sapiens
  CDR3 for alpha chain variable domain of TCR clone 131378 (TRAV12-1, TRAJ21)
CVVTLYNFNKFYF

SEQ ID NO: 262756 - protein, 20 aa, Homo sapiens
  CDR3 for beta chain variable domain of TCR clone 131378 (TRBV7-8, TRBJ2-1)
CASSLAHRLAGVRSYNEKFF

SEQ ID NO: 262757 - protein, 16 aa, Homo sapiens
  CDR3 for alpha chain variable domain of TCR clone 131379 (TRAV3, TRAJ37)
CAVRPHGSGNTGKLIY

SEQ ID NO: 262758 - protein, 17 aa, Homo sapiens
  CDR3 for beta chain variable domain of TCR clone 131379 (TRBV20-1, TRBJ2-1)
CSASSSGLAGSYNEQFF

SEQ ID NO: 262759 - protein, 11 aa, Homo sapiens
  CDR3 for alpha chain variable domain of TCR clone 131380 (TRAV8-2, TRAJ26)
CVVTLLLGSEF

SEQ ID NO: 262760 - protein, 15 aa, Homo sapiens
  CDR3 for beta chain variable domain of TCR clone 131380 (TRBV11-2, TRBJ2-2)
CASSSDRVNAGELLF

SEQ ID NO: 262761 - protein, 14 aa, Homo sapiens
  CDR3 for alpha chain variable domain of TCR clone 131381 (TRAV17, TRAJ22)
CATVLSGSARQLTF

SEQ ID NO: 262762 - protein, 12 aa, Homo sapiens
  CDR3 for beta chain variable domain of TCR clone 131381 (TRBV27, TRBJ2-2)
CASKLFTGELFF

SEQ ID NO: 262763 - protein, 21 aa, Homo sapiens
  CDR3 for alpha chain variable domain of TCR clone 131382 (TRAV1-1, TRAJ6)
CLLLLRCERLERTGGSYIPTF

SEQ ID NO: 262764 - protein, 13 aa, Homo sapiens
  CDR3 for beta chain variable domain of TCR clone 131382 (TRBV10-2, TRBJ2-7)
CASGASGGYEQYV

SEQ ID NO: 262765 - protein, 13 aa, Homo sapiens
  CDR3 for alpha chain variable domain of TCR clone 131383 (TRAV13-1, TRAJ11)
CAASIRGYSTPTF

SEQ ID NO: 262766 - protein, 14 aa, Homo sapiens
  CDR3 for beta chain variable domain of TCR clone 131383 (TRBV4-2, TRBJ2-1)
CASGLDRAYNEQFF

SEQ ID NO: 262767 - protein, 11 aa, Homo sapiens
  CDR3 for alpha chain variable domain of TCR clone 131384 (TRAV12-3, TRAJ43)
CAMSVSNDMRF

SEQ ID NO: 262768 - protein, 17 aa, Homo sapiens
  CDR3 for beta chain variable domain of TCR clone 131384 (TRBV20-1, TRBJ2-1)
CSASSSGLAGSYNGQFF

SEQ ID NO: 262769 - protein, 12 aa, Homo sapiens
  CDR3 for alpha chain variable domain of TCR clone 131385 (TRAV12-1, TRAJ40)
CVVYSGTYKYIF

SEQ ID NO: 262770 - protein, 18 aa, Homo sapiens
  CDR3 for beta chain variable domain of TCR clone 131385 (TRBV18, TRBJ1-3)
CASSPRGGAGPSGNTIYF

SEQ ID NO: 262771 - protein, 12 aa, Homo sapiens
  CDR3 for alpha chain variable domain of TCR clone 131386 (TRAV29/DV5, TRAJ49)
CAATDTGNQFYF

SEQ ID NO: 262772 - protein, 12 aa, Homo sapiens
  CDR3 for beta chain variable domain of TCR clone 131386 (TRBV12-4, TRBJ2-7)
CVSSLGGYEQYF

SEQ ID NO: 262773 - protein, 15 aa, Homo sapiens
  CDR3 for alpha chain variable domain of TCR clone 131387 (TRAV17, TRAJ57)
CATGPSQGGSEKLVF

SEQ ID NO: 262774 - protein, 12 aa, Homo sapiens
  CDR3 for beta chain variable domain of TCR clone 131387 (TRBV2, TRBJ2-1)
CAKREGYNEQFF

SEQ ID NO: 262775 - protein, 15 aa, Homo sapiens
  CDR3 for alpha chain variable domain of TCR clone 131388 (TRAV34, TRAJ38)
CGADFTPGNNRKLIW

SEQ ID NO: 262776 - protein, 16 aa, Homo sapiens
  CDR3 for beta chain variable domain of TCR clone 131388 (TRBV12-5, TRBJ2-5)
CAGGPRTSGNQETQYF

SEQ ID NO: 262777 - protein, 14 aa, Homo sapiens
  CDR3 for alpha chain variable domain of TCR clone 131389 (TRAV16, TRAJ33)
CALSAMDSNYQLIW

SEQ ID NO: 262778 - protein, 16 aa, Homo sapiens
  CDR3 for beta chain variable domain of TCR clone 131389 (TRBV25-1, TRBJ2-7)
CASGELTGGGIYEQYF

SEQ ID NO: 262779 - protein, 12 aa, Homo sapiens
  CDR3 for alpha chain variable domain of TCR clone 131390 (TRAV17, TRAJ20)
CATQANDYELSF

SEQ ID NO: 262780 - protein, 12 aa, Homo sapiens
  CDR3 for beta chain variable domain of TCR clone 131390 (TRBV6-1, TRBJ1-1)
CASNSPTAEAFF

SEQ ID NO: 262781 - protein, 11 aa, Homo sapiens
  CDR3 for alpha chain variable domain of TCR clone 131391 (TRAV2, TRAJ33)
CAVDSNYQLIW

SEQ ID NO: 262782 - protein, 16 aa, Homo sapiens
  CDR3 for beta chain variable domain of TCR clone 131391 (TRBV27, TRBJ2-2)
CASSLSGFWVTGELFF

SEQ ID NO: 262783 - protein, 14 aa, Homo sapiens
  CDR3 for alpha chain variable domain of TCR clone 131392 (TRAV12-2, TRAJ17)
CAVLFKAAGNKLTF

SEQ ID NO: 262784 - protein, 13 aa, Homo sapiens
  CDR3 for beta chain variable domain of TCR clone 131392 (TRBV7-7, TRBJ2-3)
CASSLSRADTQYF

SEQ ID NO: 262785 - protein, 15 aa, Homo sapiens
  CDR3 for alpha chain variable domain of TCR clone 131393 (TRAV8-1, TRAJ6)
CAVNANPGGSYIPTF

SEQ ID NO: 262786 - protein, 14 aa, Homo sapiens
  CDR3 for beta chain variable domain of TCR clone 131393 (TRBV10-3, TRBJ2-5)
CAIKSGGQGETQYF

SEQ ID NO: 262787 - protein, 14 aa, Homo sapiens
  CDR3 for alpha chain variable domain of TCR clone 131394 (TRAV1-2, TRAJ8)
CAVREDTGFQKLVF

SEQ ID NO: 262788 - protein, 15 aa, Homo sapiens
  CDR3 for beta chain variable domain of TCR clone 131394 (TRBV7-6, TRBJ2-5)
CASSSGLAGVETQYF

SEQ ID NO: 262789 - protein, 12 aa, Homo sapiens
  CDR3 for alpha chain variable domain of TCR clone 131395 (TRAV12-3, TRAJ17)
CAMTLTGNKLTF

SEQ ID NO: 262790 - protein, 17 aa, Homo sapiens
  CDR3 for beta chain variable domain of TCR clone 131395 (TRBV7-8, TRBJ1-5)
CASSRRDRAPLGQPQHF

SEQ ID NO: 262791 - protein, 13 aa, Homo sapiens
  CDR3 for alpha chain variable domain of TCR clone 131396 (TRAV8-3, TRAJ44)
CAVVPVTASKLTF

SEQ ID NO: 262792 - protein, 14 aa, Homo sapiens
  CDR3 for beta chain variable domain of TCR clone 131396 (TRBV11-2, TRBJ2-3)
CASSRLARTDTQYF

SEQ ID NO: 262793 - protein, 17 aa, Homo sapiens
  CDR3 for alpha chain variable domain of TCR clone 131397 (TRAV3, TRAJ38)
CAVRDCLNAGNDRKLIW

SEQ ID NO: 262794 - protein, 11 aa, Homo sapiens
  CDR3 for beta chain variable domain of TCR clone 131397 (TRBV29-1, TRBJ2-5)
CSEDRTGTQYF

SEQ ID NO: 262795 - protein, 14 aa, Homo sapiens
  CDR3 for alpha chain variable domain of TCR clone 131398 (TRAV12-2, TRAJ44)
CAVNPAGTASKLTF

SEQ ID NO: 262796 - protein, 13 aa, Homo sapiens
  CDR3 for beta chain variable domain of TCR clone 131398 (TRBV19, TRBJ2-7)
CASRKAGGSEQYF

SEQ ID NO: 262797 - protein, 16 aa, Homo sapiens
  CDR3 for alpha chain variable domain of TCR clone 131399 (TRAV26-1, TRAJ23)
CIVRVHPYNQGGKLIF

SEQ ID NO: 262798 - protein, 17 aa, Homo sapiens
  CDR3 for beta chain variable domain of TCR clone 131399 (TRBV7-8, TRBJ2-6)
CASSAGTGGAGANVLTF

SEQ ID NO: 262799 - protein, 14 aa, Homo sapiens
  CDR3 for alpha chain variable domain of TCR clone 131400 (TRAV16, TRAJ37)
CALDISGNTGKLIF

SEQ ID NO: 262800 - protein, 14 aa, Homo sapiens
  CDR3 for beta chain variable domain of TCR clone 131400 (TRBV7-2, TRBJ1-2)
CASSQTGSTYGYTF

SEQ ID NO: 262801 - protein, 11 aa, Homo sapiens
  CDR3 for alpha chain variable domain of TCR clone 131401 (TRAV13-1, TRAJ47)
CAAAPRNKLVF

SEQ ID NO: 262802 - protein, 13 aa, Homo sapiens
  CDR3 for beta chain variable domain of TCR clone 131401 (TRBV10-3, TRBJ2-7)
CASKLAVNYEQYF

SEQ ID NO: 262803 - protein, 15 aa, Homo sapiens
  CDR3 for alpha chain variable domain of TCR clone 131402 (TRAV3, TRAJ20)
CAVRDIKLSDYKLSF

SEQ ID NO: 262804 - protein, 16 aa, Homo sapiens
  CDR3 for beta chain variable domain of TCR clone 131402 (TRBV5-1, TRBJ1-5)
FAPAACLDRDNQPQHF

SEQ ID NO: 262805 - protein, 11 aa, Homo sapiens
  CDR3 for alpha chain variable domain of TCR clone 131403 (TRAV17, TRAJ39)
CATNTYNMLTF

SEQ ID NO: 262806 - protein, 13 aa, Homo sapiens
  CDR3 for beta chain variable domain of TCR clone 131403 (TRBV7-8, TRBJ2-1)
CASTRDAVDEQFF

SEQ ID NO: 262807 - protein, 15 aa, Homo sapiens
  CDR3 for alpha chain variable domain of TCR clone 131404 (TRAV12-1, TRAJ44)
CVVFVNTGTASKLTF

SEQ ID NO: 262808 - protein, 15 aa, Homo sapiens
  CDR3 for beta chain variable domain of TCR clone 131404 (TRBV7-3, TRBJ2-1)
CASSPTGGGEVEQFF

SEQ ID NO: 262809 - protein, 14 aa, Homo sapiens
  CDR3 for alpha chain variable domain of TCR clone 131405 (TRAV35, TRAJ22)
CAGLRPGSARQLTF

SEQ ID NO: 262810 - protein, 16 aa, Homo sapiens
  CDR3 for beta chain variable domain of TCR clone 131405 (TRBV6-5, TRBJ2-1)
CASSYDLSRSYNEQFF

SEQ ID NO: 262811 - protein, 14 aa, Homo sapiens
  CDR3 for alpha chain variable domain of TCR clone 131406 (TRAV2, TRAJ3)
CAVRPYSSASKIIF

SEQ ID NO: 262812 - protein, 17 aa, Homo sapiens
  CDR3 for beta chain variable domain of TCR clone 131406 (TRBV7-6, TRBJ2-5)
CASSSPQAGGPSETQYF

SEQ ID NO: 262813 - protein, 16 aa, Homo sapiens
  CDR3 for alpha chain variable domain of TCR clone 131407 (TRAV38-1, TRAJ56)
CAFMKRQTGANSKLTF

SEQ ID NO: 262814 - protein, 11 aa, Homo sapiens
  CDR3 for beta chain variable domain of TCR clone 131407 (TRBV11-2, TRBJ2-2)
CASSLPGELFF

SEQ ID NO: 262815 - protein, 12 aa, Homo sapiens
  CDR3 for alpha chain variable domain of TCR clone 131408 (TRAV12-2, TRAJ47)
CAVAEYGNKLVF

SEQ ID NO: 262816 - protein, 14 aa, Homo sapiens
  CDR3 for beta chain variable domain of TCR clone 131408 (TRBV20-1, TRBJ1-1)
CSAMGGTANTEDFF

SEQ ID NO: 262817 - protein, 18 aa, Homo sapiens
  CDR3 for alpha chain variable domain of TCR clone 131409 (TRAV13-1, TRAJ52)
CAAKNTNAGGTSYGKLTF

SEQ ID NO: 262818 - protein, 14 aa, Homo sapiens
  CDR3 for beta chain variable domain of TCR clone 131409 (TRBV6-5, TRBJ1-1)
CASSFGQGLTEAFF

SEQ ID NO: 262819 - protein, 15 aa, Homo sapiens
  CDR3 for alpha chain variable domain of TCR clone 131410 (TRAV12-1, TRAJ4)
CVANPFSGGYNKLIF

SEQ ID NO: 262820 - protein, 16 aa, Homo sapiens
  CDR3 for beta chain variable domain of TCR clone 131410 (TRBV5-1, TRBJ1-1)
CASSKTGTEVGTEAFF

SEQ ID NO: 262821 - protein, 13 aa, Homo sapiens
  CDR3 for alpha chain variable domain of TCR clone 131411 (TRAV2, TRAJ40)
CAVVTSGTYKYIF

SEQ ID NO: 262822 - protein, 15 aa, Homo sapiens
  CDR3 for beta chain variable domain of TCR clone 131411 (TRBV19, TRBJ2-1)
CASSLETSGYNEQFF

SEQ ID NO: 262823 - protein, 14 aa, Homo sapiens
  CDR3 for alpha chain variable domain of TCR clone 131412 (TRAV16, TRAJ33)
CALSAMDSNYELIW

SEQ ID NO: 262824 - protein, 16 aa, Homo sapiens
  CDR3 for beta chain variable domain of TCR clone 131412 (TRBV25-1, TRBJ2-7)
CASSELTGGGIYEQYF

SEQ ID NO: 262825 - protein, 14 aa, Homo sapiens
  CDR3 for alpha chain variable domain of TCR clone 131413 (TRAV6, TRAJ42)
CAPHYGGSQGNLIF

SEQ ID NO: 262826 - protein, 15 aa, Homo sapiens
  CDR3 for beta chain variable domain of TCR clone 131413 (TRBV5-1, TRBJ2-1)
CASSPPRAPYNEQFF

SEQ ID NO: 262827 - protein, 15 aa, Homo sapiens
  CDR3 for alpha chain variable domain of TCR clone 131414 (TRAV8-4, TRAJ48)
CAVSAAYFGNKKLTF

SEQ ID NO: 262828 - protein, 12 aa, Homo sapiens
  CDR3 for beta chain variable domain of TCR clone 131414 (TRBV3-1, TRBJ2-5)
CASSQRGETQYF

SEQ ID NO: 262829 - protein, 12 aa, Homo sapiens
  CDR3 for alpha chain variable domain of TCR clone 131415 (TRAV1-1, TRAJ39)
CAVPVVGNMLTF

SEQ ID NO: 262830 - protein, 19 aa, Homo sapiens
  CDR3 for beta chain variable domain of TCR clone 131415 (TRBV19, TRBJ2-5)
CASSIGQVTDFFLGETQYF

SEQ ID NO: 262831 - protein, 14 aa, Homo sapiens
  CDR3 for alpha chain variable domain of TCR clone 131416 (TRAV1-2, TRAJ16)
CAVNRFSDGQKLLF

SEQ ID NO: 262832 - protein, 14 aa, Homo sapiens
  CDR3 for beta chain variable domain of TCR clone 131416 (TRBV7-8, TRBJ1-5)
CASSLGAFNQPQHF

SEQ ID NO: 262833 - protein, 14 aa, Homo sapiens
  CDR3 for alpha chain variable domain of TCR clone 131417 (TRAV12-3, TRAJ10)
SHLPLTEGGNKLTF

SEQ ID NO: 262834 - protein, 11 aa, Homo sapiens
  CDR3 for beta chain variable domain of TCR clone 131417 (TRBV19, TRBJ1-1)
CASSIGSEAFF

SEQ ID NO: 262835 - protein, 18 aa, Homo sapiens
  CDR3 for alpha chain variable domain of TCR clone 131418 (TRAV12-3, TRAJ52)
CAMSRTNAGGTSYGKPTF

SEQ ID NO: 262836 - protein, 17 aa, Homo sapiens
  CDR3 for beta chain variable domain of TCR clone 131418 (TRBV7-3, TRBJ2-3)
CASSLMKRMRGADTQYF

SEQ ID NO: 262837 - protein, 18 aa, Homo sapiens
  CDR3 for alpha chain variable domain of TCR clone 131419 (TRAV21, TRAJ52)
CAVRPSPAGGTSYGKLTF

SEQ ID NO: 262838 - protein, 13 aa, Homo sapiens
  CDR3 for beta chain variable domain of TCR clone 131419 (TRBV5-4, TRBJ2-5)
CASSPVSQETQYF

SEQ ID NO: 262839 - protein, 14 aa, Homo sapiens
  CDR3 for alpha chain variable domain of TCR clone 131420 (TRAV26-1, TRAJ21)
CIVRPPYNFNKFYF

SEQ ID NO: 262840 - protein, 14 aa, Homo sapiens
  CDR3 for beta chain variable domain of TCR clone 131420 (TRBV11-3, TRBJ2-1)
CASSATTGGSIQFF

SEQ ID NO: 262841 - protein, 14 aa, Homo sapiens
  CDR3 for alpha chain variable domain of TCR clone 131421 (TRAV8-4, TRAJ13)
CAVTLSGGYQKVTF

SEQ ID NO: 262842 - protein, 12 aa, Homo sapiens
  CDR3 for beta chain variable domain of TCR clone 131421 (TRBV19, TRBJ2-7)
CASTDRGYEQYF

SEQ ID NO: 262843 - protein, 16 aa, Homo sapiens
  CDR3 for alpha chain variable domain of TCR clone 131422 (TRAV3, TRAJ21)
CAVRDIERGNFNKFYF

SEQ ID NO: 262844 - protein, 15 aa, Homo sapiens
  CDR3 for beta chain variable domain of TCR clone 131422 (TRBV11-2, TRBJ2-2)
CASSSDRVNAGELFF

SEQ ID NO: 262845 - protein, 14 aa, Homo sapiens
  CDR3 for alpha chain variable domain of TCR clone 131423 (TRAV35, TRAJ42)
CAGRYGGSQGNLIF

SEQ ID NO: 262846 - protein, 15 aa, Homo sapiens
  CDR3 for beta chain variable domain of TCR clone 131423 (TRBV5-1, TRBJ2-2)
CASSSQGGNTGELFF

SEQ ID NO: 262847 - protein, 14 aa, Homo sapiens
  CDR3 for alpha chain variable domain of TCR clone 131424 (TRAV1-2, TRAJ16)
CAVNRFSDGQKLLF

SEQ ID NO: 262848 - protein, 13 aa, Homo sapiens
  CDR3 for beta chain variable domain of TCR clone 131424 (TRBV7-2, TRBJ1-5)
CASSLAPDQPQHF

SEQ ID NO: 262849 - protein, 14 aa, Homo sapiens
  CDR3 for alpha chain variable domain of TCR clone 131425 (TRAV12-2, TRAJ10)
CAVKKTGGYQKVTF

SEQ ID NO: 262850 - protein, 12 aa, Homo sapiens
  CDR3 for beta chain variable domain of TCR clone 131425 (TRBV7-8, TRBJ2-7)
CASSLGDREQYF

SEQ ID NO: 262851 - protein, 16 aa, Homo sapiens
  CDR3 for alpha chain variable domain of TCR clone 131426 (TRAV30, TRAJ24)
CGTEIVDADSWGKFQF

SEQ ID NO: 262852 - protein, 11 aa, Homo sapiens
  CDR3 for beta chain variable domain of TCR clone 131426 (TRBV19, TRBJ1-1)
CASSIGSEAFL

SEQ ID NO: 262853 - protein, 15 aa, Homo sapiens
  CDR3 for alpha chain variable domain of TCR clone 131427 (TRAV12-1, TRAJ4)
CVVNPFSGGYNKLIF

SEQ ID NO: 262854 - protein, 13 aa, Homo sapiens
  CDR3 for beta chain variable domain of TCR clone 131427 (TRBV7-9, TRBJ1-2)
CASSLKQNYGYTF

SEQ ID NO: 262855 - protein, 14 aa, Homo sapiens
  CDR3 for alpha chain variable domain of TCR clone 131428 (TRAV35, TRAJ22)
CAGRRPGSARQLTF

SEQ ID NO: 262856 - protein, 15 aa, Homo sapiens
  CDR3 for beta chain variable domain of TCR clone 131428 (TRBV12-4, TRBJ2-5)
CASSPPTGLQETQYF

SEQ ID NO: 262857 - protein, 16 aa, Homo sapiens
  CDR3 for alpha chain variable domain of TCR clone 131429 (TRAV3, TRAJ37)
CAVRPHGSGNTGKLIF

SEQ ID NO: 262858 - protein, 13 aa, Homo sapiens
  CDR3 for beta chain variable domain of TCR clone 131429 (TRBV2, TRBJ1-5)
CATAGPGNQPQHF

SEQ ID NO: 262859 - protein, 14 aa, Homo sapiens
  CDR3 for alpha chain variable domain of TCR clone 131430 (TRAV2, TRAJ9)
CAVEDRSGGFKTIF

SEQ ID NO: 262860 - protein, 16 aa, Homo sapiens
  CDR3 for beta chain variable domain of TCR clone 131430 (TRBV10-3, TRBJ1-6)
CAISERRGQGNSPLHF

SEQ ID NO: 262861 - protein, 10 aa, Homo sapiens
  CDR3 for alpha chain variable domain of TCR clone 131431 (TRAV23/DV6, TRAJ57)
CAASSTLCQG

SEQ ID NO: 262862 - protein, 14 aa, Homo sapiens
  CDR3 for beta chain variable domain of TCR clone 131431 (TRBV25-1, TRBJ1-1)
CASTHLGGNTEAFF

SEQ ID NO: 262863 - protein, 15 aa, Homo sapiens
  CDR3 for alpha chain variable domain of TCR clone 131432 (TRAV3, TRAJ17)
CAVRDTGAAGNKLTF

SEQ ID NO: 262864 - protein, 17 aa, Homo sapiens
  CDR3 for beta chain variable domain of TCR clone 131432 (TRBV7-8, TRBJ2-6)
CASSAGTGGAGANVLTF

SEQ ID NO: 262865 - protein, 13 aa, Homo sapiens
  CDR3 for alpha chain variable domain of TCR clone 131433 (TRAV38-2/DV8, TRAJ34)
CAYRNYNTDKLIF

SEQ ID NO: 262866 - protein, 15 aa, Homo sapiens
  CDR3 for beta chain variable domain of TCR clone 131433 (TRBV20-1, TRBJ2-5)
CSAEGTGGLQKTQYF

SEQ ID NO: 262867 - protein, 16 aa, Homo sapiens
  CDR3 for alpha chain variable domain of TCR clone 131434 (TRAV30, TRAJ24)
CGTEIVDADRWGKFQF

SEQ ID NO: 262868 - protein, 13 aa, Homo sapiens
  CDR3 for beta chain variable domain of TCR clone 131434 (TRBV18, TRBJ1-2)
CASSASATEGYTF

SEQ ID NO: 262869 - protein, 11 aa, Homo sapiens
  CDR3 for alpha chain variable domain of TCR clone 131435 (TRAV12-1, TRAJ30)
CVVNGQDKTIF

SEQ ID NO: 262870 - protein, 12 aa, Homo sapiens
  CDR3 for beta chain variable domain of TCR clone 131435 (TRBV27, TRBJ2-2)
CASKLFTGELFF

SEQ ID NO: 262871 - protein, 15 aa, Homo sapiens
  CDR3 for alpha chain variable domain of TCR clone 131436 (TRAV35, TRAJ58)
CAGRRQETSGSRLTF

SEQ ID NO: 262872 - protein, 11 aa, Homo sapiens
  CDR3 for beta chain variable domain of TCR clone 131436 (TRBV11-2, TRBJ1-1)
CASSINTEAFV

SEQ ID NO: 262873 - protein, 17 aa, Homo sapiens
  CDR3 for alpha chain variable domain of TCR clone 131437 (TRAV20, TRAJ57)
CAVQAIVAQVGSEKLVF

SEQ ID NO: 262874 - protein, 13 aa, Homo sapiens
  CDR3 for beta chain variable domain of TCR clone 131437 (TRBV20-1, TRBJ2-5)
CSAFVGGGETQYF

SEQ ID NO: 262875 - protein, 11 aa, Homo sapiens
  CDR3 for alpha chain variable domain of TCR clone 131438 (TRAV21, TRAJ11)
CAVNGYSTPTF

SEQ ID NO: 262876 - protein, 16 aa, Homo sapiens
  CDR3 for beta chain variable domain of TCR clone 131438 (TRBV12-5, TRBJ2-5)
CASGPRTSGNQETQYF

SEQ ID NO: 262877 - protein, 15 aa, Homo sapiens
  CDR3 for alpha chain variable domain of TCR clone 131439 (TRAV12-1, TRAJ44)
CVADLPTGTASKLTF

SEQ ID NO: 262878 - protein, 13 aa, Homo sapiens
  CDR3 for beta chain variable domain of TCR clone 131439 (TRBV20-1, TRBJ2-5)
CSARGDYQETQYS

SEQ ID NO: 262879 - protein, 14 aa, Homo sapiens
  CDR3 for alpha chain variable domain of TCR clone 131440 (TRAV26-1, TRAJ45)
CIVRVVGGADGLTL

SEQ ID NO: 262880 - protein, 16 aa, Homo sapiens
  CDR3 for beta chain variable domain of TCR clone 131440 (TRBV7-9, TRBJ1-1)
CASSLTQVRSNTEAFF

SEQ ID NO: 262881 - protein, 15 aa, Homo sapiens
  CDR3 for alpha chain variable domain of TCR clone 131441 (TRAV27, TRAJ38)
CAARRNAGNNRKRIW

SEQ ID NO: 262882 - protein, 17 aa, Homo sapiens
  CDR3 for beta chain variable domain of TCR clone 131441 (TRBV20-1, TRBJ2-2)
CSASGSGQGGLTGELFF

SEQ ID NO: 262883 - protein, 17 aa, Homo sapiens
  CDR3 for alpha chain variable domain of TCR clone 131442 (TRAV3, TRAJ42)
CAVRDRDYGGSQGNLIF

SEQ ID NO: 262884 - protein, 13 aa, Homo sapiens
  CDR3 for beta chain variable domain of TCR clone 131442 (TRBV20-1, TRBJ1-1)
CSARVGGNTEAFF

SEQ ID NO: 262885 - protein, 15 aa, Homo sapiens
  CDR3 for alpha chain variable domain of TCR clone 131443 (TRAV8-3, TRAJ27)
CAVGPSMTNAGKSTF

SEQ ID NO: 262886 - protein, 15 aa, Homo sapiens
  CDR3 for beta chain variable domain of TCR clone 131443 (TRBV7-2, TRBJ2-1)
CASSSGLAGGNEQFF

SEQ ID NO: 262887 - protein, 17 aa, Homo sapiens
  CDR3 for alpha chain variable domain of TCR clone 131444 (TRAV1-2, TRAJ37)
CAVRVGRGSGNTGKLIF

SEQ ID NO: 262888 - protein, 17 aa, Homo sapiens
  CDR3 for beta chain variable domain of TCR clone 131444 (TRBV24-1, TRBJ1-2)
CATSDPRQGVLSGGYTF

SEQ ID NO: 262889 - protein, 15 aa, Homo sapiens
  CDR3 for alpha chain variable domain of TCR clone 131445 (TRAV13-2, TRAJ58)
CVTAQKEASGSRLTF

SEQ ID NO: 262890 - protein, 17 aa, Homo sapiens
  CDR3 for beta chain variable domain of TCR clone 131445 (TRBV24-1, TRBJ2-7)
CATRKGLAGGHSYEQYF

SEQ ID NO: 262891 - protein, 18 aa, Homo sapiens
  CDR3 for alpha chain variable domain of TCR clone 131446 (TRAV26-2, TRAJ45)
CILRVDKYSGGGADGLTF

SEQ ID NO: 262892 - protein, 14 aa, Homo sapiens
  CDR3 for beta chain variable domain of TCR clone 131446 (TRBV7-2, TRBJ2-7)
CANRSQGAAYEQYF

SEQ ID NO: 262893 - protein, 16 aa, Homo sapiens
  CDR3 for alpha chain variable domain of TCR clone 131447 (TRAV26-1, TRAJ36)
CIVRAIGRSGANNLFF

SEQ ID NO: 262894 - protein, 14 aa, Homo sapiens
  CDR3 for beta chain variable domain of TCR clone 131447 (TRBV25-1, TRBJ2-1)
CASSKTGGCNEQFF

SEQ ID NO: 262895 - protein, 14 aa, Homo sapiens
  CDR3 for alpha chain variable domain of TCR clone 131448 (TRAV8-3, TRAJ4)
CAVGAAGGYNKLIF

SEQ ID NO: 262896 - protein, 15 aa, Homo sapiens
  CDR3 for beta chain variable domain of TCR clone 131448 (TRBV6-5, TRBJ2-1)
CASRYDAGAGNEQFF

SEQ ID NO: 262897 - protein, 14 aa, Homo sapiens
  CDR3 for alpha chain variable domain of TCR clone 131449 (TRAV8-2, TRAJ23)
CVVTAYNQGGKLIF

SEQ ID NO: 262898 - protein, 15 aa, Homo sapiens
  CDR3 for beta chain variable domain of TCR clone 131449 (TRBV12-4, TRBJ1-1)
CASSLAVSRGAEAFF

SEQ ID NO: 262899 - protein, 15 aa, Homo sapiens
  CDR3 for alpha chain variable domain of TCR clone 131450 (TRAV8-4, TRAJ10)
CAGSDGPGGGNKLTF

SEQ ID NO: 262900 - protein, 13 aa, Homo sapiens
  CDR3 for beta chain variable domain of TCR clone 131450 (TRBV28, TRBJ1-3)
CASSFLGSGTIYF

SEQ ID NO: 262901 - protein, 14 aa, Homo sapiens
  CDR3 for alpha chain variable domain of TCR clone 131451 (TRAV12-2, TRAJ9)
CAVNALEGGFKPIF

SEQ ID NO: 262902 - protein, 16 aa, Homo sapiens
  CDR3 for beta chain variable domain of TCR clone 131451 (TRBV19, TRBJ1-6)
CASSVAPVAGNSPLHF

SEQ ID NO: 262903 - protein, 12 aa, Homo sapiens
  CDR3 for alpha chain variable domain of TCR clone 131452 (TRAV12-3, TRAJ17)
CAMTLTGNKLTF

SEQ ID NO: 262904 - protein, 14 aa, Homo sapiens
  CDR3 for beta chain variable domain of TCR clone 131452 (TRBV19, TRBJ2-1)
CASSRLASINEQFF

SEQ ID NO: 262905 - protein, 14 aa, Homo sapiens
  CDR3 for alpha chain variable domain of TCR clone 131453 (TRAV3, TRAJ36)
CAVRDGTGANNIFF

SEQ ID NO: 262906 - protein, 16 aa, Homo sapiens
  CDR3 for beta chain variable domain of TCR clone 131453 (TRBV7-3, TRBJ2-5)
CASIQPGGSVQETQYF

SEQ ID NO: 262907 - protein, 15 aa, Homo sapiens
  CDR3 for alpha chain variable domain of TCR clone 131454 (TRAV35, TRAJ40)
CAGQLWDSGTYNYIF

SEQ ID NO: 262908 - protein, 12 aa, Homo sapiens
  CDR3 for beta chain variable domain of TCR clone 131454 (TRBV7-8, TRBJ2-7)
CASSLAGYEQYF

SEQ ID NO: 262909 - protein, 14 aa, Homo sapiens
  CDR3 for alpha chain variable domain of TCR clone 131455 (TRAV23/DV6, TRAJ4)
CAANLSGGYNKLIF

SEQ ID NO: 262910 - protein, 17 aa, Homo sapiens
  CDR3 for beta chain variable domain of TCR clone 131455 (TRBV4-1, TRBJ1-3)
CASSTQRGIRFGNTIYF

SEQ ID NO: 262911 - protein, 16 aa, Homo sapiens
  CDR3 for alpha chain variable domain of TCR clone 131456 (TRAV4, TRAJ22)
CLVCDLYSGSARQLTF

SEQ ID NO: 262912 - protein, 16 aa, Homo sapiens
  CDR3 for beta chain variable domain of TCR clone 131456 (TRBV7-9, TRBJ2-3)
CASSPWREVGTDTQYF

SEQ ID NO: 262913 - protein, 13 aa, Homo sapiens
  CDR3 for alpha chain variable domain of TCR clone 131457 (TRAV2, TRAJ40)
CAVVTSGTYKYIF

SEQ ID NO: 262914 - protein, 14 aa, Homo sapiens
  CDR3 for beta chain variable domain of TCR clone 131457 (TRBV19, TRBJ2-7)
CASNFRDTFTGMYF

SEQ ID NO: 262915 - protein, 15 aa, Homo sapiens
  CDR3 for alpha chain variable domain of TCR clone 131458 (TRAV12-1, TRAJ44)
CVADLPTGTASKLTF

SEQ ID NO: 262916 - protein, 13 aa, Homo sapiens
  CDR3 for beta chain variable domain of TCR clone 131458 (TRBV19, TRBJ1-2)
CASSVPGQDGYTF

SEQ ID NO: 262917 - protein, 15 aa, Homo sapiens
  CDR3 for alpha chain variable domain of TCR clone 131459 (TRAV1-2, TRAJ18)
CAVRGEAQPWGGYTF

SEQ ID NO: 262918 - protein, 13 aa, Homo sapiens
  CDR3 for beta chain variable domain of TCR clone 131459 (TRBV20-1, TRBJ1-1)
CSARVGGNTEAFF

SEQ ID NO: 262919 - protein, 14 aa, Homo sapiens
  CDR3 for alpha chain variable domain of TCR clone 131460 (TRAV12-2, TRAJ13)
CAVKKTGGYQKVTF

SEQ ID NO: 262920 - protein, 16 aa, Homo sapiens
  CDR3 for beta chain variable domain of TCR clone 131460 (TRBV25-1, TRBJ1-1)
CASSGDRDRGRIEAFF

SEQ ID NO: 262921 - protein, 14 aa, Homo sapiens
  CDR3 for alpha chain variable domain of TCR clone 131461 (TRAV8-4, TRAJ54)
CAVSEVLGAQKLVF

SEQ ID NO: 262922 - protein, 17 aa, Homo sapiens
  CDR3 for beta chain variable domain of TCR clone 131461 (TRBV4-1, TRBJ1-4)
CASSHEGPRGVEEKLFF

SEQ ID NO: 262923 - protein, 16 aa, Homo sapiens
  CDR3 for alpha chain variable domain of TCR clone 131462 (TRAV30, TRAJ24)
CGTEIVDADSWGKFQF

SEQ ID NO: 262924 - protein, 14 aa, Homo sapiens
  CDR3 for beta chain variable domain of TCR clone 131462 (TRBV7-2, TRBJ2-7)
CASSPKTSYYEQYF

SEQ ID NO: 262925 - protein, 15 aa, Homo sapiens
  CDR3 for alpha chain variable domain of TCR clone 131463 (TRAV27, TRAJ17)
CRSTMIKAAGNKLTF

SEQ ID NO: 262926 - protein, 12 aa, Homo sapiens
  CDR3 for beta chain variable domain of TCR clone 131463 (TRBV2, TRBJ2-1)
CAKREGYNEQFF

SEQ ID NO: 262927 - protein, 16 aa, Homo sapiens
  CDR3 for alpha chain variable domain of TCR clone 131464 (TRAV8-3, TRAJ13)
CAVGAYPSGGYQKVTF

SEQ ID NO: 262928 - protein, 15 aa, Homo sapiens
  CDR3 for beta chain variable domain of TCR clone 131464 (TRBV12-4, TRBJ2-5)
CASSPPTGLQETQYF

SEQ ID NO: 262929 - protein, 15 aa, Homo sapiens
  CDR3 for alpha chain variable domain of TCR clone 131465 (TRAV35, TRAJ23)
CAGQRGYNQGGKLIF

SEQ ID NO: 262930 - protein, 16 aa, Homo sapiens
  CDR3 for beta chain variable domain of TCR clone 131465 (TRBV27, TRBJ2-1)
CASSSRLAGDYNEQFF

SEQ ID NO: 262931 - protein, 11 aa, Homo sapiens
  CDR3 for alpha chain variable domain of TCR clone 131466 (TRAV12-1, TRAJ26)
CVLAYGQNFVF

SEQ ID NO: 262932 - protein, 15 aa, Homo sapiens
  CDR3 for beta chain variable domain of TCR clone 131466 (TRBV12-4, TRBJ2-5)
CASSGTGQAQETQYF

SEQ ID NO: 262933 - protein, 13 aa, Homo sapiens
  CDR3 for alpha chain variable domain of TCR clone 131467 (TRAV20, TRAJ34)
CAVSSYNTDKLIF

SEQ ID NO: 262934 - protein, 13 aa, Homo sapiens
  CDR3 for beta chain variable domain of TCR clone 131467 (TRBV7-9, TRBJ1-2)
CASSLKQNDGYTF

SEQ ID NO: 262935 - protein, 23 aa, Homo sapiens
  CDR3 for alpha chain variable domain of TCR clone 131468 (TRAV12-2, TRAJ36)
SLLIRDSQPSDSATLERANNLFF

SEQ ID NO: 262936 - protein, 16 aa, Homo sapiens
  CDR3 for beta chain variable domain of TCR clone 131468 (TRBV19, TRBJ2-1)
CASSKAGPSSYNEQFF

SEQ ID NO: 262937 - protein, 12 aa, Homo sapiens
  CDR3 for alpha chain variable domain of TCR clone 131469 (TRAV12-3, TRAJ40)
CAMSSGTYKYIF

SEQ ID NO: 262938 - protein, 17 aa, Homo sapiens
  CDR3 for beta chain variable domain of TCR clone 131469 (TRBV11-2, TRBJ2-1)
CASSLYPPGVEYNEQFF

SEQ ID NO: 262939 - protein, 14 aa, Homo sapiens
  CDR3 for alpha chain variable domain of TCR clone 131470 (TRAV13-2, TRAJ17)
CAENSKAAGNKLTF

SEQ ID NO: 262940 - protein, 14 aa, Homo sapiens
  CDR3 for beta chain variable domain of TCR clone 131470 (TRBV19, TRBJ1-1)
CASSSPGRTTEAFF

SEQ ID NO: 262941 - protein, 18 aa, Homo sapiens
  CDR3 for alpha chain variable domain of TCR clone 131471 (TRAV13-1, TRAJ52)
CAAKNPNAGGTSYGKLTF

SEQ ID NO: 262942 - protein, 15 aa, Homo sapiens
  CDR3 for beta chain variable domain of TCR clone 131471 (TRBV5-1, TRBJ2-2)
CASSSQGGNTGELFF

SEQ ID NO: 262943 - protein, 13 aa, Homo sapiens
  CDR3 for alpha chain variable domain of TCR clone 131472 (TRAV12-1, TRAJ26)
CVVRRNYGQNFVF

SEQ ID NO: 262944 - protein, 14 aa, Homo sapiens
  CDR3 for beta chain variable domain of TCR clone 131472 (TRBV4-2, TRBJ2-1)
CASGLDRAYNAQFF

SEQ ID NO: 262945 - protein, 13 aa, Homo sapiens
  CDR3 for alpha chain variable domain of TCR clone 131473 (TRAV29/DV5, TRAJ31)
CAASRNDNARLMF

SEQ ID NO: 262946 - protein, 13 aa, Homo sapiens
  CDR3 for beta chain variable domain of TCR clone 131473 (TRBV7-2, TRBJ2-4)
CASSREHANIQYF

SEQ ID NO: 262947 - protein, 15 aa, Homo sapiens
  CDR3 for alpha chain variable domain of TCR clone 131474 (TRAV3, TRAJ20)
CAVRDIKLSDYKLSF

SEQ ID NO: 262948 - protein, 16 aa, Homo sapiens
  CDR3 for beta chain variable domain of TCR clone 131474 (TRBV7-2, TRBJ2-6)
CASSLAGRSGANVLTF

SEQ ID NO: 262949 - protein, 12 aa, Homo sapiens
  CDR3 for alpha chain variable domain of TCR clone 131475 (TRAV2, TRAJ8)
CAVGQGFQKLVF

SEQ ID NO: 262950 - protein, 14 aa, Homo sapiens
  CDR3 for beta chain variable domain of TCR clone 131475 (TRBV18, TRBJ2-7)
CASSPRGGAYEQYF

SEQ ID NO: 262951 - protein, 14 aa, Homo sapiens
  CDR3 for alpha chain variable domain of TCR clone 131476 (TRAV29/DV5, TRAJ45)
CAASFRGGADGLTF

SEQ ID NO: 262952 - protein, 13 aa, Homo sapiens
  CDR3 for beta chain variable domain of TCR clone 131476 (TRBV10-3, TRBJ2-7)
CASKLAVNYEQYF

SEQ ID NO: 262953 - protein, 11 aa, Homo sapiens
  CDR3 for alpha chain variable domain of TCR clone 131477 (TRAV2, TRAJ13)
CASGGYQKVTF

SEQ ID NO: 262954 - protein, 17 aa, Homo sapiens
  CDR3 for beta chain variable domain of TCR clone 131477 (TRBV28, TRBJ2-5)
CASSRQGGLAGAETQYF

SEQ ID NO: 262955 - protein, 14 aa, Homo sapiens
  CDR3 for alpha chain variable domain of TCR clone 131478 (TRAV17, TRAJ54)
CATDANQGAQELVF

SEQ ID NO: 262956 - protein, 15 aa, Homo sapiens
  CDR3 for beta chain variable domain of TCR clone 131478 (TRBV6-1, TRBJ2-1)
CASSEAAYSYNEQFF

SEQ ID NO: 262957 - protein, 13 aa, Homo sapiens
  CDR3 for alpha chain variable domain of TCR clone 131479 (TRAV35, TRAJ57)
CWSPQGGSEKLVF

SEQ ID NO: 262958 - protein, 14 aa, Homo sapiens
  CDR3 for beta chain variable domain of TCR clone 131479 (TRBV24-1, TRBJ1-1)
CATSIPRGDTEAFF

SEQ ID NO: 262959 - protein, 13 aa, Homo sapiens
  CDR3 for alpha chain variable domain of TCR clone 131480 (TRAV1-2, TRAJ31)
CAVRPNNNARLMF

SEQ ID NO: 262960 - protein, 14 aa, Homo sapiens
  CDR3 for beta chain variable domain of TCR clone 131480 (TRBV11-2, TRBJ2-1)
CASSLSEPYNEQFF

SEQ ID NO: 262961 - protein, 16 aa, Homo sapiens
  CDR3 for alpha chain variable domain of TCR clone 131481 (TRAV16, TRAJ52)
CALSAAGGTSYVKLTF

SEQ ID NO: 262962 - protein, 12 aa, Homo sapiens
  CDR3 for beta chain variable domain of TCR clone 131481 (TRBV12-4, TRBJ1-3)
CASSFSGNTIYF

SEQ ID NO: 262963 - protein, 14 aa, Homo sapiens
  CDR3 for alpha chain variable domain of TCR clone 131482 (TRAV29/DV5, TRAJ57)
CAARSQGGSEKLVF

SEQ ID NO: 262964 - protein, 15 aa, Homo sapiens
  CDR3 for beta chain variable domain of TCR clone 131482 (TRBV28, TRBJ2-4)
CAAGSGTLLMGSQYF

SEQ ID NO: 262965 - protein, 16 aa, Homo sapiens
  CDR3 for alpha chain variable domain of TCR clone 131483 (TRAV12-3, TRAJ53)
CAMSPGSGGSNYKLTF

SEQ ID NO: 262966 - protein, 14 aa, Homo sapiens
  CDR3 for beta chain variable domain of TCR clone 131483 (TRBV7-3, TRBJ2-1)
CASSLAGGTNEQFF

SEQ ID NO: 262967 - protein, 16 aa, Homo sapiens
  CDR3 for alpha chain variable domain of TCR clone 131484 (TRAV30, TRAJ24)
CGTEIVGADSWGKFQF

SEQ ID NO: 262968 - protein, 18 aa, Homo sapiens
  CDR3 for beta chain variable domain of TCR clone 131484 (TRBV11-2, TRBJ2-6)
CASSLNPFLGTGANVLTF

SEQ ID NO: 262969 - protein, 16 aa, Homo sapiens
  CDR3 for alpha chain variable domain of TCR clone 131485 (TRAV12-3, TRAJ53)
CAMSPGSGGSNYKLTF

SEQ ID NO: 262970 - protein, 12 aa, Homo sapiens
  CDR3 for beta chain variable domain of TCR clone 131485 (TRBV5-7, TRBJ1-2)
CASSLVQNGYTF

SEQ ID NO: 262971 - protein, 14 aa, Homo sapiens
  CDR3 for alpha chain variable domain of TCR clone 131486 (TRAV12-2, TRAJ15)
CAPHTGQAGTALIF

SEQ ID NO: 262972 - protein, 16 aa, Homo sapiens
  CDR3 for beta chain variable domain of TCR clone 131486 (TRBV27, TRBJ2-2)
CASSFRGLVRTGELFF

SEQ ID NO: 262973 - protein, 15 aa, Homo sapiens
  CDR3 for alpha chain variable domain of TCR clone 131487 (TRAV21, TRAJ52)
CAVRGGGTSYGKLTF

SEQ ID NO: 262974 - protein, 15 aa, Homo sapiens
  CDR3 for beta chain variable domain of TCR clone 131487 (TRBV18, TRBJ1-5)
CASSPSDRSNQPQHV

SEQ ID NO: 262975 - protein, 13 aa, Homo sapiens
  CDR3 for alpha chain variable domain of TCR clone 131488 (TRAV2, TRAJ22)
CCGRGGSARQLTF

SEQ ID NO: 262976 - protein, 12 aa, Homo sapiens
  CDR3 for beta chain variable domain of TCR clone 131488 (TRBV19, TRBJ2-1)
CASSMQDTEQFF

SEQ ID NO: 262977 - protein, 16 aa, Homo sapiens
  CDR3 for alpha chain variable domain of TCR clone 131489 (TRAV3, TRAJ34)
CAVRARGTPTSASLGL

SEQ ID NO: 262978 - protein, 15 aa, Homo sapiens
  CDR3 for beta chain variable domain of TCR clone 131489 (TRBV6-3, TRBJ2-7)
CASSSPGTVFYEQYF

SEQ ID NO: 262979 - protein, 15 aa, Homo sapiens
  CDR3 for alpha chain variable domain of TCR clone 131490 (TRAV8-3, TRAJ45)
CASSYSGGGADGLTF

SEQ ID NO: 262980 - protein, 15 aa, Homo sapiens
  CDR3 for beta chain variable domain of TCR clone 131490 (TRBV27, TRBJ1-4)
CASSPRHATNENLFF

SEQ ID NO: 262981 - protein, 15 aa, Homo sapiens
  CDR3 for alpha chain variable domain of TCR clone 131491 (TRAV23/DV6, TRAJ38)
CAARSNAGNNRKLIW

SEQ ID NO: 262982 - protein, 16 aa, Homo sapiens
  CDR3 for beta chain variable domain of TCR clone 131491 (TRBV10-2, TRBJ1-5)
CASSRDRDYSNQPPHF

SEQ ID NO: 262983 - protein, 15 aa, Homo sapiens
  CDR3 for alpha chain variable domain of TCR clone 131492 (TRAV12-2, TRAJ43)
CAFDMRFRAGTRLTV

SEQ ID NO: 262984 - protein, 18 aa, Homo sapiens
  CDR3 for beta chain variable domain of TCR clone 131492 (TRBV20-1, TRBJ2-3)
CSASGLAGGPGTTDTQYF

SEQ ID NO: 262985 - protein, 14 aa, Homo sapiens
  CDR3 for alpha chain variable domain of TCR clone 131493 (TRAV8-3, TRAJ4)
CAVGAAGGYNKLIF

SEQ ID NO: 262986 - protein, 15 aa, Homo sapiens
  CDR3 for beta chain variable domain of TCR clone 131493 (TRBV6-5, TRBJ2-1)
CACSYDAGAGNEQFF

SEQ ID NO: 262987 - protein, 14 aa, Homo sapiens
  CDR3 for alpha chain variable domain of TCR clone 131494 (TRAV1-2, TRAJ15)
CAVRDRQAGTALIF

SEQ ID NO: 262988 - protein, 16 aa, Homo sapiens
  CDR3 for beta chain variable domain of TCR clone 131494 (TRBV12-5, TRBJ2-5)
CASGPRTSGNQETQYF

SEQ ID NO: 262989 - protein, 15 aa, Homo sapiens
  CDR3 for alpha chain variable domain of TCR clone 131495 (TRAV26-1, TRAJ37)
CIVRLGSGNTGKLIF

SEQ ID NO: 262990 - protein, 14 aa, Homo sapiens
  CDR3 for beta chain variable domain of TCR clone 131495 (TRBV19, TRBJ2-1)
CASPTFVLSGEQFF

SEQ ID NO: 262991 - protein, 13 aa, Homo sapiens
  CDR3 for alpha chain variable domain of TCR clone 131496 (TRAV3, TRAJ27)
CAVRPLGAGKSTF

SEQ ID NO: 262992 - protein, 14 aa, Homo sapiens
  CDR3 for beta chain variable domain of TCR clone 131496 (TRBV18, TRBJ1-2)
CASSLNRENYGYTF

SEQ ID NO: 262993 - protein, 11 aa, Homo sapiens
  CDR3 for alpha chain variable domain of TCR clone 131497 (TRAV3, TRAJ21)
CAVGNFNKFYF

SEQ ID NO: 262994 - protein, 20 aa, Homo sapiens
  CDR3 for beta chain variable domain of TCR clone 131497 (TRBV3-1, TRBJ2-6)
CASSPRPGLEGGAGANVLTF

SEQ ID NO: 262995 - protein, 23 aa, Homo sapiens
  CDR3 for alpha chain variable domain of TCR clone 131498 (TRAV12-1, TRAJ20)
CSSETPSSVIQPPTSAENYKLSF

SEQ ID NO: 262996 - protein, 12 aa, Homo sapiens
  CDR3 for beta chain variable domain of TCR clone 131498 (TRBV11-2, TRBJ2-2)
CASSLGGGELFF

SEQ ID NO: 262997 - protein, 13 aa, Homo sapiens
  CDR3 for alpha chain variable domain of TCR clone 131499 (TRAV12-3, TRAJ43)
CAMIRPNNNDMRF

SEQ ID NO: 262998 - protein, 13 aa, Homo sapiens
  CDR3 for beta chain variable domain of TCR clone 131499 (TRBV13, TRBJ2-1)
CASILGGRGEQFF

SEQ ID NO: 262999 - protein, 13 aa, Homo sapiens
  CDR3 for alpha chain variable domain of TCR clone 131500 (TRAV1-1, TRAJ23)
CAVVANQGGKLIF

SEQ ID NO: 263000 - protein, 14 aa, Homo sapiens
  CDR3 for beta chain variable domain of TCR clone 131500 (TRBV19, TRBJ2-1)
CASPTFVLSGEQFF

SEQ ID NO: 263001 - protein, 13 aa, Homo sapiens
  CDR3 for alpha chain variable domain of TCR clone 131501 (TRAV1-2, TRAJ31)
CAVRGYNNARLMF

SEQ ID NO: 263002 - protein, 15 aa, Homo sapiens
  CDR3 for beta chain variable domain of TCR clone 131501 (TRBV5-7, TRBJ2-7)
CASSLGPGRGNEQYF

SEQ ID NO: 263003 - protein, 15 aa, Homo sapiens
  CDR3 for alpha chain variable domain of TCR clone 131502 (TRAV26-1, TRAJ29)
CIVRVEGSGNTPLVF

SEQ ID NO: 263004 - protein, 15 aa, Homo sapiens
  CDR3 for beta chain variable domain of TCR clone 131502 (TRBV5-1, TRBJ2-1)
CASKGLAGVYNEQFF

SEQ ID NO: 263005 - protein, 15 aa, Homo sapiens
  CDR3 for alpha chain variable domain of TCR clone 131503 (TRAV17, TRAJ13)
CATDAGSGGYQKVTF

SEQ ID NO: 263006 - protein, 17 aa, Homo sapiens
  CDR3 for beta chain variable domain of TCR clone 131503 (TRBV11-2, TRBJ2-1)
CASSLYPPVVEYNEQFF

SEQ ID NO: 263007 - protein, 13 aa, Homo sapiens
  CDR3 for alpha chain variable domain of TCR clone 131504 (TRAV8-2, TRAJ9)
CVVRATGGFKTIF

SEQ ID NO: 263008 - protein, 16 aa, Homo sapiens
  CDR3 for beta chain variable domain of TCR clone 131504 (TRBV11-2, TRBJ1-2)
CASSLDTGGADYGYTF

SEQ ID NO: 263009 - protein, 13 aa, Homo sapiens
  CDR3 for alpha chain variable domain of TCR clone 131505 (TRAV8-3, TRAJ4)
WVFYSGGYNKLLF

SEQ ID NO: 263010 - protein, 16 aa, Homo sapiens
  CDR3 for beta chain variable domain of TCR clone 131505 (TRBV7-8, TRBJ2-3)
CASSTEGQRETDTQYF

SEQ ID NO: 263011 - protein, 14 aa, Homo sapiens
  CDR3 for alpha chain variable domain of TCR clone 131506 (TRAV12-3, TRAJ10)
SHLPLTGGGNKLTF

SEQ ID NO: 263012 - protein, 13 aa, Homo sapiens
  CDR3 for beta chain variable domain of TCR clone 131506 (TRBV7-9, TRBJ2-3)
CASSPGATDTQYF

SEQ ID NO: 263013 - protein, 14 aa, Homo sapiens
  CDR3 for alpha chain variable domain of TCR clone 131507 (TRAV1-2, TRAJ16)
CAVNRFSDGQELLF

SEQ ID NO: 263014 - protein, 16 aa, Homo sapiens
  CDR3 for beta chain variable domain of TCR clone 131507 (TRBV29-1, TRBJ2-7)
CSVEVVGTSGSYEQYF

SEQ ID NO: 263015 - protein, 14 aa, Homo sapiens
  CDR3 for alpha chain variable domain of TCR clone 131508 (TRAV12-2, TRAJ15)
CAPHTGQAGTALIF

SEQ ID NO: 263016 - protein, 15 aa, Homo sapiens
  CDR3 for beta chain variable domain of TCR clone 131508 (TRBV5-1, TRBJ2-1)
CASSPPRAPYNEQFF

SEQ ID NO: 263017 - protein, 16 aa, Homo sapiens
  CDR3 for alpha chain variable domain of TCR clone 131509 (TRAV30, TRAJ24)
CGTGIVDADSWGKFQF

SEQ ID NO: 263018 - protein, 15 aa, Homo sapiens
  CDR3 for beta chain variable domain of TCR clone 131509 (TRBV20-1, TRBJ2-4)
CSARDLTGGPNIQYF

SEQ ID NO: 263019 - protein, 11 aa, Homo sapiens
  CDR3 for alpha chain variable domain of TCR clone 131510 (TRAV2, TRAJ13)
CASGGYQKVTF

SEQ ID NO: 263020 - protein, 14 aa, Homo sapiens
  CDR3 for beta chain variable domain of TCR clone 131510 (TRBV6-1, TRBJ1-2)
CASSTGWPPTGYTF

SEQ ID NO: 263021 - protein, 12 aa, Homo sapiens
  CDR3 for alpha chain variable domain of TCR clone 131511 (TRAV1-1, TRAJ8)
CAGGTGFQKLVF

SEQ ID NO: 263022 - protein, 14 aa, Homo sapiens
  CDR3 for beta chain variable domain of TCR clone 131511 (TRBV7-2, TRBJ1-2)
CASSSQGAHYGYTF

SEQ ID NO: 263023 - protein, 16 aa, Homo sapiens
  CDR3 for alpha chain variable domain of TCR clone 131512 (TRAV30, TRAJ24)
CGTEIVDADSWGKFQF

SEQ ID NO: 263024 - protein, 15 aa, Homo sapiens
  CDR3 for beta chain variable domain of TCR clone 131512 (TRBV5-1, TRBJ1-1)
CASSSTTGTNTEAVF

SEQ ID NO: 263025 - protein, 20 aa, Homo sapiens
  CDR3 for alpha chain variable domain of TCR clone 131513 (TRAV1-2, TRAJ8)
CAVREDRLSETCIWNWHPTS

SEQ ID NO: 263026 - protein, 14 aa, Homo sapiens
  CDR3 for beta chain variable domain of TCR clone 131513 (TRBV29-1, TRBJ2-5)
CSVETSGSGETQYF

SEQ ID NO: 263027 - protein, 11 aa, Homo sapiens
  CDR3 for alpha chain variable domain of TCR clone 131514 (TRAV8-4, TRAJ34)
CAVSWTDKLIF

SEQ ID NO: 263028 - protein, 14 aa, Homo sapiens
  CDR3 for beta chain variable domain of TCR clone 131514 (TRBV7-9, TRBJ2-3)
CASSLEDGTDTQHF

SEQ ID NO: 263029 - protein, 15 aa, Homo sapiens
  CDR3 for alpha chain variable domain of TCR clone 131515 (TRAV21, TRAJ24)
CAARSSTDSWGKLQF

SEQ ID NO: 263030 - protein, 15 aa, Homo sapiens
  CDR3 for beta chain variable domain of TCR clone 131515 (TRBV7-3, TRBJ2-1)
CASSPTGGGEVEQFF

SEQ ID NO: 263031 - protein, 15 aa, Homo sapiens
  CDR3 for alpha chain variable domain of TCR clone 131516 (TRAV12-1, TRAJ4)
CVVNPLSGGYNKLIF

SEQ ID NO: 263032 - protein, 16 aa, Homo sapiens
  CDR3 for beta chain variable domain of TCR clone 131516 (TRBV5-1, TRBJ1-1)
CASSKTGTEVGTEAFF

SEQ ID NO: 263033 - protein, 16 aa, Homo sapiens
  CDR3 for alpha chain variable domain of TCR clone 131517 (TRAV17, TRAJ52)
CATDPMGGTSYGKLTF

SEQ ID NO: 263034 - protein, 13 aa, Homo sapiens
  CDR3 for beta chain variable domain of TCR clone 131517 (TRBV7-8, TRBJ2-7)
CASSFAGLYEQYF

SEQ ID NO: 263035 - protein, 13 aa, Homo sapiens
  CDR3 for alpha chain variable domain of TCR clone 131518 (TRAV13-2, TRAJ53)
CAENMGSNYKLTF

SEQ ID NO: 263036 - protein, 15 aa, Homo sapiens
  CDR3 for beta chain variable domain of TCR clone 131518 (TRBV7-2, TRBJ2-1)
CASTHGTGIYNEQFF

SEQ ID NO: 263037 - protein, 11 aa, Homo sapiens
  CDR3 for alpha chain variable domain of TCR clone 131519 (TRAV12-3, TRAJ27)
CAMANAGKSTF

SEQ ID NO: 263038 - protein, 13 aa, Homo sapiens
  CDR3 for beta chain variable domain of TCR clone 131519 (TRBV20-1, TRBJ1-1)
CSARVGGNTEAFY

SEQ ID NO: 263039 - protein, 13 aa, Homo sapiens
  CDR3 for alpha chain variable domain of TCR clone 131520 (TRAV8-1, TRAJ28)
CAVSGAGSYQLTF

SEQ ID NO: 263040 - protein, 14 aa, Homo sapiens
  CDR3 for beta chain variable domain of TCR clone 131520 (TRBV7-2, TRBJ2-2)
CASRGQGEAGELFF

SEQ ID NO: 263041 - protein, 14 aa, Homo sapiens
  CDR3 for alpha chain variable domain of TCR clone 131521 (TRAV12-2, TRAJ9)
CAVNMEGEGFKTIF

SEQ ID NO: 263042 - protein, 14 aa, Homo sapiens
  CDR3 for beta chain variable domain of TCR clone 131521 (TRBV2, TRBJ2-5)
CASSEVLAQETQYF

SEQ ID NO: 263043 - protein, 12 aa, Homo sapiens
  CDR3 for alpha chain variable domain of TCR clone 131522 (TRAV13-2, TRAJ23)
CAERHRGGKLIF

SEQ ID NO: 263044 - protein, 13 aa, Homo sapiens
  CDR3 for beta chain variable domain of TCR clone 131522 (TRBV2, TRBJ1-4)
CASSERAGEKLFF

SEQ ID NO: 263045 - protein, 14 aa, Homo sapiens
  CDR3 for alpha chain variable domain of TCR clone 131523 (TRAV16, TRAJ39)
CALSKNNAGNMLTF

SEQ ID NO: 263046 - protein, 11 aa, Homo sapiens
  CDR3 for beta chain variable domain of TCR clone 131523 (TRBV20-1, TRBJ2-1)
CSLSSGSEQFF

SEQ ID NO: 263047 - protein, 16 aa, Homo sapiens
  CDR3 for alpha chain variable domain of TCR clone 131524 (TRAV21, TRAJ52)
CDVTNAGGTSYGKLTF

SEQ ID NO: 263048 - protein, 16 aa, Homo sapiens
  CDR3 for beta chain variable domain of TCR clone 131524 (TRBV2, TRBJ2-1)
CASSVGGSLSYNEQFF

SEQ ID NO: 263049 - protein, 13 aa, Homo sapiens
  CDR3 for alpha chain variable domain of TCR clone 131525 (TRAV12-3, TRAJ16)
CAVQLSDGQKLLF

SEQ ID NO: 263050 - protein, 20 aa, Homo sapiens
  CDR3 for beta chain variable domain of TCR clone 131525 (TRBV7-8, TRBJ2-2)
CASSHLFPGPTIHITGELFF

SEQ ID NO: 263051 - protein, 14 aa, Homo sapiens
  CDR3 for alpha chain variable domain of TCR clone 131526 (TRAV38-1, TRAJ29)
CAFITPTGNTPLVF

SEQ ID NO: 263052 - protein, 14 aa, Homo sapiens
  CDR3 for beta chain variable domain of TCR clone 131526 (TRBV18, TRBJ2-7)
CASSPRGGAYEQYF

SEQ ID NO: 263053 - protein, 14 aa, Homo sapiens
  CDR3 for alpha chain variable domain of TCR clone 131527 (TRAV12-2, TRAJ13)
CAVKKTGGYQKVTF

SEQ ID NO: 263054 - protein, 15 aa, Homo sapiens
  CDR3 for beta chain variable domain of TCR clone 131527 (TRBV27, TRBJ2-1)
CPSSNGGGSSNEQFF

SEQ ID NO: 263055 - protein, 14 aa, Homo sapiens
  CDR3 for alpha chain variable domain of TCR clone 131528 (TRAV2, TRAJ9)
CAVEDRSGGLKTIF

SEQ ID NO: 263056 - protein, 14 aa, Homo sapiens
  CDR3 for beta chain variable domain of TCR clone 131528 (TRBV18, TRBJ2-7)
CASSPRGGAYEQYF

SEQ ID NO: 263057 - protein, 17 aa, Homo sapiens
  CDR3 for alpha chain variable domain of TCR clone 131529 (TRAV3, TRAJ42)
CVVRDRDYGGSQGNLIF

SEQ ID NO: 263058 - protein, 15 aa, Homo sapiens
  CDR3 for beta chain variable domain of TCR clone 131529 (TRBV6-6, TRBJ2-7)
CASSYSYGGSYEQYF

SEQ ID NO: 263059 - protein, 14 aa, Homo sapiens
  CDR3 for alpha chain variable domain of TCR clone 131530 (TRAV14/DV4, TRAJ15)
CAMRRDQAGTALIF

SEQ ID NO: 263060 - protein, 13 aa, Homo sapiens
  CDR3 for beta chain variable domain of TCR clone 131530 (TRBV2, TRBJ2-5)
CASGTPYQETQYF

SEQ ID NO: 263061 - protein, 12 aa, Homo sapiens
  CDR3 for alpha chain variable domain of TCR clone 131531 (TRAV13-2, TRAJ39)
CAENNAGNMLTF

SEQ ID NO: 263062 - protein, 13 aa, Homo sapiens
  CDR3 for beta chain variable domain of TCR clone 131531 (TRBV19, TRBJ1-1)
CASSPSNGGEDFF

SEQ ID NO: 263063 - protein, 12 aa, Homo sapiens
  CDR3 for alpha chain variable domain of TCR clone 131532 (TRAV12-3, TRAJ17)
CAMTLTGNKLTF

SEQ ID NO: 263064 - protein, 15 aa, Homo sapiens
  CDR3 for beta chain variable domain of TCR clone 131532 (TRBV27, TRBJ2-1)
CASSLARGAYNEQFF

SEQ ID NO: 263065 - protein, 14 aa, Homo sapiens
  CDR3 for alpha chain variable domain of TCR clone 131533 (TRAV8-3, TRAJ35)
CAVVPQGFGNVLHC

SEQ ID NO: 263066 - protein, 15 aa, Homo sapiens
  CDR3 for beta chain variable domain of TCR clone 131533 (TRBV7-3, TRBJ2-2)
CASSETGQGTGELFF

SEQ ID NO: 263067 - protein, 16 aa, Homo sapiens
  CDR3 for alpha chain variable domain of TCR clone 131534 (TRAV3, TRAJ37)
CAVRVRGSGNTGKLIF

SEQ ID NO: 263068 - protein, 15 aa, Homo sapiens
  CDR3 for beta chain variable domain of TCR clone 131534 (TRBV28, TRBJ2-1)
CASSIIAGGRSEQFF

SEQ ID NO: 263069 - protein, 14 aa, Homo sapiens
  CDR3 for alpha chain variable domain of TCR clone 131535 (TRAV1-2, TRAJ16)
CAVNRFSDGQKPLF

SEQ ID NO: 263070 - protein, 16 aa, Homo sapiens
  CDR3 for beta chain variable domain of TCR clone 131535 (TRBV7-3, TRBJ2-2)
CASSLKRGTLSGELFF

SEQ ID NO: 263071 - protein, 20 aa, Homo sapiens
  CDR3 for alpha chain variable domain of TCR clone 131536 (TRAV1-2, TRAJ34)
LLKELQMKDSASPNTDKLIF

SEQ ID NO: 263072 - protein, 22 aa, Homo sapiens
  CDR3 for beta chain variable domain of TCR clone 131536 (TRBV3-1, TRBJ2-5)
CASSQAGTSGGGERPSTSGQAR

SEQ ID NO: 263073 - protein, 13 aa, Homo sapiens
  CDR3 for alpha chain variable domain of TCR clone 131537 (TRAV20, TRAJ49)
CAVQARTGNQFYF

SEQ ID NO: 263074 - protein, 14 aa, Homo sapiens
  CDR3 for beta chain variable domain of TCR clone 131537 (TRBV5-1, TRBJ1-1)
CASSLQGASTEDFF

SEQ ID NO: 263075 - protein, 11 aa, Homo sapiens
  CDR3 for alpha chain variable domain of TCR clone 131538 (TRAV2, TRAJ33)
CAVESNYQLIW

SEQ ID NO: 263076 - protein, 15 aa, Homo sapiens
  CDR3 for beta chain variable domain of TCR clone 131538 (TRBV4-1, TRBJ2-5)
CASSQWDLYQETQYF

SEQ ID NO: 263077 - protein, 12 aa, Homo sapiens
  CDR3 for alpha chain variable domain of TCR clone 131539 (TRAV27, TRAJ13)
CAGAGGYQKVTL

SEQ ID NO: 263078 - protein, 15 aa, Homo sapiens
  CDR3 for beta chain variable domain of TCR clone 131539 (TRBV20-1, TRBJ2-6)
CSARDRGPGANVLTF

SEQ ID NO: 263079 - protein, 16 aa, Homo sapiens
  CDR3 for alpha chain variable domain of TCR clone 131540 (TRAV3, TRAJ37)
CAVRVGGSGNTGKLIF

SEQ ID NO: 263080 - protein, 11 aa, Homo sapiens
  CDR3 for beta chain variable domain of TCR clone 131540 (TRBV11-2, TRBJ2-2)
CASSLPGELFF

SEQ ID NO: 263081 - protein, 13 aa, Homo sapiens
  CDR3 for alpha chain variable domain of TCR clone 131541 (TRAV1-2, TRAJ11)
CAVRREGYSPLTF

SEQ ID NO: 263082 - protein, 14 aa, Homo sapiens
  CDR3 for beta chain variable domain of TCR clone 131541 (TRBV25-1, TRBJ1-1)
CASTHLGGNTEAFF

SEQ ID NO: 263083 - protein, 17 aa, Homo sapiens
  CDR3 for alpha chain variable domain of TCR clone 131542 (TRAV3, TRAJ38)
CAVRDCLNAGNNRKLIW

SEQ ID NO: 263084 - protein, 14 aa, Homo sapiens
  CDR3 for beta chain variable domain of TCR clone 131542 (TRBV5-5, TRBJ1-5)
CASSGQGVAQPQHF

SEQ ID NO: 263085 - protein, 16 aa, Homo sapiens
  CDR3 for alpha chain variable domain of TCR clone 131543 (TRAV21, TRAJ37)
CAVRPRGSSNTGKLIF

SEQ ID NO: 263086 - protein, 15 aa, Homo sapiens
  CDR3 for beta chain variable domain of TCR clone 131543 (TRBV12-4, TRBJ2-5)
CASSPPTGLQETQYF

SEQ ID NO: 263087 - protein, 12 aa, Homo sapiens
  CDR3 for alpha chain variable domain of TCR clone 131544 (TRAV13-2, TRAJ23)
CAERHRGGKLVF

SEQ ID NO: 263088 - protein, 15 aa, Homo sapiens
  CDR3 for beta chain variable domain of TCR clone 131544 (TRBV20-1, TRBJ2-7)
CSARDRVSGMDEQYF

SEQ ID NO: 263089 - protein, 12 aa, Homo sapiens
  CDR3 for alpha chain variable domain of TCR clone 131545 (TRAV27, TRAJ36)
CAGMTGANDLFF

SEQ ID NO: 263090 - protein, 14 aa, Homo sapiens
  CDR3 for beta chain variable domain of TCR clone 131545 (TRBV12-4, TRBJ2-3)
CASSLVPSTDTQYF

SEQ ID NO: 263091 - protein, 15 aa, Homo sapiens
  CDR3 for alpha chain variable domain of TCR clone 131546 (TRAV17, TRAJ40)
CATVSSTSGTYKYIF

SEQ ID NO: 263092 - protein, 16 aa, Homo sapiens
  CDR3 for beta chain variable domain of TCR clone 131546 (TRBV12-4, TRBJ1-5)
CASSRPVGGSNQPQHF

SEQ ID NO: 263093 - protein, 14 aa, Homo sapiens
  CDR3 for alpha chain variable domain of TCR clone 131547 (TRAV2, TRAJ22)
CAVGRGGSARQLTF

SEQ ID NO: 263094 - protein, 16 aa, Homo sapiens
  CDR3 for beta chain variable domain of TCR clone 131547 (TRBV19, TRBJ2-1)
CASSKAGPSSYNEQFF

SEQ ID NO: 263095 - protein, 12 aa, Homo sapiens
  CDR3 for alpha chain variable domain of TCR clone 131548 (TRAV12-1, )
CVVNSWISRTLT

SEQ ID NO: 263096 - protein, 15 aa, Homo sapiens
  CDR3 for beta chain variable domain of TCR clone 131548 (TRBV7-9, TRBJ1-6)
CASSSPGRGNSPLHF

SEQ ID NO: 263097 - protein, 14 aa, Homo sapiens
  CDR3 for alpha chain variable domain of TCR clone 131549 (TRAV17, TRAJ39)
CATDPVRAGNMLTF

SEQ ID NO: 263098 - protein, 15 aa, Homo sapiens
  CDR3 for beta chain variable domain of TCR clone 131549 (TRBV13, TRBJ1-5)
YASSFGQGGVQPQHF

SEQ ID NO: 263099 - protein, 16 aa, Homo sapiens
  CDR3 for alpha chain variable domain of TCR clone 131550 (TRAV3, TRAJ10)
CAVRDMRAGGGNKITF

SEQ ID NO: 263100 - protein, 13 aa, Homo sapiens
  CDR3 for beta chain variable domain of TCR clone 131550 (TRBV6-1, TRBJ1-1)
CASSRQGNTEAFF

SEQ ID NO: 263101 - protein, 10 aa, Homo sapiens
  CDR3 for alpha chain variable domain of TCR clone 131551 (TRAV30, TRAJ48)
CGIGNEKLTF

SEQ ID NO: 263102 - protein, 15 aa, Homo sapiens
  CDR3 for beta chain variable domain of TCR clone 131551 (TRBV28, TRBJ2-1)
CASRKTGAAYNEQFF

SEQ ID NO: 263103 - protein, 13 aa, Homo sapiens
  CDR3 for alpha chain variable domain of TCR clone 131552 (TRAV17, TRAJ5)
CATGDTGRRALTF

SEQ ID NO: 263104 - protein, 13 aa, Homo sapiens
  CDR3 for beta chain variable domain of TCR clone 131552 (TRBV19, TRBJ1-5)
CASSIEPAQPQHF

SEQ ID NO: 263105 - protein, 14 aa, Homo sapiens
  CDR3 for alpha chain variable domain of TCR clone 131553 (TRAV8-4, TRAJ54)
CSVSEVLGAQKLVF

SEQ ID NO: 263106 - protein, 13 aa, Homo sapiens
  CDR3 for beta chain variable domain of TCR clone 131553 (TRBV27, TRBJ2-7)
CASSFVSSYEQYF

SEQ ID NO: 263107 - protein, 16 aa, Homo sapiens
  CDR3 for alpha chain variable domain of TCR clone 131554 (TRAV12-2, TRAJ10)
CAVNRVLTGGGNKLTF

SEQ ID NO: 263108 - protein, 14 aa, Homo sapiens
  CDR3 for beta chain variable domain of TCR clone 131554 (TRBV9, TRBJ2-1)
CASSVALAVNGQFF

SEQ ID NO: 263109 - protein, 23 aa, Homo sapiens
  CDR3 for alpha chain variable domain of TCR clone 131555 (TRAV30, TRAJ28)
CTLRPPSSVTQEPTSAALSDMRF

SEQ ID NO: 263110 - protein, 14 aa, Homo sapiens
  CDR3 for beta chain variable domain of TCR clone 131555 (TRBV19, TRBJ2-1)
CASPTFVLSGEQFF

SEQ ID NO: 263111 - protein, 11 aa, Homo sapiens
  CDR3 for alpha chain variable domain of TCR clone 131556 (TRAV1-1, TRAJ30)
CAQNRDDKIIF

SEQ ID NO: 263112 - protein, 12 aa, Homo sapiens
  CDR3 for beta chain variable domain of TCR clone 131556 (TRBV12-4, TRBJ1-3)
CASSFSGNTIYF

SEQ ID NO: 263113 - protein, 12 aa, Homo sapiens
  CDR3 for alpha chain variable domain of TCR clone 131557 (TRAV12-2, TRAJ10)
WGVTGVGNKLTF

SEQ ID NO: 263114 - protein, 20 aa, Homo sapiens
  CDR3 for beta chain variable domain of TCR clone 131557 (TRBV19, TRBJ2-1)
CASSISRTVTSTRLNNEQFF

SEQ ID NO: 263115 - protein, 16 aa, Homo sapiens
  CDR3 for alpha chain variable domain of TCR clone 131558 (TRAV30, TRAJ24)
CGTEIVDADSWGKFQC

SEQ ID NO: 263116 - protein, 14 aa, Homo sapiens
  CDR3 for beta chain variable domain of TCR clone 131558 (TRBV12-5, TRBJ2-5)
CASGSRTQQETQYF

SEQ ID NO: 263117 - protein, 12 aa, Homo sapiens
  CDR3 for alpha chain variable domain of TCR clone 131559 (TRAV3, TRAJ20)
CAVRDGDYKLSF

SEQ ID NO: 263118 - protein, 16 aa, Homo sapiens
  CDR3 for beta chain variable domain of TCR clone 131559 (TRBV12-4, TRBJ1-5)
CASSRPVGGSNQPQHF

SEQ ID NO: 263119 - protein, 15 aa, Homo sapiens
  CDR3 for alpha chain variable domain of TCR clone 131560 (TRAV26-1, TRAJ29)
CIVRVEGSGNTPLVF

SEQ ID NO: 263120 - protein, 14 aa, Homo sapiens
  CDR3 for beta chain variable domain of TCR clone 131560 (TRBV18, TRBJ2-5)
CASSPGVSQETPYF

SEQ ID NO: 263121 - protein, 14 aa, Homo sapiens
  CDR3 for alpha chain variable domain of TCR clone 131561 (TRAV26-1, TRAJ34)
CIVRVAYNTDKLIF

SEQ ID NO: 263122 - protein, 14 aa, Homo sapiens
  CDR3 for beta chain variable domain of TCR clone 131561 (TRBV12-4, TRBJ1-1)
CASSFEQGAHEAFF

SEQ ID NO: 263123 - protein, 12 aa, Homo sapiens
  CDR3 for alpha chain variable domain of TCR clone 131562 (TRAV17, TRAJ12)
CAGGDSSYKLIF

SEQ ID NO: 263124 - protein, 12 aa, Homo sapiens
  CDR3 for beta chain variable domain of TCR clone 131562 (TRBV29-1, TRBJ1-1)
CSESDGNTEAFV

SEQ ID NO: 263125 - protein, 14 aa, Homo sapiens
  CDR3 for alpha chain variable domain of TCR clone 131563 (TRAV20, TRAJ22)
CAVALGGSARQLTF

SEQ ID NO: 263126 - protein, 15 aa, Homo sapiens
  CDR3 for beta chain variable domain of TCR clone 131563 (TRBV7-2, TRBJ1-3)
CASSPQGGSGNTIYF

SEQ ID NO: 263127 - protein, 16 aa, Homo sapiens
  CDR3 for alpha chain variable domain of TCR clone 131564 (TRAV30, TRAJ24)
CGTEIVDADSWGKFQF

SEQ ID NO: 263128 - protein, 19 aa, Homo sapiens
  CDR3 for beta chain variable domain of TCR clone 131564 (TRBV25-1, TRBJ2-2)
CAFLVYRVDRGRKTGELFF

SEQ ID NO: 263129 - protein, 15 aa, Homo sapiens
  CDR3 for alpha chain variable domain of TCR clone 131565 (TRAV12-2, TRAJ53)
CAVNGGGGSNYKLTF

SEQ ID NO: 263130 - protein, 15 aa, Homo sapiens
  CDR3 for beta chain variable domain of TCR clone 131565 (TRBV27, TRBJ2-1)
CASSNGGGSSNEQFF

SEQ ID NO: 263131 - protein, 14 aa, Homo sapiens
  CDR3 for alpha chain variable domain of TCR clone 131566 (TRAV12-2, TRAJ13)
CAVKKTGGYQKVTF

SEQ ID NO: 263132 - protein, 14 aa, Homo sapiens
  CDR3 for beta chain variable domain of TCR clone 131566 (TRBV19, TRBJ2-7)
CASNFRDTFTGMYF

SEQ ID NO: 263133 - protein, 19 aa, Homo sapiens
  CDR3 for alpha chain variable domain of TCR clone 131567 (TRAV26-1, TRAJ22)
CCVLLHRWVFSGSARQLTF

SEQ ID NO: 263134 - protein, 13 aa, Homo sapiens
  CDR3 for beta chain variable domain of TCR clone 131567 (TRBV19, TRBJ2-5)
CASSIGQVTDFFL

SEQ ID NO: 263135 - protein, 11 aa, Homo sapiens
  CDR3 for alpha chain variable domain of TCR clone 131568 (TRAV12-1, TRAJ33)
CVVNSNYQLIW

SEQ ID NO: 263136 - protein, 19 aa, Homo sapiens
  CDR3 for beta chain variable domain of TCR clone 131568 (TRBV7-6, TRBJ2-5)
CACSLVGPGTSGEQETQYF

SEQ ID NO: 263137 - protein, 13 aa, Homo sapiens
  CDR3 for alpha chain variable domain of TCR clone 131569 (TRAV27, TRAJ45)
CRSSGGGADGLTF

SEQ ID NO: 263138 - protein, 15 aa, Homo sapiens
  CDR3 for beta chain variable domain of TCR clone 131569 (TRBV2, TRBJ2-1)
CASSEARSAYNEQFF

SEQ ID NO: 263139 - protein, 12 aa, Homo sapiens
  CDR3 for alpha chain variable domain of TCR clone 131570 (TRAV3, TRAJ30)
CAVRDPDDKIIF

SEQ ID NO: 263140 - protein, 16 aa, Homo sapiens
  CDR3 for beta chain variable domain of TCR clone 131570 (TRBV13, TRBJ2-2)
CASSPRTGEHTGELFF

SEQ ID NO: 263141 - protein, 11 aa, Homo sapiens
  CDR3 for alpha chain variable domain of TCR clone 131571 (TRAV1-2, TRAJ20)
CSVSNDYKLSF

SEQ ID NO: 263142 - protein, 16 aa, Homo sapiens
  CDR3 for beta chain variable domain of TCR clone 131571 (TRBV29-1, TRBJ2-6)
CSVEDITYSGANVLTF

SEQ ID NO: 263143 - protein, 23 aa, Homo sapiens
  CDR3 for alpha chain variable domain of TCR clone 131572 (TRAV26-1, TRAJ38)
CIADNAGNNHIQNPDPAVYQLRD

SEQ ID NO: 263144 - protein, 13 aa, Homo sapiens
  CDR3 for beta chain variable domain of TCR clone 131572 (TRBV3-1, TRBJ1-5)
CASSQAGGQPQHF

SEQ ID NO: 263145 - protein, 14 aa, Homo sapiens
  CDR3 for alpha chain variable domain of TCR clone 131573 (TRAV12-3, TRAJ10)
SHLPLTGGGNKLTF

SEQ ID NO: 263146 - protein, 13 aa, Homo sapiens
  CDR3 for beta chain variable domain of TCR clone 131573 (TRBV9, TRBJ2-1)
CVSSPSGGNEQFF

SEQ ID NO: 263147 - protein, 17 aa, Homo sapiens
  CDR3 for alpha chain variable domain of TCR clone 131574 (TRAV3, )
CAISRTLTLPCTSLETL

SEQ ID NO: 263148 - protein, 15 aa, Homo sapiens
  CDR3 for beta chain variable domain of TCR clone 131574 (TRBV19, TRBJ1-5)
CASSDSGPRNQPQHF

SEQ ID NO: 263149 - protein, 17 aa, Homo sapiens
  CDR3 for alpha chain variable domain of TCR clone 131575 (TRAV8-6, TRAJ58)
CAVSSWVGETSGSRLTF

SEQ ID NO: 263150 - protein, 15 aa, Homo sapiens
  CDR3 for beta chain variable domain of TCR clone 131575 (TRBV28, TRBJ2-1)
CASSPPGLADHEQFF

SEQ ID NO: 263151 - protein, 11 aa, Homo sapiens
  CDR3 for alpha chain variable domain of TCR clone 131576 (TRAV12-2, TRAJ29)
CAVTLRSPLVF

SEQ ID NO: 263152 - protein, 15 aa, Homo sapiens
  CDR3 for beta chain variable domain of TCR clone 131576 (TRBV7-9, TRBJ1-5)
CASSQGHQPNQPQHF

SEQ ID NO: 263153 - protein, 15 aa, Homo sapiens
  CDR3 for alpha chain variable domain of TCR clone 131577 (TRAV21, TRAJ57)
CAVIITQGGSEKLVF

SEQ ID NO: 263154 - protein, 14 aa, Homo sapiens
  CDR3 for beta chain variable domain of TCR clone 131577 (TRBV4-2, TRBJ2-3)
CASRETRAPGMQYF

SEQ ID NO: 263155 - protein, 14 aa, Homo sapiens
  CDR3 for alpha chain variable domain of TCR clone 131578 (TRAV35, TRAJ22)
CAGLRPGSAKQQTF

SEQ ID NO: 263156 - protein, 15 aa, Homo sapiens
  CDR3 for beta chain variable domain of TCR clone 131578 (TRBV12-4, TRBJ2-5)
CASSPPTGLQETQYF

SEQ ID NO: 263157 - protein, 14 aa, Homo sapiens
  CDR3 for alpha chain variable domain of TCR clone 131579 (TRAV12-2, TRAJ15)
CAPHTGQAGTALIF

SEQ ID NO: 263158 - protein, 20 aa, Homo sapiens
  CDR3 for beta chain variable domain of TCR clone 131579 (TRBV7-8, TRBJ2-2)
CASSHLFPGPTIHITGELFF

SEQ ID NO: 263159 - protein, 14 aa, Homo sapiens
  CDR3 for alpha chain variable domain of TCR clone 131580 (TRAV8-3, TRAJ4)
CAVGASGGYNRLIF

SEQ ID NO: 263160 - protein, 16 aa, Homo sapiens
  CDR3 for beta chain variable domain of TCR clone 131580 (TRBV4-3, TRBJ2-2)
CASSHLQGSGTGELFF

SEQ ID NO: 263161 - protein, 18 aa, Homo sapiens
  CDR3 for alpha chain variable domain of TCR clone 131581 (TRAV13-1, TRAJ10)
CAASKGRAVTGGGNTLTF

SEQ ID NO: 263162 - protein, 14 aa, Homo sapiens
  CDR3 for beta chain variable domain of TCR clone 131581 (TRBV18, TRBJ2-7)
CASSPRGGAYEQYF

SEQ ID NO: 263163 - protein, 11 aa, Homo sapiens
  CDR3 for alpha chain variable domain of TCR clone 131582 (TRAV2, TRAJ13)
CASGGYQKVTF

SEQ ID NO: 263164 - protein, 16 aa, Homo sapiens
  CDR3 for beta chain variable domain of TCR clone 131582 (TRBV19, TRBJ2-1)
CASSEAGPSSYNEQFF

SEQ ID NO: 263165 - protein, 15 aa, Homo sapiens
  CDR3 for alpha chain variable domain of TCR clone 131583 (TRAV21, TRAJ53)
CATLNSGGSNYKLTF

SEQ ID NO: 263166 - protein, 13 aa, Homo sapiens
  CDR3 for beta chain variable domain of TCR clone 131583 (TRBV2, TRBJ2-7)
CASSVGGSGEQYF

SEQ ID NO: 263167 - protein, 12 aa, Homo sapiens
  CDR3 for alpha chain variable domain of TCR clone 131584 (TRAV13-1, TRAJ27)
CAAHPNAGKSTF

SEQ ID NO: 263168 - protein, 14 aa, Homo sapiens
  CDR3 for beta chain variable domain of TCR clone 131584 (TRBV19, TRBJ2-2)
CASSGQGIAGELFF

SEQ ID NO: 263169 - protein, 13 aa, Homo sapiens
  CDR3 for alpha chain variable domain of TCR clone 131585 (TRAV21, TRAJ27)
CAARPGNAGKSTF

SEQ ID NO: 263170 - protein, 15 aa, Homo sapiens
  CDR3 for beta chain variable domain of TCR clone 131585 (TRBV28, TRBJ2-4)
CAAGSGTLLMGIQYF

SEQ ID NO: 263171 - protein, 16 aa, Homo sapiens
  CDR3 for alpha chain variable domain of TCR clone 131586 (TRAV3, TRAJ37)
CAVRGKGSGNTGKRIF

SEQ ID NO: 263172 - protein, 13 aa, Homo sapiens
  CDR3 for beta chain variable domain of TCR clone 131586 (TRBV4-2, TRBJ1-1)
CASSQAGNTEAFF

SEQ ID NO: 263173 - protein, 17 aa, Homo sapiens
  CDR3 for alpha chain variable domain of TCR clone 131587 (TRAV26-1, TRAJ37)
CIVRVITVSSNTGKLIF

SEQ ID NO: 263174 - protein, 18 aa, Homo sapiens
  CDR3 for beta chain variable domain of TCR clone 131587 (TRBV20-1, TRBJ2-3)
CSASGLAGGPGTTDTQYF

SEQ ID NO: 263175 - protein, 13 aa, Homo sapiens
  CDR3 for alpha chain variable domain of TCR clone 131588 (TRAV21, TRAJ27)
CAARPGNAGKSTF

SEQ ID NO: 263176 - protein, 13 aa, Homo sapiens
  CDR3 for beta chain variable domain of TCR clone 131588 (TRBV20-1, TRBJ1-1)
CSAPLGGGTEAFF

SEQ ID NO: 263177 - protein, 15 aa, Homo sapiens
  CDR3 for alpha chain variable domain of TCR clone 131589 (TRAV26-2, TRAJ57)
CILRDIRSGSEKLVF

SEQ ID NO: 263178 - protein, 15 aa, Homo sapiens
  CDR3 for beta chain variable domain of TCR clone 131589 (TRBV2, TRBJ2-1)
CASDIGLAGEGEQFF

SEQ ID NO: 263179 - protein, 16 aa, Homo sapiens
  CDR3 for alpha chain variable domain of TCR clone 131590 (TRAV23/DV6, TRAJ32)
CAATPGGGGATNKLIF

SEQ ID NO: 263180 - protein, 12 aa, Homo sapiens
  CDR3 for beta chain variable domain of TCR clone 131590 (TRBV11-2, TRBJ2-1)
CASSPGNNEQFF

SEQ ID NO: 263181 - protein, 12 aa, Homo sapiens
  CDR3 for alpha chain variable domain of TCR clone 131591 (TRAV13-1, TRAJ20)
CAAHQNDYKLSF

SEQ ID NO: 263182 - protein, 14 aa, Homo sapiens
  CDR3 for beta chain variable domain of TCR clone 131591 (TRBV5-1, TRBJ2-7)
CASSFASGVNEQYF

SEQ ID NO: 263183 - protein, 11 aa, Homo sapiens
  CDR3 for alpha chain variable domain of TCR clone 131592 (TRAV3, TRAJ21)
CAVGNFNKFYF

SEQ ID NO: 263184 - protein, 14 aa, Homo sapiens
  CDR3 for beta chain variable domain of TCR clone 131592 (TRBV7-8, TRBJ2-3)
CASSIAGGTDTQYF

SEQ ID NO: 263185 - protein, 22 aa, Homo sapiens
  CDR3 for alpha chain variable domain of TCR clone 131593 (TRAV1-1, TRAJ17)
CLLLLRCESPRGIKAAGNKLTF

SEQ ID NO: 263186 - protein, 19 aa, Homo sapiens
  CDR3 for beta chain variable domain of TCR clone 131593 (TRBV6-1, TRBJ1-1)
CASLARGGGDLTLKLSLDK

SEQ ID NO: 263187 - protein, 16 aa, Homo sapiens
  CDR3 for alpha chain variable domain of TCR clone 131594 (TRAV14/DV4, TRAJ15)
CAMREGPAQAGTALVF

SEQ ID NO: 263188 - protein, 12 aa, Homo sapiens
  CDR3 for beta chain variable domain of TCR clone 131594 (TRBV28, TRBJ2-6)
CAIQAGANVLTF

SEQ ID NO: 263189 - protein, 19 aa, Homo sapiens
  CDR3 for alpha chain variable domain of TCR clone 131595 (TRAV2, TRAJ20)
ILQVREADAAVYRDCKLSF

SEQ ID NO: 263190 - protein, 14 aa, Homo sapiens
  CDR3 for beta chain variable domain of TCR clone 131595 (TRBV13, TRBJ2-5)
CASSLGPRGETQYF

SEQ ID NO: 263191 - protein, 14 aa, Homo sapiens
  CDR3 for alpha chain variable domain of TCR clone 131596 (TRAV1-2, TRAJ16)
CAVNRFSDGQKLLF

SEQ ID NO: 263192 - protein, 13 aa, Homo sapiens
  CDR3 for beta chain variable domain of TCR clone 131596 (TRBV19, TRBJ1-2)
CASSVLGQDGYTF

SEQ ID NO: 263193 - protein, 12 aa, Homo sapiens
  CDR3 for alpha chain variable domain of TCR clone 131597 (TRAV23/DV6, TRAJ43)
CAASYIKGDMRF

SEQ ID NO: 263194 - protein, 11 aa, Homo sapiens
  CDR3 for beta chain variable domain of TCR clone 131597 (TRBV29-1, TRBJ2-3)
CSVELNRYAVF

SEQ ID NO: 263195 - protein, 12 aa, Homo sapiens
  CDR3 for alpha chain variable domain of TCR clone 131598 (TRAV13-1, TRAJ21)
CAAKEGFNKFYF

SEQ ID NO: 263196 - protein, 20 aa, Homo sapiens
  CDR3 for beta chain variable domain of TCR clone 131598 (TRBV7-8, TRBJ2-2)
CASSHLFPGPTIHITGEPFF

SEQ ID NO: 263197 - protein, 15 aa, Homo sapiens
  CDR3 for alpha chain variable domain of TCR clone 131599 (TRAV3, TRAJ45)
CASSYSGGGADGLTF

SEQ ID NO: 263198 - protein, 13 aa, Homo sapiens
  CDR3 for beta chain variable domain of TCR clone 131599 (TRBV10-3, TRBJ2-7)
CASKLAVNYEQYF

SEQ ID NO: 263199 - protein, 13 aa, Homo sapiens
  CDR3 for alpha chain variable domain of TCR clone 131600 (TRAV8-3, TRAJ44)
CAVVPGTASKLTF

SEQ ID NO: 263200 - protein, 15 aa, Homo sapiens
  CDR3 for beta chain variable domain of TCR clone 131600 (TRBV12-4, TRBJ2-5)
CASSPPTGLQETQYF

SEQ ID NO: 263201 - protein, 16 aa, Homo sapiens
  CDR3 for alpha chain variable domain of TCR clone 131601 (TRAV30, TRAJ24)
CGTEIVDADSWGKFQF

SEQ ID NO: 263202 - protein, 15 aa, Homo sapiens
  CDR3 for beta chain variable domain of TCR clone 131601 (TRBV11-3, TRBJ2-1)
CASSLVAGGGNEQFF

SEQ ID NO: 263203 - protein, 14 aa, Homo sapiens
  CDR3 for alpha chain variable domain of TCR clone 131602 (TRAV35, TRAJ42)
CAGRYGGIQGNLIF

SEQ ID NO: 263204 - protein, 15 aa, Homo sapiens
  CDR3 for beta chain variable domain of TCR clone 131602 (TRBV7-9, TRBJ2-1)
CASSLGWGRANEQFF

SEQ ID NO: 263205 - protein, 17 aa, Homo sapiens
  CDR3 for alpha chain variable domain of TCR clone 131603 (TRAV13-1, TRAJ28)
CAASPPYSGAGSYQLTF

SEQ ID NO: 263206 - protein, 15 aa, Homo sapiens
  CDR3 for beta chain variable domain of TCR clone 131603 (TRBV2, TRBJ2-3)
CASSDFEKATDTQYF

SEQ ID NO: 263207 - protein, 22 aa, Homo sapiens
  CDR3 for alpha chain variable domain of TCR clone 131604 (TRAV3, TRAJ38)
CAVRDCLNAGNNHIQNPDPAVY

SEQ ID NO: 263208 - protein, 17 aa, Homo sapiens
  CDR3 for beta chain variable domain of TCR clone 131604 (TRBV28, TRBJ2-3)
CASSPTPAGGRVDTQYF

SEQ ID NO: 263209 - protein, 14 aa, Homo sapiens
  CDR3 for alpha chain variable domain of TCR clone 131605 (TRAV12-3, TRAJ10)
SHLPLTGGGNKLTF

SEQ ID NO: 263210 - protein, 13 aa, Homo sapiens
  CDR3 for beta chain variable domain of TCR clone 131605 (TRBV9, TRBJ2-1)
CASSRSGGNEQFF

SEQ ID NO: 263211 - protein, 11 aa, Homo sapiens
  CDR3 for alpha chain variable domain of TCR clone 131606 (TRAV3, TRAJ21)
CAVGNFNKFYF

SEQ ID NO: 263212 - protein, 15 aa, Homo sapiens
  CDR3 for beta chain variable domain of TCR clone 131606 (TRBV28, TRBJ2-7)
CASSLISGGSYEQYF

SEQ ID NO: 263213 - protein, 17 aa, Homo sapiens
  CDR3 for alpha chain variable domain of TCR clone 131607 (TRAV3, TRAJ6)
CAVRDGPRAGGSYITTF

SEQ ID NO: 263214 - protein, 14 aa, Homo sapiens
  CDR3 for beta chain variable domain of TCR clone 131607 (TRBV7-2, TRBJ2-7)
CASSPRTSFYEQYF

SEQ ID NO: 263215 - protein, 22 aa, Homo sapiens
  CDR3 for alpha chain variable domain of TCR clone 131608 (TRAV8-2, TRAJ45)
PLTKPSAHMSDAAEYSADGLTF

SEQ ID NO: 263216 - protein, 13 aa, Homo sapiens
  CDR3 for beta chain variable domain of TCR clone 131608 (TRBV7-3, TRBJ2-1)
CASSPVAYNEQFF

SEQ ID NO: 263217 - protein, 12 aa, Homo sapiens
  CDR3 for alpha chain variable domain of TCR clone 131609 (TRAV1-1, TRAJ39)
CAVPVVGNMLTF

SEQ ID NO: 263218 - protein, 13 aa, Homo sapiens
  CDR3 for beta chain variable domain of TCR clone 131609 (TRBV7-2, TRBJ2-5)
CASSQTSVETQYF

SEQ ID NO: 263219 - protein, 16 aa, Homo sapiens
  CDR3 for alpha chain variable domain of TCR clone 131610 (TRAV12-3, TRAJ53)
CAMSPGSGGSNYKLTF

SEQ ID NO: 263220 - protein, 12 aa, Homo sapiens
  CDR3 for beta chain variable domain of TCR clone 131610 (TRBV11-2, TRBJ1-6)
CASRQGISPLHF

SEQ ID NO: 263221 - protein, 13 aa, Homo sapiens
  CDR3 for alpha chain variable domain of TCR clone 131611 (TRAV2, TRAJ9)
CAVESTGGFKTLF

SEQ ID NO: 263222 - protein, 15 aa, Homo sapiens
  CDR3 for beta chain variable domain of TCR clone 131611 (TRBV10-3, TRBJ2-1)
CAITFGGGTDNEQFF

SEQ ID NO: 263223 - protein, 19 aa, Homo sapiens
  CDR3 for alpha chain variable domain of TCR clone 131612 (TRAV38-1, TRAJ53)
GAFMKHGLESGGSNYKLTF

SEQ ID NO: 263224 - protein, 13 aa, Homo sapiens
  CDR3 for beta chain variable domain of TCR clone 131612 (TRBV19, TRBJ2-7)
CASSPRQSYEQYF

SEQ ID NO: 263225 - protein, 14 aa, Homo sapiens
  CDR3 for alpha chain variable domain of TCR clone 131613 (TRAV4, TRAJ20)
CTTASWANDYKLSF

SEQ ID NO: 263226 - protein, 15 aa, Homo sapiens
  CDR3 for beta chain variable domain of TCR clone 131613 (TRBV6-3, TRBJ2-7)
CASSSPGTVFYEQYF

SEQ ID NO: 263227 - protein, 17 aa, Homo sapiens
  CDR3 for alpha chain variable domain of TCR clone 131614 (TRAV3, TRAJ42)
CAVRDRDYGGSQGNRIF

SEQ ID NO: 263228 - protein, 18 aa, Homo sapiens
  CDR3 for beta chain variable domain of TCR clone 131614 (TRBV20-1, TRBJ2-3)
CSASGLAGGPGTTDTQYF

SEQ ID NO: 263229 - protein, 14 aa, Homo sapiens
  CDR3 for alpha chain variable domain of TCR clone 131615 (TRAV17, TRAJ6)
CATNPAGGSYIPTF

SEQ ID NO: 263230 - protein, 14 aa, Homo sapiens
  CDR3 for beta chain variable domain of TCR clone 131615 (TRBV28, TRBJ2-3)
CASSWRGRADTQYF

SEQ ID NO: 263231 - protein, 15 aa, Homo sapiens
  CDR3 for alpha chain variable domain of TCR clone 131616 (TRAV12-3, TRAJ13)
CAMSARSGGYQKVTF

SEQ ID NO: 263232 - protein, 12 aa, Homo sapiens
  CDR3 for beta chain variable domain of TCR clone 131616 (TRBV9, TRBJ2-2)
CASSARTGELFF

SEQ ID NO: 263233 - protein, 12 aa, Homo sapiens
  CDR3 for alpha chain variable domain of TCR clone 131617 (TRAV12-2, TRAJ20)
CAVRPSDYKLSF

SEQ ID NO: 263234 - protein, 19 aa, Homo sapiens
  CDR3 for beta chain variable domain of TCR clone 131617 (TRBV6-3, TRBJ2-1)
CASSYSWTSGRATYNEQFF

SEQ ID NO: 263235 - protein, 15 aa, Homo sapiens
  CDR3 for alpha chain variable domain of TCR clone 131618 (TRAV38-2/DV8, TRAJ47)
CAYRSAKGYGNKLVF

SEQ ID NO: 263236 - protein, 18 aa, Homo sapiens
  CDR3 for beta chain variable domain of TCR clone 131618 (TRBV27, TRBJ2-6)
CASSPPGQGAGGANVLTF

SEQ ID NO: 263237 - protein, 13 aa, Homo sapiens
  CDR3 for alpha chain variable domain of TCR clone 131619 (TRAV3, TRAJ27)
CAVRPLGAGKSTF

SEQ ID NO: 263238 - protein, 14 aa, Homo sapiens
  CDR3 for beta chain variable domain of TCR clone 131619 (TRBV5-5, TRBJ1-1)
CASSLQLMNTEAFF

SEQ ID NO: 263239 - protein, 14 aa, Homo sapiens
  CDR3 for alpha chain variable domain of TCR clone 131620 (TRAV13-1, TRAJ35)
CAASKGGFGNVLHC

SEQ ID NO: 263240 - protein, 12 aa, Homo sapiens
  CDR3 for beta chain variable domain of TCR clone 131620 (TRBV7-3, TRBJ1-1)
CQQQDWGAEAFF

SEQ ID NO: 263241 - protein, 12 aa, Homo sapiens
  CDR3 for alpha chain variable domain of TCR clone 131621 (TRAV1-2, TRAJ8)
CAVRTGFQKLVF

SEQ ID NO: 263242 - protein, 13 aa, Homo sapiens
  CDR3 for beta chain variable domain of TCR clone 131621 (TRBV13, TRBJ2-1)
CASILGGRGEQFF

SEQ ID NO: 263243 - protein, 16 aa, Homo sapiens
  CDR3 for alpha chain variable domain of TCR clone 131622 (TRAV12-2, TRAJ32)
CAVNLGQGGATNKLIF

SEQ ID NO: 263244 - protein, 15 aa, Homo sapiens
  CDR3 for beta chain variable domain of TCR clone 131622 (TRBV20-1, TRBJ2-7)
CSARGPLAGWREQYF

SEQ ID NO: 263245 - protein, 14 aa, Homo sapiens
  CDR3 for alpha chain variable domain of TCR clone 131623 (TRAV1-2, TRAJ8)
CAVREDTGFRKLVF

SEQ ID NO: 263246 - protein, 16 aa, Homo sapiens
  CDR3 for beta chain variable domain of TCR clone 131623 (TRBV28, TRBJ1-4)
CASSPPYRGRSEKLFF

SEQ ID NO: 263247 - protein, 18 aa, Homo sapiens
  CDR3 for alpha chain variable domain of TCR clone 131624 (TRAV21, TRAJ52)
CAVRPSPAGGTSYGKLTF

SEQ ID NO: 263248 - protein, 16 aa, Homo sapiens
  CDR3 for beta chain variable domain of TCR clone 131624 (TRBV19, TRBJ2-1)
CASSKAGPGSYNEQFF

SEQ ID NO: 263249 - protein, 15 aa, Homo sapiens
  CDR3 for alpha chain variable domain of TCR clone 131625 (TRAV21, TRAJ52)
CAVRGGGTSYGKLTF

SEQ ID NO: 263250 - protein, 15 aa, Homo sapiens
  CDR3 for beta chain variable domain of TCR clone 131625 (TRBV7-9, TRBJ2-7)
CASSSSGLAVYEQYF

SEQ ID NO: 263251 - protein, 18 aa, Homo sapiens
  CDR3 for alpha chain variable domain of TCR clone 131626 (TRAV4, TRAJ26)
CCVLLPRGPHNYGQNFVF

SEQ ID NO: 263252 - protein, 17 aa, Homo sapiens
  CDR3 for beta chain variable domain of TCR clone 131626 (TRBV24-1, TRBJ2-1)
CATSDVSTSGTYNEQFF

SEQ ID NO: 263253 - protein, 14 aa, Homo sapiens
  CDR3 for alpha chain variable domain of TCR clone 131627 (TRAV8-3, TRAJ10)
CAVGNAGGGNKLTF

SEQ ID NO: 263254 - protein, 12 aa, Homo sapiens
  CDR3 for beta chain variable domain of TCR clone 131627 (TRBV20-1, TRBJ2-5)
CSAGGAGETQYF

SEQ ID NO: 263255 - protein, 18 aa, Homo sapiens
  CDR3 for alpha chain variable domain of TCR clone 131628 (TRAV26-1, TRAJ52)
CIVRVEGGGGTSYGKLTF

SEQ ID NO: 263256 - protein, 13 aa, Homo sapiens
  CDR3 for beta chain variable domain of TCR clone 131628 (TRBV7-3, TRBJ1-2)
CASSLKRGYGYTF

SEQ ID NO: 263257 - protein, 14 aa, Homo sapiens
  CDR3 for alpha chain variable domain of TCR clone 131629 (TRAV29/DV5, TRAJ36)
CAARRKTGANNLFF

SEQ ID NO: 263258 - protein, 20 aa, Homo sapiens
  CDR3 for beta chain variable domain of TCR clone 131629 (TRBV7-8, TRBJ2-2)
CASSHLFPGPTIHITGELFF

SEQ ID NO: 263259 - protein, 13 aa, Homo sapiens
  CDR3 for alpha chain variable domain of TCR clone 131630 (TRAV27, TRAJ17)
CAGAATAGIKLTF

SEQ ID NO: 263260 - protein, 15 aa, Homo sapiens
  CDR3 for beta chain variable domain of TCR clone 131630 (TRBV5-1, TRBJ2-3)
CASRNQAGSTDTQYF

SEQ ID NO: 263261 - protein, 15 aa, Homo sapiens
  CDR3 for alpha chain variable domain of TCR clone 131631 (TRAV3, TRAJ22)
CAVRDRGGSARQLTF

SEQ ID NO: 263262 - protein, 16 aa, Homo sapiens
  CDR3 for beta chain variable domain of TCR clone 131631 (TRBV12-4, TRBJ2-7)
CASRSTGTGPSYEQYF

SEQ ID NO: 263263 - protein, 13 aa, Homo sapiens
  CDR3 for alpha chain variable domain of TCR clone 131632 (TRAV20, TRAJ37)
CAGCSSNTGKLIF

SEQ ID NO: 263264 - protein, 13 aa, Homo sapiens
  CDR3 for beta chain variable domain of TCR clone 131632 (TRBV24-1, TRBJ2-2)
CATSDWSTGELLF

SEQ ID NO: 263265 - protein, 10 aa, Homo sapiens
  CDR3 for alpha chain variable domain of TCR clone 131633 (TRAV21, TRAJ31)
CAVDNARLMF

SEQ ID NO: 263266 - protein, 16 aa, Homo sapiens
  CDR3 for beta chain variable domain of TCR clone 131633 (TRBV13, TRBJ2-2)
CASSPRTGEHTGELFF

SEQ ID NO: 263267 - protein, 14 aa, Homo sapiens
  CDR3 for alpha chain variable domain of TCR clone 131634 (TRAV34, TRAJ44)
CGADGTGTASKLTF

SEQ ID NO: 263268 - protein, 15 aa, Homo sapiens
  CDR3 for beta chain variable domain of TCR clone 131634 (TRBV5-1, TRBJ2-1)
CASSTPRAPYNEQFF

SEQ ID NO: 263269 - protein, 14 aa, Homo sapiens
  CDR3 for alpha chain variable domain of TCR clone 131635 (TRAV2, TRAJ37)
CAVDFTSNTGKLIF

SEQ ID NO: 263270 - protein, 11 aa, Homo sapiens
  CDR3 for beta chain variable domain of TCR clone 131635 (TRBV29-1, TRBJ2-5)
CSEDRTGTQHF

SEQ ID NO: 263271 - protein, 11 aa, Homo sapiens
  CDR3 for alpha chain variable domain of TCR clone 131636 (TRAV12-1, TRAJ26)
CVVAYGQNFVF

SEQ ID NO: 263272 - protein, 15 aa, Homo sapiens
  CDR3 for beta chain variable domain of TCR clone 131636 (TRBV12-4, TRBJ2-5)
CACSGTGQAQETQYF

SEQ ID NO: 263273 - protein, 14 aa, Homo sapiens
  CDR3 for alpha chain variable domain of TCR clone 131637 (TRAV12-2, TRAJ45)
CAVDIGGGADGLTF

SEQ ID NO: 263274 - protein, 13 aa, Homo sapiens
  CDR3 for beta chain variable domain of TCR clone 131637 (TRBV19, TRBJ2-2)
CASSIWSTGELFF

SEQ ID NO: 263275 - protein, 13 aa, Homo sapiens
  CDR3 for alpha chain variable domain of TCR clone 131638 (TRAV2, TRAJ40)
CAVVTSGTYKYIF

SEQ ID NO: 263276 - protein, 15 aa, Homo sapiens
  CDR3 for beta chain variable domain of TCR clone 131638 (TRBV7-9, TRBJ2-7)
CASSLALAEAYEQYF

SEQ ID NO: 263277 - protein, 16 aa, Homo sapiens
  CDR3 for alpha chain variable domain of TCR clone 131639 (TRAV30, TRAJ24)
CGTEIVDADSWGKFQF

SEQ ID NO: 263278 - protein, 12 aa, Homo sapiens
  CDR3 for beta chain variable domain of TCR clone 131639 (TRBV24-1, TRBJ1-1)
CATLYPDTEAFF

SEQ ID NO: 263279 - protein, 15 aa, Homo sapiens
  CDR3 for alpha chain variable domain of TCR clone 131640 (TRAV25, TRAJ52)
CAGTSGGTSYGKLTF

SEQ ID NO: 263280 - protein, 16 aa, Homo sapiens
  CDR3 for beta chain variable domain of TCR clone 131640 (TRBV15, TRBJ1-2)
CVTSRGPRTGGGGYTF

SEQ ID NO: 263281 - protein, 13 aa, Homo sapiens
  CDR3 for alpha chain variable domain of TCR clone 131641 (TRAV12-1, TRAJ37)
CVVNAGNTGELIF

SEQ ID NO: 263282 - protein, 14 aa, Homo sapiens
  CDR3 for beta chain variable domain of TCR clone 131641 (TRBV7-2, TRBJ2-3)
CASRRGLAADTQYF

SEQ ID NO: 263283 - protein, 14 aa, Homo sapiens
  CDR3 for alpha chain variable domain of TCR clone 131642 (TRAV2, TRAJ39)
CAVEVDNAGNMLTF

SEQ ID NO: 263284 - protein, 14 aa, Homo sapiens
  CDR3 for beta chain variable domain of TCR clone 131642 (TRBV28, TRBJ2-7)
CASSLRARGNEQYF

SEQ ID NO: 263285 - protein, 15 aa, Homo sapiens
  CDR3 for alpha chain variable domain of TCR clone 131643 (TRAV23/DV6, TRAJ13)
CAAWPGGGGYQKVTF

SEQ ID NO: 263286 - protein, 17 aa, Homo sapiens
  CDR3 for beta chain variable domain of TCR clone 131643 (TRBV19, TRBJ2-7)
CASSISFYDSYHYEQYF

SEQ ID NO: 263287 - protein, 15 aa, Homo sapiens
  CDR3 for alpha chain variable domain of TCR clone 131644 (TRAV13-1, TRAJ45)
CAASGSGGGADGRTF

SEQ ID NO: 263288 - protein, 12 aa, Homo sapiens
  CDR3 for beta chain variable domain of TCR clone 131644 (TRBV11-2, TRBJ2-2)
CASSLGGGELFF

SEQ ID NO: 263289 - protein, 18 aa, Homo sapiens
  CDR3 for alpha chain variable domain of TCR clone 131645 (TRAV26-1, TRAJ56)
CIVRVASRVTGANSKPTF

SEQ ID NO: 263290 - protein, 15 aa, Homo sapiens
  CDR3 for beta chain variable domain of TCR clone 131645 (TRBV7-9, TRBJ2-5)
CASSDTGRGRETQYF

SEQ ID NO: 263291 - protein, 13 aa, Homo sapiens
  CDR3 for alpha chain variable domain of TCR clone 131646 (TRAV3, TRAJ26)
CAVSRGYGQNFVF

SEQ ID NO: 263292 - protein, 15 aa, Homo sapiens
  CDR3 for beta chain variable domain of TCR clone 131646 (TRBV11-2, TRBJ2-1)
CASSLGTSGLNEQFF

SEQ ID NO: 263293 - protein, 12 aa, Homo sapiens
  CDR3 for alpha chain variable domain of TCR clone 131647 (TRAV3, TRAJ43)
CAVRDPNNDMRF

SEQ ID NO: 263294 - protein, 14 aa, Homo sapiens
  CDR3 for beta chain variable domain of TCR clone 131647 (TRBV10-3, TRBJ2-3)
CAISEKGLGDTQYF

SEQ ID NO: 263295 - protein, 14 aa, Homo sapiens
  CDR3 for alpha chain variable domain of TCR clone 131648 (TRAV8-4, TRAJ48)
CAVSETFGNEKLTF

SEQ ID NO: 263296 - protein, 17 aa, Homo sapiens
  CDR3 for beta chain variable domain of TCR clone 131648 (TRBV7-8, TRBJ2-6)
CASSAGTGGAGANVLTF

SEQ ID NO: 263297 - protein, 17 aa, Homo sapiens
  CDR3 for alpha chain variable domain of TCR clone 131649 (TRAV4, TRAJ13)
CLVGVQGSSGGYKKVTF

SEQ ID NO: 263298 - protein, 18 aa, Homo sapiens
  CDR3 for beta chain variable domain of TCR clone 131649 (TRBV15, TRBJ2-3)
CATSRDGARSWDTDTQYF

SEQ ID NO: 263299 - protein, 14 aa, Homo sapiens
  CDR3 for alpha chain variable domain of TCR clone 131650 (TRAV23/DV6, TRAJ37)
CAASTSSNTGKLLF

SEQ ID NO: 263300 - protein, 13 aa, Homo sapiens
  CDR3 for beta chain variable domain of TCR clone 131650 (TRBV7-7, TRBJ1-1)
CASSLGANTEAFF

SEQ ID NO: 263301 - protein, 14 aa, Homo sapiens
  CDR3 for alpha chain variable domain of TCR clone 131651 (TRAV12-2, TRAJ53)
CAVKGGGSNYKLTF

SEQ ID NO: 263302 - protein, 14 aa, Homo sapiens
  CDR3 for beta chain variable domain of TCR clone 131651 (TRBV19, TRBJ2-1)
RASPTFVLSGEQFF

SEQ ID NO: 263303 - protein, 14 aa, Homo sapiens
  CDR3 for alpha chain variable domain of TCR clone 131652 (TRAV17, TRAJ12)
CATDEKDSSYKLIF

SEQ ID NO: 263304 - protein, 14 aa, Homo sapiens
  CDR3 for beta chain variable domain of TCR clone 131652 (TRBV19, TRBJ2-1)
CASPTFVLSGEQFF

SEQ ID NO: 263305 - protein, 12 aa, Homo sapiens
  CDR3 for alpha chain variable domain of TCR clone 131653 (TRAV1-1, TRAJ33)
CSASDSNYQLIW

SEQ ID NO: 263306 - protein, 18 aa, Homo sapiens
  CDR3 for beta chain variable domain of TCR clone 131653 (TRBV20-1, TRBJ2-2)
CSARVQTARPSGTGELFF

SEQ ID NO: 263307 - protein, 21 aa, Homo sapiens
  CDR3 for alpha chain variable domain of TCR clone 131654 (TRAV36/DV7, TRAJ39)
TATQTGDSAIYLPNAGNMLTF

SEQ ID NO: 263308 - protein, 15 aa, Homo sapiens
  CDR3 for beta chain variable domain of TCR clone 131654 (TRBV6-1, TRBJ2-3)
CASSERGGITDTQYF

SEQ ID NO: 263309 - protein, 14 aa, Homo sapiens
  CDR3 for alpha chain variable domain of TCR clone 131655 (TRAV12-3, TRAJ10)
SHLPLTGGGNKLTF

SEQ ID NO: 263310 - protein, 15 aa, Homo sapiens
  CDR3 for beta chain variable domain of TCR clone 131655 (TRBV7-9, TRBJ1-4)
CASSRTGGFNEKLFS

SEQ ID NO: 263311 - protein, 13 aa, Homo sapiens
  CDR3 for alpha chain variable domain of TCR clone 131656 (TRAV2, TRAJ15)
CAVASQAGTALFF

SEQ ID NO: 263312 - protein, 16 aa, Homo sapiens
  CDR3 for beta chain variable domain of TCR clone 131656 (TRBV18, TRBJ1-5)
CASSPYRVEGNQPQHF

SEQ ID NO: 263313 - protein, 23 aa, Homo sapiens
  CDR3 for alpha chain variable domain of TCR clone 131657 (TRAV21, TRAJ38)
CAVANAGNNHIQNPDPAVYQLRD

SEQ ID NO: 263314 - protein, 16 aa, Homo sapiens
  CDR3 for beta chain variable domain of TCR clone 131657 (TRBV5-4, TRBJ2-2)
CASSSGQGATTGELFF

SEQ ID NO: 263315 - protein, 13 aa, Homo sapiens
  CDR3 for alpha chain variable domain of TCR clone 131658 (TRAV12-2, TRAJ52)
CNAGGTSYGKLTF

SEQ ID NO: 263316 - protein, 16 aa, Homo sapiens
  CDR3 for beta chain variable domain of TCR clone 131658 (TRBV7-9, TRBJ1-2)
CASSLGFSSGEDGYTF

SEQ ID NO: 263317 - protein, 17 aa, Homo sapiens
  CDR3 for alpha chain variable domain of TCR clone 131659 (TRAV3, TRAJ6)
CAVRDGPRAGGSYIPTF

SEQ ID NO: 263318 - protein, 16 aa, Homo sapiens
  CDR3 for beta chain variable domain of TCR clone 131659 (TRBV6-6, TRBJ1-5)
CASSYSTLVGNQPQHF

SEQ ID NO: 263319 - protein, 16 aa, Homo sapiens
  CDR3 for alpha chain variable domain of TCR clone 131660 (TRAV17, TRAJ54)
CATDSDIIQGAQKLVF

SEQ ID NO: 263320 - protein, 14 aa, Homo sapiens
  CDR3 for beta chain variable domain of TCR clone 131660 (TRBV12-5, TRBJ2-5)
CASGSRTHQETQYF

SEQ ID NO: 263321 - protein, 11 aa, Homo sapiens
  CDR3 for alpha chain variable domain of TCR clone 131661 (TRAV2, TRAJ13)
CASGGYQKVTF

SEQ ID NO: 263322 - protein, 15 aa, Homo sapiens
  CDR3 for beta chain variable domain of TCR clone 131661 (TRBV20-1, TRBJ2-7)
CSAESGTSGAYEQYF

SEQ ID NO: 263323 - protein, 20 aa, Homo sapiens
  CDR3 for alpha chain variable domain of TCR clone 131662 (TRAV26-1, TRAJ42)
CCVLLHRPTYYGGSQGNLIF

SEQ ID NO: 263324 - protein, 16 aa, Homo sapiens
  CDR3 for beta chain variable domain of TCR clone 131662 (TRBV7-3, TRBJ2-2)
CASSLKRGTLSGELFF

SEQ ID NO: 263325 - protein, 11 aa, Homo sapiens
  CDR3 for alpha chain variable domain of TCR clone 131663 (TRAV2, TRAJ9)
CCGAGGFKTIF

SEQ ID NO: 263326 - protein, 16 aa, Homo sapiens
  CDR3 for beta chain variable domain of TCR clone 131663 (TRBV13, TRBJ2-2)
CASSPRTGEHTGELFF

SEQ ID NO: 263327 - protein, 14 aa, Homo sapiens
  CDR3 for alpha chain variable domain of TCR clone 131664 (TRAV1-2, TRAJ16)
CAVNRFSDGQKLLC

SEQ ID NO: 263328 - protein, 13 aa, Homo sapiens
  CDR3 for beta chain variable domain of TCR clone 131664 (TRBV19, TRBJ1-2)
CASSVPGQDGYTF

SEQ ID NO: 263329 - protein, 14 aa, Homo sapiens
  CDR3 for alpha chain variable domain of TCR clone 131665 (TRAV35, TRAJ33)
CAGSSQDSNFQLIW

SEQ ID NO: 263330 - protein, 15 aa, Homo sapiens
  CDR3 for beta chain variable domain of TCR clone 131665 (TRBV20-1, TRBJ2-7)
CSAESGTSGAYEQYF

SEQ ID NO: 263331 - protein, 12 aa, Homo sapiens
  CDR3 for alpha chain variable domain of TCR clone 131666 (TRAV25, TRAJ29)
CAGHSGNTPLVF

SEQ ID NO: 263332 - protein, 17 aa, Homo sapiens
  CDR3 for beta chain variable domain of TCR clone 131666 (TRBV7-2, TRBJ2-2)
CASSPRGAGEGTGELFF

SEQ ID NO: 263333 - protein, 11 aa, Homo sapiens
  CDR3 for alpha chain variable domain of TCR clone 131667 (TRAV6, TRAJ41)
CALNSGYALNF

SEQ ID NO: 263334 - protein, 15 aa, Homo sapiens
  CDR3 for beta chain variable domain of TCR clone 131667 (TRBV20-1, TRBJ1-5)
CSAFKNGQRNQPQYF

SEQ ID NO: 263335 - protein, 14 aa, Homo sapiens
  CDR3 for alpha chain variable domain of TCR clone 131668 (TRAV12-2, TRAJ15)
CAPHTGQAGTAPIF

SEQ ID NO: 263336 - protein, 17 aa, Homo sapiens
  CDR3 for beta chain variable domain of TCR clone 131668 (TRBV5-5, TRBJ1-2)
CASSLGSLDGQSEGYTF

SEQ ID NO: 263337 - protein, 13 aa, Homo sapiens
  CDR3 for alpha chain variable domain of TCR clone 131669 (TRAV8-6, TRAJ13)
CAVRDGVYQKVTF

SEQ ID NO: 263338 - protein, 15 aa, Homo sapiens
  CDR3 for beta chain variable domain of TCR clone 131669 (TRBV7-9, TRBJ2-2)
CASRPEGTSTGELFF

SEQ ID NO: 263339 - protein, 14 aa, Homo sapiens
  CDR3 for alpha chain variable domain of TCR clone 131670 (TRAV14/DV4, TRAJ32)
SNVLPLTPTNKLTF

SEQ ID NO: 263340 - protein, 17 aa, Homo sapiens
  CDR3 for beta chain variable domain of TCR clone 131670 (TRBV20-1, TRBJ2-1)
CSASSSGLAGSYNEQFF

SEQ ID NO: 263341 - protein, 14 aa, Homo sapiens
  CDR3 for alpha chain variable domain of TCR clone 131671 (TRAV35, TRAJ22)
CAGLRPGSARQLTF

SEQ ID NO: 263342 - protein, 18 aa, Homo sapiens
  CDR3 for beta chain variable domain of TCR clone 131671 (TRBV11-2, TRBJ2-3)
CASSLGGASRGAPNTQYF

SEQ ID NO: 263343 - protein, 15 aa, Homo sapiens
  CDR3 for alpha chain variable domain of TCR clone 131672 (TRAV23/DV6, TRAJ18)
CAARYRGSTLGRLYF

SEQ ID NO: 263344 - protein, 19 aa, Homo sapiens
  CDR3 for beta chain variable domain of TCR clone 131672 (TRBV7-9, TRBJ2-1)
CASSHNRGALLRSYNEQFF

SEQ ID NO: 263345 - protein, 14 aa, Homo sapiens
  CDR3 for alpha chain variable domain of TCR clone 131673 (TRAV12-1, TRAJ29)
RVVNEGSGNTPLVF

SEQ ID NO: 263346 - protein, 13 aa, Homo sapiens
  CDR3 for beta chain variable domain of TCR clone 131673 (TRBV7-9, TRBJ2-3)
CASSPGSTDTQYF

SEQ ID NO: 263347 - protein, 13 aa, Homo sapiens
  CDR3 for alpha chain variable domain of TCR clone 131674 (TRAV36/DV7, TRAJ56)
CAGTTGANSKLTF

SEQ ID NO: 263348 - protein, 13 aa, Homo sapiens
  CDR3 for beta chain variable domain of TCR clone 131674 (TRBV4-1, TRBJ2-1)
CASSQAGGDEQFF

SEQ ID NO: 263349 - protein, 14 aa, Homo sapiens
  CDR3 for alpha chain variable domain of TCR clone 131675 (TRAV12-1, TRAJ36)
CVVNYWGKQPLLWD

SEQ ID NO: 263350 - protein, 13 aa, Homo sapiens
  CDR3 for beta chain variable domain of TCR clone 131675 (TRBV14, TRBJ1-1)
CASSREFGTEDFF

SEQ ID NO: 263351 - protein, 13 aa, Homo sapiens
  CDR3 for alpha chain variable domain of TCR clone 131676 (TRAV20, TRAJ54)
CAVQAGGAQKLVF

SEQ ID NO: 263352 - protein, 14 aa, Homo sapiens
  CDR3 for beta chain variable domain of TCR clone 131676 (TRBV20-1, TRBJ2-7)
CSATTGTGGYEQYF

SEQ ID NO: 263353 - protein, 17 aa, Homo sapiens
  CDR3 for alpha chain variable domain of TCR clone 131677 (TRAV20, TRAJ53)
CAVQAHGSGGSNYKLTF

SEQ ID NO: 263354 - protein, 11 aa, Homo sapiens
  CDR3 for beta chain variable domain of TCR clone 131677 (TRBV18, TRBJ2-5)
CASSPRETQYF

SEQ ID NO: 263355 - protein, 12 aa, Homo sapiens
  CDR3 for alpha chain variable domain of TCR clone 131678 (TRAV12-2, TRAJ10)
WGVTGGGNKLTF

SEQ ID NO: 263356 - protein, 13 aa, Homo sapiens
  CDR3 for beta chain variable domain of TCR clone 131678 (TRBV7-9, TRBJ2-1)
CASSSSNFNEQFF

SEQ ID NO: 263357 - protein, 14 aa, Homo sapiens
  CDR3 for alpha chain variable domain of TCR clone 131679 (TRAV12-2, TRAJ44)
CAVNPAGTASKLTF

SEQ ID NO: 263358 - protein, 16 aa, Homo sapiens
  CDR3 for beta chain variable domain of TCR clone 131679 (TRBV6-1, TRBJ1-3)
CASVQGGVETPYILER

SEQ ID NO: 263359 - protein, 16 aa, Homo sapiens
  CDR3 for alpha chain variable domain of TCR clone 131680 (TRAV12-1, TRAJ43)
CVVDPHRFGAGTRLTV

SEQ ID NO: 263360 - protein, 13 aa, Homo sapiens
  CDR3 for beta chain variable domain of TCR clone 131680 (TRBV12-4, TRBJ1-2)
CASSSGPNYGYTF

SEQ ID NO: 263361 - protein, 13 aa, Homo sapiens
  CDR3 for alpha chain variable domain of TCR clone 131681 (TRAV13-1, TRAJ27)
CAASIHQCRQINL

SEQ ID NO: 263362 - protein, 15 aa, Homo sapiens
  CDR3 for beta chain variable domain of TCR clone 131681 (TRBV27, TRBJ2-1)
CASSNGGGSSNEQFF

SEQ ID NO: 263363 - protein, 14 aa, Homo sapiens
  CDR3 for alpha chain variable domain of TCR clone 131682 (TRAV26-1, TRAJ38)
CIADNAGNNRKLVW

SEQ ID NO: 263364 - protein, 12 aa, Homo sapiens
  CDR3 for beta chain variable domain of TCR clone 131682 (TRBV5-1, TRBJ2-7)
CASSFRGYEQYF

SEQ ID NO: 263365 - protein, 17 aa, Homo sapiens
  CDR3 for alpha chain variable domain of TCR clone 131683 (TRAV3, TRAJ42)
CAVRDRDYGGSQGNLIF

SEQ ID NO: 263366 - protein, 15 aa, Homo sapiens
  CDR3 for beta chain variable domain of TCR clone 131683 (TRBV6-3, TRBJ2-7)
CASSSPETVFYEQYF

SEQ ID NO: 263367 - protein, 11 aa, Homo sapiens
  CDR3 for alpha chain variable domain of TCR clone 131684 (TRAV12-3, TRAJ43)
CAMSVSNDMRF

SEQ ID NO: 263368 - protein, 14 aa, Homo sapiens
  CDR3 for beta chain variable domain of TCR clone 131684 (TRBV18, TRBJ2-5)
CASSPGVSQETQYF

SEQ ID NO: 263369 - protein, 16 aa, Homo sapiens
  CDR3 for alpha chain variable domain of TCR clone 131685 (TRAV8-3, TRAJ13)
CAVGAYPSGGYQKVTF

SEQ ID NO: 263370 - protein, 15 aa, Homo sapiens
  CDR3 for beta chain variable domain of TCR clone 131685 (TRBV11-3, TRBJ2-3)
CASLKDGREGDTQYF

SEQ ID NO: 263371 - protein, 13 aa, Homo sapiens
  CDR3 for alpha chain variable domain of TCR clone 131686 (TRAV2, TRAJ40)
CAVVTSGTYKYIF

SEQ ID NO: 263372 - protein, 15 aa, Homo sapiens
  CDR3 for beta chain variable domain of TCR clone 131686 (TRBV11-3, TRBJ2-1)
CASSGGTSSLDEQFF

SEQ ID NO: 263373 - protein, 12 aa, Homo sapiens
  CDR3 for alpha chain variable domain of TCR clone 131687 (TRAV1-2, TRAJ33)
CAALDSNYQLIW

SEQ ID NO: 263374 - protein, 16 aa, Homo sapiens
  CDR3 for beta chain variable domain of TCR clone 131687 (TRBV6-4, TRBJ1-2)
CASSEAVVDPNYGYTF

SEQ ID NO: 263375 - protein, 14 aa, Homo sapiens
  CDR3 for alpha chain variable domain of TCR clone 131688 (TRAV1-2, TRAJ8)
CAVREDTGFQKLVF

SEQ ID NO: 263376 - protein, 15 aa, Homo sapiens
  CDR3 for beta chain variable domain of TCR clone 131688 (TRBV20-1, TRBJ2-1)
CSARGGTRYYNEQFF

SEQ ID NO: 263377 - protein, 14 aa, Homo sapiens
  CDR3 for alpha chain variable domain of TCR clone 131689 (TRAV38-1, TRAJ40)
CPLRPTSGTYKYIF

SEQ ID NO: 263378 - protein, 14 aa, Homo sapiens
  CDR3 for beta chain variable domain of TCR clone 131689 (TRBV25-1, TRBJ1-1)
CASTHLGGNTEAFF

SEQ ID NO: 263379 - protein, 11 aa, Homo sapiens
  CDR3 for alpha chain variable domain of TCR clone 131690 (TRAV12-2, TRAJ43)
CASPIGNDMRF

SEQ ID NO: 263380 - protein, 13 aa, Homo sapiens
  CDR3 for beta chain variable domain of TCR clone 131690 (TRBV7-3, TRBJ1-2)
CASSVKRGYGYTF

SEQ ID NO: 263381 - protein, 14 aa, Homo sapiens
  CDR3 for alpha chain variable domain of TCR clone 131691 (TRAV1-2, TRAJ16)
CAVNRFSDGQKLLF

SEQ ID NO: 263382 - protein, 14 aa, Homo sapiens
  CDR3 for beta chain variable domain of TCR clone 131691 (TRBV19, TRBJ2-7)
CASSIFAGTYEQYF

SEQ ID NO: 263383 - protein, 13 aa, Homo sapiens
  CDR3 for alpha chain variable domain of TCR clone 131692 (TRAV27, TRAJ6)
CAGGTRGIYIPTF

SEQ ID NO: 263384 - protein, 14 aa, Homo sapiens
  CDR3 for beta chain variable domain of TCR clone 131692 (TRBV6-3, TRBJ1-1)
CASSYQRRDTEAFF

SEQ ID NO: 263385 - protein, 13 aa, Homo sapiens
  CDR3 for alpha chain variable domain of TCR clone 131693 (TRAV1-1, TRAJ9)
CAAKNTGGFKTIF

SEQ ID NO: 263386 - protein, 14 aa, Homo sapiens
  CDR3 for beta chain variable domain of TCR clone 131693 (TRBV12-5, TRBJ2-5)
CASGSRTQQETQYF

SEQ ID NO: 263387 - protein, 11 aa, Homo sapiens
  CDR3 for alpha chain variable domain of TCR clone 131694 (TRAV8-2, TRAJ26)
CVVTLLRGSEF

SEQ ID NO: 263388 - protein, 15 aa, Homo sapiens
  CDR3 for beta chain variable domain of TCR clone 131694 (TRBV11-2, TRBJ2-2)
CASSSDRVNAGELFF

SEQ ID NO: 263389 - protein, 14 aa, Homo sapiens
  CDR3 for alpha chain variable domain of TCR clone 131695 (TRAV8-3, TRAJ35)
CAVVPQGFGNVLHC

SEQ ID NO: 263390 - protein, 16 aa, Homo sapiens
  CDR3 for beta chain variable domain of TCR clone 131695 (TRBV12-5, TRBJ2-5)
CASGPRTSGNQETQYF

SEQ ID NO: 263391 - protein, 13 aa, Homo sapiens
  CDR3 for alpha chain variable domain of TCR clone 131696 (TRAV26-1, TRAJ35)
CIVSRRVGGMLHC

SEQ ID NO: 263392 - protein, 17 aa, Homo sapiens
  CDR3 for beta chain variable domain of TCR clone 131696 (TRBV7-9, TRBJ2-7)
CASSFDGSRGGAYEQYF

SEQ ID NO: 263393 - protein, 14 aa, Homo sapiens
  CDR3 for alpha chain variable domain of TCR clone 131697 (TRAV13-1, TRAJ11)
CAASRRSGYSTLTF

SEQ ID NO: 263394 - protein, 19 aa, Homo sapiens
  CDR3 for beta chain variable domain of TCR clone 131697 (TRBV7-2, TRBJ2-3)
CASSFLSRNWGGGTDTQYF

SEQ ID NO: 263395 - protein, 14 aa, Homo sapiens
  CDR3 for alpha chain variable domain of TCR clone 131698 (TRAV12-1, TRAJ26)
CVVKGSNYGQNFVF

SEQ ID NO: 263396 - protein, 17 aa, Homo sapiens
  CDR3 for beta chain variable domain of TCR clone 131698 (TRBV11-2, TRBJ2-6)
CASSQGDIFSGANVLTF

SEQ ID NO: 263397 - protein, 14 aa, Homo sapiens
  CDR3 for alpha chain variable domain of TCR clone 131699 (TRAV1-2, TRAJ16)
CAVNRFSDGQKLLF

SEQ ID NO: 263398 - protein, 15 aa, Homo sapiens
  CDR3 for beta chain variable domain of TCR clone 131699 (TRBV28, TRBJ1-5)
CASSRDRGRDQPQHF

SEQ ID NO: 263399 - protein, 12 aa, Homo sapiens
  CDR3 for alpha chain variable domain of TCR clone 131700 (TRAV12-3, TRAJ29)
CAAREGNTPLVF

SEQ ID NO: 263400 - protein, 15 aa, Homo sapiens
  CDR3 for beta chain variable domain of TCR clone 131700 (TRBV7-3, TRBJ2-1)
CASSPTGGGEVEQFF

SEQ ID NO: 263401 - protein, 13 aa, Homo sapiens
  CDR3 for alpha chain variable domain of TCR clone 131701 (TRAV12-3, TRAJ9)
CAMRNTGGFKTIF

SEQ ID NO: 263402 - protein, 15 aa, Homo sapiens
  CDR3 for beta chain variable domain of TCR clone 131701 (TRBV11-3, TRBJ2-2)
CASSLGGRPTGELFF

SEQ ID NO: 263403 - protein, 14 aa, Homo sapiens
  CDR3 for alpha chain variable domain of TCR clone 131702 (TRAV12-2, TRAJ45)
CAVYSGGGSDGLTF

SEQ ID NO: 263404 - protein, 14 aa, Homo sapiens
  CDR3 for beta chain variable domain of TCR clone 131702 (TRBV6-5, TRBJ1-2)
CASTRGGGSDGYTF

SEQ ID NO: 263405 - protein, 14 aa, Homo sapiens
  CDR3 for alpha chain variable domain of TCR clone 131703 (TRAV26-1, TRAJ49)
CIVRPSNPGNQFYF

SEQ ID NO: 263406 - protein, 15 aa, Homo sapiens
  CDR3 for beta chain variable domain of TCR clone 131703 (TRBV19, TRBJ1-1)
CASMGFRDVNTEAFF

SEQ ID NO: 263407 - protein, 14 aa, Homo sapiens
  CDR3 for alpha chain variable domain of TCR clone 131704 (TRAV12-2, TRAJ44)
CDVNPAGTASKLTF

SEQ ID NO: 263408 - protein, 13 aa, Homo sapiens
  CDR3 for beta chain variable domain of TCR clone 131704 (TRBV20-1, TRBJ1-6)
CSAPLGVGSPLHF

SEQ ID NO: 263409 - protein, 17 aa, Homo sapiens
  CDR3 for alpha chain variable domain of TCR clone 131705 (TRAV29/DV5, TRAJ40)
CAASVIYTTSGPYKYIF

SEQ ID NO: 263410 - protein, 13 aa, Homo sapiens
  CDR3 for beta chain variable domain of TCR clone 131705 (TRBV6-1, TRBJ2-1)
CASSHDRNNEQFF

SEQ ID NO: 263411 - protein, 14 aa, Homo sapiens
  CDR3 for alpha chain variable domain of TCR clone 131706 (TRAV12-3, TRAJ29)
CAMSPYSGNTPLVF

SEQ ID NO: 263412 - protein, 13 aa, Homo sapiens
  CDR3 for beta chain variable domain of TCR clone 131706 (TRBV2, TRBJ2-2)
CASRAWRTGELFF

SEQ ID NO: 263413 - protein, 15 aa, Homo sapiens
  CDR3 for alpha chain variable domain of TCR clone 131707 (TRAV20, TRAJ43)
CAVHAGKSSNNDMRF

SEQ ID NO: 263414 - protein, 14 aa, Homo sapiens
  CDR3 for beta chain variable domain of TCR clone 131707 (TRBV27, TRBJ2-1)
CASRHLGGGKEQFF

SEQ ID NO: 263415 - protein, 13 aa, Homo sapiens
  CDR3 for alpha chain variable domain of TCR clone 131708 (TRAV27, TRAJ45)
CRSSGGGAEGLTF

SEQ ID NO: 263416 - protein, 17 aa, Homo sapiens
  CDR3 for beta chain variable domain of TCR clone 131708 (TRBV11-2, TRBJ2-1)
CASSLSPPGVEYNEQFF

SEQ ID NO: 263417 - protein, 14 aa, Homo sapiens
  CDR3 for alpha chain variable domain of TCR clone 131709 (TRAV17, TRAJ12)
CATDEKDSSYKFIF

SEQ ID NO: 263418 - protein, 16 aa, Homo sapiens
  CDR3 for beta chain variable domain of TCR clone 131709 (TRBV11-2, TRBJ2-1)
CASSPRLAGVYNEQFF

SEQ ID NO: 263419 - protein, 10 aa, Homo sapiens
  CDR3 for alpha chain variable domain of TCR clone 131710 (TRAV1-2, TRAJ31)
CAFFDARLMF

SEQ ID NO: 263420 - protein, 20 aa, Homo sapiens
  CDR3 for beta chain variable domain of TCR clone 131710 (TRBV7-8, TRBJ2-2)
CASSHLFPGPTIHITGELFF

SEQ ID NO: 263421 - protein, 17 aa, Homo sapiens
  CDR3 for alpha chain variable domain of TCR clone 131711 (TRAV3, TRAJ6)
CAVRDGPRAGGSDIPTF

SEQ ID NO: 263422 - protein, 16 aa, Homo sapiens
  CDR3 for beta chain variable domain of TCR clone 131711 (TRBV4-1, TRBJ2-7)
CASSLTAGQATYEQYF

SEQ ID NO: 263423 - protein, 15 aa, Homo sapiens
  CDR3 for alpha chain variable domain of TCR clone 131712 (TRAV21, TRAJ53)
CATLNSGGSNYKLTF

SEQ ID NO: 263424 - protein, 14 aa, Homo sapiens
  CDR3 for beta chain variable domain of TCR clone 131712 (TRBV28, TRBJ1-5)
CASSLFPGVQPQHF

SEQ ID NO: 263425 - protein, 13 aa, Homo sapiens
  CDR3 for alpha chain variable domain of TCR clone 131713 (TRAV17, TRAJ5)
CALRGTGRRALTF

SEQ ID NO: 263426 - protein, 15 aa, Homo sapiens
  CDR3 for beta chain variable domain of TCR clone 131713 (TRBV6-1, TRBJ1-5)
CASSELREGNQSQHF

SEQ ID NO: 263427 - protein, 13 aa, Homo sapiens
  CDR3 for alpha chain variable domain of TCR clone 131714 (TRAV12-2, TRAJ20)
CAVYPSNDYKLSF

SEQ ID NO: 263428 - protein, 11 aa, Homo sapiens
  CDR3 for beta chain variable domain of TCR clone 131714 (TRBV12-4, TRBJ2-3)
CASTVTDTQYF

SEQ ID NO: 263429 - protein, 14 aa, Homo sapiens
  CDR3 for alpha chain variable domain of TCR clone 131715 (TRAV2, TRAJ9)
CAVEDRSGGFKTIF

SEQ ID NO: 263430 - protein, 15 aa, Homo sapiens
  CDR3 for beta chain variable domain of TCR clone 131715 (TRBV5-1, TRBJ2-1)
CASSLVANSYNEQFF

SEQ ID NO: 263431 - protein, 17 aa, Homo sapiens
  CDR3 for alpha chain variable domain of TCR clone 131716 (TRAV12-2, TRAJ4)
CAVNVRPVSGGYNKLIF

SEQ ID NO: 263432 - protein, 15 aa, Homo sapiens
  CDR3 for beta chain variable domain of TCR clone 131716 (TRBV6-3, TRBJ2-7)
CASSSPGTVFYEQYF

SEQ ID NO: 263433 - protein, 15 aa, Homo sapiens
  CDR3 for alpha chain variable domain of TCR clone 131717 (TRAV38-1, TRAJ37)
CAFIHGSGNTGKLII

SEQ ID NO: 263434 - protein, 12 aa, Homo sapiens
  CDR3 for beta chain variable domain of TCR clone 131717 (TRBV7-9, TRBJ2-7)
CASSFGSYEQYF

SEQ ID NO: 263435 - protein, 13 aa, Homo sapiens
  CDR3 for alpha chain variable domain of TCR clone 131718 (TRAV13-1, TRAJ53)
CSASKGSNYKLTF

SEQ ID NO: 263436 - protein, 13 aa, Homo sapiens
  CDR3 for beta chain variable domain of TCR clone 131718 (TRBV29-1, TRBJ2-5)
CSVTIASEETQYF

SEQ ID NO: 263437 - protein, 15 aa, Homo sapiens
  CDR3 for alpha chain variable domain of TCR clone 131719 (TRAV12-1, TRAJ36)
CVVNEHQTGANNLSF

SEQ ID NO: 263438 - protein, 12 aa, Homo sapiens
  CDR3 for beta chain variable domain of TCR clone 131719 (TRBV29-1, TRBJ2-3)
CSVTGGADTQYF

SEQ ID NO: 263439 - protein, 14 aa, Homo sapiens
  CDR3 for alpha chain variable domain of TCR clone 131720 (TRAV12-3, TRAJ10)
SHLPLTGGGNKLTF

SEQ ID NO: 263440 - protein, 14 aa, Homo sapiens
  CDR3 for beta chain variable domain of TCR clone 131720 (TRBV20-1, TRBJ2-5)
CSATGLAVQGTQYF

SEQ ID NO: 263441 - protein, 14 aa, Homo sapiens
  CDR3 for alpha chain variable domain of TCR clone 131721 (TRAV20, TRAJ26)
CAVQAAIYGQNFVF

SEQ ID NO: 263442 - protein, 13 aa, Homo sapiens
  CDR3 for beta chain variable domain of TCR clone 131721 (TRBV27, TRBJ2-2)
CQQLGDTTGELFF

SEQ ID NO: 263443 - protein, 17 aa, Homo sapiens
  CDR3 for alpha chain variable domain of TCR clone 131722 (TRAV12-1, TRAJ42)
CVVMRMNYGGSKGNLIF

SEQ ID NO: 263444 - protein, 13 aa, Homo sapiens
  CDR3 for beta chain variable domain of TCR clone 131722 (TRBV7-2, TRBJ1-1)
CASSLARPAEAFF

SEQ ID NO: 263445 - protein, 12 aa, Homo sapiens
  CDR3 for alpha chain variable domain of TCR clone 131723 (TRAV13-1, TRAJ21)
CAAKEGFNKFYF

SEQ ID NO: 263446 - protein, 15 aa, Homo sapiens
  CDR3 for beta chain variable domain of TCR clone 131723 (TRBV11-2, TRBJ1-6)
CASSLDPWAVSPLHF

SEQ ID NO: 263447 - protein, 13 aa, Homo sapiens
  CDR3 for alpha chain variable domain of TCR clone 131724 (TRAV8-1, TRAJ13)
CAVSKGGYQKVTS

SEQ ID NO: 263448 - protein, 18 aa, Homo sapiens
  CDR3 for beta chain variable domain of TCR clone 131724 (TRBV11-2, TRBJ2-7)
CASSWRTVQTGQSYEQYF

SEQ ID NO: 263449 - protein, 14 aa, Homo sapiens
  CDR3 for alpha chain variable domain of TCR clone 131725 (TRAV8-3, TRAJ9)
CAVVYNTGGFKTIF

SEQ ID NO: 263450 - protein, 14 aa, Homo sapiens
  CDR3 for beta chain variable domain of TCR clone 131725 (TRBV7-3, TRBJ2-2)
CASSSGAYTGELFF

SEQ ID NO: 263451 - protein, 13 aa, Homo sapiens
  CDR3 for alpha chain variable domain of TCR clone 131726 (TRAV21, TRAJ32)
CAVSGGATNKLIF

SEQ ID NO: 263452 - protein, 17 aa, Homo sapiens
  CDR3 for beta chain variable domain of TCR clone 131726 (TRBV23-1, TRBJ2-1)
CASSQWPQLTMSSSSGQ

SEQ ID NO: 263453 - protein, 19 aa, Homo sapiens
  CDR3 for alpha chain variable domain of TCR clone 131727 (TRAV8-1, TRAJ18)
CAVNARRADRGSTLGRLYF

SEQ ID NO: 263454 - protein, 15 aa, Homo sapiens
  CDR3 for beta chain variable domain of TCR clone 131727 (TRBV5-1, TRBJ2-3)
CASRNQAGSTDTQYF

SEQ ID NO: 263455 - protein, 10 aa, Homo sapiens
  CDR3 for alpha chain variable domain of TCR clone 131728 (TRAV23/DV6, TRAJ57)
CAASSTLSQG

SEQ ID NO: 263456 - protein, 14 aa, Homo sapiens
  CDR3 for beta chain variable domain of TCR clone 131728 (TRBV11-2, TRBJ2-7)
CASSLGAGAYEQYF

SEQ ID NO: 263457 - protein, 14 aa, Homo sapiens
  CDR3 for alpha chain variable domain of TCR clone 131729 (TRAV4, TRAJ22)
CLARLSGSARQLTF

SEQ ID NO: 263458 - protein, 14 aa, Homo sapiens
  CDR3 for beta chain variable domain of TCR clone 131729 (TRBV7-8, TRBJ2-3)
CASSLGAGTDTQYF

SEQ ID NO: 263459 - protein, 13 aa, Homo sapiens
  CDR3 for alpha chain variable domain of TCR clone 131730 (TRAV3, TRAJ20)
CAVRDTGDYKLSF

SEQ ID NO: 263460 - protein, 15 aa, Homo sapiens
  CDR3 for beta chain variable domain of TCR clone 131730 (TRBV6-1, TRBJ2-7)
CASSEGGVVSYEQYF

SEQ ID NO: 263461 - protein, 11 aa, Homo sapiens
  CDR3 for alpha chain variable domain of TCR clone 131731 (TRAV12-3, TRAJ27)
CAMANAGKPTF

SEQ ID NO: 263462 - protein, 14 aa, Homo sapiens
  CDR3 for beta chain variable domain of TCR clone 131731 (TRBV4-1, TRBJ2-2)
CASSQAVNTGELFF

SEQ ID NO: 263463 - protein, 15 aa, Homo sapiens
  CDR3 for alpha chain variable domain of TCR clone 131732 (TRAV21, TRAJ53)
CATLNSGGSNYKLTF

SEQ ID NO: 263464 - protein, 15 aa, Homo sapiens
  CDR3 for beta chain variable domain of TCR clone 131732 (TRBV6-5, TRBJ1-2)
CASSYSQAFNYGYTF

SEQ ID NO: 263465 - protein, 13 aa, Homo sapiens
  CDR3 for alpha chain variable domain of TCR clone 131733 (TRAV12-3, TRAJ13)
CAMSSGGYQEVTF

SEQ ID NO: 263466 - protein, 13 aa, Homo sapiens
  CDR3 for beta chain variable domain of TCR clone 131733 (TRBV20-1, TRBJ1-1)
CSAPPGGHTEALF

SEQ ID NO: 263467 - protein, 16 aa, Homo sapiens
  CDR3 for alpha chain variable domain of TCR clone 131734 (TRAV8-3, TRAJ8)
CAVPRDGNTGFQKLAF

SEQ ID NO: 263468 - protein, 15 aa, Homo sapiens
  CDR3 for beta chain variable domain of TCR clone 131734 (TRBV6-1, TRBJ2-6)
CASSSRPSGANVLTF

SEQ ID NO: 263469 - protein, 15 aa, Homo sapiens
  CDR3 for alpha chain variable domain of TCR clone 131735 (TRAV17, TRAJ37)
CATDGGSSNTGKLIF

SEQ ID NO: 263470 - protein, 14 aa, Homo sapiens
  CDR3 for beta chain variable domain of TCR clone 131735 (TRBV5-7, TRBJ1-2)
CASSAVGVSGGYTF

SEQ ID NO: 263471 - protein, 15 aa, Homo sapiens
  CDR3 for alpha chain variable domain of TCR clone 131736 (TRAV21, TRAJ10)
CAVPLLTGGGNKLTF

SEQ ID NO: 263472 - protein, 16 aa, Homo sapiens
  CDR3 for beta chain variable domain of TCR clone 131736 (TRBV18, TRBJ1-1)
CASSPGVGGRGGEAFF

SEQ ID NO: 263473 - protein, 12 aa, Homo sapiens
  CDR3 for alpha chain variable domain of TCR clone 131737 (TRAV12-1, TRAJ6)
CVVSERSYIPTF

SEQ ID NO: 263474 - protein, 13 aa, Homo sapiens
  CDR3 for beta chain variable domain of TCR clone 131737 (TRBV7-9, TRBJ1-2)
CASSLKQNYGYTF

SEQ ID NO: 263475 - protein, 13 aa, Homo sapiens
  CDR3 for alpha chain variable domain of TCR clone 131738 (TRAV30, TRAJ24)
CGTVTDSWGKLQF

SEQ ID NO: 263476 - protein, 16 aa, Homo sapiens
  CDR3 for beta chain variable domain of TCR clone 131738 (TRBV19, TRBJ2-1)
CASSRAGPSSYNEQFF

SEQ ID NO: 263477 - protein, 11 aa, Homo sapiens
  CDR3 for alpha chain variable domain of TCR clone 131739 (TRAV21, TRAJ34)
CAVTNTDKLIF

SEQ ID NO: 263478 - protein, 13 aa, Homo sapiens
  CDR3 for beta chain variable domain of TCR clone 131739 (TRBV6-1, TRBJ1-2)
CASSVGQGTGYTF

SEQ ID NO: 263479 - protein, 10 aa, Homo sapiens
  CDR3 for alpha chain variable domain of TCR clone 131740 (TRAV36/DV7, TRAJ31)
CASNNARLMF

SEQ ID NO: 263480 - protein, 15 aa, Homo sapiens
  CDR3 for beta chain variable domain of TCR clone 131740 (TRBV5-1, TRBJ2-2)
CASSSQGGNTGELFF

SEQ ID NO: 263481 - protein, 17 aa, Homo sapiens
  CDR3 for alpha chain variable domain of TCR clone 131741 (TRAV12-2, TRAJ52)
CAVNPYAGGTSYGKLTF

SEQ ID NO: 263482 - protein, 15 aa, Homo sapiens
  CDR3 for beta chain variable domain of TCR clone 131741 (TRBV9, TRBJ1-6)
CASSVAGTGDSPLHF

SEQ ID NO: 263483 - protein, 16 aa, Homo sapiens
  CDR3 for alpha chain variable domain of TCR clone 131742 (TRAV30, TRAJ24)
CGTEIVDADSWGKFQF

SEQ ID NO: 263484 - protein, 15 aa, Homo sapiens
  CDR3 for beta chain variable domain of TCR clone 131742 (TRBV7-7, TRBJ2-2)
CATSKLAKNTGELFF

SEQ ID NO: 263485 - protein, 14 aa, Homo sapiens
  CDR3 for alpha chain variable domain of TCR clone 131743 (TRAV3, TRAJ22)
CAVRDYGSARQLTF

SEQ ID NO: 263486 - protein, 13 aa, Homo sapiens
  CDR3 for beta chain variable domain of TCR clone 131743 (TRBV11-2, TRBJ2-5)
CASGRGAKETQYF

SEQ ID NO: 263487 - protein, 13 aa, Homo sapiens
  CDR3 for alpha chain variable domain of TCR clone 131744 (TRAV17, TRAJ26)
CATVDNYGQNFVF

SEQ ID NO: 263488 - protein, 16 aa, Homo sapiens
  CDR3 for beta chain variable domain of TCR clone 131744 (TRBV2, TRBJ2-1)
CASSVGGSLSHNEQFF

SEQ ID NO: 263489 - protein, 14 aa, Homo sapiens
  CDR3 for alpha chain variable domain of TCR clone 131745 (TRAV1-2, TRAJ16)
CAVNRFSDGQKLLF

SEQ ID NO: 263490 - protein, 14 aa, Homo sapiens
  CDR3 for beta chain variable domain of TCR clone 131745 (TRBV28, TRBJ2-2)
CASSMQGYTGELFF

SEQ ID NO: 263491 - protein, 13 aa, Homo sapiens
  CDR3 for alpha chain variable domain of TCR clone 131746 (TRAV3, TRAJ21)
CAVREPDFNKFYF

SEQ ID NO: 263492 - protein, 15 aa, Homo sapiens
  CDR3 for beta chain variable domain of TCR clone 131746 (TRBV28, TRBJ1-3)
CASSMGWASGNTIYF

SEQ ID NO: 263493 - protein, 14 aa, Homo sapiens
  CDR3 for alpha chain variable domain of TCR clone 131747 (TRAV20, TRAJ29)
CAVQAWVGNTPLVF

SEQ ID NO: 263494 - protein, 14 aa, Homo sapiens
  CDR3 for beta chain variable domain of TCR clone 131747 (TRBV12-4, TRBJ2-2)
CASSSGGNTGELFF

SEQ ID NO: 263495 - protein, 14 aa, Homo sapiens
  CDR3 for alpha chain variable domain of TCR clone 131748 (TRAV17, TRAJ37)
CATDGSSNTGKLIF

SEQ ID NO: 263496 - protein, 16 aa, Homo sapiens
  CDR3 for beta chain variable domain of TCR clone 131748 (TRBV10-3, TRBJ2-7)
CAISADFADRPYEQYF

SEQ ID NO: 263497 - protein, 12 aa, Homo sapiens
  CDR3 for alpha chain variable domain of TCR clone 131749 (TRAV2, TRAJ24)
CAATDSWGKFQF

SEQ ID NO: 263498 - protein, 13 aa, Homo sapiens
  CDR3 for beta chain variable domain of TCR clone 131749 (TRBV5-8, TRBJ1-1)
CASSLGGDTEAFF

SEQ ID NO: 263499 - protein, 17 aa, Homo sapiens
  CDR3 for alpha chain variable domain of TCR clone 131750 (TRAV3, TRAJ42)
CAVRDRDYGGSQGNLIF

SEQ ID NO: 263500 - protein, 16 aa, Homo sapiens
  CDR3 for beta chain variable domain of TCR clone 131750 (TRBV2, TRBJ2-5)
CASSETQGVGEETQYF

SEQ ID NO: 263501 - protein, 14 aa, Homo sapiens
  CDR3 for alpha chain variable domain of TCR clone 131751 (TRAV12-1, TRAJ3)
CGAARYSSASKLIF

SEQ ID NO: 263502 - protein, 15 aa, Homo sapiens
  CDR3 for beta chain variable domain of TCR clone 131751 (TRBV7-2, TRBJ2-6)
CASSREGSGANVLTF

SEQ ID NO: 263503 - protein, 14 aa, Homo sapiens
  CDR3 for alpha chain variable domain of TCR clone 131752 (TRAV26-1, TRAJ49)
CIVRLTNTGNQFYF

SEQ ID NO: 263504 - protein, 13 aa, Homo sapiens
  CDR3 for beta chain variable domain of TCR clone 131752 (TRBV4-1, TRBJ2-7)
CASSQGQANEQYF

SEQ ID NO: 263505 - protein, 11 aa, Homo sapiens
  CDR3 for alpha chain variable domain of TCR clone 131753 (TRAV12-1, TRAJ21)
CVVYNFNKFYL

SEQ ID NO: 263506 - protein, 16 aa, Homo sapiens
  CDR3 for beta chain variable domain of TCR clone 131753 (TRBV6-5, TRBJ2-7)
CASSYFRVGISDEQYF

SEQ ID NO: 263507 - protein, 11 aa, Homo sapiens
  CDR3 for alpha chain variable domain of TCR clone 131754 (TRAV27, TRAJ47)
SIVEYGNKLVF

SEQ ID NO: 263508 - protein, 13 aa, Homo sapiens
  CDR3 for beta chain variable domain of TCR clone 131754 (TRBV19, TRBJ1-2)
CASSVPGQDGYTF

SEQ ID NO: 263509 - protein, 17 aa, Homo sapiens
  CDR3 for alpha chain variable domain of TCR clone 131755 (TRAV3, TRAJ6)
CAVRDGPRAGGSYIPTF

SEQ ID NO: 263510 - protein, 15 aa, Homo sapiens
  CDR3 for beta chain variable domain of TCR clone 131755 (TRBV5-8, TRBJ2-2)
YASSLDRGATGELFF

SEQ ID NO: 263511 - protein, 12 aa, Homo sapiens
  CDR3 for alpha chain variable domain of TCR clone 131756 (TRAV3, TRAJ20)
CAVRDGDYKLSF

SEQ ID NO: 263512 - protein, 18 aa, Homo sapiens
  CDR3 for beta chain variable domain of TCR clone 131756 (TRBV25-1, TRBJ1-2)
CASSGLQNGQGLIFGYTF

SEQ ID NO: 263513 - protein, 12 aa, Homo sapiens
  CDR3 for alpha chain variable domain of TCR clone 131757 (TRAV3, TRAJ26)
CAVRDYGQNFVF

SEQ ID NO: 263514 - protein, 13 aa, Homo sapiens
  CDR3 for beta chain variable domain of TCR clone 131757 (TRBV4-2, TRBJ1-1)
CASSQAGNTEAFF

SEQ ID NO: 263515 - protein, 14 aa, Homo sapiens
  CDR3 for alpha chain variable domain of TCR clone 131758 (TRAV26-1, TRAJ48)
CIVRVGFGNEKLTF

SEQ ID NO: 263516 - protein, 14 aa, Homo sapiens
  CDR3 for beta chain variable domain of TCR clone 131758 (TRBV7-2, TRBJ2-7)
CASRSQGAAYEQYF

SEQ ID NO: 263517 - protein, 11 aa, Homo sapiens
  CDR3 for alpha chain variable domain of TCR clone 131759 (TRAV1-2, TRAJ31)
CAVDNNARLMF

SEQ ID NO: 263518 - protein, 16 aa, Homo sapiens
  CDR3 for beta chain variable domain of TCR clone 131759 (TRBV11-2, TRBJ2-1)
CASSPRLAGVYNEQFF

SEQ ID NO: 263519 - protein, 15 aa, Homo sapiens
  CDR3 for alpha chain variable domain of TCR clone 131760 (TRAV3, TRAJ5)
CAVRDLDTGRRALTF

SEQ ID NO: 263520 - protein, 14 aa, Homo sapiens
  CDR3 for beta chain variable domain of TCR clone 131760 (TRBV11-2, TRBJ1-1)
CASSLEGVGTEAFF

SEQ ID NO: 263521 - protein, 12 aa, Homo sapiens
  CDR3 for alpha chain variable domain of TCR clone 131761 (TRAV30, TRAJ43)
CGTEERGNDMRF

SEQ ID NO: 263522 - protein, 13 aa, Homo sapiens
  CDR3 for beta chain variable domain of TCR clone 131761 (TRBV12-4, TRBJ1-2)
CASSSGGKDGYTF

SEQ ID NO: 263523 - protein, 15 aa, Homo sapiens
  CDR3 for alpha chain variable domain of TCR clone 131762 (TRAV21, TRAJ53)
CATLNSGGSNYKLTF

SEQ ID NO: 263524 - protein, 14 aa, Homo sapiens
  CDR3 for beta chain variable domain of TCR clone 131762 (TRBV11-2, TRBJ1-1)
CASSLEGVGTEALF

SEQ ID NO: 263525 - protein, 13 aa, Homo sapiens
  CDR3 for alpha chain variable domain of TCR clone 131763 (TRAV12-3, TRAJ33)
CAMSVNSNYRLIW

SEQ ID NO: 263526 - protein, 12 aa, Homo sapiens
  CDR3 for beta chain variable domain of TCR clone 131763 (TRBV11-2, TRBJ2-2)
CASSLGGGELFF

SEQ ID NO: 263527 - protein, 16 aa, Homo sapiens
  CDR3 for alpha chain variable domain of TCR clone 131764 (TRAV30, TRAJ24)
CGTEIVDADSWGTFQF

SEQ ID NO: 263528 - protein, 17 aa, Homo sapiens
  CDR3 for beta chain variable domain of TCR clone 131764 (TRBV20-1, TRBJ2-1)
CSARDPLAGVWDNEQFF

SEQ ID NO: 263529 - protein, 13 aa, Homo sapiens
  CDR3 for alpha chain variable domain of TCR clone 131765 (TRAV12-1, TRAJ26)
SATYLYYGQNFVF

SEQ ID NO: 263530 - protein, 13 aa, Homo sapiens
  CDR3 for beta chain variable domain of TCR clone 131765 (TRBV4-1, TRBJ2-2)
CASSQENTGELFF

SEQ ID NO: 263531 - protein, 22 aa, Homo sapiens
  CDR3 for alpha chain variable domain of TCR clone 131766 (TRAV8-3, TRAJ8)
CAVGPNEHRLSETCIWNWHPTS

SEQ ID NO: 263532 - protein, 14 aa, Homo sapiens
  CDR3 for beta chain variable domain of TCR clone 131766 (TRBV7-8, TRBJ2-3)
CASSLEAGTDTQYF

SEQ ID NO: 263533 - protein, 13 aa, Homo sapiens
  CDR3 for alpha chain variable domain of TCR clone 131767 (TRAV35, TRAJ21)
CAGQLSNFNRFYF

SEQ ID NO: 263534 - protein, 11 aa, Homo sapiens
  CDR3 for beta chain variable domain of TCR clone 131767 (TRBV7-6, TRBJ2-5)
CASSSQETQYF

SEQ ID NO: 263535 - protein, 13 aa, Homo sapiens
  CDR3 for alpha chain variable domain of TCR clone 131768 (TRAV12-2, TRAJ37)
CAGGSGNTGKLIF

SEQ ID NO: 263536 - protein, 15 aa, Homo sapiens
  CDR3 for beta chain variable domain of TCR clone 131768 (TRBV9, TRBJ1-6)
CASSVAGTGDSPLHF

SEQ ID NO: 263537 - protein, 11 aa, Homo sapiens
  CDR3 for alpha chain variable domain of TCR clone 131769 (TRAV3, TRAJ21)
CAVGNRNKFYF

SEQ ID NO: 263538 - protein, 16 aa, Homo sapiens
  CDR3 for beta chain variable domain of TCR clone 131769 (TRBV19, TRBJ2-1)
CASSKAGPSSYNEQFF

SEQ ID NO: 263539 - protein, 12 aa, Homo sapiens
  CDR3 for alpha chain variable domain of TCR clone 131770 (TRAV21, TRAJ33)
CAKMDSNYQLIW

SEQ ID NO: 263540 - protein, 17 aa, Homo sapiens
  CDR3 for beta chain variable domain of TCR clone 131770 (TRBV7-9, TRBJ2-3)
CASSPTVAGDLTDTQYF

SEQ ID NO: 263541 - protein, 17 aa, Homo sapiens
  CDR3 for alpha chain variable domain of TCR clone 131771 (TRAV3, TRAJ7)
CAVRDMSPLEGTTDPLL

SEQ ID NO: 263542 - protein, 17 aa, Homo sapiens
  CDR3 for beta chain variable domain of TCR clone 131771 (TRBV15, TRBJ1-2)
CATSGREIDVVNYGYTF

SEQ ID NO: 263543 - protein, 12 aa, Homo sapiens
  CDR3 for alpha chain variable domain of TCR clone 131772 (TRAV8-3, TRAJ26)
CAGDNYGQNFVF

SEQ ID NO: 263544 - protein, 15 aa, Homo sapiens
  CDR3 for beta chain variable domain of TCR clone 131772 (TRBV11-2, TRBJ1-2)
CASSLEGVQRNGYTF

SEQ ID NO: 263545 - protein, 15 aa, Homo sapiens
  CDR3 for alpha chain variable domain of TCR clone 131773 (TRAV8-4, TRAJ3)
CAVTGENLVQQCFQD

SEQ ID NO: 263546 - protein, 16 aa, Homo sapiens
  CDR3 for beta chain variable domain of TCR clone 131773 (TRBV4-2, TRBJ1-1)
CASSQAGFGMNSEAFF

SEQ ID NO: 263547 - protein, 12 aa, Homo sapiens
  CDR3 for alpha chain variable domain of TCR clone 131774 (TRAV12-3, TRAJ17)
CAMTLTGNKLTF

SEQ ID NO: 263548 - protein, 15 aa, Homo sapiens
  CDR3 for beta chain variable domain of TCR clone 131774 (TRBV19, TRBJ2-1)
CASSILGEGRNEKFF

SEQ ID NO: 263549 - protein, 11 aa, Homo sapiens
  CDR3 for alpha chain variable domain of TCR clone 131775 (TRAV17, TRAJ9)
CGFTGGFKTIF

SEQ ID NO: 263550 - protein, 14 aa, Homo sapiens
  CDR3 for beta chain variable domain of TCR clone 131775 (TRBV7-9, TRBJ2-2)
CAISLVQDTGELFF

SEQ ID NO: 263551 - protein, 17 aa, Homo sapiens
  CDR3 for alpha chain variable domain of TCR clone 131776 (TRAV3, TRAJ6)
CAVRDGPRAGGSYIPTF

SEQ ID NO: 263552 - protein, 11 aa, Homo sapiens
  CDR3 for beta chain variable domain of TCR clone 131776 (TRBV6-1, TRBJ2-1)
CASISSNEQFF

SEQ ID NO: 263553 - protein, 14 aa, Homo sapiens
  CDR3 for alpha chain variable domain of TCR clone 131777 (TRAV26-1, TRAJ21)
CTVRPPYNFNKFYF

SEQ ID NO: 263554 - protein, 14 aa, Homo sapiens
  CDR3 for beta chain variable domain of TCR clone 131777 (TRBV11-3, TRBJ2-1)
CASSATTSGSIQFF

SEQ ID NO: 263555 - protein, 15 aa, Homo sapiens
  CDR3 for alpha chain variable domain of TCR clone 131778 (TRAV21, TRAJ10)
CAVPLLTGGGNKLTF

SEQ ID NO: 263556 - protein, 14 aa, Homo sapiens
  CDR3 for beta chain variable domain of TCR clone 131778 (TRBV12-4, TRBJ1-1)
CASSLGTGGTEVFF

SEQ ID NO: 263557 - protein, 12 aa, Homo sapiens
  CDR3 for alpha chain variable domain of TCR clone 131779 (TRAV2, TRAJ33)
CAVPDSNYQLIW

SEQ ID NO: 263558 - protein, 16 aa, Homo sapiens
  CDR3 for beta chain variable domain of TCR clone 131779 (TRBV7-3, TRBJ2-2)
CASSLKRGTLSGELFF

SEQ ID NO: 263559 - protein, 15 aa, Homo sapiens
  CDR3 for alpha chain variable domain of TCR clone 131780 (TRAV4, TRAJ10)
CLVGDGSGGGNKLTF

SEQ ID NO: 263560 - protein, 15 aa, Homo sapiens
  CDR3 for beta chain variable domain of TCR clone 131780 (TRBV27, TRBJ2-3)
CASSSLAGAIDTQYF

SEQ ID NO: 263561 - protein, 14 aa, Homo sapiens
  CDR3 for alpha chain variable domain of TCR clone 131781 (TRAV14/DV4, TRAJ15)
CAMRRDQAGTALIF

SEQ ID NO: 263562 - protein, 16 aa, Homo sapiens
  CDR3 for beta chain variable domain of TCR clone 131781 (TRBV15, TRBJ2-3)
CATSRDLGSVTDTQYF

SEQ ID NO: 263563 - protein, 12 aa, Homo sapiens
  CDR3 for alpha chain variable domain of TCR clone 131782 (TRAV25, TRAJ35)
CAGIGFGNVLHC

SEQ ID NO: 263564 - protein, 13 aa, Homo sapiens
  CDR3 for beta chain variable domain of TCR clone 131782 (TRBV25-1, TRBJ2-2)
CASRKANTGELFF

SEQ ID NO: 263565 - protein, 12 aa, Homo sapiens
  CDR3 for alpha chain variable domain of TCR clone 131783 (TRAV30, TRAJ43)
CGTEERGNDMRF

SEQ ID NO: 263566 - protein, 12 aa, Homo sapiens
  CDR3 for beta chain variable domain of TCR clone 131783 (TRBV7-8, TRBJ2-7)
CASSLGDREQYF

SEQ ID NO: 263567 - protein, 14 aa, Homo sapiens
  CDR3 for alpha chain variable domain of TCR clone 131784 (TRAV1-2, TRAJ16)
CAVNRFSDGQKLLF

SEQ ID NO: 263568 - protein, 15 aa, Homo sapiens
  CDR3 for beta chain variable domain of TCR clone 131784 (TRBV7-9, TRBJ1-6)
CARSSPGRGNSPLLF

SEQ ID NO: 263569 - protein, 15 aa, Homo sapiens
  CDR3 for alpha chain variable domain of TCR clone 131785 (TRAV12-3, TRAJ49)
CAMTAPGNTGNQFYF

SEQ ID NO: 263570 - protein, 12 aa, Homo sapiens
  CDR3 for beta chain variable domain of TCR clone 131785 (TRBV7-9, TRBJ2-7)
CASSIKREEQYF

SEQ ID NO: 263571 - protein, 14 aa, Homo sapiens
  CDR3 for alpha chain variable domain of TCR clone 131786 (TRAV1-2, TRAJ8)
CAVREDTGFQKLVF

SEQ ID NO: 263572 - protein, 12 aa, Homo sapiens
  CDR3 for beta chain variable domain of TCR clone 131786 (TRBV27, TRBJ2-2)
CASKLFTGKLFF

SEQ ID NO: 263573 - protein, 15 aa, Homo sapiens
  CDR3 for alpha chain variable domain of TCR clone 131787 (TRAV27, TRAJ38)
CAGRFNAGNNRKLIW

SEQ ID NO: 263574 - protein, 11 aa, Homo sapiens
  CDR3 for beta chain variable domain of TCR clone 131787 (TRBV6-4, TRBJ2-7)
CASSDTDEQYF

SEQ ID NO: 263575 - protein, 16 aa, Homo sapiens
  CDR3 for alpha chain variable domain of TCR clone 131788 (TRAV8-3, TRAJ13)
CAVVLMNSGGYQKVTF

SEQ ID NO: 263576 - protein, 20 aa, Homo sapiens
  CDR3 for beta chain variable domain of TCR clone 131788 (TRBV5-4, TRBJ2-5)
CASSLAGGGERDPVLRARHA

SEQ ID NO: 263577 - protein, 13 aa, Homo sapiens
  CDR3 for alpha chain variable domain of TCR clone 131789 (TRAV3, TRAJ20)
CAVRSLNDYKLSF

SEQ ID NO: 263578 - protein, 14 aa, Homo sapiens
  CDR3 for beta chain variable domain of TCR clone 131789 (TRBV10-3, TRBJ2-2)
CAISGRNRDGELFF

SEQ ID NO: 263579 - protein, 12 aa, Homo sapiens
  CDR3 for alpha chain variable domain of TCR clone 131790 (TRAV2, TRAJ10)
CASTGGGNKLTF

SEQ ID NO: 263580 - protein, 15 aa, Homo sapiens
  CDR3 for beta chain variable domain of TCR clone 131790 (TRBV2, TRBJ2-1)
CASSELAGSYNEQFF

SEQ ID NO: 263581 - protein, 15 aa, Homo sapiens
  CDR3 for alpha chain variable domain of TCR clone 131791 (TRAV12-1, TRAJ4)
CVVTPWMGGDNKLIF

SEQ ID NO: 263582 - protein, 18 aa, Homo sapiens
  CDR3 for beta chain variable domain of TCR clone 131791 (TRBV11-2, TRBJ2-3)
CASSVRTSGSKKTDTQYF

SEQ ID NO: 263583 - protein, 14 aa, Homo sapiens
  CDR3 for alpha chain variable domain of TCR clone 131792 (TRAV12-3, TRAJ42)
CAMNYGGSQGNLIF

SEQ ID NO: 263584 - protein, 12 aa, Homo sapiens
  CDR3 for beta chain variable domain of TCR clone 131792 (TRBV28, TRBJ2-3)
CASSLYRDTQYF

SEQ ID NO: 263585 - protein, 11 aa, Homo sapiens
  CDR3 for alpha chain variable domain of TCR clone 131793 (TRAV1-2, TRAJ8)
CAVSSFQKLVF

SEQ ID NO: 263586 - protein, 14 aa, Homo sapiens
  CDR3 for beta chain variable domain of TCR clone 131793 (TRBV25-1, TRBJ1-1)
CASTHLGGNTEAFF

SEQ ID NO: 263587 - protein, 12 aa, Homo sapiens
  CDR3 for alpha chain variable domain of TCR clone 131794 (TRAV4, TRAJ9)
CLVPTGGFKTIF

SEQ ID NO: 263588 - protein, 12 aa, Homo sapiens
  CDR3 for beta chain variable domain of TCR clone 131794 (TRBV7-9, TRBJ1-6)
CASSLMTSPLHS

SEQ ID NO: 263589 - protein, 13 aa, Homo sapiens
  CDR3 for alpha chain variable domain of TCR clone 131795 (TRAV2, TRAJ15)
CAVASQAGTALIF

SEQ ID NO: 263590 - protein, 16 aa, Homo sapiens
  CDR3 for beta chain variable domain of TCR clone 131795 (TRBV5-1, TRBJ1-1)
CASSSGGNSLNTEVFF

SEQ ID NO: 263591 - protein, 16 aa, Homo sapiens
  CDR3 for alpha chain variable domain of TCR clone 131796 (TRAV16, TRAJ4)
CALSRMFSGGYNKLIF

SEQ ID NO: 263592 - protein, 15 aa, Homo sapiens
  CDR3 for beta chain variable domain of TCR clone 131796 (TRBV7-3, TRBJ2-1)
CASSPTGGGEVEQFF

SEQ ID NO: 263593 - protein, 14 aa, Homo sapiens
  CDR3 for alpha chain variable domain of TCR clone 131797 (TRAV12-1, TRAJ30)
CVVNIGGRDDKIIF

SEQ ID NO: 263594 - protein, 14 aa, Homo sapiens
  CDR3 for beta chain variable domain of TCR clone 131797 (TRBV20-1, TRBJ2-1)
CSSQIGGSANEQFF

SEQ ID NO: 263595 - protein, 14 aa, Homo sapiens
  CDR3 for alpha chain variable domain of TCR clone 131798 (TRAV1-2, TRAJ16)
CAVNRFPDGQKLLF

SEQ ID NO: 263596 - protein, 14 aa, Homo sapiens
  CDR3 for beta chain variable domain of TCR clone 131798 (TRBV13, TRBJ2-5)
CASSLGRGQETQYF

SEQ ID NO: 263597 - protein, 18 aa, Homo sapiens
  CDR3 for alpha chain variable domain of TCR clone 131799 (TRAV12-3, TRAJ52)
CAMSVGGAGGTSYGKLTF

SEQ ID NO: 263598 - protein, 13 aa, Homo sapiens
  CDR3 for beta chain variable domain of TCR clone 131799 (TRBV12-4, TRBJ1-5)
CASSPDRAQPQHF

SEQ ID NO: 263599 - protein, 14 aa, Homo sapiens
  CDR3 for alpha chain variable domain of TCR clone 131800 (TRAV23/DV6, TRAJ13)
CAASETGGYQTVTF

SEQ ID NO: 263600 - protein, 16 aa, Homo sapiens
  CDR3 for beta chain variable domain of TCR clone 131800 (TRBV5-1, TRBJ1-3)
CASSPWAPSSGNTIYF

SEQ ID NO: 263601 - protein, 13 aa, Homo sapiens
  CDR3 for alpha chain variable domain of TCR clone 131801 (TRAV20, TRAJ29)
CAVQAVGNTPLVF

SEQ ID NO: 263602 - protein, 15 aa, Homo sapiens
  CDR3 for beta chain variable domain of TCR clone 131801 (TRBV5-1, TRBJ2-3)
CASSVTSGSTDTQYF

SEQ ID NO: 263603 - protein, 12 aa, Homo sapiens
  CDR3 for alpha chain variable domain of TCR clone 131802 (TRAV13-1, TRAJ21)
CAAKEGFNKFYF

SEQ ID NO: 263604 - protein, 20 aa, Homo sapiens
  CDR3 for beta chain variable domain of TCR clone 131802 (TRBV7-8, TRBJ2-2)
CASSHLFPGPTSHITGELFF

SEQ ID NO: 263605 - protein, 17 aa, Homo sapiens
  CDR3 for alpha chain variable domain of TCR clone 131803 (TRAV3, TRAJ42)
CAVRDRDYGGSQGNLIF

SEQ ID NO: 263606 - protein, 14 aa, Homo sapiens
  CDR3 for beta chain variable domain of TCR clone 131803 (TRBV5-1, TRBJ2-3)
CASSLFGPTDTQYF

SEQ ID NO: 263607 - protein, 13 aa, Homo sapiens
  CDR3 for alpha chain variable domain of TCR clone 131804 (TRAV13-2, TRAJ15)
CAERHQAGTALIF

SEQ ID NO: 263608 - protein, 15 aa, Homo sapiens
  CDR3 for beta chain variable domain of TCR clone 131804 (TRBV11-2, TRBJ2-7)
CASRFPGTGGYEQYF

SEQ ID NO: 263609 - protein, 16 aa, Homo sapiens
  CDR3 for alpha chain variable domain of TCR clone 131805 (TRAV38-1, TRAJ37)
CAFKGGGSSNTGKLIF

SEQ ID NO: 263610 - protein, 13 aa, Homo sapiens
  CDR3 for beta chain variable domain of TCR clone 131805 (TRBV12-4, TRBJ2-5)
CASSLFRRETQYF

SEQ ID NO: 263611 - protein, 14 aa, Homo sapiens
  CDR3 for alpha chain variable domain of TCR clone 131806 (TRAV12-2, TRAJ13)
WAVKKTGGYQKVTF

SEQ ID NO: 263612 - protein, 12 aa, Homo sapiens
  CDR3 for beta chain variable domain of TCR clone 131806 (TRBV11-2, TRBJ2-2)
CASSLGGGELFF

SEQ ID NO: 263613 - protein, 14 aa, Homo sapiens
  CDR3 for alpha chain variable domain of TCR clone 131807 (TRAV4, TRAJ26)
CLVGDQGYGQNFVF

SEQ ID NO: 263614 - protein, 16 aa, Homo sapiens
  CDR3 for beta chain variable domain of TCR clone 131807 (TRBV2, TRBJ2-1)
CASSVGGSLSYNEQLF

SEQ ID NO: 263615 - protein, 12 aa, Homo sapiens
  CDR3 for alpha chain variable domain of TCR clone 131808 (TRAV17, TRAJ12)
CATLRSSYKLIF

SEQ ID NO: 263616 - protein, 13 aa, Homo sapiens
  CDR3 for beta chain variable domain of TCR clone 131808 (TRBV7-2, TRBJ1-5)
CASSFARNQPQHF

SEQ ID NO: 263617 - protein, 11 aa, Homo sapiens
  CDR3 for alpha chain variable domain of TCR clone 131809 (TRAV2, TRAJ33)
CAVESNYQLIW

SEQ ID NO: 263618 - protein, 16 aa, Homo sapiens
  CDR3 for beta chain variable domain of TCR clone 131809 (TRBV2, TRBJ2-1)
CASRSPAGGKYNEQFF

SEQ ID NO: 263619 - protein, 11 aa, Homo sapiens
  CDR3 for alpha chain variable domain of TCR clone 131810 (TRAV1-2, TRAJ40)
CAVPGTYKYIF

SEQ ID NO: 263620 - protein, 17 aa, Homo sapiens
  CDR3 for beta chain variable domain of TCR clone 131810 (TRBV20-1, TRBJ2-1)
CSASSSGLAGSYNEQFF

SEQ ID NO: 263621 - protein, 12 aa, Homo sapiens
  CDR3 for alpha chain variable domain of TCR clone 131811 (TRAV21, TRAJ39)
CAADNAGNMLTL

SEQ ID NO: 263622 - protein, 13 aa, Homo sapiens
  CDR3 for beta chain variable domain of TCR clone 131811 (TRBV12-4, TRBJ1-1)
CASSPGTGFEAFF

SEQ ID NO: 263623 - protein, 16 aa, Homo sapiens
  CDR3 for alpha chain variable domain of TCR clone 131812 (TRAV17, TRAJ17)
CATALQEEAAGNQLTF

SEQ ID NO: 263624 - protein, 12 aa, Homo sapiens
  CDR3 for beta chain variable domain of TCR clone 131812 (TRBV4-2, TRBJ2-5)
CASGGAQETQYF

SEQ ID NO: 263625 - protein, 19 aa, Homo sapiens
  CDR3 for alpha chain variable domain of TCR clone 131813 (TRAV26-1, TRAJ52)
CIVRAHRNAGGTSYGKLTF

SEQ ID NO: 263626 - protein, 15 aa, Homo sapiens
  CDR3 for beta chain variable domain of TCR clone 131813 (TRBV12-4, TRBJ2-5)
CASSPPTGLQETQYS

SEQ ID NO: 263627 - protein, 12 aa, Homo sapiens
  CDR3 for alpha chain variable domain of TCR clone 131814 (TRAV17, TRAJ57)
CATDGGSEKLAF

SEQ ID NO: 263628 - protein, 12 aa, Homo sapiens
  CDR3 for beta chain variable domain of TCR clone 131814 (TRBV29-1, TRBJ2-2)
CSVDKYTGELFF

SEQ ID NO: 263629 - protein, 11 aa, Homo sapiens
  CDR3 for alpha chain variable domain of TCR clone 131815 (TRAV2, TRAJ33)
CAVDSNYQLIW

SEQ ID NO: 263630 - protein, 12 aa, Homo sapiens
  CDR3 for beta chain variable domain of TCR clone 131815 (TRBV28, TRBJ2-1)
CASSFRGDEQFF

SEQ ID NO: 263631 - protein, 15 aa, Homo sapiens
  CDR3 for alpha chain variable domain of TCR clone 131816 (TRAV8-1, TRAJ6)
CAVNTPSGGSYIPTF

SEQ ID NO: 263632 - protein, 15 aa, Homo sapiens
  CDR3 for beta chain variable domain of TCR clone 131816 (TRBV11-2, TRBJ2-2)
CASSSDRVNAGELFF

SEQ ID NO: 263633 - protein, 14 aa, Homo sapiens
  CDR3 for alpha chain variable domain of TCR clone 131817 (TRAV26-1, TRAJ38)
CIADNAGNNRKLIW

SEQ ID NO: 263634 - protein, 16 aa, Homo sapiens
  CDR3 for beta chain variable domain of TCR clone 131817 (TRBV20-1, TRBJ1-2)
CSASMGQGVANYGYTF

SEQ ID NO: 263635 - protein, 15 aa, Homo sapiens
  CDR3 for alpha chain variable domain of TCR clone 131818 (TRAV35, TRAJ58)
CAGRRQETSGSRLTF

SEQ ID NO: 263636 - protein, 15 aa, Homo sapiens
  CDR3 for beta chain variable domain of TCR clone 131818 (TRBV20-1, TRBJ1-5)
CSAFKNGQRNQPQHF

SEQ ID NO: 263637 - protein, 13 aa, Homo sapiens
  CDR3 for alpha chain variable domain of TCR clone 131819 (TRAV13-1, TRAJ37)
CAARSGNTGKLIF

SEQ ID NO: 263638 - protein, 12 aa, Homo sapiens
  CDR3 for beta chain variable domain of TCR clone 131819 (TRBV24-1, TRBJ1-1)
CATLYPNTEAFF

SEQ ID NO: 263639 - protein, 14 aa, Homo sapiens
  CDR3 for alpha chain variable domain of TCR clone 131820 (TRAV1-1, TRAJ27)
CAVIYNTNAGKSTF

SEQ ID NO: 263640 - protein, 13 aa, Homo sapiens
  CDR3 for beta chain variable domain of TCR clone 131820 (TRBV6-1, TRBJ1-1)
CASSRQGNTEAFF

SEQ ID NO: 263641 - protein, 13 aa, Homo sapiens
  CDR3 for alpha chain variable domain of TCR clone 131821 (TRAV13-2, TRAJ13)
CAERPGGYQKVTF

SEQ ID NO: 263642 - protein, 14 aa, Homo sapiens
  CDR3 for beta chain variable domain of TCR clone 131821 (TRBV7-2, TRBJ2-7)
CASSPKTSFYEQYF

SEQ ID NO: 263643 - protein, 16 aa, Homo sapiens
  CDR3 for alpha chain variable domain of TCR clone 131822 (TRAV23/DV6, TRAJ9)
CAASIGGHTGGFKTIF

SEQ ID NO: 263644 - protein, 14 aa, Homo sapiens
  CDR3 for beta chain variable domain of TCR clone 131822 (TRBV9, TRBJ2-7)
CASSVGVGSYEQYF

SEQ ID NO: 263645 - protein, 14 aa, Homo sapiens
  CDR3 for alpha chain variable domain of TCR clone 131823 (TRAV12-2, TRAJ13)
CAVKKTGGYQKVTF

SEQ ID NO: 263646 - protein, 16 aa, Homo sapiens
  CDR3 for beta chain variable domain of TCR clone 131823 (TRBV11-2, TRBJ1-2)
CASSLDTGGADYGYTF

SEQ ID NO: 263647 - protein, 17 aa, Homo sapiens
  CDR3 for alpha chain variable domain of TCR clone 131824 (TRAV3, TRAJ22)
CAVRDPPLEGFCKATDL

SEQ ID NO: 263648 - protein, 13 aa, Homo sapiens
  CDR3 for beta chain variable domain of TCR clone 131824 (TRBV7-3, TRBJ1-1)
CASSQDWGAEAFF

SEQ ID NO: 263649 - protein, 14 aa, Homo sapiens
  CDR3 for alpha chain variable domain of TCR clone 131825 (TRAV2, TRAJ37)
CAVDFTSNTGKLIF

SEQ ID NO: 263650 - protein, 16 aa, Homo sapiens
  CDR3 for beta chain variable domain of TCR clone 131825 (TRBV4-2, TRBJ2-5)
CASSQELVGSQETQYF

SEQ ID NO: 263651 - protein, 13 aa, Homo sapiens
  CDR3 for alpha chain variable domain of TCR clone 131826 (TRAV17, TRAJ7)
CATDNYGNNRIAF

SEQ ID NO: 263652 - protein, 16 aa, Homo sapiens
  CDR3 for beta chain variable domain of TCR clone 131826 (TRBV4-1, TRBJ2-5)
CASSQAIAASSATQYF

SEQ ID NO: 263653 - protein, 15 aa, Homo sapiens
  CDR3 for alpha chain variable domain of TCR clone 131827 (TRAV3, TRAJ20)
CAVRDIKLSDYKLSF

SEQ ID NO: 263654 - protein, 14 aa, Homo sapiens
  CDR3 for beta chain variable domain of TCR clone 131827 (TRBV7-3, TRBJ1-1)
CASSLKGGNTEAFF

SEQ ID NO: 263655 - protein, 13 aa, Homo sapiens
  CDR3 for alpha chain variable domain of TCR clone 131828 (TRAV12-3, TRAJ13)
CAMTSGGHQKVTF

SEQ ID NO: 263656 - protein, 13 aa, Homo sapiens
  CDR3 for beta chain variable domain of TCR clone 131828 (TRBV7-9, TRBJ1-2)
CASSLKQNYGYTF

SEQ ID NO: 263657 - protein, 13 aa, Homo sapiens
  CDR3 for alpha chain variable domain of TCR clone 131829 (TRAV13-1, TRAJ21)
CAASIYNFNKFYL

SEQ ID NO: 263658 - protein, 13 aa, Homo sapiens
  CDR3 for beta chain variable domain of TCR clone 131829 (TRBV27, TRBJ1-4)
CASSLMGDEKLFF

SEQ ID NO: 263659 - protein, 14 aa, Homo sapiens
  CDR3 for alpha chain variable domain of TCR clone 131830 (TRAV12-2, TRAJ6)
CAVIASEGSYIPTF

SEQ ID NO: 263660 - protein, 12 aa, Homo sapiens
  CDR3 for beta chain variable domain of TCR clone 131830 (TRBV5-1, TRBJ1-2)
CASSQDTYGYTF

SEQ ID NO: 263661 - protein, 12 aa, Homo sapiens
  CDR3 for alpha chain variable domain of TCR clone 131831 (TRAV1-1, TRAJ8)
CAMGTGFQKLVF

SEQ ID NO: 263662 - protein, 15 aa, Homo sapiens
  CDR3 for beta chain variable domain of TCR clone 131831 (TRBV7-9, TRBJ1-4)
CASSRTGGFNEKLFF

SEQ ID NO: 263663 - protein, 15 aa, Homo sapiens
  CDR3 for alpha chain variable domain of TCR clone 131832 (TRAV3, TRAJ45)
CAVRTPWGGADGLTF

SEQ ID NO: 263664 - protein, 16 aa, Homo sapiens
  CDR3 for beta chain variable domain of TCR clone 131832 (TRBV6-1, TRBJ2-2)
CASSFGQGANTGELSF

SEQ ID NO: 263665 - protein, 10 aa, Homo sapiens
  CDR3 for alpha chain variable domain of TCR clone 131833 (TRAV39, TRAJ30)
CAVEYDKIIF

SEQ ID NO: 263666 - protein, 15 aa, Homo sapiens
  CDR3 for beta chain variable domain of TCR clone 131833 (TRBV7-9, TRBJ1-1)
CASSLLEQGGTEAFF

SEQ ID NO: 263667 - protein, 14 aa, Homo sapiens
  CDR3 for alpha chain variable domain of TCR clone 131834 (TRAV12-1, TRAJ23)
CVVIVHNQGGKLIF

SEQ ID NO: 263668 - protein, 13 aa, Homo sapiens
  CDR3 for beta chain variable domain of TCR clone 131834 (TRBV11-2, TRBJ2-5)
CASSFSSQETQYF

SEQ ID NO: 263669 - protein, 13 aa, Homo sapiens
  CDR3 for alpha chain variable domain of TCR clone 131835 (TRAV1-2, TRAJ9)
CAVLNTGGFKTIF

SEQ ID NO: 263670 - protein, 15 aa, Homo sapiens
  CDR3 for beta chain variable domain of TCR clone 131835 (TRBV19, TRBJ2-1)
CASSTPGLAYNEQFF

SEQ ID NO: 263671 - protein, 14 aa, Homo sapiens
  CDR3 for alpha chain variable domain of TCR clone 131836 (TRAV2, TRAJ9)
CAVEDRSGGFKTIF

SEQ ID NO: 263672 - protein, 17 aa, Homo sapiens
  CDR3 for beta chain variable domain of TCR clone 131836 (TRBV28, TRBJ2-5)
CASSRQGGLAGAETQYF

SEQ ID NO: 263673 - protein, 13 aa, Homo sapiens
  CDR3 for alpha chain variable domain of TCR clone 131837 (TRAV38-1, TRAJ42)
CARWGGSQGNLIF

SEQ ID NO: 263674 - protein, 13 aa, Homo sapiens
  CDR3 for beta chain variable domain of TCR clone 131837 (TRBV20-1, TRBJ1-1)
CSARGGGNTEAFF

SEQ ID NO: 263675 - protein, 15 aa, Homo sapiens
  CDR3 for alpha chain variable domain of TCR clone 131838 (TRAV35, TRAJ58)
CAGRRQETSGSRLTF

SEQ ID NO: 263676 - protein, 15 aa, Homo sapiens
  CDR3 for beta chain variable domain of TCR clone 131838 (TRBV27, TRBJ2-1)
CASSNGGGSSNEQFF

SEQ ID NO: 263677 - protein, 15 aa, Homo sapiens
  CDR3 for alpha chain variable domain of TCR clone 131839 (TRAV12-2, TRAJ53)
CAVNRGGGSNYKLTF

SEQ ID NO: 263678 - protein, 17 aa, Homo sapiens
  CDR3 for beta chain variable domain of TCR clone 131839 (TRBV7-3, TRBJ2-3)
CASSLMKRMRGADTQYF

SEQ ID NO: 263679 - protein, 13 aa, Homo sapiens
  CDR3 for alpha chain variable domain of TCR clone 131840 (TRAV27, TRAJ41)
CRSNSNSGYALNF

SEQ ID NO: 263680 - protein, 15 aa, Homo sapiens
  CDR3 for beta chain variable domain of TCR clone 131840 (TRBV9, TRBJ1-6)
CASSVAGTGDSPLHF

SEQ ID NO: 263681 - protein, 13 aa, Homo sapiens
  CDR3 for alpha chain variable domain of TCR clone 131841 (TRAV13-1, TRAJ11)
CAAVLAGYSTLTF

SEQ ID NO: 263682 - protein, 17 aa, Homo sapiens
  CDR3 for beta chain variable domain of TCR clone 131841 (TRBV25-1, TRBJ2-7)
CASSDARVVFSPYEQYF

SEQ ID NO: 263683 - protein, 15 aa, Homo sapiens
  CDR3 for alpha chain variable domain of TCR clone 131842 (TRAV26-1, TRAJ29)
CIVRVEGSGNKPLVF

SEQ ID NO: 263684 - protein, 13 aa, Homo sapiens
  CDR3 for beta chain variable domain of TCR clone 131842 (TRBV28, TRBJ1-1)
CASSKQGWTEAFF

SEQ ID NO: 263685 - protein, 13 aa, Homo sapiens
  CDR3 for alpha chain variable domain of TCR clone 131843 (TRAV23/DV6, TRAJ22)
CAPYSGSAGQLTF

SEQ ID NO: 263686 - protein, 15 aa, Homo sapiens
  CDR3 for beta chain variable domain of TCR clone 131843 (TRBV11-2, TRBJ1-6)
CASSLDPWAVSPLHF

SEQ ID NO: 263687 - protein, 15 aa, Homo sapiens
  CDR3 for alpha chain variable domain of TCR clone 131844 (TRAV3, TRAJ47)
CAVRDIGEYGNKLVF

SEQ ID NO: 263688 - protein, 14 aa, Homo sapiens
  CDR3 for beta chain variable domain of TCR clone 131844 (TRBV13, TRBJ2-5)
CASSLERVGETRYF

SEQ ID NO: 263689 - protein, 13 aa, Homo sapiens
  CDR3 for alpha chain variable domain of TCR clone 131845 (TRAV3, TRAJ4)
CAVRDGCYNKLIF

SEQ ID NO: 263690 - protein, 14 aa, Homo sapiens
  CDR3 for beta chain variable domain of TCR clone 131845 (TRBV12-4, TRBJ1-2)
CASSSSAAGSSYTF

SEQ ID NO: 263691 - protein, 12 aa, Homo sapiens
  CDR3 for alpha chain variable domain of TCR clone 131846 (TRAV12-3, TRAJ17)
CAMTLTGNKLTF

SEQ ID NO: 263692 - protein, 12 aa, Homo sapiens
  CDR3 for beta chain variable domain of TCR clone 131846 (TRBV12-4, TRBJ2-1)
CASSPGRNEQFF

SEQ ID NO: 263693 - protein, 14 aa, Homo sapiens
  CDR3 for alpha chain variable domain of TCR clone 131847 (TRAV8-3, TRAJ39)
CAVGAWGAGNMLTF

SEQ ID NO: 263694 - protein, 16 aa, Homo sapiens
  CDR3 for beta chain variable domain of TCR clone 131847 (TRBV7-2, TRBJ1-3)
YASSSGRVLSGNTIYF

SEQ ID NO: 263695 - protein, 13 aa, Homo sapiens
  CDR3 for alpha chain variable domain of TCR clone 131848 (TRAV38-1, TRAJ42)
CARWGGSQGTLIF

SEQ ID NO: 263696 - protein, 10 aa, Homo sapiens
  CDR3 for beta chain variable domain of TCR clone 131848 (TRBV2, TRBJ2-5)
CASSAATQYF

SEQ ID NO: 263697 - protein, 14 aa, Homo sapiens
  CDR3 for alpha chain variable domain of TCR clone 131849 (TRAV12-3, TRAJ29)
CAMILLSGNTPLVF

SEQ ID NO: 263698 - protein, 16 aa, Homo sapiens
  CDR3 for beta chain variable domain of TCR clone 131849 (TRBV28, TRBJ2-7)
CASSSGISGGGYEQYF

SEQ ID NO: 263699 - protein, 12 aa, Homo sapiens
  CDR3 for alpha chain variable domain of TCR clone 131850 (TRAV3, TRAJ20)
CAVRDGDYKLSF

SEQ ID NO: 263700 - protein, 14 aa, Homo sapiens
  CDR3 for beta chain variable domain of TCR clone 131850 (TRBV18, TRBJ2-7)
CASSPRGGAYEQYF

SEQ ID NO: 263701 - protein, 16 aa, Homo sapiens
  CDR3 for alpha chain variable domain of TCR clone 131851 (TRAV30, TRAJ24)
CGTEIVDADSWGKFQF

SEQ ID NO: 263702 - protein, 16 aa, Homo sapiens
  CDR3 for beta chain variable domain of TCR clone 131851 (TRBV3-1, TRBJ2-5)
CASSPGQFNGFGTQYF

SEQ ID NO: 263703 - protein, 13 aa, Homo sapiens
  CDR3 for alpha chain variable domain of TCR clone 131852 (TRAV13-1, TRAJ21)
CAASIYNFKKFYF

SEQ ID NO: 263704 - protein, 20 aa, Homo sapiens
  CDR3 for beta chain variable domain of TCR clone 131852 (TRBV7-8, TRBJ2-2)
CASSHLFPGPTIHITGELFF

SEQ ID NO: 263705 - protein, 15 aa, Homo sapiens
  CDR3 for alpha chain variable domain of TCR clone 131853 (TRAV23/DV6, TRAJ13)
CAAWPGGGGYQKVTF

SEQ ID NO: 263706 - protein, 17 aa, Homo sapiens
  CDR3 for beta chain variable domain of TCR clone 131853 (TRBV19, TRBJ2-7)
CASSISSYDSYPYERYF

SEQ ID NO: 263707 - protein, 12 aa, Homo sapiens
  CDR3 for alpha chain variable domain of TCR clone 131854 (TRAV21, TRAJ29)
CAVTSGNTPLVF

SEQ ID NO: 263708 - protein, 17 aa, Homo sapiens
  CDR3 for beta chain variable domain of TCR clone 131854 (TRBV12-4, TRBJ1-2)
CASRLGGSRELWLHLRF

SEQ ID NO: 263709 - protein, 13 aa, Homo sapiens
  CDR3 for alpha chain variable domain of TCR clone 131855 (TRAV3, TRAJ27)
CAVRPLGACKSTF

SEQ ID NO: 263710 - protein, 16 aa, Homo sapiens
  CDR3 for beta chain variable domain of TCR clone 131855 (TRBV12-5, TRBJ2-5)
CASGPRTSGNQETQYF

SEQ ID NO: 263711 - protein, 11 aa, Homo sapiens
  CDR3 for alpha chain variable domain of TCR clone 131856 (TRAV12-3, TRAJ27)
CAMANAGKSTF

SEQ ID NO: 263712 - protein, 13 aa, Homo sapiens
  CDR3 for beta chain variable domain of TCR clone 131856 (TRBV20-1, TRBJ1-1)
CSAIVGGNTEAFF

SEQ ID NO: 263713 - protein, 15 aa, Homo sapiens
  CDR3 for alpha chain variable domain of TCR clone 131857 (TRAV12-2, TRAJ23)
CAVKPIYNQGGKLIF

SEQ ID NO: 263714 - protein, 13 aa, Homo sapiens
  CDR3 for beta chain variable domain of TCR clone 131857 (TRBV10-3, TRBJ2-7)
CASKLAVNYEQYF

SEQ ID NO: 263715 - protein, 11 aa, Homo sapiens
  CDR3 for alpha chain variable domain of TCR clone 131858 (TRAV2, TRAJ33)
CAVDSNYQLIW

SEQ ID NO: 263716 - protein, 13 aa, Homo sapiens
  CDR3 for beta chain variable domain of TCR clone 131858 (TRBV12-5, TRBJ2-3)
CASGDRQSDTQYF

SEQ ID NO: 263717 - protein, 13 aa, Homo sapiens
  CDR3 for alpha chain variable domain of TCR clone 131859 (TRAV12-3, TRAJ6)
CANPSGGSDIPTF

SEQ ID NO: 263718 - protein, 14 aa, Homo sapiens
  CDR3 for beta chain variable domain of TCR clone 131859 (TRBV19, TRBJ1-1)
CASSRDRDATEAFF

SEQ ID NO: 263719 - protein, 13 aa, Homo sapiens
  CDR3 for alpha chain variable domain of TCR clone 131860 (TRAV13-1, TRAJ21)
CAASIYNFNKFYF

SEQ ID NO: 263720 - protein, 15 aa, Homo sapiens
  CDR3 for beta chain variable domain of TCR clone 131860 (TRBV7-8, TRBJ2-7)
CASSLRHFEAYEQYF

SEQ ID NO: 263721 - protein, 15 aa, Homo sapiens
  CDR3 for alpha chain variable domain of TCR clone 131861 (TRAV12-2, TRAJ53)
CAVNGGGGSNYKLTF

SEQ ID NO: 263722 - protein, 13 aa, Homo sapiens
  CDR3 for beta chain variable domain of TCR clone 131861 (TRBV12-4, TRBJ1-5)
CASSPDRAQPQHF

SEQ ID NO: 263723 - protein, 14 aa, Homo sapiens
  CDR3 for alpha chain variable domain of TCR clone 131862 (TRAV12-1, TRAJ17)
CVVNYKAAGNKLTF

SEQ ID NO: 263724 - protein, 17 aa, Homo sapiens
  CDR3 for beta chain variable domain of TCR clone 131862 (TRBV20-1, TRBJ2-1)
CSASSSGLAGSYNEQIF

SEQ ID NO: 263725 - protein, 13 aa, Homo sapiens
  CDR3 for alpha chain variable domain of TCR clone 131863 (TRAV2, TRAJ40)
CAVVTSGTYKYIF

SEQ ID NO: 263726 - protein, 13 aa, Homo sapiens
  CDR3 for beta chain variable domain of TCR clone 131863 (TRBV19, TRBJ2-5)
CASSIPYGETQYF

SEQ ID NO: 263727 - protein, 14 aa, Homo sapiens
  CDR3 for alpha chain variable domain of TCR clone 131864 (TRAV12-2, TRAJ53)
CAVKGGGSNYKLTF

SEQ ID NO: 263728 - protein, 15 aa, Homo sapiens
  CDR3 for beta chain variable domain of TCR clone 131864 (TRBV7-9, TRBJ2-7)
CASSPGGGLTYEQYF

SEQ ID NO: 263729 - protein, 16 aa, Homo sapiens
  CDR3 for alpha chain variable domain of TCR clone 131865 (TRAV20, TRAJ38)
CAVQASNAGNNRKLIW

SEQ ID NO: 263730 - protein, 16 aa, Homo sapiens
  CDR3 for beta chain variable domain of TCR clone 131865 (TRBV7-8, TRBJ2-6)
CASRVGDSAGANVLTF

SEQ ID NO: 263731 - protein, 16 aa, Homo sapiens
  CDR3 for alpha chain variable domain of TCR clone 131866 (TRAV12-2, TRAJ45)
CAVIFLSGGGTDGLTF

SEQ ID NO: 263732 - protein, 19 aa, Homo sapiens
  CDR3 for beta chain variable domain of TCR clone 131866 (TRBV28, TRBJ2-4)
CASSFQPGGPAHSKNIQYF

SEQ ID NO: 263733 - protein, 16 aa, Homo sapiens
  CDR3 for alpha chain variable domain of TCR clone 131867 (TRAV3, TRAJ5)
RAVRNFMDTGRRALTF

SEQ ID NO: 263734 - protein, 16 aa, Homo sapiens
  CDR3 for beta chain variable domain of TCR clone 131867 (TRBV4-2, TRBJ2-7)
CASSQEGLANSYEQYF

SEQ ID NO: 263735 - protein, 12 aa, Homo sapiens
  CDR3 for alpha chain variable domain of TCR clone 131868 (TRAV20, TRAJ56)
CAVTGANSKLTF

SEQ ID NO: 263736 - protein, 13 aa, Homo sapiens
  CDR3 for beta chain variable domain of TCR clone 131868 (TRBV7-7, TRBJ2-5)
CASSRSGQETQYF

SEQ ID NO: 263737 - protein, 13 aa, Homo sapiens
  CDR3 for alpha chain variable domain of TCR clone 131869 (TRAV8-3, TRAJ44)
CAVVPGTASKLSF

SEQ ID NO: 263738 - protein, 14 aa, Homo sapiens
  CDR3 for beta chain variable domain of TCR clone 131869 (TRBV11-2, TRBJ2-3)
CASSRLARTDTQYF

SEQ ID NO: 263739 - protein, 11 aa, Homo sapiens
  CDR3 for alpha chain variable domain of TCR clone 131870 (TRAV3, TRAJ17)
PKGAAGNKLTF

SEQ ID NO: 263740 - protein, 12 aa, Homo sapiens
  CDR3 for beta chain variable domain of TCR clone 131870 (TRBV11-2, TRBJ2-2)
CASSLGGGELFF

SEQ ID NO: 263741 - protein, 17 aa, Homo sapiens
  CDR3 for alpha chain variable domain of TCR clone 131871 (TRAV1-2, TRAJ8)
CAVRDPDENTGFQKLVF

SEQ ID NO: 263742 - protein, 16 aa, Homo sapiens
  CDR3 for beta chain variable domain of TCR clone 131871 (TRBV7-9, TRBJ2-2)
CASSGFGGANTGELFY

SEQ ID NO: 263743 - protein, 12 aa, Homo sapiens
  CDR3 for alpha chain variable domain of TCR clone 131872 (TRAV2, TRAJ31)
CAVEDNNARLMF

SEQ ID NO: 263744 - protein, 16 aa, Homo sapiens
  CDR3 for beta chain variable domain of TCR clone 131872 (TRBV10-3, TRBJ2-1)
CAISGVVDGGGGEQFF

SEQ ID NO: 263745 - protein, 15 aa, Homo sapiens
  CDR3 for alpha chain variable domain of TCR clone 131873 (TRAV26-1, TRAJ23)
CIVRVLNNQGGKLIF

SEQ ID NO: 263746 - protein, 15 aa, Homo sapiens
  CDR3 for beta chain variable domain of TCR clone 131873 (TRBV7-3, TRBJ2-1)
CASSFGHSNYNEQFF

SEQ ID NO: 263747 - protein, 12 aa, Homo sapiens
  CDR3 for alpha chain variable domain of TCR clone 131874 (TRAV16, TRAJ10)
CSRTGGGNKLTF

SEQ ID NO: 263748 - protein, 16 aa, Homo sapiens
  CDR3 for beta chain variable domain of TCR clone 131874 (TRBV27, TRBJ2-2)
CASSFRGLVRAGELFF

SEQ ID NO: 263749 - protein, 14 aa, Homo sapiens
  CDR3 for alpha chain variable domain of TCR clone 131875 (TRAV8-3, TRAJ44)
RAVGNTGTASKLTF

SEQ ID NO: 263750 - protein, 15 aa, Homo sapiens
  CDR3 for beta chain variable domain of TCR clone 131875 (TRBV28, TRBJ2-7)
CASSFRGQGRYEQYF

SEQ ID NO: 263751 - protein, 14 aa, Homo sapiens
  CDR3 for alpha chain variable domain of TCR clone 131876 (TRAV1-2, TRAJ8)
CAVREDTGFQKLVL

SEQ ID NO: 263752 - protein, 12 aa, Homo sapiens
  CDR3 for beta chain variable domain of TCR clone 131876 (TRBV2, TRBJ2-1)
CAYGPPGNEQFF

SEQ ID NO: 263753 - protein, 17 aa, Homo sapiens
  CDR3 for alpha chain variable domain of TCR clone 131877 (TRAV26-2, TRAJ37)
CILRELVGSSNTGKLIF

SEQ ID NO: 263754 - protein, 14 aa, Homo sapiens
  CDR3 for beta chain variable domain of TCR clone 131877 (TRBV7-2, TRBJ2-7)
CASSPKTSFYEQYF

SEQ ID NO: 263755 - protein, 14 aa, Homo sapiens
  CDR3 for alpha chain variable domain of TCR clone 131878 (TRAV26-1, TRAJ39)
CIVRGSRAGNMLTF

SEQ ID NO: 263756 - protein, 15 aa, Homo sapiens
  CDR3 for beta chain variable domain of TCR clone 131878 (TRBV7-9, TRBJ1-5)
WASSQGHQPNQPQHF

SEQ ID NO: 263757 - protein, 12 aa, Homo sapiens
  CDR3 for alpha chain variable domain of TCR clone 131879 (TRAV1-1, TRAJ39)
CAVPVVGNVLTF

SEQ ID NO: 263758 - protein, 17 aa, Homo sapiens
  CDR3 for beta chain variable domain of TCR clone 131879 (TRBV28, TRBJ2-5)
CASSTPEGDALQETQYF

SEQ ID NO: 263759 - protein, 15 aa, Homo sapiens
  CDR3 for alpha chain variable domain of TCR clone 131880 (TRAV25, TRAJ53)
CAATGGGGSNYKLTF

SEQ ID NO: 263760 - protein, 19 aa, Homo sapiens
  CDR3 for beta chain variable domain of TCR clone 131880 (TRBV7-2, TRBJ2-3)
CASSFLSRNGGGGTDTQYF

SEQ ID NO: 263761 - protein, 18 aa, Homo sapiens
  CDR3 for alpha chain variable domain of TCR clone 131881 (TRAV21, TRAJ52)
CAVRPSPAGGTSYGKLTF

SEQ ID NO: 263762 - protein, 15 aa, Homo sapiens
  CDR3 for beta chain variable domain of TCR clone 131881 (TRBV7-9, TRBJ2-7)
CASSSSGLPVYEQYF

SEQ ID NO: 263763 - protein, 10 aa, Homo sapiens
  CDR3 for alpha chain variable domain of TCR clone 131882 (TRAV23/DV6, TRAJ57)
CAASSTLSPG

SEQ ID NO: 263764 - protein, 14 aa, Homo sapiens
  CDR3 for beta chain variable domain of TCR clone 131882 (TRBV25-1, TRBJ1-1)
CASTHLGGNTEAFF

SEQ ID NO: 263765 - protein, 12 aa, Homo sapiens
  CDR3 for alpha chain variable domain of TCR clone 131883 (TRAV27, TRAJ35)
CAGADFGNVLHC

SEQ ID NO: 263766 - protein, 16 aa, Homo sapiens
  CDR3 for beta chain variable domain of TCR clone 131883 (TRBV11-2, TRBJ2-2)
CASSLRTGNLIGELFF

SEQ ID NO: 263767 - protein, 14 aa, Homo sapiens
  CDR3 for alpha chain variable domain of TCR clone 131884 (TRAV29/DV5, TRAJ45)
CAASFRGGADGLTF

SEQ ID NO: 263768 - protein, 16 aa, Homo sapiens
  CDR3 for beta chain variable domain of TCR clone 131884 (TRBV12-5, TRBJ2-5)
CASGPRTSGNQETQYF

SEQ ID NO: 263769 - protein, 11 aa, Homo sapiens
  CDR3 for alpha chain variable domain of TCR clone 131885 (TRAV1-2, TRAJ11)
CAVRGYSTLTF

SEQ ID NO: 263770 - protein, 14 aa, Homo sapiens
  CDR3 for beta chain variable domain of TCR clone 131885 (TRBV19, TRBJ2-1)
CASPTFVLSGEQFF

SEQ ID NO: 263771 - protein, 14 aa, Homo sapiens
  CDR3 for alpha chain variable domain of TCR clone 131886 (TRAV1-2, TRAJ16)
CAVNRFSDGQKLPF

SEQ ID NO: 263772 - protein, 15 aa, Homo sapiens
  CDR3 for beta chain variable domain of TCR clone 131886 (TRBV5-1, TRBJ2-2)
CASSSQGGNTGELFF

SEQ ID NO: 263773 - protein, 17 aa, Homo sapiens
  CDR3 for alpha chain variable domain of TCR clone 131887 (TRAV3, TRAJ6)
CAVRDGPRAGGSYIPTF

SEQ ID NO: 263774 - protein, 16 aa, Homo sapiens
  CDR3 for beta chain variable domain of TCR clone 131887 (TRBV27, TRBJ2-5)
CASSLSRTAGGETQYF

SEQ ID NO: 263775 - protein, 13 aa, Homo sapiens
  CDR3 for alpha chain variable domain of TCR clone 131888 (TRAV3, TRAJ20)
CAVRSLNDYKPSF

SEQ ID NO: 263776 - protein, 13 aa, Homo sapiens
  CDR3 for beta chain variable domain of TCR clone 131888 (TRBV7-3, TRBJ1-1)
CASSQDWGAEAFF

SEQ ID NO: 263777 - protein, 16 aa, Homo sapiens
  CDR3 for alpha chain variable domain of TCR clone 131889 (TRAV1-2, TRAJ10)
CAVRDQGGGGVNKLTF

SEQ ID NO: 263778 - protein, 13 aa, Homo sapiens
  CDR3 for beta chain variable domain of TCR clone 131889 (TRBV29-1, TRBJ1-1)
CSVGDSRNTEAFF

SEQ ID NO: 263779 - protein, 17 aa, Homo sapiens
  CDR3 for alpha chain variable domain of TCR clone 131890 (TRAV36/DV7, TRAJ52)
CAVAQRAGGTSYGKLTF

SEQ ID NO: 263780 - protein, 14 aa, Homo sapiens
  CDR3 for beta chain variable domain of TCR clone 131890 (TRBV19, TRBJ2-1)
CASEVTGARNEQFF

SEQ ID NO: 263781 - protein, 14 aa, Homo sapiens
  CDR3 for alpha chain variable domain of TCR clone 131891 (TRAV12-3, TRAJ57)
CAMSAWGGSEKLVV

SEQ ID NO: 263782 - protein, 14 aa, Homo sapiens
  CDR3 for beta chain variable domain of TCR clone 131891 (TRBV18, TRBJ2-5)
CASSPGVSQETQYF

SEQ ID NO: 263783 - protein, 13 aa, Homo sapiens
  CDR3 for alpha chain variable domain of TCR clone 131892 (TRAV26-2, TRAJ43)
CILRAVNNNDMRF

SEQ ID NO: 263784 - protein, 13 aa, Homo sapiens
  CDR3 for beta chain variable domain of TCR clone 131892 (TRBV12-5, TRBJ2-3)
CASGDRQSDTQYF

SEQ ID NO: 263785 - protein, 20 aa, Homo sapiens
  CDR3 for alpha chain variable domain of TCR clone 131893 (TRAV8-3, TRAJ44)
LSTSVLWVRLYTGTASKLTF

SEQ ID NO: 263786 - protein, 15 aa, Homo sapiens
  CDR3 for beta chain variable domain of TCR clone 131893 (TRBV6-5, TRBJ1-2)
CASSYSQAFNYGDTF

SEQ ID NO: 263787 - protein, 11 aa, Homo sapiens
  CDR3 for alpha chain variable domain of TCR clone 131894 (TRAV12-1, TRAJ43)
CVEYDNNDMRF

SEQ ID NO: 263788 - protein, 16 aa, Homo sapiens
  CDR3 for beta chain variable domain of TCR clone 131894 (TRBV9, TRBJ2-2)
CASSAMGKGNTGELFF

SEQ ID NO: 263789 - protein, 21 aa, Homo sapiens
  CDR3 for alpha chain variable domain of TCR clone 131895 (TRAV20, )
CAVTGANNIQNPDPAVYQLSD

SEQ ID NO: 263790 - protein, 14 aa, Homo sapiens
  CDR3 for beta chain variable domain of TCR clone 131895 (TRBV20-1, TRBJ2-5)
CSALVPGYQETQYF

SEQ ID NO: 263791 - protein, 12 aa, Homo sapiens
  CDR3 for alpha chain variable domain of TCR clone 131896 (TRAV38-1, TRAJ47)
CAFETYGNKLVF

SEQ ID NO: 263792 - protein, 11 aa, Homo sapiens
  CDR3 for beta chain variable domain of TCR clone 131896 (TRBV11-2, TRBJ1-1)
CASSINTEAFF

SEQ ID NO: 263793 - protein, 12 aa, Homo sapiens
  CDR3 for alpha chain variable domain of TCR clone 131897 (TRAV36/DV7, TRAJ54)
CAVVQGAQKLVF

SEQ ID NO: 263794 - protein, 14 aa, Homo sapiens
  CDR3 for beta chain variable domain of TCR clone 131897 (TRBV7-3, TRBJ1-1)
CASSLKGGNTEAFF

SEQ ID NO: 263795 - protein, 14 aa, Homo sapiens
  CDR3 for alpha chain variable domain of TCR clone 131898 (TRAV12-2, TRAJ13)
CAVKKTGGYQKVTF

SEQ ID NO: 263796 - protein, 15 aa, Homo sapiens
  CDR3 for beta chain variable domain of TCR clone 131898 (TRBV7-8, TRBJ2-3)
CAGSLSADSGGAQYF

SEQ ID NO: 263797 - protein, 14 aa, Homo sapiens
  CDR3 for alpha chain variable domain of TCR clone 131899 (TRAV1-2, TRAJ16)
CAVNRLSDGQKLLF

SEQ ID NO: 263798 - protein, 15 aa, Homo sapiens
  CDR3 for beta chain variable domain of TCR clone 131899 (TRBV9, TRBJ1-6)
CASSVAGTGDSHLHF

SEQ ID NO: 263799 - protein, 11 aa, Homo sapiens
  CDR3 for alpha chain variable domain of TCR clone 131900 (TRAV1-1, TRAJ23)
CAVRQGGKLIF

SEQ ID NO: 263800 - protein, 13 aa, Homo sapiens
  CDR3 for beta chain variable domain of TCR clone 131900 (TRBV12-4, TRBJ1-1)
CASSFGEDTEAFF

SEQ ID NO: 263801 - protein, 14 aa, Homo sapiens
  CDR3 for alpha chain variable domain of TCR clone 131901 (TRAV13-1, TRAJ35)
CAASKGGFGNVLHC

SEQ ID NO: 263802 - protein, 16 aa, Homo sapiens
  CDR3 for beta chain variable domain of TCR clone 131901 (TRBV2, TRBJ2-3)
CQHRGAPRRWTDTQYF

SEQ ID NO: 263803 - protein, 12 aa, Homo sapiens
  CDR3 for alpha chain variable domain of TCR clone 131902 (TRAV12-3, TRAJ20)
CAMVRGDYKLSF

SEQ ID NO: 263804 - protein, 15 aa, Homo sapiens
  CDR3 for beta chain variable domain of TCR clone 131902 (TRBV5-1, TRBJ2-7)
CASSLYPDGGYEQYF

SEQ ID NO: 263805 - protein, 12 aa, Homo sapiens
  CDR3 for alpha chain variable domain of TCR clone 131903 (TRAV1-1, TRAJ30)
CAVRGRDDTIIF

SEQ ID NO: 263806 - protein, 14 aa, Homo sapiens
  CDR3 for beta chain variable domain of TCR clone 131903 (TRBV6-1, TRBJ1-3)
CASVQGGGGNTIYF

SEQ ID NO: 263807 - protein, 10 aa, Homo sapiens
  CDR3 for alpha chain variable domain of TCR clone 131904 (TRAV8-4, TRAJ43)
CAVSADDMRF

SEQ ID NO: 263808 - protein, 15 aa, Homo sapiens
  CDR3 for beta chain variable domain of TCR clone 131904 (TRBV5-1, TRBJ2-3)
CASSVTSGSTDMQYF

SEQ ID NO: 263809 - protein, 12 aa, Homo sapiens
  CDR3 for alpha chain variable domain of TCR clone 131905 (TRAV12-2, TRAJ21)
CAARYNFNKFYF

SEQ ID NO: 263810 - protein, 14 aa, Homo sapiens
  CDR3 for beta chain variable domain of TCR clone 131905 (TRBV28, TRBJ2-1)
CASSYYTAYNEQFF

SEQ ID NO: 263811 - protein, 15 aa, Homo sapiens
  CDR3 for alpha chain variable domain of TCR clone 131906 (TRAV12-3, TRAJ6)
CAMTATTGGSYIPTF

SEQ ID NO: 263812 - protein, 16 aa, Homo sapiens
  CDR3 for beta chain variable domain of TCR clone 131906 (TRBV20-1, TRBJ1-2)
CSASMGQGVANYGYTF

SEQ ID NO: 263813 - protein, 17 aa, Homo sapiens
  CDR3 for alpha chain variable domain of TCR clone 131907 (TRAV3, TRAJ42)
CAVRDRDYGGSQGKLIF

SEQ ID NO: 263814 - protein, 14 aa, Homo sapiens
  CDR3 for beta chain variable domain of TCR clone 131907 (TRBV19, TRBJ2-5)
CASSMTGQQETQYF

SEQ ID NO: 263815 - protein, 14 aa, Homo sapiens
  CDR3 for alpha chain variable domain of TCR clone 131908 (TRAV8-4, TRAJ47)
CAVSIMEYGNKLVF

SEQ ID NO: 263816 - protein, 16 aa, Homo sapiens
  CDR3 for beta chain variable domain of TCR clone 131908 (TRBV14, TRBJ1-2)
CASSQGPTTANYGCTF

SEQ ID NO: 263817 - protein, 11 aa, Homo sapiens
  CDR3 for alpha chain variable domain of TCR clone 131909 (TRAV13-1, TRAJ20)
CAAKRRLQAQL

SEQ ID NO: 263818 - protein, 13 aa, Homo sapiens
  CDR3 for beta chain variable domain of TCR clone 131909 (TRBV12-4, TRBJ1-1)
CASSLIGNTEAFF

SEQ ID NO: 263819 - protein, 14 aa, Homo sapiens
  CDR3 for alpha chain variable domain of TCR clone 131910 (TRAV21, TRAJ35)
CAVMPIGFGSVLHC

SEQ ID NO: 263820 - protein, 18 aa, Homo sapiens
  CDR3 for beta chain variable domain of TCR clone 131910 (TRBV11-3, TRBJ2-3)
CASSLGGASRGAPNTQYF

SEQ ID NO: 263821 - protein, 14 aa, Homo sapiens
  CDR3 for alpha chain variable domain of TCR clone 131911 (TRAV12-3, TRAJ42)
CAMNYGGSQGNLIF

SEQ ID NO: 263822 - protein, 15 aa, Homo sapiens
  CDR3 for beta chain variable domain of TCR clone 131911 (TRBV5-7, TRBJ1-5)
CVSSYGKLWDQPQHF

SEQ ID NO: 263823 - protein, 14 aa, Homo sapiens
  CDR3 for alpha chain variable domain of TCR clone 131912 (TRAV12-3, TRAJ10)
SHLPLTGGGNKLTF

SEQ ID NO: 263824 - protein, 16 aa, Homo sapiens
  CDR3 for beta chain variable domain of TCR clone 131912 (TRBV6-1, TRBJ1-3)
CASVQGGGGNTIYLER

SEQ ID NO: 263825 - protein, 14 aa, Homo sapiens
  CDR3 for alpha chain variable domain of TCR clone 131913 (TRAV12-3, TRAJ10)
SHLPLTGGGNKLTF

SEQ ID NO: 263826 - protein, 17 aa, Homo sapiens
  CDR3 for beta chain variable domain of TCR clone 131913 (TRBV11-2, TRBJ2-7)
CASSLAGAGVTLYEQYF

SEQ ID NO: 263827 - protein, 14 aa, Homo sapiens
  CDR3 for alpha chain variable domain of TCR clone 131914 (TRAV2, TRAJ20)
CAVEDGTNDYKLSF

SEQ ID NO: 263828 - protein, 15 aa, Homo sapiens
  CDR3 for beta chain variable domain of TCR clone 131914 (TRBV5-1, TRBJ2-3)
CASRSNREGTDTQYF

SEQ ID NO: 263829 - protein, 13 aa, Homo sapiens
  CDR3 for alpha chain variable domain of TCR clone 131915 (TRAV17, TRAJ26)
CATVDNYGQNFVF

SEQ ID NO: 263830 - protein, 16 aa, Homo sapiens
  CDR3 for beta chain variable domain of TCR clone 131915 (TRBV2, TRBJ2-1)
CASSVGGSLSYNEQFV

SEQ ID NO: 263831 - protein, 11 aa, Homo sapiens
  CDR3 for alpha chain variable domain of TCR clone 131916 (TRAV2, TRAJ33)
CAVDSNYQLIW

SEQ ID NO: 263832 - protein, 12 aa, Homo sapiens
  CDR3 for beta chain variable domain of TCR clone 131916 (TRBV11-2, TRBJ2-2)
CASSLGGGDLFF

SEQ ID NO: 263833 - protein, 15 aa, Homo sapiens
  CDR3 for alpha chain variable domain of TCR clone 131917 (TRAV26-1, TRAJ44)
CIARVPFGTASKLTF

SEQ ID NO: 263834 - protein, 12 aa, Homo sapiens
  CDR3 for beta chain variable domain of TCR clone 131917 (TRBV11-2, TRBJ2-2)
CASSLGGGELFL

SEQ ID NO: 263835 - protein, 15 aa, Homo sapiens
  CDR3 for alpha chain variable domain of TCR clone 131918 (TRAV14/DV4, TRAJ22)
CNERGPPGSARQLTF

SEQ ID NO: 263836 - protein, 15 aa, Homo sapiens
  CDR3 for beta chain variable domain of TCR clone 131918 (TRBV7-9, TRBJ2-7)
CASSPGGGLTYEQYF

SEQ ID NO: 263837 - protein, 15 aa, Homo sapiens
  CDR3 for alpha chain variable domain of TCR clone 131919 (TRAV26-1, TRAJ24)
CIVPLTTDSWGKFQF

SEQ ID NO: 263838 - protein, 14 aa, Homo sapiens
  CDR3 for beta chain variable domain of TCR clone 131919 (TRBV10-3, TRBJ2-3)
CAISEKGLGDTQYL

SEQ ID NO: 263839 - protein, 14 aa, Homo sapiens
  CDR3 for alpha chain variable domain of TCR clone 131920 (TRAV26-1, TRAJ21)
CIVRPPYNFNKFYF

SEQ ID NO: 263840 - protein, 14 aa, Homo sapiens
  CDR3 for beta chain variable domain of TCR clone 131920 (TRBV11-3, TRBJ2-1)
SASSATTSGSIQFF

SEQ ID NO: 263841 - protein, 13 aa, Homo sapiens
  CDR3 for alpha chain variable domain of TCR clone 131921 (TRAV12-2, TRAJ4)
CAGFSGGYNKLIF

SEQ ID NO: 263842 - protein, 13 aa, Homo sapiens
  CDR3 for beta chain variable domain of TCR clone 131921 (TRBV24-1, TRBJ1-1)
CTSIPRGDTEAFF

SEQ ID NO: 263843 - protein, 14 aa, Homo sapiens
  CDR3 for alpha chain variable domain of TCR clone 131922 (TRAV12-1, TRAJ12)
CVVTRMNSSYKLIF

SEQ ID NO: 263844 - protein, 13 aa, Homo sapiens
  CDR3 for beta chain variable domain of TCR clone 131922 (TRBV20-1, TRBJ1-1)
CSARGGGNTEAFF

SEQ ID NO: 263845 - protein, 14 aa, Homo sapiens
  CDR3 for alpha chain variable domain of TCR clone 131923 (TRAV2, TRAJ20)
CAVEDGTNDYKLSF

SEQ ID NO: 263846 - protein, 15 aa, Homo sapiens
  CDR3 for beta chain variable domain of TCR clone 131923 (TRBV7-9, TRBJ2-2)
CASGPLDTFPGELFF

SEQ ID NO: 263847 - protein, 13 aa, Homo sapiens
  CDR3 for alpha chain variable domain of TCR clone 131924 (TRAV8-3, TRAJ43)
CAVGPDNNNDMRF

SEQ ID NO: 263848 - protein, 12 aa, Homo sapiens
  CDR3 for beta chain variable domain of TCR clone 131924 (TRBV7-2, TRBJ1-6)
CASILSSSPLHF

SEQ ID NO: 263849 - protein, 14 aa, Homo sapiens
  CDR3 for alpha chain variable domain of TCR clone 131925 (TRAV23/DV6, TRAJ8)
CAASKNTGFQKLVF

SEQ ID NO: 263850 - protein, 16 aa, Homo sapiens
  CDR3 for beta chain variable domain of TCR clone 131925 (TRBV4-1, TRBJ2-6)
CASGQVGDPGANVLTF

SEQ ID NO: 263851 - protein, 12 aa, Homo sapiens
  CDR3 for alpha chain variable domain of TCR clone 131926 (TRAV12-3, TRAJ17)
CAMTLTGNKLTF

SEQ ID NO: 263852 - protein, 12 aa, Homo sapiens
  CDR3 for beta chain variable domain of TCR clone 131926 (TRBV7-9, TRBJ1-5)
CASSPQGQPHHF

SEQ ID NO: 263853 - protein, 15 aa, Homo sapiens
  CDR3 for alpha chain variable domain of TCR clone 131927 (TRAV8-3, TRAJ45)
CASSYSAGGADGLTF

SEQ ID NO: 263854 - protein, 13 aa, Homo sapiens
  CDR3 for beta chain variable domain of TCR clone 131927 (TRBV10-3, TRBJ2-7)
CASKLAVNYEQYF

SEQ ID NO: 263855 - protein, 13 aa, Homo sapiens
  CDR3 for alpha chain variable domain of TCR clone 131928 (TRAV2, TRAJ15)
CAVASQAGTALIF

SEQ ID NO: 263856 - protein, 15 aa, Homo sapiens
  CDR3 for beta chain variable domain of TCR clone 131928 (TRBV5-1, TRBJ1-1)
CASSSTTGTNTEAFF

SEQ ID NO: 263857 - protein, 13 aa, Homo sapiens
  CDR3 for alpha chain variable domain of TCR clone 131929 (TRAV12-1, TRAJ21)
CVVIGDNFNKFYF

SEQ ID NO: 263858 - protein, 16 aa, Homo sapiens
  CDR3 for beta chain variable domain of TCR clone 131929 (TRBV24-1, TRBJ2-3)
CATSDPGTGATDTQYF

SEQ ID NO: 263859 - protein, 13 aa, Homo sapiens
  CDR3 for alpha chain variable domain of TCR clone 131930 (TRAV21, TRAJ27)
CAARPGSAGKSTF

SEQ ID NO: 263860 - protein, 14 aa, Homo sapiens
  CDR3 for beta chain variable domain of TCR clone 131930 (TRBV11-2, TRBJ2-7)
CASSLGAGAYEQYF

SEQ ID NO: 263861 - protein, 19 aa, Homo sapiens
  CDR3 for alpha chain variable domain of TCR clone 131931 (TRAV12-1, TRAJ31)
SLLIRDSKLSDSATPRLMF

SEQ ID NO: 263862 - protein, 14 aa, Homo sapiens
  CDR3 for beta chain variable domain of TCR clone 131931 (TRBV12-5, TRBJ2-5)
CASGSRTHQETQYF

SEQ ID NO: 263863 - protein, 13 aa, Homo sapiens
  CDR3 for alpha chain variable domain of TCR clone 131932 (TRAV14/DV4, TRAJ23)
CAMIEVKGGKLIF

SEQ ID NO: 263864 - protein, 15 aa, Homo sapiens
  CDR3 for beta chain variable domain of TCR clone 131932 (TRBV6-3, TRBJ2-1)
CASSYASDSYNEQFF

SEQ ID NO: 263865 - protein, 16 aa, Homo sapiens
  CDR3 for alpha chain variable domain of TCR clone 131933 (TRAV14/DV4, TRAJ54)
CAMREGRIQGAQKLVF

SEQ ID NO: 263866 - protein, 19 aa, Homo sapiens
  CDR3 for beta chain variable domain of TCR clone 131933 (TRBV11-3, TRBJ2-2)
CASSTRPGAKTTNTGELFF

SEQ ID NO: 263867 - protein, 14 aa, Homo sapiens
  CDR3 for alpha chain variable domain of TCR clone 131934 (TRAV1-2, TRAJ8)
CAVREDTGFQKLVF

SEQ ID NO: 263868 - protein, 14 aa, Homo sapiens
  CDR3 for beta chain variable domain of TCR clone 131934 (TRBV4-1, TRBJ2-2)
CDSSQAVNTGELFF

SEQ ID NO: 263869 - protein, 11 aa, Homo sapiens
  CDR3 for alpha chain variable domain of TCR clone 131935 (TRAV35, TRAJ34)
CWARNTDKLIF

SEQ ID NO: 263870 - protein, 15 aa, Homo sapiens
  CDR3 for beta chain variable domain of TCR clone 131935 (TRBV6-6, TRBJ2-7)
CASSYSYGGSYEQYF

SEQ ID NO: 263871 - protein, 15 aa, Homo sapiens
  CDR3 for alpha chain variable domain of TCR clone 131936 (TRAV3, TRAJ17)
CALSPKEAAGNKLTF

SEQ ID NO: 263872 - protein, 12 aa, Homo sapiens
  CDR3 for beta chain variable domain of TCR clone 131936 (TRBV7-9, TRBJ1-6)
CASSLMTSPLHF

SEQ ID NO: 263873 - protein, 14 aa, Homo sapiens
  CDR3 for alpha chain variable domain of TCR clone 131937 (TRAV1-2, TRAJ8)
CAVREDTGFQKLVF

SEQ ID NO: 263874 - protein, 14 aa, Homo sapiens
  CDR3 for beta chain variable domain of TCR clone 131937 (TRBV7-2, TRBJ1-2)
CASSRGGTNYGYTF

SEQ ID NO: 263875 - protein, 16 aa, Homo sapiens
  CDR3 for alpha chain variable domain of TCR clone 131938 (TRAV22, TRAJ45)
CAVVRGKRGGADGLTF

SEQ ID NO: 263876 - protein, 14 aa, Homo sapiens
  CDR3 for beta chain variable domain of TCR clone 131938 (TRBV7-2, TRBJ1-1)
CASSFLTGTTEAFF

SEQ ID NO: 263877 - protein, 16 aa, Homo sapiens
  CDR3 for alpha chain variable domain of TCR clone 131939 (TRAV2, TRAJ26)
TTVLGPPGDYGQNFVF

SEQ ID NO: 263878 - protein, 16 aa, Homo sapiens
  CDR3 for beta chain variable domain of TCR clone 131939 (TRBV13, TRBJ2-2)
CASSPRTGEHTGELFF

SEQ ID NO: 263879 - protein, 11 aa, Homo sapiens
  CDR3 for alpha chain variable domain of TCR clone 131940 (TRAV13-2, TRAJ23)
CAESPRGKLIF

SEQ ID NO: 263880 - protein, 13 aa, Homo sapiens
  CDR3 for beta chain variable domain of TCR clone 131940 (TRBV7-7, TRBJ1-1)
CASSLGANTEAFF

SEQ ID NO: 263881 - protein, 16 aa, Homo sapiens
  CDR3 for alpha chain variable domain of TCR clone 131941 (TRAV30, TRAJ24)
CGTEIVDADSWGNSSL

SEQ ID NO: 263882 - protein, 12 aa, Homo sapiens
  CDR3 for beta chain variable domain of TCR clone 131941 (TRBV11-2, TRBJ2-1)
CASSPGNNEQFF

SEQ ID NO: 263883 - protein, 12 aa, Homo sapiens
  CDR3 for alpha chain variable domain of TCR clone 131942 (TRAV12-3, TRAJ20)
CAMVRGDYKLSF

SEQ ID NO: 263884 - protein, 14 aa, Homo sapiens
  CDR3 for beta chain variable domain of TCR clone 131942 (TRBV9, TRBJ2-1)
CASSVDPRGKEQFF

SEQ ID NO: 263885 - protein, 15 aa, Homo sapiens
  CDR3 for alpha chain variable domain of TCR clone 131943 (TRAV26-1, TRAJ29)
CIVRVEGSGNTPLVF

SEQ ID NO: 263886 - protein, 13 aa, Homo sapiens
  CDR3 for beta chain variable domain of TCR clone 131943 (TRBV12-4, TRBJ1-1)
CASSPGTGFEAFF

SEQ ID NO: 263887 - protein, 13 aa, Homo sapiens
  CDR3 for alpha chain variable domain of TCR clone 131944 (TRAV2, TRAJ40)
CAVVTSGTYKYIF

SEQ ID NO: 263888 - protein, 15 aa, Homo sapiens
  CDR3 for beta chain variable domain of TCR clone 131944 (TRBV24-1, TRBJ2-4)
CATSDWTGGDLRQYF

SEQ ID NO: 263889 - protein, 14 aa, Homo sapiens
  CDR3 for alpha chain variable domain of TCR clone 131945 (TRAV35, TRAJ22)
CAGLRPGSAGQLTF

SEQ ID NO: 263890 - protein, 15 aa, Homo sapiens
  CDR3 for beta chain variable domain of TCR clone 131945 (TRBV12-4, TRBJ2-5)
CASSPPTGLKETQYF

SEQ ID NO: 263891 - protein, 15 aa, Homo sapiens
  CDR3 for alpha chain variable domain of TCR clone 131946 (TRAV12-2, TRAJ43)
CAFDMRFGAGTRVTV

SEQ ID NO: 263892 - protein, 18 aa, Homo sapiens
  CDR3 for beta chain variable domain of TCR clone 131946 (TRBV20-1, TRBJ2-3)
CSASGLAGGPGTTDTQYF

SEQ ID NO: 263893 - protein, 15 aa, Homo sapiens
  CDR3 for alpha chain variable domain of TCR clone 131947 (TRAV2, TRAJ13)
CATPSYSGGYQKVTF

SEQ ID NO: 263894 - protein, 14 aa, Homo sapiens
  CDR3 for beta chain variable domain of TCR clone 131947 (TRBV4-2, TRBJ2-1)
CASGLDRAYNEQLF

SEQ ID NO: 263895 - protein, 12 aa, Homo sapiens
  CDR3 for alpha chain variable domain of TCR clone 131948 (TRAV27, TRAJ35)
CAGADFGNVLHF

SEQ ID NO: 263896 - protein, 15 aa, Homo sapiens
  CDR3 for beta chain variable domain of TCR clone 131948 (TRBV19, TRBJ2-1)
CASSISSGGYNEQFF

SEQ ID NO: 263897 - protein, 14 aa, Homo sapiens
  CDR3 for alpha chain variable domain of TCR clone 131949 (TRAV38-1, TRAJ29)
CAFITPSGNTPLVF

SEQ ID NO: 263898 - protein, 15 aa, Homo sapiens
  CDR3 for beta chain variable domain of TCR clone 131949 (TRBV5-1, TRBJ2-1)
CSSSPPRAPYNEQFF

SEQ ID NO: 263899 - protein, 14 aa, Homo sapiens
  CDR3 for alpha chain variable domain of TCR clone 131950 (TRAV12-2, TRAJ40)
CAVKIPSGTSKYIF

SEQ ID NO: 263900 - protein, 17 aa, Homo sapiens
  CDR3 for beta chain variable domain of TCR clone 131950 (TRBV20-1, TRBJ2-1)
CSAFSGTSGSLYNEQFF

SEQ ID NO: 263901 - protein, 15 aa, Homo sapiens
  CDR3 for alpha chain variable domain of TCR clone 131951 (TRAV8-3, TRAJ45)
CASSYSGGGADGLTF

SEQ ID NO: 263902 - protein, 13 aa, Homo sapiens
  CDR3 for beta chain variable domain of TCR clone 131951 (TRBV7-2, TRBJ2-5)
CASSLNRQETQYF

SEQ ID NO: 263903 - protein, 15 aa, Homo sapiens
  CDR3 for alpha chain variable domain of TCR clone 131952 (TRAV21, TRAJ38)
CAVRQDAGNNRKLIW

SEQ ID NO: 263904 - protein, 13 aa, Homo sapiens
  CDR3 for beta chain variable domain of TCR clone 131952 (TRBV7-9, TRBJ1-2)
CASSLKQNYGYTF

SEQ ID NO: 263905 - protein, 15 aa, Homo sapiens
  CDR3 for alpha chain variable domain of TCR clone 131953 (TRAV12-2, TRAJ53)
CAVNGEGGSNYKLTF

SEQ ID NO: 263906 - protein, 17 aa, Homo sapiens
  CDR3 for beta chain variable domain of TCR clone 131953 (TRBV7-3, TRBJ2-3)
CASSLMKRMRGADTQYF

SEQ ID NO: 263907 - protein, 14 aa, Homo sapiens
  CDR3 for alpha chain variable domain of TCR clone 131954 (TRAV12-3, TRAJ10)
SHLPLTGGGNKLTF

SEQ ID NO: 263908 - protein, 13 aa, Homo sapiens
  CDR3 for beta chain variable domain of TCR clone 131954 (TRBV11-3, TRBJ2-3)
CASSHDTKDTQYF

SEQ ID NO: 263909 - protein, 12 aa, Homo sapiens
  CDR3 for alpha chain variable domain of TCR clone 131955 (TRAV21, TRAJ11)
CAATSGYTTLTF

SEQ ID NO: 263910 - protein, 14 aa, Homo sapiens
  CDR3 for beta chain variable domain of TCR clone 131955 (TRBV20-1, TRBJ2-7)
CSAPELAGVGEQYF

SEQ ID NO: 263911 - protein, 17 aa, Homo sapiens
  CDR3 for alpha chain variable domain of TCR clone 131956 (TRAV4, TRAJ18)
CLVGEMSVGSTLGRLYF

SEQ ID NO: 263912 - protein, 14 aa, Homo sapiens
  CDR3 for beta chain variable domain of TCR clone 131956 (TRBV6-5, TRBJ1-2)
CASSYDGTGGGYTF

SEQ ID NO: 263913 - protein, 13 aa, Homo sapiens
  CDR3 for alpha chain variable domain of TCR clone 131957 (TRAV8-3, TRAJ28)
CAVGPVGSYQLTF

SEQ ID NO: 263914 - protein, 14 aa, Homo sapiens
  CDR3 for beta chain variable domain of TCR clone 131957 (TRBV7-2, TRBJ2-7)
CASRSQGAAYEQYF

SEQ ID NO: 263915 - protein, 14 aa, Homo sapiens
  CDR3 for alpha chain variable domain of TCR clone 131958 (TRAV1-2, TRAJ8)
CAVREDTGFQKLVF

SEQ ID NO: 263916 - protein, 15 aa, Homo sapiens
  CDR3 for beta chain variable domain of TCR clone 131958 (TRBV20-1, TRBJ2-2)
CSAIPGHSNTGELFF

SEQ ID NO: 263917 - protein, 15 aa, Homo sapiens
  CDR3 for alpha chain variable domain of TCR clone 131959 (TRAV12-1, TRAJ44)
CVVFVNTGTASKLTF

SEQ ID NO: 263918 - protein, 17 aa, Homo sapiens
  CDR3 for beta chain variable domain of TCR clone 131959 (TRBV7-8, TRBJ2-6)
CASSAGTGGAGANALTF

SEQ ID NO: 263919 - protein, 18 aa, Homo sapiens
  CDR3 for alpha chain variable domain of TCR clone 131960 (TRAV21, TRAJ52)
CAVRPSPAGGTSYGKLTF

SEQ ID NO: 263920 - protein, 15 aa, Homo sapiens
  CDR3 for beta chain variable domain of TCR clone 131960 (TRBV7-9, TRBJ2-3)
CASSLKWGVTDTQYF

SEQ ID NO: 263921 - protein, 11 aa, Homo sapiens
  CDR3 for alpha chain variable domain of TCR clone 131961 (TRAV35, TRAJ34)
CWARNTDKLIF

SEQ ID NO: 263922 - protein, 13 aa, Homo sapiens
  CDR3 for beta chain variable domain of TCR clone 131961 (TRBV19, TRBJ2-7)
YASSIDRTYEQYF

SEQ ID NO: 263923 - protein, 15 aa, Homo sapiens
  CDR3 for alpha chain variable domain of TCR clone 131962 (TRAV21, TRAJ24)
CAARSSTASWGKLQF

SEQ ID NO: 263924 - protein, 11 aa, Homo sapiens
  CDR3 for beta chain variable domain of TCR clone 131962 (TRBV11-2, TRBJ2-2)
CASSLPGELFF

SEQ ID NO: 263925 - protein, 14 aa, Homo sapiens
  CDR3 for alpha chain variable domain of TCR clone 131963 (TRAV26-1, TRAJ45)
CIVVTGGGADGLTF

SEQ ID NO: 263926 - protein, 19 aa, Homo sapiens
  CDR3 for beta chain variable domain of TCR clone 131963 (TRBV19, TRBJ2-2)
CASTRPGLAGGRVTGELFF

SEQ ID NO: 263927 - protein, 17 aa, Homo sapiens
  CDR3 for alpha chain variable domain of TCR clone 131964 (TRAV36/DV7, TRAJ52)
CAVAQRAGGTSYGKLTF

SEQ ID NO: 263928 - protein, 14 aa, Homo sapiens
  CDR3 for beta chain variable domain of TCR clone 131964 (TRBV19, TRBJ2-1)
CASPTFVLSGERFF

SEQ ID NO: 263929 - protein, 10 aa, Homo sapiens
  CDR3 for alpha chain variable domain of TCR clone 131965 (TRAV8-4, TRAJ43)
CAVSADDRRF

SEQ ID NO: 263930 - protein, 11 aa, Homo sapiens
  CDR3 for beta chain variable domain of TCR clone 131965 (TRBV12-4, TRBJ2-3)
CASTATDTQYF

SEQ ID NO: 263931 - protein, 14 aa, Homo sapiens
  CDR3 for alpha chain variable domain of TCR clone 131966 (TRAV35, TRAJ13)
CAGSPSGGYQKVTF

SEQ ID NO: 263932 - protein, 17 aa, Homo sapiens
  CDR3 for beta chain variable domain of TCR clone 131966 (TRBV7-6, TRBJ2-5)
CTSSPGLADPWGETQYF

SEQ ID NO: 263933 - protein, 14 aa, Homo sapiens
  CDR3 for alpha chain variable domain of TCR clone 131967 (TRAV12-2, TRAJ17)
CAVNIKAAGNKLTF

SEQ ID NO: 263934 - protein, 12 aa, Homo sapiens
  CDR3 for beta chain variable domain of TCR clone 131967 (TRBV7-8, TRBJ2-7)
CASSLGGREQYF

SEQ ID NO: 263935 - protein, 13 aa, Homo sapiens
  CDR3 for alpha chain variable domain of TCR clone 131968 (TRAV13-2, TRAJ48)
CAEMDFGNEKLTF

SEQ ID NO: 263936 - protein, 15 aa, Homo sapiens
  CDR3 for beta chain variable domain of TCR clone 131968 (TRBV7-9, TRBJ1-6)
CASISPGRGNSPLHF

SEQ ID NO: 263937 - protein, 14 aa, Homo sapiens
  CDR3 for alpha chain variable domain of TCR clone 131969 (TRAV41, TRAJ57)
CAVLLQGGSEKLVF

SEQ ID NO: 263938 - protein, 15 aa, Homo sapiens
  CDR3 for beta chain variable domain of TCR clone 131969 (TRBV7-9, TRBJ1-4)
CASSARTGGNEKLFF

SEQ ID NO: 263939 - protein, 14 aa, Homo sapiens
  CDR3 for alpha chain variable domain of TCR clone 131970 (TRAV38-1, TRAJ11)
CAFMKHEGYSTLTF

SEQ ID NO: 263940 - protein, 15 aa, Homo sapiens
  CDR3 for beta chain variable domain of TCR clone 131970 (TRBV10-2, TRBJ2-6)
CASSEQGTGANVLTF

SEQ ID NO: 263941 - protein, 18 aa, Homo sapiens
  CDR3 for alpha chain variable domain of TCR clone 131971 (TRAV13-1, TRAJ52)
CAAKNPNAGGTSYGKMTF

SEQ ID NO: 263942 - protein, 14 aa, Homo sapiens
  CDR3 for beta chain variable domain of TCR clone 131971 (TRBV7-2, TRBJ2-7)
CASRSQGAAYEQYF

SEQ ID NO: 263943 - protein, 16 aa, Homo sapiens
  CDR3 for alpha chain variable domain of TCR clone 131972 (TRAV21, TRAJ45)
CVVSWGSGGGADGLTF

SEQ ID NO: 263944 - protein, 14 aa, Homo sapiens
  CDR3 for beta chain variable domain of TCR clone 131972 (TRBV4-2, TRBJ1-2)
CASSPGGSNYGYTF

SEQ ID NO: 263945 - protein, 12 aa, Homo sapiens
  CDR3 for alpha chain variable domain of TCR clone 131973 (TRAV35, TRAJ49)
CAGWNTGNQFYF

SEQ ID NO: 263946 - protein, 16 aa, Homo sapiens
  CDR3 for beta chain variable domain of TCR clone 131973 (TRBV5-1, TRBJ2-2)
CASSLLDTTNTGELFF

SEQ ID NO: 263947 - protein, 16 aa, Homo sapiens
  CDR3 for alpha chain variable domain of TCR clone 131974 (TRAV35, TRAJ28)
CAGQRYSGAGSYQLTF

SEQ ID NO: 263948 - protein, 10 aa, Homo sapiens
  CDR3 for beta chain variable domain of TCR clone 131974 (TRBV19, TRBJ1-2)
CASSQDRSMA

SEQ ID NO: 263949 - protein, 14 aa, Homo sapiens
  CDR3 for alpha chain variable domain of TCR clone 131975 (TRAV8-2, TRAJ4)
CVVSHLGGYNKLIF

SEQ ID NO: 263950 - protein, 14 aa, Homo sapiens
  CDR3 for beta chain variable domain of TCR clone 131975 (TRBV19, TRBJ2-1)
CASPTFVLSGEQFF

SEQ ID NO: 263951 - protein, 11 aa, Homo sapiens
  CDR3 for alpha chain variable domain of TCR clone 131976 (TRAV12-3, TRAJ43)
CAMSVSNDMRF

SEQ ID NO: 263952 - protein, 13 aa, Homo sapiens
  CDR3 for beta chain variable domain of TCR clone 131976 (TRBV20-1, TRBJ1-1)
CSAPLGGGTEAFY

SEQ ID NO: 263953 - protein, 15 aa, Homo sapiens
  CDR3 for alpha chain variable domain of TCR clone 131977 (TRAV9-2, TRAJ24)
CALSDFWASWGKLQF

SEQ ID NO: 263954 - protein, 14 aa, Homo sapiens
  CDR3 for beta chain variable domain of TCR clone 131977 (TRBV19, TRBJ2-7)
CASSIFAGTYEQYF

SEQ ID NO: 263955 - protein, 13 aa, Homo sapiens
  CDR3 for alpha chain variable domain of TCR clone 131978 (TRAV4, TRAJ34)
CLVGDYNTDKLIF

SEQ ID NO: 263956 - protein, 16 aa, Homo sapiens
  CDR3 for beta chain variable domain of TCR clone 131978 (TRBV7-3, TRBJ2-1)
CASSLEGYRSYNEQFF

SEQ ID NO: 263957 - protein, 12 aa, Homo sapiens
  CDR3 for alpha chain variable domain of TCR clone 131979 (TRAV20, TRAJ33)
CAVRGSNYQLIW

SEQ ID NO: 263958 - protein, 13 aa, Homo sapiens
  CDR3 for beta chain variable domain of TCR clone 131979 (TRBV4-3, TRBJ1-1)
CAISPTGNTEAFF

SEQ ID NO: 263959 - protein, 19 aa, Homo sapiens
  CDR3 for alpha chain variable domain of TCR clone 131980 (TRAV13-1, TRAJ52)
CAASPYQNAGGTSYGKLTL

SEQ ID NO: 263960 - protein, 13 aa, Homo sapiens
  CDR3 for beta chain variable domain of TCR clone 131980 (TRBV15, TRBJ2-7)
CATSTTGHYEQYF

SEQ ID NO: 263961 - protein, 15 aa, Homo sapiens
  CDR3 for alpha chain variable domain of TCR clone 131981 (TRAV8-4, TRAJ3)
CAVTGENLVQQCFQD

SEQ ID NO: 263962 - protein, 16 aa, Homo sapiens
  CDR3 for beta chain variable domain of TCR clone 131981 (TRBV5-7, TRBJ2-7)
PAANGGGGRGSYEQYF

SEQ ID NO: 263963 - protein, 13 aa, Homo sapiens
  CDR3 for alpha chain variable domain of TCR clone 131982 (TRAV8-3, TRAJ28)
CAVGAVGSYQLTF

SEQ ID NO: 263964 - protein, 15 aa, Homo sapiens
  CDR3 for beta chain variable domain of TCR clone 131982 (TRBV18, TRBJ1-1)
CASSGRTGEVTEAFF

SEQ ID NO: 263965 - protein, 14 aa, Homo sapiens
  CDR3 for alpha chain variable domain of TCR clone 131983 (TRAV30, TRAJ26)
CGTEIVSYGQNFVF

SEQ ID NO: 263966 - protein, 13 aa, Homo sapiens
  CDR3 for beta chain variable domain of TCR clone 131983 (TRBV19, TRBJ1-3)
CASRLSIGNTIYF

SEQ ID NO: 263967 - protein, 14 aa, Homo sapiens
  CDR3 for alpha chain variable domain of TCR clone 131984 (TRAV12-3, TRAJ10)
SHLPLTGGGNKLTF

SEQ ID NO: 263968 - protein, 18 aa, Homo sapiens
  CDR3 for beta chain variable domain of TCR clone 131984 (TRBV4-1, TRBJ1-5)
CASSQDPRGQGLNQPQHF

SEQ ID NO: 263969 - protein, 13 aa, Homo sapiens
  CDR3 for alpha chain variable domain of TCR clone 131985 (TRAV12-1, TRAJ20)
CAVGLRVDYKLSF

SEQ ID NO: 263970 - protein, 13 aa, Homo sapiens
  CDR3 for beta chain variable domain of TCR clone 131985 (TRBV6-1, TRBJ1-1)
CASSRQGNTEAFF

SEQ ID NO: 263971 - protein, 13 aa, Homo sapiens
  CDR3 for alpha chain variable domain of TCR clone 131986 (TRAV17, TRAJ4)
CATKSGGYNKLIF

SEQ ID NO: 263972 - protein, 17 aa, Homo sapiens
  CDR3 for beta chain variable domain of TCR clone 131986 (TRBV13, TRBJ2-3)
CASSLSRVAGGRNTQYF

SEQ ID NO: 263973 - protein, 13 aa, Homo sapiens
  CDR3 for alpha chain variable domain of TCR clone 131987 (TRAV20, TRAJ54)
CAVQAGGAQKLVF

SEQ ID NO: 263974 - protein, 14 aa, Homo sapiens
  CDR3 for beta chain variable domain of TCR clone 131987 (TRBV20-1, TRBJ2-7)
CSAKTGTGGYERYF

SEQ ID NO: 263975 - protein, 17 aa, Homo sapiens
  CDR3 for alpha chain variable domain of TCR clone 131988 (TRAV3, TRAJ6)
CAEGDGPRAGGSYIPTF

SEQ ID NO: 263976 - protein, 14 aa, Homo sapiens
  CDR3 for beta chain variable domain of TCR clone 131988 (TRBV7-2, TRBJ2-7)
CASSPKTSFYEQYF

SEQ ID NO: 263977 - protein, 10 aa, Homo sapiens
  CDR3 for alpha chain variable domain of TCR clone 131989 (TRAV23/DV6, TRAJ57)
CAASSTLSQG

SEQ ID NO: 263978 - protein, 13 aa, Homo sapiens
  CDR3 for beta chain variable domain of TCR clone 131989 (TRBV7-2, TRBJ2-2)
CASSLAVTGELFF

SEQ ID NO: 263979 - protein, 12 aa, Homo sapiens
  CDR3 for alpha chain variable domain of TCR clone 131990 (TRAV2, TRAJ9)
CAVGAGGFKTIF

SEQ ID NO: 263980 - protein, 16 aa, Homo sapiens
  CDR3 for beta chain variable domain of TCR clone 131990 (TRBV7-3, TRBJ2-1)
CASSLEGYRSYNEQFF

SEQ ID NO: 263981 - protein, 15 aa, Homo sapiens
  CDR3 for alpha chain variable domain of TCR clone 131991 (TRAV3, TRAJ17)
CAVSPKEAAGNKLNF

SEQ ID NO: 263982 - protein, 12 aa, Homo sapiens
  CDR3 for beta chain variable domain of TCR clone 131991 (TRBV7-9, TRBJ1-6)
CASSLMTSPLHF

SEQ ID NO: 263983 - protein, 14 aa, Homo sapiens
  CDR3 for alpha chain variable domain of TCR clone 131992 (TRAV26-1, TRAJ38)
CIADNAGNNRKLSW

SEQ ID NO: 263984 - protein, 13 aa, Homo sapiens
  CDR3 for beta chain variable domain of TCR clone 131992 (TRBV7-9, TRBJ1-2)
CASSLKQNYGYTF

SEQ ID NO: 263985 - protein, 11 aa, Homo sapiens
  CDR3 for alpha chain variable domain of TCR clone 131993 (TRAV12-3, TRAJ49)
CAMSSGNQFYF

SEQ ID NO: 263986 - protein, 15 aa, Homo sapiens
  CDR3 for beta chain variable domain of TCR clone 131993 (TRBV6-3, TRBJ2-7)
CASSSPGTVFYEQYF

SEQ ID NO: 263987 - protein, 13 aa, Homo sapiens
  CDR3 for alpha chain variable domain of TCR clone 131994 (TRAV36/DV7, TRAJ54)
CAVCTQGAQTLVF

SEQ ID NO: 263988 - protein, 13 aa, Homo sapiens
  CDR3 for beta chain variable domain of TCR clone 131994 (TRBV7-6, TRBJ2-7)
CASSLDHTHEQYF

SEQ ID NO: 263989 - protein, 14 aa, Homo sapiens
  CDR3 for alpha chain variable domain of TCR clone 131995 (TRAV13-1, TRAJ9)
CAASAPTGGFKTIF

SEQ ID NO: 263990 - protein, 16 aa, Homo sapiens
  CDR3 for beta chain variable domain of TCR clone 131995 (TRBV7-8, TRBJ2-4)
CASSAERTLAKNIQYF

SEQ ID NO: 263991 - protein, 16 aa, Homo sapiens
  CDR3 for alpha chain variable domain of TCR clone 131996 (TRAV9-2, TRAJ54)
CSESLGIIQGAQKLVF

SEQ ID NO: 263992 - protein, 13 aa, Homo sapiens
  CDR3 for beta chain variable domain of TCR clone 131996 (TRBV3-1, TRBJ1-1)
CASSPGVITEAFF

SEQ ID NO: 263993 - protein, 20 aa, Homo sapiens
  CDR3 for alpha chain variable domain of TCR clone 131997 (TRAV12-3, TRAJ41)
SLFIRDSQPSDSATPEALNF

SEQ ID NO: 263994 - protein, 13 aa, Homo sapiens
  CDR3 for beta chain variable domain of TCR clone 131997 (TRBV7-3, TRBJ1-1)
CASSQDWGAEAFF

SEQ ID NO: 263995 - protein, 17 aa, Homo sapiens
  CDR3 for alpha chain variable domain of TCR clone 131998 (TRAV8-6, TRAJ58)
CAVSSWVGETSGSRLTF

SEQ ID NO: 263996 - protein, 14 aa, Homo sapiens
  CDR3 for beta chain variable domain of TCR clone 131998 (TRBV4-3, TRBJ2-1)
CTSGLDRAYNEQFF

SEQ ID NO: 263997 - protein, 18 aa, Homo sapiens
  CDR3 for alpha chain variable domain of TCR clone 131999 (TRAV21, TRAJ52)
CAVRPSPAGGTSYGKLAF

SEQ ID NO: 263998 - protein, 14 aa, Homo sapiens
  CDR3 for beta chain variable domain of TCR clone 131999 (TRBV6-1, TRBJ1-3)
CASVQGGGGNTIYF

SEQ ID NO: 263999 - protein, 15 aa, Homo sapiens
  CDR3 for alpha chain variable domain of TCR clone 132000 (TRAV12-2, TRAJ53)
CAVNGGGGSNYKLTF

SEQ ID NO: 264000 - protein, 12 aa, Homo sapiens
  CDR3 for beta chain variable domain of TCR clone 132000 (TRBV7-6, TRBJ2-5)
CASSLSQENQYF

SEQ ID NO: 264001 - protein, 17 aa, Homo sapiens
  CDR3 for alpha chain variable domain of TCR clone 132001 (TRAV3, TRAJ6)
CAVSRRTDTGGSYIPTF

SEQ ID NO: 264002 - protein, 13 aa, Homo sapiens
  CDR3 for beta chain variable domain of TCR clone 132001 (TRBV7-9, TRBJ1-2)
CASSLKQNYGYTF

SEQ ID NO: 264003 - protein, 13 aa, Homo sapiens
  CDR3 for alpha chain variable domain of TCR clone 132002 (TRAV12-1, TRAJ11)
CVVNRAGYSTLTF

SEQ ID NO: 264004 - protein, 15 aa, Homo sapiens
  CDR3 for beta chain variable domain of TCR clone 132002 (TRBV7-3, TRBJ2-2)
FASSETGQGTGELFF

SEQ ID NO: 264005 - protein, 14 aa, Homo sapiens
  CDR3 for alpha chain variable domain of TCR clone 132003 (TRAV30, TRAJ33)
CGTERRFSNYQLIC

SEQ ID NO: 264006 - protein, 16 aa, Homo sapiens
  CDR3 for beta chain variable domain of TCR clone 132003 (TRBV7-3, TRBJ2-2)
CASSLKRGTLSGELFF

SEQ ID NO: 264007 - protein, 14 aa, Homo sapiens
  CDR3 for alpha chain variable domain of TCR clone 132004 (TRAV8-3, TRAJ4)
CAVGAAGGYNKLIF

SEQ ID NO: 264008 - protein, 13 aa, Homo sapiens
  CDR3 for beta chain variable domain of TCR clone 132004 (TRBV11-2, TRBJ2-5)
CASSSTGEETQYF

SEQ ID NO: 264009 - protein, 14 aa, Homo sapiens
  CDR3 for alpha chain variable domain of TCR clone 132005 (TRAV13-1, TRAJ5)
CAAHPDTGRRALTF

SEQ ID NO: 264010 - protein, 11 aa, Homo sapiens
  CDR3 for beta chain variable domain of TCR clone 132005 (TRBV7-8, TRBJ2-7)
CASSLSLEQYF

SEQ ID NO: 264011 - protein, 16 aa, Homo sapiens
  CDR3 for alpha chain variable domain of TCR clone 132006 (TRAV12-3, TRAJ53)
CALSVGSGGSNYKLTF

SEQ ID NO: 264012 - protein, 13 aa, Homo sapiens
  CDR3 for beta chain variable domain of TCR clone 132006 (TRBV7-6, TRBJ1-2)
CASSLVADYGYTF

SEQ ID NO: 264013 - protein, 11 aa, Homo sapiens
  CDR3 for alpha chain variable domain of TCR clone 132007 (TRAV35, TRAJ30)
CAPGGDDKIIF

SEQ ID NO: 264014 - protein, 17 aa, Homo sapiens
  CDR3 for beta chain variable domain of TCR clone 132007 (TRBV7-7, TRBJ1-1)
CASIGDRPNLGVTEAFF

SEQ ID NO: 264015 - protein, 15 aa, Homo sapiens
  CDR3 for alpha chain variable domain of TCR clone 132008 (TRAV12-3, TRAJ6)
CVMSATTGGSYIPTF

SEQ ID NO: 264016 - protein, 19 aa, Homo sapiens
  CDR3 for beta chain variable domain of TCR clone 132008 (TRBV25-1, TRBJ2-2)
CAILVYRVDRGRKTGELFF

SEQ ID NO: 264017 - protein, 13 aa, Homo sapiens
  CDR3 for alpha chain variable domain of TCR clone 132009 (TRAV3, TRAJ21)
CAVREPDFNKFYF

SEQ ID NO: 264018 - protein, 18 aa, Homo sapiens
  CDR3 for beta chain variable domain of TCR clone 132009 (TRBV11-3, TRBJ2-3)
CASSLGGASRGAPNTQYF

SEQ ID NO: 264019 - protein, 13 aa, Homo sapiens
  CDR3 for alpha chain variable domain of TCR clone 132010 (TRAV3, TRAJ27)
CAMRPLGAGKSTF

SEQ ID NO: 264020 - protein, 13 aa, Homo sapiens
  CDR3 for beta chain variable domain of TCR clone 132010 (TRBV7-9, TRBJ2-3)
CASSPGSTDTQYF

SEQ ID NO: 264021 - protein, 13 aa, Homo sapiens
  CDR3 for alpha chain variable domain of TCR clone 132011 (TRAV12-3, TRAJ46)
CAMKKSSGDKLTF

SEQ ID NO: 264022 - protein, 17 aa, Homo sapiens
  CDR3 for beta chain variable domain of TCR clone 132011 (TRBV3-1, TRBJ2-5)
CASSQGLAGMYQENQYF

SEQ ID NO: 264023 - protein, 14 aa, Homo sapiens
  CDR3 for alpha chain variable domain of TCR clone 132012 (TRAV3, TRAJ9)
CAVRGNTGGFKTIF

SEQ ID NO: 264024 - protein, 16 aa, Homo sapiens
  CDR3 for beta chain variable domain of TCR clone 132012 (TRBV7-2, TRBJ2-7)
CASSLGLAGGAYEQYL

SEQ ID NO: 264025 - protein, 16 aa, Homo sapiens
  CDR3 for alpha chain variable domain of TCR clone 132013 (TRAV1-2, TRAJ6)
CAVRDQGTGGSYIPTI

SEQ ID NO: 264026 - protein, 13 aa, Homo sapiens
  CDR3 for beta chain variable domain of TCR clone 132013 (TRBV28, TRBJ2-7)
CASTPGLAGEQYF

SEQ ID NO: 264027 - protein, 17 aa, Homo sapiens
  CDR3 for alpha chain variable domain of TCR clone 132014 (TRAV3, TRAJ6)
CAVRDGPRPGGSYIPTF

SEQ ID NO: 264028 - protein, 17 aa, Homo sapiens
  CDR3 for beta chain variable domain of TCR clone 132014 (TRBV20-1, TRBJ1-5)
CSASLSPGQGGNQPQHF

SEQ ID NO: 264029 - protein, 14 aa, Homo sapiens
  CDR3 for alpha chain variable domain of TCR clone 132015 (TRAV12-1, TRAJ3)
CVVNPGSSASKIIF

SEQ ID NO: 264030 - protein, 18 aa, Homo sapiens
  CDR3 for beta chain variable domain of TCR clone 132015 (TRBV4-2, TRBJ1-2)
CASSQDKVGHTANYGYTF

SEQ ID NO: 264031 - protein, 13 aa, Homo sapiens
  CDR3 for alpha chain variable domain of TCR clone 132016 (TRAV12-3, TRAJ13)
CAMSSGGYQKVTF

SEQ ID NO: 264032 - protein, 11 aa, Homo sapiens
  CDR3 for beta chain variable domain of TCR clone 132016 (TRBV11-2, TRBJ2-2)
CASSLPGELFF

SEQ ID NO: 264033 - protein, 14 aa, Homo sapiens
  CDR3 for alpha chain variable domain of TCR clone 132017 (TRAV12-3, TRAJ42)
CAMNYGGSQGNLIF

SEQ ID NO: 264034 - protein, 15 aa, Homo sapiens
  CDR3 for beta chain variable domain of TCR clone 132017 (TRBV11-2, TRBJ2-1)
CASTHGTGIYNEQFF

SEQ ID NO: 264035 - protein, 15 aa, Homo sapiens
  CDR3 for alpha chain variable domain of TCR clone 132018 (TRAV8-3, TRAJ32)
CAVGPYGGATNKRIF

SEQ ID NO: 264036 - protein, 14 aa, Homo sapiens
  CDR3 for beta chain variable domain of TCR clone 132018 (TRBV29-1, TRBJ2-2)
CSVLAETNTGELFF

SEQ ID NO: 264037 - protein, 13 aa, Homo sapiens
  CDR3 for alpha chain variable domain of TCR clone 132019 (TRAV8-6, TRAJ49)
CAVITNTGNQFYF

SEQ ID NO: 264038 - protein, 15 aa, Homo sapiens
  CDR3 for beta chain variable domain of TCR clone 132019 (TRBV7-2, TRBJ2-1)
CASSFQADEYNEQFF

SEQ ID NO: 264039 - protein, 14 aa, Homo sapiens
  CDR3 for alpha chain variable domain of TCR clone 132020 (TRAV12-1, TRAJ6)
CGEHCAGGSYIPTF

SEQ ID NO: 264040 - protein, 15 aa, Homo sapiens
  CDR3 for beta chain variable domain of TCR clone 132020 (TRBV18, TRBJ1-1)
CASSDRGTGDNEAFF

SEQ ID NO: 264041 - protein, 13 aa, Homo sapiens
  CDR3 for alpha chain variable domain of TCR clone 132021 (TRAV13-1, TRAJ53)
CAARKGSNYKLTF

SEQ ID NO: 264042 - protein, 13 aa, Homo sapiens
  CDR3 for beta chain variable domain of TCR clone 132021 (TRBV29-1, TRBJ2-5)
CSVTIASEETQYF

SEQ ID NO: 264043 - protein, 15 aa, Homo sapiens
  CDR3 for alpha chain variable domain of TCR clone 132022 (TRAV29/DV5, TRAJ53)
CAASASGGSNYKLTF

SEQ ID NO: 264044 - protein, 19 aa, Homo sapiens
  CDR3 for beta chain variable domain of TCR clone 132022 (TRBV5-1, TRBJ2-3)
YASSLWLAGGITTTDTQYF

SEQ ID NO: 264045 - protein, 16 aa, Homo sapiens
  CDR3 for alpha chain variable domain of TCR clone 132023 (TRAV27, TRAJ48)
TAAQPGDTGLYLPLTF

SEQ ID NO: 264046 - protein, 15 aa, Homo sapiens
  CDR3 for beta chain variable domain of TCR clone 132023 (TRBV27, TRBJ2-2)
CASSLEGPNTGELFF

SEQ ID NO: 264047 - protein, 13 aa, Homo sapiens
  CDR3 for alpha chain variable domain of TCR clone 132024 (TRAV3, TRAJ8)
CAVRFTGFQKLVF

SEQ ID NO: 264048 - protein, 14 aa, Homo sapiens
  CDR3 for beta chain variable domain of TCR clone 132024 (TRBV9, TRBJ1-3)
CASSVVGDGNTIYS

SEQ ID NO: 264049 - protein, 14 aa, Homo sapiens
  CDR3 for alpha chain variable domain of TCR clone 132025 (TRAV35, TRAJ13)
CAGSPSGGYQKVTF

SEQ ID NO: 264050 - protein, 13 aa, Homo sapiens
  CDR3 for beta chain variable domain of TCR clone 132025 (TRBV29-1, TRBJ1-1)
CSVGDSRNTEAFV

SEQ ID NO: 264051 - protein, 22 aa, Homo sapiens
  CDR3 for alpha chain variable domain of TCR clone 132026 (TRAV2, TRAJ10)
ILQVREADAAVYYTGGGNKLTF

SEQ ID NO: 264052 - protein, 16 aa, Homo sapiens
  CDR3 for beta chain variable domain of TCR clone 132026 (TRBV28, TRBJ2-7)
CASSLFFETGGPEQYF

SEQ ID NO: 264053 - protein, 14 aa, Homo sapiens
  CDR3 for alpha chain variable domain of TCR clone 132027 (TRAV16, TRAJ15)
CALSGPQAGTALIF

SEQ ID NO: 264054 - protein, 12 aa, Homo sapiens
  CDR3 for beta chain variable domain of TCR clone 132027 (TRBV18, TRBJ2-5)
CASSHSKETQYF

SEQ ID NO: 264055 - protein, 11 aa, Homo sapiens
  CDR3 for alpha chain variable domain of TCR clone 132028 (TRAV2, TRAJ13)
CASGGYQKVTF

SEQ ID NO: 264056 - protein, 13 aa, Homo sapiens
  CDR3 for beta chain variable domain of TCR clone 132028 (TRBV12-4, TRBJ1-2)
CASSSRQGKGYTF

SEQ ID NO: 264057 - protein, 14 aa, Homo sapiens
  CDR3 for alpha chain variable domain of TCR clone 132029 (TRAV13-1, TRAJ40)
CAASMTSGTYKYIF

SEQ ID NO: 264058 - protein, 14 aa, Homo sapiens
  CDR3 for beta chain variable domain of TCR clone 132029 (TRBV19, TRBJ2-2)
CASTVTANTGELFF

SEQ ID NO: 264059 - protein, 13 aa, Homo sapiens
  CDR3 for alpha chain variable domain of TCR clone 132030 (TRAV30, TRAJ24)
CGAVTDSWGKLQF

SEQ ID NO: 264060 - protein, 14 aa, Homo sapiens
  CDR3 for beta chain variable domain of TCR clone 132030 (TRBV6-3, TRBJ2-2)
CASTYTPDTGELFF

SEQ ID NO: 264061 - protein, 11 aa, Homo sapiens
  CDR3 for alpha chain variable domain of TCR clone 132031 (TRAV3, TRAJ21)
CAVGNFNKFYF

SEQ ID NO: 264062 - protein, 17 aa, Homo sapiens
  CDR3 for beta chain variable domain of TCR clone 132031 (TRBV19, TRBJ2-6)
CASSTGQVFSGANVLTF

SEQ ID NO: 264063 - protein, 13 aa, Homo sapiens
  CDR3 for alpha chain variable domain of TCR clone 132032 (TRAV21, TRAJ27)
CAARPGHAGKSTF

SEQ ID NO: 264064 - protein, 14 aa, Homo sapiens
  CDR3 for beta chain variable domain of TCR clone 132032 (TRBV20-1, TRBJ2-1)
CSAAGSGEYNEQFF

SEQ ID NO: 264065 - protein, 18 aa, Homo sapiens
  CDR3 for alpha chain variable domain of TCR clone 132033 (TRAV13-1, TRAJ52)
CAAKNPNAGGTSYGKLTF

SEQ ID NO: 264066 - protein, 15 aa, Homo sapiens
  CDR3 for beta chain variable domain of TCR clone 132033 (TRBV6-1, TRBJ2-3)
CASSERGGITDTQYC

SEQ ID NO: 264067 - protein, 11 aa, Homo sapiens
  CDR3 for alpha chain variable domain of TCR clone 132034 (TRAV2, TRAJ13)
CASGGYQKVTF

SEQ ID NO: 264068 - protein, 16 aa, Homo sapiens
  CDR3 for beta chain variable domain of TCR clone 132034 (TRBV5-1, TRBJ2-3)
CASSSIGAGSTDTQYF

SEQ ID NO: 264069 - protein, 14 aa, Homo sapiens
  CDR3 for alpha chain variable domain of TCR clone 132035 (TRAV12-1, TRAJ12)
CVVTRMDNSYKLIF

SEQ ID NO: 264070 - protein, 13 aa, Homo sapiens
  CDR3 for beta chain variable domain of TCR clone 132035 (TRBV20-1, TRBJ1-1)
CSARGGGNTEAFF

SEQ ID NO: 264071 - protein, 14 aa, Homo sapiens
  CDR3 for alpha chain variable domain of TCR clone 132036 (TRAV36/DV7, TRAJ44)
CCGANTGTASKLTF

SEQ ID NO: 264072 - protein, 14 aa, Homo sapiens
  CDR3 for beta chain variable domain of TCR clone 132036 (TRBV20-1, TRBJ1-3)
CSASPPGAGNTIYF

SEQ ID NO: 264073 - protein, 16 aa, Homo sapiens
  CDR3 for alpha chain variable domain of TCR clone 132037 (TRAV30, TRAJ24)
CGTEIVDADSWGKFQF

SEQ ID NO: 264074 - protein, 14 aa, Homo sapiens
  CDR3 for beta chain variable domain of TCR clone 132037 (TRBV12-5, TRBJ2-5)
CASGSHTHQETQYF

SEQ ID NO: 264075 - protein, 19 aa, Homo sapiens
  CDR3 for alpha chain variable domain of TCR clone 132038 (TRAV25, TRAJ43)
TATQTTDVGTYFCAVFMRF

SEQ ID NO: 264076 - protein, 15 aa, Homo sapiens
  CDR3 for beta chain variable domain of TCR clone 132038 (TRBV7-9, TRBJ1-5)
CASSQGHQPNQPQHF

SEQ ID NO: 264077 - protein, 14 aa, Homo sapiens
  CDR3 for alpha chain variable domain of TCR clone 132039 (TRAV13-1, TRAJ44)
CAAKATGTASKLTF

SEQ ID NO: 264078 - protein, 17 aa, Homo sapiens
  CDR3 for beta chain variable domain of TCR clone 132039 (TRBV7-3, TRBJ2-3)
CACSLMKRMRGADTQYF

SEQ ID NO: 264079 - protein, 14 aa, Homo sapiens
  CDR3 for alpha chain variable domain of TCR clone 132040 (TRAV26-1, TRAJ38)
CIADNAGNNRKLIL

SEQ ID NO: 264080 - protein, 16 aa, Homo sapiens
  CDR3 for beta chain variable domain of TCR clone 132040 (TRBV20-1, TRBJ2-7)
CSASTSGRLSSYEQYF

SEQ ID NO: 264081 - protein, 15 aa, Homo sapiens
  CDR3 for alpha chain variable domain of TCR clone 132041 (TRAV8-4, TRAJ37)
CAVSTRSGNTGKLIF

SEQ ID NO: 264082 - protein, 20 aa, Homo sapiens
  CDR3 for beta chain variable domain of TCR clone 132041 (TRBV7-8, TRBJ2-2)
CASSHLFPGPTIHIAGELFF

SEQ ID NO: 264083 - protein, 14 aa, Homo sapiens
  CDR3 for alpha chain variable domain of TCR clone 132042 (TRAV1-2, TRAJ16)
CAVNRFSDGQKLLF

SEQ ID NO: 264084 - protein, 11 aa, Homo sapiens
  CDR3 for beta chain variable domain of TCR clone 132042 (TRBV7-9, TRBJ2-3)
CASSPTNTQYF

SEQ ID NO: 264085 - protein, 13 aa, Homo sapiens
  CDR3 for alpha chain variable domain of TCR clone 132043 (TRAV8-6, TRAJ49)
CAVITNTGNQFYF

SEQ ID NO: 264086 - protein, 13 aa, Homo sapiens
  CDR3 for beta chain variable domain of TCR clone 132043 (TRBV10-3, TRBJ2-7)
CTSKLAVNYEQYF

SEQ ID NO: 264087 - protein, 14 aa, Homo sapiens
  CDR3 for alpha chain variable domain of TCR clone 132044 (TRAV12-2, TRAJ13)
CAVKETGGYQKVTF

SEQ ID NO: 264088 - protein, 16 aa, Homo sapiens
  CDR3 for beta chain variable domain of TCR clone 132044 (TRBV2, TRBJ2-1)
CASRSPAGGKYNEQFF

SEQ ID NO: 264089 - protein, 10 aa, Homo sapiens
  CDR3 for alpha chain variable domain of TCR clone 132045 (TRAV12-3, TRAJ18)
CAMSAEAQPW

SEQ ID NO: 264090 - protein, 16 aa, Homo sapiens
  CDR3 for beta chain variable domain of TCR clone 132045 (TRBV11-2, TRBJ2-7)
CASSTVTAPKTYEQYF

SEQ ID NO: 264091 - protein, 14 aa, Homo sapiens
  CDR3 for alpha chain variable domain of TCR clone 132046 (TRAV12-3, TRAJ10)
SHLPLTGGGNKLTF

SEQ ID NO: 264092 - protein, 11 aa, Homo sapiens
  CDR3 for beta chain variable domain of TCR clone 132046 (TRBV20-1, TRBJ2-5)
CSADRAEAQYF

SEQ ID NO: 264093 - protein, 11 aa, Homo sapiens
  CDR3 for alpha chain variable domain of TCR clone 132047 (TRAV12-1, TRAJ15)
CVVNAGTALIF

SEQ ID NO: 264094 - protein, 16 aa, Homo sapiens
  CDR3 for beta chain variable domain of TCR clone 132047 (TRBV28, TRBJ2-1)
CASSSRVRDSYNEQLF

SEQ ID NO: 264095 - protein, 14 aa, Homo sapiens
  CDR3 for alpha chain variable domain of TCR clone 132048 (TRAV8-3, TRAJ9)
CAVVYITGGFKTIF

SEQ ID NO: 264096 - protein, 14 aa, Homo sapiens
  CDR3 for beta chain variable domain of TCR clone 132048 (TRBV7-3, TRBJ2-2)
CASSSGGYTGELFF

SEQ ID NO: 264097 - protein, 22 aa, Homo sapiens
  CDR3 for alpha chain variable domain of TCR clone 132049 (TRAV4, )
CLVGPHNYDIQNPDPAVYQLRD

SEQ ID NO: 264098 - protein, 17 aa, Homo sapiens
  CDR3 for beta chain variable domain of TCR clone 132049 (TRBV24-1, TRBJ2-1)
CATSDVSTSGAYNEQFF

SEQ ID NO: 264099 - protein, 14 aa, Homo sapiens
  CDR3 for alpha chain variable domain of TCR clone 132050 (TRAV23/DV6, TRAJ40)
CAASLTSGAYKYIF

SEQ ID NO: 264100 - protein, 14 aa, Homo sapiens
  CDR3 for beta chain variable domain of TCR clone 132050 (TRBV5-1, TRBJ2-3)
CASSRGQGGGTQYF

SEQ ID NO: 264101 - protein, 13 aa, Homo sapiens
  CDR3 for alpha chain variable domain of TCR clone 132051 (TRAV1-2, TRAJ9)
CAALNTGGFKTIF

SEQ ID NO: 264102 - protein, 14 aa, Homo sapiens
  CDR3 for beta chain variable domain of TCR clone 132051 (TRBV4-1, TRBJ2-2)
CASSQAVNTEELFF

SEQ ID NO: 264103 - protein, 14 aa, Homo sapiens
  CDR3 for alpha chain variable domain of TCR clone 132052 (TRAV8-6, TRAJ12)
CAVKAAYSSYKLIF

SEQ ID NO: 264104 - protein, 15 aa, Homo sapiens
  CDR3 for beta chain variable domain of TCR clone 132052 (TRBV5-1, TRBJ2-5)
CASSLGLAEQETQYF

SEQ ID NO: 264105 - protein, 13 aa, Homo sapiens
  CDR3 for alpha chain variable domain of TCR clone 132053 (TRAV23/DV6, TRAJ16)
CAASISDCQKLLF

SEQ ID NO: 264106 - protein, 15 aa, Homo sapiens
  CDR3 for beta chain variable domain of TCR clone 132053 (TRBV2, TRBJ2-2)
CASSRETVGTGELFF

SEQ ID NO: 264107 - protein, 14 aa, Homo sapiens
  CDR3 for alpha chain variable domain of TCR clone 132054 (TRAV17, TRAJ22)
CATSPSGSARQLTF

SEQ ID NO: 264108 - protein, 13 aa, Homo sapiens
  CDR3 for beta chain variable domain of TCR clone 132054 (TRBV4-2, TRBJ1-1)
CASSQAGNTEAFF

SEQ ID NO: 264109 - protein, 15 aa, Homo sapiens
  CDR3 for alpha chain variable domain of TCR clone 132055 (TRAV21, TRAJ53)
CATLNSGGSNYKLTF

SEQ ID NO: 264110 - protein, 16 aa, Homo sapiens
  CDR3 for beta chain variable domain of TCR clone 132055 (TRBV9, TRBJ2-1)
RASSVGGGGNYNEQFF

SEQ ID NO: 264111 - protein, 11 aa, Homo sapiens
  CDR3 for alpha chain variable domain of TCR clone 132056 (TRAV2, TRAJ13)
CASGGYQKVTF

SEQ ID NO: 264112 - protein, 13 aa, Homo sapiens
  CDR3 for beta chain variable domain of TCR clone 132056 (TRBV27, TRBJ1-4)
CVSSLMGDEKLFF

SEQ ID NO: 264113 - protein, 12 aa, Homo sapiens
  CDR3 for alpha chain variable domain of TCR clone 132057 (TRAV12-1, TRAJ40)
CVVYSGTYKYIF

SEQ ID NO: 264114 - protein, 16 aa, Homo sapiens
  CDR3 for beta chain variable domain of TCR clone 132057 (TRBV28, TRBJ1-1)
CASSLSGTGWNTEAFF

SEQ ID NO: 264115 - protein, 13 aa, Homo sapiens
  CDR3 for alpha chain variable domain of TCR clone 132058 (TRAV8-2, TRAJ49)
CVVSPSTGNQLYF

SEQ ID NO: 264116 - protein, 14 aa, Homo sapiens
  CDR3 for beta chain variable domain of TCR clone 132058 (TRBV11-2, TRBJ2-7)
CASSRSGGAGEQYF

SEQ ID NO: 264117 - protein, 12 aa, Homo sapiens
  CDR3 for alpha chain variable domain of TCR clone 132059 (TRAV2, TRAJ9)
CAVGAGGFETIF

SEQ ID NO: 264118 - protein, 11 aa, Homo sapiens
  CDR3 for beta chain variable domain of TCR clone 132059 (TRBV13, TRBJ2-2)
CASSPRTGEHT

SEQ ID NO: 264119 - protein, 10 aa, Homo sapiens
  CDR3 for alpha chain variable domain of TCR clone 132060 (TRAV16, TRAJ22)
SAMYLRQLTF

SEQ ID NO: 264120 - protein, 13 aa, Homo sapiens
  CDR3 for beta chain variable domain of TCR clone 132060 (TRBV10-2, TRBJ2-6)
CASKSAGANVLTF

SEQ ID NO: 264121 - protein, 11 aa, Homo sapiens
  CDR3 for alpha chain variable domain of TCR clone 132061 (TRAV17, TRAJ49)
CATNTGNQFYF

SEQ ID NO: 264122 - protein, 14 aa, Homo sapiens
  CDR3 for beta chain variable domain of TCR clone 132061 (TRBV28, TRBJ1-3)
CASSFRDRVNTIYF

SEQ ID NO: 264123 - protein, 14 aa, Homo sapiens
  CDR3 for alpha chain variable domain of TCR clone 132062 (TRAV30, TRAJ33)
CGTVAPRSNSQLIW

SEQ ID NO: 264124 - protein, 16 aa, Homo sapiens
  CDR3 for beta chain variable domain of TCR clone 132062 (TRBV3-1, TRBJ2-5)
CASSPGQFNGFGTQYF

SEQ ID NO: 264125 - protein, 12 aa, Homo sapiens
  CDR3 for alpha chain variable domain of TCR clone 132063 (TRAV13-1, TRAJ15)
CAASQAGTALIF

SEQ ID NO: 264126 - protein, 17 aa, Homo sapiens
  CDR3 for beta chain variable domain of TCR clone 132063 (TRBV6-5, TRBJ2-3)
CASSYTTGTGRGDTQYF

SEQ ID NO: 264127 - protein, 16 aa, Homo sapiens
  CDR3 for alpha chain variable domain of TCR clone 132064 (TRAV3, TRAJ10)
CAVRDMRAGGGNKLTF

SEQ ID NO: 264128 - protein, 15 aa, Homo sapiens
  CDR3 for beta chain variable domain of TCR clone 132064 (TRBV7-2, TRBJ2-1)
CASSSGLAGGNEQFF

SEQ ID NO: 264129 - protein, 13 aa, Homo sapiens
  CDR3 for alpha chain variable domain of TCR clone 132065 (TRAV8-3, TRAJ6)
CAVGAGGSYIPTF

SEQ ID NO: 264130 - protein, 14 aa, Homo sapiens
  CDR3 for beta chain variable domain of TCR clone 132065 (TRBV11-2, TRBJ1-1)
CASSTQRGRTEAFF

SEQ ID NO: 264131 - protein, 11 aa, Homo sapiens
  CDR3 for alpha chain variable domain of TCR clone 132066 (TRAV3, TRAJ31)
CAVRPDARLMF

SEQ ID NO: 264132 - protein, 15 aa, Homo sapiens
  CDR3 for beta chain variable domain of TCR clone 132066 (TRBV7-2, TRBJ2-1)
CASTHGTGIYNEQFF

SEQ ID NO: 264133 - protein, 14 aa, Homo sapiens
  CDR3 for alpha chain variable domain of TCR clone 132067 (TRAV21, TRAJ35)
CAVMPIGFGNVLHC

SEQ ID NO: 264134 - protein, 12 aa, Homo sapiens
  CDR3 for beta chain variable domain of TCR clone 132067 (TRBV7-9, TRBJ2-7)
YASSIKREEQYL

SEQ ID NO: 264135 - protein, 14 aa, Homo sapiens
  CDR3 for alpha chain variable domain of TCR clone 132068 (TRAV8-3, TRAJ39)
CAVGANNAGNMLTF

SEQ ID NO: 264136 - protein, 12 aa, Homo sapiens
  CDR3 for beta chain variable domain of TCR clone 132068 (TRBV28, TRBJ1-3)
CVSVSSGNTIYF

SEQ ID NO: 264137 - protein, 14 aa, Homo sapiens
  CDR3 for alpha chain variable domain of TCR clone 132069 (TRAV12-2, TRAJ44)
CAVNPAGTSSKLTF

SEQ ID NO: 264138 - protein, 13 aa, Homo sapiens
  CDR3 for beta chain variable domain of TCR clone 132069 (TRBV20-1, TRBJ1-6)
CSAPLGVGSPLHF

SEQ ID NO: 264139 - protein, 13 aa, Homo sapiens
  CDR3 for alpha chain variable domain of TCR clone 132070 (TRAV38-1, TRAJ42)
CARWGGSQGNLIF

SEQ ID NO: 264140 - protein, 14 aa, Homo sapiens
  CDR3 for beta chain variable domain of TCR clone 132070 (TRBV6-1, TRBJ1-3)
CASVQGGGGNTMYF

SEQ ID NO: 264141 - protein, 13 aa, Homo sapiens
  CDR3 for alpha chain variable domain of TCR clone 132071 (TRAV12-1, TRAJ6)
CVVFPGGSYIPTF

SEQ ID NO: 264142 - protein, 14 aa, Homo sapiens
  CDR3 for beta chain variable domain of TCR clone 132071 (TRBV7-2, TRBJ1-5)
CASSTQGAGQPQHF

SEQ ID NO: 264143 - protein, 12 aa, Homo sapiens
  CDR3 for alpha chain variable domain of TCR clone 132072 (TRAV13-1, TRAJ49)
CAASPMGNQFYF

SEQ ID NO: 264144 - protein, 13 aa, Homo sapiens
  CDR3 for beta chain variable domain of TCR clone 132072 (TRBV3-1, TRBJ2-7)
CASSLRDGYEQYF

SEQ ID NO: 264145 - protein, 11 aa, Homo sapiens
  CDR3 for alpha chain variable domain of TCR clone 132073 (TRAV12-2, TRAJ33)
CDVTSNYQLIW

SEQ ID NO: 264146 - protein, 14 aa, Homo sapiens
  CDR3 for beta chain variable domain of TCR clone 132073 (TRBV28, TRBJ2-2)
CASRIRSGTGELFF

SEQ ID NO: 264147 - protein, 11 aa, Homo sapiens
  CDR3 for alpha chain variable domain of TCR clone 132074 (TRAV2, TRAJ13)
CASGGYQKVTF

SEQ ID NO: 264148 - protein, 15 aa, Homo sapiens
  CDR3 for beta chain variable domain of TCR clone 132074 (TRBV7-9, TRBJ1-6)
WASSSPGRGNSPLHF

SEQ ID NO: 264149 - protein, 14 aa, Homo sapiens
  CDR3 for alpha chain variable domain of TCR clone 132075 (TRAV1-2, TRAJ16)
CAVNRFSDGEKLLF

SEQ ID NO: 264150 - protein, 13 aa, Homo sapiens
  CDR3 for beta chain variable domain of TCR clone 132075 (TRBV10-3, TRBJ2-7)
CASKLAVNYEQYF

SEQ ID NO: 264151 - protein, 14 aa, Homo sapiens
  CDR3 for alpha chain variable domain of TCR clone 132076 (TRAV17, TRAJ57)
CATDPQGGSEKLVF

SEQ ID NO: 264152 - protein, 12 aa, Homo sapiens
  CDR3 for beta chain variable domain of TCR clone 132076 (TRBV11-2, TRBJ2-2)
CASSLPTGELFF

SEQ ID NO: 264153 - protein, 13 aa, Homo sapiens
  CDR3 for alpha chain variable domain of TCR clone 132077 (TRAV21, TRAJ27)
CAALNTNAGKSTF

SEQ ID NO: 264154 - protein, 16 aa, Homo sapiens
  CDR3 for beta chain variable domain of TCR clone 132077 (TRBV12-5, TRBJ2-5)
CASGPRTSGNQETQYF

SEQ ID NO: 264155 - protein, 14 aa, Homo sapiens
  CDR3 for alpha chain variable domain of TCR clone 132078 (TRAV1-2, TRAJ16)
CAVNRFSDGQKLLF

SEQ ID NO: 264156 - protein, 13 aa, Homo sapiens
  CDR3 for beta chain variable domain of TCR clone 132078 (TRBV4-1, TRBJ2-3)
CASSLDFTDTQYF

SEQ ID NO: 264157 - protein, 14 aa, Homo sapiens
  CDR3 for alpha chain variable domain of TCR clone 132079 (TRAV9-2, TRAJ39)
CALYIYNAGNMLTF

SEQ ID NO: 264158 - protein, 14 aa, Homo sapiens
  CDR3 for beta chain variable domain of TCR clone 132079 (TRBV9, TRBJ2-7)
CASSPLRAVGEQYF

SEQ ID NO: 264159 - protein, 14 aa, Homo sapiens
  CDR3 for alpha chain variable domain of TCR clone 132080 (TRAV12-3, TRAJ42)
CAMNYGGSQGNLIF

SEQ ID NO: 264160 - protein, 15 aa, Homo sapiens
  CDR3 for beta chain variable domain of TCR clone 132080 (TRBV5-7, TRBJ1-5)
CASSYGKLWDQPRHF

SEQ ID NO: 264161 - protein, 15 aa, Homo sapiens
  CDR3 for alpha chain variable domain of TCR clone 132081 (TRAV3, TRAJ4)
CAVRDGTGGYNKLIF

SEQ ID NO: 264162 - protein, 14 aa, Homo sapiens
  CDR3 for beta chain variable domain of TCR clone 132081 (TRBV11-2, TRBJ2-7)
CASSLGAGAYEQYF

SEQ ID NO: 264163 - protein, 14 aa, Homo sapiens
  CDR3 for alpha chain variable domain of TCR clone 132082 (TRAV12-2, TRAJ44)
CAVNKAGTASKLTF

SEQ ID NO: 264164 - protein, 14 aa, Homo sapiens
  CDR3 for beta chain variable domain of TCR clone 132082 (TRBV25-1, TRBJ1-2)
CASSEAGTAYGYTF

SEQ ID NO: 264165 - protein, 11 aa, Homo sapiens
  CDR3 for alpha chain variable domain of TCR clone 132083 (TRAV1-2, TRAJ20)
CAVSNDYKLSF

SEQ ID NO: 264166 - protein, 15 aa, Homo sapiens
  CDR3 for beta chain variable domain of TCR clone 132083 (TRBV6-6, TRBJ2-7)
CASSYSYGGSYEQYF

SEQ ID NO: 264167 - protein, 14 aa, Homo sapiens
  CDR3 for alpha chain variable domain of TCR clone 132084 (TRAV25, TRAJ35)
CARRMEGFGNVLHC

SEQ ID NO: 264168 - protein, 13 aa, Homo sapiens
  CDR3 for beta chain variable domain of TCR clone 132084 (TRBV7-2, TRBJ1-4)
CASSLAGLETLFF

SEQ ID NO: 264169 - protein, 13 aa, Homo sapiens
  CDR3 for alpha chain variable domain of TCR clone 132085 (TRAV12-1, TRAJ33)
CGDAPDSNYQLIW

SEQ ID NO: 264170 - protein, 16 aa, Homo sapiens
  CDR3 for beta chain variable domain of TCR clone 132085 (TRBV3-1, TRBJ2-5)
CASSPGQFNGFGTQYF

SEQ ID NO: 264171 - protein, 14 aa, Homo sapiens
  CDR3 for alpha chain variable domain of TCR clone 132086 (TRAV14/DV4, TRAJ42)
CPRGSLRSQGNLIF

SEQ ID NO: 264172 - protein, 13 aa, Homo sapiens
  CDR3 for beta chain variable domain of TCR clone 132086 (TRBV7-9, TRBJ1-2)
CASSLKQNYGYTF

SEQ ID NO: 264173 - protein, 14 aa, Homo sapiens
  CDR3 for alpha chain variable domain of TCR clone 132087 (TRAV35, TRAJ40)
CAGSTTSGTHKYIF

SEQ ID NO: 264174 - protein, 13 aa, Homo sapiens
  CDR3 for beta chain variable domain of TCR clone 132087 (TRBV20-1, TRBJ1-6)
CSAPLGVGSPLHF

SEQ ID NO: 264175 - protein, 13 aa, Homo sapiens
  CDR3 for alpha chain variable domain of TCR clone 132088 (TRAV12-1, TRAJ53)
CVVNAESNYKLTF

SEQ ID NO: 264176 - protein, 16 aa, Homo sapiens
  CDR3 for beta chain variable domain of TCR clone 132088 (TRBV12-5, TRBJ2-5)
CASGPRTSGNQETQYF

SEQ ID NO: 264177 - protein, 18 aa, Homo sapiens
  CDR3 for alpha chain variable domain of TCR clone 132089 (TRAV29/DV5, TRAJ53)
CSVLLCSKRGGSNYKLTF

SEQ ID NO: 264178 - protein, 17 aa, Homo sapiens
  CDR3 for beta chain variable domain of TCR clone 132089 (TRBV7-8, TRBJ2-6)
CASSAGTGGAGANGLTF

SEQ ID NO: 264179 - protein, 14 aa, Homo sapiens
  CDR3 for alpha chain variable domain of TCR clone 132090 (TRAV21, TRAJ12)
CAVRNGDSSYKLIF

SEQ ID NO: 264180 - protein, 14 aa, Homo sapiens
  CDR3 for beta chain variable domain of TCR clone 132090 (TRBV7-6, TRBJ2-7)
CASSWTGTGNEQYF

SEQ ID NO: 264181 - protein, 14 aa, Homo sapiens
  CDR3 for alpha chain variable domain of TCR clone 132091 (TRAV1-2, TRAJ8)
CAVREDTGFQKLVF

SEQ ID NO: 264182 - protein, 13 aa, Homo sapiens
  CDR3 for beta chain variable domain of TCR clone 132091 (TRBV19, TRBJ2-7)
CASSIRSSYEQYF

SEQ ID NO: 264183 - protein, 15 aa, Homo sapiens
  CDR3 for alpha chain variable domain of TCR clone 132092 (TRAV29/DV5, TRAJ20)
CAASAVRSNDYKLSF

SEQ ID NO: 264184 - protein, 15 aa, Homo sapiens
  CDR3 for beta chain variable domain of TCR clone 132092 (TRBV28, TRBJ2-7)
CASRPWDRLSYEQYF

SEQ ID NO: 264185 - protein, 11 aa, Homo sapiens
  CDR3 for alpha chain variable domain of TCR clone 132093 (TRAV3, TRAJ21)
CAVGSFNKFYF

SEQ ID NO: 264186 - protein, 14 aa, Homo sapiens
  CDR3 for beta chain variable domain of TCR clone 132093 (TRBV24-1, TRBJ1-1)
CATSIPRGDTEAFF

SEQ ID NO: 264187 - protein, 16 aa, Homo sapiens
  CDR3 for alpha chain variable domain of TCR clone 132094 (TRAV3, TRAJ37)
CAVRPHGSGNTGKLIF

SEQ ID NO: 264188 - protein, 15 aa, Homo sapiens
  CDR3 for beta chain variable domain of TCR clone 132094 (TRBV28, TRBJ1-2)
CASSSHSIANYGYTF

SEQ ID NO: 264189 - protein, 15 aa, Homo sapiens
  CDR3 for alpha chain variable domain of TCR clone 132095 (TRAV12-2, TRAJ43)
CAFDMRFGAGTRLTV

SEQ ID NO: 264190 - protein, 13 aa, Homo sapiens
  CDR3 for beta chain variable domain of TCR clone 132095 (TRBV4-2, TRBJ1-1)
CASSQAGNTEAVF

SEQ ID NO: 264191 - protein, 12 aa, Homo sapiens
  CDR3 for alpha chain variable domain of TCR clone 132096 (TRAV1-1, TRAJ23)
CAVTNQGGKLIF

SEQ ID NO: 264192 - protein, 14 aa, Homo sapiens
  CDR3 for beta chain variable domain of TCR clone 132096 (TRBV12-4, TRBJ1-6)
CASNLQGKGSPLHY

SEQ ID NO: 264193 - protein, 12 aa, Homo sapiens
  CDR3 for alpha chain variable domain of TCR clone 132097 (TRAV3, TRAJ20)
CAVRDPDYKLSF

SEQ ID NO: 264194 - protein, 18 aa, Homo sapiens
  CDR3 for beta chain variable domain of TCR clone 132097 (TRBV28, TRBJ1-3)
CASSPPGTVTSSGNTIYF

SEQ ID NO: 264195 - protein, 14 aa, Homo sapiens
  CDR3 for alpha chain variable domain of TCR clone 132098 (TRAV1-2, TRAJ16)
CAVNRFSDVQKLLF

SEQ ID NO: 264196 - protein, 15 aa, Homo sapiens
  CDR3 for beta chain variable domain of TCR clone 132098 (TRBV5-1, TRBJ2-3)
CASSVTSGSTDTQYF

SEQ ID NO: 264197 - protein, 14 aa, Homo sapiens
  CDR3 for alpha chain variable domain of TCR clone 132099 (TRAV35, TRAJ22)
CAGLRPGTARQLTF

SEQ ID NO: 264198 - protein, 15 aa, Homo sapiens
  CDR3 for beta chain variable domain of TCR clone 132099 (TRBV12-4, TRBJ2-5)
CASSPPTGLQETQYF

SEQ ID NO: 264199 - protein, 14 aa, Homo sapiens
  CDR3 for alpha chain variable domain of TCR clone 132100 (TRAV36/DV7, TRAJ57)
CAVGFPGGSEKLVF

SEQ ID NO: 264200 - protein, 12 aa, Homo sapiens
  CDR3 for beta chain variable domain of TCR clone 132100 (TRBV19, TRBJ2-7)
CASTSGTYEQCF

SEQ ID NO: 264201 - protein, 14 aa, Homo sapiens
  CDR3 for alpha chain variable domain of TCR clone 132101 (TRAV12-3, TRAJ33)
CAMSVPGSKYQLIW

SEQ ID NO: 264202 - protein, 12 aa, Homo sapiens
  CDR3 for beta chain variable domain of TCR clone 132101 (TRBV7-8, TRBJ2-7)
CASSLGDREQYF

SEQ ID NO: 264203 - protein, 15 aa, Homo sapiens
  CDR3 for alpha chain variable domain of TCR clone 132102 (TRAV14/DV4, TRAJ12)
CAMREERDSSYKLIF

SEQ ID NO: 264204 - protein, 13 aa, Homo sapiens
  CDR3 for beta chain variable domain of TCR clone 132102 (TRBV11-2, TRBJ2-7)
CASSVTRQGEQYF

SEQ ID NO: 264205 - protein, 13 aa, Homo sapiens
  CDR3 for alpha chain variable domain of TCR clone 132103 (TRAV12-2, TRAJ20)
CAVYPSNDYKLSF

SEQ ID NO: 264206 - protein, 15 aa, Homo sapiens
  CDR3 for beta chain variable domain of TCR clone 132103 (TRBV7-2, TRBJ2-1)
CASTSASGDYNEQFF

SEQ ID NO: 264207 - protein, 16 aa, Homo sapiens
  CDR3 for alpha chain variable domain of TCR clone 132104 (TRAV3, TRAJ37)
CAVRGKGSGNTGKLIF

SEQ ID NO: 264208 - protein, 15 aa, Homo sapiens
  CDR3 for beta chain variable domain of TCR clone 132104 (TRBV7-3, TRBJ2-2)
CAGSETGQGTGELFF

SEQ ID NO: 264209 - protein, 14 aa, Homo sapiens
  CDR3 for alpha chain variable domain of TCR clone 132105 (TRAV8-1, TRAJ24)
CSVNAADSWGKLQF

SEQ ID NO: 264210 - protein, 16 aa, Homo sapiens
  CDR3 for beta chain variable domain of TCR clone 132105 (TRBV4-3, TRBJ2-1)
CASSPALDRGVNEQFF

SEQ ID NO: 264211 - protein, 16 aa, Homo sapiens
  CDR3 for alpha chain variable domain of TCR clone 132106 (TRAV38-2/DV8, TRAJ42)
CAYRAFYGGSQGNLIF

SEQ ID NO: 264212 - protein, 16 aa, Homo sapiens
  CDR3 for beta chain variable domain of TCR clone 132106 (TRBV12-5, TRBJ2-5)
CASGPRTSGNQETQYF

SEQ ID NO: 264213 - protein, 14 aa, Homo sapiens
  CDR3 for alpha chain variable domain of TCR clone 132107 (TRAV13-1, TRAJ44)
CAAKATGTASKLTF

SEQ ID NO: 264214 - protein, 14 aa, Homo sapiens
  CDR3 for beta chain variable domain of TCR clone 132107 (TRBV20-1, TRBJ1-1)
CSAQTRIGGTEAFF

SEQ ID NO: 264215 - protein, 14 aa, Homo sapiens
  CDR3 for alpha chain variable domain of TCR clone 132108 (TRAV1-2, TRAJ8)
CAVREDTGCQKLVF

SEQ ID NO: 264216 - protein, 15 aa, Homo sapiens
  CDR3 for beta chain variable domain of TCR clone 132108 (TRBV27, TRBJ2-1)
CASSNGGGSSNEQFF

SEQ ID NO: 264217 - protein, 13 aa, Homo sapiens
  CDR3 for alpha chain variable domain of TCR clone 132109 (TRAV1-2, TRAJ31)
CAVRPNNNARLMF

SEQ ID NO: 264218 - protein, 14 aa, Homo sapiens
  CDR3 for beta chain variable domain of TCR clone 132109 (TRBV11-2, TRBJ2-1)
CASSLSGPYNEQFF

SEQ ID NO: 264219 - protein, 14 aa, Homo sapiens
  CDR3 for alpha chain variable domain of TCR clone 132110 (TRAV13-2, TRAJ15)
CAENPNKAGTALIF

SEQ ID NO: 264220 - protein, 16 aa, Homo sapiens
  CDR3 for beta chain variable domain of TCR clone 132110 (TRBV12-4, TRBJ1-2)
CASSPTATGKTRGYTF

SEQ ID NO: 264221 - protein, 14 aa, Homo sapiens
  CDR3 for alpha chain variable domain of TCR clone 132111 (TRAV8-2, TRAJ4)
CVVSPSGGYHKLIF

SEQ ID NO: 264222 - protein, 16 aa, Homo sapiens
  CDR3 for beta chain variable domain of TCR clone 132111 (TRBV7-3, TRBJ2-1)
CASSLEGYRSYNEQFF

SEQ ID NO: 264223 - protein, 14 aa, Homo sapiens
  CDR3 for alpha chain variable domain of TCR clone 132112 (TRAV9-2, TRAJ48)
GAAPVDFGNEKLTF

SEQ ID NO: 264224 - protein, 12 aa, Homo sapiens
  CDR3 for beta chain variable domain of TCR clone 132112 (TRBV6-3, TRBJ2-7)
CASSLTPYEQYF

SEQ ID NO: 264225 - protein, 16 aa, Homo sapiens
  CDR3 for alpha chain variable domain of TCR clone 132113 (TRAV30, TRAJ24)
CGTEIEDADSWGKFQF

SEQ ID NO: 264226 - protein, 12 aa, Homo sapiens
  CDR3 for beta chain variable domain of TCR clone 132113 (TRBV7-8, TRBJ2-7)
CASSLGDREQYF

SEQ ID NO: 264227 - protein, 18 aa, Homo sapiens
  CDR3 for alpha chain variable domain of TCR clone 132114 (TRAV38-1, TRAJ40)
CDVFLCFTPYLGTYKYIF

SEQ ID NO: 264228 - protein, 14 aa, Homo sapiens
  CDR3 for beta chain variable domain of TCR clone 132114 (TRBV25-1, TRBJ1-1)
CASTHLGGNTEAFF

SEQ ID NO: 264229 - protein, 13 aa, Homo sapiens
  CDR3 for alpha chain variable domain of TCR clone 132115 (TRAV8-3, TRAJ48)
CAVVPFGNEKLTF

SEQ ID NO: 264230 - protein, 15 aa, Homo sapiens
  CDR3 for beta chain variable domain of TCR clone 132115 (TRBV11-2, TRBJ2-1)
CASSSPSTRYNKQFF

SEQ ID NO: 264231 - protein, 14 aa, Homo sapiens
  CDR3 for alpha chain variable domain of TCR clone 132116 (TRAV21, TRAJ28)
CAVGSGAGSYQLTF

SEQ ID NO: 264232 - protein, 12 aa, Homo sapiens
  CDR3 for beta chain variable domain of TCR clone 132116 (TRBV7-8, TRBJ2-7)
CASSLGDREQYF

SEQ ID NO: 264233 - protein, 13 aa, Homo sapiens
  CDR3 for alpha chain variable domain of TCR clone 132117 (TRAV17, TRAJ13)
CATDSGGYQKVTF

SEQ ID NO: 264234 - protein, 18 aa, Homo sapiens
  CDR3 for beta chain variable domain of TCR clone 132117 (TRBV11-2, TRBJ2-7)
CASSWRTVQTGQSYEQYF

SEQ ID NO: 264235 - protein, 14 aa, Homo sapiens
  CDR3 for alpha chain variable domain of TCR clone 132118 (TRAV13-1, TRAJ35)
CAASKGGFGNVLHC

SEQ ID NO: 264236 - protein, 13 aa, Homo sapiens
  CDR3 for beta chain variable domain of TCR clone 132118 (TRBV11-2, TRBJ2-5)
CASSSTGEETQYF

SEQ ID NO: 264237 - protein, 15 aa, Homo sapiens
  CDR3 for alpha chain variable domain of TCR clone 132119 (TRAV27, TRAJ24)
CAGGTSADSWGKLQF

SEQ ID NO: 264238 - protein, 13 aa, Homo sapiens
  CDR3 for beta chain variable domain of TCR clone 132119 (TRBV7-3, TRBJ1-1)
CASSQDWGAEAFF

SEQ ID NO: 264239 - protein, 19 aa, Homo sapiens
  CDR3 for alpha chain variable domain of TCR clone 132120 (TRAV1-2, TRAJ26)
CLLPLCCERPDNYGQNFVF

SEQ ID NO: 264240 - protein, 21 aa, Homo sapiens
  CDR3 for beta chain variable domain of TCR clone 132120 (TRBV28, TRBJ2-5)
CASSRQGGLAGAETSTSGQAR

SEQ ID NO: 264241 - protein, 13 aa, Homo sapiens
  CDR3 for alpha chain variable domain of TCR clone 132121 (TRAV27, TRAJ3)
ASLRGSRASKIIF

SEQ ID NO: 264242 - protein, 15 aa, Homo sapiens
  CDR3 for beta chain variable domain of TCR clone 132121 (TRBV28, TRBJ1-3)
CASSMGWASGNTMYF

SEQ ID NO: 264243 - protein, 21 aa, Homo sapiens
  CDR3 for alpha chain variable domain of TCR clone 132122 (TRAV8-4, TRAJ47)
HLTKPSAHMSDAAERGNKLGF

SEQ ID NO: 264244 - protein, 14 aa, Homo sapiens
  CDR3 for beta chain variable domain of TCR clone 132122 (TRBV7-9, TRBJ2-1)
CASSPRDSLYEQFF

SEQ ID NO: 264245 - protein, 15 aa, Homo sapiens
  CDR3 for alpha chain variable domain of TCR clone 132123 (TRAV12-1, TRAJ15)
CVVNSYGQAGTALIF

SEQ ID NO: 264246 - protein, 14 aa, Homo sapiens
  CDR3 for beta chain variable domain of TCR clone 132123 (TRBV7-2, TRBJ2-7)
CASGLQGPYGEQYF

SEQ ID NO: 264247 - protein, 11 aa, Homo sapiens
  CDR3 for alpha chain variable domain of TCR clone 132124 (TRAV3, TRAJ21)
CAVGNFNKFYL

SEQ ID NO: 264248 - protein, 13 aa, Homo sapiens
  CDR3 for beta chain variable domain of TCR clone 132124 (TRBV7-3, TRBJ1-1)
CASSQDWGAEAFF

SEQ ID NO: 264249 - protein, 17 aa, Homo sapiens
  CDR3 for alpha chain variable domain of TCR clone 132125 (TRAV3, TRAJ6)
CAVRDGPRAGGSYIPTF

SEQ ID NO: 264250 - protein, 14 aa, Homo sapiens
  CDR3 for beta chain variable domain of TCR clone 132125 (TRBV7-2, TRBJ2-7)
CASSPKTGFDEQYF

SEQ ID NO: 264251 - protein, 15 aa, Homo sapiens
  CDR3 for alpha chain variable domain of TCR clone 132126 (TRAV4, TRAJ39)
CLVGPNNNAGNMLTF

SEQ ID NO: 264252 - protein, 13 aa, Homo sapiens
  CDR3 for beta chain variable domain of TCR clone 132126 (TRBV11-2, TRBJ2-5)
CASSSTGEETQSF

SEQ ID NO: 264253 - protein, 16 aa, Homo sapiens
  CDR3 for alpha chain variable domain of TCR clone 132127 (TRAV30, TRAJ24)
CGTEIVDADSWGQFQF

SEQ ID NO: 264254 - protein, 17 aa, Homo sapiens
  CDR3 for beta chain variable domain of TCR clone 132127 (TRBV20-1, TRBJ2-2)
CSASGSGQGGLTGELFF

SEQ ID NO: 264255 - protein, 12 aa, Homo sapiens
  CDR3 for alpha chain variable domain of TCR clone 132128 (TRAV2, TRAJ33)
CAVEDSNYQLIW

SEQ ID NO: 264256 - protein, 14 aa, Homo sapiens
  CDR3 for beta chain variable domain of TCR clone 132128 (TRBV19, TRBJ1-4)
CASSINRGGEKLLF

SEQ ID NO: 264257 - protein, 15 aa, Homo sapiens
  CDR3 for alpha chain variable domain of TCR clone 132129 (TRAV21, TRAJ32)
CAVRRYGGATNKLIF

SEQ ID NO: 264258 - protein, 16 aa, Homo sapiens
  CDR3 for beta chain variable domain of TCR clone 132129 (TRBV12-4, TRBJ1-5)
CASSRPVGGSNQPQHF

SEQ ID NO: 264259 - protein, 15 aa, Homo sapiens
  CDR3 for alpha chain variable domain of TCR clone 132130 (TRAV38-1, TRAJ37)
CAFIHGSGNTGKLIF

SEQ ID NO: 264260 - protein, 15 aa, Homo sapiens
  CDR3 for beta chain variable domain of TCR clone 132130 (TRBV6-3, TRBJ2-7)
CASSSPGTVFYEQYF

SEQ ID NO: 264261 - protein, 11 aa, Homo sapiens
  CDR3 for alpha chain variable domain of TCR clone 132131 (TRAV21, TRAJ41)
CAVRSGYALNF

SEQ ID NO: 264262 - protein, 13 aa, Homo sapiens
  CDR3 for beta chain variable domain of TCR clone 132131 (TRBV7-9, TRBJ1-2)
CASSLKQNYGYIF

SEQ ID NO: 264263 - protein, 16 aa, Homo sapiens
  CDR3 for alpha chain variable domain of TCR clone 132132 (TRAV30, TRAJ24)
CGTEIVDADSWGKFQF

SEQ ID NO: 264264 - protein, 15 aa, Homo sapiens
  CDR3 for beta chain variable domain of TCR clone 132132 (TRBV7-9, TRBJ2-3)
CASSHGDRVPDTQYF

SEQ ID NO: 264265 - protein, 16 aa, Homo sapiens
  CDR3 for alpha chain variable domain of TCR clone 132133 (TRAV12-3, TRAJ53)
CAMSPGSGGRNYKLTF

SEQ ID NO: 264266 - protein, 14 aa, Homo sapiens
  CDR3 for beta chain variable domain of TCR clone 132133 (TRBV4-2, TRBJ2-1)
CASGLDRAYNEQFF

SEQ ID NO: 264267 - protein, 12 aa, Homo sapiens
  CDR3 for alpha chain variable domain of TCR clone 132134 (TRAV20, TRAJ39)
CAVGNAGNMLTF

SEQ ID NO: 264268 - protein, 16 aa, Homo sapiens
  CDR3 for beta chain variable domain of TCR clone 132134 (TRBV27, TRBJ2-2)
CASSFRGLVRTGELFF

SEQ ID NO: 264269 - protein, 13 aa, Homo sapiens
  CDR3 for alpha chain variable domain of TCR clone 132135 (TRAV12-3, TRAJ46)
CAVKKSSGDKLTF

SEQ ID NO: 264270 - protein, 13 aa, Homo sapiens
  CDR3 for beta chain variable domain of TCR clone 132135 (TRBV6-1, TRBJ2-1)
YASSHDRNNEQFF

SEQ ID NO: 264271 - protein, 14 aa, Homo sapiens
  CDR3 for alpha chain variable domain of TCR clone 132136 (TRAV26-1, TRAJ22)
CIVRVYGSARQPTF

SEQ ID NO: 264272 - protein, 17 aa, Homo sapiens
  CDR3 for beta chain variable domain of TCR clone 132136 (TRBV7-3, TRBJ2-3)
CASSPGGLAGFGDTQYF

SEQ ID NO: 264273 - protein, 12 aa, Homo sapiens
  CDR3 for alpha chain variable domain of TCR clone 132137 (TRAV16, TRAJ49)
CALNEGGNHFYF

SEQ ID NO: 264274 - protein, 14 aa, Homo sapiens
  CDR3 for beta chain variable domain of TCR clone 132137 (TRBV7-9, TRBJ2-1)
CASRPTGLRNEQFF

SEQ ID NO: 264275 - protein, 16 aa, Homo sapiens
  CDR3 for alpha chain variable domain of TCR clone 132138 (TRAV12-2, TRAJ40)
CAVIRGGTSGTCKYIF

SEQ ID NO: 264276 - protein, 14 aa, Homo sapiens
  CDR3 for beta chain variable domain of TCR clone 132138 (TRBV20-1, TRBJ2-5)
CSARDGRAGETQYF

SEQ ID NO: 264277 - protein, 12 aa, Homo sapiens
  CDR3 for alpha chain variable domain of TCR clone 132139 (TRAV21, TRAJ33)
CAKMDSNYQLIW

SEQ ID NO: 264278 - protein, 12 aa, Homo sapiens
  CDR3 for beta chain variable domain of TCR clone 132139 (TRBV7-8, TRBJ2-7)
CASSLGDREQYF

SEQ ID NO: 264279 - protein, 14 aa, Homo sapiens
  CDR3 for alpha chain variable domain of TCR clone 132140 (TRAV12-3, TRAJ10)
SHLPLTGGGNKLTF

SEQ ID NO: 264280 - protein, 15 aa, Homo sapiens
  CDR3 for beta chain variable domain of TCR clone 132140 (TRBV3-1, TRBJ2-1)
CASSQALVAYNEQFF

SEQ ID NO: 264281 - protein, 16 aa, Homo sapiens
  CDR3 for alpha chain variable domain of TCR clone 132141 (TRAV12-1, TRAJ53)
CVVTSVAGGSNYKLTF

SEQ ID NO: 264282 - protein, 14 aa, Homo sapiens
  CDR3 for beta chain variable domain of TCR clone 132141 (TRBV7-2, TRBJ2-7)
CASSPKTSFYEQYF

SEQ ID NO: 264283 - protein, 18 aa, Homo sapiens
  CDR3 for alpha chain variable domain of TCR clone 132142 (TRAV21, TRAJ52)
CAVRPSPAGGTSYGKPTF

SEQ ID NO: 264284 - protein, 16 aa, Homo sapiens
  CDR3 for beta chain variable domain of TCR clone 132142 (TRBV19, TRBJ2-2)
CASRSPGTGATGELFF

SEQ ID NO: 264285 - protein, 13 aa, Homo sapiens
  CDR3 for alpha chain variable domain of TCR clone 132143 (TRAV22, TRAJ29)
CAVGGSGNTPLVF

SEQ ID NO: 264286 - protein, 13 aa, Homo sapiens
  CDR3 for beta chain variable domain of TCR clone 132143 (TRBV4-2, TRBJ1-1)
CASSQAGNTEACF

SEQ ID NO: 264287 - protein, 14 aa, Homo sapiens
  CDR3 for alpha chain variable domain of TCR clone 132144 (TRAV12-2, TRAJ4)
CAVLIGGGYNELIF

SEQ ID NO: 264288 - protein, 14 aa, Homo sapiens
  CDR3 for beta chain variable domain of TCR clone 132144 (TRBV6-1, TRBJ1-3)
CASVQGGGGNTIYF

SEQ ID NO: 264289 - protein, 10 aa, Homo sapiens
  CDR3 for alpha chain variable domain of TCR clone 132145 (TRAV23/DV6, TRAJ57)
CAASSTLSQG

SEQ ID NO: 264290 - protein, 13 aa, Homo sapiens
  CDR3 for beta chain variable domain of TCR clone 132145 (TRBV10-3, TRBJ2-7)
CASKLAVNYEQYS

SEQ ID NO: 264291 - protein, 16 aa, Homo sapiens
  CDR3 for alpha chain variable domain of TCR clone 132146 (TRAV16, TRAJ4)
CALRRMFSGGYNKLIF

SEQ ID NO: 264292 - protein, 12 aa, Homo sapiens
  CDR3 for beta chain variable domain of TCR clone 132146 (TRBV29-1, TRBJ2-3)
CSVTGGADTQYF

SEQ ID NO: 264293 - protein, 12 aa, Homo sapiens
  CDR3 for alpha chain variable domain of TCR clone 132147 (TRAV12-3, TRAJ17)
CAMTLTGNKLTF

SEQ ID NO: 264294 - protein, 14 aa, Homo sapiens
  CDR3 for beta chain variable domain of TCR clone 132147 (TRBV4-1, TRBJ2-7)
CASSQDREHDEQYF

SEQ ID NO: 264295 - protein, 14 aa, Homo sapiens
  CDR3 for alpha chain variable domain of TCR clone 132148 (TRAV26-1, TRAJ38)
CIADNAGNNRKLIW

SEQ ID NO: 264296 - protein, 15 aa, Homo sapiens
  CDR3 for beta chain variable domain of TCR clone 132148 (TRBV10-2, TRBJ2-5)
CASRGSGGPQETQYF

SEQ ID NO: 264297 - protein, 14 aa, Homo sapiens
  CDR3 for alpha chain variable domain of TCR clone 132149 (TRAV3, TRAJ9)
CAVRLNTGGFKTMF

SEQ ID NO: 264298 - protein, 15 aa, Homo sapiens
  CDR3 for beta chain variable domain of TCR clone 132149 (TRBV7-2, TRBJ2-1)
CASSLASGRVNEQFF

SEQ ID NO: 264299 - protein, 17 aa, Homo sapiens
  CDR3 for alpha chain variable domain of TCR clone 132150 (TRAV3, TRAJ6)
CAVRDGPRAGGSYIPTF

SEQ ID NO: 264300 - protein, 13 aa, Homo sapiens
  CDR3 for beta chain variable domain of TCR clone 132150 (TRBV2, TRBJ1-1)
CASRWTVNTEAFF

SEQ ID NO: 264301 - protein, 14 aa, Homo sapiens
  CDR3 for alpha chain variable domain of TCR clone 132151 (TRAV26-1, TRAJ38)
CIADNAGNNRKPIW

SEQ ID NO: 264302 - protein, 13 aa, Homo sapiens
  CDR3 for beta chain variable domain of TCR clone 132151 (TRBV20-1, TRBJ1-1)
CSARGGGNTEAFL

SEQ ID NO: 264303 - protein, 15 aa, Homo sapiens
  CDR3 for alpha chain variable domain of TCR clone 132152 (TRAV3, TRAJ3)
CAVIDRDSSASKIIF

SEQ ID NO: 264304 - protein, 18 aa, Homo sapiens
  CDR3 for beta chain variable domain of TCR clone 132152 (TRBV25-1, TRBJ1-2)
CASSGLQNGQGLIFGYTF

SEQ ID NO: 264305 - protein, 14 aa, Homo sapiens
  CDR3 for alpha chain variable domain of TCR clone 132153 (TRAV17, TRAJ11)
CATDTSRGYSTPTF

SEQ ID NO: 264306 - protein, 13 aa, Homo sapiens
  CDR3 for beta chain variable domain of TCR clone 132153 (TRBV19, TRBJ2-5)
CASRDSRRETQYF

SEQ ID NO: 264307 - protein, 14 aa, Homo sapiens
  CDR3 for alpha chain variable domain of TCR clone 132154 (TRAV20, TRAJ10)
CAVRVEGGGNKLTF

SEQ ID NO: 264308 - protein, 14 aa, Homo sapiens
  CDR3 for beta chain variable domain of TCR clone 132154 (TRBV20-1, TRBJ2-1)
CSAQIGGSANEQFF

SEQ ID NO: 264309 - protein, 11 aa, Homo sapiens
  CDR3 for alpha chain variable domain of TCR clone 132155 (TRAV12-1, TRAJ34)
CVVNKGRELIF

SEQ ID NO: 264310 - protein, 12 aa, Homo sapiens
  CDR3 for beta chain variable domain of TCR clone 132155 (TRBV2, TRBJ2-1)
RAYGPPGNEQFF

SEQ ID NO: 264311 - protein, 14 aa, Homo sapiens
  CDR3 for alpha chain variable domain of TCR clone 132156 (TRAV9-2, TRAJ39)
CALYIYNAGNMLTF

SEQ ID NO: 264312 - protein, 15 aa, Homo sapiens
  CDR3 for beta chain variable domain of TCR clone 132156 (TRBV27, TRBJ1-6)
CASSLDRGLGSPLHF

SEQ ID NO: 264313 - protein, 14 aa, Homo sapiens
  CDR3 for alpha chain variable domain of TCR clone 132157 (TRAV12-2, TRAJ13)
CAVKKTGGYQKVTL

SEQ ID NO: 264314 - protein, 15 aa, Homo sapiens
  CDR3 for beta chain variable domain of TCR clone 132157 (TRBV27, TRBJ2-1)
CASSNGGGSSNEHFF

SEQ ID NO: 264315 - protein, 12 aa, Homo sapiens
  CDR3 for alpha chain variable domain of TCR clone 132158 (TRAV3, TRAJ39)
CAVIEWSNMLTF

SEQ ID NO: 264316 - protein, 16 aa, Homo sapiens
  CDR3 for beta chain variable domain of TCR clone 132158 (TRBV7-8, TRBJ2-1)
CASSLAGTGRYNGQFF

SEQ ID NO: 264317 - protein, 13 aa, Homo sapiens
  CDR3 for alpha chain variable domain of TCR clone 132159 (TRAV17, TRAJ40)
CATRSPGTYKYIF

SEQ ID NO: 264318 - protein, 12 aa, Homo sapiens
  CDR3 for beta chain variable domain of TCR clone 132159 (TRBV7-8, TRBJ2-7)
CASSLGDREQYF

SEQ ID NO: 264319 - protein, 13 aa, Homo sapiens
  CDR3 for alpha chain variable domain of TCR clone 132160 (TRAV26-2, TRAJ43)
CILRAVNNNDMRF

SEQ ID NO: 264320 - protein, 17 aa, Homo sapiens
  CDR3 for beta chain variable domain of TCR clone 132160 (TRBV5-1, TRBJ2-5)
CASSPVALGQNQETQYF

SEQ ID NO: 264321 - protein, 14 aa, Homo sapiens
  CDR3 for alpha chain variable domain of TCR clone 132161 (TRAV3, TRAJ37)
CAVKESGNTGKLIF

SEQ ID NO: 264322 - protein, 15 aa, Homo sapiens
  CDR3 for beta chain variable domain of TCR clone 132161 (TRBV6-6, TRBJ2-7)
CASSYSYGGSYEQYF

SEQ ID NO: 264323 - protein, 16 aa, Homo sapiens
  CDR3 for alpha chain variable domain of TCR clone 132162 (TRAV30, TRAJ24)
CGTEIVDADSWGKFKF

SEQ ID NO: 264324 - protein, 14 aa, Homo sapiens
  CDR3 for beta chain variable domain of TCR clone 132162 (TRBV12-5, TRBJ2-5)
CAGGSRTHQETQYF

SEQ ID NO: 264325 - protein, 11 aa, Homo sapiens
  CDR3 for alpha chain variable domain of TCR clone 132163 (TRAV12-3, TRAJ27)
CAMVNAGKSTF

SEQ ID NO: 264326 - protein, 16 aa, Homo sapiens
  CDR3 for beta chain variable domain of TCR clone 132163 (TRBV5-7, TRBJ2-5)
CASTLAPAGGRETQYF

SEQ ID NO: 264327 - protein, 15 aa, Homo sapiens
  CDR3 for alpha chain variable domain of TCR clone 132164 (TRAV34, TRAJ38)
CGADFTPGNNRKLIW

SEQ ID NO: 264328 - protein, 16 aa, Homo sapiens
  CDR3 for beta chain variable domain of TCR clone 132164 (TRBV12-5, TRBJ2-5)
CASGPRSSGNQETQYF

SEQ ID NO: 264329 - protein, 14 aa, Homo sapiens
  CDR3 for alpha chain variable domain of TCR clone 132165 (TRAV1-2, TRAJ8)
CAVREDTGFQKLVF

SEQ ID NO: 264330 - protein, 15 aa, Homo sapiens
  CDR3 for beta chain variable domain of TCR clone 132165 (TRBV28, TRBJ2-5)
CASSPPWSYQETQYF

SEQ ID NO: 264331 - protein, 12 aa, Homo sapiens
  CDR3 for alpha chain variable domain of TCR clone 132166 (TRAV17, TRAJ20)
CATDSNDYKLSF

SEQ ID NO: 264332 - protein, 11 aa, Homo sapiens
  CDR3 for beta chain variable domain of TCR clone 132166 (TRBV11-2, TRBJ2-2)
CASSLPGELFF

SEQ ID NO: 264333 - protein, 18 aa, Homo sapiens
  CDR3 for alpha chain variable domain of TCR clone 132167 (TRAV35, TRAJ28)
CAGHNYPLSGAGSYKLTF

SEQ ID NO: 264334 - protein, 12 aa, Homo sapiens
  CDR3 for beta chain variable domain of TCR clone 132167 (TRBV7-9, TRBJ1-1)
CASSLEGTEAFF

SEQ ID NO: 264335 - protein, 17 aa, Homo sapiens
  CDR3 for alpha chain variable domain of TCR clone 132168 (TRAV29/DV5, TRAJ45)
CAADGPFSGGGADGLTF

SEQ ID NO: 264336 - protein, 13 aa, Homo sapiens
  CDR3 for beta chain variable domain of TCR clone 132168 (TRBV19, TRBJ1-5)
CASSMRGYQHQHF

SEQ ID NO: 264337 - protein, 17 aa, Homo sapiens
  CDR3 for alpha chain variable domain of TCR clone 132169 (TRAV29/DV5, TRAJ40)
CAASVIYTTSGTNKYIF

SEQ ID NO: 264338 - protein, 13 aa, Homo sapiens
  CDR3 for beta chain variable domain of TCR clone 132169 (TRBV6-1, TRBJ2-1)
CASSHDRNNEQFF

SEQ ID NO: 264339 - protein, 17 aa, Homo sapiens
  CDR3 for alpha chain variable domain of TCR clone 132170 (TRAV26-1, TRAJ28)
CIVRVPDSGAGSYQLTF

SEQ ID NO: 264340 - protein, 17 aa, Homo sapiens
  CDR3 for beta chain variable domain of TCR clone 132170 (TRBV28, TRBJ2-7)
CASRPLPAGGKSYEQYF

SEQ ID NO: 264341 - protein, 13 aa, Homo sapiens
  CDR3 for alpha chain variable domain of TCR clone 132171 (TRAV13-1, TRAJ6)
CAASRGGSYIPTF

SEQ ID NO: 264342 - protein, 15 aa, Homo sapiens
  CDR3 for beta chain variable domain of TCR clone 132171 (TRBV25-1, TRBJ2-5)
CASSDTGTNQETQYF

SEQ ID NO: 264343 - protein, 10 aa, Homo sapiens
  CDR3 for alpha chain variable domain of TCR clone 132172 (TRAV1-2, TRAJ23)
CAGKGGKLIF

SEQ ID NO: 264344 - protein, 14 aa, Homo sapiens
  CDR3 for beta chain variable domain of TCR clone 132172 (TRBV6-1, TRBJ1-3)
CASVQGGGGNTIYF

SEQ ID NO: 264345 - protein, 13 aa, Homo sapiens
  CDR3 for alpha chain variable domain of TCR clone 132173 (TRAV8-1, TRAJ23)
CAVTGGQGGKLIF

SEQ ID NO: 264346 - protein, 14 aa, Homo sapiens
  CDR3 for beta chain variable domain of TCR clone 132173 (TRBV27, TRBJ1-1)
CASSLLSGLSEAFF

SEQ ID NO: 264347 - protein, 16 aa, Homo sapiens
  CDR3 for alpha chain variable domain of TCR clone 132174 (TRAV3, TRAJ10)
CAVRDMRAGGGNKLTF

SEQ ID NO: 264348 - protein, 15 aa, Homo sapiens
  CDR3 for beta chain variable domain of TCR clone 132174 (TRBV6-4, TRBJ2-1)
CASSDSTGGYNEQFF

SEQ ID NO: 264349 - protein, 14 aa, Homo sapiens
  CDR3 for alpha chain variable domain of TCR clone 132175 (TRAV12-3, TRAJ10)
SHLPLTGGGNKLTF

SEQ ID NO: 264350 - protein, 14 aa, Homo sapiens
  CDR3 for beta chain variable domain of TCR clone 132175 (TRBV6-1, TRBJ1-3)
CASVQGGCGNTIYF

SEQ ID NO: 264351 - protein, 14 aa, Homo sapiens
  CDR3 for alpha chain variable domain of TCR clone 132176 (TRAV3, TRAJ17)
CAVRDAAAGNKLTF

SEQ ID NO: 264352 - protein, 13 aa, Homo sapiens
  CDR3 for beta chain variable domain of TCR clone 132176 (TRBV2, TRBJ1-1)
CASSVGGYTEAFF

SEQ ID NO: 264353 - protein, 10 aa, Homo sapiens
  CDR3 for alpha chain variable domain of TCR clone 132177 (TRAV12-2, TRAJ48)
CAVTSEKLPF

SEQ ID NO: 264354 - protein, 17 aa, Homo sapiens
  CDR3 for beta chain variable domain of TCR clone 132177 (TRBV11-1, TRBJ2-7)
CASSLTGSFGLDYEQYF

SEQ ID NO: 264355 - protein, 12 aa, Homo sapiens
  CDR3 for alpha chain variable domain of TCR clone 132178 (TRAV12-1, TRAJ40)
CVFYSGTYKYIF

SEQ ID NO: 264356 - protein, 18 aa, Homo sapiens
  CDR3 for beta chain variable domain of TCR clone 132178 (TRBV12-4, TRBJ2-2)
CASSLVARTRGRTGELFF

SEQ ID NO: 264357 - protein, 15 aa, Homo sapiens
  CDR3 for alpha chain variable domain of TCR clone 132179 (TRAV25, TRAJ41)
CAGPWNSNSGYALNF

SEQ ID NO: 264358 - protein, 19 aa, Homo sapiens
  CDR3 for beta chain variable domain of TCR clone 132179 (TRBV25-1, TRBJ2-2)
CAILVYRVDRGRKTGELFF

SEQ ID NO: 264359 - protein, 16 aa, Homo sapiens
  CDR3 for alpha chain variable domain of TCR clone 132180 (TRAV3, TRAJ37)
CAVRGRGSGNTGKLIF

SEQ ID NO: 264360 - protein, 14 aa, Homo sapiens
  CDR3 for beta chain variable domain of TCR clone 132180 (TRBV20-1, TRBJ2-3)
CSARGGTSTDTQYF

SEQ ID NO: 264361 - protein, 15 aa, Homo sapiens
  CDR3 for alpha chain variable domain of TCR clone 132181 (TRAV12-2, TRAJ43)
CAFDMRFGAGTRLTV

SEQ ID NO: 264362 - protein, 18 aa, Homo sapiens
  CDR3 for beta chain variable domain of TCR clone 132181 (TRBV20-1, TRBJ2-3)
CSASGLAGGPGTTDTQYV

SEQ ID NO: 264363 - protein, 14 aa, Homo sapiens
  CDR3 for alpha chain variable domain of TCR clone 132182 (TRAV26-1, TRAJ34)
CIVIVAYNTDKLIF

SEQ ID NO: 264364 - protein, 14 aa, Homo sapiens
  CDR3 for beta chain variable domain of TCR clone 132182 (TRBV13, TRBJ2-5)
CASSLGPRGETQYF

SEQ ID NO: 264365 - protein, 15 aa, Homo sapiens
  CDR3 for alpha chain variable domain of TCR clone 132183 (TRAV17, TRAJ57)
CATGPSQGGSEKLVF

SEQ ID NO: 264366 - protein, 13 aa, Homo sapiens
  CDR3 for beta chain variable domain of TCR clone 132183 (TRBV20-1, TRBJ2-2)
CSASAAGTGELFF

SEQ ID NO: 264367 - protein, 12 aa, Homo sapiens
  CDR3 for alpha chain variable domain of TCR clone 132184 (TRAV27, TRAJ13)
CAGAGGYQKVTF

SEQ ID NO: 264368 - protein, 15 aa, Homo sapiens
  CDR3 for beta chain variable domain of TCR clone 132184 (TRBV20-1, TRBJ2-3)
CSARVVGGSTDTQYF

SEQ ID NO: 264369 - protein, 13 aa, Homo sapiens
  CDR3 for alpha chain variable domain of TCR clone 132185 (TRAV23/DV6, TRAJ58)
CAASEIGGSRLTS

SEQ ID NO: 264370 - protein, 15 aa, Homo sapiens
  CDR3 for beta chain variable domain of TCR clone 132185 (TRBV19, TRBJ1-1)
CASTSGQIQNTEAFF

SEQ ID NO: 264371 - protein, 13 aa, Homo sapiens
  CDR3 for alpha chain variable domain of TCR clone 132186 (TRAV13-2, TRAJ15)
CAEKNQAGTAPIF

SEQ ID NO: 264372 - protein, 15 aa, Homo sapiens
  CDR3 for beta chain variable domain of TCR clone 132186 (TRBV29-1, TRBJ2-5)
CSVAPGQGARETQYF

SEQ ID NO: 264373 - protein, 14 aa, Homo sapiens
  CDR3 for alpha chain variable domain of TCR clone 132187 (TRAV17, TRAJ16)
CATADFSDGQTLLF

SEQ ID NO: 264374 - protein, 12 aa, Homo sapiens
  CDR3 for beta chain variable domain of TCR clone 132187 (TRBV24-1, TRBJ1-1)
CATLYPDTEAFF

SEQ ID NO: 264375 - protein, 13 aa, Homo sapiens
  CDR3 for alpha chain variable domain of TCR clone 132188 (TRAV2, TRAJ15)
CAVASQAGTALIF

SEQ ID NO: 264376 - protein, 14 aa, Homo sapiens
  CDR3 for beta chain variable domain of TCR clone 132188 (TRBV5-4, TRBJ1-1)
CASSLDSRRDEAFF

SEQ ID NO: 264377 - protein, 13 aa, Homo sapiens
  CDR3 for alpha chain variable domain of TCR clone 132189 (TRAV27, TRAJ45)
CRSSGGGAYGLTF

SEQ ID NO: 264378 - protein, 15 aa, Homo sapiens
  CDR3 for beta chain variable domain of TCR clone 132189 (TRBV9, TRBJ2-2)
CASSDFAGASGELFF

SEQ ID NO: 264379 - protein, 17 aa, Homo sapiens
  CDR3 for alpha chain variable domain of TCR clone 132190 (TRAV3, TRAJ38)
CALRDCLNAGNNRKLIW

SEQ ID NO: 264380 - protein, 14 aa, Homo sapiens
  CDR3 for beta chain variable domain of TCR clone 132190 (TRBV5-5, TRBJ1-5)
CASSGQGVDQPQHF

SEQ ID NO: 264381 - protein, 12 aa, Homo sapiens
  CDR3 for alpha chain variable domain of TCR clone 132191 (TRAV36/DV7, TRAJ37)
CACYGNTGKLIF

SEQ ID NO: 264382 - protein, 13 aa, Homo sapiens
  CDR3 for beta chain variable domain of TCR clone 132191 (TRBV10-3, TRBJ2-7)
CASKRAVNYEQYF

SEQ ID NO: 264383 - protein, 14 aa, Homo sapiens
  CDR3 for alpha chain variable domain of TCR clone 132192 (TRAV17, TRAJ56)
CATDYTGANSKLKF

SEQ ID NO: 264384 - protein, 14 aa, Homo sapiens
  CDR3 for beta chain variable domain of TCR clone 132192 (TRBV18, TRBJ2-1)
CASSPVRGDNEQFF

SEQ ID NO: 264385 - protein, 15 aa, Homo sapiens
  CDR3 for alpha chain variable domain of TCR clone 132193 (TRAV8-3, TRAJ27)
CAVGPSKTNAGKSTF

SEQ ID NO: 264386 - protein, 16 aa, Homo sapiens
  CDR3 for beta chain variable domain of TCR clone 132193 (TRBV3-1, TRBJ1-5)
CASSQEFGQGNQPQHF

SEQ ID NO: 264387 - protein, 17 aa, Homo sapiens
  CDR3 for alpha chain variable domain of TCR clone 132194 (TRAV3, TRAJ42)
CAVRDREYGGSQGNLTF

SEQ ID NO: 264388 - protein, 12 aa, Homo sapiens
  CDR3 for beta chain variable domain of TCR clone 132194 (TRBV11-2, TRBJ2-1)
CASSPGNNEQFF

SEQ ID NO: 264389 - protein, 10 aa, Homo sapiens
  CDR3 for alpha chain variable domain of TCR clone 132195 (TRAV23/DV6, TRAJ57)
CAASSTLSQG

SEQ ID NO: 264390 - protein, 14 aa, Homo sapiens
  CDR3 for beta chain variable domain of TCR clone 132195 (TRBV7-8, TRBJ2-1)
CASSSQGAYNEQFF

SEQ ID NO: 264391 - protein, 13 aa, Homo sapiens
  CDR3 for alpha chain variable domain of TCR clone 132196 (TRAV12-1, TRAJ6)
CVVFLGGSYIPTF

SEQ ID NO: 264392 - protein, 14 aa, Homo sapiens
  CDR3 for beta chain variable domain of TCR clone 132196 (TRBV20-1, TRBJ1-3)
CSASPTGAGNTIYF

SEQ ID NO: 264393 - protein, 13 aa, Homo sapiens
  CDR3 for alpha chain variable domain of TCR clone 132197 (TRAV13-1, TRAJ11)
CAAVLSGYSTLTF

SEQ ID NO: 264394 - protein, 17 aa, Homo sapiens
  CDR3 for beta chain variable domain of TCR clone 132197 (TRBV25-1, TRBJ2-7)
CASSDARVVFSSYEQYF

SEQ ID NO: 264395 - protein, 12 aa, Homo sapiens
  CDR3 for alpha chain variable domain of TCR clone 132198 (TRAV12-3, TRAJ29)
CAAREGNTPLVF

SEQ ID NO: 264396 - protein, 17 aa, Homo sapiens
  CDR3 for beta chain variable domain of TCR clone 132198 (TRBV18, TRBJ2-1)
CASSPLAAGAGENEQFF

SEQ ID NO: 264397 - protein, 21 aa, Homo sapiens
  CDR3 for alpha chain variable domain of TCR clone 132199 (TRAV8-3, TRAJ6)
CAVGGEEATYLHLEEETALLF

SEQ ID NO: 264398 - protein, 14 aa, Homo sapiens
  CDR3 for beta chain variable domain of TCR clone 132199 (TRBV5-1, TRBJ2-7)
CASSRGESLYEQYF

SEQ ID NO: 264399 - protein, 14 aa, Homo sapiens
  CDR3 for alpha chain variable domain of TCR clone 132200 (TRAV16, TRAJ15)
CALSGPQAGTALIF

SEQ ID NO: 264400 - protein, 12 aa, Homo sapiens
  CDR3 for beta chain variable domain of TCR clone 132200 (TRBV18, TRBJ2-5)
CASSPSKETQCF

SEQ ID NO: 264401 - protein, 14 aa, Homo sapiens
  CDR3 for alpha chain variable domain of TCR clone 132201 (TRAV12-2, TRAJ39)
SATHLCAVNNMLTF

SEQ ID NO: 264402 - protein, 16 aa, Homo sapiens
  CDR3 for beta chain variable domain of TCR clone 132201 (TRBV9, TRBJ2-7)
CASSAGPDRSPYEQYF

SEQ ID NO: 264403 - protein, 11 aa, Homo sapiens
  CDR3 for alpha chain variable domain of TCR clone 132202 (TRAV3, TRAJ21)
CAVGNFNKFYF

SEQ ID NO: 264404 - protein, 14 aa, Homo sapiens
  CDR3 for beta chain variable domain of TCR clone 132202 (TRBV29-1, TRBJ1-2)
CSARRGTQTSGYTF

SEQ ID NO: 264405 - protein, 16 aa, Homo sapiens
  CDR3 for alpha chain variable domain of TCR clone 132203 (TRAV26-2, TRAJ45)
CTTASPIGGGADGLTF

SEQ ID NO: 264406 - protein, 20 aa, Homo sapiens
  CDR3 for beta chain variable domain of TCR clone 132203 (TRBV28, TRBJ2-1)
CASTPIGRSPGLSGGNEQFF

SEQ ID NO: 264407 - protein, 14 aa, Homo sapiens
  CDR3 for alpha chain variable domain of TCR clone 132204 (TRAV23/DV6, TRAJ17)
CAARGRAAGNKLTF

SEQ ID NO: 264408 - protein, 13 aa, Homo sapiens
  CDR3 for beta chain variable domain of TCR clone 132204 (TRBV7-6, TRBJ1-2)
CACSLVADYGYTF

SEQ ID NO: 264409 - protein, 11 aa, Homo sapiens
  CDR3 for alpha chain variable domain of TCR clone 132205 (TRAV3, TRAJ21)
CAVGNFNKFYF

SEQ ID NO: 264410 - protein, 14 aa, Homo sapiens
  CDR3 for beta chain variable domain of TCR clone 132205 (TRBV29-1, TRBJ2-2)
CSGRGSGNTGELLF

SEQ ID NO: 264411 - protein, 11 aa, Homo sapiens
  CDR3 for alpha chain variable domain of TCR clone 132206 (TRAV21, TRAJ23)
CSPQRRGKLIF

SEQ ID NO: 264412 - protein, 14 aa, Homo sapiens
  CDR3 for beta chain variable domain of TCR clone 132206 (TRBV12-4, TRBJ1-1)
CASTWTGHDTEAFF

SEQ ID NO: 264413 - protein, 15 aa, Homo sapiens
  CDR3 for alpha chain variable domain of TCR clone 132207 (TRAV8-2, TRAJ15)
CVVTMGNQAGTALIF

SEQ ID NO: 264414 - protein, 13 aa, Homo sapiens
  CDR3 for beta chain variable domain of TCR clone 132207 (TRBV4-1, TRBJ2-2)
CASSQENTGELFF

SEQ ID NO: 264415 - protein, 11 aa, Homo sapiens
  CDR3 for alpha chain variable domain of TCR clone 132208 (TRAV21, TRAJ34)
CAHYNTDKLIF

SEQ ID NO: 264416 - protein, 14 aa, Homo sapiens
  CDR3 for beta chain variable domain of TCR clone 132208 (TRBV11-3, TRBJ2-2)
CASSRDTSTGELFF

SEQ ID NO: 264417 - protein, 13 aa, Homo sapiens
  CDR3 for alpha chain variable domain of TCR clone 132209 (TRAV12-3, TRAJ41)
CAIAPNSGHALNF

SEQ ID NO: 264418 - protein, 14 aa, Homo sapiens
  CDR3 for beta chain variable domain of TCR clone 132209 (TRBV7-2, TRBJ1-3)
CASSLGTAGNTIYF

SEQ ID NO: 264419 - protein, 15 aa, Homo sapiens
  CDR3 for alpha chain variable domain of TCR clone 132210 (TRAV25, TRAJ52)
CAGTSGGTSYGKLTF

SEQ ID NO: 264420 - protein, 16 aa, Homo sapiens
  CDR3 for beta chain variable domain of TCR clone 132210 (TRBV15, TRBJ1-2)
CATSRGTRTGGGGYTF

SEQ ID NO: 264421 - protein, 17 aa, Homo sapiens
  CDR3 for alpha chain variable domain of TCR clone 132211 (TRAV23/DV6, TRAJ57)
CAASSTLSQGGSEKLVF

SEQ ID NO: 264422 - protein, 14 aa, Homo sapiens
  CDR3 for beta chain variable domain of TCR clone 132211 (TRBV7-8, TRBJ2-5)
CASSATGGQEAQYF

SEQ ID NO: 264423 - protein, 14 aa, Homo sapiens
  CDR3 for alpha chain variable domain of TCR clone 132212 (TRAV8-4, TRAJ9)
CAVRIYTGGFKTIF

SEQ ID NO: 264424 - protein, 15 aa, Homo sapiens
  CDR3 for beta chain variable domain of TCR clone 132212 (TRBV10-2, TRBJ2-6)
CASSEQGTGANVLTF

SEQ ID NO: 264425 - protein, 12 aa, Homo sapiens
  CDR3 for alpha chain variable domain of TCR clone 132213 (TRAV13-1, TRAJ15)
CAASQAGNALIF

SEQ ID NO: 264426 - protein, 18 aa, Homo sapiens
  CDR3 for beta chain variable domain of TCR clone 132213 (TRBV7-9, TRBJ2-3)
CASSLPINGQISTDTQYF

SEQ ID NO: 264427 - protein, 12 aa, Homo sapiens
  CDR3 for alpha chain variable domain of TCR clone 132214 (TRAV13-1, TRAJ15)
CAASQAGTALIF

SEQ ID NO: 264428 - protein, 14 aa, Homo sapiens
  CDR3 for beta chain variable domain of TCR clone 132214 (TRBV19, TRBJ2-2)
CASSNLHRSGELFF

SEQ ID NO: 264429 - protein, 15 aa, Homo sapiens
  CDR3 for alpha chain variable domain of TCR clone 132215 (TRAV8-2, TRAJ40)
CVVLGTTSGTYKYIF

SEQ ID NO: 264430 - protein, 17 aa, Homo sapiens
  CDR3 for beta chain variable domain of TCR clone 132215 (TRBV7-8, TRBJ2-6)
CASSAGTGGAGANVLTF

SEQ ID NO: 264431 - protein, 14 aa, Homo sapiens
  CDR3 for alpha chain variable domain of TCR clone 132216 (TRAV8-3, TRAJ4)
CAVGAAGGYNKLIF

SEQ ID NO: 264432 - protein, 15 aa, Homo sapiens
  CDR3 for beta chain variable domain of TCR clone 132216 (TRBV27, TRBJ1-5)
CASSLGTGFDQPQHF

SEQ ID NO: 264433 - protein, 16 aa, Homo sapiens
  CDR3 for alpha chain variable domain of TCR clone 132217 (TRAV1-2, TRAJ10)
CAVRGVPTGGGNKLTF

SEQ ID NO: 264434 - protein, 14 aa, Homo sapiens
  CDR3 for beta chain variable domain of TCR clone 132217 (TRBV5-1, TRBJ2-7)
CASSRGESLYEQYF

SEQ ID NO: 264435 - protein, 11 aa, Homo sapiens
  CDR3 for alpha chain variable domain of TCR clone 132218 (TRAV2, TRAJ13)
CASVGYQKVTF

SEQ ID NO: 264436 - protein, 15 aa, Homo sapiens
  CDR3 for beta chain variable domain of TCR clone 132218 (TRBV20-1, TRBJ2-7)
CSARVPAAYFYEQYF

SEQ ID NO: 264437 - protein, 13 aa, Homo sapiens
  CDR3 for alpha chain variable domain of TCR clone 132219 (TRAV27, TRAJ29)
CAGAHSGNTPLVF

SEQ ID NO: 264438 - protein, 15 aa, Homo sapiens
  CDR3 for beta chain variable domain of TCR clone 132219 (TRBV28, TRBJ2-1)
CASSIIAGGRSEQFF

SEQ ID NO: 264439 - protein, 16 aa, Homo sapiens
  CDR3 for alpha chain variable domain of TCR clone 132220 (TRAV16, TRAJ57)
CAPYLITQGGSEKLVF

SEQ ID NO: 264440 - protein, 14 aa, Homo sapiens
  CDR3 for beta chain variable domain of TCR clone 132220 (TRBV19, TRBJ2-1)
CASPTFVLSGEQFF

SEQ ID NO: 264441 - protein, 17 aa, Homo sapiens
  CDR3 for alpha chain variable domain of TCR clone 132221 (TRAV13-1, TRAJ53)
CAASWKSSGGSNYKLTF

SEQ ID NO: 264442 - protein, 19 aa, Homo sapiens
  CDR3 for beta chain variable domain of TCR clone 132221 (TRBV7-9, TRBJ2-1)
CASSHNRGTLLRSYNEQFF

SEQ ID NO: 264443 - protein, 15 aa, Homo sapiens
  CDR3 for alpha chain variable domain of TCR clone 132222 (TRAV12-2, TRAJ53)
CAVNGGGGSNYKLTF

SEQ ID NO: 264444 - protein, 15 aa, Homo sapiens
  CDR3 for beta chain variable domain of TCR clone 132222 (TRBV15, TRBJ1-1)
CATSLQGGRNTEAFF

SEQ ID NO: 264445 - protein, 11 aa, Homo sapiens
  CDR3 for alpha chain variable domain of TCR clone 132223 (TRAV2, TRAJ13)
CASGGYQKVTF

SEQ ID NO: 264446 - protein, 16 aa, Homo sapiens
  CDR3 for beta chain variable domain of TCR clone 132223 (TRBV20-1, TRBJ1-4)
CSAPGQCLLTNEKLFF

SEQ ID NO: 264447 - protein, 18 aa, Homo sapiens
  CDR3 for alpha chain variable domain of TCR clone 132224 (TRAV26-2, TRAJ54)
CILRDVEVGIQGAQKLVF

SEQ ID NO: 264448 - protein, 15 aa, Homo sapiens
  CDR3 for beta chain variable domain of TCR clone 132224 (TRBV28, TRBJ2-1)
CASSIIAGGRSEQFF

SEQ ID NO: 264449 - protein, 16 aa, Homo sapiens
  CDR3 for alpha chain variable domain of TCR clone 132225 (TRAV23/DV6, TRAJ9)
CAASIGGNTGGFKTIF

SEQ ID NO: 264450 - protein, 13 aa, Homo sapiens
  CDR3 for beta chain variable domain of TCR clone 132225 (TRBV4-2, TRBJ1-1)
CASSQAGNTEAFF

SEQ ID NO: 264451 - protein, 14 aa, Homo sapiens
  CDR3 for alpha chain variable domain of TCR clone 132226 (TRAV34, TRAJ22)
CGADTSGSARQLTF

SEQ ID NO: 264452 - protein, 13 aa, Homo sapiens
  CDR3 for beta chain variable domain of TCR clone 132226 (TRBV10-3, TRBJ2-7)
CASKLAVNYEQYF

SEQ ID NO: 264453 - protein, 17 aa, Homo sapiens
  CDR3 for alpha chain variable domain of TCR clone 132227 (TRAV26-2, TRAJ42)
CILRDVGYGGSQGNLIF

SEQ ID NO: 264454 - protein, 15 aa, Homo sapiens
  CDR3 for beta chain variable domain of TCR clone 132227 (TRBV19, TRBJ2-1)
CASSSPGVPLDEQFF

SEQ ID NO: 264455 - protein, 12 aa, Homo sapiens
  CDR3 for alpha chain variable domain of TCR clone 132228 (TRAV13-2, TRAJ8)
CAPWLGFQKLVF

SEQ ID NO: 264456 - protein, 14 aa, Homo sapiens
  CDR3 for beta chain variable domain of TCR clone 132228 (TRBV7-9, TRBJ1-1)
CASTPLQSYTEAFF

SEQ ID NO: 264457 - protein, 13 aa, Homo sapiens
  CDR3 for alpha chain variable domain of TCR clone 132229 (TRAV26-1, )
CIVSHRVEGFWNQ

SEQ ID NO: 264458 - protein, 14 aa, Homo sapiens
  CDR3 for beta chain variable domain of TCR clone 132229 (TRBV20-1, TRBJ2-7)
CSAWTALSSYDQYF

SEQ ID NO: 264459 - protein, 13 aa, Homo sapiens
  CDR3 for alpha chain variable domain of TCR clone 132230 (TRAV12-3, TRAJ13)
CAMSSGGYQGVTF

SEQ ID NO: 264460 - protein, 13 aa, Homo sapiens
  CDR3 for beta chain variable domain of TCR clone 132230 (TRBV20-1, TRBJ1-1)
CSAPPGGHTEAFF

SEQ ID NO: 264461 - protein, 13 aa, Homo sapiens
  CDR3 for alpha chain variable domain of TCR clone 132231 (TRAV26-1, TRAJ12)
CIVRPDSSYKLIF

SEQ ID NO: 264462 - protein, 15 aa, Homo sapiens
  CDR3 for beta chain variable domain of TCR clone 132231 (TRBV7-2, TRBJ2-1)
CASTHGTGIYNEQVF

SEQ ID NO: 264463 - protein, 13 aa, Homo sapiens
  CDR3 for alpha chain variable domain of TCR clone 132232 (TRAV29/DV5, TRAJ44)
CAASTGTASKLTF

SEQ ID NO: 264464 - protein, 13 aa, Homo sapiens
  CDR3 for beta chain variable domain of TCR clone 132232 (TRBV4-2, TRBJ1-1)
CASSQAGNTEAFF

SEQ ID NO: 264465 - protein, 16 aa, Homo sapiens
  CDR3 for alpha chain variable domain of TCR clone 132233 (TRAV27, TRAJ48)
TAAQPGDTGLYLPLTF

SEQ ID NO: 264466 - protein, 12 aa, Homo sapiens
  CDR3 for beta chain variable domain of TCR clone 132233 (TRBV12-4, TRBJ2-7)
CASSLGGYEQYF

SEQ ID NO: 264467 - protein, 11 aa, Homo sapiens
  CDR3 for alpha chain variable domain of TCR clone 132234 (TRAV23/DV6, TRAJ58)
CAARLLRGETS

SEQ ID NO: 264468 - protein, 18 aa, Homo sapiens
  CDR3 for beta chain variable domain of TCR clone 132234 (TRBV28, TRBJ2-1)
CASSSPSGLAGAIYEQFF

SEQ ID NO: 264469 - protein, 18 aa, Homo sapiens
  CDR3 for alpha chain variable domain of TCR clone 132235 (TRAV14/DV4, TRAJ3)
CAMREGSGGYSSASKIIF

SEQ ID NO: 264470 - protein, 16 aa, Homo sapiens
  CDR3 for beta chain variable domain of TCR clone 132235 (TRBV5-1, TRBJ1-5)
FAPAACLDRDNQPQHF

SEQ ID NO: 264471 - protein, 15 aa, Homo sapiens
  CDR3 for alpha chain variable domain of TCR clone 132236 (TRAV3, TRAJ22)
CAVRDRGGSARQLTF

SEQ ID NO: 264472 - protein, 16 aa, Homo sapiens
  CDR3 for beta chain variable domain of TCR clone 132236 (TRBV5-1, TRBJ1-1)
CASSSGGNSLNTEAFF

SEQ ID NO: 264473 - protein, 13 aa, Homo sapiens
  CDR3 for alpha chain variable domain of TCR clone 132237 (TRAV12-2, TRAJ52)
RAVGGTSYGKLTF

SEQ ID NO: 264474 - protein, 14 aa, Homo sapiens
  CDR3 for beta chain variable domain of TCR clone 132237 (TRBV19, TRBJ2-1)
CASPTFVLSGEQFF

SEQ ID NO: 264475 - protein, 14 aa, Homo sapiens
  CDR3 for alpha chain variable domain of TCR clone 132238 (TRAV35, TRAJ22)
CAGLRPGSARQLTF

SEQ ID NO: 264476 - protein, 20 aa, Homo sapiens
  CDR3 for beta chain variable domain of TCR clone 132238 (TRBV7-8, TRBJ2-2)
CASSHLFPGPTIHITGELFF

SEQ ID NO: 264477 - protein, 10 aa, Homo sapiens
  CDR3 for alpha chain variable domain of TCR clone 132239 (TRAV17, TRAJ36)
CATVAGNLFF

SEQ ID NO: 264478 - protein, 14 aa, Homo sapiens
  CDR3 for beta chain variable domain of TCR clone 132239 (TRBV10-3, TRBJ2-5)
CAIKSGGQGETQYF

SEQ ID NO: 264479 - protein, 14 aa, Homo sapiens
  CDR3 for alpha chain variable domain of TCR clone 132240 (TRAV1-2, TRAJ16)
CAVNRSSDGQKLLF

SEQ ID NO: 264480 - protein, 13 aa, Homo sapiens
  CDR3 for beta chain variable domain of TCR clone 132240 (TRBV20-1, TRBJ1-1)
CSARVGGNTEAFF

SEQ ID NO: 264481 - protein, 15 aa, Homo sapiens
  CDR3 for alpha chain variable domain of TCR clone 132241 (TRAV17, TRAJ57)
CATGPSQGGSEKLVF

SEQ ID NO: 264482 - protein, 13 aa, Homo sapiens
  CDR3 for beta chain variable domain of TCR clone 132241 (TRBV7-2, TRBJ1-4)
CASSLAGLEKLFF

SEQ ID NO: 264483 - protein, 13 aa, Homo sapiens
  CDR3 for alpha chain variable domain of TCR clone 132242 (TRAV3, TRAJ21)
CAVGNFNKFYFDL

SEQ ID NO: 264484 - protein, 17 aa, Homo sapiens
  CDR3 for beta chain variable domain of TCR clone 132242 (TRBV24-1, TRBJ2-1)
CATSDVSTSGTYNEQLF

SEQ ID NO: 264485 - protein, 15 aa, Homo sapiens
  CDR3 for alpha chain variable domain of TCR clone 132243 (TRAV3, TRAJ3)
CCERPRYSSASTIIF

SEQ ID NO: 264486 - protein, 16 aa, Homo sapiens
  CDR3 for beta chain variable domain of TCR clone 132243 (TRBV19, TRBJ1-5)
CASSIDRGGPRQPQHF

SEQ ID NO: 264487 - protein, 14 aa, Homo sapiens
  CDR3 for alpha chain variable domain of TCR clone 132244 (TRAV27, TRAJ49)
CAGRPEGTGNQFSF

SEQ ID NO: 264488 - protein, 15 aa, Homo sapiens
  CDR3 for beta chain variable domain of TCR clone 132244 (TRBV19, TRBJ2-1)
CASSIQATSYNEQFF

SEQ ID NO: 264489 - protein, 11 aa, Homo sapiens
  CDR3 for alpha chain variable domain of TCR clone 132245 (TRAV2, TRAJ33)
CAVDSNYQLIW

SEQ ID NO: 264490 - protein, 13 aa, Homo sapiens
  CDR3 for beta chain variable domain of TCR clone 132245 (TRBV7-3, TRBJ1-5)
CASSLDSNQPQHF

SEQ ID NO: 264491 - protein, 15 aa, Homo sapiens
  CDR3 for alpha chain variable domain of TCR clone 132246 (TRAV3, TRAJ17)
CAVRDTGAAGNQLTF

SEQ ID NO: 264492 - protein, 14 aa, Homo sapiens
  CDR3 for beta chain variable domain of TCR clone 132246 (TRBV6-3, TRBJ1-1)
CASSNLLPGAEAFF

SEQ ID NO: 264493 - protein, 17 aa, Homo sapiens
  CDR3 for alpha chain variable domain of TCR clone 132247 (TRAV36/DV7, TRAJ42)
CAGGGMNYGGSQGNLIF

SEQ ID NO: 264494 - protein, 12 aa, Homo sapiens
  CDR3 for beta chain variable domain of TCR clone 132247 (TRBV5-1, TRBJ2-7)
CASSFRGYEQYF

SEQ ID NO: 264495 - protein, 17 aa, Homo sapiens
  CDR3 for alpha chain variable domain of TCR clone 132248 (TRAV26-2, TRAJ42)
YILRDVGYGGSQGNLIF

SEQ ID NO: 264496 - protein, 16 aa, Homo sapiens
  CDR3 for beta chain variable domain of TCR clone 132248 (TRBV12-4, TRBJ1-5)
CASSRPVGGSNQPQHF

SEQ ID NO: 264497 - protein, 12 aa, Homo sapiens
  CDR3 for alpha chain variable domain of TCR clone 132249 (TRAV16, TRAJ10)
CSRTGGGNKLTF

SEQ ID NO: 264498 - protein, 14 aa, Homo sapiens
  CDR3 for beta chain variable domain of TCR clone 132249 (TRBV19, TRBJ2-1)
CASSRLASINEQFF

SEQ ID NO: 264499 - protein, 16 aa, Homo sapiens
  CDR3 for alpha chain variable domain of TCR clone 132250 (TRAV8-3, TRAJ8)
CAVPIDGNTGFQKLVF

SEQ ID NO: 264500 - protein, 14 aa, Homo sapiens
  CDR3 for beta chain variable domain of TCR clone 132250 (TRBV28, TRBJ1-1)
CASSESGRGTEAFF

SEQ ID NO: 264501 - protein, 13 aa, Homo sapiens
  CDR3 for alpha chain variable domain of TCR clone 132251 (TRAV8-6, TRAJ41)
CAVSENSGYALNF

SEQ ID NO: 264502 - protein, 16 aa, Homo sapiens
  CDR3 for beta chain variable domain of TCR clone 132251 (TRBV7-2, TRBJ2-3)
CQQLRGPGTSTDTQYF

SEQ ID NO: 264503 - protein, 12 aa, Homo sapiens
  CDR3 for alpha chain variable domain of TCR clone 132252 (TRAV17, TRAJ54)
CATDKGAQKLVF

SEQ ID NO: 264504 - protein, 17 aa, Homo sapiens
  CDR3 for beta chain variable domain of TCR clone 132252 (TRBV20-1, TRBJ2-2)
CSASGSGQGGLTGELFF

SEQ ID NO: 264505 - protein, 15 aa, Homo sapiens
  CDR3 for alpha chain variable domain of TCR clone 132253 (TRAV17, TRAJ13)
CATDAGSGGYQKVTF

SEQ ID NO: 264506 - protein, 17 aa, Homo sapiens
  CDR3 for beta chain variable domain of TCR clone 132253 (TRBV11-2, TRBJ2-1)
CDSSLYPPGVEYNEQFF

SEQ ID NO: 264507 - protein, 11 aa, Homo sapiens
  CDR3 for alpha chain variable domain of TCR clone 132254 (TRAV13-2, TRAJ20)
FADSNDYKLSF

SEQ ID NO: 264508 - protein, 12 aa, Homo sapiens
  CDR3 for beta chain variable domain of TCR clone 132254 (TRBV11-2, TRBJ2-2)
CASSLGGGELFF

SEQ ID NO: 264509 - protein, 13 aa, Homo sapiens
  CDR3 for alpha chain variable domain of TCR clone 132255 (TRAV8-6, TRAJ36)
CAVIGPGANNLFF

SEQ ID NO: 264510 - protein, 15 aa, Homo sapiens
  CDR3 for beta chain variable domain of TCR clone 132255 (TRBV5-1, TRBJ2-7)
CASSFSTDSVYEQYF

SEQ ID NO: 264511 - protein, 13 aa, Homo sapiens
  CDR3 for alpha chain variable domain of TCR clone 132256 (TRAV2, TRAJ29)
CAAQNSGNTHLVF

SEQ ID NO: 264512 - protein, 14 aa, Homo sapiens
  CDR3 for beta chain variable domain of TCR clone 132256 (TRBV7-9, TRBJ2-4)
CASSLAMGGNIQYF

SEQ ID NO: 264513 - protein, 15 aa, Homo sapiens
  CDR3 for alpha chain variable domain of TCR clone 132257 (TRAV12-2, TRAJ43)
CAFDVRFGAGTRLTV

SEQ ID NO: 264514 - protein, 17 aa, Homo sapiens
  CDR3 for beta chain variable domain of TCR clone 132257 (TRBV13, TRBJ2-3)
CASSLSRVAGGRNTQYF

SEQ ID NO: 264515 - protein, 12 aa, Homo sapiens
  CDR3 for alpha chain variable domain of TCR clone 132258 (TRAV17, TRAJ57)
CATDGGSEKLVF

SEQ ID NO: 264516 - protein, 14 aa, Homo sapiens
  CDR3 for beta chain variable domain of TCR clone 132258 (TRBV6-1, TRBJ1-3)
CASVQGGGGNTIYF

SEQ ID NO: 264517 - protein, 22 aa, Homo sapiens
  CDR3 for alpha chain variable domain of TCR clone 132259 (TRAV2, TRAJ10)
ILQVREADAAVYYTGGGNKLTF

SEQ ID NO: 264518 - protein, 16 aa, Homo sapiens
  CDR3 for beta chain variable domain of TCR clone 132259 (TRBV7-3, TRBJ2-2)
CASSLKRGTLSGELFF

SEQ ID NO: 264519 - protein, 15 aa, Homo sapiens
  CDR3 for alpha chain variable domain of TCR clone 132260 (TRAV8-2, TRAJ16)
CVVSDGISDGQKLLF

SEQ ID NO: 264520 - protein, 14 aa, Homo sapiens
  CDR3 for beta chain variable domain of TCR clone 132260 (TRBV7-3, TRBJ1-1)
CASSLGTGYTEAFF

SEQ ID NO: 264521 - protein, 15 aa, Homo sapiens
  CDR3 for alpha chain variable domain of TCR clone 132261 (TRAV3, TRAJ22)
CAVRDRGGSGRQLTF

SEQ ID NO: 264522 - protein, 13 aa, Homo sapiens
  CDR3 for beta chain variable domain of TCR clone 132261 (TRBV20-1, TRBJ1-1)
CSARVGGNTEAFF

SEQ ID NO: 264523 - protein, 14 aa, Homo sapiens
  CDR3 for alpha chain variable domain of TCR clone 132262 (TRAV1-2, TRAJ8)
CAVREDTGFQKLVF

SEQ ID NO: 264524 - protein, 12 aa, Homo sapiens
  CDR3 for beta chain variable domain of TCR clone 132262 (TRBV11-2, TRBJ2-2)
CASILGGGELFF

SEQ ID NO: 264525 - protein, 14 aa, Homo sapiens
  CDR3 for alpha chain variable domain of TCR clone 132263 (TRAV1-2, TRAJ8)
CAVREDTGFQKLVF

SEQ ID NO: 264526 - protein, 13 aa, Homo sapiens
  CDR3 for beta chain variable domain of TCR clone 132263 (TRBV7-3, TRBJ2-5)
CASSSDREETQYF

SEQ ID NO: 264527 - protein, 13 aa, Homo sapiens
  CDR3 for alpha chain variable domain of TCR clone 132264 (TRAV21, TRAJ27)
CAARPGNAGKSTF

SEQ ID NO: 264528 - protein, 12 aa, Homo sapiens
  CDR3 for beta chain variable domain of TCR clone 132264 (TRBV7-9, TRBJ2-7)
CASSIKREEQYF

SEQ ID NO: 264529 - protein, 14 aa, Homo sapiens
  CDR3 for alpha chain variable domain of TCR clone 132265 (TRAV12-3, TRAJ10)
SHLPLTGGGNKLTF

SEQ ID NO: 264530 - protein, 14 aa, Homo sapiens
  CDR3 for beta chain variable domain of TCR clone 132265 (TRBV19, TRBJ1-5)
CASSLSGGSQPRHF

SEQ ID NO: 264531 - protein, 13 aa, Homo sapiens
  CDR3 for alpha chain variable domain of TCR clone 132266 (TRAV12-2, TRAJ4)
CAVRSGGYNQLIF

SEQ ID NO: 264532 - protein, 15 aa, Homo sapiens
  CDR3 for beta chain variable domain of TCR clone 132266 (TRBV10-3, TRBJ2-1)
CAISDVQDRAYEQFF

SEQ ID NO: 264533 - protein, 13 aa, Homo sapiens
  CDR3 for alpha chain variable domain of TCR clone 132267 (TRAV27, TRAJ49)
CAPRPYTGNQFYF

SEQ ID NO: 264534 - protein, 19 aa, Homo sapiens
  CDR3 for beta chain variable domain of TCR clone 132267 (TRBV25-1, TRBJ2-2)
CAILVYRVDRGRKTGELFF

SEQ ID NO: 264535 - protein, 16 aa, Homo sapiens
  CDR3 for alpha chain variable domain of TCR clone 132268 (TRAV38-2/DV8, TRAJ45)
CAYTTTSGGGADGLPF

SEQ ID NO: 264536 - protein, 14 aa, Homo sapiens
  CDR3 for beta chain variable domain of TCR clone 132268 (TRBV7-9, TRBJ2-2)
CASSLGHRTGELFF

SEQ ID NO: 264537 - protein, 15 aa, Homo sapiens
  CDR3 for alpha chain variable domain of TCR clone 132269 (TRAV12-1, TRAJ42)
CVVTRDGGSQGNLVF

SEQ ID NO: 264538 - protein, 14 aa, Homo sapiens
  CDR3 for beta chain variable domain of TCR clone 132269 (TRBV11-2, TRBJ2-3)
CASSLGGGANTQYF

SEQ ID NO: 264539 - protein, 16 aa, Homo sapiens
  CDR3 for alpha chain variable domain of TCR clone 132270 (TRAV4, TRAJ9)
CLVGDPNRPGGFKTIF

SEQ ID NO: 264540 - protein, 16 aa, Homo sapiens
  CDR3 for beta chain variable domain of TCR clone 132270 (TRBV28, TRBJ1-4)
CSSSPPYRGRSEKLFF

SEQ ID NO: 264541 - protein, 12 aa, Homo sapiens
  CDR3 for alpha chain variable domain of TCR clone 132271 (TRAV16, TRAJ56)
CAPTGANSKLTF

SEQ ID NO: 264542 - protein, 17 aa, Homo sapiens
  CDR3 for beta chain variable domain of TCR clone 132271 (TRBV27, TRBJ2-6)
CASSLTGFAPGANVLTF

SEQ ID NO: 264543 - protein, 14 aa, Homo sapiens
  CDR3 for alpha chain variable domain of TCR clone 132272 (TRAV4, TRAJ9)
CLVGSGTGGFKTIF

SEQ ID NO: 264544 - protein, 15 aa, Homo sapiens
  CDR3 for beta chain variable domain of TCR clone 132272 (TRBV28, TRBJ2-1)
CASSIIAGGRSEQFF

SEQ ID NO: 264545 - protein, 14 aa, Homo sapiens
  CDR3 for alpha chain variable domain of TCR clone 132273 (TRAV12-3, TRAJ10)
SHLPLAGGGNKLTF

SEQ ID NO: 264546 - protein, 15 aa, Homo sapiens
  CDR3 for beta chain variable domain of TCR clone 132273 (TRBV27, TRBJ1-5)
CASSLGTGFDQPQHF

SEQ ID NO: 264547 - protein, 14 aa, Homo sapiens
  CDR3 for alpha chain variable domain of TCR clone 132274 (TRAV29/DV5, TRAJ48)
CAAMALFGNEKFTF

SEQ ID NO: 264548 - protein, 15 aa, Homo sapiens
  CDR3 for beta chain variable domain of TCR clone 132274 (TRBV7-2, TRBJ2-1)
CASTHGTGIYNEQFF

SEQ ID NO: 264549 - protein, 14 aa, Homo sapiens
  CDR3 for alpha chain variable domain of TCR clone 132275 (TRAV26-1, TRAJ21)
CIVRPPYNFNKFYF

SEQ ID NO: 264550 - protein, 14 aa, Homo sapiens
  CDR3 for beta chain variable domain of TCR clone 132275 (TRBV11-3, TRBJ2-1)
CASSATTSGSIQLF

SEQ ID NO: 264551 - protein, 14 aa, Homo sapiens
  CDR3 for alpha chain variable domain of TCR clone 132276 (TRAV8-3, TRAJ4)
CAVGAAGGYNRLIF

SEQ ID NO: 264552 - protein, 13 aa, Homo sapiens
  CDR3 for beta chain variable domain of TCR clone 132276 (TRBV3-1, TRBJ1-1)
CASSPGVITEAFF

SEQ ID NO: 264553 - protein, 13 aa, Homo sapiens
  CDR3 for alpha chain variable domain of TCR clone 132277 (TRAV1-2, TRAJ9)
CAVLNTGGFKTIF

SEQ ID NO: 264554 - protein, 14 aa, Homo sapiens
  CDR3 for beta chain variable domain of TCR clone 132277 (TRBV20-1, TRBJ2-3)
CSARSGTSTDTQYF

SEQ ID NO: 264555 - protein, 16 aa, Homo sapiens
  CDR3 for alpha chain variable domain of TCR clone 132278 (TRAV8-3, TRAJ13)
CALGAYPSGGYQKVTF

SEQ ID NO: 264556 - protein, 14 aa, Homo sapiens
  CDR3 for beta chain variable domain of TCR clone 132278 (TRBV18, TRBJ2-5)
CASSPRASSETQYF

SEQ ID NO: 264557 - protein, 23 aa, Homo sapiens
  CDR3 for alpha chain variable domain of TCR clone 132279 (TRAV26-1, TRAJ38)
CIADNAGNNHIQNPDPAVYQLRD

SEQ ID NO: 264558 - protein, 15 aa, Homo sapiens
  CDR3 for beta chain variable domain of TCR clone 132279 (TRBV10-2, TRBJ2-6)
CASSEQGTGANVLTF

SEQ ID NO: 264559 - protein, 14 aa, Homo sapiens
  CDR3 for alpha chain variable domain of TCR clone 132280 (TRAV12-1, TRAJ17)
CVVNPKAAGNKLTF

SEQ ID NO: 264560 - protein, 15 aa, Homo sapiens
  CDR3 for beta chain variable domain of TCR clone 132280 (TRBV7-2, TRBJ2-3)
CASSLAGAFIDTQYV

SEQ ID NO: 264561 - protein, 11 aa, Homo sapiens
  CDR3 for alpha chain variable domain of TCR clone 132281 (TRAV12-1, TRAJ33)
CVVNMNYQLIW

SEQ ID NO: 264562 - protein, 17 aa, Homo sapiens
  CDR3 for beta chain variable domain of TCR clone 132281 (TRBV6-5, TRBJ2-1)
CASRLSGRFESYNEQFF

SEQ ID NO: 264563 - protein, 15 aa, Homo sapiens
  CDR3 for alpha chain variable domain of TCR clone 132282 (TRAV3, TRAJ22)
CAVRDRGGSARQLTF

SEQ ID NO: 264564 - protein, 13 aa, Homo sapiens
  CDR3 for beta chain variable domain of TCR clone 132282 (TRBV12-4, TRBJ1-2)
CASSLRQGKGYAF

SEQ ID NO: 264565 - protein, 14 aa, Homo sapiens
  CDR3 for alpha chain variable domain of TCR clone 132283 (TRAV27, TRAJ22)
CAGLPSGSARQLTF

SEQ ID NO: 264566 - protein, 20 aa, Homo sapiens
  CDR3 for beta chain variable domain of TCR clone 132283 (TRBV7-9, TRBJ2-1)
CASSSPRAPRTRSSYNEQFF

SEQ ID NO: 264567 - protein, 13 aa, Homo sapiens
  CDR3 for alpha chain variable domain of TCR clone 132284 (TRAV21, TRAJ37)
CAVSSGNTGKLIF

SEQ ID NO: 264568 - protein, 13 aa, Homo sapiens
  CDR3 for beta chain variable domain of TCR clone 132284 (TRBV7-6, TRBJ2-3)
CASSLRGDNTQYF

SEQ ID NO: 264569 - protein, 14 aa, Homo sapiens
  CDR3 for alpha chain variable domain of TCR clone 132285 (TRAV23/DV6, TRAJ13)
CAAMYSWGYQKVTF

SEQ ID NO: 264570 - protein, 14 aa, Homo sapiens
  CDR3 for beta chain variable domain of TCR clone 132285 (TRBV7-9, TRBJ2-1)
CASSPRDSLYEQFF

SEQ ID NO: 264571 - protein, 20 aa, Homo sapiens
  CDR3 for alpha chain variable domain of TCR clone 132286 (TRAV1-1, TRAJ4)
CLLLLRCEGFLSGGYNKLIF

SEQ ID NO: 264572 - protein, 16 aa, Homo sapiens
  CDR3 for beta chain variable domain of TCR clone 132286 (TRBV28, TRBJ1-4)
CASSPPYRGRSGKLFF

SEQ ID NO: 264573 - protein, 12 aa, Homo sapiens
  CDR3 for alpha chain variable domain of TCR clone 132287 (TRAV13-1, TRAJ48)
CAANFGNEKLTF

SEQ ID NO: 264574 - protein, 13 aa, Homo sapiens
  CDR3 for beta chain variable domain of TCR clone 132287 (TRBV7-3, TRBJ1-1)
CASSQDWGAEAFI

SEQ ID NO: 264575 - protein, 12 aa, Homo sapiens
  CDR3 for alpha chain variable domain of TCR clone 132288 (TRAV27, TRAJ9)
CAGEYGGFKTIF

SEQ ID NO: 264576 - protein, 18 aa, Homo sapiens
  CDR3 for beta chain variable domain of TCR clone 132288 (TRBV10-2, TRBJ2-2)
CISAPAVHRQADAGELFF

SEQ ID NO: 264577 - protein, 14 aa, Homo sapiens
  CDR3 for alpha chain variable domain of TCR clone 132289 (TRAV16, TRAJ33)
CALSAMDSNYQLIW

SEQ ID NO: 264578 - protein, 15 aa, Homo sapiens
  CDR3 for beta chain variable domain of TCR clone 132289 (TRBV28, TRBJ1-3)
CASSMGWASGNTIYF

SEQ ID NO: 264579 - protein, 13 aa, Homo sapiens
  CDR3 for alpha chain variable domain of TCR clone 132290 (TRAV30, TRAJ24)
CGTVTDSWGKLQF

SEQ ID NO: 264580 - protein, 13 aa, Homo sapiens
  CDR3 for beta chain variable domain of TCR clone 132290 (TRBV7-2, TRBJ2-2)
CASSLAVTGELFF

SEQ ID NO: 264581 - protein, 12 aa, Homo sapiens
  CDR3 for alpha chain variable domain of TCR clone 132291 (TRAV20, TRAJ39)
CAVSNAGNMLTF

SEQ ID NO: 264582 - protein, 17 aa, Homo sapiens
  CDR3 for beta chain variable domain of TCR clone 132291 (TRBV4-1, TRBJ2-3)
CASSQGYVSGGTDTQYF

SEQ ID NO: 264583 - protein, 13 aa, Homo sapiens
  CDR3 for alpha chain variable domain of TCR clone 132292 (TRAV3, TRAJ8)
CAVRFTGFQKLVF

SEQ ID NO: 264584 - protein, 16 aa, Homo sapiens
  CDR3 for beta chain variable domain of TCR clone 132292 (TRBV7-9, TRBJ2-1)
CASSDVAGGSYNEQFF

SEQ ID NO: 264585 - protein, 17 aa, Homo sapiens
  CDR3 for alpha chain variable domain of TCR clone 132293 (TRAV3, TRAJ6)
CAVRDGPRAGGSYIPTF

SEQ ID NO: 264586 - protein, 13 aa, Homo sapiens
  CDR3 for beta chain variable domain of TCR clone 132293 (TRBV29-1, TRBJ1-1)
CSVGDSRNTEALF

SEQ ID NO: 264587 - protein, 14 aa, Homo sapiens
  CDR3 for alpha chain variable domain of TCR clone 132294 (TRAV8-4, TRAJ17)
CAVSDQAAGNKLTF

SEQ ID NO: 264588 - protein, 15 aa, Homo sapiens
  CDR3 for beta chain variable domain of TCR clone 132294 (TRBV7-2, TRBJ1-2)
CASSLAPDRGLGYTL

SEQ ID NO: 264589 - protein, 16 aa, Homo sapiens
  CDR3 for alpha chain variable domain of TCR clone 132295 (TRAV3, TRAJ10)
CAVRDMRAGGGNKLTF

SEQ ID NO: 264590 - protein, 15 aa, Homo sapiens
  CDR3 for beta chain variable domain of TCR clone 132295 (TRBV27, TRBJ2-1)
CASSNGGGSSNEQLF

SEQ ID NO: 264591 - protein, 16 aa, Homo sapiens
  CDR3 for alpha chain variable domain of TCR clone 132296 (TRAV13-1, TRAJ40)
CAASIATTSGTYKYIF

SEQ ID NO: 264592 - protein, 15 aa, Homo sapiens
  CDR3 for beta chain variable domain of TCR clone 132296 (TRBV4-1, TRBJ1-4)
CASSDTGGTNEKLFF

SEQ ID NO: 264593 - protein, 12 aa, Homo sapiens
  CDR3 for alpha chain variable domain of TCR clone 132297 (TRAV4, TRAJ26)
CLVGDYGQNFAF

SEQ ID NO: 264594 - protein, 15 aa, Homo sapiens
  CDR3 for beta chain variable domain of TCR clone 132297 (TRBV27, TRBJ2-1)
CASSNGGGSSNEQFF

SEQ ID NO: 264595 - protein, 13 aa, Homo sapiens
  CDR3 for alpha chain variable domain of TCR clone 132298 (TRAV8-6, TRAJ49)
CAVVTNTGNQFYF

SEQ ID NO: 264596 - protein, 14 aa, Homo sapiens
  CDR3 for beta chain variable domain of TCR clone 132298 (TRBV5-1, TRBJ2-7)
CASSRGESLYEQYF

SEQ ID NO: 264597 - protein, 16 aa, Homo sapiens
  CDR3 for alpha chain variable domain of TCR clone 132299 (TRAV30, TRAJ57)
CGTGWAPQGGSEKLVF

SEQ ID NO: 264598 - protein, 14 aa, Homo sapiens
  CDR3 for beta chain variable domain of TCR clone 132299 (TRBV18, TRBJ1-1)
CDSSPGFQGVEAFF

SEQ ID NO: 264599 - protein, 19 aa, Homo sapiens
  CDR3 for alpha chain variable domain of TCR clone 132300 (TRAV26-1, TRAJ52)
CIVRAHRNAGGASYGKLTL

SEQ ID NO: 264600 - protein, 15 aa, Homo sapiens
  CDR3 for beta chain variable domain of TCR clone 132300 (TRBV29-1, TRBJ2-1)
CSGRDRKSSYNEQFF

SEQ ID NO: 264601 - protein, 14 aa, Homo sapiens
  CDR3 for alpha chain variable domain of TCR clone 132301 (TRAV26-1, TRAJ34)
CIVRLRYNTDKLIF

SEQ ID NO: 264602 - protein, 13 aa, Homo sapiens
  CDR3 for beta chain variable domain of TCR clone 132301 (TRBV19, TRBJ1-2)
CASSVPGQDGYTF

SEQ ID NO: 264603 - protein, 12 aa, Homo sapiens
  CDR3 for alpha chain variable domain of TCR clone 132302 (TRAV12-3, TRAJ17)
CAMTLTGNKLTF

SEQ ID NO: 264604 - protein, 15 aa, Homo sapiens
  CDR3 for beta chain variable domain of TCR clone 132302 (TRBV12-4, TRBJ2-5)
CASSLGGQGRETQYF

SEQ ID NO: 264605 - protein, 14 aa, Homo sapiens
  CDR3 for alpha chain variable domain of TCR clone 132303 (TRAV1-2, TRAJ8)
CAVIEDTGFQKLVF

SEQ ID NO: 264606 - protein, 11 aa, Homo sapiens
  CDR3 for beta chain variable domain of TCR clone 132303 (TRBV11-3, TRBJ2-7)
CASSRTYEQYF

SEQ ID NO: 264607 - protein, 16 aa, Homo sapiens
  CDR3 for alpha chain variable domain of TCR clone 132304 (TRAV14/DV4, TRAJ54)
CAMREGRIQGAQKLVF

SEQ ID NO: 264608 - protein, 12 aa, Homo sapiens
  CDR3 for beta chain variable domain of TCR clone 132304 (TRBV11-2, TRBJ2-2)
CTSSLGGGELFF

SEQ ID NO: 264609 - protein, 15 aa, Homo sapiens
  CDR3 for alpha chain variable domain of TCR clone 132305 (TRAV12-1, TRAJ5)
CLVNMLETGRRALTF

SEQ ID NO: 264610 - protein, 12 aa, Homo sapiens
  CDR3 for beta chain variable domain of TCR clone 132305 (TRBV11-2, TRBJ2-2)
CASSLGGGELFF

SEQ ID NO: 264611 - protein, 15 aa, Homo sapiens
  CDR3 for alpha chain variable domain of TCR clone 132306 (TRAV8-4, TRAJ7)
CAVSGGNDGNNRLAF

SEQ ID NO: 264612 - protein, 11 aa, Homo sapiens
  CDR3 for beta chain variable domain of TCR clone 132306 (TRBV20-1, TRBJ2-1)
CSLSSGSEQFF

SEQ ID NO: 264613 - protein, 12 aa, Homo sapiens
  CDR3 for alpha chain variable domain of TCR clone 132307 (TRAV12-3, TRAJ39)
CAMTQAGNMLTF

SEQ ID NO: 264614 - protein, 13 aa, Homo sapiens
  CDR3 for beta chain variable domain of TCR clone 132307 (TRBV20-1, TRBJ1-1)
CSAPEGGNTEALF

SEQ ID NO: 264615 - protein, 15 aa, Homo sapiens
  CDR3 for alpha chain variable domain of TCR clone 132308 (TRAV8-3, TRAJ11)
CAVGLLNSGYSTLTF

SEQ ID NO: 264616 - protein, 14 aa, Homo sapiens
  CDR3 for beta chain variable domain of TCR clone 132308 (TRBV7-8, TRBJ2-7)
CASSPRDRVYEQYF

SEQ ID NO: 264617 - protein, 13 aa, Homo sapiens
  CDR3 for alpha chain variable domain of TCR clone 132309 (TRAV12-1, TRAJ39)
CVVNYNAGNVLTF

SEQ ID NO: 264618 - protein, 12 aa, Homo sapiens
  CDR3 for beta chain variable domain of TCR clone 132309 (TRBV5-7, TRBJ1-1)
CASSLGRGKAFF

SEQ ID NO: 264619 - protein, 13 aa, Homo sapiens
  CDR3 for alpha chain variable domain of TCR clone 132310 (TRAV1-2, TRAJ9)
CAALNTGGFKTIF

SEQ ID NO: 264620 - protein, 12 aa, Homo sapiens
  CDR3 for beta chain variable domain of TCR clone 132310 (TRBV11-2, TRBJ2-2)
CASSLPTGELFF

SEQ ID NO: 264621 - protein, 14 aa, Homo sapiens
  CDR3 for alpha chain variable domain of TCR clone 132311 (TRAV8-6, TRAJ12)
CAVKEADSSYKLIF

SEQ ID NO: 264622 - protein, 15 aa, Homo sapiens
  CDR3 for beta chain variable domain of TCR clone 132311 (TRBV5-1, TRBJ2-5)
CASSLGLAEQETQYF

SEQ ID NO: 264623 - protein, 14 aa, Homo sapiens
  CDR3 for alpha chain variable domain of TCR clone 132312 (TRAV23/DV6, TRAJ13)
CSLAGGGGYQKVTF

SEQ ID NO: 264624 - protein, 17 aa, Homo sapiens
  CDR3 for beta chain variable domain of TCR clone 132312 (TRBV19, TRBJ2-7)
CASSISFYDSYPYEQYF

SEQ ID NO: 264625 - protein, 13 aa, Homo sapiens
  CDR3 for alpha chain variable domain of TCR clone 132313 (TRAV13-1, TRAJ23)
CAASGRGGGKLIF

SEQ ID NO: 264626 - protein, 12 aa, Homo sapiens
  CDR3 for beta chain variable domain of TCR clone 132313 (TRBV5-7, TRBJ2-7)
CASSVQGGEQYF

SEQ ID NO: 264627 - protein, 12 aa, Homo sapiens
  CDR3 for alpha chain variable domain of TCR clone 132314 (TRAV8-6, TRAJ4)
CAVSDHPNKLIF

SEQ ID NO: 264628 - protein, 13 aa, Homo sapiens
  CDR3 for beta chain variable domain of TCR clone 132314 (TRBV15, TRBJ1-6)
CATSGGLNSPLHF

SEQ ID NO: 264629 - protein, 13 aa, Homo sapiens
  CDR3 for alpha chain variable domain of TCR clone 132315 (TRAV1-2, TRAJ9)
CAVLNTGVFKTIF

SEQ ID NO: 264630 - protein, 14 aa, Homo sapiens
  CDR3 for beta chain variable domain of TCR clone 132315 (TRBV5-1, TRBJ2-2)
CASSLGGGSGELFF

SEQ ID NO: 264631 - protein, 14 aa, Homo sapiens
  CDR3 for alpha chain variable domain of TCR clone 132316 (TRAV12-3, TRAJ10)
SHLPLTGGGNKLTF

SEQ ID NO: 264632 - protein, 14 aa, Homo sapiens
  CDR3 for beta chain variable domain of TCR clone 132316 (TRBV7-8, TRBJ1-2)
CASSPDSLSYGYTF

SEQ ID NO: 264633 - protein, 16 aa, Homo sapiens
  CDR3 for alpha chain variable domain of TCR clone 132317 (TRAV12-2, TRAJ45)
CVVKRSPGGGADGLTF

SEQ ID NO: 264634 - protein, 12 aa, Homo sapiens
  CDR3 for beta chain variable domain of TCR clone 132317 (TRBV6-1, TRBJ2-5)
CASSEGRETQYF

SEQ ID NO: 264635 - protein, 13 aa, Homo sapiens
  CDR3 for alpha chain variable domain of TCR clone 132318 (TRAV12-1, TRAJ9)
CVVLNTGGFKTIF

SEQ ID NO: 264636 - protein, 13 aa, Homo sapiens
  CDR3 for beta chain variable domain of TCR clone 132318 (TRBV20-1, TRBJ1-1)
CSARGGGKTEAFF

SEQ ID NO: 264637 - protein, 14 aa, Homo sapiens
  CDR3 for alpha chain variable domain of TCR clone 132319 (TRAV2, TRAJ37)
CAVDFTSNTRKLIF

SEQ ID NO: 264638 - protein, 15 aa, Homo sapiens
  CDR3 for beta chain variable domain of TCR clone 132319 (TRBV20-1, TRBJ1-1)
CSASRGVTGNTEAFF

SEQ ID NO: 264639 - protein, 18 aa, Homo sapiens
  CDR3 for alpha chain variable domain of TCR clone 132320 (TRAV21, TRAJ52)
CAVRPSPAGGTSYGKLTF

SEQ ID NO: 264640 - protein, 13 aa, Homo sapiens
  CDR3 for beta chain variable domain of TCR clone 132320 (TRBV7-9, TRBJ1-2)
CASSLKQSYGYTF

SEQ ID NO: 264641 - protein, 17 aa, Homo sapiens
  CDR3 for alpha chain variable domain of TCR clone 132321 (TRAV13-1, TRAJ52)
CAASSGAGGTSYGKLTF

SEQ ID NO: 264642 - protein, 15 aa, Homo sapiens
  CDR3 for beta chain variable domain of TCR clone 132321 (TRBV2, TRBJ2-1)
CASRELAGSYNEQFF

SEQ ID NO: 264643 - protein, 15 aa, Homo sapiens
  CDR3 for alpha chain variable domain of TCR clone 132322 (TRAV8-3, TRAJ44)
CAVGATTGTASKLTF

SEQ ID NO: 264644 - protein, 19 aa, Homo sapiens
  CDR3 for beta chain variable domain of TCR clone 132322 (TRBV7-2, TRBJ2-3)
CASSFLSRNWGGGTDTQYF

SEQ ID NO: 264645 - protein, 16 aa, Homo sapiens
  CDR3 for alpha chain variable domain of TCR clone 132323 (TRAV30, TRAJ24)
CGTEIVDADSWGKFQF

SEQ ID NO: 264646 - protein, 14 aa, Homo sapiens
  CDR3 for beta chain variable domain of TCR clone 132323 (TRBV6-6, TRBJ2-7)
CASSDSGAGYEQYF

SEQ ID NO: 264647 - protein, 15 aa, Homo sapiens
  CDR3 for alpha chain variable domain of TCR clone 132324 (TRAV4, TRAJ39)
CLVGDYNNAGNMLTF

SEQ ID NO: 264648 - protein, 15 aa, Homo sapiens
  CDR3 for beta chain variable domain of TCR clone 132324 (TRBV20-1, TRBJ1-5)
CSARVGRVVSQPQHF

SEQ ID NO: 264649 - protein, 13 aa, Homo sapiens
  CDR3 for alpha chain variable domain of TCR clone 132325 (TRAV12-1, TRAJ17)
CVVFLTAGNKLTF

SEQ ID NO: 264650 - protein, 17 aa, Homo sapiens
  CDR3 for beta chain variable domain of TCR clone 132325 (TRBV28, TRBJ2-5)
CASSRQGGLAGAETQYF

SEQ ID NO: 264651 - protein, 14 aa, Homo sapiens
  CDR3 for alpha chain variable domain of TCR clone 132326 (TRAV12-2, TRAJ40)
CAVKIPSGTYKYIF

SEQ ID NO: 264652 - protein, 13 aa, Homo sapiens
  CDR3 for beta chain variable domain of TCR clone 132326 (TRBV2, TRBJ2-5)
CASSDGIQETQYF

SEQ ID NO: 264653 - protein, 19 aa, Homo sapiens
  CDR3 for alpha chain variable domain of TCR clone 132327 (TRAV2, TRAJ20)
ILQVREADAAVYRDCKLSF

SEQ ID NO: 264654 - protein, 15 aa, Homo sapiens
  CDR3 for beta chain variable domain of TCR clone 132327 (TRBV20-1, TRBJ1-5)
CSARPRGQLNQPQHF

SEQ ID NO: 264655 - protein, 14 aa, Homo sapiens
  CDR3 for alpha chain variable domain of TCR clone 132328 (TRAV8-3, TRAJ39)
CAVGENNAGNMLTF

SEQ ID NO: 264656 - protein, 12 aa, Homo sapiens
  CDR3 for beta chain variable domain of TCR clone 132328 (TRBV28, TRBJ1-3)
CASVSSGNTIYF

SEQ ID NO: 264657 - protein, 18 aa, Homo sapiens
  CDR3 for alpha chain variable domain of TCR clone 132329 (TRAV13-1, TRAJ52)
CAAKDPNAGGTSYGKLTF

SEQ ID NO: 264658 - protein, 15 aa, Homo sapiens
  CDR3 for beta chain variable domain of TCR clone 132329 (TRBV2, TRBJ2-2)
CASSRETVGTGELFF

SEQ ID NO: 264659 - protein, 16 aa, Homo sapiens
  CDR3 for alpha chain variable domain of TCR clone 132330 (TRAV17, TRAJ28)
CATALDSGAGRYQLTF

SEQ ID NO: 264660 - protein, 15 aa, Homo sapiens
  CDR3 for beta chain variable domain of TCR clone 132330 (TRBV12-4, TRBJ1-2)
CASSFEAGLGYGYTF

SEQ ID NO: 264661 - protein, 15 aa, Homo sapiens
  CDR3 for alpha chain variable domain of TCR clone 132331 (TRAV26-1, TRAJ44)
CIVRIGTGTASKLTF

SEQ ID NO: 264662 - protein, 15 aa, Homo sapiens
  CDR3 for beta chain variable domain of TCR clone 132331 (TRBV7-6, TRBJ2-1)
CASSSLAGEGNEQFL

SEQ ID NO: 264663 - protein, 12 aa, Homo sapiens
  CDR3 for alpha chain variable domain of TCR clone 132332 (TRAV13-1, TRAJ15)
GAASQAGTALIF

SEQ ID NO: 264664 - protein, 18 aa, Homo sapiens
  CDR3 for beta chain variable domain of TCR clone 132332 (TRBV7-9, TRBJ2-3)
CASSLPINGQISTDTQYF

SEQ ID NO: 264665 - protein, 13 aa, Homo sapiens
  CDR3 for alpha chain variable domain of TCR clone 132333 (TRAV12-3, TRAJ7)
CAMTPYGNNRLAF

SEQ ID NO: 264666 - protein, 17 aa, Homo sapiens
  CDR3 for beta chain variable domain of TCR clone 132333 (TRBV20-1, TRBJ2-2)
CSASGSGQGGLTGELFF

SEQ ID NO: 264667 - protein, 13 aa, Homo sapiens
  CDR3 for alpha chain variable domain of TCR clone 132334 (TRAV20, TRAJ48)
CAVQGVGNEKLTF

SEQ ID NO: 264668 - protein, 14 aa, Homo sapiens
  CDR3 for beta chain variable domain of TCR clone 132334 (TRBV27, TRBJ2-7)
CASSFLDGPYEQYF

SEQ ID NO: 264669 - protein, 14 aa, Homo sapiens
  CDR3 for alpha chain variable domain of TCR clone 132335 (TRAV12-1, TRAJ8)
CVVNSNTGFQNLVF

SEQ ID NO: 264670 - protein, 16 aa, Homo sapiens
  CDR3 for beta chain variable domain of TCR clone 132335 (TRBV20-1, TRBJ2-2)
CSARDDRVGLTGELFF

SEQ ID NO: 264671 - protein, 14 aa, Homo sapiens
  CDR3 for alpha chain variable domain of TCR clone 132336 (TRAV16, TRAJ31)
CALSGRNNNARLMF

SEQ ID NO: 264672 - protein, 17 aa, Homo sapiens
  CDR3 for beta chain variable domain of TCR clone 132336 (TRBV13, TRBJ2-1)
CASSLILGLAGYNEQFF

SEQ ID NO: 264673 - protein, 11 aa, Homo sapiens
  CDR3 for alpha chain variable domain of TCR clone 132337 (TRAV8-6, TRAJ34)
CAVWNTAKLIF

SEQ ID NO: 264674 - protein, 16 aa, Homo sapiens
  CDR3 for beta chain variable domain of TCR clone 132337 (TRBV5-1, TRBJ2-7)
CASSYASTSSGGEQYF

SEQ ID NO: 264675 - protein, 23 aa, Homo sapiens
  CDR3 for alpha chain variable domain of TCR clone 132338 (TRAV12-2, TRAJ22)
CSSETPSPVIQPPGRSSARQLTF

SEQ ID NO: 264676 - protein, 16 aa, Homo sapiens
  CDR3 for beta chain variable domain of TCR clone 132338 (TRBV5-1, TRBJ2-7)
CASSWGTGGRAREQYF

SEQ ID NO: 264677 - protein, 10 aa, Homo sapiens
  CDR3 for alpha chain variable domain of TCR clone 132339 (TRAV12-3, TRAJ49)
CAMNDDQFYF

SEQ ID NO: 264678 - protein, 13 aa, Homo sapiens
  CDR3 for beta chain variable domain of TCR clone 132339 (TRBV19, TRBJ1-2)
CASSVPGQDGYTF

SEQ ID NO: 264679 - protein, 10 aa, Homo sapiens
  CDR3 for alpha chain variable domain of TCR clone 132340 (TRAV8-4, TRAJ43)
RAVSADDMRF

SEQ ID NO: 264680 - protein, 16 aa, Homo sapiens
  CDR3 for beta chain variable domain of TCR clone 132340 (TRBV12-5, TRBJ2-5)
CASGPRTSGNQETQYF

SEQ ID NO: 264681 - protein, 16 aa, Homo sapiens
  CDR3 for alpha chain variable domain of TCR clone 132341 (TRAV8-2, TRAJ45)
CVVNEGTGGGADGLTF

SEQ ID NO: 264682 - protein, 13 aa, Homo sapiens
  CDR3 for beta chain variable domain of TCR clone 132341 (TRBV19, TRBJ2-5)
CASRDSRRETQYF

SEQ ID NO: 264683 - protein, 13 aa, Homo sapiens
  CDR3 for alpha chain variable domain of TCR clone 132342 (TRAV17, TRAJ15)
CATDARAGTALIF

SEQ ID NO: 264684 - protein, 15 aa, Homo sapiens
  CDR3 for beta chain variable domain of TCR clone 132342 (TRBV20-1, TRBJ2-7)
CSARDRVSGMDKQYF

SEQ ID NO: 264685 - protein, 16 aa, Homo sapiens
  CDR3 for alpha chain variable domain of TCR clone 132343 (TRAV12-3, TRAJ53)
CAMRPGRGGSNYKLTF

SEQ ID NO: 264686 - protein, 11 aa, Homo sapiens
  CDR3 for beta chain variable domain of TCR clone 132343 (TRBV29-1, TRBJ2-5)
CSEDRTGTQYF

SEQ ID NO: 264687 - protein, 13 aa, Homo sapiens
  CDR3 for alpha chain variable domain of TCR clone 132344 (TRAV12-2, TRAJ39)
CAVNNNAGNMLTF

SEQ ID NO: 264688 - protein, 13 aa, Homo sapiens
  CDR3 for beta chain variable domain of TCR clone 132344 (TRBV7-9, TRBJ1-2)
CASSLKQNYGYTF

SEQ ID NO: 264689 - protein, 11 aa, Homo sapiens
  CDR3 for alpha chain variable domain of TCR clone 132345 (TRAV2, TRAJ33)
CAVDSNYQLIW

SEQ ID NO: 264690 - protein, 14 aa, Homo sapiens
  CDR3 for beta chain variable domain of TCR clone 132345 (TRBV11-2, TRBJ1-2)
CASSLGTANYGYTF

SEQ ID NO: 264691 - protein, 13 aa, Homo sapiens
  CDR3 for alpha chain variable domain of TCR clone 132346 (TRAV38-1, TRAJ42)
CARWGGSQGNLIF

SEQ ID NO: 264692 - protein, 17 aa, Homo sapiens
  CDR3 for beta chain variable domain of TCR clone 132346 (TRBV20-1, TRBJ2-1)
CSARDPLAAVWDNEQFF

SEQ ID NO: 264693 - protein, 13 aa, Homo sapiens
  CDR3 for alpha chain variable domain of TCR clone 132347 (TRAV36/DV7, TRAJ7)
CAVERYGNNRLAF

SEQ ID NO: 264694 - protein, 15 aa, Homo sapiens
  CDR3 for beta chain variable domain of TCR clone 132347 (TRBV7-2, TRBJ1-2)
CASSPRAGWSYGYTF

SEQ ID NO: 264695 - protein, 15 aa, Homo sapiens
  CDR3 for alpha chain variable domain of TCR clone 132348 (TRAV12-2, TRAJ43)
CAFDMRFGAGTRLTV

SEQ ID NO: 264696 - protein, 18 aa, Homo sapiens
  CDR3 for beta chain variable domain of TCR clone 132348 (TRBV20-1, TRBJ2-3)
CSASGLAGGLGTTDTQYF

SEQ ID NO: 264697 - protein, 13 aa, Homo sapiens
  CDR3 for alpha chain variable domain of TCR clone 132349 (TRAV35, TRAJ44)
CAGLSGTASKLTF

SEQ ID NO: 264698 - protein, 13 aa, Homo sapiens
  CDR3 for beta chain variable domain of TCR clone 132349 (TRBV7-9, TRBJ1-2)
CASSLKQNYGYTF

SEQ ID NO: 264699 - protein, 14 aa, Homo sapiens
  CDR3 for alpha chain variable domain of TCR clone 132350 (TRAV12-3, TRAJ10)
SHLPLTGGGNKLTF

SEQ ID NO: 264700 - protein, 14 aa, Homo sapiens
  CDR3 for beta chain variable domain of TCR clone 132350 (TRBV9, TRBJ2-1)
CASSVDPRGKEQFF

SEQ ID NO: 264701 - protein, 13 aa, Homo sapiens
  CDR3 for alpha chain variable domain of TCR clone 132351 (TRAV2, TRAJ47)
CAVDREYANKLVF

SEQ ID NO: 264702 - protein, 17 aa, Homo sapiens
  CDR3 for beta chain variable domain of TCR clone 132351 (TRBV15, TRBJ1-5)
CATSRVKGIYSNQPQHF

SEQ ID NO: 264703 - protein, 18 aa, Homo sapiens
  CDR3 for alpha chain variable domain of TCR clone 132352 (TRAV26-2, TRAJ45)
CILRVDKYSGGGADGLTF

SEQ ID NO: 264704 - protein, 13 aa, Homo sapiens
  CDR3 for beta chain variable domain of TCR clone 132352 (TRBV11-2, TRBJ2-5)
CASSFSSQETQYF

SEQ ID NO: 264705 - protein, 14 aa, Homo sapiens
  CDR3 for alpha chain variable domain of TCR clone 132353 (TRAV20, TRAJ42)
CAVQAGGSQGNLIF

SEQ ID NO: 264706 - protein, 15 aa, Homo sapiens
  CDR3 for beta chain variable domain of TCR clone 132353 (TRBV10-3, TRBJ2-3)
CAISLTSGGTDTQYF

SEQ ID NO: 264707 - protein, 15 aa, Homo sapiens
  CDR3 for alpha chain variable domain of TCR clone 132354 (TRAV26-1, TRAJ53)
CIVSLLAGSNYKLTF

SEQ ID NO: 264708 - protein, 16 aa, Homo sapiens
  CDR3 for beta chain variable domain of TCR clone 132354 (TRBV7-3, TRBJ2-3)
CASSLSGYRPEDTQYF

SEQ ID NO: 264709 - protein, 15 aa, Homo sapiens
  CDR3 for alpha chain variable domain of TCR clone 132355 (TRAV29/DV5, TRAJ24)
CAASGATDSWGKFQF

SEQ ID NO: 264710 - protein, 14 aa, Homo sapiens
  CDR3 for beta chain variable domain of TCR clone 132355 (TRBV5-1, TRBJ2-7)
CASSLVRGSGEQYF

SEQ ID NO: 264711 - protein, 13 aa, Homo sapiens
  CDR3 for alpha chain variable domain of TCR clone 132356 (TRAV4, TRAJ33)
CLVGDMNNYQLIW

SEQ ID NO: 264712 - protein, 16 aa, Homo sapiens
  CDR3 for beta chain variable domain of TCR clone 132356 (TRBV7-2, TRBJ2-6)
CAILSGVSSGANVLTF

SEQ ID NO: 264713 - protein, 13 aa, Homo sapiens
  CDR3 for alpha chain variable domain of TCR clone 132357 (TRAV12-3, TRAJ9)
CAMRNTGGFKTIF

SEQ ID NO: 264714 - protein, 14 aa, Homo sapiens
  CDR3 for beta chain variable domain of TCR clone 132357 (TRBV7-6, TRBJ2-5)
CASSSPSGSETQYF

SEQ ID NO: 264715 - protein, 15 aa, Homo sapiens
  CDR3 for alpha chain variable domain of TCR clone 132358 (TRAV21, TRAJ10)
CAVPLLTGGGNKLTF

SEQ ID NO: 264716 - protein, 14 aa, Homo sapiens
  CDR3 for beta chain variable domain of TCR clone 132358 (TRBV12-4, TRBJ1-1)
CASSLGTGGTEAFI

SEQ ID NO: 264717 - protein, 14 aa, Homo sapiens
  CDR3 for alpha chain variable domain of TCR clone 132359 (TRAV8-4, TRAJ9)
CAVRINTGGFKTFF

SEQ ID NO: 264718 - protein, 15 aa, Homo sapiens
  CDR3 for beta chain variable domain of TCR clone 132359 (TRBV10-2, TRBJ2-6)
CASSEQGTGANVLTF

SEQ ID NO: 264719 - protein, 17 aa, Homo sapiens
  CDR3 for alpha chain variable domain of TCR clone 132360 (TRAV3, TRAJ6)
CAVRDGPRAGGSYIPTF

SEQ ID NO: 264720 - protein, 12 aa, Homo sapiens
  CDR3 for beta chain variable domain of TCR clone 132360 (TRBV11-3, TRBJ2-2)
CASSLGGGELFF

SEQ ID NO: 264721 - protein, 13 aa, Homo sapiens
  CDR3 for alpha chain variable domain of TCR clone 132361 (TRAV3, TRAJ36)
CAVRDTGANNLFF

SEQ ID NO: 264722 - protein, 15 aa, Homo sapiens
  CDR3 for beta chain variable domain of TCR clone 132361 (TRBV24-1, TRBJ2-1)
CATSGSEGFYNEQFF

SEQ ID NO: 264723 - protein, 23 aa, Homo sapiens
  CDR3 for alpha chain variable domain of TCR clone 132362 (TRAV26-1, TRAJ38)
CIADNAGNNHIQNPDPAVYQLSD

SEQ ID NO: 264724 - protein, 13 aa, Homo sapiens
  CDR3 for beta chain variable domain of TCR clone 132362 (TRBV5-4, TRBJ1-1)
CASSVDLGTEAFF

SEQ ID NO: 264725 - protein, 15 aa, Homo sapiens
  CDR3 for alpha chain variable domain of TCR clone 132363 (TRAV20, TRAJ43)
CAVQAGKSSNNDMRF

SEQ ID NO: 264726 - protein, 13 aa, Homo sapiens
  CDR3 for beta chain variable domain of TCR clone 132363 (TRBV27, TRBJ1-1)
CASGLSIGAEAFF

SEQ ID NO: 264727 - protein, 14 aa, Homo sapiens
  CDR3 for alpha chain variable domain of TCR clone 132364 (TRAV13-1, TRAJ44)
CAAKATGTASKLTF

SEQ ID NO: 264728 - protein, 14 aa, Homo sapiens
  CDR3 for beta chain variable domain of TCR clone 132364 (TRBV7-9, TRBJ2-1)
CASSSMVGFGEQFF

SEQ ID NO: 264729 - protein, 14 aa, Homo sapiens
  CDR3 for alpha chain variable domain of TCR clone 132365 (TRAV12-1, TRAJ17)
CVVNYKAAGNKLTF

SEQ ID NO: 264730 - protein, 17 aa, Homo sapiens
  CDR3 for beta chain variable domain of TCR clone 132365 (TRBV20-1, TRBJ2-1)
CSASSSGLGDPTMSSSS

SEQ ID NO: 264731 - protein, 15 aa, Homo sapiens
  CDR3 for alpha chain variable domain of TCR clone 132366 (TRAV8-3, TRAJ45)
CASSCSGGGADGLTF

SEQ ID NO: 264732 - protein, 13 aa, Homo sapiens
  CDR3 for beta chain variable domain of TCR clone 132366 (TRBV10-3, TRBJ2-7)
CASKLAVNYGQYF

SEQ ID NO: 264733 - protein, 11 aa, Homo sapiens
  CDR3 for alpha chain variable domain of TCR clone 132367 (TRAV17, TRAJ9)
CATTGGFKTIF

SEQ ID NO: 264734 - protein, 14 aa, Homo sapiens
  CDR3 for beta chain variable domain of TCR clone 132367 (TRBV7-9, TRBJ2-2)
CASSGLADTGKLFF

SEQ ID NO: 264735 - protein, 16 aa, Homo sapiens
  CDR3 for alpha chain variable domain of TCR clone 132368 (TRAV17, TRAJ53)
CATDALSGGSNYKLTL

SEQ ID NO: 264736 - protein, 12 aa, Homo sapiens
  CDR3 for beta chain variable domain of TCR clone 132368 (TRBV5-1, TRBJ2-7)
CASSFRGYEQYF

SEQ ID NO: 264737 - protein, 13 aa, Homo sapiens
  CDR3 for alpha chain variable domain of TCR clone 132369 (TRAV2, TRAJ5)
CAVPYTGRRALTF

SEQ ID NO: 264738 - protein, 15 aa, Homo sapiens
  CDR3 for beta chain variable domain of TCR clone 132369 (TRBV7-2, TRBJ2-2)
CASSTRTGYTGELFF

SEQ ID NO: 264739 - protein, 14 aa, Homo sapiens
  CDR3 for alpha chain variable domain of TCR clone 132370 (TRAV17, TRAJ39)
CATDPVRAGNMLTF

SEQ ID NO: 264740 - protein, 15 aa, Homo sapiens
  CDR3 for beta chain variable domain of TCR clone 132370 (TRBV13, TRBJ1-5)
CASSFGQGGVQPQHC

SEQ ID NO: 264741 - protein, 12 aa, Homo sapiens
  CDR3 for alpha chain variable domain of TCR clone 132371 (TRAV1-1, TRAJ9)
CAVDTGGFKTIF

SEQ ID NO: 264742 - protein, 13 aa, Homo sapiens
  CDR3 for beta chain variable domain of TCR clone 132371 (TRBV20-1, TRBJ1-1)
CSARGGGNTEAFF

SEQ ID NO: 264743 - protein, 12 aa, Homo sapiens
  CDR3 for alpha chain variable domain of TCR clone 132372 (TRAV21, TRAJ31)
CVLAGNNARLMF

SEQ ID NO: 264744 - protein, 16 aa, Homo sapiens
  CDR3 for beta chain variable domain of TCR clone 132372 (TRBV27, TRBJ2-5)
CASGFGPGGTKETQYF

SEQ ID NO: 264745 - protein, 13 aa, Homo sapiens
  CDR3 for alpha chain variable domain of TCR clone 132373 (TRAV30, TRAJ24)
CGTVADSWGKLQF

SEQ ID NO: 264746 - protein, 15 aa, Homo sapiens
  CDR3 for beta chain variable domain of TCR clone 132373 (TRBV4-1, TRBJ2-1)
CASSQDPGNYNEQFF

SEQ ID NO: 264747 - protein, 13 aa, Homo sapiens
  CDR3 for alpha chain variable domain of TCR clone 132374 (TRAV2, TRAJ29)
CAVRNSGNTPLVF

SEQ ID NO: 264748 - protein, 17 aa, Homo sapiens
  CDR3 for beta chain variable domain of TCR clone 132374 (TRBV13, TRBJ2-3)
CASSLSRVAGGRNTQYF

SEQ ID NO: 264749 - protein, 13 aa, Homo sapiens
  CDR3 for alpha chain variable domain of TCR clone 132375 (TRAV27, TRAJ3)
ASLRGSCASKIIF

SEQ ID NO: 264750 - protein, 15 aa, Homo sapiens
  CDR3 for beta chain variable domain of TCR clone 132375 (TRBV28, TRBJ1-3)
CASSMGWASGNTIYF

SEQ ID NO: 264751 - protein, 13 aa, Homo sapiens
  CDR3 for alpha chain variable domain of TCR clone 132376 (TRAV6, TRAJ23)
CALDQNQGGKLIF

SEQ ID NO: 264752 - protein, 15 aa, Homo sapiens
  CDR3 for beta chain variable domain of TCR clone 132376 (TRBV28, TRBJ1-2)
CASSGSEQRVFGYTF

SEQ ID NO: 264753 - protein, 15 aa, Homo sapiens
  CDR3 for alpha chain variable domain of TCR clone 132377 (TRAV12-2, TRAJ53)
CAVDGGGGSNYKLTF

SEQ ID NO: 264754 - protein, 17 aa, Homo sapiens
  CDR3 for beta chain variable domain of TCR clone 132377 (TRBV7-3, TRBJ2-3)
CASSLMKRMRGADTQYF

SEQ ID NO: 264755 - protein, 14 aa, Homo sapiens
  CDR3 for alpha chain variable domain of TCR clone 132378 (TRAV8-3, TRAJ4)
CAVGAAGGYNKLIF

SEQ ID NO: 264756 - protein, 18 aa, Homo sapiens
  CDR3 for beta chain variable domain of TCR clone 132378 (TRBV11-2, TRBJ2-3)
CASSLGGASRGAPNTQYF

SEQ ID NO: 264757 - protein, 15 aa, Homo sapiens
  CDR3 for alpha chain variable domain of TCR clone 132379 (TRAV17, TRAJ37)
CATDHGSSNTGKLIF

SEQ ID NO: 264758 - protein, 14 aa, Homo sapiens
  CDR3 for beta chain variable domain of TCR clone 132379 (TRBV7-2, TRBJ2-3)
CASSQTSGADTQYF

SEQ ID NO: 264759 - protein, 17 aa, Homo sapiens
  CDR3 for alpha chain variable domain of TCR clone 132380 (TRAV35, TRAJ28)
CAGLRVYSGAGSYQLTF

SEQ ID NO: 264760 - protein, 15 aa, Homo sapiens
  CDR3 for beta chain variable domain of TCR clone 132380 (TRBV2, TRBJ1-2)
CASSEIGGANYGYTF

SEQ ID NO: 264761 - protein, 15 aa, Homo sapiens
  CDR3 for alpha chain variable domain of TCR clone 132381 (TRAV12-2, TRAJ13)
CAVNQPSGGYQKVTF

SEQ ID NO: 264762 - protein, 16 aa, Homo sapiens
  CDR3 for beta chain variable domain of TCR clone 132381 (TRBV10-2, TRBJ2-2)
CASSESRDRGSGELFF

SEQ ID NO: 264763 - protein, 17 aa, Homo sapiens
  CDR3 for alpha chain variable domain of TCR clone 132382 (TRAV3, TRAJ42)
CAVRDRDYGGSQGNLMF

SEQ ID NO: 264764 - protein, 15 aa, Homo sapiens
  CDR3 for beta chain variable domain of TCR clone 132382 (TRBV6-6, TRBJ2-7)
CASSYSYGGSYEQYF

SEQ ID NO: 264765 - protein, 15 aa, Homo sapiens
  CDR3 for alpha chain variable domain of TCR clone 132383 (TRAV12-2, TRAJ53)
CAVNGGGGSNYKLTF

SEQ ID NO: 264766 - protein, 16 aa, Homo sapiens
  CDR3 for beta chain variable domain of TCR clone 132383 (TRBV7-3, TRBJ2-3)
CASSLMKRMRSRYAVF

SEQ ID NO: 264767 - protein, 13 aa, Homo sapiens
  CDR3 for alpha chain variable domain of TCR clone 132384 (TRAV21, TRAJ20)
CAVGLRVDYKLSF

SEQ ID NO: 264768 - protein, 15 aa, Homo sapiens
  CDR3 for beta chain variable domain of TCR clone 132384 (TRBV2, TRBJ2-1)
CASSELAGSYNEQFF

SEQ ID NO: 264769 - protein, 15 aa, Homo sapiens
  CDR3 for alpha chain variable domain of TCR clone 132385 (TRAV17, TRAJ16)
CATALRFSDGQKLLF

SEQ ID NO: 264770 - protein, 15 aa, Homo sapiens
  CDR3 for beta chain variable domain of TCR clone 132385 (TRBV13, TRBJ1-5)
CASSFGQGGVKPQHF

SEQ ID NO: 264771 - protein, 14 aa, Homo sapiens
  CDR3 for alpha chain variable domain of TCR clone 132386 (TRAV34, TRAJ44)
CGADGTGTASKLTF

SEQ ID NO: 264772 - protein, 13 aa, Homo sapiens
  CDR3 for beta chain variable domain of TCR clone 132386 (TRBV7-2, TRBJ1-1)
CASSLTENTEAFF

SEQ ID NO: 264773 - protein, 15 aa, Homo sapiens
  CDR3 for alpha chain variable domain of TCR clone 132387 (TRAV8-3, TRAJ41)
CAVGSNSNSGYALNF

SEQ ID NO: 264774 - protein, 17 aa, Homo sapiens
  CDR3 for beta chain variable domain of TCR clone 132387 (TRBV25-1, TRBJ2-1)
CSSSAYGQGRGVYEQFF

SEQ ID NO: 264775 - protein, 16 aa, Homo sapiens
  CDR3 for alpha chain variable domain of TCR clone 132388 (TRAV30, TRAJ24)
CGTEIVDADSWGKFQF

SEQ ID NO: 264776 - protein, 17 aa, Homo sapiens
  CDR3 for beta chain variable domain of TCR clone 132388 (TRBV20-1, TRBJ2-2)
CSARDRTSGRHTGELFF

SEQ ID NO: 264777 - protein, 15 aa, Homo sapiens
  CDR3 for alpha chain variable domain of TCR clone 132389 (TRAV3, TRAJ5)
CAVRDLDTGRRALTF

SEQ ID NO: 264778 - protein, 14 aa, Homo sapiens
  CDR3 for beta chain variable domain of TCR clone 132389 (TRBV24-1, TRBJ1-1)
CATSIPRGDTEAFF

SEQ ID NO: 264779 - protein, 13 aa, Homo sapiens
  CDR3 for alpha chain variable domain of TCR clone 132390 (TRAV12-1, TRAJ33)
CGDAPDSNYQLIW

SEQ ID NO: 264780 - protein, 17 aa, Homo sapiens
  CDR3 for beta chain variable domain of TCR clone 132390 (TRBV11-2, TRBJ2-1)
CASSLYPPGVEYNEQFF

SEQ ID NO: 264781 - protein, 15 aa, Homo sapiens
  CDR3 for alpha chain variable domain of TCR clone 132391 (TRAV21, TRAJ24)
CAARSSTASWGKLQF

SEQ ID NO: 264782 - protein, 15 aa, Homo sapiens
  CDR3 for beta chain variable domain of TCR clone 132391 (TRBV5-1, TRBJ2-1)
CASSPPRAPYNEQFF

SEQ ID NO: 264783 - protein, 13 aa, Homo sapiens
  CDR3 for alpha chain variable domain of TCR clone 132392 (TRAV8-2, TRAJ29)
CALPGAGNTPLVF

SEQ ID NO: 264784 - protein, 16 aa, Homo sapiens
  CDR3 for beta chain variable domain of TCR clone 132392 (TRBV5-1, TRBJ2-5)
CASSSSGPGGAETQYF

SEQ ID NO: 264785 - protein, 14 aa, Homo sapiens
  CDR3 for alpha chain variable domain of TCR clone 132393 (TRAV12-3, TRAJ10)
SHLPLTGGGNKLTF

SEQ ID NO: 264786 - protein, 17 aa, Homo sapiens
  CDR3 for beta chain variable domain of TCR clone 132393 (TRBV7-3, TRBJ2-5)
CASSLGSGRSGSETQYF

SEQ ID NO: 264787 - protein, 14 aa, Homo sapiens
  CDR3 for alpha chain variable domain of TCR clone 132394 (TRAV14/DV4, TRAJ7)
CAMREAYGDNRLAF

SEQ ID NO: 264788 - protein, 15 aa, Homo sapiens
  CDR3 for beta chain variable domain of TCR clone 132394 (TRBV19, TRBJ2-1)
CASSINREPSHEQFF

SEQ ID NO: 264789 - protein, 17 aa, Homo sapiens
  CDR3 for alpha chain variable domain of TCR clone 132395 (TRAV26-1, TRAJ28)
CIVRVPDSGAGSYQLTF

SEQ ID NO: 264790 - protein, 17 aa, Homo sapiens
  CDR3 for beta chain variable domain of TCR clone 132395 (TRBV28, TRBJ2-7)
CASSPFPAGGKSYEQYF

SEQ ID NO: 264791 - protein, 12 aa, Homo sapiens
  CDR3 for alpha chain variable domain of TCR clone 132396 (TRAV1-1, TRAJ30)
CAVRGSDDKIIF

SEQ ID NO: 264792 - protein, 14 aa, Homo sapiens
  CDR3 for beta chain variable domain of TCR clone 132396 (TRBV6-1, TRBJ1-3)
CASVQGGGGNTIYF

SEQ ID NO: 264793 - protein, 13 aa, Homo sapiens
  CDR3 for alpha chain variable domain of TCR clone 132397 (TRAV3, TRAJ21)
CAVREPDFNKFYF

SEQ ID NO: 264794 - protein, 13 aa, Homo sapiens
  CDR3 for beta chain variable domain of TCR clone 132397 (TRBV9, TRBJ2-1)
CASSPSSGNEQFF

SEQ ID NO: 264795 - protein, 13 aa, Homo sapiens
  CDR3 for alpha chain variable domain of TCR clone 132398 (TRAV23/DV6, TRAJ27)
CAASKPMQANQPL

SEQ ID NO: 264796 - protein, 14 aa, Homo sapiens
  CDR3 for beta chain variable domain of TCR clone 132398 (TRBV5-4, TRBJ1-1)
CASSLDSRRDEAVF

SEQ ID NO: 264797 - protein, 12 aa, Homo sapiens
  CDR3 for alpha chain variable domain of TCR clone 132399 (TRAV1-1, TRAJ30)
CAVRGRDDKIIF

SEQ ID NO: 264798 - protein, 14 aa, Homo sapiens
  CDR3 for beta chain variable domain of TCR clone 132399 (TRBV12-5, TRBJ2-5)
CASGSRTHQETQYF

SEQ ID NO: 264799 - protein, 12 aa, Homo sapiens
  CDR3 for alpha chain variable domain of TCR clone 132400 (TRAV17, TRAJ30)
CATDARDDKIIF

SEQ ID NO: 264800 - protein, 16 aa, Homo sapiens
  CDR3 for beta chain variable domain of TCR clone 132400 (TRBV7-3, TRBJ2-1)
CASSLEGYRSYNEQFF

SEQ ID NO: 264801 - protein, 16 aa, Homo sapiens
  CDR3 for alpha chain variable domain of TCR clone 132401 (TRAV21, TRAJ37)
CAVRTAGSSNPGNLIF

SEQ ID NO: 264802 - protein, 13 aa, Homo sapiens
  CDR3 for beta chain variable domain of TCR clone 132401 (TRBV7-9, TRBJ2-5)
CASLPSGRETQYF

SEQ ID NO: 264803 - protein, 11 aa, Homo sapiens
  CDR3 for alpha chain variable domain of TCR clone 132402 (TRAV39, TRAJ49)
CAVDISPQFYF

SEQ ID NO: 264804 - protein, 11 aa, Homo sapiens
  CDR3 for beta chain variable domain of TCR clone 132402 (TRBV7-8, TRBJ2-7)
CASSLSLEQYF

SEQ ID NO: 264805 - protein, 12 aa, Homo sapiens
  CDR3 for alpha chain variable domain of TCR clone 132403 (TRAV21, TRAJ11)
CAATSGFSTLTF

SEQ ID NO: 264806 - protein, 14 aa, Homo sapiens
  CDR3 for beta chain variable domain of TCR clone 132403 (TRBV20-1, TRBJ2-7)
CSAPELAGVGEQYF

SEQ ID NO: 264807 - protein, 14 aa, Homo sapiens
  CDR3 for alpha chain variable domain of TCR clone 132404 (TRAV9-2, TRAJ36)
CALPWRTGANNLFF

SEQ ID NO: 264808 - protein, 14 aa, Homo sapiens
  CDR3 for beta chain variable domain of TCR clone 132404 (TRBV2, TRBJ1-2)
CAISELQVNYGYTF

SEQ ID NO: 264809 - protein, 12 aa, Homo sapiens
  CDR3 for alpha chain variable domain of TCR clone 132405 (TRAV12-3, TRAJ17)
CAMTLTGNKLTF

SEQ ID NO: 264810 - protein, 14 aa, Homo sapiens
  CDR3 for beta chain variable domain of TCR clone 132405 (TRBV28, TRBJ1-5)
CASSGQALYQPQHF

SEQ ID NO: 264811 - protein, 15 aa, Homo sapiens
  CDR3 for alpha chain variable domain of TCR clone 132406 (TRAV3, TRAJ22)
CAVRDRGGSARQLPF

SEQ ID NO: 264812 - protein, 16 aa, Homo sapiens
  CDR3 for beta chain variable domain of TCR clone 132406 (TRBV4-2, TRBJ2-4)
CASSQELRRAKNIQYF

SEQ ID NO: 264813 - protein, 11 aa, Homo sapiens
  CDR3 for alpha chain variable domain of TCR clone 132407 (TRAV3, TRAJ32)
NYGGATNKLIF

SEQ ID NO: 264814 - protein, 15 aa, Homo sapiens
  CDR3 for beta chain variable domain of TCR clone 132407 (TRBV25-1, TRBJ1-4)
CASSPGDSTNEKLFF

SEQ ID NO: 264815 - protein, 14 aa, Homo sapiens
  CDR3 for alpha chain variable domain of TCR clone 132408 (TRAV20, TRAJ44)
CAVQDTGTASKLTF

SEQ ID NO: 264816 - protein, 13 aa, Homo sapiens
  CDR3 for beta chain variable domain of TCR clone 132408 (TRBV29-1, TRBJ1-3)
CSAGTGRGNTIYV

SEQ ID NO: 264817 - protein, 10 aa, Homo sapiens
  CDR3 for alpha chain variable domain of TCR clone 132409 (TRAV1-2, TRAJ23)
CAGQGGKLIF

SEQ ID NO: 264818 - protein, 15 aa, Homo sapiens
  CDR3 for beta chain variable domain of TCR clone 132409 (TRBV20-1, TRBJ2-7)
CSARDRVSGMDEQYF

SEQ ID NO: 264819 - protein, 16 aa, Homo sapiens
  CDR3 for alpha chain variable domain of TCR clone 132410 (TRAV12-3, TRAJ53)
CAMSVGSGGSNYKLTS

SEQ ID NO: 264820 - protein, 13 aa, Homo sapiens
  CDR3 for beta chain variable domain of TCR clone 132410 (TRBV7-6, TRBJ1-2)
CASSLVADYGYTF

SEQ ID NO: 264821 - protein, 13 aa, Homo sapiens
  CDR3 for alpha chain variable domain of TCR clone 132411 (TRAV3, TRAJ27)
CAVRPLGAGKSTF

SEQ ID NO: 264822 - protein, 12 aa, Homo sapiens
  CDR3 for beta chain variable domain of TCR clone 132411 (TRBV19, TRBJ2-1)
CASSRQGAEQFF

SEQ ID NO: 264823 - protein, 11 aa, Homo sapiens
  CDR3 for alpha chain variable domain of TCR clone 132412 (TRAV3, TRAJ21)
CAVGNFNKFYF

SEQ ID NO: 264824 - protein, 14 aa, Homo sapiens
  CDR3 for beta chain variable domain of TCR clone 132412 (TRBV20-1, TRBJ2-1)
CSAQIGGSANEQFF

SEQ ID NO: 264825 - protein, 14 aa, Homo sapiens
  CDR3 for alpha chain variable domain of TCR clone 132413 (TRAV16, TRAJ37)
CALDISGNTVKLIF

SEQ ID NO: 264826 - protein, 14 aa, Homo sapiens
  CDR3 for beta chain variable domain of TCR clone 132413 (TRBV7-6, TRBJ2-7)
CASSFRQGADEQYF

SEQ ID NO: 264827 - protein, 15 aa, Homo sapiens
  CDR3 for alpha chain variable domain of TCR clone 132414 (TRAV10, TRAJ6)
CVVRPRTGGSYIPTF

SEQ ID NO: 264828 - protein, 17 aa, Homo sapiens
  CDR3 for beta chain variable domain of TCR clone 132414 (TRBV28, TRBJ2-5)
CASSTPEGDALQETQYF

SEQ ID NO: 264829 - protein, 15 aa, Homo sapiens
  CDR3 for alpha chain variable domain of TCR clone 132415 (TRAV26-1, TRAJ29)
CIVRVEGSGNTPLVF

SEQ ID NO: 264830 - protein, 16 aa, Homo sapiens
  CDR3 for beta chain variable domain of TCR clone 132415 (TRBV2, TRBJ1-5)
CASSESPQGLNQPQHF

SEQ ID NO: 264831 - protein, 16 aa, Homo sapiens
  CDR3 for alpha chain variable domain of TCR clone 132416 (TRAV30, TRAJ24)
CGTEIVDADSWGKFQF

SEQ ID NO: 264832 - protein, 18 aa, Homo sapiens
  CDR3 for beta chain variable domain of TCR clone 132416 (TRBV11-3, TRBJ2-3)
CASSLGGASRGAPNTQYF

SEQ ID NO: 264833 - protein, 16 aa, Homo sapiens
  CDR3 for alpha chain variable domain of TCR clone 132417 (TRAV30, TRAJ24)
CGTEIVDADSWGKFQV

SEQ ID NO: 264834 - protein, 15 aa, Homo sapiens
  CDR3 for beta chain variable domain of TCR clone 132417 (TRBV5-1, TRBJ1-1)
CASSLAPRGNTEAFF

SEQ ID NO: 264835 - protein, 18 aa, Homo sapiens
  CDR3 for alpha chain variable domain of TCR clone 132418 (TRAV21, TRAJ52)
CAVRPSPAGGTSYGKLTF

SEQ ID NO: 264836 - protein, 12 aa, Homo sapiens
  CDR3 for beta chain variable domain of TCR clone 132418 (TRBV2, TRBJ2-1)
CAKREGYNEQFF

SEQ ID NO: 264837 - protein, 19 aa, Homo sapiens
  CDR3 for alpha chain variable domain of TCR clone 132419 (TRAV2, TRAJ20)
ILQVREADAAVYRDCKLSF

SEQ ID NO: 264838 - protein, 12 aa, Homo sapiens
  CDR3 for beta chain variable domain of TCR clone 132419 (TRBV11-2, TRBJ2-2)
CASSLGGGELFF

SEQ ID NO: 264839 - protein, 13 aa, Homo sapiens
  CDR3 for alpha chain variable domain of TCR clone 132420 (TRAV12-2, TRAJ3)
CAFQYSNASKIIF

SEQ ID NO: 264840 - protein, 11 aa, Homo sapiens
  CDR3 for beta chain variable domain of TCR clone 132420 (TRBV20-1, TRBJ2-3)
CSGTSSTTQYF

SEQ ID NO: 264841 - protein, 12 aa, Homo sapiens
  CDR3 for alpha chain variable domain of TCR clone 132421 (TRAV23/DV6, TRAJ30)
CAASKGDDKIVF

SEQ ID NO: 264842 - protein, 15 aa, Homo sapiens
  CDR3 for beta chain variable domain of TCR clone 132421 (TRBV29-1, TRBJ2-1)
CSGRDRKSSYNEQFF

SEQ ID NO: 264843 - protein, 10 aa, Homo sapiens
  CDR3 for alpha chain variable domain of TCR clone 132422 (TRAV36/DV7, TRAJ48)
CAVGNEKLTF

SEQ ID NO: 264844 - protein, 13 aa, Homo sapiens
  CDR3 for beta chain variable domain of TCR clone 132422 (TRBV7-3, TRBJ1-1)
CASSQDWGAEAFF

SEQ ID NO: 264845 - protein, 15 aa, Homo sapiens
  CDR3 for alpha chain variable domain of TCR clone 132423 (TRAV27, TRAJ38)
CAARRNAGNNRKLIW

SEQ ID NO: 264846 - protein, 15 aa, Homo sapiens
  CDR3 for beta chain variable domain of TCR clone 132423 (TRBV7-3, TRBJ2-2)
CASSETGQGTGELFF

SEQ ID NO: 264847 - protein, 15 aa, Homo sapiens
  CDR3 for alpha chain variable domain of TCR clone 132424 (TRAV27, TRAJ38)
CAARRNAGNNRKLIW

SEQ ID NO: 264848 - protein, 13 aa, Homo sapiens
  CDR3 for beta chain variable domain of TCR clone 132424 (TRBV7-3, TRBJ2-1)
CASSLDSYNERFF

SEQ ID NO: 264849 - protein, 12 aa, Homo sapiens
  CDR3 for alpha chain variable domain of TCR clone 132425 (TRAV20, TRAJ49)
CAVNKDGNQFYF

SEQ ID NO: 264850 - protein, 13 aa, Homo sapiens
  CDR3 for beta chain variable domain of TCR clone 132425 (TRBV10-3, TRBJ2-5)
CAMTSGAGETQYF

SEQ ID NO: 264851 - protein, 12 aa, Homo sapiens
  CDR3 for alpha chain variable domain of TCR clone 132426 (TRAV21, TRAJ11)
CPATSGYSTLTF

SEQ ID NO: 264852 - protein, 14 aa, Homo sapiens
  CDR3 for beta chain variable domain of TCR clone 132426 (TRBV20-1, TRBJ2-7)
CSAPELAGVGEQYF

SEQ ID NO: 264853 - protein, 15 aa, Homo sapiens
  CDR3 for alpha chain variable domain of TCR clone 132427 (TRAV26-2, TRAJ39)
CSLRGNNNAGNMLTF

SEQ ID NO: 264854 - protein, 15 aa, Homo sapiens
  CDR3 for beta chain variable domain of TCR clone 132427 (TRBV5-4, TRBJ1-1)
CASSSLGCANTEAFF

SEQ ID NO: 264855 - protein, 11 aa, Homo sapiens
  CDR3 for alpha chain variable domain of TCR clone 132428 (TRAV4, TRAJ31)
CLVGDNARLMF

SEQ ID NO: 264856 - protein, 13 aa, Homo sapiens
  CDR3 for beta chain variable domain of TCR clone 132428 (TRBV12-4, TRBJ1-4)
CASAMGHNEKLFF

SEQ ID NO: 264857 - protein, 16 aa, Homo sapiens
  CDR3 for alpha chain variable domain of TCR clone 132429 (TRAV4, TRAJ18)
CCVLLIGGSPLGRLYF

SEQ ID NO: 264858 - protein, 12 aa, Homo sapiens
  CDR3 for beta chain variable domain of TCR clone 132429 (TRBV6-3, TRBJ2-7)
CASSLTPYEQYF

SEQ ID NO: 264859 - protein, 14 aa, Homo sapiens
  CDR3 for alpha chain variable domain of TCR clone 132430 (TRAV12-2, TRAJ44)
CAVNPAGTASKLTF

SEQ ID NO: 264860 - protein, 15 aa, Homo sapiens
  CDR3 for beta chain variable domain of TCR clone 132430 (TRBV5-1, TRBJ2-1)
CASSPPRAAYNEQFF

SEQ ID NO: 264861 - protein, 18 aa, Homo sapiens
  CDR3 for alpha chain variable domain of TCR clone 132431 (TRAV12-3, TRAJ52)
CAMSRTNAGGTSYGKLTF

SEQ ID NO: 264862 - protein, 13 aa, Homo sapiens
  CDR3 for beta chain variable domain of TCR clone 132431 (TRBV19, TRBJ1-2)
CASSVPGQDGYTF

SEQ ID NO: 264863 - protein, 17 aa, Homo sapiens
  CDR3 for alpha chain variable domain of TCR clone 132432 (TRAV2, TRAJ36)
CAVEYRGNWGKQPLLWD

SEQ ID NO: 264864 - protein, 14 aa, Homo sapiens
  CDR3 for beta chain variable domain of TCR clone 132432 (TRBV7-9, TRBJ2-5)
CASSLDTAQETQYF

SEQ ID NO: 264865 - protein, 14 aa, Homo sapiens
  CDR3 for alpha chain variable domain of TCR clone 132433 (TRAV12-3, TRAJ10)
SHLPLTGGGNKLTF

SEQ ID NO: 264866 - protein, 12 aa, Homo sapiens
  CDR3 for beta chain variable domain of TCR clone 132433 (TRBV28, TRBJ2-6)
CAIQAGANVLTF

SEQ ID NO: 264867 - protein, 14 aa, Homo sapiens
  CDR3 for alpha chain variable domain of TCR clone 132434 (TRAV1-2, TRAJ8)
CAVREDTGFQKLVF

SEQ ID NO: 264868 - protein, 14 aa, Homo sapiens
  CDR3 for beta chain variable domain of TCR clone 132434 (TRBV5-1, TRBJ2-3)
CASSLFGPTDTQYF

SEQ ID NO: 264869 - protein, 13 aa, Homo sapiens
  CDR3 for alpha chain variable domain of TCR clone 132435 (TRAV21, TRAJ57)
CAVTQGGSEKLVF

SEQ ID NO: 264870 - protein, 13 aa, Homo sapiens
  CDR3 for beta chain variable domain of TCR clone 132435 (TRBV9, TRBJ2-7)
CASSVAEYYEQYF

SEQ ID NO: 264871 - protein, 14 aa, Homo sapiens
  CDR3 for alpha chain variable domain of TCR clone 132436 (TRAV8-4, TRAJ9)
CAVRINTGGFKTIF

SEQ ID NO: 264872 - protein, 17 aa, Homo sapiens
  CDR3 for beta chain variable domain of TCR clone 132436 (TRBV13, TRBJ2-3)
CASSLSRVAGGRNTQYF

SEQ ID NO: 264873 - protein, 18 aa, Homo sapiens
  CDR3 for alpha chain variable domain of TCR clone 132437 (TRAV26-1, TRAJ23)
CIVRVGLEVWNQGGKLIF

SEQ ID NO: 264874 - protein, 16 aa, Homo sapiens
  CDR3 for beta chain variable domain of TCR clone 132437 (TRBV12-4, TRBJ2-5)
CASSFFVRGRLETQYF

SEQ ID NO: 264875 - protein, 14 aa, Homo sapiens
  CDR3 for alpha chain variable domain of TCR clone 132438 (TRAV1-2, TRAJ16)
CAVNRFSDGQKPLF

SEQ ID NO: 264876 - protein, 18 aa, Homo sapiens
  CDR3 for beta chain variable domain of TCR clone 132438 (TRBV20-1, TRBJ2-6)
CSAETTPTHGSGANVLTF

SEQ ID NO: 264877 - protein, 11 aa, Homo sapiens
  CDR3 for alpha chain variable domain of TCR clone 132439 (TRAV3, TRAJ21)
CAVGNFNKFYF

SEQ ID NO: 264878 - protein, 16 aa, Homo sapiens
  CDR3 for beta chain variable domain of TCR clone 132439 (TRBV19, TRBJ2-1)
CASSRAGPSAYNEQFF

SEQ ID NO: 264879 - protein, 15 aa, Homo sapiens
  CDR3 for alpha chain variable domain of TCR clone 132440 (TRAV21, TRAJ24)
CAARSSTDSWGKLQF

SEQ ID NO: 264880 - protein, 13 aa, Homo sapiens
  CDR3 for beta chain variable domain of TCR clone 132440 (TRBV12-5, TRBJ2-3)
CASGDRQSDTQYF

SEQ ID NO: 264881 - protein, 12 aa, Homo sapiens
  CDR3 for alpha chain variable domain of TCR clone 132441 (TRAV17, TRAJ12)
CATLRSSFKLIF

SEQ ID NO: 264882 - protein, 16 aa, Homo sapiens
  CDR3 for beta chain variable domain of TCR clone 132441 (TRBV28, TRBJ2-7)
CASSLFFETGGPEQYF

SEQ ID NO: 264883 - protein, 16 aa, Homo sapiens
  CDR3 for alpha chain variable domain of TCR clone 132442 (TRAV12-2, TRAJ6)
CAAPLAGSGGSYIPTF

SEQ ID NO: 264884 - protein, 10 aa, Homo sapiens
  CDR3 for beta chain variable domain of TCR clone 132442 (TRBV28, TRBJ1-2)
CASRSDRAVF

SEQ ID NO: 264885 - protein, 17 aa, Homo sapiens
  CDR3 for alpha chain variable domain of TCR clone 132443 (TRAV3, TRAJ6)
CAVRDGPRAGGSYIPTF

SEQ ID NO: 264886 - protein, 14 aa, Homo sapiens
  CDR3 for beta chain variable domain of TCR clone 132443 (TRBV7-2, TRBJ2-7)
CASSPKNSFYEQCF

SEQ ID NO: 264887 - protein, 13 aa, Homo sapiens
  CDR3 for alpha chain variable domain of TCR clone 132444 (TRAV8-3, TRAJ28)
CAVGAVGSYQLTF

SEQ ID NO: 264888 - protein, 18 aa, Homo sapiens
  CDR3 for beta chain variable domain of TCR clone 132444 (TRBV13, TRBJ2-4)
CAIIDQKRSVLRRRDPAL

SEQ ID NO: 264889 - protein, 13 aa, Homo sapiens
  CDR3 for alpha chain variable domain of TCR clone 132445 (TRAV8-3, TRAJ4)
WVFYSGGYNKLIF

SEQ ID NO: 264890 - protein, 15 aa, Homo sapiens
  CDR3 for beta chain variable domain of TCR clone 132445 (TRBV20-1, TRBJ2-7)
CSARDRVSGMDEQYF

SEQ ID NO: 264891 - protein, 12 aa, Homo sapiens
  CDR3 for alpha chain variable domain of TCR clone 132446 (TRAV13-2, TRAJ23)
CAERHRGGKLIF

SEQ ID NO: 264892 - protein, 14 aa, Homo sapiens
  CDR3 for beta chain variable domain of TCR clone 132446 (TRBV11-2, TRBJ1-2)
CASSLGTAKYGYTF

SEQ ID NO: 264893 - protein, 14 aa, Homo sapiens
  CDR3 for alpha chain variable domain of TCR clone 132447 (TRAV2, TRAJ37)
CAVDFTSNTGKLIF

SEQ ID NO: 264894 - protein, 14 aa, Homo sapiens
  CDR3 for beta chain variable domain of TCR clone 132447 (TRBV5-1, TRBJ2-5)
CASSFGDSQETQYF

SEQ ID NO: 264895 - protein, 11 aa, Homo sapiens
  CDR3 for alpha chain variable domain of TCR clone 132448 (TRAV1-2, TRAJ20)
CAVSNDYKLSF

SEQ ID NO: 264896 - protein, 16 aa, Homo sapiens
  CDR3 for beta chain variable domain of TCR clone 132448 (TRBV29-1, TRBJ2-6)
CSVEDITYSGADVLTF

SEQ ID NO: 264897 - protein, 14 aa, Homo sapiens
  CDR3 for alpha chain variable domain of TCR clone 132449 (TRAV2, TRAJ3)
CAVPPYSSASKIIF

SEQ ID NO: 264898 - protein, 11 aa, Homo sapiens
  CDR3 for beta chain variable domain of TCR clone 132449 (TRBV7-2, TRBJ2-3)
CASSLGDTQYF

SEQ ID NO: 264899 - protein, 12 aa, Homo sapiens
  CDR3 for alpha chain variable domain of TCR clone 132450 (TRAV13-1, TRAJ53)
AASGGSNYKLTF

SEQ ID NO: 264900 - protein, 16 aa, Homo sapiens
  CDR3 for beta chain variable domain of TCR clone 132450 (TRBV28, TRBJ2-6)
CACSNRRGSGANVLTF

SEQ ID NO: 264901 - protein, 14 aa, Homo sapiens
  CDR3 for alpha chain variable domain of TCR clone 132451 (TRAV1-1, TRAJ27)
CAVIYNTNAGKSTF

SEQ ID NO: 264902 - protein, 15 aa, Homo sapiens
  CDR3 for beta chain variable domain of TCR clone 132451 (TRBV7-2, TRBJ2-1)
CASSSGLSGGNEQFF

SEQ ID NO: 264903 - protein, 15 aa, Homo sapiens
  CDR3 for alpha chain variable domain of TCR clone 132452 (TRAV17, TRAJ57)
CATGPSHGGSEKLVF

SEQ ID NO: 264904 - protein, 16 aa, Homo sapiens
  CDR3 for beta chain variable domain of TCR clone 132452 (TRBV12-4, TRBJ1-5)
CASSRPVGGSNQPQRF

SEQ ID NO: 264905 - protein, 15 aa, Homo sapiens
  CDR3 for alpha chain variable domain of TCR clone 132453 (TRAV26-2, TRAJ26)
CILRDFDNYGQNFVF

SEQ ID NO: 264906 - protein, 14 aa, Homo sapiens
  CDR3 for beta chain variable domain of TCR clone 132453 (TRBV29-1, TRBJ2-5)
CSFWTAYAGETQYF

SEQ ID NO: 264907 - protein, 14 aa, Homo sapiens
  CDR3 for alpha chain variable domain of TCR clone 132454 (TRAV13-1, TRAJ48)
CAASRSFGNEKLTF

SEQ ID NO: 264908 - protein, 15 aa, Homo sapiens
  CDR3 for beta chain variable domain of TCR clone 132454 (TRBV7-2, TRBJ1-2)
CASSPRAGWNYGYTF

SEQ ID NO: 264909 - protein, 15 aa, Homo sapiens
  CDR3 for alpha chain variable domain of TCR clone 132455 (TRAV3, TRAJ3)
CAVRDGHSSASKIVF

SEQ ID NO: 264910 - protein, 17 aa, Homo sapiens
  CDR3 for beta chain variable domain of TCR clone 132455 (TRBV25-1, TRBJ2-7)
CASSDARVVFSSYEQYF

SEQ ID NO: 264911 - protein, 13 aa, Homo sapiens
  CDR3 for alpha chain variable domain of TCR clone 132456 (TRAV3, TRAJ16)
CAVRDRNGQKLLF

SEQ ID NO: 264912 - protein, 15 aa, Homo sapiens
  CDR3 for beta chain variable domain of TCR clone 132456 (TRBV5-1, TRBJ2-1)
GASSPPRAPYNEQFF

SEQ ID NO: 264913 - protein, 14 aa, Homo sapiens
  CDR3 for alpha chain variable domain of TCR clone 132457 (TRAV27, TRAJ23)
CAGLSYNQGGKLIF

SEQ ID NO: 264914 - protein, 14 aa, Homo sapiens
  CDR3 for beta chain variable domain of TCR clone 132457 (TRBV27, TRBJ1-1)
CASSLLSGLSEAFF

SEQ ID NO: 264915 - protein, 18 aa, Homo sapiens
  CDR3 for alpha chain variable domain of TCR clone 132458 (TRAV13-1, TRAJ52)
CAAKNPNAGGTSYGKLTF

SEQ ID NO: 264916 - protein, 14 aa, Homo sapiens
  CDR3 for beta chain variable domain of TCR clone 132458 (TRBV19, TRBJ2-2)
CASSTLHRSGELFF

SEQ ID NO: 264917 - protein, 16 aa, Homo sapiens
  CDR3 for alpha chain variable domain of TCR clone 132459 (TRAV3, TRAJ10)
CAVRDMRAGGGNKRTF

SEQ ID NO: 264918 - protein, 14 aa, Homo sapiens
  CDR3 for beta chain variable domain of TCR clone 132459 (TRBV7-2, TRBJ1-1)
CASSFLTGTTEAFF

SEQ ID NO: 264919 - protein, 15 aa, Homo sapiens
  CDR3 for alpha chain variable domain of TCR clone 132460 (TRAV20, TRAJ4)
CAVTMFSGGYNKLIF

SEQ ID NO: 264920 - protein, 19 aa, Homo sapiens
  CDR3 for beta chain variable domain of TCR clone 132460 (TRBV19, TRBJ2-5)
CASSIGQVTDFFLGETQYF

SEQ ID NO: 264921 - protein, 14 aa, Homo sapiens
  CDR3 for alpha chain variable domain of TCR clone 132461 (TRAV8-3, TRAJ15)
CAVGRHQAGTALIF

SEQ ID NO: 264922 - protein, 13 aa, Homo sapiens
  CDR3 for beta chain variable domain of TCR clone 132461 (TRBV9, TRBJ2-7)
CAGSASDSYEQYF

SEQ ID NO: 264923 - protein, 14 aa, Homo sapiens
  CDR3 for alpha chain variable domain of TCR clone 132462 (TRAV26-1, TRAJ38)
CIADNAGNNRKLIC

SEQ ID NO: 264924 - protein, 13 aa, Homo sapiens
  CDR3 for beta chain variable domain of TCR clone 132462 (TRBV20-1, TRBJ2-2)
CSASAAGTGELFF

SEQ ID NO: 264925 - protein, 14 aa, Homo sapiens
  CDR3 for alpha chain variable domain of TCR clone 132463 (TRAV1-2, TRAJ8)
CSVREDTGFQKLVF

SEQ ID NO: 264926 - protein, 15 aa, Homo sapiens
  CDR3 for beta chain variable domain of TCR clone 132463 (TRBV20-1, TRBJ2-7)
CSARDRVSGMDEQYF

SEQ ID NO: 264927 - protein, 11 aa, Homo sapiens
  CDR3 for alpha chain variable domain of TCR clone 132464 (TRAV3, TRAJ21)
CAVGNFNKFYF

SEQ ID NO: 264928 - protein, 14 aa, Homo sapiens
  CDR3 for beta chain variable domain of TCR clone 132464 (TRBV7-9, TRBJ2-2)
CASSLVQDAGELFF

SEQ ID NO: 264929 - protein, 14 aa, Homo sapiens
  CDR3 for alpha chain variable domain of TCR clone 132465 (TRAV26-1, TRAJ38)
CIADNAGNNRKLIW

SEQ ID NO: 264930 - protein, 13 aa, Homo sapiens
  CDR3 for beta chain variable domain of TCR clone 132465 (TRBV11-3, TRBJ1-1)
CASTGSLNTEAFF

SEQ ID NO: 264931 - protein, 15 aa, Homo sapiens
  CDR3 for alpha chain variable domain of TCR clone 132466 (TRAV8-3, TRAJ45)
CASSYSGGGADGLTF

SEQ ID NO: 264932 - protein, 12 aa, Homo sapiens
  CDR3 for beta chain variable domain of TCR clone 132466 (TRBV12-4, TRBJ2-7)
CASSLGGYEQYL

SEQ ID NO: 264933 - protein, 18 aa, Homo sapiens
  CDR3 for alpha chain variable domain of TCR clone 132467 (TRAV29/DV5, TRAJ52)
CAAGFRDAGGTSYGKLTF

SEQ ID NO: 264934 - protein, 15 aa, Homo sapiens
  CDR3 for beta chain variable domain of TCR clone 132467 (TRBV7-3, TRBJ2-2)
CSSLKRGTLSGELFF

SEQ ID NO: 264935 - protein, 12 aa, Homo sapiens
  CDR3 for alpha chain variable domain of TCR clone 132468 (TRAV12-3, TRAJ21)
CAMFNNLNKFYF

SEQ ID NO: 264936 - protein, 14 aa, Homo sapiens
  CDR3 for beta chain variable domain of TCR clone 132468 (TRBV28, TRBJ2-1)
CASSIQGTVGEQFF

SEQ ID NO: 264937 - protein, 14 aa, Homo sapiens
  CDR3 for alpha chain variable domain of TCR clone 132469 (TRAV13-1, TRAJ28)
CAASKGAGSYQPTF

SEQ ID NO: 264938 - protein, 16 aa, Homo sapiens
  CDR3 for beta chain variable domain of TCR clone 132469 (TRBV4-2, TRBJ2-3)
CASSQDGARGGVKQYF

SEQ ID NO: 264939 - protein, 16 aa, Homo sapiens
  CDR3 for alpha chain variable domain of TCR clone 132470 (TRAV3, TRAJ10)
CAVRDMRAGGGNKLTF

SEQ ID NO: 264940 - protein, 15 aa, Homo sapiens
  CDR3 for beta chain variable domain of TCR clone 132470 (TRBV11-2, TRBJ1-6)
CASTGFGTAVSPLYF

SEQ ID NO: 264941 - protein, 13 aa, Homo sapiens
  CDR3 for alpha chain variable domain of TCR clone 132471 (TRAV17, TRAJ5)
CALRGTGRRALTF

SEQ ID NO: 264942 - protein, 15 aa, Homo sapiens
  CDR3 for beta chain variable domain of TCR clone 132471 (TRBV28, TRBJ1-3)
CASSMGWASGNTIYF

SEQ ID NO: 264943 - protein, 13 aa, Homo sapiens
  CDR3 for alpha chain variable domain of TCR clone 132472 (TRAV36/DV7, TRAJ37)
CAVFSSNTGKLIF

SEQ ID NO: 264944 - protein, 13 aa, Homo sapiens
  CDR3 for beta chain variable domain of TCR clone 132472 (TRBV10-3, TRBJ1-2)
CAISERDSYGYTF

SEQ ID NO: 264945 - protein, 13 aa, Homo sapiens
  CDR3 for alpha chain variable domain of TCR clone 132473 (TRAV13-1, TRAJ39)
CAASIWAGNMLTF

SEQ ID NO: 264946 - protein, 15 aa, Homo sapiens
  CDR3 for beta chain variable domain of TCR clone 132473 (TRBV7-9, TRBJ1-1)
CAGSLLEQGGTEAFF

SEQ ID NO: 264947 - protein, 14 aa, Homo sapiens
  CDR3 for alpha chain variable domain of TCR clone 132474 (TRAV1-2, TRAJ27)
CAVRYNTNAGKSTF

SEQ ID NO: 264948 - protein, 11 aa, Homo sapiens
  CDR3 for beta chain variable domain of TCR clone 132474 (TRBV12-4, TRBJ2-3)
CASTATDTQYF

SEQ ID NO: 264949 - protein, 14 aa, Homo sapiens
  CDR3 for alpha chain variable domain of TCR clone 132475 (TRAV3, TRAJ6)
CAVRDPWGSYIPTF

SEQ ID NO: 264950 - protein, 15 aa, Homo sapiens
  CDR3 for beta chain variable domain of TCR clone 132475 (TRBV12-4, TRBJ1-3)
CASSFQGTFGNTIYF

SEQ ID NO: 264951 - protein, 14 aa, Homo sapiens
  CDR3 for alpha chain variable domain of TCR clone 132476 (TRAV1-2, TRAJ16)
CAVNRVSDGQKLLF

SEQ ID NO: 264952 - protein, 16 aa, Homo sapiens
  CDR3 for beta chain variable domain of TCR clone 132476 (TRBV29-1, TRBJ2-7)
CSVEVVGTSGSYEQYF

SEQ ID NO: 264953 - protein, 13 aa, Homo sapiens
  CDR3 for alpha chain variable domain of TCR clone 132477 (TRAV8-3, TRAJ30)
CAVGGWRDDKIIF

SEQ ID NO: 264954 - protein, 16 aa, Homo sapiens
  CDR3 for beta chain variable domain of TCR clone 132477 (TRBV5-4, TRBJ2-3)
CASQQPGAGGADTQYF

SEQ ID NO: 264955 - protein, 15 aa, Homo sapiens
  CDR3 for alpha chain variable domain of TCR clone 132478 (TRAV21, TRAJ10)
CAVPLLTGGGNKLTF

SEQ ID NO: 264956 - protein, 14 aa, Homo sapiens
  CDR3 for beta chain variable domain of TCR clone 132478 (TRBV7-2, TRBJ1-2)
CASSLGGQGYGYTF

SEQ ID NO: 264957 - protein, 15 aa, Homo sapiens
  CDR3 for alpha chain variable domain of TCR clone 132479 (TRAV17, TRAJ35)
CATAFVIGFGHVLHC

SEQ ID NO: 264958 - protein, 16 aa, Homo sapiens
  CDR3 for beta chain variable domain of TCR clone 132479 (TRBV11-2, TRBJ2-7)
CASSPLAGGPRYEQYF

SEQ ID NO: 264959 - protein, 13 aa, Homo sapiens
  CDR3 for alpha chain variable domain of TCR clone 132480 (TRAV13-2, TRAJ13)
CAERPGGYKKVTF

SEQ ID NO: 264960 - protein, 14 aa, Homo sapiens
  CDR3 for beta chain variable domain of TCR clone 132480 (TRBV23-1, TRBJ2-5)
CASSFLRSQETQYF

SEQ ID NO: 264961 - protein, 13 aa, Homo sapiens
  CDR3 for alpha chain variable domain of TCR clone 132481 (TRAV21, TRAJ56)
CAVRLGANSKLTF

SEQ ID NO: 264962 - protein, 12 aa, Homo sapiens
  CDR3 for beta chain variable domain of TCR clone 132481 (TRBV12-4, TRBJ2-3)
CASSSATDTQYF

SEQ ID NO: 264963 - protein, 15 aa, Homo sapiens
  CDR3 for alpha chain variable domain of TCR clone 132482 (TRAV25, TRAJ53)
CPTSNSGGSNYKLTF

SEQ ID NO: 264964 - protein, 14 aa, Homo sapiens
  CDR3 for beta chain variable domain of TCR clone 132482 (TRBV4-1, TRBJ2-2)
CASSQAVNTGELFF

SEQ ID NO: 264965 - protein, 16 aa, Homo sapiens
  CDR3 for alpha chain variable domain of TCR clone 132483 (TRAV21, TRAJ52)
CAVTNAGGTSYGKLTF

SEQ ID NO: 264966 - protein, 16 aa, Homo sapiens
  CDR3 for beta chain variable domain of TCR clone 132483 (TRBV15, TRBJ1-2)
CATSRGPRTGGGGYTF

SEQ ID NO: 264967 - protein, 12 aa, Homo sapiens
  CDR3 for alpha chain variable domain of TCR clone 132484 (TRAV13-2, TRAJ8)
CAPWLGFQKLVF

SEQ ID NO: 264968 - protein, 14 aa, Homo sapiens
  CDR3 for beta chain variable domain of TCR clone 132484 (TRBV20-1, TRBJ2-7)
CSAKRGRSSYEQYF

SEQ ID NO: 264969 - protein, 15 aa, Homo sapiens
  CDR3 for alpha chain variable domain of TCR clone 132485 (TRAV4, TRAJ28)
CLFIWGWELPTHFRE

SEQ ID NO: 264970 - protein, 14 aa, Homo sapiens
  CDR3 for beta chain variable domain of TCR clone 132485 (TRBV7-9, TRBJ2-5)
CASSLDTAQETQYF

SEQ ID NO: 264971 - protein, 12 aa, Homo sapiens
  CDR3 for alpha chain variable domain of TCR clone 132486 (TRAV13-1, TRAJ48)
CAENFGNEKLTF

SEQ ID NO: 264972 - protein, 13 aa, Homo sapiens
  CDR3 for beta chain variable domain of TCR clone 132486 (TRBV7-3, TRBJ1-1)
CASSQDWGAEAFF

SEQ ID NO: 264973 - protein, 13 aa, Homo sapiens
  CDR3 for alpha chain variable domain of TCR clone 132487 (TRAV13-2, TRAJ53)
CAENMGSNYKLTF

SEQ ID NO: 264974 - protein, 13 aa, Homo sapiens
  CDR3 for beta chain variable domain of TCR clone 132487 (TRBV4-1, TRBJ2-2)
CPSSQENTGELFF

SEQ ID NO: 264975 - protein, 14 aa, Homo sapiens
  CDR3 for alpha chain variable domain of TCR clone 132488 (TRAV20, TRAJ10)
CAVRVEGGGNKLTF

SEQ ID NO: 264976 - protein, 18 aa, Homo sapiens
  CDR3 for beta chain variable domain of TCR clone 132488 (TRBV24-1, TRBJ2-1)
CATSDLRFLGRGVHEQFF

SEQ ID NO: 264977 - protein, 13 aa, Homo sapiens
  CDR3 for alpha chain variable domain of TCR clone 132489 (TRAV25, TRAJ54)
CAGTIQGAQKLVF

SEQ ID NO: 264978 - protein, 17 aa, Homo sapiens
  CDR3 for beta chain variable domain of TCR clone 132489 (TRBV19, TRBJ1-5)
CASSILTGENQPSILVM

SEQ ID NO: 264979 - protein, 17 aa, Homo sapiens
  CDR3 for alpha chain variable domain of TCR clone 132490 (TRAV23/DV6, TRAJ58)
CAARLLSGETSGSRLTF

SEQ ID NO: 264980 - protein, 14 aa, Homo sapiens
  CDR3 for beta chain variable domain of TCR clone 132490 (TRBV2, TRBJ2-7)
CASSLTSGGYEQYF

SEQ ID NO: 264981 - protein, 14 aa, Homo sapiens
  CDR3 for alpha chain variable domain of TCR clone 132491 (TRAV21, TRAJ45)
RAVHSGGGADGLTF

SEQ ID NO: 264982 - protein, 14 aa, Homo sapiens
  CDR3 for beta chain variable domain of TCR clone 132491 (TRBV20-1, TRBJ2-1)
CSARRLAEANEQFF

SEQ ID NO: 264983 - protein, 13 aa, Homo sapiens
  CDR3 for alpha chain variable domain of TCR clone 132492 (TRAV22, TRAJ26)
CAVEHNYGQNFVF

SEQ ID NO: 264984 - protein, 16 aa, Homo sapiens
  CDR3 for beta chain variable domain of TCR clone 132492 (TRBV7-2, TRBJ2-6)
CASSERRASGANVLIF

SEQ ID NO: 264985 - protein, 17 aa, Homo sapiens
  CDR3 for alpha chain variable domain of TCR clone 132493 (TRAV36/DV7, TRAJ52)
CAVTQRAGGTSYGKLTF

SEQ ID NO: 264986 - protein, 15 aa, Homo sapiens
  CDR3 for beta chain variable domain of TCR clone 132493 (TRBV6-5, TRBJ1-2)
CASSYSQAFNYGYTF

SEQ ID NO: 264987 - protein, 11 aa, Homo sapiens
  CDR3 for alpha chain variable domain of TCR clone 132494 (TRAV1-2, TRAJ20)
CAVSNDYKLSF

SEQ ID NO: 264988 - protein, 13 aa, Homo sapiens
  CDR3 for beta chain variable domain of TCR clone 132494 (TRBV6-1, TRBJ1-1)
CASSRQGNTEAFF

SEQ ID NO: 264989 - protein, 15 aa, Homo sapiens
  CDR3 for alpha chain variable domain of TCR clone 132495 (TRAV8-3, TRAJ45)
CASSYSGGGADGLTF

SEQ ID NO: 264990 - protein, 17 aa, Homo sapiens
  CDR3 for beta chain variable domain of TCR clone 132495 (TRBV7-8, TRBJ1-2)
SASSLRPLQGHLYGYTF

SEQ ID NO: 264991 - protein, 16 aa, Homo sapiens
  CDR3 for alpha chain variable domain of TCR clone 132496 (TRAV30, TRAJ24)
CGTEIVDADSWGKFKF

SEQ ID NO: 264992 - protein, 16 aa, Homo sapiens
  CDR3 for beta chain variable domain of TCR clone 132496 (TRBV20-1, TRBJ1-2)
CSASMGQGVANYGYTF

SEQ ID NO: 264993 - protein, 14 aa, Homo sapiens
  CDR3 for alpha chain variable domain of TCR clone 132497 (TRAV12-3, TRAJ29)
CAMSPYSGNTPLVF

SEQ ID NO: 264994 - protein, 13 aa, Homo sapiens
  CDR3 for beta chain variable domain of TCR clone 132497 (TRBV7-3, TRBJ1-1)
CASSQDWGAEAFF

SEQ ID NO: 264995 - protein, 11 aa, Homo sapiens
  CDR3 for alpha chain variable domain of TCR clone 132498 (TRAV8-3, TRAJ18)
CSVGGRQRLNP

SEQ ID NO: 264996 - protein, 12 aa, Homo sapiens
  CDR3 for beta chain variable domain of TCR clone 132498 (TRBV28, TRBJ2-6)
CAIQAGANVLTF

SEQ ID NO: 264997 - protein, 14 aa, Homo sapiens
  CDR3 for alpha chain variable domain of TCR clone 132499 (TRAV20, TRAJ20)
CAVRRGYNDYKLSL

SEQ ID NO: 264998 - protein, 13 aa, Homo sapiens
  CDR3 for beta chain variable domain of TCR clone 132499 (TRBV19, TRBJ2-5)
CASSETAPETQYF

SEQ ID NO: 264999 - protein, 17 aa, Homo sapiens
  CDR3 for alpha chain variable domain of TCR clone 132500 (TRAV17, TRAJ52)
CATERPSGGTSYGKLAF

SEQ ID NO: 265000 - protein, 13 aa, Homo sapiens
  CDR3 for beta chain variable domain of TCR clone 132500 (TRBV7-9, TRBJ1-2)
CASSLKQNYGYTF

SEQ ID NO: 265001 - protein, 12 aa, Homo sapiens
  CDR3 for alpha chain variable domain of TCR clone 132501 (TRAV13-1, TRAJ5)
CAAKAGRRALTF

SEQ ID NO: 265002 - protein, 15 aa, Homo sapiens
  CDR3 for beta chain variable domain of TCR clone 132501 (TRBV18, TRBJ1-2)
CASSLGGLFNYGYTF

SEQ ID NO: 265003 - protein, 13 aa, Homo sapiens
  CDR3 for alpha chain variable domain of TCR clone 132502 (TRAV13-1, TRAJ11)
CAAVLAGYSTLTF

SEQ ID NO: 265004 - protein, 17 aa, Homo sapiens
  CDR3 for beta chain variable domain of TCR clone 132502 (TRBV25-1, TRBJ2-7)
CASSDARVVFSSYEQFF

SEQ ID NO: 265005 - protein, 13 aa, Homo sapiens
  CDR3 for alpha chain variable domain of TCR clone 132503 (TRAV21, TRAJ10)
CAVPTGGGNKLTF

SEQ ID NO: 265006 - protein, 22 aa, Homo sapiens
  CDR3 for beta chain variable domain of TCR clone 132503 (TRBV19, TRBJ2-1)
CASSVRDRVTGTSGRIYNEQFL

SEQ ID NO: 265007 - protein, 14 aa, Homo sapiens
  CDR3 for alpha chain variable domain of TCR clone 132504 (TRAV1-2, TRAJ16)
CAVNRFSDGQKLLF

SEQ ID NO: 265008 - protein, 14 aa, Homo sapiens
  CDR3 for beta chain variable domain of TCR clone 132504 (TRBV12-5, TRBJ2-5)
CASGSRAHQETQYF

SEQ ID NO: 265009 - protein, 12 aa, Homo sapiens
  CDR3 for alpha chain variable domain of TCR clone 132505 (TRAV2, TRAJ31)
CAVEDNNARLMF

SEQ ID NO: 265010 - protein, 14 aa, Homo sapiens
  CDR3 for beta chain variable domain of TCR clone 132505 (TRBV4-1, TRBJ2-2)
CASSQAVNTGELFF

SEQ ID NO: 265011 - protein, 14 aa, Homo sapiens
  CDR3 for alpha chain variable domain of TCR clone 132506 (TRAV12-3, TRAJ10)
SHLPLTGGGNKLTF

SEQ ID NO: 265012 - protein, 15 aa, Homo sapiens
  CDR3 for beta chain variable domain of TCR clone 132506 (TRBV7-2, TRBJ2-1)
CASSLVGSSYNEQFF

SEQ ID NO: 265013 - protein, 20 aa, Homo sapiens
  CDR3 for alpha chain variable domain of TCR clone 132507 (TRAV26-1, TRAJ42)
CCVLLHRQTYYGGSQGNLIF

SEQ ID NO: 265014 - protein, 17 aa, Homo sapiens
  CDR3 for beta chain variable domain of TCR clone 132507 (TRBV28, TRBJ2-5)
CASSTPEGDALQETQYF

SEQ ID NO: 265015 - protein, 11 aa, Homo sapiens
  CDR3 for alpha chain variable domain of TCR clone 132508 (TRAV23/DV6, TRAJ58)
CAARLLRGETG

SEQ ID NO: 265016 - protein, 14 aa, Homo sapiens
  CDR3 for beta chain variable domain of TCR clone 132508 (TRBV7-3, TRBJ2-1)
CASSLAGGTNEQFF

SEQ ID NO: 265017 - protein, 10 aa, Homo sapiens
  CDR3 for alpha chain variable domain of TCR clone 132509 (TRAV26-1, TRAJ22)
CIAGSRQLTF

SEQ ID NO: 265018 - protein, 15 aa, Homo sapiens
  CDR3 for beta chain variable domain of TCR clone 132509 (TRBV11-3, TRBJ2-3)
CASLKDGREGDTQYF

SEQ ID NO: 265019 - protein, 18 aa, Homo sapiens
  CDR3 for alpha chain variable domain of TCR clone 132510 (TRAV21, TRAJ52)
CAVRPSPAGGTSYGKLTF

SEQ ID NO: 265020 - protein, 14 aa, Homo sapiens
  CDR3 for beta chain variable domain of TCR clone 132510 (TRBV2, TRBJ1-5)
CASSGTGFNQPQHF

SEQ ID NO: 265021 - protein, 17 aa, Homo sapiens
  CDR3 for alpha chain variable domain of TCR clone 132511 (TRAV3, TRAJ28)
CAVREAYSGAGSYQLTF

SEQ ID NO: 265022 - protein, 17 aa, Homo sapiens
  CDR3 for beta chain variable domain of TCR clone 132511 (TRBV20-1, TRBJ2-1)
CSASSSGLAGSYNEQFF

SEQ ID NO: 265023 - protein, 15 aa, Homo sapiens
  CDR3 for alpha chain variable domain of TCR clone 132512 (TRAV21, TRAJ53)
CATLNSGGSNYKMTF

SEQ ID NO: 265024 - protein, 14 aa, Homo sapiens
  CDR3 for beta chain variable domain of TCR clone 132512 (TRBV7-2, TRBJ2-7)
CASRSQGAAYEQYF

SEQ ID NO: 265025 - protein, 13 aa, Homo sapiens
  CDR3 for alpha chain variable domain of TCR clone 132513 (TRAV20, TRAJ48)
CAVQGVGNEKLTF

SEQ ID NO: 265026 - protein, 19 aa, Homo sapiens
  CDR3 for beta chain variable domain of TCR clone 132513 (TRBV2, TRBJ2-2)
CAGSQPGLAGGGNTGELFF

SEQ ID NO: 265027 - protein, 12 aa, Homo sapiens
  CDR3 for alpha chain variable domain of TCR clone 132514 (TRAV12-3, TRAJ17)
CAMTLTGNKLTF

SEQ ID NO: 265028 - protein, 13 aa, Homo sapiens
  CDR3 for beta chain variable domain of TCR clone 132514 (TRBV6-6, TRBJ2-7)
CASSPKHLAEQYF

SEQ ID NO: 265029 - protein, 12 aa, Homo sapiens
  CDR3 for alpha chain variable domain of TCR clone 132515 (TRAV26-1, TRAJ13)
CIVSRGYQKVTF

SEQ ID NO: 265030 - protein, 14 aa, Homo sapiens
  CDR3 for beta chain variable domain of TCR clone 132515 (TRBV7-2, TRBJ2-7)
CASSPKTSCYEQYF

SEQ ID NO: 265031 - protein, 14 aa, Homo sapiens
  CDR3 for alpha chain variable domain of TCR clone 132516 (TRAV12-3, TRAJ10)
SHLPLTGGGNKLTF

SEQ ID NO: 265032 - protein, 13 aa, Homo sapiens
  CDR3 for beta chain variable domain of TCR clone 132516 (TRBV7-9, TRBJ2-3)
CASSPGSADTQYF

SEQ ID NO: 265033 - protein, 13 aa, Homo sapiens
  CDR3 for alpha chain variable domain of TCR clone 132517 (TRAV2, TRAJ27)
CAVEAPMQANQPL

SEQ ID NO: 265034 - protein, 13 aa, Homo sapiens
  CDR3 for beta chain variable domain of TCR clone 132517 (TRBV10-2, TRBJ2-3)
CASSGSGDHTQYF

SEQ ID NO: 265035 - protein, 14 aa, Homo sapiens
  CDR3 for alpha chain variable domain of TCR clone 132518 (TRAV35, TRAJ13)
CAGSPSGGYQKVTF

SEQ ID NO: 265036 - protein, 15 aa, Homo sapiens
  CDR3 for beta chain variable domain of TCR clone 132518 (TRBV6-1, TRBJ2-3)
CASSEIAHSTDTQYF

SEQ ID NO: 265037 - protein, 13 aa, Homo sapiens
  CDR3 for alpha chain variable domain of TCR clone 132519 (TRAV2, TRAJ40)
CAVVTSGTYKYIF

SEQ ID NO: 265038 - protein, 14 aa, Homo sapiens
  CDR3 for beta chain variable domain of TCR clone 132519 (TRBV5-4, TRBJ1-1)
CASSLDSRRDEAFF

SEQ ID NO: 265039 - protein, 11 aa, Homo sapiens
  CDR3 for alpha chain variable domain of TCR clone 132520 (TRAV1-2, TRAJ20)
CAEANDYKLSF

SEQ ID NO: 265040 - protein, 18 aa, Homo sapiens
  CDR3 for beta chain variable domain of TCR clone 132520 (TRBV20-1, TRBJ2-6)
CSAETTPTHGSGANVLTF

SEQ ID NO: 265041 - protein, 14 aa, Homo sapiens
  CDR3 for alpha chain variable domain of TCR clone 132521 (TRAV16, TRAJ17)
CALIGRAAGNKLTF

SEQ ID NO: 265042 - protein, 15 aa, Homo sapiens
  CDR3 for beta chain variable domain of TCR clone 132521 (TRBV3-1, TRBJ1-2)
CASSPTRLPEGGYTF

SEQ ID NO: 265043 - protein, 11 aa, Homo sapiens
  CDR3 for alpha chain variable domain of TCR clone 132522 (TRAV21, TRAJ20)
CAVRNDYKLSF

SEQ ID NO: 265044 - protein, 13 aa, Homo sapiens
  CDR3 for beta chain variable domain of TCR clone 132522 (TRBV20-1, TRBJ1-1)
CSAPLGGGTEAFF

SEQ ID NO: 265045 - protein, 11 aa, Homo sapiens
  CDR3 for alpha chain variable domain of TCR clone 132523 (TRAV2, TRAJ33)
CAVESNYQLFW

SEQ ID NO: 265046 - protein, 15 aa, Homo sapiens
  CDR3 for beta chain variable domain of TCR clone 132523 (TRBV19, TRBJ1-1)
CASTSGQIQNTEAFF

SEQ ID NO: 265047 - protein, 14 aa, Homo sapiens
  CDR3 for alpha chain variable domain of TCR clone 132524 (TRAV12-2, TRAJ13)
CAVKKTGGYQKVTF

SEQ ID NO: 265048 - protein, 19 aa, Homo sapiens
  CDR3 for beta chain variable domain of TCR clone 132524 (TRBV28, TRBJ2-7)
CASSYSGTSRLGWVYEQYF

SEQ ID NO: 265049 - protein, 14 aa, Homo sapiens
  CDR3 for alpha chain variable domain of TCR clone 132525 (TRAV12-3, TRAJ10)
SHLPLTGGGNKLTF

SEQ ID NO: 265050 - protein, 22 aa, Homo sapiens
  CDR3 for beta chain variable domain of TCR clone 132525 (TRBV6-1, TRBJ1-3)
CASVQGGGWKHHVFWRGKLAHC

SEQ ID NO: 265051 - protein, 14 aa, Homo sapiens
  CDR3 for alpha chain variable domain of TCR clone 132526 (TRAV17, TRAJ56)
CATVPAGANSKLTF

SEQ ID NO: 265052 - protein, 16 aa, Homo sapiens
  CDR3 for beta chain variable domain of TCR clone 132526 (TRBV6-5, TRBJ2-1)
CASSETLAGHYNEQFF

SEQ ID NO: 265053 - protein, 13 aa, Homo sapiens
  CDR3 for alpha chain variable domain of TCR clone 132527 (TRAV3, TRAJ21)
CTVREPDFNKFYL

SEQ ID NO: 265054 - protein, 17 aa, Homo sapiens
  CDR3 for beta chain variable domain of TCR clone 132527 (TRBV7-8, TRBJ2-6)
CASSAGTGGAGANVLTF

SEQ ID NO: 265055 - protein, 14 aa, Homo sapiens
  CDR3 for alpha chain variable domain of TCR clone 132528 (TRAV12-2, TRAJ33)
CAVKRARSNYQLNW

SEQ ID NO: 265056 - protein, 15 aa, Homo sapiens
  CDR3 for beta chain variable domain of TCR clone 132528 (TRBV20-1, TRBJ2-7)
CSARDRVSGMDEQYF

SEQ ID NO: 265057 - protein, 15 aa, Homo sapiens
  CDR3 for alpha chain variable domain of TCR clone 132529 (TRAV25, TRAJ52)
CAGRPGGTSYGKLTF

SEQ ID NO: 265058 - protein, 16 aa, Homo sapiens
  CDR3 for beta chain variable domain of TCR clone 132529 (TRBV4-2, TRBJ2-3)
CASSQELAGDTDTQYF

SEQ ID NO: 265059 - protein, 14 aa, Homo sapiens
  CDR3 for alpha chain variable domain of TCR clone 132530 (TRAV12-1, TRAJ30)
CVVNIGGRDDKIIF

SEQ ID NO: 265060 - protein, 13 aa, Homo sapiens
  CDR3 for beta chain variable domain of TCR clone 132530 (TRBV12-5, TRBJ2-1)
CASGLGRGNEQYF

SEQ ID NO: 265061 - protein, 12 aa, Homo sapiens
  CDR3 for alpha chain variable domain of TCR clone 132531 (TRAV27, TRAJ36)
SSTPAGANNLFF

SEQ ID NO: 265062 - protein, 13 aa, Homo sapiens
  CDR3 for beta chain variable domain of TCR clone 132531 (TRBV7-9, TRBJ2-3)
CASSPGSTDTQYF

SEQ ID NO: 265063 - protein, 13 aa, Homo sapiens
  CDR3 for alpha chain variable domain of TCR clone 132532 (TRAV13-1, TRAJ24)
CAASDGSWGKLPF

SEQ ID NO: 265064 - protein, 13 aa, Homo sapiens
  CDR3 for beta chain variable domain of TCR clone 132532 (TRBV4-3, TRBJ2-5)
CASSQGGGETQYF

SEQ ID NO: 265065 - protein, 13 aa, Homo sapiens
  CDR3 for alpha chain variable domain of TCR clone 132533 (TRAV21, TRAJ57)
CAVTQGGSEKLVF

SEQ ID NO: 265066 - protein, 14 aa, Homo sapiens
  CDR3 for beta chain variable domain of TCR clone 132533 (TRBV7-8, TRBJ2-3)
CASSLEAGTDTQYF

SEQ ID NO: 265067 - protein, 13 aa, Homo sapiens
  CDR3 for alpha chain variable domain of TCR clone 132534 (TRAV12-1, TRAJ9)
CVVLNTGGFKTIF

SEQ ID NO: 265068 - protein, 15 aa, Homo sapiens
  CDR3 for beta chain variable domain of TCR clone 132534 (TRBV12-4, TRBJ2-5)
CASSPPTGLQETQYF

SEQ ID NO: 265069 - protein, 16 aa, Homo sapiens
  CDR3 for alpha chain variable domain of TCR clone 132535 (TRAV30, TRAJ24)
CGTEIVDADSWGKFQF

SEQ ID NO: 265070 - protein, 14 aa, Homo sapiens
  CDR3 for beta chain variable domain of TCR clone 132535 (TRBV11-2, TRBJ2-7)
CASSLGAGDYEQYF

SEQ ID NO: 265071 - protein, 14 aa, Homo sapiens
  CDR3 for alpha chain variable domain of TCR clone 132536 (TRAV38-1, TRAJ45)
CASHSGGGVDGLTF

SEQ ID NO: 265072 - protein, 13 aa, Homo sapiens
  CDR3 for beta chain variable domain of TCR clone 132536 (TRBV10-3, TRBJ1-2)
CAISERDSYGYTF

SEQ ID NO: 265073 - protein, 14 aa, Homo sapiens
  CDR3 for alpha chain variable domain of TCR clone 132537 (TRAV12-3, TRAJ13)
CAIRNSGGYQKVTF

SEQ ID NO: 265074 - protein, 14 aa, Homo sapiens
  CDR3 for beta chain variable domain of TCR clone 132537 (TRBV4-1, TRBJ1-6)
CASSPGSDSSPLHF

SEQ ID NO: 265075 - protein, 16 aa, Homo sapiens
  CDR3 for alpha chain variable domain of TCR clone 132538 (TRAV20, TRAJ26)
CAVQHRRDNYGQNFVF

SEQ ID NO: 265076 - protein, 17 aa, Homo sapiens
  CDR3 for beta chain variable domain of TCR clone 132538 (TRBV7-8, TRBJ2-6)
CASSAGTGGAGANVLTF

SEQ ID NO: 265077 - protein, 14 aa, Homo sapiens
  CDR3 for alpha chain variable domain of TCR clone 132539 (TRAV12-2, TRAJ13)
CAVKKTGGYQKGTF

SEQ ID NO: 265078 - protein, 14 aa, Homo sapiens
  CDR3 for beta chain variable domain of TCR clone 132539 (TRBV5-5, TRBJ2-7)
CASSLGQGTYEQYF

SEQ ID NO: 265079 - protein, 20 aa, Homo sapiens
  CDR3 for alpha chain variable domain of TCR clone 132540 (TRAV1-1, TRAJ39)
CLLLLRCESSAYNAGNMLTF

SEQ ID NO: 265080 - protein, 13 aa, Homo sapiens
  CDR3 for beta chain variable domain of TCR clone 132540 (TRBV12-4, TRBJ1-5)
CASSPDRAQTQHF

SEQ ID NO: 265081 - protein, 13 aa, Homo sapiens
  CDR3 for alpha chain variable domain of TCR clone 132541 (TRAV12-3, TRAJ29)
CAMTLSGNTPLVF

SEQ ID NO: 265082 - protein, 13 aa, Homo sapiens
  CDR3 for beta chain variable domain of TCR clone 132541 (TRBV7-9, TRBJ1-2)
CASSLKQNYGYTF

SEQ ID NO: 265083 - protein, 23 aa, Homo sapiens
  CDR3 for alpha chain variable domain of TCR clone 132542 (TRAV8-4, TRAJ38)
CARLNAGNNHIQNPDPAVYQLRD

SEQ ID NO: 265084 - protein, 14 aa, Homo sapiens
  CDR3 for beta chain variable domain of TCR clone 132542 (TRBV7-8, TRBJ2-3)
CASSLEAGTDAQYF

SEQ ID NO: 265085 - protein, 14 aa, Homo sapiens
  CDR3 for alpha chain variable domain of TCR clone 132543 (TRAV13-1, TRAJ23)
CAASRLGRGGKIIF

SEQ ID NO: 265086 - protein, 13 aa, Homo sapiens
  CDR3 for beta chain variable domain of TCR clone 132543 (TRBV20-1, TRBJ1-1)
CSAPLGGGTEAFF

SEQ ID NO: 265087 - protein, 14 aa, Homo sapiens
  CDR3 for alpha chain variable domain of TCR clone 132544 (TRAV16, TRAJ39)
CALSKNNAGNMLTF

SEQ ID NO: 265088 - protein, 21 aa, Homo sapiens
  CDR3 for beta chain variable domain of TCR clone 132544 (TRBV6-6, TRBJ2-1)
ELAAPSQTSVYFCASSYEQFF

SEQ ID NO: 265089 - protein, 18 aa, Homo sapiens
  CDR3 for alpha chain variable domain of TCR clone 132545 (TRAV12-3, TRAJ52)
CAMSVGGAGGTSYGKLTF

SEQ ID NO: 265090 - protein, 12 aa, Homo sapiens
  CDR3 for beta chain variable domain of TCR clone 132545 (TRBV7-9, TRBJ2-7)
CASSIKREEQYF

SEQ ID NO: 265091 - protein, 15 aa, Homo sapiens
  CDR3 for alpha chain variable domain of TCR clone 132546 (TRAV38-1, TRAJ37)
CAFIFGSGTTGKLIF

SEQ ID NO: 265092 - protein, 12 aa, Homo sapiens
  CDR3 for beta chain variable domain of TCR clone 132546 (TRBV7-9, TRBJ2-7)
CASSLEGYEQYF

SEQ ID NO: 265093 - protein, 14 aa, Homo sapiens
  CDR3 for alpha chain variable domain of TCR clone 132547 (TRAV12-1, TRAJ12)
CVVTRMDSSYKLIF

SEQ ID NO: 265094 - protein, 13 aa, Homo sapiens
  CDR3 for beta chain variable domain of TCR clone 132547 (TRBV7-3, TRBJ1-1)
CASSQDWGAEAFF

SEQ ID NO: 265095 - protein, 15 aa, Homo sapiens
  CDR3 for alpha chain variable domain of TCR clone 132548 (TRAV17, TRAJ56)
CAAEPFTGANSKLTF

SEQ ID NO: 265096 - protein, 15 aa, Homo sapiens
  CDR3 for beta chain variable domain of TCR clone 132548 (TRBV12-4, TRBJ2-5)
CASSPPTGLQETQYF

SEQ ID NO: 265097 - protein, 12 aa, Homo sapiens
  CDR3 for alpha chain variable domain of TCR clone 132549 (TRAV17, TRAJ30)
CVPERRDYKIIF

SEQ ID NO: 265098 - protein, 14 aa, Homo sapiens
  CDR3 for beta chain variable domain of TCR clone 132549 (TRBV7-7, TRBJ2-2)
CASSRDRSTGELFF

SEQ ID NO: 265099 - protein, 15 aa, Homo sapiens
  CDR3 for alpha chain variable domain of TCR clone 132550 (TRAV12-2, TRAJ53)
CAVNGGGGSNYKLTF

SEQ ID NO: 265100 - protein, 19 aa, Homo sapiens
  CDR3 for beta chain variable domain of TCR clone 132550 (TRBV12-4, TRBJ2-1)
CASTLAFDPRDKEANEQFF

SEQ ID NO: 265101 - protein, 13 aa, Homo sapiens
  CDR3 for alpha chain variable domain of TCR clone 132551 (TRAV3, TRAJ15)
CAVRDQAGTALIF

SEQ ID NO: 265102 - protein, 15 aa, Homo sapiens
  CDR3 for beta chain variable domain of TCR clone 132551 (TRBV11-1, TRBJ2-7)
CASSLNYGASYEKYF

SEQ ID NO: 265103 - protein, 12 aa, Homo sapiens
  CDR3 for alpha chain variable domain of TCR clone 132552 (TRAV8-3, TRAJ20)
CAVGANDYKLSF

SEQ ID NO: 265104 - protein, 16 aa, Homo sapiens
  CDR3 for beta chain variable domain of TCR clone 132552 (TRBV7-9, TRBJ2-1)
CASSPRLGSSYNEQFF

SEQ ID NO: 265105 - protein, 15 aa, Homo sapiens
  CDR3 for alpha chain variable domain of TCR clone 132553 (TRAV16, TRAJ16)
CALQGGGSDGQKLLF

SEQ ID NO: 265106 - protein, 15 aa, Homo sapiens
  CDR3 for beta chain variable domain of TCR clone 132553 (TRBV20-1, TRBJ2-7)
CSARDRVSWMDEQYF

SEQ ID NO: 265107 - protein, 11 aa, Homo sapiens
  CDR3 for alpha chain variable domain of TCR clone 132554 (TRAV1-1, TRAJ23)
CAVRQGGKLIF

SEQ ID NO: 265108 - protein, 20 aa, Homo sapiens
  CDR3 for beta chain variable domain of TCR clone 132554 (TRBV7-8, TRBJ2-2)
WASSHLFPGPTSHITGELFF

SEQ ID NO: 265109 - protein, 15 aa, Homo sapiens
  CDR3 for alpha chain variable domain of TCR clone 132555 (TRAV8-3, TRAJ27)
CAVGPSKANAGKSTF

SEQ ID NO: 265110 - protein, 12 aa, Homo sapiens
  CDR3 for beta chain variable domain of TCR clone 132555 (TRBV11-2, TRBJ2-2)
CASSLGGGELFF

SEQ ID NO: 265111 - protein, 14 aa, Homo sapiens
  CDR3 for alpha chain variable domain of TCR clone 132556 (TRAV20, TRAJ42)
CAVQAGGSQGNHIF

SEQ ID NO: 265112 - protein, 14 aa, Homo sapiens
  CDR3 for beta chain variable domain of TCR clone 132556 (TRBV28, TRBJ1-2)
CASRIQGANYGYTF

SEQ ID NO: 265113 - protein, 17 aa, Homo sapiens
  CDR3 for alpha chain variable domain of TCR clone 132557 (TRAV4, TRAJ18)
CLVCERSVGSTLGRLYF

SEQ ID NO: 265114 - protein, 14 aa, Homo sapiens
  CDR3 for beta chain variable domain of TCR clone 132557 (TRBV6-5, TRBJ1-2)
CASSYDGTGGGYTF

SEQ ID NO: 265115 - protein, 14 aa, Homo sapiens
  CDR3 for alpha chain variable domain of TCR clone 132558 (TRAV12-2, TRAJ15)
CAPHTGQAGTALIF

SEQ ID NO: 265116 - protein, 11 aa, Homo sapiens
  CDR3 for beta chain variable domain of TCR clone 132558 (TRBV6-3, TRBJ2-3)
CATGQADTQYF

SEQ ID NO: 265117 - protein, 16 aa, Homo sapiens
  CDR3 for alpha chain variable domain of TCR clone 132559 (TRAV16, TRAJ4)
CALSRMFSGGYNKLIF

SEQ ID NO: 265118 - protein, 12 aa, Homo sapiens
  CDR3 for beta chain variable domain of TCR clone 132559 (TRBV7-9, TRBJ2-7)
CASSIKREEQYF

SEQ ID NO: 265119 - protein, 14 aa, Homo sapiens
  CDR3 for alpha chain variable domain of TCR clone 132560 (TRAV8-2, TRAJ4)
CVVSPSGGYNKLIF

SEQ ID NO: 265120 - protein, 15 aa, Homo sapiens
  CDR3 for beta chain variable domain of TCR clone 132560 (TRBV7-9, TRBJ1-5)
CASSQGHQPNQPQHF

SEQ ID NO: 265121 - protein, 15 aa, Homo sapiens
  CDR3 for alpha chain variable domain of TCR clone 132561 (TRAV9-2, TRAJ49)
CALSPPDHTGNQFDF

SEQ ID NO: 265122 - protein, 14 aa, Homo sapiens
  CDR3 for beta chain variable domain of TCR clone 132561 (TRBV12-4, TRBJ1-1)
CASSLGTGGTEAFF

SEQ ID NO: 265123 - protein, 11 aa, Homo sapiens
  CDR3 for alpha chain variable domain of TCR clone 132562 (TRAV2, TRAJ33)
CAVDSNYQLIW

SEQ ID NO: 265124 - protein, 14 aa, Homo sapiens
  CDR3 for beta chain variable domain of TCR clone 132562 (TRBV11-2, TRBJ2-3)
CASSRLARTDTHYF

SEQ ID NO: 265125 - protein, 12 aa, Homo sapiens
  CDR3 for alpha chain variable domain of TCR clone 132563 (TRAV12-3, TRAJ17)
CAMTLTGNKLTF

SEQ ID NO: 265126 - protein, 15 aa, Homo sapiens
  CDR3 for beta chain variable domain of TCR clone 132563 (TRBV10-3, TRBJ2-1)
CAISDVQDRAYEQFF

SEQ ID NO: 265127 - protein, 13 aa, Homo sapiens
  CDR3 for alpha chain variable domain of TCR clone 132564 (TRAV21, TRAJ20)
CAVSRLGDYKLSF

SEQ ID NO: 265128 - protein, 13 aa, Homo sapiens
  CDR3 for beta chain variable domain of TCR clone 132564 (TRBV7-3, TRBJ1-1)
SASSPAGGLEAFF

SEQ ID NO: 265129 - protein, 15 aa, Homo sapiens
  CDR3 for alpha chain variable domain of TCR clone 132565 (TRAV13-1, TRAJ28)
CAASSLGLGVTNSLS

SEQ ID NO: 265130 - protein, 12 aa, Homo sapiens
  CDR3 for beta chain variable domain of TCR clone 132565 (TRBV6-5, TRBJ2-7)
CASSDRQNEQYF

SEQ ID NO: 265131 - protein, 15 aa, Homo sapiens
  CDR3 for alpha chain variable domain of TCR clone 132566 (TRAV12-2, TRAJ53)
CAVNGGGGSNYKRTF

SEQ ID NO: 265132 - protein, 14 aa, Homo sapiens
  CDR3 for beta chain variable domain of TCR clone 132566 (TRBV19, TRBJ2-2)
CASSTLHRSGELFF

SEQ ID NO: 265133 - protein, 12 aa, Homo sapiens
  CDR3 for alpha chain variable domain of TCR clone 132567 (TRAV13-1, TRAJ21)
CAAKEGFNKFYF

SEQ ID NO: 265134 - protein, 15 aa, Homo sapiens
  CDR3 for beta chain variable domain of TCR clone 132567 (TRBV28, TRBJ1-1)
CASGRLAGLNTEAFF

SEQ ID NO: 265135 - protein, 12 aa, Homo sapiens
  CDR3 for alpha chain variable domain of TCR clone 132568 (TRAV21, TRAJ23)
CAVMLQGGKLIF

SEQ ID NO: 265136 - protein, 14 aa, Homo sapiens
  CDR3 for beta chain variable domain of TCR clone 132568 (TRBV7-9, TRBJ1-4)
CAITEGEANEKLLF

SEQ ID NO: 265137 - protein, 10 aa, Homo sapiens
  CDR3 for alpha chain variable domain of TCR clone 132569 (TRAV36/DV7, TRAJ48)
CAVGNEKLTF

SEQ ID NO: 265138 - protein, 13 aa, Homo sapiens
  CDR3 for beta chain variable domain of TCR clone 132569 (TRBV12-4, TRBJ1-2)
CASSLRQGKGYTF

SEQ ID NO: 265139 - protein, 11 aa, Homo sapiens
  CDR3 for alpha chain variable domain of TCR clone 132570 (TRAV23/DV6, TRAJ48)
CAPRWGEKLTF

SEQ ID NO: 265140 - protein, 14 aa, Homo sapiens
  CDR3 for beta chain variable domain of TCR clone 132570 (TRBV7-2, TRBJ2-2)
CASRGQGAAGELFF

SEQ ID NO: 265141 - protein, 14 aa, Homo sapiens
  CDR3 for alpha chain variable domain of TCR clone 132571 (TRAV35, TRAJ13)
CAGRSPGGYQKVTF

SEQ ID NO: 265142 - protein, 14 aa, Homo sapiens
  CDR3 for beta chain variable domain of TCR clone 132571 (TRBV19, TRBJ2-2)
CASSMVGVSGELFF

SEQ ID NO: 265143 - protein, 13 aa, Homo sapiens
  CDR3 for alpha chain variable domain of TCR clone 132572 (TRAV21, TRAJ27)
CAALNTNACKSTF

SEQ ID NO: 265144 - protein, 14 aa, Homo sapiens
  CDR3 for beta chain variable domain of TCR clone 132572 (TRBV27, TRBJ1-1)
CASSLLSGLSEAFF

SEQ ID NO: 265145 - protein, 14 aa, Homo sapiens
  CDR3 for alpha chain variable domain of TCR clone 132573 (TRAV8-3, TRAJ28)
CAVVPGAGSYQLTF

SEQ ID NO: 265146 - protein, 15 aa, Homo sapiens
  CDR3 for beta chain variable domain of TCR clone 132573 (TRBV6-3, TRBJ2-2)
CASGGMTVDTGELFF

SEQ ID NO: 265147 - protein, 15 aa, Homo sapiens
  CDR3 for alpha chain variable domain of TCR clone 132574 (TRAV13-1, TRAJ17)
CAASIHGGCRQQANF

SEQ ID NO: 265148 - protein, 14 aa, Homo sapiens
  CDR3 for beta chain variable domain of TCR clone 132574 (TRBV20-1, TRBJ2-4)
CSARDRGQGGSQYF

SEQ ID NO: 265149 - protein, 13 aa, Homo sapiens
  CDR3 for alpha chain variable domain of TCR clone 132575 (TRAV1-2, TRAJ9)
CAVLNTGGFKTIF

SEQ ID NO: 265150 - protein, 16 aa, Homo sapiens
  CDR3 for beta chain variable domain of TCR clone 132575 (TRBV24-1, TRBJ2-3)
CATSDPGTGATDTQYF

SEQ ID NO: 265151 - protein, 15 aa, Homo sapiens
  CDR3 for alpha chain variable domain of TCR clone 132576 (TRAV29/DV5, TRAJ29)
CAASERSSGNTPLVF

SEQ ID NO: 265152 - protein, 17 aa, Homo sapiens
  CDR3 for beta chain variable domain of TCR clone 132576 (TRBV4-1, TRBJ1-4)
CASRQEGPRGVEEKLFF

SEQ ID NO: 265153 - protein, 18 aa, Homo sapiens
  CDR3 for alpha chain variable domain of TCR clone 132577 (TRAV13-1, TRAJ52)
CAASKRSAGGTSYGKLTF

SEQ ID NO: 265154 - protein, 13 aa, Homo sapiens
  CDR3 for beta chain variable domain of TCR clone 132577 (TRBV12-4, TRBJ1-2)
CASSLRQGKGDSF

SEQ ID NO: 265155 - protein, 11 aa, Homo sapiens
  CDR3 for alpha chain variable domain of TCR clone 132578 (TRAV2, TRAJ13)
CASGGYQEVTF

SEQ ID NO: 265156 - protein, 15 aa, Homo sapiens
  CDR3 for beta chain variable domain of TCR clone 132578 (TRBV11-1, TRBJ2-7)
CASSLNYGASYEQYF

SEQ ID NO: 265157 - protein, 14 aa, Homo sapiens
  CDR3 for alpha chain variable domain of TCR clone 132579 (TRAV22, TRAJ28)
CAVYSGAGSYQLTF

SEQ ID NO: 265158 - protein, 16 aa, Homo sapiens
  CDR3 for beta chain variable domain of TCR clone 132579 (TRBV24-1, TRBJ2-3)
CATSDPGTGATDTQYL

SEQ ID NO: 265159 - protein, 12 aa, Homo sapiens
  CDR3 for alpha chain variable domain of TCR clone 132580 (TRAV29/DV5, TRAJ49)
CAATDTGNQFYF

SEQ ID NO: 265160 - protein, 13 aa, Homo sapiens
  CDR3 for beta chain variable domain of TCR clone 132580 (TRBV10-3, TRBJ2-7)
CASKLAVNYEQYF

SEQ ID NO: 265161 - protein, 12 aa, Homo sapiens
  CDR3 for alpha chain variable domain of TCR clone 132581 (TRAV27, TRAJ33)
CAGDGSNYQLIW

SEQ ID NO: 265162 - protein, 15 aa, Homo sapiens
  CDR3 for beta chain variable domain of TCR clone 132581 (TRBV9, TRBJ1-6)
CASSVAGTGDSPLHF

SEQ ID NO: 265163 - protein, 15 aa, Homo sapiens
  CDR3 for alpha chain variable domain of TCR clone 132582 (TRAV13-2, TRAJ53)
CAETVSGGSNYKLTF

SEQ ID NO: 265164 - protein, 13 aa, Homo sapiens
  CDR3 for beta chain variable domain of TCR clone 132582 (TRBV12-5, TRBJ2-3)
CASGDRQSDTQYF

SEQ ID NO: 265165 - protein, 14 aa, Homo sapiens
  CDR3 for alpha chain variable domain of TCR clone 132583 (TRAV2, TRAJ37)
CAVEDQCNTGKLIF

SEQ ID NO: 265166 - protein, 14 aa, Homo sapiens
  CDR3 for beta chain variable domain of TCR clone 132583 (TRBV18, TRBJ2-1)
CASSPQGRFNEQFF

SEQ ID NO: 265167 - protein, 16 aa, Homo sapiens
  CDR3 for alpha chain variable domain of TCR clone 132584 (TRAV1-2, TRAJ10)
CAVRGVLTGGGNKLTF

SEQ ID NO: 265168 - protein, 15 aa, Homo sapiens
  CDR3 for beta chain variable domain of TCR clone 132584 (TRBV7-9, TRBJ1-6)
CASSSPGRGNSHLHF

SEQ ID NO: 265169 - protein, 14 aa, Homo sapiens
  CDR3 for alpha chain variable domain of TCR clone 132585 (TRAV1-2, TRAJ16)
CSVNRFSDGQKLLF

SEQ ID NO: 265170 - protein, 13 aa, Homo sapiens
  CDR3 for beta chain variable domain of TCR clone 132585 (TRBV20-1, TRBJ1-1)
CSARVGGNTEAFF

SEQ ID NO: 265171 - protein, 15 aa, Homo sapiens
  CDR3 for alpha chain variable domain of TCR clone 132586 (TRAV17, TRAJ13)
CATDAGSGVYQKVTF

SEQ ID NO: 265172 - protein, 17 aa, Homo sapiens
  CDR3 for beta chain variable domain of TCR clone 132586 (TRBV11-2, TRBJ2-1)
CASSLYPPGVEYNEQFF

SEQ ID NO: 265173 - protein, 12 aa, Homo sapiens
  CDR3 for alpha chain variable domain of TCR clone 132587 (TRAV6, TRAJ15)
CVRNQAGTALIF

SEQ ID NO: 265174 - protein, 11 aa, Homo sapiens
  CDR3 for beta chain variable domain of TCR clone 132587 (TRBV29-1, TRBJ2-5)
CSEDRTGTQYF

SEQ ID NO: 265175 - protein, 15 aa, Homo sapiens
  CDR3 for alpha chain variable domain of TCR clone 132588 (TRAV4, TRAJ10)
CLVGDEEGGGSKLTF

SEQ ID NO: 265176 - protein, 15 aa, Homo sapiens
  CDR3 for beta chain variable domain of TCR clone 132588 (TRBV7-9, TRBJ1-6)
CASSSPGRGNSPLHF

SEQ ID NO: 265177 - protein, 11 aa, Homo sapiens
  CDR3 for alpha chain variable domain of TCR clone 132589 (TRAV2, TRAJ33)
CAVDSNYQLIW

SEQ ID NO: 265178 - protein, 14 aa, Homo sapiens
  CDR3 for beta chain variable domain of TCR clone 132589 (TRBV7-3, TRBJ1-1)
CASSLKGGNTEAFF

SEQ ID NO: 265179 - protein, 14 aa, Homo sapiens
  CDR3 for alpha chain variable domain of TCR clone 132590 (TRAV8-1, TRAJ36)
CAVNSPTGANNLFS

SEQ ID NO: 265180 - protein, 15 aa, Homo sapiens
  CDR3 for beta chain variable domain of TCR clone 132590 (TRBV7-2, TRBJ2-3)
CASSLEQGGTDTQYF

SEQ ID NO: 265181 - protein, 12 aa, Homo sapiens
  CDR3 for alpha chain variable domain of TCR clone 132591 (TRAV13-1, TRAJ21)
CAVKEGFNKFYF

SEQ ID NO: 265182 - protein, 18 aa, Homo sapiens
  CDR3 for beta chain variable domain of TCR clone 132591 (TRBV20-1, TRBJ2-6)
CSAETTPTHGSGANVLTF

SEQ ID NO: 265183 - protein, 14 aa, Homo sapiens
  CDR3 for alpha chain variable domain of TCR clone 132592 (TRAV38-1, TRAJ40)
CALRPTSGTYKYIF

SEQ ID NO: 265184 - protein, 13 aa, Homo sapiens
  CDR3 for beta chain variable domain of TCR clone 132592 (TRBV25-1, TRBJ1-1)
CQRPPGGNTEAFF

SEQ ID NO: 265185 - protein, 11 aa, Homo sapiens
  CDR3 for alpha chain variable domain of TCR clone 132593 (TRAV23/DV6, TRAJ47)
CAAGYGNKLVF

SEQ ID NO: 265186 - protein, 14 aa, Homo sapiens
  CDR3 for beta chain variable domain of TCR clone 132593 (TRBV20-1, TRBJ2-7)
CSAKTGTGGYEQYF

SEQ ID NO: 265187 - protein, 14 aa, Homo sapiens
  CDR3 for alpha chain variable domain of TCR clone 132594 (TRAV1-2, TRAJ16)
CAVNRFSDGQKLLF

SEQ ID NO: 265188 - protein, 14 aa, Homo sapiens
  CDR3 for beta chain variable domain of TCR clone 132594 (TRBV12-4, TRBJ1-6)
CASNLQGKGSPLHF

SEQ ID NO: 265189 - protein, 14 aa, Homo sapiens
  CDR3 for alpha chain variable domain of TCR clone 132595 (TRAV12-2, TRAJ11)
CAVEGGSGYSPLTF

SEQ ID NO: 265190 - protein, 16 aa, Homo sapiens
  CDR3 for beta chain variable domain of TCR clone 132595 (TRBV6-1, TRBJ1-2)
CASSGAWQGRSHGYTF

SEQ ID NO: 265191 - protein, 14 aa, Homo sapiens
  CDR3 for alpha chain variable domain of TCR clone 132596 (TRAV1-2, TRAJ16)
CAVNRFSDGQKLLF

SEQ ID NO: 265192 - protein, 13 aa, Homo sapiens
  CDR3 for beta chain variable domain of TCR clone 132596 (TRBV19, TRBJ2-1)
CASSMYRVNEQFF

SEQ ID NO: 265193 - protein, 16 aa, Homo sapiens
  CDR3 for alpha chain variable domain of TCR clone 132597 (TRAV3, TRAJ10)
CAVRDMRAGGGNKLTF

SEQ ID NO: 265194 - protein, 14 aa, Homo sapiens
  CDR3 for beta chain variable domain of TCR clone 132597 (TRBV25-1, TRBJ1-1)
GASTHLGGNTEAFF

SEQ ID NO: 265195 - protein, 15 aa, Homo sapiens
  CDR3 for alpha chain variable domain of TCR clone 132598 (TRAV3, TRAJ5)
CAVRDRKTGRRALTF

SEQ ID NO: 265196 - protein, 14 aa, Homo sapiens
  CDR3 for beta chain variable domain of TCR clone 132598 (TRBV11-2, TRBJ2-7)
CASSLGAGAYEQYF

SEQ ID NO: 265197 - protein, 13 aa, Homo sapiens
  CDR3 for alpha chain variable domain of TCR clone 132599 (TRAV17, TRAJ29)
CATGPSGNTPLVF

SEQ ID NO: 265198 - protein, 14 aa, Homo sapiens
  CDR3 for beta chain variable domain of TCR clone 132599 (TRBV2, TRBJ1-6)
CASEVSAYNSPLHF

SEQ ID NO: 265199 - protein, 18 aa, Homo sapiens
  CDR3 for alpha chain variable domain of TCR clone 132600 (TRAV8-4, TRAJ52)
CAVTRANAGGTSYGKLTF

SEQ ID NO: 265200 - protein, 20 aa, Homo sapiens
  CDR3 for beta chain variable domain of TCR clone 132600 (TRBV19, TRBJ2-1)
CASSISRTVTSTRLNNEQCF

SEQ ID NO: 265201 - protein, 12 aa, Homo sapiens
  CDR3 for alpha chain variable domain of TCR clone 132601 (TRAV21, TRAJ49)
CAVSNTGNQFYF

SEQ ID NO: 265202 - protein, 16 aa, Homo sapiens
  CDR3 for beta chain variable domain of TCR clone 132601 (TRBV4-2, TRBJ1-1)
CASSQAGFGMNTEAFF

SEQ ID NO: 265203 - protein, 15 aa, Homo sapiens
  CDR3 for alpha chain variable domain of TCR clone 132602 (TRAV3, TRAJ5)
CAVTDLDTGRRALTF

SEQ ID NO: 265204 - protein, 13 aa, Homo sapiens
  CDR3 for beta chain variable domain of TCR clone 132602 (TRBV12-4, TRBJ2-7)
CASSPTETYEQYF

SEQ ID NO: 265205 - protein, 18 aa, Homo sapiens
  CDR3 for alpha chain variable domain of TCR clone 132603 (TRAV13-1, TRAJ52)
CAVKNPNAGGTSYGKLTF

SEQ ID NO: 265206 - protein, 15 aa, Homo sapiens
  CDR3 for beta chain variable domain of TCR clone 132603 (TRBV6-1, TRBJ2-3)
CASSERGGITDTQYF

SEQ ID NO: 265207 - protein, 12 aa, Homo sapiens
  CDR3 for alpha chain variable domain of TCR clone 132604 (TRAV12-3, TRAJ17)
YAMTLTGNKLTF

SEQ ID NO: 265208 - protein, 14 aa, Homo sapiens
  CDR3 for beta chain variable domain of TCR clone 132604 (TRBV19, TRBJ2-1)
CASPTFVLSGEQFF

SEQ ID NO: 265209 - protein, 14 aa, Homo sapiens
  CDR3 for alpha chain variable domain of TCR clone 132605 (TRAV13-1, TRAJ40)
CAASMTSGTYKYIF

SEQ ID NO: 265210 - protein, 17 aa, Homo sapiens
  CDR3 for beta chain variable domain of TCR clone 132605 (TRBV11-3, TRBJ2-6)
CASKWGQGLSGANVLTF

SEQ ID NO: 265211 - protein, 14 aa, Homo sapiens
  CDR3 for alpha chain variable domain of TCR clone 132606 (TRAV8-3, TRAJ6)
CAVGASGGIYIPTF

SEQ ID NO: 265212 - protein, 17 aa, Homo sapiens
  CDR3 for beta chain variable domain of TCR clone 132606 (TRBV18, TRBJ2-2)
CASSPSDPWQNTGELFF

SEQ ID NO: 265213 - protein, 12 aa, Homo sapiens
  CDR3 for alpha chain variable domain of TCR clone 132607 (TRAV12-3, TRAJ17)
CAMTLTGNKLTF

SEQ ID NO: 265214 - protein, 13 aa, Homo sapiens
  CDR3 for beta chain variable domain of TCR clone 132607 (TRBV12-4, TRBJ1-3)
CASSLASGNTIYF

SEQ ID NO: 265215 - protein, 14 aa, Homo sapiens
  CDR3 for alpha chain variable domain of TCR clone 132608 (TRAV8-4, TRAJ5)
CAVSTDTGRRALTF

SEQ ID NO: 265216 - protein, 13 aa, Homo sapiens
  CDR3 for beta chain variable domain of TCR clone 132608 (TRBV7-3, TRBJ1-1)
CASSQDWGAEAFF

SEQ ID NO: 265217 - protein, 12 aa, Homo sapiens
  CDR3 for alpha chain variable domain of TCR clone 132609 (TRAV23/DV6, TRAJ53)
CAASKLGRGGSN

SEQ ID NO: 265218 - protein, 18 aa, Homo sapiens
  CDR3 for beta chain variable domain of TCR clone 132609 (TRBV11-2, TRBJ2-3)
CASSLGGASRGAPNTQYF

SEQ ID NO: 265219 - protein, 14 aa, Homo sapiens
  CDR3 for alpha chain variable domain of TCR clone 132610 (TRAV12-2, TRAJ53)
CAVKGGGSNYKLTF

SEQ ID NO: 265220 - protein, 13 aa, Homo sapiens
  CDR3 for beta chain variable domain of TCR clone 132610 (TRBV7-3, TRBJ2-5)
CASSFRGGETQYF

SEQ ID NO: 265221 - protein, 17 aa, Homo sapiens
  CDR3 for alpha chain variable domain of TCR clone 132611 (TRAV3, TRAJ6)
CAVRDGPRAGGSYIPTF

SEQ ID NO: 265222 - protein, 15 aa, Homo sapiens
  CDR3 for beta chain variable domain of TCR clone 132611 (TRBV5-7, TRBJ1-5)
CASSYGKLWDQPQHF

SEQ ID NO: 265223 - protein, 12 aa, Homo sapiens
  CDR3 for alpha chain variable domain of TCR clone 132612 (TRAV17, TRAJ57)
CATDGGSEKLVF

SEQ ID NO: 265224 - protein, 13 aa, Homo sapiens
  CDR3 for beta chain variable domain of TCR clone 132612 (TRBV7-9, TRBJ2-7)
CASSSAGAYEQYF

SEQ ID NO: 265225 - protein, 12 aa, Homo sapiens
  CDR3 for alpha chain variable domain of TCR clone 132613 (TRAV12-3, TRAJ17)
CAMTLTGNKLTF

SEQ ID NO: 265226 - protein, 13 aa, Homo sapiens
  CDR3 for beta chain variable domain of TCR clone 132613 (TRBV12-4, TRBJ2-7)
CASSLSGVYEQYF

SEQ ID NO: 265227 - protein, 15 aa, Homo sapiens
  CDR3 for alpha chain variable domain of TCR clone 132614 (TRAV26-1, TRAJ44)
CTVRANTGTASKLTF

SEQ ID NO: 265228 - protein, 17 aa, Homo sapiens
  CDR3 for beta chain variable domain of TCR clone 132614 (TRBV7-3, TRBJ2-3)
CASSPRGRGYGTDTQYF

SEQ ID NO: 265229 - protein, 13 aa, Homo sapiens
  CDR3 for alpha chain variable domain of TCR clone 132615 (TRAV1-2, TRAJ9)
CAALNTGGFKTIF

SEQ ID NO: 265230 - protein, 15 aa, Homo sapiens
  CDR3 for beta chain variable domain of TCR clone 132615 (TRBV5-1, TRBJ2-7)
CASSLMTSGSNEQYF

SEQ ID NO: 265231 - protein, 16 aa, Homo sapiens
  CDR3 for alpha chain variable domain of TCR clone 132616 (TRAV38-1, TRAJ45)
CAFIKGSGGGADGLTF

SEQ ID NO: 265232 - protein, 15 aa, Homo sapiens
  CDR3 for beta chain variable domain of TCR clone 132616 (TRBV20-1, TRBJ2-7)
CSAREGRDSLYEQYF

SEQ ID NO: 265233 - protein, 14 aa, Homo sapiens
  CDR3 for alpha chain variable domain of TCR clone 132617 (TRAV8-1, TRAJ5)
CAVSTDTGRRALTF

SEQ ID NO: 265234 - protein, 14 aa, Homo sapiens
  CDR3 for beta chain variable domain of TCR clone 132617 (TRBV7-8, TRBJ2-3)
CASSFPDGQDTQYF

SEQ ID NO: 265235 - protein, 14 aa, Homo sapiens
  CDR3 for alpha chain variable domain of TCR clone 132618 (TRAV8-3, TRAJ4)
CAVGAAGGYNKLIF

SEQ ID NO: 265236 - protein, 13 aa, Homo sapiens
  CDR3 for beta chain variable domain of TCR clone 132618 (TRBV4-2, TRBJ1-1)
CASSQAGNTEAFF

SEQ ID NO: 265237 - protein, 13 aa, Homo sapiens
  CDR3 for alpha chain variable domain of TCR clone 132619 (TRAV13-1, TRAJ20)
SAARVSNDYKLSF

SEQ ID NO: 265238 - protein, 12 aa, Homo sapiens
  CDR3 for beta chain variable domain of TCR clone 132619 (TRBV20-1, TRBJ2-1)
CSARLGTDEQFF

SEQ ID NO: 265239 - protein, 17 aa, Homo sapiens
  CDR3 for alpha chain variable domain of TCR clone 132620 (TRAV13-1, TRAJ52)
CAASSGAGGTSYGKLTY

SEQ ID NO: 265240 - protein, 15 aa, Homo sapiens
  CDR3 for beta chain variable domain of TCR clone 132620 (TRBV2, TRBJ2-1)
CASSELAGSYNEQFF

SEQ ID NO: 265241 - protein, 11 aa, Homo sapiens
  CDR3 for alpha chain variable domain of TCR clone 132621 (TRAV3, TRAJ21)
CAVGNFNKFYF

SEQ ID NO: 265242 - protein, 13 aa, Homo sapiens
  CDR3 for beta chain variable domain of TCR clone 132621 (TRBV3-1, TRBJ1-1)
CASSPGVITEAFF

SEQ ID NO: 265243 - protein, 15 aa, Homo sapiens
  CDR3 for alpha chain variable domain of TCR clone 132622 (TRAV12-1, TRAJ44)
CVVFVNTGTASKLTF

SEQ ID NO: 265244 - protein, 13 aa, Homo sapiens
  CDR3 for beta chain variable domain of TCR clone 132622 (TRBV7-9, TRBJ1-2)
CASSLKQNYGYTF

SEQ ID NO: 265245 - protein, 14 aa, Homo sapiens
  CDR3 for alpha chain variable domain of TCR clone 132623 (TRAV38-1, TRAJ45)
CAYYSGGGADGLTF

SEQ ID NO: 265246 - protein, 12 aa, Homo sapiens
  CDR3 for beta chain variable domain of TCR clone 132623 (TRBV5-5, TRBJ2-5)
CASSYFGETQYF

SEQ ID NO: 265247 - protein, 13 aa, Homo sapiens
  CDR3 for alpha chain variable domain of TCR clone 132624 (TRAV8-6, TRAJ49)
CAVITNTGNQFYF

SEQ ID NO: 265248 - protein, 17 aa, Homo sapiens
  CDR3 for beta chain variable domain of TCR clone 132624 (TRBV11-2, TRBJ2-1)
CASSLYPPGVGYNEQFF

SEQ ID NO: 265249 - protein, 15 aa, Homo sapiens
  CDR3 for alpha chain variable domain of TCR clone 132625 (TRAV3, TRAJ29)
CAVRDLYSGNTPLVF

SEQ ID NO: 265250 - protein, 17 aa, Homo sapiens
  CDR3 for beta chain variable domain of TCR clone 132625 (TRBV28, TRBJ2-5)
CASSTPEGDALQETQYF

SEQ ID NO: 265251 - protein, 17 aa, Homo sapiens
  CDR3 for alpha chain variable domain of TCR clone 132626 (TRAV12-2, TRAJ6)
CAPQGPPRAGGSYIPTF

SEQ ID NO: 265252 - protein, 16 aa, Homo sapiens
  CDR3 for beta chain variable domain of TCR clone 132626 (TRBV19, TRBJ2-2)
CASSTTRASNTGELFF

SEQ ID NO: 265253 - protein, 18 aa, Homo sapiens
  CDR3 for alpha chain variable domain of TCR clone 132627 (TRAV13-1, TRAJ52)
CAACKRSAGGTSYGKLTF

SEQ ID NO: 265254 - protein, 13 aa, Homo sapiens
  CDR3 for beta chain variable domain of TCR clone 132627 (TRBV12-4, TRBJ1-2)
CASSLRQGKGYTF

SEQ ID NO: 265255 - protein, 13 aa, Homo sapiens
  CDR3 for alpha chain variable domain of TCR clone 132628 (TRAV2, TRAJ43)
TTVLTRGNNDMRF

SEQ ID NO: 265256 - protein, 16 aa, Homo sapiens
  CDR3 for beta chain variable domain of TCR clone 132628 (TRBV4-1, TRBJ2-7)
CASSQEWTSGPLEQYF

SEQ ID NO: 265257 - protein, 13 aa, Homo sapiens
  CDR3 for alpha chain variable domain of TCR clone 132629 (TRAV21, TRAJ27)
CAARPGNAGKSTF

SEQ ID NO: 265258 - protein, 15 aa, Homo sapiens
  CDR3 for beta chain variable domain of TCR clone 132629 (TRBV11-3, TRBJ2-7)
CASSPGPAGSYEQYF

SEQ ID NO: 265259 - protein, 12 aa, Homo sapiens
  CDR3 for alpha chain variable domain of TCR clone 132630 (TRAV12-3, TRAJ17)
CAMTLTGNKLTF

SEQ ID NO: 265260 - protein, 17 aa, Homo sapiens
  CDR3 for beta chain variable domain of TCR clone 132630 (TRBV12-4, TRBJ1-1)
CTSVPAVSGQGGTEAFF

SEQ ID NO: 265261 - protein, 17 aa, Homo sapiens
  CDR3 for alpha chain variable domain of TCR clone 132631 (TRAV13-1, TRAJ28)
CAASPPYSGVGSYQLTF

SEQ ID NO: 265262 - protein, 12 aa, Homo sapiens
  CDR3 for beta chain variable domain of TCR clone 132631 (TRBV11-2, TRBJ2-2)
CASSLPTGELFF

SEQ ID NO: 265263 - protein, 16 aa, Homo sapiens
  CDR3 for alpha chain variable domain of TCR clone 132632 (TRAV26-1, TRAJ52)
CIVSNASGTSYGKLTF

SEQ ID NO: 265264 - protein, 15 aa, Homo sapiens
  CDR3 for beta chain variable domain of TCR clone 132632 (TRBV7-3, TRBJ2-1)
CASSPTGGGEVEQFF

SEQ ID NO: 265265 - protein, 16 aa, Homo sapiens
  CDR3 for alpha chain variable domain of TCR clone 132633 (TRAV3, TRAJ21)
CAVRDIERGNFNKFYF

SEQ ID NO: 265266 - protein, 16 aa, Homo sapiens
  CDR3 for beta chain variable domain of TCR clone 132633 (TRBV12-4, TRBJ1-5)
CASSRPVGGPNQPQHF

SEQ ID NO: 265267 - protein, 14 aa, Homo sapiens
  CDR3 for alpha chain variable domain of TCR clone 132634 (TRAV17, TRAJ57)
CATDPQGGSEKLGF

SEQ ID NO: 265268 - protein, 17 aa, Homo sapiens
  CDR3 for beta chain variable domain of TCR clone 132634 (TRBV5-1, TRBJ2-2)
CASSLAGLSGGTGELFF

SEQ ID NO: 265269 - protein, 15 aa, Homo sapiens
  CDR3 for alpha chain variable domain of TCR clone 132635 (TRAV1-2, TRAJ30)
CAVRPHGNIDDKIIF

SEQ ID NO: 265270 - protein, 13 aa, Homo sapiens
  CDR3 for beta chain variable domain of TCR clone 132635 (TRBV4-1, TRBJ2-7)
CASSQGQAYEQYF

SEQ ID NO: 265271 - protein, 11 aa, Homo sapiens
  CDR3 for alpha chain variable domain of TCR clone 132636 (TRAV12-1, TRAJ40)
CVVRETYKYIF

SEQ ID NO: 265272 - protein, 13 aa, Homo sapiens
  CDR3 for beta chain variable domain of TCR clone 132636 (TRBV7-9, TRBJ1-5)
CASSLRNDQPQHF

SEQ ID NO: 265273 - protein, 13 aa, Homo sapiens
  CDR3 for alpha chain variable domain of TCR clone 132637 (TRAV3, TRAJ21)
CAVREPDFNTFYF

SEQ ID NO: 265274 - protein, 12 aa, Homo sapiens
  CDR3 for beta chain variable domain of TCR clone 132637 (TRBV5-1, TRBJ2-4)
LAGEWTKNIQYF

SEQ ID NO: 265275 - protein, 15 aa, Homo sapiens
  CDR3 for alpha chain variable domain of TCR clone 132638 (TRAV21, TRAJ24)
CAARSSTDSWGKLKF

SEQ ID NO: 265276 - protein, 11 aa, Homo sapiens
  CDR3 for beta chain variable domain of TCR clone 132638 (TRBV11-2, TRBJ2-2)
CASSLPGELFF

SEQ ID NO: 265277 - protein, 11 aa, Homo sapiens
  CDR3 for alpha chain variable domain of TCR clone 132639 (TRAV1-2, TRAJ40)
CAVPGTYKYIF

SEQ ID NO: 265278 - protein, 15 aa, Homo sapiens
  CDR3 for beta chain variable domain of TCR clone 132639 (TRBV7-9, TRBJ1-5)
CASSQGHQPNQPQHF

SEQ ID NO: 265279 - protein, 14 aa, Homo sapiens
  CDR3 for alpha chain variable domain of TCR clone 132640 (TRAV36/DV7, TRAJ57)
CAAGFPGGSEKLVF

SEQ ID NO: 265280 - protein, 12 aa, Homo sapiens
  CDR3 for beta chain variable domain of TCR clone 132640 (TRBV19, TRBJ2-7)
CASTSGTYEQYF

SEQ ID NO: 265281 - protein, 12 aa, Homo sapiens
  CDR3 for alpha chain variable domain of TCR clone 132641 (TRAV20, TRAJ17)
CAMTLTGNKLTF

SEQ ID NO: 265282 - protein, 15 aa, Homo sapiens
  CDR3 for beta chain variable domain of TCR clone 132641 (TRBV20-1, TRBJ2-7)
CSARDWVSGMDEQYF

SEQ ID NO: 265283 - protein, 13 aa, Homo sapiens
  CDR3 for alpha chain variable domain of TCR clone 132642 (TRAV12-3, TRAJ13)
CAMTSGGYQKVTF

SEQ ID NO: 265284 - protein, 13 aa, Homo sapiens
  CDR3 for beta chain variable domain of TCR clone 132642 (TRBV4-1, TRBJ2-7)
CASSQQATYEQYF

SEQ ID NO: 265285 - protein, 13 aa, Homo sapiens
  CDR3 for alpha chain variable domain of TCR clone 132643 (TRAV14/DV4, TRAJ34)
CAMRDYNTDKLIF

SEQ ID NO: 265286 - protein, 14 aa, Homo sapiens
  CDR3 for beta chain variable domain of TCR clone 132643 (TRBV25-1, TRBJ1-1)
CASTHLGGNTEAFF

SEQ ID NO: 265287 - protein, 13 aa, Homo sapiens
  CDR3 for alpha chain variable domain of TCR clone 132644 (TRAV13-2, TRAJ11)
CAEGDSGYSTLTF

SEQ ID NO: 265288 - protein, 12 aa, Homo sapiens
  CDR3 for beta chain variable domain of TCR clone 132644 (TRBV7-9, TRBJ1-1)
CAGSLEGTEAFF

SEQ ID NO: 265289 - protein, 14 aa, Homo sapiens
  CDR3 for alpha chain variable domain of TCR clone 132645 (TRAV26-1, TRAJ45)
CIVSVVGGADGLTF

SEQ ID NO: 265290 - protein, 16 aa, Homo sapiens
  CDR3 for beta chain variable domain of TCR clone 132645 (TRBV7-9, TRBJ1-1)
CASSLTQVRSNTEAFF

SEQ ID NO: 265291 - protein, 20 aa, Homo sapiens
  CDR3 for alpha chain variable domain of TCR clone 132646 (TRAV21, TRAJ30)
CAVRRRMTRSSLEKGHDFIF

SEQ ID NO: 265292 - protein, 15 aa, Homo sapiens
  CDR3 for beta chain variable domain of TCR clone 132646 (TRBV6-6, TRBJ2-7)
CASSYLYGGSYEQYF

SEQ ID NO: 265293 - protein, 17 aa, Homo sapiens
  CDR3 for alpha chain variable domain of TCR clone 132647 (TRAV38-2/DV8, TRAJ28)
CAFLTLYSGAGSYQITF

SEQ ID NO: 265294 - protein, 14 aa, Homo sapiens
  CDR3 for beta chain variable domain of TCR clone 132647 (TRBV7-2, TRBJ2-5)
CASSLSGGGETQYF

SEQ ID NO: 265295 - protein, 15 aa, Homo sapiens
  CDR3 for alpha chain variable domain of TCR clone 132648 (TRAV8-4, TRAJ3)
CAVTGENLVQQCFQD

SEQ ID NO: 265296 - protein, 16 aa, Homo sapiens
  CDR3 for beta chain variable domain of TCR clone 132648 (TRBV4-2, TRBJ1-1)
CASSQTGFGMNTEAFF

SEQ ID NO: 265297 - protein, 15 aa, Homo sapiens
  CDR3 for alpha chain variable domain of TCR clone 132649 (TRAV26-1, TRAJ15)
CIVRMANQAGTALIF

SEQ ID NO: 265298 - protein, 15 aa, Homo sapiens
  CDR3 for beta chain variable domain of TCR clone 132649 (TRBV20-1, TRBJ1-1)
CSARKAETSNTEALF

SEQ ID NO: 265299 - protein, 13 aa, Homo sapiens
  CDR3 for alpha chain variable domain of TCR clone 132650 (TRAV20, TRAJ37)
CAGCSSNTGKLIF

SEQ ID NO: 265300 - protein, 14 aa, Homo sapiens
  CDR3 for beta chain variable domain of TCR clone 132650 (TRBV20-1, TRBJ2-5)
CSARDERAGETQYF

SEQ ID NO: 265301 - protein, 13 aa, Homo sapiens
  CDR3 for alpha chain variable domain of TCR clone 132651 (TRAV27, TRAJ57)
CRSAQGLSEKLVF

SEQ ID NO: 265302 - protein, 11 aa, Homo sapiens
  CDR3 for beta chain variable domain of TCR clone 132651 (TRBV11-2, TRBJ1-1)
CASSINTEAFF

SEQ ID NO: 265303 - protein, 13 aa, Homo sapiens
  CDR3 for alpha chain variable domain of TCR clone 132652 (TRAV2, TRAJ40)
CAVVTLGAYKYIF

SEQ ID NO: 265304 - protein, 14 aa, Homo sapiens
  CDR3 for beta chain variable domain of TCR clone 132652 (TRBV19, TRBJ2-1)
CASPTFVLSGEQFF

SEQ ID NO: 265305 - protein, 13 aa, Homo sapiens
  CDR3 for alpha chain variable domain of TCR clone 132653 (TRAV17, TRAJ54)
CATDAMGAQKLVF

SEQ ID NO: 265306 - protein, 15 aa, Homo sapiens
  CDR3 for beta chain variable domain of TCR clone 132653 (TRBV7-3, TRBJ2-1)
CASSPTGGGEVEQFF

SEQ ID NO: 265307 - protein, 16 aa, Homo sapiens
  CDR3 for alpha chain variable domain of TCR clone 132654 (TRAV20, TRAJ52)
CAVLPDGGTSYGKLTF

SEQ ID NO: 265308 - protein, 20 aa, Homo sapiens
  CDR3 for beta chain variable domain of TCR clone 132654 (TRBV7-8, TRBJ2-2)
CASSHLFPGPTIHITGELFF

SEQ ID NO: 265309 - protein, 14 aa, Homo sapiens
  CDR3 for alpha chain variable domain of TCR clone 132655 (TRAV8-3, TRAJ9)
CAVVYNTGGFKTIF

SEQ ID NO: 265310 - protein, 13 aa, Homo sapiens
  CDR3 for beta chain variable domain of TCR clone 132655 (TRBV7-3, TRBJ2-2)
CQQLRRIHRELFF

SEQ ID NO: 265311 - protein, 13 aa, Homo sapiens
  CDR3 for alpha chain variable domain of TCR clone 132656 (TRAV21, TRAJ27)
CDALNTNAGKSTF

SEQ ID NO: 265312 - protein, 12 aa, Homo sapiens
  CDR3 for beta chain variable domain of TCR clone 132656 (TRBV11-2, TRBJ2-2)
CASSLGGGELFF

SEQ ID NO: 265313 - protein, 14 aa, Homo sapiens
  CDR3 for alpha chain variable domain of TCR clone 132657 (TRAV8-4, TRAJ37)
CAVSEPSNTGKLIF

SEQ ID NO: 265314 - protein, 14 aa, Homo sapiens
  CDR3 for beta chain variable domain of TCR clone 132657 (TRBV28, TRBJ2-1)
CAIHRTGARTERFF

SEQ ID NO: 265315 - protein, 14 aa, Homo sapiens
  CDR3 for alpha chain variable domain of TCR clone 132658 (TRAV13-1, TRAJ35)
CAASKGGFGNVLQC

SEQ ID NO: 265316 - protein, 16 aa, Homo sapiens
  CDR3 for beta chain variable domain of TCR clone 132658 (TRBV2, TRBJ1-4)
CASNLLQGATNEKLFF

SEQ ID NO: 265317 - protein, 14 aa, Homo sapiens
  CDR3 for alpha chain variable domain of TCR clone 132659 (TRAV1-2, TRAJ8)
CAVREDTGFQKLVF

SEQ ID NO: 265318 - protein, 15 aa, Homo sapiens
  CDR3 for beta chain variable domain of TCR clone 132659 (TRBV7-9, TRBJ1-6)
CASSSPGRGNSPLYF

SEQ ID NO: 265319 - protein, 14 aa, Homo sapiens
  CDR3 for alpha chain variable domain of TCR clone 132660 (TRAV12-2, TRAJ9)
YAVNALEGGFKTIF

SEQ ID NO: 265320 - protein, 16 aa, Homo sapiens
  CDR3 for beta chain variable domain of TCR clone 132660 (TRBV11-2, TRBJ2-7)
CASSPLAGGPRYGQYF

SEQ ID NO: 265321 - protein, 12 aa, Homo sapiens
  CDR3 for alpha chain variable domain of TCR clone 132661 (TRAV12-1, TRAJ40)
CVVYSGTYKYIF

SEQ ID NO: 265322 - protein, 22 aa, Homo sapiens
  CDR3 for beta chain variable domain of TCR clone 132661 (TRBV7-6, TRBJ2-1)
SRTRPCIAGPAAWGGGADEQFF

SEQ ID NO: 265323 - protein, 15 aa, Homo sapiens
  CDR3 for alpha chain variable domain of TCR clone 132662 (TRAV20, TRAJ43)
CAVQAGKSSNNDKRF

SEQ ID NO: 265324 - protein, 14 aa, Homo sapiens
  CDR3 for beta chain variable domain of TCR clone 132662 (TRBV27, TRBJ2-1)
CASRHLGGGKEQFF

SEQ ID NO: 265325 - protein, 16 aa, Homo sapiens
  CDR3 for alpha chain variable domain of TCR clone 132663 (TRAV30, TRAJ24)
CGTEIVDADSWGRFQF

SEQ ID NO: 265326 - protein, 15 aa, Homo sapiens
  CDR3 for beta chain variable domain of TCR clone 132663 (TRBV20-1, TRBJ2-7)
CSARDRVSGMDEQYF

SEQ ID NO: 265327 - protein, 17 aa, Homo sapiens
  CDR3 for alpha chain variable domain of TCR clone 132664 (TRAV3, TRAJ42)
CAVRDRDYGGSQGNLIF

SEQ ID NO: 265328 - protein, 15 aa, Homo sapiens
  CDR3 for beta chain variable domain of TCR clone 132664 (TRBV2, TRBJ2-7)
RASSEGLARSYEQYF

SEQ ID NO: 265329 - protein, 13 aa, Homo sapiens
  CDR3 for alpha chain variable domain of TCR clone 132665 (TRAV17, TRAJ9)
CATAITGGFKTIF

SEQ ID NO: 265330 - protein, 16 aa, Homo sapiens
  CDR3 for beta chain variable domain of TCR clone 132665 (TRBV15, TRBJ2-1)
CATSRSLAGGYNEQFF

SEQ ID NO: 265331 - protein, 19 aa, Homo sapiens
  CDR3 for alpha chain variable domain of TCR clone 132666 (TRAV26-1, TRAJ52)
CIVRAHRNAGGTSYGKLTF

SEQ ID NO: 265332 - protein, 11 aa, Homo sapiens
  CDR3 for beta chain variable domain of TCR clone 132666 (TRBV11-2, TRBJ1-1)
CASSINTEAFF

SEQ ID NO: 265333 - protein, 17 aa, Homo sapiens
  CDR3 for alpha chain variable domain of TCR clone 132667 (TRAV3, TRAJ42)
CAVRDRDYGGSQGNLIF

SEQ ID NO: 265334 - protein, 14 aa, Homo sapiens
  CDR3 for beta chain variable domain of TCR clone 132667 (TRBV12-5, TRBJ2-5)
CASGSRTHQGTQYF

SEQ ID NO: 265335 - protein, 11 aa, Homo sapiens
  CDR3 for alpha chain variable domain of TCR clone 132668 (TRAV1-1, TRAJ23)
CAVRQGGKLLF

SEQ ID NO: 265336 - protein, 13 aa, Homo sapiens
  CDR3 for beta chain variable domain of TCR clone 132668 (TRBV7-3, TRBJ1-1)
CASSQDWGAEAFF

SEQ ID NO: 265337 - protein, 12 aa, Homo sapiens
  CDR3 for alpha chain variable domain of TCR clone 132669 (TRAV21, TRAJ49)
CAVTNTGNQFYF

SEQ ID NO: 265338 - protein, 17 aa, Homo sapiens
  CDR3 for beta chain variable domain of TCR clone 132669 (TRBV13, TRBJ2-3)
CASSLSRGAGGRNTQYF

SEQ ID NO: 265339 - protein, 13 aa, Homo sapiens
  CDR3 for alpha chain variable domain of TCR clone 132670 (TRAV26-1, TRAJ48)
CIVRVVGDEKLTF

SEQ ID NO: 265340 - protein, 15 aa, Homo sapiens
  CDR3 for beta chain variable domain of TCR clone 132670 (TRBV7-9, TRBJ1-6)
CASSSPGRGNSPLHF

SEQ ID NO: 265341 - protein, 12 aa, Homo sapiens
  CDR3 for alpha chain variable domain of TCR clone 132671 (TRAV36/DV7, TRAJ37)
CACYGNTGKLIS

SEQ ID NO: 265342 - protein, 13 aa, Homo sapiens
  CDR3 for beta chain variable domain of TCR clone 132671 (TRBV10-3, TRBJ2-7)
CASKLAVNYEQYF

SEQ ID NO: 265343 - protein, 14 aa, Homo sapiens
  CDR3 for alpha chain variable domain of TCR clone 132672 (TRAV25, TRAJ9)
CAGPGNAGGFKTIF

SEQ ID NO: 265344 - protein, 14 aa, Homo sapiens
  CDR3 for beta chain variable domain of TCR clone 132672 (TRBV12-5, TRBJ2-5)
CASGSRTHQETQYF

SEQ ID NO: 265345 - protein, 14 aa, Homo sapiens
  CDR3 for alpha chain variable domain of TCR clone 132673 (TRAV36/DV7, TRAJ32)
CAVGHVGATNKLIF

SEQ ID NO: 265346 - protein, 15 aa, Homo sapiens
  CDR3 for beta chain variable domain of TCR clone 132673 (TRBV27, TRBJ2-1)
CASSNGGGSSNEQFF

SEQ ID NO: 265347 - protein, 12 aa, Homo sapiens
  CDR3 for alpha chain variable domain of TCR clone 132674 (TRAV1-2, TRAJ17)
CAVRAAGNKITF

SEQ ID NO: 265348 - protein, 16 aa, Homo sapiens
  CDR3 for beta chain variable domain of TCR clone 132674 (TRBV20-1, TRBJ2-1)
CSAPGLAGSYSDEQFF

SEQ ID NO: 265349 - protein, 14 aa, Homo sapiens
  CDR3 for alpha chain variable domain of TCR clone 132675 (TRAV9-2, TRAJ39)
CALYIYNAGNMLTF

SEQ ID NO: 265350 - protein, 13 aa, Homo sapiens
  CDR3 for beta chain variable domain of TCR clone 132675 (TRBV19, TRBJ2-5)
CASSMGGAGTQYF

SEQ ID NO: 265351 - protein, 12 aa, Homo sapiens
  CDR3 for alpha chain variable domain of TCR clone 132676 (TRAV13-1, TRAJ21)
CAAKEGFNKFYF

SEQ ID NO: 265352 - protein, 19 aa, Homo sapiens
  CDR3 for beta chain variable domain of TCR clone 132676 (TRBV2, TRBJ2-7)
CASSGDETSGRANDYEQYF

SEQ ID NO: 265353 - protein, 14 aa, Homo sapiens
  CDR3 for alpha chain variable domain of TCR clone 132677 (TRAV1-2, TRAJ16)
CAVNRFSDGQKLLF

SEQ ID NO: 265354 - protein, 13 aa, Homo sapiens
  CDR3 for beta chain variable domain of TCR clone 132677 (TRBV6-1, TRBJ1-2)
CASSVGQGTGYTF

SEQ ID NO: 265355 - protein, 17 aa, Homo sapiens
  CDR3 for alpha chain variable domain of TCR clone 132678 (TRAV23/DV6, TRAJ57)
CAASSTLSQGGSEKLVF

SEQ ID NO: 265356 - protein, 14 aa, Homo sapiens
  CDR3 for beta chain variable domain of TCR clone 132678 (TRBV25-1, TRBJ1-1)
CANTHLGGNTEAFF

SEQ ID NO: 265357 - protein, 12 aa, Homo sapiens
  CDR3 for alpha chain variable domain of TCR clone 132679 (TRAV12-1, TRAJ40)
CVFYSGTYQYIF

SEQ ID NO: 265358 - protein, 18 aa, Homo sapiens
  CDR3 for beta chain variable domain of TCR clone 132679 (TRBV12-4, TRBJ2-2)
CASSLVAGTRGRTGELFF

SEQ ID NO: 265359 - protein, 11 aa, Homo sapiens
  CDR3 for alpha chain variable domain of TCR clone 132680 (TRAV1-2, TRAJ31)
CAVNNNARLMF

SEQ ID NO: 265360 - protein, 12 aa, Homo sapiens
  CDR3 for beta chain variable domain of TCR clone 132680 (TRBV2, TRBJ2-1)
CAKREGYNEQFF

SEQ ID NO: 265361 - protein, 16 aa, Homo sapiens
  CDR3 for alpha chain variable domain of TCR clone 132681 (TRAV16, TRAJ52)
CALSAAGGTSYGKLTF

SEQ ID NO: 265362 - protein, 17 aa, Homo sapiens
  CDR3 for beta chain variable domain of TCR clone 132681 (TRBV11-2, TRBJ2-1)
CASSLYPPGVECNEQFF

SEQ ID NO: 265363 - protein, 10 aa, Homo sapiens
  CDR3 for alpha chain variable domain of TCR clone 132682 (TRAV1-2, TRAJ20)
CAVTDYKLSF

SEQ ID NO: 265364 - protein, 12 aa, Homo sapiens
  CDR3 for beta chain variable domain of TCR clone 132682 (TRBV20-1, TRBJ2-1)
CSARLGTDEQFF

SEQ ID NO: 265365 - protein, 15 aa, Homo sapiens
  CDR3 for alpha chain variable domain of TCR clone 132683 (TRAV4, TRAJ26)
CLVGDMNNYGQNFVL

SEQ ID NO: 265366 - protein, 16 aa, Homo sapiens
  CDR3 for beta chain variable domain of TCR clone 132683 (TRBV28, TRBJ1-4)
CASSSRTGAANEKLFF

SEQ ID NO: 265367 - protein, 15 aa, Homo sapiens
  CDR3 for alpha chain variable domain of TCR clone 132684 (TRAV26-1, TRAJ29)
CIVRVEGSGNTPLVF

SEQ ID NO: 265368 - protein, 15 aa, Homo sapiens
  CDR3 for beta chain variable domain of TCR clone 132684 (TRBV12-4, TRBJ1-1)
CQQQDRVVANTESFF

SEQ ID NO: 265369 - protein, 14 aa, Homo sapiens
  CDR3 for alpha chain variable domain of TCR clone 132685 (TRAV12-2, TRAJ13)
CAVKKTWGYQKVTF

SEQ ID NO: 265370 - protein, 12 aa, Homo sapiens
  CDR3 for beta chain variable domain of TCR clone 132685 (TRBV12-4, TRBJ1-2)
CASSFIWLHLRF

SEQ ID NO: 265371 - protein, 14 aa, Homo sapiens
  CDR3 for alpha chain variable domain of TCR clone 132686 (TRAV12-1, TRAJ17)
CVVNYKAAGNKLTF

SEQ ID NO: 265372 - protein, 13 aa, Homo sapiens
  CDR3 for beta chain variable domain of TCR clone 132686 (TRBV28, TRBJ2-5)
CASSFAGGETQYF

SEQ ID NO: 265373 - protein, 12 aa, Homo sapiens
  CDR3 for alpha chain variable domain of TCR clone 132687 (TRAV23/DV6, TRAJ32)
CSMPGATNKPIF

SEQ ID NO: 265374 - protein, 17 aa, Homo sapiens
  CDR3 for beta chain variable domain of TCR clone 132687 (TRBV13, TRBJ2-3)
CASSSLGTSGLTDTQYF

SEQ ID NO: 265375 - protein, 11 aa, Homo sapiens
  CDR3 for alpha chain variable domain of TCR clone 132688 (TRAV23/DV6, TRAJ48)
CAPRWGEKLTF

SEQ ID NO: 265376 - protein, 13 aa, Homo sapiens
  CDR3 for beta chain variable domain of TCR clone 132688 (TRBV12-4, TRBJ2-5)
CASSPGTEGTQYF

SEQ ID NO: 265377 - protein, 16 aa, Homo sapiens
  CDR3 for alpha chain variable domain of TCR clone 132689 (TRAV30, TRAJ24)
CGTEIVDADSWGKFQF

SEQ ID NO: 265378 - protein, 13 aa, Homo sapiens
  CDR3 for beta chain variable domain of TCR clone 132689 (TRBV4-1, TRBJ2-2)
CASSQENNGELFF

SEQ ID NO: 265379 - protein, 14 aa, Homo sapiens
  CDR3 for alpha chain variable domain of TCR clone 132690 (TRAV35, TRAJ33)
CAGSSQDSNYQLIW

SEQ ID NO: 265380 - protein, 15 aa, Homo sapiens
  CDR3 for beta chain variable domain of TCR clone 132690 (TRBV20-1, TRBJ2-7)
CSAECGTSGAYEQYF

SEQ ID NO: 265381 - protein, 14 aa, Homo sapiens
  CDR3 for alpha chain variable domain of TCR clone 132691 (TRAV12-2, TRAJ44)
CAVNPAGTASKLTF

SEQ ID NO: 265382 - protein, 14 aa, Homo sapiens
  CDR3 for beta chain variable domain of TCR clone 132691 (TRBV19, TRBJ2-7)
CASTVQGRPYEQYF

SEQ ID NO: 265383 - protein, 14 aa, Homo sapiens
  CDR3 for alpha chain variable domain of TCR clone 132692 (TRAV1-2, TRAJ8)
CAVREDTGFQKLVF

SEQ ID NO: 265384 - protein, 15 aa, Homo sapiens
  CDR3 for beta chain variable domain of TCR clone 132692 (TRBV4-3, TRBJ2-7)
CASSQDLGSSYEQYF

SEQ ID NO: 265385 - protein, 14 aa, Homo sapiens
  CDR3 for alpha chain variable domain of TCR clone 132693 (TRAV4, TRAJ20)
CLVGDFTNDYKLSF

SEQ ID NO: 265386 - protein, 15 aa, Homo sapiens
  CDR3 for beta chain variable domain of TCR clone 132693 (TRBV9, TRBJ1-6)
CASSVAGTGDSPLHF

SEQ ID NO: 265387 - protein, 14 aa, Homo sapiens
  CDR3 for alpha chain variable domain of TCR clone 132694 (TRAV12-1, TRAJ4)
CGEQRSGGYNKLIF

SEQ ID NO: 265388 - protein, 14 aa, Homo sapiens
  CDR3 for beta chain variable domain of TCR clone 132694 (TRBV25-1, TRBJ1-1)
CASTHLGGNTEAFF

SEQ ID NO: 265389 - protein, 17 aa, Homo sapiens
  CDR3 for alpha chain variable domain of TCR clone 132695 (TRAV3, TRAJ6)
CAVRGGPRAGGSYIPTF

SEQ ID NO: 265390 - protein, 13 aa, Homo sapiens
  CDR3 for beta chain variable domain of TCR clone 132695 (TRBV4-2, TRBJ1-1)
CASSQAGNTEAFF

SEQ ID NO: 265391 - protein, 15 aa, Homo sapiens
  CDR3 for alpha chain variable domain of TCR clone 132696 (TRAV12-2, TRAJ43)
CAFDMRFGAGTRLTV

SEQ ID NO: 265392 - protein, 13 aa, Homo sapiens
  CDR3 for beta chain variable domain of TCR clone 132696 (TRBV12-5, TRBJ2-3)
CASGDRQSDTQYF

SEQ ID NO: 265393 - protein, 12 aa, Homo sapiens
  CDR3 for alpha chain variable domain of TCR clone 132697 (TRAV3, TRAJ20)
CAVRDPDYKLSF

SEQ ID NO: 265394 - protein, 15 aa, Homo sapiens
  CDR3 for beta chain variable domain of TCR clone 132697 (TRBV18, TRBJ2-5)
CASTDRGPRQETQYF

SEQ ID NO: 265395 - protein, 11 aa, Homo sapiens
  CDR3 for alpha chain variable domain of TCR clone 132698 (TRAV3, TRAJ21)
CAVGNFNNFYF

SEQ ID NO: 265396 - protein, 16 aa, Homo sapiens
  CDR3 for beta chain variable domain of TCR clone 132698 (TRBV19, TRBJ2-1)
CASSKARPSSYNEQFF

SEQ ID NO: 265397 - protein, 11 aa, Homo sapiens
  CDR3 for alpha chain variable domain of TCR clone 132699 (TRAV21, TRAJ20)
CCRVNDYKLSF

SEQ ID NO: 265398 - protein, 15 aa, Homo sapiens
  CDR3 for beta chain variable domain of TCR clone 132699 (TRBV2, TRBJ2-2)
CASSRQGPNTGELSF

SEQ ID NO: 265399 - protein, 17 aa, Homo sapiens
  CDR3 for alpha chain variable domain of TCR clone 132700 (TRAV3, TRAJ6)
CAVRDGPRAGGSYIPTF

SEQ ID NO: 265400 - protein, 14 aa, Homo sapiens
  CDR3 for beta chain variable domain of TCR clone 132700 (TRBV19, TRBJ2-7)
CASSMGQGAIEQYF

SEQ ID NO: 265401 - protein, 13 aa, Homo sapiens
  CDR3 for alpha chain variable domain of TCR clone 132701 (TRAV12-3, TRAJ33)
CAMSVNSNHQLIW

SEQ ID NO: 265402 - protein, 13 aa, Homo sapiens
  CDR3 for beta chain variable domain of TCR clone 132701 (TRBV7-2, TRBJ2-2)
CASSLAVTGGLFF

SEQ ID NO: 265403 - protein, 15 aa, Homo sapiens
  CDR3 for alpha chain variable domain of TCR clone 132702 (TRAV17, TRAJ42)
CATDHYGGSQGNLIF

SEQ ID NO: 265404 - protein, 18 aa, Homo sapiens
  CDR3 for beta chain variable domain of TCR clone 132702 (TRBV6-6, TRBJ1-3)
CASSYSKWDSISGNTIYF

SEQ ID NO: 265405 - protein, 15 aa, Homo sapiens
  CDR3 for alpha chain variable domain of TCR clone 132703 (TRAV26-1, TRAJ23)
CIVRVLNNQGGKLIF

SEQ ID NO: 265406 - protein, 15 aa, Homo sapiens
  CDR3 for beta chain variable domain of TCR clone 132703 (TRBV7-3, TRBJ2-1)
CARSFGQSNYNEQFF

SEQ ID NO: 265407 - protein, 11 aa, Homo sapiens
  CDR3 for alpha chain variable domain of TCR clone 132704 (TRAV3, TRAJ32)
CAVREGIMVVL

SEQ ID NO: 265408 - protein, 13 aa, Homo sapiens
  CDR3 for beta chain variable domain of TCR clone 132704 (TRBV7-9, TRBJ1-5)
CASSLRNDQPQHF

SEQ ID NO: 265409 - protein, 16 aa, Homo sapiens
  CDR3 for alpha chain variable domain of TCR clone 132705 (TRAV30, TRAJ24)
CGTEIVDADSGGKFQF

SEQ ID NO: 265410 - protein, 16 aa, Homo sapiens
  CDR3 for beta chain variable domain of TCR clone 132705 (TRBV12-5, TRBJ2-5)
CASGPRTSGNQETQYF

SEQ ID NO: 265411 - protein, 14 aa, Homo sapiens
  CDR3 for alpha chain variable domain of TCR clone 132706 (TRAV12-2, TRAJ17)
CAVLFKAAGNKLTF

SEQ ID NO: 265412 - protein, 13 aa, Homo sapiens
  CDR3 for beta chain variable domain of TCR clone 132706 (TRBV20-1, TRBJ2-1)
CSASTGTSNEQFF

SEQ ID NO: 265413 - protein, 13 aa, Homo sapiens
  CDR3 for alpha chain variable domain of TCR clone 132707 (TRAV3, TRAJ21)
CAVREPDFNKFYF

SEQ ID NO: 265414 - protein, 14 aa, Homo sapiens
  CDR3 for beta chain variable domain of TCR clone 132707 (TRBV4-1, TRBJ2-2)
CASSQAVNAGELFF

SEQ ID NO: 265415 - protein, 15 aa, Homo sapiens
  CDR3 for alpha chain variable domain of TCR clone 132708 (TRAV3, TRAJ22)
CAVRDRGGSARQVTF

SEQ ID NO: 265416 - protein, 16 aa, Homo sapiens
  CDR3 for beta chain variable domain of TCR clone 132708 (TRBV5-4, TRBJ2-3)
CASQQPGAGGADTQYF

SEQ ID NO: 265417 - protein, 13 aa, Homo sapiens
  CDR3 for alpha chain variable domain of TCR clone 132709 (TRAV27, TRAJ42)
CAGARGSQGKLIF

SEQ ID NO: 265418 - protein, 15 aa, Homo sapiens
  CDR3 for beta chain variable domain of TCR clone 132709 (TRBV10-3, TRBJ2-2)
CAIRTDREDTGELFF

SEQ ID NO: 265419 - protein, 12 aa, Homo sapiens
  CDR3 for alpha chain variable domain of TCR clone 132710 (TRAV12-1, TRAJ40)
CVVYSGTYKYIF

SEQ ID NO: 265420 - protein, 18 aa, Homo sapiens
  CDR3 for beta chain variable domain of TCR clone 132710 (TRBV11-2, TRBJ2-3)
CPSSLGGASRGAPNTQYF

SEQ ID NO: 265421 - protein, 18 aa, Homo sapiens
  CDR3 for alpha chain variable domain of TCR clone 132711 (TRAV29/DV5, TRAJ53)
CSVLLCSKRGGSNYKLTF

SEQ ID NO: 265422 - protein, 18 aa, Homo sapiens
  CDR3 for beta chain variable domain of TCR clone 132711 (TRBV4-1, TRBJ1-5)
CASSQDPRGQGLNQPQHF

SEQ ID NO: 265423 - protein, 13 aa, Homo sapiens
  CDR3 for alpha chain variable domain of TCR clone 132712 (TRAV17, TRAJ9)
CPTDYTGGFKTIF

SEQ ID NO: 265424 - protein, 14 aa, Homo sapiens
  CDR3 for beta chain variable domain of TCR clone 132712 (TRBV19, TRBJ2-5)
CASSMTGQQETQYF

SEQ ID NO: 265425 - protein, 13 aa, Homo sapiens
  CDR3 for alpha chain variable domain of TCR clone 132713 (TRAV25, TRAJ38)
CPLAAGNNRKLIW

SEQ ID NO: 265426 - protein, 14 aa, Homo sapiens
  CDR3 for beta chain variable domain of TCR clone 132713 (TRBV6-1, TRBJ1-3)
CASVQGGGGNTIYF

SEQ ID NO: 265427 - protein, 13 aa, Homo sapiens
  CDR3 for alpha chain variable domain of TCR clone 132714 (TRAV8-3, TRAJ48)
CAVVPFGNEKLTF

SEQ ID NO: 265428 - protein, 15 aa, Homo sapiens
  CDR3 for beta chain variable domain of TCR clone 132714 (TRBV11-2, TRBJ2-1)
CASSSPSTSYNEQFF

SEQ ID NO: 265429 - protein, 14 aa, Homo sapiens
  CDR3 for alpha chain variable domain of TCR clone 132715 (TRAV30, TRAJ33)
CGTVAPRSNYQLIW

SEQ ID NO: 265430 - protein, 16 aa, Homo sapiens
  CDR3 for beta chain variable domain of TCR clone 132715 (TRBV3-1, TRBJ2-5)
CASSAGQFNGFGTQYF

SEQ ID NO: 265431 - protein, 15 aa, Homo sapiens
  CDR3 for alpha chain variable domain of TCR clone 132716 (TRAV1-2, TRAJ35)
CAVRDREGFGNVLHC

SEQ ID NO: 265432 - protein, 14 aa, Homo sapiens
  CDR3 for beta chain variable domain of TCR clone 132716 (TRBV28, TRBJ1-4)
CASSRTVGNEKLFL

SEQ ID NO: 265433 - protein, 14 aa, Homo sapiens
  CDR3 for alpha chain variable domain of TCR clone 132717 (TRAV1-2, TRAJ8)
CAVREDTGFQKLVF

SEQ ID NO: 265434 - protein, 14 aa, Homo sapiens
  CDR3 for beta chain variable domain of TCR clone 132717 (TRBV7-8, TRBJ2-3)
CASSLDRGTDTQYF

SEQ ID NO: 265435 - protein, 16 aa, Homo sapiens
  CDR3 for alpha chain variable domain of TCR clone 132718 (TRAV3, TRAJ37)
CAVRGKGSGNTGKQIF

SEQ ID NO: 265436 - protein, 13 aa, Homo sapiens
  CDR3 for beta chain variable domain of TCR clone 132718 (TRBV4-2, TRBJ1-1)
CASSQAGNTEAFF

SEQ ID NO: 265437 - protein, 16 aa, Homo sapiens
  CDR3 for alpha chain variable domain of TCR clone 132719 (TRAV30, TRAJ24)
CGSEIVDADSWGKFQF

SEQ ID NO: 265438 - protein, 12 aa, Homo sapiens
  CDR3 for beta chain variable domain of TCR clone 132719 (TRBV11-2, TRBJ2-2)
CASSLPTGELFF

SEQ ID NO: 265439 - protein, 12 aa, Homo sapiens
  CDR3 for alpha chain variable domain of TCR clone 132720 (TRAV21, TRAJ13)
PAPSGGYQKVTF

SEQ ID NO: 265440 - protein, 15 aa, Homo sapiens
  CDR3 for beta chain variable domain of TCR clone 132720 (TRBV7-9, TRBJ1-6)
CASSSPGRGNSPLHF

SEQ ID NO: 265441 - protein, 16 aa, Homo sapiens
  CDR3 for alpha chain variable domain of TCR clone 132721 (TRAV16, TRAJ4)
CALSRMFSGGYNKLIF

SEQ ID NO: 265442 - protein, 16 aa, Homo sapiens
  CDR3 for beta chain variable domain of TCR clone 132721 (TRBV24-1, TRBJ2-3)
CATSDPGTGATDTHYF

SEQ ID NO: 265443 - protein, 14 aa, Homo sapiens
  CDR3 for alpha chain variable domain of TCR clone 132722 (TRAV13-1, TRAJ6)
CAAIITGGSYIPTF

SEQ ID NO: 265444 - protein, 14 aa, Homo sapiens
  CDR3 for beta chain variable domain of TCR clone 132722 (TRBV6-3, TRBJ2-1)
CASLHSAYYNEQFF

SEQ ID NO: 265445 - protein, 15 aa, Homo sapiens
  CDR3 for alpha chain variable domain of TCR clone 132723 (TRAV40, TRAJ45)
CLLGDLGGGADGLNF

SEQ ID NO: 265446 - protein, 13 aa, Homo sapiens
  CDR3 for beta chain variable domain of TCR clone 132723 (TRBV7-9, TRBJ1-2)
CASSLKQNYGYTF

SEQ ID NO: 265447 - protein, 14 aa, Homo sapiens
  CDR3 for alpha chain variable domain of TCR clone 132724 (TRAV12-1, TRAJ12)
CVVTRMDSSYKLIF

SEQ ID NO: 265448 - protein, 15 aa, Homo sapiens
  CDR3 for beta chain variable domain of TCR clone 132724 (TRBV27, TRBJ1-4)
CASSAQQDLNEKLFF

SEQ ID NO: 265449 - protein, 18 aa, Homo sapiens
  CDR3 for alpha chain variable domain of TCR clone 132725 (TRAV21, TRAJ52)
CAVRPLPAGGTSYGKLTF

SEQ ID NO: 265450 - protein, 17 aa, Homo sapiens
  CDR3 for beta chain variable domain of TCR clone 132725 (TRBV13, TRBJ2-3)
CASSLSRVAGGRNTQYF

SEQ ID NO: 265451 - protein, 15 aa, Homo sapiens
  CDR3 for alpha chain variable domain of TCR clone 132726 (TRAV4, TRAJ39)
CLVGPNNNAGNMLTF

SEQ ID NO: 265452 - protein, 15 aa, Homo sapiens
  CDR3 for beta chain variable domain of TCR clone 132726 (TRBV27, TRBJ2-1)
CASSNGGGSSNEQFF

SEQ ID NO: 265453 - protein, 14 aa, Homo sapiens
  CDR3 for alpha chain variable domain of TCR clone 132727 (TRAV20, TRAJ54)
CAVQAGRGAQKLVF

SEQ ID NO: 265454 - protein, 20 aa, Homo sapiens
  CDR3 for beta chain variable domain of TCR clone 132727 (TRBV7-8, TRBJ2-2)
CASSHLFPGPTIHITGELFF

SEQ ID NO: 265455 - protein, 15 aa, Homo sapiens
  CDR3 for alpha chain variable domain of TCR clone 132728 (TRAV16, TRAJ16)
CALQGGGSDGQKLLF

SEQ ID NO: 265456 - protein, 15 aa, Homo sapiens
  CDR3 for beta chain variable domain of TCR clone 132728 (TRBV20-1, TRBJ2-7)
CSARYRVSGMDEQYF

SEQ ID NO: 265457 - protein, 12 aa, Homo sapiens
  CDR3 for alpha chain variable domain of TCR clone 132729 (TRAV27, TRAJ58)
CAGARDTSRLTF

SEQ ID NO: 265458 - protein, 14 aa, Homo sapiens
  CDR3 for beta chain variable domain of TCR clone 132729 (TRBV29-1, TRBJ2-3)
CSVEPGTRTDTQYF

SEQ ID NO: 265459 - protein, 15 aa, Homo sapiens
  CDR3 for alpha chain variable domain of TCR clone 132730 (TRAV3, TRAJ22)
CAVRDRGGSARQLTF

SEQ ID NO: 265460 - protein, 14 aa, Homo sapiens
  CDR3 for beta chain variable domain of TCR clone 132730 (TRBV19, TRBJ2-1)
CASSRLASINEQFV

SEQ ID NO: 265461 - protein, 10 aa, Homo sapiens
  CDR3 for alpha chain variable domain of TCR clone 132731 (TRAV2, TRAJ34)
CAVVNDKLVF

SEQ ID NO: 265462 - protein, 20 aa, Homo sapiens
  CDR3 for beta chain variable domain of TCR clone 132731 (TRBV19, TRBJ2-1)
CASSISRTVTSTRLNNEQFF

SEQ ID NO: 265463 - protein, 13 aa, Homo sapiens
  CDR3 for alpha chain variable domain of TCR clone 132732 (TRAV29/DV5, TRAJ31)
CAASRNNNARLMF

SEQ ID NO: 265464 - protein, 13 aa, Homo sapiens
  CDR3 for beta chain variable domain of TCR clone 132732 (TRBV2, TRBJ1-5)
CATAGPGNQPQHF

SEQ ID NO: 265465 - protein, 16 aa, Homo sapiens
  CDR3 for alpha chain variable domain of TCR clone 132733 (TRAV12-3, TRAJ53)
CAMSPGSGGSNYKLTF

SEQ ID NO: 265466 - protein, 14 aa, Homo sapiens
  CDR3 for beta chain variable domain of TCR clone 132733 (TRBV4-2, TRBJ2-7)
CASSPNRAPYEQYF

SEQ ID NO: 265467 - protein, 14 aa, Homo sapiens
  CDR3 for alpha chain variable domain of TCR clone 132734 (TRAV29/DV5, TRAJ36)
CAARRKTGANNLFF

SEQ ID NO: 265468 - protein, 15 aa, Homo sapiens
  CDR3 for beta chain variable domain of TCR clone 132734 (TRBV15, TRBJ1-4)
CATSRDMGSYEKLFF

SEQ ID NO: 265469 - protein, 14 aa, Homo sapiens
  CDR3 for alpha chain variable domain of TCR clone 132735 (TRAV8-3, TRAJ4)
CAVGASGGYNKLIF

SEQ ID NO: 265470 - protein, 13 aa, Homo sapiens
  CDR3 for beta chain variable domain of TCR clone 132735 (TRBV18, TRBJ2-5)
CASSLQGQETQYV

SEQ ID NO: 265471 - protein, 14 aa, Homo sapiens
  CDR3 for alpha chain variable domain of TCR clone 132736 (TRAV6, TRAJ37)
CALGSQGNTGKLIF

SEQ ID NO: 265472 - protein, 13 aa, Homo sapiens
  CDR3 for beta chain variable domain of TCR clone 132736 (TRBV7-9, TRBJ1-2)
CASSLKQNYGYTF

SEQ ID NO: 265473 - protein, 14 aa, Homo sapiens
  CDR3 for alpha chain variable domain of TCR clone 132737 (TRAV12-2, TRAJ40)
CAVKIPSGTYKYIF

SEQ ID NO: 265474 - protein, 15 aa, Homo sapiens
  CDR3 for beta chain variable domain of TCR clone 132737 (TRBV25-1, TRBJ1-4)
CASSPGDSTNEKLFF

SEQ ID NO: 265475 - protein, 11 aa, Homo sapiens
  CDR3 for alpha chain variable domain of TCR clone 132738 (TRAV35, TRAJ30)
CAPGGDDKIIF

SEQ ID NO: 265476 - protein, 17 aa, Homo sapiens
  CDR3 for beta chain variable domain of TCR clone 132738 (TRBV7-3, TRBJ2-3)
CASSLMKRMRGADTQYF

SEQ ID NO: 265477 - protein, 13 aa, Homo sapiens
  CDR3 for alpha chain variable domain of TCR clone 132739 (TRAV2, TRAJ39)
TTVHHNAGNMLTF

SEQ ID NO: 265478 - protein, 16 aa, Homo sapiens
  CDR3 for beta chain variable domain of TCR clone 132739 (TRBV24-1, TRBJ2-3)
CATSGYRDRDTDTQYF

SEQ ID NO: 265479 - protein, 13 aa, Homo sapiens
  CDR3 for alpha chain variable domain of TCR clone 132740 (TRAV13-2, TRAJ40)
GAEFTSGTYKYIF

SEQ ID NO: 265480 - protein, 14 aa, Homo sapiens
  CDR3 for beta chain variable domain of TCR clone 132740 (TRBV10-2, TRBJ1-5)
CASSSTGRNQPQHF

SEQ ID NO: 265481 - protein, 14 aa, Homo sapiens
  CDR3 for alpha chain variable domain of TCR clone 132741 (TRAV1-2, TRAJ6)
CAVSLSGGSYIPTF

SEQ ID NO: 265482 - protein, 15 aa, Homo sapiens
  CDR3 for beta chain variable domain of TCR clone 132741 (TRBV28, TRBJ2-7)
CASSPGGRGFYEQYI

SEQ ID NO: 265483 - protein, 13 aa, Homo sapiens
  CDR3 for alpha chain variable domain of TCR clone 132742 (TRAV8-3, TRAJ4)
WVFYSGGYNKLSF

SEQ ID NO: 265484 - protein, 16 aa, Homo sapiens
  CDR3 for beta chain variable domain of TCR clone 132742 (TRBV7-8, TRBJ2-3)
CASSTEGQRETDTQYF

SEQ ID NO: 265485 - protein, 11 aa, Homo sapiens
  CDR3 for alpha chain variable domain of TCR clone 132743 (TRAV13-1, TRAJ40)
CAVSGTYIYIF

SEQ ID NO: 265486 - protein, 13 aa, Homo sapiens
  CDR3 for beta chain variable domain of TCR clone 132743 (TRBV19, TRBJ1-5)
CASSIGGNQTQHF

SEQ ID NO: 265487 - protein, 12 aa, Homo sapiens
  CDR3 for alpha chain variable domain of TCR clone 132744 (TRAV24, TRAJ26)
CAFNNYGQNFVF

SEQ ID NO: 265488 - protein, 15 aa, Homo sapiens
  CDR3 for beta chain variable domain of TCR clone 132744 (TRBV9, TRBJ1-6)
CASSVAGTGDSPLHF

SEQ ID NO: 265489 - protein, 14 aa, Homo sapiens
  CDR3 for alpha chain variable domain of TCR clone 132745 (TRAV12-3, TRAJ22)
CAMSLFGSARQLTF

SEQ ID NO: 265490 - protein, 11 aa, Homo sapiens
  CDR3 for beta chain variable domain of TCR clone 132745 (TRBV12-4, TRBJ2-2)
CASSSAGELFS

SEQ ID NO: 265491 - protein, 14 aa, Homo sapiens
  CDR3 for alpha chain variable domain of TCR clone 132746 (TRAV8-3, TRAJ4)
CAVGASGGYNKLIF

SEQ ID NO: 265492 - protein, 14 aa, Homo sapiens
  CDR3 for beta chain variable domain of TCR clone 132746 (TRBV7-2, TRBJ2-5)
CASSFTQGQETQYF

SEQ ID NO: 265493 - protein, 17 aa, Homo sapiens
  CDR3 for alpha chain variable domain of TCR clone 132747 (TRAV21, TRAJ24)
CAGIRLRSTDSWWKLQF

SEQ ID NO: 265494 - protein, 15 aa, Homo sapiens
  CDR3 for beta chain variable domain of TCR clone 132747 (TRBV7-2, TRBJ2-3)
CASSPRGLSTDTQYF

SEQ ID NO: 265495 - protein, 15 aa, Homo sapiens
  CDR3 for alpha chain variable domain of TCR clone 132748 (TRAV17, TRAJ57)
CATGPSQGGSEKLVF

SEQ ID NO: 265496 - protein, 18 aa, Homo sapiens
  CDR3 for beta chain variable domain of TCR clone 132748 (TRBV7-9, TRBJ2-7)
CTSSLTTSGSRTWYEQYF

SEQ ID NO: 265497 - protein, 11 aa, Homo sapiens
  CDR3 for alpha chain variable domain of TCR clone 132749 (TRAV2, TRAJ21)
CAVFNFNKFYF

SEQ ID NO: 265498 - protein, 15 aa, Homo sapiens
  CDR3 for beta chain variable domain of TCR clone 132749 (TRBV5-1, TRBJ2-6)
CASSLDPSGANVLTF

SEQ ID NO: 265499 - protein, 13 aa, Homo sapiens
  CDR3 for alpha chain variable domain of TCR clone 132750 (TRAV29/DV5, TRAJ31)
CAASRNNNARLMF

SEQ ID NO: 265500 - protein, 12 aa, Homo sapiens
  CDR3 for beta chain variable domain of TCR clone 132750 (TRBV14, TRBJ2-1)
CASSRLKGEQFF

SEQ ID NO: 265501 - protein, 14 aa, Homo sapiens
  CDR3 for alpha chain variable domain of TCR clone 132751 (TRAV8-3, TRAJ39)
CAVGANNAGTMLTF

SEQ ID NO: 265502 - protein, 12 aa, Homo sapiens
  CDR3 for beta chain variable domain of TCR clone 132751 (TRBV28, TRBJ1-3)
CASVSSGNTIYF

SEQ ID NO: 265503 - protein, 18 aa, Homo sapiens
  CDR3 for alpha chain variable domain of TCR clone 132752 (TRAV21, TRAJ52)
CAVRPSPAGGTSYGKLTF

SEQ ID NO: 265504 - protein, 15 aa, Homo sapiens
  CDR3 for beta chain variable domain of TCR clone 132752 (TRBV11-2, TRBJ2-1)
CASSKNRGLIYEQFF

SEQ ID NO: 265505 - protein, 15 aa, Homo sapiens
  CDR3 for alpha chain variable domain of TCR clone 132753 (TRAV12-1, TRAJ44)
CVVFVNTGTTSKLTF

SEQ ID NO: 265506 - protein, 16 aa, Homo sapiens
  CDR3 for beta chain variable domain of TCR clone 132753 (TRBV20-1, TRBJ2-5)
CSPGGTSGGYMETQYF

SEQ ID NO: 265507 - protein, 15 aa, Homo sapiens
  CDR3 for alpha chain variable domain of TCR clone 132754 (TRAV3, TRAJ23)
CAVRDRGNQVGKLIF

SEQ ID NO: 265508 - protein, 15 aa, Homo sapiens
  CDR3 for beta chain variable domain of TCR clone 132754 (TRBV7-3, TRBJ2-1)
CQQLAPSGSYNEQFF

SEQ ID NO: 265509 - protein, 13 aa, Homo sapiens
  CDR3 for alpha chain variable domain of TCR clone 132755 (TRAV38-2/DV8, TRAJ34)
CAYRNYNTDKLIF

SEQ ID NO: 265510 - protein, 17 aa, Homo sapiens
  CDR3 for beta chain variable domain of TCR clone 132755 (TRBV28, TRBJ2-5)
CASSTPEGDALQETQYF

SEQ ID NO: 265511 - protein, 14 aa, Homo sapiens
  CDR3 for alpha chain variable domain of TCR clone 132756 (TRAV12-1, TRAJ30)
CVVNIGGRDDKIIF

SEQ ID NO: 265512 - protein, 15 aa, Homo sapiens
  CDR3 for beta chain variable domain of TCR clone 132756 (TRBV6-1, TRBJ2-1)
CASSEEGPSYNEQFF

SEQ ID NO: 265513 - protein, 19 aa, Homo sapiens
  CDR3 for alpha chain variable domain of TCR clone 132757 (TRAV8-3, TRAJ8)
LSTSVLWDPMNTGFQKLVF

SEQ ID NO: 265514 - protein, 13 aa, Homo sapiens
  CDR3 for beta chain variable domain of TCR clone 132757 (TRBV10-2, TRBJ2-3)
CARSESGDHTQYF

SEQ ID NO: 265515 - protein, 17 aa, Homo sapiens
  CDR3 for alpha chain variable domain of TCR clone 132758 (TRAV3, TRAJ6)
CAVRDGPRAGGSYIPTF

SEQ ID NO: 265516 - protein, 12 aa, Homo sapiens
  CDR3 for beta chain variable domain of TCR clone 132758 (TRBV14, TRBJ1-1)
CASSQLKGLAFF

SEQ ID NO: 265517 - protein, 15 aa, Homo sapiens
  CDR3 for alpha chain variable domain of TCR clone 132759 (TRAV17, TRAJ57)
CATGPSQVGSEKLVF

SEQ ID NO: 265518 - protein, 15 aa, Homo sapiens
  CDR3 for beta chain variable domain of TCR clone 132759 (TRBV9, TRBJ1-6)
CASSVAGTGDSPLHF

SEQ ID NO: 265519 - protein, 15 aa, Homo sapiens
  CDR3 for alpha chain variable domain of TCR clone 132760 (TRAV2, TRAJ9)
CAVEDRGTGGFKTIF

SEQ ID NO: 265520 - protein, 15 aa, Homo sapiens
  CDR3 for beta chain variable domain of TCR clone 132760 (TRBV6-6, TRBJ2-7)
CASSYSYGGSYEQYF

SEQ ID NO: 265521 - protein, 11 aa, Homo sapiens
  CDR3 for alpha chain variable domain of TCR clone 132761 (TRAV13-1, TRAJ30)
CAASRDDKIIF

SEQ ID NO: 265522 - protein, 15 aa, Homo sapiens
  CDR3 for beta chain variable domain of TCR clone 132761 (TRBV18, TRBJ1-1)
CASSPSSWVNTEAVF

SEQ ID NO: 265523 - protein, 17 aa, Homo sapiens
  CDR3 for alpha chain variable domain of TCR clone 132762 (TRAV26-1, TRAJ21)
CVAKGKFYFGSWTKLNV

SEQ ID NO: 265524 - protein, 15 aa, Homo sapiens
  CDR3 for beta chain variable domain of TCR clone 132762 (TRBV7-2, TRBJ2-1)
CASSSGLAGGNEQFF

SEQ ID NO: 265525 - protein, 17 aa, Homo sapiens
  CDR3 for alpha chain variable domain of TCR clone 132763 (TRAV3, TRAJ12)
CAVRDGGRMDSSYKLIF

SEQ ID NO: 265526 - protein, 14 aa, Homo sapiens
  CDR3 for beta chain variable domain of TCR clone 132763 (TRBV7-9, TRBJ1-2)
CASSRQGANYGCTF

SEQ ID NO: 265527 - protein, 14 aa, Homo sapiens
  CDR3 for alpha chain variable domain of TCR clone 132764 (TRAV25, TRAJ35)
CARRMECFGNVLHC

SEQ ID NO: 265528 - protein, 13 aa, Homo sapiens
  CDR3 for beta chain variable domain of TCR clone 132764 (TRBV7-2, TRBJ1-4)
CASSLAGLEKLFF

SEQ ID NO: 265529 - protein, 14 aa, Homo sapiens
  CDR3 for alpha chain variable domain of TCR clone 132765 (TRAV13-1, TRAJ45)
CAAIGGGGAGGLTF

SEQ ID NO: 265530 - protein, 16 aa, Homo sapiens
  CDR3 for beta chain variable domain of TCR clone 132765 (TRBV7-2, TRBJ1-1)
CASSLGAGWTNTEAFF

SEQ ID NO: 265531 - protein, 15 aa, Homo sapiens
  CDR3 for alpha chain variable domain of TCR clone 132766 (TRAV17, TRAJ23)
CATDAEDNQGGKLIF

SEQ ID NO: 265532 - protein, 12 aa, Homo sapiens
  CDR3 for beta chain variable domain of TCR clone 132766 (TRBV2, TRBJ2-1)
CTKREGYNEQFF

SEQ ID NO: 265533 - protein, 16 aa, Homo sapiens
  CDR3 for alpha chain variable domain of TCR clone 132767 (TRAV12-2, TRAJ10)
CAVNRVLTGGGNKLTF

SEQ ID NO: 265534 - protein, 16 aa, Homo sapiens
  CDR3 for beta chain variable domain of TCR clone 132767 (TRBV7-2, TRBJ2-5)
CASSPRGRGGGETQYF

SEQ ID NO: 265535 - protein, 13 aa, Homo sapiens
  CDR3 for alpha chain variable domain of TCR clone 132768 (TRAV12-1, TRAJ34)
CVVAGYNTDKLIF

SEQ ID NO: 265536 - protein, 15 aa, Homo sapiens
  CDR3 for beta chain variable domain of TCR clone 132768 (TRBV28, TRBJ2-7)
CASKAGGYTSSTSGR

SEQ ID NO: 265537 - protein, 12 aa, Homo sapiens
  CDR3 for alpha chain variable domain of TCR clone 132769 (TRAV1-1, TRAJ43)
CAPRVSSNDTRF

SEQ ID NO: 265538 - protein, 15 aa, Homo sapiens
  CDR3 for beta chain variable domain of TCR clone 132769 (TRBV5-1, TRBJ2-7)
CASSLGDFTTYEQYF

SEQ ID NO: 265539 - protein, 10 aa, Homo sapiens
  CDR3 for alpha chain variable domain of TCR clone 132770 (TRAV20, TRAJ22)
CAAPARQLTF

SEQ ID NO: 265540 - protein, 14 aa, Homo sapiens
  CDR3 for beta chain variable domain of TCR clone 132770 (TRBV19, TRBJ2-1)
CASSMCSGATEQFF

SEQ ID NO: 265541 - protein, 13 aa, Homo sapiens
  CDR3 for alpha chain variable domain of TCR clone 132771 (TRAV29/DV5, TRAJ31)
CAASRNNNARLMF

SEQ ID NO: 265542 - protein, 13 aa, Homo sapiens
  CDR3 for beta chain variable domain of TCR clone 132771 (TRBV7-2, TRBJ2-4)
CACSREHANIQYF

SEQ ID NO: 265543 - protein, 11 aa, Homo sapiens
  CDR3 for alpha chain variable domain of TCR clone 132772 (TRAV4, TRAJ23)
CLVAPGGKLSF

SEQ ID NO: 265544 - protein, 15 aa, Homo sapiens
  CDR3 for beta chain variable domain of TCR clone 132772 (TRBV7-2, TRBJ2-1)
CASSFQADEYNEQFF

SEQ ID NO: 265545 - protein, 12 aa, Homo sapiens
  CDR3 for alpha chain variable domain of TCR clone 132773 (TRAV8-2, TRAJ45)
CVQGGGADGLTF

SEQ ID NO: 265546 - protein, 19 aa, Homo sapiens
  CDR3 for beta chain variable domain of TCR clone 132773 (TRBV25-1, TRBJ2-2)
CAILVYRVDRGRKTGELFF

SEQ ID NO: 265547 - protein, 14 aa, Homo sapiens
  CDR3 for alpha chain variable domain of TCR clone 132774 (TRAV3, TRAJ9)
CAVRLNTGGFKTIF

SEQ ID NO: 265548 - protein, 14 aa, Homo sapiens
  CDR3 for beta chain variable domain of TCR clone 132774 (TRBV12-4, TRBJ1-1)
CASSLGTGGTEAFF

SEQ ID NO: 265549 - protein, 15 aa, Homo sapiens
  CDR3 for alpha chain variable domain of TCR clone 132775 (TRAV2, TRAJ15)
CAVEDREQAGTALIF

SEQ ID NO: 265550 - protein, 13 aa, Homo sapiens
  CDR3 for beta chain variable domain of TCR clone 132775 (TRBV10-2, TRBJ2-3)
CASIESGDHTQYF

SEQ ID NO: 265551 - protein, 17 aa, Homo sapiens
  CDR3 for alpha chain variable domain of TCR clone 132776 (TRAV3, TRAJ6)
CAVSRRTDTGGSYIPTF

SEQ ID NO: 265552 - protein, 16 aa, Homo sapiens
  CDR3 for beta chain variable domain of TCR clone 132776 (TRBV12-5, TRBJ2-5)
CASGPRTSGNQETQYF

SEQ ID NO: 265553 - protein, 13 aa, Homo sapiens
  CDR3 for alpha chain variable domain of TCR clone 132777 (TRAV17, TRAJ26)
CATVDNDGQNFVF

SEQ ID NO: 265554 - protein, 16 aa, Homo sapiens
  CDR3 for beta chain variable domain of TCR clone 132777 (TRBV2, TRBJ2-1)
CASSVGGSLSYNEQFF

SEQ ID NO: 265555 - protein, 15 aa, Homo sapiens
  CDR3 for alpha chain variable domain of TCR clone 132778 (TRAV34, TRAJ38)
CGADFTPGNNRKLIW

SEQ ID NO: 265556 - protein, 16 aa, Homo sapiens
  CDR3 for beta chain variable domain of TCR clone 132778 (TRBV12-5, TRBJ2-5)
CASGPRTSGNKETQYF

SEQ ID NO: 265557 - protein, 14 aa, Homo sapiens
  CDR3 for alpha chain variable domain of TCR clone 132779 (TRAV1-1, TRAJ28)
CAAPSGAGSYQLTF

SEQ ID NO: 265558 - protein, 13 aa, Homo sapiens
  CDR3 for beta chain variable domain of TCR clone 132779 (TRBV7-9, TRBJ1-2)
CASSLKQNYGYTF

SEQ ID NO: 265559 - protein, 13 aa, Homo sapiens
  CDR3 for alpha chain variable domain of TCR clone 132780 (TRAV17, TRAJ39)
CATEDNAGNMLTF

SEQ ID NO: 265560 - protein, 14 aa, Homo sapiens
  CDR3 for beta chain variable domain of TCR clone 132780 (TRBV19, TRBJ1-2)
CASSTTGGAGGYTF

SEQ ID NO: 265561 - protein, 13 aa, Homo sapiens
  CDR3 for alpha chain variable domain of TCR clone 132781 (TRAV27, TRAJ40)
CAGPPSGIYKYIF

SEQ ID NO: 265562 - protein, 13 aa, Homo sapiens
  CDR3 for beta chain variable domain of TCR clone 132781 (TRBV28, TRBJ1-2)
CAGRDRGNYGYTF

SEQ ID NO: 265563 - protein, 14 aa, Homo sapiens
  CDR3 for alpha chain variable domain of TCR clone 132782 (TRAV26-1, TRAJ21)
CIVRVVYNFKKFYF

SEQ ID NO: 265564 - protein, 17 aa, Homo sapiens
  CDR3 for beta chain variable domain of TCR clone 132782 (TRBV11-2, TRBJ2-1)
CASSLYPPGVEYNEQFF

SEQ ID NO: 265565 - protein, 10 aa, Homo sapiens
  CDR3 for alpha chain variable domain of TCR clone 132783 (TRAV12-1, TRAJ23)
CVVSGGKLIF

SEQ ID NO: 265566 - protein, 19 aa, Homo sapiens
  CDR3 for beta chain variable domain of TCR clone 132783 (TRBV25-1, TRBJ2-2)
CAILVYRVDRGRKTGELFF

SEQ ID NO: 265567 - protein, 13 aa, Homo sapiens
  CDR3 for alpha chain variable domain of TCR clone 132784 (TRAV27, TRAJ42)
FAGARGSQGNLIF

SEQ ID NO: 265568 - protein, 15 aa, Homo sapiens
  CDR3 for beta chain variable domain of TCR clone 132784 (TRBV10-3, TRBJ2-2)
CAIRTDREDTGELFF

SEQ ID NO: 265569 - protein, 12 aa, Homo sapiens
  CDR3 for alpha chain variable domain of TCR clone 132785 (TRAV13-2, TRAJ23)
CAERHRGGKLIF

SEQ ID NO: 265570 - protein, 16 aa, Homo sapiens
  CDR3 for beta chain variable domain of TCR clone 132785 (TRBV20-1, TRBJ1-4)
CSAAGQGLLTNEKLFF

SEQ ID NO: 265571 - protein, 11 aa, Homo sapiens
  CDR3 for alpha chain variable domain of TCR clone 132786 (TRAV1-1, TRAJ23)
CAVRQGGTLIF

SEQ ID NO: 265572 - protein, 14 aa, Homo sapiens
  CDR3 for beta chain variable domain of TCR clone 132786 (TRBV19, TRBJ2-1)
CASPTFVLSGEQFF

SEQ ID NO: 265573 - protein, 11 aa, Homo sapiens
  CDR3 for alpha chain variable domain of TCR clone 132787 (TRAV2, TRAJ33)
CAVDSNYQLIW

SEQ ID NO: 265574 - protein, 13 aa, Homo sapiens
  CDR3 for beta chain variable domain of TCR clone 132787 (TRBV7-8, TRBJ2-1)
CASSLERLGEQFF

SEQ ID NO: 265575 - protein, 13 aa, Homo sapiens
  CDR3 for alpha chain variable domain of TCR clone 132788 (TRAV12-3, TRAJ7)
CAMTPYGNIRLAF

SEQ ID NO: 265576 - protein, 16 aa, Homo sapiens
  CDR3 for beta chain variable domain of TCR clone 132788 (TRBV20-1, TRBJ1-4)
CSARPYGGELNEKLFF

SEQ ID NO: 265577 - protein, 15 aa, Homo sapiens
  CDR3 for alpha chain variable domain of TCR clone 132789 (TRAV38-1, TRAJ37)
CAFIFGSGNTGKLIF

SEQ ID NO: 265578 - protein, 16 aa, Homo sapiens
  CDR3 for beta chain variable domain of TCR clone 132789 (TRBV6-1, TRBJ2-3)
CACSEVIGQGTDTQYF

SEQ ID NO: 265579 - protein, 12 aa, Homo sapiens
  CDR3 for alpha chain variable domain of TCR clone 132790 (TRAV12-1, TRAJ40)
CVVYSGTYKYIF

SEQ ID NO: 265580 - protein, 16 aa, Homo sapiens
  CDR3 for beta chain variable domain of TCR clone 132790 (TRBV27, TRBJ2-5)
CASSGSGTSEVETQYF

SEQ ID NO: 265581 - protein, 18 aa, Homo sapiens
  CDR3 for alpha chain variable domain of TCR clone 132791 (TRAV16, TRAJ52)
FALSGVDAGGTSYGKLTF

SEQ ID NO: 265582 - protein, 15 aa, Homo sapiens
  CDR3 for beta chain variable domain of TCR clone 132791 (TRBV11-3, TRBJ2-3)
CASSAGTVVTNTQYF

SEQ ID NO: 265583 - protein, 17 aa, Homo sapiens
  CDR3 for alpha chain variable domain of TCR clone 132792 (TRAV3, TRAJ38)
CAVRDCLNAGNNRKLIW

SEQ ID NO: 265584 - protein, 14 aa, Homo sapiens
  CDR3 for beta chain variable domain of TCR clone 132792 (TRBV19, TRBJ2-7)
CASTVQGRPYEQYF

SEQ ID NO: 265585 - protein, 15 aa, Homo sapiens
  CDR3 for alpha chain variable domain of TCR clone 132793 (TRAV8-3, TRAJ27)
CAVGPSRPMQANQPL

SEQ ID NO: 265586 - protein, 15 aa, Homo sapiens
  CDR3 for beta chain variable domain of TCR clone 132793 (TRBV7-2, TRBJ2-1)
CASSSGLAGGNEQFF

SEQ ID NO: 265587 - protein, 14 aa, Homo sapiens
  CDR3 for alpha chain variable domain of TCR clone 132794 (TRAV17, TRAJ56)
CATVPAGANSKLTF

SEQ ID NO: 265588 - protein, 13 aa, Homo sapiens
  CDR3 for beta chain variable domain of TCR clone 132794 (TRBV10-3, TRBJ2-7)
CASKLAVNYEQYF

SEQ ID NO: 265589 - protein, 18 aa, Homo sapiens
  CDR3 for alpha chain variable domain of TCR clone 132795 (TRAV26-1, TRAJ5)
CIVRVVPPRDTGRRALNF

SEQ ID NO: 265590 - protein, 15 aa, Homo sapiens
  CDR3 for beta chain variable domain of TCR clone 132795 (TRBV7-9, TRBJ2-7)
CASSLPMGQANEQYF

SEQ ID NO: 265591 - protein, 10 aa, Homo sapiens
  CDR3 for alpha chain variable domain of TCR clone 132796 (TRAV21, TRAJ43)
CAVRIGDMRF

SEQ ID NO: 265592 - protein, 16 aa, Homo sapiens
  CDR3 for beta chain variable domain of TCR clone 132796 (TRBV25-1, TRBJ1-1)
CASSGDRDRGRIEAFF

SEQ ID NO: 265593 - protein, 14 aa, Homo sapiens
  CDR3 for alpha chain variable domain of TCR clone 132797 (TRAV12-3, TRAJ9)
CAMSPNTGGFKTIF

SEQ ID NO: 265594 - protein, 12 aa, Homo sapiens
  CDR3 for beta chain variable domain of TCR clone 132797 (TRBV11-2, TRBJ2-2)
CAGSLGGGELFF

SEQ ID NO: 265595 - protein, 14 aa, Homo sapiens
  CDR3 for alpha chain variable domain of TCR clone 132798 (TRAV1-2, TRAJ16)
CAVNRFSDGQKLLF

SEQ ID NO: 265596 - protein, 13 aa, Homo sapiens
  CDR3 for beta chain variable domain of TCR clone 132798 (TRBV7-9, TRBJ1-2)
CASSPSNFWGYTF

SEQ ID NO: 265597 - protein, 14 aa, Homo sapiens
  CDR3 for alpha chain variable domain of TCR clone 132799 (TRAV27, TRAJ36)
CAGPPKRGANNLFS

SEQ ID NO: 265598 - protein, 15 aa, Homo sapiens
  CDR3 for beta chain variable domain of TCR clone 132799 (TRBV18, TRBJ2-7)
CASSPASTPNYEQYF

SEQ ID NO: 265599 - protein, 13 aa, Homo sapiens
  CDR3 for alpha chain variable domain of TCR clone 132800 (TRAV23/DV6, TRAJ36)
CAASQTGANNPFF

SEQ ID NO: 265600 - protein, 13 aa, Homo sapiens
  CDR3 for beta chain variable domain of TCR clone 132800 (TRBV5-4, TRBJ1-5)
CASSLGGDQPQHF

SEQ ID NO: 265601 - protein, 16 aa, Homo sapiens
  CDR3 for alpha chain variable domain of TCR clone 132801 (TRAV21, TRAJ37)
CAVRTAGSSNTGKLIF

SEQ ID NO: 265602 - protein, 15 aa, Homo sapiens
  CDR3 for beta chain variable domain of TCR clone 132801 (TRBV7-9, TRBJ2-2)
CASSPETGAGGELFF

SEQ ID NO: 265603 - protein, 16 aa, Homo sapiens
  CDR3 for alpha chain variable domain of TCR clone 132802 (TRAV30, TRAJ24)
CGTEIVDADSWGKFQF

SEQ ID NO: 265604 - protein, 15 aa, Homo sapiens
  CDR3 for beta chain variable domain of TCR clone 132802 (TRBV11-3, TRBJ2-3)
CASLKDGREGDTRYF

SEQ ID NO: 265605 - protein, 10 aa, Homo sapiens
  CDR3 for alpha chain variable domain of TCR clone 132803 (TRAV12-1, TRAJ37)
ARGNTGKLIF

SEQ ID NO: 265606 - protein, 15 aa, Homo sapiens
  CDR3 for beta chain variable domain of TCR clone 132803 (TRBV7-2, TRBJ2-3)
CASSLEQGGTDTQYC

SEQ ID NO: 265607 - protein, 14 aa, Homo sapiens
  CDR3 for alpha chain variable domain of TCR clone 132804 (TRAV29/DV5, TRAJ45)
CAASFRGGADGLTF

SEQ ID NO: 265608 - protein, 13 aa, Homo sapiens
  CDR3 for beta chain variable domain of TCR clone 132804 (TRBV7-9, TRBJ2-3)
CASSPGSTDTQYF

SEQ ID NO: 265609 - protein, 13 aa, Homo sapiens
  CDR3 for alpha chain variable domain of TCR clone 132805 (TRAV27, TRAJ54)
CAGAGRGAQKLVF

SEQ ID NO: 265610 - protein, 15 aa, Homo sapiens
  CDR3 for beta chain variable domain of TCR clone 132805 (TRBV18, TRBJ2-6)
CASSPSYAGANVLTF

SEQ ID NO: 265611 - protein, 13 aa, Homo sapiens
  CDR3 for alpha chain variable domain of TCR clone 132806 (TRAV12-3, TRAJ7)
CAMTPYGNNRLAF

SEQ ID NO: 265612 - protein, 16 aa, Homo sapiens
  CDR3 for beta chain variable domain of TCR clone 132806 (TRBV20-1, TRBJ1-4)
CSAGPYGGELNEKLFF

SEQ ID NO: 265613 - protein, 16 aa, Homo sapiens
  CDR3 for alpha chain variable domain of TCR clone 132807 (TRAV20, TRAJ53)
CAVRRGSGGSNYKLTF

SEQ ID NO: 265614 - protein, 13 aa, Homo sapiens
  CDR3 for beta chain variable domain of TCR clone 132807 (TRBV11-2, TRBJ1-2)
CASSLGTNYGYTF

SEQ ID NO: 265615 - protein, 12 aa, Homo sapiens
  CDR3 for alpha chain variable domain of TCR clone 132808 (TRAV2, TRAJ33)
CAFMDSNYQLIW

SEQ ID NO: 265616 - protein, 16 aa, Homo sapiens
  CDR3 for beta chain variable domain of TCR clone 132808 (TRBV2, TRBJ2-7)
CASSEPWTGPSCEQYF

SEQ ID NO: 265617 - protein, 17 aa, Homo sapiens
  CDR3 for alpha chain variable domain of TCR clone 132809 (TRAV3, TRAJ38)
CAVRDCLNAGNNRKLIR

SEQ ID NO: 265618 - protein, 14 aa, Homo sapiens
  CDR3 for beta chain variable domain of TCR clone 132809 (TRBV5-5, TRBJ1-5)
CASSGQGVDQPQHF

SEQ ID NO: 265619 - protein, 18 aa, Homo sapiens
  CDR3 for alpha chain variable domain of TCR clone 132810 (TRAV21, TRAJ52)
CAVRPSPAGGTSYGKLTF

SEQ ID NO: 265620 - protein, 14 aa, Homo sapiens
  CDR3 for beta chain variable domain of TCR clone 132810 (TRBV7-8, TRBJ2-3)
CASSFKSSTDTQYF

SEQ ID NO: 265621 - protein, 14 aa, Homo sapiens
  CDR3 for alpha chain variable domain of TCR clone 132811 (TRAV26-1, TRAJ38)
CIADNAGNNRKLIV

SEQ ID NO: 265622 - protein, 13 aa, Homo sapiens
  CDR3 for beta chain variable domain of TCR clone 132811 (TRBV20-1, TRBJ1-1)
CSARGGGNTEAFF

SEQ ID NO: 265623 - protein, 12 aa, Homo sapiens
  CDR3 for alpha chain variable domain of TCR clone 132812 (TRAV29/DV5, TRAJ49)
CAATDTGDQFYF

SEQ ID NO: 265624 - protein, 12 aa, Homo sapiens
  CDR3 for beta chain variable domain of TCR clone 132812 (TRBV12-4, TRBJ2-7)
CASSLGGYEQYF

SEQ ID NO: 265625 - protein, 18 aa, Homo sapiens
  CDR3 for alpha chain variable domain of TCR clone 132813 (TRAV26-2, TRAJ54)
CILRDVEVGIQGAQKLVF

SEQ ID NO: 265626 - protein, 17 aa, Homo sapiens
  CDR3 for beta chain variable domain of TCR clone 132813 (TRBV7-8, TRBJ2-6)
CASSAGTGGAGANVLTF

SEQ ID NO: 265627 - protein, 13 aa, Homo sapiens
  CDR3 for alpha chain variable domain of TCR clone 132814 (TRAV13-1, TRAJ5)
CAARVTGRRALTF

SEQ ID NO: 265628 - protein, 12 aa, Homo sapiens
  CDR3 for beta chain variable domain of TCR clone 132814 (TRBV29-1, TRBJ2-3)
CSVTGGADTQYF

SEQ ID NO: 265629 - protein, 18 aa, Homo sapiens
  CDR3 for alpha chain variable domain of TCR clone 132815 (TRAV21, TRAJ52)
CAVRPSPAGGTSYGKLTF

SEQ ID NO: 265630 - protein, 13 aa, Homo sapiens
  CDR3 for beta chain variable domain of TCR clone 132815 (TRBV29-1, TRBJ2-2)
CSVHREDTGELFF

SEQ ID NO: 265631 - protein, 13 aa, Homo sapiens
  CDR3 for alpha chain variable domain of TCR clone 132816 (TRAV35, TRAJ42)
CAGFPGSQGNLIF

SEQ ID NO: 265632 - protein, 14 aa, Homo sapiens
  CDR3 for beta chain variable domain of TCR clone 132816 (TRBV7-8, TRBJ2-7)
CASTFRGGPNEQYF

SEQ ID NO: 265633 - protein, 13 aa, Homo sapiens
  CDR3 for alpha chain variable domain of TCR clone 132817 (TRAV21, TRAJ20)
CAVGVFADYKLSF

SEQ ID NO: 265634 - protein, 14 aa, Homo sapiens
  CDR3 for beta chain variable domain of TCR clone 132817 (TRBV19, TRBJ2-1)
CASPTFVLSGEQFF

SEQ ID NO: 265635 - protein, 11 aa, Homo sapiens
  CDR3 for alpha chain variable domain of TCR clone 132818 (TRAV1-1, TRAJ23)
CAVRQGGKLIF

SEQ ID NO: 265636 - protein, 14 aa, Homo sapiens
  CDR3 for beta chain variable domain of TCR clone 132818 (TRBV7-3, TRBJ1-1)
CASSLKGGNTEAFF

SEQ ID NO: 265637 - protein, 15 aa, Homo sapiens
  CDR3 for alpha chain variable domain of TCR clone 132819 (TRAV35, TRAJ58)
CAGRRQETSGSRFTF

SEQ ID NO: 265638 - protein, 11 aa, Homo sapiens
  CDR3 for beta chain variable domain of TCR clone 132819 (TRBV11-2, TRBJ1-1)
CASSINTEAFF

SEQ ID NO: 265639 - protein, 15 aa, Homo sapiens
  CDR3 for alpha chain variable domain of TCR clone 132820 (TRAV26-1, TRAJ29)
CIVRVEGAGNTPLGF

SEQ ID NO: 265640 - protein, 15 aa, Homo sapiens
  CDR3 for beta chain variable domain of TCR clone 132820 (TRBV7-9, TRBJ1-5)
CASSQGHQPNQPQHF

SEQ ID NO: 265641 - protein, 15 aa, Homo sapiens
  CDR3 for alpha chain variable domain of TCR clone 132821 (TRAV12-2, TRAJ43)
CAFDMRFGAGTRLTV

SEQ ID NO: 265642 - protein, 18 aa, Homo sapiens
  CDR3 for beta chain variable domain of TCR clone 132821 (TRBV20-1, TRBJ2-3)
CSASGLAGGPGATDTQYF

SEQ ID NO: 265643 - protein, 14 aa, Homo sapiens
  CDR3 for alpha chain variable domain of TCR clone 132822 (TRAV8-3, TRAJ4)
CAVGAAGGYNKLIF

SEQ ID NO: 265644 - protein, 12 aa, Homo sapiens
  CDR3 for beta chain variable domain of TCR clone 132822 (TRBV28, TRBJ2-3)
CASSLYRDTQYF

SEQ ID NO: 265645 - protein, 13 aa, Homo sapiens
  CDR3 for alpha chain variable domain of TCR clone 132823 (TRAV30, TRAJ24)
CGTVTDSWGKLQF

SEQ ID NO: 265646 - protein, 12 aa, Homo sapiens
  CDR3 for beta chain variable domain of TCR clone 132823 (TRBV29-1, TRBJ1-3)
CSTRDSGNTIYF

SEQ ID NO: 265647 - protein, 12 aa, Homo sapiens
  CDR3 for alpha chain variable domain of TCR clone 132824 (TRAV1-2, TRAJ26)
CAVRYYGQNFVF

SEQ ID NO: 265648 - protein, 13 aa, Homo sapiens
  CDR3 for beta chain variable domain of TCR clone 132824 (TRBV15, TRBJ1-6)
CATSGGLNSPLHF

SEQ ID NO: 265649 - protein, 15 aa, Homo sapiens
  CDR3 for alpha chain variable domain of TCR clone 132825 (TRAV3, TRAJ22)
CAVRDRGGSARQLTF

SEQ ID NO: 265650 - protein, 13 aa, Homo sapiens
  CDR3 for beta chain variable domain of TCR clone 132825 (TRBV12-4, TRBJ2-2)
CASSITGSGELFF

SEQ ID NO: 265651 - protein, 16 aa, Homo sapiens
  CDR3 for alpha chain variable domain of TCR clone 132826 (TRAV12-1, TRAJ53)
CVMTSVAGGSNYKLTF

SEQ ID NO: 265652 - protein, 16 aa, Homo sapiens
  CDR3 for beta chain variable domain of TCR clone 132826 (TRBV6-6, TRBJ2-3)
CASSYSHAGSTDTQYF

SEQ ID NO: 265653 - protein, 13 aa, Homo sapiens
  CDR3 for alpha chain variable domain of TCR clone 132827 (TRAV35, TRAJ36)
CAGPRIGANNHFF

SEQ ID NO: 265654 - protein, 15 aa, Homo sapiens
  CDR3 for beta chain variable domain of TCR clone 132827 (TRBV28, TRBJ2-5)
CASSPPWSYQETQYF

SEQ ID NO: 265655 - protein, 13 aa, Homo sapiens
  CDR3 for alpha chain variable domain of TCR clone 132828 (TRAV13-2, TRAJ48)
CAEMDFGNEKLTF

SEQ ID NO: 265656 - protein, 12 aa, Homo sapiens
  CDR3 for beta chain variable domain of TCR clone 132828 (TRBV14, TRBJ1-1)
CASSQLKGLAFF

SEQ ID NO: 265657 - protein, 12 aa, Homo sapiens
  CDR3 for alpha chain variable domain of TCR clone 132829 (TRAV8-3, TRAJ20)
CAVGANDYKLSF

SEQ ID NO: 265658 - protein, 19 aa, Homo sapiens
  CDR3 for beta chain variable domain of TCR clone 132829 (TRBV25-1, TRBJ2-2)
CAILVYRVDRGRKTGELFF

SEQ ID NO: 265659 - protein, 13 aa, Homo sapiens
  CDR3 for alpha chain variable domain of TCR clone 132830 (TRAV25, TRAJ26)
CAGVDNYGQNFVF

SEQ ID NO: 265660 - protein, 15 aa, Homo sapiens
  CDR3 for beta chain variable domain of TCR clone 132830 (TRBV20-1, TRBJ2-7)
CSARDRVSGMDEQYF

SEQ ID NO: 265661 - protein, 13 aa, Homo sapiens
  CDR3 for alpha chain variable domain of TCR clone 132831 (TRAV21, TRAJ20)
RAVGVFADYKLSF

SEQ ID NO: 265662 - protein, 14 aa, Homo sapiens
  CDR3 for beta chain variable domain of TCR clone 132831 (TRBV4-2, TRBJ1-4)
CASSPSSGNEKLFF

SEQ ID NO: 265663 - protein, 15 aa, Homo sapiens
  CDR3 for alpha chain variable domain of TCR clone 132832 (TRAV20, TRAJ53)
CAVQASGGSNYKLTF

SEQ ID NO: 265664 - protein, 12 aa, Homo sapiens
  CDR3 for beta chain variable domain of TCR clone 132832 (TRBV7-6, TRBJ2-5)
CASSLSQEAQYF

SEQ ID NO: 265665 - protein, 13 aa, Homo sapiens
  CDR3 for alpha chain variable domain of TCR clone 132833 (TRAV12-1, TRAJ38)
CVVPAGNNRKLIW

SEQ ID NO: 265666 - protein, 15 aa, Homo sapiens
  CDR3 for beta chain variable domain of TCR clone 132833 (TRBV2, TRBJ2-1)
CASSELAGSYNEQFF

SEQ ID NO: 265667 - protein, 14 aa, Homo sapiens
  CDR3 for alpha chain variable domain of TCR clone 132834 (TRAV13-1, TRAJ44)
CAAKATGTASKLTF

SEQ ID NO: 265668 - protein, 17 aa, Homo sapiens
  CDR3 for beta chain variable domain of TCR clone 132834 (TRBV7-3, TRBJ2-3)
RASSLMKRMRGVDTQYF

SEQ ID NO: 265669 - protein, 14 aa, Homo sapiens
  CDR3 for alpha chain variable domain of TCR clone 132835 (TRAV9-2, TRAJ9)
CALSDPTGGFKTIF

SEQ ID NO: 265670 - protein, 14 aa, Homo sapiens
  CDR3 for beta chain variable domain of TCR clone 132835 (TRBV20-1, TRBJ2-4)
RSARDRGQGGIQYF

SEQ ID NO: 265671 - protein, 10 aa, Homo sapiens
  CDR3 for alpha chain variable domain of TCR clone 132836 (TRAV26-1, TRAJ22)
CIVSLNFFWF

SEQ ID NO: 265672 - protein, 14 aa, Homo sapiens
  CDR3 for beta chain variable domain of TCR clone 132836 (TRBV7-3, TRBJ1-1)
CASSLGTGYTEAFF

SEQ ID NO: 265673 - protein, 13 aa, Homo sapiens
  CDR3 for alpha chain variable domain of TCR clone 132837 (TRAV20, TRAJ49)
CAVQARTGNQFYF

SEQ ID NO: 265674 - protein, 14 aa, Homo sapiens
  CDR3 for beta chain variable domain of TCR clone 132837 (TRBV7-2, TRBJ2-7)
CASSPKTSFYEQCF

SEQ ID NO: 265675 - protein, 16 aa, Homo sapiens
  CDR3 for alpha chain variable domain of TCR clone 132838 (TRAV22, TRAJ45)
CAVERGKRGGADGLTF

SEQ ID NO: 265676 - protein, 14 aa, Homo sapiens
  CDR3 for beta chain variable domain of TCR clone 132838 (TRBV13, TRBJ2-7)
CASSLKGASYEQYF

SEQ ID NO: 265677 - protein, 13 aa, Homo sapiens
  CDR3 for alpha chain variable domain of TCR clone 132839 (TRAV12-2, TRAJ12)
CAVNGDSSYKLIF

SEQ ID NO: 265678 - protein, 15 aa, Homo sapiens
  CDR3 for beta chain variable domain of TCR clone 132839 (TRBV19, TRBJ1-2)
CASSVGQVLNYGYTF

SEQ ID NO: 265679 - protein, 14 aa, Homo sapiens
  CDR3 for alpha chain variable domain of TCR clone 132840 (TRAV12-3, TRAJ10)
SHLPLTGGGNKLTF

SEQ ID NO: 265680 - protein, 16 aa, Homo sapiens
  CDR3 for beta chain variable domain of TCR clone 132840 (TRBV4-2, TRBJ1-1)
CASSQAGFGMNTEAFF

SEQ ID NO: 265681 - protein, 14 aa, Homo sapiens
  CDR3 for alpha chain variable domain of TCR clone 132841 (TRAV12-2, TRAJ13)
SAVKKTGGYQKVTF

SEQ ID NO: 265682 - protein, 14 aa, Homo sapiens
  CDR3 for beta chain variable domain of TCR clone 132841 (TRBV10-3, TRBJ2-1)
CAISSDLAYNEQFF

SEQ ID NO: 265683 - protein, 16 aa, Homo sapiens
  CDR3 for alpha chain variable domain of TCR clone 132842 (TRAV1-1, TRAJ45)
CAVRAYSGGGADGLPF

SEQ ID NO: 265684 - protein, 13 aa, Homo sapiens
  CDR3 for beta chain variable domain of TCR clone 132842 (TRBV20-1, TRBJ1-2)
CSARGTADYGYTF

SEQ ID NO: 265685 - protein, 10 aa, Homo sapiens
  CDR3 for alpha chain variable domain of TCR clone 132843 (TRAV20, TRAJ22)
CAAPARQLTF

SEQ ID NO: 265686 - protein, 14 aa, Homo sapiens
  CDR3 for beta chain variable domain of TCR clone 132843 (TRBV19, TRBJ2-1)
CASSMGSGATEQLF

SEQ ID NO: 265687 - protein, 14 aa, Homo sapiens
  CDR3 for alpha chain variable domain of TCR clone 132844 (TRAV12-2, TRAJ40)
CAVKIPSGTYKYIF

SEQ ID NO: 265688 - protein, 15 aa, Homo sapiens
  CDR3 for beta chain variable domain of TCR clone 132844 (TRBV19, TRBJ2-1)
CANIKGRGPYNEQFF

SEQ ID NO: 265689 - protein, 13 aa, Homo sapiens
  CDR3 for alpha chain variable domain of TCR clone 132845 (TRAV35, TRAJ54)
CAGSIQGAQKLVF

SEQ ID NO: 265690 - protein, 20 aa, Homo sapiens
  CDR3 for beta chain variable domain of TCR clone 132845 (TRBV28, TRBJ2-1)
CASTPIGRSPGLAGGNEQFF

SEQ ID NO: 265691 - protein, 18 aa, Homo sapiens
  CDR3 for alpha chain variable domain of TCR clone 132846 (TRAV26-2, TRAJ45)
CILRLWGYSGGGADGLTF

SEQ ID NO: 265692 - protein, 17 aa, Homo sapiens
  CDR3 for beta chain variable domain of TCR clone 132846 (TRBV28, TRBJ2-3)
CASSPTPAGGRVDTRYF

SEQ ID NO: 265693 - protein, 11 aa, Homo sapiens
  CDR3 for alpha chain variable domain of TCR clone 132847 (TRAV2, TRAJ33)
CAVDSNYQLIW

SEQ ID NO: 265694 - protein, 15 aa, Homo sapiens
  CDR3 for beta chain variable domain of TCR clone 132847 (TRBV27, TRBJ2-1)
CASSNGGGSSNEQFF

SEQ ID NO: 265695 - protein, 15 aa, Homo sapiens
  CDR3 for alpha chain variable domain of TCR clone 132848 (TRAV17, TRAJ42)
CATDHYGGSQGNLIF

SEQ ID NO: 265696 - protein, 12 aa, Homo sapiens
  CDR3 for beta chain variable domain of TCR clone 132848 (TRBV7-2, TRBJ1-5)
CQQLCEDQPQHF

SEQ ID NO: 265697 - protein, 15 aa, Homo sapiens
  CDR3 for alpha chain variable domain of TCR clone 132849 (TRAV3, TRAJ27)
CAVRDPITNAGKSTF

SEQ ID NO: 265698 - protein, 15 aa, Homo sapiens
  CDR3 for beta chain variable domain of TCR clone 132849 (TRBV28, TRBJ2-1)
CASSIIAGGRSEQFF

SEQ ID NO: 265699 - protein, 12 aa, Homo sapiens
  CDR3 for alpha chain variable domain of TCR clone 132850 (TRAV40, TRAJ20)
CLRGLNDYKLSF

SEQ ID NO: 265700 - protein, 14 aa, Homo sapiens
  CDR3 for beta chain variable domain of TCR clone 132850 (TRBV19, TRBJ2-1)
CASSSGRGYNEQFF

SEQ ID NO: 265701 - protein, 13 aa, Homo sapiens
  CDR3 for alpha chain variable domain of TCR clone 132851 (TRAV2, TRAJ40)
CAVVTSGTYKYIF

SEQ ID NO: 265702 - protein, 16 aa, Homo sapiens
  CDR3 for beta chain variable domain of TCR clone 132851 (TRBV19, TRBJ2-2)
GASRSPGTGATGELFF

SEQ ID NO: 265703 - protein, 13 aa, Homo sapiens
  CDR3 for alpha chain variable domain of TCR clone 132852 (TRAV14/DV4, TRAJ16)
CAMREGSGQKLLF

SEQ ID NO: 265704 - protein, 13 aa, Homo sapiens
  CDR3 for beta chain variable domain of TCR clone 132852 (TRBV25-1, TRBJ1-1)
CASSDRGRAEAFF

SEQ ID NO: 265705 - protein, 11 aa, Homo sapiens
  CDR3 for alpha chain variable domain of TCR clone 132853 (TRAV35, TRAJ29)
CAGAGNTPLVF

SEQ ID NO: 265706 - protein, 13 aa, Homo sapiens
  CDR3 for beta chain variable domain of TCR clone 132853 (TRBV10-2, TRBJ2-7)
CASGASGGYEQYF

SEQ ID NO: 265707 - protein, 12 aa, Homo sapiens
  CDR3 for alpha chain variable domain of TCR clone 132854 (TRAV21, TRAJ37)
CAVRGNTGKLIF

SEQ ID NO: 265708 - protein, 16 aa, Homo sapiens
  CDR3 for beta chain variable domain of TCR clone 132854 (TRBV19, TRBJ2-1)
CASSKAGPSSYNEQFF

SEQ ID NO: 265709 - protein, 16 aa, Homo sapiens
  CDR3 for alpha chain variable domain of TCR clone 132855 (TRAV1-2, TRAJ10)
CAVRGVLTGGGNKLTF

SEQ ID NO: 265710 - protein, 15 aa, Homo sapiens
  CDR3 for beta chain variable domain of TCR clone 132855 (TRBV27, TRBJ2-7)
CASSPIVTGAYERYF

SEQ ID NO: 265711 - protein, 14 aa, Homo sapiens
  CDR3 for alpha chain variable domain of TCR clone 132856 (TRAV12-3, TRAJ58)
CAMSTETSGSRLTF

SEQ ID NO: 265712 - protein, 13 aa, Homo sapiens
  CDR3 for beta chain variable domain of TCR clone 132856 (TRBV27, TRBJ2-3)
CASSLGRTDTQYF

SEQ ID NO: 265713 - protein, 15 aa, Homo sapiens
  CDR3 for alpha chain variable domain of TCR clone 132857 (TRAV13-2, TRAJ5)
CAENPHWTGRRALTF

SEQ ID NO: 265714 - protein, 16 aa, Homo sapiens
  CDR3 for beta chain variable domain of TCR clone 132857 (TRBV7-9, TRBJ1-3)
CANSQTSGLRMGTIYF

SEQ ID NO: 265715 - protein, 14 aa, Homo sapiens
  CDR3 for alpha chain variable domain of TCR clone 132858 (TRAV12-1, TRAJ26)
CVVKGSNYCQNFVF

SEQ ID NO: 265716 - protein, 17 aa, Homo sapiens
  CDR3 for beta chain variable domain of TCR clone 132858 (TRBV11-2, TRBJ2-6)
CASSQRDIFSGANVLTF

SEQ ID NO: 265717 - protein, 13 aa, Homo sapiens
  CDR3 for alpha chain variable domain of TCR clone 132859 (TRAV12-2, TRAJ39)
CAVNNNAGNMPTF

SEQ ID NO: 265718 - protein, 12 aa, Homo sapiens
  CDR3 for beta chain variable domain of TCR clone 132859 (TRBV5-1, TRBJ2-7)
CASSFRGYEQYF

SEQ ID NO: 265719 - protein, 14 aa, Homo sapiens
  CDR3 for alpha chain variable domain of TCR clone 132860 (TRAV13-1, TRAJ44)
CAAKATGTASKLTF

SEQ ID NO: 265720 - protein, 17 aa, Homo sapiens
  CDR3 for beta chain variable domain of TCR clone 132860 (TRBV7-3, TRBJ2-3)
CAGSLMKRMRGADTQYF

SEQ ID NO: 265721 - protein, 18 aa, Homo sapiens
  CDR3 for alpha chain variable domain of TCR clone 132861 (TRAV26-1, TRAJ52)
CIVRVEGAGGTRYGKLTF

SEQ ID NO: 265722 - protein, 13 aa, Homo sapiens
  CDR3 for beta chain variable domain of TCR clone 132861 (TRBV7-3, TRBJ1-2)
CASSLKRGYGYTF

SEQ ID NO: 265723 - protein, 14 aa, Homo sapiens
  CDR3 for alpha chain variable domain of TCR clone 132862 (TRAV8-4, TRAJ37)
CAVSEPSNTGQLIF

SEQ ID NO: 265724 - protein, 14 aa, Homo sapiens
  CDR3 for beta chain variable domain of TCR clone 132862 (TRBV28, TRBJ2-1)
CAIHRTGARTEQFF

SEQ ID NO: 265725 - protein, 14 aa, Homo sapiens
  CDR3 for alpha chain variable domain of TCR clone 132863 (TRAV6, TRAJ37)
CALGSQGNTGRLIF

SEQ ID NO: 265726 - protein, 15 aa, Homo sapiens
  CDR3 for beta chain variable domain of TCR clone 132863 (TRBV2, TRBJ2-1)
CASSEEREGDNEQFF

SEQ ID NO: 265727 - protein, 13 aa, Homo sapiens
  CDR3 for alpha chain variable domain of TCR clone 132864 (TRAV12-3, TRAJ13)
CAMSAGGYQKVTF

SEQ ID NO: 265728 - protein, 13 aa, Homo sapiens
  CDR3 for beta chain variable domain of TCR clone 132864 (TRBV12-5, TRBJ2-3)
CASGDRQSDTQYF

SEQ ID NO: 265729 - protein, 14 aa, Homo sapiens
  CDR3 for alpha chain variable domain of TCR clone 132865 (TRAV8-4, TRAJ34)
CAVSDPGDTDKLIF

SEQ ID NO: 265730 - protein, 15 aa, Homo sapiens
  CDR3 for beta chain variable domain of TCR clone 132865 (TRBV27, TRBJ2-1)
CASSNGGGSSNEQFF

SEQ ID NO: 265731 - protein, 16 aa, Homo sapiens
  CDR3 for alpha chain variable domain of TCR clone 132866 (TRAV3, TRAJ10)
CAVRDMRAGGGNKLTF

SEQ ID NO: 265732 - protein, 16 aa, Homo sapiens
  CDR3 for beta chain variable domain of TCR clone 132866 (TRBV19, TRBJ2-2)
CASSFPGQGLAVELFF

SEQ ID NO: 265733 - protein, 14 aa, Homo sapiens
  CDR3 for alpha chain variable domain of TCR clone 132867 (TRAV8-4, TRAJ5)
CAVSTDTGRRALTF

SEQ ID NO: 265734 - protein, 14 aa, Homo sapiens
  CDR3 for beta chain variable domain of TCR clone 132867 (TRBV19, TRBJ2-1)
CASSIGLSNNEQFF

SEQ ID NO: 265735 - protein, 11 aa, Homo sapiens
  CDR3 for alpha chain variable domain of TCR clone 132868 (TRAV1-2, TRAJ40)
CAVPGTYKYIF

SEQ ID NO: 265736 - protein, 16 aa, Homo sapiens
  CDR3 for beta chain variable domain of TCR clone 132868 (TRBV29-1, TRBJ2-7)
CSVEVVGTSGSYELYF

SEQ ID NO: 265737 - protein, 17 aa, Homo sapiens
  CDR3 for alpha chain variable domain of TCR clone 132869 (TRAV3, TRAJ6)
CAVRDCPRAGGSYIPTF

SEQ ID NO: 265738 - protein, 20 aa, Homo sapiens
  CDR3 for beta chain variable domain of TCR clone 132869 (TRBV28, TRBJ2-1)
CASTPIGRSPGLAGGNEQFF

SEQ ID NO: 265739 - protein, 12 aa, Homo sapiens
  CDR3 for alpha chain variable domain of TCR clone 132870 (TRAV23/DV6, TRAJ53)
CAASKLGSGGSN

SEQ ID NO: 265740 - protein, 14 aa, Homo sapiens
  CDR3 for beta chain variable domain of TCR clone 132870 (TRBV7-9, TRBJ2-3)
CASSLGQGTNTQYF

SEQ ID NO: 265741 - protein, 13 aa, Homo sapiens
  CDR3 for alpha chain variable domain of TCR clone 132871 (TRAV20, TRAJ49)
CAVQARTGNQFYF

SEQ ID NO: 265742 - protein, 13 aa, Homo sapiens
  CDR3 for beta chain variable domain of TCR clone 132871 (TRBV12-4, TRBJ1-1)
CASSPGTGFEAFF

SEQ ID NO: 265743 - protein, 17 aa, Homo sapiens
  CDR3 for alpha chain variable domain of TCR clone 132872 (TRAV38-2/DV8, TRAJ57)
CAYRGVLTQGGSEKLVF

SEQ ID NO: 265744 - protein, 16 aa, Homo sapiens
  CDR3 for beta chain variable domain of TCR clone 132872 (TRBV7-3, TRBJ2-2)
CASSLKRGTLSGELFF

SEQ ID NO: 265745 - protein, 14 aa, Homo sapiens
  CDR3 for alpha chain variable domain of TCR clone 132873 (TRAV12-3, TRAJ29)
CAMSPYSGNTPLVF

SEQ ID NO: 265746 - protein, 17 aa, Homo sapiens
  CDR3 for beta chain variable domain of TCR clone 132873 (TRBV7-3, TRBJ2-3)
CASSLMKRMRGADTQYF

SEQ ID NO: 265747 - protein, 14 aa, Homo sapiens
  CDR3 for alpha chain variable domain of TCR clone 132874 (TRAV1-1, TRAJ33)
CAVRPEASNYQLIW

SEQ ID NO: 265748 - protein, 15 aa, Homo sapiens
  CDR3 for beta chain variable domain of TCR clone 132874 (TRBV20-1, TRBJ2-1)
CSARSPGGPGNEQFF

SEQ ID NO: 265749 - protein, 13 aa, Homo sapiens
  CDR3 for alpha chain variable domain of TCR clone 132875 (TRAV21, TRAJ27)
CAARPGNAGKSTF

SEQ ID NO: 265750 - protein, 20 aa, Homo sapiens
  CDR3 for beta chain variable domain of TCR clone 132875 (TRBV4-2, TRBJ2-7)
CASSQASGGNLRAVRRAGHQ

SEQ ID NO: 265751 - protein, 16 aa, Homo sapiens
  CDR3 for alpha chain variable domain of TCR clone 132876 (TRAV16, TRAJ4)
CALSRMFSGGYNKLIF

SEQ ID NO: 265752 - protein, 12 aa, Homo sapiens
  CDR3 for beta chain variable domain of TCR clone 132876 (TRBV11-2, TRBJ2-1)
CASSPGNNEQFF

SEQ ID NO: 265753 - protein, 12 aa, Homo sapiens
  CDR3 for alpha chain variable domain of TCR clone 132877 (TRAV12-1, TRAJ40)
CVVYSGTYKYIF

SEQ ID NO: 265754 - protein, 14 aa, Homo sapiens
  CDR3 for beta chain variable domain of TCR clone 132877 (TRBV11-2, TRBJ1-2)
CASSLGTANYGYTF

SEQ ID NO: 265755 - protein, 12 aa, Homo sapiens
  CDR3 for alpha chain variable domain of TCR clone 132878 (TRAV8-3, TRAJ41)
CAVALSGYALNF

SEQ ID NO: 265756 - protein, 16 aa, Homo sapiens
  CDR3 for beta chain variable domain of TCR clone 132878 (TRBV27, TRBJ2-7)
SASSSERRDSAYEQYF

SEQ ID NO: 265757 - protein, 13 aa, Homo sapiens
  CDR3 for alpha chain variable domain of TCR clone 132879 (TRAV21, TRAJ15)
CAVANQAATALIF

SEQ ID NO: 265758 - protein, 14 aa, Homo sapiens
  CDR3 for beta chain variable domain of TCR clone 132879 (TRBV27, TRBJ2-2)
CASSLGAATGELFF

SEQ ID NO: 265759 - protein, 15 aa, Homo sapiens
  CDR3 for alpha chain variable domain of TCR clone 132880 (TRAV26-1, TRAJ56)
CIVRVATGANSKLTF

SEQ ID NO: 265760 - protein, 15 aa, Homo sapiens
  CDR3 for beta chain variable domain of TCR clone 132880 (TRBV7-9, TRBJ1-6)
CASSSPGRGNSPLHF

SEQ ID NO: 265761 - protein, 11 aa, Homo sapiens
  CDR3 for alpha chain variable domain of TCR clone 132881 (TRAV1-1, TRAJ23)
CAVRQGGKLIF

SEQ ID NO: 265762 - protein, 13 aa, Homo sapiens
  CDR3 for beta chain variable domain of TCR clone 132881 (TRBV7-3, TRBJ1-1)
LASSQDWGAEAFF

SEQ ID NO: 265763 - protein, 13 aa, Homo sapiens
  CDR3 for alpha chain variable domain of TCR clone 132882 (TRAV30, TRAJ49)
CGTESQPVTSSIL

SEQ ID NO: 265764 - protein, 14 aa, Homo sapiens
  CDR3 for beta chain variable domain of TCR clone 132882 (TRBV12-5, TRBJ2-5)
CASGSRTHQETQYF

SEQ ID NO: 265765 - protein, 18 aa, Homo sapiens
  CDR3 for alpha chain variable domain of TCR clone 132883 (TRAV13-1, TRAJ52)
CAAKNPNAGGTSYGNLTF

SEQ ID NO: 265766 - protein, 14 aa, Homo sapiens
  CDR3 for beta chain variable domain of TCR clone 132883 (TRBV6-1, TRBJ1-3)
CASVQGGGGNTIYF

SEQ ID NO: 265767 - protein, 15 aa, Homo sapiens
  CDR3 for alpha chain variable domain of TCR clone 132884 (TRAV12-1, TRAJ21)
CVVIGTTSTNFTLDL

SEQ ID NO: 265768 - protein, 14 aa, Homo sapiens
  CDR3 for beta chain variable domain of TCR clone 132884 (TRBV7-3, TRBJ2-2)
CASSLYPLTGELFF

SEQ ID NO: 265769 - protein, 17 aa, Homo sapiens
  CDR3 for alpha chain variable domain of TCR clone 132885 (TRAV13-1, TRAJ44)
CAASRGAALPVNSPLGL

SEQ ID NO: 265770 - protein, 16 aa, Homo sapiens
  CDR3 for beta chain variable domain of TCR clone 132885 (TRBV29-1, TRBJ2-7)
CSVEVVGTSGSYEQYF

SEQ ID NO: 265771 - protein, 14 aa, Homo sapiens
  CDR3 for alpha chain variable domain of TCR clone 132886 (TRAV3, TRAJ21)
CAVESQANFNKFYF

SEQ ID NO: 265772 - protein, 15 aa, Homo sapiens
  CDR3 for beta chain variable domain of TCR clone 132886 (TRBV20-1, TRBJ2-7)
CSARDRVSGMDEQYF

SEQ ID NO: 265773 - protein, 12 aa, Homo sapiens
  CDR3 for alpha chain variable domain of TCR clone 132887 (TRAV12-2, TRAJ10)
WGVTGGGNKRTF

SEQ ID NO: 265774 - protein, 16 aa, Homo sapiens
  CDR3 for beta chain variable domain of TCR clone 132887 (TRBV6-4, TRBJ1-2)
CASSEAVGDPNYGYTF

SEQ ID NO: 265775 - protein, 15 aa, Homo sapiens
  CDR3 for alpha chain variable domain of TCR clone 132888 (TRAV12-2, TRAJ53)
CAVNGGGGGNYKLTF

SEQ ID NO: 265776 - protein, 14 aa, Homo sapiens
  CDR3 for beta chain variable domain of TCR clone 132888 (TRBV19, TRBJ2-2)
CASSTLHRSGELFS

SEQ ID NO: 265777 - protein, 15 aa, Homo sapiens
  CDR3 for alpha chain variable domain of TCR clone 132889 (TRAV1-2, TRAJ18)
CAWEGRGSTLGRLYF

SEQ ID NO: 265778 - protein, 11 aa, Homo sapiens
  CDR3 for beta chain variable domain of TCR clone 132889 (TRBV7-8, TRBJ2-7)
CASSLSLEQYF

SEQ ID NO: 265779 - protein, 14 aa, Homo sapiens
  CDR3 for alpha chain variable domain of TCR clone 132890 (TRAV12-2, TRAJ40)
CAVKIPSGTYKYSF

SEQ ID NO: 265780 - protein, 17 aa, Homo sapiens
  CDR3 for beta chain variable domain of TCR clone 132890 (TRBV11-2, TRBJ2-1)
CASSLYPPGVEYNEQFF

SEQ ID NO: 265781 - protein, 15 aa, Homo sapiens
  CDR3 for alpha chain variable domain of TCR clone 132891 (TRAV3, TRAJ22)
CAVRDRGGSARELTF

SEQ ID NO: 265782 - protein, 16 aa, Homo sapiens
  CDR3 for beta chain variable domain of TCR clone 132891 (TRBV5-4, TRBJ2-3)
CASQQPGAGGADTQYF

SEQ ID NO: 265783 - protein, 14 aa, Homo sapiens
  CDR3 for alpha chain variable domain of TCR clone 132892 (TRAV26-1, TRAJ54)
CIVRRTQGAQKLVF

SEQ ID NO: 265784 - protein, 12 aa, Homo sapiens
  CDR3 for beta chain variable domain of TCR clone 132892 (TRBV4-2, TRBJ2-5)
CASGGAQETQYF

SEQ ID NO: 265785 - protein, 13 aa, Homo sapiens
  CDR3 for alpha chain variable domain of TCR clone 132893 (TRAV8-1, TRAJ34)
CAVRPYNTDKLIL

SEQ ID NO: 265786 - protein, 15 aa, Homo sapiens
  CDR3 for beta chain variable domain of TCR clone 132893 (TRBV7-9, TRBJ1-3)
CASSLRSGSGNTIYF

SEQ ID NO: 265787 - protein, 16 aa, Homo sapiens
  CDR3 for alpha chain variable domain of TCR clone 132894 (TRAV26-1, TRAJ37)
CIVRGDGSGNTGKLII

SEQ ID NO: 265788 - protein, 17 aa, Homo sapiens
  CDR3 for beta chain variable domain of TCR clone 132894 (TRBV4-1, TRBJ2-7)
CASSRDPLGVRGGEQYF

SEQ ID NO: 265789 - protein, 14 aa, Homo sapiens
  CDR3 for alpha chain variable domain of TCR clone 132895 (TRAV12-1, TRAJ12)
CVVTSGDSSYKLIF

SEQ ID NO: 265790 - protein, 15 aa, Homo sapiens
  CDR3 for beta chain variable domain of TCR clone 132895 (TRBV6-3, TRBJ2-7)
CASSSPGTVFYEQYF

SEQ ID NO: 265791 - protein, 15 aa, Homo sapiens
  CDR3 for alpha chain variable domain of TCR clone 132896 (TRAV17, TRAJ57)
CATGPSQGGSDKLVF

SEQ ID NO: 265792 - protein, 17 aa, Homo sapiens
  CDR3 for beta chain variable domain of TCR clone 132896 (TRBV20-1, TRBJ2-1)
CSASSSGLAGSYNEQFF

SEQ ID NO: 265793 - protein, 13 aa, Homo sapiens
  CDR3 for alpha chain variable domain of TCR clone 132897 (TRAV21, TRAJ20)
CAVGLRVDYKLSF

SEQ ID NO: 265794 - protein, 13 aa, Homo sapiens
  CDR3 for beta chain variable domain of TCR clone 132897 (TRBV6-1, TRBJ1-1)
CASSRQGNPEAFF

SEQ ID NO: 265795 - protein, 14 aa, Homo sapiens
  CDR3 for alpha chain variable domain of TCR clone 132898 (TRAV16, TRAJ42)
CALLAGGSQGNLIF

SEQ ID NO: 265796 - protein, 17 aa, Homo sapiens
  CDR3 for beta chain variable domain of TCR clone 132898 (TRBV24-1, TRBJ2-4)
CATSDAEARGVRNIQYF

SEQ ID NO: 265797 - protein, 23 aa, Homo sapiens
  CDR3 for alpha chain variable domain of TCR clone 132899 (TRAV26-1, TRAJ38)
CIVRPLNAGNNHIQNPDPAVYQL

SEQ ID NO: 265798 - protein, 15 aa, Homo sapiens
  CDR3 for beta chain variable domain of TCR clone 132899 (TRBV12-4, TRBJ2-5)
CASSPPAGLQETQYF

SEQ ID NO: 265799 - protein, 14 aa, Homo sapiens
  CDR3 for alpha chain variable domain of TCR clone 132900 (TRAV26-1, TRAJ39)
CIVRGSRAGNMLTF

SEQ ID NO: 265800 - protein, 11 aa, Homo sapiens
  CDR3 for beta chain variable domain of TCR clone 132900 (TRBV25-1, TRBJ1-1)
PTWGGNTEAFF

SEQ ID NO: 265801 - protein, 14 aa, Homo sapiens
  CDR3 for alpha chain variable domain of TCR clone 132901 (TRAV8-2, TRAJ4)
CVVCPSGGYNKLIF

SEQ ID NO: 265802 - protein, 15 aa, Homo sapiens
  CDR3 for beta chain variable domain of TCR clone 132901 (TRBV4-1, TRBJ1-4)
CASSDTGGTNEKLFF

SEQ ID NO: 265803 - protein, 15 aa, Homo sapiens
  CDR3 for alpha chain variable domain of TCR clone 132902 (TRAV12-1, TRAJ44)
CVADLPTGTASKLTF

SEQ ID NO: 265804 - protein, 15 aa, Homo sapiens
  CDR3 for beta chain variable domain of TCR clone 132902 (TRBV6-1, TRBJ2-1)
CASSELRGQYNEQFF

SEQ ID NO: 265805 - protein, 14 aa, Homo sapiens
  CDR3 for alpha chain variable domain of TCR clone 132903 (TRAV35, TRAJ22)
CAGLRPGSARQLTF

SEQ ID NO: 265806 - protein, 16 aa, Homo sapiens
  CDR3 for beta chain variable domain of TCR clone 132903 (TRBV20-1, TRBJ1-2)
CSASMGQGVANYGYTF

SEQ ID NO: 265807 - protein, 11 aa, Homo sapiens
  CDR3 for alpha chain variable domain of TCR clone 132904 (TRAV29/DV5, TRAJ47)
CAATYGNKLVF

SEQ ID NO: 265808 - protein, 14 aa, Homo sapiens
  CDR3 for beta chain variable domain of TCR clone 132904 (TRBV12-4, TRBJ1-1)
CASSLGTGGTEAFF

SEQ ID NO: 265809 - protein, 17 aa, Homo sapiens
  CDR3 for alpha chain variable domain of TCR clone 132905 (TRAV12-3, TRAJ6)
CAMSARGWAGGSYIPTF

SEQ ID NO: 265810 - protein, 12 aa, Homo sapiens
  CDR3 for beta chain variable domain of TCR clone 132905 (TRBV12-4, TRBJ2-3)
CASSTLPDTQYF

SEQ ID NO: 265811 - protein, 16 aa, Homo sapiens
  CDR3 for alpha chain variable domain of TCR clone 132906 (TRAV3, TRAJ37)
CAVRPHGSVNTGKLIF

SEQ ID NO: 265812 - protein, 13 aa, Homo sapiens
  CDR3 for beta chain variable domain of TCR clone 132906 (TRBV2, TRBJ1-5)
CASGTGGYQPQHF

SEQ ID NO: 265813 - protein, 16 aa, Homo sapiens
  CDR3 for alpha chain variable domain of TCR clone 132907 (TRAV3, TRAJ10)
CAVRDMRAGGGTKLTF

SEQ ID NO: 265814 - protein, 14 aa, Homo sapiens
  CDR3 for beta chain variable domain of TCR clone 132907 (TRBV25-1, TRBJ1-1)
CASTHLGGNTEAFF

SEQ ID NO: 265815 - protein, 17 aa, Homo sapiens
  CDR3 for alpha chain variable domain of TCR clone 132908 (TRAV13-1, TRAJ28)
CAASPPYSGAGSYQLTF

SEQ ID NO: 265816 - protein, 12 aa, Homo sapiens
  CDR3 for beta chain variable domain of TCR clone 132908 (TRBV7-8, TRBJ2-7)
CASSLGDREQYF

SEQ ID NO: 265817 - protein, 13 aa, Homo sapiens
  CDR3 for alpha chain variable domain of TCR clone 132909 (TRAV22, TRAJ44)
CALNPGTASKLTF

SEQ ID NO: 265818 - protein, 14 aa, Homo sapiens
  CDR3 for beta chain variable domain of TCR clone 132909 (TRBV6-1, TRBJ1-3)
CASVQGGGGNTIYF

SEQ ID NO: 265819 - protein, 16 aa, Homo sapiens
  CDR3 for alpha chain variable domain of TCR clone 132910 (TRAV8-3, TRAJ13)
CAVGAYPSGGYQKDTF

SEQ ID NO: 265820 - protein, 15 aa, Homo sapiens
  CDR3 for beta chain variable domain of TCR clone 132910 (TRBV19, TRBJ1-5)
CASSIVWADNQPQHF

SEQ ID NO: 265821 - protein, 14 aa, Homo sapiens
  CDR3 for alpha chain variable domain of TCR clone 132911 (TRAV26-2, TRAJ32)
CILFRGGATNKLIF

SEQ ID NO: 265822 - protein, 13 aa, Homo sapiens
  CDR3 for beta chain variable domain of TCR clone 132911 (TRBV20-1, TRBJ2-7)
CSARPSTNYEQYF

SEQ ID NO: 265823 - protein, 14 aa, Homo sapiens
  CDR3 for alpha chain variable domain of TCR clone 132912 (TRAV23/DV6, TRAJ8)
CAESKATGFQKLVF

SEQ ID NO: 265824 - protein, 13 aa, Homo sapiens
  CDR3 for beta chain variable domain of TCR clone 132912 (TRBV11-3, TRBJ2-5)
CASSSGLQETQYF

SEQ ID NO: 265825 - protein, 14 aa, Homo sapiens
  CDR3 for alpha chain variable domain of TCR clone 132913 (TRAV17, TRAJ57)
CATDPQGGSEKLVF

SEQ ID NO: 265826 - protein, 16 aa, Homo sapiens
  CDR3 for beta chain variable domain of TCR clone 132913 (TRBV20-1, TRBJ1-4)
CSAPGQGLLTNEQLFF

SEQ ID NO: 265827 - protein, 16 aa, Homo sapiens
  CDR3 for alpha chain variable domain of TCR clone 132914 (TRAV30, TRAJ24)
CGTEIVDADSWGKFQF

SEQ ID NO: 265828 - protein, 17 aa, Homo sapiens
  CDR3 for beta chain variable domain of TCR clone 132914 (TRBV5-1, TRBJ2-5)
CASSLLGLAANQETQYF

SEQ ID NO: 265829 - protein, 15 aa, Homo sapiens
  CDR3 for alpha chain variable domain of TCR clone 132915 (TRAV17, TRAJ13)
CAADAGSGGYQKVTF

SEQ ID NO: 265830 - protein, 17 aa, Homo sapiens
  CDR3 for beta chain variable domain of TCR clone 132915 (TRBV11-2, TRBJ2-1)
CASSLYPPGVEYNEQFF

SEQ ID NO: 265831 - protein, 17 aa, Homo sapiens
  CDR3 for alpha chain variable domain of TCR clone 132916 (TRAV3, TRAJ6)
CAVRDGPRAGGSYIPTF

SEQ ID NO: 265832 - protein, 16 aa, Homo sapiens
  CDR3 for beta chain variable domain of TCR clone 132916 (TRBV11-2, TRBJ2-5)
CASSGQGYSPQETQYF

SEQ ID NO: 265833 - protein, 18 aa, Homo sapiens
  CDR3 for alpha chain variable domain of TCR clone 132917 (TRAV12-3, TRAJ52)
CAMSVGGAGGTSYGKVTF

SEQ ID NO: 265834 - protein, 15 aa, Homo sapiens
  CDR3 for beta chain variable domain of TCR clone 132917 (TRBV27, TRBJ1-6)
CASSFDRGLGSPLHF

SEQ ID NO: 265835 - protein, 15 aa, Homo sapiens
  CDR3 for alpha chain variable domain of TCR clone 132918 (TRAV13-1, TRAJ52)
CAATSPRTSYGKLTF

SEQ ID NO: 265836 - protein, 14 aa, Homo sapiens
  CDR3 for beta chain variable domain of TCR clone 132918 (TRBV28, TRBJ2-3)
CASSFVQGTDTQYF

SEQ ID NO: 265837 - protein, 14 aa, Homo sapiens
  CDR3 for alpha chain variable domain of TCR clone 132919 (TRAV12-3, TRAJ10)
SHLPLTGGGNKLTF

SEQ ID NO: 265838 - protein, 17 aa, Homo sapiens
  CDR3 for beta chain variable domain of TCR clone 132919 (TRBV4-1, TRBJ1-4)
CASSDTGELMKNCFLAV

SEQ ID NO: 265839 - protein, 16 aa, Homo sapiens
  CDR3 for alpha chain variable domain of TCR clone 132920 (TRAV30, TRAJ24)
CGTEIVDADSWGKFQF

SEQ ID NO: 265840 - protein, 17 aa, Homo sapiens
  CDR3 for beta chain variable domain of TCR clone 132920 (TRBV11-2, TRBJ2-3)
CQQLRGASRGAPNTQYF

SEQ ID NO: 265841 - protein, 12 aa, Homo sapiens
  CDR3 for alpha chain variable domain of TCR clone 132921 (TRAV12-2, TRAJ10)
WGVTGGGNKLTF

SEQ ID NO: 265842 - protein, 14 aa, Homo sapiens
  CDR3 for beta chain variable domain of TCR clone 132921 (TRBV12-5, TRBJ2-5)
CASGSRTHQETQYF

SEQ ID NO: 265843 - protein, 13 aa, Homo sapiens
  CDR3 for alpha chain variable domain of TCR clone 132922 (TRAV16, TRAJ11)
CALMNSGYSTLTF

SEQ ID NO: 265844 - protein, 13 aa, Homo sapiens
  CDR3 for beta chain variable domain of TCR clone 132922 (TRBV7-9, TRBJ1-2)
CASSLKQNYGYTF

SEQ ID NO: 265845 - protein, 12 aa, Homo sapiens
  CDR3 for alpha chain variable domain of TCR clone 132923 (TRAV16, TRAJ26)
CALRLWSEFFLW

SEQ ID NO: 265846 - protein, 14 aa, Homo sapiens
  CDR3 for beta chain variable domain of TCR clone 132923 (TRBV7-2, TRBJ2-7)
CASRSQGAAYEQYF

SEQ ID NO: 265847 - protein, 17 aa, Homo sapiens
  CDR3 for alpha chain variable domain of TCR clone 132924 (TRAV26-1, TRAJ58)
CIVRVGAEETSGSRLTF

SEQ ID NO: 265848 - protein, 18 aa, Homo sapiens
  CDR3 for beta chain variable domain of TCR clone 132924 (TRBV7-9, TRBJ2-7)
CASSLTASGSRTWYEQYF

SEQ ID NO: 265849 - protein, 13 aa, Homo sapiens
  CDR3 for alpha chain variable domain of TCR clone 132925 (TRAV23/DV6, TRAJ15)
CAALPAVRNCSDL

SEQ ID NO: 265850 - protein, 14 aa, Homo sapiens
  CDR3 for beta chain variable domain of TCR clone 132925 (TRBV7-9, TRBJ1-2)
CASSRQGANYGYTF

SEQ ID NO: 265851 - protein, 15 aa, Homo sapiens
  CDR3 for alpha chain variable domain of TCR clone 132926 (TRAV17, TRAJ22)
CATVAPSGSARQLTF

SEQ ID NO: 265852 - protein, 16 aa, Homo sapiens
  CDR3 for beta chain variable domain of TCR clone 132926 (TRBV10-3, TRBJ2-7)
CAISADFADGPYEQYF

SEQ ID NO: 265853 - protein, 13 aa, Homo sapiens
  CDR3 for alpha chain variable domain of TCR clone 132927 (TRAV2, TRAJ15)
CAVASQAGTALIF

SEQ ID NO: 265854 - protein, 15 aa, Homo sapiens
  CDR3 for beta chain variable domain of TCR clone 132927 (TRBV11-2, TRBJ2-1)
CASSLGTSGLNEQFL

SEQ ID NO: 265855 - protein, 13 aa, Homo sapiens
  CDR3 for alpha chain variable domain of TCR clone 132928 (TRAV13-1, TRAJ11)
CAAVLAGYSTLTF

SEQ ID NO: 265856 - protein, 17 aa, Homo sapiens
  CDR3 for beta chain variable domain of TCR clone 132928 (TRBV25-1, TRBJ2-7)
CASSDARVVFASYEQYF

SEQ ID NO: 265857 - protein, 18 aa, Homo sapiens
  CDR3 for alpha chain variable domain of TCR clone 132929 (TRAV26-1, TRAJ52)
CIVRVAGAGGTSYGKLTF

SEQ ID NO: 265858 - protein, 13 aa, Homo sapiens
  CDR3 for beta chain variable domain of TCR clone 132929 (TRBV7-3, TRBJ1-2)
CASSLKRGYGYTF

SEQ ID NO: 265859 - protein, 14 aa, Homo sapiens
  CDR3 for alpha chain variable domain of TCR clone 132930 (TRAV3, TRAJ22)
CAVRDYGSARQLTF

SEQ ID NO: 265860 - protein, 16 aa, Homo sapiens
  CDR3 for beta chain variable domain of TCR clone 132930 (TRBV7-3, TRBJ2-2)
CASSLKRGTLSGELFF

SEQ ID NO: 265861 - protein, 16 aa, Homo sapiens
  CDR3 for alpha chain variable domain of TCR clone 132931 (TRAV30, TRAJ48)
CGTEIKSNFGNEKLTF

SEQ ID NO: 265862 - protein, 14 aa, Homo sapiens
  CDR3 for beta chain variable domain of TCR clone 132931 (TRBV7-3, TRBJ1-1)
CASSLKGGNTEAFF

SEQ ID NO: 265863 - protein, 16 aa, Homo sapiens
  CDR3 for alpha chain variable domain of TCR clone 132932 (TRAV12-2, TRAJ50)
CAVGTATKTSYDKVKF

SEQ ID NO: 265864 - protein, 12 aa, Homo sapiens
  CDR3 for beta chain variable domain of TCR clone 132932 (TRBV12-4, TRBJ1-5)
CASSLGRQPQHF

SEQ ID NO: 265865 - protein, 13 aa, Homo sapiens
  CDR3 for alpha chain variable domain of TCR clone 132933 (TRAV21, TRAJ37)
CAVSSGNTGKLIF

SEQ ID NO: 265866 - protein, 14 aa, Homo sapiens
  CDR3 for beta chain variable domain of TCR clone 132933 (TRBV6-1, TRBJ1-3)
CASVQGGGGNTIYF

SEQ ID NO: 265867 - protein, 13 aa, Homo sapiens
  CDR3 for alpha chain variable domain of TCR clone 132934 (TRAV12-2, TRAJ4)
CAVRSGGYNELIF

SEQ ID NO: 265868 - protein, 15 aa, Homo sapiens
  CDR3 for beta chain variable domain of TCR clone 132934 (TRBV10-3, TRBJ2-1)
CAISDVQDRAYEQFF

SEQ ID NO: 265869 - protein, 14 aa, Homo sapiens
  CDR3 for alpha chain variable domain of TCR clone 132935 (TRAV38-1, TRAJ43)
CAFMKPNNNNDMRF

SEQ ID NO: 265870 - protein, 17 aa, Homo sapiens
  CDR3 for beta chain variable domain of TCR clone 132935 (TRBV7-7, TRBJ1-4)
CASSLVGQGASNEKLFF

SEQ ID NO: 265871 - protein, 14 aa, Homo sapiens
  CDR3 for alpha chain variable domain of TCR clone 132936 (TRAV17, TRAJ35)
CATDRPGLGNVLHC

SEQ ID NO: 265872 - protein, 19 aa, Homo sapiens
  CDR3 for beta chain variable domain of TCR clone 132936 (TRBV11-3, TRBJ2-2)
CASSTRPGAKTTNTGELFF

SEQ ID NO: 265873 - protein, 11 aa, Homo sapiens
  CDR3 for alpha chain variable domain of TCR clone 132937 (TRAV12-2, TRAJ54)
CAVEGAQKLVF

SEQ ID NO: 265874 - protein, 14 aa, Homo sapiens
  CDR3 for beta chain variable domain of TCR clone 132937 (TRBV12-4, TRBJ1-1)
CASSLGTGGTEAFF

SEQ ID NO: 265875 - protein, 13 aa, Homo sapiens
  CDR3 for alpha chain variable domain of TCR clone 132938 (TRAV1-2, TRAJ9)
CAALNTGGFKTIF

SEQ ID NO: 265876 - protein, 13 aa, Homo sapiens
  CDR3 for beta chain variable domain of TCR clone 132938 (TRBV5-4, TRBJ1-6)
CASSLGVGSPLHF

SEQ ID NO: 265877 - protein, 12 aa, Homo sapiens
  CDR3 for alpha chain variable domain of TCR clone 132939 (TRAV20, TRAJ20)
CAVLFNDYKLSF

SEQ ID NO: 265878 - protein, 14 aa, Homo sapiens
  CDR3 for beta chain variable domain of TCR clone 132939 (TRBV20-1, TRBJ2-1)
CSAQIGGSANEQFF

SEQ ID NO: 265879 - protein, 18 aa, Homo sapiens
  CDR3 for alpha chain variable domain of TCR clone 132940 (TRAV21, TRAJ52)
CAVRPSPAGGTCYGKLTF

SEQ ID NO: 265880 - protein, 13 aa, Homo sapiens
  CDR3 for beta chain variable domain of TCR clone 132940 (TRBV29-1, TRBJ2-2)
CSVYREDTGELFF

SEQ ID NO: 265881 - protein, 17 aa, Homo sapiens
  CDR3 for alpha chain variable domain of TCR clone 132941 (TRAV8-1, TRAJ43)
CAVTNDMLFGAGTRLTV

SEQ ID NO: 265882 - protein, 17 aa, Homo sapiens
  CDR3 for beta chain variable domain of TCR clone 132941 (TRBV5-4, TRBJ2-1)
CASSSAGGRGPYNEQFF

SEQ ID NO: 265883 - protein, 14 aa, Homo sapiens
  CDR3 for alpha chain variable domain of TCR clone 132942 (TRAV1-2, TRAJ8)
CAVRDDTGFQKLVF

SEQ ID NO: 265884 - protein, 13 aa, Homo sapiens
  CDR3 for beta chain variable domain of TCR clone 132942 (TRBV12-4, TRBJ1-5)
CASSPDRAQPQHF

SEQ ID NO: 265885 - protein, 12 aa, Homo sapiens
  CDR3 for alpha chain variable domain of TCR clone 132943 (TRAV13-1, TRAJ27)
CAAHTNAGKSTF

SEQ ID NO: 265886 - protein, 15 aa, Homo sapiens
  CDR3 for beta chain variable domain of TCR clone 132943 (TRBV7-9, TRBJ1-6)
CASSSPGRGNSPLHC

SEQ ID NO: 265887 - protein, 13 aa, Homo sapiens
  CDR3 for alpha chain variable domain of TCR clone 132944 (TRAV8-3, TRAJ21)
CAVGAYNFNKFYF

SEQ ID NO: 265888 - protein, 13 aa, Homo sapiens
  CDR3 for beta chain variable domain of TCR clone 132944 (TRBV19, TRBJ2-7)
CASREAGGSEQYF

SEQ ID NO: 265889 - protein, 10 aa, Homo sapiens
  CDR3 for alpha chain variable domain of TCR clone 132945 (TRAV8-4, TRAJ43)
CAVSADDMRF

SEQ ID NO: 265890 - protein, 14 aa, Homo sapiens
  CDR3 for beta chain variable domain of TCR clone 132945 (TRBV7-9, TRBJ2-1)
CASSPRDSLYEQFF

SEQ ID NO: 265891 - protein, 13 aa, Homo sapiens
  CDR3 for alpha chain variable domain of TCR clone 132946 (TRAV3, TRAJ21)
CAVREPDFNKFYC

SEQ ID NO: 265892 - protein, 13 aa, Homo sapiens
  CDR3 for beta chain variable domain of TCR clone 132946 (TRBV9, TRBJ2-1)
CASSPSGGNEQFF

SEQ ID NO: 265893 - protein, 13 aa, Homo sapiens
  CDR3 for alpha chain variable domain of TCR clone 132947 (TRAV2, TRAJ10)
CALETGGGNKLTF

SEQ ID NO: 265894 - protein, 14 aa, Homo sapiens
  CDR3 for beta chain variable domain of TCR clone 132947 (TRBV20-1, TRBJ2-3)
CSAGGRRGTDTQYF

SEQ ID NO: 265895 - protein, 16 aa, Homo sapiens
  CDR3 for alpha chain variable domain of TCR clone 132948 (TRAV16, TRAJ52)
CALSAAGGTSYGKLTF

SEQ ID NO: 265896 - protein, 12 aa, Homo sapiens
  CDR3 for beta chain variable domain of TCR clone 132948 (TRBV12-4, TRBJ1-3)
CASSFSGNTIYF

SEQ ID NO: 265897 - protein, 13 aa, Homo sapiens
  CDR3 for alpha chain variable domain of TCR clone 132949 (TRAV3, TRAJ21)
CAVREPDFNKFYF

SEQ ID NO: 265898 - protein, 12 aa, Homo sapiens
  CDR3 for beta chain variable domain of TCR clone 132949 (TRBV9, TRBJ2-1)
CSSPSGGNEQFF

SEQ ID NO: 265899 - protein, 16 aa, Homo sapiens
  CDR3 for alpha chain variable domain of TCR clone 132950 (TRAV3, TRAJ32)
CAVRENYGGATNKLIF

SEQ ID NO: 265900 - protein, 12 aa, Homo sapiens
  CDR3 for beta chain variable domain of TCR clone 132950 (TRBV20-1, TRBJ1-2)
CSVTPEGYGYTV

SEQ ID NO: 265901 - protein, 11 aa, Homo sapiens
  CDR3 for alpha chain variable domain of TCR clone 132951 (TRAV12-3, TRAJ43)
CAMSVSNDMRF

SEQ ID NO: 265902 - protein, 13 aa, Homo sapiens
  CDR3 for beta chain variable domain of TCR clone 132951 (TRBV20-1, TRBJ1-1)
CSAPLGAGTEAFF

SEQ ID NO: 265903 - protein, 14 aa, Homo sapiens
  CDR3 for alpha chain variable domain of TCR clone 132952 (TRAV1-2, TRAJ16)
CAVNRFSDGQKLLF

SEQ ID NO: 265904 - protein, 14 aa, Homo sapiens
  CDR3 for beta chain variable domain of TCR clone 132952 (TRBV28, TRBJ1-5)
CASSLGVLVKPQHF

SEQ ID NO: 265905 - protein, 15 aa, Homo sapiens
  CDR3 for alpha chain variable domain of TCR clone 132953 (TRAV26-1, TRAJ37)
CIVRLGSGNTGKLIF

SEQ ID NO: 265906 - protein, 12 aa, Homo sapiens
  CDR3 for beta chain variable domain of TCR clone 132953 (TRBV11-2, TRBJ2-2)
CASSLGGGELFF

SEQ ID NO: 265907 - protein, 19 aa, Homo sapiens
  CDR3 for alpha chain variable domain of TCR clone 132954 (TRAV26-1, TRAJ22)
CCVLLHRWVFSGSARQLTF

SEQ ID NO: 265908 - protein, 16 aa, Homo sapiens
  CDR3 for beta chain variable domain of TCR clone 132954 (TRBV13, TRBJ2-7)
CASSSRESGRTYEQYF

SEQ ID NO: 265909 - protein, 13 aa, Homo sapiens
  CDR3 for alpha chain variable domain of TCR clone 132955 (TRAV12-3, TRAJ33)
CAMSVNSNYQLIW

SEQ ID NO: 265910 - protein, 13 aa, Homo sapiens
  CDR3 for beta chain variable domain of TCR clone 132955 (TRBV12-4, TRBJ1-1)
CASSPGTGFEAFF

SEQ ID NO: 265911 - protein, 14 aa, Homo sapiens
  CDR3 for alpha chain variable domain of TCR clone 132956 (TRAV12-2, TRAJ17)
CAVLFKAAGNKLTF

SEQ ID NO: 265912 - protein, 13 aa, Homo sapiens
  CDR3 for beta chain variable domain of TCR clone 132956 (TRBV15, TRBJ1-1)
CATSRIRNTEAFF

SEQ ID NO: 265913 - protein, 15 aa, Homo sapiens
  CDR3 for alpha chain variable domain of TCR clone 132957 (TRAV26-1, TRAJ22)
CIVRVSFWFCKATDL

SEQ ID NO: 265914 - protein, 14 aa, Homo sapiens
  CDR3 for beta chain variable domain of TCR clone 132957 (TRBV12-5, TRBJ2-5)
CASGSRTHQETQYF

SEQ ID NO: 265915 - protein, 13 aa, Homo sapiens
  CDR3 for alpha chain variable domain of TCR clone 132958 (TRAV21, TRAJ20)
CAVGLRVDYKLSF

SEQ ID NO: 265916 - protein, 15 aa, Homo sapiens
  CDR3 for beta chain variable domain of TCR clone 132958 (TRBV12-5, TRBJ2-2)
CASGRLGGNTGELFF

SEQ ID NO: 265917 - protein, 15 aa, Homo sapiens
  CDR3 for alpha chain variable domain of TCR clone 132959 (TRAV17, TRAJ22)
CATVAPSGSARQLTF

SEQ ID NO: 265918 - protein, 16 aa, Homo sapiens
  CDR3 for beta chain variable domain of TCR clone 132959 (TRBV10-3, TRBJ2-7)
CAISADFADRPYEPYF

SEQ ID NO: 265919 - protein, 13 aa, Homo sapiens
  CDR3 for alpha chain variable domain of TCR clone 132960 (TRAV1-2, TRAJ36)
CAGDQTGANNLFF

SEQ ID NO: 265920 - protein, 14 aa, Homo sapiens
  CDR3 for beta chain variable domain of TCR clone 132960 (TRBV20-1, TRBJ2-5)
CSAREMTKQETQYF

SEQ ID NO: 265921 - protein, 15 aa, Homo sapiens
  CDR3 for alpha chain variable domain of TCR clone 132961 (TRAV3, TRAJ30)
CAVRDEYGRDEKIIF

SEQ ID NO: 265922 - protein, 16 aa, Homo sapiens
  CDR3 for beta chain variable domain of TCR clone 132961 (TRBV5-1, TRBJ2-5)
CASSLANHRGRETQYF

SEQ ID NO: 265923 - protein, 14 aa, Homo sapiens
  CDR3 for alpha chain variable domain of TCR clone 132962 (TRAV1-2, TRAJ16)
CAVNRFSDVQKLLF

SEQ ID NO: 265924 - protein, 14 aa, Homo sapiens
  CDR3 for beta chain variable domain of TCR clone 132962 (TRBV20-1, TRBJ2-1)
CSARGGSSYNEQFF

SEQ ID NO: 265925 - protein, 15 aa, Homo sapiens
  CDR3 for alpha chain variable domain of TCR clone 132963 (TRAV23/DV6, TRAJ13)
CAAWPGGGGYQTVTF

SEQ ID NO: 265926 - protein, 14 aa, Homo sapiens
  CDR3 for beta chain variable domain of TCR clone 132963 (TRBV6-1, TRBJ2-1)
CASAGGAIKNEQFF

SEQ ID NO: 265927 - protein, 15 aa, Homo sapiens
  CDR3 for alpha chain variable domain of TCR clone 132964 (TRAV13-1, TRAJ27)
CAARELNTNAGKSAF

SEQ ID NO: 265928 - protein, 14 aa, Homo sapiens
  CDR3 for beta chain variable domain of TCR clone 132964 (TRBV6-5, TRBJ1-2)
CASSYTRDRGRYTF

SEQ ID NO: 265929 - protein, 15 aa, Homo sapiens
  CDR3 for alpha chain variable domain of TCR clone 132965 (TRAV12-3, TRAJ6)
CAMSATAGGSYIPTF

SEQ ID NO: 265930 - protein, 11 aa, Homo sapiens
  CDR3 for beta chain variable domain of TCR clone 132965 (TRBV20-1, TRBJ1-5)
CSAQGDQPQHF

SEQ ID NO: 265931 - protein, 14 aa, Homo sapiens
  CDR3 for alpha chain variable domain of TCR clone 132966 (TRAV12-3, TRAJ12)
CAMCRMDSSYKLIF

SEQ ID NO: 265932 - protein, 14 aa, Homo sapiens
  CDR3 for beta chain variable domain of TCR clone 132966 (TRBV20-1, TRBJ1-4)
CSARSGQSNEKLFF

SEQ ID NO: 265933 - protein, 12 aa, Homo sapiens
  CDR3 for alpha chain variable domain of TCR clone 132967 (TRAV12-3, TRAJ17)
CAMTLTGNKLTF

SEQ ID NO: 265934 - protein, 13 aa, Homo sapiens
  CDR3 for beta chain variable domain of TCR clone 132967 (TRBV7-3, TRBJ1-1)
CASSQDWGADAFF

SEQ ID NO: 265935 - protein, 13 aa, Homo sapiens
  CDR3 for alpha chain variable domain of TCR clone 132968 (TRAV38-2/DV8, TRAJ53)
CASGGGSNYKLTF

SEQ ID NO: 265936 - protein, 16 aa, Homo sapiens
  CDR3 for beta chain variable domain of TCR clone 132968 (TRBV28, TRBJ1-5)
CASRFRGAVQNQPQHL

SEQ ID NO: 265937 - protein, 13 aa, Homo sapiens
  CDR3 for alpha chain variable domain of TCR clone 132969 (TRAV20, TRAJ37)
CAGCSSNTGKLIF

SEQ ID NO: 265938 - protein, 16 aa, Homo sapiens
  CDR3 for beta chain variable domain of TCR clone 132969 (TRBV7-9, TRBJ1-2)
CASSLGFSSGEDGYTF

SEQ ID NO: 265939 - protein, 12 aa, Homo sapiens
  CDR3 for alpha chain variable domain of TCR clone 132970 (TRAV17, TRAJ20)
CATALNDYKLSL

SEQ ID NO: 265940 - protein, 12 aa, Homo sapiens
  CDR3 for beta chain variable domain of TCR clone 132970 (TRBV10-3, TRBJ2-7)
CAHGADSGEQYF

SEQ ID NO: 265941 - protein, 13 aa, Homo sapiens
  CDR3 for alpha chain variable domain of TCR clone 132971 (TRAV26-1, TRAJ34)
CIVRVGNTDKPIF

SEQ ID NO: 265942 - protein, 15 aa, Homo sapiens
  CDR3 for beta chain variable domain of TCR clone 132971 (TRBV7-3, TRBJ1-2)
CASSPQGFAPGGYTF

SEQ ID NO: 265943 - protein, 15 aa, Homo sapiens
  CDR3 for alpha chain variable domain of TCR clone 132972 (TRAV26-2, TRAJ16)
CILSLRFSDGQKLLF

SEQ ID NO: 265944 - protein, 13 aa, Homo sapiens
  CDR3 for beta chain variable domain of TCR clone 132972 (TRBV20-1, TRBJ1-1)
CSAPLGGGTEAFF

SEQ ID NO: 265945 - protein, 13 aa, Homo sapiens
  CDR3 for alpha chain variable domain of TCR clone 132973 (TRAV12-1, TRAJ33)
CGDAPASNYQLIW

SEQ ID NO: 265946 - protein, 15 aa, Homo sapiens
  CDR3 for beta chain variable domain of TCR clone 132973 (TRBV27, TRBJ2-1)
CASSNGGGSSNEQFF

SEQ ID NO: 265947 - protein, 11 aa, Homo sapiens
  CDR3 for alpha chain variable domain of TCR clone 132974 (TRAV8-1, TRAJ8)
CAMTGFQKLVL

SEQ ID NO: 265948 - protein, 14 aa, Homo sapiens
  CDR3 for beta chain variable domain of TCR clone 132974 (TRBV5-4, TRBJ1-2)
CASTRQTDNYGYTF

SEQ ID NO: 265949 - protein, 12 aa, Homo sapiens
  CDR3 for alpha chain variable domain of TCR clone 132975 (TRAV12-3, TRAJ17)
CAMTLTGNKLTF

SEQ ID NO: 265950 - protein, 15 aa, Homo sapiens
  CDR3 for beta chain variable domain of TCR clone 132975 (TRBV20-1, TRBJ2-3)
CSAEPLAGHGDTQYF

SEQ ID NO: 265951 - protein, 13 aa, Homo sapiens
  CDR3 for alpha chain variable domain of TCR clone 132976 (TRAV3, TRAJ20)
CAVRSLNDYKLSF

SEQ ID NO: 265952 - protein, 13 aa, Homo sapiens
  CDR3 for beta chain variable domain of TCR clone 132976 (TRBV6-1, TRBJ2-1)
CAGMDTTNNEQFF

SEQ ID NO: 265953 - protein, 13 aa, Homo sapiens
  CDR3 for alpha chain variable domain of TCR clone 132977 (TRAV26-1, TRAJ34)
CIVRGHNTDKLIF

SEQ ID NO: 265954 - protein, 15 aa, Homo sapiens
  CDR3 for beta chain variable domain of TCR clone 132977 (TRBV19, TRBJ1-1)
CASTSGQIQNTEAFF

SEQ ID NO: 265955 - protein, 13 aa, Homo sapiens
  CDR3 for alpha chain variable domain of TCR clone 132978 (TRAV21, TRAJ20)
CAVGLSVDYKLSF

SEQ ID NO: 265956 - protein, 13 aa, Homo sapiens
  CDR3 for beta chain variable domain of TCR clone 132978 (TRBV6-1, TRBJ1-1)
CASSRQGNTGAFF

SEQ ID NO: 265957 - protein, 11 aa, Homo sapiens
  CDR3 for alpha chain variable domain of TCR clone 132979 (TRAV8-3, TRAJ16)
CAVFPCQKLLF

SEQ ID NO: 265958 - protein, 12 aa, Homo sapiens
  CDR3 for beta chain variable domain of TCR clone 132979 (TRBV3-1, TRBJ1-1)
CASSQDPTEAFF

SEQ ID NO: 265959 - protein, 16 aa, Homo sapiens
  CDR3 for alpha chain variable domain of TCR clone 132980 (TRAV8-3, TRAJ13)
CAVGAYPSGGYQKVTF

SEQ ID NO: 265960 - protein, 17 aa, Homo sapiens
  CDR3 for beta chain variable domain of TCR clone 132980 (TRBV20-1, TRBJ2-1)
CSASSSGLAGSYNEQFF

SEQ ID NO: 265961 - protein, 15 aa, Homo sapiens
  CDR3 for alpha chain variable domain of TCR clone 132981 (TRAV26-1, TRAJ44)
CIARVPFCTASKLTF

SEQ ID NO: 265962 - protein, 15 aa, Homo sapiens
  CDR3 for beta chain variable domain of TCR clone 132981 (TRBV20-1, TRBJ1-1)
CSASRGVTGNTEAFF

SEQ ID NO: 265963 - protein, 13 aa, Homo sapiens
  CDR3 for alpha chain variable domain of TCR clone 132982 (TRAV21, TRAJ27)
CAARPGNAGKSTF

SEQ ID NO: 265964 - protein, 17 aa, Homo sapiens
  CDR3 for beta chain variable domain of TCR clone 132982 (TRBV11-3, TRBJ2-7)
CASSPGPASSYEQYLGR

SEQ ID NO: 265965 - protein, 15 aa, Homo sapiens
  CDR3 for alpha chain variable domain of TCR clone 132983 (TRAV12-2, TRAJ53)
CAVNGGGGSNYKLTF

SEQ ID NO: 265966 - protein, 14 aa, Homo sapiens
  CDR3 for beta chain variable domain of TCR clone 132983 (TRBV7-2, TRBJ1-2)
CASSQTGSTYGYAF

SEQ ID NO: 265967 - protein, 13 aa, Homo sapiens
  CDR3 for alpha chain variable domain of TCR clone 132984 (TRAV27, TRAJ29)
CAGARSGNTPLVF

SEQ ID NO: 265968 - protein, 14 aa, Homo sapiens
  CDR3 for beta chain variable domain of TCR clone 132984 (TRBV7-9, TRBJ2-7)
CASSIGQGAGEQCF

SEQ ID NO: 265969 - protein, 14 aa, Homo sapiens
  CDR3 for alpha chain variable domain of TCR clone 132985 (TRAV12-2, TRAJ17)
CAALFKAPGNKLTF

SEQ ID NO: 265970 - protein, 16 aa, Homo sapiens
  CDR3 for beta chain variable domain of TCR clone 132985 (TRBV20-1, TRBJ2-2)
CSASASGIPGAGELFF

SEQ ID NO: 265971 - protein, 13 aa, Homo sapiens
  CDR3 for alpha chain variable domain of TCR clone 132986 (TRAV13-1, TRAJ10)
CAATAGGGNKLTF

SEQ ID NO: 265972 - protein, 12 aa, Homo sapiens
  CDR3 for beta chain variable domain of TCR clone 132986 (TRBV7-3, TRBJ2-1)
CASRFQSGPQFF

SEQ ID NO: 265973 - protein, 13 aa, Homo sapiens
  CDR3 for alpha chain variable domain of TCR clone 132987 (TRAV13-1, TRAJ53)
QADSGGSNYKLTF

SEQ ID NO: 265974 - protein, 15 aa, Homo sapiens
  CDR3 for beta chain variable domain of TCR clone 132987 (TRBV5-1, TRBJ2-1)
CASSPPRAPYNEQFF

SEQ ID NO: 265975 - protein, 15 aa, Homo sapiens
  CDR3 for alpha chain variable domain of TCR clone 132988 (TRAV3, TRAJ22)
CAVRDRGGSARPLTF

SEQ ID NO: 265976 - protein, 16 aa, Homo sapiens
  CDR3 for beta chain variable domain of TCR clone 132988 (TRBV25-1, TRBJ1-1)
CASSGDRDRGRIEAFF

SEQ ID NO: 265977 - protein, 14 aa, Homo sapiens
  CDR3 for alpha chain variable domain of TCR clone 132989 (TRAV12-2, TRAJ52)
CAVPGGTSYGKLTF

SEQ ID NO: 265978 - protein, 13 aa, Homo sapiens
  CDR3 for beta chain variable domain of TCR clone 132989 (TRBV19, TRBJ2-7)
CASSPRQSYEQYF

SEQ ID NO: 265979 - protein, 16 aa, Homo sapiens
  CDR3 for alpha chain variable domain of TCR clone 132990 (TRAV3, TRAJ37)
CAVIGKGSGNTGKLIF

SEQ ID NO: 265980 - protein, 13 aa, Homo sapiens
  CDR3 for beta chain variable domain of TCR clone 132990 (TRBV14, TRBJ2-7)
CASSQDRRYEQYF

SEQ ID NO: 265981 - protein, 14 aa, Homo sapiens
  CDR3 for alpha chain variable domain of TCR clone 132991 (TRAV17, TRAJ35)
CATDRPGFGNVLHC

SEQ ID NO: 265982 - protein, 12 aa, Homo sapiens
  CDR3 for beta chain variable domain of TCR clone 132991 (TRBV11-2, TRBJ2-2)
CASSLGGGELFF

SEQ ID NO: 265983 - protein, 14 aa, Homo sapiens
  CDR3 for alpha chain variable domain of TCR clone 132992 (TRAV2, TRAJ37)
CAVDFTSNTGKLIF

SEQ ID NO: 265984 - protein, 17 aa, Homo sapiens
  CDR3 for beta chain variable domain of TCR clone 132992 (TRBV19, TRBJ2-6)
CASSTGQVFSGANVLTF

SEQ ID NO: 265985 - protein, 11 aa, Homo sapiens
  CDR3 for alpha chain variable domain of TCR clone 132993 (TRAV12-1, TRAJ30)
CVVNGQDKIIF

SEQ ID NO: 265986 - protein, 15 aa, Homo sapiens
  CDR3 for beta chain variable domain of TCR clone 132993 (TRBV11-3, TRBJ2-3)
CASLKDGREGDTQYF

SEQ ID NO: 265987 - protein, 17 aa, Homo sapiens
  CDR3 for alpha chain variable domain of TCR clone 132994 (TRAV26-1, TRAJ46)
IASSESEKKSSGDKLTF

SEQ ID NO: 265988 - protein, 19 aa, Homo sapiens
  CDR3 for beta chain variable domain of TCR clone 132994 (TRBV25-1, TRBJ2-2)
CAILVYRVDRGRKTGELFF

SEQ ID NO: 265989 - protein, 14 aa, Homo sapiens
  CDR3 for alpha chain variable domain of TCR clone 132995 (TRAV13-1, TRAJ44)
CAAQATGTASKLTF

SEQ ID NO: 265990 - protein, 17 aa, Homo sapiens
  CDR3 for beta chain variable domain of TCR clone 132995 (TRBV7-3, TRBJ2-3)
RASSLMKRMRGADTQYF

SEQ ID NO: 265991 - protein, 14 aa, Homo sapiens
  CDR3 for alpha chain variable domain of TCR clone 132996 (TRAV12-3, TRAJ10)
SHLPLTGGGNKLTF

SEQ ID NO: 265992 - protein, 13 aa, Homo sapiens
  CDR3 for beta chain variable domain of TCR clone 132996 (TRBV28, TRBJ1-1)
CASSKQGWTEAFF

SEQ ID NO: 265993 - protein, 17 aa, Homo sapiens
  CDR3 for alpha chain variable domain of TCR clone 132997 (TRAV12-2, TRAJ6)
CAPQGPPRAGGSYIPTF

SEQ ID NO: 265994 - protein, 16 aa, Homo sapiens
  CDR3 for beta chain variable domain of TCR clone 132997 (TRBV19, TRBJ2-2)
CANSTARASNTGELFF

SEQ ID NO: 265995 - protein, 14 aa, Homo sapiens
  CDR3 for alpha chain variable domain of TCR clone 132998 (TRAV29/DV5, TRAJ34)
CSASASRETDKLIF

SEQ ID NO: 265996 - protein, 15 aa, Homo sapiens
  CDR3 for beta chain variable domain of TCR clone 132998 (TRBV7-8, TRBJ2-7)
CASSLERAGSYEQYF

SEQ ID NO: 265997 - protein, 17 aa, Homo sapiens
  CDR3 for alpha chain variable domain of TCR clone 132999 (TRAV3, TRAJ6)
CAVRDGPRAGGSYIPTF

SEQ ID NO: 265998 - protein, 13 aa, Homo sapiens
  CDR3 for beta chain variable domain of TCR clone 132999 (TRBV20-1, TRBJ1-6)
CSAPLGVGSPLNF

SEQ ID NO: 265999 - protein, 15 aa, Homo sapiens
  CDR3 for alpha chain variable domain of TCR clone 133000 (TRAV12-3, TRAJ6)
CAMSATSGGSYLPTF

SEQ ID NO: 266000 - protein, 11 aa, Homo sapiens
  CDR3 for beta chain variable domain of TCR clone 133000 (TRBV20-1, TRBJ1-5)
CSAQGDQPQHF

SEQ ID NO: 266001 - protein, 14 aa, Homo sapiens
  CDR3 for alpha chain variable domain of TCR clone 133001 (TRAV29/DV5, TRAJ35)
CAASKGGFGNVLHC

SEQ ID NO: 266002 - protein, 13 aa, Homo sapiens
  CDR3 for beta chain variable domain of TCR clone 133001 (TRBV7-3, TRBJ1-1)
CASSQDWGAEAFF

SEQ ID NO: 266003 - protein, 13 aa, Homo sapiens
  CDR3 for alpha chain variable domain of TCR clone 133002 (TRAV25, TRAJ10)
CAGRTGGGNKLTF

SEQ ID NO: 266004 - protein, 15 aa, Homo sapiens
  CDR3 for beta chain variable domain of TCR clone 133002 (TRBV19, TRBJ2-1)
CASSSPGVHLDEQFF

SEQ ID NO: 266005 - protein, 12 aa, Homo sapiens
  CDR3 for alpha chain variable domain of TCR clone 133003 (TRAV21, TRAJ15)
CAVANRRNCSDL

SEQ ID NO: 266006 - protein, 14 aa, Homo sapiens
  CDR3 for beta chain variable domain of TCR clone 133003 (TRBV27, TRBJ2-2)
CASSLGAATGELFF

SEQ ID NO: 266007 - protein, 20 aa, Homo sapiens
  CDR3 for alpha chain variable domain of TCR clone 133004 (TRAV12-1, TRAJ42)
SSVIQPPTSVKGGSQGNLIF

SEQ ID NO: 266008 - protein, 16 aa, Homo sapiens
  CDR3 for beta chain variable domain of TCR clone 133004 (TRBV19, TRBJ2-3)
CASSPGAASRTDTQYF

SEQ ID NO: 266009 - protein, 18 aa, Homo sapiens
  CDR3 for alpha chain variable domain of TCR clone 133005 (TRAV12-3, TRAJ52)
CAMSRTNAGGPSYGKLTF

SEQ ID NO: 266010 - protein, 17 aa, Homo sapiens
  CDR3 for beta chain variable domain of TCR clone 133005 (TRBV7-3, TRBJ2-3)
CASSLMKRMRGADTQYF

SEQ ID NO: 266011 - protein, 11 aa, Homo sapiens
  CDR3 for alpha chain variable domain of TCR clone 133006 (TRAV12-3, TRAJ43)
CAMSVSNDIRF

SEQ ID NO: 266012 - protein, 12 aa, Homo sapiens
  CDR3 for beta chain variable domain of TCR clone 133006 (TRBV20-1, TRBJ1-1)
QCSTWGGTEAFF

SEQ ID NO: 266013 - protein, 16 aa, Homo sapiens
  CDR3 for alpha chain variable domain of TCR clone 133007 (TRAV12-3, TRAJ45)
CAMGWGSGGGADGLTF

SEQ ID NO: 266014 - protein, 15 aa, Homo sapiens
  CDR3 for beta chain variable domain of TCR clone 133007 (TRBV7-9, TRBJ1-6)
CASSSPGRGNSPLHF

SEQ ID NO: 266015 - protein, 14 aa, Homo sapiens
  CDR3 for alpha chain variable domain of TCR clone 133008 (TRAV3, TRAJ9)
CAVRLNTGGFKTIF

SEQ ID NO: 266016 - protein, 15 aa, Homo sapiens
  CDR3 for beta chain variable domain of TCR clone 133008 (TRBV7-2, TRBJ2-1)
CASSLASGRLNEQFF

SEQ ID NO: 266017 - protein, 13 aa, Homo sapiens
  CDR3 for alpha chain variable domain of TCR clone 133009 (TRAV17, TRAJ13)
CATDSGGYQRVTF

SEQ ID NO: 266018 - protein, 14 aa, Homo sapiens
  CDR3 for beta chain variable domain of TCR clone 133009 (TRBV6-1, TRBJ1-1)
CASTPLQMNTEAFF

SEQ ID NO: 266019 - protein, 13 aa, Homo sapiens
  CDR3 for alpha chain variable domain of TCR clone 133010 (TRAV2, TRAJ40)
CAVVTSGTYKYIF

SEQ ID NO: 266020 - protein, 14 aa, Homo sapiens
  CDR3 for beta chain variable domain of TCR clone 133010 (TRBV28, TRBJ1-2)
CASRIQGANYGYTF

SEQ ID NO: 266021 - protein, 16 aa, Homo sapiens
  CDR3 for alpha chain variable domain of TCR clone 133011 (TRAV30, TRAJ24)
CGTEIVDADSWGNSSL

SEQ ID NO: 266022 - protein, 14 aa, Homo sapiens
  CDR3 for beta chain variable domain of TCR clone 133011 (TRBV12-5, TRBJ2-5)
CASGSRTHQGTQYF

SEQ ID NO: 266023 - protein, 14 aa, Homo sapiens
  CDR3 for alpha chain variable domain of TCR clone 133012 (TRAV4, TRAJ30)
FLVGDMNRDDKIIF

SEQ ID NO: 266024 - protein, 16 aa, Homo sapiens
  CDR3 for beta chain variable domain of TCR clone 133012 (TRBV20-1, TRBJ1-4)
CSAPGQGLLTNEKLFF

SEQ ID NO: 266025 - protein, 15 aa, Homo sapiens
  CDR3 for alpha chain variable domain of TCR clone 133013 (TRAV21, TRAJ24)
CAARSSTDSWGKLQF

SEQ ID NO: 266026 - protein, 13 aa, Homo sapiens
  CDR3 for beta chain variable domain of TCR clone 133013 (TRBV11-2, TRBJ2-5)
CASSSTGEETEYF

SEQ ID NO: 266027 - protein, 14 aa, Homo sapiens
  CDR3 for alpha chain variable domain of TCR clone 133014 (TRAV12-3, TRAJ10)
SHLPLTGGGNKLTF

SEQ ID NO: 266028 - protein, 14 aa, Homo sapiens
  CDR3 for beta chain variable domain of TCR clone 133014 (TRBV6-1, TRBJ1-3)
CAIVQGGGGNTIYF

SEQ ID NO: 266029 - protein, 13 aa, Homo sapiens
  CDR3 for alpha chain variable domain of TCR clone 133015 (TRAV17, TRAJ9)
CPTDYTGGFKTIF

SEQ ID NO: 266030 - protein, 16 aa, Homo sapiens
  CDR3 for beta chain variable domain of TCR clone 133015 (TRBV7-7, TRBJ2-1)
CASSLASGTSYNEQFF

SEQ ID NO: 266031 - protein, 10 aa, Homo sapiens
  CDR3 for alpha chain variable domain of TCR clone 133016 (TRAV38-2/DV8, TRAJ43)
CAYTSGDMRF

SEQ ID NO: 266032 - protein, 15 aa, Homo sapiens
  CDR3 for beta chain variable domain of TCR clone 133016 (TRBV11-3, TRBJ2-3)
CASLRDGREGDTQYF

SEQ ID NO: 266033 - protein, 13 aa, Homo sapiens
  CDR3 for alpha chain variable domain of TCR clone 133017 (TRAV20, TRAJ34)
CAVSSYNTDKLIF

SEQ ID NO: 266034 - protein, 13 aa, Homo sapiens
  CDR3 for beta chain variable domain of TCR clone 133017 (TRBV7-9, TRBJ1-2)
CVSSLKQNYGYTF

SEQ ID NO: 266035 - protein, 14 aa, Homo sapiens
  CDR3 for alpha chain variable domain of TCR clone 133018 (TRAV13-1, TRAJ40)
CAASMTSGTYKYIF

SEQ ID NO: 266036 - protein, 14 aa, Homo sapiens
  CDR3 for beta chain variable domain of TCR clone 133018 (TRBV25-1, TRBJ1-1)
CASTHLGGNTEAFF

SEQ ID NO: 266037 - protein, 14 aa, Homo sapiens
  CDR3 for alpha chain variable domain of TCR clone 133019 (TRAV29/DV5, TRAJ36)
CAARRKTGANNLFF

SEQ ID NO: 266038 - protein, 12 aa, Homo sapiens
  CDR3 for beta chain variable domain of TCR clone 133019 (TRBV7-8, TRBJ2-7)
CASSLGDREQYF

SEQ ID NO: 266039 - protein, 12 aa, Homo sapiens
  CDR3 for alpha chain variable domain of TCR clone 133020 (TRAV1-1, TRAJ24)
CAVRGSWGKFQV

SEQ ID NO: 266040 - protein, 14 aa, Homo sapiens
  CDR3 for beta chain variable domain of TCR clone 133020 (TRBV20-1, TRBJ2-3)
CSARGGTSTDTQYF

SEQ ID NO: 266041 - protein, 14 aa, Homo sapiens
  CDR3 for alpha chain variable domain of TCR clone 133021 (TRAV12-2, TRAJ13)
CAVKKAGGYQKVTF

SEQ ID NO: 266042 - protein, 14 aa, Homo sapiens
  CDR3 for beta chain variable domain of TCR clone 133021 (TRBV7-6, TRBJ2-3)
CASSLGTVTDTQYF

SEQ ID NO: 266043 - protein, 12 aa, Homo sapiens
  CDR3 for alpha chain variable domain of TCR clone 133022 (TRAV21, TRAJ49)
CAVTNTGNQFYC

SEQ ID NO: 266044 - protein, 17 aa, Homo sapiens
  CDR3 for beta chain variable domain of TCR clone 133022 (TRBV13, TRBJ2-3)
CASSLSRVAGGRNTQYF

SEQ ID NO: 266045 - protein, 14 aa, Homo sapiens
  CDR3 for alpha chain variable domain of TCR clone 133023 (TRAV17, TRAJ37)
CATDGSSNTGKLIF

SEQ ID NO: 266046 - protein, 13 aa, Homo sapiens
  CDR3 for beta chain variable domain of TCR clone 133023 (TRBV11-2, TRBJ2-1)
CASSLDLVNVQFF

SEQ ID NO: 266047 - protein, 16 aa, Homo sapiens
  CDR3 for alpha chain variable domain of TCR clone 133024 (TRAV39, TRAJ32)
CAVDMGYGGATNKLIF

SEQ ID NO: 266048 - protein, 14 aa, Homo sapiens
  CDR3 for beta chain variable domain of TCR clone 133024 (TRBV9, TRBJ2-4)
CASSPSGTSGFQYF

SEQ ID NO: 266049 - protein, 17 aa, Homo sapiens
  CDR3 for alpha chain variable domain of TCR clone 133025 (TRAV2, TRAJ36)
CAVEGRGNWGKQPLLWD

SEQ ID NO: 266050 - protein, 14 aa, Homo sapiens
  CDR3 for beta chain variable domain of TCR clone 133025 (TRBV7-9, TRBJ2-5)
CASSLDTAQETQYF

SEQ ID NO: 266051 - protein, 14 aa, Homo sapiens
  CDR3 for alpha chain variable domain of TCR clone 133026 (TRAV1-2, TRAJ8)
CAVREDTGFQKLVF

SEQ ID NO: 266052 - protein, 15 aa, Homo sapiens
  CDR3 for beta chain variable domain of TCR clone 133026 (TRBV5-1, TRBJ2-1)
CASTGSGRTYNEQFF

SEQ ID NO: 266053 - protein, 17 aa, Homo sapiens
  CDR3 for alpha chain variable domain of TCR clone 133027 (TRAV4, TRAJ18)
CLVGERSVGSTLGRLYF

SEQ ID NO: 266054 - protein, 17 aa, Homo sapiens
  CDR3 for beta chain variable domain of TCR clone 133027 (TRBV5-4, TRBJ2-1)
CASSSAGGRGPYNEQFF

SEQ ID NO: 266055 - protein, 13 aa, Homo sapiens
  CDR3 for alpha chain variable domain of TCR clone 133028 (TRAV20, TRAJ9)
CAVPDTGGFKTIF

SEQ ID NO: 266056 - protein, 15 aa, Homo sapiens
  CDR3 for beta chain variable domain of TCR clone 133028 (TRBV7-2, TRBJ2-1)
CASTHGTGIYNEQFF

SEQ ID NO: 266057 - protein, 14 aa, Homo sapiens
  CDR3 for alpha chain variable domain of TCR clone 133029 (TRAV21, TRAJ32)
CCGDYGGATNKLTF

SEQ ID NO: 266058 - protein, 13 aa, Homo sapiens
  CDR3 for beta chain variable domain of TCR clone 133029 (TRBV2, TRBJ1-6)
CASGRGGISPLHF

SEQ ID NO: 266059 - protein, 14 aa, Homo sapiens
  CDR3 for alpha chain variable domain of TCR clone 133030 (TRAV12-1, TRAJ17)
CVVNYKAAGNKLTF

SEQ ID NO: 266060 - protein, 17 aa, Homo sapiens
  CDR3 for beta chain variable domain of TCR clone 133030 (TRBV20-1, TRBJ2-1)
CSASSSGLAGSYNELFF

SEQ ID NO: 266061 - protein, 13 aa, Homo sapiens
  CDR3 for alpha chain variable domain of TCR clone 133031 (TRAV13-1, TRAJ39)
CAANIWAGNMLTF

SEQ ID NO: 266062 - protein, 15 aa, Homo sapiens
  CDR3 for beta chain variable domain of TCR clone 133031 (TRBV7-9, TRBJ1-1)
CASSLLEQGGTEAFF

SEQ ID NO: 266063 - protein, 18 aa, Homo sapiens
  CDR3 for alpha chain variable domain of TCR clone 133032 (TRAV17, TRAJ45)
CATSLDLYSGGGADGLTF

SEQ ID NO: 266064 - protein, 15 aa, Homo sapiens
  CDR3 for beta chain variable domain of TCR clone 133032 (TRBV11-2, TRBJ2-1)
CASSKIRGLIYEQFF

SEQ ID NO: 266065 - protein, 12 aa, Homo sapiens
  CDR3 for alpha chain variable domain of TCR clone 133033 (TRAV13-2, TRAJ23)
CAERHRGGKLIF

SEQ ID NO: 266066 - protein, 13 aa, Homo sapiens
  CDR3 for beta chain variable domain of TCR clone 133033 (TRBV7-9, TRBJ1-2)
CASSIKQNYGYTF

SEQ ID NO: 266067 - protein, 19 aa, Homo sapiens
  CDR3 for alpha chain variable domain of TCR clone 133034 (TRAV38-1, TRAJ53)
CAFMKHGLESGGSNYKLTF

SEQ ID NO: 266068 - protein, 13 aa, Homo sapiens
  CDR3 for beta chain variable domain of TCR clone 133034 (TRBV19, TRBJ2-7)
CASSPRQSCEQYF

SEQ ID NO: 266069 - protein, 14 aa, Homo sapiens
  CDR3 for alpha chain variable domain of TCR clone 133035 (TRAV26-1, TRAJ45)
CIEVTGGGADGLTF

SEQ ID NO: 266070 - protein, 15 aa, Homo sapiens
  CDR3 for beta chain variable domain of TCR clone 133035 (TRBV4-1, TRBJ2-2)
CASSEGQGITGELFF

SEQ ID NO: 266071 - protein, 14 aa, Homo sapiens
  CDR3 for alpha chain variable domain of TCR clone 133036 (TRAV20, TRAJ10)
CAVRVEGGGNKLTF

SEQ ID NO: 266072 - protein, 13 aa, Homo sapiens
  CDR3 for beta chain variable domain of TCR clone 133036 (TRBV13, TRBJ2-2)
CASSPGLNGELFF

SEQ ID NO: 266073 - protein, 11 aa, Homo sapiens
  CDR3 for alpha chain variable domain of TCR clone 133037 (TRAV1-2, TRAJ20)
CAVANDYKLSF

SEQ ID NO: 266074 - protein, 15 aa, Homo sapiens
  CDR3 for beta chain variable domain of TCR clone 133037 (TRBV9, TRBJ2-1)
CASSLAGSSYNEQFF

SEQ ID NO: 266075 - protein, 16 aa, Homo sapiens
  CDR3 for alpha chain variable domain of TCR clone 133038 (TRAV3, TRAJ37)
CAVRPHGSGNTGELIF

SEQ ID NO: 266076 - protein, 16 aa, Homo sapiens
  CDR3 for beta chain variable domain of TCR clone 133038 (TRBV7-9, TRBJ2-3)
CASSPWREVGTDTQYF

SEQ ID NO: 266077 - protein, 11 aa, Homo sapiens
  CDR3 for alpha chain variable domain of TCR clone 133039 (TRAV13-1, TRAJ15)
CAATPGTSLTF

SEQ ID NO: 266078 - protein, 13 aa, Homo sapiens
  CDR3 for beta chain variable domain of TCR clone 133039 (TRBV7-2, TRBJ2-1)
CASSLGVYNEQFF

SEQ ID NO: 266079 - protein, 14 aa, Homo sapiens
  CDR3 for alpha chain variable domain of TCR clone 133040 (TRAV8-3, TRAJ4)
CAVGAAGSYNKLIF

SEQ ID NO: 266080 - protein, 17 aa, Homo sapiens
  CDR3 for beta chain variable domain of TCR clone 133040 (TRBV13, TRBJ2-3)
CASSLSRVAGGRNTQYF

SEQ ID NO: 266081 - protein, 15 aa, Homo sapiens
  CDR3 for alpha chain variable domain of TCR clone 133041 (TRAV2, TRAJ15)
CAVEDRGQAGTALIF

SEQ ID NO: 266082 - protein, 14 aa, Homo sapiens
  CDR3 for beta chain variable domain of TCR clone 133041 (TRBV7-2, TRBJ2-7)
CASSPKTSFYEQYF

SEQ ID NO: 266083 - protein, 14 aa, Homo sapiens
  CDR3 for alpha chain variable domain of TCR clone 133042 (TRAV13-1, TRAJ35)
CAASKGGFGNVLHC

SEQ ID NO: 266084 - protein, 15 aa, Homo sapiens
  CDR3 for beta chain variable domain of TCR clone 133042 (TRBV6-1, TRBJ2-7)
CASSESMGDFYEQYF

SEQ ID NO: 266085 - protein, 15 aa, Homo sapiens
  CDR3 for alpha chain variable domain of TCR clone 133043 (TRAV8-6, TRAJ37)
CAVIFSSGNTGKLIF

SEQ ID NO: 266086 - protein, 15 aa, Homo sapiens
  CDR3 for beta chain variable domain of TCR clone 133043 (TRBV25-1, TRBJ2-4)
CASSETESAKNTQYF

SEQ ID NO: 266087 - protein, 13 aa, Homo sapiens
  CDR3 for alpha chain variable domain of TCR clone 133044 (TRAV12-1, TRAJ33)
CGDAPDSNYQLIW

SEQ ID NO: 266088 - protein, 16 aa, Homo sapiens
  CDR3 for beta chain variable domain of TCR clone 133044 (TRBV19, TRBJ2-1)
CASSKAGPSSYNEQFF

SEQ ID NO: 266089 - protein, 13 aa, Homo sapiens
  CDR3 for alpha chain variable domain of TCR clone 133045 (TRAV26-1, TRAJ40)
CIVRVEGTYKYIF

SEQ ID NO: 266090 - protein, 15 aa, Homo sapiens
  CDR3 for beta chain variable domain of TCR clone 133045 (TRBV10-3, TRBJ2-1)
CAISDVQDRAYEQFL

SEQ ID NO: 266091 - protein, 17 aa, Homo sapiens
  CDR3 for alpha chain variable domain of TCR clone 133046 (TRAV35, TRAJ38)
CAGQLQRNAGNNRKLIW

SEQ ID NO: 266092 - protein, 15 aa, Homo sapiens
  CDR3 for beta chain variable domain of TCR clone 133046 (TRBV28, TRBJ1-3)
CASSMGWASGNTIYF

SEQ ID NO: 266093 - protein, 12 aa, Homo sapiens
  CDR3 for alpha chain variable domain of TCR clone 133047 (TRAV21, TRAJ3)
CCFYSSASKIIF

SEQ ID NO: 266094 - protein, 16 aa, Homo sapiens
  CDR3 for beta chain variable domain of TCR clone 133047 (TRBV19, TRBJ2-1)
CASSKAGPSLYNEQFF

SEQ ID NO: 266095 - protein, 15 aa, Homo sapiens
  CDR3 for alpha chain variable domain of TCR clone 133048 (TRAV26-1, TRAJ29)
CIVRVEGSGNTPLVF

SEQ ID NO: 266096 - protein, 12 aa, Homo sapiens
  CDR3 for beta chain variable domain of TCR clone 133048 (TRBV29-1, TRBJ2-3)
CSVTGGADTQYF

SEQ ID NO: 266097 - protein, 12 aa, Homo sapiens
  CDR3 for alpha chain variable domain of TCR clone 133049 (TRAV21, TRAJ23)
CAVMLQGGKLIF

SEQ ID NO: 266098 - protein, 14 aa, Homo sapiens
  CDR3 for beta chain variable domain of TCR clone 133049 (TRBV7-9, TRBJ1-4)
CAITEGEANEKLFC

SEQ ID NO: 266099 - protein, 13 aa, Homo sapiens
  CDR3 for alpha chain variable domain of TCR clone 133050 (TRAV17, TRAJ34)
CATDLYNTDKLIF

SEQ ID NO: 266100 - protein, 15 aa, Homo sapiens
  CDR3 for beta chain variable domain of TCR clone 133050 (TRBV20-1, TRBJ2-3)
CSASGTSGFTDTQYF

SEQ ID NO: 266101 - protein, 13 aa, Homo sapiens
  CDR3 for alpha chain variable domain of TCR clone 133051 (TRAV38-2/DV8, TRAJ34)
CVYRNYNTDKLIF

SEQ ID NO: 266102 - protein, 15 aa, Homo sapiens
  CDR3 for beta chain variable domain of TCR clone 133051 (TRBV20-1, TRBJ2-5)
CSAEGTGGLQETQYF

SEQ ID NO: 266103 - protein, 14 aa, Homo sapiens
  CDR3 for alpha chain variable domain of TCR clone 133052 (TRAV26-1, TRAJ45)
CIVRVVGGADGLTF

SEQ ID NO: 266104 - protein, 16 aa, Homo sapiens
  CDR3 for beta chain variable domain of TCR clone 133052 (TRBV7-9, TRBJ1-1)
CASSLTQGRSNTEAFF

SEQ ID NO: 266105 - protein, 14 aa, Homo sapiens
  CDR3 for alpha chain variable domain of TCR clone 133053 (TRAV4, TRAJ17)
CLVGEVAAGNKLTF

SEQ ID NO: 266106 - protein, 14 aa, Homo sapiens
  CDR3 for beta chain variable domain of TCR clone 133053 (TRBV4-1, TRBJ2-7)
CASSPVAGGDEQYF

SEQ ID NO: 266107 - protein, 14 aa, Homo sapiens
  CDR3 for alpha chain variable domain of TCR clone 133054 (TRAV13-2, TRAJ11)
CADTGNSGYSTLTF

SEQ ID NO: 266108 - protein, 11 aa, Homo sapiens
  CDR3 for beta chain variable domain of TCR clone 133054 (TRBV10-3, TRBJ2-7)
CAISEGLEQYF

SEQ ID NO: 266109 - protein, 13 aa, Homo sapiens
  CDR3 for alpha chain variable domain of TCR clone 133055 (TRAV12-1, TRAJ40)
CVVPTPGTYKYIF

SEQ ID NO: 266110 - protein, 13 aa, Homo sapiens
  CDR3 for beta chain variable domain of TCR clone 133055 (TRBV4-2, TRBJ1-1)
CASSQAGNTEAFF

SEQ ID NO: 266111 - protein, 14 aa, Homo sapiens
  CDR3 for alpha chain variable domain of TCR clone 133056 (TRAV16, TRAJ53)
CALKSGGSNYKLTF

SEQ ID NO: 266112 - protein, 13 aa, Homo sapiens
  CDR3 for beta chain variable domain of TCR clone 133056 (TRBV6-1, TRBJ1-1)
CASSRQGNTEAFF

SEQ ID NO: 266113 - protein, 13 aa, Homo sapiens
  CDR3 for alpha chain variable domain of TCR clone 133057 (TRAV12-2, TRAJ15)
CAVFNQAGTALIF

SEQ ID NO: 266114 - protein, 23 aa, Homo sapiens
  CDR3 for beta chain variable domain of TCR clone 133057 (TRBV7-8, TRBJ1-5)
RRTPPCISVPAAGGGGAGQPQHF

SEQ ID NO: 266115 - protein, 14 aa, Homo sapiens
  CDR3 for alpha chain variable domain of TCR clone 133058 (TRAV12-2, TRAJ13)
CAVKTTGGYQKVTF

SEQ ID NO: 266116 - protein, 15 aa, Homo sapiens
  CDR3 for beta chain variable domain of TCR clone 133058 (TRBV20-1, TRBJ2-1)
CSARGIGGTYNEQFF

SEQ ID NO: 266117 - protein, 15 aa, Homo sapiens
  CDR3 for alpha chain variable domain of TCR clone 133059 (TRAV8-3, TRAJ45)
CASSYSGGGADGLTF

SEQ ID NO: 266118 - protein, 13 aa, Homo sapiens
  CDR3 for beta chain variable domain of TCR clone 133059 (TRBV27, TRBJ2-1)
CASSSGSYNEQFF

SEQ ID NO: 266119 - protein, 14 aa, Homo sapiens
  CDR3 for alpha chain variable domain of TCR clone 133060 (TRAV8-1, TRAJ15)
CAVNGQQAGTALIF

SEQ ID NO: 266120 - protein, 16 aa, Homo sapiens
  CDR3 for beta chain variable domain of TCR clone 133060 (TRBV5-7, TRBJ1-4)
CASSPSGGLKTEKLFF

SEQ ID NO: 266121 - protein, 11 aa, Homo sapiens
  CDR3 for alpha chain variable domain of TCR clone 133061 (TRAV13-2, TRAJ36)
CAETGASNLFF

SEQ ID NO: 266122 - protein, 13 aa, Homo sapiens
  CDR3 for beta chain variable domain of TCR clone 133061 (TRBV7-9, TRBJ2-4)
CATEGLAGNIQYF

SEQ ID NO: 266123 - protein, 17 aa, Homo sapiens
  CDR3 for alpha chain variable domain of TCR clone 133062 (TRAV3, TRAJ6)
RAMSRRTDTGGSYIPTF

SEQ ID NO: 266124 - protein, 18 aa, Homo sapiens
  CDR3 for beta chain variable domain of TCR clone 133062 (TRBV7-2, TRBJ2-3)
CASSLETSRGRKADTQYF

SEQ ID NO: 266125 - protein, 13 aa, Homo sapiens
  CDR3 for alpha chain variable domain of TCR clone 133063 (TRAV27, TRAJ45)
CRSSGGGADGLTF

SEQ ID NO: 266126 - protein, 13 aa, Homo sapiens
  CDR3 for beta chain variable domain of TCR clone 133063 (TRBV2, TRBJ1-1)
CASSEGGNTEAFF

SEQ ID NO: 266127 - protein, 15 aa, Homo sapiens
  CDR3 for alpha chain variable domain of TCR clone 133064 (TRAV17, TRAJ13)
CAKDARSGGYQKVTF

SEQ ID NO: 266128 - protein, 17 aa, Homo sapiens
  CDR3 for beta chain variable domain of TCR clone 133064 (TRBV11-2, TRBJ2-1)
CASSLYPPGVEYNEQFF

SEQ ID NO: 266129 - protein, 11 aa, Homo sapiens
  CDR3 for alpha chain variable domain of TCR clone 133065 (TRAV3, TRAJ21)
CAVGNFNKFYF

SEQ ID NO: 266130 - protein, 16 aa, Homo sapiens
  CDR3 for beta chain variable domain of TCR clone 133065 (TRBV19, TRBJ2-1)
CASSKAGAGSYNEQFF

SEQ ID NO: 266131 - protein, 12 aa, Homo sapiens
  CDR3 for alpha chain variable domain of TCR clone 133066 (TRAV8-3, TRAJ20)
CAVGANDYKLSF

SEQ ID NO: 266132 - protein, 15 aa, Homo sapiens
  CDR3 for beta chain variable domain of TCR clone 133066 (TRBV7-2, TRBJ2-2)
CASRRPGQNTGELFF

SEQ ID NO: 266133 - protein, 14 aa, Homo sapiens
  CDR3 for alpha chain variable domain of TCR clone 133067 (TRAV17, TRAJ6)
CATDASGGSYIPTF

SEQ ID NO: 266134 - protein, 19 aa, Homo sapiens
  CDR3 for beta chain variable domain of TCR clone 133067 (TRBV4-3, TRBJ2-7)
CASSQEFIGWQVTPYEQYL

SEQ ID NO: 266135 - protein, 16 aa, Homo sapiens
  CDR3 for alpha chain variable domain of TCR clone 133068 (TRAV20, TRAJ28)
CAVRDPSGAGSYQLTF

SEQ ID NO: 266136 - protein, 12 aa, Homo sapiens
  CDR3 for beta chain variable domain of TCR clone 133068 (TRBV11-2, TRBJ2-2)
CASSLPTGELFF

SEQ ID NO: 266137 - protein, 12 aa, Homo sapiens
  CDR3 for alpha chain variable domain of TCR clone 133069 (TRAV12-3, TRAJ17)
CAMTLTGNKLTF

SEQ ID NO: 266138 - protein, 13 aa, Homo sapiens
  CDR3 for beta chain variable domain of TCR clone 133069 (TRBV27, TRBJ2-7)
CASSLTTGYEQYF

SEQ ID NO: 266139 - protein, 14 aa, Homo sapiens
  CDR3 for alpha chain variable domain of TCR clone 133070 (TRAV16, TRAJ26)
CSLSSANYGQNFFF

SEQ ID NO: 266140 - protein, 16 aa, Homo sapiens
  CDR3 for beta chain variable domain of TCR clone 133070 (TRBV20-1, TRBJ1-4)
CSAPGQGLLTNEKLFF

SEQ ID NO: 266141 - protein, 15 aa, Homo sapiens
  CDR3 for alpha chain variable domain of TCR clone 133071 (TRAV2, TRAJ22)
CAVPSRGGSARQLTF

SEQ ID NO: 266142 - protein, 15 aa, Homo sapiens
  CDR3 for beta chain variable domain of TCR clone 133071 (TRBV6-1, TRBJ2-3)
CASSERGGITDTQYF

SEQ ID NO: 266143 - protein, 15 aa, Homo sapiens
  CDR3 for alpha chain variable domain of TCR clone 133072 (TRAV21, TRAJ53)
CATLNSGGSNYKLTF

SEQ ID NO: 266144 - protein, 15 aa, Homo sapiens
  CDR3 for beta chain variable domain of TCR clone 133072 (TRBV19, TRBJ2-7)
CASSPAGSGEALRYF

SEQ ID NO: 266145 - protein, 14 aa, Homo sapiens
  CDR3 for alpha chain variable domain of TCR clone 133073 (TRAV35, TRAJ22)
CAALRPGSARQLTF

SEQ ID NO: 266146 - protein, 15 aa, Homo sapiens
  CDR3 for beta chain variable domain of TCR clone 133073 (TRBV12-4, TRBJ2-5)
CASSPPTGLQETQYF

SEQ ID NO: 266147 - protein, 15 aa, Homo sapiens
  CDR3 for alpha chain variable domain of TCR clone 133074 (TRAV27, TRAJ38)
CAARRNAGNNRKLMW

SEQ ID NO: 266148 - protein, 14 aa, Homo sapiens
  CDR3 for beta chain variable domain of TCR clone 133074 (TRBV7-2, TRBJ2-7)
CASSPRDGAYEQYF

SEQ ID NO: 266149 - protein, 15 aa, Homo sapiens
  CDR3 for alpha chain variable domain of TCR clone 133075 (TRAV3, TRAJ22)
CAVRDRGGSARQLTF

SEQ ID NO: 266150 - protein, 11 aa, Homo sapiens
  CDR3 for beta chain variable domain of TCR clone 133075 (TRBV19, TRBJ2-2)
CASRYSGELFF

SEQ ID NO: 266151 - protein, 16 aa, Homo sapiens
  CDR3 for alpha chain variable domain of TCR clone 133076 (TRAV16, TRAJ52)
CALSAAGGTSYGKLTF

SEQ ID NO: 266152 - protein, 16 aa, Homo sapiens
  CDR3 for beta chain variable domain of TCR clone 133076 (TRBV4-2, TRBJ2-7)
CASSQDRGTSSYEQYF

SEQ ID NO: 266153 - protein, 13 aa, Homo sapiens
  CDR3 for alpha chain variable domain of TCR clone 133077 (TRAV35, TRAJ21)
CTGQLSNFNKFYF

SEQ ID NO: 266154 - protein, 11 aa, Homo sapiens
  CDR3 for beta chain variable domain of TCR clone 133077 (TRBV7-6, TRBJ2-5)
CASSSQETQYF

SEQ ID NO: 266155 - protein, 13 aa, Homo sapiens
  CDR3 for alpha chain variable domain of TCR clone 133078 (TRAV13-1, TRAJ21)
CAASIYNFNKFYF

SEQ ID NO: 266156 - protein, 15 aa, Homo sapiens
  CDR3 for beta chain variable domain of TCR clone 133078 (TRBV20-1, TRBJ2-1)
CSASSAGSSYNEQFF

SEQ ID NO: 266157 - protein, 19 aa, Homo sapiens
  CDR3 for alpha chain variable domain of TCR clone 133079 (TRAV1-2, TRAJ26)
CLLPLCCERPDNYGQNFVF

SEQ ID NO: 266158 - protein, 18 aa, Homo sapiens
  CDR3 for beta chain variable domain of TCR clone 133079 (TRBV11-2, TRBJ2-3)
CASSLGGASRGAPNTQYF

SEQ ID NO: 266159 - protein, 15 aa, Homo sapiens
  CDR3 for alpha chain variable domain of TCR clone 133080 (TRAV3, TRAJ22)
CAVRDRGGSARQLTF

SEQ ID NO: 266160 - protein, 16 aa, Homo sapiens
  CDR3 for beta chain variable domain of TCR clone 133080 (TRBV5-4, TRBJ2-3)
CASQQRGAGGADTQYF

SEQ ID NO: 266161 - protein, 16 aa, Homo sapiens
  CDR3 for alpha chain variable domain of TCR clone 133081 (TRAV3, TRAJ3)
CAVRDRAKSSASKITF

SEQ ID NO: 266162 - protein, 13 aa, Homo sapiens
  CDR3 for beta chain variable domain of TCR clone 133081 (TRBV10-3, TRBJ2-7)
CASKLAVNYEQYF

SEQ ID NO: 266163 - protein, 15 aa, Homo sapiens
  CDR3 for alpha chain variable domain of TCR clone 133082 (TRAV26-1, TRAJ22)
CLVRVSFWFCKATDL

SEQ ID NO: 266164 - protein, 13 aa, Homo sapiens
  CDR3 for beta chain variable domain of TCR clone 133082 (TRBV7-9, TRBJ1-2)
CASSLKQNYGYTF

SEQ ID NO: 266165 - protein, 14 aa, Homo sapiens
  CDR3 for alpha chain variable domain of TCR clone 133083 (TRAV12-2, TRAJ17)
CAVLFKASGNKLTF

SEQ ID NO: 266166 - protein, 14 aa, Homo sapiens
  CDR3 for beta chain variable domain of TCR clone 133083 (TRBV4-1, TRBJ2-2)
CASSQAVNTGELFF

SEQ ID NO: 266167 - protein, 16 aa, Homo sapiens
  CDR3 for alpha chain variable domain of TCR clone 133084 (TRAV13-1, TRAJ18)
CAASRMRGSTLGRLYF

SEQ ID NO: 266168 - protein, 13 aa, Homo sapiens
  CDR3 for beta chain variable domain of TCR clone 133084 (TRBV7-9, TRBJ1-2)
CASSLKQNYGYTF

SEQ ID NO: 266169 - protein, 12 aa, Homo sapiens
  CDR3 for alpha chain variable domain of TCR clone 133085 (TRAV12-3, TRAJ17)
CAMTLTGNKLTF

SEQ ID NO: 266170 - protein, 15 aa, Homo sapiens
  CDR3 for beta chain variable domain of TCR clone 133085 (TRBV6-3, TRBJ2-7)
CASSSPGTVVYEQYF

SEQ ID NO: 266171 - protein, 10 aa, Homo sapiens
  CDR3 for alpha chain variable domain of TCR clone 133086 (TRAV30, TRAJ16)
CGTGGQKLLF

SEQ ID NO: 266172 - protein, 13 aa, Homo sapiens
  CDR3 for beta chain variable domain of TCR clone 133086 (TRBV20-1, TRBJ2-2)
CSASAAGTGELFF

SEQ ID NO: 266173 - protein, 14 aa, Homo sapiens
  CDR3 for alpha chain variable domain of TCR clone 133087 (TRAV8-3, TRAJ4)
CAVGASGGYNKLIF

SEQ ID NO: 266174 - protein, 13 aa, Homo sapiens
  CDR3 for beta chain variable domain of TCR clone 133087 (TRBV18, TRBJ2-5)
CASSLQGQGTQYF

SEQ ID NO: 266175 - protein, 13 aa, Homo sapiens
  CDR3 for alpha chain variable domain of TCR clone 133088 (TRAV20, TRAJ54)
CAVQAGGAQKLVF

SEQ ID NO: 266176 - protein, 15 aa, Homo sapiens
  CDR3 for beta chain variable domain of TCR clone 133088 (TRBV9, TRBJ1-6)
CASSVAGTGDSPLHF

SEQ ID NO: 266177 - protein, 17 aa, Homo sapiens
  CDR3 for alpha chain variable domain of TCR clone 133089 (TRAV3, TRAJ6)
CAVRDGPRAGGSYIPTF

SEQ ID NO: 266178 - protein, 15 aa, Homo sapiens
  CDR3 for beta chain variable domain of TCR clone 133089 (TRBV27, TRBJ2-5)
CASSLYPRGGETQYF

SEQ ID NO: 266179 - protein, 12 aa, Homo sapiens
  CDR3 for alpha chain variable domain of TCR clone 133090 (TRAV25, TRAJ53)
CQSGGRNYKLTF

SEQ ID NO: 266180 - protein, 15 aa, Homo sapiens
  CDR3 for beta chain variable domain of TCR clone 133090 (TRBV5-1, TRBJ2-2)
CASSWTSPNTGELFF

SEQ ID NO: 266181 - protein, 15 aa, Homo sapiens
  CDR3 for alpha chain variable domain of TCR clone 133091 (TRAV3, TRAJ17)
CAVRDTGAAGNKLTV

SEQ ID NO: 266182 - protein, 14 aa, Homo sapiens
  CDR3 for beta chain variable domain of TCR clone 133091 (TRBV6-3, TRBJ1-1)
CASSNLLPGAEAFF

SEQ ID NO: 266183 - protein, 14 aa, Homo sapiens
  CDR3 for alpha chain variable domain of TCR clone 133092 (TRAV10, TRAJ36)
CVVKYEGGANNPFF

SEQ ID NO: 266184 - protein, 16 aa, Homo sapiens
  CDR3 for beta chain variable domain of TCR clone 133092 (TRBV7-3, TRBJ2-2)
CASSLKRGTLSGELFF

SEQ ID NO: 266185 - protein, 12 aa, Homo sapiens
  CDR3 for alpha chain variable domain of TCR clone 133093 (TRAV29/DV5, TRAJ49)
CAATDTGNQFYF

SEQ ID NO: 266186 - protein, 16 aa, Homo sapiens
  CDR3 for beta chain variable domain of TCR clone 133093 (TRBV4-2, TRBJ2-7)
CASSQDRGTSSYEQYF

SEQ ID NO: 266187 - protein, 15 aa, Homo sapiens
  CDR3 for alpha chain variable domain of TCR clone 133094 (TRAV12-1, TRAJ40)
CVVTPSTSGTYKYIF

SEQ ID NO: 266188 - protein, 17 aa, Homo sapiens
  CDR3 for beta chain variable domain of TCR clone 133094 (TRBV19, TRBJ2-1)
CASSTPRLGVSYNEQFF

SEQ ID NO: 266189 - protein, 15 aa, Homo sapiens
  CDR3 for alpha chain variable domain of TCR clone 133095 (TRAV12-1, TRAJ9)
CVVSFGDTGGFKTIC

SEQ ID NO: 266190 - protein, 13 aa, Homo sapiens
  CDR3 for beta chain variable domain of TCR clone 133095 (TRBV2, TRBJ1-4)
CASSERAGEKLFF

SEQ ID NO: 266191 - protein, 14 aa, Homo sapiens
  CDR3 for alpha chain variable domain of TCR clone 133096 (TRAV12-3, TRAJ42)
CAMNYGGSQGNLIF

SEQ ID NO: 266192 - protein, 15 aa, Homo sapiens
  CDR3 for beta chain variable domain of TCR clone 133096 (TRBV12-4, TRBJ2-7)
CASSLGSGGPYEQYF

SEQ ID NO: 266193 - protein, 12 aa, Homo sapiens
  CDR3 for alpha chain variable domain of TCR clone 133097 (TRAV17, TRAJ12)
CATLRSSYKLTF

SEQ ID NO: 266194 - protein, 16 aa, Homo sapiens
  CDR3 for beta chain variable domain of TCR clone 133097 (TRBV6-1, TRBJ1-2)
CASSGAWQGRSHGYTF

SEQ ID NO: 266195 - protein, 14 aa, Homo sapiens
  CDR3 for alpha chain variable domain of TCR clone 133098 (TRAV1-2, TRAJ16)
CAVNRFSDGQKLLF

SEQ ID NO: 266196 - protein, 14 aa, Homo sapiens
  CDR3 for beta chain variable domain of TCR clone 133098 (TRBV13, TRBJ2-5)
CASSLGRWQETQYF

SEQ ID NO: 266197 - protein, 14 aa, Homo sapiens
  CDR3 for alpha chain variable domain of TCR clone 133099 (TRAV1-2, TRAJ16)
CAVNRFSDGQKLLF

SEQ ID NO: 266198 - protein, 15 aa, Homo sapiens
  CDR3 for beta chain variable domain of TCR clone 133099 (TRBV29-1, TRBJ2-6)
CSVGDRGSGANVLTF

SEQ ID NO: 266199 - protein, 14 aa, Homo sapiens
  CDR3 for alpha chain variable domain of TCR clone 133100 (TRAV13-1, TRAJ35)
CAASKGGFGNVLHF

SEQ ID NO: 266200 - protein, 16 aa, Homo sapiens
  CDR3 for beta chain variable domain of TCR clone 133100 (TRBV7-9, TRBJ2-1)
CASSDVAGGSYNEQFF

SEQ ID NO: 266201 - protein, 14 aa, Homo sapiens
  CDR3 for alpha chain variable domain of TCR clone 133101 (TRAV2, TRAJ9)
CAVEDRSGGFKTIF

SEQ ID NO: 266202 - protein, 15 aa, Homo sapiens
  CDR3 for beta chain variable domain of TCR clone 133101 (TRBV12-3, TRBJ2-5)
CASSLSGAFQETQYF

SEQ ID NO: 266203 - protein, 13 aa, Homo sapiens
  CDR3 for alpha chain variable domain of TCR clone 133102 (TRAV27, TRAJ45)
CRSSGGGADGLTF

SEQ ID NO: 266204 - protein, 16 aa, Homo sapiens
  CDR3 for beta chain variable domain of TCR clone 133102 (TRBV7-2, TRBJ2-5)
CASSSKWLSGQETQYF

SEQ ID NO: 266205 - protein, 16 aa, Homo sapiens
  CDR3 for alpha chain variable domain of TCR clone 133103 (TRAV20, TRAJ28)
CAVRDPSGAGSYQLTF

SEQ ID NO: 266206 - protein, 20 aa, Homo sapiens
  CDR3 for beta chain variable domain of TCR clone 133103 (TRBV28, TRBJ2-1)
CASTPIGRSPGLAGGNEQFF

SEQ ID NO: 266207 - protein, 19 aa, Homo sapiens
  CDR3 for alpha chain variable domain of TCR clone 133104 (TRAV2, TRAJ20)
ILQVREADAAVYRDCKLSF

SEQ ID NO: 266208 - protein, 13 aa, Homo sapiens
  CDR3 for beta chain variable domain of TCR clone 133104 (TRBV15, TRBJ1-6)
SATSGGLNSPLHF

SEQ ID NO: 266209 - protein, 11 aa, Homo sapiens
  CDR3 for alpha chain variable domain of TCR clone 133105 (TRAV12-2, TRAJ39)
RAVNNMLTFGG

SEQ ID NO: 266210 - protein, 16 aa, Homo sapiens
  CDR3 for beta chain variable domain of TCR clone 133105 (TRBV5-3, TRBJ2-2)
CARSFGTGTNTGELFF

SEQ ID NO: 266211 - protein, 12 aa, Homo sapiens
  CDR3 for alpha chain variable domain of TCR clone 133106 (TRAV21, TRAJ13)
PGPSGGYQKVTF

SEQ ID NO: 266212 - protein, 14 aa, Homo sapiens
  CDR3 for beta chain variable domain of TCR clone 133106 (TRBV20-1, TRBJ2-7)
CSVKDRKGAYEQYF

SEQ ID NO: 266213 - protein, 11 aa, Homo sapiens
  CDR3 for alpha chain variable domain of TCR clone 133107 (TRAV12-1, TRAJ30)
CVVKGQDKIIF

SEQ ID NO: 266214 - protein, 12 aa, Homo sapiens
  CDR3 for beta chain variable domain of TCR clone 133107 (TRBV27, TRBJ2-2)
CASKLFTGGLFF

SEQ ID NO: 266215 - protein, 11 aa, Homo sapiens
  CDR3 for alpha chain variable domain of TCR clone 133108 (TRAV21, TRAJ34)
CAVTNNDKLIF

SEQ ID NO: 266216 - protein, 16 aa, Homo sapiens
  CDR3 for beta chain variable domain of TCR clone 133108 (TRBV6-1, TRBJ2-5)
CASSETLDRGAETQYF

SEQ ID NO: 266217 - protein, 20 aa, Homo sapiens
  CDR3 for alpha chain variable domain of TCR clone 133109 (TRAV26-1, TRAJ42)
CCVLLHRQTYYGGSQGNLIF

SEQ ID NO: 266218 - protein, 16 aa, Homo sapiens
  CDR3 for beta chain variable domain of TCR clone 133109 (TRBV7-3, TRBJ2-2)
CASSLKRGTLSGKLFF

SEQ ID NO: 266219 - protein, 14 aa, Homo sapiens
  CDR3 for alpha chain variable domain of TCR clone 133110 (TRAV35, TRAJ53)
CAGNSGGSNYKLTF

SEQ ID NO: 266220 - protein, 16 aa, Homo sapiens
  CDR3 for beta chain variable domain of TCR clone 133110 (TRBV7-9, TRBJ1-2)
CASSLGFSSGEDGYTF

SEQ ID NO: 266221 - protein, 14 aa, Homo sapiens
  CDR3 for alpha chain variable domain of TCR clone 133111 (TRAV3, TRAJ21)
CAVESQANFNKFHF

SEQ ID NO: 266222 - protein, 12 aa, Homo sapiens
  CDR3 for beta chain variable domain of TCR clone 133111 (TRBV6-3, TRBJ2-7)
CASSLTPYEQYF

SEQ ID NO: 266223 - protein, 21 aa, Homo sapiens
  CDR3 for alpha chain variable domain of TCR clone 133112 (TRAV36/DV7, TRAJ39)
TATQTGDSAIYLPNAGNMLTF

SEQ ID NO: 266224 - protein, 12 aa, Homo sapiens
  CDR3 for beta chain variable domain of TCR clone 133112 (TRBV7-8, TRBJ2-7)
CASSLGDREQYF

SEQ ID NO: 266225 - protein, 14 aa, Homo sapiens
  CDR3 for alpha chain variable domain of TCR clone 133113 (TRAV8-4, TRAJ13)
CAVTLSGGYQKVTF

SEQ ID NO: 266226 - protein, 14 aa, Homo sapiens
  CDR3 for beta chain variable domain of TCR clone 133113 (TRBV6-1, TRBJ1-3)
CASVQGGGGNTIYF

SEQ ID NO: 266227 - protein, 13 aa, Homo sapiens
  CDR3 for alpha chain variable domain of TCR clone 133114 (TRAV12-2, TRAJ37)
CAGGSCNTGKLIF

SEQ ID NO: 266228 - protein, 14 aa, Homo sapiens
  CDR3 for beta chain variable domain of TCR clone 133114 (TRBV6-1, TRBJ2-6)
CASQQGAGANVLTF

SEQ ID NO: 266229 - protein, 11 aa, Homo sapiens
  CDR3 for alpha chain variable domain of TCR clone 133115 (TRAV3, TRAJ32)
CAAREGIMVVL

SEQ ID NO: 266230 - protein, 13 aa, Homo sapiens
  CDR3 for beta chain variable domain of TCR clone 133115 (TRBV2, TRBJ1-1)
CASSEGGNTEAFF

SEQ ID NO: 266231 - protein, 12 aa, Homo sapiens
  CDR3 for alpha chain variable domain of TCR clone 133116 (TRAV35, TRAJ39)
LAPNNAGNMLNF

SEQ ID NO: 266232 - protein, 16 aa, Homo sapiens
  CDR3 for beta chain variable domain of TCR clone 133116 (TRBV2, TRBJ2-3)
CASSTSVEGVTDTQYF

SEQ ID NO: 266233 - protein, 14 aa, Homo sapiens
  CDR3 for alpha chain variable domain of TCR clone 133117 (TRAV1-2, TRAJ15)
CAVRDRQAGTALIF

SEQ ID NO: 266234 - protein, 15 aa, Homo sapiens
  CDR3 for beta chain variable domain of TCR clone 133117 (TRBV7-2, TRBJ2-1)
CASSLASGRVNEQLF

SEQ ID NO: 266235 - protein, 12 aa, Homo sapiens
  CDR3 for alpha chain variable domain of TCR clone 133118 (TRAV8-3, TRAJ27)
CAVGAAAGKSTF

SEQ ID NO: 266236 - protein, 14 aa, Homo sapiens
  CDR3 for beta chain variable domain of TCR clone 133118 (TRBV2, TRBJ2-1)
CASRLIVGHDEQFF

SEQ ID NO: 266237 - protein, 17 aa, Homo sapiens
  CDR3 for alpha chain variable domain of TCR clone 133119 (TRAV3, TRAJ6)
CAVRGGPRAGGCYIPTF

SEQ ID NO: 266238 - protein, 14 aa, Homo sapiens
  CDR3 for beta chain variable domain of TCR clone 133119 (TRBV7-2, TRBJ2-7)
CASSPKTSFYEQYF

SEQ ID NO: 266239 - protein, 13 aa, Homo sapiens
  CDR3 for alpha chain variable domain of TCR clone 133120 (TRAV8-6, TRAJ21)
CAVSPSSLNKFYF

SEQ ID NO: 266240 - protein, 14 aa, Homo sapiens
  CDR3 for beta chain variable domain of TCR clone 133120 (TRBV7-9, TRBJ2-5)
CASSLDTAQEAQYF

SEQ ID NO: 266241 - protein, 15 aa, Homo sapiens
  CDR3 for alpha chain variable domain of TCR clone 133121 (TRAV2, TRAJ9)
CAVEDRGTGGFKTIL

SEQ ID NO: 266242 - protein, 14 aa, Homo sapiens
  CDR3 for beta chain variable domain of TCR clone 133121 (TRBV4-1, TRBJ2-2)
CASSQAVNTGELFF

SEQ ID NO: 266243 - protein, 14 aa, Homo sapiens
  CDR3 for alpha chain variable domain of TCR clone 133122 (TRAV35, TRAJ22)
CAGLRPGSARQLTF

SEQ ID NO: 266244 - protein, 15 aa, Homo sapiens
  CDR3 for beta chain variable domain of TCR clone 133122 (TRBV12-4, TRBJ2-5)
CASTPPTGLQETQYF

SEQ ID NO: 266245 - protein, 15 aa, Homo sapiens
  CDR3 for alpha chain variable domain of TCR clone 133123 (TRAV21, TRAJ40)
CAVRPQTSGTYKYIF

SEQ ID NO: 266246 - protein, 14 aa, Homo sapiens
  CDR3 for beta chain variable domain of TCR clone 133123 (TRBV5-4, TRBJ1-1)
CASSLDSRRDEAFF

SEQ ID NO: 266247 - protein, 15 aa, Homo sapiens
  CDR3 for alpha chain variable domain of TCR clone 133124 (TRAV34, TRAJ38)
CGADFTPGNNRKLIW

SEQ ID NO: 266248 - protein, 18 aa, Homo sapiens
  CDR3 for beta chain variable domain of TCR clone 133124 (TRBV24-1, TRBJ2-3)
CATSDSPSGLSRTDTQYF

SEQ ID NO: 266249 - protein, 17 aa, Homo sapiens
  CDR3 for alpha chain variable domain of TCR clone 133125 (TRAV8-6, TRAJ58)
CAVSSWVGETSGSRLTF

SEQ ID NO: 266250 - protein, 15 aa, Homo sapiens
  CDR3 for beta chain variable domain of TCR clone 133125 (TRBV7-3, TRBJ2-1)
CASSPTGGSRNEQFF

SEQ ID NO: 266251 - protein, 14 aa, Homo sapiens
  CDR3 for alpha chain variable domain of TCR clone 133126 (TRAV12-2, TRAJ40)
CAVKIPSGTYKYIF

SEQ ID NO: 266252 - protein, 16 aa, Homo sapiens
  CDR3 for beta chain variable domain of TCR clone 133126 (TRBV28, TRBJ2-5)
RASSFSPAGGWETQYF

SEQ ID NO: 266253 - protein, 19 aa, Homo sapiens
  CDR3 for alpha chain variable domain of TCR clone 133127 (TRAV4, TRAJ6)
CLVGFGTSIASGGSYIPTF

SEQ ID NO: 266254 - protein, 15 aa, Homo sapiens
  CDR3 for beta chain variable domain of TCR clone 133127 (TRBV11-2, TRBJ2-1)
CASSKNRGLIYEQFF

SEQ ID NO: 266255 - protein, 12 aa, Homo sapiens
  CDR3 for alpha chain variable domain of TCR clone 133128 (TRAV16, TRAJ26)
CALRSYGQNFVF

SEQ ID NO: 266256 - protein, 14 aa, Homo sapiens
  CDR3 for beta chain variable domain of TCR clone 133128 (TRBV10-3, TRBJ2-1)
CAISSDRAYNEQFS

SEQ ID NO: 266257 - protein, 13 aa, Homo sapiens
  CDR3 for alpha chain variable domain of TCR clone 133129 (TRAV35, TRAJ44)
CAGLSGTASKLTF

SEQ ID NO: 266258 - protein, 17 aa, Homo sapiens
  CDR3 for beta chain variable domain of TCR clone 133129 (TRBV7-8, TRBJ1-2)
CASSFRPLQGHLYGYTF

SEQ ID NO: 266259 - protein, 14 aa, Homo sapiens
  CDR3 for alpha chain variable domain of TCR clone 133130 (TRAV8-4, TRAJ9)
CAVRINTGGFKTIF

SEQ ID NO: 266260 - protein, 18 aa, Homo sapiens
  CDR3 for beta chain variable domain of TCR clone 133130 (TRBV20-1, TRBJ2-3)
CSASGLAGGPGTTDTQYF

SEQ ID NO: 266261 - protein, 11 aa, Homo sapiens
  CDR3 for alpha chain variable domain of TCR clone 133131 (TRAV1-2, TRAJ20)
CAVANDYKPSF

SEQ ID NO: 266262 - protein, 16 aa, Homo sapiens
  CDR3 for beta chain variable domain of TCR clone 133131 (TRBV4-3, TRBJ1-6)
CASSQDPGVYNSPLHF

SEQ ID NO: 266263 - protein, 10 aa, Homo sapiens
  CDR3 for alpha chain variable domain of TCR clone 133132 (TRAV13-1, TRAJ52)
CAASKGVLVV

SEQ ID NO: 266264 - protein, 13 aa, Homo sapiens
  CDR3 for beta chain variable domain of TCR clone 133132 (TRBV12-4, TRBJ1-2)
CASSLRQGKGYTF

SEQ ID NO: 266265 - protein, 15 aa, Homo sapiens
  CDR3 for alpha chain variable domain of TCR clone 133133 (TRAV38-1, TRAJ37)
CAFIFGSGNPGKPIF

SEQ ID NO: 266266 - protein, 12 aa, Homo sapiens
  CDR3 for beta chain variable domain of TCR clone 133133 (TRBV7-9, TRBJ2-7)
CASSLEGYEQYF

SEQ ID NO: 266267 - protein, 13 aa, Homo sapiens
  CDR3 for alpha chain variable domain of TCR clone 133134 (TRAV17, TRAJ5)
CAPMDTGRRALTF

SEQ ID NO: 266268 - protein, 15 aa, Homo sapiens
  CDR3 for beta chain variable domain of TCR clone 133134 (TRBV6-6, TRBJ2-5)
CASSPGGGLEETHYF

SEQ ID NO: 266269 - protein, 12 aa, Homo sapiens
  CDR3 for alpha chain variable domain of TCR clone 133135 (TRAV26-1, TRAJ54)
CIGGWGAQKLVV

SEQ ID NO: 266270 - protein, 14 aa, Homo sapiens
  CDR3 for beta chain variable domain of TCR clone 133135 (TRBV11-2, TRBJ1-2)
CASSSGQAGDGYTF

SEQ ID NO: 266271 - protein, 14 aa, Homo sapiens
  CDR3 for alpha chain variable domain of TCR clone 133136 (TRAV12-2, TRAJ24)
CAVTPADSWGKLQF

SEQ ID NO: 266272 - protein, 15 aa, Homo sapiens
  CDR3 for beta chain variable domain of TCR clone 133136 (TRBV5-1, TRBJ1-1)
CASSSTTGTNTEAFF

SEQ ID NO: 266273 - protein, 17 aa, Homo sapiens
  CDR3 for alpha chain variable domain of TCR clone 133137 (TRAV23/DV6, TRAJ57)
CSASSTLSQGGSETLVF

SEQ ID NO: 266274 - protein, 14 aa, Homo sapiens
  CDR3 for beta chain variable domain of TCR clone 133137 (TRBV25-1, TRBJ1-1)
CASTHLGGNTEAFF

SEQ ID NO: 266275 - protein, 13 aa, Homo sapiens
  CDR3 for alpha chain variable domain of TCR clone 133138 (TRAV35, TRAJ36)
CAGPRIGANNLFF

SEQ ID NO: 266276 - protein, 15 aa, Homo sapiens
  CDR3 for beta chain variable domain of TCR clone 133138 (TRBV28, TRBJ2-5)
CASSPPRSYQETQYF

SEQ ID NO: 266277 - protein, 13 aa, Homo sapiens
  CDR3 for alpha chain variable domain of TCR clone 133139 (TRAV6, TRAJ20)
CALAVSNHYKLSF

SEQ ID NO: 266278 - protein, 16 aa, Homo sapiens
  CDR3 for beta chain variable domain of TCR clone 133139 (TRBV7-9, TRBJ2-1)
CASSDVAGGSYNEQFF

SEQ ID NO: 266279 - protein, 14 aa, Homo sapiens
  CDR3 for alpha chain variable domain of TCR clone 133140 (TRAV38-1, TRAJ40)
CALRPTSGTYKYIF

SEQ ID NO: 266280 - protein, 19 aa, Homo sapiens
  CDR3 for beta chain variable domain of TCR clone 133140 (TRBV7-2, TRBJ2-3)
CASSFLSRNWGGGTDTQYF

SEQ ID NO: 266281 - protein, 13 aa, Homo sapiens
  CDR3 for alpha chain variable domain of TCR clone 133141 (TRAV21, TRAJ45)
CAVMGGGAEGLTF

SEQ ID NO: 266282 - protein, 14 aa, Homo sapiens
  CDR3 for beta chain variable domain of TCR clone 133141 (TRBV4-3, TRBJ1-4)
CASSPLQRNEKLFF

SEQ ID NO: 266283 - protein, 15 aa, Homo sapiens
  CDR3 for alpha chain variable domain of TCR clone 133142 (TRAV23/DV6, TRAJ28)
CAALLAYSGAGSYKL

SEQ ID NO: 266284 - protein, 15 aa, Homo sapiens
  CDR3 for beta chain variable domain of TCR clone 133142 (TRBV7-2, TRBJ2-1)
CASSLVAGRYNEQFF

SEQ ID NO: 266285 - protein, 12 aa, Homo sapiens
  CDR3 for alpha chain variable domain of TCR clone 133143 (TRAV13-1, TRAJ27)
CAAHTNAGKSTF

SEQ ID NO: 266286 - protein, 17 aa, Homo sapiens
  CDR3 for beta chain variable domain of TCR clone 133143 (TRBV7-3, TRBJ2-3)
CASSLMKRMRGADTQYF

SEQ ID NO: 266287 - protein, 15 aa, Homo sapiens
  CDR3 for alpha chain variable domain of TCR clone 133144 (TRAV3, TRAJ36)
CAVRASQTGAKNLFF

SEQ ID NO: 266288 - protein, 13 aa, Homo sapiens
  CDR3 for beta chain variable domain of TCR clone 133144 (TRBV10-3, TRBJ1-2)
CAISERDSYGYTF

SEQ ID NO: 266289 - protein, 13 aa, Homo sapiens
  CDR3 for alpha chain variable domain of TCR clone 133145 (TRAV12-3, TRAJ7)
CAVSASGNNRLAF

SEQ ID NO: 266290 - protein, 14 aa, Homo sapiens
  CDR3 for beta chain variable domain of TCR clone 133145 (TRBV13, TRBJ2-5)
CASSLGPRGETQYF

SEQ ID NO: 266291 - protein, 14 aa, Homo sapiens
  CDR3 for alpha chain variable domain of TCR clone 133146 (TRAV12-2, TRAJ24)
CAVTPADSWGKLQF

SEQ ID NO: 266292 - protein, 13 aa, Homo sapiens
  CDR3 for beta chain variable domain of TCR clone 133146 (TRBV10-2, TRBJ2-7)
CASGASGGYEQYF

SEQ ID NO: 266293 - protein, 15 aa, Homo sapiens
  CDR3 for alpha chain variable domain of TCR clone 133147 (TRAV1-2, TRAJ36)
CAASADQTGANNLFF

SEQ ID NO: 266294 - protein, 15 aa, Homo sapiens
  CDR3 for beta chain variable domain of TCR clone 133147 (TRBV5-1, TRBJ2-7)
CASSFSTDSVYEQYL

SEQ ID NO: 266295 - protein, 17 aa, Homo sapiens
  CDR3 for alpha chain variable domain of TCR clone 133148 (TRAV3, TRAJ6)
CAVSRRTDTGGSDIPTF

SEQ ID NO: 266296 - protein, 18 aa, Homo sapiens
  CDR3 for beta chain variable domain of TCR clone 133148 (TRBV7-2, TRBJ2-3)
CASSLETSRGRKADTQYF

SEQ ID NO: 266297 - protein, 20 aa, Homo sapiens
  CDR3 for alpha chain variable domain of TCR clone 133149 (TRAV12-1, TRAJ42)
SSVIQPPTSVKGGSQGNLIF

SEQ ID NO: 266298 - protein, 18 aa, Homo sapiens
  CDR3 for beta chain variable domain of TCR clone 133149 (TRBV11-2, TRBJ2-3)
CARSLGGASRGAPNTQYF

SEQ ID NO: 266299 - protein, 14 aa, Homo sapiens
  CDR3 for alpha chain variable domain of TCR clone 133150 (TRAV35, TRAJ33)
CAGSSQDSNYQLIW

SEQ ID NO: 266300 - protein, 14 aa, Homo sapiens
  CDR3 for beta chain variable domain of TCR clone 133150 (TRBV4-1, TRBJ2-2)
CASSQAVNTGELFF

SEQ ID NO: 266301 - protein, 14 aa, Homo sapiens
  CDR3 for alpha chain variable domain of TCR clone 133151 (TRAV2, TRAJ23)
CAVGLRNQGGKLIF

SEQ ID NO: 266302 - protein, 15 aa, Homo sapiens
  CDR3 for beta chain variable domain of TCR clone 133151 (TRBV6-5, TRBJ2-5)
CASGPLAGGIETQYF

SEQ ID NO: 266303 - protein, 13 aa, Homo sapiens
  CDR3 for alpha chain variable domain of TCR clone 133152 (TRAV29/DV5, TRAJ31)
CAASRNNDARLMF

SEQ ID NO: 266304 - protein, 12 aa, Homo sapiens
  CDR3 for beta chain variable domain of TCR clone 133152 (TRBV14, TRBJ2-7)
CASSSLKGEQYF

SEQ ID NO: 266305 - protein, 15 aa, Homo sapiens
  CDR3 for alpha chain variable domain of TCR clone 133153 (TRAV38-1, TRAJ57)
CAFMDSQGGFEKLVF

SEQ ID NO: 266306 - protein, 16 aa, Homo sapiens
  CDR3 for beta chain variable domain of TCR clone 133153 (TRBV10-3, TRBJ2-1)
CAIRGGGRGDYNEQFF

SEQ ID NO: 266307 - protein, 10 aa, Homo sapiens
  CDR3 for alpha chain variable domain of TCR clone 133154 (TRAV1-2, TRAJ23)
CAGQGGKLIF

SEQ ID NO: 266308 - protein, 16 aa, Homo sapiens
  CDR3 for beta chain variable domain of TCR clone 133154 (TRBV11-2, TRBJ1-1)
CDSSLRQGGEHSKAFF

SEQ ID NO: 266309 - protein, 16 aa, Homo sapiens
  CDR3 for alpha chain variable domain of TCR clone 133155 (TRAV3, TRAJ28)
CAVLPRAGAGSYQLTF

SEQ ID NO: 266310 - protein, 13 aa, Homo sapiens
  CDR3 for beta chain variable domain of TCR clone 133155 (TRBV12-4, TRBJ2-5)
CASRLAVQETQYF

SEQ ID NO: 266311 - protein, 10 aa, Homo sapiens
  CDR3 for alpha chain variable domain of TCR clone 133156 (TRAV13-1, TRAJ30)
CAARDDKIIF

SEQ ID NO: 266312 - protein, 14 aa, Homo sapiens
  CDR3 for beta chain variable domain of TCR clone 133156 (TRBV19, TRBJ2-1)
CASPTFVLSGEQFF

SEQ ID NO: 266313 - protein, 14 aa, Homo sapiens
  CDR3 for alpha chain variable domain of TCR clone 133157 (TRAV12-2, TRAJ13)
CAVKKTGGYQKVTF

SEQ ID NO: 266314 - protein, 20 aa, Homo sapiens
  CDR3 for beta chain variable domain of TCR clone 133157 (TRBV11-3, TRBJ2-7)
CASSQRTSGSLRAVLRAGHQ

SEQ ID NO: 266315 - protein, 14 aa, Homo sapiens
  CDR3 for alpha chain variable domain of TCR clone 133158 (TRAV8-3, TRAJ4)
CAVGAAGGYNKLIF

SEQ ID NO: 266316 - protein, 14 aa, Homo sapiens
  CDR3 for beta chain variable domain of TCR clone 133158 (TRBV7-2, TRBJ1-5)
CASSPRGGPQPQHF

SEQ ID NO: 266317 - protein, 10 aa, Homo sapiens
  CDR3 for alpha chain variable domain of TCR clone 133159 (TRAV26-1, TRAJ22)
RSGSVRQLTF

SEQ ID NO: 266318 - protein, 13 aa, Homo sapiens
  CDR3 for beta chain variable domain of TCR clone 133159 (TRBV7-9, TRBJ1-2)
CASSLKQNYGYTF

SEQ ID NO: 266319 - protein, 12 aa, Homo sapiens
  CDR3 for alpha chain variable domain of TCR clone 133160 (TRAV12-1, TRAJ31)
CVVNRNNARLMF

SEQ ID NO: 266320 - protein, 15 aa, Homo sapiens
  CDR3 for beta chain variable domain of TCR clone 133160 (TRBV10-3, TRBJ2-3)
CAISKALSSTDTQYF

SEQ ID NO: 266321 - protein, 17 aa, Homo sapiens
  CDR3 for alpha chain variable domain of TCR clone 133161 (TRAV3, TRAJ6)
CAVRDGPRAGGRYIPTL

SEQ ID NO: 266322 - protein, 14 aa, Homo sapiens
  CDR3 for beta chain variable domain of TCR clone 133161 (TRBV7-2, TRBJ2-7)
CASSPKTSFYEQYF

SEQ ID NO: 266323 - protein, 11 aa, Homo sapiens
  CDR3 for alpha chain variable domain of TCR clone 133162 (TRAV35, TRAJ30)
CAPGGGDKIIF

SEQ ID NO: 266324 - protein, 14 aa, Homo sapiens
  CDR3 for beta chain variable domain of TCR clone 133162 (TRBV7-6, TRBJ2-1)
CASSLGGGADEQFF

SEQ ID NO: 266325 - protein, 11 aa, Homo sapiens
  CDR3 for alpha chain variable domain of TCR clone 133163 (TRAV21, TRAJ34)
CAHYNTDKLIF

SEQ ID NO: 266326 - protein, 18 aa, Homo sapiens
  CDR3 for beta chain variable domain of TCR clone 133163 (TRBV3-1, TRBJ1-2)
CASSQDVIGWNGDYGYTF

SEQ ID NO: 266327 - protein, 14 aa, Homo sapiens
  CDR3 for alpha chain variable domain of TCR clone 133164 (TRAV8-1, TRAJ5)
CAVRADTGRRALTF

SEQ ID NO: 266328 - protein, 14 aa, Homo sapiens
  CDR3 for beta chain variable domain of TCR clone 133164 (TRBV5-5, TRBJ1-2)
CASSLDPYNYGYTF

SEQ ID NO: 266329 - protein, 15 aa, Homo sapiens
  CDR3 for alpha chain variable domain of TCR clone 133165 (TRAV17, TRAJ10)
CATDASGGGGNKLTF

SEQ ID NO: 266330 - protein, 14 aa, Homo sapiens
  CDR3 for beta chain variable domain of TCR clone 133165 (TRBV20-1, TRBJ2-5)
CSVPYRGRVETQYF

SEQ ID NO: 266331 - protein, 16 aa, Homo sapiens
  CDR3 for alpha chain variable domain of TCR clone 133166 (TRAV3, TRAJ37)
CAVRPHGSGNTGKLIF

SEQ ID NO: 266332 - protein, 15 aa, Homo sapiens
  CDR3 for beta chain variable domain of TCR clone 133166 (TRBV29-1, TRBJ2-1)
CSVRTSLSSYNEQFF

SEQ ID NO: 266333 - protein, 12 aa, Homo sapiens
  CDR3 for alpha chain variable domain of TCR clone 133167 (TRAV12-2, TRAJ16)
CAVNLDGQKLLF

SEQ ID NO: 266334 - protein, 16 aa, Homo sapiens
  CDR3 for beta chain variable domain of TCR clone 133167 (TRBV2, TRBJ2-1)
CASSANPRDWQAEQFF

SEQ ID NO: 266335 - protein, 15 aa, Homo sapiens
  CDR3 for alpha chain variable domain of TCR clone 133168 (TRAV1-1, TRAJ5)
CAVRHMDTGSRALTF

SEQ ID NO: 266336 - protein, 17 aa, Homo sapiens
  CDR3 for beta chain variable domain of TCR clone 133168 (TRBV28, TRBJ2-7)
CASSPGLAGGDSSEQYF

SEQ ID NO: 266337 - protein, 14 aa, Homo sapiens
  CDR3 for alpha chain variable domain of TCR clone 133169 (TRAV12-1, TRAJ17)
CVLNYKAAGNNLTF

SEQ ID NO: 266338 - protein, 17 aa, Homo sapiens
  CDR3 for beta chain variable domain of TCR clone 133169 (TRBV20-1, TRBJ2-1)
CSASSSGLAGSYNEQFF

SEQ ID NO: 266339 - protein, 15 aa, Homo sapiens
  CDR3 for alpha chain variable domain of TCR clone 133170 (TRAV12-1, TRAJ9)
CVVGFGDTGGFKTIF

SEQ ID NO: 266340 - protein, 13 aa, Homo sapiens
  CDR3 for beta chain variable domain of TCR clone 133170 (TRBV2, TRBJ1-4)
CASSERAGEKLFF

SEQ ID NO: 266341 - protein, 10 aa, Homo sapiens
  CDR3 for alpha chain variable domain of TCR clone 133171 (TRAV30, TRAJ32)
CGTGKDMVVL

SEQ ID NO: 266342 - protein, 13 aa, Homo sapiens
  CDR3 for beta chain variable domain of TCR clone 133171 (TRBV10-3, TRBJ2-7)
CASKLAVNYEQYF

SEQ ID NO: 266343 - protein, 12 aa, Homo sapiens
  CDR3 for alpha chain variable domain of TCR clone 133172 (TRAV13-1, TRAJ15)
CAASQAGTALIF

SEQ ID NO: 266344 - protein, 19 aa, Homo sapiens
  CDR3 for beta chain variable domain of TCR clone 133172 (TRBV11-3, TRBJ2-2)
CASSTRPGAKTTNTGELFF

SEQ ID NO: 266345 - protein, 13 aa, Homo sapiens
  CDR3 for alpha chain variable domain of TCR clone 133173 (TRAV2, TRAJ40)
CAVVTSGTYKYIF

SEQ ID NO: 266346 - protein, 15 aa, Homo sapiens
  CDR3 for beta chain variable domain of TCR clone 133173 (TRBV19, TRBJ1-5)
CASSIVWADNQPQHF

SEQ ID NO: 266347 - protein, 12 aa, Homo sapiens
  CDR3 for alpha chain variable domain of TCR clone 133174 (TRAV3, TRAJ43)
CAVRDPNNDMRF

SEQ ID NO: 266348 - protein, 15 aa, Homo sapiens
  CDR3 for beta chain variable domain of TCR clone 133174 (TRBV27, TRBJ1-5)
CDSSLGTGFDQPQHF

SEQ ID NO: 266349 - protein, 17 aa, Homo sapiens
  CDR3 for alpha chain variable domain of TCR clone 133175 (TRAV12-1, TRAJ42)
CVVMRMNYVGSQGNLIF

SEQ ID NO: 266350 - protein, 13 aa, Homo sapiens
  CDR3 for beta chain variable domain of TCR clone 133175 (TRBV7-2, TRBJ1-1)
CASSLARPAEAFF

SEQ ID NO: 266351 - protein, 13 aa, Homo sapiens
  CDR3 for alpha chain variable domain of TCR clone 133176 (TRAV21, TRAJ57)
CAVTQGGCEKLVF

SEQ ID NO: 266352 - protein, 16 aa, Homo sapiens
  CDR3 for beta chain variable domain of TCR clone 133176 (TRBV29-1, TRBJ2-7)
CSVEDAEDGTAYEQYF

SEQ ID NO: 266353 - protein, 14 aa, Homo sapiens
  CDR3 for alpha chain variable domain of TCR clone 133177 (TRAV12-2, TRAJ40)
CAVKIHSGTYKYIF

SEQ ID NO: 266354 - protein, 12 aa, Homo sapiens
  CDR3 for beta chain variable domain of TCR clone 133177 (TRBV11-2, TRBJ2-2)
CASSLGGGELFF

SEQ ID NO: 266355 - protein, 13 aa, Homo sapiens
  CDR3 for alpha chain variable domain of TCR clone 133178 (TRAV12-1, TRAJ26)
CVVRRNYGQNFVF

SEQ ID NO: 266356 - protein, 14 aa, Homo sapiens
  CDR3 for beta chain variable domain of TCR clone 133178 (TRBV6-3, TRBJ1-1)
CASRYTGESAEAFF

SEQ ID NO: 266357 - protein, 11 aa, Homo sapiens
  CDR3 for alpha chain variable domain of TCR clone 133179 (TRAV17, TRAJ39)
CATGAAGNMLP

SEQ ID NO: 266358 - protein, 14 aa, Homo sapiens
  CDR3 for beta chain variable domain of TCR clone 133179 (TRBV7-9, TRBJ1-2)
CASSRQGANYGYTF

SEQ ID NO: 266359 - protein, 12 aa, Homo sapiens
  CDR3 for alpha chain variable domain of TCR clone 133180 (TRAV13-2, TRAJ58)
CAERRLDSRLTF

SEQ ID NO: 266360 - protein, 15 aa, Homo sapiens
  CDR3 for beta chain variable domain of TCR clone 133180 (TRBV5-1, TRBJ2-5)
CASSSGQEMVETQYF

SEQ ID NO: 266361 - protein, 12 aa, Homo sapiens
  CDR3 for alpha chain variable domain of TCR clone 133181 (TRAV8-3, TRAJ34)
CASGYNTDKLIF

SEQ ID NO: 266362 - protein, 13 aa, Homo sapiens
  CDR3 for beta chain variable domain of TCR clone 133181 (TRBV6-4, TRBJ2-3)
CASSVSWADTQYF

SEQ ID NO: 266363 - protein, 17 aa, Homo sapiens
  CDR3 for alpha chain variable domain of TCR clone 133182 (TRAV35, TRAJ52)
CAGQLAAGGTSYGKLTF

SEQ ID NO: 266364 - protein, 14 aa, Homo sapiens
  CDR3 for beta chain variable domain of TCR clone 133182 (TRBV12-4, TRBJ1-1)
CASSLGTGGTEAFF

SEQ ID NO: 266365 - protein, 16 aa, Homo sapiens
  CDR3 for alpha chain variable domain of TCR clone 133183 (TRAV3, TRAJ21)
CAVRDIERGNFNKFYF

SEQ ID NO: 266366 - protein, 13 aa, Homo sapiens
  CDR3 for beta chain variable domain of TCR clone 133183 (TRBV19, TRBJ1-2)
CASSQGQVYGYTF

SEQ ID NO: 266367 - protein, 12 aa, Homo sapiens
  CDR3 for alpha chain variable domain of TCR clone 133184 (TRAV8-3, TRAJ40)
CAVTPGTYKYIF

SEQ ID NO: 266368 - protein, 14 aa, Homo sapiens
  CDR3 for beta chain variable domain of TCR clone 133184 (TRBV12-4, TRBJ2-3)
CASSGQGSTDTQYF

SEQ ID NO: 266369 - protein, 14 aa, Homo sapiens
  CDR3 for alpha chain variable domain of TCR clone 133185 (TRAV12-2, TRAJ13)
CAVKKTGGYQKVTF

SEQ ID NO: 266370 - protein, 13 aa, Homo sapiens
  CDR3 for beta chain variable domain of TCR clone 133185 (TRBV12-4, TRBJ2-2)
CASSITGSGELFF

SEQ ID NO: 266371 - protein, 14 aa, Homo sapiens
  CDR3 for alpha chain variable domain of TCR clone 133186 (TRAV12-1, TRAJ12)
CVVNGRDSSYKLIF

SEQ ID NO: 266372 - protein, 18 aa, Homo sapiens
  CDR3 for beta chain variable domain of TCR clone 133186 (TRBV11-2, TRBJ2-3)
CASSLGGASRGAPNTQYF

SEQ ID NO: 266373 - protein, 14 aa, Homo sapiens
  CDR3 for alpha chain variable domain of TCR clone 133187 (TRAV3, TRAJ40)
CAVRDRRGTYKYIF

SEQ ID NO: 266374 - protein, 15 aa, Homo sapiens
  CDR3 for beta chain variable domain of TCR clone 133187 (TRBV11-1, TRBJ1-3)
CASTDPSAFGNTIYF

SEQ ID NO: 266375 - protein, 12 aa, Homo sapiens
  CDR3 for alpha chain variable domain of TCR clone 133188 (TRAV13-1, TRAJ53)
AASGGSNYKLTF

SEQ ID NO: 266376 - protein, 14 aa, Homo sapiens
  CDR3 for beta chain variable domain of TCR clone 133188 (TRBV12-4, TRBJ1-6)
CASNLQGKGSPLHF

SEQ ID NO: 266377 - protein, 15 aa, Homo sapiens
  CDR3 for alpha chain variable domain of TCR clone 133189 (TRAV35, TRAJ33)
CAGQPPRYSNYQLIW

SEQ ID NO: 266378 - protein, 16 aa, Homo sapiens
  CDR3 for beta chain variable domain of TCR clone 133189 (TRBV7-9, TRBJ2-3)
CASSPWREVGTDTQYF

SEQ ID NO: 266379 - protein, 13 aa, Homo sapiens
  CDR3 for alpha chain variable domain of TCR clone 133190 (TRAV3, TRAJ43)
CAVKARNKNDMRF

SEQ ID NO: 266380 - protein, 16 aa, Homo sapiens
  CDR3 for beta chain variable domain of TCR clone 133190 (TRBV7-9, TRBJ2-3)
CASSFSVAGGTDTQYF

SEQ ID NO: 266381 - protein, 14 aa, Homo sapiens
  CDR3 for alpha chain variable domain of TCR clone 133191 (TRAV23/DV6, TRAJ37)
CASSTSSNTGKLIF

SEQ ID NO: 266382 - protein, 13 aa, Homo sapiens
  CDR3 for beta chain variable domain of TCR clone 133191 (TRBV7-7, TRBJ1-1)
CASSLGANTEAFF

SEQ ID NO: 266383 - protein, 13 aa, Homo sapiens
  CDR3 for alpha chain variable domain of TCR clone 133192 (TRAV27, TRAJ49)
CAPRPYTGTQFYF

SEQ ID NO: 266384 - protein, 18 aa, Homo sapiens
  CDR3 for beta chain variable domain of TCR clone 133192 (TRBV7-3, TRBJ2-5)
CASSLGGAAQGRWETQYF

SEQ ID NO: 266385 - protein, 15 aa, Homo sapiens
  CDR3 for alpha chain variable domain of TCR clone 133193 (TRAV26-1, TRAJ29)
CIVRVEGSGNTPLVF

SEQ ID NO: 266386 - protein, 15 aa, Homo sapiens
  CDR3 for beta chain variable domain of TCR clone 133193 (TRBV4-1, TRBJ2-3)
CASSRGQGIPDTQYF

SEQ ID NO: 266387 - protein, 13 aa, Homo sapiens
  CDR3 for alpha chain variable domain of TCR clone 133194 (TRAV3, TRAJ27)
CAVRPLGAGKSTF

SEQ ID NO: 266388 - protein, 13 aa, Homo sapiens
  CDR3 for beta chain variable domain of TCR clone 133194 (TRBV7-9, TRBJ2-3)
CGSSPGSTDTQYF

SEQ ID NO: 266389 - protein, 12 aa, Homo sapiens
  CDR3 for alpha chain variable domain of TCR clone 133195 (TRAV2, TRAJ9)
CAVGAGGFKTMF

SEQ ID NO: 266390 - protein, 16 aa, Homo sapiens
  CDR3 for beta chain variable domain of TCR clone 133195 (TRBV13, TRBJ2-2)
CASSPRTGEHTGELFF

SEQ ID NO: 266391 - protein, 13 aa, Homo sapiens
  CDR3 for alpha chain variable domain of TCR clone 133196 (TRAV39, TRAJ33)
CTANPDSNYQLIW

SEQ ID NO: 266392 - protein, 13 aa, Homo sapiens
  CDR3 for beta chain variable domain of TCR clone 133196 (TRBV18, TRBJ1-1)
CASSGGRNTEAFF

SEQ ID NO: 266393 - protein, 14 aa, Homo sapiens
  CDR3 for alpha chain variable domain of TCR clone 133197 (TRAV35, TRAJ40)
CAVSTTSGTYKYIF

SEQ ID NO: 266394 - protein, 13 aa, Homo sapiens
  CDR3 for beta chain variable domain of TCR clone 133197 (TRBV20-1, TRBJ1-6)
CSAPLGVGSPLHF

SEQ ID NO: 266395 - protein, 20 aa, Homo sapiens
  CDR3 for alpha chain variable domain of TCR clone 133198 (TRAV12-1, TRAJ42)
SSVIQPPTSVKGGSQGNLIF

SEQ ID NO: 266396 - protein, 18 aa, Homo sapiens
  CDR3 for beta chain variable domain of TCR clone 133198 (TRBV11-2, TRBJ2-3)
CASSLRGASRGAPNTQYL

SEQ ID NO: 266397 - protein, 11 aa, Homo sapiens
  CDR3 for alpha chain variable domain of TCR clone 133199 (TRAV1-1, TRAJ20)
CAVFSDYKLSF

SEQ ID NO: 266398 - protein, 14 aa, Homo sapiens
  CDR3 for beta chain variable domain of TCR clone 133199 (TRBV19, TRBJ2-1)
CASSKDRGQDEQFF

SEQ ID NO: 266399 - protein, 14 aa, Homo sapiens
  CDR3 for alpha chain variable domain of TCR clone 133200 (TRAV12-2, TRAJ13)
CAVKKTGGYQEVTF

SEQ ID NO: 266400 - protein, 17 aa, Homo sapiens
  CDR3 for beta chain variable domain of TCR clone 133200 (TRBV20-1, TRBJ2-2)
CIASGSGQGGLTGELFF

SEQ ID NO: 266401 - protein, 14 aa, Homo sapiens
  CDR3 for alpha chain variable domain of TCR clone 133201 (TRAV1-2, TRAJ6)
CAVRSSGGSYIPTF

SEQ ID NO: 266402 - protein, 14 aa, Homo sapiens
  CDR3 for beta chain variable domain of TCR clone 133201 (TRBV7-3, TRBJ2-1)
CASSLAGGTNEQFF

SEQ ID NO: 266403 - protein, 13 aa, Homo sapiens
  CDR3 for alpha chain variable domain of TCR clone 133202 (TRAV12-3, TRAJ4)
CNEQAGGYNKLIF

SEQ ID NO: 266404 - protein, 15 aa, Homo sapiens
  CDR3 for beta chain variable domain of TCR clone 133202 (TRBV5-1, TRBJ1-1)
CASSLSGLGGTEAFF

SEQ ID NO: 266405 - protein, 14 aa, Homo sapiens
  CDR3 for alpha chain variable domain of TCR clone 133203 (TRAV12-2, TRAJ5)
CAVNRSTGRRALTF

SEQ ID NO: 266406 - protein, 15 aa, Homo sapiens
  CDR3 for beta chain variable domain of TCR clone 133203 (TRBV27, TRBJ2-1)
CASSNGGGSSNEQFF

SEQ ID NO: 266407 - protein, 13 aa, Homo sapiens
  CDR3 for alpha chain variable domain of TCR clone 133204 (TRAV17, TRAJ54)
CATSWGGAQKLVF

SEQ ID NO: 266408 - protein, 15 aa, Homo sapiens
  CDR3 for beta chain variable domain of TCR clone 133204 (TRBV3-1, TRBJ2-5)
CASSANLGGPETQYF

SEQ ID NO: 266409 - protein, 16 aa, Homo sapiens
  CDR3 for alpha chain variable domain of TCR clone 133205 (TRAV3, TRAJ23)
CAVEPLIYNQGGKLIF

SEQ ID NO: 266410 - protein, 15 aa, Homo sapiens
  CDR3 for beta chain variable domain of TCR clone 133205 (TRBV7-3, TRBJ2-1)
CASSLAGAGADEQFF

SEQ ID NO: 266411 - protein, 16 aa, Homo sapiens
  CDR3 for alpha chain variable domain of TCR clone 133206 (TRAV3, TRAJ37)
CAVRPHGSGNTGKLIF

SEQ ID NO: 266412 - protein, 15 aa, Homo sapiens
  CDR3 for beta chain variable domain of TCR clone 133206 (TRBV7-2, TRBJ2-1)
CASTSASGDYNEQFF

SEQ ID NO: 266413 - protein, 13 aa, Homo sapiens
  CDR3 for alpha chain variable domain of TCR clone 133207 (TRAV2, TRAJ24)
CAVSTDSWGKLQF

SEQ ID NO: 266414 - protein, 14 aa, Homo sapiens
  CDR3 for beta chain variable domain of TCR clone 133207 (TRBV13, TRBJ2-5)
CASSLGTAQEAQYF

SEQ ID NO: 266415 - protein, 12 aa, Homo sapiens
  CDR3 for alpha chain variable domain of TCR clone 133208 (TRAV13-1, TRAJ48)
CAANFGNEKLTF

SEQ ID NO: 266416 - protein, 12 aa, Homo sapiens
  CDR3 for beta chain variable domain of TCR clone 133208 (TRBV2, TRBJ2-7)
CASSDPDYEQYF

SEQ ID NO: 266417 - protein, 17 aa, Homo sapiens
  CDR3 for alpha chain variable domain of TCR clone 133209 (TRAV26-1, TRAJ46)
IASSESEKKRSGDKLTF

SEQ ID NO: 266418 - protein, 13 aa, Homo sapiens
  CDR3 for beta chain variable domain of TCR clone 133209 (TRBV12-5, TRBJ2-3)
CASGDRQSDTQYF

SEQ ID NO: 266419 - protein, 13 aa, Homo sapiens
  CDR3 for alpha chain variable domain of TCR clone 133210 (TRAV27, TRAJ49)
CAPRPYTGTSSIL

SEQ ID NO: 266420 - protein, 15 aa, Homo sapiens
  CDR3 for beta chain variable domain of TCR clone 133210 (TRBV7-2, TRBJ2-7)
CASSWGQGAIYEQYF

SEQ ID NO: 266421 - protein, 15 aa, Homo sapiens
  CDR3 for alpha chain variable domain of TCR clone 133211 (TRAV26-1, TRAJ29)
CIVRVEGSGNTPLVF

SEQ ID NO: 266422 - protein, 12 aa, Homo sapiens
  CDR3 for beta chain variable domain of TCR clone 133211 (TRBV7-8, TRBJ2-7)
CASNLGDREQYF

SEQ ID NO: 266423 - protein, 16 aa, Homo sapiens
  CDR3 for alpha chain variable domain of TCR clone 133212 (TRAV30, TRAJ24)
CGTEIVDADSWGKFQV

SEQ ID NO: 266424 - protein, 14 aa, Homo sapiens
  CDR3 for beta chain variable domain of TCR clone 133212 (TRBV12-5, TRBJ2-5)
CASGSRTHQETQYF

SEQ ID NO: 266425 - protein, 14 aa, Homo sapiens
  CDR3 for alpha chain variable domain of TCR clone 133213 (TRAV12-3, TRAJ42)
CAMNYGGSQGNLIF

SEQ ID NO: 266426 - protein, 15 aa, Homo sapiens
  CDR3 for beta chain variable domain of TCR clone 133213 (TRBV27, TRBJ2-1)
CASSLARGAYNEQFF

SEQ ID NO: 266427 - protein, 13 aa, Homo sapiens
  CDR3 for alpha chain variable domain of TCR clone 133214 (TRAV12-1, TRAJ7)
RVVNMRGNNRLAF

SEQ ID NO: 266428 - protein, 16 aa, Homo sapiens
  CDR3 for beta chain variable domain of TCR clone 133214 (TRBV20-1, TRBJ1-4)
CSAPGQGLLTNEKLFF

SEQ ID NO: 266429 - protein, 14 aa, Homo sapiens
  CDR3 for alpha chain variable domain of TCR clone 133215 (TRAV4, TRAJ20)
CLVGRRSNDYKLSF

SEQ ID NO: 266430 - protein, 18 aa, Homo sapiens
  CDR3 for beta chain variable domain of TCR clone 133215 (TRBV2, TRBJ2-5)
WASSGDPQGRGAQETQYF

SEQ ID NO: 266431 - protein, 16 aa, Homo sapiens
  CDR3 for alpha chain variable domain of TCR clone 133216 (TRAV12-3, TRAJ53)
CAMSPGSGGSNNKLTF

SEQ ID NO: 266432 - protein, 14 aa, Homo sapiens
  CDR3 for beta chain variable domain of TCR clone 133216 (TRBV4-1, TRBJ2-7)
CASSPVAGGDEQYF

SEQ ID NO: 266433 - protein, 14 aa, Homo sapiens
  CDR3 for alpha chain variable domain of TCR clone 133217 (TRAV17, TRAJ57)
CTTDASGGSEKLVF

SEQ ID NO: 266434 - protein, 14 aa, Homo sapiens
  CDR3 for beta chain variable domain of TCR clone 133217 (TRBV4-2, TRBJ2-1)
CASGLDRAYNEQFF

SEQ ID NO: 266435 - protein, 14 aa, Homo sapiens
  CDR3 for alpha chain variable domain of TCR clone 133218 (TRAV20, TRAJ22)
CAVDLGGSARQLTF

SEQ ID NO: 266436 - protein, 15 aa, Homo sapiens
  CDR3 for beta chain variable domain of TCR clone 133218 (TRBV7-2, TRBJ1-1)
CASSFAGDRDTEAFF

SEQ ID NO: 266437 - protein, 10 aa, Homo sapiens
  CDR3 for alpha chain variable domain of TCR clone 133219 (TRAV23/DV6, TRAJ43)
CAAAVAALEQ

SEQ ID NO: 266438 - protein, 20 aa, Homo sapiens
  CDR3 for beta chain variable domain of TCR clone 133219 (TRBV7-8, TRBJ2-2)
CASSHLFPGPTIHITGELFF

SEQ ID NO: 266439 - protein, 15 aa, Homo sapiens
  CDR3 for alpha chain variable domain of TCR clone 133220 (TRAV2, TRAJ24)
CAVVRLKNSWGKLQF

SEQ ID NO: 266440 - protein, 14 aa, Homo sapiens
  CDR3 for beta chain variable domain of TCR clone 133220 (TRBV19, TRBJ2-1)
CASPTFVLSGEQFF

SEQ ID NO: 266441 - protein, 16 aa, Homo sapiens
  CDR3 for alpha chain variable domain of TCR clone 133221 (TRAV1-2, TRAJ10)
CAVRGVLTGGGNKVTF

SEQ ID NO: 266442 - protein, 12 aa, Homo sapiens
  CDR3 for beta chain variable domain of TCR clone 133221 (TRBV7-8, TRBJ2-7)
CASSLGDREQYF

SEQ ID NO: 266443 - protein, 15 aa, Homo sapiens
  CDR3 for alpha chain variable domain of TCR clone 133222 (TRAV12-2, TRAJ53)
CAVNGGGGSNYKLTF

SEQ ID NO: 266444 - protein, 12 aa, Homo sapiens
  CDR3 for beta chain variable domain of TCR clone 133222 (TRBV20-1, TRBJ2-7)
CSAITPTKEQYF

SEQ ID NO: 266445 - protein, 17 aa, Homo sapiens
  CDR3 for alpha chain variable domain of TCR clone 133223 (TRAV3, TRAJ28)
CAVRPLYSGDGSYQLTF

SEQ ID NO: 266446 - protein, 16 aa, Homo sapiens
  CDR3 for beta chain variable domain of TCR clone 133223 (TRBV4-2, TRBJ1-4)
CASSQARGPTNEKLFF

SEQ ID NO: 266447 - protein, 13 aa, Homo sapiens
  CDR3 for alpha chain variable domain of TCR clone 133224 (TRAV2, TRAJ40)
CAVATSGTYKYIF

SEQ ID NO: 266448 - protein, 14 aa, Homo sapiens
  CDR3 for beta chain variable domain of TCR clone 133224 (TRBV19, TRBJ2-1)
CAGPTFVLSGEQFF

SEQ ID NO: 266449 - protein, 14 aa, Homo sapiens
  CDR3 for alpha chain variable domain of TCR clone 133225 (TRAV2, TRAJ9)
CAVEDRSGGFKTIF

SEQ ID NO: 266450 - protein, 17 aa, Homo sapiens
  CDR3 for beta chain variable domain of TCR clone 133225 (TRBV19, TRBJ2-6)
CASSKGATASGANVLTF

SEQ ID NO: 266451 - protein, 18 aa, Homo sapiens
  CDR3 for alpha chain variable domain of TCR clone 133226 (TRAV21, TRAJ52)
CAVRPSPAGGTSYGKLTF

SEQ ID NO: 266452 - protein, 14 aa, Homo sapiens
  CDR3 for beta chain variable domain of TCR clone 133226 (TRBV7-2, TRBJ2-7)
CASSGLAGRGEQYF

SEQ ID NO: 266453 - protein, 13 aa, Homo sapiens
  CDR3 for alpha chain variable domain of TCR clone 133227 (TRAV2, TRAJ15)
RAVASQAGTALIF

SEQ ID NO: 266454 - protein, 15 aa, Homo sapiens
  CDR3 for beta chain variable domain of TCR clone 133227 (TRBV27, TRBJ2-3)
CASSSLAGVIDTQYF

SEQ ID NO: 266455 - protein, 15 aa, Homo sapiens
  CDR3 for alpha chain variable domain of TCR clone 133228 (TRAV3, TRAJ5)
CAVRDRKKGRRTLTF

SEQ ID NO: 266456 - protein, 15 aa, Homo sapiens
  CDR3 for beta chain variable domain of TCR clone 133228 (TRBV7-8, TRBJ2-1)
CASSLADSLYNEQFF

SEQ ID NO: 266457 - protein, 13 aa, Homo sapiens
  CDR3 for alpha chain variable domain of TCR clone 133229 (TRAV12-3, TRAJ13)
CAMNSGGYQKVTF

SEQ ID NO: 266458 - protein, 13 aa, Homo sapiens
  CDR3 for beta chain variable domain of TCR clone 133229 (TRBV7-9, TRBJ1-2)
CASSLKQNYGYTF

SEQ ID NO: 266459 - protein, 10 aa, Homo sapiens
  CDR3 for alpha chain variable domain of TCR clone 133230 (TRAV21, TRAJ31)
CAVDNARLMF

SEQ ID NO: 266460 - protein, 13 aa, Homo sapiens
  CDR3 for beta chain variable domain of TCR clone 133230 (TRBV4-1, TRBJ1-1)
CDSSRKMNTEAFF

SEQ ID NO: 266461 - protein, 16 aa, Homo sapiens
  CDR3 for alpha chain variable domain of TCR clone 133231 (TRAV12-2, TRAJ18)
CAVTTDRGSTLGRLDF

SEQ ID NO: 266462 - protein, 14 aa, Homo sapiens
  CDR3 for beta chain variable domain of TCR clone 133231 (TRBV4-2, TRBJ1-5)
CASSQDSINQPQHF

SEQ ID NO: 266463 - protein, 14 aa, Homo sapiens
  CDR3 for alpha chain variable domain of TCR clone 133232 (TRAV12-2, TRAJ40)
CAVKIPSGTYKYIF

SEQ ID NO: 266464 - protein, 14 aa, Homo sapiens
  CDR3 for beta chain variable domain of TCR clone 133232 (TRBV11-2, TRBJ2-7)
CASSSTGEGYEQYF

SEQ ID NO: 266465 - protein, 15 aa, Homo sapiens
  CDR3 for alpha chain variable domain of TCR clone 133233 (TRAV8-4, TRAJ47)
CAVCDPEEYGNKLVF

SEQ ID NO: 266466 - protein, 15 aa, Homo sapiens
  CDR3 for beta chain variable domain of TCR clone 133233 (TRBV11-2, TRBJ2-1)
CASSLGPDSYNEQFF

SEQ ID NO: 266467 - protein, 14 aa, Homo sapiens
  CDR3 for alpha chain variable domain of TCR clone 133234 (TRAV12-2, TRAJ13)
CAVKKTGGYQKVTF

SEQ ID NO: 266468 - protein, 19 aa, Homo sapiens
  CDR3 for beta chain variable domain of TCR clone 133234 (TRBV4-1, TRBJ1-4)
CASSQEGPRGWRKNCFLAV

SEQ ID NO: 266469 - protein, 12 aa, Homo sapiens
  CDR3 for alpha chain variable domain of TCR clone 133235 (TRAV13-1, TRAJ21)
CSAKEGFNKFYF

SEQ ID NO: 266470 - protein, 17 aa, Homo sapiens
  CDR3 for beta chain variable domain of TCR clone 133235 (TRBV20-1, TRBJ2-1)
CSASSSGLAGSYNEQFF

SEQ ID NO: 266471 - protein, 13 aa, Homo sapiens
  CDR3 for alpha chain variable domain of TCR clone 133236 (TRAV12-2, TRAJ57)
CAGHQGGSEKLVF

SEQ ID NO: 266472 - protein, 12 aa, Homo sapiens
  CDR3 for beta chain variable domain of TCR clone 133236 (TRBV11-2, TRBJ2-2)
CASSLGGGELFF

SEQ ID NO: 266473 - protein, 13 aa, Homo sapiens
  CDR3 for alpha chain variable domain of TCR clone 133237 (TRAV35, TRAJ32)
CAGVGGATNKLIF

SEQ ID NO: 266474 - protein, 17 aa, Homo sapiens
  CDR3 for beta chain variable domain of TCR clone 133237 (TRBV4-3, TRBJ2-1)
CASSQFSSGRASGEHFF

SEQ ID NO: 266475 - protein, 11 aa, Homo sapiens
  CDR3 for alpha chain variable domain of TCR clone 133238 (TRAV3, TRAJ21)
CAVGNFNKFYF

SEQ ID NO: 266476 - protein, 13 aa, Homo sapiens
  CDR3 for beta chain variable domain of TCR clone 133238 (TRBV20-1, TRBJ1-6)
CSAPLGVGSPLHF

SEQ ID NO: 266477 - protein, 15 aa, Homo sapiens
  CDR3 for alpha chain variable domain of TCR clone 133239 (TRAV8-4, TRAJ3)
CAVTGENLVQQCFQD

SEQ ID NO: 266478 - protein, 16 aa, Homo sapiens
  CDR3 for beta chain variable domain of TCR clone 133239 (TRBV19, TRBJ2-1)
CASSKAGPSSYNEQFF

SEQ ID NO: 266479 - protein, 14 aa, Homo sapiens
  CDR3 for alpha chain variable domain of TCR clone 133240 (TRAV21, TRAJ35)
CAVMPIGFGNVLHC

SEQ ID NO: 266480 - protein, 15 aa, Homo sapiens
  CDR3 for beta chain variable domain of TCR clone 133240 (TRBV2, TRBJ2-1)
CASSELAGSYNEQFF

SEQ ID NO: 266481 - protein, 14 aa, Homo sapiens
  CDR3 for alpha chain variable domain of TCR clone 133241 (TRAV1-2, TRAJ16)
CAVNRVSDGQKLLF

SEQ ID NO: 266482 - protein, 13 aa, Homo sapiens
  CDR3 for beta chain variable domain of TCR clone 133241 (TRBV20-1, TRBJ1-1)
CSARGGGNTEAFF

SEQ ID NO: 266483 - protein, 12 aa, Homo sapiens
  CDR3 for alpha chain variable domain of TCR clone 133242 (TRAV27, TRAJ35)
CAGADFGNVLRC

SEQ ID NO: 266484 - protein, 16 aa, Homo sapiens
  CDR3 for beta chain variable domain of TCR clone 133242 (TRBV6-1, TRBJ2-1)
CASILRQGSSYNEQFF

SEQ ID NO: 266485 - protein, 14 aa, Homo sapiens
  CDR3 for alpha chain variable domain of TCR clone 133243 (TRAV12-2, TRAJ40)
CAVKIPSGTYKYIF

SEQ ID NO: 266486 - protein, 14 aa, Homo sapiens
  CDR3 for beta chain variable domain of TCR clone 133243 (TRBV7-9, TRBJ1-2)
CASSRQGANYGYAF

SEQ ID NO: 266487 - protein, 16 aa, Homo sapiens
  CDR3 for alpha chain variable domain of TCR clone 133244 (TRAV3, TRAJ32)
CAVRDMGGGTTNKLIF

SEQ ID NO: 266488 - protein, 11 aa, Homo sapiens
  CDR3 for beta chain variable domain of TCR clone 133244 (TRBV12-4, TRBJ2-1)
CASSRLNEQFF

SEQ ID NO: 266489 - protein, 13 aa, Homo sapiens
  CDR3 for alpha chain variable domain of TCR clone 133245 (TRAV20, TRAJ37)
CAGCSSNTGKLIF

SEQ ID NO: 266490 - protein, 11 aa, Homo sapiens
  CDR3 for beta chain variable domain of TCR clone 133245 (TRBV12-4, TRBJ2-3)
CASTATHTQYF

SEQ ID NO: 266491 - protein, 23 aa, Homo sapiens
  CDR3 for alpha chain variable domain of TCR clone 133246 (TRAV26-1, TRAJ38)
CIADNAGNNPIQNPDPAVYQLRD

SEQ ID NO: 266492 - protein, 13 aa, Homo sapiens
  CDR3 for beta chain variable domain of TCR clone 133246 (TRBV20-1, TRBJ1-1)
CSARGGGNTEAFF

SEQ ID NO: 266493 - protein, 14 aa, Homo sapiens
  CDR3 for alpha chain variable domain of TCR clone 133247 (TRAV12-2, TRAJ49)
CAVTLGLYGNQFYF

SEQ ID NO: 266494 - protein, 15 aa, Homo sapiens
  CDR3 for beta chain variable domain of TCR clone 133247 (TRBV27, TRBJ2-1)
CASSNGGGSSNEQFF

SEQ ID NO: 266495 - protein, 15 aa, Homo sapiens
  CDR3 for alpha chain variable domain of TCR clone 133248 (TRAV20, TRAJ58)
CAVQDLETSGSRLTF

SEQ ID NO: 266496 - protein, 13 aa, Homo sapiens
  CDR3 for beta chain variable domain of TCR clone 133248 (TRBV20-1, TRBJ1-1)
CGARGGGNTEAFF

SEQ ID NO: 266497 - protein, 13 aa, Homo sapiens
  CDR3 for alpha chain variable domain of TCR clone 133249 (TRAV2, TRAJ40)
CAVVTSGTYKYIF

SEQ ID NO: 266498 - protein, 11 aa, Homo sapiens
  CDR3 for beta chain variable domain of TCR clone 133249 (TRBV19, TRBJ2-1)
RLSFLSGEQFF

SEQ ID NO: 266499 - protein, 15 aa, Homo sapiens
  CDR3 for alpha chain variable domain of TCR clone 133250 (TRAV26-1, TRAJ29)
CIVRVEGSGNTPLVF

SEQ ID NO: 266500 - protein, 14 aa, Homo sapiens
  CDR3 for beta chain variable domain of TCR clone 133250 (TRBV25-1, TRBJ1-1)
SASTHLGGNTEAFF

SEQ ID NO: 266501 - protein, 16 aa, Homo sapiens
  CDR3 for alpha chain variable domain of TCR clone 133251 (TRAV3, TRAJ21)
CAVRDIERGNFNKSYF

SEQ ID NO: 266502 - protein, 13 aa, Homo sapiens
  CDR3 for beta chain variable domain of TCR clone 133251 (TRBV27, TRBJ2-7)
CASSLTTGYEQYF

SEQ ID NO: 266503 - protein, 14 aa, Homo sapiens
  CDR3 for alpha chain variable domain of TCR clone 133252 (TRAV8-3, TRAJ4)
CAVGAAGGYNKLIF

SEQ ID NO: 266504 - protein, 15 aa, Homo sapiens
  CDR3 for beta chain variable domain of TCR clone 133252 (TRBV4-1, TRBJ1-4)
CASSDTGGTNEKLFF

SEQ ID NO: 266505 - protein, 14 aa, Homo sapiens
  CDR3 for alpha chain variable domain of TCR clone 133253 (TRAV20, TRAJ10)
CAVRVEGGGNKLTF

SEQ ID NO: 266506 - protein, 18 aa, Homo sapiens
  CDR3 for beta chain variable domain of TCR clone 133253 (TRBV24-1, TRBJ2-1)
CATSDLMFLGKGVHEQFF

SEQ ID NO: 266507 - protein, 10 aa, Homo sapiens
  CDR3 for alpha chain variable domain of TCR clone 133254 (TRAV1-2, TRAJ20)
CALNDYKLSF

SEQ ID NO: 266508 - protein, 16 aa, Homo sapiens
  CDR3 for beta chain variable domain of TCR clone 133254 (TRBV20-1, TRBJ1-1)
CSARALTQGMNTEAFL

SEQ ID NO: 266509 - protein, 14 aa, Homo sapiens
  CDR3 for alpha chain variable domain of TCR clone 133255 (TRAV12-2, TRAJ11)
CAVRPREGYSTLTF

SEQ ID NO: 266510 - protein, 13 aa, Homo sapiens
  CDR3 for beta chain variable domain of TCR clone 133255 (TRBV10-3, TRBJ2-5)
CAMTSGAGETQYF

SEQ ID NO: 266511 - protein, 15 aa, Homo sapiens
  CDR3 for alpha chain variable domain of TCR clone 133256 (TRAV3, TRAJ22)
CAVRDRGGSARQLTF

SEQ ID NO: 266512 - protein, 14 aa, Homo sapiens
  CDR3 for beta chain variable domain of TCR clone 133256 (TRBV7-8, TRBJ2-3)
CASSFKSSTDTQYF

SEQ ID NO: 266513 - protein, 15 aa, Homo sapiens
  CDR3 for alpha chain variable domain of TCR clone 133257 (TRAV2, TRAJ15)
FAVEDRGQAGTALIF

SEQ ID NO: 266514 - protein, 13 aa, Homo sapiens
  CDR3 for beta chain variable domain of TCR clone 133257 (TRBV10-2, TRBJ2-7)
CASGASGGYEQYF

SEQ ID NO: 266515 - protein, 15 aa, Homo sapiens
  CDR3 for alpha chain variable domain of TCR clone 133258 (TRAV13-1, TRAJ3)
CAASKLASSASKIIF

SEQ ID NO: 266516 - protein, 13 aa, Homo sapiens
  CDR3 for beta chain variable domain of TCR clone 133258 (TRBV20-1, TRBJ2-2)
CSASAAGTGELFF

SEQ ID NO: 266517 - protein, 14 aa, Homo sapiens
  CDR3 for alpha chain variable domain of TCR clone 133259 (TRAV1-2, TRAJ16)
CAVRSASDGQKLLF

SEQ ID NO: 266518 - protein, 11 aa, Homo sapiens
  CDR3 for beta chain variable domain of TCR clone 133259 (TRBV7-8, TRBJ2-7)
CASSLSLEQYF

SEQ ID NO: 266519 - protein, 16 aa, Homo sapiens
  CDR3 for alpha chain variable domain of TCR clone 133260 (TRAV17, TRAJ23)
TSVLRTPYNQGGKLIF

SEQ ID NO: 266520 - protein, 13 aa, Homo sapiens
  CDR3 for beta chain variable domain of TCR clone 133260 (TRBV7-3, TRBJ1-5)
CASSLDSNQPQHF

SEQ ID NO: 266521 - protein, 16 aa, Homo sapiens
  CDR3 for alpha chain variable domain of TCR clone 133261 (TRAV4, TRAJ9)
CLVGDPNRPGGFKTIF

SEQ ID NO: 266522 - protein, 13 aa, Homo sapiens
  CDR3 for beta chain variable domain of TCR clone 133261 (TRBV5-5, TRBJ1-2)
CASSFWRGEDYTC

SEQ ID NO: 266523 - protein, 16 aa, Homo sapiens
  CDR3 for alpha chain variable domain of TCR clone 133262 (TRAV30, TRAJ24)
CGTEIVDADSWGKFQF

SEQ ID NO: 266524 - protein, 15 aa, Homo sapiens
  CDR3 for beta chain variable domain of TCR clone 133262 (TRBV9, TRBJ1-6)
CASSVAGTGDSHLHF

SEQ ID NO: 266525 - protein, 16 aa, Homo sapiens
  CDR3 for alpha chain variable domain of TCR clone 133263 (TRAV26-1, TRAJ41)
CIVRVAVANSGYALNF

SEQ ID NO: 266526 - protein, 16 aa, Homo sapiens
  CDR3 for beta chain variable domain of TCR clone 133263 (TRBV4-3, TRBJ2-1)
CASSPALDRGVNEQFF

SEQ ID NO: 266527 - protein, 16 aa, Homo sapiens
  CDR3 for alpha chain variable domain of TCR clone 133264 (TRAV26-1, )
CIDIQNPDPALYQLRD

SEQ ID NO: 266528 - protein, 19 aa, Homo sapiens
  CDR3 for beta chain variable domain of TCR clone 133264 (TRBV19, TRBJ2-5)
CASSIGQVTDFFLGETQYF

SEQ ID NO: 266529 - protein, 14 aa, Homo sapiens
  CDR3 for alpha chain variable domain of TCR clone 133265 (TRAV12-3, TRAJ10)
SHLPLTGGGNKLTF

SEQ ID NO: 266530 - protein, 15 aa, Homo sapiens
  CDR3 for beta chain variable domain of TCR clone 133265 (TRBV7-9, TRBJ2-1)
CASSLAGLARNEQFF

SEQ ID NO: 266531 - protein, 15 aa, Homo sapiens
  CDR3 for alpha chain variable domain of TCR clone 133266 (TRAV34, TRAJ38)
CGADFTPGNNLKLIW

SEQ ID NO: 266532 - protein, 16 aa, Homo sapiens
  CDR3 for beta chain variable domain of TCR clone 133266 (TRBV12-5, TRBJ2-5)
CASGPRTSGNQETQYF

SEQ ID NO: 266533 - protein, 14 aa, Homo sapiens
  CDR3 for alpha chain variable domain of TCR clone 133267 (TRAV13-1, TRAJ44)
CAAKATGTASKLTF

SEQ ID NO: 266534 - protein, 16 aa, Homo sapiens
  CDR3 for beta chain variable domain of TCR clone 133267 (TRBV5-1, TRBJ2-2)
CASSFGDRPNTGELFF

SEQ ID NO: 266535 - protein, 11 aa, Homo sapiens
  CDR3 for alpha chain variable domain of TCR clone 133268 (TRAV35, TRAJ30)
CAPGGDDRIIF

SEQ ID NO: 266536 - protein, 15 aa, Homo sapiens
  CDR3 for beta chain variable domain of TCR clone 133268 (TRBV9, TRBJ1-6)
CASSVAGTGDSPLHF

SEQ ID NO: 266537 - protein, 14 aa, Homo sapiens
  CDR3 for alpha chain variable domain of TCR clone 133269 (TRAV1-2, TRAJ8)
CAVREDTGVQKLVF

SEQ ID NO: 266538 - protein, 14 aa, Homo sapiens
  CDR3 for beta chain variable domain of TCR clone 133269 (TRBV15, TRBJ2-3)
CATRSGTSTDTQYF

SEQ ID NO: 266539 - protein, 12 aa, Homo sapiens
  CDR3 for alpha chain variable domain of TCR clone 133270 (TRAV8-3, TRAJ26)
CAGDNYGQNFVF

SEQ ID NO: 266540 - protein, 18 aa, Homo sapiens
  CDR3 for beta chain variable domain of TCR clone 133270 (TRBV18, TRBJ1-3)
CASSPRGGAGPSGNTIYF

SEQ ID NO: 266541 - protein, 13 aa, Homo sapiens
  CDR3 for alpha chain variable domain of TCR clone 133271 (TRAV27, TRAJ6)
CAGGTRGSYIPTL

SEQ ID NO: 266542 - protein, 13 aa, Homo sapiens
  CDR3 for beta chain variable domain of TCR clone 133271 (TRBV4-1, TRBJ2-2)
CASSQENTGELFF

SEQ ID NO: 266543 - protein, 18 aa, Homo sapiens
  CDR3 for alpha chain variable domain of TCR clone 133272 (TRAV26-1, TRAJ23)
CIVRVCLEVWNQGGKLIF

SEQ ID NO: 266544 - protein, 16 aa, Homo sapiens
  CDR3 for beta chain variable domain of TCR clone 133272 (TRBV12-4, TRBJ2-5)
CASSFFVRGRQETQYF

SEQ ID NO: 266545 - protein, 15 aa, Homo sapiens
  CDR3 for alpha chain variable domain of TCR clone 133273 (TRAV12-1, TRAJ6)
CVVARIRRKLHTYIL

SEQ ID NO: 266546 - protein, 15 aa, Homo sapiens
  CDR3 for beta chain variable domain of TCR clone 133273 (TRBV7-3, TRBJ2-1)
CASSLKASEYNERFF

SEQ ID NO: 266547 - protein, 15 aa, Homo sapiens
  CDR3 for alpha chain variable domain of TCR clone 133274 (TRAV27, TRAJ38)
CAARRNAGNNRKLIW

SEQ ID NO: 266548 - protein, 13 aa, Homo sapiens
  CDR3 for beta chain variable domain of TCR clone 133274 (TRBV12-5, TRBJ2-3)
CASGDRQSGTQYL

SEQ ID NO: 266549 - protein, 14 aa, Homo sapiens
  CDR3 for alpha chain variable domain of TCR clone 133275 (TRAV1-2, TRAJ16)
CAVNRFSDGQKLLF

SEQ ID NO: 266550 - protein, 13 aa, Homo sapiens
  CDR3 for beta chain variable domain of TCR clone 133275 (TRBV20-1, TRBJ1-6)
CSAPTGLGSSLHF

SEQ ID NO: 266551 - protein, 16 aa, Homo sapiens
  CDR3 for alpha chain variable domain of TCR clone 133276 (TRAV16, TRAJ52)
CALSAAGGTSYGKLTF

SEQ ID NO: 266552 - protein, 16 aa, Homo sapiens
  CDR3 for beta chain variable domain of TCR clone 133276 (TRBV2, TRBJ1-1)
CASSPPNRGMNTEAFF

SEQ ID NO: 266553 - protein, 15 aa, Homo sapiens
  CDR3 for alpha chain variable domain of TCR clone 133277 (TRAV8-3, TRAJ11)
CAVGLLNSGYSTLTF

SEQ ID NO: 266554 - protein, 14 aa, Homo sapiens
  CDR3 for beta chain variable domain of TCR clone 133277 (TRBV15, TRBJ2-3)
CATRSGTSTDTQYF

SEQ ID NO: 266555 - protein, 11 aa, Homo sapiens
  CDR3 for alpha chain variable domain of TCR clone 133278 (TRAV14/DV4, TRAJ31)
CAMRENARLMF

SEQ ID NO: 266556 - protein, 12 aa, Homo sapiens
  CDR3 for beta chain variable domain of TCR clone 133278 (TRBV11-2, TRBJ2-2)
CASSLGGGELFF

SEQ ID NO: 266557 - protein, 12 aa, Homo sapiens
  CDR3 for alpha chain variable domain of TCR clone 133279 (TRAV1-1, TRAJ30)
CAVRGRDDKIIF

SEQ ID NO: 266558 - protein, 13 aa, Homo sapiens
  CDR3 for beta chain variable domain of TCR clone 133279 (TRBV11-3, TRBJ2-7)
CASSLHKLYEQYF

SEQ ID NO: 266559 - protein, 15 aa, Homo sapiens
  CDR3 for alpha chain variable domain of TCR clone 133280 (TRAV16, TRAJ12)
CSKWPLRDSSYKLIF

SEQ ID NO: 266560 - protein, 13 aa, Homo sapiens
  CDR3 for beta chain variable domain of TCR clone 133280 (TRBV4-2, TRBJ1-1)
CASSQAGNAEAFF

SEQ ID NO: 266561 - protein, 10 aa, Homo sapiens
  CDR3 for alpha chain variable domain of TCR clone 133281 (TRAV12-2, TRAJ39)
LCAVNNMLTF

SEQ ID NO: 266562 - protein, 16 aa, Homo sapiens
  CDR3 for beta chain variable domain of TCR clone 133281 (TRBV9, TRBJ2-7)
CASSAGPDRSPYEQYF

SEQ ID NO: 266563 - protein, 16 aa, Homo sapiens
  CDR3 for alpha chain variable domain of TCR clone 133282 (TRAV4, TRAJ22)
CLVGDLYSGSARQLTF

SEQ ID NO: 266564 - protein, 12 aa, Homo sapiens
  CDR3 for beta chain variable domain of TCR clone 133282 (TRBV11-2, TRBJ2-1)
CASSPGNNEQFF

SEQ ID NO: 266565 - protein, 15 aa, Homo sapiens
  CDR3 for alpha chain variable domain of TCR clone 133283 (TRAV3, TRAJ16)
CAVRDGFSDGQKLLF

SEQ ID NO: 266566 - protein, 12 aa, Homo sapiens
  CDR3 for beta chain variable domain of TCR clone 133283 (TRBV11-2, TRBJ2-2)
CASSLPTGELFF

SEQ ID NO: 266567 - protein, 20 aa, Homo sapiens
  CDR3 for alpha chain variable domain of TCR clone 133284 (TRAV12-1, TRAJ42)
SSVIQQPTSVKGGSQGNLIF

SEQ ID NO: 266568 - protein, 18 aa, Homo sapiens
  CDR3 for beta chain variable domain of TCR clone 133284 (TRBV11-2, TRBJ2-3)
CASSLGGASREAPNTQYF

SEQ ID NO: 266569 - protein, 15 aa, Homo sapiens
  CDR3 for alpha chain variable domain of TCR clone 133285 (TRAV26-2, TRAJ13)
CILRDLSGGYKKVTF

SEQ ID NO: 266570 - protein, 14 aa, Homo sapiens
  CDR3 for beta chain variable domain of TCR clone 133285 (TRBV4-1, TRBJ2-3)
CASSQEGSTDTQYF

SEQ ID NO: 266571 - protein, 11 aa, Homo sapiens
  CDR3 for alpha chain variable domain of TCR clone 133286 (TRAV36/DV7, TRAJ50)
CAVEPENLLRQ

SEQ ID NO: 266572 - protein, 13 aa, Homo sapiens
  CDR3 for beta chain variable domain of TCR clone 133286 (TRBV7-2, TRBJ2-7)
CASSSPSGSEQYF

SEQ ID NO: 266573 - protein, 16 aa, Homo sapiens
  CDR3 for alpha chain variable domain of TCR clone 133287 (TRAV3, TRAJ23)
CAVKLGIYNQGGKLIF

SEQ ID NO: 266574 - protein, 17 aa, Homo sapiens
  CDR3 for beta chain variable domain of TCR clone 133287 (TRBV10-3, TRBJ2-6)
CAISESTAPSGANVLTF

SEQ ID NO: 266575 - protein, 15 aa, Homo sapiens
  CDR3 for alpha chain variable domain of TCR clone 133288 (TRAV25, TRAJ52)
CAGRPGGTSYGELTF

SEQ ID NO: 266576 - protein, 14 aa, Homo sapiens
  CDR3 for beta chain variable domain of TCR clone 133288 (TRBV19, TRBJ2-7)
CASSIFAGTYEQYF

SEQ ID NO: 266577 - protein, 10 aa, Homo sapiens
  CDR3 for alpha chain variable domain of TCR clone 133289 (TRAV1-2, TRAJ31)
CAFFDARLMF

SEQ ID NO: 266578 - protein, 12 aa, Homo sapiens
  CDR3 for beta chain variable domain of TCR clone 133289 (TRBV7-9, TRBJ1-5)
CASSPQGQPQHF

SEQ ID NO: 266579 - protein, 16 aa, Homo sapiens
  CDR3 for alpha chain variable domain of TCR clone 133290 (TRAV8-3, TRAJ10)
CAVDPILTGGGNKLTF

SEQ ID NO: 266580 - protein, 16 aa, Homo sapiens
  CDR3 for beta chain variable domain of TCR clone 133290 (TRBV7-2, TRBJ2-5)
CASSSKWLSGQETQYF

SEQ ID NO: 266581 - protein, 15 aa, Homo sapiens
  CDR3 for alpha chain variable domain of TCR clone 133291 (TRAV3, TRAJ20)
CAVRDIKLSDYKLGF

SEQ ID NO: 266582 - protein, 13 aa, Homo sapiens
  CDR3 for beta chain variable domain of TCR clone 133291 (TRBV20-1, TRBJ1-1)
CSARVGGNTEAFF

SEQ ID NO: 266583 - protein, 12 aa, Homo sapiens
  CDR3 for alpha chain variable domain of TCR clone 133292 (TRAV35, TRAJ42)
CWVSGSQGNLIF

SEQ ID NO: 266584 - protein, 13 aa, Homo sapiens
  CDR3 for beta chain variable domain of TCR clone 133292 (TRBV29-1, TRBJ2-1)
CSVEGGRVNEQFF

SEQ ID NO: 266585 - protein, 12 aa, Homo sapiens
  CDR3 for alpha chain variable domain of TCR clone 133293 (TRAV30, TRAJ43)
CDTEERGNDMRF

SEQ ID NO: 266586 - protein, 13 aa, Homo sapiens
  CDR3 for beta chain variable domain of TCR clone 133293 (TRBV7-9, TRBJ2-3)
CASSPGSTDTQYF

SEQ ID NO: 266587 - protein, 21 aa, Homo sapiens
  CDR3 for alpha chain variable domain of TCR clone 133294 (TRAV26-1, TRAJ38)
CIADNAGNNHIQNPDPAVYQL

SEQ ID NO: 266588 - protein, 13 aa, Homo sapiens
  CDR3 for beta chain variable domain of TCR clone 133294 (TRBV20-1, TRBJ1-1)
CSARGGGNTEAVF

SEQ ID NO: 266589 - protein, 17 aa, Homo sapiens
  CDR3 for alpha chain variable domain of TCR clone 133295 (TRAV3, TRAJ42)
CAVRDRDYGGSQGSLIF

SEQ ID NO: 266590 - protein, 14 aa, Homo sapiens
  CDR3 for beta chain variable domain of TCR clone 133295 (TRBV19, TRBJ2-5)
CASSMTGQQETQYF

SEQ ID NO: 266591 - protein, 17 aa, Homo sapiens
  CDR3 for alpha chain variable domain of TCR clone 133296 (TRAV3, TRAJ6)
CAVRDGPRAGGSYIPTF

SEQ ID NO: 266592 - protein, 15 aa, Homo sapiens
  CDR3 for beta chain variable domain of TCR clone 133296 (TRBV29-1, TRBJ2-1)
CSAAPLAGGRNEQFF

SEQ ID NO: 266593 - protein, 14 aa, Homo sapiens
  CDR3 for alpha chain variable domain of TCR clone 133297 (TRAV16, TRAJ37)
CALDVSGNTGKLIF

SEQ ID NO: 266594 - protein, 14 aa, Homo sapiens
  CDR3 for beta chain variable domain of TCR clone 133297 (TRBV7-6, TRBJ2-7)
CASSFRQGADEQYF

SEQ ID NO: 266595 - protein, 14 aa, Homo sapiens
  CDR3 for alpha chain variable domain of TCR clone 133298 (TRAV14/DV4, TRAJ54)
CAMREAPGAQKLVF

SEQ ID NO: 266596 - protein, 13 aa, Homo sapiens
  CDR3 for beta chain variable domain of TCR clone 133298 (TRBV19, TRBJ1-2)
CASSQGQVYGYTF

SEQ ID NO: 266597 - protein, 16 aa, Homo sapiens
  CDR3 for alpha chain variable domain of TCR clone 133299 (TRAV30, TRAJ57)
CGTGWAPQGGSEKPVF

SEQ ID NO: 266598 - protein, 14 aa, Homo sapiens
  CDR3 for beta chain variable domain of TCR clone 133299 (TRBV18, TRBJ1-1)
CASSPGFQGVEAFF

SEQ ID NO: 266599 - protein, 12 aa, Homo sapiens
  CDR3 for alpha chain variable domain of TCR clone 133300 (TRAV21, TRAJ37)
CAVRGNTGKLIF

SEQ ID NO: 266600 - protein, 14 aa, Homo sapiens
  CDR3 for beta chain variable domain of TCR clone 133300 (TRBV19, TRBJ2-1)
CASGVTGARNEQFF

SEQ ID NO: 266601 - protein, 10 aa, Homo sapiens
  CDR3 for alpha chain variable domain of TCR clone 133301 (TRAV30, TRAJ48)
CGIGNEKLTF

SEQ ID NO: 266602 - protein, 14 aa, Homo sapiens
  CDR3 for beta chain variable domain of TCR clone 133301 (TRBV7-6, TRBJ2-3)
CASSVAGGTETQYF

SEQ ID NO: 266603 - protein, 11 aa, Homo sapiens
  CDR3 for alpha chain variable domain of TCR clone 133302 (TRAV20, TRAJ40)
CAVGGTYNYIF

SEQ ID NO: 266604 - protein, 15 aa, Homo sapiens
  CDR3 for beta chain variable domain of TCR clone 133302 (TRBV6-3, TRBJ2-2)
CASSFLATLTGELFF

SEQ ID NO: 266605 - protein, 11 aa, Homo sapiens
  CDR3 for alpha chain variable domain of TCR clone 133303 (TRAV22, TRAJ47)
CAVLYGNKLVF

SEQ ID NO: 266606 - protein, 16 aa, Homo sapiens
  CDR3 for beta chain variable domain of TCR clone 133303 (TRBV4-1, TRBJ2-3)
CASSQSTSGAEDTQYF

SEQ ID NO: 266607 - protein, 16 aa, Homo sapiens
  CDR3 for alpha chain variable domain of TCR clone 133304 (TRAV8-4, TRAJ52)
CAVSDPGGTSYGKLTF

SEQ ID NO: 266608 - protein, 15 aa, Homo sapiens
  CDR3 for beta chain variable domain of TCR clone 133304 (TRBV6-6, TRBJ2-7)
CASSYSYGGSYEQYF

SEQ ID NO: 266609 - protein, 14 aa, Homo sapiens
  CDR3 for alpha chain variable domain of TCR clone 133305 (TRAV1-2, TRAJ16)
CAVNRFSDGQKLLF

SEQ ID NO: 266610 - protein, 15 aa, Homo sapiens
  CDR3 for beta chain variable domain of TCR clone 133305 (TRBV28, TRBJ1-2)
CASTRPGIMAYGYTF

SEQ ID NO: 266611 - protein, 14 aa, Homo sapiens
  CDR3 for alpha chain variable domain of TCR clone 133306 (TRAV1-2, TRAJ16)
CAVNRFSDGQKLLF

SEQ ID NO: 266612 - protein, 16 aa, Homo sapiens
  CDR3 for beta chain variable domain of TCR clone 133306 (TRBV11-2, TRBJ1-2)
CASSLDTGGADYGYSF

SEQ ID NO: 266613 - protein, 16 aa, Homo sapiens
  CDR3 for alpha chain variable domain of TCR clone 133307 (TRAV21, TRAJ37)
CAVRPRGSSNTGKLIF

SEQ ID NO: 266614 - protein, 16 aa, Homo sapiens
  CDR3 for beta chain variable domain of TCR clone 133307 (TRBV19, TRBJ2-3)
CASSFYTTGIGDTQYF

SEQ ID NO: 266615 - protein, 16 aa, Homo sapiens
  CDR3 for alpha chain variable domain of TCR clone 133308 (TRAV12-3, TRAJ53)
CAMSPGSGVSNYKLTF

SEQ ID NO: 266616 - protein, 17 aa, Homo sapiens
  CDR3 for beta chain variable domain of TCR clone 133308 (TRBV28, TRBJ2-5)
CASSTPEGDALQETQYF

SEQ ID NO: 266617 - protein, 14 aa, Homo sapiens
  CDR3 for alpha chain variable domain of TCR clone 133309 (TRAV26-2, TRAJ32)
CCVGYGGATNKLIF

SEQ ID NO: 266618 - protein, 15 aa, Homo sapiens
  CDR3 for beta chain variable domain of TCR clone 133309 (TRBV27, TRBJ2-5)
CARSLYPRGGETQYF

SEQ ID NO: 266619 - protein, 14 aa, Homo sapiens
  CDR3 for alpha chain variable domain of TCR clone 133310 (TRAV26-1, TRAJ45)
CIEVTGGGADGLTF

SEQ ID NO: 266620 - protein, 19 aa, Homo sapiens
  CDR3 for beta chain variable domain of TCR clone 133310 (TRBV19, TRBJ2-2)
CASTRPGLAGGRVTGELLF

SEQ ID NO: 266621 - protein, 12 aa, Homo sapiens
  CDR3 for alpha chain variable domain of TCR clone 133311 (TRAV13-1, TRAJ15)
CAASQAGTALIF

SEQ ID NO: 266622 - protein, 13 aa, Homo sapiens
  CDR3 for beta chain variable domain of TCR clone 133311 (TRBV7-2, TRBJ2-7)
CASSSPSGSEQYF

SEQ ID NO: 266623 - protein, 16 aa, Homo sapiens
  CDR3 for alpha chain variable domain of TCR clone 133312 (TRAV1-2, TRAJ10)
CAVRGVLTGGGNKLTF

SEQ ID NO: 266624 - protein, 13 aa, Homo sapiens
  CDR3 for beta chain variable domain of TCR clone 133312 (TRBV7-9, TRBJ2-3)
CASSPGSTDTQYF

SEQ ID NO: 266625 - protein, 13 aa, Homo sapiens
  CDR3 for alpha chain variable domain of TCR clone 133313 (TRAV21, TRAJ27)
CAVRPGNAGKSTF

SEQ ID NO: 266626 - protein, 14 aa, Homo sapiens
  CDR3 for beta chain variable domain of TCR clone 133313 (TRBV7-6, TRBJ2-1)
CASSLGGGQMSSSS

SEQ ID NO: 266627 - protein, 15 aa, Homo sapiens
  CDR3 for alpha chain variable domain of TCR clone 133314 (TRAV17, TRAJ56)
CATEPFTGANSKLTF

SEQ ID NO: 266628 - protein, 14 aa, Homo sapiens
  CDR3 for beta chain variable domain of TCR clone 133314 (TRBV7-3, TRBJ2-1)
CASSLSGSYNEQFF

SEQ ID NO: 266629 - protein, 18 aa, Homo sapiens
  CDR3 for alpha chain variable domain of TCR clone 133315 (TRAV12-3, TRAJ52)
CAMSRTNAGGTSYGKLTF

SEQ ID NO: 266630 - protein, 15 aa, Homo sapiens
  CDR3 for beta chain variable domain of TCR clone 133315 (TRBV11-3, TRBJ2-3)
CASLKDGREGDTQYF

SEQ ID NO: 266631 - protein, 13 aa, Homo sapiens
  CDR3 for alpha chain variable domain of TCR clone 133316 (TRAV21, TRAJ11)
CAVPNSGYSTLTF

SEQ ID NO: 266632 - protein, 13 aa, Homo sapiens
  CDR3 for beta chain variable domain of TCR clone 133316 (TRBV3-1, TRBJ2-7)
RASSLRDGYEQYF

SEQ ID NO: 266633 - protein, 11 aa, Homo sapiens
  CDR3 for alpha chain variable domain of TCR clone 133317 (TRAV1-2, TRAJ40)
CAVPGTYKYIF

SEQ ID NO: 266634 - protein, 16 aa, Homo sapiens
  CDR3 for beta chain variable domain of TCR clone 133317 (TRBV29-1, TRBJ2-7)
CSVEVVGTIGSYEQYF

SEQ ID NO: 266635 - protein, 13 aa, Homo sapiens
  CDR3 for alpha chain variable domain of TCR clone 133318 (TRAV3, TRAJ27)
CAVRPLGADKSTF

SEQ ID NO: 266636 - protein, 14 aa, Homo sapiens
  CDR3 for beta chain variable domain of TCR clone 133318 (TRBV7-9, TRBJ2-1)
CASSIRQGWDEQFF

SEQ ID NO: 266637 - protein, 21 aa, Homo sapiens
  CDR3 for alpha chain variable domain of TCR clone 133319 (TRAV26-1, TRAJ17)
CCVLLHRQSSGSKAAGNKPTF

SEQ ID NO: 266638 - protein, 14 aa, Homo sapiens
  CDR3 for beta chain variable domain of TCR clone 133319 (TRBV28, TRBJ1-2)
RASRIQGANYGYTF

SEQ ID NO: 266639 - protein, 15 aa, Homo sapiens
  CDR3 for alpha chain variable domain of TCR clone 133320 (TRAV38-2/DV8, TRAJ45)
CAYWDSGGGADGLPF

SEQ ID NO: 266640 - protein, 14 aa, Homo sapiens
  CDR3 for beta chain variable domain of TCR clone 133320 (TRBV7-2, TRBJ2-7)
CASRSQGAAYEQYF

SEQ ID NO: 266641 - protein, 14 aa, Homo sapiens
  CDR3 for alpha chain variable domain of TCR clone 133321 (TRAV12-2, TRAJ48)
CAVNAFFGNEKLNF

SEQ ID NO: 266642 - protein, 13 aa, Homo sapiens
  CDR3 for beta chain variable domain of TCR clone 133321 (TRBV28, TRBJ2-7)
CAGAQQGLDEQYF

SEQ ID NO: 266643 - protein, 13 aa, Homo sapiens
  CDR3 for alpha chain variable domain of TCR clone 133322 (TRAV27, TRAJ41)
CAGEGNSGYALNF

SEQ ID NO: 266644 - protein, 14 aa, Homo sapiens
  CDR3 for beta chain variable domain of TCR clone 133322 (TRBV5-1, TRBJ2-7)
CASSRGESLYEQYF

SEQ ID NO: 266645 - protein, 13 aa, Homo sapiens
  CDR3 for alpha chain variable domain of TCR clone 133323 (TRAV12-1, TRAJ7)
CVVNMSGNNRLAF

SEQ ID NO: 266646 - protein, 15 aa, Homo sapiens
  CDR3 for beta chain variable domain of TCR clone 133323 (TRBV27, TRBJ2-3)
CASSLGLAATDTQYF

SEQ ID NO: 266647 - protein, 10 aa, Homo sapiens
  CDR3 for alpha chain variable domain of TCR clone 133324 (TRAV1-2, TRAJ20)
CALNAYKLSF

SEQ ID NO: 266648 - protein, 16 aa, Homo sapiens
  CDR3 for beta chain variable domain of TCR clone 133324 (TRBV20-1, TRBJ1-1)
CSARALTQGMNTEAFF

SEQ ID NO: 266649 - protein, 13 aa, Homo sapiens
  CDR3 for alpha chain variable domain of TCR clone 133325 (TRAV8-6, TRAJ49)
CAVIKNTGNQFYF

SEQ ID NO: 266650 - protein, 14 aa, Homo sapiens
  CDR3 for beta chain variable domain of TCR clone 133325 (TRBV5-1, TRBJ2-7)
CASSRGESLYEQYF

SEQ ID NO: 266651 - protein, 12 aa, Homo sapiens
  CDR3 for alpha chain variable domain of TCR clone 133326 (TRAV36/DV7, TRAJ37)
CACYGNPGKLIF

SEQ ID NO: 266652 - protein, 13 aa, Homo sapiens
  CDR3 for beta chain variable domain of TCR clone 133326 (TRBV10-3, TRBJ2-7)
CASKLAVNYEQYF

SEQ ID NO: 266653 - protein, 14 aa, Homo sapiens
  CDR3 for alpha chain variable domain of TCR clone 133327 (TRAV20, TRAJ29)
CAVQAWVGNTPLVF

SEQ ID NO: 266654 - protein, 16 aa, Homo sapiens
  CDR3 for beta chain variable domain of TCR clone 133327 (TRBV5-1, TRBJ2-7)
CASSVTSGSSTYEQYF

SEQ ID NO: 266655 - protein, 12 aa, Homo sapiens
  CDR3 for alpha chain variable domain of TCR clone 133328 (TRAV12-3, TRAJ17)
CAMTLTGNKLTF

SEQ ID NO: 266656 - protein, 13 aa, Homo sapiens
  CDR3 for beta chain variable domain of TCR clone 133328 (TRBV7-3, TRBJ1-5)
CASSLDSNQPQHF

SEQ ID NO: 266657 - protein, 13 aa, Homo sapiens
  CDR3 for alpha chain variable domain of TCR clone 133329 (TRAV3, TRAJ20)
CAVRDTGDYKLSF

SEQ ID NO: 266658 - protein, 12 aa, Homo sapiens
  CDR3 for beta chain variable domain of TCR clone 133329 (TRBV11-2, TRBJ2-2)
CASSLGGGELFF

SEQ ID NO: 266659 - protein, 13 aa, Homo sapiens
  CDR3 for alpha chain variable domain of TCR clone 133330 (TRAV12-2, TRAJ24)
CAVSTDSWGNCSL

SEQ ID NO: 266660 - protein, 12 aa, Homo sapiens
  CDR3 for beta chain variable domain of TCR clone 133330 (TRBV7-6, TRBJ2-7)
CASSLADSEQYF

SEQ ID NO: 266661 - protein, 13 aa, Homo sapiens
  CDR3 for alpha chain variable domain of TCR clone 133331 (TRAV12-3, TRAJ40)
CAMSDSGTYRYIF

SEQ ID NO: 266662 - protein, 14 aa, Homo sapiens
  CDR3 for beta chain variable domain of TCR clone 133331 (TRBV7-2, TRBJ1-5)
CASSTQGAGQPQHF

SEQ ID NO: 266663 - protein, 15 aa, Homo sapiens
  CDR3 for alpha chain variable domain of TCR clone 133332 (TRAV4, TRAJ39)
CLVGPNNSAGNMLTF

SEQ ID NO: 266664 - protein, 14 aa, Homo sapiens
  CDR3 for beta chain variable domain of TCR clone 133332 (TRBV19, TRBJ2-1)
CASPTFVLSGEQFL

SEQ ID NO: 266665 - protein, 14 aa, Homo sapiens
  CDR3 for alpha chain variable domain of TCR clone 133333 (TRAV12-3, TRAJ6)
CAMSATGGSHIPTF

SEQ ID NO: 266666 - protein, 16 aa, Homo sapiens
  CDR3 for beta chain variable domain of TCR clone 133333 (TRBV4-2, TRBJ2-1)
CASSPRAGQGANEQFF

SEQ ID NO: 266667 - protein, 14 aa, Homo sapiens
  CDR3 for alpha chain variable domain of TCR clone 133334 (TRAV30, TRAJ26)
CGTEIVSYGQNFVF

SEQ ID NO: 266668 - protein, 13 aa, Homo sapiens
  CDR3 for beta chain variable domain of TCR clone 133334 (TRBV19, TRBJ1-3)
CASRLSLGNTIYY

SEQ ID NO: 266669 - protein, 13 aa, Homo sapiens
  CDR3 for alpha chain variable domain of TCR clone 133335 (TRAV1-2, TRAJ9)
CAALNTGGFKTIF

SEQ ID NO: 266670 - protein, 13 aa, Homo sapiens
  CDR3 for beta chain variable domain of TCR clone 133335 (TRBV7-2, TRBJ2-4)
CASSREHANIQYF

SEQ ID NO: 266671 - protein, 11 aa, Homo sapiens
  CDR3 for alpha chain variable domain of TCR clone 133336 (TRAV3, TRAJ21)
CAVGNFNKFYF

SEQ ID NO: 266672 - protein, 16 aa, Homo sapiens
  CDR3 for beta chain variable domain of TCR clone 133336 (TRBV19, TRBJ1-1)
CASRFGGPVTGTEAFF

SEQ ID NO: 266673 - protein, 14 aa, Homo sapiens
  CDR3 for alpha chain variable domain of TCR clone 133337 (TRAV8-2, TRAJ37)
CVVSISGNTGKLIF

SEQ ID NO: 266674 - protein, 13 aa, Homo sapiens
  CDR3 for beta chain variable domain of TCR clone 133337 (TRBV7-8, TRBJ2-7)
RRVRLTEMGERYF

SEQ ID NO: 266675 - protein, 19 aa, Homo sapiens
  CDR3 for alpha chain variable domain of TCR clone 133338 (TRAV13-1, TRAJ52)
CAASPYQNAGGTSYGKLTF

SEQ ID NO: 266676 - protein, 17 aa, Homo sapiens
  CDR3 for beta chain variable domain of TCR clone 133338 (TRBV5-1, TRBJ2-2)
CASSPRTGGMNTGELFF

SEQ ID NO: 266677 - protein, 14 aa, Homo sapiens
  CDR3 for alpha chain variable domain of TCR clone 133339 (TRAV3, TRAJ36)
CAWRRLSGANNLFF

SEQ ID NO: 266678 - protein, 15 aa, Homo sapiens
  CDR3 for beta chain variable domain of TCR clone 133339 (TRBV7-2, TRBJ2-2)
CASSTRTGYTGELFF

SEQ ID NO: 266679 - protein, 11 aa, Homo sapiens
  CDR3 for alpha chain variable domain of TCR clone 133340 (TRAV12-1, TRAJ8)
CVVTGFQKLVF

SEQ ID NO: 266680 - protein, 15 aa, Homo sapiens
  CDR3 for beta chain variable domain of TCR clone 133340 (TRBV20-1, TRBJ2-7)
CSARDRVSGMDEQYF

SEQ ID NO: 266681 - protein, 15 aa, Homo sapiens
  CDR3 for alpha chain variable domain of TCR clone 133341 (TRAV23/DV6, TRAJ4)
CAASPLRGGYNKLLF

SEQ ID NO: 266682 - protein, 15 aa, Homo sapiens
  CDR3 for beta chain variable domain of TCR clone 133341 (TRBV7-9, TRBJ1-6)
CASSSPGRGNSPLHF

SEQ ID NO: 266683 - protein, 11 aa, Homo sapiens
  CDR3 for alpha chain variable domain of TCR clone 133342 (TRAV12-2, TRAJ54)
CAVEGAQELVF

SEQ ID NO: 266684 - protein, 17 aa, Homo sapiens
  CDR3 for beta chain variable domain of TCR clone 133342 (TRBV18, TRBJ1-3)
CASSLYPTGPSGNTIYF

SEQ ID NO: 266685 - protein, 14 aa, Homo sapiens
  CDR3 for alpha chain variable domain of TCR clone 133343 (TRAV17, TRAJ35)
CATDRPGFGNVLHC

SEQ ID NO: 266686 - protein, 19 aa, Homo sapiens
  CDR3 for beta chain variable domain of TCR clone 133343 (TRBV11-3, TRBJ2-2)
CASSTRPGAKTTNTGELFC

SEQ ID NO: 266687 - protein, 16 aa, Homo sapiens
  CDR3 for alpha chain variable domain of TCR clone 133344 (TRAV3, TRAJ10)
CAVRDMRAGGGNKLTF

SEQ ID NO: 266688 - protein, 13 aa, Homo sapiens
  CDR3 for beta chain variable domain of TCR clone 133344 (TRBV6-1, TRBJ1-1)
CASSRQGNTEAVF

SEQ ID NO: 266689 - protein, 17 aa, Homo sapiens
  CDR3 for alpha chain variable domain of TCR clone 133345 (TRAV13-1, TRAJ53)
CAASWKRSGGSNYKLTF

SEQ ID NO: 266690 - protein, 19 aa, Homo sapiens
  CDR3 for beta chain variable domain of TCR clone 133345 (TRBV7-9, TRBJ2-1)
CASSHNRGALLRSYNEQFF

SEQ ID NO: 266691 - protein, 12 aa, Homo sapiens
  CDR3 for alpha chain variable domain of TCR clone 133346 (TRAV4, TRAJ26)
CLVGDYGQNFVF

SEQ ID NO: 266692 - protein, 16 aa, Homo sapiens
  CDR3 for beta chain variable domain of TCR clone 133346 (TRBV7-2, TRBJ1-2)
GASSSNQDRRGHGYTF

SEQ ID NO: 266693 - protein, 15 aa, Homo sapiens
  CDR3 for alpha chain variable domain of TCR clone 133347 (TRAV9-2, TRAJ28)
CALSISGAGSYQLTF

SEQ ID NO: 266694 - protein, 16 aa, Homo sapiens
  CDR3 for beta chain variable domain of TCR clone 133347 (TRBV4-2, TRBJ2-1)
CASSQETATPYNEQFF

SEQ ID NO: 266695 - protein, 15 aa, Homo sapiens
  CDR3 for alpha chain variable domain of TCR clone 133348 (TRAV8-3, TRAJ45)
CASSYSGGGADGLTF

SEQ ID NO: 266696 - protein, 13 aa, Homo sapiens
  CDR3 for beta chain variable domain of TCR clone 133348 (TRBV10-3, TRBJ2-7)
CASKLAVYYEQYF

SEQ ID NO: 266697 - protein, 13 aa, Homo sapiens
  CDR3 for alpha chain variable domain of TCR clone 133349 (TRAV12-1, TRAJ9)
CVVLNTVGFKTIF

SEQ ID NO: 266698 - protein, 13 aa, Homo sapiens
  CDR3 for beta chain variable domain of TCR clone 133349 (TRBV20-1, TRBJ1-1)
CSARGGGNTEAFF

SEQ ID NO: 266699 - protein, 15 aa, Homo sapiens
  CDR3 for alpha chain variable domain of TCR clone 133350 (TRAV21, TRAJ24)
CAARSSTDSWGKLQF

SEQ ID NO: 266700 - protein, 15 aa, Homo sapiens
  CDR3 for beta chain variable domain of TCR clone 133350 (TRBV24-1, TRBJ2-5)
CATSETTGAVGAQYF

SEQ ID NO: 266701 - protein, 12 aa, Homo sapiens
  CDR3 for alpha chain variable domain of TCR clone 133351 (TRAV1-1, TRAJ8)
CAGGTGFQNLVF

SEQ ID NO: 266702 - protein, 13 aa, Homo sapiens
  CDR3 for beta chain variable domain of TCR clone 133351 (TRBV19, TRBJ1-2)
CASSQGQVYGYTF

SEQ ID NO: 266703 - protein, 11 aa, Homo sapiens
  CDR3 for alpha chain variable domain of TCR clone 133352 (TRAV12-2, TRAJ31)
CAILNNARLMS

SEQ ID NO: 266704 - protein, 16 aa, Homo sapiens
  CDR3 for beta chain variable domain of TCR clone 133352 (TRBV13, TRBJ2-2)
CASSPRTGEHTGELFF

SEQ ID NO: 266705 - protein, 15 aa, Homo sapiens
  CDR3 for alpha chain variable domain of TCR clone 133353 (TRAV8-3, TRAJ11)
WAVGLLNSGYSTLTF

SEQ ID NO: 266706 - protein, 16 aa, Homo sapiens
  CDR3 for beta chain variable domain of TCR clone 133353 (TRBV7-9, TRBJ1-2)
CASSLGFSSGEDGYTF

SEQ ID NO: 266707 - protein, 16 aa, Homo sapiens
  CDR3 for alpha chain variable domain of TCR clone 133354 (TRAV13-2, TRAJ15)
CAENIPSNQAGTALIF

SEQ ID NO: 266708 - protein, 15 aa, Homo sapiens
  CDR3 for beta chain variable domain of TCR clone 133354 (TRBV20-1, TRBJ2-7)
CSARDRVSGMDEQYF

SEQ ID NO: 266709 - protein, 13 aa, Homo sapiens
  CDR3 for alpha chain variable domain of TCR clone 133355 (TRAV12-1, TRAJ40)
CVVPTSGTYKYIF

SEQ ID NO: 266710 - protein, 16 aa, Homo sapiens
  CDR3 for beta chain variable domain of TCR clone 133355 (TRBV7-9, TRBJ1-2)
CASSLGFSSGEDGYTV

SEQ ID NO: 266711 - protein, 16 aa, Homo sapiens
  CDR3 for alpha chain variable domain of TCR clone 133356 (TRAV3, TRAJ10)
CAVRYMRAGGGNKLTF

SEQ ID NO: 266712 - protein, 15 aa, Homo sapiens
  CDR3 for beta chain variable domain of TCR clone 133356 (TRBV9, TRBJ1-6)
CASSVAGTGDSPLHF

SEQ ID NO: 266713 - protein, 16 aa, Homo sapiens
  CDR3 for alpha chain variable domain of TCR clone 133357 (TRAV23/DV6, TRAJ9)
CAASIGGNTGGFTTIF

SEQ ID NO: 266714 - protein, 17 aa, Homo sapiens
  CDR3 for beta chain variable domain of TCR clone 133357 (TRBV13, TRBJ2-3)
CASSLSRVAGGRNTQYF

SEQ ID NO: 266715 - protein, 12 aa, Homo sapiens
  CDR3 for alpha chain variable domain of TCR clone 133358 (TRAV13-1, TRAJ21)
CAAKEGFNKFYF

SEQ ID NO: 266716 - protein, 15 aa, Homo sapiens
  CDR3 for beta chain variable domain of TCR clone 133358 (TRBV7-9, TRBJ1-6)
CASSSPGRGNSHLHF

SEQ ID NO: 266717 - protein, 12 aa, Homo sapiens
  CDR3 for alpha chain variable domain of TCR clone 133359 (TRAV36/DV7, TRAJ40)
CAVGTGTYKYIF

SEQ ID NO: 266718 - protein, 15 aa, Homo sapiens
  CDR3 for beta chain variable domain of TCR clone 133359 (TRBV3-1, TRBJ2-7)
CASSQEWTGSYEQYF

SEQ ID NO: 266719 - protein, 14 aa, Homo sapiens
  CDR3 for alpha chain variable domain of TCR clone 133360 (TRAV12-3, TRAJ10)
SHLPLTGGGNKLTF

SEQ ID NO: 266720 - protein, 14 aa, Homo sapiens
  CDR3 for beta chain variable domain of TCR clone 133360 (TRBV7-2, TRBJ1-3)
CASSLGTAGNTIYF

SEQ ID NO: 266721 - protein, 12 aa, Homo sapiens
  CDR3 for alpha chain variable domain of TCR clone 133361 (TRAV36/DV7, TRAJ54)
CAVVRGTQKLVF

SEQ ID NO: 266722 - protein, 14 aa, Homo sapiens
  CDR3 for beta chain variable domain of TCR clone 133361 (TRBV7-3, TRBJ1-1)
CASSLKGGNTEAFF

SEQ ID NO: 266723 - protein, 13 aa, Homo sapiens
  CDR3 for alpha chain variable domain of TCR clone 133362 (TRAV29/DV5, TRAJ31)
CAASRNNNARLMF

SEQ ID NO: 266724 - protein, 12 aa, Homo sapiens
  CDR3 for beta chain variable domain of TCR clone 133362 (TRBV14, TRBJ1-1)
CASSQLKGLAFF

SEQ ID NO: 266725 - protein, 14 aa, Homo sapiens
  CDR3 for alpha chain variable domain of TCR clone 133363 (TRAV26-1, TRAJ38)
CIADNAGNNRKLIW

SEQ ID NO: 266726 - protein, 17 aa, Homo sapiens
  CDR3 for beta chain variable domain of TCR clone 133363 (TRBV7-6, TRBJ2-5)
CASSLGGLAGGLKTQYF

SEQ ID NO: 266727 - protein, 17 aa, Homo sapiens
  CDR3 for alpha chain variable domain of TCR clone 133364 (TRAV3, TRAJ38)
CAVRDCLNAGNNRKLIW

SEQ ID NO: 266728 - protein, 15 aa, Homo sapiens
  CDR3 for beta chain variable domain of TCR clone 133364 (TRBV4-1, TRBJ1-4)
CASSDTGGTNEKLFF

SEQ ID NO: 266729 - protein, 12 aa, Homo sapiens
  CDR3 for alpha chain variable domain of TCR clone 133365 (TRAV35, TRAJ36)
CCDSEEANNLFF

SEQ ID NO: 266730 - protein, 16 aa, Homo sapiens
  CDR3 for beta chain variable domain of TCR clone 133365 (TRBV7-8, TRBJ2-4)
CASSAERTLAKNIQYF

SEQ ID NO: 266731 - protein, 15 aa, Homo sapiens
  CDR3 for alpha chain variable domain of TCR clone 133366 (TRAV21, TRAJ53)
CATLNSGGSNYKLTF

SEQ ID NO: 266732 - protein, 14 aa, Homo sapiens
  CDR3 for beta chain variable domain of TCR clone 133366 (TRBV12-4, TRBJ2-7)
CASSILGVAYEQYF

SEQ ID NO: 266733 - protein, 16 aa, Homo sapiens
  CDR3 for alpha chain variable domain of TCR clone 133367 (TRAV14/DV4, TRAJ15)
CAMREGPAQAGTALIF

SEQ ID NO: 266734 - protein, 12 aa, Homo sapiens
  CDR3 for beta chain variable domain of TCR clone 133367 (TRBV28, TRBJ2-6)
CAIQAGANVLAF

SEQ ID NO: 266735 - protein, 12 aa, Homo sapiens
  CDR3 for alpha chain variable domain of TCR clone 133368 (TRAV1-1, TRAJ39)
CAVPVVDNMLTF

SEQ ID NO: 266736 - protein, 15 aa, Homo sapiens
  CDR3 for beta chain variable domain of TCR clone 133368 (TRBV19, TRBJ1-6)
CASSTQGAVGSPLHF

SEQ ID NO: 266737 - protein, 12 aa, Homo sapiens
  CDR3 for alpha chain variable domain of TCR clone 133369 (TRAV12-3, TRAJ17)
CAMTLTGNKLTF

SEQ ID NO: 266738 - protein, 15 aa, Homo sapiens
  CDR3 for beta chain variable domain of TCR clone 133369 (TRBV28, TRBJ1-2)
CASIPQGSDDYGYTF

SEQ ID NO: 266739 - protein, 12 aa, Homo sapiens
  CDR3 for alpha chain variable domain of TCR clone 133370 (TRAV12-3, TRAJ17)
CAMTLTGSKLTF

SEQ ID NO: 266740 - protein, 15 aa, Homo sapiens
  CDR3 for beta chain variable domain of TCR clone 133370 (TRBV20-1, TRBJ2-7)
CSARDQVSGMDEQYF

SEQ ID NO: 266741 - protein, 15 aa, Homo sapiens
  CDR3 for alpha chain variable domain of TCR clone 133371 (TRAV8-3, TRAJ37)
CAVGGLSSNTGKLIF

SEQ ID NO: 266742 - protein, 15 aa, Homo sapiens
  CDR3 for beta chain variable domain of TCR clone 133371 (TRBV7-8, TRBJ1-1)
CASSLGAGFDTEAFF

SEQ ID NO: 266743 - protein, 13 aa, Homo sapiens
  CDR3 for alpha chain variable domain of TCR clone 133372 (TRAV12-3, TRAJ43)
CAMIRPNNNDMRF

SEQ ID NO: 266744 - protein, 12 aa, Homo sapiens
  CDR3 for beta chain variable domain of TCR clone 133372 (TRBV11-2, TRBJ2-5)
CASSLVQETQYF

SEQ ID NO: 266745 - protein, 13 aa, Homo sapiens
  CDR3 for alpha chain variable domain of TCR clone 133373 (TRAV26-2, TRAJ43)
CILRAVNNNDMRL

SEQ ID NO: 266746 - protein, 14 aa, Homo sapiens
  CDR3 for beta chain variable domain of TCR clone 133373 (TRBV19, TRBJ2-1)
CASPTFVLSGEQFF

SEQ ID NO: 266747 - protein, 18 aa, Homo sapiens
  CDR3 for alpha chain variable domain of TCR clone 133374 (TRAV17, TRAJ45)
CATSLDLYSGGGADGLTF

SEQ ID NO: 266748 - protein, 10 aa, Homo sapiens
  CDR3 for beta chain variable domain of TCR clone 133374 (TRBV7-9, TRBJ1-1)
CASSFTEAFF

SEQ ID NO: 266749 - protein, 12 aa, Homo sapiens
  CDR3 for alpha chain variable domain of TCR clone 133375 (TRAV12-2, TRAJ8)
CAVNTGFQKLVF

SEQ ID NO: 266750 - protein, 10 aa, Homo sapiens
  CDR3 for beta chain variable domain of TCR clone 133375 (TRBV7-8, TRBJ1-5)
CASSLERRGL

SEQ ID NO: 266751 - protein, 13 aa, Homo sapiens
  CDR3 for alpha chain variable domain of TCR clone 133376 (TRAV21, TRAJ20)
CAVGLRVDYKLSF

SEQ ID NO: 266752 - protein, 18 aa, Homo sapiens
  CDR3 for beta chain variable domain of TCR clone 133376 (TRBV7-6, TRBJ2-1)
GASSPRTSGMSSYNEQFF

SEQ ID NO: 266753 - protein, 14 aa, Homo sapiens
  CDR3 for alpha chain variable domain of TCR clone 133377 (TRAV26-1, TRAJ38)
CIADNAGNNRKLIW

SEQ ID NO: 266754 - protein, 16 aa, Homo sapiens
  CDR3 for beta chain variable domain of TCR clone 133377 (TRBV20-1, TRBJ2-7)
CSAATSGRLSSYEQYF

SEQ ID NO: 266755 - protein, 18 aa, Homo sapiens
  CDR3 for alpha chain variable domain of TCR clone 133378 (TRAV26-1, TRAJ52)
CIVRVEGAGGTSYGNLTF

SEQ ID NO: 266756 - protein, 13 aa, Homo sapiens
  CDR3 for beta chain variable domain of TCR clone 133378 (TRBV7-3, TRBJ1-2)
CASSLKRGYGYTF

SEQ ID NO: 266757 - protein, 13 aa, Homo sapiens
  CDR3 for alpha chain variable domain of TCR clone 133379 (TRAV13-1, TRAJ6)
CAARRGGSYIPTF

SEQ ID NO: 266758 - protein, 14 aa, Homo sapiens
  CDR3 for beta chain variable domain of TCR clone 133379 (TRBV7-2, TRBJ2-7)
CASRSQGAAYEQYF

SEQ ID NO: 266759 - protein, 14 aa, Homo sapiens
  CDR3 for alpha chain variable domain of TCR clone 133380 (TRAV12-1, TRAJ43)
CVVNGRSNNNDMRF

SEQ ID NO: 266760 - protein, 14 aa, Homo sapiens
  CDR3 for beta chain variable domain of TCR clone 133380 (TRBV4-1, TRBJ2-2)
CASSQAVNTGELFF

SEQ ID NO: 266761 - protein, 13 aa, Homo sapiens
  CDR3 for alpha chain variable domain of TCR clone 133381 (TRAV8-1, TRAJ28)
CAVSGAGSYQLTF

SEQ ID NO: 266762 - protein, 18 aa, Homo sapiens
  CDR3 for beta chain variable domain of TCR clone 133381 (TRBV11-2, TRBJ2-3)
CASSLGGASRGAPDTQYF

SEQ ID NO: 266763 - protein, 10 aa, Homo sapiens
  CDR3 for alpha chain variable domain of TCR clone 133382 (TRAV12-2, TRAJ49)
CAVRRNQFYF

SEQ ID NO: 266764 - protein, 14 aa, Homo sapiens
  CDR3 for beta chain variable domain of TCR clone 133382 (TRBV25-1, TRBJ1-1)
CASTHLGGNTEAFF

SEQ ID NO: 266765 - protein, 17 aa, Homo sapiens
  CDR3 for alpha chain variable domain of TCR clone 133383 (TRAV36/DV7, TRAJ52)
CAVAQRAGGTSYGKLTF

SEQ ID NO: 266766 - protein, 15 aa, Homo sapiens
  CDR3 for beta chain variable domain of TCR clone 133383 (TRBV6-5, TRBJ1-2)
CASSYSQAFNYGDTF

SEQ ID NO: 266767 - protein, 11 aa, Homo sapiens
  CDR3 for alpha chain variable domain of TCR clone 133384 (TRAV1-2, TRAJ31)
CAVNNNARLMF

SEQ ID NO: 266768 - protein, 15 aa, Homo sapiens
  CDR3 for beta chain variable domain of TCR clone 133384 (TRBV28, TRBJ2-1)
CASSIIAGGRSEQYF

SEQ ID NO: 266769 - protein, 16 aa, Homo sapiens
  CDR3 for alpha chain variable domain of TCR clone 133385 (TRAV12-3, TRAJ53)
CAMSPGSGGSNYKLTF

SEQ ID NO: 266770 - protein, 13 aa, Homo sapiens
  CDR3 for beta chain variable domain of TCR clone 133385 (TRBV14, TRBJ1-1)
CASSREFGTEAFF

SEQ ID NO: 266771 - protein, 14 aa, Homo sapiens
  CDR3 for alpha chain variable domain of TCR clone 133386 (TRAV12-1, TRAJ17)
CVVNYKAAGNKLTF

SEQ ID NO: 266772 - protein, 14 aa, Homo sapiens
  CDR3 for beta chain variable domain of TCR clone 133386 (TRBV7-2, TRBJ2-7)
CASSLYPGRYEQYF

SEQ ID NO: 266773 - protein, 13 aa, Homo sapiens
  CDR3 for alpha chain variable domain of TCR clone 133387 (TRAV13-1, TRAJ39)
CAASIWAGNMLTF

SEQ ID NO: 266774 - protein, 12 aa, Homo sapiens
  CDR3 for beta chain variable domain of TCR clone 133387 (TRBV7-9, TRBJ2-7)
CASSIKREEQYF

SEQ ID NO: 266775 - protein, 15 aa, Homo sapiens
  CDR3 for alpha chain variable domain of TCR clone 133388 (TRAV29/DV5, TRAJ12)
CAAAPRMDSSYKLIF

SEQ ID NO: 266776 - protein, 16 aa, Homo sapiens
  CDR3 for beta chain variable domain of TCR clone 133388 (TRBV20-1, TRBJ1-2)
CSASMGQGVANYGYTF

SEQ ID NO: 266777 - protein, 12 aa, Homo sapiens
  CDR3 for alpha chain variable domain of TCR clone 133389 (TRAV21, TRAJ11)
CAVRGGNSTLTF

SEQ ID NO: 266778 - protein, 15 aa, Homo sapiens
  CDR3 for beta chain variable domain of TCR clone 133389 (TRBV6-1, TRBJ2-7)
CASSEPIAATTAQYF

SEQ ID NO: 266779 - protein, 14 aa, Homo sapiens
  CDR3 for alpha chain variable domain of TCR clone 133390 (TRAV17, TRAJ35)
CATDRPGFGNVLHC

SEQ ID NO: 266780 - protein, 13 aa, Homo sapiens
  CDR3 for beta chain variable domain of TCR clone 133390 (TRBV19, TRBJ1-2)
CASSQGQVYGYTF

SEQ ID NO: 266781 - protein, 11 aa, Homo sapiens
  CDR3 for alpha chain variable domain of TCR clone 133391 (TRAV3, TRAJ21)
CDVGNFNKFYF

SEQ ID NO: 266782 - protein, 16 aa, Homo sapiens
  CDR3 for beta chain variable domain of TCR clone 133391 (TRBV19, TRBJ2-1)
YASSKAGPSSYNEQFF

SEQ ID NO: 266783 - protein, 13 aa, Homo sapiens
  CDR3 for alpha chain variable domain of TCR clone 133392 (TRAV17, TRAJ22)
CAGRRGSARRLTF

SEQ ID NO: 266784 - protein, 14 aa, Homo sapiens
  CDR3 for beta chain variable domain of TCR clone 133392 (TRBV19, TRBJ1-1)
CASSITGWETEAFF

SEQ ID NO: 266785 - protein, 13 aa, Homo sapiens
  CDR3 for alpha chain variable domain of TCR clone 133393 (TRAV12-2, TRAJ12)
CAVLMDSSYKLIF

SEQ ID NO: 266786 - protein, 21 aa, Homo sapiens
  CDR3 for beta chain variable domain of TCR clone 133393 (TRBV14, TRBJ1-1)
QPAELEDSGVYFCASSGRAFF

SEQ ID NO: 266787 - protein, 13 aa, Homo sapiens
  CDR3 for alpha chain variable domain of TCR clone 133394 (TRAV17, TRAJ5)
CALRGTGRRALTF

SEQ ID NO: 266788 - protein, 13 aa, Homo sapiens
  CDR3 for beta chain variable domain of TCR clone 133394 (TRBV4-2, TRBJ1-1)
CASCQAGNTEAFF

SEQ ID NO: 266789 - protein, 14 aa, Homo sapiens
  CDR3 for alpha chain variable domain of TCR clone 133395 (TRAV2, TRAJ9)
CAVGDRSGGFKAIF

SEQ ID NO: 266790 - protein, 12 aa, Homo sapiens
  CDR3 for beta chain variable domain of TCR clone 133395 (TRBV11-2, TRBJ2-1)
CASSPGNNEQFF

SEQ ID NO: 266791 - protein, 12 aa, Homo sapiens
  CDR3 for alpha chain variable domain of TCR clone 133396 (TRAV12-3, TRAJ17)
CAMTLTGNKLTF

SEQ ID NO: 266792 - protein, 12 aa, Homo sapiens
  CDR3 for beta chain variable domain of TCR clone 133396 (TRBV2, TRBJ2-1)
CAYGPPGNEQFS

SEQ ID NO: 266793 - protein, 16 aa, Homo sapiens
  CDR3 for alpha chain variable domain of TCR clone 133397 (TRAV30, TRAJ24)
CGTEIVDADSWGKFQF

SEQ ID NO: 266794 - protein, 14 aa, Homo sapiens
  CDR3 for beta chain variable domain of TCR clone 133397 (TRBV2, TRBJ2-1)
CASSVGRSGNEQFF

SEQ ID NO: 266795 - protein, 11 aa, Homo sapiens
  CDR3 for alpha chain variable domain of TCR clone 133398 (TRAV1-2, TRAJ20)
CAVSNDYKLSF

SEQ ID NO: 266796 - protein, 16 aa, Homo sapiens
  CDR3 for beta chain variable domain of TCR clone 133398 (TRBV7-9, TRBJ2-1)
CASSPRASSSYNEQFF

SEQ ID NO: 266797 - protein, 11 aa, Homo sapiens
  CDR3 for alpha chain variable domain of TCR clone 133399 (TRAV21, TRAJ48)
CAVDGNEKLTF

SEQ ID NO: 266798 - protein, 16 aa, Homo sapiens
  CDR3 for beta chain variable domain of TCR clone 133399 (TRBV12-4, TRBJ1-5)
CASSSGPGGSNQPQHF

SEQ ID NO: 266799 - protein, 16 aa, Homo sapiens
  CDR3 for alpha chain variable domain of TCR clone 133400 (TRAV8-4, TRAJ13)
CAVTFLGVTRKLPLEL

SEQ ID NO: 266800 - protein, 14 aa, Homo sapiens
  CDR3 for beta chain variable domain of TCR clone 133400 (TRBV7-2, TRBJ1-2)
CASSQTGSTYGYTF

SEQ ID NO: 266801 - protein, 14 aa, Homo sapiens
  CDR3 for alpha chain variable domain of TCR clone 133401 (TRAV21, TRAJ38)
CAVANAGNNRKLIW

SEQ ID NO: 266802 - protein, 17 aa, Homo sapiens
  CDR3 for beta chain variable domain of TCR clone 133401 (TRBV13, TRBJ2-3)
CASSLSRVAGGRNTQYF

SEQ ID NO: 266803 - protein, 14 aa, Homo sapiens
  CDR3 for alpha chain variable domain of TCR clone 133402 (TRAV1-2, TRAJ8)
CAVREDPGFQKLVF

SEQ ID NO: 266804 - protein, 15 aa, Homo sapiens
  CDR3 for beta chain variable domain of TCR clone 133402 (TRBV10-2, TRBJ2-6)
CASSEQGTGANVLTF

SEQ ID NO: 266805 - protein, 13 aa, Homo sapiens
  CDR3 for alpha chain variable domain of TCR clone 133403 (TRAV23/DV6, TRAJ15)
CAALPAGRNCSDL

SEQ ID NO: 266806 - protein, 14 aa, Homo sapiens
  CDR3 for beta chain variable domain of TCR clone 133403 (TRBV7-9, TRBJ1-2)
CAGSRQGANYGYTF

SEQ ID NO: 266807 - protein, 12 aa, Homo sapiens
  CDR3 for alpha chain variable domain of TCR clone 133404 (TRAV13-1, TRAJ21)
CAAKEGFNKFYF

SEQ ID NO: 266808 - protein, 15 aa, Homo sapiens
  CDR3 for beta chain variable domain of TCR clone 133404 (TRBV27, TRBJ2-1)
CASSNGGGSSNEQFF

SEQ ID NO: 266809 - protein, 14 aa, Homo sapiens
  CDR3 for alpha chain variable domain of TCR clone 133405 (TRAV12-1, TRAJ38)
CGELKAGNNRKLIW

SEQ ID NO: 266810 - protein, 12 aa, Homo sapiens
  CDR3 for beta chain variable domain of TCR clone 133405 (TRBV24-1, TRBJ1-1)
CATLYPYTEAFF

SEQ ID NO: 266811 - protein, 16 aa, Homo sapiens
  CDR3 for alpha chain variable domain of TCR clone 133406 (TRAV3, TRAJ10)
CAVRDMRAGGGNKLTF

SEQ ID NO: 266812 - protein, 15 aa, Homo sapiens
  CDR3 for beta chain variable domain of TCR clone 133406 (TRBV2, TRBJ2-3)
CASSDFEKATDTQYF

SEQ ID NO: 266813 - protein, 14 aa, Homo sapiens
  CDR3 for alpha chain variable domain of TCR clone 133407 (TRAV26-1, TRAJ39)
RIVRGSRAGNMLTF

SEQ ID NO: 266814 - protein, 14 aa, Homo sapiens
  CDR3 for beta chain variable domain of TCR clone 133407 (TRBV25-1, TRBJ1-1)
CASTHLGGNTEAFF

SEQ ID NO: 266815 - protein, 13 aa, Homo sapiens
  CDR3 for alpha chain variable domain of TCR clone 133408 (TRAV21, TRAJ27)
CAARPGNAGKSTF

SEQ ID NO: 266816 - protein, 13 aa, Homo sapiens
  CDR3 for beta chain variable domain of TCR clone 133408 (TRBV7-2, TRBJ1-6)
CASSLKFDSPLHF

SEQ ID NO: 266817 - protein, 12 aa, Homo sapiens
  CDR3 for alpha chain variable domain of TCR clone 133409 (TRAV27, TRAJ36)
ASTPAGANNLFF

SEQ ID NO: 266818 - protein, 13 aa, Homo sapiens
  CDR3 for beta chain variable domain of TCR clone 133409 (TRBV7-9, TRBJ2-3)
CASSPVSTDTQYF

SEQ ID NO: 266819 - protein, 14 aa, Homo sapiens
  CDR3 for alpha chain variable domain of TCR clone 133410 (TRAV12-2, TRAJ40)
CAVKIPSGTYKYIF

SEQ ID NO: 266820 - protein, 17 aa, Homo sapiens
  CDR3 for beta chain variable domain of TCR clone 133410 (TRBV11-2, TRBJ2-1)
CASSLYPSGVEYNEQFF

SEQ ID NO: 266821 - protein, 15 aa, Homo sapiens
  CDR3 for alpha chain variable domain of TCR clone 133411 (TRAV2, TRAJ37)
CAVEDGSSNTGKLIF

SEQ ID NO: 266822 - protein, 14 aa, Homo sapiens
  CDR3 for beta chain variable domain of TCR clone 133411 (TRBV7-2, TRBJ2-1)
CASSLSGVYNEQFF

SEQ ID NO: 266823 - protein, 14 aa, Homo sapiens
  CDR3 for alpha chain variable domain of TCR clone 133412 (TRAV17, TRAJ24)
CATLTTDSWGKFRF

SEQ ID NO: 266824 - protein, 16 aa, Homo sapiens
  CDR3 for beta chain variable domain of TCR clone 133412 (TRBV4-2, TRBJ2-7)
CASSQDGGSLRGEQYF

SEQ ID NO: 266825 - protein, 12 aa, Homo sapiens
  CDR3 for alpha chain variable domain of TCR clone 133413 (TRAV17, TRAJ45)
CAAGGGADGLTF

SEQ ID NO: 266826 - protein, 15 aa, Homo sapiens
  CDR3 for beta chain variable domain of TCR clone 133413 (TRBV20-1, TRBJ2-7)
CSARDRVAGMDEQYF

SEQ ID NO: 266827 - protein, 12 aa, Homo sapiens
  CDR3 for alpha chain variable domain of TCR clone 133414 (TRAV21, TRAJ24)
CAVMDSWGKLQF

SEQ ID NO: 266828 - protein, 16 aa, Homo sapiens
  CDR3 for beta chain variable domain of TCR clone 133414 (TRBV13, TRBJ2-2)
CASGEVFGANTGELFF

SEQ ID NO: 266829 - protein, 14 aa, Homo sapiens
  CDR3 for alpha chain variable domain of TCR clone 133415 (TRAV13-1, TRAJ9)
CAASALSGGFKTIF

SEQ ID NO: 266830 - protein, 13 aa, Homo sapiens
  CDR3 for beta chain variable domain of TCR clone 133415 (TRBV20-1, TRBJ1-1)
CSAGTVGNTEAFF

SEQ ID NO: 266831 - protein, 11 aa, Homo sapiens
  CDR3 for alpha chain variable domain of TCR clone 133416 (TRAV13-1, TRAJ30)
CAASRDDKIIF

SEQ ID NO: 266832 - protein, 15 aa, Homo sapiens
  CDR3 for beta chain variable domain of TCR clone 133416 (TRBV18, TRBJ1-1)
CASSPSSWVNTDAFF

SEQ ID NO: 266833 - protein, 19 aa, Homo sapiens
  CDR3 for alpha chain variable domain of TCR clone 133417 (TRAV2, TRAJ20)
ILQVREADAAVYRDCKLSF

SEQ ID NO: 266834 - protein, 14 aa, Homo sapiens
  CDR3 for beta chain variable domain of TCR clone 133417 (TRBV20-1, TRBJ2-7)
CSAKRGRSSYEQYF

SEQ ID NO: 266835 - protein, 14 aa, Homo sapiens
  CDR3 for alpha chain variable domain of TCR clone 133418 (TRAV12-2, TRAJ17)
YAMLFKAAGNKLTF

SEQ ID NO: 266836 - protein, 17 aa, Homo sapiens
  CDR3 for beta chain variable domain of TCR clone 133418 (TRBV20-1, TRBJ2-2)
CSASGSGQGGLTGEPFF

SEQ ID NO: 266837 - protein, 12 aa, Homo sapiens
  CDR3 for alpha chain variable domain of TCR clone 133419 (TRAV12-3, TRAJ17)
CAMTLTGNKLTF

SEQ ID NO: 266838 - protein, 15 aa, Homo sapiens
  CDR3 for beta chain variable domain of TCR clone 133419 (TRBV13, TRBJ2-5)
CASSRGDRDQETQYF

SEQ ID NO: 266839 - protein, 13 aa, Homo sapiens
  CDR3 for alpha chain variable domain of TCR clone 133420 (TRAV8-3, TRAJ40)
CAVGAQYLRNLQI

SEQ ID NO: 266840 - protein, 14 aa, Homo sapiens
  CDR3 for beta chain variable domain of TCR clone 133420 (TRBV25-1, TRBJ1-1)
CASTHLGGNTEAFF

SEQ ID NO: 266841 - protein, 13 aa, Homo sapiens
  CDR3 for alpha chain variable domain of TCR clone 133421 (TRAV8-3, TRAJ28)
CAVGAVGSYQLTL

SEQ ID NO: 266842 - protein, 17 aa, Homo sapiens
  CDR3 for beta chain variable domain of TCR clone 133421 (TRBV11-2, TRBJ2-1)
CASSLYPPGVEYNEQFF

SEQ ID NO: 266843 - protein, 13 aa, Homo sapiens
  CDR3 for alpha chain variable domain of TCR clone 133422 (TRAV6, TRAJ4)
CALLRGGYNKLIF

SEQ ID NO: 266844 - protein, 16 aa, Homo sapiens
  CDR3 for beta chain variable domain of TCR clone 133422 (TRBV5-1, TRBJ2-1)
CASSSRSGGSYNEQFF

SEQ ID NO: 266845 - protein, 13 aa, Homo sapiens
  CDR3 for alpha chain variable domain of TCR clone 133423 (TRAV20, TRAJ7)
CAVLQGGNNRLAF

SEQ ID NO: 266846 - protein, 17 aa, Homo sapiens
  CDR3 for beta chain variable domain of TCR clone 133423 (TRBV11-2, TRBJ2-1)
CASSLYPPGVEYNEQFF

SEQ ID NO: 266847 - protein, 14 aa, Homo sapiens
  CDR3 for alpha chain variable domain of TCR clone 133424 (TRAV21, TRAJ45)
CAVVSGGGADGLTF

SEQ ID NO: 266848 - protein, 14 aa, Homo sapiens
  CDR3 for beta chain variable domain of TCR clone 133424 (TRBV20-1, TRBJ2-3)
SSALGLEGADTQYF

SEQ ID NO: 266849 - protein, 18 aa, Homo sapiens
  CDR3 for alpha chain variable domain of TCR clone 133425 (TRAV21, TRAJ52)
CAVRPSPAGGTSYGKLTF

SEQ ID NO: 266850 - protein, 22 aa, Homo sapiens
  CDR3 for beta chain variable domain of TCR clone 133425 (TRBV29-1, TRBJ2-5)
TVSNMSPEDSSIYLCSAGTQYF

SEQ ID NO: 266851 - protein, 13 aa, Homo sapiens
  CDR3 for alpha chain variable domain of TCR clone 133426 (TRAV12-1, TRAJ11)
CVGNRAGYSTLTF

SEQ ID NO: 266852 - protein, 15 aa, Homo sapiens
  CDR3 for beta chain variable domain of TCR clone 133426 (TRBV7-3, TRBJ2-2)
CASSETGQGTGELFF

SEQ ID NO: 266853 - protein, 15 aa, Homo sapiens
  CDR3 for alpha chain variable domain of TCR clone 133427 (TRAV8-4, TRAJ48)
CAVSAAYFGTEKLTF

SEQ ID NO: 266854 - protein, 12 aa, Homo sapiens
  CDR3 for beta chain variable domain of TCR clone 133427 (TRBV3-1, TRBJ2-5)
CASSQRGETQYF

SEQ ID NO: 266855 - protein, 14 aa, Homo sapiens
  CDR3 for alpha chain variable domain of TCR clone 133428 (TRAV1-2, TRAJ16)
CAVNRFSDGQKLLF

SEQ ID NO: 266856 - protein, 18 aa, Homo sapiens
  CDR3 for beta chain variable domain of TCR clone 133428 (TRBV7-2, TRBJ2-3)
CASSLKREGSGITDTQYF

SEQ ID NO: 266857 - protein, 12 aa, Homo sapiens
  CDR3 for alpha chain variable domain of TCR clone 133429 (TRAV3, TRAJ20)
CAVRDGDYTLSF

SEQ ID NO: 266858 - protein, 13 aa, Homo sapiens
  CDR3 for beta chain variable domain of TCR clone 133429 (TRBV9, TRBJ2-1)
CASSVGQGGEQFF

SEQ ID NO: 266859 - protein, 15 aa, Homo sapiens
  CDR3 for alpha chain variable domain of TCR clone 133430 (TRAV8-3, TRAJ45)
CAVEGSGGGAEGLTF

SEQ ID NO: 266860 - protein, 16 aa, Homo sapiens
  CDR3 for beta chain variable domain of TCR clone 133430 (TRBV6-5, TRBJ2-6)
CASSYPLSSGANVLTF

SEQ ID NO: 266861 - protein, 15 aa, Homo sapiens
  CDR3 for alpha chain variable domain of TCR clone 133431 (TRAV26-1, TRAJ29)
CIVRVEGSGNTPLVF

SEQ ID NO: 266862 - protein, 13 aa, Homo sapiens
  CDR3 for beta chain variable domain of TCR clone 133431 (TRBV19, TRBJ2-3)
CATWDKITDTQYF

SEQ ID NO: 266863 - protein, 17 aa, Homo sapiens
  CDR3 for alpha chain variable domain of TCR clone 133432 (TRAV26-1, TRAJ53)
CIVRVDDIGGSNYKLTF

SEQ ID NO: 266864 - protein, 15 aa, Homo sapiens
  CDR3 for beta chain variable domain of TCR clone 133432 (TRBV20-1, TRBJ2-7)
CSARVPAAYFYEQYF

SEQ ID NO: 266865 - protein, 13 aa, Homo sapiens
  CDR3 for alpha chain variable domain of TCR clone 133433 (TRAV12-1, TRAJ6)
CVVFPGGSYIPTF

SEQ ID NO: 266866 - protein, 17 aa, Homo sapiens
  CDR3 for beta chain variable domain of TCR clone 133433 (TRBV28, TRBJ2-5)
CASSTPEGDALQETQYF

SEQ ID NO: 266867 - protein, 16 aa, Homo sapiens
  CDR3 for alpha chain variable domain of TCR clone 133434 (TRAV26-2, TRAJ57)
CILRDVGSGGSEKLAF

SEQ ID NO: 266868 - protein, 13 aa, Homo sapiens
  CDR3 for beta chain variable domain of TCR clone 133434 (TRBV18, TRBJ2-3)
CASSPGVTDTQYF

SEQ ID NO: 266869 - protein, 16 aa, Homo sapiens
  CDR3 for alpha chain variable domain of TCR clone 133435 (TRAV4, TRAJ22)
CLVGDLYSGSARQLTF

SEQ ID NO: 266870 - protein, 16 aa, Homo sapiens
  CDR3 for beta chain variable domain of TCR clone 133435 (TRBV7-9, TRBJ2-1)
CARSDVAGGSYNEQFF

SEQ ID NO: 266871 - protein, 17 aa, Homo sapiens
  CDR3 for alpha chain variable domain of TCR clone 133436 (TRAV21, TRAJ52)
CAVGVNAGGTSYGMLTF

SEQ ID NO: 266872 - protein, 16 aa, Homo sapiens
  CDR3 for beta chain variable domain of TCR clone 133436 (TRBV19, TRBJ2-1)
CAGSKAGPSSYNEQFF

SEQ ID NO: 266873 - protein, 14 aa, Homo sapiens
  CDR3 for alpha chain variable domain of TCR clone 133437 (TRAV26-1, TRAJ38)
CIVVGAGNNRKLIL

SEQ ID NO: 266874 - protein, 12 aa, Homo sapiens
  CDR3 for beta chain variable domain of TCR clone 133437 (TRBV5-1, TRBJ2-5)
CASSWDQETQYF

SEQ ID NO: 266875 - protein, 16 aa, Homo sapiens
  CDR3 for alpha chain variable domain of TCR clone 133438 (TRAV12-2, TRAJ10)
CAVNRVLTGGGNKLTF

SEQ ID NO: 266876 - protein, 14 aa, Homo sapiens
  CDR3 for beta chain variable domain of TCR clone 133438 (TRBV6-1, TRBJ1-3)
CASVQGGGGNTIYF

SEQ ID NO: 266877 - protein, 14 aa, Homo sapiens
  CDR3 for alpha chain variable domain of TCR clone 133439 (TRAV2, TRAJ9)
CAVEDRSGGFKTIF

SEQ ID NO: 266878 - protein, 14 aa, Homo sapiens
  CDR3 for beta chain variable domain of TCR clone 133439 (TRBV20-1, TRBJ1-3)
CSASPTGAGNTIYF

SEQ ID NO: 266879 - protein, 16 aa, Homo sapiens
  CDR3 for alpha chain variable domain of TCR clone 133440 (TRAV23/DV6, TRAJ9)
CAASIGGNTGGFKTIF

SEQ ID NO: 266880 - protein, 15 aa, Homo sapiens
  CDR3 for beta chain variable domain of TCR clone 133440 (TRBV4-2, TRBJ2-1)
CASSREAGGYNEQFF

SEQ ID NO: 266881 - protein, 15 aa, Homo sapiens
  CDR3 for alpha chain variable domain of TCR clone 133441 (TRAV3, TRAJ22)
CAVRDRGGSARQLTF

SEQ ID NO: 266882 - protein, 11 aa, Homo sapiens
  CDR3 for beta chain variable domain of TCR clone 133441 (TRBV7-9, TRBJ2-3)
CASSGPDTQYF

SEQ ID NO: 266883 - protein, 14 aa, Homo sapiens
  CDR3 for alpha chain variable domain of TCR clone 133442 (TRAV4, TRAJ10)
CLVGDTGGGNKPTF

SEQ ID NO: 266884 - protein, 13 aa, Homo sapiens
  CDR3 for beta chain variable domain of TCR clone 133442 (TRBV10-2, TRBJ2-5)
CASSVGPQETQYF

SEQ ID NO: 266885 - protein, 16 aa, Homo sapiens
  CDR3 for alpha chain variable domain of TCR clone 133443 (TRAV12-1, TRAJ53)
CVVTSVAGGSNYKLTF

SEQ ID NO: 266886 - protein, 16 aa, Homo sapiens
  CDR3 for beta chain variable domain of TCR clone 133443 (TRBV6-6, TRBJ2-3)
CASSYSHAGATDTQYF

SEQ ID NO: 266887 - protein, 12 aa, Homo sapiens
  CDR3 for alpha chain variable domain of TCR clone 133444 (TRAV13-1, TRAJ42)
SVLRGSQGNLIF

SEQ ID NO: 266888 - protein, 14 aa, Homo sapiens
  CDR3 for beta chain variable domain of TCR clone 133444 (TRBV12-5, TRBJ2-5)
CASGSRTHQETQYF

SEQ ID NO: 266889 - protein, 12 aa, Homo sapiens
  CDR3 for alpha chain variable domain of TCR clone 133445 (TRAV13-1, TRAJ40)
CAAGKGTYKYIF

SEQ ID NO: 266890 - protein, 16 aa, Homo sapiens
  CDR3 for beta chain variable domain of TCR clone 133445 (TRBV4-3, TRBJ2-2)
CASSHLQGSGTGELFF

SEQ ID NO: 266891 - protein, 13 aa, Homo sapiens
  CDR3 for alpha chain variable domain of TCR clone 133446 (TRAV2, TRAJ40)
CAVVTSGTYKYIF

SEQ ID NO: 266892 - protein, 13 aa, Homo sapiens
  CDR3 for beta chain variable domain of TCR clone 133446 (TRBV7-2, TRBJ1-5)
CASTPTVNQPQHF

SEQ ID NO: 266893 - protein, 13 aa, Homo sapiens
  CDR3 for alpha chain variable domain of TCR clone 133447 (TRAV23/DV6, TRAJ33)
CAASADSNYQLIW

SEQ ID NO: 266894 - protein, 20 aa, Homo sapiens
  CDR3 for beta chain variable domain of TCR clone 133447 (TRBV7-8, TRBJ2-2)
CASSHLFPGPTIHITGELFF

SEQ ID NO: 266895 - protein, 16 aa, Homo sapiens
  CDR3 for alpha chain variable domain of TCR clone 133448 (TRAV12-2, TRAJ6)
YAAPLAGSGGSYIPTF

SEQ ID NO: 266896 - protein, 10 aa, Homo sapiens
  CDR3 for beta chain variable domain of TCR clone 133448 (TRBV28, TRBJ1-2)
CASSSDRAVF

SEQ ID NO: 266897 - protein, 13 aa, Homo sapiens
  CDR3 for alpha chain variable domain of TCR clone 133449 (TRAV23/DV6, TRAJ21)
CAASIGNFNKFYF

SEQ ID NO: 266898 - protein, 13 aa, Homo sapiens
  CDR3 for beta chain variable domain of TCR clone 133449 (TRBV12-4, TRBJ2-7)
CASSLSGVYEQYF

SEQ ID NO: 266899 - protein, 14 aa, Homo sapiens
  CDR3 for alpha chain variable domain of TCR clone 133450 (TRAV26-1, TRAJ45)
CIEVTGGGADGLTF

SEQ ID NO: 266900 - protein, 14 aa, Homo sapiens
  CDR3 for beta chain variable domain of TCR clone 133450 (TRBV5-1, TRBJ2-7)
CASSRGESLYEQYF

SEQ ID NO: 266901 - protein, 13 aa, Homo sapiens
  CDR3 for alpha chain variable domain of TCR clone 133451 (TRAV21, TRAJ20)
CAVGLRVDYKLSF

SEQ ID NO: 266902 - protein, 14 aa, Homo sapiens
  CDR3 for beta chain variable domain of TCR clone 133451 (TRBV7-2, TRBJ2-7)
CASSLPPGQGPQYF

SEQ ID NO: 266903 - protein, 12 aa, Homo sapiens
  CDR3 for alpha chain variable domain of TCR clone 133452 (TRAV16, TRAJ10)
CSRSGGGNKLTF

SEQ ID NO: 266904 - protein, 15 aa, Homo sapiens
  CDR3 for beta chain variable domain of TCR clone 133452 (TRBV6-3, TRBJ2-7)
CASSSPGTVFYEQYF

SEQ ID NO: 266905 - protein, 13 aa, Homo sapiens
  CDR3 for alpha chain variable domain of TCR clone 133453 (TRAV29/DV5, TRAJ44)
CSASTGTASKLTF

SEQ ID NO: 266906 - protein, 13 aa, Homo sapiens
  CDR3 for beta chain variable domain of TCR clone 133453 (TRBV19, TRBJ2-7)
CASRKAGGSEQYF

SEQ ID NO: 266907 - protein, 15 aa, Homo sapiens
  CDR3 for alpha chain variable domain of TCR clone 133454 (TRAV38-1, TRAJ37)
CAFIHGSGNTGKLIF

SEQ ID NO: 266908 - protein, 14 aa, Homo sapiens
  CDR3 for beta chain variable domain of TCR clone 133454 (TRBV7-6, TRBJ2-3)
CASSLGTVTDTQYF

SEQ ID NO: 266909 - protein, 14 aa, Homo sapiens
  CDR3 for alpha chain variable domain of TCR clone 133455 (TRAV8-4, TRAJ17)
CAVSDQAPGNKLTF

SEQ ID NO: 266910 - protein, 15 aa, Homo sapiens
  CDR3 for beta chain variable domain of TCR clone 133455 (TRBV7-2, TRBJ1-2)
CASSLAPDRGLGYTF

SEQ ID NO: 266911 - protein, 15 aa, Homo sapiens
  CDR3 for alpha chain variable domain of TCR clone 133456 (TRAV23/DV6, TRAJ18)
CAASFRGSTLGRLYF

SEQ ID NO: 266912 - protein, 15 aa, Homo sapiens
  CDR3 for beta chain variable domain of TCR clone 133456 (TRBV5-1, TRBJ2-1)
CASSPPRAPYNEQFF

SEQ ID NO: 266913 - protein, 14 aa, Homo sapiens
  CDR3 for alpha chain variable domain of TCR clone 133457 (TRAV3, TRAJ40)
CAVRDRRGTYKYIF

SEQ ID NO: 266914 - protein, 15 aa, Homo sapiens
  CDR3 for beta chain variable domain of TCR clone 133457 (TRBV28, TRBJ2-1)
CASIIIAGGRSEQFF

SEQ ID NO: 266915 - protein, 15 aa, Homo sapiens
  CDR3 for alpha chain variable domain of TCR clone 133458 (TRAV8-3, TRAJ45)
CASSYSGGGADGLTF

SEQ ID NO: 266916 - protein, 17 aa, Homo sapiens
  CDR3 for beta chain variable domain of TCR clone 133458 (TRBV7-8, TRBJ1-2)
CASSLRPLQRHLYGYTF

SEQ ID NO: 266917 - protein, 18 aa, Homo sapiens
  CDR3 for alpha chain variable domain of TCR clone 133459 (TRAV26-2, TRAJ54)
CILRDVEVGIQGAQKLVF

SEQ ID NO: 266918 - protein, 17 aa, Homo sapiens
  CDR3 for beta chain variable domain of TCR clone 133459 (TRBV7-3, TRBJ2-3)
CASSLMKRMRGADTQYF

SEQ ID NO: 266919 - protein, 16 aa, Homo sapiens
  CDR3 for alpha chain variable domain of TCR clone 133460 (TRAV16, TRAJ52)
CGLSGVGGTSYGKLTF

SEQ ID NO: 266920 - protein, 14 aa, Homo sapiens
  CDR3 for beta chain variable domain of TCR clone 133460 (TRBV19, TRBJ1-2)
CASSLQGQAYGYTF

SEQ ID NO: 266921 - protein, 12 aa, Homo sapiens
  CDR3 for alpha chain variable domain of TCR clone 133461 (TRAV1-1, TRAJ20)
CAVREDDYKLSF

SEQ ID NO: 266922 - protein, 13 aa, Homo sapiens
  CDR3 for beta chain variable domain of TCR clone 133461 (TRBV10-3, TRBJ2-7)
CASKLAVNYEQYF

SEQ ID NO: 266923 - protein, 15 aa, Homo sapiens
  CDR3 for alpha chain variable domain of TCR clone 133462 (TRAV12-3, TRAJ6)
CAISAASGGSYIPTF

SEQ ID NO: 266924 - protein, 13 aa, Homo sapiens
  CDR3 for beta chain variable domain of TCR clone 133462 (TRBV20-1, TRBJ1-2)
CSASTERIYGYTF

SEQ ID NO: 266925 - protein, 11 aa, Homo sapiens
  CDR3 for alpha chain variable domain of TCR clone 133463 (TRAV13-1, TRAJ39)
CASHAGNMLTF

SEQ ID NO: 266926 - protein, 17 aa, Homo sapiens
  CDR3 for beta chain variable domain of TCR clone 133463 (TRBV5-1, TRBJ1-6)
CASSFGEVSSYNSPLHF

SEQ ID NO: 266927 - protein, 23 aa, Homo sapiens
  CDR3 for alpha chain variable domain of TCR clone 133464 (TRAV26-1, TRAJ38)
CIADNAGNNHIQNPDPAVYQLTD

SEQ ID NO: 266928 - protein, 17 aa, Homo sapiens
  CDR3 for beta chain variable domain of TCR clone 133464 (TRBV11-2, TRBJ2-6)
CASSQRDIFSGANVLTF

SEQ ID NO: 266929 - protein, 17 aa, Homo sapiens
  CDR3 for alpha chain variable domain of TCR clone 133465 (TRAV26-1, TRAJ28)
CIVRARCSGAGSYQLTF

SEQ ID NO: 266930 - protein, 10 aa, Homo sapiens
  CDR3 for beta chain variable domain of TCR clone 133465 (TRBV12-4, TRBJ2-7)
CASLTFEQYF

SEQ ID NO: 266931 - protein, 17 aa, Homo sapiens
  CDR3 for alpha chain variable domain of TCR clone 133466 (TRAV12-2, TRAJ22)
CAVNRIPFSGSARQLTF

SEQ ID NO: 266932 - protein, 13 aa, Homo sapiens
  CDR3 for beta chain variable domain of TCR clone 133466 (TRBV10-3, TRBJ2-7)
CASKLAVNYEQYF

SEQ ID NO: 266933 - protein, 13 aa, Homo sapiens
  CDR3 for alpha chain variable domain of TCR clone 133467 (TRAV39, TRAJ58)
CAGEETSGSRLTF

SEQ ID NO: 266934 - protein, 14 aa, Homo sapiens
  CDR3 for beta chain variable domain of TCR clone 133467 (TRBV12-5, TRBJ2-5)
CASGSRTHQETQHF

SEQ ID NO: 266935 - protein, 11 aa, Homo sapiens
  CDR3 for alpha chain variable domain of TCR clone 133468 (TRAV12-1, TRAJ34)
CVVYKGRELIF

SEQ ID NO: 266936 - protein, 12 aa, Homo sapiens
  CDR3 for beta chain variable domain of TCR clone 133468 (TRBV2, TRBJ2-1)
CAYGPPGNEQFF

SEQ ID NO: 266937 - protein, 12 aa, Homo sapiens
  CDR3 for alpha chain variable domain of TCR clone 133469 (TRAV29/DV5, TRAJ49)
CAATDTGNQFYF

SEQ ID NO: 266938 - protein, 14 aa, Homo sapiens
  CDR3 for beta chain variable domain of TCR clone 133469 (TRBV12-5, TRBJ2-5)
CASGSRTHQETQYF

SEQ ID NO: 266939 - protein, 14 aa, Homo sapiens
  CDR3 for alpha chain variable domain of TCR clone 133470 (TRAV12-1, TRAJ17)
CVVNYKAAGNKLTF

SEQ ID NO: 266940 - protein, 14 aa, Homo sapiens
  CDR3 for beta chain variable domain of TCR clone 133470 (TRBV20-1, TRBJ2-3)
CSARGGTSTDTQYF

SEQ ID NO: 266941 - protein, 15 aa, Homo sapiens
  CDR3 for alpha chain variable domain of TCR clone 133471 (TRAV16, TRAJ16)
CALQGGGSDGQKLLF

SEQ ID NO: 266942 - protein, 12 aa, Homo sapiens
  CDR3 for beta chain variable domain of TCR clone 133471 (TRBV11-2, TRBJ2-2)
CASSLGGGELFF

SEQ ID NO: 266943 - protein, 14 aa, Homo sapiens
  CDR3 for alpha chain variable domain of TCR clone 133472 (TRAV8-2, TRAJ4)
CVVSPSGGYNKLIL

SEQ ID NO: 266944 - protein, 15 aa, Homo sapiens
  CDR3 for beta chain variable domain of TCR clone 133472 (TRBV2, TRBJ2-1)
CASSELAGSYNEQFF

SEQ ID NO: 266945 - protein, 12 aa, Homo sapiens
  CDR3 for alpha chain variable domain of TCR clone 133473 (TRAV12-3, TRAJ17)
CAMTLTGNKLTF

SEQ ID NO: 266946 - protein, 13 aa, Homo sapiens
  CDR3 for beta chain variable domain of TCR clone 133473 (TRBV9, TRBJ2-2)
CASSPRPAGELFL

SEQ ID NO: 266947 - protein, 14 aa, Homo sapiens
  CDR3 for alpha chain variable domain of TCR clone 133474 (TRAV1-2, TRAJ16)
CAVNRFSDGQKLPF

SEQ ID NO: 266948 - protein, 11 aa, Homo sapiens
  CDR3 for beta chain variable domain of TCR clone 133474 (TRBV6-3, TRBJ2-3)
CATGQADTQYF

SEQ ID NO: 266949 - protein, 10 aa, Homo sapiens
  CDR3 for alpha chain variable domain of TCR clone 133475 (TRAV8-3, TRAJ43)
CAVALADMRF

SEQ ID NO: 266950 - protein, 16 aa, Homo sapiens
  CDR3 for beta chain variable domain of TCR clone 133475 (TRBV19, TRBJ2-2)
CASRSPGTGATGELFF

SEQ ID NO: 266951 - protein, 13 aa, Homo sapiens
  CDR3 for alpha chain variable domain of TCR clone 133476 (TRAV27, TRAJ58)
CAGFETSGSRLTF

SEQ ID NO: 266952 - protein, 13 aa, Homo sapiens
  CDR3 for beta chain variable domain of TCR clone 133476 (TRBV7-3, TRBJ1-1)
CASSQDWGAEAFF

SEQ ID NO: 266953 - protein, 14 aa, Homo sapiens
  CDR3 for alpha chain variable domain of TCR clone 133477 (TRAV12-1, TRAJ54)
CVVNIYQGAQKLVF

SEQ ID NO: 266954 - protein, 13 aa, Homo sapiens
  CDR3 for beta chain variable domain of TCR clone 133477 (TRBV12-5, TRBJ2-3)
CASGDRQSDTQYF

SEQ ID NO: 266955 - protein, 14 aa, Homo sapiens
  CDR3 for alpha chain variable domain of TCR clone 133478 (TRAV1-2, TRAJ16)
CAVDRFSDGQKLLF

SEQ ID NO: 266956 - protein, 15 aa, Homo sapiens
  CDR3 for beta chain variable domain of TCR clone 133478 (TRBV19, TRBJ1-5)
CASSIVWADNQPQHF

SEQ ID NO: 266957 - protein, 11 aa, Homo sapiens
  CDR3 for alpha chain variable domain of TCR clone 133479 (TRAV21, TRAJ48)
CAVDGNEKLTF

SEQ ID NO: 266958 - protein, 16 aa, Homo sapiens
  CDR3 for beta chain variable domain of TCR clone 133479 (TRBV12-4, TRBJ1-5)
CASSSGPRGSNKPQHF

SEQ ID NO: 266959 - protein, 19 aa, Homo sapiens
  CDR3 for alpha chain variable domain of TCR clone 133480 (TRAV3, TRAJ6)
CAVRDRNPSRTGGSYIPTF

SEQ ID NO: 266960 - protein, 15 aa, Homo sapiens
  CDR3 for beta chain variable domain of TCR clone 133480 (TRBV18, TRBJ2-7)
CASSPTFMDSYEQYF

SEQ ID NO: 266961 - protein, 12 aa, Homo sapiens
  CDR3 for alpha chain variable domain of TCR clone 133481 (TRAV16, TRAJ13)
CITLRGYQKVNF

SEQ ID NO: 266962 - protein, 17 aa, Homo sapiens
  CDR3 for beta chain variable domain of TCR clone 133481 (TRBV28, TRBJ2-5)
CASSRQGGLAGAETQYF

SEQ ID NO: 266963 - protein, 11 aa, Homo sapiens
  CDR3 for alpha chain variable domain of TCR clone 133482 (TRAV1-2, TRAJ34)
CAGYNTDKLII

SEQ ID NO: 266964 - protein, 16 aa, Homo sapiens
  CDR3 for beta chain variable domain of TCR clone 133482 (TRBV10-3, TRBJ2-1)
CAISGVGDGGGGEQFF

SEQ ID NO: 266965 - protein, 13 aa, Homo sapiens
  CDR3 for alpha chain variable domain of TCR clone 133483 (TRAV8-6, TRAJ9)
CAVWDTGGFKTIF

SEQ ID NO: 266966 - protein, 14 aa, Homo sapiens
  CDR3 for beta chain variable domain of TCR clone 133483 (TRBV2, TRBJ2-1)
CASSEALIYSEQFF

SEQ ID NO: 266967 - protein, 17 aa, Homo sapiens
  CDR3 for alpha chain variable domain of TCR clone 133484 (TRAV26-1, TRAJ53)
CIVRVDDSGGSNYKLTF

SEQ ID NO: 266968 - protein, 15 aa, Homo sapiens
  CDR3 for beta chain variable domain of TCR clone 133484 (TRBV20-1, TRBJ2-7)
CSARVPAANFYEQYF

SEQ ID NO: 266969 - protein, 16 aa, Homo sapiens
  CDR3 for alpha chain variable domain of TCR clone 133485 (TRAV3, TRAJ37)
CAVRGKGSGNTGKLIF

SEQ ID NO: 266970 - protein, 15 aa, Homo sapiens
  CDR3 for beta chain variable domain of TCR clone 133485 (TRBV2, TRBJ2-1)
CASSEEREGDNEQFF

SEQ ID NO: 266971 - protein, 11 aa, Homo sapiens
  CDR3 for alpha chain variable domain of TCR clone 133486 (TRAV12-2, TRAJ33)
CAVGSNSQLIW

SEQ ID NO: 266972 - protein, 14 aa, Homo sapiens
  CDR3 for beta chain variable domain of TCR clone 133486 (TRBV6-1, TRBJ2-2)
CASVEHIESGELFF

SEQ ID NO: 266973 - protein, 12 aa, Homo sapiens
  CDR3 for alpha chain variable domain of TCR clone 133487 (TRAV12-1, TRAJ6)
CVVSERSYIPTF

SEQ ID NO: 266974 - protein, 15 aa, Homo sapiens
  CDR3 for beta chain variable domain of TCR clone 133487 (TRBV7-2, TRBJ2-1)
CASSLASGRVNEQFF

SEQ ID NO: 266975 - protein, 16 aa, Homo sapiens
  CDR3 for alpha chain variable domain of TCR clone 133488 (TRAV17, TRAJ35)
CATAEGGIGFGNVLHC

SEQ ID NO: 266976 - protein, 13 aa, Homo sapiens
  CDR3 for beta chain variable domain of TCR clone 133488 (TRBV4-2, TRBJ1-1)
CASSQAGNTEAFF

SEQ ID NO: 266977 - protein, 12 aa, Homo sapiens
  CDR3 for alpha chain variable domain of TCR clone 133489 (TRAV12-3, TRAJ17)
CAMTLTGNNLTF

SEQ ID NO: 266978 - protein, 15 aa, Homo sapiens
  CDR3 for beta chain variable domain of TCR clone 133489 (TRBV6-6, TRBJ2-5)
CASSPGGGLEETQYF

SEQ ID NO: 266979 - protein, 14 aa, Homo sapiens
  CDR3 for alpha chain variable domain of TCR clone 133490 (TRAV12-2, TRAJ45)
CAVNIGGGADGLTS

SEQ ID NO: 266980 - protein, 17 aa, Homo sapiens
  CDR3 for beta chain variable domain of TCR clone 133490 (TRBV7-8, TRBJ2-6)
CASSAGTGGAGANVLTF

SEQ ID NO: 266981 - protein, 12 aa, Homo sapiens
  CDR3 for alpha chain variable domain of TCR clone 133491 (TRAV8-3, TRAJ26)
CAGDNYGQNFVF

SEQ ID NO: 266982 - protein, 13 aa, Homo sapiens
  CDR3 for beta chain variable domain of TCR clone 133491 (TRBV20-1, TRBJ2-5)
SAVLEGTIETQYF

SEQ ID NO: 266983 - protein, 12 aa, Homo sapiens
  CDR3 for alpha chain variable domain of TCR clone 133492 (TRAV21, TRAJ13)
PGPSGGYQKVTF

SEQ ID NO: 266984 - protein, 13 aa, Homo sapiens
  CDR3 for beta chain variable domain of TCR clone 133492 (TRBV7-9, TRBJ1-2)
CASSLKQNCGYTF

SEQ ID NO: 266985 - protein, 15 aa, Homo sapiens
  CDR3 for alpha chain variable domain of TCR clone 133493 (TRAV26-1, TRAJ22)
CIVRVSFWFCKATDL

SEQ ID NO: 266986 - protein, 14 aa, Homo sapiens
  CDR3 for beta chain variable domain of TCR clone 133493 (TRBV7-9, TRBJ2-3)
CASSLEDGTDTQYF

SEQ ID NO: 266987 - protein, 16 aa, Homo sapiens
  CDR3 for alpha chain variable domain of TCR clone 133494 (TRAV16, TRAJ57)
CAPYLITQGGSEKLVF

SEQ ID NO: 266988 - protein, 17 aa, Homo sapiens
  CDR3 for beta chain variable domain of TCR clone 133494 (TRBV24-1, TRBJ2-4)
CATSGAEARGVRNIQYF

SEQ ID NO: 266989 - protein, 14 aa, Homo sapiens
  CDR3 for alpha chain variable domain of TCR clone 133495 (TRAV17, TRAJ54)
CATDANQGAQKMVF

SEQ ID NO: 266990 - protein, 12 aa, Homo sapiens
  CDR3 for beta chain variable domain of TCR clone 133495 (TRBV6-3, TRBJ2-1)
CASSGSYNEQFF

SEQ ID NO: 266991 - protein, 12 aa, Homo sapiens
  CDR3 for alpha chain variable domain of TCR clone 133496 (TRAV12-1, TRAJ40)
CVFYSGTYKYIF

SEQ ID NO: 266992 - protein, 15 aa, Homo sapiens
  CDR3 for beta chain variable domain of TCR clone 133496 (TRBV7-2, TRBJ2-1)
CASTHGTGIYNEQFF

SEQ ID NO: 266993 - protein, 13 aa, Homo sapiens
  CDR3 for alpha chain variable domain of TCR clone 133497 (TRAV21, TRAJ27)
CAARPGNAGKSTF

SEQ ID NO: 266994 - protein, 14 aa, Homo sapiens
  CDR3 for beta chain variable domain of TCR clone 133497 (TRBV7-6, TRBJ2-3)
CASSLGTVTDTQYI

SEQ ID NO: 266995 - protein, 15 aa, Homo sapiens
  CDR3 for alpha chain variable domain of TCR clone 133498 (TRAV26-1, TRAJ12)
IASAELMDSSYKLIF

SEQ ID NO: 266996 - protein, 11 aa, Homo sapiens
  CDR3 for beta chain variable domain of TCR clone 133498 (TRBV7-9, TRBJ2-3)
CASSPPDTQYF

SEQ ID NO: 266997 - protein, 14 aa, Homo sapiens
  CDR3 for alpha chain variable domain of TCR clone 133499 (TRAV26-1, TRAJ45)
CIVRVVGGADGLTF

SEQ ID NO: 266998 - protein, 16 aa, Homo sapiens
  CDR3 for beta chain variable domain of TCR clone 133499 (TRBV7-9, TRBJ1-1)
CASSLTQARSNTEAFF

SEQ ID NO: 266999 - protein, 13 aa, Homo sapiens
  CDR3 for alpha chain variable domain of TCR clone 133500 (TRAV3, TRAJ21)
CAVREPDFNKFHF

SEQ ID NO: 267000 - protein, 18 aa, Homo sapiens
  CDR3 for beta chain variable domain of TCR clone 133500 (TRBV11-2, TRBJ2-3)
CASSLGGASRGAPNTQYF

SEQ ID NO: 267001 - protein, 15 aa, Homo sapiens
  CDR3 for alpha chain variable domain of TCR clone 133501 (TRAV14/DV4, TRAJ46)
CAMREKKSSGAKLTF

SEQ ID NO: 267002 - protein, 13 aa, Homo sapiens
  CDR3 for beta chain variable domain of TCR clone 133501 (TRBV20-1, TRBJ2-5)
CSAREAFQETQYF

SEQ ID NO: 267003 - protein, 15 aa, Homo sapiens
  CDR3 for alpha chain variable domain of TCR clone 133502 (TRAV3, TRAJ22)
CAVRDRGGSARQLTF

SEQ ID NO: 267004 - protein, 18 aa, Homo sapiens
  CDR3 for beta chain variable domain of TCR clone 133502 (TRBV11-2, TRBJ1-6)
CASSLVFATGGSVHPSTL

SEQ ID NO: 267005 - protein, 14 aa, Homo sapiens
  CDR3 for alpha chain variable domain of TCR clone 133503 (TRAV6, TRAJ6)
CALDRAGGSYIPTF

SEQ ID NO: 267006 - protein, 14 aa, Homo sapiens
  CDR3 for beta chain variable domain of TCR clone 133503 (TRBV7-3, TRBJ1-1)
CASSLKGGNTEAFF

SEQ ID NO: 267007 - protein, 15 aa, Homo sapiens
  CDR3 for alpha chain variable domain of TCR clone 133504 (TRAV3, TRAJ5)
CAVRDLDTGRRALTF

SEQ ID NO: 267008 - protein, 14 aa, Homo sapiens
  CDR3 for beta chain variable domain of TCR clone 133504 (TRBV11-2, TRBJ2-5)
CASSRTGGIETQYF

SEQ ID NO: 267009 - protein, 16 aa, Homo sapiens
  CDR3 for alpha chain variable domain of TCR clone 133505 (TRAV12-1, TRAJ53)
CVVTSVAGGSNYKLTF

SEQ ID NO: 267010 - protein, 14 aa, Homo sapiens
  CDR3 for beta chain variable domain of TCR clone 133505 (TRBV7-2, TRBJ2-7)
CASSLYPGRYEQYF

SEQ ID NO: 267011 - protein, 15 aa, Homo sapiens
  CDR3 for alpha chain variable domain of TCR clone 133506 (TRAV17, TRAJ10)
CATVLLTGGGNKLTF

SEQ ID NO: 267012 - protein, 15 aa, Homo sapiens
  CDR3 for beta chain variable domain of TCR clone 133506 (TRBV7-9, TRBJ1-4)
CASSARTGGNEKLFF

SEQ ID NO: 267013 - protein, 14 aa, Homo sapiens
  CDR3 for alpha chain variable domain of TCR clone 133507 (TRAV12-3, TRAJ10)
GHLPLTGGGNKLTF

SEQ ID NO: 267014 - protein, 14 aa, Homo sapiens
  CDR3 for beta chain variable domain of TCR clone 133507 (TRBV7-6, TRBJ2-3)
CASSLGTVTDTQYF

SEQ ID NO: 267015 - protein, 16 aa, Homo sapiens
  CDR3 for alpha chain variable domain of TCR clone 133508 (TRAV3, TRAJ13)
CAVRDPNSGGYLKVTF

SEQ ID NO: 267016 - protein, 14 aa, Homo sapiens
  CDR3 for beta chain variable domain of TCR clone 133508 (TRBV7-2, TRBJ2-7)
CASSPKTSFYEQYF

SEQ ID NO: 267017 - protein, 15 aa, Homo sapiens
  CDR3 for alpha chain variable domain of TCR clone 133509 (TRAV9-2, TRAJ28)
CALSISGAGSYQLTF

SEQ ID NO: 267018 - protein, 15 aa, Homo sapiens
  CDR3 for beta chain variable domain of TCR clone 133509 (TRBV28, TRBJ2-1)
CASSIIAGGRSEQFF

SEQ ID NO: 267019 - protein, 18 aa, Homo sapiens
  CDR3 for alpha chain variable domain of TCR clone 133510 (TRAV26-2, TRAJ54)
CILRDVEVGIQGAQKLVF

SEQ ID NO: 267020 - protein, 16 aa, Homo sapiens
  CDR3 for beta chain variable domain of TCR clone 133510 (TRBV6-1, TRBJ2-5)
CASSETLDRGAETQYS

SEQ ID NO: 267021 - protein, 13 aa, Homo sapiens
  CDR3 for alpha chain variable domain of TCR clone 133511 (TRAV8-6, TRAJ48)
CAGVNFGNEKLTF

SEQ ID NO: 267022 - protein, 16 aa, Homo sapiens
  CDR3 for beta chain variable domain of TCR clone 133511 (TRBV4-2, TRBJ2-6)
CAGSQARSSGANVLTF

SEQ ID NO: 267023 - protein, 12 aa, Homo sapiens
  CDR3 for alpha chain variable domain of TCR clone 133512 (TRAV16, TRAJ10)
CTRTGGGNKLTF

SEQ ID NO: 267024 - protein, 15 aa, Homo sapiens
  CDR3 for beta chain variable domain of TCR clone 133512 (TRBV6-3, TRBJ2-7)
CASSSPGTVFYEQYF

SEQ ID NO: 267025 - protein, 16 aa, Homo sapiens
  CDR3 for alpha chain variable domain of TCR clone 133513 (TRAV12-2, TRAJ28)
CAVITDSGSGSYQLTF

SEQ ID NO: 267026 - protein, 14 aa, Homo sapiens
  CDR3 for beta chain variable domain of TCR clone 133513 (TRBV25-1, TRBJ1-1)
CASTHLGGNTEAFF

SEQ ID NO: 267027 - protein, 13 aa, Homo sapiens
  CDR3 for alpha chain variable domain of TCR clone 133514 (TRAV13-1, TRAJ6)
CSASRGGSYIPTF

SEQ ID NO: 267028 - protein, 15 aa, Homo sapiens
  CDR3 for beta chain variable domain of TCR clone 133514 (TRBV25-1, TRBJ2-5)
CASSDTGTHQETQYF

SEQ ID NO: 267029 - protein, 14 aa, Homo sapiens
  CDR3 for alpha chain variable domain of TCR clone 133515 (TRAV26-1, TRAJ34)
CIVRVSYNTDKLIF

SEQ ID NO: 267030 - protein, 15 aa, Homo sapiens
  CDR3 for beta chain variable domain of TCR clone 133515 (TRBV7-9, TRBJ1-4)
CASSRTGGFNEKLFF

SEQ ID NO: 267031 - protein, 11 aa, Homo sapiens
  CDR3 for alpha chain variable domain of TCR clone 133516 (TRAV35, TRAJ34)
CWARNTDKLIF

SEQ ID NO: 267032 - protein, 15 aa, Homo sapiens
  CDR3 for beta chain variable domain of TCR clone 133516 (TRBV9, TRBJ1-6)
CASSVAGTGDSPLHF

SEQ ID NO: 267033 - protein, 14 aa, Homo sapiens
  CDR3 for alpha chain variable domain of TCR clone 133517 (TRAV8-1, TRAJ5)
CAVRTDTGRRALTF

SEQ ID NO: 267034 - protein, 15 aa, Homo sapiens
  CDR3 for beta chain variable domain of TCR clone 133517 (TRBV20-1, TRBJ2-7)
CSARDRVSGMDEQYF

SEQ ID NO: 267035 - protein, 16 aa, Homo sapiens
  CDR3 for alpha chain variable domain of TCR clone 133518 (TRAV3, TRAJ4)
CAVRPSPSGGYNKLIF

SEQ ID NO: 267036 - protein, 12 aa, Homo sapiens
  CDR3 for beta chain variable domain of TCR clone 133518 (TRBV7-9, TRBJ2-7)
CASSQGVYELYF

SEQ ID NO: 267037 - protein, 14 aa, Homo sapiens
  CDR3 for alpha chain variable domain of TCR clone 133519 (TRAV8-4, TRAJ9)
CAVRINTGGFKTIF

SEQ ID NO: 267038 - protein, 15 aa, Homo sapiens
  CDR3 for beta chain variable domain of TCR clone 133519 (TRBV10-2, TRBJ2-6)
CASSEQGTGSNVLTF

SEQ ID NO: 267039 - protein, 12 aa, Homo sapiens
  CDR3 for alpha chain variable domain of TCR clone 133520 (TRAV21, TRAJ33)
CAKMDSNYQLIW

SEQ ID NO: 267040 - protein, 16 aa, Homo sapiens
  CDR3 for beta chain variable domain of TCR clone 133520 (TRBV7-2, TRBJ2-7)
CASSLEAGGPWYEQYF

SEQ ID NO: 267041 - protein, 14 aa, Homo sapiens
  CDR3 for alpha chain variable domain of TCR clone 133521 (TRAV29/DV5, TRAJ34)
CAASASRKTDKLIF

SEQ ID NO: 267042 - protein, 15 aa, Homo sapiens
  CDR3 for beta chain variable domain of TCR clone 133521 (TRBV7-8, TRBJ2-7)
CASSLERAGSYEQYF

SEQ ID NO: 267043 - protein, 15 aa, Homo sapiens
  CDR3 for alpha chain variable domain of TCR clone 133522 (TRAV20, TRAJ43)
CAVQAGKSSNNDMRF

SEQ ID NO: 267044 - protein, 15 aa, Homo sapiens
  CDR3 for beta chain variable domain of TCR clone 133522 (TRBV25-1, TRBJ1-4)
CASSKRIATNEKLFF

SEQ ID NO: 267045 - protein, 12 aa, Homo sapiens
  CDR3 for alpha chain variable domain of TCR clone 133523 (TRAV12-1, TRAJ40)
CVVYSGTYKYIF

SEQ ID NO: 267046 - protein, 14 aa, Homo sapiens
  CDR3 for beta chain variable domain of TCR clone 133523 (TRBV7-7, TRBJ2-1)
CASSLGGGADEQFF

SEQ ID NO: 267047 - protein, 12 aa, Homo sapiens
  CDR3 for alpha chain variable domain of TCR clone 133524 (TRAV12-3, TRAJ17)
CAMTLAGNKLTF

SEQ ID NO: 267048 - protein, 15 aa, Homo sapiens
  CDR3 for beta chain variable domain of TCR clone 133524 (TRBV2, TRBJ2-1)
CASSELAGSYNEQFF

SEQ ID NO: 267049 - protein, 14 aa, Homo sapiens
  CDR3 for alpha chain variable domain of TCR clone 133525 (TRAV1-2, TRAJ16)
CAVNRFSDGKKLLF

SEQ ID NO: 267050 - protein, 16 aa, Homo sapiens
  CDR3 for beta chain variable domain of TCR clone 133525 (TRBV19, TRBJ2-1)
CASSKAGPSSYNEQFF

SEQ ID NO: 267051 - protein, 14 aa, Homo sapiens
  CDR3 for alpha chain variable domain of TCR clone 133526 (TRAV1-2, TRAJ16)
CAVNRFSDGQKLLF

SEQ ID NO: 267052 - protein, 18 aa, Homo sapiens
  CDR3 for beta chain variable domain of TCR clone 133526 (TRBV7-9, TRBJ2-7)
CACSLTTSGSRTWYEQYF

SEQ ID NO: 267053 - protein, 14 aa, Homo sapiens
  CDR3 for alpha chain variable domain of TCR clone 133527 (TRAV12-3, TRAJ13)
CAMKNSGGYQKVTF

SEQ ID NO: 267054 - protein, 13 aa, Homo sapiens
  CDR3 for beta chain variable domain of TCR clone 133527 (TRBV7-9, TRBJ2-3)
CASSPGSTDTQYF

SEQ ID NO: 267055 - protein, 15 aa, Homo sapiens
  CDR3 for alpha chain variable domain of TCR clone 133528 (TRAV21, TRAJ22)
CAVRLFFWFCKATDL

SEQ ID NO: 267056 - protein, 14 aa, Homo sapiens
  CDR3 for beta chain variable domain of TCR clone 133528 (TRBV18, TRBJ2-5)
CASSPGVSQETQYF

SEQ ID NO: 267057 - protein, 13 aa, Homo sapiens
  CDR3 for alpha chain variable domain of TCR clone 133529 (TRAV27, TRAJ6)
CAGGPRGSYIPTF

SEQ ID NO: 267058 - protein, 13 aa, Homo sapiens
  CDR3 for beta chain variable domain of TCR clone 133529 (TRBV4-1, TRBJ2-2)
CASSQENTGELFF

SEQ ID NO: 267059 - protein, 14 aa, Homo sapiens
  CDR3 for alpha chain variable domain of TCR clone 133530 (TRAV12-2, TRAJ13)
CAVKKTGGYQKVTF

SEQ ID NO: 267060 - protein, 15 aa, Homo sapiens
  CDR3 for beta chain variable domain of TCR clone 133530 (TRBV7-3, TRBJ2-2)
CASSETGQGTGELFF

SEQ ID NO: 267061 - protein, 15 aa, Homo sapiens
  CDR3 for alpha chain variable domain of TCR clone 133531 (TRAV17, TRAJ41)
CATDPPSNSGYALNF

SEQ ID NO: 267062 - protein, 15 aa, Homo sapiens
  CDR3 for beta chain variable domain of TCR clone 133531 (TRBV4-1, TRBJ2-7)
CASSQQGQGFDEQYF

SEQ ID NO: 267063 - protein, 17 aa, Homo sapiens
  CDR3 for alpha chain variable domain of TCR clone 133532 (TRAV4, TRAJ42)
CLVGVLNFGGSQGNLIF

SEQ ID NO: 267064 - protein, 12 aa, Homo sapiens
  CDR3 for beta chain variable domain of TCR clone 133532 (TRBV20-1, TRBJ2-1)
CSAQYTYNEQFF

SEQ ID NO: 267065 - protein, 14 aa, Homo sapiens
  CDR3 for alpha chain variable domain of TCR clone 133533 (TRAV2, TRAJ37)
CAVDFTSNTGKLIF

SEQ ID NO: 267066 - protein, 15 aa, Homo sapiens
  CDR3 for beta chain variable domain of TCR clone 133533 (TRBV5-1, TRBJ2-3)
CASSVTSGSTDTQYF

SEQ ID NO: 267067 - protein, 13 aa, Homo sapiens
  CDR3 for alpha chain variable domain of TCR clone 133534 (TRAV3, TRAJ3)
CAVADSSASKIIF

SEQ ID NO: 267068 - protein, 16 aa, Homo sapiens
  CDR3 for beta chain variable domain of TCR clone 133534 (TRBV5-1, TRBJ2-3)
CASSLGLAVYTDTQYF

SEQ ID NO: 267069 - protein, 12 aa, Homo sapiens
  CDR3 for alpha chain variable domain of TCR clone 133535 (TRAV8-3, TRAJ20)
CAVGANDYKLSF

SEQ ID NO: 267070 - protein, 15 aa, Homo sapiens
  CDR3 for beta chain variable domain of TCR clone 133535 (TRBV7-8, TRBJ1-1)
CASSLGDSRNTEAFF

SEQ ID NO: 267071 - protein, 15 aa, Homo sapiens
  CDR3 for alpha chain variable domain of TCR clone 133536 (TRAV30, TRAJ57)
CGTAIPQGGSEKLVF

SEQ ID NO: 267072 - protein, 12 aa, Homo sapiens
  CDR3 for beta chain variable domain of TCR clone 133536 (TRBV11-2, TRBJ2-2)
CASSLGGGELFF

SEQ ID NO: 267073 - protein, 13 aa, Homo sapiens
  CDR3 for alpha chain variable domain of TCR clone 133537 (TRAV4, TRAJ28)
CLFIWGWELPTHF

SEQ ID NO: 267074 - protein, 14 aa, Homo sapiens
  CDR3 for beta chain variable domain of TCR clone 133537 (TRBV7-9, TRBJ2-5)
CASSLDTAQENQYF

SEQ ID NO: 267075 - protein, 14 aa, Homo sapiens
  CDR3 for alpha chain variable domain of TCR clone 133538 (TRAV3, TRAJ21)
CAVESQTNFNKFYF

SEQ ID NO: 267076 - protein, 18 aa, Homo sapiens
  CDR3 for beta chain variable domain of TCR clone 133538 (TRBV7-9, TRBJ2-1)
CASSLAVSGTSGRNEQFF

SEQ ID NO: 267077 - protein, 13 aa, Homo sapiens
  CDR3 for alpha chain variable domain of TCR clone 133539 (TRAV35, TRAJ42)
CAGFPGSQGNLIF

SEQ ID NO: 267078 - protein, 14 aa, Homo sapiens
  CDR3 for beta chain variable domain of TCR clone 133539 (TRBV27, TRBJ1-1)
CASSLLSGLSEAFF

SEQ ID NO: 267079 - protein, 15 aa, Homo sapiens
  CDR3 for alpha chain variable domain of TCR clone 133540 (TRAV29/DV5, TRAJ40)
CAASAQGSGTYKYVF

SEQ ID NO: 267080 - protein, 15 aa, Homo sapiens
  CDR3 for beta chain variable domain of TCR clone 133540 (TRBV7-2, TRBJ2-3)
CASSLAGAFIDTQYF

SEQ ID NO: 267081 - protein, 15 aa, Homo sapiens
  CDR3 for alpha chain variable domain of TCR clone 133541 (TRAV26-1, TRAJ56)
CIVRVDNGATSKLTF

SEQ ID NO: 267082 - protein, 15 aa, Homo sapiens
  CDR3 for beta chain variable domain of TCR clone 133541 (TRBV20-1, TRBJ2-7)
CSARDPTEVGHEQYF

SEQ ID NO: 267083 - protein, 16 aa, Homo sapiens
  CDR3 for alpha chain variable domain of TCR clone 133542 (TRAV3, TRAJ37)
CAVRGKGSGNTGKLIF

SEQ ID NO: 267084 - protein, 12 aa, Homo sapiens
  CDR3 for beta chain variable domain of TCR clone 133542 (TRBV11-2, TRBJ2-2)
CASSRGGGELFF

SEQ ID NO: 267085 - protein, 12 aa, Homo sapiens
  CDR3 for alpha chain variable domain of TCR clone 133543 (TRAV8-4, TRAJ37)
CAVSGNPGKLIF

SEQ ID NO: 267086 - protein, 17 aa, Homo sapiens
  CDR3 for beta chain variable domain of TCR clone 133543 (TRBV7-2, TRBJ2-3)
CASSPQGRARVQDTQYS

SEQ ID NO: 267087 - protein, 14 aa, Homo sapiens
  CDR3 for alpha chain variable domain of TCR clone 133544 (TRAV35, TRAJ13)
CAGSPSGGYQKVTF

SEQ ID NO: 267088 - protein, 13 aa, Homo sapiens
  CDR3 for beta chain variable domain of TCR clone 133544 (TRBV29-1, TRBJ1-1)
CSVGDSRNTEAFL

SEQ ID NO: 267089 - protein, 14 aa, Homo sapiens
  CDR3 for alpha chain variable domain of TCR clone 133545 (TRAV12-3, TRAJ10)
SHLPLTGGGNKLTF

SEQ ID NO: 267090 - protein, 11 aa, Homo sapiens
  CDR3 for beta chain variable domain of TCR clone 133545 (TRBV2, TRBJ1-1)
CASREGTEASL

SEQ ID NO: 267091 - protein, 11 aa, Homo sapiens
  CDR3 for alpha chain variable domain of TCR clone 133546 (TRAV1-1, TRAJ16)
CAAGDAQKLLF

SEQ ID NO: 267092 - protein, 15 aa, Homo sapiens
  CDR3 for beta chain variable domain of TCR clone 133546 (TRBV28, TRBJ1-2)
CASIPQGSDDYGYTF

SEQ ID NO: 267093 - protein, 14 aa, Homo sapiens
  CDR3 for alpha chain variable domain of TCR clone 133547 (TRAV9-2, TRAJ39)
CALYIHNAGNMLTF

SEQ ID NO: 267094 - protein, 14 aa, Homo sapiens
  CDR3 for beta chain variable domain of TCR clone 133547 (TRBV19, TRBJ2-2)
CATTGHANTGELFF

SEQ ID NO: 267095 - protein, 17 aa, Homo sapiens
  CDR3 for alpha chain variable domain of TCR clone 133548 (TRAV3, TRAJ6)
CAVRDGPRAGGSYIPTF

SEQ ID NO: 267096 - protein, 14 aa, Homo sapiens
  CDR3 for beta chain variable domain of TCR clone 133548 (TRBV11-2, TRBJ2-3)
CASSGLARTDTQYF

SEQ ID NO: 267097 - protein, 15 aa, Homo sapiens
  CDR3 for alpha chain variable domain of TCR clone 133549 (TRAV3, TRAJ22)
CAVRDRGGSARQLTF

SEQ ID NO: 267098 - protein, 13 aa, Homo sapiens
  CDR3 for beta chain variable domain of TCR clone 133549 (TRBV12-4, TRBJ1-2)
CASSLRQGNGYTF

SEQ ID NO: 267099 - protein, 11 aa, Homo sapiens
  CDR3 for alpha chain variable domain of TCR clone 133550 (TRAV21, TRAJ11)
CAVNGYSTLTF

SEQ ID NO: 267100 - protein, 16 aa, Homo sapiens
  CDR3 for beta chain variable domain of TCR clone 133550 (TRBV12-5, TRBJ2-5)
CASGPRTSGKQETQYF

SEQ ID NO: 267101 - protein, 14 aa, Homo sapiens
  CDR3 for alpha chain variable domain of TCR clone 133551 (TRAV35, TRAJ13)
CAGSPSGGYQKVTF

SEQ ID NO: 267102 - protein, 12 aa, Homo sapiens
  CDR3 for beta chain variable domain of TCR clone 133551 (TRBV7-9, TRBJ2-7)
CASSLEGYEQYF

SEQ ID NO: 267103 - protein, 14 aa, Homo sapiens
  CDR3 for alpha chain variable domain of TCR clone 133552 (TRAV8-3, TRAJ15)
CAVGRHQAGTALLF

SEQ ID NO: 267104 - protein, 13 aa, Homo sapiens
  CDR3 for beta chain variable domain of TCR clone 133552 (TRBV9, TRBJ2-7)
CASSASDSYEQYF

SEQ ID NO: 267105 - protein, 13 aa, Homo sapiens
  CDR3 for alpha chain variable domain of TCR clone 133553 (TRAV17, TRAJ34)
CATDLYNTYKLIF

SEQ ID NO: 267106 - protein, 15 aa, Homo sapiens
  CDR3 for beta chain variable domain of TCR clone 133553 (TRBV20-1, TRBJ2-3)
CSATGTSGFTDTQYF

SEQ ID NO: 267107 - protein, 14 aa, Homo sapiens
  CDR3 for alpha chain variable domain of TCR clone 133554 (TRAV8-3, TRAJ10)
CAVGNAGGGNKLTF

SEQ ID NO: 267108 - protein, 15 aa, Homo sapiens
  CDR3 for beta chain variable domain of TCR clone 133554 (TRBV10-3, TRBJ2-3)
CAISLASGGTDTQYF

SEQ ID NO: 267109 - protein, 13 aa, Homo sapiens
  CDR3 for alpha chain variable domain of TCR clone 133555 (TRAV8-1, TRAJ28)
CAVSGAGSYQLTF

SEQ ID NO: 267110 - protein, 14 aa, Homo sapiens
  CDR3 for beta chain variable domain of TCR clone 133555 (TRBV4-1, TRBJ2-2)
CASSQAVNTGELFF

SEQ ID NO: 267111 - protein, 15 aa, Homo sapiens
  CDR3 for alpha chain variable domain of TCR clone 133556 (TRAV3, TRAJ3)
CAVRDMSSSASKIIF

SEQ ID NO: 267112 - protein, 14 aa, Homo sapiens
  CDR3 for beta chain variable domain of TCR clone 133556 (TRBV19, TRBJ2-1)
CASPTSVLSGEQFF

SEQ ID NO: 267113 - protein, 16 aa, Homo sapiens
  CDR3 for alpha chain variable domain of TCR clone 133557 (TRAV30, TRAJ24)
CGTEIVDADSWGKFQF

SEQ ID NO: 267114 - protein, 15 aa, Homo sapiens
  CDR3 for beta chain variable domain of TCR clone 133557 (TRBV28, TRBJ2-1)
CASRVGLDEYNEQFF

SEQ ID NO: 267115 - protein, 13 aa, Homo sapiens
  CDR3 for alpha chain variable domain of TCR clone 133558 (TRAV20, TRAJ54)
CTVQAGGAQKLVF

SEQ ID NO: 267116 - protein, 14 aa, Homo sapiens
  CDR3 for beta chain variable domain of TCR clone 133558 (TRBV20-1, TRBJ2-7)
CSAKTGTGGYEQYF

SEQ ID NO: 267117 - protein, 15 aa, Homo sapiens
  CDR3 for alpha chain variable domain of TCR clone 133559 (TRAV12-3, TRAJ5)
CAMSGLGTGRRALTF

SEQ ID NO: 267118 - protein, 16 aa, Homo sapiens
  CDR3 for beta chain variable domain of TCR clone 133559 (TRBV20-1, TRBJ2-3)
CSARLHSAGAVDTQYF

SEQ ID NO: 267119 - protein, 13 aa, Homo sapiens
  CDR3 for alpha chain variable domain of TCR clone 133560 (TRAV20, TRAJ3)
CASRYSSASKIIF

SEQ ID NO: 267120 - protein, 16 aa, Homo sapiens
  CDR3 for beta chain variable domain of TCR clone 133560 (TRBV6-1, TRBJ1-6)
CASSSEGSPRNSPLHF

SEQ ID NO: 267121 - protein, 11 aa, Homo sapiens
  CDR3 for alpha chain variable domain of TCR clone 133561 (TRAV17, TRAJ31)
CATSNNARFMF

SEQ ID NO: 267122 - protein, 16 aa, Homo sapiens
  CDR3 for beta chain variable domain of TCR clone 133561 (TRBV7-8, TRBJ2-4)
CASSAERTLAKNIQYF

SEQ ID NO: 267123 - protein, 12 aa, Homo sapiens
  CDR3 for alpha chain variable domain of TCR clone 133562 (TRAV21, TRAJ23)
CAVPNQGGKLIF

SEQ ID NO: 267124 - protein, 15 aa, Homo sapiens
  CDR3 for beta chain variable domain of TCR clone 133562 (TRBV27, TRBJ2-1)
CAGSFGAGTGPEQFF

SEQ ID NO: 267125 - protein, 16 aa, Homo sapiens
  CDR3 for alpha chain variable domain of TCR clone 133563 (TRAV36/DV7, TRAJ30)
CAVETYGLDRDDKIIF

SEQ ID NO: 267126 - protein, 15 aa, Homo sapiens
  CDR3 for beta chain variable domain of TCR clone 133563 (TRBV11-2, TRBJ2-2)
CASSSDRVNAGELFF

SEQ ID NO: 267127 - protein, 13 aa, Homo sapiens
  CDR3 for alpha chain variable domain of TCR clone 133564 (TRAV21, TRAJ27)
CAARPGNAGKSTL

SEQ ID NO: 267128 - protein, 14 aa, Homo sapiens
  CDR3 for beta chain variable domain of TCR clone 133564 (TRBV7-6, TRBJ2-3)
CAISLGTVTDTQYF

SEQ ID NO: 267129 - protein, 13 aa, Homo sapiens
  CDR3 for alpha chain variable domain of TCR clone 133565 (TRAV8-2, TRAJ36)
CVVSHLPTNNIFF

SEQ ID NO: 267130 - protein, 18 aa, Homo sapiens
  CDR3 for beta chain variable domain of TCR clone 133565 (TRBV7-9, TRBJ2-6)
CASSFPGAGISGANVLTF

SEQ ID NO: 267131 - protein, 11 aa, Homo sapiens
  CDR3 for alpha chain variable domain of TCR clone 133566 (TRAV12-3, TRAJ41)
RAMNAREALNF

SEQ ID NO: 267132 - protein, 16 aa, Homo sapiens
  CDR3 for beta chain variable domain of TCR clone 133566 (TRBV7-8, TRBJ2-3)
CASSTEGQRETDTQYF

SEQ ID NO: 267133 - protein, 14 aa, Homo sapiens
  CDR3 for alpha chain variable domain of TCR clone 133567 (TRAV13-1, TRAJ10)
CASKEPGGGNKLTF

SEQ ID NO: 267134 - protein, 14 aa, Homo sapiens
  CDR3 for beta chain variable domain of TCR clone 133567 (TRBV6-6, TRBJ2-7)
CASSDSGAGYEQYF

SEQ ID NO: 267135 - protein, 14 aa, Homo sapiens
  CDR3 for alpha chain variable domain of TCR clone 133568 (TRAV21, TRAJ10)
CAVALTGGGNKLTF

SEQ ID NO: 267136 - protein, 13 aa, Homo sapiens
  CDR3 for beta chain variable domain of TCR clone 133568 (TRBV7-2, TRBJ1-6)
CASSLGSNSPLHC

SEQ ID NO: 267137 - protein, 15 aa, Homo sapiens
  CDR3 for alpha chain variable domain of TCR clone 133569 (TRAV26-1, TRAJ40)
CIVRAVPSGTYKYIF

SEQ ID NO: 267138 - protein, 14 aa, Homo sapiens
  CDR3 for beta chain variable domain of TCR clone 133569 (TRBV19, TRBJ2-1)
CASKAPGLANEQFF

SEQ ID NO: 267139 - protein, 11 aa, Homo sapiens
  CDR3 for alpha chain variable domain of TCR clone 133570 (TRAV12-3, TRAJ43)
CAMSVSNDMRF

SEQ ID NO: 267140 - protein, 17 aa, Homo sapiens
  CDR3 for beta chain variable domain of TCR clone 133570 (TRBV20-1, TRBJ2-1)
CSASSSGLAGSYNEQFV

SEQ ID NO: 267141 - protein, 11 aa, Homo sapiens
  CDR3 for alpha chain variable domain of TCR clone 133571 (TRAV12-2, TRAJ3)
CAVKRASKIIF

SEQ ID NO: 267142 - protein, 14 aa, Homo sapiens
  CDR3 for beta chain variable domain of TCR clone 133571 (TRBV6-5, TRBJ1-1)
CASNRQRSDTEAFL

SEQ ID NO: 267143 - protein, 16 aa, Homo sapiens
  CDR3 for alpha chain variable domain of TCR clone 133572 (TRAV12-1, TRAJ12)
CVVNTLLMDSSYELIF

SEQ ID NO: 267144 - protein, 13 aa, Homo sapiens
  CDR3 for beta chain variable domain of TCR clone 133572 (TRBV11-2, TRBJ2-1)
CASSSEAYNEQFF

SEQ ID NO: 267145 - protein, 14 aa, Homo sapiens
  CDR3 for alpha chain variable domain of TCR clone 133573 (TRAV2, TRAJ9)
CAVEDRSGGFKTIF

SEQ ID NO: 267146 - protein, 13 aa, Homo sapiens
  CDR3 for beta chain variable domain of TCR clone 133573 (TRBV12-4, TRBJ2-1)
CASSLPPFDEQFF

SEQ ID NO: 267147 - protein, 15 aa, Homo sapiens
  CDR3 for alpha chain variable domain of TCR clone 133574 (TRAV20, TRAJ4)
CAVEGSSGGYNKLIF

SEQ ID NO: 267148 - protein, 14 aa, Homo sapiens
  CDR3 for beta chain variable domain of TCR clone 133574 (TRBV7-8, TRBJ2-7)
WASTLGGALGEQYF

SEQ ID NO: 267149 - protein, 14 aa, Homo sapiens
  CDR3 for alpha chain variable domain of TCR clone 133575 (TRAV12-2, TRAJ40)
CAVKIPSGTYKYIF

SEQ ID NO: 267150 - protein, 17 aa, Homo sapiens
  CDR3 for beta chain variable domain of TCR clone 133575 (TRBV20-1, TRBJ2-1)
CSAFSGTSGSLYNERFF

SEQ ID NO: 267151 - protein, 14 aa, Homo sapiens
  CDR3 for alpha chain variable domain of TCR clone 133576 (TRAV12-2, TRAJ13)
CAVKKTGGYQKVTF

SEQ ID NO: 267152 - protein, 15 aa, Homo sapiens
  CDR3 for beta chain variable domain of TCR clone 133576 (TRBV11-2, TRBJ1-3)
CASSLDGTVGNTIYF

SEQ ID NO: 267153 - protein, 16 aa, Homo sapiens
  CDR3 for alpha chain variable domain of TCR clone 133577 (TRAV27, TRAJ53)
CAAPEGSGGSNYKLTF

SEQ ID NO: 267154 - protein, 14 aa, Homo sapiens
  CDR3 for beta chain variable domain of TCR clone 133577 (TRBV4-3, TRBJ1-5)
CASSQGVQGWPQHF

SEQ ID NO: 267155 - protein, 14 aa, Homo sapiens
  CDR3 for alpha chain variable domain of TCR clone 133578 (TRAV2, TRAJ9)
CAVDPNTGGFKTII

SEQ ID NO: 267156 - protein, 14 aa, Homo sapiens
  CDR3 for beta chain variable domain of TCR clone 133578 (TRBV7-2, TRBJ2-7)
CASSPKTSFYEQYF

SEQ ID NO: 267157 - protein, 15 aa, Homo sapiens
  CDR3 for alpha chain variable domain of TCR clone 133579 (TRAV27, TRAJ38)
CAARRNAGNNRKLIW

SEQ ID NO: 267158 - protein, 13 aa, Homo sapiens
  CDR3 for beta chain variable domain of TCR clone 133579 (TRBV7-6, TRBJ1-2)
CASSLVADYGYTF

SEQ ID NO: 267159 - protein, 21 aa, Homo sapiens
  CDR3 for alpha chain variable domain of TCR clone 133580 (TRAV1-1, TRAJ6)
CAVRREEATYLHLEEEPALLF

SEQ ID NO: 267160 - protein, 15 aa, Homo sapiens
  CDR3 for beta chain variable domain of TCR clone 133580 (TRBV6-6, TRBJ2-1)
CATRQGVSSYNEQSF

SEQ ID NO: 267161 - protein, 13 aa, Homo sapiens
  CDR3 for alpha chain variable domain of TCR clone 133581 (TRAV13-1, TRAJ6)
CAARRGRSYIPTF

SEQ ID NO: 267162 - protein, 16 aa, Homo sapiens
  CDR3 for beta chain variable domain of TCR clone 133581 (TRBV7-9, TRBJ2-2)
CASSLATGVGTGELFF

SEQ ID NO: 267163 - protein, 19 aa, Homo sapiens
  CDR3 for alpha chain variable domain of TCR clone 133582 (TRAV1-2, TRAJ26)
CLLPLCCERPDNYGQNFVF

SEQ ID NO: 267164 - protein, 14 aa, Homo sapiens
  CDR3 for beta chain variable domain of TCR clone 133582 (TRBV5-1, TRBJ2-7)
CASSRGESLYEQYF

SEQ ID NO: 267165 - protein, 14 aa, Homo sapiens
  CDR3 for alpha chain variable domain of TCR clone 133583 (TRAV17, TRAJ22)
CATVLSGSARQLTF

SEQ ID NO: 267166 - protein, 14 aa, Homo sapiens
  CDR3 for beta chain variable domain of TCR clone 133583 (TRBV12-4, TRBJ2-5)
CASSFWDRGETQYF

SEQ ID NO: 267167 - protein, 13 aa, Homo sapiens
  CDR3 for alpha chain variable domain of TCR clone 133584 (TRAV27, TRAJ6)
CAGGTRGSYIPTS

SEQ ID NO: 267168 - protein, 15 aa, Homo sapiens
  CDR3 for beta chain variable domain of TCR clone 133584 (TRBV11-2, TRBJ1-3)
CASSLSPLVRDTIYF

SEQ ID NO: 267169 - protein, 17 aa, Homo sapiens
  CDR3 for alpha chain variable domain of TCR clone 133585 (TRAV3, TRAJ6)
CAVRDGPRAGGSYIPTF

SEQ ID NO: 267170 - protein, 16 aa, Homo sapiens
  CDR3 for beta chain variable domain of TCR clone 133585 (TRBV12-4, TRBJ2-5)
CASSFFVRGRQETQYF

SEQ ID NO: 267171 - protein, 13 aa, Homo sapiens
  CDR3 for alpha chain variable domain of TCR clone 133586 (TRAV12-1, TRAJ22)
CVASGGSARQLTF

SEQ ID NO: 267172 - protein, 14 aa, Homo sapiens
  CDR3 for beta chain variable domain of TCR clone 133586 (TRBV11-3, TRBJ1-2)
CASSLGSGTYGDTF

SEQ ID NO: 267173 - protein, 12 aa, Homo sapiens
  CDR3 for alpha chain variable domain of TCR clone 133587 (TRAV29/DV5, TRAJ49)
CAATDTGNQFYF

SEQ ID NO: 267174 - protein, 18 aa, Homo sapiens
  CDR3 for beta chain variable domain of TCR clone 133587 (TRBV20-1, TRBJ2-1)
CSASAQGTSGRHWNEQFF

SEQ ID NO: 267175 - protein, 13 aa, Homo sapiens
  CDR3 for alpha chain variable domain of TCR clone 133588 (TRAV3, TRAJ21)
CAVREPDFKKFYF

SEQ ID NO: 267176 - protein, 15 aa, Homo sapiens
  CDR3 for beta chain variable domain of TCR clone 133588 (TRBV2, TRBJ2-1)
CASSELAGGYNEQFF

SEQ ID NO: 267177 - protein, 13 aa, Homo sapiens
  CDR3 for alpha chain variable domain of TCR clone 133589 (TRAV8-4, TRAJ20)
CAVSRSNDYKLSF

SEQ ID NO: 267178 - protein, 15 aa, Homo sapiens
  CDR3 for beta chain variable domain of TCR clone 133589 (TRBV11-3, TRBJ2-3)
CASLKDGREGDTQYF

SEQ ID NO: 267179 - protein, 15 aa, Homo sapiens
  CDR3 for alpha chain variable domain of TCR clone 133590 (TRAV8-2, TRAJ40)
CVVLGTTSGTYKYIF

SEQ ID NO: 267180 - protein, 14 aa, Homo sapiens
  CDR3 for beta chain variable domain of TCR clone 133590 (TRBV4-2, TRBJ2-1)
CASGLDRAYNEQFF

SEQ ID NO: 267181 - protein, 13 aa, Homo sapiens
  CDR3 for alpha chain variable domain of TCR clone 133591 (TRAV27, TRAJ6)
CAGGTRGSYIPTF

SEQ ID NO: 267182 - protein, 13 aa, Homo sapiens
  CDR3 for beta chain variable domain of TCR clone 133591 (TRBV12-4, TRBJ2-7)
CASSRDSGYEQYF

SEQ ID NO: 267183 - protein, 12 aa, Homo sapiens
  CDR3 for alpha chain variable domain of TCR clone 133592 (TRAV12-2, TRAJ8)
CAVNTGFQKLVF

SEQ ID NO: 267184 - protein, 15 aa, Homo sapiens
  CDR3 for beta chain variable domain of TCR clone 133592 (TRBV7-8, TRBJ1-5)
RASSLERRGLEPQHF

SEQ ID NO: 267185 - protein, 12 aa, Homo sapiens
  CDR3 for alpha chain variable domain of TCR clone 133593 (TRAV8-3, TRAJ26)
CAGDNYGQNFVF

SEQ ID NO: 267186 - protein, 14 aa, Homo sapiens
  CDR3 for beta chain variable domain of TCR clone 133593 (TRBV19, TRBJ2-1)
CARGARSFQWEQFF

SEQ ID NO: 267187 - protein, 14 aa, Homo sapiens
  CDR3 for alpha chain variable domain of TCR clone 133594 (TRAV12-2, TRAJ22)
CAVRVSGSARQLTF

SEQ ID NO: 267188 - protein, 14 aa, Homo sapiens
  CDR3 for beta chain variable domain of TCR clone 133594 (TRBV25-1, TRBJ1-1)
CASTHLGGNTEAFF

SEQ ID NO: 267189 - protein, 10 aa, Homo sapiens
  CDR3 for alpha chain variable domain of TCR clone 133595 (TRAV4, TRAJ20)
KGNNDYKLSF

SEQ ID NO: 267190 - protein, 17 aa, Homo sapiens
  CDR3 for beta chain variable domain of TCR clone 133595 (TRBV11-2, TRBJ2-1)
CASSLYPPGVEYNEQFF

SEQ ID NO: 267191 - protein, 13 aa, Homo sapiens
  CDR3 for alpha chain variable domain of TCR clone 133596 (TRAV13-1, TRAJ21)
CAASIYNFNKFYF

SEQ ID NO: 267192 - protein, 15 aa, Homo sapiens
  CDR3 for beta chain variable domain of TCR clone 133596 (TRBV19, TRBJ2-7)
CASSPAGSGEALRYF

SEQ ID NO: 267193 - protein, 12 aa, Homo sapiens
  CDR3 for alpha chain variable domain of TCR clone 133597 (TRAV17, TRAJ29)
CATPHHETHLLS

SEQ ID NO: 267194 - protein, 17 aa, Homo sapiens
  CDR3 for beta chain variable domain of TCR clone 133597 (TRBV20-1, TRBJ2-2)
CSASGSGQGGLTGELFF

SEQ ID NO: 267195 - protein, 11 aa, Homo sapiens
  CDR3 for alpha chain variable domain of TCR clone 133598 (TRAV13-1, TRAJ39)
CASHAGNVLTF

SEQ ID NO: 267196 - protein, 14 aa, Homo sapiens
  CDR3 for beta chain variable domain of TCR clone 133598 (TRBV11-2, TRBJ1-5)
CASSLDRGRQPQHF

SEQ ID NO: 267197 - protein, 13 aa, Homo sapiens
  CDR3 for alpha chain variable domain of TCR clone 133599 (TRAV6, TRAJ20)
CALAVSNDYKLSF

SEQ ID NO: 267198 - protein, 14 aa, Homo sapiens
  CDR3 for beta chain variable domain of TCR clone 133599 (TRBV7-2, TRBJ2-7)
CASSPKTSFYEQYF

SEQ ID NO: 267199 - protein, 12 aa, Homo sapiens
  CDR3 for alpha chain variable domain of TCR clone 133600 (TRAV13-1, TRAJ9)
CASHTGGFKTNF

SEQ ID NO: 267200 - protein, 13 aa, Homo sapiens
  CDR3 for beta chain variable domain of TCR clone 133600 (TRBV12-4, TRBJ1-2)
CASSSGSKDGYTF

SEQ ID NO: 267201 - protein, 17 aa, Homo sapiens
  CDR3 for alpha chain variable domain of TCR clone 133601 (TRAV13-1, TRAJ52)
CAAGRNAGGTSYGKLTF

SEQ ID NO: 267202 - protein, 14 aa, Homo sapiens
  CDR3 for beta chain variable domain of TCR clone 133601 (TRBV4-2, TRBJ2-1)
CASGLDRAYNEQFF

SEQ ID NO: 267203 - protein, 15 aa, Homo sapiens
  CDR3 for alpha chain variable domain of TCR clone 133602 (TRAV2, TRAJ28)
CAVPYSGAGSYQLTF

SEQ ID NO: 267204 - protein, 17 aa, Homo sapiens
  CDR3 for beta chain variable domain of TCR clone 133602 (TRBV20-1, TRBJ2-4)
CRARDWASGGRENIQYF

SEQ ID NO: 267205 - protein, 17 aa, Homo sapiens
  CDR3 for alpha chain variable domain of TCR clone 133603 (TRAV4, TRAJ13)
CIVGVQGSSGGYQKVTF

SEQ ID NO: 267206 - protein, 18 aa, Homo sapiens
  CDR3 for beta chain variable domain of TCR clone 133603 (TRBV15, TRBJ2-3)
CATSRAGARSWDTDTQYF

SEQ ID NO: 267207 - protein, 13 aa, Homo sapiens
  CDR3 for alpha chain variable domain of TCR clone 133604 (TRAV2, TRAJ40)
CAVVTSGTYKYIF

SEQ ID NO: 267208 - protein, 13 aa, Homo sapiens
  CDR3 for beta chain variable domain of TCR clone 133604 (TRBV20-1, TRBJ2-2)
CSASAAGTGELFF

SEQ ID NO: 267209 - protein, 10 aa, Homo sapiens
  CDR3 for alpha chain variable domain of TCR clone 133605 (TRAV20, TRAJ22)
CAAPARQRTF

SEQ ID NO: 267210 - protein, 14 aa, Homo sapiens
  CDR3 for beta chain variable domain of TCR clone 133605 (TRBV19, TRBJ2-1)
CASSMGSGATEQFF

SEQ ID NO: 267211 - protein, 15 aa, Homo sapiens
  CDR3 for alpha chain variable domain of TCR clone 133606 (TRAV8-3, TRAJ27)
CAVGPSKTNAGKSTF

SEQ ID NO: 267212 - protein, 15 aa, Homo sapiens
  CDR3 for beta chain variable domain of TCR clone 133606 (TRBV28, TRBJ2-1)
CASSIIAGGRSEQFF

SEQ ID NO: 267213 - protein, 15 aa, Homo sapiens
  CDR3 for alpha chain variable domain of TCR clone 133607 (TRAV12-1, TRAJ5)
CVVNMLETGRRALTF

SEQ ID NO: 267214 - protein, 12 aa, Homo sapiens
  CDR3 for beta chain variable domain of TCR clone 133607 (TRBV11-2, TRBJ2-2)
CASSLGGGELVF

SEQ ID NO: 267215 - protein, 10 aa, Homo sapiens
  CDR3 for alpha chain variable domain of TCR clone 133608 (TRAV13-1, TRAJ42)
CAASELWRKP

SEQ ID NO: 267216 - protein, 15 aa, Homo sapiens
  CDR3 for beta chain variable domain of TCR clone 133608 (TRBV20-1, TRBJ2-1)
CSASSAGSSYDEQFF

SEQ ID NO: 267217 - protein, 14 aa, Homo sapiens
  CDR3 for alpha chain variable domain of TCR clone 133609 (TRAV12-2, TRAJ13)
CAVKKTGGYQKVTF

SEQ ID NO: 267218 - protein, 13 aa, Homo sapiens
  CDR3 for beta chain variable domain of TCR clone 133609 (TRBV28, TRBJ2-3)
YASSLPQVDTQYF

SEQ ID NO: 267219 - protein, 16 aa, Homo sapiens
  CDR3 for alpha chain variable domain of TCR clone 133610 (TRAV3, TRAJ37)
CAVRGKGSGNTGKLIF

SEQ ID NO: 267220 - protein, 13 aa, Homo sapiens
  CDR3 for beta chain variable domain of TCR clone 133610 (TRBV12-4, TRBJ1-2)
CASSLRQGKGYTF

SEQ ID NO: 267221 - protein, 13 aa, Homo sapiens
  CDR3 for alpha chain variable domain of TCR clone 133611 (TRAV29/DV5, TRAJ47)
CAASAEYGNKLVF

SEQ ID NO: 267222 - protein, 13 aa, Homo sapiens
  CDR3 for beta chain variable domain of TCR clone 133611 (TRBV19, TRBJ2-7)
CASSIDRTYEQYF

SEQ ID NO: 267223 - protein, 11 aa, Homo sapiens
  CDR3 for alpha chain variable domain of TCR clone 133612 (TRAV27, TRAJ47)
SIVEYGNKLVF

SEQ ID NO: 267224 - protein, 18 aa, Homo sapiens
  CDR3 for beta chain variable domain of TCR clone 133612 (TRBV2, TRBJ2-1)
CASRGLAGGPRTYNEQFS

SEQ ID NO: 267225 - protein, 11 aa, Homo sapiens
  CDR3 for alpha chain variable domain of TCR clone 133613 (TRAV12-3, TRAJ49)
CAANTGNQFYF

SEQ ID NO: 267226 - protein, 13 aa, Homo sapiens
  CDR3 for beta chain variable domain of TCR clone 133613 (TRBV28, TRBJ2-7)
CASTPGLAGEQYF

SEQ ID NO: 267227 - protein, 19 aa, Homo sapiens
  CDR3 for alpha chain variable domain of TCR clone 133614 (TRAV26-1, TRAJ52)
CIVRAHRNAGGTSYGKLTF

SEQ ID NO: 267228 - protein, 15 aa, Homo sapiens
  CDR3 for beta chain variable domain of TCR clone 133614 (TRBV29-1, TRBJ2-1)
CSGRDRKSSYNEQSF

SEQ ID NO: 267229 - protein, 14 aa, Homo sapiens
  CDR3 for alpha chain variable domain of TCR clone 133615 (TRAV17, TRAJ57)
CATDPQGGSEKLVF

SEQ ID NO: 267230 - protein, 16 aa, Homo sapiens
  CDR3 for beta chain variable domain of TCR clone 133615 (TRBV6-6, TRBJ1-5)
CASSYSTLVGNQPQHF

SEQ ID NO: 267231 - protein, 14 aa, Homo sapiens
  CDR3 for alpha chain variable domain of TCR clone 133616 (TRAV8-3, TRAJ23)
CAVIIYNQGGKLIF

SEQ ID NO: 267232 - protein, 15 aa, Homo sapiens
  CDR3 for beta chain variable domain of TCR clone 133616 (TRBV18, TRBJ2-1)
SASSPPSASYNEQFF

SEQ ID NO: 267233 - protein, 14 aa, Homo sapiens
  CDR3 for alpha chain variable domain of TCR clone 133617 (TRAV1-2, TRAJ16)
CAVNRFSDGLKLLF

SEQ ID NO: 267234 - protein, 15 aa, Homo sapiens
  CDR3 for beta chain variable domain of TCR clone 133617 (TRBV7-9, TRBJ1-6)
CASSSPGRGNSPLHF

SEQ ID NO: 267235 - protein, 15 aa, Homo sapiens
  CDR3 for alpha chain variable domain of TCR clone 133618 (TRAV4, TRAJ39)
CLVGPNNNAGNMITF

SEQ ID NO: 267236 - protein, 15 aa, Homo sapiens
  CDR3 for beta chain variable domain of TCR clone 133618 (TRBV7-9, TRBJ1-6)
CASSSPGRGNSPLHF

SEQ ID NO: 267237 - protein, 13 aa, Homo sapiens
  CDR3 for alpha chain variable domain of TCR clone 133619 (TRAV4, TRAJ42)
CLVGGGSQGNLIF

SEQ ID NO: 267238 - protein, 16 aa, Homo sapiens
  CDR3 for beta chain variable domain of TCR clone 133619 (TRBV5-1, TRBJ2-3)
CASSLQGRVGADTQYV

SEQ ID NO: 267239 - protein, 16 aa, Homo sapiens
  CDR3 for alpha chain variable domain of TCR clone 133620 (TRAV21, TRAJ37)
CAVRTAGSSNTGKLIF

SEQ ID NO: 267240 - protein, 13 aa, Homo sapiens
  CDR3 for beta chain variable domain of TCR clone 133620 (TRBV7-9, TRBJ2-5)
CASVPSGRETQYF

SEQ ID NO: 267241 - protein, 13 aa, Homo sapiens
  CDR3 for alpha chain variable domain of TCR clone 133621 (TRAV8-2, TRAJ47)
CVVREREGNKLVF

SEQ ID NO: 267242 - protein, 15 aa, Homo sapiens
  CDR3 for beta chain variable domain of TCR clone 133621 (TRBV6-3, TRBJ2-7)
CASSSPGTVFYEQYF

SEQ ID NO: 267243 - protein, 12 aa, Homo sapiens
  CDR3 for alpha chain variable domain of TCR clone 133622 (TRAV27, TRAJ9)
CAGESGGFKTIF

SEQ ID NO: 267244 - protein, 14 aa, Homo sapiens
  CDR3 for beta chain variable domain of TCR clone 133622 (TRBV6-1, TRBJ2-1)
CASAKDGFYNEHFF

SEQ ID NO: 267245 - protein, 14 aa, Homo sapiens
  CDR3 for alpha chain variable domain of TCR clone 133623 (TRAV21, TRAJ45)
CAVSSGGGADGLTF

SEQ ID NO: 267246 - protein, 17 aa, Homo sapiens
  CDR3 for beta chain variable domain of TCR clone 133623 (TRBV13, TRBJ2-3)
CASSLSRVAGGRNTQYF

SEQ ID NO: 267247 - protein, 20 aa, Homo sapiens
  CDR3 for alpha chain variable domain of TCR clone 133624 (TRAV21, TRAJ4)
AASQPGDSATLAGGDNKLIF

SEQ ID NO: 267248 - protein, 19 aa, Homo sapiens
  CDR3 for beta chain variable domain of TCR clone 133624 (TRBV18, TRBJ1-3)
CASSPLSRTGMSSGNTIYF

SEQ ID NO: 267249 - protein, 11 aa, Homo sapiens
  CDR3 for alpha chain variable domain of TCR clone 133625 (TRAV2, TRAJ13)
CASGGYQKVTF

SEQ ID NO: 267250 - protein, 17 aa, Homo sapiens
  CDR3 for beta chain variable domain of TCR clone 133625 (TRBV20-1, TRBJ2-7)
CSARDPEGDHREYEQYF

SEQ ID NO: 267251 - protein, 14 aa, Homo sapiens
  CDR3 for alpha chain variable domain of TCR clone 133626 (TRAV26-1, TRAJ45)
CIVRGVGGADGLTF

SEQ ID NO: 267252 - protein, 16 aa, Homo sapiens
  CDR3 for beta chain variable domain of TCR clone 133626 (TRBV7-9, TRBJ1-1)
CASSLTQVRSNTEAFF

SEQ ID NO: 267253 - protein, 15 aa, Homo sapiens
  CDR3 for alpha chain variable domain of TCR clone 133627 (TRAV3, TRAJ24)
CAVRDKMTAGGNCSL

SEQ ID NO: 267254 - protein, 14 aa, Homo sapiens
  CDR3 for beta chain variable domain of TCR clone 133627 (TRBV4-2, TRBJ1-2)
CASSQDDRAYGYTF

SEQ ID NO: 267255 - protein, 15 aa, Homo sapiens
  CDR3 for alpha chain variable domain of TCR clone 133628 (TRAV1-1, TRAJ20)
CAVRDNIANDYKLSF

SEQ ID NO: 267256 - protein, 13 aa, Homo sapiens
  CDR3 for beta chain variable domain of TCR clone 133628 (TRBV4-1, TRBJ2-2)
CASSQENTGELFF

SEQ ID NO: 267257 - protein, 15 aa, Homo sapiens
  CDR3 for alpha chain variable domain of TCR clone 133629 (TRAV12-3, TRAJ49)
CAMAVTPNTGNQFYF

SEQ ID NO: 267258 - protein, 16 aa, Homo sapiens
  CDR3 for beta chain variable domain of TCR clone 133629 (TRBV19, TRBJ2-1)
CASSKAGPSSYNEQFF

SEQ ID NO: 267259 - protein, 14 aa, Homo sapiens
  CDR3 for alpha chain variable domain of TCR clone 133630 (TRAV1-2, TRAJ16)
CAVNRFSDGQKLLF

SEQ ID NO: 267260 - protein, 13 aa, Homo sapiens
  CDR3 for beta chain variable domain of TCR clone 133630 (TRBV20-1, TRBJ1-2)
CSASTERIYGYTF

SEQ ID NO: 267261 - protein, 16 aa, Homo sapiens
  CDR3 for alpha chain variable domain of TCR clone 133631 (TRAV3, TRAJ10)
CAVRDMRAGGGNKLTF

SEQ ID NO: 267262 - protein, 15 aa, Homo sapiens
  CDR3 for beta chain variable domain of TCR clone 133631 (TRBV11-2, TRBJ2-1)
CASSSPSTRYNEQFF

SEQ ID NO: 267263 - protein, 11 aa, Homo sapiens
  CDR3 for alpha chain variable domain of TCR clone 133632 (TRAV16, TRAJ31)
CALFNNARLMF

SEQ ID NO: 267264 - protein, 14 aa, Homo sapiens
  CDR3 for beta chain variable domain of TCR clone 133632 (TRBV15, TRBJ1-1)
CATRREWGNTEAFF

SEQ ID NO: 267265 - protein, 13 aa, Homo sapiens
  CDR3 for alpha chain variable domain of TCR clone 133633 (TRAV25, TRAJ10)
CAGRTGGGNKLTF

SEQ ID NO: 267266 - protein, 15 aa, Homo sapiens
  CDR3 for beta chain variable domain of TCR clone 133633 (TRBV7-2, TRBJ2-1)
CASSLVAGRYNEQFF

SEQ ID NO: 267267 - protein, 14 aa, Homo sapiens
  CDR3 for alpha chain variable domain of TCR clone 133634 (TRAV1-2, TRAJ16)
CAVNRFSDGQKLLF

SEQ ID NO: 267268 - protein, 16 aa, Homo sapiens
  CDR3 for beta chain variable domain of TCR clone 133634 (TRBV15, TRBJ2-1)
CHQQRLGLAGNNEQFF

SEQ ID NO: 267269 - protein, 13 aa, Homo sapiens
  CDR3 for alpha chain variable domain of TCR clone 133635 (TRAV36/DV7, TRAJ54)
CAVLIRGAQKLVF

SEQ ID NO: 267270 - protein, 13 aa, Homo sapiens
  CDR3 for beta chain variable domain of TCR clone 133635 (TRBV29-1, TRBJ2-4)
CSVGEGTKNIQYF

SEQ ID NO: 267271 - protein, 15 aa, Homo sapiens
  CDR3 for alpha chain variable domain of TCR clone 133636 (TRAV8-6, TRAJ11)
CAVSDRRSGYSTLTF

SEQ ID NO: 267272 - protein, 15 aa, Homo sapiens
  CDR3 for beta chain variable domain of TCR clone 133636 (TRBV7-3, TRBJ2-1)
CASSPTGGGRNEQFF

SEQ ID NO: 267273 - protein, 13 aa, Homo sapiens
  CDR3 for alpha chain variable domain of TCR clone 133637 (TRAV8-2, TRAJ49)
CVVTPNTGNQCYF

SEQ ID NO: 267274 - protein, 15 aa, Homo sapiens
  CDR3 for beta chain variable domain of TCR clone 133637 (TRBV11-2, TRBJ2-1)
CASSLTSGGYNEQFF

SEQ ID NO: 267275 - protein, 18 aa, Homo sapiens
  CDR3 for alpha chain variable domain of TCR clone 133638 (TRAV21, TRAJ52)
CAVRPSPAGGTSYGKLTF

SEQ ID NO: 267276 - protein, 13 aa, Homo sapiens
  CDR3 for beta chain variable domain of TCR clone 133638 (TRBV29-1, TRBJ2-1)
CGVEGGRVNEQFF

SEQ ID NO: 267277 - protein, 12 aa, Homo sapiens
  CDR3 for alpha chain variable domain of TCR clone 133639 (TRAV13-1, TRAJ49)
CAASSWGNQFYF

SEQ ID NO: 267278 - protein, 14 aa, Homo sapiens
  CDR3 for beta chain variable domain of TCR clone 133639 (TRBV12-4, TRBJ1-1)
CASSLDGLNTEAFF

SEQ ID NO: 267279 - protein, 15 aa, Homo sapiens
  CDR3 for alpha chain variable domain of TCR clone 133640 (TRAV17, TRAJ10)
CATVLLTGGGNKLTF

SEQ ID NO: 267280 - protein, 13 aa, Homo sapiens
  CDR3 for beta chain variable domain of TCR clone 133640 (TRBV7-9, TRBJ1-2)
CASSLKQNYGYTF

SEQ ID NO: 267281 - protein, 13 aa, Homo sapiens
  CDR3 for alpha chain variable domain of TCR clone 133641 (TRAV2, TRAJ40)
CAVVTSGTYKYIF

SEQ ID NO: 267282 - protein, 15 aa, Homo sapiens
  CDR3 for beta chain variable domain of TCR clone 133641 (TRBV11-2, TRBJ2-1)
CASSPAGQSLNEQFF

SEQ ID NO: 267283 - protein, 18 aa, Homo sapiens
  CDR3 for alpha chain variable domain of TCR clone 133642 (TRAV26-1, TRAJ23)
CIVRVGLEEWNQGGKLIF

SEQ ID NO: 267284 - protein, 16 aa, Homo sapiens
  CDR3 for beta chain variable domain of TCR clone 133642 (TRBV12-4, TRBJ2-5)
CASSFFVRGRQETQYF

SEQ ID NO: 267285 - protein, 14 aa, Homo sapiens
  CDR3 for alpha chain variable domain of TCR clone 133643 (TRAV12-2, TRAJ36)
CAVKISTGANNLFF

SEQ ID NO: 267286 - protein, 14 aa, Homo sapiens
  CDR3 for beta chain variable domain of TCR clone 133643 (TRBV25-1, TRBJ1-2)
CASSDTTGVGGYTF

SEQ ID NO: 267287 - protein, 16 aa, Homo sapiens
  CDR3 for alpha chain variable domain of TCR clone 133644 (TRAV14/DV4, TRAJ21)
CAMREGPENNFNKFYF

SEQ ID NO: 267288 - protein, 20 aa, Homo sapiens
  CDR3 for beta chain variable domain of TCR clone 133644 (TRBV7-8, TRBJ2-2)
CASSHLFPGPTIHITGELFF

SEQ ID NO: 267289 - protein, 12 aa, Homo sapiens
  CDR3 for alpha chain variable domain of TCR clone 133645 (TRAV12-3, TRAJ17)
CAMTLTGNKLTF

SEQ ID NO: 267290 - protein, 15 aa, Homo sapiens
  CDR3 for beta chain variable domain of TCR clone 133645 (TRBV7-6, TRBJ2-1)
CASSSLAGEGNEQFF

SEQ ID NO: 267291 - protein, 17 aa, Homo sapiens
  CDR3 for alpha chain variable domain of TCR clone 133646 (TRAV36/DV7, TRAJ52)
CAVAQRAGGTSYGKLTF

SEQ ID NO: 267292 - protein, 16 aa, Homo sapiens
  CDR3 for beta chain variable domain of TCR clone 133646 (TRBV20-1, TRBJ1-4)
RSAPGQGLLTNEKLFF

SEQ ID NO: 267293 - protein, 16 aa, Homo sapiens
  CDR3 for alpha chain variable domain of TCR clone 133647 (TRAV3, TRAJ37)
CAVRVRGSGNTGKLIF

SEQ ID NO: 267294 - protein, 14 aa, Homo sapiens
  CDR3 for beta chain variable domain of TCR clone 133647 (TRBV23-1, TRBJ2-5)
CASSFLRSQETQYF

SEQ ID NO: 267295 - protein, 15 aa, Homo sapiens
  CDR3 for alpha chain variable domain of TCR clone 133648 (TRAV2, TRAJ9)
CAVEDRGTGGFKTIF

SEQ ID NO: 267296 - protein, 16 aa, Homo sapiens
  CDR3 for beta chain variable domain of TCR clone 133648 (TRBV2, TRBJ2-1)
CASSVGGSLSYNEQFF

SEQ ID NO: 267297 - protein, 14 aa, Homo sapiens
  CDR3 for alpha chain variable domain of TCR clone 133649 (TRAV35, TRAJ54)
CAGYLIQGAQKLVF

SEQ ID NO: 267298 - protein, 13 aa, Homo sapiens
  CDR3 for beta chain variable domain of TCR clone 133649 (TRBV12-4, TRBJ1-5)
CASSPDRAQPQHF

SEQ ID NO: 267299 - protein, 12 aa, Homo sapiens
  CDR3 for alpha chain variable domain of TCR clone 133650 (TRAV8-3, TRAJ20)
CAVDFSDYKLSF

SEQ ID NO: 267300 - protein, 14 aa, Homo sapiens
  CDR3 for beta chain variable domain of TCR clone 133650 (TRBV11-2, TRBJ1-2)
CASSLYRGNYGYTF

SEQ ID NO: 267301 - protein, 16 aa, Homo sapiens
  CDR3 for alpha chain variable domain of TCR clone 133651 (TRAV12-3, TRAJ53)
CAMSQGSGGSNYKLTF

SEQ ID NO: 267302 - protein, 17 aa, Homo sapiens
  CDR3 for beta chain variable domain of TCR clone 133651 (TRBV28, TRBJ2-5)
CASSTPEGDALQETQYF

SEQ ID NO: 267303 - protein, 14 aa, Homo sapiens
  CDR3 for alpha chain variable domain of TCR clone 133652 (TRAV26-1, TRAJ45)
CIEVTGGGADGLTF

SEQ ID NO: 267304 - protein, 14 aa, Homo sapiens
  CDR3 for beta chain variable domain of TCR clone 133652 (TRBV7-2, TRBJ2-7)
CASRSQGAAYEQYF

SEQ ID NO: 267305 - protein, 13 aa, Homo sapiens
  CDR3 for alpha chain variable domain of TCR clone 133653 (TRAV12-2, TRAJ52)
CNAGGTSYGKLTF

SEQ ID NO: 267306 - protein, 16 aa, Homo sapiens
  CDR3 for beta chain variable domain of TCR clone 133653 (TRBV7-6, TRBJ2-7)
CASSGGTGALSYEQYF

SEQ ID NO: 267307 - protein, 18 aa, Homo sapiens
  CDR3 for alpha chain variable domain of TCR clone 133654 (TRAV9-2, TRAJ52)
CALSRHNAGGTSYGKLTF

SEQ ID NO: 267308 - protein, 14 aa, Homo sapiens
  CDR3 for beta chain variable domain of TCR clone 133654 (TRBV9, TRBJ2-4)
CASSPSGTSGFQYF

SEQ ID NO: 267309 - protein, 12 aa, Homo sapiens
  CDR3 for alpha chain variable domain of TCR clone 133655 (TRAV17, TRAJ49)
CATVTTGNQFYL

SEQ ID NO: 267310 - protein, 13 aa, Homo sapiens
  CDR3 for beta chain variable domain of TCR clone 133655 (TRBV7-2, TRBJ2-2)
CASSLAVTGELFF

SEQ ID NO: 267311 - protein, 12 aa, Homo sapiens
  CDR3 for alpha chain variable domain of TCR clone 133656 (TRAV16, TRAJ10)
CSRTGGGNKLTF

SEQ ID NO: 267312 - protein, 13 aa, Homo sapiens
  CDR3 for beta chain variable domain of TCR clone 133656 (TRBV11-2, TRBJ1-1)
CASSLGNGAEAFF

SEQ ID NO: 267313 - protein, 16 aa, Homo sapiens
  CDR3 for alpha chain variable domain of TCR clone 133657 (TRAV3, TRAJ37)
CAVRVRGPGNTGKLIF

SEQ ID NO: 267314 - protein, 11 aa, Homo sapiens
  CDR3 for beta chain variable domain of TCR clone 133657 (TRBV11-2, TRBJ2-2)
CASSLPGELFF

SEQ ID NO: 267315 - protein, 14 aa, Homo sapiens
  CDR3 for alpha chain variable domain of TCR clone 133658 (TRAV1-2, TRAJ16)
CAVNRFSDGQKLLF

SEQ ID NO: 267316 - protein, 17 aa, Homo sapiens
  CDR3 for beta chain variable domain of TCR clone 133658 (TRBV7-9, TRBJ2-1)
CASSLVASYPSYNEQVF

SEQ ID NO: 267317 - protein, 11 aa, Homo sapiens
  CDR3 for alpha chain variable domain of TCR clone 133659 (TRAV17, TRAJ36)
CAPTGANNLFF

SEQ ID NO: 267318 - protein, 13 aa, Homo sapiens
  CDR3 for beta chain variable domain of TCR clone 133659 (TRBV20-1, TRBJ1-1)
CSAPPGGHTEAVF

SEQ ID NO: 267319 - protein, 18 aa, Homo sapiens
  CDR3 for alpha chain variable domain of TCR clone 133660 (TRAV1-2, TRAJ18)
CSVRDMGDRGSTLGRLYF

SEQ ID NO: 267320 - protein, 16 aa, Homo sapiens
  CDR3 for beta chain variable domain of TCR clone 133660 (TRBV29-1, TRBJ1-2)
CSVEANRDIANYGYTF

SEQ ID NO: 267321 - protein, 16 aa, Homo sapiens
  CDR3 for alpha chain variable domain of TCR clone 133661 (TRAV4, TRAJ9)
CLVVDPNRPGGFKTIF

SEQ ID NO: 267322 - protein, 16 aa, Homo sapiens
  CDR3 for beta chain variable domain of TCR clone 133661 (TRBV28, TRBJ1-4)
CASSPPYRGRSEKLFF

SEQ ID NO: 267323 - protein, 17 aa, Homo sapiens
  CDR3 for alpha chain variable domain of TCR clone 133662 (TRAV26-1, TRAJ47)
CIVPSLLYMEYGNKLVF

SEQ ID NO: 267324 - protein, 14 aa, Homo sapiens
  CDR3 for beta chain variable domain of TCR clone 133662 (TRBV7-3, TRBJ1-5)
RASSFAGCNQPQHF

SEQ ID NO: 267325 - protein, 14 aa, Homo sapiens
  CDR3 for alpha chain variable domain of TCR clone 133663 (TRAV8-4, TRAJ13)
CAVTLSGGYQRVTF

SEQ ID NO: 267326 - protein, 14 aa, Homo sapiens
  CDR3 for beta chain variable domain of TCR clone 133663 (TRBV7-2, TRBJ1-2)
CASSQTGSTYGYTF

SEQ ID NO: 267327 - protein, 15 aa, Homo sapiens
  CDR3 for alpha chain variable domain of TCR clone 133664 (TRAV26-1, TRAJ29)
CVVRVEGSGNTPLVF

SEQ ID NO: 267328 - protein, 16 aa, Homo sapiens
  CDR3 for beta chain variable domain of TCR clone 133664 (TRBV28, TRBJ2-7)
CASSLFFETGGPEQYF

SEQ ID NO: 267329 - protein, 15 aa, Homo sapiens
  CDR3 for alpha chain variable domain of TCR clone 133665 (TRAV8-4, TRAJ47)
CSVSDPEEYGNKLVF

SEQ ID NO: 267330 - protein, 15 aa, Homo sapiens
  CDR3 for beta chain variable domain of TCR clone 133665 (TRBV11-2, TRBJ2-1)
CASSLGPDSYNEQFF

SEQ ID NO: 267331 - protein, 14 aa, Homo sapiens
  CDR3 for alpha chain variable domain of TCR clone 133666 (TRAV39, TRAJ54)
CAVVLIQGAQKLVF

SEQ ID NO: 267332 - protein, 17 aa, Homo sapiens
  CDR3 for beta chain variable domain of TCR clone 133666 (TRBV13, TRBJ2-3)
CASSLSRVAGGRNTQYF

SEQ ID NO: 267333 - protein, 16 aa, Homo sapiens
  CDR3 for alpha chain variable domain of TCR clone 133667 (TRAV14/DV4, TRAJ53)
CAMREGGGGSNYKLTF

SEQ ID NO: 267334 - protein, 17 aa, Homo sapiens
  CDR3 for beta chain variable domain of TCR clone 133667 (TRBV20-1, TRBJ2-1)
CSASSSGLAGSYNEQFF

SEQ ID NO: 267335 - protein, 12 aa, Homo sapiens
  CDR3 for alpha chain variable domain of TCR clone 133668 (TRAV27, TRAJ13)
CAGAGGYQKVTF

SEQ ID NO: 267336 - protein, 15 aa, Homo sapiens
  CDR3 for beta chain variable domain of TCR clone 133668 (TRBV28, TRBJ1-3)
CASSMGWASGNTIYF

SEQ ID NO: 267337 - protein, 14 aa, Homo sapiens
  CDR3 for alpha chain variable domain of TCR clone 133669 (TRAV29/DV5, TRAJ36)
CAARRKTGANNPFF

SEQ ID NO: 267338 - protein, 13 aa, Homo sapiens
  CDR3 for beta chain variable domain of TCR clone 133669 (TRBV7-9, TRBJ1-2)
CASSLKQNYGYTF

SEQ ID NO: 267339 - protein, 14 aa, Homo sapiens
  CDR3 for alpha chain variable domain of TCR clone 133670 (TRAV35, TRAJ33)
CAGSSQDSNYQLIW

SEQ ID NO: 267340 - protein, 19 aa, Homo sapiens
  CDR3 for beta chain variable domain of TCR clone 133670 (TRBV12-4, TRBJ2-1)
CASTLAFDPRDKEANEQFF

SEQ ID NO: 267341 - protein, 11 aa, Homo sapiens
  CDR3 for alpha chain variable domain of TCR clone 133671 (TRAV2, TRAJ13)
CASGGYQKVTF

SEQ ID NO: 267342 - protein, 14 aa, Homo sapiens
  CDR3 for beta chain variable domain of TCR clone 133671 (TRBV7-9, TRBJ2-2)
CASSGLADTGELFF

SEQ ID NO: 267343 - protein, 12 aa, Homo sapiens
  CDR3 for alpha chain variable domain of TCR clone 133672 (TRAV4, TRAJ26)
CLVGGYGQNFVF

SEQ ID NO: 267344 - protein, 14 aa, Homo sapiens
  CDR3 for beta chain variable domain of TCR clone 133672 (TRBV13, TRBJ2-5)
CASSLERVGETQYF

SEQ ID NO: 267345 - protein, 12 aa, Homo sapiens
  CDR3 for alpha chain variable domain of TCR clone 133673 (TRAV12-1, TRAJ34)
CVVAGATDKLIF

SEQ ID NO: 267346 - protein, 15 aa, Homo sapiens
  CDR3 for beta chain variable domain of TCR clone 133673 (TRBV4-1, TRBJ1-4)
CASSDTGGTNEKLFF

SEQ ID NO: 267347 - protein, 18 aa, Homo sapiens
  CDR3 for alpha chain variable domain of TCR clone 133674 (TRAV26-2, TRAJ45)
CILRLWGYSGGGAAGLTF

SEQ ID NO: 267348 - protein, 13 aa, Homo sapiens
  CDR3 for beta chain variable domain of TCR clone 133674 (TRBV7-8, TRBJ2-7)
CASSLTGGREQYF

SEQ ID NO: 267349 - protein, 17 aa, Homo sapiens
  CDR3 for alpha chain variable domain of TCR clone 133675 (TRAV13-1, TRAJ31)
CAPKDRLMFGDGTQLVV

SEQ ID NO: 267350 - protein, 12 aa, Homo sapiens
  CDR3 for beta chain variable domain of TCR clone 133675 (TRBV7-9, TRBJ2-7)
CASSLEGYEQYF

SEQ ID NO: 267351 - protein, 11 aa, Homo sapiens
  CDR3 for alpha chain variable domain of TCR clone 133676 (TRAV17, TRAJ9)
CGFTGGFKTIF

SEQ ID NO: 267352 - protein, 14 aa, Homo sapiens
  CDR3 for beta chain variable domain of TCR clone 133676 (TRBV7-2, TRBJ2-2)
CASRGQGAAGELFF

SEQ ID NO: 267353 - protein, 14 aa, Homo sapiens
  CDR3 for alpha chain variable domain of TCR clone 133677 (TRAV8-4, TRAJ48)
CAVSETFGNDKLTF

SEQ ID NO: 267354 - protein, 14 aa, Homo sapiens
  CDR3 for beta chain variable domain of TCR clone 133677 (TRBV13, TRBJ2-7)
CASSLKGASYEQYF

SEQ ID NO: 267355 - protein, 15 aa, Homo sapiens
  CDR3 for alpha chain variable domain of TCR clone 133678 (TRAV8-6, TRAJ10)
CAVSDQAGGGNKLTF

SEQ ID NO: 267356 - protein, 15 aa, Homo sapiens
  CDR3 for beta chain variable domain of TCR clone 133678 (TRBV20-1, TRBJ2-7)
CSARDRVSGMDEQYF

SEQ ID NO: 267357 - protein, 10 aa, Homo sapiens
  CDR3 for alpha chain variable domain of TCR clone 133679 (TRAV36/DV7, TRAJ50)
CAVEPENLLR

SEQ ID NO: 267358 - protein, 13 aa, Homo sapiens
  CDR3 for beta chain variable domain of TCR clone 133679 (TRBV7-2, TRBJ2-7)
CASSSPSGSEQYF

SEQ ID NO: 267359 - protein, 14 aa, Homo sapiens
  CDR3 for alpha chain variable domain of TCR clone 133680 (TRAV1-2, TRAJ16)
CAVNRFSDGQKLLF

SEQ ID NO: 267360 - protein, 16 aa, Homo sapiens
  CDR3 for beta chain variable domain of TCR clone 133680 (TRBV19, TRBJ2-2)
CANRSPGTGATGELFF

SEQ ID NO: 267361 - protein, 12 aa, Homo sapiens
  CDR3 for alpha chain variable domain of TCR clone 133681 (TRAV24, TRAJ26)
CALDNYGQNFVF

SEQ ID NO: 267362 - protein, 14 aa, Homo sapiens
  CDR3 for beta chain variable domain of TCR clone 133681 (TRBV12-5, TRBJ2-5)
CASGSRTHQETQYF

SEQ ID NO: 267363 - protein, 16 aa, Homo sapiens
  CDR3 for alpha chain variable domain of TCR clone 133682 (TRAV23/DV6, TRAJ9)
RAASIGGNTGGFKTIF

SEQ ID NO: 267364 - protein, 14 aa, Homo sapiens
  CDR3 for beta chain variable domain of TCR clone 133682 (TRBV9, TRBJ2-7)
CASSVGVGSYEQYF

SEQ ID NO: 267365 - protein, 14 aa, Homo sapiens
  CDR3 for alpha chain variable domain of TCR clone 133683 (TRAV12-2, TRAJ13)
CSVQKTGGYQKVTF

SEQ ID NO: 267366 - protein, 15 aa, Homo sapiens
  CDR3 for beta chain variable domain of TCR clone 133683 (TRBV27, TRBJ2-1)
CASSNGGGSSNEQFF

SEQ ID NO: 267367 - protein, 19 aa, Homo sapiens
  CDR3 for alpha chain variable domain of TCR clone 133684 (TRAV2, TRAJ20)
ILQVREADAAVYRDCKLSF

SEQ ID NO: 267368 - protein, 16 aa, Homo sapiens
  CDR3 for beta chain variable domain of TCR clone 133684 (TRBV9, TRBJ2-2)
CASGAMGKGNTGELFF

SEQ ID NO: 267369 - protein, 14 aa, Homo sapiens
  CDR3 for alpha chain variable domain of TCR clone 133685 (TRAV17, TRAJ57)
CATDPQGGSEKLVF

SEQ ID NO: 267370 - protein, 18 aa, Homo sapiens
  CDR3 for beta chain variable domain of TCR clone 133685 (TRBV6-6, TRBJ1-3)
CASSYSKWDSSSGNTIYF

SEQ ID NO: 267371 - protein, 15 aa, Homo sapiens
  CDR3 for alpha chain variable domain of TCR clone 133686 (TRAV14/DV4, TRAJ49)
CAMREGRDTGNQVYF

SEQ ID NO: 267372 - protein, 17 aa, Homo sapiens
  CDR3 for beta chain variable domain of TCR clone 133686 (TRBV12-4, TRBJ1-5)
CASSLRGDRGPNQPQHF

SEQ ID NO: 267373 - protein, 14 aa, Homo sapiens
  CDR3 for alpha chain variable domain of TCR clone 133687 (TRAV8-6, TRAJ29)
CAVSRATGNTPLVF

SEQ ID NO: 267374 - protein, 13 aa, Homo sapiens
  CDR3 for beta chain variable domain of TCR clone 133687 (TRBV19, TRBJ1-5)
CASSEGSNQPQHF

SEQ ID NO: 267375 - protein, 18 aa, Homo sapiens
  CDR3 for alpha chain variable domain of TCR clone 133688 (TRAV29/DV5, TRAJ52)
CAAGFRGAGGTSYGKLTF

SEQ ID NO: 267376 - protein, 14 aa, Homo sapiens
  CDR3 for beta chain variable domain of TCR clone 133688 (TRBV19, TRBJ2-1)
CASPTFVLSGEQFF

SEQ ID NO: 267377 - protein, 13 aa, Homo sapiens
  CDR3 for alpha chain variable domain of TCR clone 133689 (TRAV27, TRAJ49)
CAPRPYTGTQFYF

SEQ ID NO: 267378 - protein, 16 aa, Homo sapiens
  CDR3 for beta chain variable domain of TCR clone 133689 (TRBV4-1, TRBJ1-2)
CASSQDAGQVLYGYTF

SEQ ID NO: 267379 - protein, 14 aa, Homo sapiens
  CDR3 for alpha chain variable domain of TCR clone 133690 (TRAV1-2, TRAJ16)
CAVNRFSDGQKLLF

SEQ ID NO: 267380 - protein, 17 aa, Homo sapiens
  CDR3 for beta chain variable domain of TCR clone 133690 (TRBV13, TRBJ2-3)
CASSLSRAAGGRNTQYF

SEQ ID NO: 267381 - protein, 14 aa, Homo sapiens
  CDR3 for alpha chain variable domain of TCR clone 133691 (TRAV12-2, TRAJ17)
CAALFKAAGNKLTF

SEQ ID NO: 267382 - protein, 13 aa, Homo sapiens
  CDR3 for beta chain variable domain of TCR clone 133691 (TRBV4-1, TRBJ2-2)
CASSQENTGELFF

SEQ ID NO: 267383 - protein, 15 aa, Homo sapiens
  CDR3 for alpha chain variable domain of TCR clone 133692 (TRAV8-4, TRAJ10)
CAVSDGPGGGNKLPF

SEQ ID NO: 267384 - protein, 13 aa, Homo sapiens
  CDR3 for beta chain variable domain of TCR clone 133692 (TRBV28, TRBJ1-3)
CASSFLGSGTIYF

SEQ ID NO: 267385 - protein, 13 aa, Homo sapiens
  CDR3 for alpha chain variable domain of TCR clone 133693 (TRAV35, TRAJ37)
CTGSSGNTGKLIF

SEQ ID NO: 267386 - protein, 16 aa, Homo sapiens
  CDR3 for beta chain variable domain of TCR clone 133693 (TRBV10-3, TRBJ2-1)
CAISLTSGNSYNEQFF

SEQ ID NO: 267387 - protein, 21 aa, Homo sapiens
  CDR3 for alpha chain variable domain of TCR clone 133694 (TRAV13-1, TRAJ26)
SLHITETQPEDSAVYFCAIVF

SEQ ID NO: 267388 - protein, 18 aa, Homo sapiens
  CDR3 for beta chain variable domain of TCR clone 133694 (TRBV11-2, TRBJ2-6)
CASSLNPFLGTGANVLTF

SEQ ID NO: 267389 - protein, 13 aa, Homo sapiens
  CDR3 for alpha chain variable domain of TCR clone 133695 (TRAV17, TRAJ22)
CAHHSGSARQLTF

SEQ ID NO: 267390 - protein, 14 aa, Homo sapiens
  CDR3 for beta chain variable domain of TCR clone 133695 (TRBV4-1, TRBJ2-2)
CASSQAVNTGELFF

SEQ ID NO: 267391 - protein, 14 aa, Homo sapiens
  CDR3 for alpha chain variable domain of TCR clone 133696 (TRAV20, TRAJ56)
CAVQFGGANSKLTF

SEQ ID NO: 267392 - protein, 13 aa, Homo sapiens
  CDR3 for beta chain variable domain of TCR clone 133696 (TRBV7-6, TRBJ1-2)
CASSLVADYGYTF

SEQ ID NO: 267393 - protein, 17 aa, Homo sapiens
  CDR3 for alpha chain variable domain of TCR clone 133697 (TRAV3, TRAJ42)
CAVRDRDYGGSQGKLIF

SEQ ID NO: 267394 - protein, 12 aa, Homo sapiens
  CDR3 for beta chain variable domain of TCR clone 133697 (TRBV29-1, TRBJ2-2)
CSVDKYTGELFF

SEQ ID NO: 267395 - protein, 14 aa, Homo sapiens
  CDR3 for alpha chain variable domain of TCR clone 133698 (TRAV13-1, TRAJ44)
CAAEATGTASKLTF

SEQ ID NO: 267396 - protein, 12 aa, Homo sapiens
  CDR3 for beta chain variable domain of TCR clone 133698 (TRBV7-8, TRBJ2-7)
CASSLGDREQYF

SEQ ID NO: 267397 - protein, 13 aa, Homo sapiens
  CDR3 for alpha chain variable domain of TCR clone 133699 (TRAV24, TRAJ23)
CASHWNQGGKLIF

SEQ ID NO: 267398 - protein, 13 aa, Homo sapiens
  CDR3 for beta chain variable domain of TCR clone 133699 (TRBV13, TRBJ2-1)
CASIVGGRGEQFF

SEQ ID NO: 267399 - protein, 14 aa, Homo sapiens
  CDR3 for alpha chain variable domain of TCR clone 133700 (TRAV20, TRAJ10)
CAVRVEGGGNKPTF

SEQ ID NO: 267400 - protein, 18 aa, Homo sapiens
  CDR3 for beta chain variable domain of TCR clone 133700 (TRBV24-1, TRBJ2-1)
CATSDLMFLGRGVHEQFF

SEQ ID NO: 267401 - protein, 15 aa, Homo sapiens
  CDR3 for alpha chain variable domain of TCR clone 133701 (TRAV29/DV5, TRAJ24)
CAASGATDSWGKFQF

SEQ ID NO: 267402 - protein, 15 aa, Homo sapiens
  CDR3 for beta chain variable domain of TCR clone 133701 (TRBV7-9, TRBJ1-5)
CASSQGHQPNQPQHF

SEQ ID NO: 267403 - protein, 14 aa, Homo sapiens
  CDR3 for alpha chain variable domain of TCR clone 133702 (TRAV35, TRAJ33)
CAGSSQDSNYQLIW

SEQ ID NO: 267404 - protein, 15 aa, Homo sapiens
  CDR3 for beta chain variable domain of TCR clone 133702 (TRBV7-9, TRBJ1-6)
CASSSPGRGNSPLHF

SEQ ID NO: 267405 - protein, 14 aa, Homo sapiens
  CDR3 for alpha chain variable domain of TCR clone 133703 (TRAV12-2, TRAJ5)
CAVKGDTGRRALTF

SEQ ID NO: 267406 - protein, 18 aa, Homo sapiens
  CDR3 for beta chain variable domain of TCR clone 133703 (TRBV11-2, TRBJ2-3)
CASSLGGASRGAPNTQYF

SEQ ID NO: 267407 - protein, 14 aa, Homo sapiens
  CDR3 for alpha chain variable domain of TCR clone 133704 (TRAV14/DV4, TRAJ42)
CPRGSLRSQGNLIF

SEQ ID NO: 267408 - protein, 14 aa, Homo sapiens
  CDR3 for beta chain variable domain of TCR clone 133704 (TRBV12-4, TRBJ2-1)
CASSWTSGVNEQFF

SEQ ID NO: 267409 - protein, 17 aa, Homo sapiens
  CDR3 for alpha chain variable domain of TCR clone 133705 (TRAV3, TRAJ6)
CALSRRTDTGGSYIPTF

SEQ ID NO: 267410 - protein, 18 aa, Homo sapiens
  CDR3 for beta chain variable domain of TCR clone 133705 (TRBV7-2, TRBJ2-3)
CASSLETSRGRKADTQYF

SEQ ID NO: 267411 - protein, 17 aa, Homo sapiens
  CDR3 for alpha chain variable domain of TCR clone 133706 (TRAV4, TRAJ20)
CTTASWGKGNNDYKLSF

SEQ ID NO: 267412 - protein, 17 aa, Homo sapiens
  CDR3 for beta chain variable domain of TCR clone 133706 (TRBV11-2, TRBJ2-1)
CASSLYPPGVEYNEQFF

SEQ ID NO: 267413 - protein, 15 aa, Homo sapiens
  CDR3 for alpha chain variable domain of TCR clone 133707 (TRAV26-1, TRAJ29)
CIVRVEGSGNTPLVF

SEQ ID NO: 267414 - protein, 13 aa, Homo sapiens
  CDR3 for beta chain variable domain of TCR clone 133707 (TRBV9, TRBJ2-7)
CASSVAEYYEQYF

SEQ ID NO: 267415 - protein, 14 aa, Homo sapiens
  CDR3 for alpha chain variable domain of TCR clone 133708 (TRAV12-3, TRAJ10)
SHLPLTGGGNKLTF

SEQ ID NO: 267416 - protein, 12 aa, Homo sapiens
  CDR3 for beta chain variable domain of TCR clone 133708 (TRBV7-3, TRBJ2-5)
CASSSAGGTQYF

SEQ ID NO: 267417 - protein, 15 aa, Homo sapiens
  CDR3 for alpha chain variable domain of TCR clone 133709 (TRAV12-3, TRAJ11)
CAMSEENSGYSTLTF

SEQ ID NO: 267418 - protein, 14 aa, Homo sapiens
  CDR3 for beta chain variable domain of TCR clone 133709 (TRBV19, TRBJ2-1)
CASPTFVLSGEQFF

SEQ ID NO: 267419 - protein, 15 aa, Homo sapiens
  CDR3 for alpha chain variable domain of TCR clone 133710 (TRAV26-1, TRAJ29)
CIVRVEGSGNTPLVF

SEQ ID NO: 267420 - protein, 16 aa, Homo sapiens
  CDR3 for beta chain variable domain of TCR clone 133710 (TRBV7-7, TRBJ2-1)
CASSLASGTSYNEQFF

SEQ ID NO: 267421 - protein, 15 aa, Homo sapiens
  CDR3 for alpha chain variable domain of TCR clone 133711 (TRAV17, TRAJ22)
CATVAPSGSARQLTF

SEQ ID NO: 267422 - protein, 18 aa, Homo sapiens
  CDR3 for beta chain variable domain of TCR clone 133711 (TRBV7-9, TRBJ2-7)
CASSLTTSGSRTWYEQYF

SEQ ID NO: 267423 - protein, 15 aa, Homo sapiens
  CDR3 for alpha chain variable domain of TCR clone 133712 (TRAV8-3, TRAJ6)
CAVGPLGGGSDIPTF

SEQ ID NO: 267424 - protein, 14 aa, Homo sapiens
  CDR3 for beta chain variable domain of TCR clone 133712 (TRBV19, TRBJ2-2)
CASSTGQGAGELFF

SEQ ID NO: 267425 - protein, 16 aa, Homo sapiens
  CDR3 for alpha chain variable domain of TCR clone 133713 (TRAV3, TRAJ5)
CAVRNLMDTGRRALTF

SEQ ID NO: 267426 - protein, 16 aa, Homo sapiens
  CDR3 for beta chain variable domain of TCR clone 133713 (TRBV4-2, TRBJ2-7)
CASSQEGLASSYEQYF

SEQ ID NO: 267427 - protein, 14 aa, Homo sapiens
  CDR3 for alpha chain variable domain of TCR clone 133714 (TRAV35, TRAJ13)
CAGSPSGGYQQVTF

SEQ ID NO: 267428 - protein, 13 aa, Homo sapiens
  CDR3 for beta chain variable domain of TCR clone 133714 (TRBV29-1, TRBJ1-1)
CSVGDSRNTEAFF

SEQ ID NO: 267429 - protein, 15 aa, Homo sapiens
  CDR3 for alpha chain variable domain of TCR clone 133715 (TRAV38-1, TRAJ57)
CAFMGSQGGSEKLVF

SEQ ID NO: 267430 - protein, 16 aa, Homo sapiens
  CDR3 for beta chain variable domain of TCR clone 133715 (TRBV10-3, TRBJ2-1)
CAIRGGGRGDYNEQFF

SEQ ID NO: 267431 - protein, 15 aa, Homo sapiens
  CDR3 for alpha chain variable domain of TCR clone 133716 (TRAV2, TRAJ9)
CAVEGRGTGGFKTIF

SEQ ID NO: 267432 - protein, 16 aa, Homo sapiens
  CDR3 for beta chain variable domain of TCR clone 133716 (TRBV24-1, TRBJ2-3)
CAASDPGTGATDTQYF

SEQ ID NO: 267433 - protein, 18 aa, Homo sapiens
  CDR3 for alpha chain variable domain of TCR clone 133717 (TRAV13-1, TRAJ52)
CAAKNPNSGGTSYGKLTF

SEQ ID NO: 267434 - protein, 15 aa, Homo sapiens
  CDR3 for beta chain variable domain of TCR clone 133717 (TRBV28, TRBJ2-1)
CASSIIAGGRSEQFF

SEQ ID NO: 267435 - protein, 14 aa, Homo sapiens
  CDR3 for alpha chain variable domain of TCR clone 133718 (TRAV17, TRAJ16)
CATADFSYGQKLLF

SEQ ID NO: 267436 - protein, 12 aa, Homo sapiens
  CDR3 for beta chain variable domain of TCR clone 133718 (TRBV24-1, TRBJ1-1)
CATLYPDTEAFF

SEQ ID NO: 267437 - protein, 14 aa, Homo sapiens
  CDR3 for alpha chain variable domain of TCR clone 133719 (TRAV1-1, TRAJ27)
CAVIYNTNAGKSTF

SEQ ID NO: 267438 - protein, 16 aa, Homo sapiens
  CDR3 for beta chain variable domain of TCR clone 133719 (TRBV5-1, TRBJ2-3)
CASSLEGGSFTDTQYF

SEQ ID NO: 267439 - protein, 18 aa, Homo sapiens
  CDR3 for alpha chain variable domain of TCR clone 133720 (TRAV21, TRAJ52)
CGVRPSPAGGTSYGKLTF

SEQ ID NO: 267440 - protein, 17 aa, Homo sapiens
  CDR3 for beta chain variable domain of TCR clone 133720 (TRBV13, TRBJ2-3)
CASSLSRVAGGRNTQYF

SEQ ID NO: 267441 - protein, 16 aa, Homo sapiens
  CDR3 for alpha chain variable domain of TCR clone 133721 (TRAV38-1, TRAJ42)
CAFMKLGGGSQGNLIF

SEQ ID NO: 267442 - protein, 17 aa, Homo sapiens
  CDR3 for beta chain variable domain of TCR clone 133721 (TRBV28, TRBJ2-5)
CASSTPEGDALQETQYF

SEQ ID NO: 267443 - protein, 11 aa, Homo sapiens
  CDR3 for alpha chain variable domain of TCR clone 133722 (TRAV13-1, TRAJ39)
CAFHAGNMLTF

SEQ ID NO: 267444 - protein, 14 aa, Homo sapiens
  CDR3 for beta chain variable domain of TCR clone 133722 (TRBV11-2, TRBJ1-5)
CASSLDRGRQPQHF

SEQ ID NO: 267445 - protein, 14 aa, Homo sapiens
  CDR3 for alpha chain variable domain of TCR clone 133723 (TRAV12-3, TRAJ9)
CALSPNTGGFKTIF

SEQ ID NO: 267446 - protein, 12 aa, Homo sapiens
  CDR3 for beta chain variable domain of TCR clone 133723 (TRBV19, TRBJ1-5)
CASSIAQQPQHF

SEQ ID NO: 267447 - protein, 15 aa, Homo sapiens
  CDR3 for alpha chain variable domain of TCR clone 133724 (TRAV22, TRAJ24)
CAVPLSTDSWGKFQF

SEQ ID NO: 267448 - protein, 14 aa, Homo sapiens
  CDR3 for beta chain variable domain of TCR clone 133724 (TRBV7-2, TRBJ2-7)
CASRSQGAAYEQYF

SEQ ID NO: 267449 - protein, 18 aa, Homo sapiens
  CDR3 for alpha chain variable domain of TCR clone 133725 (TRAV3, TRAJ17)
CAVRARRGGRSCRQQANF

SEQ ID NO: 267450 - protein, 14 aa, Homo sapiens
  CDR3 for beta chain variable domain of TCR clone 133725 (TRBV4-1, TRBJ2-2)
CSCSQAVNTGELFF

SEQ ID NO: 267451 - protein, 16 aa, Homo sapiens
  CDR3 for alpha chain variable domain of TCR clone 133726 (TRAV17, TRAJ52)
CATGIIGGTSYGKLTF

SEQ ID NO: 267452 - protein, 15 aa, Homo sapiens
  CDR3 for beta chain variable domain of TCR clone 133726 (TRBV18, TRBJ2-1)
CASSPPSASYNEQFF

SEQ ID NO: 267453 - protein, 14 aa, Homo sapiens
  CDR3 for alpha chain variable domain of TCR clone 133727 (TRAV12-2, TRAJ13)
CAVKKTGGYQKVTF

SEQ ID NO: 267454 - protein, 15 aa, Homo sapiens
  CDR3 for beta chain variable domain of TCR clone 133727 (TRBV6-6, TRBJ2-7)
CASSYSYGGSYEQYF

SEQ ID NO: 267455 - protein, 19 aa, Homo sapiens
  CDR3 for alpha chain variable domain of TCR clone 133728 (TRAV26-1, TRAJ28)
CIVRVAHAYSVAGSYQLTF

SEQ ID NO: 267456 - protein, 12 aa, Homo sapiens
  CDR3 for beta chain variable domain of TCR clone 133728 (TRBV27, TRBJ2-2)
CASKLFTGELFF

SEQ ID NO: 267457 - protein, 14 aa, Homo sapiens
  CDR3 for alpha chain variable domain of TCR clone 133729 (TRAV17, TRAJ12)
CAILPMDSSYKLIF

SEQ ID NO: 267458 - protein, 13 aa, Homo sapiens
  CDR3 for beta chain variable domain of TCR clone 133729 (TRBV27, TRBJ1-1)
CASSLSIGAEAFF

SEQ ID NO: 267459 - protein, 16 aa, Homo sapiens
  CDR3 for alpha chain variable domain of TCR clone 133730 (TRAV26-1, TRAJ32)
CIVRTNYGGATNKHIF

SEQ ID NO: 267460 - protein, 14 aa, Homo sapiens
  CDR3 for beta chain variable domain of TCR clone 133730 (TRBV27, TRBJ1-1)
CASSLLSGLSEAFF

SEQ ID NO: 267461 - protein, 13 aa, Homo sapiens
  CDR3 for alpha chain variable domain of TCR clone 133731 (TRAV2, TRAJ20)
CAVEDPSEYKLSF

SEQ ID NO: 267462 - protein, 15 aa, Homo sapiens
  CDR3 for beta chain variable domain of TCR clone 133731 (TRBV7-9, TRBJ1-6)
CASSSPGRGNSPLHF

SEQ ID NO: 267463 - protein, 15 aa, Homo sapiens
  CDR3 for alpha chain variable domain of TCR clone 133732 (TRAV12-3, TRAJ45)
CASSYSGGGADGLTF

SEQ ID NO: 267464 - protein, 13 aa, Homo sapiens
  CDR3 for beta chain variable domain of TCR clone 133732 (TRBV10-3, TRBJ2-7)
CASKLAVNYEQYF

SEQ ID NO: 267465 - protein, 14 aa, Homo sapiens
  CDR3 for alpha chain variable domain of TCR clone 133733 (TRAV29/DV5, TRAJ20)
CAATICSNDYKLSF

SEQ ID NO: 267466 - protein, 15 aa, Homo sapiens
  CDR3 for beta chain variable domain of TCR clone 133733 (TRBV20-1, TRBJ2-1)
CSASSAGSSYNEQFF

SEQ ID NO: 267467 - protein, 11 aa, Homo sapiens
  CDR3 for alpha chain variable domain of TCR clone 133734 (TRAV2, TRAJ21)
CAVFNFNKFYF

SEQ ID NO: 267468 - protein, 14 aa, Homo sapiens
  CDR3 for beta chain variable domain of TCR clone 133734 (TRBV7-9, TRBJ2-1)
CASSPRDSLYEQFF

SEQ ID NO: 267469 - protein, 14 aa, Homo sapiens
  CDR3 for alpha chain variable domain of TCR clone 133735 (TRAV12-2, TRAJ9)
CAVNALEGGFKTIF

SEQ ID NO: 267470 - protein, 14 aa, Homo sapiens
  CDR3 for beta chain variable domain of TCR clone 133735 (TRBV12-4, TRBJ1-1)
CASSLGTGGTEAFF

SEQ ID NO: 267471 - protein, 11 aa, Homo sapiens
  CDR3 for alpha chain variable domain of TCR clone 133736 (TRAV26-1, TRAJ37)
CIVRVGRKLIF

SEQ ID NO: 267472 - protein, 12 aa, Homo sapiens
  CDR3 for beta chain variable domain of TCR clone 133736 (TRBV20-1, TRBJ2-7)
CSAITPTKEQYF

SEQ ID NO: 267473 - protein, 13 aa, Homo sapiens
  CDR3 for alpha chain variable domain of TCR clone 133737 (TRAV12-1, TRAJ40)
YVVPTSGTYKYIF

SEQ ID NO: 267474 - protein, 18 aa, Homo sapiens
  CDR3 for beta chain variable domain of TCR clone 133737 (TRBV7-6, TRBJ2-1)
CASSPRTSGMSSYNEQFF

SEQ ID NO: 267475 - protein, 16 aa, Homo sapiens
  CDR3 for alpha chain variable domain of TCR clone 133738 (TRAV21, TRAJ52)
CAVTNAGGTSYGKLTF

SEQ ID NO: 267476 - protein, 13 aa, Homo sapiens
  CDR3 for beta chain variable domain of TCR clone 133738 (TRBV20-1, TRBJ2-3)
CSARLEGTDTQYF

SEQ ID NO: 267477 - protein, 13 aa, Homo sapiens
  CDR3 for alpha chain variable domain of TCR clone 133739 (TRAV8-6, TRAJ49)
CAVITNNGNQFYF

SEQ ID NO: 267478 - protein, 14 aa, Homo sapiens
  CDR3 for beta chain variable domain of TCR clone 133739 (TRBV5-1, TRBJ2-7)
CASSRGESLYEQYF

SEQ ID NO: 267479 - protein, 12 aa, Homo sapiens
  CDR3 for alpha chain variable domain of TCR clone 133740 (TRAV2, TRAJ33)
CAFMDSNYQLIW

SEQ ID NO: 267480 - protein, 16 aa, Homo sapiens
  CDR3 for beta chain variable domain of TCR clone 133740 (TRBV2, TRBJ2-7)
CASSEPWTVPSYEQYF

SEQ ID NO: 267481 - protein, 17 aa, Homo sapiens
  CDR3 for alpha chain variable domain of TCR clone 133741 (TRAV4, TRAJ18)
CLVGERTVGSTLGRLYF

SEQ ID NO: 267482 - protein, 14 aa, Homo sapiens
  CDR3 for beta chain variable domain of TCR clone 133741 (TRBV6-5, TRBJ1-2)
CASSYDGTGGGYTF

SEQ ID NO: 267483 - protein, 16 aa, Homo sapiens
  CDR3 for alpha chain variable domain of TCR clone 133742 (TRAV30, TRAJ24)
CGTEIVDADSWGKFQF

SEQ ID NO: 267484 - protein, 14 aa, Homo sapiens
  CDR3 for beta chain variable domain of TCR clone 133742 (TRBV27, TRBJ1-1)
CASSQGTVMTEAFF

SEQ ID NO: 267485 - protein, 13 aa, Homo sapiens
  CDR3 for alpha chain variable domain of TCR clone 133743 (TRAV8-4, TRAJ48)
CAVSLFGNEKLTF

SEQ ID NO: 267486 - protein, 13 aa, Homo sapiens
  CDR3 for beta chain variable domain of TCR clone 133743 (TRBV4-1, TRBJ2-2)
CASSQENTGELFF

SEQ ID NO: 267487 - protein, 13 aa, Homo sapiens
  CDR3 for alpha chain variable domain of TCR clone 133744 (TRAV38-1, TRAJ30)
CAFISSGDDKIIF

SEQ ID NO: 267488 - protein, 13 aa, Homo sapiens
  CDR3 for beta chain variable domain of TCR clone 133744 (TRBV7-9, TRBJ1-2)
CASSLKQNYGYTF

SEQ ID NO: 267489 - protein, 12 aa, Homo sapiens
  CDR3 for alpha chain variable domain of TCR clone 133745 (TRAV13-1, TRAJ21)
CAAFFNFNTFYF

SEQ ID NO: 267490 - protein, 14 aa, Homo sapiens
  CDR3 for beta chain variable domain of TCR clone 133745 (TRBV4-1, TRBJ2-7)
CASRLTSGSYEQYF

SEQ ID NO: 267491 - protein, 16 aa, Homo sapiens
  CDR3 for alpha chain variable domain of TCR clone 133746 (TRAV14/DV4, TRAJ53)
CAMREGGGGSNYKLTF

SEQ ID NO: 267492 - protein, 15 aa, Homo sapiens
  CDR3 for beta chain variable domain of TCR clone 133746 (TRBV12-4, TRBJ2-5)
CASSPPTGPQETQYF

SEQ ID NO: 267493 - protein, 12 aa, Homo sapiens
  CDR3 for alpha chain variable domain of TCR clone 133747 (TRAV12-3, TRAJ17)
CAMTLTGNKLTF

SEQ ID NO: 267494 - protein, 13 aa, Homo sapiens
  CDR3 for beta chain variable domain of TCR clone 133747 (TRBV10-3, TRBJ2-7)
CASKLAVNYEQFF

SEQ ID NO: 267495 - protein, 12 aa, Homo sapiens
  CDR3 for alpha chain variable domain of TCR clone 133748 (TRAV1-1, TRAJ9)
CAVDTGGFKTIS

SEQ ID NO: 267496 - protein, 22 aa, Homo sapiens
  CDR3 for beta chain variable domain of TCR clone 133748 (TRBV9, TRBJ1-3)
CASSVDPGETTIALETPYILER

SEQ ID NO: 267497 - protein, 15 aa, Homo sapiens
  CDR3 for alpha chain variable domain of TCR clone 133749 (TRAV12-2, TRAJ53)
CAVNGGGGSNHKLTF

SEQ ID NO: 267498 - protein, 15 aa, Homo sapiens
  CDR3 for beta chain variable domain of TCR clone 133749 (TRBV20-1, TRBJ2-7)
CSARDRVSGMDEQYF

SEQ ID NO: 267499 - protein, 14 aa, Homo sapiens
  CDR3 for alpha chain variable domain of TCR clone 133750 (TRAV1-2, TRAJ16)
CAVNRFSDGQKLLF

SEQ ID NO: 267500 - protein, 15 aa, Homo sapiens
  CDR3 for beta chain variable domain of TCR clone 133750 (TRBV5-1, TRBJ2-1)
CASKGLAGVYNEQFF

SEQ ID NO: 267501 - protein, 14 aa, Homo sapiens
  CDR3 for alpha chain variable domain of TCR clone 133751 (TRAV8-4, TRAJ13)
CAVTLSGGYQKVTF

SEQ ID NO: 267502 - protein, 14 aa, Homo sapiens
  CDR3 for beta chain variable domain of TCR clone 133751 (TRBV7-2, TRBJ1-2)
CASSQTGSTHGYTF

SEQ ID NO: 267503 - protein, 13 aa, Homo sapiens
  CDR3 for alpha chain variable domain of TCR clone 133752 (TRAV35, TRAJ21)
CAGQPSNFNKFYF

SEQ ID NO: 267504 - protein, 11 aa, Homo sapiens
  CDR3 for beta chain variable domain of TCR clone 133752 (TRBV7-6, TRBJ2-5)
CASSSQETQYF

SEQ ID NO: 267505 - protein, 14 aa, Homo sapiens
  CDR3 for alpha chain variable domain of TCR clone 133753 (TRAV2, TRAJ37)
CAVDFTSNTGKLFF

SEQ ID NO: 267506 - protein, 15 aa, Homo sapiens
  CDR3 for beta chain variable domain of TCR clone 133753 (TRBV20-1, TRBJ1-1)
CSASRGVTGNTEAFF

SEQ ID NO: 267507 - protein, 14 aa, Homo sapiens
  CDR3 for alpha chain variable domain of TCR clone 133754 (TRAV8-3, TRAJ33)
CAVGRMDSNYQLIW

SEQ ID NO: 267508 - protein, 17 aa, Homo sapiens
  CDR3 for beta chain variable domain of TCR clone 133754 (TRBV19, TRBJ2-6)
CASSTGQVFSGANVLTF

SEQ ID NO: 267509 - protein, 14 aa, Homo sapiens
  CDR3 for alpha chain variable domain of TCR clone 133755 (TRAV21, TRAJ28)
CAVGSGAGSYQLTF

SEQ ID NO: 267510 - protein, 14 aa, Homo sapiens
  CDR3 for beta chain variable domain of TCR clone 133755 (TRBV7-8, TRBJ2-3)
CASSLEAGTDTQYF

SEQ ID NO: 267511 - protein, 12 aa, Homo sapiens
  CDR3 for alpha chain variable domain of TCR clone 133756 (TRAV13-1, TRAJ42)
SVLRGSQGNLIF

SEQ ID NO: 267512 - protein, 16 aa, Homo sapiens
  CDR3 for beta chain variable domain of TCR clone 133756 (TRBV5-1, TRBJ2-3)
CASSLQGRVGADTQYF

SEQ ID NO: 267513 - protein, 13 aa, Homo sapiens
  CDR3 for alpha chain variable domain of TCR clone 133757 (TRAV12-1, TRAJ49)
CVVNTNTGNQFYF

SEQ ID NO: 267514 - protein, 16 aa, Homo sapiens
  CDR3 for beta chain variable domain of TCR clone 133757 (TRBV12-5, TRBJ2-5)
CASGPRTSGNQETQYF

SEQ ID NO: 267515 - protein, 15 aa, Homo sapiens
  CDR3 for alpha chain variable domain of TCR clone 133758 (TRAV26-1, TRAJ17)
CIVRVVKAAVNKLTF

SEQ ID NO: 267516 - protein, 16 aa, Homo sapiens
  CDR3 for beta chain variable domain of TCR clone 133758 (TRBV7-9, TRBJ2-1)
CASSLVSGPSYNEQFF

SEQ ID NO: 267517 - protein, 13 aa, Homo sapiens
  CDR3 for alpha chain variable domain of TCR clone 133759 (TRAV16, TRAJ28)
CALTGAGSYQLTF

SEQ ID NO: 267518 - protein, 12 aa, Homo sapiens
  CDR3 for beta chain variable domain of TCR clone 133759 (TRBV12-4, TRBJ1-2)
CASSFIWLHLRF

SEQ ID NO: 267519 - protein, 13 aa, Homo sapiens
  CDR3 for alpha chain variable domain of TCR clone 133760 (TRAV12-2, TRAJ20)
CAVNRFDDYNLSF

SEQ ID NO: 267520 - protein, 12 aa, Homo sapiens
  CDR3 for beta chain variable domain of TCR clone 133760 (TRBV28, TRBJ2-3)
CASSLYRDTQYF

SEQ ID NO: 267521 - protein, 14 aa, Homo sapiens
  CDR3 for alpha chain variable domain of TCR clone 133761 (TRAV12-3, TRAJ10)
SHLPLTGGGNKLTF

SEQ ID NO: 267522 - protein, 14 aa, Homo sapiens
  CDR3 for beta chain variable domain of TCR clone 133761 (TRBV6-1, TRBJ1-3)
CASVPGGGGNTIYF

SEQ ID NO: 267523 - protein, 14 aa, Homo sapiens
  CDR3 for alpha chain variable domain of TCR clone 133762 (TRAV17, TRAJ4)
CATAPLGGYSKLIF

SEQ ID NO: 267524 - protein, 13 aa, Homo sapiens
  CDR3 for beta chain variable domain of TCR clone 133762 (TRBV12-4, TRBJ1-3)
CASSLASGNTMYF

SEQ ID NO: 267525 - protein, 16 aa, Homo sapiens
  CDR3 for alpha chain variable domain of TCR clone 133763 (TRAV8-3, TRAJ8)
CAVSRDGNTGFQKLVF

SEQ ID NO: 267526 - protein, 14 aa, Homo sapiens
  CDR3 for beta chain variable domain of TCR clone 133763 (TRBV28, TRBJ1-1)
CASSESGRGTEAFF

SEQ ID NO: 267527 - protein, 15 aa, Homo sapiens
  CDR3 for alpha chain variable domain of TCR clone 133764 (TRAV23/DV6, TRAJ18)
CAARYRGSTLGRLYF

SEQ ID NO: 267528 - protein, 15 aa, Homo sapiens
  CDR3 for beta chain variable domain of TCR clone 133764 (TRBV9, TRBJ1-3)
CASSVTGFSGNTIYF

SEQ ID NO: 267529 - protein, 13 aa, Homo sapiens
  CDR3 for alpha chain variable domain of TCR clone 133765 (TRAV3, TRAJ21)
CAVGNFNKFYFDL

SEQ ID NO: 267530 - protein, 16 aa, Homo sapiens
  CDR3 for beta chain variable domain of TCR clone 133765 (TRBV19, TRBJ2-1)
CAGSKAGPSSYNEQFF

SEQ ID NO: 267531 - protein, 16 aa, Homo sapiens
  CDR3 for alpha chain variable domain of TCR clone 133766 (TRAV21, TRAJ37)
CAVRTAGSSNTGKLIF

SEQ ID NO: 267532 - protein, 16 aa, Homo sapiens
  CDR3 for beta chain variable domain of TCR clone 133766 (TRBV27, TRBJ2-2)
CASSFRGLVRTGELFF

SEQ ID NO: 267533 - protein, 16 aa, Homo sapiens
  CDR3 for alpha chain variable domain of TCR clone 133767 (TRAV30, TRAJ24)
CGTEIVDADSWGKFQF

SEQ ID NO: 267534 - protein, 15 aa, Homo sapiens
  CDR3 for beta chain variable domain of TCR clone 133767 (TRBV12-4, TRBJ1-2)
CASSPITGGGYGYTF

SEQ ID NO: 267535 - protein, 11 aa, Homo sapiens
  CDR3 for alpha chain variable domain of TCR clone 133768 (TRAV12-2, TRAJ33)
CAVTSNYPLIW

SEQ ID NO: 267536 - protein, 14 aa, Homo sapiens
  CDR3 for beta chain variable domain of TCR clone 133768 (TRBV12-4, TRBJ2-2)
CASNQGANTGELFF

SEQ ID NO: 267537 - protein, 14 aa, Homo sapiens
  CDR3 for alpha chain variable domain of TCR clone 133769 (TRAV38-1, TRAJ45)
CAYYSGGGADGLTF

SEQ ID NO: 267538 - protein, 14 aa, Homo sapiens
  CDR3 for beta chain variable domain of TCR clone 133769 (TRBV4-2, TRBJ2-1)
CASGLDRAYNEQFF

SEQ ID NO: 267539 - protein, 12 aa, Homo sapiens
  CDR3 for alpha chain variable domain of TCR clone 133770 (TRAV13-1, TRAJ49)
FAAPNTGNQFYF

SEQ ID NO: 267540 - protein, 17 aa, Homo sapiens
  CDR3 for beta chain variable domain of TCR clone 133770 (TRBV25-1, TRBJ2-7)
CASSDARVVFSSYEQYF

SEQ ID NO: 267541 - protein, 15 aa, Homo sapiens
  CDR3 for alpha chain variable domain of TCR clone 133771 (TRAV3, TRAJ36)
CAVRASQTGANNLFF

SEQ ID NO: 267542 - protein, 15 aa, Homo sapiens
  CDR3 for beta chain variable domain of TCR clone 133771 (TRBV6-3, TRBJ2-7)
CASSSPGTVFYEQYF

SEQ ID NO: 267543 - protein, 13 aa, Homo sapiens
  CDR3 for alpha chain variable domain of TCR clone 133772 (TRAV17, TRAJ7)
CATDNYGNNRLAF

SEQ ID NO: 267544 - protein, 14 aa, Homo sapiens
  CDR3 for beta chain variable domain of TCR clone 133772 (TRBV7-2, TRBJ2-5)
CASSPRGSSETQYF

SEQ ID NO: 267545 - protein, 16 aa, Homo sapiens
  CDR3 for alpha chain variable domain of TCR clone 133773 (TRAV1-2, TRAJ6)
CAVRDQGTEGSYIPTF

SEQ ID NO: 267546 - protein, 13 aa, Homo sapiens
  CDR3 for beta chain variable domain of TCR clone 133773 (TRBV28, TRBJ2-7)
CASTPGLAGEQYF

SEQ ID NO: 267547 - protein, 15 aa, Homo sapiens
  CDR3 for alpha chain variable domain of TCR clone 133774 (TRAV8-3, TRAJ45)
CASSCSGGGADGLTF

SEQ ID NO: 267548 - protein, 17 aa, Homo sapiens
  CDR3 for beta chain variable domain of TCR clone 133774 (TRBV7-8, TRBJ1-2)
CASSLRPLQGHLYGYTF

SEQ ID NO: 267549 - protein, 12 aa, Homo sapiens
  CDR3 for alpha chain variable domain of TCR clone 133775 (TRAV1-2, TRAJ33)
RAALDSNYQLIW

SEQ ID NO: 267550 - protein, 16 aa, Homo sapiens
  CDR3 for beta chain variable domain of TCR clone 133775 (TRBV6-4, TRBJ1-2)
CASSEAVGDPNYGYTF

SEQ ID NO: 267551 - protein, 14 aa, Homo sapiens
  CDR3 for alpha chain variable domain of TCR clone 133776 (TRAV17, TRAJ12)
CAILPLDSSYKLIF

SEQ ID NO: 267552 - protein, 15 aa, Homo sapiens
  CDR3 for beta chain variable domain of TCR clone 133776 (TRBV5-1, TRBJ1-1)
CASSLGEGENTEAFF

SEQ ID NO: 267553 - protein, 14 aa, Homo sapiens
  CDR3 for alpha chain variable domain of TCR clone 133777 (TRAV12-1, TRAJ30)
CVVNIGERWQDHLW

SEQ ID NO: 267554 - protein, 14 aa, Homo sapiens
  CDR3 for beta chain variable domain of TCR clone 133777 (TRBV7-6, TRBJ2-3)
CASSLGTVTDTQYF

SEQ ID NO: 267555 - protein, 17 aa, Homo sapiens
  CDR3 for alpha chain variable domain of TCR clone 133778 (TRAV4, TRAJ18)
CLVGERSVGSTLGRLYF

SEQ ID NO: 267556 - protein, 14 aa, Homo sapiens
  CDR3 for beta chain variable domain of TCR clone 133778 (TRBV6-5, TRBJ1-2)
CASSYDCTGGGYTF

SEQ ID NO: 267557 - protein, 14 aa, Homo sapiens
  CDR3 for alpha chain variable domain of TCR clone 133779 (TRAV8-4, TRAJ48)
CAVSQTFGNEKLTF

SEQ ID NO: 267558 - protein, 14 aa, Homo sapiens
  CDR3 for beta chain variable domain of TCR clone 133779 (TRBV13, TRBJ2-7)
CASSLKGASYEQYF

SEQ ID NO: 267559 - protein, 14 aa, Homo sapiens
  CDR3 for alpha chain variable domain of TCR clone 133780 (TRAV17, TRAJ40)
CATALTSGTYKYIF

SEQ ID NO: 267560 - protein, 14 aa, Homo sapiens
  CDR3 for beta chain variable domain of TCR clone 133780 (TRBV7-2, TRBJ2-7)
CASSPKTSFYEQYF

SEQ ID NO: 267561 - protein, 14 aa, Homo sapiens
  CDR3 for alpha chain variable domain of TCR clone 133781 (TRAV21, TRAJ23)
CAILIYNQGGKLIF

SEQ ID NO: 267562 - protein, 18 aa, Homo sapiens
  CDR3 for beta chain variable domain of TCR clone 133781 (TRBV20-1, TRBJ2-6)
CSAETTPTHGSGANVLTF

SEQ ID NO: 267563 - protein, 18 aa, Homo sapiens
  CDR3 for alpha chain variable domain of TCR clone 133782 (TRAV12-1, TRAJ52)
CVVKLINAGGTSYGKLAF

SEQ ID NO: 267564 - protein, 16 aa, Homo sapiens
  CDR3 for beta chain variable domain of TCR clone 133782 (TRBV7-6, TRBJ2-7)
CASSGGTGALSYEQYF

SEQ ID NO: 267565 - protein, 14 aa, Homo sapiens
  CDR3 for alpha chain variable domain of TCR clone 133783 (TRAV17, TRAJ34)
CATDSLEGTDKLIF

SEQ ID NO: 267566 - protein, 15 aa, Homo sapiens
  CDR3 for beta chain variable domain of TCR clone 133783 (TRBV10-3, TRBJ2-3)
CAISLTSGGTDTQYF

SEQ ID NO: 267567 - protein, 13 aa, Homo sapiens
  CDR3 for alpha chain variable domain of TCR clone 133784 (TRAV35, TRAJ57)
CAGSQGGSEKLVF

SEQ ID NO: 267568 - protein, 15 aa, Homo sapiens
  CDR3 for beta chain variable domain of TCR clone 133784 (TRBV20-1, TRBJ2-7)
CSARDRVSGMDEQFF

SEQ ID NO: 267569 - protein, 16 aa, Homo sapiens
  CDR3 for alpha chain variable domain of TCR clone 133785 (TRAV3, TRAJ10)
CAVRDMRAGGGNKPTL

SEQ ID NO: 267570 - protein, 16 aa, Homo sapiens
  CDR3 for beta chain variable domain of TCR clone 133785 (TRBV20-1, TRBJ1-4)
CSAPGQGLLTNEKLFF

SEQ ID NO: 267571 - protein, 16 aa, Homo sapiens
  CDR3 for alpha chain variable domain of TCR clone 133786 (TRAV12-1, TRAJ42)
CVVTPYYGGSQGNLIF

SEQ ID NO: 267572 - protein, 13 aa, Homo sapiens
  CDR3 for beta chain variable domain of TCR clone 133786 (TRBV12-5, TRBJ2-3)
CASGDRQSDTQYF

SEQ ID NO: 267573 - protein, 14 aa, Homo sapiens
  CDR3 for alpha chain variable domain of TCR clone 133787 (TRAV29/DV5, TRAJ44)
CAASALGTASKLTF

SEQ ID NO: 267574 - protein, 13 aa, Homo sapiens
  CDR3 for beta chain variable domain of TCR clone 133787 (TRBV7-8, TRBJ2-7)
RRVRLTEMGEQYF

SEQ ID NO: 267575 - protein, 17 aa, Homo sapiens
  CDR3 for alpha chain variable domain of TCR clone 133788 (TRAV3, TRAJ42)
CAVRDRDYGGSQGNLIL

SEQ ID NO: 267576 - protein, 17 aa, Homo sapiens
  CDR3 for beta chain variable domain of TCR clone 133788 (TRBV7-9, TRBJ2-3)
CASSPTVAGDLTDTQYF

SEQ ID NO: 267577 - protein, 13 aa, Homo sapiens
  CDR3 for alpha chain variable domain of TCR clone 133789 (TRAV8-1, TRAJ8)
CAVNRTGFQKLVF

SEQ ID NO: 267578 - protein, 15 aa, Homo sapiens
  CDR3 for beta chain variable domain of TCR clone 133789 (TRBV12-5, TRBJ2-5)
CASGSGLAGRETQYF

SEQ ID NO: 267579 - protein, 14 aa, Homo sapiens
  CDR3 for alpha chain variable domain of TCR clone 133790 (TRAV23/DV6, TRAJ11)
CSASLESGYSTLTF

SEQ ID NO: 267580 - protein, 15 aa, Homo sapiens
  CDR3 for beta chain variable domain of TCR clone 133790 (TRBV28, TRBJ2-7)
CASSSPGTEPFEQYF

SEQ ID NO: 267581 - protein, 16 aa, Homo sapiens
  CDR3 for alpha chain variable domain of TCR clone 133791 (TRAV26-1, TRAJ31)
CIVRPPVLNNNARLMF

SEQ ID NO: 267582 - protein, 12 aa, Homo sapiens
  CDR3 for beta chain variable domain of TCR clone 133791 (TRBV7-8, TRBJ2-7)
CASSLGDREQYF

SEQ ID NO: 267583 - protein, 13 aa, Homo sapiens
  CDR3 for alpha chain variable domain of TCR clone 133792 (TRAV2, TRAJ40)
CAVVTSGTYNYIF

SEQ ID NO: 267584 - protein, 17 aa, Homo sapiens
  CDR3 for beta chain variable domain of TCR clone 133792 (TRBV11-2, TRBJ2-1)
CASSLYPPGVEYNEQFF

SEQ ID NO: 267585 - protein, 15 aa, Homo sapiens
  CDR3 for alpha chain variable domain of TCR clone 133793 (TRAV13-1, TRAJ3)
CAASKLASSASKIVF

SEQ ID NO: 267586 - protein, 16 aa, Homo sapiens
  CDR3 for beta chain variable domain of TCR clone 133793 (TRBV25-1, TRBJ1-5)
CASGAPTVNSNQPQHF

SEQ ID NO: 267587 - protein, 14 aa, Homo sapiens
  CDR3 for alpha chain variable domain of TCR clone 133794 (TRAV12-3, TRAJ10)
SRLPLTGGGNKLTF

SEQ ID NO: 267588 - protein, 15 aa, Homo sapiens
  CDR3 for beta chain variable domain of TCR clone 133794 (TRBV11-3, TRBJ2-3)
CASLKDGREGDTQYF

SEQ ID NO: 267589 - protein, 11 aa, Homo sapiens
  CDR3 for alpha chain variable domain of TCR clone 133795 (TRAV12-3, TRAJ27)
CAMANAGKPTF

SEQ ID NO: 267590 - protein, 12 aa, Homo sapiens
  CDR3 for beta chain variable domain of TCR clone 133795 (TRBV12-4, TRBJ2-7)
CASSLGGYEQYF

SEQ ID NO: 267591 - protein, 15 aa, Homo sapiens
  CDR3 for alpha chain variable domain of TCR clone 133796 (TRAV23/DV6, TRAJ18)
CAARYRGSTLERLYF

SEQ ID NO: 267592 - protein, 15 aa, Homo sapiens
  CDR3 for beta chain variable domain of TCR clone 133796 (TRBV20-1, TRBJ2-7)
CSARDRVSGMDEQYF

SEQ ID NO: 267593 - protein, 15 aa, Homo sapiens
  CDR3 for alpha chain variable domain of TCR clone 133797 (TRAV8-4, TRAJ3)
CAVTGENLVQQCFQD

SEQ ID NO: 267594 - protein, 16 aa, Homo sapiens
  CDR3 for beta chain variable domain of TCR clone 133797 (TRBV4-2, TRBJ1-1)
CASSQAGSGMNTEAFF

SEQ ID NO: 267595 - protein, 11 aa, Homo sapiens
  CDR3 for alpha chain variable domain of TCR clone 133798 (TRAV12-2, TRAJ31)
CAVTRWARLMF

SEQ ID NO: 267596 - protein, 15 aa, Homo sapiens
  CDR3 for beta chain variable domain of TCR clone 133798 (TRBV28, TRBJ2-5)
CASSPPWSYQETQYF

SEQ ID NO: 267597 - protein, 15 aa, Homo sapiens
  CDR3 for alpha chain variable domain of TCR clone 133799 (TRAV8-3, TRAJ6)
CAVGPLRGGSYIPTF

SEQ ID NO: 267598 - protein, 14 aa, Homo sapiens
  CDR3 for beta chain variable domain of TCR clone 133799 (TRBV19, TRBJ2-2)
CASSTGQGAGELFF

SEQ ID NO: 267599 - protein, 21 aa, Homo sapiens
  CDR3 for alpha chain variable domain of TCR clone 133800 (TRAV25, TRAJ7)
TATQTTDVGTYFCPGDNRLAF

SEQ ID NO: 267600 - protein, 14 aa, Homo sapiens
  CDR3 for beta chain variable domain of TCR clone 133800 (TRBV11-2, TRBJ2-2)
CASSLGLRVRELFF

SEQ ID NO: 267601 - protein, 12 aa, Homo sapiens
  CDR3 for alpha chain variable domain of TCR clone 133801 (TRAV1-1, TRAJ39)
CAVPVVGNMLTF

SEQ ID NO: 267602 - protein, 15 aa, Homo sapiens
  CDR3 for beta chain variable domain of TCR clone 133801 (TRBV19, TRBJ1-6)
CASSTQGAVGSRLHF

SEQ ID NO: 267603 - protein, 18 aa, Homo sapiens
  CDR3 for alpha chain variable domain of TCR clone 133802 (TRAV21, TRAJ52)
CAVRPSPAGGTSYGKLTF

SEQ ID NO: 267604 - protein, 13 aa, Homo sapiens
  CDR3 for beta chain variable domain of TCR clone 133802 (TRBV7-3, TRBJ1-1)
CASSQDWWAEAFF

SEQ ID NO: 267605 - protein, 14 aa, Homo sapiens
  CDR3 for alpha chain variable domain of TCR clone 133803 (TRAV26-1, TRAJ45)
CIEVTGGGADGLTF

SEQ ID NO: 267606 - protein, 12 aa, Homo sapiens
  CDR3 for beta chain variable domain of TCR clone 133803 (TRBV12-4, TRBJ2-7)
CASSLGGYEQHF

SEQ ID NO: 267607 - protein, 13 aa, Homo sapiens
  CDR3 for alpha chain variable domain of TCR clone 133804 (TRAV16, TRAJ58)
CALSIPSGSRLTF

SEQ ID NO: 267608 - protein, 15 aa, Homo sapiens
  CDR3 for beta chain variable domain of TCR clone 133804 (TRBV7-2, TRBJ2-2)
CASSLVAGSAGELFF

SEQ ID NO: 267609 - protein, 15 aa, Homo sapiens
  CDR3 for alpha chain variable domain of TCR clone 133805 (TRAV14/DV4, TRAJ12)
CAMREERDSSYKLIF

SEQ ID NO: 267610 - protein, 13 aa, Homo sapiens
  CDR3 for beta chain variable domain of TCR clone 133805 (TRBV11-2, TRBJ1-2)
CASSLDRGETTMA

SEQ ID NO: 267611 - protein, 11 aa, Homo sapiens
  CDR3 for alpha chain variable domain of TCR clone 133806 (TRAV12-3, TRAJ43)
CAMSVSNDIRF

SEQ ID NO: 267612 - protein, 14 aa, Homo sapiens
  CDR3 for beta chain variable domain of TCR clone 133806 (TRBV7-8, TRBJ2-3)
CASSLEAGTDTQYF

SEQ ID NO: 267613 - protein, 13 aa, Homo sapiens
  CDR3 for alpha chain variable domain of TCR clone 133807 (TRAV12-2, TRAJ52)
CAVSGTSYGKLTF

SEQ ID NO: 267614 - protein, 16 aa, Homo sapiens
  CDR3 for beta chain variable domain of TCR clone 133807 (TRBV11-2, TRBJ2-1)
CQQLIPPGVEYNEQFF

SEQ ID NO: 267615 - protein, 16 aa, Homo sapiens
  CDR3 for alpha chain variable domain of TCR clone 133808 (TRAV20, TRAJ52)
CAVLPDGGTSYGKLKF

SEQ ID NO: 267616 - protein, 12 aa, Homo sapiens
  CDR3 for beta chain variable domain of TCR clone 133808 (TRBV19, TRBJ2-1)
CASSQISNEQFF

SEQ ID NO: 267617 - protein, 14 aa, Homo sapiens
  CDR3 for alpha chain variable domain of TCR clone 133809 (TRAV13-1, TRAJ40)
CAAHPTSGTYKYIF

SEQ ID NO: 267618 - protein, 14 aa, Homo sapiens
  CDR3 for beta chain variable domain of TCR clone 133809 (TRBV11-2, TRBJ2-2)
CQQPLGGGTGELFF

SEQ ID NO: 267619 - protein, 16 aa, Homo sapiens
  CDR3 for alpha chain variable domain of TCR clone 133810 (TRAV4, TRAJ22)
CLVVDLYSGSARQLTF

SEQ ID NO: 267620 - protein, 14 aa, Homo sapiens
  CDR3 for beta chain variable domain of TCR clone 133810 (TRBV28, TRBJ2-3)
CASSWRGRADTQYF

SEQ ID NO: 267621 - protein, 12 aa, Homo sapiens
  CDR3 for alpha chain variable domain of TCR clone 133811 (TRAV8-3, TRAJ15)
CAVGAPLSALIF

SEQ ID NO: 267622 - protein, 14 aa, Homo sapiens
  CDR3 for beta chain variable domain of TCR clone 133811 (TRBV6-1, TRBJ1-3)
CASVQGGGGNTIYF

SEQ ID NO: 267623 - protein, 18 aa, Homo sapiens
  CDR3 for alpha chain variable domain of TCR clone 133812 (TRAV9-2, TRAJ52)
CALSRHNAGGTSYGKLTF

SEQ ID NO: 267624 - protein, 16 aa, Homo sapiens
  CDR3 for beta chain variable domain of TCR clone 133812 (TRBV19, TRBJ2-1)
CASSKVGPSSYNEQFF

SEQ ID NO: 267625 - protein, 12 aa, Homo sapiens
  CDR3 for alpha chain variable domain of TCR clone 133813 (TRAV36/DV7, TRAJ54)
CAVVRGAQKLVF

SEQ ID NO: 267626 - protein, 17 aa, Homo sapiens
  CDR3 for beta chain variable domain of TCR clone 133813 (TRBV13, TRBJ2-3)
CASSLSRVAGGRNTQYF

SEQ ID NO: 267627 - protein, 15 aa, Homo sapiens
  CDR3 for alpha chain variable domain of TCR clone 133814 (TRAV38-2/DV8, TRAJ48)
CAYRSGGFGNEKLTF

SEQ ID NO: 267628 - protein, 16 aa, Homo sapiens
  CDR3 for beta chain variable domain of TCR clone 133814 (TRBV28, TRBJ2-7)
CASSPWVATRDLSQYF

SEQ ID NO: 267629 - protein, 15 aa, Homo sapiens
  CDR3 for alpha chain variable domain of TCR clone 133815 (TRAV26-1, TRAJ23)
CIVRVAGYQGGKLIF

SEQ ID NO: 267630 - protein, 18 aa, Homo sapiens
  CDR3 for beta chain variable domain of TCR clone 133815 (TRBV28, TRBJ2-1)
CASSSTSGRANSYNEQFV

SEQ ID NO: 267631 - protein, 15 aa, Homo sapiens
  CDR3 for alpha chain variable domain of TCR clone 133816 (TRAV23/DV6, TRAJ37)
CAASRGSSNTGKLIF

SEQ ID NO: 267632 - protein, 15 aa, Homo sapiens
  CDR3 for beta chain variable domain of TCR clone 133816 (TRBV6-5, TRBJ2-7)
CASSARRWSDNEQYF

SEQ ID NO: 267633 - protein, 15 aa, Homo sapiens
  CDR3 for alpha chain variable domain of TCR clone 133817 (TRAV8-3, TRAJ45)
RASSYSGGGAVGLTF

SEQ ID NO: 267634 - protein, 13 aa, Homo sapiens
  CDR3 for beta chain variable domain of TCR clone 133817 (TRBV10-3, TRBJ2-7)
CASKLAVNYEQYF

SEQ ID NO: 267635 - protein, 12 aa, Homo sapiens
  CDR3 for alpha chain variable domain of TCR clone 133818 (TRAV13-2, TRAJ8)
CAPWLGFQKLVF

SEQ ID NO: 267636 - protein, 15 aa, Homo sapiens
  CDR3 for beta chain variable domain of TCR clone 133818 (TRBV15, TRBJ1-5)
CATSRDPVSNQPQHF

SEQ ID NO: 267637 - protein, 14 aa, Homo sapiens
  CDR3 for alpha chain variable domain of TCR clone 133819 (TRAV1-2, TRAJ16)
CAVNRFSDGQNLLF

SEQ ID NO: 267638 - protein, 11 aa, Homo sapiens
  CDR3 for beta chain variable domain of TCR clone 133819 (TRBV29-1, TRBJ2-5)
CSEDRTGTQYF

SEQ ID NO: 267639 - protein, 15 aa, Homo sapiens
  CDR3 for alpha chain variable domain of TCR clone 133820 (TRAV27, TRAJ38)
CAARRNAGNNRTLIW

SEQ ID NO: 267640 - protein, 13 aa, Homo sapiens
  CDR3 for beta chain variable domain of TCR clone 133820 (TRBV12-4, TRBJ1-5)
CASSPDRAQPQHF

SEQ ID NO: 267641 - protein, 15 aa, Homo sapiens
  CDR3 for alpha chain variable domain of TCR clone 133821 (TRAV12-1, TRAJ45)
CVVLSGRGGADGLTF

SEQ ID NO: 267642 - protein, 13 aa, Homo sapiens
  CDR3 for beta chain variable domain of TCR clone 133821 (TRBV11-2, TRBJ2-5)
CASSSTGEETQYF

SEQ ID NO: 267643 - protein, 13 aa, Homo sapiens
  CDR3 for alpha chain variable domain of TCR clone 133822 (TRAV21, TRAJ27)
CAARPGHAGKSTF

SEQ ID NO: 267644 - protein, 13 aa, Homo sapiens
  CDR3 for beta chain variable domain of TCR clone 133822 (TRBV7-6, TRBJ2-1)
CQQLGGGADEQFF

SEQ ID NO: 267645 - protein, 17 aa, Homo sapiens
  CDR3 for alpha chain variable domain of TCR clone 133823 (TRAV13-1, TRAJ52)
CAAGRNAGGTSYRKLTF

SEQ ID NO: 267646 - protein, 13 aa, Homo sapiens
  CDR3 for beta chain variable domain of TCR clone 133823 (TRBV7-2, TRBJ1-1)
CASNLKGAKVAFF

SEQ ID NO: 267647 - protein, 13 aa, Homo sapiens
  CDR3 for alpha chain variable domain of TCR clone 133824 (TRAV12-2, TRAJ6)
CAVNVSRKLHTYI

SEQ ID NO: 267648 - protein, 14 aa, Homo sapiens
  CDR3 for beta chain variable domain of TCR clone 133824 (TRBV18, TRBJ1-4)
CASSPGPNGEKLFF

SEQ ID NO: 267649 - protein, 13 aa, Homo sapiens
  CDR3 for alpha chain variable domain of TCR clone 133825 (TRAV8-4, TRAJ47)
CAVTALYGNKLVF

SEQ ID NO: 267650 - protein, 14 aa, Homo sapiens
  CDR3 for beta chain variable domain of TCR clone 133825 (TRBV19, TRBJ2-7)
SASSIGGAVAEQYF

SEQ ID NO: 267651 - protein, 11 aa, Homo sapiens
  CDR3 for alpha chain variable domain of TCR clone 133826 (TRAV23/DV6, TRAJ49)
CAVAPVTRSIL

SEQ ID NO: 267652 - protein, 13 aa, Homo sapiens
  CDR3 for beta chain variable domain of TCR clone 133826 (TRBV6-1, TRBJ1-1)
CASSRQGNTEAFF

SEQ ID NO: 267653 - protein, 12 aa, Homo sapiens
  CDR3 for alpha chain variable domain of TCR clone 133827 (TRAV2, TRAJ33)
CAVPDSNYQLIW

SEQ ID NO: 267654 - protein, 13 aa, Homo sapiens
  CDR3 for beta chain variable domain of TCR clone 133827 (TRBV29-1, TRBJ2-1)
CSVEGGRVNEQFF

SEQ ID NO: 267655 - protein, 15 aa, Homo sapiens
  CDR3 for alpha chain variable domain of TCR clone 133828 (TRAV13-1, TRAJ5)
CAVSPIDTGRIALTF

SEQ ID NO: 267656 - protein, 18 aa, Homo sapiens
  CDR3 for beta chain variable domain of TCR clone 133828 (TRBV4-1, TRBJ2-2)
CASSFRTSGGEGPGELFF

SEQ ID NO: 267657 - protein, 13 aa, Homo sapiens
  CDR3 for alpha chain variable domain of TCR clone 133829 (TRAV3, TRAJ21)
CAVREPDFNKFYF

SEQ ID NO: 267658 - protein, 12 aa, Homo sapiens
  CDR3 for beta chain variable domain of TCR clone 133829 (TRBV5-1, TRBJ2-4)
LAGEWTKNIQYF

SEQ ID NO: 267659 - protein, 14 aa, Homo sapiens
  CDR3 for alpha chain variable domain of TCR clone 133830 (TRAV1-2, TRAJ16)
CAVNRFSDGQKLLF

SEQ ID NO: 267660 - protein, 14 aa, Homo sapiens
  CDR3 for beta chain variable domain of TCR clone 133830 (TRBV10-3, TRBJ2-7)
CHQCGTSETYEQYF

SEQ ID NO: 267661 - protein, 15 aa, Homo sapiens
  CDR3 for alpha chain variable domain of TCR clone 133831 (TRAV12-2, TRAJ43)
CAFDMRFGAGTRLTV

SEQ ID NO: 267662 - protein, 15 aa, Homo sapiens
  CDR3 for beta chain variable domain of TCR clone 133831 (TRBV27, TRBJ2-1)
CASSNGGGSSNEQFF

SEQ ID NO: 267663 - protein, 11 aa, Homo sapiens
  CDR3 for alpha chain variable domain of TCR clone 133832 (TRAV3, TRAJ21)
CAVGNFNKFHF

SEQ ID NO: 267664 - protein, 12 aa, Homo sapiens
  CDR3 for beta chain variable domain of TCR clone 133832 (TRBV14, TRBJ2-5)
CASSHLKETQYF

SEQ ID NO: 267665 - protein, 14 aa, Homo sapiens
  CDR3 for alpha chain variable domain of TCR clone 133833 (TRAV8-6, TRAJ9)
CAVSSYTGGFKTIF

SEQ ID NO: 267666 - protein, 15 aa, Homo sapiens
  CDR3 for beta chain variable domain of TCR clone 133833 (TRBV2, TRBJ1-2)
CASSESSTVNYGYTF

SEQ ID NO: 267667 - protein, 14 aa, Homo sapiens
  CDR3 for alpha chain variable domain of TCR clone 133834 (TRAV1-1, TRAJ27)
CAVIYNTNAGKTTF

SEQ ID NO: 267668 - protein, 15 aa, Homo sapiens
  CDR3 for beta chain variable domain of TCR clone 133834 (TRBV7-2, TRBJ2-1)
CASSSGLAGGNEQFF

SEQ ID NO: 267669 - protein, 16 aa, Homo sapiens
  CDR3 for alpha chain variable domain of TCR clone 133835 (TRAV12-3, TRAJ53)
CAMSPGSGGSNYKLTF

SEQ ID NO: 267670 - protein, 13 aa, Homo sapiens
  CDR3 for beta chain variable domain of TCR clone 133835 (TRBV7-3, TRBJ1-1)
CASSQDWGDEAFF

SEQ ID NO: 267671 - protein, 15 aa, Homo sapiens
  CDR3 for alpha chain variable domain of TCR clone 133836 (TRAV26-1, TRAJ17)
CIVRVVKAAGNKLTI

SEQ ID NO: 267672 - protein, 16 aa, Homo sapiens
  CDR3 for beta chain variable domain of TCR clone 133836 (TRBV7-9, TRBJ2-1)
CASSLVSGPSYNEQFF

SEQ ID NO: 267673 - protein, 15 aa, Homo sapiens
  CDR3 for alpha chain variable domain of TCR clone 133837 (TRAV26-1, TRAJ29)
FIVRVEGSGNTPLAF

SEQ ID NO: 267674 - protein, 15 aa, Homo sapiens
  CDR3 for beta chain variable domain of TCR clone 133837 (TRBV7-9, TRBJ1-5)
CASSQGHQPNQPQHF

SEQ ID NO: 267675 - protein, 13 aa, Homo sapiens
  CDR3 for alpha chain variable domain of TCR clone 133838 (TRAV22, TRAJ44)
CAGSTGTASKLTF

SEQ ID NO: 267676 - protein, 13 aa, Homo sapiens
  CDR3 for beta chain variable domain of TCR clone 133838 (TRBV19, TRBJ1-3)
CASRLSLGNTIYF

SEQ ID NO: 267677 - protein, 13 aa, Homo sapiens
  CDR3 for alpha chain variable domain of TCR clone 133839 (TRAV17, TRAJ7)
CATDNYGNNRLAF

SEQ ID NO: 267678 - protein, 17 aa, Homo sapiens
  CDR3 for beta chain variable domain of TCR clone 133839 (TRBV11-2, TRBJ2-1)
CASSLYPPGVEYNEQFF

SEQ ID NO: 267679 - protein, 16 aa, Homo sapiens
  CDR3 for alpha chain variable domain of TCR clone 133840 (TRAV26-1, TRAJ45)
CIVEKYSGGGAYGLTF

SEQ ID NO: 267680 - protein, 16 aa, Homo sapiens
  CDR3 for beta chain variable domain of TCR clone 133840 (TRBV10-3, TRBJ1-6)
CAISERRGQGNSPLHF

SEQ ID NO: 267681 - protein, 14 aa, Homo sapiens
  CDR3 for alpha chain variable domain of TCR clone 133841 (TRAV12-3, TRAJ58)
CAMSTETSGSRLTF

SEQ ID NO: 267682 - protein, 14 aa, Homo sapiens
  CDR3 for beta chain variable domain of TCR clone 133841 (TRBV7-2, TRBJ2-7)
CASRSQGAAYEQYF

SEQ ID NO: 267683 - protein, 11 aa, Homo sapiens
  CDR3 for alpha chain variable domain of TCR clone 133842 (TRAV13-1, TRAJ15)
CAATPGTALIF

SEQ ID NO: 267684 - protein, 15 aa, Homo sapiens
  CDR3 for beta chain variable domain of TCR clone 133842 (TRBV28, TRBJ2-5)
CASSTPWSYQETQYF

SEQ ID NO: 267685 - protein, 19 aa, Homo sapiens
  CDR3 for alpha chain variable domain of TCR clone 133843 (TRAV1-2, TRAJ26)
CLSPLCCERPDNYGQNFVF

SEQ ID NO: 267686 - protein, 15 aa, Homo sapiens
  CDR3 for beta chain variable domain of TCR clone 133843 (TRBV7-2, TRBJ1-2)
CASSLVSGGDYGYTF

SEQ ID NO: 267687 - protein, 13 aa, Homo sapiens
  CDR3 for alpha chain variable domain of TCR clone 133844 (TRAV13-1, TRAJ39)
CAASIWAGNMLPF

SEQ ID NO: 267688 - protein, 15 aa, Homo sapiens
  CDR3 for beta chain variable domain of TCR clone 133844 (TRBV7-9, TRBJ1-1)
CASSLLEQGGTEAFF

SEQ ID NO: 267689 - protein, 14 aa, Homo sapiens
  CDR3 for alpha chain variable domain of TCR clone 133845 (TRAV20, TRAJ42)
CAVQAGGSQGNLIL

SEQ ID NO: 267690 - protein, 15 aa, Homo sapiens
  CDR3 for beta chain variable domain of TCR clone 133845 (TRBV28, TRBJ2-1)
CASSIIAGGRSEQFF

SEQ ID NO: 267691 - protein, 15 aa, Homo sapiens
  CDR3 for alpha chain variable domain of TCR clone 133846 (TRAV8-2, TRAJ24)
CVVSDRADSWGKLQF

SEQ ID NO: 267692 - protein, 11 aa, Homo sapiens
  CDR3 for beta chain variable domain of TCR clone 133846 (TRBV20-1, TRBJ1-2)
CSVQGAGGYTF

SEQ ID NO: 267693 - protein, 11 aa, Homo sapiens
  CDR3 for alpha chain variable domain of TCR clone 133847 (TRAV17, TRAJ43)
CATPRSNDMRF

SEQ ID NO: 267694 - protein, 17 aa, Homo sapiens
  CDR3 for beta chain variable domain of TCR clone 133847 (TRBV7-3, TRBJ2-5)
CASSLGSGRSGSETQYS

SEQ ID NO: 267695 - protein, 15 aa, Homo sapiens
  CDR3 for alpha chain variable domain of TCR clone 133848 (TRAV12-1, TRAJ44)
CVVDTPQGTARKLTF

SEQ ID NO: 267696 - protein, 14 aa, Homo sapiens
  CDR3 for beta chain variable domain of TCR clone 133848 (TRBV7-9, TRBJ2-1)
CASSPRDSLYEQFF

SEQ ID NO: 267697 - protein, 12 aa, Homo sapiens
  CDR3 for alpha chain variable domain of TCR clone 133849 (TRAV12-2, TRAJ52)
IGGGTSYGKLTF

SEQ ID NO: 267698 - protein, 16 aa, Homo sapiens
  CDR3 for beta chain variable domain of TCR clone 133849 (TRBV12-4, TRBJ1-5)
CASSRPVGGSNQPQHF

SEQ ID NO: 267699 - protein, 18 aa, Homo sapiens
  CDR3 for alpha chain variable domain of TCR clone 133850 (TRAV12-3, TRAJ52)
CAVSVGGAGGTSYGKLTF

SEQ ID NO: 267700 - protein, 14 aa, Homo sapiens
  CDR3 for beta chain variable domain of TCR clone 133850 (TRBV11-1, TRBJ2-7)
CASSFRQGSYEQHF

SEQ ID NO: 267701 - protein, 15 aa, Homo sapiens
  CDR3 for alpha chain variable domain of TCR clone 133851 (TRAV25, TRAJ53)
CAATGGGGSNYNLTF

SEQ ID NO: 267702 - protein, 19 aa, Homo sapiens
  CDR3 for beta chain variable domain of TCR clone 133851 (TRBV7-2, TRBJ2-3)
CASSFLSRNWGGGTDTQYF

SEQ ID NO: 267703 - protein, 12 aa, Homo sapiens
  CDR3 for alpha chain variable domain of TCR clone 133852 (TRAV17, TRAJ29)
CYASSGNTPLVF

SEQ ID NO: 267704 - protein, 17 aa, Homo sapiens
  CDR3 for beta chain variable domain of TCR clone 133852 (TRBV20-1, TRBJ2-2)
CSASGSGQVGLTGELFF

SEQ ID NO: 267705 - protein, 16 aa, Homo sapiens
  CDR3 for alpha chain variable domain of TCR clone 133853 (TRAV8-6, TRAJ28)
CAVTPKPGAGSYQLTF

SEQ ID NO: 267706 - protein, 16 aa, Homo sapiens
  CDR3 for beta chain variable domain of TCR clone 133853 (TRBV12-4, TRBJ2-5)
CASSWRPSGDLETQYF

SEQ ID NO: 267707 - protein, 14 aa, Homo sapiens
  CDR3 for alpha chain variable domain of TCR clone 133854 (TRAV13-2, TRAJ43)
CAEIPTYNNNDMRF

SEQ ID NO: 267708 - protein, 11 aa, Homo sapiens
  CDR3 for beta chain variable domain of TCR clone 133854 (TRBV7-8, TRBJ2-7)
CASSLSLEQYF

SEQ ID NO: 267709 - protein, 18 aa, Homo sapiens
  CDR3 for alpha chain variable domain of TCR clone 133855 (TRAV21, TRAJ52)
CAVRPSPAGGTSYGKLTL

SEQ ID NO: 267710 - protein, 14 aa, Homo sapiens
  CDR3 for beta chain variable domain of TCR clone 133855 (TRBV6-1, TRBJ1-3)
CASVQGGGGNTIYF

SEQ ID NO: 267711 - protein, 11 aa, Homo sapiens
  CDR3 for alpha chain variable domain of TCR clone 133856 (TRAV21, TRAJ33)
CAVYSNYQLIW

SEQ ID NO: 267712 - protein, 16 aa, Homo sapiens
  CDR3 for beta chain variable domain of TCR clone 133856 (TRBV19, TRBJ2-2)
CASRSPGTGATGELFF

SEQ ID NO: 267713 - protein, 12 aa, Homo sapiens
  CDR3 for alpha chain variable domain of TCR clone 133857 (TRAV13-2, TRAJ8)
CAPWLGFQKLVF

SEQ ID NO: 267714 - protein, 13 aa, Homo sapiens
  CDR3 for beta chain variable domain of TCR clone 133857 (TRBV24-1, TRBJ2-1)
CATSAGPYNEQFF

SEQ ID NO: 267715 - protein, 20 aa, Homo sapiens
  CDR3 for alpha chain variable domain of TCR clone 133858 (TRAV27, TRAJ10)
ASTSVPSRGILTGGGNKLTF

SEQ ID NO: 267716 - protein, 15 aa, Homo sapiens
  CDR3 for beta chain variable domain of TCR clone 133858 (TRBV28, TRBJ2-1)
CASSGLAEVDNEQFF

SEQ ID NO: 267717 - protein, 14 aa, Homo sapiens
  CDR3 for alpha chain variable domain of TCR clone 133859 (TRAV8-4, TRAJ9)
CAVTFNTGGFKTIF

SEQ ID NO: 267718 - protein, 15 aa, Homo sapiens
  CDR3 for beta chain variable domain of TCR clone 133859 (TRBV7-9, TRBJ2-2)
CASSPETGAGGELSF

SEQ ID NO: 267719 - protein, 17 aa, Homo sapiens
  CDR3 for alpha chain variable domain of TCR clone 133860 (TRAV14/DV4, TRAJ3)
CAMREGPEYSSSSKIIF

SEQ ID NO: 267720 - protein, 17 aa, Homo sapiens
  CDR3 for beta chain variable domain of TCR clone 133860 (TRBV20-1, TRBJ1-5)
CSARVGGERQGNQPQHF

SEQ ID NO: 267721 - protein, 12 aa, Homo sapiens
  CDR3 for alpha chain variable domain of TCR clone 133861 (TRAV26-2, TRAJ21)
CILKGNFNKFYF

SEQ ID NO: 267722 - protein, 14 aa, Homo sapiens
  CDR3 for beta chain variable domain of TCR clone 133861 (TRBV7-9, TRBJ1-1)
CASTPLQSYAEAFF

SEQ ID NO: 267723 - protein, 13 aa, Homo sapiens
  CDR3 for alpha chain variable domain of TCR clone 133862 (TRAV13-1, TRAJ20)
CAARVSNDYKLSF

SEQ ID NO: 267724 - protein, 14 aa, Homo sapiens
  CDR3 for beta chain variable domain of TCR clone 133862 (TRBV7-2, TRBJ2-7)
CASSPKTSFYEQYF

SEQ ID NO: 267725 - protein, 17 aa, Homo sapiens
  CDR3 for alpha chain variable domain of TCR clone 133863 (TRAV12-3, TRAJ26)
CAMSGGRWDNYGQTFVF

SEQ ID NO: 267726 - protein, 12 aa, Homo sapiens
  CDR3 for beta chain variable domain of TCR clone 133863 (TRBV19, TRBJ1-1)
CASSTTGIEAFF

SEQ ID NO: 267727 - protein, 14 aa, Homo sapiens
  CDR3 for alpha chain variable domain of TCR clone 133864 (TRAV3, TRAJ17)
CAVRDAAAGNELTF

SEQ ID NO: 267728 - protein, 15 aa, Homo sapiens
  CDR3 for beta chain variable domain of TCR clone 133864 (TRBV3-1, TRBJ2-7)
CASSQVRQGAYEQYF

SEQ ID NO: 267729 - protein, 15 aa, Homo sapiens
  CDR3 for alpha chain variable domain of TCR clone 133865 (TRAV3, TRAJ5)
CAVRDRKTGRRALTF

SEQ ID NO: 267730 - protein, 15 aa, Homo sapiens
  CDR3 for beta chain variable domain of TCR clone 133865 (TRBV7-8, TRBJ2-1)
CASSLADSLYNELFF

SEQ ID NO: 267731 - protein, 17 aa, Homo sapiens
  CDR3 for alpha chain variable domain of TCR clone 133866 (TRAV38-2/DV8, TRAJ23)
CALSRKLIFGQGTELSV

SEQ ID NO: 267732 - protein, 15 aa, Homo sapiens
  CDR3 for beta chain variable domain of TCR clone 133866 (TRBV27, TRBJ2-5)
CASSLYPRGGETQYF

SEQ ID NO: 267733 - protein, 12 aa, Homo sapiens
  CDR3 for alpha chain variable domain of TCR clone 133867 (TRAV23/DV6, TRAJ33)
CAPMDSNYQLIW

SEQ ID NO: 267734 - protein, 14 aa, Homo sapiens
  CDR3 for beta chain variable domain of TCR clone 133867 (TRBV5-4, TRBJ2-5)
CASRPDKEQETQYF

SEQ ID NO: 267735 - protein, 16 aa, Homo sapiens
  CDR3 for alpha chain variable domain of TCR clone 133868 (TRAV12-3, TRAJ53)
CAMSPGSGGSNYKLTF

SEQ ID NO: 267736 - protein, 14 aa, Homo sapiens
  CDR3 for beta chain variable domain of TCR clone 133868 (TRBV7-2, TRBJ1-1)
CASSFLTWTTEAFF

SEQ ID NO: 267737 - protein, 16 aa, Homo sapiens
  CDR3 for alpha chain variable domain of TCR clone 133869 (TRAV12-1, TRAJ22)
CVVKTISSGSARQLTF

SEQ ID NO: 267738 - protein, 13 aa, Homo sapiens
  CDR3 for beta chain variable domain of TCR clone 133869 (TRBV19, TRBJ2-1)
CASNGGVFSEQFF

SEQ ID NO: 267739 - protein, 17 aa, Homo sapiens
  CDR3 for alpha chain variable domain of TCR clone 133870 (TRAV1-2, TRAJ8)
CAVRDPDENTGFQKLVF

SEQ ID NO: 267740 - protein, 12 aa, Homo sapiens
  CDR3 for beta chain variable domain of TCR clone 133870 (TRBV7-9, TRBJ2-7)
CATRTDAYEQYF

SEQ ID NO: 267741 - protein, 14 aa, Homo sapiens
  CDR3 for alpha chain variable domain of TCR clone 133871 (TRAV12-2, TRAJ24)
CAVTPADSWGKLQF

SEQ ID NO: 267742 - protein, 16 aa, Homo sapiens
  CDR3 for beta chain variable domain of TCR clone 133871 (TRBV12-5, TRBJ2-5)
CASGPRTSGNQETQYF

SEQ ID NO: 267743 - protein, 15 aa, Homo sapiens
  CDR3 for alpha chain variable domain of TCR clone 133872 (TRAV13-1, TRAJ17)
CAASIERSAGNKLTF

SEQ ID NO: 267744 - protein, 13 aa, Homo sapiens
  CDR3 for beta chain variable domain of TCR clone 133872 (TRBV7-7, TRBJ2-3)
CASSLSRADTQYF

SEQ ID NO: 267745 - protein, 15 aa, Homo sapiens
  CDR3 for alpha chain variable domain of TCR clone 133873 (TRAV8-3, TRAJ11)
CAVGLLNSGYSTLTF

SEQ ID NO: 267746 - protein, 14 aa, Homo sapiens
  CDR3 for beta chain variable domain of TCR clone 133873 (TRBV13, TRBJ2-5)
CASSLERVGETQYF

SEQ ID NO: 267747 - protein, 14 aa, Homo sapiens
  CDR3 for alpha chain variable domain of TCR clone 133874 (TRAV12-2, TRAJ44)
CAVNPAGTASKLTF

SEQ ID NO: 267748 - protein, 11 aa, Homo sapiens
  CDR3 for beta chain variable domain of TCR clone 133874 (TRBV11-2, TRBJ2-2)
CASSLPGELFF

SEQ ID NO: 267749 - protein, 14 aa, Homo sapiens
  CDR3 for alpha chain variable domain of TCR clone 133875 (TRAV1-2, TRAJ8)
CAVREDTGFQKLVF

SEQ ID NO: 267750 - protein, 22 aa, Homo sapiens
  CDR3 for beta chain variable domain of TCR clone 133875 (TRBV9, TRBJ2-1)
CASSVDPRGERAVLRARDTAHR

SEQ ID NO: 267751 - protein, 15 aa, Homo sapiens
  CDR3 for alpha chain variable domain of TCR clone 133876 (TRAV2, TRAJ28)
CAVPYSGAGSYQLTF

SEQ ID NO: 267752 - protein, 17 aa, Homo sapiens
  CDR3 for beta chain variable domain of TCR clone 133876 (TRBV20-1, TRBJ2-4)
CSARDWASGGRENNQYF

SEQ ID NO: 267753 - protein, 15 aa, Homo sapiens
  CDR3 for alpha chain variable domain of TCR clone 133877 (TRAV21, TRAJ53)
CATLNSGGSNYKLTF

SEQ ID NO: 267754 - protein, 13 aa, Homo sapiens
  CDR3 for beta chain variable domain of TCR clone 133877 (TRBV12-4, TRBJ1-1)
CASSLGGTTEAFF

SEQ ID NO: 267755 - protein, 16 aa, Homo sapiens
  CDR3 for alpha chain variable domain of TCR clone 133878 (TRAV26-2, TRAJ45)
CTTASPIGGGAEGLTF

SEQ ID NO: 267756 - protein, 20 aa, Homo sapiens
  CDR3 for beta chain variable domain of TCR clone 133878 (TRBV28, TRBJ2-1)
CASTPIGRSPGLAGGNEQFF

SEQ ID NO: 267757 - protein, 15 aa, Homo sapiens
  CDR3 for alpha chain variable domain of TCR clone 133879 (TRAV13-1, TRAJ10)
CAATILTGGGNKLTF

SEQ ID NO: 267758 - protein, 20 aa, Homo sapiens
  CDR3 for beta chain variable domain of TCR clone 133879 (TRBV28, TRBJ2-1)
CASTPIGRSPGLAGGNEQFF

SEQ ID NO: 267759 - protein, 15 aa, Homo sapiens
  CDR3 for alpha chain variable domain of TCR clone 133880 (TRAV23/DV6, TRAJ13)
CAAWPGGGGYQKVTF

SEQ ID NO: 267760 - protein, 17 aa, Homo sapiens
  CDR3 for beta chain variable domain of TCR clone 133880 (TRBV10-3, TRBJ2-6)
CAISGSTAPSGANVLTF

SEQ ID NO: 267761 - protein, 13 aa, Homo sapiens
  CDR3 for alpha chain variable domain of TCR clone 133881 (TRAV12-3, TRAJ33)
CAMSVNSNYQLIW

SEQ ID NO: 267762 - protein, 16 aa, Homo sapiens
  CDR3 for beta chain variable domain of TCR clone 133881 (TRBV6-1, TRBJ2-5)
CASSETLDRGAETQYF

SEQ ID NO: 267763 - protein, 12 aa, Homo sapiens
  CDR3 for alpha chain variable domain of TCR clone 133882 (TRAV12-3, TRAJ34)
CAMGYNTDKLIF

SEQ ID NO: 267764 - protein, 14 aa, Homo sapiens
  CDR3 for beta chain variable domain of TCR clone 133882 (TRBV2, TRBJ2-7)
CASSLTSGGYEQYF

SEQ ID NO: 267765 - protein, 12 aa, Homo sapiens
  CDR3 for alpha chain variable domain of TCR clone 133883 (TRAV3, TRAJ20)
CAVRDPDYKLSF

SEQ ID NO: 267766 - protein, 15 aa, Homo sapiens
  CDR3 for beta chain variable domain of TCR clone 133883 (TRBV15, TRBJ1-4)
CATSRDMGSYEKLFF

SEQ ID NO: 267767 - protein, 17 aa, Homo sapiens
  CDR3 for alpha chain variable domain of TCR clone 133884 (TRAV4, TRAJ42)
CLVGVLNYGGSQGNLIF

SEQ ID NO: 267768 - protein, 12 aa, Homo sapiens
  CDR3 for beta chain variable domain of TCR clone 133884 (TRBV20-1, TRBJ2-1)
CKAQYTYNEQFF

SEQ ID NO: 267769 - protein, 10 aa, Homo sapiens
  CDR3 for alpha chain variable domain of TCR clone 133885 (TRAV23/DV6, TRAJ57)
CAASSTLSQG

SEQ ID NO: 267770 - protein, 16 aa, Homo sapiens
  CDR3 for beta chain variable domain of TCR clone 133885 (TRBV7-2, TRBJ1-5)
CASSPWGPEGNQPQHF

SEQ ID NO: 267771 - protein, 16 aa, Homo sapiens
  CDR3 for alpha chain variable domain of TCR clone 133886 (TRAV30, TRAJ24)
CGTEIVDADSWGKFQF

SEQ ID NO: 267772 - protein, 18 aa, Homo sapiens
  CDR3 for beta chain variable domain of TCR clone 133886 (TRBV7-9, TRBJ2-7)
CTSSLTTSGSRTWYEQYF

SEQ ID NO: 267773 - protein, 14 aa, Homo sapiens
  CDR3 for alpha chain variable domain of TCR clone 133887 (TRAV12-2, TRAJ8)
CAVKENTGFQKLVF

SEQ ID NO: 267774 - protein, 16 aa, Homo sapiens
  CDR3 for beta chain variable domain of TCR clone 133887 (TRBV4-1, TRBJ2-3)
CASSQSTSGAEDTQYF

SEQ ID NO: 267775 - protein, 17 aa, Homo sapiens
  CDR3 for alpha chain variable domain of TCR clone 133888 (TRAV3, TRAJ6)
CAVRDGPRAGGSNIPTL

SEQ ID NO: 267776 - protein, 20 aa, Homo sapiens
  CDR3 for beta chain variable domain of TCR clone 133888 (TRBV28, TRBJ2-1)
CASTPIGRSPGLAGGNEQFF

SEQ ID NO: 267777 - protein, 14 aa, Homo sapiens
  CDR3 for alpha chain variable domain of TCR clone 133889 (TRAV9-2, TRAJ39)
CALYIYNAGNMLTF

SEQ ID NO: 267778 - protein, 13 aa, Homo sapiens
  CDR3 for beta chain variable domain of TCR clone 133889 (TRBV7-9, TRBJ1-2)
CASSPSNFWGYTF

SEQ ID NO: 267779 - protein, 13 aa, Homo sapiens
  CDR3 for alpha chain variable domain of TCR clone 133890 (TRAV13-2, TRAJ13)
CAERPVGYQKVTF

SEQ ID NO: 267780 - protein, 16 aa, Homo sapiens
  CDR3 for beta chain variable domain of TCR clone 133890 (TRBV18, TRBJ2-5)
CASSPPSSGGAKTQYF

SEQ ID NO: 267781 - protein, 15 aa, Homo sapiens
  CDR3 for alpha chain variable domain of TCR clone 133891 (TRAV21, TRAJ43)
CAVRPSKAVFDDMRF

SEQ ID NO: 267782 - protein, 13 aa, Homo sapiens
  CDR3 for beta chain variable domain of TCR clone 133891 (TRBV7-9, TRBJ1-2)
CASSLKQNYGYTF

SEQ ID NO: 267783 - protein, 14 aa, Homo sapiens
  CDR3 for alpha chain variable domain of TCR clone 133892 (TRAV6, TRAJ6)
CALPASGGSYIPTF

SEQ ID NO: 267784 - protein, 17 aa, Homo sapiens
  CDR3 for beta chain variable domain of TCR clone 133892 (TRBV5-1, TRBJ2-5)
CASSPVALGQNQETQYF

SEQ ID NO: 267785 - protein, 17 aa, Homo sapiens
  CDR3 for alpha chain variable domain of TCR clone 133893 (TRAV3, TRAJ6)
CAVRDGTRAGGSYIPTF

SEQ ID NO: 267786 - protein, 13 aa, Homo sapiens
  CDR3 for beta chain variable domain of TCR clone 133893 (TRBV27, TRBJ2-1)
CASRTLGVGEQFF

SEQ ID NO: 267787 - protein, 15 aa, Homo sapiens
  CDR3 for alpha chain variable domain of TCR clone 133894 (TRAV3, TRAJ5)
CAVRDLDTGRRALTF

SEQ ID NO: 267788 - protein, 13 aa, Homo sapiens
  CDR3 for beta chain variable domain of TCR clone 133894 (TRBV25-1, TRBJ1-4)
CQQWGGQPEKLFF

SEQ ID NO: 267789 - protein, 18 aa, Homo sapiens
  CDR3 for alpha chain variable domain of TCR clone 133895 (TRAV9-2, TRAJ10)
CALSDGALASGGGNKLTF

SEQ ID NO: 267790 - protein, 16 aa, Homo sapiens
  CDR3 for beta chain variable domain of TCR clone 133895 (TRBV28, TRBJ2-7)
CASSSSGTSGSYKQYF

SEQ ID NO: 267791 - protein, 12 aa, Homo sapiens
  CDR3 for alpha chain variable domain of TCR clone 133896 (TRAV13-1, TRAJ21)
CAAKEGFNEFYF

SEQ ID NO: 267792 - protein, 17 aa, Homo sapiens
  CDR3 for beta chain variable domain of TCR clone 133896 (TRBV20-1, TRBJ2-1)
CSASSSGLAGSYDEQFF

SEQ ID NO: 267793 - protein, 12 aa, Homo sapiens
  CDR3 for alpha chain variable domain of TCR clone 133897 (TRAV2, TRAJ33)
CAVPDSNYQLIW

SEQ ID NO: 267794 - protein, 20 aa, Homo sapiens
  CDR3 for beta chain variable domain of TCR clone 133897 (TRBV19, TRBJ2-1)
CAGSISRTVTSTRLNNEQFF

SEQ ID NO: 267795 - protein, 13 aa, Homo sapiens
  CDR3 for alpha chain variable domain of TCR clone 133898 (TRAV8-3, TRAJ4)
WVFYSGGYNKLIF

SEQ ID NO: 267796 - protein, 14 aa, Homo sapiens
  CDR3 for beta chain variable domain of TCR clone 133898 (TRBV7-9, TRBJ2-3)
CACSLEDGTDTQYF

SEQ ID NO: 267797 - protein, 15 aa, Homo sapiens
  CDR3 for alpha chain variable domain of TCR clone 133899 (TRAV23/DV6, TRAJ18)
CAARYRGSTLGRLYF

SEQ ID NO: 267798 - protein, 17 aa, Homo sapiens
  CDR3 for beta chain variable domain of TCR clone 133899 (TRBV13, TRBJ2-3)
CASSLSRVAGGRNTQYF

SEQ ID NO: 267799 - protein, 16 aa, Homo sapiens
  CDR3 for alpha chain variable domain of TCR clone 133900 (TRAV12-3, TRAJ53)
CAMSPGSGGSNYKLTF

SEQ ID NO: 267800 - protein, 11 aa, Homo sapiens
  CDR3 for beta chain variable domain of TCR clone 133900 (TRBV29-1, TRBJ2-5)
CSEGRTRTQYF

SEQ ID NO: 267801 - protein, 13 aa, Homo sapiens
  CDR3 for alpha chain variable domain of TCR clone 133901 (TRAV8-4, TRAJ10)
CAAFTGGGNKLTF

SEQ ID NO: 267802 - protein, 15 aa, Homo sapiens
  CDR3 for beta chain variable domain of TCR clone 133901 (TRBV2, TRBJ2-3)
CASSDLEKATDTQYF

SEQ ID NO: 267803 - protein, 14 aa, Homo sapiens
  CDR3 for alpha chain variable domain of TCR clone 133902 (TRAV8-4, TRAJ13)
CAVTLSGGYQKVTF

SEQ ID NO: 267804 - protein, 14 aa, Homo sapiens
  CDR3 for beta chain variable domain of TCR clone 133902 (TRBV7-2, TRBJ1-2)
CASSQKGSTYGYTF

SEQ ID NO: 267805 - protein, 12 aa, Homo sapiens
  CDR3 for alpha chain variable domain of TCR clone 133903 (TRAV9-2, TRAJ57)
CALRSGSEKLVF

SEQ ID NO: 267806 - protein, 17 aa, Homo sapiens
  CDR3 for beta chain variable domain of TCR clone 133903 (TRBV13, TRBJ2-3)
CASSLSRVAGGRNTQYF

SEQ ID NO: 267807 - protein, 14 aa, Homo sapiens
  CDR3 for alpha chain variable domain of TCR clone 133904 (TRAV2, TRAJ37)
CAVDFTSNTGRLIF

SEQ ID NO: 267808 - protein, 13 aa, Homo sapiens
  CDR3 for beta chain variable domain of TCR clone 133904 (TRBV20-1, TRBJ1-1)
CSAPLGGGTEAFF

SEQ ID NO: 267809 - protein, 12 aa, Homo sapiens
  CDR3 for alpha chain variable domain of TCR clone 133905 (TRAV27, TRAJ58)
CAGARDTSRLTF

SEQ ID NO: 267810 - protein, 15 aa, Homo sapiens
  CDR3 for beta chain variable domain of TCR clone 133905 (TRBV3-1, TRBJ2-7)
CASSQVAGAKYEQYF

SEQ ID NO: 267811 - protein, 10 aa, Homo sapiens
  CDR3 for alpha chain variable domain of TCR clone 133906 (TRAV12-3, TRAJ49)
CAMNDDQFYF

SEQ ID NO: 267812 - protein, 14 aa, Homo sapiens
  CDR3 for beta chain variable domain of TCR clone 133906 (TRBV4-3, TRBJ1-1)
CASSQGWTPARAFF

SEQ ID NO: 267813 - protein, 11 aa, Homo sapiens
  CDR3 for alpha chain variable domain of TCR clone 133907 (TRAV2, TRAJ33)
CAVESNYQLIW

SEQ ID NO: 267814 - protein, 15 aa, Homo sapiens
  CDR3 for beta chain variable domain of TCR clone 133907 (TRBV19, TRBJ1-1)
CASTSGQIQNTESFF

SEQ ID NO: 267815 - protein, 11 aa, Homo sapiens
  CDR3 for alpha chain variable domain of TCR clone 133908 (TRAV3, TRAJ13)
CAVTSYEKVTF

SEQ ID NO: 267816 - protein, 15 aa, Homo sapiens
  CDR3 for beta chain variable domain of TCR clone 133908 (TRBV7-9, TRBJ2-7)
CASSSSGLAVYEQYF

SEQ ID NO: 267817 - protein, 13 aa, Homo sapiens
  CDR3 for alpha chain variable domain of TCR clone 133909 (TRAV3, TRAJ27)
CAVRPLGAGKSTF

SEQ ID NO: 267818 - protein, 13 aa, Homo sapiens
  CDR3 for beta chain variable domain of TCR clone 133909 (TRBV7-9, TRBJ2-3)
CASSPGSTATQYF

SEQ ID NO: 267819 - protein, 13 aa, Homo sapiens
  CDR3 for alpha chain variable domain of TCR clone 133910 (TRAV3, TRAJ27)
CAVRPLGAGKSTF

SEQ ID NO: 267820 - protein, 13 aa, Homo sapiens
  CDR3 for beta chain variable domain of TCR clone 133910 (TRBV7-3, TRBJ1-2)
CASSLKRGYGYTF

SEQ ID NO: 267821 - protein, 15 aa, Homo sapiens
  CDR3 for alpha chain variable domain of TCR clone 133911 (TRAV12-3, TRAJ6)
CAMSATTGGSYIPTF

SEQ ID NO: 267822 - protein, 13 aa, Homo sapiens
  CDR3 for beta chain variable domain of TCR clone 133911 (TRBV7-9, TRBJ1-2)
CASSLKQNYGYSF

SEQ ID NO: 267823 - protein, 16 aa, Homo sapiens
  CDR3 for alpha chain variable domain of TCR clone 133912 (TRAV17, TRAJ35)
CATAEGGIGFGNVLHC

SEQ ID NO: 267824 - protein, 16 aa, Homo sapiens
  CDR3 for beta chain variable domain of TCR clone 133912 (TRBV6-5, TRBJ2-7)
CASSSDPTSVFYEQYF

SEQ ID NO: 267825 - protein, 13 aa, Homo sapiens
  CDR3 for alpha chain variable domain of TCR clone 133913 (TRAV12-3, TRAJ56)
CAMSFGANSKLTF

SEQ ID NO: 267826 - protein, 15 aa, Homo sapiens
  CDR3 for beta chain variable domain of TCR clone 133913 (TRBV6-3, TRBJ2-7)
CASSSPGTVSYEQYF

SEQ ID NO: 267827 - protein, 14 aa, Homo sapiens
  CDR3 for alpha chain variable domain of TCR clone 133914 (TRAV1-2, TRAJ16)
CAVNRFSDGQKLLF

SEQ ID NO: 267828 - protein, 14 aa, Homo sapiens
  CDR3 for beta chain variable domain of TCR clone 133914 (TRBV19, TRBJ2-1)
CASKDPGLANEQFF

SEQ ID NO: 267829 - protein, 10 aa, Homo sapiens
  CDR3 for alpha chain variable domain of TCR clone 133915 (TRAV1-2, TRAJ23)
CAGQGGKLIF

SEQ ID NO: 267830 - protein, 16 aa, Homo sapiens
  CDR3 for beta chain variable domain of TCR clone 133915 (TRBV11-2, TRBJ1-1)
CASSLRQGGEHSKDFF

SEQ ID NO: 267831 - protein, 16 aa, Homo sapiens
  CDR3 for alpha chain variable domain of TCR clone 133916 (TRAV12-3, TRAJ53)
CAMSPGSGGSNYKLTF

SEQ ID NO: 267832 - protein, 15 aa, Homo sapiens
  CDR3 for beta chain variable domain of TCR clone 133916 (TRBV4-1, TRBJ2-5)
CASSQWDLYQETQYF

SEQ ID NO: 267833 - protein, 13 aa, Homo sapiens
  CDR3 for alpha chain variable domain of TCR clone 133917 (TRAV21, TRAJ27)
CAARPGNAGKSTF

SEQ ID NO: 267834 - protein, 16 aa, Homo sapiens
  CDR3 for beta chain variable domain of TCR clone 133917 (TRBV4-1, TRBJ2-3)
CASSQSTSGAEDTQYF

SEQ ID NO: 267835 - protein, 13 aa, Homo sapiens
  CDR3 for alpha chain variable domain of TCR clone 133918 (TRAV29/DV5, TRAJ45)
CRSSGGGADGLTF

SEQ ID NO: 267836 - protein, 17 aa, Homo sapiens
  CDR3 for beta chain variable domain of TCR clone 133918 (TRBV11-2, TRBJ2-1)
CASSLYPPGVEYNEQFF

SEQ ID NO: 267837 - protein, 13 aa, Homo sapiens
  CDR3 for alpha chain variable domain of TCR clone 133919 (TRAV36/DV7, TRAJ53)
CARSGGSNYKLTF

SEQ ID NO: 267838 - protein, 13 aa, Homo sapiens
  CDR3 for beta chain variable domain of TCR clone 133919 (TRBV28, TRBJ2-4)
CASSQSSKNIQYF

SEQ ID NO: 267839 - protein, 14 aa, Homo sapiens
  CDR3 for alpha chain variable domain of TCR clone 133920 (TRAV17, TRAJ16)
CATADFSDGQKLLF

SEQ ID NO: 267840 - protein, 15 aa, Homo sapiens
  CDR3 for beta chain variable domain of TCR clone 133920 (TRBV5-1, TRBJ2-7)
CASSPQGRPLDEQYF

SEQ ID NO: 267841 - protein, 14 aa, Homo sapiens
  CDR3 for alpha chain variable domain of TCR clone 133921 (TRAV12-2, TRAJ17)
CAVLFKAAGNKLTF

SEQ ID NO: 267842 - protein, 13 aa, Homo sapiens
  CDR3 for beta chain variable domain of TCR clone 133921 (TRBV7-3, TRBJ2-1)
CAISLWPYNEQFF

SEQ ID NO: 267843 - protein, 12 aa, Homo sapiens
  CDR3 for alpha chain variable domain of TCR clone 133922 (TRAV27, TRAJ35)
CAGADFGNVLHC

SEQ ID NO: 267844 - protein, 15 aa, Homo sapiens
  CDR3 for beta chain variable domain of TCR clone 133922 (TRBV7-2, TRBJ1-2)
CASSLVSGGDYGYTF

SEQ ID NO: 267845 - protein, 16 aa, Homo sapiens
  CDR3 for alpha chain variable domain of TCR clone 133923 (TRAV8-4, TRAJ5)
CAVSPLTDTGRRALTF

SEQ ID NO: 267846 - protein, 14 aa, Homo sapiens
  CDR3 for beta chain variable domain of TCR clone 133923 (TRBV19, TRBJ1-6)
CASSTDEWNSPLHF

SEQ ID NO: 267847 - protein, 13 aa, Homo sapiens
  CDR3 for alpha chain variable domain of TCR clone 133924 (TRAV12-2, TRAJ10)
CAVPTGGGNKLPF

SEQ ID NO: 267848 - protein, 14 aa, Homo sapiens
  CDR3 for beta chain variable domain of TCR clone 133924 (TRBV25-1, TRBJ1-1)
CASTHLGGNTEAFF

SEQ ID NO: 267849 - protein, 13 aa, Homo sapiens
  CDR3 for alpha chain variable domain of TCR clone 133925 (TRAV12-1, TRAJ31)
CVVIPNNNARLMF

SEQ ID NO: 267850 - protein, 14 aa, Homo sapiens
  CDR3 for beta chain variable domain of TCR clone 133925 (TRBV19, TRBJ2-1)
CASPTFVLSGEQFF

SEQ ID NO: 267851 - protein, 12 aa, Homo sapiens
  CDR3 for alpha chain variable domain of TCR clone 133926 (TRAV3, TRAJ20)
CAVRDPDYKLSF

SEQ ID NO: 267852 - protein, 11 aa, Homo sapiens
  CDR3 for beta chain variable domain of TCR clone 133926 (TRBV28, TRBJ2-5)
CASSLKVTQYF

SEQ ID NO: 267853 - protein, 16 aa, Homo sapiens
  CDR3 for alpha chain variable domain of TCR clone 133927 (TRAV3, TRAJ37)
CAVRGNGSGNTGKLIF

SEQ ID NO: 267854 - protein, 15 aa, Homo sapiens
  CDR3 for beta chain variable domain of TCR clone 133927 (TRBV20-1, TRBJ2-1)
CSARGGTRYYNEQFF

SEQ ID NO: 267855 - protein, 14 aa, Homo sapiens
  CDR3 for alpha chain variable domain of TCR clone 133928 (TRAV17, TRAJ54)
CATDANQVAQKLVF

SEQ ID NO: 267856 - protein, 12 aa, Homo sapiens
  CDR3 for beta chain variable domain of TCR clone 133928 (TRBV7-9, TRBJ2-7)
CASSIKREEQYF

SEQ ID NO: 267857 - protein, 17 aa, Homo sapiens
  CDR3 for alpha chain variable domain of TCR clone 133929 (TRAV3, TRAJ6)
CAVRDGPRAGGGYIPTF

SEQ ID NO: 267858 - protein, 16 aa, Homo sapiens
  CDR3 for beta chain variable domain of TCR clone 133929 (TRBV7-8, TRBJ2-3)
CASSTEGQRETDTQYF

SEQ ID NO: 267859 - protein, 13 aa, Homo sapiens
  CDR3 for alpha chain variable domain of TCR clone 133930 (TRAV17, TRAJ9)
CATDYTGGFKTIF

SEQ ID NO: 267860 - protein, 14 aa, Homo sapiens
  CDR3 for beta chain variable domain of TCR clone 133930 (TRBV7-2, TRBJ2-7)
CASSPKTSFYEQYF

SEQ ID NO: 267861 - protein, 11 aa, Homo sapiens
  CDR3 for alpha chain variable domain of TCR clone 133931 (TRAV13-2, TRAJ23)
CAESPRGKLIF

SEQ ID NO: 267862 - protein, 12 aa, Homo sapiens
  CDR3 for beta chain variable domain of TCR clone 133931 (TRBV11-2, TRBJ2-2)
CASSIGGGELFF

SEQ ID NO: 267863 - protein, 17 aa, Homo sapiens
  CDR3 for alpha chain variable domain of TCR clone 133932 (TRAV13-1, TRAJ52)
CAAGRNAVGTSYGKLTF

SEQ ID NO: 267864 - protein, 13 aa, Homo sapiens
  CDR3 for beta chain variable domain of TCR clone 133932 (TRBV7-2, TRBJ1-1)
CASNLKGAKVAFF

SEQ ID NO: 267865 - protein, 15 aa, Homo sapiens
  CDR3 for alpha chain variable domain of TCR clone 133933 (TRAV4, TRAJ26)
CLVGDMNNYGQNFFF

SEQ ID NO: 267866 - protein, 16 aa, Homo sapiens
  CDR3 for beta chain variable domain of TCR clone 133933 (TRBV28, TRBJ1-4)
CASSSRTGAANEKLFF

SEQ ID NO: 267867 - protein, 14 aa, Homo sapiens
  CDR3 for alpha chain variable domain of TCR clone 133934 (TRAV12-1, TRAJ13)
CVVIDSGGNQKVTF

SEQ ID NO: 267868 - protein, 17 aa, Homo sapiens
  CDR3 for beta chain variable domain of TCR clone 133934 (TRBV15, TRBJ1-5)
CATSRAPPGTRNQPQHF

SEQ ID NO: 267869 - protein, 17 aa, Homo sapiens
  CDR3 for alpha chain variable domain of TCR clone 133935 (TRAV13-1, TRAJ31)
CAPRDRLMFGDGTQLVV

SEQ ID NO: 267870 - protein, 15 aa, Homo sapiens
  CDR3 for beta chain variable domain of TCR clone 133935 (TRBV7-3, TRBJ2-1)
CASSPTGGGEVEQFF

SEQ ID NO: 267871 - protein, 12 aa, Homo sapiens
  CDR3 for alpha chain variable domain of TCR clone 133936 (TRAV12-2, TRAJ52)
IGGGTSSGKLTF

SEQ ID NO: 267872 - protein, 13 aa, Homo sapiens
  CDR3 for beta chain variable domain of TCR clone 133936 (TRBV15, TRBJ2-7)
CATSTTGHYEQYF

SEQ ID NO: 267873 - protein, 13 aa, Homo sapiens
  CDR3 for alpha chain variable domain of TCR clone 133937 (TRAV13-1, TRAJ11)
CAAVLAGYSTLTF

SEQ ID NO: 267874 - protein, 17 aa, Homo sapiens
  CDR3 for beta chain variable domain of TCR clone 133937 (TRBV25-1, TRBJ2-7)
CASSDARVVFSAYEQYF

SEQ ID NO: 267875 - protein, 13 aa, Homo sapiens
  CDR3 for alpha chain variable domain of TCR clone 133938 (TRAV8-3, TRAJ28)
CAVGAVGRYQLTF

SEQ ID NO: 267876 - protein, 16 aa, Homo sapiens
  CDR3 for beta chain variable domain of TCR clone 133938 (TRBV19, TRBJ2-1)
CASSKAGPSSYNEQFF

SEQ ID NO: 267877 - protein, 12 aa, Homo sapiens
  CDR3 for alpha chain variable domain of TCR clone 133939 (TRAV8-2, TRAJ45)
CVQGGGADGLTF

SEQ ID NO: 267878 - protein, 14 aa, Homo sapiens
  CDR3 for beta chain variable domain of TCR clone 133939 (TRBV2, TRBJ2-7)
CASSLTSGGYEQYF

SEQ ID NO: 267879 - protein, 12 aa, Homo sapiens
  CDR3 for alpha chain variable domain of TCR clone 133940 (TRAV20, TRAJ39)
CAVGNAGNMLTF

SEQ ID NO: 267880 - protein, 17 aa, Homo sapiens
  CDR3 for beta chain variable domain of TCR clone 133940 (TRBV4-1, TRBJ2-3)
CASSRGYVSGGTDTQYF

SEQ ID NO: 267881 - protein, 13 aa, Homo sapiens
  CDR3 for alpha chain variable domain of TCR clone 133941 (TRAV2, TRAJ13)
CAVESGGYQKVTF

SEQ ID NO: 267882 - protein, 12 aa, Homo sapiens
  CDR3 for beta chain variable domain of TCR clone 133941 (TRBV29-1, TRBJ2-3)
CSVTRGADTQYF

SEQ ID NO: 267883 - protein, 14 aa, Homo sapiens
  CDR3 for alpha chain variable domain of TCR clone 133942 (TRAV12-2, TRAJ13)
CAVKQTGGYQKVTL

SEQ ID NO: 267884 - protein, 15 aa, Homo sapiens
  CDR3 for beta chain variable domain of TCR clone 133942 (TRBV27, TRBJ2-1)
CASSNGGGSSNEQFF

SEQ ID NO: 267885 - protein, 21 aa, Homo sapiens
  CDR3 for alpha chain variable domain of TCR clone 133943 (TRAV26-1, TRAJ17)
CCVLLHRQSSGSKAAGNKLTF

SEQ ID NO: 267886 - protein, 14 aa, Homo sapiens
  CDR3 for beta chain variable domain of TCR clone 133943 (TRBV28, TRBJ1-2)
CASRIQGVNYGYTF

SEQ ID NO: 267887 - protein, 16 aa, Homo sapiens
  CDR3 for alpha chain variable domain of TCR clone 133944 (TRAV16, TRAJ52)
CALSAAGGTSYGKLTF

SEQ ID NO: 267888 - protein, 12 aa, Homo sapiens
  CDR3 for beta chain variable domain of TCR clone 133944 (TRBV12-4, TRBJ1-3)
CASSFSGNSIYF

SEQ ID NO: 267889 - protein, 11 aa, Homo sapiens
  CDR3 for alpha chain variable domain of TCR clone 133945 (TRAV23/DV6, TRAJ56)
CAAPANSKLTF

SEQ ID NO: 267890 - protein, 12 aa, Homo sapiens
  CDR3 for beta chain variable domain of TCR clone 133945 (TRBV11-2, TRBJ2-2)
CASSLGGGELFF

SEQ ID NO: 267891 - protein, 12 aa, Homo sapiens
  CDR3 for alpha chain variable domain of TCR clone 133946 (TRAV17, TRAJ12)
CATLRSCYKLIF

SEQ ID NO: 267892 - protein, 16 aa, Homo sapiens
  CDR3 for beta chain variable domain of TCR clone 133946 (TRBV28, TRBJ2-7)
CASSLFFETGGPEQYF

SEQ ID NO: 267893 - protein, 14 aa, Homo sapiens
  CDR3 for alpha chain variable domain of TCR clone 133947 (TRAV1-2, TRAJ8)
CAVREDTGFKKLVF

SEQ ID NO: 267894 - protein, 15 aa, Homo sapiens
  CDR3 for beta chain variable domain of TCR clone 133947 (TRBV12-4, TRBJ2-5)
CASSPPTGLQETQYF

SEQ ID NO: 267895 - protein, 15 aa, Homo sapiens
  CDR3 for alpha chain variable domain of TCR clone 133948 (TRAV26-1, TRAJ9)
CIVRESNTGGFKTIF

SEQ ID NO: 267896 - protein, 11 aa, Homo sapiens
  CDR3 for beta chain variable domain of TCR clone 133948 (TRBV7-6, TRBJ2-5)
FASSFQETQYF

SEQ ID NO: 267897 - protein, 16 aa, Homo sapiens
  CDR3 for alpha chain variable domain of TCR clone 133949 (TRAV4, TRAJ22)
CLVGDLYSGSARQLTF

SEQ ID NO: 267898 - protein, 16 aa, Homo sapiens
  CDR3 for beta chain variable domain of TCR clone 133949 (TRBV7-9, TRBJ2-1)
CTSSDVAGGSYNERFF

SEQ ID NO: 267899 - protein, 11 aa, Homo sapiens
  CDR3 for alpha chain variable domain of TCR clone 133950 (TRAV35, TRAJ34)
CWARNTDKLIF

SEQ ID NO: 267900 - protein, 14 aa, Homo sapiens
  CDR3 for beta chain variable domain of TCR clone 133950 (TRBV7-9, TRBJ2-2)
CASSLVQDTGELFF

SEQ ID NO: 267901 - protein, 15 aa, Homo sapiens
  CDR3 for alpha chain variable domain of TCR clone 133951 (TRAV21, TRAJ38)
CAVRQDAGYNRKLIW

SEQ ID NO: 267902 - protein, 16 aa, Homo sapiens
  CDR3 for beta chain variable domain of TCR clone 133951 (TRBV4-2, TRBJ1-1)
CASRPLDGGGDTEAFF

SEQ ID NO: 267903 - protein, 12 aa, Homo sapiens
  CDR3 for alpha chain variable domain of TCR clone 133952 (TRAV12-1, TRAJ34)
CVVTFNTDKRIF

SEQ ID NO: 267904 - protein, 14 aa, Homo sapiens
  CDR3 for beta chain variable domain of TCR clone 133952 (TRBV19, TRBJ1-1)
CASLRTGLNTEAFF

SEQ ID NO: 267905 - protein, 11 aa, Homo sapiens
  CDR3 for alpha chain variable domain of TCR clone 133953 (TRAV35, TRAJ40)
GRTSGTYKYIF

SEQ ID NO: 267906 - protein, 14 aa, Homo sapiens
  CDR3 for beta chain variable domain of TCR clone 133953 (TRBV11-2, TRBJ2-5)
CASSRTGGIETQYF

SEQ ID NO: 267907 - protein, 12 aa, Homo sapiens
  CDR3 for alpha chain variable domain of TCR clone 133954 (TRAV8-3, TRAJ48)
CCGAFWNEKLTF

SEQ ID NO: 267908 - protein, 14 aa, Homo sapiens
  CDR3 for beta chain variable domain of TCR clone 133954 (TRBV18, TRBJ2-7)
CASSPRGGAYEQYF

SEQ ID NO: 267909 - protein, 11 aa, Homo sapiens
  CDR3 for alpha chain variable domain of TCR clone 133955 (TRAV1-1, TRAJ23)
CAVRQGGKLIF

SEQ ID NO: 267910 - protein, 20 aa, Homo sapiens
  CDR3 for beta chain variable domain of TCR clone 133955 (TRBV7-8, TRBJ2-2)
CASSHLYPGPTIHITGELFF

SEQ ID NO: 267911 - protein, 11 aa, Homo sapiens
  CDR3 for alpha chain variable domain of TCR clone 133956 (TRAV2, TRAJ13)
CAYGGYQKVTF

SEQ ID NO: 267912 - protein, 18 aa, Homo sapiens
  CDR3 for beta chain variable domain of TCR clone 133956 (TRBV19, TRBJ2-6)
CASIGPTSGGSGANVLTF

SEQ ID NO: 267913 - protein, 12 aa, Homo sapiens
  CDR3 for alpha chain variable domain of TCR clone 133957 (TRAV13-1, TRAJ21)
CAAKEGFNKFYF

SEQ ID NO: 267914 - protein, 15 aa, Homo sapiens
  CDR3 for beta chain variable domain of TCR clone 133957 (TRBV7-3, TRBJ2-2)
CASSETGQGTGELFF

SEQ ID NO: 267915 - protein, 14 aa, Homo sapiens
  CDR3 for alpha chain variable domain of TCR clone 133958 (TRAV12-2, TRAJ44)
CAVNPAGTASKLTF

SEQ ID NO: 267916 - protein, 13 aa, Homo sapiens
  CDR3 for beta chain variable domain of TCR clone 133958 (TRBV20-1, TRBJ1-6)
CSAHLGVGSPLHF

SEQ ID NO: 267917 - protein, 14 aa, Homo sapiens
  CDR3 for alpha chain variable domain of TCR clone 133959 (TRAV2, TRAJ9)
CAVEDRSGGFKTIF

SEQ ID NO: 267918 - protein, 16 aa, Homo sapiens
  CDR3 for beta chain variable domain of TCR clone 133959 (TRBV15, TRBJ1-2)
CATSRGPRTGGGGYTF

SEQ ID NO: 267919 - protein, 19 aa, Homo sapiens
  CDR3 for alpha chain variable domain of TCR clone 133960 (TRAV26-1, TRAJ52)
CIVRAHRNTGGTSYGKLTF

SEQ ID NO: 267920 - protein, 15 aa, Homo sapiens
  CDR3 for beta chain variable domain of TCR clone 133960 (TRBV29-1, TRBJ2-1)
CSGRDRKSSYNEQFF

SEQ ID NO: 267921 - protein, 13 aa, Homo sapiens
  CDR3 for alpha chain variable domain of TCR clone 133961 (TRAV23/DV6, TRAJ22)
CAARDGSARQLTF

SEQ ID NO: 267922 - protein, 14 aa, Homo sapiens
  CDR3 for beta chain variable domain of TCR clone 133961 (TRBV4-1, TRBJ2-2)
CASSQAVNTGELFF

SEQ ID NO: 267923 - protein, 12 aa, Homo sapiens
  CDR3 for alpha chain variable domain of TCR clone 133962 (TRAV25, TRAJ38)
CAGTGNNRKLIW

SEQ ID NO: 267924 - protein, 14 aa, Homo sapiens
  CDR3 for beta chain variable domain of TCR clone 133962 (TRBV19, TRBJ1-5)
CASSKITGPQPQHF

SEQ ID NO: 267925 - protein, 14 aa, Homo sapiens
  CDR3 for alpha chain variable domain of TCR clone 133963 (TRAV38-1, TRAJ35)
CAFLTIGFGNGLHC

SEQ ID NO: 267926 - protein, 17 aa, Homo sapiens
  CDR3 for beta chain variable domain of TCR clone 133963 (TRBV28, TRBJ1-1)
CASSGDLRTESNTEAFF

SEQ ID NO: 267927 - protein, 12 aa, Homo sapiens
  CDR3 for alpha chain variable domain of TCR clone 133964 (TRAV1-2, TRAJ33)
CAALDSNYQLIW

SEQ ID NO: 267928 - protein, 13 aa, Homo sapiens
  CDR3 for beta chain variable domain of TCR clone 133964 (TRBV4-1, TRBJ1-1)
CASSQLGTGEAFF

SEQ ID NO: 267929 - protein, 15 aa, Homo sapiens
  CDR3 for alpha chain variable domain of TCR clone 133965 (TRAV21, TRAJ17)
CAVDEQKAAGNKLTF

SEQ ID NO: 267930 - protein, 17 aa, Homo sapiens
  CDR3 for beta chain variable domain of TCR clone 133965 (TRBV7-9, TRBJ2-3)
CASSPTVAGDLTDTQYF

SEQ ID NO: 267931 - protein, 17 aa, Homo sapiens
  CDR3 for alpha chain variable domain of TCR clone 133966 (TRAV9-2, TRAJ45)
CALSGYYSGGGADGLTF

SEQ ID NO: 267932 - protein, 14 aa, Homo sapiens
  CDR3 for beta chain variable domain of TCR clone 133966 (TRBV19, TRBJ2-1)
CASPTFVLSGEQFF

SEQ ID NO: 267933 - protein, 15 aa, Homo sapiens
  CDR3 for alpha chain variable domain of TCR clone 133967 (TRAV3, TRAJ9)
CAARDSNTGGFKTIF

SEQ ID NO: 267934 - protein, 16 aa, Homo sapiens
  CDR3 for beta chain variable domain of TCR clone 133967 (TRBV15, TRBJ2-5)
CATSPTTGQGMETQYF

SEQ ID NO: 267935 - protein, 15 aa, Homo sapiens
  CDR3 for alpha chain variable domain of TCR clone 133968 (TRAV8-6, TRAJ38)
CAVSSNAGNNRKLIW

SEQ ID NO: 267936 - protein, 17 aa, Homo sapiens
  CDR3 for beta chain variable domain of TCR clone 133968 (TRBV11-2, TRBJ2-1)
CASSLCPPGVEYNEQFF

SEQ ID NO: 267937 - protein, 13 aa, Homo sapiens
  CDR3 for alpha chain variable domain of TCR clone 133969 (TRAV13-1, TRAJ39)
CSKYSNAGNMLTF

SEQ ID NO: 267938 - protein, 16 aa, Homo sapiens
  CDR3 for beta chain variable domain of TCR clone 133969 (TRBV20-1, TRBJ1-4)
CNAPGQGLLTNEKLFF

SEQ ID NO: 267939 - protein, 14 aa, Homo sapiens
  CDR3 for alpha chain variable domain of TCR clone 133970 (TRAV13-2, TRAJ9)
CAENLETGGFKTIF

SEQ ID NO: 267940 - protein, 13 aa, Homo sapiens
  CDR3 for beta chain variable domain of TCR clone 133970 (TRBV7-9, TRBJ1-2)
CASSLKQNYSYTF

SEQ ID NO: 267941 - protein, 14 aa, Homo sapiens
  CDR3 for alpha chain variable domain of TCR clone 133971 (TRAV2, TRAJ37)
CAVDFASNTGKLIF

SEQ ID NO: 267942 - protein, 14 aa, Homo sapiens
  CDR3 for beta chain variable domain of TCR clone 133971 (TRBV20-1, TRBJ2-7)
CSAPELAGVGEQYF

SEQ ID NO: 267943 - protein, 14 aa, Homo sapiens
  CDR3 for alpha chain variable domain of TCR clone 133972 (TRAV26-1, TRAJ40)
CIVRLLSGTYKYIF

SEQ ID NO: 267944 - protein, 14 aa, Homo sapiens
  CDR3 for beta chain variable domain of TCR clone 133972 (TRBV19, TRBJ2-1)
CASPTFVLSGEQFF

SEQ ID NO: 267945 - protein, 16 aa, Homo sapiens
  CDR3 for alpha chain variable domain of TCR clone 133973 (TRAV3, TRAJ37)
GAVRPHGSGNTGKLIF

SEQ ID NO: 267946 - protein, 14 aa, Homo sapiens
  CDR3 for beta chain variable domain of TCR clone 133973 (TRBV25-1, TRBJ1-1)
CASTHLGGNTEAFF

SEQ ID NO: 267947 - protein, 12 aa, Homo sapiens
  CDR3 for alpha chain variable domain of TCR clone 133974 (TRAV3, TRAJ43)
CAVRDPNNDMRF

SEQ ID NO: 267948 - protein, 14 aa, Homo sapiens
  CDR3 for beta chain variable domain of TCR clone 133974 (TRBV5-1, TRBJ2-7)
CASSRGESLYEQYF

SEQ ID NO: 267949 - protein, 14 aa, Homo sapiens
  CDR3 for alpha chain variable domain of TCR clone 133975 (TRAV12-1, TRAJ12)
CVVTRMDGSYKLIF

SEQ ID NO: 267950 - protein, 14 aa, Homo sapiens
  CDR3 for beta chain variable domain of TCR clone 133975 (TRBV4-1, TRBJ2-7)
CASSPVAGGDEQYF

SEQ ID NO: 267951 - protein, 12 aa, Homo sapiens
  CDR3 for alpha chain variable domain of TCR clone 133976 (TRAV12-2, TRAJ31)
CAVNTPDARLMF

SEQ ID NO: 267952 - protein, 17 aa, Homo sapiens
  CDR3 for beta chain variable domain of TCR clone 133976 (TRBV20-1, TRBJ1-6)
CSARGGYTSSYNSPLHF

SEQ ID NO: 267953 - protein, 15 aa, Homo sapiens
  CDR3 for alpha chain variable domain of TCR clone 133977 (TRAV8-3, TRAJ27)
CAVGPSTTNAGKSTF

SEQ ID NO: 267954 - protein, 13 aa, Homo sapiens
  CDR3 for beta chain variable domain of TCR clone 133977 (TRBV12-5, TRBJ1-2)
CASGVRTGNGYTF

SEQ ID NO: 267955 - protein, 11 aa, Homo sapiens
  CDR3 for alpha chain variable domain of TCR clone 133978 (TRAV3, TRAJ21)
CAVGNFNKFYF

SEQ ID NO: 267956 - protein, 13 aa, Homo sapiens
  CDR3 for beta chain variable domain of TCR clone 133978 (TRBV11-2, TRBJ2-5)
CASSFSSQETQYF

SEQ ID NO: 267957 - protein, 14 aa, Homo sapiens
  CDR3 for alpha chain variable domain of TCR clone 133979 (TRAV30, TRAJ33)
CGTERRFSNYQLIW

SEQ ID NO: 267958 - protein, 16 aa, Homo sapiens
  CDR3 for beta chain variable domain of TCR clone 133979 (TRBV7-3, TRBJ2-2)
CASSLKRGTLSGELVF

SEQ ID NO: 267959 - protein, 14 aa, Homo sapiens
  CDR3 for alpha chain variable domain of TCR clone 133980 (TRAV1-2, TRAJ8)
CAVREDTGFQKLVF

SEQ ID NO: 267960 - protein, 13 aa, Homo sapiens
  CDR3 for beta chain variable domain of TCR clone 133980 (TRBV7-9, TRBJ1-5)
CASSLRNDQPQHF

SEQ ID NO: 267961 - protein, 14 aa, Homo sapiens
  CDR3 for alpha chain variable domain of TCR clone 133981 (TRAV12-1, TRAJ12)
CVVTRMDSSYKLIF

SEQ ID NO: 267962 - protein, 13 aa, Homo sapiens
  CDR3 for beta chain variable domain of TCR clone 133981 (TRBV20-1, TRBJ1-1)
CSARGGGNTDAFF

SEQ ID NO: 267963 - protein, 14 aa, Homo sapiens
  CDR3 for alpha chain variable domain of TCR clone 133982 (TRAV29/DV5, TRAJ36)
CAARRKTGANNLFF

SEQ ID NO: 267964 - protein, 13 aa, Homo sapiens
  CDR3 for beta chain variable domain of TCR clone 133982 (TRBV9, TRBJ2-1)
CASSPSGGNEQFF

SEQ ID NO: 267965 - protein, 13 aa, Homo sapiens
  CDR3 for alpha chain variable domain of TCR clone 133983 (TRAV8-3, TRAJ28)
CAVGAVGSYQLTF

SEQ ID NO: 267966 - protein, 13 aa, Homo sapiens
  CDR3 for beta chain variable domain of TCR clone 133983 (TRBV4-1, TRBJ2-1)
CASSQAGGDEQFF

SEQ ID NO: 267967 - protein, 16 aa, Homo sapiens
  CDR3 for alpha chain variable domain of TCR clone 133984 (TRAV22, TRAJ45)
CAGERGKRGGADGLTF

SEQ ID NO: 267968 - protein, 13 aa, Homo sapiens
  CDR3 for beta chain variable domain of TCR clone 133984 (TRBV27, TRBJ1-1)
CASSLSIGAEAFF

SEQ ID NO: 267969 - protein, 13 aa, Homo sapiens
  CDR3 for alpha chain variable domain of TCR clone 133985 (TRAV12-3, TRAJ39)
CAMRDNAGNMLTF

SEQ ID NO: 267970 - protein, 14 aa, Homo sapiens
  CDR3 for beta chain variable domain of TCR clone 133985 (TRBV7-2, TRBJ2-5)
CASSLSGGGETQYF

SEQ ID NO: 267971 - protein, 16 aa, Homo sapiens
  CDR3 for alpha chain variable domain of TCR clone 133986 (TRAV12-3, TRAJ58)
CAMTDTEETSGSRLTF

SEQ ID NO: 267972 - protein, 22 aa, Homo sapiens
  CDR3 for beta chain variable domain of TCR clone 133986 (TRBV23-1, TRBJ2-7)
CASSRRLDSGHGYVGGGYEQYF

SEQ ID NO: 267973 - protein, 15 aa, Homo sapiens
  CDR3 for alpha chain variable domain of TCR clone 133987 (TRAV3, TRAJ29)
CAVRAPLSGNTPLVF

SEQ ID NO: 267974 - protein, 17 aa, Homo sapiens
  CDR3 for beta chain variable domain of TCR clone 133987 (TRBV13, TRBJ2-3)
CASSLSRVAGGRNTQYF

SEQ ID NO: 267975 - protein, 16 aa, Homo sapiens
  CDR3 for alpha chain variable domain of TCR clone 133988 (TRAV12-3, TRAJ53)
CAMSPGSGGSNYKLTF

SEQ ID NO: 267976 - protein, 19 aa, Homo sapiens
  CDR3 for beta chain variable domain of TCR clone 133988 (TRBV7-2, TRBJ2-3)
CASSFLSRNWGGGTDTQYF

SEQ ID NO: 267977 - protein, 16 aa, Homo sapiens
  CDR3 for alpha chain variable domain of TCR clone 133989 (TRAV30, TRAJ24)
CGTEIVDADSWGKFQF

SEQ ID NO: 267978 - protein, 13 aa, Homo sapiens
  CDR3 for beta chain variable domain of TCR clone 133989 (TRBV4-1, TRBJ2-7)
CASSQGQAYEQYF

SEQ ID NO: 267979 - protein, 13 aa, Homo sapiens
  CDR3 for alpha chain variable domain of TCR clone 133990 (TRAV21, TRAJ57)
WAVTQGGSEKLVF

SEQ ID NO: 267980 - protein, 16 aa, Homo sapiens
  CDR3 for beta chain variable domain of TCR clone 133990 (TRBV29-1, TRBJ2-7)
CSVEDAEDGTAYEQYF

SEQ ID NO: 267981 - protein, 12 aa, Homo sapiens
  CDR3 for alpha chain variable domain of TCR clone 133991 (TRAV13-1, TRAJ15)
CAASQAGTDLIF

SEQ ID NO: 267982 - protein, 14 aa, Homo sapiens
  CDR3 for beta chain variable domain of TCR clone 133991 (TRBV19, TRBJ2-2)
CASSTLHRSGELFF

SEQ ID NO: 267983 - protein, 14 aa, Homo sapiens
  CDR3 for alpha chain variable domain of TCR clone 133992 (TRAV12-1, TRAJ30)
CVVNIGGRDDKVIF

SEQ ID NO: 267984 - protein, 13 aa, Homo sapiens
  CDR3 for beta chain variable domain of TCR clone 133992 (TRBV12-5, TRBJ2-1)
CASGLGRGNEQFF

SEQ ID NO: 267985 - protein, 14 aa, Homo sapiens
  CDR3 for alpha chain variable domain of TCR clone 133993 (TRAV1-2, TRAJ16)
CAVNRFSDGQKLLF

SEQ ID NO: 267986 - protein, 16 aa, Homo sapiens
  CDR3 for beta chain variable domain of TCR clone 133993 (TRBV11-3, TRBJ2-5)
CASSSVVAGSTETQYF

SEQ ID NO: 267987 - protein, 15 aa, Homo sapiens
  CDR3 for alpha chain variable domain of TCR clone 133994 (TRAV8-3, TRAJ11)
CAVGLSNSGYSTLTF

SEQ ID NO: 267988 - protein, 14 aa, Homo sapiens
  CDR3 for beta chain variable domain of TCR clone 133994 (TRBV4-1, TRBJ2-5)
CASSRSGSGETQYF

SEQ ID NO: 267989 - protein, 16 aa, Homo sapiens
  CDR3 for alpha chain variable domain of TCR clone 133995 (TRAV30, TRAJ24)
CGTEIVDADSWGKFQF

SEQ ID NO: 267990 - protein, 14 aa, Homo sapiens
  CDR3 for beta chain variable domain of TCR clone 133995 (TRBV13, TRBJ2-7)
CASSLKGASYEQYF

SEQ ID NO: 267991 - protein, 14 aa, Homo sapiens
  CDR3 for alpha chain variable domain of TCR clone 133996 (TRAV8-3, TRAJ42)
CAVGAWGSQGNLIF

SEQ ID NO: 267992 - protein, 13 aa, Homo sapiens
  CDR3 for beta chain variable domain of TCR clone 133996 (TRBV27, TRBJ2-7)
CASGRGGAYEQYF

SEQ ID NO: 267993 - protein, 14 aa, Homo sapiens
  CDR3 for alpha chain variable domain of TCR clone 133997 (TRAV1-2, TRAJ27)
CAPAEYTNAGKSTF

SEQ ID NO: 267994 - protein, 17 aa, Homo sapiens
  CDR3 for beta chain variable domain of TCR clone 133997 (TRBV28, TRBJ2-5)
CASSRQGGLAGAETQYF

SEQ ID NO: 267995 - protein, 11 aa, Homo sapiens
  CDR3 for alpha chain variable domain of TCR clone 133998 (TRAV2, TRAJ21)
WAVFNFNKFYF

SEQ ID NO: 267996 - protein, 14 aa, Homo sapiens
  CDR3 for beta chain variable domain of TCR clone 133998 (TRBV15, TRBJ2-3)
CATRSGTSTDTQYF

SEQ ID NO: 267997 - protein, 23 aa, Homo sapiens
  CDR3 for alpha chain variable domain of TCR clone 133999 (TRAV8-3, TRAJ6)
CAVGGEEATYLHLEEEPALLFIR

SEQ ID NO: 267998 - protein, 14 aa, Homo sapiens
  CDR3 for beta chain variable domain of TCR clone 133999 (TRBV5-1, TRBJ2-7)
CASSRGESLYEQYF

SEQ ID NO: 267999 - protein, 14 aa, Homo sapiens
  CDR3 for alpha chain variable domain of TCR clone 134000 (TRAV1-2, TRAJ16)
CAVSRFSDGQKLLF

SEQ ID NO: 268000 - protein, 15 aa, Homo sapiens
  CDR3 for beta chain variable domain of TCR clone 134000 (TRBV7-9, TRBJ1-6)
CASSSPGRGHSPLHF

SEQ ID NO: 268001 - protein, 18 aa, Homo sapiens
  CDR3 for alpha chain variable domain of TCR clone 134001 (TRAV13-1, TRAJ52)
CAASKRSAGGTSYGKLTF

SEQ ID NO: 268002 - protein, 15 aa, Homo sapiens
  CDR3 for beta chain variable domain of TCR clone 134001 (TRBV20-1, TRBJ2-1)
CSARGIGGTYNEQFF

SEQ ID NO: 268003 - protein, 15 aa, Homo sapiens
  CDR3 for alpha chain variable domain of TCR clone 134002 (TRAV25, TRAJ52)
CAGRPGGTSYGKLTF

SEQ ID NO: 268004 - protein, 14 aa, Homo sapiens
  CDR3 for beta chain variable domain of TCR clone 134002 (TRBV12-4, TRBJ1-1)
CASSLGTGGTEAFF

SEQ ID NO: 268005 - protein, 11 aa, Homo sapiens
  CDR3 for alpha chain variable domain of TCR clone 134003 (TRAV1-1, TRAJ23)
CAVRQGGKLIF

SEQ ID NO: 268006 - protein, 15 aa, Homo sapiens
  CDR3 for beta chain variable domain of TCR clone 134003 (TRBV19, TRBJ1-2)
CASNLGGETPYGYTF

SEQ ID NO: 268007 - protein, 16 aa, Homo sapiens
  CDR3 for alpha chain variable domain of TCR clone 134004 (TRAV26-1, TRAJ53)
CIVRVAMGGSNYKLTF

SEQ ID NO: 268008 - protein, 15 aa, Homo sapiens
  CDR3 for beta chain variable domain of TCR clone 134004 (TRBV7-9, TRBJ1-5)
CASSQGHQPNQPQHF

SEQ ID NO: 268009 - protein, 14 aa, Homo sapiens
  CDR3 for alpha chain variable domain of TCR clone 134005 (TRAV12-2, TRAJ3)
CAVKGYSSASKIIF

SEQ ID NO: 268010 - protein, 14 aa, Homo sapiens
  CDR3 for beta chain variable domain of TCR clone 134005 (TRBV18, TRBJ2-5)
CASSPGVSQETQYF

SEQ ID NO: 268011 - protein, 22 aa, Homo sapiens
  CDR3 for alpha chain variable domain of TCR clone 134006 (TRAV3, TRAJ38)
CAVRDCLNAGNNHIQNPDPAVY

SEQ ID NO: 268012 - protein, 15 aa, Homo sapiens
  CDR3 for beta chain variable domain of TCR clone 134006 (TRBV6-3, TRBJ2-7)
CASSSPGTVFYEQYF

SEQ ID NO: 268013 - protein, 18 aa, Homo sapiens
  CDR3 for alpha chain variable domain of TCR clone 134007 (TRAV13-1, TRAJ52)
CAAKNPNAGGTSYGKLTF

SEQ ID NO: 268014 - protein, 14 aa, Homo sapiens
  CDR3 for beta chain variable domain of TCR clone 134007 (TRBV7-3, TRBJ2-1)
CASSVAGGTNEQFF

SEQ ID NO: 268015 - protein, 12 aa, Homo sapiens
  CDR3 for alpha chain variable domain of TCR clone 134008 (TRAV3, TRAJ20)
CALRDHDYKLSF

SEQ ID NO: 268016 - protein, 15 aa, Homo sapiens
  CDR3 for beta chain variable domain of TCR clone 134008 (TRBV9, TRBJ1-6)
CASSVAGTGDSPLHF

SEQ ID NO: 268017 - protein, 14 aa, Homo sapiens
  CDR3 for alpha chain variable domain of TCR clone 134009 (TRAV17, TRAJ16)
CATADFSDGQKLLF

SEQ ID NO: 268018 - protein, 14 aa, Homo sapiens
  CDR3 for beta chain variable domain of TCR clone 134009 (TRBV6-1, TRBJ1-3)
CASVQGGGGNTIYF

SEQ ID NO: 268019 - protein, 13 aa, Homo sapiens
  CDR3 for alpha chain variable domain of TCR clone 134010 (TRAV21, TRAJ37)
CAVSSGNTGKLIF

SEQ ID NO: 268020 - protein, 14 aa, Homo sapiens
  CDR3 for beta chain variable domain of TCR clone 134010 (TRBV7-9, TRBJ2-2)
CASSLVQDTGELFF

SEQ ID NO: 268021 - protein, 12 aa, Homo sapiens
  CDR3 for alpha chain variable domain of TCR clone 134011 (TRAV1-1, TRAJ39)
CAVPVVGNMLTF

SEQ ID NO: 268022 - protein, 12 aa, Homo sapiens
  CDR3 for beta chain variable domain of TCR clone 134011 (TRBV7-2, TRBJ2-5)
CASSQYQETQYF

SEQ ID NO: 268023 - protein, 13 aa, Homo sapiens
  CDR3 for alpha chain variable domain of TCR clone 134012 (TRAV3, TRAJ21)
CAVREPDFNKFYF

SEQ ID NO: 268024 - protein, 14 aa, Homo sapiens
  CDR3 for beta chain variable domain of TCR clone 134012 (TRBV7-8, TRBJ2-5)
CASSATGGQETQYF

SEQ ID NO: 268025 - protein, 14 aa, Homo sapiens
  CDR3 for alpha chain variable domain of TCR clone 134013 (TRAV17, TRAJ56)
CATVPAGANSKLTF

SEQ ID NO: 268026 - protein, 12 aa, Homo sapiens
  CDR3 for beta chain variable domain of TCR clone 134013 (TRBV9, TRBJ2-2)
CASSARTGELFF

SEQ ID NO: 268027 - protein, 14 aa, Homo sapiens
  CDR3 for alpha chain variable domain of TCR clone 134014 (TRAV29/DV5, TRAJ32)
CAAAYGGATNKLIF

SEQ ID NO: 268028 - protein, 15 aa, Homo sapiens
  CDR3 for beta chain variable domain of TCR clone 134014 (TRBV19, TRBJ2-1)
CASSIVRGEGREQFF

SEQ ID NO: 268029 - protein, 12 aa, Homo sapiens
  CDR3 for alpha chain variable domain of TCR clone 134015 (TRAV35, TRAJ30)
CAGLNRDDKIIF

SEQ ID NO: 268030 - protein, 15 aa, Homo sapiens
  CDR3 for beta chain variable domain of TCR clone 134015 (TRBV9, TRBJ1-6)
CASSLAGTGDSPLHF

SEQ ID NO: 268031 - protein, 14 aa, Homo sapiens
  CDR3 for alpha chain variable domain of TCR clone 134016 (TRAV12-3, TRAJ10)
SHLPLTGGGKKLTF

SEQ ID NO: 268032 - protein, 14 aa, Homo sapiens
  CDR3 for beta chain variable domain of TCR clone 134016 (TRBV7-2, TRBJ2-2)
CASSLNSNTGELFF

SEQ ID NO: 268033 - protein, 14 aa, Homo sapiens
  CDR3 for alpha chain variable domain of TCR clone 134017 (TRAV1-2, TRAJ8)
CAAREDTGFQKLVF

SEQ ID NO: 268034 - protein, 11 aa, Homo sapiens
  CDR3 for beta chain variable domain of TCR clone 134017 (TRBV11-2, TRBJ2-2)
CASSLPGELFF

SEQ ID NO: 268035 - protein, 11 aa, Homo sapiens
  CDR3 for alpha chain variable domain of TCR clone 134018 (TRAV12-1, TRAJ30)
CVVNGQDKIIF

SEQ ID NO: 268036 - protein, 15 aa, Homo sapiens
  CDR3 for beta chain variable domain of TCR clone 134018 (TRBV6-5, TRBJ2-1)
CASSYDAGAGNEQFF

SEQ ID NO: 268037 - protein, 11 aa, Homo sapiens
  CDR3 for alpha chain variable domain of TCR clone 134019 (TRAV2, TRAJ20)
CAVVNNYKLSF

SEQ ID NO: 268038 - protein, 17 aa, Homo sapiens
  CDR3 for beta chain variable domain of TCR clone 134019 (TRBV28, TRBJ1-1)
CASSLSGTGYENTEAFF

SEQ ID NO: 268039 - protein, 14 aa, Homo sapiens
  CDR3 for alpha chain variable domain of TCR clone 134020 (TRAV1-2, TRAJ16)
CAVNRFSDSQKLLF

SEQ ID NO: 268040 - protein, 16 aa, Homo sapiens
  CDR3 for beta chain variable domain of TCR clone 134020 (TRBV11-2, TRBJ1-2)
CASSLDTGGADYGYTF

SEQ ID NO: 268041 - protein, 14 aa, Homo sapiens
  CDR3 for alpha chain variable domain of TCR clone 134021 (TRAV29/DV5, TRAJ36)
CAARRKTGANNLLF

SEQ ID NO: 268042 - protein, 12 aa, Homo sapiens
  CDR3 for beta chain variable domain of TCR clone 134021 (TRBV11-2, TRBJ2-1)
CASSPGNNEQFF

SEQ ID NO: 268043 - protein, 14 aa, Homo sapiens
  CDR3 for alpha chain variable domain of TCR clone 134022 (TRAV1-2, TRAJ16)
CAVNRFSDGQKLLF

SEQ ID NO: 268044 - protein, 13 aa, Homo sapiens
  CDR3 for beta chain variable domain of TCR clone 134022 (TRBV19, TRBJ1-2)
CASSVPGQDGYSF

SEQ ID NO: 268045 - protein, 12 aa, Homo sapiens
  CDR3 for alpha chain variable domain of TCR clone 134023 (TRAV21, TRAJ23)
CAVMLQGGKLIF

SEQ ID NO: 268046 - protein, 18 aa, Homo sapiens
  CDR3 for beta chain variable domain of TCR clone 134023 (TRBV25-1, TRBJ1-2)
CASSGLQNGQGLIFGYTF

SEQ ID NO: 268047 - protein, 13 aa, Homo sapiens
  CDR3 for alpha chain variable domain of TCR clone 134024 (TRAV1-2, TRAJ9)
RAALNTGGFKTIF

SEQ ID NO: 268048 - protein, 13 aa, Homo sapiens
  CDR3 for beta chain variable domain of TCR clone 134024 (TRBV15, TRBJ1-6)
CATSGGLNSPLHF

SEQ ID NO: 268049 - protein, 14 aa, Homo sapiens
  CDR3 for alpha chain variable domain of TCR clone 134025 (TRAV21, TRAJ10)
CAVALTGGGNKLTF

SEQ ID NO: 268050 - protein, 13 aa, Homo sapiens
  CDR3 for beta chain variable domain of TCR clone 134025 (TRBV20-1, TRBJ2-2)
CSASAAGTGELFF

SEQ ID NO: 268051 - protein, 11 aa, Homo sapiens
  CDR3 for alpha chain variable domain of TCR clone 134026 (TRAV12-2, TRAJ39)
CAVYNMLTFGG

SEQ ID NO: 268052 - protein, 16 aa, Homo sapiens
  CDR3 for beta chain variable domain of TCR clone 134026 (TRBV5-3, TRBJ2-2)
CARSFGTGTNTGELFF

SEQ ID NO: 268053 - protein, 15 aa, Homo sapiens
  CDR3 for alpha chain variable domain of TCR clone 134027 (TRAV12-2, TRAJ53)
CAVNGGGGSNYKLTF

SEQ ID NO: 268054 - protein, 15 aa, Homo sapiens
  CDR3 for beta chain variable domain of TCR clone 134027 (TRBV7-2, TRBJ2-1)
CASSFQADEYNEQFF

SEQ ID NO: 268055 - protein, 13 aa, Homo sapiens
  CDR3 for alpha chain variable domain of TCR clone 134028 (TRAV22, TRAJ12)
CAGRMDSSYKLIF

SEQ ID NO: 268056 - protein, 15 aa, Homo sapiens
  CDR3 for beta chain variable domain of TCR clone 134028 (TRBV9, TRBJ1-6)
CASSVAGTGDSPLHF

SEQ ID NO: 268057 - protein, 14 aa, Homo sapiens
  CDR3 for alpha chain variable domain of TCR clone 134029 (TRAV17, TRAJ22)
CATSPSGSARQLNF

SEQ ID NO: 268058 - protein, 15 aa, Homo sapiens
  CDR3 for beta chain variable domain of TCR clone 134029 (TRBV4-1, TRBJ2-5)
CASSQWDLYQETQYF

SEQ ID NO: 268059 - protein, 14 aa, Homo sapiens
  CDR3 for alpha chain variable domain of TCR clone 134030 (TRAV12-3, TRAJ54)
CAMRGIQGAQKLVF

SEQ ID NO: 268060 - protein, 19 aa, Homo sapiens
  CDR3 for beta chain variable domain of TCR clone 134030 (TRBV25-1, TRBJ2-2)
CAILVYRVDRGRKTGELFF

SEQ ID NO: 268061 - protein, 14 aa, Homo sapiens
  CDR3 for alpha chain variable domain of TCR clone 134031 (TRAV16, TRAJ33)
CALSAMDSNYHLIW

SEQ ID NO: 268062 - protein, 17 aa, Homo sapiens
  CDR3 for beta chain variable domain of TCR clone 134031 (TRBV25-1, TRBJ2-7)
CASSDARVVFSSYEQYF

SEQ ID NO: 268063 - protein, 15 aa, Homo sapiens
  CDR3 for alpha chain variable domain of TCR clone 134032 (TRAV26-1, TRAJ29)
CIVRVTNSGNTPLVL

SEQ ID NO: 268064 - protein, 12 aa, Homo sapiens
  CDR3 for beta chain variable domain of TCR clone 134032 (TRBV20-1, TRBJ1-2)
CSASWQGYGYTF

SEQ ID NO: 268065 - protein, 17 aa, Homo sapiens
  CDR3 for alpha chain variable domain of TCR clone 134033 (TRAV14/DV4, TRAJ4)
CAMREASGRGGYNKLIF

SEQ ID NO: 268066 - protein, 14 aa, Homo sapiens
  CDR3 for beta chain variable domain of TCR clone 134033 (TRBV11-2, TRBJ2-5)
CASSRTGGIETQYF

SEQ ID NO: 268067 - protein, 16 aa, Homo sapiens
  CDR3 for alpha chain variable domain of TCR clone 134034 (TRAV38-2/DV8, TRAJ47)
CAYSSAIMEYGNKLVF

SEQ ID NO: 268068 - protein, 14 aa, Homo sapiens
  CDR3 for beta chain variable domain of TCR clone 134034 (TRBV19, TRBJ2-7)
CASSIFAGTYEQYF

SEQ ID NO: 268069 - protein, 18 aa, Homo sapiens
  CDR3 for alpha chain variable domain of TCR clone 134035 (TRAV2, TRAJ20)
LHVREADAAVYRDCKLSF

SEQ ID NO: 268070 - protein, 13 aa, Homo sapiens
  CDR3 for beta chain variable domain of TCR clone 134035 (TRBV15, TRBJ1-6)
CATSGGLNSPLHF

SEQ ID NO: 268071 - protein, 16 aa, Homo sapiens
  CDR3 for alpha chain variable domain of TCR clone 134036 (TRAV30, TRAJ24)
CGTEIVDADSWGKFQF

SEQ ID NO: 268072 - protein, 12 aa, Homo sapiens
  CDR3 for beta chain variable domain of TCR clone 134036 (TRBV11-2, TRBJ2-2)
CASRLPTGELFF

SEQ ID NO: 268073 - protein, 14 aa, Homo sapiens
  CDR3 for alpha chain variable domain of TCR clone 134037 (TRAV17, TRAJ16)
CATADLSDGQKLLF

SEQ ID NO: 268074 - protein, 13 aa, Homo sapiens
  CDR3 for beta chain variable domain of TCR clone 134037 (TRBV7-3, TRBJ1-1)
CASSQDWGAEAFF

SEQ ID NO: 268075 - protein, 15 aa, Homo sapiens
  CDR3 for alpha chain variable domain of TCR clone 134038 (TRAV21, TRAJ53)
CATLNSGGSNYKLTF

SEQ ID NO: 268076 - protein, 14 aa, Homo sapiens
  CDR3 for beta chain variable domain of TCR clone 134038 (TRBV15, TRBJ2-5)
CATSGDRGQETQYF

SEQ ID NO: 268077 - protein, 12 aa, Homo sapiens
  CDR3 for alpha chain variable domain of TCR clone 134039 (TRAV13-1, TRAJ21)
CEAKEGFNKFYF

SEQ ID NO: 268078 - protein, 13 aa, Homo sapiens
  CDR3 for beta chain variable domain of TCR clone 134039 (TRBV7-3, TRBJ1-1)
CASSQDWGAEAFF

SEQ ID NO: 268079 - protein, 15 aa, Homo sapiens
  CDR3 for alpha chain variable domain of TCR clone 134040 (TRAV3, TRAJ9)
CAVRARNTGGFKTIF

SEQ ID NO: 268080 - protein, 15 aa, Homo sapiens
  CDR3 for beta chain variable domain of TCR clone 134040 (TRBV11-3, TRBJ1-3)
CASSLFGPSGNTIYF

SEQ ID NO: 268081 - protein, 13 aa, Homo sapiens
  CDR3 for alpha chain variable domain of TCR clone 134041 (TRAV21, TRAJ57)
CAVTQGGSEKLVS

SEQ ID NO: 268082 - protein, 11 aa, Homo sapiens
  CDR3 for beta chain variable domain of TCR clone 134041 (TRBV11-2, TRBJ2-2)
CASSLPGELFF

SEQ ID NO: 268083 - protein, 11 aa, Homo sapiens
  CDR3 for alpha chain variable domain of TCR clone 134042 (TRAV12-2, TRAJ54)
CAVEGAQKLVF

SEQ ID NO: 268084 - protein, 17 aa, Homo sapiens
  CDR3 for beta chain variable domain of TCR clone 134042 (TRBV18, TRBJ1-3)
CASSPYPTGPSGNTINF

SEQ ID NO: 268085 - protein, 14 aa, Homo sapiens
  CDR3 for alpha chain variable domain of TCR clone 134043 (TRAV29/DV5, TRAJ45)
CAASFRGSADGLTF

SEQ ID NO: 268086 - protein, 11 aa, Homo sapiens
  CDR3 for beta chain variable domain of TCR clone 134043 (TRBV11-2, TRBJ2-2)
CASSLPGELFF

SEQ ID NO: 268087 - protein, 15 aa, Homo sapiens
  CDR3 for alpha chain variable domain of TCR clone 134044 (TRAV3, TRAJ13)
CAVRDIAGGYQEVTF

SEQ ID NO: 268088 - protein, 13 aa, Homo sapiens
  CDR3 for beta chain variable domain of TCR clone 134044 (TRBV2, TRBJ2-2)
CASSKKNTGELFF

SEQ ID NO: 268089 - protein, 11 aa, Homo sapiens
  CDR3 for alpha chain variable domain of TCR clone 134045 (TRAV35, TRAJ30)
CAGERDDKIIF

SEQ ID NO: 268090 - protein, 14 aa, Homo sapiens
  CDR3 for beta chain variable domain of TCR clone 134045 (TRBV15, TRBJ2-5)
CATRGDRGQETQYF

SEQ ID NO: 268091 - protein, 16 aa, Homo sapiens
  CDR3 for alpha chain variable domain of TCR clone 134046 (TRAV26-1, TRAJ23)
CIVRVHPYNQGGKLIS

SEQ ID NO: 268092 - protein, 15 aa, Homo sapiens
  CDR3 for beta chain variable domain of TCR clone 134046 (TRBV5-7, TRBJ2-7)
CASSPYFEGSYEQYF

SEQ ID NO: 268093 - protein, 16 aa, Homo sapiens
  CDR3 for alpha chain variable domain of TCR clone 134047 (TRAV3, TRAJ32)
CAVRENYGGATNKLIF

SEQ ID NO: 268094 - protein, 12 aa, Homo sapiens
  CDR3 for beta chain variable domain of TCR clone 134047 (TRBV20-1, TRBJ1-2)
CSVTPEGYGYTL

SEQ ID NO: 268095 - protein, 12 aa, Homo sapiens
  CDR3 for alpha chain variable domain of TCR clone 134048 (TRAV8-3, TRAJ20)
CAVGANDYKLSF

SEQ ID NO: 268096 - protein, 18 aa, Homo sapiens
  CDR3 for beta chain variable domain of TCR clone 134048 (TRBV7-9, TRBJ2-7)
CASSLTTSGSRTWYEQYF

SEQ ID NO: 268097 - protein, 17 aa, Homo sapiens
  CDR3 for alpha chain variable domain of TCR clone 134049 (TRAV3, TRAJ6)
CAVRDGPRAGGSYIPTF

SEQ ID NO: 268098 - protein, 16 aa, Homo sapiens
  CDR3 for beta chain variable domain of TCR clone 134049 (TRBV9, TRBJ2-1)
CASSVGGGGNYNEQFF

SEQ ID NO: 268099 - protein, 15 aa, Homo sapiens
  CDR3 for alpha chain variable domain of TCR clone 134050 (TRAV12-3, TRAJ6)
CAMSATTGGSYIPTF

SEQ ID NO: 268100 - protein, 16 aa, Homo sapiens
  CDR3 for beta chain variable domain of TCR clone 134050 (TRBV20-1, TRBJ1-2)
CSATMGQGVANYGYTF

SEQ ID NO: 268101 - protein, 11 aa, Homo sapiens
  CDR3 for alpha chain variable domain of TCR clone 134051 (TRAV12-2, TRAJ33)
CAVTSNYKLIW

SEQ ID NO: 268102 - protein, 14 aa, Homo sapiens
  CDR3 for beta chain variable domain of TCR clone 134051 (TRBV28, TRBJ2-2)
CASRIRSGTGELFF

SEQ ID NO: 268103 - protein, 17 aa, Homo sapiens
  CDR3 for alpha chain variable domain of TCR clone 134052 (TRAV26-1, TRAJ42)
CAVRDRDYGGSQGNLIF

SEQ ID NO: 268104 - protein, 15 aa, Homo sapiens
  CDR3 for beta chain variable domain of TCR clone 134052 (TRBV6-6, TRBJ2-7)
CASSYSYGGSYEQYF

SEQ ID NO: 268105 - protein, 16 aa, Homo sapiens
  CDR3 for alpha chain variable domain of TCR clone 134053 (TRAV27, TRAJ13)
RAGAKSDSGGYQKVTF

SEQ ID NO: 268106 - protein, 15 aa, Homo sapiens
  CDR3 for beta chain variable domain of TCR clone 134053 (TRBV29-1, TRBJ2-1)
CSVGRHALFYNEQLF

SEQ ID NO: 268107 - protein, 12 aa, Homo sapiens
  CDR3 for alpha chain variable domain of TCR clone 134054 (TRAV35, TRAJ49)
CAGWNTGNQFYF

SEQ ID NO: 268108 - protein, 16 aa, Homo sapiens
  CDR3 for beta chain variable domain of TCR clone 134054 (TRBV5-1, TRBJ2-2)
GASSLWDTTNTGELFF

SEQ ID NO: 268109 - protein, 16 aa, Homo sapiens
  CDR3 for alpha chain variable domain of TCR clone 134055 (TRAV27, TRAJ56)
CAGVSRKDGANSKLTF

SEQ ID NO: 268110 - protein, 15 aa, Homo sapiens
  CDR3 for beta chain variable domain of TCR clone 134055 (TRBV7-2, TRBJ1-1)
CASSFAGDRDTEAFF

SEQ ID NO: 268111 - protein, 16 aa, Homo sapiens
  CDR3 for alpha chain variable domain of TCR clone 134056 (TRAV26-2, TRAJ22)
CILRDGASGSARQLTF

SEQ ID NO: 268112 - protein, 15 aa, Homo sapiens
  CDR3 for beta chain variable domain of TCR clone 134056 (TRBV19, TRBJ2-3)
CASSSNAGVRDTQYF

SEQ ID NO: 268113 - protein, 15 aa, Homo sapiens
  CDR3 for alpha chain variable domain of TCR clone 134057 (TRAV13-1, TRAJ44)
CAASRGGGAASKLTF

SEQ ID NO: 268114 - protein, 16 aa, Homo sapiens
  CDR3 for beta chain variable domain of TCR clone 134057 (TRBV29-1, TRBJ2-7)
CSVEVVGTSGSYEQYF

SEQ ID NO: 268115 - protein, 14 aa, Homo sapiens
  CDR3 for alpha chain variable domain of TCR clone 134058 (TRAV12-3, TRAJ56)
CAMSVTGANSKLTF

SEQ ID NO: 268116 - protein, 15 aa, Homo sapiens
  CDR3 for beta chain variable domain of TCR clone 134058 (TRBV10-2, TRBJ2-6)
CASSEQGTGANVLTF

SEQ ID NO: 268117 - protein, 15 aa, Homo sapiens
  CDR3 for alpha chain variable domain of TCR clone 134059 (TRAV12-3, TRAJ6)
CAMSATTGGSYIPTF

SEQ ID NO: 268118 - protein, 14 aa, Homo sapiens
  CDR3 for beta chain variable domain of TCR clone 134059 (TRBV6-5, TRBJ1-6)
CASSPGRADSPLHF

SEQ ID NO: 268119 - protein, 14 aa, Homo sapiens
  CDR3 for alpha chain variable domain of TCR clone 134060 (TRAV12-1, TRAJ3)
CGAARYSSASKIIF

SEQ ID NO: 268120 - protein, 13 aa, Homo sapiens
  CDR3 for beta chain variable domain of TCR clone 134060 (TRBV7-2, TRBJ1-1)
CASSQDWGAEAFF

SEQ ID NO: 268121 - protein, 13 aa, Homo sapiens
  CDR3 for alpha chain variable domain of TCR clone 134061 (TRAV2, TRAJ29)
CAVYSSGNTPLVF

SEQ ID NO: 268122 - protein, 15 aa, Homo sapiens
  CDR3 for beta chain variable domain of TCR clone 134061 (TRBV2, TRBJ2-1)
CASSELAGSYNEQFF

SEQ ID NO: 268123 - protein, 12 aa, Homo sapiens
  CDR3 for alpha chain variable domain of TCR clone 134062 (TRAV3, TRAJ43)
CAVRDPNNDMCF

SEQ ID NO: 268124 - protein, 15 aa, Homo sapiens
  CDR3 for beta chain variable domain of TCR clone 134062 (TRBV12-4, TRBJ1-5)
CASSLGTGFDQPQHF

SEQ ID NO: 268125 - protein, 15 aa, Homo sapiens
  CDR3 for alpha chain variable domain of TCR clone 134063 (TRAV17, TRAJ37)
CATDHGSSITGKLIF

SEQ ID NO: 268126 - protein, 14 aa, Homo sapiens
  CDR3 for beta chain variable domain of TCR clone 134063 (TRBV7-2, TRBJ2-3)
CASSRTSGADTQYF

SEQ ID NO: 268127 - protein, 15 aa, Homo sapiens
  CDR3 for alpha chain variable domain of TCR clone 134064 (TRAV25, TRAJ52)
CAGGPGGTSYGKLTF

SEQ ID NO: 268128 - protein, 17 aa, Homo sapiens
  CDR3 for beta chain variable domain of TCR clone 134064 (TRBV7-8, TRBJ2-6)
CASSAGTGGAGANVLTF

SEQ ID NO: 268129 - protein, 14 aa, Homo sapiens
  CDR3 for alpha chain variable domain of TCR clone 134065 (TRAV26-1, TRAJ40)
CIVRLLSGTYKYIF

SEQ ID NO: 268130 - protein, 13 aa, Homo sapiens
  CDR3 for beta chain variable domain of TCR clone 134065 (TRBV2, TRBJ1-4)
CASSERAGEKLFF

SEQ ID NO: 268131 - protein, 15 aa, Homo sapiens
  CDR3 for alpha chain variable domain of TCR clone 134066 (TRAV26-1, TRAJ22)
CIVRVSFWFCKATDL

SEQ ID NO: 268132 - protein, 13 aa, Homo sapiens
  CDR3 for beta chain variable domain of TCR clone 134066 (TRBV7-9, TRBJ1-2)
YASSLKQNCGYTF

SEQ ID NO: 268133 - protein, 12 aa, Homo sapiens
  CDR3 for alpha chain variable domain of TCR clone 134067 (TRAV23/DV6, TRAJ3)
CAARAPQQSFQD

SEQ ID NO: 268134 - protein, 17 aa, Homo sapiens
  CDR3 for beta chain variable domain of TCR clone 134067 (TRBV7-9, TRBJ2-3)
CASSPTVAGDLTDTQYF

SEQ ID NO: 268135 - protein, 14 aa, Homo sapiens
  CDR3 for alpha chain variable domain of TCR clone 134068 (TRAV12-2, TRAJ13)
CAVKKTGGYQKVTF

SEQ ID NO: 268136 - protein, 18 aa, Homo sapiens
  CDR3 for beta chain variable domain of TCR clone 134068 (TRBV24-1, TRBJ2-2)
CATSDSGQGTANTGELLF

SEQ ID NO: 268137 - protein, 19 aa, Homo sapiens
  CDR3 for alpha chain variable domain of TCR clone 134069 (TRAV25, TRAJ20)
TATQTTDVGILPHDYKLSF

SEQ ID NO: 268138 - protein, 20 aa, Homo sapiens
  CDR3 for beta chain variable domain of TCR clone 134069 (TRBV7-8, TRBJ2-2)
CASSHLFPGPTIHITGELFF

SEQ ID NO: 268139 - protein, 14 aa, Homo sapiens
  CDR3 for alpha chain variable domain of TCR clone 134070 (TRAV12-1, TRAJ30)
CVVNMGGRDDKIIF

SEQ ID NO: 268140 - protein, 13 aa, Homo sapiens
  CDR3 for beta chain variable domain of TCR clone 134070 (TRBV12-5, TRBJ2-1)
CASGLGRGNEQFF

SEQ ID NO: 268141 - protein, 15 aa, Homo sapiens
  CDR3 for alpha chain variable domain of TCR clone 134071 (TRAV27, TRAJ53)
CRAINSGGGNYKLTF

SEQ ID NO: 268142 - protein, 14 aa, Homo sapiens
  CDR3 for beta chain variable domain of TCR clone 134071 (TRBV7-3, TRBJ2-1)
CASSLAGGTNEQFF

SEQ ID NO: 268143 - protein, 13 aa, Homo sapiens
  CDR3 for alpha chain variable domain of TCR clone 134072 (TRAV2, TRAJ15)
CAVEAQAGTALIF

SEQ ID NO: 268144 - protein, 16 aa, Homo sapiens
  CDR3 for beta chain variable domain of TCR clone 134072 (TRBV19, TRBJ2-1)
CASSKAGPSSYNEQFF

SEQ ID NO: 268145 - protein, 22 aa, Homo sapiens
  CDR3 for alpha chain variable domain of TCR clone 134073 (TRAV26-1, TRAJ30)
CIVRVRTEMTRSSLEKGHDFIF

SEQ ID NO: 268146 - protein, 18 aa, Homo sapiens
  CDR3 for beta chain variable domain of TCR clone 134073 (TRBV4-1, TRBJ1-5)
CASSQDPRGQWLNQPQHF

SEQ ID NO: 268147 - protein, 13 aa, Homo sapiens
  CDR3 for alpha chain variable domain of TCR clone 134074 (TRAV27, TRAJ29)
CAGAHSGNTPLVF

SEQ ID NO: 268148 - protein, 13 aa, Homo sapiens
  CDR3 for beta chain variable domain of TCR clone 134074 (TRBV15, TRBJ1-6)
CATSGGLNSPLHF

SEQ ID NO: 268149 - protein, 14 aa, Homo sapiens
  CDR3 for alpha chain variable domain of TCR clone 134075 (TRAV3, TRAJ16)
CCERLKSDGQKLLF

SEQ ID NO: 268150 - protein, 15 aa, Homo sapiens
  CDR3 for beta chain variable domain of TCR clone 134075 (TRBV28, TRBJ2-7)
CASSPGGGGFYEQYF

SEQ ID NO: 268151 - protein, 13 aa, Homo sapiens
  CDR3 for alpha chain variable domain of TCR clone 134076 (TRAV1-2, TRAJ9)
CAVLNTGGFKTIF

SEQ ID NO: 268152 - protein, 14 aa, Homo sapiens
  CDR3 for beta chain variable domain of TCR clone 134076 (TRBV20-1, TRBJ2-3)
CSARGGNSTDTQYF

SEQ ID NO: 268153 - protein, 14 aa, Homo sapiens
  CDR3 for alpha chain variable domain of TCR clone 134077 (TRAV1-1, TRAJ27)
CAVIYNTNAGKSTF

SEQ ID NO: 268154 - protein, 18 aa, Homo sapiens
  CDR3 for beta chain variable domain of TCR clone 134077 (TRBV7-3, TRBJ2-1)
CASSLALASGRAMVSSSS

SEQ ID NO: 268155 - protein, 14 aa, Homo sapiens
  CDR3 for alpha chain variable domain of TCR clone 134078 (TRAV1-2, TRAJ16)
CAVNRFSDGQKLLF

SEQ ID NO: 268156 - protein, 15 aa, Homo sapiens
  CDR3 for beta chain variable domain of TCR clone 134078 (TRBV4-3, TRBJ2-7)
CASSQGGRGIYEQYF

SEQ ID NO: 268157 - protein, 16 aa, Homo sapiens
  CDR3 for alpha chain variable domain of TCR clone 134079 (TRAV23/DV6, TRAJ12)
CAAIDLGAMDSSYKLI

SEQ ID NO: 268158 - protein, 12 aa, Homo sapiens
  CDR3 for beta chain variable domain of TCR clone 134079 (TRBV10-3, TRBJ2-2)
CAIRENTGELFF

SEQ ID NO: 268159 - protein, 11 aa, Homo sapiens
  CDR3 for alpha chain variable domain of TCR clone 134080 (TRAV4, TRAJ23)
CLVAPGGKLIF

SEQ ID NO: 268160 - protein, 15 aa, Homo sapiens
  CDR3 for beta chain variable domain of TCR clone 134080 (TRBV7-2, TRBJ2-1)
CANSFQADEYNEQFF

SEQ ID NO: 268161 - protein, 14 aa, Homo sapiens
  CDR3 for alpha chain variable domain of TCR clone 134081 (TRAV4, TRAJ30)
CLLTLMNRDDKIIF

SEQ ID NO: 268162 - protein, 15 aa, Homo sapiens
  CDR3 for beta chain variable domain of TCR clone 134081 (TRBV7-2, TRBJ1-5)
CARSRGQGDNQPQHF

SEQ ID NO: 268163 - protein, 19 aa, Homo sapiens
  CDR3 for alpha chain variable domain of TCR clone 134082 (TRAV2, TRAJ20)
ILQVREADAAVYRDCKLSF

SEQ ID NO: 268164 - protein, 13 aa, Homo sapiens
  CDR3 for beta chain variable domain of TCR clone 134082 (TRBV15, TRBJ1-6)
CATSGGRNSPLHF

SEQ ID NO: 268165 - protein, 14 aa, Homo sapiens
  CDR3 for alpha chain variable domain of TCR clone 134083 (TRAV12-1, TRAJ12)
CVVTRMDSSYKLIF

SEQ ID NO: 268166 - protein, 12 aa, Homo sapiens
  CDR3 for beta chain variable domain of TCR clone 134083 (TRBV11-2, TRBJ2-5)
CASSPPAETQYF

SEQ ID NO: 268167 - protein, 14 aa, Homo sapiens
  CDR3 for alpha chain variable domain of TCR clone 134084 (TRAV1-2, TRAJ8)
CAVREDPGFQKLVF

SEQ ID NO: 268168 - protein, 12 aa, Homo sapiens
  CDR3 for beta chain variable domain of TCR clone 134084 (TRBV2, TRBJ2-1)
CAYGPPGNEQFF

SEQ ID NO: 268169 - protein, 11 aa, Homo sapiens
  CDR3 for alpha chain variable domain of TCR clone 134085 (TRAV3, TRAJ21)
CAVGNFNKFYF

SEQ ID NO: 268170 - protein, 15 aa, Homo sapiens
  CDR3 for beta chain variable domain of TCR clone 134085 (TRBV13, TRBJ2-5)
CASSLPGGIQETQYF

SEQ ID NO: 268171 - protein, 14 aa, Homo sapiens
  CDR3 for alpha chain variable domain of TCR clone 134086 (TRAV26-1, TRAJ34)
CIVRVAYNTDKLIF

SEQ ID NO: 268172 - protein, 15 aa, Homo sapiens
  CDR3 for beta chain variable domain of TCR clone 134086 (TRBV20-1, TRBJ2-7)
CSSRVPAAYFYEQYF

SEQ ID NO: 268173 - protein, 14 aa, Homo sapiens
  CDR3 for alpha chain variable domain of TCR clone 134087 (TRAV1-2, TRAJ15)
CAVRDRQAGTALIF

SEQ ID NO: 268174 - protein, 17 aa, Homo sapiens
  CDR3 for beta chain variable domain of TCR clone 134087 (TRBV5-5, TRBJ1-2)
CASSLGSLDGQSGGYTF

SEQ ID NO: 268175 - protein, 13 aa, Homo sapiens
  CDR3 for alpha chain variable domain of TCR clone 134088 (TRAV16, TRAJ31)
YALSAHNNARLMF

SEQ ID NO: 268176 - protein, 17 aa, Homo sapiens
  CDR3 for beta chain variable domain of TCR clone 134088 (TRBV12-4, TRBJ2-1)
CASSPGLAGGRINEQFF

SEQ ID NO: 268177 - protein, 15 aa, Homo sapiens
  CDR3 for alpha chain variable domain of TCR clone 134089 (TRAV17, TRAJ52)
CATEAGGTSYGKLTF

SEQ ID NO: 268178 - protein, 14 aa, Homo sapiens
  CDR3 for beta chain variable domain of TCR clone 134089 (TRBV28, TRBJ1-5)
CARSLGVLVKPQHF

SEQ ID NO: 268179 - protein, 14 aa, Homo sapiens
  CDR3 for alpha chain variable domain of TCR clone 134090 (TRAV12-2, TRAJ13)
CAVKKTGGYKKVTF

SEQ ID NO: 268180 - protein, 14 aa, Homo sapiens
  CDR3 for beta chain variable domain of TCR clone 134090 (TRBV12-5, TRBJ2-5)
CASGSRTHQETQYF

SEQ ID NO: 268181 - protein, 13 aa, Homo sapiens
  CDR3 for alpha chain variable domain of TCR clone 134091 (TRAV26-1, TRAJ30)
CIVRVESNDKIIF

SEQ ID NO: 268182 - protein, 15 aa, Homo sapiens
  CDR3 for beta chain variable domain of TCR clone 134091 (TRBV6-1, TRBJ2-3)
CASSERGGTTDTQYF

SEQ ID NO: 268183 - protein, 11 aa, Homo sapiens
  CDR3 for alpha chain variable domain of TCR clone 134092 (TRAV1-2, TRAJ20)
CAVANDYKLSF

SEQ ID NO: 268184 - protein, 14 aa, Homo sapiens
  CDR3 for beta chain variable domain of TCR clone 134092 (TRBV7-2, TRBJ2-7)
CASSPKTSFYEQCF

SEQ ID NO: 268185 - protein, 12 aa, Homo sapiens
  CDR3 for alpha chain variable domain of TCR clone 134093 (TRAV2, TRAJ9)
CAVGAGGFKTIF

SEQ ID NO: 268186 - protein, 12 aa, Homo sapiens
  CDR3 for beta chain variable domain of TCR clone 134093 (TRBV11-2, TRBJ2-1)
CASSPGNNEQFF

SEQ ID NO: 268187 - protein, 13 aa, Homo sapiens
  CDR3 for alpha chain variable domain of TCR clone 134094 (TRAV12-3, TRAJ33)
CAMSVNSSYQLIW

SEQ ID NO: 268188 - protein, 16 aa, Homo sapiens
  CDR3 for beta chain variable domain of TCR clone 134094 (TRBV13, TRBJ2-5)
CASSLRTGGSWETQYF

SEQ ID NO: 268189 - protein, 12 aa, Homo sapiens
  CDR3 for alpha chain variable domain of TCR clone 134095 (TRAV13-1, TRAJ15)
CAASQAGTALVF

SEQ ID NO: 268190 - protein, 14 aa, Homo sapiens
  CDR3 for beta chain variable domain of TCR clone 134095 (TRBV19, TRBJ2-2)
CASSTLHRSGELFF

SEQ ID NO: 268191 - protein, 15 aa, Homo sapiens
  CDR3 for alpha chain variable domain of TCR clone 134096 (TRAV13-1, TRAJ57)
CAASNTQSGSEKLVF

SEQ ID NO: 268192 - protein, 16 aa, Homo sapiens
  CDR3 for beta chain variable domain of TCR clone 134096 (TRBV19, TRBJ2-1)
CASSKAGPSSYNEQFF

SEQ ID NO: 268193 - protein, 15 aa, Homo sapiens
  CDR3 for alpha chain variable domain of TCR clone 134097 (TRAV12-2, TRAJ20)
CAVKGGFGAGTTVTV

SEQ ID NO: 268194 - protein, 14 aa, Homo sapiens
  CDR3 for beta chain variable domain of TCR clone 134097 (TRBV7-2, TRBJ1-2)
CASSQTGSTYGYTF

SEQ ID NO: 268195 - protein, 12 aa, Homo sapiens
  CDR3 for alpha chain variable domain of TCR clone 134098 (TRAV12-3, TRAJ17)
CAMTLTGNKLTF

SEQ ID NO: 268196 - protein, 16 aa, Homo sapiens
  CDR3 for beta chain variable domain of TCR clone 134098 (TRBV5-1, TRBJ2-7)
CASSLEGLAGLYEQYF

SEQ ID NO: 268197 - protein, 13 aa, Homo sapiens
  CDR3 for alpha chain variable domain of TCR clone 134099 (TRAV13-2, TRAJ48)
CAEMDFGTEKLTF

SEQ ID NO: 268198 - protein, 13 aa, Homo sapiens
  CDR3 for beta chain variable domain of TCR clone 134099 (TRBV7-9, TRBJ1-2)
CASSLKQNYGYTF

SEQ ID NO: 268199 - protein, 15 aa, Homo sapiens
  CDR3 for alpha chain variable domain of TCR clone 134100 (TRAV12-2, TRAJ43)
CAFDMRFGAGTRLSV

SEQ ID NO: 268200 - protein, 18 aa, Homo sapiens
  CDR3 for beta chain variable domain of TCR clone 134100 (TRBV20-1, TRBJ2-3)
CSASGLAGGPGTTDTQYF

SEQ ID NO: 268201 - protein, 15 aa, Homo sapiens
  CDR3 for alpha chain variable domain of TCR clone 134101 (TRAV13-1, TRAJ50)
CAAKGSKTSYDKVIF

SEQ ID NO: 268202 - protein, 18 aa, Homo sapiens
  CDR3 for beta chain variable domain of TCR clone 134101 (TRBV10-3, TRBJ2-1)
CTSVPSVSLRGGVDEQFF

SEQ ID NO: 268203 - protein, 11 aa, Homo sapiens
  CDR3 for alpha chain variable domain of TCR clone 134102 (TRAV3, TRAJ21)
CAVCNFNKFYF

SEQ ID NO: 268204 - protein, 13 aa, Homo sapiens
  CDR3 for beta chain variable domain of TCR clone 134102 (TRBV7-9, TRBJ1-2)
CASSLKQNYGYTF

SEQ ID NO: 268205 - protein, 13 aa, Homo sapiens
  CDR3 for alpha chain variable domain of TCR clone 134103 (TRAV8-3, TRAJ28)
CAVGAVASYQLTF

SEQ ID NO: 268206 - protein, 15 aa, Homo sapiens
  CDR3 for beta chain variable domain of TCR clone 134103 (TRBV7-9, TRBJ1-5)
CASSQGHQPNQPQHF

SEQ ID NO: 268207 - protein, 12 aa, Homo sapiens
  CDR3 for alpha chain variable domain of TCR clone 134104 (TRAV20, TRAJ37)
CALPSNTGKLIF

SEQ ID NO: 268208 - protein, 14 aa, Homo sapiens
  CDR3 for beta chain variable domain of TCR clone 134104 (TRBV19, TRBJ2-1)
CASPAFVLSGEQFF

SEQ ID NO: 268209 - protein, 17 aa, Homo sapiens
  CDR3 for alpha chain variable domain of TCR clone 134105 (TRAV8-6, TRAJ58)
CAVSSWVGETSGSRLTF

SEQ ID NO: 268210 - protein, 14 aa, Homo sapiens
  CDR3 for beta chain variable domain of TCR clone 134105 (TRBV4-3, TRBJ2-1)
SASGLDRAYNEQFF

SEQ ID NO: 268211 - protein, 15 aa, Homo sapiens
  CDR3 for alpha chain variable domain of TCR clone 134106 (TRAV8-2, TRAJ16)
CVVSDGFSDGQKLLF

SEQ ID NO: 268212 - protein, 15 aa, Homo sapiens
  CDR3 for beta chain variable domain of TCR clone 134106 (TRBV7-9, TRBJ1-5)
CASSQGHQPNQPQHF

SEQ ID NO: 268213 - protein, 15 aa, Homo sapiens
  CDR3 for alpha chain variable domain of TCR clone 134107 (TRAV12-1, TRAJ44)
CVVFVNTGTASKLTF

SEQ ID NO: 268214 - protein, 15 aa, Homo sapiens
  CDR3 for beta chain variable domain of TCR clone 134107 (TRBV20-1, TRBJ2-3)
CSATGTSGFTDTQYF

SEQ ID NO: 268215 - protein, 16 aa, Homo sapiens
  CDR3 for alpha chain variable domain of TCR clone 134108 (TRAV1-1, TRAJ29)
CAVRSTRNSGNTPLVF

SEQ ID NO: 268216 - protein, 16 aa, Homo sapiens
  CDR3 for beta chain variable domain of TCR clone 134108 (TRBV27, TRBJ1-1)
CARSSRGRTGYTEAFF

SEQ ID NO: 268217 - protein, 11 aa, Homo sapiens
  CDR3 for alpha chain variable domain of TCR clone 134109 (TRAV27, TRAJ45)
CAGAQEEVLTD

SEQ ID NO: 268218 - protein, 15 aa, Homo sapiens
  CDR3 for beta chain variable domain of TCR clone 134109 (TRBV9, TRBJ1-6)
CASSVAGTGDSPLHF

SEQ ID NO: 268219 - protein, 12 aa, Homo sapiens
  CDR3 for alpha chain variable domain of TCR clone 134110 (TRAV12-1, TRAJ40)
CVVSSGTYKYIF

SEQ ID NO: 268220 - protein, 14 aa, Homo sapiens
  CDR3 for beta chain variable domain of TCR clone 134110 (TRBV20-1, TRBJ2-2)
CSAQDTANTGELFF

SEQ ID NO: 268221 - protein, 11 aa, Homo sapiens
  CDR3 for alpha chain variable domain of TCR clone 134111 (TRAV2, TRAJ33)
CAVDSNYQLIW

SEQ ID NO: 268222 - protein, 15 aa, Homo sapiens
  CDR3 for beta chain variable domain of TCR clone 134111 (TRBV19, TRBJ1-2)
CASSVGQVVNYGYTF

SEQ ID NO: 268223 - protein, 12 aa, Homo sapiens
  CDR3 for alpha chain variable domain of TCR clone 134112 (TRAV12-3, TRAJ20)
CAMVRGDYKLSF

SEQ ID NO: 268224 - protein, 14 aa, Homo sapiens
  CDR3 for beta chain variable domain of TCR clone 134112 (TRBV4-1, TRBJ1-1)
CASSRSGQSFEAFF

SEQ ID NO: 268225 - protein, 17 aa, Homo sapiens
  CDR3 for alpha chain variable domain of TCR clone 134113 (TRAV27, TRAJ52)
CAGAGWAGGTSYGKLTF

SEQ ID NO: 268226 - protein, 16 aa, Homo sapiens
  CDR3 for beta chain variable domain of TCR clone 134113 (TRBV19, TRBJ2-1)
CASSTAGPSSYNEQFF

SEQ ID NO: 268227 - protein, 15 aa, Homo sapiens
  CDR3 for alpha chain variable domain of TCR clone 134114 (TRAV8-3, TRAJ45)
CASSYSGGGADGLTF

SEQ ID NO: 268228 - protein, 16 aa, Homo sapiens
  CDR3 for beta chain variable domain of TCR clone 134114 (TRBV7-3, TRBJ2-3)
CASSLSGYRPEDTQYF

SEQ ID NO: 268229 - protein, 13 aa, Homo sapiens
  CDR3 for alpha chain variable domain of TCR clone 134115 (TRAV39, TRAJ58)
CAGEETSGSRLTF

SEQ ID NO: 268230 - protein, 15 aa, Homo sapiens
  CDR3 for beta chain variable domain of TCR clone 134115 (TRBV7-2, TRBJ2-1)
CASSFQADEYNEQFF

SEQ ID NO: 268231 - protein, 12 aa, Homo sapiens
  CDR3 for alpha chain variable domain of TCR clone 134116 (TRAV12-2, TRAJ31)
CSVNTPDARLMF

SEQ ID NO: 268232 - protein, 15 aa, Homo sapiens
  CDR3 for beta chain variable domain of TCR clone 134116 (TRBV4-2, TRBJ1-1)
CASSQDQGLNTEAFF

SEQ ID NO: 268233 - protein, 15 aa, Homo sapiens
  CDR3 for alpha chain variable domain of TCR clone 134117 (TRAV3, TRAJ20)
CAVRDIKLSDYKLSF

SEQ ID NO: 268234 - protein, 12 aa, Homo sapiens
  CDR3 for beta chain variable domain of TCR clone 134117 (TRBV29-1, TRBJ2-3)
CSVTGGADTQYF

SEQ ID NO: 268235 - protein, 17 aa, Homo sapiens
  CDR3 for alpha chain variable domain of TCR clone 134118 (TRAV3, TRAJ6)
CAVRDGPRAGGRYIPTF

SEQ ID NO: 268236 - protein, 14 aa, Homo sapiens
  CDR3 for beta chain variable domain of TCR clone 134118 (TRBV11-2, TRBJ2-3)
CASSRLARTDTQYF

SEQ ID NO: 268237 - protein, 14 aa, Homo sapiens
  CDR3 for alpha chain variable domain of TCR clone 134119 (TRAV12-2, TRAJ53)
CAVKGGGSNYKLTF

SEQ ID NO: 268238 - protein, 14 aa, Homo sapiens
  CDR3 for beta chain variable domain of TCR clone 134119 (TRBV7-7, TRBJ2-2)
CATRQDSDTGDLFF

SEQ ID NO: 268239 - protein, 14 aa, Homo sapiens
  CDR3 for alpha chain variable domain of TCR clone 134120 (TRAV12-3, TRAJ10)
SHLPLTGGGNKLTF

SEQ ID NO: 268240 - protein, 11 aa, Homo sapiens
  CDR3 for beta chain variable domain of TCR clone 134120 (TRBV20-1, TRBJ1-5)
CSAQGDQPQHF

SEQ ID NO: 268241 - protein, 16 aa, Homo sapiens
  CDR3 for alpha chain variable domain of TCR clone 134121 (TRAV1-2, TRAJ10)
CAVGGVLTGGGNKITF

SEQ ID NO: 268242 - protein, 12 aa, Homo sapiens
  CDR3 for beta chain variable domain of TCR clone 134121 (TRBV7-8, TRBJ2-7)
CASSLGDREQYF

SEQ ID NO: 268243 - protein, 14 aa, Homo sapiens
  CDR3 for alpha chain variable domain of TCR clone 134122 (TRAV38-1, TRAJ39)
CAFAYNNAGNMLTF

SEQ ID NO: 268244 - protein, 15 aa, Homo sapiens
  CDR3 for beta chain variable domain of TCR clone 134122 (TRBV19, TRBJ2-6)
CARSIGPSGANVLTF

SEQ ID NO: 268245 - protein, 11 aa, Homo sapiens
  CDR3 for alpha chain variable domain of TCR clone 134123 (TRAV3, TRAJ21)
CAVGNFNKFYF

SEQ ID NO: 268246 - protein, 17 aa, Homo sapiens
  CDR3 for beta chain variable domain of TCR clone 134123 (TRBV20-1, TRBJ2-1)
CSASSSGLAGSYNEQFF

SEQ ID NO: 268247 - protein, 15 aa, Homo sapiens
  CDR3 for alpha chain variable domain of TCR clone 134124 (TRAV36/DV7, TRAJ53)
CVVEGGGGSNYKLTF

SEQ ID NO: 268248 - protein, 16 aa, Homo sapiens
  CDR3 for beta chain variable domain of TCR clone 134124 (TRBV27, TRBJ2-2)
CASSLSGFWVTGELFF

SEQ ID NO: 268249 - protein, 14 aa, Homo sapiens
  CDR3 for alpha chain variable domain of TCR clone 134125 (TRAV21, TRAJ45)
CAVSSGGGADGLTF

SEQ ID NO: 268250 - protein, 13 aa, Homo sapiens
  CDR3 for beta chain variable domain of TCR clone 134125 (TRBV5-1, TRBJ2-1)
CASSLGSYNEQFF

SEQ ID NO: 268251 - protein, 17 aa, Homo sapiens
  CDR3 for alpha chain variable domain of TCR clone 134126 (TRAV13-1, TRAJ28)
CAASPPYSGAGSYQPTF

SEQ ID NO: 268252 - protein, 19 aa, Homo sapiens
  CDR3 for beta chain variable domain of TCR clone 134126 (TRBV25-1, TRBJ2-2)
CAILVYRVDRGRKTGELFF

SEQ ID NO: 268253 - protein, 11 aa, Homo sapiens
  CDR3 for alpha chain variable domain of TCR clone 134127 (TRAV3, TRAJ21)
CALGNFNKFCF

SEQ ID NO: 268254 - protein, 16 aa, Homo sapiens
  CDR3 for beta chain variable domain of TCR clone 134127 (TRBV19, TRBJ2-1)
CASSKAGPSSYNEQFF

SEQ ID NO: 268255 - protein, 14 aa, Homo sapiens
  CDR3 for alpha chain variable domain of TCR clone 134128 (TRAV38-1, TRAJ29)
CAFTTPSGNTPLVF

SEQ ID NO: 268256 - protein, 14 aa, Homo sapiens
  CDR3 for beta chain variable domain of TCR clone 134128 (TRBV18, TRBJ2-7)
CASSPRGGAYEQYF

SEQ ID NO: 268257 - protein, 18 aa, Homo sapiens
  CDR3 for alpha chain variable domain of TCR clone 134129 (TRAV26-1, TRAJ22)
CIVRVALISSGSARQLTF

SEQ ID NO: 268258 - protein, 13 aa, Homo sapiens
  CDR3 for beta chain variable domain of TCR clone 134129 (TRBV13, TRBJ2-5)
CASSAEVGETQYF

SEQ ID NO: 268259 - protein, 14 aa, Homo sapiens
  CDR3 for alpha chain variable domain of TCR clone 134130 (TRAV2, TRAJ39)
CAVEGDNAGNMLTC

SEQ ID NO: 268260 - protein, 14 aa, Homo sapiens
  CDR3 for beta chain variable domain of TCR clone 134130 (TRBV28, TRBJ2-7)
CASSLRARGNEQYF

SEQ ID NO: 268261 - protein, 17 aa, Homo sapiens
  CDR3 for alpha chain variable domain of TCR clone 134131 (TRAV26-1, TRAJ37)
CIVRVITVSSNTGKLIF

SEQ ID NO: 268262 - protein, 13 aa, Homo sapiens
  CDR3 for beta chain variable domain of TCR clone 134131 (TRBV13, TRBJ2-1)
CASTPGSYNEQFF

SEQ ID NO: 268263 - protein, 17 aa, Homo sapiens
  CDR3 for alpha chain variable domain of TCR clone 134132 (TRAV3, TRAJ42)
CAVRDRDYGGSQGNLIF

SEQ ID NO: 268264 - protein, 13 aa, Homo sapiens
  CDR3 for beta chain variable domain of TCR clone 134132 (TRBV20-1, TRBJ1-6)
CSAPLGVGSPLHF

SEQ ID NO: 268265 - protein, 17 aa, Homo sapiens
  CDR3 for alpha chain variable domain of TCR clone 134133 (TRAV36/DV7, TRAJ52)
CAVAQRASGTSYGKLTF

SEQ ID NO: 268266 - protein, 15 aa, Homo sapiens
  CDR3 for beta chain variable domain of TCR clone 134133 (TRBV20-1, TRBJ2-7)
CSAESGTSGAYEQYF

SEQ ID NO: 268267 - protein, 16 aa, Homo sapiens
  CDR3 for alpha chain variable domain of TCR clone 134134 (TRAV3, TRAJ37)
CAVRGKRSGNTGKLIF

SEQ ID NO: 268268 - protein, 16 aa, Homo sapiens
  CDR3 for beta chain variable domain of TCR clone 134134 (TRBV28, TRBJ1-5)
CASSFRGGYSNQPQHF

SEQ ID NO: 268269 - protein, 16 aa, Homo sapiens
  CDR3 for alpha chain variable domain of TCR clone 134135 (TRAV30, TRAJ24)
CGTEIVDADSWGKFQF

SEQ ID NO: 268270 - protein, 14 aa, Homo sapiens
  CDR3 for beta chain variable domain of TCR clone 134135 (TRBV4-1, TRBJ1-1)
CASSRSGQSFEAFF

SEQ ID NO: 268271 - protein, 14 aa, Homo sapiens
  CDR3 for alpha chain variable domain of TCR clone 134136 (TRAV3, TRAJ7)
CAVREEERVQQTRF

SEQ ID NO: 268272 - protein, 12 aa, Homo sapiens
  CDR3 for beta chain variable domain of TCR clone 134136 (TRBV7-8, TRBJ2-7)
CASSLGDREQYF

SEQ ID NO: 268273 - protein, 14 aa, Homo sapiens
  CDR3 for alpha chain variable domain of TCR clone 134137 (TRAV1-2, TRAJ16)
CAVNRFSDGQKLLF

SEQ ID NO: 268274 - protein, 14 aa, Homo sapiens
  CDR3 for beta chain variable domain of TCR clone 134137 (TRBV11-1, TRBJ2-7)
CASSLEREWGEQYF

SEQ ID NO: 268275 - protein, 10 aa, Homo sapiens
  CDR3 for alpha chain variable domain of TCR clone 134138 (TRAV12-3, TRAJ49)
CAMNDDQFYF

SEQ ID NO: 268276 - protein, 13 aa, Homo sapiens
  CDR3 for beta chain variable domain of TCR clone 134138 (TRBV14, TRBJ2-7)
CASSQDRRYEQYF

SEQ ID NO: 268277 - protein, 12 aa, Homo sapiens
  CDR3 for alpha chain variable domain of TCR clone 134139 (TRAV12-3, TRAJ13)
CNGDWGLPEVTF

SEQ ID NO: 268278 - protein, 14 aa, Homo sapiens
  CDR3 for beta chain variable domain of TCR clone 134139 (TRBV7-2, TRBJ2-5)
CASSTGGELKTQYF

SEQ ID NO: 268279 - protein, 14 aa, Homo sapiens
  CDR3 for alpha chain variable domain of TCR clone 134140 (TRAV1-2, TRAJ16)
CAVKRFSDGQKLLF

SEQ ID NO: 268280 - protein, 13 aa, Homo sapiens
  CDR3 for beta chain variable domain of TCR clone 134140 (TRBV20-1, TRBJ1-1)
CSARGGGNTEAFF

SEQ ID NO: 268281 - protein, 14 aa, Homo sapiens
  CDR3 for alpha chain variable domain of TCR clone 134141 (TRAV2, TRAJ9)
CAVEDRSGGFKTIF

SEQ ID NO: 268282 - protein, 13 aa, Homo sapiens
  CDR3 for beta chain variable domain of TCR clone 134141 (TRBV19, TRBJ1-1)
CASSFGRNTEAFF

SEQ ID NO: 268283 - protein, 11 aa, Homo sapiens
  CDR3 for alpha chain variable domain of TCR clone 134142 (TRAV25, TRAJ5)
CAGGGQESTYF

SEQ ID NO: 268284 - protein, 15 aa, Homo sapiens
  CDR3 for beta chain variable domain of TCR clone 134142 (TRBV9, TRBJ1-2)
CASSVVGQANYGYTF

SEQ ID NO: 268285 - protein, 13 aa, Homo sapiens
  CDR3 for alpha chain variable domain of TCR clone 134143 (TRAV12-1, TRAJ3)
CVVNPRGASKTIF

SEQ ID NO: 268286 - protein, 13 aa, Homo sapiens
  CDR3 for beta chain variable domain of TCR clone 134143 (TRBV28, TRBJ1-5)
CASSDRGNQPQHF

SEQ ID NO: 268287 - protein, 18 aa, Homo sapiens
  CDR3 for alpha chain variable domain of TCR clone 134144 (TRAV13-1, TRAJ52)
CAAKNPNAGGTSYGKLTF

SEQ ID NO: 268288 - protein, 14 aa, Homo sapiens
  CDR3 for beta chain variable domain of TCR clone 134144 (TRBV2, TRBJ2-1)
CASSEARQGVSEFF

SEQ ID NO: 268289 - protein, 15 aa, Homo sapiens
  CDR3 for alpha chain variable domain of TCR clone 134145 (TRAV17, TRAJ57)
CATGPSQGGSEKPVF

SEQ ID NO: 268290 - protein, 17 aa, Homo sapiens
  CDR3 for beta chain variable domain of TCR clone 134145 (TRBV20-1, TRBJ2-1)
CSASSSGLAGSYNEQFF

SEQ ID NO: 268291 - protein, 11 aa, Homo sapiens
  CDR3 for alpha chain variable domain of TCR clone 134146 (TRAV2, TRAJ33)
CAVESSYQLIW

SEQ ID NO: 268292 - protein, 12 aa, Homo sapiens
  CDR3 for beta chain variable domain of TCR clone 134146 (TRBV11-2, TRBJ2-2)
CASSLGGGELFF

SEQ ID NO: 268293 - protein, 17 aa, Homo sapiens
  CDR3 for alpha chain variable domain of TCR clone 134147 (TRAV3, TRAJ6)
CAVRDGPRAGGSYIPTF

SEQ ID NO: 268294 - protein, 13 aa, Homo sapiens
  CDR3 for beta chain variable domain of TCR clone 134147 (TRBV27, TRBJ2-1)
CASRTRGVGEQFF

SEQ ID NO: 268295 - protein, 13 aa, Homo sapiens
  CDR3 for alpha chain variable domain of TCR clone 134148 (TRAV12-1, TRAJ40)
CAVPTSGTYKYIF

SEQ ID NO: 268296 - protein, 16 aa, Homo sapiens
  CDR3 for beta chain variable domain of TCR clone 134148 (TRBV7-9, TRBJ1-2)
CASSLGFSSGEDGYTF

SEQ ID NO: 268297 - protein, 16 aa, Homo sapiens
  CDR3 for alpha chain variable domain of TCR clone 134149 (TRAV17, TRAJ22)
CATGPISSGSARRLTF

SEQ ID NO: 268298 - protein, 13 aa, Homo sapiens
  CDR3 for beta chain variable domain of TCR clone 134149 (TRBV11-2, TRBJ2-1)
CASSLGLAGGRFF

SEQ ID NO: 268299 - protein, 11 aa, Homo sapiens
  CDR3 for alpha chain variable domain of TCR clone 134150 (TRAV1-2, TRAJ40)
CAVPGTYKYIF

SEQ ID NO: 268300 - protein, 16 aa, Homo sapiens
  CDR3 for beta chain variable domain of TCR clone 134150 (TRBV29-1, TRBJ2-7)
CSVEVAGTSGSYEQYF

SEQ ID NO: 268301 - protein, 12 aa, Homo sapiens
  CDR3 for alpha chain variable domain of TCR clone 134151 (TRAV16, TRAJ10)
CAFTGGGNKLTF

SEQ ID NO: 268302 - protein, 13 aa, Homo sapiens
  CDR3 for beta chain variable domain of TCR clone 134151 (TRBV7-9, TRBJ2-3)
CASSPGSTDTQYF

SEQ ID NO: 268303 - protein, 15 aa, Homo sapiens
  CDR3 for alpha chain variable domain of TCR clone 134152 (TRAV3, TRAJ20)
CAVRDSRSNDYKPSF

SEQ ID NO: 268304 - protein, 14 aa, Homo sapiens
  CDR3 for beta chain variable domain of TCR clone 134152 (TRBV20-1, TRBJ2-7)
CSARRGNGIYEQYF

SEQ ID NO: 268305 - protein, 13 aa, Homo sapiens
  CDR3 for alpha chain variable domain of TCR clone 134153 (TRAV13-1, TRAJ39)
CSKYSNAGNMLTF

SEQ ID NO: 268306 - protein, 14 aa, Homo sapiens
  CDR3 for beta chain variable domain of TCR clone 134153 (TRBV4-2, TRBJ2-1)
CASGLDRAYNEQFF

SEQ ID NO: 268307 - protein, 15 aa, Homo sapiens
  CDR3 for alpha chain variable domain of TCR clone 134154 (TRAV21, TRAJ24)
CAARSSPDSWGKLQF

SEQ ID NO: 268308 - protein, 15 aa, Homo sapiens
  CDR3 for beta chain variable domain of TCR clone 134154 (TRBV4-1, TRBJ2-7)
CASSQNTGRLYEQYF

SEQ ID NO: 268309 - protein, 19 aa, Homo sapiens
  CDR3 for alpha chain variable domain of TCR clone 134155 (TRAV1-2, TRAJ26)
CLLPLCCERPDNYGQNFVF

SEQ ID NO: 268310 - protein, 15 aa, Homo sapiens
  CDR3 for beta chain variable domain of TCR clone 134155 (TRBV11-3, TRBJ2-2)
CASSYFSTGTGELFF

SEQ ID NO: 268311 - protein, 12 aa, Homo sapiens
  CDR3 for alpha chain variable domain of TCR clone 134156 (TRAV1-1, TRAJ9)
CAVGTGGFKTIF

SEQ ID NO: 268312 - protein, 13 aa, Homo sapiens
  CDR3 for beta chain variable domain of TCR clone 134156 (TRBV27, TRBJ1-1)
CASSLSIGAEAFF

SEQ ID NO: 268313 - protein, 13 aa, Homo sapiens
  CDR3 for alpha chain variable domain of TCR clone 134157 (TRAV10, TRAJ40)
CVVSALGTYEYIF

SEQ ID NO: 268314 - protein, 13 aa, Homo sapiens
  CDR3 for beta chain variable domain of TCR clone 134157 (TRBV20-1, TRBJ2-3)
CSARLAGTDTQYF

SEQ ID NO: 268315 - protein, 14 aa, Homo sapiens
  CDR3 for alpha chain variable domain of TCR clone 134158 (TRAV8-1, TRAJ24)
CAVNAAYSWGKLQF

SEQ ID NO: 268316 - protein, 16 aa, Homo sapiens
  CDR3 for beta chain variable domain of TCR clone 134158 (TRBV4-3, TRBJ2-1)
CASSPALDRGVNEQFF

SEQ ID NO: 268317 - protein, 14 aa, Homo sapiens
  CDR3 for alpha chain variable domain of TCR clone 134159 (TRAV12-2, TRAJ40)
CAVKIPSGTYKYIF

SEQ ID NO: 268318 - protein, 13 aa, Homo sapiens
  CDR3 for beta chain variable domain of TCR clone 134159 (TRBV19, TRBJ2-7)
CASSIDRTYEQYF

SEQ ID NO: 268319 - protein, 13 aa, Homo sapiens
  CDR3 for alpha chain variable domain of TCR clone 134160 (TRAV13-1, TRAJ21)
CAASIYNFNKFYF

SEQ ID NO: 268320 - protein, 18 aa, Homo sapiens
  CDR3 for beta chain variable domain of TCR clone 134160 (TRBV20-1, TRBJ2-6)
CSAETTPTHGSGANVLTF

SEQ ID NO: 268321 - protein, 16 aa, Homo sapiens
  CDR3 for alpha chain variable domain of TCR clone 134161 (TRAV3, TRAJ3)
CAVRDRAKSSASKIIF

SEQ ID NO: 268322 - protein, 12 aa, Homo sapiens
  CDR3 for beta chain variable domain of TCR clone 134161 (TRBV11-2, TRBJ2-2)
CASSLGGGELFF

SEQ ID NO: 268323 - protein, 11 aa, Homo sapiens
  CDR3 for alpha chain variable domain of TCR clone 134162 (TRAV1-2, TRAJ31)
CAVNYNARLMF

SEQ ID NO: 268324 - protein, 15 aa, Homo sapiens
  CDR3 for beta chain variable domain of TCR clone 134162 (TRBV28, TRBJ2-1)
CASSIIAGGRSEQFF

SEQ ID NO: 268325 - protein, 14 aa, Homo sapiens
  CDR3 for alpha chain variable domain of TCR clone 134163 (TRAV13-1, TRAJ35)
CAASKGGFGNVCIA

SEQ ID NO: 268326 - protein, 13 aa, Homo sapiens
  CDR3 for beta chain variable domain of TCR clone 134163 (TRBV7-3, TRBJ1-1)
CASSQDWGAEAFF

SEQ ID NO: 268327 - protein, 12 aa, Homo sapiens
  CDR3 for alpha chain variable domain of TCR clone 134164 (TRAV12-3, TRAJ17)
CAMTLTGNKLTF

SEQ ID NO: 268328 - protein, 19 aa, Homo sapiens
  CDR3 for beta chain variable domain of TCR clone 134164 (TRBV25-1, TRBJ2-2)
CAILVCRVDRGRKTGELFF

SEQ ID NO: 268329 - protein, 10 aa, Homo sapiens
  CDR3 for alpha chain variable domain of TCR clone 134165 (TRAV30, TRAJ20)
CGTDDYKLSF

SEQ ID NO: 268330 - protein, 17 aa, Homo sapiens
  CDR3 for beta chain variable domain of TCR clone 134165 (TRBV7-9, TRBJ2-7)
CASSWQGRWREAYEQYF

SEQ ID NO: 268331 - protein, 12 aa, Homo sapiens
  CDR3 for alpha chain variable domain of TCR clone 134166 (TRAV13-2, TRAJ23)
CAERHRGGKLIF

SEQ ID NO: 268332 - protein, 16 aa, Homo sapiens
  CDR3 for beta chain variable domain of TCR clone 134166 (TRBV5-1, TRBJ2-3)
CASSLTSGTSGGTQYF

SEQ ID NO: 268333 - protein, 13 aa, Homo sapiens
  CDR3 for alpha chain variable domain of TCR clone 134167 (TRAV21, TRAJ57)
CAVTQGGSEKLVF

SEQ ID NO: 268334 - protein, 13 aa, Homo sapiens
  CDR3 for beta chain variable domain of TCR clone 134167 (TRBV12-4, TRBJ2-7)
CASSLSGVYEQYF

SEQ ID NO: 268335 - protein, 15 aa, Homo sapiens
  CDR3 for alpha chain variable domain of TCR clone 134168 (TRAV26-1, TRAJ29)
CIVRVEGSGNTPLVF

SEQ ID NO: 268336 - protein, 14 aa, Homo sapiens
  CDR3 for beta chain variable domain of TCR clone 134168 (TRBV18, TRBJ2-5)
CANSPGVSQETQYF

SEQ ID NO: 268337 - protein, 15 aa, Homo sapiens
  CDR3 for alpha chain variable domain of TCR clone 134169 (TRAV12-3, TRAJ49)
CAMAVTPTTGNQFYF

SEQ ID NO: 268338 - protein, 14 aa, Homo sapiens
  CDR3 for beta chain variable domain of TCR clone 134169 (TRBV7-8, TRBJ2-3)
CASSLEAGTDTQYF

SEQ ID NO: 268339 - protein, 14 aa, Homo sapiens
  CDR3 for alpha chain variable domain of TCR clone 134170 (TRAV23/DV6, TRAJ8)
CAASKATGFPKLVF

SEQ ID NO: 268340 - protein, 15 aa, Homo sapiens
  CDR3 for beta chain variable domain of TCR clone 134170 (TRBV28, TRBJ2-3)
CASSPDRQGANTQYF

SEQ ID NO: 268341 - protein, 10 aa, Homo sapiens
  CDR3 for alpha chain variable domain of TCR clone 134171 (TRAV5, TRAJ34)
CAEDTDKLIF

SEQ ID NO: 268342 - protein, 15 aa, Homo sapiens
  CDR3 for beta chain variable domain of TCR clone 134171 (TRBV7-8, TRBJ1-2)
CASSLVRDGGLGYTF

SEQ ID NO: 268343 - protein, 12 aa, Homo sapiens
  CDR3 for alpha chain variable domain of TCR clone 134172 (TRAV25, TRAJ53)
CQSGGNNYKLTF

SEQ ID NO: 268344 - protein, 15 aa, Homo sapiens
  CDR3 for beta chain variable domain of TCR clone 134172 (TRBV5-1, TRBJ2-2)
CASSWTSPNTGELFF

SEQ ID NO: 268345 - protein, 14 aa, Homo sapiens
  CDR3 for alpha chain variable domain of TCR clone 134173 (TRAV1-2, TRAJ16)
CAVNRFSDGQKLLF

SEQ ID NO: 268346 - protein, 14 aa, Homo sapiens
  CDR3 for beta chain variable domain of TCR clone 134173 (TRBV7-9, TRBJ1-4)
CAITEGEANENLFF

SEQ ID NO: 268347 - protein, 14 aa, Homo sapiens
  CDR3 for alpha chain variable domain of TCR clone 134174 (TRAV1-2, TRAJ8)
CAVREDTGFQKLVF

SEQ ID NO: 268348 - protein, 14 aa, Homo sapiens
  CDR3 for beta chain variable domain of TCR clone 134174 (TRBV7-3, TRBJ2-1)
CASSLAGGTNEQFV

SEQ ID NO: 268349 - protein, 11 aa, Homo sapiens
  CDR3 for alpha chain variable domain of TCR clone 134175 (TRAV12-2, TRAJ10)
GVTGGGNKLTF

SEQ ID NO: 268350 - protein, 16 aa, Homo sapiens
  CDR3 for beta chain variable domain of TCR clone 134175 (TRBV6-4, TRBJ1-2)
CASSEAVGDPNYGYTF

SEQ ID NO: 268351 - protein, 13 aa, Homo sapiens
  CDR3 for alpha chain variable domain of TCR clone 134176 (TRAV12-3, TRAJ33)
CAMSVNSNYQLIW

SEQ ID NO: 268352 - protein, 13 aa, Homo sapiens
  CDR3 for beta chain variable domain of TCR clone 134176 (TRBV12-5, TRBJ2-3)
CASGDRQSDTQYF

SEQ ID NO: 268353 - protein, 17 aa, Homo sapiens
  CDR3 for alpha chain variable domain of TCR clone 134177 (TRAV12-2, TRAJ52)
CAVNPYAGGTSYGKLTF

SEQ ID NO: 268354 - protein, 16 aa, Homo sapiens
  CDR3 for beta chain variable domain of TCR clone 134177 (TRBV5-5, TRBJ2-2)
CDSSGRREGATGELFF

SEQ ID NO: 268355 - protein, 13 aa, Homo sapiens
  CDR3 for alpha chain variable domain of TCR clone 134178 (TRAV8-6, TRAJ21)
CAVSPSSRNKFYF

SEQ ID NO: 268356 - protein, 14 aa, Homo sapiens
  CDR3 for beta chain variable domain of TCR clone 134178 (TRBV7-9, TRBJ2-5)
CASSLDTAQETQYF

SEQ ID NO: 268357 - protein, 11 aa, Homo sapiens
  CDR3 for alpha chain variable domain of TCR clone 134179 (TRAV22, TRAJ20)
CAPLHDYKLSF

SEQ ID NO: 268358 - protein, 14 aa, Homo sapiens
  CDR3 for beta chain variable domain of TCR clone 134179 (TRBV4-1, TRBJ2-2)
CASSQAVNTGELFF

SEQ ID NO: 268359 - protein, 13 aa, Homo sapiens
  CDR3 for alpha chain variable domain of TCR clone 134180 (TRAV2, TRAJ20)
CAVEDPSEYKLSF

SEQ ID NO: 268360 - protein, 16 aa, Homo sapiens
  CDR3 for beta chain variable domain of TCR clone 134180 (TRBV25-1, TRBJ2-7)
CASSELIGGGIYEQYF

SEQ ID NO: 268361 - protein, 14 aa, Homo sapiens
  CDR3 for alpha chain variable domain of TCR clone 134181 (TRAV29/DV5, TRAJ5)
CAASGDAGRRALTF

SEQ ID NO: 268362 - protein, 14 aa, Homo sapiens
  CDR3 for beta chain variable domain of TCR clone 134181 (TRBV7-3, TRBJ2-1)
CASSLSGSYNEQFF

SEQ ID NO: 268363 - protein, 15 aa, Homo sapiens
  CDR3 for alpha chain variable domain of TCR clone 134182 (TRAV35, TRAJ52)
CAGPRGGTSYGKLTF

SEQ ID NO: 268364 - protein, 14 aa, Homo sapiens
  CDR3 for beta chain variable domain of TCR clone 134182 (TRBV20-1, TRBJ2-7)
CSAWTALSAYEQYF

SEQ ID NO: 268365 - protein, 14 aa, Homo sapiens
  CDR3 for alpha chain variable domain of TCR clone 134183 (TRAV12-2, TRAJ45)
FAVNIGGGADGLTF

SEQ ID NO: 268366 - protein, 13 aa, Homo sapiens
  CDR3 for beta chain variable domain of TCR clone 134183 (TRBV19, TRBJ2-2)
CASGIWSTGELFF

SEQ ID NO: 268367 - protein, 13 aa, Homo sapiens
  CDR3 for alpha chain variable domain of TCR clone 134184 (TRAV12-2, TRAJ3)
CAFQYSSSSKIIF

SEQ ID NO: 268368 - protein, 11 aa, Homo sapiens
  CDR3 for beta chain variable domain of TCR clone 134184 (TRBV20-1, TRBJ2-3)
CSGTSSTTQYF

SEQ ID NO: 268369 - protein, 17 aa, Homo sapiens
  CDR3 for alpha chain variable domain of TCR clone 134185 (TRAV38-2/DV8, TRAJ57)
CAYRSVLTQGGSEKLFF

SEQ ID NO: 268370 - protein, 16 aa, Homo sapiens
  CDR3 for beta chain variable domain of TCR clone 134185 (TRBV7-3, TRBJ2-2)
CASSLKRGTLSGELFF

SEQ ID NO: 268371 - protein, 14 aa, Homo sapiens
  CDR3 for alpha chain variable domain of TCR clone 134186 (TRAV17, TRAJ37)
CATDGSSNTGKLIF

SEQ ID NO: 268372 - protein, 13 aa, Homo sapiens
  CDR3 for beta chain variable domain of TCR clone 134186 (TRBV11-2, TRBJ2-1)
CARSLDLVNEQFF

SEQ ID NO: 268373 - protein, 13 aa, Homo sapiens
  CDR3 for alpha chain variable domain of TCR clone 134187 (TRAV1-1, TRAJ31)
CASYLNNNARLMF

SEQ ID NO: 268374 - protein, 14 aa, Homo sapiens
  CDR3 for beta chain variable domain of TCR clone 134187 (TRBV4-1, TRBJ2-5)
CANSRSGSGETQYF

SEQ ID NO: 268375 - protein, 13 aa, Homo sapiens
  CDR3 for alpha chain variable domain of TCR clone 134188 (TRAV8-6, TRAJ50)
CAVIKTSYDKVIF

SEQ ID NO: 268376 - protein, 15 aa, Homo sapiens
  CDR3 for beta chain variable domain of TCR clone 134188 (TRBV7-2, TRBJ2-2)
CVSRRPGQNTGELFF

SEQ ID NO: 268377 - protein, 13 aa, Homo sapiens
  CDR3 for alpha chain variable domain of TCR clone 134189 (TRAV22, TRAJ48)
CAVERFGNEKLTF

SEQ ID NO: 268378 - protein, 13 aa, Homo sapiens
  CDR3 for beta chain variable domain of TCR clone 134189 (TRBV7-2, TRBJ2-2)
CASSLAVTGELFF

SEQ ID NO: 268379 - protein, 14 aa, Homo sapiens
  CDR3 for alpha chain variable domain of TCR clone 134190 (TRAV1-2, TRAJ16)
CAVNRFSDGQKLLF

SEQ ID NO: 268380 - protein, 12 aa, Homo sapiens
  CDR3 for beta chain variable domain of TCR clone 134190 (TRBV14, TRBJ2-5)
CASSHLKETQYF

SEQ ID NO: 268381 - protein, 13 aa, Homo sapiens
  CDR3 for alpha chain variable domain of TCR clone 134191 (TRAV3, TRAJ21)
CAVREPDFNKFYF

SEQ ID NO: 268382 - protein, 18 aa, Homo sapiens
  CDR3 for beta chain variable domain of TCR clone 134191 (TRBV20-1, TRBJ2-6)
CSAGTTPTHGSGANVLTF

SEQ ID NO: 268383 - protein, 12 aa, Homo sapiens
  CDR3 for alpha chain variable domain of TCR clone 134192 (TRAV17, TRAJ39)
CAKGAAGNMLTF

SEQ ID NO: 268384 - protein, 14 aa, Homo sapiens
  CDR3 for beta chain variable domain of TCR clone 134192 (TRBV7-9, TRBJ1-2)
CASSRQGANYGYTF

SEQ ID NO: 268385 - protein, 13 aa, Homo sapiens
  CDR3 for alpha chain variable domain of TCR clone 134193 (TRAV3, TRAJ20)
CAVRSLNDYKLSF

SEQ ID NO: 268386 - protein, 13 aa, Homo sapiens
  CDR3 for beta chain variable domain of TCR clone 134193 (TRBV7-3, TRBJ1-1)
CASSQDWGAEAFC

SEQ ID NO: 268387 - protein, 13 aa, Homo sapiens
  CDR3 for alpha chain variable domain of TCR clone 134194 (TRAV23/DV6, TRAJ12)
CAPRVDSSSKLIF

SEQ ID NO: 268388 - protein, 12 aa, Homo sapiens
  CDR3 for beta chain variable domain of TCR clone 134194 (TRBV7-6, TRBJ2-5)
CASSLSQETQYF

SEQ ID NO: 268389 - protein, 13 aa, Homo sapiens
  CDR3 for alpha chain variable domain of TCR clone 134195 (TRAV20, TRAJ42)
CAVQGGSQGNLIF

SEQ ID NO: 268390 - protein, 15 aa, Homo sapiens
  CDR3 for beta chain variable domain of TCR clone 134195 (TRBV10-1, TRBJ2-1)
CASSEWRGTYNEQFS

SEQ ID NO: 268391 - protein, 15 aa, Homo sapiens
  CDR3 for alpha chain variable domain of TCR clone 134196 (TRAV12-1, TRAJ44)
CVVFVNTGTASKLTF

SEQ ID NO: 268392 - protein, 17 aa, Homo sapiens
  CDR3 for beta chain variable domain of TCR clone 134196 (TRBV7-8, TRBJ2-6)
CASSAGTGGAGDNVLTF

SEQ ID NO: 268393 - protein, 13 aa, Homo sapiens
  CDR3 for alpha chain variable domain of TCR clone 134197 (TRAV29/DV5, TRAJ31)
CAASRNNNARLMF

SEQ ID NO: 268394 - protein, 13 aa, Homo sapiens
  CDR3 for beta chain variable domain of TCR clone 134197 (TRBV15, TRBJ1-6)
CATSGGLNSPLHF

SEQ ID NO: 268395 - protein, 14 aa, Homo sapiens
  CDR3 for alpha chain variable domain of TCR clone 134198 (TRAV13-1, TRAJ29)
CAASSNSGNTPLVF

SEQ ID NO: 268396 - protein, 15 aa, Homo sapiens
  CDR3 for beta chain variable domain of TCR clone 134198 (TRBV28, TRBJ1-4)
CASSLGTGTKEKLFF

SEQ ID NO: 268397 - protein, 16 aa, Homo sapiens
  CDR3 for alpha chain variable domain of TCR clone 134199 (TRAV27, TRAJ13)
CAGAKSDSGGYQKVTF

SEQ ID NO: 268398 - protein, 13 aa, Homo sapiens
  CDR3 for beta chain variable domain of TCR clone 134199 (TRBV5-4, TRBJ2-1)
CASSLQGPREQFF

SEQ ID NO: 268399 - protein, 14 aa, Homo sapiens
  CDR3 for alpha chain variable domain of TCR clone 134200 (TRAV1-2, TRAJ16)
CAVNRFPDGQKLLF

SEQ ID NO: 268400 - protein, 16 aa, Homo sapiens
  CDR3 for beta chain variable domain of TCR clone 134200 (TRBV19, TRBJ2-1)
CASSKAGPSSYNEQFF

SEQ ID NO: 268401 - protein, 14 aa, Homo sapiens
  CDR3 for alpha chain variable domain of TCR clone 134201 (TRAV12-2, TRAJ17)
CAVLFKAAGNKLTF

SEQ ID NO: 268402 - protein, 16 aa, Homo sapiens
  CDR3 for beta chain variable domain of TCR clone 134201 (TRBV18, TRBJ1-6)
CASSQTEISYNSPLHF

SEQ ID NO: 268403 - protein, 18 aa, Homo sapiens
  CDR3 for alpha chain variable domain of TCR clone 134202 (TRAV13-1, TRAJ52)
CAAKNPNAGGTSYGKLTF

SEQ ID NO: 268404 - protein, 16 aa, Homo sapiens
  CDR3 for beta chain variable domain of TCR clone 134202 (TRBV7-3, TRBJ2-1)
CASSLEGYRSYNEQFF

SEQ ID NO: 268405 - protein, 11 aa, Homo sapiens
  CDR3 for alpha chain variable domain of TCR clone 134203 (TRAV17, TRAJ31)
CATSNNARLMF

SEQ ID NO: 268406 - protein, 14 aa, Homo sapiens
  CDR3 for beta chain variable domain of TCR clone 134203 (TRBV25-1, TRBJ1-1)
CASTHLGGNTEAFF

SEQ ID NO: 268407 - protein, 14 aa, Homo sapiens
  CDR3 for alpha chain variable domain of TCR clone 134204 (TRAV12-2, TRAJ17)
CAVLFKAAGNKLTF

SEQ ID NO: 268408 - protein, 13 aa, Homo sapiens
  CDR3 for beta chain variable domain of TCR clone 134204 (TRBV20-1, TRBJ1-1)
CSARVGGNTEAFF

SEQ ID NO: 268409 - protein, 15 aa, Homo sapiens
  CDR3 for alpha chain variable domain of TCR clone 134205 (TRAV3, TRAJ47)
YAVRDIGEYGNKLVF

SEQ ID NO: 268410 - protein, 14 aa, Homo sapiens
  CDR3 for beta chain variable domain of TCR clone 134205 (TRBV13, TRBJ2-5)
CASSLERVGETQYF

SEQ ID NO: 268411 - protein, 12 aa, Homo sapiens
  CDR3 for alpha chain variable domain of TCR clone 134206 (TRAV35, TRAJ33)
CAGPGGGIATIS

SEQ ID NO: 268412 - protein, 11 aa, Homo sapiens
  CDR3 for beta chain variable domain of TCR clone 134206 (TRBV10-3, TRBJ2-7)
CAISEGLEQYF

SEQ ID NO: 268413 - protein, 14 aa, Homo sapiens
  CDR3 for alpha chain variable domain of TCR clone 134207 (TRAV8-4, TRAJ29)
CAVSAVEGNTPLVF

SEQ ID NO: 268414 - protein, 13 aa, Homo sapiens
  CDR3 for beta chain variable domain of TCR clone 134207 (TRBV12-4, TRBJ2-7)
CASSFKGRYEQYF

SEQ ID NO: 268415 - protein, 16 aa, Homo sapiens
  CDR3 for alpha chain variable domain of TCR clone 134208 (TRAV16, TRAJ4)
CALSRMFSGGYNKLIF

SEQ ID NO: 268416 - protein, 13 aa, Homo sapiens
  CDR3 for beta chain variable domain of TCR clone 134208 (TRBV6-3, TRBJ2-7)
CASSYPITYEQYF

SEQ ID NO: 268417 - protein, 13 aa, Homo sapiens
  CDR3 for alpha chain variable domain of TCR clone 134209 (TRAV20, TRAJ42)
CAVQGGSQGNLIF

SEQ ID NO: 268418 - protein, 15 aa, Homo sapiens
  CDR3 for beta chain variable domain of TCR clone 134209 (TRBV7-6, TRBJ1-5)
CASSQSSGINQPQHF

SEQ ID NO: 268419 - protein, 19 aa, Homo sapiens
  CDR3 for alpha chain variable domain of TCR clone 134210 (TRAV1-2, TRAJ26)
CLLPLCCERPDNYGQNFVF

SEQ ID NO: 268420 - protein, 13 aa, Homo sapiens
  CDR3 for beta chain variable domain of TCR clone 134210 (TRBV6-5, TRBJ2-5)
CASSPQGGETQYF

SEQ ID NO: 268421 - protein, 18 aa, Homo sapiens
  CDR3 for alpha chain variable domain of TCR clone 134211 (TRAV21, TRAJ52)
CAVRPSPAGGTSYGKLTF

SEQ ID NO: 268422 - protein, 15 aa, Homo sapiens
  CDR3 for beta chain variable domain of TCR clone 134211 (TRBV7-3, TRBJ1-1)
CASSQDWGAEVSLDK

SEQ ID NO: 268423 - protein, 13 aa, Homo sapiens
  CDR3 for alpha chain variable domain of TCR clone 134212 (TRAV12-1, TRAJ16)
CVVNGPDGQKLLF

SEQ ID NO: 268424 - protein, 14 aa, Homo sapiens
  CDR3 for beta chain variable domain of TCR clone 134212 (TRBV7-3, TRBJ1-1)
CASSLKGGNTEAFF

SEQ ID NO: 268425 - protein, 11 aa, Homo sapiens
  CDR3 for alpha chain variable domain of TCR clone 134213 (TRAV29/DV5, TRAJ31)
CAASYRNRLMF

SEQ ID NO: 268426 - protein, 19 aa, Homo sapiens
  CDR3 for beta chain variable domain of TCR clone 134213 (TRBV19, TRBJ2-5)
CASSIGQVTDFFLGETQYF

SEQ ID NO: 268427 - protein, 14 aa, Homo sapiens
  CDR3 for alpha chain variable domain of TCR clone 134214 (TRAV26-1, TRAJ34)
CIVRESYNTDKLIF

SEQ ID NO: 268428 - protein, 14 aa, Homo sapiens
  CDR3 for beta chain variable domain of TCR clone 134214 (TRBV7-9, TRBJ1-2)
CASSLVQINYGYTF

SEQ ID NO: 268429 - protein, 13 aa, Homo sapiens
  CDR3 for alpha chain variable domain of TCR clone 134215 (TRAV3, TRAJ20)
CCEAFCNDYKLSF

SEQ ID NO: 268430 - protein, 17 aa, Homo sapiens
  CDR3 for beta chain variable domain of TCR clone 134215 (TRBV13, TRBJ2-3)
CASSLSRVAGGRNTQYF

SEQ ID NO: 268431 - protein, 12 aa, Homo sapiens
  CDR3 for alpha chain variable domain of TCR clone 134216 (TRAV3, TRAJ20)
CAVRDGDYKLSF

SEQ ID NO: 268432 - protein, 15 aa, Homo sapiens
  CDR3 for beta chain variable domain of TCR clone 134216 (TRBV20-1, TRBJ1-1)
CSARSAATSNTEAFF

SEQ ID NO: 268433 - protein, 13 aa, Homo sapiens
  CDR3 for alpha chain variable domain of TCR clone 134217 (TRAV8-3, TRAJ48)
CAVVPFGNEKLTF

SEQ ID NO: 268434 - protein, 13 aa, Homo sapiens
  CDR3 for beta chain variable domain of TCR clone 134217 (TRBV25-1, TRBJ2-5)
CASSPGGVETQYF

SEQ ID NO: 268435 - protein, 12 aa, Homo sapiens
  CDR3 for alpha chain variable domain of TCR clone 134218 (TRAV8-3, TRAJ26)
CAGDNYGQNFVF

SEQ ID NO: 268436 - protein, 13 aa, Homo sapiens
  CDR3 for beta chain variable domain of TCR clone 134218 (TRBV6-5, TRBJ2-7)
CASRTSGIHEQYF

SEQ ID NO: 268437 - protein, 13 aa, Homo sapiens
  CDR3 for alpha chain variable domain of TCR clone 134219 (TRAV13-2, TRAJ48)
CAEMDFGNEKLTF

SEQ ID NO: 268438 - protein, 17 aa, Homo sapiens
  CDR3 for beta chain variable domain of TCR clone 134219 (TRBV28, TRBJ2-5)
CASSTPEGDALQETQYF

SEQ ID NO: 268439 - protein, 14 aa, Homo sapiens
  CDR3 for alpha chain variable domain of TCR clone 134220 (TRAV13-1, TRAJ23)
CAASRLGRGGKLIF

SEQ ID NO: 268440 - protein, 15 aa, Homo sapiens
  CDR3 for beta chain variable domain of TCR clone 134220 (TRBV11-3, TRBJ2-3)
CASLKDGREGDTQYF

SEQ ID NO: 268441 - protein, 17 aa, Homo sapiens
  CDR3 for alpha chain variable domain of TCR clone 134221 (TRAV3, TRAJ6)
CAVRDGPRAGGSYIPTF

SEQ ID NO: 268442 - protein, 14 aa, Homo sapiens
  CDR3 for beta chain variable domain of TCR clone 134221 (TRBV7-2, TRBJ2-4)
CASSLSGGANIQYF

SEQ ID NO: 268443 - protein, 13 aa, Homo sapiens
  CDR3 for alpha chain variable domain of TCR clone 134222 (TRAV13-1, TRAJ5)
CAASDTGRRALTF

SEQ ID NO: 268444 - protein, 13 aa, Homo sapiens
  CDR3 for beta chain variable domain of TCR clone 134222 (TRBV7-9, TRBJ1-2)
CASSLKQNYGYTF

SEQ ID NO: 268445 - protein, 14 aa, Homo sapiens
  CDR3 for alpha chain variable domain of TCR clone 134223 (TRAV1-1, TRAJ35)
CAAPPIGFGNVLHC

SEQ ID NO: 268446 - protein, 14 aa, Homo sapiens
  CDR3 for beta chain variable domain of TCR clone 134223 (TRBV7-2, TRBJ2-7)
CASSLDPGPYEQYF

SEQ ID NO: 268447 - protein, 14 aa, Homo sapiens
  CDR3 for alpha chain variable domain of TCR clone 134224 (TRAV12-1, TRAJ13)
CVVIDSGGYQKVTF

SEQ ID NO: 268448 - protein, 13 aa, Homo sapiens
  CDR3 for beta chain variable domain of TCR clone 134224 (TRBV20-1, TRBJ1-1)
CSAPPGGHTEAVF

SEQ ID NO: 268449 - protein, 17 aa, Homo sapiens
  CDR3 for alpha chain variable domain of TCR clone 134225 (TRAV8-4, TRAJ45)
CAVSEGGSGGGADGLTF

SEQ ID NO: 268450 - protein, 13 aa, Homo sapiens
  CDR3 for beta chain variable domain of TCR clone 134225 (TRBV10-3, TRBJ2-7)
CASKLAVNYEQYF

SEQ ID NO: 268451 - protein, 16 aa, Homo sapiens
  CDR3 for alpha chain variable domain of TCR clone 134226 (TRAV3, TRAJ13)
CAVRDPNSWGYQKVTF

SEQ ID NO: 268452 - protein, 13 aa, Homo sapiens
  CDR3 for beta chain variable domain of TCR clone 134226 (TRBV7-9, TRBJ2-7)
CASSLQGSYEQYF

SEQ ID NO: 268453 - protein, 14 aa, Homo sapiens
  CDR3 for alpha chain variable domain of TCR clone 134227 (TRAV26-1, TRAJ45)
CIEVTGGGADGLTV

SEQ ID NO: 268454 - protein, 13 aa, Homo sapiens
  CDR3 for beta chain variable domain of TCR clone 134227 (TRBV7-6, TRBJ1-2)
CASSLVADYGYTF

SEQ ID NO: 268455 - protein, 13 aa, Homo sapiens
  CDR3 for alpha chain variable domain of TCR clone 134228 (TRAV2, TRAJ40)
CAVVTSGTYKYIF

SEQ ID NO: 268456 - protein, 16 aa, Homo sapiens
  CDR3 for beta chain variable domain of TCR clone 134228 (TRBV7-2, TRBJ2-7)
CASSFPLAGGPLEQYF

SEQ ID NO: 268457 - protein, 16 aa, Homo sapiens
  CDR3 for alpha chain variable domain of TCR clone 134229 (TRAV26-1, TRAJ23)
CIVRVERYNQGGKLIF

SEQ ID NO: 268458 - protein, 16 aa, Homo sapiens
  CDR3 for beta chain variable domain of TCR clone 134229 (TRBV13, TRBJ2-2)
CASGPRTGEHTGELFF

SEQ ID NO: 268459 - protein, 16 aa, Homo sapiens
  CDR3 for alpha chain variable domain of TCR clone 134230 (TRAV3, TRAJ5)
CAVRNLMDTGRRALTF

SEQ ID NO: 268460 - protein, 16 aa, Homo sapiens
  CDR3 for beta chain variable domain of TCR clone 134230 (TRBV12-5, TRBJ2-5)
CASGPRTSGNKETQYF

SEQ ID NO: 268461 - protein, 14 aa, Homo sapiens
  CDR3 for alpha chain variable domain of TCR clone 134231 (TRAV8-1, TRAJ5)
CAVSMDTGRRELTF

SEQ ID NO: 268462 - protein, 15 aa, Homo sapiens
  CDR3 for beta chain variable domain of TCR clone 134231 (TRBV19, TRBJ2-4)
CASRGPRRGENIQYF

SEQ ID NO: 268463 - protein, 13 aa, Homo sapiens
  CDR3 for alpha chain variable domain of TCR clone 134232 (TRAV3, TRAJ21)
CAVREPDFNKFYF

SEQ ID NO: 268464 - protein, 18 aa, Homo sapiens
  CDR3 for beta chain variable domain of TCR clone 134232 (TRBV11-2, TRBJ2-3)
CASSLGGAPRGAPNTQYF

SEQ ID NO: 268465 - protein, 15 aa, Homo sapiens
  CDR3 for alpha chain variable domain of TCR clone 134233 (TRAV1-2, TRAJ10)
CAVRGFTGGGNKLTF

SEQ ID NO: 268466 - protein, 13 aa, Homo sapiens
  CDR3 for beta chain variable domain of TCR clone 134233 (TRBV12-4, TRBJ2-1)
CASSHYTDNEQFF

SEQ ID NO: 268467 - protein, 14 aa, Homo sapiens
  CDR3 for alpha chain variable domain of TCR clone 134234 (TRAV13-1, TRAJ13)
CAASRVGGYQKVTF

SEQ ID NO: 268468 - protein, 17 aa, Homo sapiens
  CDR3 for beta chain variable domain of TCR clone 134234 (TRBV15, TRBJ1-5)
CATSRAPLGTRNQPQHF

SEQ ID NO: 268469 - protein, 16 aa, Homo sapiens
  CDR3 for alpha chain variable domain of TCR clone 134235 (TRAV30, TRAJ24)
CGTEIVDADSWGKFQF

SEQ ID NO: 268470 - protein, 15 aa, Homo sapiens
  CDR3 for beta chain variable domain of TCR clone 134235 (TRBV20-1, TRBJ2-7)
CSARDRVSGVDEQYF

SEQ ID NO: 268471 - protein, 15 aa, Homo sapiens
  CDR3 for alpha chain variable domain of TCR clone 134236 (TRAV13-1, TRAJ45)
CAASGSGGGADGLTF

SEQ ID NO: 268472 - protein, 14 aa, Homo sapiens
  CDR3 for beta chain variable domain of TCR clone 134236 (TRBV12-4, TRBJ1-2)
CASSCVGTAYGYTF

SEQ ID NO: 268473 - protein, 12 aa, Homo sapiens
  CDR3 for alpha chain variable domain of TCR clone 134237 (TRAV17, TRAJ20)
CATYSNDYKLSF

SEQ ID NO: 268474 - protein, 15 aa, Homo sapiens
  CDR3 for beta chain variable domain of TCR clone 134237 (TRBV11-2, TRBJ2-2)
CASSSDRVNAGELFF

SEQ ID NO: 268475 - protein, 13 aa, Homo sapiens
  CDR3 for alpha chain variable domain of TCR clone 134238 (TRAV36/DV7, TRAJ54)
CAVCTQGAQNLVF

SEQ ID NO: 268476 - protein, 13 aa, Homo sapiens
  CDR3 for beta chain variable domain of TCR clone 134238 (TRBV7-6, TRBJ2-7)
CASSLDHTHEQYF

SEQ ID NO: 268477 - protein, 13 aa, Homo sapiens
  CDR3 for alpha chain variable domain of TCR clone 134239 (TRAV1-2, TRAJ12)
CAVSMDSSYKLIF

SEQ ID NO: 268478 - protein, 14 aa, Homo sapiens
  CDR3 for beta chain variable domain of TCR clone 134239 (TRBV2, TRBJ2-7)
CASSRDRSSYEQYF

SEQ ID NO: 268479 - protein, 14 aa, Homo sapiens
  CDR3 for alpha chain variable domain of TCR clone 134240 (TRAV12-2, TRAJ40)
CAVKIPPGTYKYIF

SEQ ID NO: 268480 - protein, 18 aa, Homo sapiens
  CDR3 for beta chain variable domain of TCR clone 134240 (TRBV20-1, TRBJ2-6)
CSAETTPTHGSGANVLTF

SEQ ID NO: 268481 - protein, 14 aa, Homo sapiens
  CDR3 for alpha chain variable domain of TCR clone 134241 (TRAV6, TRAJ6)
CALPTSGGSYVPTF

SEQ ID NO: 268482 - protein, 15 aa, Homo sapiens
  CDR3 for beta chain variable domain of TCR clone 134241 (TRBV20-1, TRBJ2-7)
CSAESGTSGAYEQYF

SEQ ID NO: 268483 - protein, 17 aa, Homo sapiens
  CDR3 for alpha chain variable domain of TCR clone 134242 (TRAV2, TRAJ36)
CAVEDRGNWGKQTLLWD

SEQ ID NO: 268484 - protein, 14 aa, Homo sapiens
  CDR3 for beta chain variable domain of TCR clone 134242 (TRBV7-9, TRBJ2-5)
CASSLDTAQETQYF

SEQ ID NO: 268485 - protein, 12 aa, Homo sapiens
  CDR3 for alpha chain variable domain of TCR clone 134243 (TRAV12-2, TRAJ42)
CAVGGSQGNLIF

SEQ ID NO: 268486 - protein, 13 aa, Homo sapiens
  CDR3 for beta chain variable domain of TCR clone 134243 (TRBV11-3, TRBJ1-1)
CASSLALGTEAFF

SEQ ID NO: 268487 - protein, 12 aa, Homo sapiens
  CDR3 for alpha chain variable domain of TCR clone 134244 (TRAV12-3, TRAJ17)
CAMTLTGNKLTF

SEQ ID NO: 268488 - protein, 14 aa, Homo sapiens
  CDR3 for beta chain variable domain of TCR clone 134244 (TRBV28, TRBJ2-1)
CASSIQGTVGEQFF

SEQ ID NO: 268489 - protein, 16 aa, Homo sapiens
  CDR3 for alpha chain variable domain of TCR clone 134245 (TRAV3, TRAJ37)
CAVRPHGSGNTGKLIF

SEQ ID NO: 268490 - protein, 16 aa, Homo sapiens
  CDR3 for beta chain variable domain of TCR clone 134245 (TRBV9, TRBJ1-2)
CASSVEEKVSRYGYTF

SEQ ID NO: 268491 - protein, 16 aa, Homo sapiens
  CDR3 for alpha chain variable domain of TCR clone 134246 (TRAV21, TRAJ33)
CAVSPASMDSNYQLIW

SEQ ID NO: 268492 - protein, 15 aa, Homo sapiens
  CDR3 for beta chain variable domain of TCR clone 134246 (TRBV10-2, TRBJ2-6)
CASSEQGTGANVLTF

SEQ ID NO: 268493 - protein, 18 aa, Homo sapiens
  CDR3 for alpha chain variable domain of TCR clone 134247 (TRAV21, TRAJ52)
RAVRPSPSGGTSYGKLTF

SEQ ID NO: 268494 - protein, 17 aa, Homo sapiens
  CDR3 for beta chain variable domain of TCR clone 134247 (TRBV13, TRBJ2-3)
CASSLSRVAGGRNTQYF

SEQ ID NO: 268495 - protein, 11 aa, Homo sapiens
  CDR3 for alpha chain variable domain of TCR clone 134248 (TRAV12-3, TRAJ27)
CAMANAGKSTF

SEQ ID NO: 268496 - protein, 13 aa, Homo sapiens
  CDR3 for beta chain variable domain of TCR clone 134248 (TRBV20-1, TRBJ1-1)
CSARVGGYTEAFF

SEQ ID NO: 268497 - protein, 14 aa, Homo sapiens
  CDR3 for alpha chain variable domain of TCR clone 134249 (TRAV2, TRAJ22)
GAVGRGGSARQLTF

SEQ ID NO: 268498 - protein, 12 aa, Homo sapiens
  CDR3 for beta chain variable domain of TCR clone 134249 (TRBV19, TRBJ2-1)
CASSMQDTEQFF

SEQ ID NO: 268499 - protein, 14 aa, Homo sapiens
  CDR3 for alpha chain variable domain of TCR clone 134250 (TRAV12-2, TRAJ17)
CAALFKSAGNKLTF

SEQ ID NO: 268500 - protein, 16 aa, Homo sapiens
  CDR3 for beta chain variable domain of TCR clone 134250 (TRBV20-1, TRBJ2-2)
CSASASGIPGAGELFF

SEQ ID NO: 268501 - protein, 12 aa, Homo sapiens
  CDR3 for alpha chain variable domain of TCR clone 134251 (TRAV4, TRAJ22)
CLVAGFCKATDL

SEQ ID NO: 268502 - protein, 14 aa, Homo sapiens
  CDR3 for beta chain variable domain of TCR clone 134251 (TRBV20-1, TRBJ1-1)
CSARAVNGYTEAFF

SEQ ID NO: 268503 - protein, 14 aa, Homo sapiens
  CDR3 for alpha chain variable domain of TCR clone 134252 (TRAV1-2, TRAJ16)
CAVNRFSDGQKLLF

SEQ ID NO: 268504 - protein, 14 aa, Homo sapiens
  CDR3 for beta chain variable domain of TCR clone 134252 (TRBV9, TRBJ1-2)
CASSVSGTLYGYTF

SEQ ID NO: 268505 - protein, 14 aa, Homo sapiens
  CDR3 for alpha chain variable domain of TCR clone 134253 (TRAV12-3, TRAJ42)
CAMNYGGSQGNLIF

SEQ ID NO: 268506 - protein, 13 aa, Homo sapiens
  CDR3 for beta chain variable domain of TCR clone 134253 (TRBV20-1, TRBJ1-6)
CSVPLGVGSPLHF

SEQ ID NO: 268507 - protein, 14 aa, Homo sapiens
  CDR3 for alpha chain variable domain of TCR clone 134254 (TRAV16, TRAJ39)
CALSKNNAGNMLTF

SEQ ID NO: 268508 - protein, 13 aa, Homo sapiens
  CDR3 for beta chain variable domain of TCR clone 134254 (TRBV20-1, TRBJ1-1)
CSARGGGNTEAFF

SEQ ID NO: 268509 - protein, 16 aa, Homo sapiens
  CDR3 for alpha chain variable domain of TCR clone 134255 (TRAV26-1, TRAJ36)
CIVRVSYQTGANNLFF

SEQ ID NO: 268510 - protein, 13 aa, Homo sapiens
  CDR3 for beta chain variable domain of TCR clone 134255 (TRBV5-5, TRBJ1-5)
CASSLGIGEDQHF

SEQ ID NO: 268511 - protein, 14 aa, Homo sapiens
  CDR3 for alpha chain variable domain of TCR clone 134256 (TRAV26-1, TRAJ6)
CIVSPVGGSYIPTF

SEQ ID NO: 268512 - protein, 16 aa, Homo sapiens
  CDR3 for beta chain variable domain of TCR clone 134256 (TRBV4-1, TRBJ2-5)
CASSPGLAGVLGTQYF

SEQ ID NO: 268513 - protein, 13 aa, Homo sapiens
  CDR3 for alpha chain variable domain of TCR clone 134257 (TRAV17, TRAJ5)
CAPMDTGGRALTF

SEQ ID NO: 268514 - protein, 15 aa, Homo sapiens
  CDR3 for beta chain variable domain of TCR clone 134257 (TRBV6-6, TRBJ2-5)
CASSPGGGLEETQYF

SEQ ID NO: 268515 - protein, 14 aa, Homo sapiens
  CDR3 for alpha chain variable domain of TCR clone 134258 (TRAV1-2, TRAJ8)
CAVREDTGFQTLVF

SEQ ID NO: 268516 - protein, 16 aa, Homo sapiens
  CDR3 for beta chain variable domain of TCR clone 134258 (TRBV7-9, TRBJ2-1)
CASSDVAGGSYNEQFF

SEQ ID NO: 268517 - protein, 19 aa, Homo sapiens
  CDR3 for alpha chain variable domain of TCR clone 134259 (TRAV2, TRAJ20)
ILQVREADAAVYRDCKLSF

SEQ ID NO: 268518 - protein, 12 aa, Homo sapiens
  CDR3 for beta chain variable domain of TCR clone 134259 (TRBV11-2, TRBJ2-2)
CASSLGVGELFF

SEQ ID NO: 268519 - protein, 13 aa, Homo sapiens
  CDR3 for alpha chain variable domain of TCR clone 134260 (TRAV16, TRAJ9)
CALRATGGFKTIF

SEQ ID NO: 268520 - protein, 16 aa, Homo sapiens
  CDR3 for beta chain variable domain of TCR clone 134260 (TRBV5-1, TRBJ1-3)
CASSRSGEDSGSTIYF

SEQ ID NO: 268521 - protein, 12 aa, Homo sapiens
  CDR3 for alpha chain variable domain of TCR clone 134261 (TRAV12-3, TRAJ40)
CAVSSGTYKYIF

SEQ ID NO: 268522 - protein, 15 aa, Homo sapiens
  CDR3 for beta chain variable domain of TCR clone 134261 (TRBV7-9, TRBJ2-7)
CASSHGGGLTYEQYF

SEQ ID NO: 268523 - protein, 10 aa, Homo sapiens
  CDR3 for alpha chain variable domain of TCR clone 134262 (TRAV2, TRAJ34)
CAVVYDKLIF

SEQ ID NO: 268524 - protein, 15 aa, Homo sapiens
  CDR3 for beta chain variable domain of TCR clone 134262 (TRBV3-1, TRBJ2-2)
CASSQDWTRAGELFF

SEQ ID NO: 268525 - protein, 17 aa, Homo sapiens
  CDR3 for alpha chain variable domain of TCR clone 134263 (TRAV26-2, TRAJ28)
CILRPLLIVAGSYQLTF

SEQ ID NO: 268526 - protein, 16 aa, Homo sapiens
  CDR3 for beta chain variable domain of TCR clone 134263 (TRBV6-4, TRBJ1-4)
CASSETGQDPNDKLFF

SEQ ID NO: 268527 - protein, 11 aa, Homo sapiens
  CDR3 for alpha chain variable domain of TCR clone 134264 (TRAV21, TRAJ11)
CAVNGYSTLTF

SEQ ID NO: 268528 - protein, 13 aa, Homo sapiens
  CDR3 for beta chain variable domain of TCR clone 134264 (TRBV3-1, TRBJ1-1)
CASSPGVITEAFF

SEQ ID NO: 268529 - protein, 13 aa, Homo sapiens
  CDR3 for alpha chain variable domain of TCR clone 134265 (TRAV12-1, TRAJ33)
CGDAPDRNYQLIW

SEQ ID NO: 268530 - protein, 15 aa, Homo sapiens
  CDR3 for beta chain variable domain of TCR clone 134265 (TRBV27, TRBJ2-1)
CASSNGGGSSNEQFF

SEQ ID NO: 268531 - protein, 12 aa, Homo sapiens
  CDR3 for alpha chain variable domain of TCR clone 134266 (TRAV1-1, TRAJ43)
CAPRVSSNDMRF

SEQ ID NO: 268532 - protein, 16 aa, Homo sapiens
  CDR3 for beta chain variable domain of TCR clone 134266 (TRBV11-2, TRBJ2-2)
CASSLRTGNLIGELFF

SEQ ID NO: 268533 - protein, 14 aa, Homo sapiens
  CDR3 for alpha chain variable domain of TCR clone 134267 (TRAV26-1, TRAJ34)
CIVRVAGNTDKLIF

SEQ ID NO: 268534 - protein, 16 aa, Homo sapiens
  CDR3 for beta chain variable domain of TCR clone 134267 (TRBV12-5, TRBJ2-5)
CASGPRTSGDQETQYF

SEQ ID NO: 268535 - protein, 12 aa, Homo sapiens
  CDR3 for alpha chain variable domain of TCR clone 134268 (TRAV20, TRAJ20)
CAVRLNDYKLSF

SEQ ID NO: 268536 - protein, 14 aa, Homo sapiens
  CDR3 for beta chain variable domain of TCR clone 134268 (TRBV20-1, TRBJ2-1)
CSAQIGGSANEQFF

SEQ ID NO: 268537 - protein, 13 aa, Homo sapiens
  CDR3 for alpha chain variable domain of TCR clone 134269 (TRAV16, TRAJ31)
SALSAHNNARLMF

SEQ ID NO: 268538 - protein, 17 aa, Homo sapiens
  CDR3 for beta chain variable domain of TCR clone 134269 (TRBV12-4, TRBJ2-1)
CASSPGLAGGRINEQFF

SEQ ID NO: 268539 - protein, 15 aa, Homo sapiens
  CDR3 for alpha chain variable domain of TCR clone 134270 (TRAV21, TRAJ37)
CDTDGGSSNTGKLIF

SEQ ID NO: 268540 - protein, 15 aa, Homo sapiens
  CDR3 for beta chain variable domain of TCR clone 134270 (TRBV28, TRBJ2-5)
CASSSGRTIQETQYF

SEQ ID NO: 268541 - protein, 14 aa, Homo sapiens
  CDR3 for alpha chain variable domain of TCR clone 134271 (TRAV20, TRAJ29)
CTVQAWVGNTPLVF

SEQ ID NO: 268542 - protein, 15 aa, Homo sapiens
  CDR3 for beta chain variable domain of TCR clone 134271 (TRBV29-1, TRBJ2-7)
CSVEFFDRGSYEQYF

SEQ ID NO: 268543 - protein, 14 aa, Homo sapiens
  CDR3 for alpha chain variable domain of TCR clone 134272 (TRAV2, TRAJ20)
CAVELTPNDYKLSF

SEQ ID NO: 268544 - protein, 13 aa, Homo sapiens
  CDR3 for beta chain variable domain of TCR clone 134272 (TRBV19, TRBJ2-5)
CASSGRAGETQYF

SEQ ID NO: 268545 - protein, 12 aa, Homo sapiens
  CDR3 for alpha chain variable domain of TCR clone 134273 (TRAV29/DV5, TRAJ49)
CAATDTGNQFYF

SEQ ID NO: 268546 - protein, 12 aa, Homo sapiens
  CDR3 for beta chain variable domain of TCR clone 134273 (TRBV12-4, TRBJ2-7)
CASSLGGYEQHF

SEQ ID NO: 268547 - protein, 13 aa, Homo sapiens
  CDR3 for alpha chain variable domain of TCR clone 134274 (TRAV12-3, TRAJ53)
CAMRGGSNYKLTF

SEQ ID NO: 268548 - protein, 15 aa, Homo sapiens
  CDR3 for beta chain variable domain of TCR clone 134274 (TRBV2, TRBJ2-1)
SATQARLVMIGEQFF

SEQ ID NO: 268549 - protein, 15 aa, Homo sapiens
  CDR3 for alpha chain variable domain of TCR clone 134275 (TRAV3, TRAJ20)
CAVRDIKLSDYKLSF

SEQ ID NO: 268550 - protein, 15 aa, Homo sapiens
  CDR3 for beta chain variable domain of TCR clone 134275 (TRBV5-7, TRBJ1-5)
CASSYGKLWDQPQHF

SEQ ID NO: 268551 - protein, 12 aa, Homo sapiens
  CDR3 for alpha chain variable domain of TCR clone 134276 (TRAV12-1, TRAJ40)
CVVSSGTYKDIF

SEQ ID NO: 268552 - protein, 14 aa, Homo sapiens
  CDR3 for beta chain variable domain of TCR clone 134276 (TRBV20-1, TRBJ2-2)
CSAPDTANTGELFF

SEQ ID NO: 268553 - protein, 14 aa, Homo sapiens
  CDR3 for alpha chain variable domain of TCR clone 134277 (TRAV8-3, TRAJ15)
CAVGRHQAGTALIF

SEQ ID NO: 268554 - protein, 17 aa, Homo sapiens
  CDR3 for beta chain variable domain of TCR clone 134277 (TRBV13, TRBJ2-3)
CASSLSRVAGGRNTQYF

SEQ ID NO: 268555 - protein, 19 aa, Homo sapiens
  CDR3 for alpha chain variable domain of TCR clone 134278 (TRAV14/DV4, TRAJ26)
CAMRGPSEFCLWSRNQLVR

SEQ ID NO: 268556 - protein, 14 aa, Homo sapiens
  CDR3 for beta chain variable domain of TCR clone 134278 (TRBV12-4, TRBJ1-3)
CASTLTGAGNTIYF

SEQ ID NO: 268557 - protein, 14 aa, Homo sapiens
  CDR3 for alpha chain variable domain of TCR clone 134279 (TRAV12-2, TRAJ13)
CAVKKTGGYQKVTF

SEQ ID NO: 268558 - protein, 13 aa, Homo sapiens
  CDR3 for beta chain variable domain of TCR clone 134279 (TRBV7-7, TRBJ2-2)
CASSLTSAGELFF

SEQ ID NO: 268559 - protein, 14 aa, Homo sapiens
  CDR3 for alpha chain variable domain of TCR clone 134280 (TRAV17, TRAJ56)
CATVPAGANSKLTF

SEQ ID NO: 268560 - protein, 15 aa, Homo sapiens
  CDR3 for beta chain variable domain of TCR clone 134280 (TRBV20-1, TRBJ2-1)
CSARFSAGGLNEQFF

SEQ ID NO: 268561 - protein, 14 aa, Homo sapiens
  CDR3 for alpha chain variable domain of TCR clone 134281 (TRAV21, TRAJ45)
CAVSSGGGADGLTF

SEQ ID NO: 268562 - protein, 16 aa, Homo sapiens
  CDR3 for beta chain variable domain of TCR clone 134281 (TRBV5-4, TRBJ2-3)
CASQQPGAGGADTQYF

SEQ ID NO: 268563 - protein, 16 aa, Homo sapiens
  CDR3 for alpha chain variable domain of TCR clone 134282 (TRAV14/DV4, TRAJ15)
CAMREGPAQAGTALIV

SEQ ID NO: 268564 - protein, 12 aa, Homo sapiens
  CDR3 for beta chain variable domain of TCR clone 134282 (TRBV28, TRBJ2-6)
CAIQAGANVLTF

SEQ ID NO: 268565 - protein, 13 aa, Homo sapiens
  CDR3 for alpha chain variable domain of TCR clone 134283 (TRAV12-3, TRAJ49)
CAMSRNTGNQFYF

SEQ ID NO: 268566 - protein, 16 aa, Homo sapiens
  CDR3 for beta chain variable domain of TCR clone 134283 (TRBV5-8, TRBJ2-2)
RASSLINPGGAGELFF

SEQ ID NO: 268567 - protein, 16 aa, Homo sapiens
  CDR3 for alpha chain variable domain of TCR clone 134284 (TRAV13-1, TRAJ40)
CAASIATTSETYKYIF

SEQ ID NO: 268568 - protein, 14 aa, Homo sapiens
  CDR3 for beta chain variable domain of TCR clone 134284 (TRBV4-2, TRBJ2-1)
CASGLDRAYNEQFF

SEQ ID NO: 268569 - protein, 11 aa, Homo sapiens
  CDR3 for alpha chain variable domain of TCR clone 134285 (TRAV2, TRAJ13)
CASGGYQKVTF

SEQ ID NO: 268570 - protein, 15 aa, Homo sapiens
  CDR3 for beta chain variable domain of TCR clone 134285 (TRBV7-3, TRBJ2-1)
CASSQRGGALIEQFF

SEQ ID NO: 268571 - protein, 13 aa, Homo sapiens
  CDR3 for alpha chain variable domain of TCR clone 134286 (TRAV26-1, TRAJ33)
CIVRVEGTYQLIW

SEQ ID NO: 268572 - protein, 16 aa, Homo sapiens
  CDR3 for beta chain variable domain of TCR clone 134286 (TRBV15, TRBJ2-7)
CATSRDRGRRRGEQYF

SEQ ID NO: 268573 - protein, 14 aa, Homo sapiens
  CDR3 for alpha chain variable domain of TCR clone 134287 (TRAV12-2, TRAJ11)
CAVEGGSGYSTLTF

SEQ ID NO: 268574 - protein, 16 aa, Homo sapiens
  CDR3 for beta chain variable domain of TCR clone 134287 (TRBV20-1, TRBJ1-4)
CSAPGQGLLTNEKLFF

SEQ ID NO: 268575 - protein, 12 aa, Homo sapiens
  CDR3 for alpha chain variable domain of TCR clone 134288 (TRAV27, TRAJ9)
CAGESGGFKTIF

SEQ ID NO: 268576 - protein, 18 aa, Homo sapiens
  CDR3 for beta chain variable domain of TCR clone 134288 (TRBV10-2, TRBJ2-2)
CTSAPAVHRQADAGELFF

SEQ ID NO: 268577 - protein, 13 aa, Homo sapiens
  CDR3 for alpha chain variable domain of TCR clone 134289 (TRAV1-1, TRAJ9)
CAAKNTGGFKTIY

SEQ ID NO: 268578 - protein, 14 aa, Homo sapiens
  CDR3 for beta chain variable domain of TCR clone 134289 (TRBV20-1, TRBJ2-1)
CSAQIGGSANEQFF

SEQ ID NO: 268579 - protein, 13 aa, Homo sapiens
  CDR3 for alpha chain variable domain of TCR clone 134290 (TRAV21, TRAJ27)
CAAPNTNAGKSTF

SEQ ID NO: 268580 - protein, 12 aa, Homo sapiens
  CDR3 for beta chain variable domain of TCR clone 134290 (TRBV18, TRBJ1-1)
CASSPGGTEAFF

SEQ ID NO: 268581 - protein, 15 aa, Homo sapiens
  CDR3 for alpha chain variable domain of TCR clone 134291 (TRAV2, TRAJ9)
CAVEDRGTGGFKTIF

SEQ ID NO: 268582 - protein, 14 aa, Homo sapiens
  CDR3 for beta chain variable domain of TCR clone 134291 (TRBV13, TRBJ2-5)
CASSLERVGETQYF

SEQ ID NO: 268583 - protein, 19 aa, Homo sapiens
  CDR3 for alpha chain variable domain of TCR clone 134292 (TRAV29/DV5, TRAJ49)
CSVLLCSKLTVDTGNQFYF

SEQ ID NO: 268584 - protein, 14 aa, Homo sapiens
  CDR3 for beta chain variable domain of TCR clone 134292 (TRBV7-2, TRBJ1-2)
CASSQTGSTYGYTF

SEQ ID NO: 268585 - protein, 16 aa, Homo sapiens
  CDR3 for alpha chain variable domain of TCR clone 134293 (TRAV1-2, TRAJ10)
CAVRGVLTGGGNKLTF

SEQ ID NO: 268586 - protein, 15 aa, Homo sapiens
  CDR3 for beta chain variable domain of TCR clone 134293 (TRBV11-2, TRBJ2-1)
CASSLGTSGLNEQFF

SEQ ID NO: 268587 - protein, 17 aa, Homo sapiens
  CDR3 for alpha chain variable domain of TCR clone 134294 (TRAV3, TRAJ6)
CAVRDGPRAGGSYIPTF

SEQ ID NO: 268588 - protein, 19 aa, Homo sapiens
  CDR3 for beta chain variable domain of TCR clone 134294 (TRBV5-1, TRBJ2-3)
CASSLWTSGGITTPDTQYF

SEQ ID NO: 268589 - protein, 16 aa, Homo sapiens
  CDR3 for alpha chain variable domain of TCR clone 134295 (TRAV13-2, TRAJ28)
CAEKSYSGAGSYQLTF

SEQ ID NO: 268590 - protein, 16 aa, Homo sapiens
  CDR3 for beta chain variable domain of TCR clone 134295 (TRBV19, TRBJ2-1)
CASSKAGPSSYNEQLF

SEQ ID NO: 268591 - protein, 14 aa, Homo sapiens
  CDR3 for alpha chain variable domain of TCR clone 134296 (TRAV1-2, TRAJ16)
CAVNRFSDGQKLLF

SEQ ID NO: 268592 - protein, 11 aa, Homo sapiens
  CDR3 for beta chain variable domain of TCR clone 134296 (TRBV5-6, TRBJ1-2)
CASSRGGGYTF

SEQ ID NO: 268593 - protein, 15 aa, Homo sapiens
  CDR3 for alpha chain variable domain of TCR clone 134297 (TRAV23/DV6, TRAJ18)
CAARYRDSTLGRLYF

SEQ ID NO: 268594 - protein, 13 aa, Homo sapiens
  CDR3 for beta chain variable domain of TCR clone 134297 (TRBV7-2, TRBJ2-7)
CASSSPSGSEQYF

SEQ ID NO: 268595 - protein, 14 aa, Homo sapiens
  CDR3 for alpha chain variable domain of TCR clone 134298 (TRAV12-2, TRAJ48)
CSVNAFFGNEKLTF

SEQ ID NO: 268596 - protein, 13 aa, Homo sapiens
  CDR3 for beta chain variable domain of TCR clone 134298 (TRBV28, TRBJ2-7)
CAGAQQGLDEQYF

SEQ ID NO: 268597 - protein, 15 aa, Homo sapiens
  CDR3 for alpha chain variable domain of TCR clone 134299 (TRAV12-2, TRAJ53)
CAVNGGGGSNYKLTF

SEQ ID NO: 268598 - protein, 17 aa, Homo sapiens
  CDR3 for beta chain variable domain of TCR clone 134299 (TRBV7-3, TRBJ2-3)
CASSLMKRMRGADKQYF

SEQ ID NO: 268599 - protein, 12 aa, Homo sapiens
  CDR3 for alpha chain variable domain of TCR clone 134300 (TRAV26-1, TRAJ43)
CIVRGNNDDMRF

SEQ ID NO: 268600 - protein, 13 aa, Homo sapiens
  CDR3 for beta chain variable domain of TCR clone 134300 (TRBV20-1, TRBJ2-3)
CSAIYPGADTQYF

SEQ ID NO: 268601 - protein, 13 aa, Homo sapiens
  CDR3 for alpha chain variable domain of TCR clone 134301 (TRAV8-6, TRAJ50)
CAVTKTSYDKVIF

SEQ ID NO: 268602 - protein, 15 aa, Homo sapiens
  CDR3 for beta chain variable domain of TCR clone 134301 (TRBV7-2, TRBJ2-2)
CASRRPGQNTGELFF

SEQ ID NO: 268603 - protein, 15 aa, Homo sapiens
  CDR3 for alpha chain variable domain of TCR clone 134302 (TRAV26-1, TRAJ29)
CIVRVEGSGNTPLVF

SEQ ID NO: 268604 - protein, 15 aa, Homo sapiens
  CDR3 for beta chain variable domain of TCR clone 134302 (TRBV19, TRBJ2-7)
CASSPAGSGEALRYF

SEQ ID NO: 268605 - protein, 12 aa, Homo sapiens
  CDR3 for alpha chain variable domain of TCR clone 134303 (TRAV29/DV5, TRAJ43)
CAATDTGNQFYF

SEQ ID NO: 268606 - protein, 15 aa, Homo sapiens
  CDR3 for beta chain variable domain of TCR clone 134303 (TRBV7-9, TRBJ2-2)
CASGPLDTFPGELFF

SEQ ID NO: 268607 - protein, 14 aa, Homo sapiens
  CDR3 for alpha chain variable domain of TCR clone 134304 (TRAV1-1, TRAJ23)
CAVSIYNQGGKLIF

SEQ ID NO: 268608 - protein, 14 aa, Homo sapiens
  CDR3 for beta chain variable domain of TCR clone 134304 (TRBV4-1, TRBJ2-7)
CASSPVAGGDEQYF

SEQ ID NO: 268609 - protein, 13 aa, Homo sapiens
  CDR3 for alpha chain variable domain of TCR clone 134305 (TRAV12-2, TRAJ36)
CAMIATGANNLFF

SEQ ID NO: 268610 - protein, 17 aa, Homo sapiens
  CDR3 for beta chain variable domain of TCR clone 134305 (TRBV7-3, TRBJ2-2)
CASSLSGTSGGTGELFF

SEQ ID NO: 268611 - protein, 14 aa, Homo sapiens
  CDR3 for alpha chain variable domain of TCR clone 134306 (TRAV12-1, TRAJ22)
CVVTTSGSARQLTF

SEQ ID NO: 268612 - protein, 17 aa, Homo sapiens
  CDR3 for beta chain variable domain of TCR clone 134306 (TRBV28, TRBJ2-5)
CASSRQGGLAGAETQYF

SEQ ID NO: 268613 - protein, 13 aa, Homo sapiens
  CDR3 for alpha chain variable domain of TCR clone 134307 (TRAV13-1, TRAJ21)
CAASIYNFNKFYF

SEQ ID NO: 268614 - protein, 13 aa, Homo sapiens
  CDR3 for beta chain variable domain of TCR clone 134307 (TRBV27, TRBJ1-4)
CASSLMGDEKLIF

SEQ ID NO: 268615 - protein, 12 aa, Homo sapiens
  CDR3 for alpha chain variable domain of TCR clone 134308 (TRAV29/DV5, TRAJ30)
CAASARDDKIIF

SEQ ID NO: 268616 - protein, 15 aa, Homo sapiens
  CDR3 for beta chain variable domain of TCR clone 134308 (TRBV9, TRBJ1-6)
CASSVAGTGDSPLHF

SEQ ID NO: 268617 - protein, 14 aa, Homo sapiens
  CDR3 for alpha chain variable domain of TCR clone 134309 (TRAV12-2, TRAJ13)
CAVKKTGGYQKVTF

SEQ ID NO: 268618 - protein, 15 aa, Homo sapiens
  CDR3 for beta chain variable domain of TCR clone 134309 (TRBV11-3, TRBJ2-7)
CASSPGPASSYEQYF

SEQ ID NO: 268619 - protein, 18 aa, Homo sapiens
  CDR3 for alpha chain variable domain of TCR clone 134310 (TRAV21, TRAJ52)
CAVRPSPAGGTSYGKMTF

SEQ ID NO: 268620 - protein, 15 aa, Homo sapiens
  CDR3 for beta chain variable domain of TCR clone 134310 (TRBV20-1, TRBJ2-7)
CSARDRVSGMDEQYF

SEQ ID NO: 268621 - protein, 14 aa, Homo sapiens
  CDR3 for alpha chain variable domain of TCR clone 134311 (TRAV35, TRAJ22)
CAGLRPGSARQLTF

SEQ ID NO: 268622 - protein, 15 aa, Homo sapiens
  CDR3 for beta chain variable domain of TCR clone 134311 (TRBV6-4, TRBJ2-1)
CASSDSTGGYNEQFF

SEQ ID NO: 268623 - protein, 14 aa, Homo sapiens
  CDR3 for alpha chain variable domain of TCR clone 134312 (TRAV1-2, TRAJ16)
CAVNRFSDGQKLLC

SEQ ID NO: 268624 - protein, 15 aa, Homo sapiens
  CDR3 for beta chain variable domain of TCR clone 134312 (TRBV7-9, TRBJ1-6)
CASSSPGRGNSPLHF

SEQ ID NO: 268625 - protein, 13 aa, Homo sapiens
  CDR3 for alpha chain variable domain of TCR clone 134313 (TRAV2, TRAJ40)
CAVVTSGTHKYIF

SEQ ID NO: 268626 - protein, 14 aa, Homo sapiens
  CDR3 for beta chain variable domain of TCR clone 134313 (TRBV19, TRBJ2-1)
CASPTFVLSDEQFF

SEQ ID NO: 268627 - protein, 14 aa, Homo sapiens
  CDR3 for alpha chain variable domain of TCR clone 134314 (TRAV13-1, TRAJ40)
CAASMTSGTYKYIF

SEQ ID NO: 268628 - protein, 17 aa, Homo sapiens
  CDR3 for beta chain variable domain of TCR clone 134314 (TRBV13, TRBJ2-3)
CASSLSRVAGGRNTQYF

SEQ ID NO: 268629 - protein, 13 aa, Homo sapiens
  CDR3 for alpha chain variable domain of TCR clone 134315 (TRAV23/DV6, TRAJ22)
CAPYSGSARQLTF

SEQ ID NO: 268630 - protein, 13 aa, Homo sapiens
  CDR3 for beta chain variable domain of TCR clone 134315 (TRBV6-1, TRBJ1-1)
CASSRQGNTEALF

SEQ ID NO: 268631 - protein, 15 aa, Homo sapiens
  CDR3 for alpha chain variable domain of TCR clone 134316 (TRAV25, TRAJ52)
CAGRPGGTSYGKLTF

SEQ ID NO: 268632 - protein, 14 aa, Homo sapiens
  CDR3 for beta chain variable domain of TCR clone 134316 (TRBV11-2, TRBJ2-1)
CASSLEPSGGGKFF

SEQ ID NO: 268633 - protein, 11 aa, Homo sapiens
  CDR3 for alpha chain variable domain of TCR clone 134317 (TRAV13-2, TRAJ20)
CADSNDYKPSF

SEQ ID NO: 268634 - protein, 15 aa, Homo sapiens
  CDR3 for beta chain variable domain of TCR clone 134317 (TRBV4-1, TRBJ1-4)
CASSDTGGTNEKLFF

SEQ ID NO: 268635 - protein, 15 aa, Homo sapiens
  CDR3 for alpha chain variable domain of TCR clone 134318 (TRAV2, TRAJ24)
CAVVRLKNSWGKLQF

SEQ ID NO: 268636 - protein, 14 aa, Homo sapiens
  CDR3 for beta chain variable domain of TCR clone 134318 (TRBV20-1, TRBJ2-7)
CSAISREASYEQYF

SEQ ID NO: 268637 - protein, 14 aa, Homo sapiens
  CDR3 for alpha chain variable domain of TCR clone 134319 (TRAV9-2, TRAJ39)
CALYIYNAGNMLTF

SEQ ID NO: 268638 - protein, 15 aa, Homo sapiens
  CDR3 for beta chain variable domain of TCR clone 134319 (TRBV28, TRBJ1-4)
CASSVSGSGLEKLFF

SEQ ID NO: 268639 - protein, 14 aa, Homo sapiens
  CDR3 for alpha chain variable domain of TCR clone 134320 (TRAV8-6, TRAJ57)
CAVSSKGGSEKLVF

SEQ ID NO: 268640 - protein, 14 aa, Homo sapiens
  CDR3 for beta chain variable domain of TCR clone 134320 (TRBV18, TRBJ2-7)
CASSPRGGAYEQYF

SEQ ID NO: 268641 - protein, 15 aa, Homo sapiens
  CDR3 for alpha chain variable domain of TCR clone 134321 (TRAV3, TRAJ9)
CAVRARNTGGFKTIF

SEQ ID NO: 268642 - protein, 14 aa, Homo sapiens
  CDR3 for beta chain variable domain of TCR clone 134321 (TRBV11-1, TRBJ2-7)
CASSLEREWGEQYF

SEQ ID NO: 268643 - protein, 21 aa, Homo sapiens
  CDR3 for alpha chain variable domain of TCR clone 134322 (TRAV26-1, TRAJ38)
CIADNAGNNHIQNPDPAVYQL

SEQ ID NO: 268644 - protein, 13 aa, Homo sapiens
  CDR3 for beta chain variable domain of TCR clone 134322 (TRBV10-3, TRBJ2-7)
CASKLAVNYEQYF

SEQ ID NO: 268645 - protein, 12 aa, Homo sapiens
  CDR3 for alpha chain variable domain of TCR clone 134323 (TRAV16, TRAJ29)
CALSLGNTLLVF

SEQ ID NO: 268646 - protein, 14 aa, Homo sapiens
  CDR3 for beta chain variable domain of TCR clone 134323 (TRBV7-2, TRBJ2-1)
CASSLAGSWYEQFF

SEQ ID NO: 268647 - protein, 13 aa, Homo sapiens
  CDR3 for alpha chain variable domain of TCR clone 134324 (TRAV13-1, TRAJ43)
FAASKNNNNDMRF

SEQ ID NO: 268648 - protein, 13 aa, Homo sapiens
  CDR3 for beta chain variable domain of TCR clone 134324 (TRBV4-2, TRBJ1-1)
CASSQAGNTEAFF

SEQ ID NO: 268649 - protein, 14 aa, Homo sapiens
  CDR3 for alpha chain variable domain of TCR clone 134325 (TRAV12-2, TRAJ5)
CAVNRSTGRRALTI

SEQ ID NO: 268650 - protein, 12 aa, Homo sapiens
  CDR3 for beta chain variable domain of TCR clone 134325 (TRBV19, TRBJ1-5)
CASSIAQQPQHF

SEQ ID NO: 268651 - protein, 14 aa, Homo sapiens
  CDR3 for alpha chain variable domain of TCR clone 134326 (TRAV1-1, TRAJ27)
CAVIYNTNAGKSTF

SEQ ID NO: 268652 - protein, 14 aa, Homo sapiens
  CDR3 for beta chain variable domain of TCR clone 134326 (TRBV7-2, TRBJ2-5)
CASSTGGELKTQYF

SEQ ID NO: 268653 - protein, 16 aa, Homo sapiens
  CDR3 for alpha chain variable domain of TCR clone 134327 (TRAV4, TRAJ18)
CCVLLIGGSTLGRLYF

SEQ ID NO: 268654 - protein, 17 aa, Homo sapiens
  CDR3 for beta chain variable domain of TCR clone 134327 (TRBV5-4, TRBJ2-1)
CASSSAGGRGPYNEQFF

SEQ ID NO: 268655 - protein, 13 aa, Homo sapiens
  CDR3 for alpha chain variable domain of TCR clone 134328 (TRAV3, TRAJ21)
CAVREPDFNKFYF

SEQ ID NO: 268656 - protein, 12 aa, Homo sapiens
  CDR3 for beta chain variable domain of TCR clone 134328 (TRBV5-1, TRBJ2-4)
LAGGWTKNIQYF

SEQ ID NO: 268657 - protein, 17 aa, Homo sapiens
  CDR3 for alpha chain variable domain of TCR clone 134329 (TRAV13-1, TRAJ52)
CAASSGAGGTSYGKVTF

SEQ ID NO: 268658 - protein, 15 aa, Homo sapiens
  CDR3 for beta chain variable domain of TCR clone 134329 (TRBV2, TRBJ2-1)
CASSELAGSYNEQFF

SEQ ID NO: 268659 - protein, 13 aa, Homo sapiens
  CDR3 for alpha chain variable domain of TCR clone 134330 (TRAV2, TRAJ29)
CAAGNSGNTPLVF

SEQ ID NO: 268660 - protein, 13 aa, Homo sapiens
  CDR3 for beta chain variable domain of TCR clone 134330 (TRBV11-2, TRBJ2-5)
CASSSTGEETQYF

SEQ ID NO: 268661 - protein, 17 aa, Homo sapiens
  CDR3 for alpha chain variable domain of TCR clone 134331 (TRAV3, TRAJ6)
CAVRDGPRAVGSYIPTF

SEQ ID NO: 268662 - protein, 16 aa, Homo sapiens
  CDR3 for beta chain variable domain of TCR clone 134331 (TRBV7-8, TRBJ2-3)
CASSTEGQRETDTQYF

SEQ ID NO: 268663 - protein, 12 aa, Homo sapiens
  CDR3 for alpha chain variable domain of TCR clone 134332 (TRAV8-3, TRAJ26)
CAVDNYGQNFVF

SEQ ID NO: 268664 - protein, 13 aa, Homo sapiens
  CDR3 for beta chain variable domain of TCR clone 134332 (TRBV20-1, TRBJ2-5)
CSARGDYQETQYF

SEQ ID NO: 268665 - protein, 10 aa, Homo sapiens
  CDR3 for alpha chain variable domain of TCR clone 134333 (TRAV13-2, TRAJ24)
ITDSWGKLQF

SEQ ID NO: 268666 - protein, 13 aa, Homo sapiens
  CDR3 for beta chain variable domain of TCR clone 134333 (TRBV29-1, TRBJ2-1)
CSVEGGRVNEQFF

SEQ ID NO: 268667 - protein, 11 aa, Homo sapiens
  CDR3 for alpha chain variable domain of TCR clone 134334 (TRAV2, TRAJ13)
CASGGYQKVTF

SEQ ID NO: 268668 - protein, 17 aa, Homo sapiens
  CDR3 for beta chain variable domain of TCR clone 134334 (TRBV20-1, TRBJ2-2)
CSASGSGQGGLTGGLFF

SEQ ID NO: 268669 - protein, 15 aa, Homo sapiens
  CDR3 for alpha chain variable domain of TCR clone 134335 (TRAV3, TRAJ15)
CSVRPANQAGTALIF

SEQ ID NO: 268670 - protein, 14 aa, Homo sapiens
  CDR3 for beta chain variable domain of TCR clone 134335 (TRBV4-1, TRBJ2-2)
CASSQAVNTGELFF

SEQ ID NO: 268671 - protein, 14 aa, Homo sapiens
  CDR3 for alpha chain variable domain of TCR clone 134336 (TRAV12-3, TRAJ10)
SHLPLTGGGNKLTF

SEQ ID NO: 268672 - protein, 17 aa, Homo sapiens
  CDR3 for beta chain variable domain of TCR clone 134336 (TRBV19, TRBJ2-6)
CASSKGATASGANVLTF

SEQ ID NO: 268673 - protein, 13 aa, Homo sapiens
  CDR3 for alpha chain variable domain of TCR clone 134337 (TRAV27, TRAJ41)
CAGEGNSGYALNF

SEQ ID NO: 268674 - protein, 15 aa, Homo sapiens
  CDR3 for beta chain variable domain of TCR clone 134337 (TRBV6-3, TRBJ2-7)
CASSSPGTVFYKQYF

SEQ ID NO: 268675 - protein, 12 aa, Homo sapiens
  CDR3 for alpha chain variable domain of TCR clone 134338 (TRAV12-1, TRAJ34)
CVVAGATDKLIF

SEQ ID NO: 268676 - protein, 13 aa, Homo sapiens
  CDR3 for beta chain variable domain of TCR clone 134338 (TRBV7-9, TRBJ1-2)
CASSLKQNYGYTF

SEQ ID NO: 268677 - protein, 15 aa, Homo sapiens
  CDR3 for alpha chain variable domain of TCR clone 134339 (TRAV26-1, TRAJ15)
CIVRAANQSGTALIF

SEQ ID NO: 268678 - protein, 15 aa, Homo sapiens
  CDR3 for beta chain variable domain of TCR clone 134339 (TRBV20-1, TRBJ1-1)
CSARSAATSNTEAFF

SEQ ID NO: 268679 - protein, 12 aa, Homo sapiens
  CDR3 for alpha chain variable domain of TCR clone 134340 (TRAV26-1, TRAJ43)
CIVGGNNNDMRF

SEQ ID NO: 268680 - protein, 13 aa, Homo sapiens
  CDR3 for beta chain variable domain of TCR clone 134340 (TRBV20-1, TRBJ2-3)
CSAIYPGADTQYF

SEQ ID NO: 268681 - protein, 12 aa, Homo sapiens
  CDR3 for alpha chain variable domain of TCR clone 134341 (TRAV13-1, TRAJ15)
CAASQAGTALIF

SEQ ID NO: 268682 - protein, 14 aa, Homo sapiens
  CDR3 for beta chain variable domain of TCR clone 134341 (TRBV19, TRBJ2-2)
CASSTLHRSGELFF

SEQ ID NO: 268683 - protein, 18 aa, Homo sapiens
  CDR3 for alpha chain variable domain of TCR clone 134342 (TRAV13-2, TRAJ52)
CAETPLNAGGTSYGKLTF

SEQ ID NO: 268684 - protein, 15 aa, Homo sapiens
  CDR3 for beta chain variable domain of TCR clone 134342 (TRBV7-2, TRBJ2-7)
RASSLKGALTYEQYF

SEQ ID NO: 268685 - protein, 16 aa, Homo sapiens
  CDR3 for alpha chain variable domain of TCR clone 134343 (TRAV1-2, TRAJ10)
CAVGGVLTGGGNKLTF

SEQ ID NO: 268686 - protein, 14 aa, Homo sapiens
  CDR3 for beta chain variable domain of TCR clone 134343 (TRBV11-2, TRBJ1-2)
CASSLGTANYGYTF

SEQ ID NO: 268687 - protein, 16 aa, Homo sapiens
  CDR3 for alpha chain variable domain of TCR clone 134344 (TRAV17, TRAJ52)
CATGIIGGTSYGKLTF

SEQ ID NO: 268688 - protein, 14 aa, Homo sapiens
  CDR3 for beta chain variable domain of TCR clone 134344 (TRBV7-3, TRBJ2-2)
CASSSGGYTGGLFF

SEQ ID NO: 268689 - protein, 14 aa, Homo sapiens
  CDR3 for alpha chain variable domain of TCR clone 134345 (TRAV12-2, TRAJ24)
CAVTPADSWGKLQF

SEQ ID NO: 268690 - protein, 11 aa, Homo sapiens
  CDR3 for beta chain variable domain of TCR clone 134345 (TRBV6-3, TRBJ2-3)
CATGQADTQYF

SEQ ID NO: 268691 - protein, 19 aa, Homo sapiens
  CDR3 for alpha chain variable domain of TCR clone 134346 (TRAV27, TRAJ53)
ASTSVQSRNSGGRNYKLTF

SEQ ID NO: 268692 - protein, 14 aa, Homo sapiens
  CDR3 for beta chain variable domain of TCR clone 134346 (TRBV11-1, TRBJ2-7)
CASTFAVPSYEQYF

SEQ ID NO: 268693 - protein, 15 aa, Homo sapiens
  CDR3 for alpha chain variable domain of TCR clone 134347 (TRAV13-1, TRAJ17)
CAASIERAAGNKLTF

SEQ ID NO: 268694 - protein, 12 aa, Homo sapiens
  CDR3 for beta chain variable domain of TCR clone 134347 (TRBV5-7, TRBJ1-1)
CASSLGRGKAVF

SEQ ID NO: 268695 - protein, 15 aa, Homo sapiens
  CDR3 for alpha chain variable domain of TCR clone 134348 (TRAV26-1, TRAJ23)
CIVRVAGYQGGKLIF

SEQ ID NO: 268696 - protein, 15 aa, Homo sapiens
  CDR3 for beta chain variable domain of TCR clone 134348 (TRBV7-2, TRBJ2-3)
CASSSTGLETDTQYF

SEQ ID NO: 268697 - protein, 11 aa, Homo sapiens
  CDR3 for alpha chain variable domain of TCR clone 134349 (TRAV12-1, TRAJ30)
FVVNGQDKIIF

SEQ ID NO: 268698 - protein, 12 aa, Homo sapiens
  CDR3 for beta chain variable domain of TCR clone 134349 (TRBV27, TRBJ2-2)
CASKLFTGELFF

SEQ ID NO: 268699 - protein, 14 aa, Homo sapiens
  CDR3 for alpha chain variable domain of TCR clone 134350 (TRAV12-3, TRAJ9)
CAMSPNTGGFKTIF

SEQ ID NO: 268700 - protein, 13 aa, Homo sapiens
  CDR3 for beta chain variable domain of TCR clone 134350 (TRBV12-5, TRBJ2-3)
CASGDRQSDTQYF

SEQ ID NO: 268701 - protein, 14 aa, Homo sapiens
  CDR3 for alpha chain variable domain of TCR clone 134351 (TRAV13-1, TRAJ35)
CAASKGGFGNVLHC

SEQ ID NO: 268702 - protein, 14 aa, Homo sapiens
  CDR3 for beta chain variable domain of TCR clone 134351 (TRBV4-2, TRBJ2-1)
CASGLDRAHNEQFF

SEQ ID NO: 268703 - protein, 10 aa, Homo sapiens
  CDR3 for alpha chain variable domain of TCR clone 134352 (TRAV2, TRAJ34)
CAVVNDKLIF

SEQ ID NO: 268704 - protein, 16 aa, Homo sapiens
  CDR3 for beta chain variable domain of TCR clone 134352 (TRBV5-1, TRBJ2-3)
CACSLGLAVYTDTQYF

SEQ ID NO: 268705 - protein, 14 aa, Homo sapiens
  CDR3 for alpha chain variable domain of TCR clone 134353 (TRAV13-1, TRAJ23)
CAASRLGRGEKLIF

SEQ ID NO: 268706 - protein, 15 aa, Homo sapiens
  CDR3 for beta chain variable domain of TCR clone 134353 (TRBV7-2, TRBJ2-1)
CASSLVAGRYNEQFF

SEQ ID NO: 268707 - protein, 15 aa, Homo sapiens
  CDR3 for alpha chain variable domain of TCR clone 134354 (TRAV8-4, TRAJ45)
CAVIWTGGGADGLPF

SEQ ID NO: 268708 - protein, 12 aa, Homo sapiens
  CDR3 for beta chain variable domain of TCR clone 134354 (TRBV29-1, TRBJ2-7)
CSVGPSGDEQYF

SEQ ID NO: 268709 - protein, 14 aa, Homo sapiens
  CDR3 for alpha chain variable domain of TCR clone 134355 (TRAV12-3, TRAJ10)
SHLPLTGGGNKLTF

SEQ ID NO: 268710 - protein, 14 aa, Homo sapiens
  CDR3 for beta chain variable domain of TCR clone 134355 (TRBV20-1, TRBJ2-7)
CSAKRGRSSYEQYF

SEQ ID NO: 268711 - protein, 11 aa, Homo sapiens
  CDR3 for alpha chain variable domain of TCR clone 134356 (TRAV13-1, TRAJ6)
CATLGSYIPTF

SEQ ID NO: 268712 - protein, 12 aa, Homo sapiens
  CDR3 for beta chain variable domain of TCR clone 134356 (TRBV11-2, TRBJ2-1)
YASSPGNNEQFF

SEQ ID NO: 268713 - protein, 15 aa, Homo sapiens
  CDR3 for alpha chain variable domain of TCR clone 134357 (TRAV12-1, TRAJ44)
CVADLPTGTASKLTF

SEQ ID NO: 268714 - protein, 15 aa, Homo sapiens
  CDR3 for beta chain variable domain of TCR clone 134357 (TRBV11-3, TRBJ1-1)
CASSLGGPGDTEAFF

SEQ ID NO: 268715 - protein, 15 aa, Homo sapiens
  CDR3 for alpha chain variable domain of TCR clone 134358 (TRAV8-3, TRAJ45)
CASSYSGGGADGLTF

SEQ ID NO: 268716 - protein, 16 aa, Homo sapiens
  CDR3 for beta chain variable domain of TCR clone 134358 (TRBV7-9, TRBJ2-1)
CASSDVAGGSYNEQFF

SEQ ID NO: 268717 - protein, 13 aa, Homo sapiens
  CDR3 for alpha chain variable domain of TCR clone 134359 (TRAV8-3, TRAJ48)
CAVVPFGNEKLTF

SEQ ID NO: 268718 - protein, 16 aa, Homo sapiens
  CDR3 for beta chain variable domain of TCR clone 134359 (TRBV4-3, TRBJ2-1)
CASSPALDRGVNEQFF

SEQ ID NO: 268719 - protein, 13 aa, Homo sapiens
  CDR3 for alpha chain variable domain of TCR clone 134360 (TRAV17, TRAJ9)
CATDYTGGFKTIF

SEQ ID NO: 268720 - protein, 11 aa, Homo sapiens
  CDR3 for beta chain variable domain of TCR clone 134360 (TRBV7-9, TRBJ2-3)
CASSPTDTQYF

SEQ ID NO: 268721 - protein, 13 aa, Homo sapiens
  CDR3 for alpha chain variable domain of TCR clone 134361 (TRAV35, TRAJ42)
CAGFPGSQGNLIL

SEQ ID NO: 268722 - protein, 14 aa, Homo sapiens
  CDR3 for beta chain variable domain of TCR clone 134361 (TRBV19, TRBJ2-1)
CASPTFVLSGEQFF

SEQ ID NO: 268723 - protein, 13 aa, Homo sapiens
  CDR3 for alpha chain variable domain of TCR clone 134362 (TRAV12-2, TRAJ9)
CAVKWAGGVKTIF

SEQ ID NO: 268724 - protein, 13 aa, Homo sapiens
  CDR3 for beta chain variable domain of TCR clone 134362 (TRBV7-3, TRBJ1-1)
CASSQDWGAEAFF

SEQ ID NO: 268725 - protein, 12 aa, Homo sapiens
  CDR3 for alpha chain variable domain of TCR clone 134363 (TRAV12-2, TRAJ20)
CAVRPSDYKLSF

SEQ ID NO: 268726 - protein, 17 aa, Homo sapiens
  CDR3 for beta chain variable domain of TCR clone 134363 (TRBV13, TRBJ2-3)
CASSLSRVAGGRNTQYF

SEQ ID NO: 268727 - protein, 10 aa, Homo sapiens
  CDR3 for alpha chain variable domain of TCR clone 134364 (TRAV1-2, TRAJ20)
CACNGYKLSF

SEQ ID NO: 268728 - protein, 14 aa, Homo sapiens
  CDR3 for beta chain variable domain of TCR clone 134364 (TRBV20-1, TRBJ1-1)
CSAQTRIGGTEAFF

SEQ ID NO: 268729 - protein, 12 aa, Homo sapiens
  CDR3 for alpha chain variable domain of TCR clone 134365 (TRAV8-6, TRAJ43)
CAVSNNNNDMRF

SEQ ID NO: 268730 - protein, 13 aa, Homo sapiens
  CDR3 for beta chain variable domain of TCR clone 134365 (TRBV7-3, TRBJ1-1)
CASSQDWGAEAFF

SEQ ID NO: 268731 - protein, 15 aa, Homo sapiens
  CDR3 for alpha chain variable domain of TCR clone 134366 (TRAV3, TRAJ36)
CAVRASQTGANNLFF

SEQ ID NO: 268732 - protein, 16 aa, Homo sapiens
  CDR3 for beta chain variable domain of TCR clone 134366 (TRBV19, TRBJ2-2)
CASLSPGTGATGELFF

SEQ ID NO: 268733 - protein, 11 aa, Homo sapiens
  CDR3 for alpha chain variable domain of TCR clone 134367 (TRAV27, TRAJ43)
CVRYNNNDMRF

SEQ ID NO: 268734 - protein, 16 aa, Homo sapiens
  CDR3 for beta chain variable domain of TCR clone 134367 (TRBV20-1, TRBJ1-4)
CSAPGQGLLTNEKLFF

SEQ ID NO: 268735 - protein, 13 aa, Homo sapiens
  CDR3 for alpha chain variable domain of TCR clone 134368 (TRAV29/DV5, TRAJ47)
CAASAEYGNKLVF

SEQ ID NO: 268736 - protein, 15 aa, Homo sapiens
  CDR3 for beta chain variable domain of TCR clone 134368 (TRBV19, TRBJ2-1)
CASSMGWNSNNEQFF

SEQ ID NO: 268737 - protein, 14 aa, Homo sapiens
  CDR3 for alpha chain variable domain of TCR clone 134369 (TRAV1-2, TRAJ16)
CAVNRFSDGQKLLF

SEQ ID NO: 268738 - protein, 16 aa, Homo sapiens
  CDR3 for beta chain variable domain of TCR clone 134369 (TRBV7-6, TRBJ2-3)
CASSPLAGGSTDTQYF

SEQ ID NO: 268739 - protein, 22 aa, Homo sapiens
  CDR3 for alpha chain variable domain of TCR clone 134370 (TRAV12-2, TRAJ53)
SPVIQPPTSVPPILSSNYKLTF

SEQ ID NO: 268740 - protein, 12 aa, Homo sapiens
  CDR3 for beta chain variable domain of TCR clone 134370 (TRBV11-2, TRBJ2-2)
CASSLPTGELFF

SEQ ID NO: 268741 - protein, 14 aa, Homo sapiens
  CDR3 for alpha chain variable domain of TCR clone 134371 (TRAV12-1, TRAJ30)
CVVNIGGRDDKIIF

SEQ ID NO: 268742 - protein, 15 aa, Homo sapiens
  CDR3 for beta chain variable domain of TCR clone 134371 (TRBV18, TRBJ1-2)
CASSPSNTPNYGYTL

SEQ ID NO: 268743 - protein, 16 aa, Homo sapiens
  CDR3 for alpha chain variable domain of TCR clone 134372 (TRAV12-3, TRAJ53)
CAMSPGSGGSNYKLTF

SEQ ID NO: 268744 - protein, 16 aa, Homo sapiens
  CDR3 for beta chain variable domain of TCR clone 134372 (TRBV4-2, TRBJ1-1)
CASSQAGFGMNNEAFF

SEQ ID NO: 268745 - protein, 13 aa, Homo sapiens
  CDR3 for alpha chain variable domain of TCR clone 134373 (TRAV12-3, TRAJ13)
CAMSSGGYQKVTF

SEQ ID NO: 268746 - protein, 20 aa, Homo sapiens
  CDR3 for beta chain variable domain of TCR clone 134373 (TRBV4-1, TRBJ2-7)
CASSRGHSELLRAVLRAGHQ

SEQ ID NO: 268747 - protein, 15 aa, Homo sapiens
  CDR3 for alpha chain variable domain of TCR clone 134374 (TRAV4, TRAJ44)
CIVRIGTGTASKLTF

SEQ ID NO: 268748 - protein, 15 aa, Homo sapiens
  CDR3 for beta chain variable domain of TCR clone 134374 (TRBV7-6, TRBJ2-1)
CASSSLAGEGNEQFF

SEQ ID NO: 268749 - protein, 13 aa, Homo sapiens
  CDR3 for alpha chain variable domain of TCR clone 134375 (TRAV29/DV5, TRAJ31)
CAASRNNNARLMF

SEQ ID NO: 268750 - protein, 14 aa, Homo sapiens
  CDR3 for beta chain variable domain of TCR clone 134375 (TRBV11-1, TRBJ2-7)
CASSFRQGSYEQYF

SEQ ID NO: 268751 - protein, 14 aa, Homo sapiens
  CDR3 for alpha chain variable domain of TCR clone 134376 (TRAV25, TRAJ27)
CAGPGNTNEGKSTF

SEQ ID NO: 268752 - protein, 16 aa, Homo sapiens
  CDR3 for beta chain variable domain of TCR clone 134376 (TRBV4-1, TRBJ2-6)
CASSQDGGPGANVLTF

SEQ ID NO: 268753 - protein, 14 aa, Homo sapiens
  CDR3 for alpha chain variable domain of TCR clone 134377 (TRAV8-4, TRAJ8)
CAVSEDTGFQKLVF

SEQ ID NO: 268754 - protein, 16 aa, Homo sapiens
  CDR3 for beta chain variable domain of TCR clone 134377 (TRBV7-8, TRBJ2-4)
CASSAERTLAKNIQYF

SEQ ID NO: 268755 - protein, 11 aa, Homo sapiens
  CDR3 for alpha chain variable domain of TCR clone 134378 (TRAV12-2, TRAJ31)
CAVTRWARLVF

SEQ ID NO: 268756 - protein, 15 aa, Homo sapiens
  CDR3 for beta chain variable domain of TCR clone 134378 (TRBV19, TRBJ2-7)
CASSIGGGLVNEQYF

SEQ ID NO: 268757 - protein, 12 aa, Homo sapiens
  CDR3 for alpha chain variable domain of TCR clone 134379 (TRAV12-3, TRAJ43)
CAISSNNNDMRF

SEQ ID NO: 268758 - protein, 15 aa, Homo sapiens
  CDR3 for beta chain variable domain of TCR clone 134379 (TRBV20-1, TRBJ2-2)
CSAIPGHSNTGELFF

SEQ ID NO: 268759 - protein, 14 aa, Homo sapiens
  CDR3 for alpha chain variable domain of TCR clone 134380 (TRAV17, TRAJ12)
CAILPMDSSYKLIF

SEQ ID NO: 268760 - protein, 14 aa, Homo sapiens
  CDR3 for beta chain variable domain of TCR clone 134380 (TRBV7-6, TRBJ2-3)
CASSLGTVTDTQYF

SEQ ID NO: 268761 - protein, 13 aa, Homo sapiens
  CDR3 for alpha chain variable domain of TCR clone 134381 (TRAV21, TRAJ56)
CAVRLGANSKLTF

SEQ ID NO: 268762 - protein, 14 aa, Homo sapiens
  CDR3 for beta chain variable domain of TCR clone 134381 (TRBV25-1, TRBJ1-1)
CASTHLGGNTEAFF

SEQ ID NO: 268763 - protein, 13 aa, Homo sapiens
  CDR3 for alpha chain variable domain of TCR clone 134382 (TRAV17, TRAJ26)
CATVDNYGQNFVF

SEQ ID NO: 268764 - protein, 16 aa, Homo sapiens
  CDR3 for beta chain variable domain of TCR clone 134382 (TRBV2, TRBJ2-1)
CASSVGGSLSYDEQFF

SEQ ID NO: 268765 - protein, 15 aa, Homo sapiens
  CDR3 for alpha chain variable domain of TCR clone 134383 (TRAV41, TRAJ45)
CAASYSGGGADGLTF

SEQ ID NO: 268766 - protein, 12 aa, Homo sapiens
  CDR3 for beta chain variable domain of TCR clone 134383 (TRBV11-2, TRBJ2-2)
CASSLGGGELFF

SEQ ID NO: 268767 - protein, 11 aa, Homo sapiens
  CDR3 for alpha chain variable domain of TCR clone 134384 (TRAV3, TRAJ21)
CAVCNFNKFYF

SEQ ID NO: 268768 - protein, 16 aa, Homo sapiens
  CDR3 for beta chain variable domain of TCR clone 134384 (TRBV19, TRBJ2-1)
CASSKAGPSSYNEQFF

SEQ ID NO: 268769 - protein, 12 aa, Homo sapiens
  CDR3 for alpha chain variable domain of TCR clone 134385 (TRAV16, TRAJ10)
CSRTGGGNKLTF

SEQ ID NO: 268770 - protein, 19 aa, Homo sapiens
  CDR3 for beta chain variable domain of TCR clone 134385 (TRBV25-1, TRBJ2-2)
RAILVYRVDRGRKTGELFF

SEQ ID NO: 268771 - protein, 14 aa, Homo sapiens
  CDR3 for alpha chain variable domain of TCR clone 134386 (TRAV1-2, TRAJ8)
CAVREDTGFQKLVF

SEQ ID NO: 268772 - protein, 15 aa, Homo sapiens
  CDR3 for beta chain variable domain of TCR clone 134386 (TRBV7-9, TRBJ1-2)
CASSDIGGIVYGYTF

SEQ ID NO: 268773 - protein, 15 aa, Homo sapiens
  CDR3 for alpha chain variable domain of TCR clone 134387 (TRAV2, TRAJ15)
CAVEDRGQAGTALIF

SEQ ID NO: 268774 - protein, 14 aa, Homo sapiens
  CDR3 for beta chain variable domain of TCR clone 134387 (TRBV12-4, TRBJ1-6)
CASNLQGKGSPLHF

SEQ ID NO: 268775 - protein, 12 aa, Homo sapiens
  CDR3 for alpha chain variable domain of TCR clone 134388 (TRAV12-3, TRAJ20)
RAMVRGDYKLSF

SEQ ID NO: 268776 - protein, 16 aa, Homo sapiens
  CDR3 for beta chain variable domain of TCR clone 134388 (TRBV5-1, TRBJ2-3)
CASSLGLAVYTDTQYF

SEQ ID NO: 268777 - protein, 16 aa, Homo sapiens
  CDR3 for alpha chain variable domain of TCR clone 134389 (TRAV16, TRAJ4)
CALSRMFSGGYNKLIF

SEQ ID NO: 268778 - protein, 14 aa, Homo sapiens
  CDR3 for beta chain variable domain of TCR clone 134389 (TRBV4-2, TRBJ2-3)
CASSQERGTDTQYF

SEQ ID NO: 268779 - protein, 11 aa, Homo sapiens
  CDR3 for alpha chain variable domain of TCR clone 134390 (TRAV17, TRAJ9)
CATTGGFKTIF

SEQ ID NO: 268780 - protein, 14 aa, Homo sapiens
  CDR3 for beta chain variable domain of TCR clone 134390 (TRBV7-9, TRBJ2-2)
CASSGLADTGELFY

SEQ ID NO: 268781 - protein, 12 aa, Homo sapiens
  CDR3 for alpha chain variable domain of TCR clone 134391 (TRAV17, TRAJ57)
CATDGGSEKLVF

SEQ ID NO: 268782 - protein, 12 aa, Homo sapiens
  CDR3 for beta chain variable domain of TCR clone 134391 (TRBV29-1, TRBJ2-2)
CSVDKYTGGLFF

SEQ ID NO: 268783 - protein, 23 aa, Homo sapiens
  CDR3 for alpha chain variable domain of TCR clone 134392 (TRAV26-1, TRAJ38)
CIADNAGNNHIQNPDPAVYQLSD

SEQ ID NO: 268784 - protein, 16 aa, Homo sapiens
  CDR3 for beta chain variable domain of TCR clone 134392 (TRBV7-9, TRBJ1-2)
CASSLGFSSGEDGYTF

SEQ ID NO: 268785 - protein, 14 aa, Homo sapiens
  CDR3 for alpha chain variable domain of TCR clone 134393 (TRAV1-2, TRAJ16)
CAVNRFSDGQKLLF

SEQ ID NO: 268786 - protein, 14 aa, Homo sapiens
  CDR3 for beta chain variable domain of TCR clone 134393 (TRBV15, TRBJ2-1)
CATSGVEDYNEQFF

SEQ ID NO: 268787 - protein, 11 aa, Homo sapiens
  CDR3 for alpha chain variable domain of TCR clone 134394 (TRAV2, TRAJ13)
CASGGYQKVTF

SEQ ID NO: 268788 - protein, 15 aa, Homo sapiens
  CDR3 for beta chain variable domain of TCR clone 134394 (TRBV11-3, TRBJ2-2)
CASSLGGRPTGELFF

SEQ ID NO: 268789 - protein, 12 aa, Homo sapiens
  CDR3 for alpha chain variable domain of TCR clone 134395 (TRAV17, TRAJ49)
CATVTTGNQFYF

SEQ ID NO: 268790 - protein, 13 aa, Homo sapiens
  CDR3 for beta chain variable domain of TCR clone 134395 (TRBV7-9, TRBJ1-2)
CASSLKQNYGYAF

SEQ ID NO: 268791 - protein, 14 aa, Homo sapiens
  CDR3 for alpha chain variable domain of TCR clone 134396 (TRAV17, TRAJ56)
CATVPAGANSKRTF

SEQ ID NO: 268792 - protein, 13 aa, Homo sapiens
  CDR3 for beta chain variable domain of TCR clone 134396 (TRBV12-4, TRBJ2-2)
CASSITGSGELFF

SEQ ID NO: 268793 - protein, 14 aa, Homo sapiens
  CDR3 for alpha chain variable domain of TCR clone 134397 (TRAV13-2, TRAJ43)
CAEIPTYNNNDMRF

SEQ ID NO: 268794 - protein, 16 aa, Homo sapiens
  CDR3 for beta chain variable domain of TCR clone 134397 (TRBV6-1, TRBJ2-5)
CASSETLDRGAETQYF

SEQ ID NO: 268795 - protein, 13 aa, Homo sapiens
  CDR3 for alpha chain variable domain of TCR clone 134398 (TRAV12-3, TRAJ13)
CAMTSGGYQKVTF

SEQ ID NO: 268796 - protein, 13 aa, Homo sapiens
  CDR3 for beta chain variable domain of TCR clone 134398 (TRBV20-1, TRBJ2-2)
CSALSGWAGELFF

SEQ ID NO: 268797 - protein, 14 aa, Homo sapiens
  CDR3 for alpha chain variable domain of TCR clone 134399 (TRAV17, TRAJ15)
CATAPNQAGTAPIF

SEQ ID NO: 268798 - protein, 14 aa, Homo sapiens
  CDR3 for beta chain variable domain of TCR clone 134399 (TRBV19, TRBJ2-7)
CASSMGQGAIEQYF

SEQ ID NO: 268799 - protein, 14 aa, Homo sapiens
  CDR3 for alpha chain variable domain of TCR clone 134400 (TRAV9-2, TRAJ39)
CALYIYNAGNLLTF

SEQ ID NO: 268800 - protein, 13 aa, Homo sapiens
  CDR3 for beta chain variable domain of TCR clone 134400 (TRBV7-9, TRBJ1-2)
CASSLKQNYGYTF

SEQ ID NO: 268801 - protein, 15 aa, Homo sapiens
  CDR3 for alpha chain variable domain of TCR clone 134401 (TRAV3, TRAJ13)
CAVRVYSGGYRKVTF

SEQ ID NO: 268802 - protein, 13 aa, Homo sapiens
  CDR3 for beta chain variable domain of TCR clone 134401 (TRBV18, TRBJ1-1)
CASSPGKNTEAFF

SEQ ID NO: 268803 - protein, 14 aa, Homo sapiens
  CDR3 for alpha chain variable domain of TCR clone 134402 (TRAV12-2, TRAJ44)
CAVNLAGTASKLTF

SEQ ID NO: 268804 - protein, 15 aa, Homo sapiens
  CDR3 for beta chain variable domain of TCR clone 134402 (TRBV5-1, TRBJ2-1)
CASSPPRAPYNEQFF

SEQ ID NO: 268805 - protein, 13 aa, Homo sapiens
  CDR3 for alpha chain variable domain of TCR clone 134403 (TRAV22, TRAJ12)
FAGRMDSSYKLIF

SEQ ID NO: 268806 - protein, 15 aa, Homo sapiens
  CDR3 for beta chain variable domain of TCR clone 134403 (TRBV10-1, TRBJ2-1)
CASSEWRGTYNEQFF

SEQ ID NO: 268807 - protein, 14 aa, Homo sapiens
  CDR3 for alpha chain variable domain of TCR clone 134404 (TRAV8-4, TRAJ9)
CAVRINTGGFKTIF

SEQ ID NO: 268808 - protein, 19 aa, Homo sapiens
  CDR3 for beta chain variable domain of TCR clone 134404 (TRBV7-2, TRBJ2-5)
CASGTSGGTPPLGSETQYF

SEQ ID NO: 268809 - protein, 15 aa, Homo sapiens
  CDR3 for alpha chain variable domain of TCR clone 134405 (TRAV21, TRAJ53)
CATLNSGGSNYKLTF

SEQ ID NO: 268810 - protein, 15 aa, Homo sapiens
  CDR3 for beta chain variable domain of TCR clone 134405 (TRBV28, TRBJ2-5)
CASSPPWSYQETQYF

SEQ ID NO: 268811 - protein, 13 aa, Homo sapiens
  CDR3 for alpha chain variable domain of TCR clone 134406 (TRAV21, TRAJ20)
CAVGLRVDYELSF

SEQ ID NO: 268812 - protein, 11 aa, Homo sapiens
  CDR3 for beta chain variable domain of TCR clone 134406 (TRBV29-1, TRBJ2-5)
CSEDRTGTQYF

SEQ ID NO: 268813 - protein, 16 aa, Homo sapiens
  CDR3 for alpha chain variable domain of TCR clone 134407 (TRAV8-2, TRAJ7)
CVVSEGPYYGNNRLAF

SEQ ID NO: 268814 - protein, 16 aa, Homo sapiens
  CDR3 for beta chain variable domain of TCR clone 134407 (TRBV7-3, TRBJ2-2)
CASSLKRGTLSGELFF

SEQ ID NO: 268815 - protein, 15 aa, Homo sapiens
  CDR3 for alpha chain variable domain of TCR clone 134408 (TRAV1-2, TRAJ18)
CAWEGRGSTLGRLYF

SEQ ID NO: 268816 - protein, 14 aa, Homo sapiens
  CDR3 for beta chain variable domain of TCR clone 134408 (TRBV7-6, TRBJ2-3)
CASSLGTVTDTQYF

SEQ ID NO: 268817 - protein, 14 aa, Homo sapiens
  CDR3 for alpha chain variable domain of TCR clone 134409 (TRAV26-1, TRAJ49)
CIVKLTNTGNQFYF

SEQ ID NO: 268818 - protein, 13 aa, Homo sapiens
  CDR3 for beta chain variable domain of TCR clone 134409 (TRBV4-1, TRBJ2-7)
CASSQGQAYEQYF

SEQ ID NO: 268819 - protein, 13 aa, Homo sapiens
  CDR3 for alpha chain variable domain of TCR clone 134410 (TRAV8-3, TRAJ48)
CAVVPFGNDKLTF

SEQ ID NO: 268820 - protein, 19 aa, Homo sapiens
  CDR3 for beta chain variable domain of TCR clone 134410 (TRBV25-1, TRBJ2-2)
CAILVYRVDRGRKTGELFF

SEQ ID NO: 268821 - protein, 11 aa, Homo sapiens
  CDR3 for alpha chain variable domain of TCR clone 134411 (TRAV23/DV6, TRAJ58)
CAARLLRGETS

SEQ ID NO: 268822 - protein, 12 aa, Homo sapiens
  CDR3 for beta chain variable domain of TCR clone 134411 (TRBV11-2, TRBJ2-1)
CASSPGNNEQFF

SEQ ID NO: 268823 - protein, 14 aa, Homo sapiens
  CDR3 for alpha chain variable domain of TCR clone 134412 (TRAV23/DV6, TRAJ4)
CAAKLSGGYNKLIF

SEQ ID NO: 268824 - protein, 11 aa, Homo sapiens
  CDR3 for beta chain variable domain of TCR clone 134412 (TRBV7-9, TRBJ2-3)
CASSPTDTQYF

SEQ ID NO: 268825 - protein, 12 aa, Homo sapiens
  CDR3 for alpha chain variable domain of TCR clone 134413 (TRAV1-2, TRAJ33)
CAALDSNYQLIW

SEQ ID NO: 268826 - protein, 17 aa, Homo sapiens
  CDR3 for beta chain variable domain of TCR clone 134413 (TRBV25-1, TRBJ1-2)
CASSEFGSATTNYGDTF

SEQ ID NO: 268827 - protein, 16 aa, Homo sapiens
  CDR3 for alpha chain variable domain of TCR clone 134414 (TRAV26-1, TRAJ36)
CIVRAPDQTGANNLFF

SEQ ID NO: 268828 - protein, 21 aa, Homo sapiens
  CDR3 for beta chain variable domain of TCR clone 134414 (TRBV6-1, TRBJ1-1)
CASSGVGNYKGISGFDTEAFF

SEQ ID NO: 268829 - protein, 10 aa, Homo sapiens
  CDR3 for alpha chain variable domain of TCR clone 134415 (TRAV8-4, TRAJ43)
CAVSADDMRF

SEQ ID NO: 268830 - protein, 15 aa, Homo sapiens
  CDR3 for beta chain variable domain of TCR clone 134415 (TRBV5-1, TRBJ2-3)
CASSVTSGSTDTQDF

SEQ ID NO: 268831 - protein, 13 aa, Homo sapiens
  CDR3 for alpha chain variable domain of TCR clone 134416 (TRAV12-2, TRAJ15)
CAVFNQAGTAPIF

SEQ ID NO: 268832 - protein, 15 aa, Homo sapiens
  CDR3 for beta chain variable domain of TCR clone 134416 (TRBV7-8, TRBJ1-5)
CASSRGGGADQPQHF

SEQ ID NO: 268833 - protein, 11 aa, Homo sapiens
  CDR3 for alpha chain variable domain of TCR clone 134417 (TRAV3, TRAJ21)
CAVGNFNKFYF

SEQ ID NO: 268834 - protein, 15 aa, Homo sapiens
  CDR3 for beta chain variable domain of TCR clone 134417 (TRBV29-1, TRBJ2-1)
CSVEGGPASYNEQLF

SEQ ID NO: 268835 - protein, 18 aa, Homo sapiens
  CDR3 for alpha chain variable domain of TCR clone 134418 (TRAV21, TRAJ52)
CAVRPSPAGGTSYGKLTF

SEQ ID NO: 268836 - protein, 14 aa, Homo sapiens
  CDR3 for beta chain variable domain of TCR clone 134418 (TRBV7-2, TRBJ2-7)
RASSPKTSFYEQYF

SEQ ID NO: 268837 - protein, 15 aa, Homo sapiens
  CDR3 for alpha chain variable domain of TCR clone 134419 (TRAV29/DV5, TRAJ24)
CAASGATDSWGKFQF

SEQ ID NO: 268838 - protein, 12 aa, Homo sapiens
  CDR3 for beta chain variable domain of TCR clone 134419 (TRBV11-2, TRBJ2-2)
CASSLPTGELFV

SEQ ID NO: 268839 - protein, 11 aa, Homo sapiens
  CDR3 for alpha chain variable domain of TCR clone 134420 (TRAV1-1, TRAJ23)
CAVRQGGKLIF

SEQ ID NO: 268840 - protein, 17 aa, Homo sapiens
  CDR3 for beta chain variable domain of TCR clone 134420 (TRBV15, TRBJ1-1)
CATSRVGGADGDTEAFF

SEQ ID NO: 268841 - protein, 13 aa, Homo sapiens
  CDR3 for alpha chain variable domain of TCR clone 134421 (TRAV21, TRAJ20)
CAVGLRVDYKLSF

SEQ ID NO: 268842 - protein, 14 aa, Homo sapiens
  CDR3 for beta chain variable domain of TCR clone 134421 (TRBV11-2, TRBJ2-1)
CASTTGQGNNEQFF

SEQ ID NO: 268843 - protein, 13 aa, Homo sapiens
  CDR3 for alpha chain variable domain of TCR clone 134422 (TRAV12-1, TRAJ40)
CVVPTSGTYKYIF

SEQ ID NO: 268844 - protein, 14 aa, Homo sapiens
  CDR3 for beta chain variable domain of TCR clone 134422 (TRBV4-2, TRBJ2-1)
CASGLDRAYNEQFF

SEQ ID NO: 268845 - protein, 12 aa, Homo sapiens
  CDR3 for alpha chain variable domain of TCR clone 134423 (TRAV12-3, TRAJ17)
CAMTLTGNKLTF

SEQ ID NO: 268846 - protein, 16 aa, Homo sapiens
  CDR3 for beta chain variable domain of TCR clone 134423 (TRBV20-1, TRBJ2-2)
CSASASGIPGAGELFF

SEQ ID NO: 268847 - protein, 13 aa, Homo sapiens
  CDR3 for alpha chain variable domain of TCR clone 134424 (TRAV8-3, TRAJ44)
CAVVPGTASKLTF

SEQ ID NO: 268848 - protein, 16 aa, Homo sapiens
  CDR3 for beta chain variable domain of TCR clone 134424 (TRBV7-9, TRBJ1-2)
CASSLGFSSGEDGYTF

SEQ ID NO: 268849 - protein, 11 aa, Homo sapiens
  CDR3 for alpha chain variable domain of TCR clone 134425 (TRAV12-2, TRAJ49)
CALQGGNQFYF

SEQ ID NO: 268850 - protein, 13 aa, Homo sapiens
  CDR3 for beta chain variable domain of TCR clone 134425 (TRBV4-1, TRBJ1-1)
CAGSQLGTGEAFF

SEQ ID NO: 268851 - protein, 13 aa, Homo sapiens
  CDR3 for alpha chain variable domain of TCR clone 134426 (TRAV21, TRAJ15)
CAVANQAGTALNF

SEQ ID NO: 268852 - protein, 14 aa, Homo sapiens
  CDR3 for beta chain variable domain of TCR clone 134426 (TRBV27, TRBJ2-2)
CASSLGAATGELFF

SEQ ID NO: 268853 - protein, 12 aa, Homo sapiens
  CDR3 for alpha chain variable domain of TCR clone 134427 (TRAV12-2, TRAJ16)
CAVNLDVQKLLF

SEQ ID NO: 268854 - protein, 16 aa, Homo sapiens
  CDR3 for beta chain variable domain of TCR clone 134427 (TRBV7-9, TRBJ2-1)
CASSLVLTGQGNEQFF

SEQ ID NO: 268855 - protein, 13 aa, Homo sapiens
  CDR3 for alpha chain variable domain of TCR clone 134428 (TRAV2, TRAJ40)
CAVVTSGTYKYIS

SEQ ID NO: 268856 - protein, 14 aa, Homo sapiens
  CDR3 for beta chain variable domain of TCR clone 134428 (TRBV7-9, TRBJ2-1)
CASSSMVGFGEQFF

SEQ ID NO: 268857 - protein, 13 aa, Homo sapiens
  CDR3 for alpha chain variable domain of TCR clone 134429 (TRAV22, TRAJ29)
CAVGGSGNTPLVF

SEQ ID NO: 268858 - protein, 17 aa, Homo sapiens
  CDR3 for beta chain variable domain of TCR clone 134429 (TRBV28, TRBJ2-1)
CASSSARQALTYNEQFF

SEQ ID NO: 268859 - protein, 16 aa, Homo sapiens
  CDR3 for alpha chain variable domain of TCR clone 134430 (TRAV3, TRAJ5)
CAVRNLMDTGRRALNF

SEQ ID NO: 268860 - protein, 16 aa, Homo sapiens
  CDR3 for beta chain variable domain of TCR clone 134430 (TRBV12-5, TRBJ2-5)
CASGPRTSGNQETQYF

SEQ ID NO: 268861 - protein, 17 aa, Homo sapiens
  CDR3 for alpha chain variable domain of TCR clone 134431 (TRAV3, TRAJ6)
CAVRDGPRAGGSYIPTF

SEQ ID NO: 268862 - protein, 12 aa, Homo sapiens
  CDR3 for beta chain variable domain of TCR clone 134431 (TRBV6-5, TRBJ1-1)
CASSAEGAEAFF

SEQ ID NO: 268863 - protein, 13 aa, Homo sapiens
  CDR3 for alpha chain variable domain of TCR clone 134432 (TRAV27, TRAJ3)
ASLRGSSASKIIF

SEQ ID NO: 268864 - protein, 14 aa, Homo sapiens
  CDR3 for beta chain variable domain of TCR clone 134432 (TRBV12-5, TRBJ2-5)
CASGSRTHQETQYF

SEQ ID NO: 268865 - protein, 11 aa, Homo sapiens
  CDR3 for alpha chain variable domain of TCR clone 134433 (TRAV3, TRAJ21)
CAVGNFNKFYF

SEQ ID NO: 268866 - protein, 17 aa, Homo sapiens
  CDR3 for beta chain variable domain of TCR clone 134433 (TRBV28, TRBJ2-5)
CASSTPEGDALQETQYF

SEQ ID NO: 268867 - protein, 16 aa, Homo sapiens
  CDR3 for alpha chain variable domain of TCR clone 134434 (TRAV14/DV4, TRAJ10)
CAMREGRPGGGNKLTF

SEQ ID NO: 268868 - protein, 14 aa, Homo sapiens
  CDR3 for beta chain variable domain of TCR clone 134434 (TRBV20-1, TRBJ2-7)
CSAKRGRSSYEQYF

SEQ ID NO: 268869 - protein, 13 aa, Homo sapiens
  CDR3 for alpha chain variable domain of TCR clone 134435 (TRAV21, TRAJ27)
CAARPGNAGKSTF

SEQ ID NO: 268870 - protein, 14 aa, Homo sapiens
  CDR3 for beta chain variable domain of TCR clone 134435 (TRBV11-2, TRBJ2-3)
CASSRLARTDTQYF

SEQ ID NO: 268871 - protein, 15 aa, Homo sapiens
  CDR3 for alpha chain variable domain of TCR clone 134436 (TRAV14/DV4, TRAJ10)
CAMRELAGGGNKLTF

SEQ ID NO: 268872 - protein, 18 aa, Homo sapiens
  CDR3 for beta chain variable domain of TCR clone 134436 (TRBV7-9, TRBJ2-7)
CASSLTTSGSRTWYEQYF

SEQ ID NO: 268873 - protein, 15 aa, Homo sapiens
  CDR3 for alpha chain variable domain of TCR clone 134437 (TRAV8-6, TRAJ6)
CAVSFTSGGSYIPTF

SEQ ID NO: 268874 - protein, 14 aa, Homo sapiens
  CDR3 for beta chain variable domain of TCR clone 134437 (TRBV4-1, TRBJ2-2)
CASSQAVNTGELFF

SEQ ID NO: 268875 - protein, 18 aa, Homo sapiens
  CDR3 for alpha chain variable domain of TCR clone 134438 (TRAV12-2, )
CAVEDIQNPDPAVYQLRD

SEQ ID NO: 268876 - protein, 16 aa, Homo sapiens
  CDR3 for beta chain variable domain of TCR clone 134438 (TRBV6-1, TRBJ1-2)
FASSGAWQGRSHGYTF

SEQ ID NO: 268877 - protein, 13 aa, Homo sapiens
  CDR3 for alpha chain variable domain of TCR clone 134439 (TRAV38-2/DV8, TRAJ53)
CASGGGRNYKLTF

SEQ ID NO: 268878 - protein, 16 aa, Homo sapiens
  CDR3 for beta chain variable domain of TCR clone 134439 (TRBV28, TRBJ1-5)
CASRFRGAVQNQPQHF

SEQ ID NO: 268879 - protein, 13 aa, Homo sapiens
  CDR3 for alpha chain variable domain of TCR clone 134440 (TRAV3, TRAJ20)
CAVRSLNDYKLSL

SEQ ID NO: 268880 - protein, 13 aa, Homo sapiens
  CDR3 for beta chain variable domain of TCR clone 134440 (TRBV6-1, TRBJ2-1)
CAGMDPTNNEQFF

SEQ ID NO: 268881 - protein, 12 aa, Homo sapiens
  CDR3 for alpha chain variable domain of TCR clone 134441 (TRAV35, TRAJ12)
CAGMDSSYKLIF

SEQ ID NO: 268882 - protein, 14 aa, Homo sapiens
  CDR3 for beta chain variable domain of TCR clone 134441 (TRBV28, TRBJ2-5)
CASSLYRGTETQYC

SEQ ID NO: 268883 - protein, 14 aa, Homo sapiens
  CDR3 for alpha chain variable domain of TCR clone 134442 (TRAV27, TRAJ58)
CAGDGETSGSRLTF

SEQ ID NO: 268884 - protein, 15 aa, Homo sapiens
  CDR3 for beta chain variable domain of TCR clone 134442 (TRBV7-9, TRBJ1-5)
CASSQGHQPNQPQHF

SEQ ID NO: 268885 - protein, 12 aa, Homo sapiens
  CDR3 for alpha chain variable domain of TCR clone 134443 (TRAV12-1, TRAJ40)
CVVYSGTYKYIF

SEQ ID NO: 268886 - protein, 14 aa, Homo sapiens
  CDR3 for beta chain variable domain of TCR clone 134443 (TRBV7-9, TRBJ2-5)
CASGLDTAQETQYF

SEQ ID NO: 268887 - protein, 12 aa, Homo sapiens
  CDR3 for alpha chain variable domain of TCR clone 134444 (TRAV12-3, TRAJ17)
CAMTLTGNKLTF

SEQ ID NO: 268888 - protein, 18 aa, Homo sapiens
  CDR3 for beta chain variable domain of TCR clone 134444 (TRBV25-1, TRBJ1-2)
CASSGLQNGQGLIFGYTF

SEQ ID NO: 268889 - protein, 13 aa, Homo sapiens
  CDR3 for alpha chain variable domain of TCR clone 134445 (TRAV41, TRAJ40)
CAVIPSGTYKYIF

SEQ ID NO: 268890 - protein, 14 aa, Homo sapiens
  CDR3 for beta chain variable domain of TCR clone 134445 (TRBV7-2, TRBJ2-1)
CASSLGVGYNEQFF

SEQ ID NO: 268891 - protein, 13 aa, Homo sapiens
  CDR3 for alpha chain variable domain of TCR clone 134446 (TRAV36/DV7, TRAJ37)
CAVFSSNTGKLIF

SEQ ID NO: 268892 - protein, 17 aa, Homo sapiens
  CDR3 for beta chain variable domain of TCR clone 134446 (TRBV13, TRBJ2-3)
CASSLSRVAGGRNTQYF

SEQ ID NO: 268893 - protein, 11 aa, Homo sapiens
  CDR3 for alpha chain variable domain of TCR clone 134447 (TRAV21, TRAJ11)
CAVNGYSTLTF

SEQ ID NO: 268894 - protein, 15 aa, Homo sapiens
  CDR3 for beta chain variable domain of TCR clone 134447 (TRBV20-1, TRBJ2-7)
CSAESGTSGSYEQYF

SEQ ID NO: 268895 - protein, 13 aa, Homo sapiens
  CDR3 for alpha chain variable domain of TCR clone 134448 (TRAV27, TRAJ41)
CAGEGNSGYALNL

SEQ ID NO: 268896 - protein, 14 aa, Homo sapiens
  CDR3 for beta chain variable domain of TCR clone 134448 (TRBV7-2, TRBJ1-1)
RASSFLTGTTEAFF

SEQ ID NO: 268897 - protein, 17 aa, Homo sapiens
  CDR3 for alpha chain variable domain of TCR clone 134449 (TRAV3, TRAJ6)
CAVRDGPRAGGSYIPTF

SEQ ID NO: 268898 - protein, 17 aa, Homo sapiens
  CDR3 for beta chain variable domain of TCR clone 134449 (TRBV4-2, TRBJ1-1)
CASTQFGGGSGNTEAFF

SEQ ID NO: 268899 - protein, 12 aa, Homo sapiens
  CDR3 for alpha chain variable domain of TCR clone 134450 (TRAV16, TRAJ21)
CALLGNFNKFYF

SEQ ID NO: 268900 - protein, 14 aa, Homo sapiens
  CDR3 for beta chain variable domain of TCR clone 134450 (TRBV11-2, TRBJ2-5)
CASSRTRGIETQYF

SEQ ID NO: 268901 - protein, 15 aa, Homo sapiens
  CDR3 for alpha chain variable domain of TCR clone 134451 (TRAV35, TRAJ23)
CAGPLGNNQGGKLIF

SEQ ID NO: 268902 - protein, 14 aa, Homo sapiens
  CDR3 for beta chain variable domain of TCR clone 134451 (TRBV7-9, TRBJ1-1)
CASTTLQSYTEAFF

SEQ ID NO: 268903 - protein, 12 aa, Homo sapiens
  CDR3 for alpha chain variable domain of TCR clone 134452 (TRAV17, TRAJ57)
CAMDGGSEKLVF

SEQ ID NO: 268904 - protein, 15 aa, Homo sapiens
  CDR3 for beta chain variable domain of TCR clone 134452 (TRBV7-3, TRBJ2-7)
CASSLTGQGKYEQYF

SEQ ID NO: 268905 - protein, 17 aa, Homo sapiens
  CDR3 for alpha chain variable domain of TCR clone 134453 (TRAV12-2, TRAJ6)
CAPQGPPRAGGSYILTF

SEQ ID NO: 268906 - protein, 16 aa, Homo sapiens
  CDR3 for beta chain variable domain of TCR clone 134453 (TRBV19, TRBJ2-2)
CASSTARASNTGELFF

SEQ ID NO: 268907 - protein, 20 aa, Homo sapiens
  CDR3 for alpha chain variable domain of TCR clone 134454 (TRAV27, TRAJ10)
ASTSVPSRGILTGGGNKPTF

SEQ ID NO: 268908 - protein, 15 aa, Homo sapiens
  CDR3 for beta chain variable domain of TCR clone 134454 (TRBV9, TRBJ2-3)
CASSLEGGLTDTQYF

SEQ ID NO: 268909 - protein, 16 aa, Homo sapiens
  CDR3 for alpha chain variable domain of TCR clone 134455 (TRAV30, TRAJ24)
CGTEIVDADSCGKFQF

SEQ ID NO: 268910 - protein, 15 aa, Homo sapiens
  CDR3 for beta chain variable domain of TCR clone 134455 (TRBV27, TRBJ2-1)
CASSNGGGSSNEQFF

SEQ ID NO: 268911 - protein, 11 aa, Homo sapiens
  CDR3 for alpha chain variable domain of TCR clone 134456 (TRAV22, TRAJ49)
FAVLTGNQFYF

SEQ ID NO: 268912 - protein, 11 aa, Homo sapiens
  CDR3 for beta chain variable domain of TCR clone 134456 (TRBV5-6, TRBJ2-1)
CASSLGGEQFF

SEQ ID NO: 268913 - protein, 15 aa, Homo sapiens
  CDR3 for alpha chain variable domain of TCR clone 134457 (TRAV2, TRAJ24)
CDLQLTAGGNSSLEQ

SEQ ID NO: 268914 - protein, 13 aa, Homo sapiens
  CDR3 for beta chain variable domain of TCR clone 134457 (TRBV7-9, TRBJ1-2)
CASSLKQNYGYTF

SEQ ID NO: 268915 - protein, 19 aa, Homo sapiens
  CDR3 for alpha chain variable domain of TCR clone 134458 (TRAV40, )
CLPIPDIQNPDPAVYQLRD

SEQ ID NO: 268916 - protein, 15 aa, Homo sapiens
  CDR3 for beta chain variable domain of TCR clone 134458 (TRBV2, TRBJ1-2)
CASIEIGGANYGYTF

SEQ ID NO: 268917 - protein, 13 aa, Homo sapiens
  CDR3 for alpha chain variable domain of TCR clone 134459 (TRAV13-2, TRAJ53)
CAENMGSNYKLTF

SEQ ID NO: 268918 - protein, 13 aa, Homo sapiens
  CDR3 for beta chain variable domain of TCR clone 134459 (TRBV20-1, TRBJ1-1)
CSAPPGGHTEAFF

SEQ ID NO: 268919 - protein, 13 aa, Homo sapiens
  CDR3 for alpha chain variable domain of TCR clone 134460 (TRAV13-2, TRAJ22)
CLGWISSARQLTF

SEQ ID NO: 268920 - protein, 15 aa, Homo sapiens
  CDR3 for beta chain variable domain of TCR clone 134460 (TRBV7-2, TRBJ2-3)
CASSATGLETDTQYF

SEQ ID NO: 268921 - protein, 20 aa, Homo sapiens
  CDR3 for alpha chain variable domain of TCR clone 134461 (TRAV27, TRAJ53)
QASTSVQSRNSGGSNYKLTF

SEQ ID NO: 268922 - protein, 14 aa, Homo sapiens
  CDR3 for beta chain variable domain of TCR clone 134461 (TRBV11-1, TRBJ2-7)
CASTFAVPSYEQYF

SEQ ID NO: 268923 - protein, 14 aa, Homo sapiens
  CDR3 for alpha chain variable domain of TCR clone 134462 (TRAV26-1, TRAJ38)
CIADNAGNKRKLIW

SEQ ID NO: 268924 - protein, 13 aa, Homo sapiens
  CDR3 for beta chain variable domain of TCR clone 134462 (TRBV7-9, TRBJ2-3)
CASSPGSTDTQYF

SEQ ID NO: 268925 - protein, 16 aa, Homo sapiens
  CDR3 for alpha chain variable domain of TCR clone 134463 (TRAV8-3, TRAJ8)
CAVPRDGNTGFQKLVF

SEQ ID NO: 268926 - protein, 15 aa, Homo sapiens
  CDR3 for beta chain variable domain of TCR clone 134463 (TRBV6-1, TRBJ2-6)
CASSSRPSGADVLTF

SEQ ID NO: 268927 - protein, 13 aa, Homo sapiens
  CDR3 for alpha chain variable domain of TCR clone 134464 (TRAV12-2, TRAJ39)
CAVNNNAGNMLTF

SEQ ID NO: 268928 - protein, 16 aa, Homo sapiens
  CDR3 for beta chain variable domain of TCR clone 134464 (TRBV7-3, TRBJ2-2)
CASSLKRGTLSGELFF

SEQ ID NO: 268929 - protein, 15 aa, Homo sapiens
  CDR3 for alpha chain variable domain of TCR clone 134465 (TRAV27, TRAJ38)
CAARRNAGNNRKLIW

SEQ ID NO: 268930 - protein, 13 aa, Homo sapiens
  CDR3 for beta chain variable domain of TCR clone 134465 (TRBV12-5, TRBJ2-3)
CACGDRQSDTQYF

SEQ ID NO: 268931 - protein, 15 aa, Homo sapiens
  CDR3 for alpha chain variable domain of TCR clone 134466 (TRAV1-2, TRAJ30)
CAVRPHGNRDDKIIF

SEQ ID NO: 268932 - protein, 13 aa, Homo sapiens
  CDR3 for beta chain variable domain of TCR clone 134466 (TRBV4-1, TRBJ2-7)
CASSRGQAYEQYF

SEQ ID NO: 268933 - protein, 18 aa, Homo sapiens
  CDR3 for alpha chain variable domain of TCR clone 134467 (TRAV29/DV5, TRAJ52)
CAAGFRGAGGTSYGKLTF

SEQ ID NO: 268934 - protein, 16 aa, Homo sapiens
  CDR3 for beta chain variable domain of TCR clone 134467 (TRBV7-3, TRBJ2-2)
CASSLKRGTLSVELFF

SEQ ID NO: 268935 - protein, 10 aa, Homo sapiens
  CDR3 for alpha chain variable domain of TCR clone 134468 (TRAV12-3, TRAJ49)
CAMNDDQFYF

SEQ ID NO: 268936 - protein, 14 aa, Homo sapiens
  CDR3 for beta chain variable domain of TCR clone 134468 (TRBV7-9, TRBJ2-1)
CASSLVVGADEQFF

SEQ ID NO: 268937 - protein, 14 aa, Homo sapiens
  CDR3 for alpha chain variable domain of TCR clone 134469 (TRAV8-3, TRAJ9)
CAVVYNTGGFKTIF

SEQ ID NO: 268938 - protein, 14 aa, Homo sapiens
  CDR3 for beta chain variable domain of TCR clone 134469 (TRBV12-4, TRBJ1-1)
CASTWTGHDTEAFF

SEQ ID NO: 268939 - protein, 14 aa, Homo sapiens
  CDR3 for alpha chain variable domain of TCR clone 134470 (TRAV35, TRAJ33)
CAGSSQDSNYQLIW

SEQ ID NO: 268940 - protein, 15 aa, Homo sapiens
  CDR3 for beta chain variable domain of TCR clone 134470 (TRBV7-9, TRBJ2-7)
CASSLALAEAYEQYF

SEQ ID NO: 268941 - protein, 13 aa, Homo sapiens
  CDR3 for alpha chain variable domain of TCR clone 134471 (TRAV36/DV7, TRAJ37)
CAVFSSNTVKLIF

SEQ ID NO: 268942 - protein, 16 aa, Homo sapiens
  CDR3 for beta chain variable domain of TCR clone 134471 (TRBV3-1, TRBJ2-5)
CASSPGQFNGFGTQYF

SEQ ID NO: 268943 - protein, 13 aa, Homo sapiens
  CDR3 for alpha chain variable domain of TCR clone 134472 (TRAV12-1, TRAJ22)
CVVYSGSARQLIF

SEQ ID NO: 268944 - protein, 10 aa, Homo sapiens
  CDR3 for beta chain variable domain of TCR clone 134472 (TRBV6-3, TRBJ2-2)
CASRDGELFF

SEQ ID NO: 268945 - protein, 11 aa, Homo sapiens
  CDR3 for alpha chain variable domain of TCR clone 134473 (TRAV13-1, TRAJ49)
CACVGGNQFYF

SEQ ID NO: 268946 - protein, 14 aa, Homo sapiens
  CDR3 for beta chain variable domain of TCR clone 134473 (TRBV20-1, TRBJ2-1)
CSVGSGRLNNEQFF

SEQ ID NO: 268947 - protein, 12 aa, Homo sapiens
  CDR3 for alpha chain variable domain of TCR clone 134474 (TRAV13-1, TRAJ48)
CAANFGNEKLTF

SEQ ID NO: 268948 - protein, 11 aa, Homo sapiens
  CDR3 for beta chain variable domain of TCR clone 134474 (TRBV20-1, TRBJ1-5)
CSAQGDQAQHF

SEQ ID NO: 268949 - protein, 13 aa, Homo sapiens
  CDR3 for alpha chain variable domain of TCR clone 134475 (TRAV2, TRAJ15)
CAVASQAGTALIF

SEQ ID NO: 268950 - protein, 13 aa, Homo sapiens
  CDR3 for beta chain variable domain of TCR clone 134475 (TRBV19, TRBJ1-2)
CASSRGQVYGYTF

SEQ ID NO: 268951 - protein, 14 aa, Homo sapiens
  CDR3 for alpha chain variable domain of TCR clone 134476 (TRAV12-2, TRAJ40)
CAVKIPSGTYKYIF

SEQ ID NO: 268952 - protein, 14 aa, Homo sapiens
  CDR3 for beta chain variable domain of TCR clone 134476 (TRBV19, TRBJ2-1)
CASKDPSSYNEQFF

SEQ ID NO: 268953 - protein, 12 aa, Homo sapiens
  CDR3 for alpha chain variable domain of TCR clone 134477 (TRAV2, TRAJ33)
CAFMDSNYQLIW

SEQ ID NO: 268954 - protein, 14 aa, Homo sapiens
  CDR3 for beta chain variable domain of TCR clone 134477 (TRBV11-2, TRBJ1-5)
CASSLDRGRQPQHF

SEQ ID NO: 268955 - protein, 14 aa, Homo sapiens
  CDR3 for alpha chain variable domain of TCR clone 134478 (TRAV1-2, TRAJ8)
CAVREDTGFPKLVF

SEQ ID NO: 268956 - protein, 12 aa, Homo sapiens
  CDR3 for beta chain variable domain of TCR clone 134478 (TRBV24-1, TRBJ1-1)
CATLYPDTEAFF

SEQ ID NO: 268957 - protein, 14 aa, Homo sapiens
  CDR3 for alpha chain variable domain of TCR clone 134479 (TRAV29/DV5, TRAJ44)
CAAFLVGTASKLTF

SEQ ID NO: 268958 - protein, 14 aa, Homo sapiens
  CDR3 for beta chain variable domain of TCR clone 134479 (TRBV5-4, TRBJ1-1)
CASSLDSRRDEAFF

SEQ ID NO: 268959 - protein, 13 aa, Homo sapiens
  CDR3 for alpha chain variable domain of TCR clone 134480 (TRAV26-1, )
CIVSHRVAGFWNQ

SEQ ID NO: 268960 - protein, 14 aa, Homo sapiens
  CDR3 for beta chain variable domain of TCR clone 134480 (TRBV20-1, TRBJ2-7)
CSAWTALSSYEQYF

SEQ ID NO: 268961 - protein, 14 aa, Homo sapiens
  CDR3 for alpha chain variable domain of TCR clone 134481 (TRAV12-3, TRAJ42)
CAMNYGGSQGNLSF

SEQ ID NO: 268962 - protein, 15 aa, Homo sapiens
  CDR3 for beta chain variable domain of TCR clone 134481 (TRBV5-7, TRBJ1-5)
CASSYGKLWDQPQHF

SEQ ID NO: 268963 - protein, 12 aa, Homo sapiens
  CDR3 for alpha chain variable domain of TCR clone 134482 (TRAV12-3, TRAJ17)
CAMTLTGNKLTF

SEQ ID NO: 268964 - protein, 14 aa, Homo sapiens
  CDR3 for beta chain variable domain of TCR clone 134482 (TRBV20-1, TRBJ2-1)
CSARGGSSYNEQFF

SEQ ID NO: 268965 - protein, 14 aa, Homo sapiens
  CDR3 for alpha chain variable domain of TCR clone 134483 (TRAV1-2, TRAJ8)
CAVREDTGFQKPVF

SEQ ID NO: 268966 - protein, 16 aa, Homo sapiens
  CDR3 for beta chain variable domain of TCR clone 134483 (TRBV7-3, TRBJ2-1)
CASSLEGYRSYNEQFF

SEQ ID NO: 268967 - protein, 16 aa, Homo sapiens
  CDR3 for alpha chain variable domain of TCR clone 134484 (TRAV8-3, TRAJ10)
CAVGPILTGGGYKLTF

SEQ ID NO: 268968 - protein, 16 aa, Homo sapiens
  CDR3 for beta chain variable domain of TCR clone 134484 (TRBV7-2, TRBJ2-5)
CASSSKWLSGQETQYF

SEQ ID NO: 268969 - protein, 13 aa, Homo sapiens
  CDR3 for alpha chain variable domain of TCR clone 134485 (TRAV21, TRAJ15)
CAVANQAGTALIF

SEQ ID NO: 268970 - protein, 14 aa, Homo sapiens
  CDR3 for beta chain variable domain of TCR clone 134485 (TRBV27, TRBJ2-5)
CASSSLKGWETQYF

SEQ ID NO: 268971 - protein, 13 aa, Homo sapiens
  CDR3 for alpha chain variable domain of TCR clone 134486 (TRAV21, TRAJ57)
CAVTQGGSEKLVF

SEQ ID NO: 268972 - protein, 16 aa, Homo sapiens
  CDR3 for beta chain variable domain of TCR clone 134486 (TRBV29-1, TRBJ2-7)
CSVEDAEDGTADEQYF

SEQ ID NO: 268973 - protein, 10 aa, Homo sapiens
  CDR3 for alpha chain variable domain of TCR clone 134487 (TRAV36/DV7, TRAJ48)
CAVGNENLTF

SEQ ID NO: 268974 - protein, 15 aa, Homo sapiens
  CDR3 for beta chain variable domain of TCR clone 134487 (TRBV6-5, TRBJ1-4)
CASSSVGGAGEKLFF

SEQ ID NO: 268975 - protein, 20 aa, Homo sapiens
  CDR3 for alpha chain variable domain of TCR clone 134488 (TRAV21, TRAJ4)
AASQPGDSATLAGGYNKLIF

SEQ ID NO: 268976 - protein, 19 aa, Homo sapiens
  CDR3 for beta chain variable domain of TCR clone 134488 (TRBV18, TRBJ1-3)
CASSPPSRTGMSSGNTIYF

SEQ ID NO: 268977 - protein, 11 aa, Homo sapiens
  CDR3 for alpha chain variable domain of TCR clone 134489 (TRAV1-1, TRAJ23)
CAVRQGGKLIF

SEQ ID NO: 268978 - protein, 14 aa, Homo sapiens
  CDR3 for beta chain variable domain of TCR clone 134489 (TRBV7-2, TRBJ2-7)
CASSLRWEVNEQYF

SEQ ID NO: 268979 - protein, 12 aa, Homo sapiens
  CDR3 for alpha chain variable domain of TCR clone 134490 (TRAV13-1, TRAJ21)
YAAKEGFNKFYF

SEQ ID NO: 268980 - protein, 12 aa, Homo sapiens
  CDR3 for beta chain variable domain of TCR clone 134490 (TRBV11-2, TRBJ2-2)
CASSLGGGELFF

SEQ ID NO: 268981 - protein, 13 aa, Homo sapiens
  CDR3 for alpha chain variable domain of TCR clone 134491 (TRAV2, TRAJ40)
CAVVTSGTYKYIF

SEQ ID NO: 268982 - protein, 13 aa, Homo sapiens
  CDR3 for beta chain variable domain of TCR clone 134491 (TRBV7-7, TRBJ2-5)
CASSRSGQETQYF

SEQ ID NO: 268983 - protein, 13 aa, Homo sapiens
  CDR3 for alpha chain variable domain of TCR clone 134492 (TRAV30, TRAJ24)
CGTVTDSWGKLKF

SEQ ID NO: 268984 - protein, 14 aa, Homo sapiens
  CDR3 for beta chain variable domain of TCR clone 134492 (TRBV6-3, TRBJ2-2)
CASTYTPDTGELFF

SEQ ID NO: 268985 - protein, 14 aa, Homo sapiens
  CDR3 for alpha chain variable domain of TCR clone 134493 (TRAV21, TRAJ45)
CAVHSGGGADGLTF

SEQ ID NO: 268986 - protein, 15 aa, Homo sapiens
  CDR3 for beta chain variable domain of TCR clone 134493 (TRBV10-3, TRBJ2-1)
CAIRNGTSGHNEQFF

SEQ ID NO: 268987 - protein, 15 aa, Homo sapiens
  CDR3 for alpha chain variable domain of TCR clone 134494 (TRAV12-3, TRAJ6)
CAMSATTGGSYIPTF

SEQ ID NO: 268988 - protein, 15 aa, Homo sapiens
  CDR3 for beta chain variable domain of TCR clone 134494 (TRBV28, TRBJ1-3)
CASSMGWASGNTIYF

SEQ ID NO: 268989 - protein, 13 aa, Homo sapiens
  CDR3 for alpha chain variable domain of TCR clone 134495 (TRAV12-3, TRAJ53)
CAMRGGSNYKLTF

SEQ ID NO: 268990 - protein, 15 aa, Homo sapiens
  CDR3 for beta chain variable domain of TCR clone 134495 (TRBV2, TRBJ2-1)
CATQARLVIIGEQFF

SEQ ID NO: 268991 - protein, 11 aa, Homo sapiens
  CDR3 for alpha chain variable domain of TCR clone 134496 (TRAV21, TRAJ11)
CAVNGYSTLTC

SEQ ID NO: 268992 - protein, 11 aa, Homo sapiens
  CDR3 for beta chain variable domain of TCR clone 134496 (TRBV19, TRBJ1-1)
CASSIGSEAFF

SEQ ID NO: 268993 - protein, 14 aa, Homo sapiens
  CDR3 for alpha chain variable domain of TCR clone 134497 (TRAV35, TRAJ50)
CAGHRKTSYDKVIF

SEQ ID NO: 268994 - protein, 12 aa, Homo sapiens
  CDR3 for beta chain variable domain of TCR clone 134497 (TRBV7-2, TRBJ2-1)
CASSPQDIEQFF

SEQ ID NO: 268995 - protein, 15 aa, Homo sapiens
  CDR3 for alpha chain variable domain of TCR clone 134498 (TRAV34, TRAJ38)
CGADFTPGNNRKLIW

SEQ ID NO: 268996 - protein, 17 aa, Homo sapiens
  CDR3 for beta chain variable domain of TCR clone 134498 (TRBV7-8, TRBJ2-6)
CASSAGTGGAGANVLTF

SEQ ID NO: 268997 - protein, 16 aa, Homo sapiens
  CDR3 for alpha chain variable domain of TCR clone 134499 (TRAV30, TRAJ24)
CGTEIVDADSWGKFQF

SEQ ID NO: 268998 - protein, 15 aa, Homo sapiens
  CDR3 for beta chain variable domain of TCR clone 134499 (TRBV7-9, TRBJ1-4)
CASSPRTGGNEKLFF

SEQ ID NO: 268999 - protein, 11 aa, Homo sapiens
  CDR3 for alpha chain variable domain of TCR clone 134500 (TRAV17, TRAJ43)
CATPRSNDMRF

SEQ ID NO: 269000 - protein, 15 aa, Homo sapiens
  CDR3 for beta chain variable domain of TCR clone 134500 (TRBV11-2, TRBJ2-1)
CASSLGTSGLNQQFF

SEQ ID NO: 269001 - protein, 23 aa, Homo sapiens
  CDR3 for alpha chain variable domain of TCR clone 134501 (TRAV1-1, TRAJ11)
LLQELQMKDSASYFCAGYSTLTF

SEQ ID NO: 269002 - protein, 15 aa, Homo sapiens
  CDR3 for beta chain variable domain of TCR clone 134501 (TRBV6-5, TRBJ2-1)
CASRGDFDPYNEQFF

SEQ ID NO: 269003 - protein, 15 aa, Homo sapiens
  CDR3 for alpha chain variable domain of TCR clone 134502 (TRAV3, TRAJ17)
CAVRDTGAAGNELTF

SEQ ID NO: 269004 - protein, 16 aa, Homo sapiens
  CDR3 for beta chain variable domain of TCR clone 134502 (TRBV7-3, TRBJ2-2)
CASSLKRGTLSGELFF

SEQ ID NO: 269005 - protein, 14 aa, Homo sapiens
  CDR3 for alpha chain variable domain of TCR clone 134503 (TRAV8-1, TRAJ27)
CAVNVGTNAGKSTF

SEQ ID NO: 269006 - protein, 15 aa, Homo sapiens
  CDR3 for beta chain variable domain of TCR clone 134503 (TRBV11-3, TRBJ2-2)
CASGLGGRPTGELFF

SEQ ID NO: 269007 - protein, 16 aa, Homo sapiens
  CDR3 for alpha chain variable domain of TCR clone 134504 (TRAV3, TRAJ37)
CAVRGKGSGNTGKLIF

SEQ ID NO: 269008 - protein, 16 aa, Homo sapiens
  CDR3 for beta chain variable domain of TCR clone 134504 (TRBV12-5, TRBJ2-5)
CASGPRTSGNQETRYF

SEQ ID NO: 269009 - protein, 14 aa, Homo sapiens
  CDR3 for alpha chain variable domain of TCR clone 134505 (TRAV21, TRAJ38)
YAVANAGNNRKLIW

SEQ ID NO: 269010 - protein, 16 aa, Homo sapiens
  CDR3 for beta chain variable domain of TCR clone 134505 (TRBV6-1, TRBJ2-5)
CASSETLDRGAETQYF

SEQ ID NO: 269011 - protein, 15 aa, Homo sapiens
  CDR3 for alpha chain variable domain of TCR clone 134506 (TRAV8-4, TRAJ3)
CAVTGENIVQQCFQD

SEQ ID NO: 269012 - protein, 16 aa, Homo sapiens
  CDR3 for beta chain variable domain of TCR clone 134506 (TRBV4-2, TRBJ1-1)
CASSQAGFGMNTEAFF

SEQ ID NO: 269013 - protein, 10 aa, Homo sapiens
  CDR3 for alpha chain variable domain of TCR clone 134507 (TRAV30, TRAJ48)
CGIGNEKLTF

SEQ ID NO: 269014 - protein, 14 aa, Homo sapiens
  CDR3 for beta chain variable domain of TCR clone 134507 (TRBV7-6, TRBJ2-3)
CASSVAGGTDTQYC

SEQ ID NO: 269015 - protein, 13 aa, Homo sapiens
  CDR3 for alpha chain variable domain of TCR clone 134508 (TRAV2, TRAJ40)
CAVVTSGTYEYIF

SEQ ID NO: 269016 - protein, 15 aa, Homo sapiens
  CDR3 for beta chain variable domain of TCR clone 134508 (TRBV28, TRBJ2-1)
CASSGLAEVDNEQFF

SEQ ID NO: 269017 - protein, 14 aa, Homo sapiens
  CDR3 for alpha chain variable domain of TCR clone 134509 (TRAV8-3, TRAJ6)
CAVGASGGSYIPTF

SEQ ID NO: 269018 - protein, 17 aa, Homo sapiens
  CDR3 for beta chain variable domain of TCR clone 134509 (TRBV18, TRBJ2-2)
FASSPSDPWQNTGELFF

SEQ ID NO: 269019 - protein, 15 aa, Homo sapiens
  CDR3 for alpha chain variable domain of TCR clone 134510 (TRAV12-2, TRAJ53)
CAVNGGGGSNYKLTF

SEQ ID NO: 269020 - protein, 15 aa, Homo sapiens
  CDR3 for beta chain variable domain of TCR clone 134510 (TRBV7-3, TRBJ2-2)
CASSLEVLPTGELFF

SEQ ID NO: 269021 - protein, 16 aa, Homo sapiens
  CDR3 for alpha chain variable domain of TCR clone 134511 (TRAV30, TRAJ24)
CGTEIVDADSWGKFQF

SEQ ID NO: 269022 - protein, 16 aa, Homo sapiens
  CDR3 for beta chain variable domain of TCR clone 134511 (TRBV2, TRBJ1-3)
CASSGGAGRSRNTIYF

SEQ ID NO: 269023 - protein, 13 aa, Homo sapiens
  CDR3 for alpha chain variable domain of TCR clone 134512 (TRAV23/DV6, TRAJ47)
CAASSQYGNKLVF

SEQ ID NO: 269024 - protein, 12 aa, Homo sapiens
  CDR3 for beta chain variable domain of TCR clone 134512 (TRBV20-1, TRBJ1-2)
CSAPGFNYGYTF

SEQ ID NO: 269025 - protein, 16 aa, Homo sapiens
  CDR3 for alpha chain variable domain of TCR clone 134513 (TRAV26-1, TRAJ37)
CIVRGDGSGITGKLIF

SEQ ID NO: 269026 - protein, 17 aa, Homo sapiens
  CDR3 for beta chain variable domain of TCR clone 134513 (TRBV4-1, TRBJ2-7)
CASSRDPLGVRGGEQYF

SEQ ID NO: 269027 - protein, 14 aa, Homo sapiens
  CDR3 for alpha chain variable domain of TCR clone 134514 (TRAV12-2, TRAJ53)
CRERGGGSNYKLTF

SEQ ID NO: 269028 - protein, 17 aa, Homo sapiens
  CDR3 for beta chain variable domain of TCR clone 134514 (TRBV19, TRBJ2-3)
CASSLMKRMRGADTQYF

SEQ ID NO: 269029 - protein, 13 aa, Homo sapiens
  CDR3 for alpha chain variable domain of TCR clone 134515 (TRAV12-3, TRAJ13)
CAMNSGGYQKVTF

SEQ ID NO: 269030 - protein, 13 aa, Homo sapiens
  CDR3 for beta chain variable domain of TCR clone 134515 (TRBV20-1, TRBJ2-2)
CSALSGGAGELFF

SEQ ID NO: 269031 - protein, 10 aa, Homo sapiens
  CDR3 for alpha chain variable domain of TCR clone 134516 (TRAV30, TRAJ48)
CGIGNEKLTF

SEQ ID NO: 269032 - protein, 16 aa, Homo sapiens
  CDR3 for beta chain variable domain of TCR clone 134516 (TRBV24-1, TRBJ2-3)
CATSDPGTGATDTQYF

SEQ ID NO: 269033 - protein, 13 aa, Homo sapiens
  CDR3 for alpha chain variable domain of TCR clone 134517 (TRAV21, TRAJ57)
CAVTQGGSEKLVF

SEQ ID NO: 269034 - protein, 17 aa, Homo sapiens
  CDR3 for beta chain variable domain of TCR clone 134517 (TRBV20-1, TRBJ2-6)
CSAPPGTVASEANVLTF

SEQ ID NO: 269035 - protein, 15 aa, Homo sapiens
  CDR3 for alpha chain variable domain of TCR clone 134518 (TRAV20, TRAJ53)
CAVQSSGGSNYKLTF

SEQ ID NO: 269036 - protein, 12 aa, Homo sapiens
  CDR3 for beta chain variable domain of TCR clone 134518 (TRBV7-6, TRBJ2-5)
CASSLSQETQYF

SEQ ID NO: 269037 - protein, 15 aa, Homo sapiens
  CDR3 for alpha chain variable domain of TCR clone 134519 (TRAV29/DV5, TRAJ24)
CAASGAPDSWGKFQF

SEQ ID NO: 269038 - protein, 12 aa, Homo sapiens
  CDR3 for beta chain variable domain of TCR clone 134519 (TRBV11-2, TRBJ2-2)
CASSLPTGELFF

SEQ ID NO: 269039 - protein, 12 aa, Homo sapiens
  CDR3 for alpha chain variable domain of TCR clone 134520 (TRAV21, TRAJ31)
CVLAGNNARLMF

SEQ ID NO: 269040 - protein, 16 aa, Homo sapiens
  CDR3 for beta chain variable domain of TCR clone 134520 (TRBV27, TRBJ2-5)
CASSFGPGGTKETQYI

SEQ ID NO: 269041 - protein, 17 aa, Homo sapiens
  CDR3 for alpha chain variable domain of TCR clone 134521 (TRAV2, TRAJ10)
CAVEDQRSREEETNAPL

SEQ ID NO: 269042 - protein, 16 aa, Homo sapiens
  CDR3 for beta chain variable domain of TCR clone 134521 (TRBV18, TRBJ1-5)
CASSPSTGNSNQPQHF

SEQ ID NO: 269043 - protein, 10 aa, Homo sapiens
  CDR3 for alpha chain variable domain of TCR clone 134522 (TRAV12-2, TRAJ52)
RSTSYGKLTF

SEQ ID NO: 269044 - protein, 12 aa, Homo sapiens
  CDR3 for beta chain variable domain of TCR clone 134522 (TRBV7-8, TRBJ2-7)
CASSLGDREQYF

SEQ ID NO: 269045 - protein, 15 aa, Homo sapiens
  CDR3 for alpha chain variable domain of TCR clone 134523 (TRAV8-3, TRAJ45)
CASSYSGGGAAGLTL

SEQ ID NO: 269046 - protein, 13 aa, Homo sapiens
  CDR3 for beta chain variable domain of TCR clone 134523 (TRBV10-3, TRBJ2-7)
CASKLAVNYEQYF

SEQ ID NO: 269047 - protein, 15 aa, Homo sapiens
  CDR3 for alpha chain variable domain of TCR clone 134524 (TRAV12-3, TRAJ6)
CAMSATTGGSYIPTF

SEQ ID NO: 269048 - protein, 16 aa, Homo sapiens
  CDR3 for beta chain variable domain of TCR clone 134524 (TRBV7-8, TRBJ2-4)
CASSAERTLAKNIQYF

SEQ ID NO: 269049 - protein, 13 aa, Homo sapiens
  CDR3 for alpha chain variable domain of TCR clone 134525 (TRAV26-1, TRAJ34)
CIVRPWITDKLIF

SEQ ID NO: 269050 - protein, 14 aa, Homo sapiens
  CDR3 for beta chain variable domain of TCR clone 134525 (TRBV12-4, TRBJ1-4)
CARSRQGANEKLFF

SEQ ID NO: 269051 - protein, 14 aa, Homo sapiens
  CDR3 for alpha chain variable domain of TCR clone 134526 (TRAV12-2, TRAJ13)
CAVKKTGGYQKVTF

SEQ ID NO: 269052 - protein, 13 aa, Homo sapiens
  CDR3 for beta chain variable domain of TCR clone 134526 (TRBV12-4, TRBJ1-2)
CTSVPAVSYGYTF

SEQ ID NO: 269053 - protein, 11 aa, Homo sapiens
  CDR3 for alpha chain variable domain of TCR clone 134527 (TRAV12-1, TRAJ43)
CVEYDNNAMRF

SEQ ID NO: 269054 - protein, 15 aa, Homo sapiens
  CDR3 for beta chain variable domain of TCR clone 134527 (TRBV18, TRBJ2-5)
CASSPRASEAETQYF

SEQ ID NO: 269055 - protein, 15 aa, Homo sapiens
  CDR3 for alpha chain variable domain of TCR clone 134528 (TRAV4, TRAJ36)
CLVGDKQTGANNLFF

SEQ ID NO: 269056 - protein, 14 aa, Homo sapiens
  CDR3 for beta chain variable domain of TCR clone 134528 (TRBV25-1, TRBJ1-1)
CASTHLGGNTEAFF

SEQ ID NO: 269057 - protein, 14 aa, Homo sapiens
  CDR3 for alpha chain variable domain of TCR clone 134529 (TRAV12-1, TRAJ30)
CVVNIGGRDGKIIF

SEQ ID NO: 269058 - protein, 14 aa, Homo sapiens
  CDR3 for beta chain variable domain of TCR clone 134529 (TRBV7-6, TRBJ2-3)
CASSLGTVTDTQYL

SEQ ID NO: 269059 - protein, 13 aa, Homo sapiens
  CDR3 for alpha chain variable domain of TCR clone 134530 (TRAV2, TRAJ29)
CSAGNSGNTPLVF

SEQ ID NO: 269060 - protein, 16 aa, Homo sapiens
  CDR3 for beta chain variable domain of TCR clone 134530 (TRBV7-9, TRBJ1-2)
CASSPGGGAINYGYTF

SEQ ID NO: 269061 - protein, 13 aa, Homo sapiens
  CDR3 for alpha chain variable domain of TCR clone 134531 (TRAV13-1, TRAJ39)
CSKDSNAGNMLTF

SEQ ID NO: 269062 - protein, 16 aa, Homo sapiens
  CDR3 for beta chain variable domain of TCR clone 134531 (TRBV20-1, TRBJ1-4)
CSAPGQGLLTNEKLFF

SEQ ID NO: 269063 - protein, 15 aa, Homo sapiens
  CDR3 for alpha chain variable domain of TCR clone 134532 (TRAV38-2/DV8, TRAJ28)
CAYRSRGAGSYQLAL

SEQ ID NO: 269064 - protein, 14 aa, Homo sapiens
  CDR3 for beta chain variable domain of TCR clone 134532 (TRBV7-9, TRBJ2-7)
CASSLSQGSYEQYF

SEQ ID NO: 269065 - protein, 10 aa, Homo sapiens
  CDR3 for alpha chain variable domain of TCR clone 134533 (TRAV8-4, TRAJ43)
CAVSADDIRF

SEQ ID NO: 269066 - protein, 13 aa, Homo sapiens
  CDR3 for beta chain variable domain of TCR clone 134533 (TRBV12-4, TRBJ2-5)
CASSPGTEETQYF

SEQ ID NO: 269067 - protein, 12 aa, Homo sapiens
  CDR3 for alpha chain variable domain of TCR clone 134534 (TRAV12-3, TRAJ3)
CAIDSSASKIIF

SEQ ID NO: 269068 - protein, 17 aa, Homo sapiens
  CDR3 for beta chain variable domain of TCR clone 134534 (TRBV7-9, TRBJ2-3)
CASSLEEAGAYPDTQYC

SEQ ID NO: 269069 - protein, 13 aa, Homo sapiens
  CDR3 for alpha chain variable domain of TCR clone 134535 (TRAV26-2, TRAJ57)
CILSRGGCEKLVF

SEQ ID NO: 269070 - protein, 16 aa, Homo sapiens
  CDR3 for beta chain variable domain of TCR clone 134535 (TRBV18, TRBJ1-5)
CASSPRTGGGNQPQHF

SEQ ID NO: 269071 - protein, 15 aa, Homo sapiens
  CDR3 for alpha chain variable domain of TCR clone 134536 (TRAV26-1, TRAJ56)
CVVRVDNGANSKLTF

SEQ ID NO: 269072 - protein, 15 aa, Homo sapiens
  CDR3 for beta chain variable domain of TCR clone 134536 (TRBV20-1, TRBJ2-7)
CSARDPTEVGHEQYF

SEQ ID NO: 269073 - protein, 13 aa, Homo sapiens
  CDR3 for alpha chain variable domain of TCR clone 134537 (TRAV12-2, TRAJ50)
CAVIVTSYDKVIF

SEQ ID NO: 269074 - protein, 20 aa, Homo sapiens
  CDR3 for beta chain variable domain of TCR clone 134537 (TRBV7-8, TRBJ2-2)
CASSHLFPGPTIHITGELFF

SEQ ID NO: 269075 - protein, 15 aa, Homo sapiens
  CDR3 for alpha chain variable domain of TCR clone 134538 (TRAV13-2, TRAJ16)
FAENDRFSDGQKLLF

SEQ ID NO: 269076 - protein, 14 aa, Homo sapiens
  CDR3 for beta chain variable domain of TCR clone 134538 (TRBV4-2, TRBJ1-5)
CASSRDRGNQPQHF

SEQ ID NO: 269077 - protein, 14 aa, Homo sapiens
  CDR3 for alpha chain variable domain of TCR clone 134539 (TRAV3, TRAJ35)
CAVRDMGFGNVLHC

SEQ ID NO: 269078 - protein, 16 aa, Homo sapiens
  CDR3 for beta chain variable domain of TCR clone 134539 (TRBV7-9, TRBJ1-2)
CASSLGFSSGEDGYTF

SEQ ID NO: 269079 - protein, 14 aa, Homo sapiens
  CDR3 for alpha chain variable domain of TCR clone 134540 (TRAV12-1, TRAJ8)
CVVNSNTGFQKLVF

SEQ ID NO: 269080 - protein, 17 aa, Homo sapiens
  CDR3 for beta chain variable domain of TCR clone 134540 (TRBV7-8, TRBJ2-6)
CASSAGTGGAGANDLTF

SEQ ID NO: 269081 - protein, 11 aa, Homo sapiens
  CDR3 for alpha chain variable domain of TCR clone 134541 (TRAV14/DV4, )
CSMREISRTLT

SEQ ID NO: 269082 - protein, 14 aa, Homo sapiens
  CDR3 for beta chain variable domain of TCR clone 134541 (TRBV2, TRBJ2-1)
CASSDRAYYNEQFF

SEQ ID NO: 269083 - protein, 17 aa, Homo sapiens
  CDR3 for alpha chain variable domain of TCR clone 134542 (TRAV1-2, TRAJ6)
CAVGDTTRTGGSYIPTF

SEQ ID NO: 269084 - protein, 12 aa, Homo sapiens
  CDR3 for beta chain variable domain of TCR clone 134542 (TRBV24-1, TRBJ2-3)
CATSSGGDTQYF

SEQ ID NO: 269085 - protein, 14 aa, Homo sapiens
  CDR3 for alpha chain variable domain of TCR clone 134543 (TRAV21, TRAJ45)
CAVSSGGGADGLTF

SEQ ID NO: 269086 - protein, 15 aa, Homo sapiens
  CDR3 for beta chain variable domain of TCR clone 134543 (TRBV6-1, TRBJ2-4)
CASSEAVWTINRQYF

SEQ ID NO: 269087 - protein, 14 aa, Homo sapiens
  CDR3 for alpha chain variable domain of TCR clone 134544 (TRAV21, TRAJ35)
CAVMPIGFGNVLHC

SEQ ID NO: 269088 - protein, 12 aa, Homo sapiens
  CDR3 for beta chain variable domain of TCR clone 134544 (TRBV7-9, TRBJ2-5)
CASSIKREEQYF

SEQ ID NO: 269089 - protein, 15 aa, Homo sapiens
  CDR3 for alpha chain variable domain of TCR clone 134545 (TRAV26-1, TRAJ29)
CIVRVEGSGNTPLVF

SEQ ID NO: 269090 - protein, 13 aa, Homo sapiens
  CDR3 for beta chain variable domain of TCR clone 134545 (TRBV19, TRBJ1-1)
RASSPSNGGEAFF

SEQ ID NO: 269091 - protein, 12 aa, Homo sapiens
  CDR3 for alpha chain variable domain of TCR clone 134546 (TRAV2, TRAJ31)
CAVEDNNARLMF

SEQ ID NO: 269092 - protein, 14 aa, Homo sapiens
  CDR3 for beta chain variable domain of TCR clone 134546 (TRBV19, TRBJ2-1)
CASSRLASINEQFF

SEQ ID NO: 269093 - protein, 14 aa, Homo sapiens
  CDR3 for alpha chain variable domain of TCR clone 134547 (TRAV13-1, TRAJ26)
CAARSAHYGQNFVF

SEQ ID NO: 269094 - protein, 17 aa, Homo sapiens
  CDR3 for beta chain variable domain of TCR clone 134547 (TRBV25-1, TRBJ2-5)
CASSRRGGRGGQETQYF

SEQ ID NO: 269095 - protein, 14 aa, Homo sapiens
  CDR3 for alpha chain variable domain of TCR clone 134548 (TRAV1-2, TRAJ16)
CAVNRFSDGQKLLF

SEQ ID NO: 269096 - protein, 14 aa, Homo sapiens
  CDR3 for beta chain variable domain of TCR clone 134548 (TRBV25-1, TRBJ1-1)
CTSTHLGGNTEAFF

SEQ ID NO: 269097 - protein, 15 aa, Homo sapiens
  CDR3 for alpha chain variable domain of TCR clone 134549 (TRAV23/DV6, TRAJ18)
RAARYRGSTLGRLYF

SEQ ID NO: 269098 - protein, 15 aa, Homo sapiens
  CDR3 for beta chain variable domain of TCR clone 134549 (TRBV6-3, TRBJ2-2)
CASSFLATLTGELFF

SEQ ID NO: 269099 - protein, 13 aa, Homo sapiens
  CDR3 for alpha chain variable domain of TCR clone 134550 (TRAV30, TRAJ6)
YGFIEGGSYIPTF

SEQ ID NO: 269100 - protein, 16 aa, Homo sapiens
  CDR3 for beta chain variable domain of TCR clone 134550 (TRBV7-6, TRBJ2-3)
CASSARTSRGTDTQYF

SEQ ID NO: 269101 - protein, 14 aa, Homo sapiens
  CDR3 for alpha chain variable domain of TCR clone 134551 (TRAV12-2, TRAJ32)
CAHPESGATHKLIF

SEQ ID NO: 269102 - protein, 14 aa, Homo sapiens
  CDR3 for beta chain variable domain of TCR clone 134551 (TRBV4-2, TRBJ2-3)
CASRETRAPGMQYF

SEQ ID NO: 269103 - protein, 17 aa, Homo sapiens
  CDR3 for alpha chain variable domain of TCR clone 134552 (TRAV3, TRAJ42)
CSVRDRDYGGSQGNPIF

SEQ ID NO: 269104 - protein, 15 aa, Homo sapiens
  CDR3 for beta chain variable domain of TCR clone 134552 (TRBV6-6, TRBJ2-7)
CASSYSYGGSYEQYF

SEQ ID NO: 269105 - protein, 14 aa, Homo sapiens
  CDR3 for alpha chain variable domain of TCR clone 134553 (TRAV12-3, TRAJ58)
CAMSTEASGSRLTF

SEQ ID NO: 269106 - protein, 13 aa, Homo sapiens
  CDR3 for beta chain variable domain of TCR clone 134553 (TRBV27, TRBJ2-3)
CASSWGRTDTQYF

SEQ ID NO: 269107 - protein, 10 aa, Homo sapiens
  CDR3 for alpha chain variable domain of TCR clone 134554 (TRAV30, TRAJ48)
CGIGNEKLTF

SEQ ID NO: 269108 - protein, 16 aa, Homo sapiens
  CDR3 for beta chain variable domain of TCR clone 134554 (TRBV27, TRBJ2-1)
SMSVEPGTSGDNEQFF

SEQ ID NO: 269109 - protein, 10 aa, Homo sapiens
  CDR3 for alpha chain variable domain of TCR clone 134555 (TRAV1-2, TRAJ31)
CFSEDARLMF

SEQ ID NO: 269110 - protein, 14 aa, Homo sapiens
  CDR3 for beta chain variable domain of TCR clone 134555 (TRBV19, TRBJ2-1)
CASPTFVLSGEQFF

SEQ ID NO: 269111 - protein, 15 aa, Homo sapiens
  CDR3 for alpha chain variable domain of TCR clone 134556 (TRAV12-1, TRAJ45)
CVVIRRGGGADGLTF

SEQ ID NO: 269112 - protein, 18 aa, Homo sapiens
  CDR3 for beta chain variable domain of TCR clone 134556 (TRBV23-1, TRBJ1-1)
CASEKQGAEATLRLSLDK

SEQ ID NO: 269113 - protein, 13 aa, Homo sapiens
  CDR3 for alpha chain variable domain of TCR clone 134557 (TRAV27, TRAJ6)
CAGGTRGSYIPTF

SEQ ID NO: 269114 - protein, 13 aa, Homo sapiens
  CDR3 for beta chain variable domain of TCR clone 134557 (TRBV4-1, TRBJ2-2)
CASSQENTGELFF

SEQ ID NO: 269115 - protein, 15 aa, Homo sapiens
  CDR3 for alpha chain variable domain of TCR clone 134558 (TRAV12-1, TRAJ4)
CVVNPFPGGYNKLIF

SEQ ID NO: 269116 - protein, 16 aa, Homo sapiens
  CDR3 for beta chain variable domain of TCR clone 134558 (TRBV5-1, TRBJ1-1)
CASSKTGTEVGTEAFF

SEQ ID NO: 269117 - protein, 14 aa, Homo sapiens
  CDR3 for alpha chain variable domain of TCR clone 134559 (TRAV29/DV5, TRAJ36)
CAARRKTGANNLFF

SEQ ID NO: 269118 - protein, 12 aa, Homo sapiens
  CDR3 for beta chain variable domain of TCR clone 134559 (TRBV11-3, TRBJ2-1)
CASSPGNNEQFF

SEQ ID NO: 269119 - protein, 14 aa, Homo sapiens
  CDR3 for alpha chain variable domain of TCR clone 134560 (TRAV21, TRAJ35)
CAVMPIGIGNVLHC

SEQ ID NO: 269120 - protein, 12 aa, Homo sapiens
  CDR3 for beta chain variable domain of TCR clone 134560 (TRBV7-9, TRBJ2-7)
CASSSKREEQYF

SEQ ID NO: 269121 - protein, 18 aa, Homo sapiens
  CDR3 for alpha chain variable domain of TCR clone 134561 (TRAV12-3, TRAJ52)
CAMSVGGAGGTSYGKLTF

SEQ ID NO: 269122 - protein, 12 aa, Homo sapiens
  CDR3 for beta chain variable domain of TCR clone 134561 (TRBV7-8, TRBJ2-7)
CASSLGDREQYF

SEQ ID NO: 269123 - protein, 13 aa, Homo sapiens
  CDR3 for alpha chain variable domain of TCR clone 134562 (TRAV3, TRAJ34)
CAVRDYNTDKLIF

SEQ ID NO: 269124 - protein, 16 aa, Homo sapiens
  CDR3 for beta chain variable domain of TCR clone 134562 (TRBV24-1, TRBJ2-3)
CATSDPGTGATDTQYF

SEQ ID NO: 269125 - protein, 14 aa, Homo sapiens
  CDR3 for alpha chain variable domain of TCR clone 134563 (TRAV1-2, TRAJ16)
CAVNRFSDGQNLLF

SEQ ID NO: 269126 - protein, 12 aa, Homo sapiens
  CDR3 for beta chain variable domain of TCR clone 134563 (TRBV7-9, TRBJ2-7)
CASSLEGYEQYF

SEQ ID NO: 269127 - protein, 13 aa, Homo sapiens
  CDR3 for alpha chain variable domain of TCR clone 134564 (TRAV21, TRAJ56)
CAVRTGANSKLTF

SEQ ID NO: 269128 - protein, 15 aa, Homo sapiens
  CDR3 for beta chain variable domain of TCR clone 134564 (TRBV7-9, TRBJ1-1)
CASSHRGTVNTEAFL

SEQ ID NO: 269129 - protein, 15 aa, Homo sapiens
  CDR3 for alpha chain variable domain of TCR clone 134565 (TRAV30, TRAJ57)
CGTAIPQGGSEKLAF

SEQ ID NO: 269130 - protein, 13 aa, Homo sapiens
  CDR3 for beta chain variable domain of TCR clone 134565 (TRBV7-9, TRBJ1-2)
CASSPSNFWGYTF

SEQ ID NO: 269131 - protein, 10 aa, Homo sapiens
  CDR3 for alpha chain variable domain of TCR clone 134566 (TRAV16, TRAJ22)
SAMYLWQLTF

SEQ ID NO: 269132 - protein, 15 aa, Homo sapiens
  CDR3 for beta chain variable domain of TCR clone 134566 (TRBV7-9, TRBJ1-6)
CASSSPGRGNSPLHF

SEQ ID NO: 269133 - protein, 13 aa, Homo sapiens
  CDR3 for alpha chain variable domain of TCR clone 134567 (TRAV12-2, TRAJ42)
CAGKRGSQGNLIF

SEQ ID NO: 269134 - protein, 12 aa, Homo sapiens
  CDR3 for beta chain variable domain of TCR clone 134567 (TRBV5-7, TRBJ1-2)
CASSLVQNGYTF

SEQ ID NO: 269135 - protein, 13 aa, Homo sapiens
  CDR3 for alpha chain variable domain of TCR clone 134568 (TRAV13-1, TRAJ4)
CAASIGGYNKLIF

SEQ ID NO: 269136 - protein, 14 aa, Homo sapiens
  CDR3 for beta chain variable domain of TCR clone 134568 (TRBV7-2, TRBJ1-1)
CASSFLTGTTEAFF

SEQ ID NO: 269137 - protein, 14 aa, Homo sapiens
  CDR3 for alpha chain variable domain of TCR clone 134569 (TRAV9-2, TRAJ39)
CALYIYNAGNMLTF

SEQ ID NO: 269138 - protein, 13 aa, Homo sapiens
  CDR3 for beta chain variable domain of TCR clone 134569 (TRBV2, TRBJ1-1)
CASSVLMDTEAFF

SEQ ID NO: 269139 - protein, 13 aa, Homo sapiens
  CDR3 for alpha chain variable domain of TCR clone 134570 (TRAV1-2, TRAJ9)
CAALNTGGFKTIF

SEQ ID NO: 269140 - protein, 14 aa, Homo sapiens
  CDR3 for beta chain variable domain of TCR clone 134570 (TRBV7-2, TRBJ2-5)
CASSLSGGGETQYF

SEQ ID NO: 269141 - protein, 14 aa, Homo sapiens
  CDR3 for alpha chain variable domain of TCR clone 134571 (TRAV12-3, TRAJ22)
CAMSLFGSARQLTF

SEQ ID NO: 269142 - protein, 14 aa, Homo sapiens
  CDR3 for beta chain variable domain of TCR clone 134571 (TRBV4-2, TRBJ2-1)
CASSLDRAYNEQFF

SEQ ID NO: 269143 - protein, 11 aa, Homo sapiens
  CDR3 for alpha chain variable domain of TCR clone 134572 (TRAV35, TRAJ30)
CAGPGDDKIIF

SEQ ID NO: 269144 - protein, 14 aa, Homo sapiens
  CDR3 for beta chain variable domain of TCR clone 134572 (TRBV19, TRBJ2-1)
CASPTFVLSGEQFF

SEQ ID NO: 269145 - protein, 13 aa, Homo sapiens
  CDR3 for alpha chain variable domain of TCR clone 134573 (TRAV13-1, TRAJ21)
CAASIYNFNKFYF

SEQ ID NO: 269146 - protein, 15 aa, Homo sapiens
  CDR3 for beta chain variable domain of TCR clone 134573 (TRBV12-4, TRBJ2-5)
CASSPPTGLQETQYF

SEQ ID NO: 269147 - protein, 14 aa, Homo sapiens
  CDR3 for alpha chain variable domain of TCR clone 134574 (TRAV30, TRAJ26)
CGTEIVSYGQNFIF

SEQ ID NO: 269148 - protein, 13 aa, Homo sapiens
  CDR3 for beta chain variable domain of TCR clone 134574 (TRBV7-3, TRBJ1-1)
CASSQDWGAEAFF

SEQ ID NO: 269149 - protein, 14 aa, Homo sapiens
  CDR3 for alpha chain variable domain of TCR clone 134575 (TRAV12-3, TRAJ7)
CAMSEIGGNNRLAF

SEQ ID NO: 269150 - protein, 15 aa, Homo sapiens
  CDR3 for beta chain variable domain of TCR clone 134575 (TRBV6-1, TRBJ2-2)
CASSAGQGYTGELFF

SEQ ID NO: 269151 - protein, 12 aa, Homo sapiens
  CDR3 for alpha chain variable domain of TCR clone 134576 (TRAV12-2, TRAJ28)
CAVRAGSYQLTF

SEQ ID NO: 269152 - protein, 13 aa, Homo sapiens
  CDR3 for beta chain variable domain of TCR clone 134576 (TRBV11-2, TRBJ1-6)
CASSLAGVSPLHF

SEQ ID NO: 269153 - protein, 13 aa, Homo sapiens
  CDR3 for alpha chain variable domain of TCR clone 134577 (TRAV26-2, TRAJ43)
CILRAVNNNDMRF

SEQ ID NO: 269154 - protein, 15 aa, Homo sapiens
  CDR3 for beta chain variable domain of TCR clone 134577 (TRBV6-1, TRBJ2-1)
CASSEAAYSYNEQFF

SEQ ID NO: 269155 - protein, 15 aa, Homo sapiens
  CDR3 for alpha chain variable domain of TCR clone 134578 (TRAV3, TRAJ22)
CAVRDWGGSARQLTF

SEQ ID NO: 269156 - protein, 14 aa, Homo sapiens
  CDR3 for beta chain variable domain of TCR clone 134578 (TRBV19, TRBJ1-5)
CASSLGLIGQPQHF

SEQ ID NO: 269157 - protein, 16 aa, Homo sapiens
  CDR3 for alpha chain variable domain of TCR clone 134579 (TRAV12-3, TRAJ53)
CAMSPGSGGSNYKLTF

SEQ ID NO: 269158 - protein, 11 aa, Homo sapiens
  CDR3 for beta chain variable domain of TCR clone 134579 (TRBV29-1, TRBJ2-5)
CSEHRTGTQYF

SEQ ID NO: 269159 - protein, 14 aa, Homo sapiens
  CDR3 for alpha chain variable domain of TCR clone 134580 (TRAV38-1, TRAJ54)
CAFISPSGAQKLVF

SEQ ID NO: 269160 - protein, 16 aa, Homo sapiens
  CDR3 for beta chain variable domain of TCR clone 134580 (TRBV28, TRBJ2-1)
CASSLGGSGSYNEQFF

SEQ ID NO: 269161 - protein, 20 aa, Homo sapiens
  CDR3 for alpha chain variable domain of TCR clone 134581 (TRAV26-1, TRAJ42)
CCVLLHRQTYYGGSQGNLIF

SEQ ID NO: 269162 - protein, 20 aa, Homo sapiens
  CDR3 for beta chain variable domain of TCR clone 134581 (TRBV7-8, TRBJ2-2)
CASSHLFPGPTIHITGELFF

SEQ ID NO: 269163 - protein, 15 aa, Homo sapiens
  CDR3 for alpha chain variable domain of TCR clone 134582 (TRAV3, TRAJ22)
CAVRDRGGSARQLTF

SEQ ID NO: 269164 - protein, 17 aa, Homo sapiens
  CDR3 for beta chain variable domain of TCR clone 134582 (TRBV13, TRBJ2-3)
CASSLSRVAGGGNTQYF

SEQ ID NO: 269165 - protein, 13 aa, Homo sapiens
  CDR3 for alpha chain variable domain of TCR clone 134583 (TRAV12-3, TRAJ13)
CAMTSGGYQKVTF

SEQ ID NO: 269166 - protein, 13 aa, Homo sapiens
  CDR3 for beta chain variable domain of TCR clone 134583 (TRBV20-1, TRBJ2-2)
CSALSGGAGELIF

SEQ ID NO: 269167 - protein, 12 aa, Homo sapiens
  CDR3 for alpha chain variable domain of TCR clone 134584 (TRAV3, TRAJ27)
CAVRDGAGKSTF

SEQ ID NO: 269168 - protein, 15 aa, Homo sapiens
  CDR3 for beta chain variable domain of TCR clone 134584 (TRBV2, TRBJ2-7)
CAGGEGTGLTYEQYF

SEQ ID NO: 269169 - protein, 16 aa, Homo sapiens
  CDR3 for alpha chain variable domain of TCR clone 134585 (TRAV20, TRAJ53)
CAVRRGSGGSNYQLTF

SEQ ID NO: 269170 - protein, 12 aa, Homo sapiens
  CDR3 for beta chain variable domain of TCR clone 134585 (TRBV29-1, TRBJ2-3)
CSVVLGADTQYF

SEQ ID NO: 269171 - protein, 15 aa, Homo sapiens
  CDR3 for alpha chain variable domain of TCR clone 134586 (TRAV2, TRAJ11)
CAVEDPNSGYSTLTF

SEQ ID NO: 269172 - protein, 15 aa, Homo sapiens
  CDR3 for beta chain variable domain of TCR clone 134586 (TRBV7-2, TRBJ2-6)
CASSLQEAGANVLTF

SEQ ID NO: 269173 - protein, 14 aa, Homo sapiens
  CDR3 for alpha chain variable domain of TCR clone 134587 (TRAV39, TRAJ42)
CAVDIARSQGNPIF

SEQ ID NO: 269174 - protein, 15 aa, Homo sapiens
  CDR3 for beta chain variable domain of TCR clone 134587 (TRBV27, TRBJ2-7)
CASSLFGTGLDEQYF

SEQ ID NO: 269175 - protein, 12 aa, Homo sapiens
  CDR3 for alpha chain variable domain of TCR clone 134588 (TRAV23/DV6, TRAJ33)
CAASRSNYQLIW

SEQ ID NO: 269176 - protein, 13 aa, Homo sapiens
  CDR3 for beta chain variable domain of TCR clone 134588 (TRBV2, TRBJ1-1)
CASSVLMNTEAFF

SEQ ID NO: 269177 - protein, 15 aa, Homo sapiens
  CDR3 for alpha chain variable domain of TCR clone 134589 (TRAV12-2, TRAJ53)
CAVNGGRGSNYKLTF

SEQ ID NO: 269178 - protein, 13 aa, Homo sapiens
  CDR3 for beta chain variable domain of TCR clone 134589 (TRBV3-1, TRBJ1-1)
CASSPGVITEAFF

SEQ ID NO: 269179 - protein, 16 aa, Homo sapiens
  CDR3 for alpha chain variable domain of TCR clone 134590 (TRAV12-3, TRAJ53)
CAMSPGSGGSNYKLTF

SEQ ID NO: 269180 - protein, 17 aa, Homo sapiens
  CDR3 for beta chain variable domain of TCR clone 134590 (TRBV7-9, TRBJ2-1)
CASSLVASYPSYNEQFF

SEQ ID NO: 269181 - protein, 13 aa, Homo sapiens
  CDR3 for alpha chain variable domain of TCR clone 134591 (TRAV12-2, TRAJ3)
CAGCESSASKIIF

SEQ ID NO: 269182 - protein, 14 aa, Homo sapiens
  CDR3 for beta chain variable domain of TCR clone 134591 (TRBV25-1, TRBJ1-1)
CASTHLGGNTEAFF

SEQ ID NO: 269183 - protein, 10 aa, Homo sapiens
  CDR3 for alpha chain variable domain of TCR clone 134592 (TRAV25, TRAJ34)
CAYNTDKLIF

SEQ ID NO: 269184 - protein, 15 aa, Homo sapiens
  CDR3 for beta chain variable domain of TCR clone 134592 (TRBV5-1, TRBJ2-7)
CASSLNGGPAREQYF

SEQ ID NO: 269185 - protein, 20 aa, Homo sapiens
  CDR3 for alpha chain variable domain of TCR clone 134593 (TRAV12-3, TRAJ41)
SLFIRDSQPSDSATPEALNF

SEQ ID NO: 269186 - protein, 16 aa, Homo sapiens
  CDR3 for beta chain variable domain of TCR clone 134593 (TRBV7-3, TRBJ2-2)
CASSLKRGTLSGELFF

SEQ ID NO: 269187 - protein, 15 aa, Homo sapiens
  CDR3 for alpha chain variable domain of TCR clone 134594 (TRAV34, TRAJ38)
CGADFTPGNNRKLIW

SEQ ID NO: 269188 - protein, 15 aa, Homo sapiens
  CDR3 for beta chain variable domain of TCR clone 134594 (TRBV5-1, TRBJ2-3)
CASSVTSGSTDTQYF

SEQ ID NO: 269189 - protein, 10 aa, Homo sapiens
  CDR3 for alpha chain variable domain of TCR clone 134595 (TRAV36/DV7, TRAJ48)
CAVGNEKLTF

SEQ ID NO: 269190 - protein, 18 aa, Homo sapiens
  CDR3 for beta chain variable domain of TCR clone 134595 (TRBV7-3, TRBJ2-3)
CASSSTGTYPGSTDTQYF

SEQ ID NO: 269191 - protein, 12 aa, Homo sapiens
  CDR3 for alpha chain variable domain of TCR clone 134596 (TRAV13-2, TRAJ23)
CAERHRGGKLIF

SEQ ID NO: 269192 - protein, 12 aa, Homo sapiens
  CDR3 for beta chain variable domain of TCR clone 134596 (TRBV11-2, TRBJ2-5)
CASSLGQETQYF

SEQ ID NO: 269193 - protein, 14 aa, Homo sapiens
  CDR3 for alpha chain variable domain of TCR clone 134597 (TRAV1-2, TRAJ8)
CAVREDTGFQKLVF

SEQ ID NO: 269194 - protein, 15 aa, Homo sapiens
  CDR3 for beta chain variable domain of TCR clone 134597 (TRBV19, TRBJ2-1)
CASSRPGQNYNEQFF

SEQ ID NO: 269195 - protein, 13 aa, Homo sapiens
  CDR3 for alpha chain variable domain of TCR clone 134598 (TRAV1-1, TRAJ9)
CAAKNTGGFKTIF

SEQ ID NO: 269196 - protein, 18 aa, Homo sapiens
  CDR3 for beta chain variable domain of TCR clone 134598 (TRBV18, TRBJ2-1)
CASCPNWGQGAPKCEQFF

SEQ ID NO: 269197 - protein, 17 aa, Homo sapiens
  CDR3 for alpha chain variable domain of TCR clone 134599 (TRAV38-1, TRAJ28)
CAFMKPTSGAGSYQLTF

SEQ ID NO: 269198 - protein, 14 aa, Homo sapiens
  CDR3 for beta chain variable domain of TCR clone 134599 (TRBV7-3, TRBJ1-1)
CASSLKGGNTEAFF

SEQ ID NO: 269199 - protein, 14 aa, Homo sapiens
  CDR3 for alpha chain variable domain of TCR clone 134600 (TRAV1-2, TRAJ8)
CAVREDTGFQKLVF

SEQ ID NO: 269200 - protein, 15 aa, Homo sapiens
  CDR3 for beta chain variable domain of TCR clone 134600 (TRBV9, TRBJ1-6)
CASSVAGTGDSPLHS

SEQ ID NO: 269201 - protein, 14 aa, Homo sapiens
  CDR3 for alpha chain variable domain of TCR clone 134601 (TRAV26-1, TRAJ48)
CIVRVGFGNEKLTF

SEQ ID NO: 269202 - protein, 13 aa, Homo sapiens
  CDR3 for beta chain variable domain of TCR clone 134601 (TRBV10-2, TRBJ2-7)
CASGASGGYEQYL

SEQ ID NO: 269203 - protein, 13 aa, Homo sapiens
  CDR3 for alpha chain variable domain of TCR clone 134602 (TRAV13-2, TRAJ13)
CADLSGGYQTVTF

SEQ ID NO: 269204 - protein, 15 aa, Homo sapiens
  CDR3 for beta chain variable domain of TCR clone 134602 (TRBV19, TRBJ1-1)
CASSIGGGRNTEAFF

SEQ ID NO: 269205 - protein, 12 aa, Homo sapiens
  CDR3 for alpha chain variable domain of TCR clone 134603 (TRAV8-1, TRAJ47)
CAVNVWGNKLVF

SEQ ID NO: 269206 - protein, 13 aa, Homo sapiens
  CDR3 for beta chain variable domain of TCR clone 134603 (TRBV7-6, TRBJ2-7)
CASSLDHTHEQYF

SEQ ID NO: 269207 - protein, 14 aa, Homo sapiens
  CDR3 for alpha chain variable domain of TCR clone 134604 (TRAV1-2, TRAJ16)
CAVNRFSDGQKLLF

SEQ ID NO: 269208 - protein, 17 aa, Homo sapiens
  CDR3 for beta chain variable domain of TCR clone 134604 (TRBV23-1, TRBJ1-5)
CASSQSRTGGPNQPQHF

SEQ ID NO: 269209 - protein, 14 aa, Homo sapiens
  CDR3 for alpha chain variable domain of TCR clone 134605 (TRAV13-1, TRAJ40)
CAAIMTSGTYKYIF

SEQ ID NO: 269210 - protein, 13 aa, Homo sapiens
  CDR3 for beta chain variable domain of TCR clone 134605 (TRBV4-1, TRBJ2-5)
CASSQEVQETQYF

SEQ ID NO: 269211 - protein, 12 aa, Homo sapiens
  CDR3 for alpha chain variable domain of TCR clone 134606 (TRAV13-1, TRAJ16)
CSKVSDGQKLLF

SEQ ID NO: 269212 - protein, 13 aa, Homo sapiens
  CDR3 for beta chain variable domain of TCR clone 134606 (TRBV4-1, TRBJ2-1)
CASSQAGGDEQFF

SEQ ID NO: 269213 - protein, 14 aa, Homo sapiens
  CDR3 for alpha chain variable domain of TCR clone 134607 (TRAV1-2, TRAJ6)
CAVRTSGGSYIPTF

SEQ ID NO: 269214 - protein, 13 aa, Homo sapiens
  CDR3 for beta chain variable domain of TCR clone 134607 (TRBV7-3, TRBJ1-1)
CASSQDWGAEAFF

SEQ ID NO: 269215 - protein, 18 aa, Homo sapiens
  CDR3 for alpha chain variable domain of TCR clone 134608 (TRAV21, TRAJ52)
CSVRPSPAGGTSYGNLTF

SEQ ID NO: 269216 - protein, 17 aa, Homo sapiens
  CDR3 for beta chain variable domain of TCR clone 134608 (TRBV13, TRBJ2-3)
CASSLSRVAGGRNTQYF

SEQ ID NO: 269217 - protein, 16 aa, Homo sapiens
  CDR3 for alpha chain variable domain of TCR clone 134609 (TRAV8-3, TRAJ13)
CAVGAYPSGGYQKVTF

SEQ ID NO: 269218 - protein, 15 aa, Homo sapiens
  CDR3 for beta chain variable domain of TCR clone 134609 (TRBV19, TRBJ1-5)
CASSIVWADIQPQHF

SEQ ID NO: 269219 - protein, 14 aa, Homo sapiens
  CDR3 for alpha chain variable domain of TCR clone 134610 (TRAV23/DV6, TRAJ23)
CAAGPYNQGGKLIF

SEQ ID NO: 269220 - protein, 15 aa, Homo sapiens
  CDR3 for beta chain variable domain of TCR clone 134610 (TRBV20-1, TRBJ2-7)
CSARDRVSGMDEQYF

SEQ ID NO: 269221 - protein, 12 aa, Homo sapiens
  CDR3 for alpha chain variable domain of TCR clone 134611 (TRAV10, TRAJ43)
CVVVRVGNDMRF

SEQ ID NO: 269222 - protein, 14 aa, Homo sapiens
  CDR3 for beta chain variable domain of TCR clone 134611 (TRBV11-2, TRBJ2-5)
CASSRTGGIETQYF

SEQ ID NO: 269223 - protein, 13 aa, Homo sapiens
  CDR3 for alpha chain variable domain of TCR clone 134612 (TRAV1-2, TRAJ39)
CAVKDNAGNMLTF

SEQ ID NO: 269224 - protein, 19 aa, Homo sapiens
  CDR3 for beta chain variable domain of TCR clone 134612 (TRBV7-2, TRBJ2-3)
CASSFLSRNWGGGTDTQYF

SEQ ID NO: 269225 - protein, 14 aa, Homo sapiens
  CDR3 for alpha chain variable domain of TCR clone 134613 (TRAV12-2, TRAJ40)
CAVKIPSGTYKYIF

SEQ ID NO: 269226 - protein, 15 aa, Homo sapiens
  CDR3 for beta chain variable domain of TCR clone 134613 (TRBV7-2, TRBJ1-2)
CASSLVSGGDYGYTF

SEQ ID NO: 269227 - protein, 11 aa, Homo sapiens
  CDR3 for alpha chain variable domain of TCR clone 134614 (TRAV2, TRAJ13)
CASGGYQKVTF

SEQ ID NO: 269228 - protein, 15 aa, Homo sapiens
  CDR3 for beta chain variable domain of TCR clone 134614 (TRBV28, TRBJ2-1)
CASSGLAEVDNEQFF

SEQ ID NO: 269229 - protein, 15 aa, Homo sapiens
  CDR3 for alpha chain variable domain of TCR clone 134615 (TRAV17, TRAJ28)
CATADSGAGSYQLTF

SEQ ID NO: 269230 - protein, 13 aa, Homo sapiens
  CDR3 for beta chain variable domain of TCR clone 134615 (TRBV5-4, TRBJ2-5)
CASSRQEGETQYF

SEQ ID NO: 269231 - protein, 13 aa, Homo sapiens
  CDR3 for alpha chain variable domain of TCR clone 134616 (TRAV27, TRAJ6)
CAGGTRGSYIPTF

SEQ ID NO: 269232 - protein, 19 aa, Homo sapiens
  CDR3 for beta chain variable domain of TCR clone 134616 (TRBV24-1, TRBJ2-1)
TSVPPVIFPNNSSYNEQFF

SEQ ID NO: 269233 - protein, 13 aa, Homo sapiens
  CDR3 for alpha chain variable domain of TCR clone 134617 (TRAV8-3, TRAJ28)
CAVGAVGSYQLTF

SEQ ID NO: 269234 - protein, 17 aa, Homo sapiens
  CDR3 for beta chain variable domain of TCR clone 134617 (TRBV10-3, TRBJ2-6)
CAISESTAPSGANVLTF

SEQ ID NO: 269235 - protein, 13 aa, Homo sapiens
  CDR3 for alpha chain variable domain of TCR clone 134618 (TRAV2, TRAJ40)
CAVVTSGTYKYIF

SEQ ID NO: 269236 - protein, 15 aa, Homo sapiens
  CDR3 for beta chain variable domain of TCR clone 134618 (TRBV18, TRBJ1-5)
CASSPSDRSNQPQHF

SEQ ID NO: 269237 - protein, 13 aa, Homo sapiens
  CDR3 for alpha chain variable domain of TCR clone 134619 (TRAV2, TRAJ40)
CAVVTSGTYKYIF

SEQ ID NO: 269238 - protein, 16 aa, Homo sapiens
  CDR3 for beta chain variable domain of TCR clone 134619 (TRBV19, TRBJ2-3)
CASSPGAASRTDTQYF

SEQ ID NO: 269239 - protein, 12 aa, Homo sapiens
  CDR3 for alpha chain variable domain of TCR clone 134620 (TRAV17, TRAJ12)
CATLRSSYKLIF

SEQ ID NO: 269240 - protein, 16 aa, Homo sapiens
  CDR3 for beta chain variable domain of TCR clone 134620 (TRBV28, TRBJ2-7)
CASSLFFETGGPELYF

SEQ ID NO: 269241 - protein, 15 aa, Homo sapiens
  CDR3 for alpha chain variable domain of TCR clone 134621 (TRAV17, TRAJ37)
CATDGGSSNTGKLIF

SEQ ID NO: 269242 - protein, 15 aa, Homo sapiens
  CDR3 for beta chain variable domain of TCR clone 134621 (TRBV28, TRBJ2-5)
CASSAGRTIQETQYF

SEQ ID NO: 269243 - protein, 17 aa, Homo sapiens
  CDR3 for alpha chain variable domain of TCR clone 134622 (TRAV17, TRAJ28)
YATDPRRGGAGSYQLTF

SEQ ID NO: 269244 - protein, 16 aa, Homo sapiens
  CDR3 for beta chain variable domain of TCR clone 134622 (TRBV25-1, TRBJ1-1)
CASSGDRDRGRIEAFF

SEQ ID NO: 269245 - protein, 12 aa, Homo sapiens
  CDR3 for alpha chain variable domain of TCR clone 134623 (TRAV2, TRAJ10)
CASTGGGNKLTF

SEQ ID NO: 269246 - protein, 12 aa, Homo sapiens
  CDR3 for beta chain variable domain of TCR clone 134623 (TRBV7-9, TRBJ1-5)
CASSPQGQPQHF

SEQ ID NO: 269247 - protein, 17 aa, Homo sapiens
  CDR3 for alpha chain variable domain of TCR clone 134624 (TRAV13-1, TRAJ5)
CSNPSLSRDTGRGALTF

SEQ ID NO: 269248 - protein, 17 aa, Homo sapiens
  CDR3 for beta chain variable domain of TCR clone 134624 (TRBV24-1, TRBJ2-1)
CATSDVSTSGTYNEQFF

SEQ ID NO: 269249 - protein, 15 aa, Homo sapiens
  CDR3 for alpha chain variable domain of TCR clone 134625 (TRAV12-3, TRAJ6)
CAMSETSGGSYIPTF

SEQ ID NO: 269250 - protein, 11 aa, Homo sapiens
  CDR3 for beta chain variable domain of TCR clone 134625 (TRBV20-1, TRBJ1-5)
CSAQGDQPQHF

SEQ ID NO: 269251 - protein, 17 aa, Homo sapiens
  CDR3 for alpha chain variable domain of TCR clone 134626 (TRAV3, TRAJ6)
CAVRDGPRAGGSYIPTF

SEQ ID NO: 269252 - protein, 14 aa, Homo sapiens
  CDR3 for beta chain variable domain of TCR clone 134626 (TRBV7-9, TRBJ2-5)
CASSLDTAQETQYF

SEQ ID NO: 269253 - protein, 12 aa, Homo sapiens
  CDR3 for alpha chain variable domain of TCR clone 134627 (TRAV3, TRAJ43)
CGVRDPNNDMRF

SEQ ID NO: 269254 - protein, 15 aa, Homo sapiens
  CDR3 for beta chain variable domain of TCR clone 134627 (TRBV27, TRBJ1-5)
CASSLGTGFDQPQHF

SEQ ID NO: 269255 - protein, 16 aa, Homo sapiens
  CDR3 for alpha chain variable domain of TCR clone 134628 (TRAV38-1, TRAJ56)
CAFMKRQTGANSKLTF

SEQ ID NO: 269256 - protein, 12 aa, Homo sapiens
  CDR3 for beta chain variable domain of TCR clone 134628 (TRBV7-9, TRBJ2-7)
CASSIKREEQYF

SEQ ID NO: 269257 - protein, 16 aa, Homo sapiens
  CDR3 for alpha chain variable domain of TCR clone 134629 (TRAV30, TRAJ24)
CGTEVADADSWGKFQF

SEQ ID NO: 269258 - protein, 14 aa, Homo sapiens
  CDR3 for beta chain variable domain of TCR clone 134629 (TRBV12-5, TRBJ2-5)
CASGSRTHQETQYF

SEQ ID NO: 269259 - protein, 14 aa, Homo sapiens
  CDR3 for alpha chain variable domain of TCR clone 134630 (TRAV38-1, TRAJ45)
CASHSGGGADGLTF

SEQ ID NO: 269260 - protein, 13 aa, Homo sapiens
  CDR3 for beta chain variable domain of TCR clone 134630 (TRBV10-3, TRBJ1-2)
CAISERDSYGHTF

SEQ ID NO: 269261 - protein, 14 aa, Homo sapiens
  CDR3 for alpha chain variable domain of TCR clone 134631 (TRAV12-2, TRAJ9)
CAVSFGTGGFKTIF

SEQ ID NO: 269262 - protein, 15 aa, Homo sapiens
  CDR3 for beta chain variable domain of TCR clone 134631 (TRBV11-2, TRBJ2-2)
CASSSDRVNAGELFF

SEQ ID NO: 269263 - protein, 14 aa, Homo sapiens
  CDR3 for alpha chain variable domain of TCR clone 134632 (TRAV8-4, TRAJ13)
CAVTLSGGYQKVTF

SEQ ID NO: 269264 - protein, 13 aa, Homo sapiens
  CDR3 for beta chain variable domain of TCR clone 134632 (TRBV7-9, TRBJ2-7)
CASSFAGAYEQYF

SEQ ID NO: 269265 - protein, 13 aa, Homo sapiens
  CDR3 for alpha chain variable domain of TCR clone 134633 (TRAV24, TRAJ44)
CALLTGTASKLTF

SEQ ID NO: 269266 - protein, 14 aa, Homo sapiens
  CDR3 for beta chain variable domain of TCR clone 134633 (TRBV11-2, TRBJ1-2)
CASSLGTANYGYTF

SEQ ID NO: 269267 - protein, 14 aa, Homo sapiens
  CDR3 for alpha chain variable domain of TCR clone 134634 (TRAV1-2, TRAJ16)
CAVNRFSNGQKLLF

SEQ ID NO: 269268 - protein, 14 aa, Homo sapiens
  CDR3 for beta chain variable domain of TCR clone 134634 (TRBV7-2, TRBJ2-7)
CASSPKTSFYEQYF

SEQ ID NO: 269269 - protein, 17 aa, Homo sapiens
  CDR3 for alpha chain variable domain of TCR clone 134635 (TRAV13-1, TRAJ32)
CAASNGWWCYKQAHLLN

SEQ ID NO: 269270 - protein, 15 aa, Homo sapiens
  CDR3 for beta chain variable domain of TCR clone 134635 (TRBV20-1, TRBJ1-2)
CSAIRTGAFNYGYTF

SEQ ID NO: 269271 - protein, 15 aa, Homo sapiens
  CDR3 for alpha chain variable domain of TCR clone 134636 (TRAV21, TRAJ24)
CAAQSSTDSWGKLQF

SEQ ID NO: 269272 - protein, 13 aa, Homo sapiens
  CDR3 for beta chain variable domain of TCR clone 134636 (TRBV11-2, TRBJ2-5)
CASSSTGEETQYF

SEQ ID NO: 269273 - protein, 12 aa, Homo sapiens
  CDR3 for alpha chain variable domain of TCR clone 134637 (TRAV23/DV6, TRAJ58)
CAARLLRGETSG

SEQ ID NO: 269274 - protein, 14 aa, Homo sapiens
  CDR3 for beta chain variable domain of TCR clone 134637 (TRBV7-2, TRBJ2-7)
CASRSQGAAYEQYF

SEQ ID NO: 269275 - protein, 13 aa, Homo sapiens
  CDR3 for alpha chain variable domain of TCR clone 134638 (TRAV2, TRAJ24)
CAVTTDSWGRLQF

SEQ ID NO: 269276 - protein, 14 aa, Homo sapiens
  CDR3 for beta chain variable domain of TCR clone 134638 (TRBV13, TRBJ2-5)
CASSLGRGQETQYF

SEQ ID NO: 269277 - protein, 14 aa, Homo sapiens
  CDR3 for alpha chain variable domain of TCR clone 134639 (TRAV1-2, TRAJ8)
CAVREDTGFQKLVS

SEQ ID NO: 269278 - protein, 13 aa, Homo sapiens
  CDR3 for beta chain variable domain of TCR clone 134639 (TRBV10-3, TRBJ1-2)
CAISERDSYGYTF

SEQ ID NO: 269279 - protein, 14 aa, Homo sapiens
  CDR3 for alpha chain variable domain of TCR clone 134640 (TRAV26-2, TRAJ31)
CILIPGNNNARPMF

SEQ ID NO: 269280 - protein, 16 aa, Homo sapiens
  CDR3 for beta chain variable domain of TCR clone 134640 (TRBV7-3, TRBJ2-1)
CASSLVSGSPNNEQFF

SEQ ID NO: 269281 - protein, 16 aa, Homo sapiens
  CDR3 for alpha chain variable domain of TCR clone 134641 (TRAV12-3, TRAJ53)
CAMSPGSGGSNYKLTF

SEQ ID NO: 269282 - protein, 18 aa, Homo sapiens
  CDR3 for beta chain variable domain of TCR clone 134641 (TRBV18, TRBJ2-3)
CASSYTSGAAGGTDTQYF

SEQ ID NO: 269283 - protein, 13 aa, Homo sapiens
  CDR3 for alpha chain variable domain of TCR clone 134642 (TRAV36/DV7, TRAJ54)
CAVCTQGAQQLVF

SEQ ID NO: 269284 - protein, 13 aa, Homo sapiens
  CDR3 for beta chain variable domain of TCR clone 134642 (TRBV7-6, TRBJ2-7)
CASSLDHTHEQYF

SEQ ID NO: 269285 - protein, 13 aa, Homo sapiens
  CDR3 for alpha chain variable domain of TCR clone 134643 (TRAV24, TRAJ23)
CASHWNQGRKLIF

SEQ ID NO: 269286 - protein, 13 aa, Homo sapiens
  CDR3 for beta chain variable domain of TCR clone 134643 (TRBV13, TRBJ2-1)
CASILGGRGEQFF

SEQ ID NO: 269287 - protein, 13 aa, Homo sapiens
  CDR3 for alpha chain variable domain of TCR clone 134644 (TRAV16, TRAJ26)
CITVLCLGQNFVF

SEQ ID NO: 269288 - protein, 12 aa, Homo sapiens
  CDR3 for beta chain variable domain of TCR clone 134644 (TRBV11-2, TRBJ2-1)
CASSTGNNEQFF

SEQ ID NO: 269289 - protein, 14 aa, Homo sapiens
  CDR3 for alpha chain variable domain of TCR clone 134645 (TRAV1-2, TRAJ16)
CAVNRFSDGQKMLF

SEQ ID NO: 269290 - protein, 16 aa, Homo sapiens
  CDR3 for beta chain variable domain of TCR clone 134645 (TRBV20-1, TRBJ1-4)
CSAPGQGLLTNEKLFF

SEQ ID NO: 269291 - protein, 18 aa, Homo sapiens
  CDR3 for alpha chain variable domain of TCR clone 134646 (TRAV29/DV5, TRAJ53)
CSVLLCSKRGGSNYKLPF

SEQ ID NO: 269292 - protein, 17 aa, Homo sapiens
  CDR3 for beta chain variable domain of TCR clone 134646 (TRBV7-8, TRBJ2-6)
CASSAGTGGAGANVLTF

SEQ ID NO: 269293 - protein, 11 aa, Homo sapiens
  CDR3 for alpha chain variable domain of TCR clone 134647 (TRAV12-3, TRAJ49)
CAANTGNQFYF

SEQ ID NO: 269294 - protein, 16 aa, Homo sapiens
  CDR3 for beta chain variable domain of TCR clone 134647 (TRBV7-9, TRBJ2-3)
CASSPWREVGTDKQYF

SEQ ID NO: 269295 - protein, 11 aa, Homo sapiens
  CDR3 for alpha chain variable domain of TCR clone 134648 (TRAV35, TRAJ30)
CAGERDDKIIF

SEQ ID NO: 269296 - protein, 13 aa, Homo sapiens
  CDR3 for beta chain variable domain of TCR clone 134648 (TRBV7-9, TRBJ1-2)
CASSLKQNYGYTF

SEQ ID NO: 269297 - protein, 11 aa, Homo sapiens
  CDR3 for alpha chain variable domain of TCR clone 134649 (TRAV3, TRAJ21)
CAVGNFNKFYF

SEQ ID NO: 269298 - protein, 17 aa, Homo sapiens
  CDR3 for beta chain variable domain of TCR clone 134649 (TRBV24-1, TRBJ2-1)
CATSDVSTSGTYNDQFF

SEQ ID NO: 269299 - protein, 15 aa, Homo sapiens
  CDR3 for alpha chain variable domain of TCR clone 134650 (TRAV3, TRAJ13)
CAVRVYSGGYQKVTF

SEQ ID NO: 269300 - protein, 13 aa, Homo sapiens
  CDR3 for beta chain variable domain of TCR clone 134650 (TRBV28, TRBJ1-2)
CAGRDRGNYGYTF

SEQ ID NO: 269301 - protein, 17 aa, Homo sapiens
  CDR3 for alpha chain variable domain of TCR clone 134651 (TRAV3, TRAJ6)
CAVRDGPRAGGSYIPTS

SEQ ID NO: 269302 - protein, 13 aa, Homo sapiens
  CDR3 for beta chain variable domain of TCR clone 134651 (TRBV19, TRBJ2-7)
CASSIDRTYEQYF

SEQ ID NO: 269303 - protein, 18 aa, Homo sapiens
  CDR3 for alpha chain variable domain of TCR clone 134652 (TRAV21, TRAJ52)
CAVSPSPAGGTSYGKLTF

SEQ ID NO: 269304 - protein, 17 aa, Homo sapiens
  CDR3 for beta chain variable domain of TCR clone 134652 (TRBV13, TRBJ2-3)
CASSLSRVGGGRNTQYF

SEQ ID NO: 269305 - protein, 14 aa, Homo sapiens
  CDR3 for alpha chain variable domain of TCR clone 134653 (TRAV4, TRAJ17)
CLVGDMAAGNKLTF

SEQ ID NO: 269306 - protein, 14 aa, Homo sapiens
  CDR3 for beta chain variable domain of TCR clone 134653 (TRBV4-1, TRBJ2-7)
CASSPVAGGDEHYF

SEQ ID NO: 269307 - protein, 15 aa, Homo sapiens
  CDR3 for alpha chain variable domain of TCR clone 134654 (TRAV13-1, TRAJ17)
CAESIERAAGNKLTF

SEQ ID NO: 269308 - protein, 13 aa, Homo sapiens
  CDR3 for beta chain variable domain of TCR clone 134654 (TRBV7-7, TRBJ2-3)
CASSLSRADTQYF

SEQ ID NO: 269309 - protein, 13 aa, Homo sapiens
  CDR3 for alpha chain variable domain of TCR clone 134655 (TRAV12-2, TRAJ15)
CAVFNQAGTALIF

SEQ ID NO: 269310 - protein, 15 aa, Homo sapiens
  CDR3 for beta chain variable domain of TCR clone 134655 (TRBV7-8, TRBJ1-5)
WASSRGGGADQPQHF

SEQ ID NO: 269311 - protein, 12 aa, Homo sapiens
  CDR3 for alpha chain variable domain of TCR clone 134656 (TRAV12-3, TRAJ20)
CAMVRGDYKVSF

SEQ ID NO: 269312 - protein, 12 aa, Homo sapiens
  CDR3 for beta chain variable domain of TCR clone 134656 (TRBV6-1, TRBJ2-7)
CASSDYSYEQYF

SEQ ID NO: 269313 - protein, 17 aa, Homo sapiens
  CDR3 for alpha chain variable domain of TCR clone 134657 (TRAV26-1, TRAJ46)
IASSESEKKSSGNKLTF

SEQ ID NO: 269314 - protein, 16 aa, Homo sapiens
  CDR3 for beta chain variable domain of TCR clone 134657 (TRBV27, TRBJ2-2)
CASSFRGLVRTGELFF

SEQ ID NO: 269315 - protein, 14 aa, Homo sapiens
  CDR3 for alpha chain variable domain of TCR clone 134658 (TRAV3, TRAJ27)
CAVRDDTNAGKSTF

SEQ ID NO: 269316 - protein, 13 aa, Homo sapiens
  CDR3 for beta chain variable domain of TCR clone 134658 (TRBV10-2, TRBJ2-7)
CASGASGGYEQYF

SEQ ID NO: 269317 - protein, 17 aa, Homo sapiens
  CDR3 for alpha chain variable domain of TCR clone 134659 (TRAV12-1, TRAJ13)
CVVNKRGEFWGLPESYL

SEQ ID NO: 269318 - protein, 12 aa, Homo sapiens
  CDR3 for beta chain variable domain of TCR clone 134659 (TRBV12-4, TRBJ2-3)
CASSLGQDTQYF

SEQ ID NO: 269319 - protein, 14 aa, Homo sapiens
  CDR3 for alpha chain variable domain of TCR clone 134660 (TRAV27, TRAJ22)
CAGLPSGSASTLTF

SEQ ID NO: 269320 - protein, 13 aa, Homo sapiens
  CDR3 for beta chain variable domain of TCR clone 134660 (TRBV7-2, TRBJ2-7)
CASSSPSGSEQYF

SEQ ID NO: 269321 - protein, 12 aa, Homo sapiens
  CDR3 for alpha chain variable domain of TCR clone 134661 (TRAV8-4, TRAJ43)
CAVSVNNNDMRF

SEQ ID NO: 269322 - protein, 13 aa, Homo sapiens
  CDR3 for beta chain variable domain of TCR clone 134661 (TRBV29-1, TRBJ1-1)
CSVGDSRNTEAFF

SEQ ID NO: 269323 - protein, 10 aa, Homo sapiens
  CDR3 for alpha chain variable domain of TCR clone 134662 (TRAV3, TRAJ30)
CAGREIEIIF

SEQ ID NO: 269324 - protein, 14 aa, Homo sapiens
  CDR3 for beta chain variable domain of TCR clone 134662 (TRBV15, TRBJ2-3)
CATRSGTSTDTQYF

SEQ ID NO: 269325 - protein, 15 aa, Homo sapiens
  CDR3 for alpha chain variable domain of TCR clone 134663 (TRAV3, TRAJ5)
CAVRDRKTGRRALTF

SEQ ID NO: 269326 - protein, 14 aa, Homo sapiens
  CDR3 for beta chain variable domain of TCR clone 134663 (TRBV15, TRBJ2-1)
CATSGVEDYNEQFF

SEQ ID NO: 269327 - protein, 14 aa, Homo sapiens
  CDR3 for alpha chain variable domain of TCR clone 134664 (TRAV16, TRAJ33)
CALSAMDSNYQLIR

SEQ ID NO: 269328 - protein, 16 aa, Homo sapiens
  CDR3 for beta chain variable domain of TCR clone 134664 (TRBV25-1, TRBJ2-7)
CASSELTGGGIYEQYF

SEQ ID NO: 269329 - protein, 19 aa, Homo sapiens
  CDR3 for alpha chain variable domain of TCR clone 134665 (TRAV38-1, TRAJ53)
CAFMKHGLESGGSIYKLTF

SEQ ID NO: 269330 - protein, 13 aa, Homo sapiens
  CDR3 for beta chain variable domain of TCR clone 134665 (TRBV19, TRBJ2-7)
CASSPRQSYEQYF

SEQ ID NO: 269331 - protein, 17 aa, Homo sapiens
  CDR3 for alpha chain variable domain of TCR clone 134666 (TRAV36/DV7, TRAJ52)
CAVAQRAGGTSYGKMTF

SEQ ID NO: 269332 - protein, 15 aa, Homo sapiens
  CDR3 for beta chain variable domain of TCR clone 134666 (TRBV6-5, TRBJ1-2)
CASSYSQAFNYGYTF

SEQ ID NO: 269333 - protein, 16 aa, Homo sapiens
  CDR3 for alpha chain variable domain of TCR clone 134667 (TRAV30, TRAJ24)
CGTEIVAADSWGKLQF

SEQ ID NO: 269334 - protein, 14 aa, Homo sapiens
  CDR3 for beta chain variable domain of TCR clone 134667 (TRBV12-5, TRBJ2-5)
CASGSRTHQETQYF

SEQ ID NO: 269335 - protein, 12 aa, Homo sapiens
  CDR3 for alpha chain variable domain of TCR clone 134668 (TRAV25, TRAJ11)
CAGASGYSTLTF

SEQ ID NO: 269336 - protein, 15 aa, Homo sapiens
  CDR3 for beta chain variable domain of TCR clone 134668 (TRBV7-9, TRBJ2-2)
CASSPETGAGGELFF

SEQ ID NO: 269337 - protein, 14 aa, Homo sapiens
  CDR3 for alpha chain variable domain of TCR clone 134669 (TRAV21, TRAJ35)
CAEMPIGFGNVLHC

SEQ ID NO: 269338 - protein, 13 aa, Homo sapiens
  CDR3 for beta chain variable domain of TCR clone 134669 (TRBV23-1, TRBJ1-4)
CASRGKFNEKLFF

SEQ ID NO: 269339 - protein, 15 aa, Homo sapiens
  CDR3 for alpha chain variable domain of TCR clone 134670 (TRAV3, TRAJ5)
CAVRDRKTGRRALTF

SEQ ID NO: 269340 - protein, 14 aa, Homo sapiens
  CDR3 for beta chain variable domain of TCR clone 134670 (TRBV2, TRBJ2-1)
CASRTGSSYNEQFF

SEQ ID NO: 269341 - protein, 15 aa, Homo sapiens
  CDR3 for alpha chain variable domain of TCR clone 134671 (TRAV3, TRAJ5)
CAVCDLDTGRRALTF

SEQ ID NO: 269342 - protein, 13 aa, Homo sapiens
  CDR3 for beta chain variable domain of TCR clone 134671 (TRBV12-4, TRBJ2-7)
CASSPTETYEQYF

SEQ ID NO: 269343 - protein, 16 aa, Homo sapiens
  CDR3 for alpha chain variable domain of TCR clone 134672 (TRAV3, TRAJ37)
CAVRPHGSGNTGKLIF

SEQ ID NO: 269344 - protein, 18 aa, Homo sapiens
  CDR3 for beta chain variable domain of TCR clone 134672 (TRBV6-5, TRBJ2-5)
CASSYSQAGGSYQETQYF

SEQ ID NO: 269345 - protein, 12 aa, Homo sapiens
  CDR3 for alpha chain variable domain of TCR clone 134673 (TRAV21, TRAJ37)
CAVRGNTGKLIF

SEQ ID NO: 269346 - protein, 20 aa, Homo sapiens
  CDR3 for beta chain variable domain of TCR clone 134673 (TRBV7-8, TRBJ2-2)
CASSHLFPGPTIHITGELFF

SEQ ID NO: 269347 - protein, 16 aa, Homo sapiens
  CDR3 for alpha chain variable domain of TCR clone 134674 (TRAV3, TRAJ10)
CAVRDMRSGGGKKLTF

SEQ ID NO: 269348 - protein, 13 aa, Homo sapiens
  CDR3 for beta chain variable domain of TCR clone 134674 (TRBV12-4, TRBJ2-7)
CASSPTETYEQYF

SEQ ID NO: 269349 - protein, 16 aa, Homo sapiens
  CDR3 for alpha chain variable domain of TCR clone 134675 (TRAV16, TRAJ57)
FAPYLITQGGSEKLVF

SEQ ID NO: 269350 - protein, 17 aa, Homo sapiens
  CDR3 for beta chain variable domain of TCR clone 134675 (TRBV24-1, TRBJ2-4)
CATSGAEARGVRNIQYF

SEQ ID NO: 269351 - protein, 14 aa, Homo sapiens
  CDR3 for alpha chain variable domain of TCR clone 134676 (TRAV1-2, TRAJ16)
CAVNRFSDGQKLLF

SEQ ID NO: 269352 - protein, 17 aa, Homo sapiens
  CDR3 for beta chain variable domain of TCR clone 134676 (TRBV11-2, TRBJ2-1)
CASSLYPPGVEYSEQFF

SEQ ID NO: 269353 - protein, 13 aa, Homo sapiens
  CDR3 for alpha chain variable domain of TCR clone 134677 (TRAV25, TRAJ10)
CAGRTGGGNKLTF

SEQ ID NO: 269354 - protein, 17 aa, Homo sapiens
  CDR3 for beta chain variable domain of TCR clone 134677 (TRBV7-3, TRBJ2-3)
CASSLMKRMRGADTQYF

SEQ ID NO: 269355 - protein, 14 aa, Homo sapiens
  CDR3 for alpha chain variable domain of TCR clone 134678 (TRAV12-2, TRAJ45)
CAVNTGGGADGLTF

SEQ ID NO: 269356 - protein, 13 aa, Homo sapiens
  CDR3 for beta chain variable domain of TCR clone 134678 (TRBV19, TRBJ2-2)
CASSIWSTGELFF

SEQ ID NO: 269357 - protein, 14 aa, Homo sapiens
  CDR3 for alpha chain variable domain of TCR clone 134679 (TRAV12-3, TRAJ58)
CAMSTETSGPRLTF

SEQ ID NO: 269358 - protein, 15 aa, Homo sapiens
  CDR3 for beta chain variable domain of TCR clone 134679 (TRBV4-1, TRBJ1-4)
CASSDTGGTNEKLFL

SEQ ID NO: 269359 - protein, 13 aa, Homo sapiens
  CDR3 for alpha chain variable domain of TCR clone 134680 (TRAV21, TRAJ36)
CAVIKTGANNLFF

SEQ ID NO: 269360 - protein, 13 aa, Homo sapiens
  CDR3 for beta chain variable domain of TCR clone 134680 (TRBV29-1, TRBJ2-3)
CSGTRGGRDTQYF

SEQ ID NO: 269361 - protein, 13 aa, Homo sapiens
  CDR3 for alpha chain variable domain of TCR clone 134681 (TRAV12-1, TRAJ16)
CVVNTRNGQKLLF

SEQ ID NO: 269362 - protein, 19 aa, Homo sapiens
  CDR3 for beta chain variable domain of TCR clone 134681 (TRBV6-1, TRBJ2-5)
CASSRVGAGGPGLEETQYF

SEQ ID NO: 269363 - protein, 13 aa, Homo sapiens
  CDR3 for alpha chain variable domain of TCR clone 134682 (TRAV17, TRAJ26)
CTTVDNYGQNFVF

SEQ ID NO: 269364 - protein, 16 aa, Homo sapiens
  CDR3 for beta chain variable domain of TCR clone 134682 (TRBV2, TRBJ2-1)
CARSVGGSLSYNEQFF

SEQ ID NO: 269365 - protein, 12 aa, Homo sapiens
  CDR3 for alpha chain variable domain of TCR clone 134683 (TRAV12-2, TRAJ7)
CAVMRGNNRPAF

SEQ ID NO: 269366 - protein, 17 aa, Homo sapiens
  CDR3 for beta chain variable domain of TCR clone 134683 (TRBV7-9, TRBJ2-3)
CASSPTVAGDLTDTQYF

SEQ ID NO: 269367 - protein, 15 aa, Homo sapiens
  CDR3 for alpha chain variable domain of TCR clone 134684 (TRAV3, TRAJ47)
CAVRDIGEYGNKLVF

SEQ ID NO: 269368 - protein, 13 aa, Homo sapiens
  CDR3 for beta chain variable domain of TCR clone 134684 (TRBV2, TRBJ1-4)
CASSELGVEKLFF

SEQ ID NO: 269369 - protein, 11 aa, Homo sapiens
  CDR3 for alpha chain variable domain of TCR clone 134685 (TRAV3, TRAJ21)
CAVGNFNKFYF

SEQ ID NO: 269370 - protein, 17 aa, Homo sapiens
  CDR3 for beta chain variable domain of TCR clone 134685 (TRBV24-1, TRBJ2-5)
CATSDATSGDPQETQYF

SEQ ID NO: 269371 - protein, 16 aa, Homo sapiens
  CDR3 for alpha chain variable domain of TCR clone 134686 (TRAV3, TRAJ10)
CAVRDMRAGGGNKLTF

SEQ ID NO: 269372 - protein, 15 aa, Homo sapiens
  CDR3 for beta chain variable domain of TCR clone 134686 (TRBV10-3, TRBJ2-5)
CAISEFGRGQETQYF

SEQ ID NO: 269373 - protein, 16 aa, Homo sapiens
  CDR3 for alpha chain variable domain of TCR clone 134687 (TRAV12-2, TRAJ10)
CAVNRVLTGGGNKLTF

SEQ ID NO: 269374 - protein, 13 aa, Homo sapiens
  CDR3 for beta chain variable domain of TCR clone 134687 (TRBV4-1, TRBJ2-1)
CASSQAGGDEQFF

SEQ ID NO: 269375 - protein, 13 aa, Homo sapiens
  CDR3 for alpha chain variable domain of TCR clone 134688 (TRAV27, TRAJ29)
CAGAHSGNTPLVF

SEQ ID NO: 269376 - protein, 16 aa, Homo sapiens
  CDR3 for beta chain variable domain of TCR clone 134688 (TRBV7-9, TRBJ2-7)
CASSIGQGRASSTSGR

SEQ ID NO: 269377 - protein, 14 aa, Homo sapiens
  CDR3 for alpha chain variable domain of TCR clone 134689 (TRAV8-3, TRAJ15)
CAVGRHQAGTALIF

SEQ ID NO: 269378 - protein, 15 aa, Homo sapiens
  CDR3 for beta chain variable domain of TCR clone 134689 (TRBV19, TRBJ1-2)
CASSVGQVLNYGYTF

SEQ ID NO: 269379 - protein, 13 aa, Homo sapiens
  CDR3 for alpha chain variable domain of TCR clone 134690 (TRAV8-6, TRAJ24)
CAVSSDSWGKLQF

SEQ ID NO: 269380 - protein, 15 aa, Homo sapiens
  CDR3 for beta chain variable domain of TCR clone 134690 (TRBV6-5, TRBJ2-1)
CASSYDAGAGNEQFF

SEQ ID NO: 269381 - protein, 14 aa, Homo sapiens
  CDR3 for alpha chain variable domain of TCR clone 134691 (TRAV12-1, TRAJ5)
CVVTGDTGRRALTF

SEQ ID NO: 269382 - protein, 15 aa, Homo sapiens
  CDR3 for beta chain variable domain of TCR clone 134691 (TRBV4-1, TRBJ1-4)
CASSDTGGTNEKLFF

SEQ ID NO: 269383 - protein, 22 aa, Homo sapiens
  CDR3 for alpha chain variable domain of TCR clone 134692 (TRAV12-2, TRAJ32)
CSSETPSPVIQPPKSATNKLIF

SEQ ID NO: 269384 - protein, 15 aa, Homo sapiens
  CDR3 for beta chain variable domain of TCR clone 134692 (TRBV28, TRBJ2-7)
CASSADRGRGETQYF

SEQ ID NO: 269385 - protein, 13 aa, Homo sapiens
  CDR3 for alpha chain variable domain of TCR clone 134693 (TRAV8-1, TRAJ28)
CAVSGAGSYQLTF

SEQ ID NO: 269386 - protein, 14 aa, Homo sapiens
  CDR3 for beta chain variable domain of TCR clone 134693 (TRBV7-2, TRBJ2-2)
CASRGQGAAGEVFF

SEQ ID NO: 269387 - protein, 14 aa, Homo sapiens
  CDR3 for alpha chain variable domain of TCR clone 134694 (TRAV12-2, TRAJ53)
CAVTGGGSNYKLTL

SEQ ID NO: 269388 - protein, 15 aa, Homo sapiens
  CDR3 for beta chain variable domain of TCR clone 134694 (TRBV11-2, TRBJ2-2)
CASSSDRVNAGELFF

SEQ ID NO: 269389 - protein, 12 aa, Homo sapiens
  CDR3 for alpha chain variable domain of TCR clone 134695 (TRAV12-1, TRAJ40)
CVVPSGTYKYIF

SEQ ID NO: 269390 - protein, 15 aa, Homo sapiens
  CDR3 for beta chain variable domain of TCR clone 134695 (TRBV12-4, TRBJ2-1)
CASSPLSGRNSEQCF

SEQ ID NO: 269391 - protein, 15 aa, Homo sapiens
  CDR3 for alpha chain variable domain of TCR clone 134696 (TRAV12-2, TRAJ53)
CAVNGGGGSNYKLTF

SEQ ID NO: 269392 - protein, 15 aa, Homo sapiens
  CDR3 for beta chain variable domain of TCR clone 134696 (TRBV2, TRBJ2-7)
CASTRLGSGATEQYF

SEQ ID NO: 269393 - protein, 15 aa, Homo sapiens
  CDR3 for alpha chain variable domain of TCR clone 134697 (TRAV26-1, TRAJ48)
CIARWSWFGNEKLIF

SEQ ID NO: 269394 - protein, 12 aa, Homo sapiens
  CDR3 for beta chain variable domain of TCR clone 134697 (TRBV19, TRBJ2-5)
CASSISEETQYF

SEQ ID NO: 269395 - protein, 11 aa, Homo sapiens
  CDR3 for alpha chain variable domain of TCR clone 134698 (TRAV3, TRAJ21)
CAVGNFNKFYF

SEQ ID NO: 269396 - protein, 16 aa, Homo sapiens
  CDR3 for beta chain variable domain of TCR clone 134698 (TRBV19, TRBJ2-1)
GAGSKAGPSSYNEQFF

SEQ ID NO: 269397 - protein, 12 aa, Homo sapiens
  CDR3 for alpha chain variable domain of TCR clone 134699 (TRAV38-2/DV8, TRAJ48)
CALLSGNEKLTF

SEQ ID NO: 269398 - protein, 15 aa, Homo sapiens
  CDR3 for beta chain variable domain of TCR clone 134699 (TRBV9, TRBJ1-6)
CASSVAGTGDSPLHF

SEQ ID NO: 269399 - protein, 14 aa, Homo sapiens
  CDR3 for alpha chain variable domain of TCR clone 134700 (TRAV13-1, TRAJ35)
CAASKGGFGNVLHF

SEQ ID NO: 269400 - protein, 13 aa, Homo sapiens
  CDR3 for beta chain variable domain of TCR clone 134700 (TRBV7-3, TRBJ1-1)
CASRQDWGAEAFF

SEQ ID NO: 269401 - protein, 10 aa, Homo sapiens
  CDR3 for alpha chain variable domain of TCR clone 134701 (TRAV1-2, TRAJ20)
CALNDYKLSF

SEQ ID NO: 269402 - protein, 16 aa, Homo sapiens
  CDR3 for beta chain variable domain of TCR clone 134701 (TRBV20-1, TRBJ1-1)
CSASTLTQGMNTEAFF

SEQ ID NO: 269403 - protein, 13 aa, Homo sapiens
  CDR3 for alpha chain variable domain of TCR clone 134702 (TRAV3, TRAJ27)
CAVRPLCAGKSTF

SEQ ID NO: 269404 - protein, 13 aa, Homo sapiens
  CDR3 for beta chain variable domain of TCR clone 134702 (TRBV7-9, TRBJ2-3)
CASSPGSSDTQYF

SEQ ID NO: 269405 - protein, 14 aa, Homo sapiens
  CDR3 for alpha chain variable domain of TCR clone 134703 (TRAV26-1, TRAJ39)
CIVRGSRAGNMPTF

SEQ ID NO: 269406 - protein, 11 aa, Homo sapiens
  CDR3 for beta chain variable domain of TCR clone 134703 (TRBV12-4, TRBJ2-3)
CASTATDTQYF

SEQ ID NO: 269407 - protein, 12 aa, Homo sapiens
  CDR3 for alpha chain variable domain of TCR clone 134704 (TRAV12-3, TRAJ20)
RAMVRGDYKLSF

SEQ ID NO: 269408 - protein, 11 aa, Homo sapiens
  CDR3 for beta chain variable domain of TCR clone 134704 (TRBV29-1, TRBJ2-5)
CSEDRTGTQYF

SEQ ID NO: 269409 - protein, 14 aa, Homo sapiens
  CDR3 for alpha chain variable domain of TCR clone 134705 (TRAV2, TRAJ29)
CAVTPPSGNTPLVF

SEQ ID NO: 269410 - protein, 15 aa, Homo sapiens
  CDR3 for beta chain variable domain of TCR clone 134705 (TRBV5-7, TRBJ2-1)
CASSLTGQVYNEQFF

SEQ ID NO: 269411 - protein, 15 aa, Homo sapiens
  CDR3 for alpha chain variable domain of TCR clone 134706 (TRAV3, TRAJ4)
CAVRDGTGGYNKLIF

SEQ ID NO: 269412 - protein, 14 aa, Homo sapiens
  CDR3 for beta chain variable domain of TCR clone 134706 (TRBV19, TRBJ2-1)
CASPTFVLSGEQFL

SEQ ID NO: 269413 - protein, 13 aa, Homo sapiens
  CDR3 for alpha chain variable domain of TCR clone 134707 (TRAV25, TRAJ47)
CAGHREYGNKLVF

SEQ ID NO: 269414 - protein, 17 aa, Homo sapiens
  CDR3 for beta chain variable domain of TCR clone 134707 (TRBV7-8, TRBJ2-5)
CASSLASGGRFQETQYL

SEQ ID NO: 269415 - protein, 14 aa, Homo sapiens
  CDR3 for alpha chain variable domain of TCR clone 134708 (TRAV26-1, TRAJ38)
CIADNAGNNRKLIW

SEQ ID NO: 269416 - protein, 13 aa, Homo sapiens
  CDR3 for beta chain variable domain of TCR clone 134708 (TRBV20-1, TRBJ1-1)
CSARGGGITEAFF

SEQ ID NO: 269417 - protein, 14 aa, Homo sapiens
  CDR3 for alpha chain variable domain of TCR clone 134709 (TRAV12-2, TRAJ13)
CAVKKTGGYQKVTF

SEQ ID NO: 269418 - protein, 14 aa, Homo sapiens
  CDR3 for beta chain variable domain of TCR clone 134709 (TRBV28, TRBJ2-5)
CQQPPWSYQETQYF

SEQ ID NO: 269419 - protein, 16 aa, Homo sapiens
  CDR3 for alpha chain variable domain of TCR clone 134710 (TRAV30, TRAJ24)
CGTEIVDADSWGKFQF

SEQ ID NO: 269420 - protein, 13 aa, Homo sapiens
  CDR3 for beta chain variable domain of TCR clone 134710 (TRBV11-2, TRBJ2-1)
CASSLRLTHEQFF

SEQ ID NO: 269421 - protein, 16 aa, Homo sapiens
  CDR3 for alpha chain variable domain of TCR clone 134711 (TRAV26-1, TRAJ52)
CIVSNAGGTSYGKLTF

SEQ ID NO: 269422 - protein, 16 aa, Homo sapiens
  CDR3 for beta chain variable domain of TCR clone 134711 (TRBV5-1, TRBJ2-1)
CARSLEGRGLYNEQFF

SEQ ID NO: 269423 - protein, 12 aa, Homo sapiens
  CDR3 for alpha chain variable domain of TCR clone 134712 (TRAV8-3, TRAJ26)
CAGDNYGQNFVF

SEQ ID NO: 269424 - protein, 14 aa, Homo sapiens
  CDR3 for beta chain variable domain of TCR clone 134712 (TRBV13, TRBJ2-7)
CASSLKGASYEQYF

SEQ ID NO: 269425 - protein, 14 aa, Homo sapiens
  CDR3 for alpha chain variable domain of TCR clone 134713 (TRAV2, TRAJ9)
CAVEDRSGGFTTIF

SEQ ID NO: 269426 - protein, 12 aa, Homo sapiens
  CDR3 for beta chain variable domain of TCR clone 134713 (TRBV7-9, TRBJ2-7)
CASSLEGYEQYF

SEQ ID NO: 269427 - protein, 14 aa, Homo sapiens
  CDR3 for alpha chain variable domain of TCR clone 134714 (TRAV1-2, TRAJ8)
CAVREDPGFQKLVF

SEQ ID NO: 269428 - protein, 12 aa, Homo sapiens
  CDR3 for beta chain variable domain of TCR clone 134714 (TRBV29-1, TRBJ2-7)
CSARDRPYEQYF

SEQ ID NO: 269429 - protein, 17 aa, Homo sapiens
  CDR3 for alpha chain variable domain of TCR clone 134715 (TRAV29/DV5, TRAJ29)
CAASEVLRGKHTSCLWK

SEQ ID NO: 269430 - protein, 15 aa, Homo sapiens
  CDR3 for beta chain variable domain of TCR clone 134715 (TRBV7-9, TRBJ1-5)
CASSQGHQPNQPRHF

SEQ ID NO: 269431 - protein, 20 aa, Homo sapiens
  CDR3 for alpha chain variable domain of TCR clone 134716 (TRAV8-3, TRAJ44)
LSTSVLWVRLYTGTASNLTF

SEQ ID NO: 269432 - protein, 15 aa, Homo sapiens
  CDR3 for beta chain variable domain of TCR clone 134716 (TRBV6-5, TRBJ1-2)
CASSYSQAFNYGYTF

SEQ ID NO: 269433 - protein, 13 aa, Homo sapiens
  CDR3 for alpha chain variable domain of TCR clone 134717 (TRAV21, TRAJ45)
RAVMGGGTDGLTF

SEQ ID NO: 269434 - protein, 16 aa, Homo sapiens
  CDR3 for beta chain variable domain of TCR clone 134717 (TRBV20-1, TRBJ2-1)
CSARDHLAGGRGEQFF

SEQ ID NO: 269435 - protein, 13 aa, Homo sapiens
  CDR3 for alpha chain variable domain of TCR clone 134718 (TRAV35, TRAJ33)
CAEQLYGVYQLIW

SEQ ID NO: 269436 - protein, 14 aa, Homo sapiens
  CDR3 for beta chain variable domain of TCR clone 134718 (TRBV7-2, TRBJ1-1)
CASSLGGAGTEAFF

SEQ ID NO: 269437 - protein, 13 aa, Homo sapiens
  CDR3 for alpha chain variable domain of TCR clone 134719 (TRAV20, TRAJ9)
CAVPDTGGFKTIF

SEQ ID NO: 269438 - protein, 15 aa, Homo sapiens
  CDR3 for beta chain variable domain of TCR clone 134719 (TRBV27, TRBJ2-7)
CASSKAGRGGYEEYF

SEQ ID NO: 269439 - protein, 13 aa, Homo sapiens
  CDR3 for alpha chain variable domain of TCR clone 134720 (TRAV14/DV4, TRAJ40)
CAMSGSGTYKYIF

SEQ ID NO: 269440 - protein, 15 aa, Homo sapiens
  CDR3 for beta chain variable domain of TCR clone 134720 (TRBV20-1, TRBJ2-7)
CSARDRVYGMDEQYF

SEQ ID NO: 269441 - protein, 13 aa, Homo sapiens
  CDR3 for alpha chain variable domain of TCR clone 134721 (TRAV20, TRAJ37)
CAGCSGNTGKLIF

SEQ ID NO: 269442 - protein, 11 aa, Homo sapiens
  CDR3 for beta chain variable domain of TCR clone 134721 (TRBV12-4, TRBJ2-3)
WPSTATDTQYF

SEQ ID NO: 269443 - protein, 14 aa, Homo sapiens
  CDR3 for alpha chain variable domain of TCR clone 134722 (TRAV8-4, TRAJ13)
CAVTLSGGYQKVTF

SEQ ID NO: 269444 - protein, 15 aa, Homo sapiens
  CDR3 for beta chain variable domain of TCR clone 134722 (TRBV7-2, TRBJ2-3)
CASSLVVRGPDTQYF

SEQ ID NO: 269445 - protein, 17 aa, Homo sapiens
  CDR3 for alpha chain variable domain of TCR clone 134723 (TRAV23/DV6, TRAJ53)
CAASKLGGGGSNYKLTF

SEQ ID NO: 269446 - protein, 14 aa, Homo sapiens
  CDR3 for beta chain variable domain of TCR clone 134723 (TRBV7-9, TRBJ2-3)
CASSLEQGTNTQYF

SEQ ID NO: 269447 - protein, 13 aa, Homo sapiens
  CDR3 for alpha chain variable domain of TCR clone 134724 (TRAV12-2, TRAJ18)
CAVRGSTLGRLYF

SEQ ID NO: 269448 - protein, 12 aa, Homo sapiens
  CDR3 for beta chain variable domain of TCR clone 134724 (TRBV6-3, TRBJ2-7)
CASSRQGYEQYF

SEQ ID NO: 269449 - protein, 19 aa, Homo sapiens
  CDR3 for alpha chain variable domain of TCR clone 134725 (TRAV1-2, TRAJ26)
CLLPLCCERPDNYGQNFFF

SEQ ID NO: 269450 - protein, 15 aa, Homo sapiens
  CDR3 for beta chain variable domain of TCR clone 134725 (TRBV9, TRBJ1-6)
CASSVAGTGDSPLHF

SEQ ID NO: 269451 - protein, 16 aa, Homo sapiens
  CDR3 for alpha chain variable domain of TCR clone 134726 (TRAV13-2, TRAJ53)
CAENANSGGSNYKLTF

SEQ ID NO: 269452 - protein, 19 aa, Homo sapiens
  CDR3 for beta chain variable domain of TCR clone 134726 (TRBV28, TRBJ2-7)
CAGSYSGTSRLGWVYEQYF

SEQ ID NO: 269453 - protein, 14 aa, Homo sapiens
  CDR3 for alpha chain variable domain of TCR clone 134727 (TRAV12-3, TRAJ10)
SHLPLTGGGNKLTF

SEQ ID NO: 269454 - protein, 16 aa, Homo sapiens
  CDR3 for beta chain variable domain of TCR clone 134727 (TRBV11-3, TRBJ2-5)
CQQPPRGPGGKETQYF

SEQ ID NO: 269455 - protein, 13 aa, Homo sapiens
  CDR3 for alpha chain variable domain of TCR clone 134728 (TRAV3, TRAJ43)
CSVRDTRGGDMRF

SEQ ID NO: 269456 - protein, 15 aa, Homo sapiens
  CDR3 for beta chain variable domain of TCR clone 134728 (TRBV6-5, TRBJ1-5)
CASSYSRRSNQPHHF

SEQ ID NO: 269457 - protein, 16 aa, Homo sapiens
  CDR3 for alpha chain variable domain of TCR clone 134729 (TRAV12-2, TRAJ18)
CAVTTDRGSTLGRLYF

SEQ ID NO: 269458 - protein, 14 aa, Homo sapiens
  CDR3 for beta chain variable domain of TCR clone 134729 (TRBV4-2, TRBJ1-5)
CASSQYSMNQPQHF

SEQ ID NO: 269459 - protein, 15 aa, Homo sapiens
  CDR3 for alpha chain variable domain of TCR clone 134730 (TRAV8-3, TRAJ40)
CAAPSLGSGTYKYIF

SEQ ID NO: 269460 - protein, 14 aa, Homo sapiens
  CDR3 for beta chain variable domain of TCR clone 134730 (TRBV7-8, TRBJ2-7)
CASSPRDRVYEQYF

SEQ ID NO: 269461 - protein, 14 aa, Homo sapiens
  CDR3 for alpha chain variable domain of TCR clone 134731 (TRAV12-2, TRAJ17)
CAALFKAAGNKLTF

SEQ ID NO: 269462 - protein, 16 aa, Homo sapiens
  CDR3 for beta chain variable domain of TCR clone 134731 (TRBV19, TRBJ2-2)
CASRSPGTGATGELFF

SEQ ID NO: 269463 - protein, 18 aa, Homo sapiens
  CDR3 for alpha chain variable domain of TCR clone 134732 (TRAV21, TRAJ52)
CAVRPSPAGGTSYGKLTF

SEQ ID NO: 269464 - protein, 13 aa, Homo sapiens
  CDR3 for beta chain variable domain of TCR clone 134732 (TRBV29-1, TRBJ2-1)
CSVEGGRVNEPFF

SEQ ID NO: 269465 - protein, 13 aa, Homo sapiens
  CDR3 for alpha chain variable domain of TCR clone 134733 (TRAV8-3, TRAJ28)
CAVGAVVSYQLTF

SEQ ID NO: 269466 - protein, 17 aa, Homo sapiens
  CDR3 for beta chain variable domain of TCR clone 134733 (TRBV11-2, TRBJ2-1)
CASSLYSPGVEYNEQFF

SEQ ID NO: 269467 - protein, 14 aa, Homo sapiens
  CDR3 for alpha chain variable domain of TCR clone 134734 (TRAV3, TRAJ15)
CAVTLNQAGTALIF

SEQ ID NO: 269468 - protein, 14 aa, Homo sapiens
  CDR3 for beta chain variable domain of TCR clone 134734 (TRBV7-2, TRBJ2-1)
CASSLGVGYNEQFF

SEQ ID NO: 269469 - protein, 14 aa, Homo sapiens
  CDR3 for alpha chain variable domain of TCR clone 134735 (TRAV8-1, TRAJ13)
CAVKRSGGYQTVTF

SEQ ID NO: 269470 - protein, 22 aa, Homo sapiens
  CDR3 for beta chain variable domain of TCR clone 134735 (TRBV11-2, TRBJ1-4)
CASSLDITRRGIPRKDNEKLFF

SEQ ID NO: 269471 - protein, 12 aa, Homo sapiens
  CDR3 for alpha chain variable domain of TCR clone 134736 (TRAV17, TRAJ4)
CGTDGGYNKLIF

SEQ ID NO: 269472 - protein, 13 aa, Homo sapiens
  CDR3 for beta chain variable domain of TCR clone 134736 (TRBV29-1, TRBJ2-2)
CSTTGVNTGELFF

SEQ ID NO: 269473 - protein, 12 aa, Homo sapiens
  CDR3 for alpha chain variable domain of TCR clone 134737 (TRAV16, TRAJ27)
CAPSTNAGKSTF

SEQ ID NO: 269474 - protein, 14 aa, Homo sapiens
  CDR3 for beta chain variable domain of TCR clone 134737 (TRBV2, TRBJ2-7)
CASSLTSGGYEQYF

SEQ ID NO: 269475 - protein, 14 aa, Homo sapiens
  CDR3 for alpha chain variable domain of TCR clone 134738 (TRAV12-3, TRAJ10)
SHLPPTGGGNKLTF

SEQ ID NO: 269476 - protein, 12 aa, Homo sapiens
  CDR3 for beta chain variable domain of TCR clone 134738 (TRBV14, TRBJ1-1)
CASSQLKGLAFF

SEQ ID NO: 269477 - protein, 13 aa, Homo sapiens
  CDR3 for alpha chain variable domain of TCR clone 134739 (TRAV13-1, TRAJ4)
CAASIGGYNKLIY

SEQ ID NO: 269478 - protein, 16 aa, Homo sapiens
  CDR3 for beta chain variable domain of TCR clone 134739 (TRBV20-1, TRBJ2-1)
CSAPGLAGSYSDEQFF

SEQ ID NO: 269479 - protein, 13 aa, Homo sapiens
  CDR3 for alpha chain variable domain of TCR clone 134740 (TRAV29/DV5, TRAJ31)
CAASRNNNARLMF

SEQ ID NO: 269480 - protein, 17 aa, Homo sapiens
  CDR3 for beta chain variable domain of TCR clone 134740 (TRBV4-2, TRBJ1-1)
CASTQFGGGSGNTEAFF

SEQ ID NO: 269481 - protein, 10 aa, Homo sapiens
  CDR3 for alpha chain variable domain of TCR clone 134741 (TRAV12-1, TRAJ43)
CVVHNNDMRF

SEQ ID NO: 269482 - protein, 13 aa, Homo sapiens
  CDR3 for beta chain variable domain of TCR clone 134741 (TRBV7-3, TRBJ2-2)
CASSLNVLGELFF

SEQ ID NO: 269483 - protein, 12 aa, Homo sapiens
  CDR3 for alpha chain variable domain of TCR clone 134742 (TRAV21, TRAJ6)
CAVKGVSYIPTF

SEQ ID NO: 269484 - protein, 13 aa, Homo sapiens
  CDR3 for beta chain variable domain of TCR clone 134742 (TRBV11-2, TRBJ1-1)
CASSFTENTEAFF

SEQ ID NO: 269485 - protein, 14 aa, Homo sapiens
  CDR3 for alpha chain variable domain of TCR clone 134743 (TRAV12-2, TRAJ5)
CAVNRSTGRRALTF

SEQ ID NO: 269486 - protein, 16 aa, Homo sapiens
  CDR3 for beta chain variable domain of TCR clone 134743 (TRBV7-2, TRBJ2-5)
CASSSKWLSGQETQYC

SEQ ID NO: 269487 - protein, 15 aa, Homo sapiens
  CDR3 for alpha chain variable domain of TCR clone 134744 (TRAV2, TRAJ15)
CAVEDRNQAGTALIF

SEQ ID NO: 269488 - protein, 13 aa, Homo sapiens
  CDR3 for beta chain variable domain of TCR clone 134744 (TRBV10-2, TRBJ2-1)
CASVASGDAKQFF

SEQ ID NO: 269489 - protein, 16 aa, Homo sapiens
  CDR3 for alpha chain variable domain of TCR clone 134745 (TRAV23/DV6, TRAJ48)
CAASGVVNFGNEKLTF

SEQ ID NO: 269490 - protein, 15 aa, Homo sapiens
  CDR3 for beta chain variable domain of TCR clone 134745 (TRBV20-1, TRBJ2-5)
CSAGLAGVAQETQYF

SEQ ID NO: 269491 - protein, 13 aa, Homo sapiens
  CDR3 for alpha chain variable domain of TCR clone 134746 (TRAV12-2, TRAJ6)
CAVNVSRKLHTYI

SEQ ID NO: 269492 - protein, 16 aa, Homo sapiens
  CDR3 for beta chain variable domain of TCR clone 134746 (TRBV19, TRBJ2-2)
CASSFPGQGLAGELFF

SEQ ID NO: 269493 - protein, 18 aa, Homo sapiens
  CDR3 for alpha chain variable domain of TCR clone 134747 (TRAV12-1, TRAJ52)
CVVKLINAGGTSYGKLTF

SEQ ID NO: 269494 - protein, 12 aa, Homo sapiens
  CDR3 for beta chain variable domain of TCR clone 134747 (TRBV29-1, TRBJ2-3)
CSVTGGADTQYF

SEQ ID NO: 269495 - protein, 16 aa, Homo sapiens
  CDR3 for alpha chain variable domain of TCR clone 134748 (TRAV30, TRAJ24)
SGTEIVDADSWGKFQF

SEQ ID NO: 269496 - protein, 14 aa, Homo sapiens
  CDR3 for beta chain variable domain of TCR clone 134748 (TRBV12-5, TRBJ2-5)
CASGSRRHQETQYF

SEQ ID NO: 269497 - protein, 12 aa, Homo sapiens
  CDR3 for alpha chain variable domain of TCR clone 134749 (TRAV21, TRAJ11)
CAATSGYSTLTF

SEQ ID NO: 269498 - protein, 15 aa, Homo sapiens
  CDR3 for beta chain variable domain of TCR clone 134749 (TRBV19, TRBJ1-1)
CASTSGQIQNTEAFF

SEQ ID NO: 269499 - protein, 16 aa, Homo sapiens
  CDR3 for alpha chain variable domain of TCR clone 134750 (TRAV17, TRAJ36)
CATVSLNWGKQPLLWD

SEQ ID NO: 269500 - protein, 14 aa, Homo sapiens
  CDR3 for beta chain variable domain of TCR clone 134750 (TRBV7-2, TRBJ2-7)
CASSPKTSFYEQYF

SEQ ID NO: 269501 - protein, 15 aa, Homo sapiens
  CDR3 for alpha chain variable domain of TCR clone 134751 (TRAV23/DV6, TRAJ18)
CAARYRGPTLGRLYF

SEQ ID NO: 269502 - protein, 13 aa, Homo sapiens
  CDR3 for beta chain variable domain of TCR clone 134751 (TRBV7-2, TRBJ2-7)
CAGSSPSGSEQYF

SEQ ID NO: 269503 - protein, 14 aa, Homo sapiens
  CDR3 for alpha chain variable domain of TCR clone 134752 (TRAV13-2, TRAJ44)
CAEWRGGTASKLTF

SEQ ID NO: 269504 - protein, 13 aa, Homo sapiens
  CDR3 for beta chain variable domain of TCR clone 134752 (TRBV29-1, TRBJ2-1)
CSVDGGASYEQFF

SEQ ID NO: 269505 - protein, 15 aa, Homo sapiens
  CDR3 for alpha chain variable domain of TCR clone 134753 (TRAV26-1, TRAJ17)
CIVRVVKAAGHQLTF

SEQ ID NO: 269506 - protein, 16 aa, Homo sapiens
  CDR3 for beta chain variable domain of TCR clone 134753 (TRBV7-9, TRBJ2-1)
CASSLVSGPSYNEQFF

SEQ ID NO: 269507 - protein, 17 aa, Homo sapiens
  CDR3 for alpha chain variable domain of TCR clone 134754 (TRAV27, TRAJ34)
CAGGGGLGDYNTDKLIF

SEQ ID NO: 269508 - protein, 15 aa, Homo sapiens
  CDR3 for beta chain variable domain of TCR clone 134754 (TRBV9, TRBJ1-4)
CASSVGGSTNEKLFF

SEQ ID NO: 269509 - protein, 12 aa, Homo sapiens
  CDR3 for alpha chain variable domain of TCR clone 134755 (TRAV3, TRAJ39)
CAVIEWSNMLTF

SEQ ID NO: 269510 - protein, 12 aa, Homo sapiens
  CDR3 for beta chain variable domain of TCR clone 134755 (TRBV12-4, TRBJ2-7)
CASSLGGYEQHF

SEQ ID NO: 269511 - protein, 13 aa, Homo sapiens
  CDR3 for alpha chain variable domain of TCR clone 134756 (TRAV36/DV7, TRAJ54)
CAVDIQGAQKLVF

SEQ ID NO: 269512 - protein, 14 aa, Homo sapiens
  CDR3 for beta chain variable domain of TCR clone 134756 (TRBV19, TRBJ2-7)
CASNFRDTFPGMYF

SEQ ID NO: 269513 - protein, 16 aa, Homo sapiens
  CDR3 for alpha chain variable domain of TCR clone 134757 (TRAV8-3, TRAJ13)
CAVGAYPSGGYQKVTF

SEQ ID NO: 269514 - protein, 14 aa, Homo sapiens
  CDR3 for beta chain variable domain of TCR clone 134757 (TRBV18, TRBJ2-5)
CASSPRASSEAQYF

SEQ ID NO: 269515 - protein, 13 aa, Homo sapiens
  CDR3 for alpha chain variable domain of TCR clone 134758 (TRAV2, TRAJ40)
CAVVTSGTYKYIF

SEQ ID NO: 269516 - protein, 16 aa, Homo sapiens
  CDR3 for beta chain variable domain of TCR clone 134758 (TRBV11-2, TRBJ2-2)
CASSLRTGNLIGELFF

SEQ ID NO: 269517 - protein, 14 aa, Homo sapiens
  CDR3 for alpha chain variable domain of TCR clone 134759 (TRAV1-2, TRAJ8)
CAVREDTGFQKLVF

SEQ ID NO: 269518 - protein, 15 aa, Homo sapiens
  CDR3 for beta chain variable domain of TCR clone 134759 (TRBV20-1, TRBJ2-7)
CSARDRVSGMDEQYF

SEQ ID NO: 269519 - protein, 14 aa, Homo sapiens
  CDR3 for alpha chain variable domain of TCR clone 134760 (TRAV1-2, TRAJ16)
CAVNRFSDGQKLLF

SEQ ID NO: 269520 - protein, 13 aa, Homo sapiens
  CDR3 for beta chain variable domain of TCR clone 134760 (TRBV20-1, TRBJ1-1)
CSARLGQGTEAFV

SEQ ID NO: 269521 - protein, 12 aa, Homo sapiens
  CDR3 for alpha chain variable domain of TCR clone 134761 (TRAV13-1, TRAJ21)
CAAKEGFNKFYF

SEQ ID NO: 269522 - protein, 13 aa, Homo sapiens
  CDR3 for beta chain variable domain of TCR clone 134761 (TRBV6-6, TRBJ2-7)
CASSPKHLAEQYF

SEQ ID NO: 269523 - protein, 18 aa, Homo sapiens
  CDR3 for alpha chain variable domain of TCR clone 134762 (TRAV21, TRAJ52)
CAVRPSPSGGTSYGKLTF

SEQ ID NO: 269524 - protein, 14 aa, Homo sapiens
  CDR3 for beta chain variable domain of TCR clone 134762 (TRBV20-1, TRBJ2-1)
CSAQIGGSANEQFF

SEQ ID NO: 269525 - protein, 12 aa, Homo sapiens
  CDR3 for alpha chain variable domain of TCR clone 134763 (TRAV17, TRAJ20)
CATQSNDYKLSF

SEQ ID NO: 269526 - protein, 12 aa, Homo sapiens
  CDR3 for beta chain variable domain of TCR clone 134763 (TRBV10-3, TRBJ1-1)
CHHSRRGTEAFF

SEQ ID NO: 269527 - protein, 11 aa, Homo sapiens
  CDR3 for alpha chain variable domain of TCR clone 134764 (TRAV2, TRAJ13)
CASGGYQKVTF

SEQ ID NO: 269528 - protein, 16 aa, Homo sapiens
  CDR3 for beta chain variable domain of TCR clone 134764 (TRBV6-1, TRBJ2-5)
CASSDTLDRGAESQYF

SEQ ID NO: 269529 - protein, 16 aa, Homo sapiens
  CDR3 for alpha chain variable domain of TCR clone 134765 (TRAV21, TRAJ52)
CAVTNAGGTSYGKLTF

SEQ ID NO: 269530 - protein, 17 aa, Homo sapiens
  CDR3 for beta chain variable domain of TCR clone 134765 (TRBV28, TRBJ2-5)
CASSRQGVLAGAGTQYF

SEQ ID NO: 269531 - protein, 14 aa, Homo sapiens
  CDR3 for alpha chain variable domain of TCR clone 134766 (TRAV13-1, TRAJ9)
YAASALTGGFETIF

SEQ ID NO: 269532 - protein, 13 aa, Homo sapiens
  CDR3 for beta chain variable domain of TCR clone 134766 (TRBV20-1, TRBJ1-1)
CSAGTVGNAEAFF

SEQ ID NO: 269533 - protein, 14 aa, Homo sapiens
  CDR3 for alpha chain variable domain of TCR clone 134767 (TRAV12-2, TRAJ9)
CAVSLNTGGFKTIF

SEQ ID NO: 269534 - protein, 17 aa, Homo sapiens
  CDR3 for beta chain variable domain of TCR clone 134767 (TRBV20-1, TRBJ2-2)
CSASRQVGQGYTGELFF

SEQ ID NO: 269535 - protein, 16 aa, Homo sapiens
  CDR3 for alpha chain variable domain of TCR clone 134768 (TRAV26-2, TRAJ37)
FILRDFGSSNTGKLIF

SEQ ID NO: 269536 - protein, 15 aa, Homo sapiens
  CDR3 for beta chain variable domain of TCR clone 134768 (TRBV6-5, TRBJ2-7)
CASRSLAVSSYEQYF

SEQ ID NO: 269537 - protein, 13 aa, Homo sapiens
  CDR3 for alpha chain variable domain of TCR clone 134769 (TRAV30, TRAJ6)
CCTEAGGSYIPTF

SEQ ID NO: 269538 - protein, 16 aa, Homo sapiens
  CDR3 for beta chain variable domain of TCR clone 134769 (TRBV4-3, TRBJ2-3)
CASSLGLAGEGDTQYF

SEQ ID NO: 269539 - protein, 13 aa, Homo sapiens
  CDR3 for alpha chain variable domain of TCR clone 134770 (TRAV12-2, TRAJ18)
CAVRGSTLGRLYF

SEQ ID NO: 269540 - protein, 18 aa, Homo sapiens
  CDR3 for beta chain variable domain of TCR clone 134770 (TRBV27, TRBJ2-3)
CACSLSGTSGRGTDTQYF

SEQ ID NO: 269541 - protein, 16 aa, Homo sapiens
  CDR3 for alpha chain variable domain of TCR clone 134771 (TRAV20, TRAJ26)
CAVQHRRDNYGQNFVF

SEQ ID NO: 269542 - protein, 17 aa, Homo sapiens
  CDR3 for beta chain variable domain of TCR clone 134771 (TRBV29-1, TRBJ2-3)
CSVSAGQTLTPTDTQYF

SEQ ID NO: 269543 - protein, 13 aa, Homo sapiens
  CDR3 for alpha chain variable domain of TCR clone 134772 (TRAV21, TRAJ20)
CAVGVFADYNLSF

SEQ ID NO: 269544 - protein, 14 aa, Homo sapiens
  CDR3 for beta chain variable domain of TCR clone 134772 (TRBV4-2, TRBJ1-4)
CASSPSSGNEKLFF

SEQ ID NO: 269545 - protein, 13 aa, Homo sapiens
  CDR3 for alpha chain variable domain of TCR clone 134773 (TRAV12-2, TRAJ20)
CAVYPSNDYNLSF

SEQ ID NO: 269546 - protein, 15 aa, Homo sapiens
  CDR3 for beta chain variable domain of TCR clone 134773 (TRBV27, TRBJ2-5)
CASSLYPRGGETQYS

SEQ ID NO: 269547 - protein, 14 aa, Homo sapiens
  CDR3 for alpha chain variable domain of TCR clone 134774 (TRAV1-2, TRAJ16)
CAVNRFSDGQKLLF

SEQ ID NO: 269548 - protein, 15 aa, Homo sapiens
  CDR3 for beta chain variable domain of TCR clone 134774 (TRBV7-9, TRBJ1-6)
CASSSPGRGNSPLRC

SEQ ID NO: 269549 - protein, 15 aa, Homo sapiens
  CDR3 for alpha chain variable domain of TCR clone 134775 (TRAV3, TRAJ3)
CAVRDRDSSASKIIF

SEQ ID NO: 269550 - protein, 18 aa, Homo sapiens
  CDR3 for beta chain variable domain of TCR clone 134775 (TRBV25-1, TRBJ1-2)
CASSGLPNGQGLIFGYTF

SEQ ID NO: 269551 - protein, 12 aa, Homo sapiens
  CDR3 for alpha chain variable domain of TCR clone 134776 (TRAV13-2, TRAJ23)
CAERHRGGKLIF

SEQ ID NO: 269552 - protein, 14 aa, Homo sapiens
  CDR3 for beta chain variable domain of TCR clone 134776 (TRBV19, TRBJ2-1)
CASLTFVLSGEQFF

SEQ ID NO: 269553 - protein, 16 aa, Homo sapiens
  CDR3 for alpha chain variable domain of TCR clone 134777 (TRAV8-4, TRAJ5)
CAVSPFTDTGRRALTF

SEQ ID NO: 269554 - protein, 14 aa, Homo sapiens
  CDR3 for beta chain variable domain of TCR clone 134777 (TRBV19, TRBJ1-6)
CASSTDGWNSPLHF

SEQ ID NO: 269555 - protein, 14 aa, Homo sapiens
  CDR3 for alpha chain variable domain of TCR clone 134778 (TRAV23/DV6, TRAJ4)
CAANLSGGYNKLIF

SEQ ID NO: 269556 - protein, 11 aa, Homo sapiens
  CDR3 for beta chain variable domain of TCR clone 134778 (TRBV4-1, TRBJ1-3)
CASSPQRGIRF

SEQ ID NO: 269557 - protein, 11 aa, Homo sapiens
  CDR3 for alpha chain variable domain of TCR clone 134779 (TRAV23/DV6, TRAJ58)
CAARLLRGETS

SEQ ID NO: 269558 - protein, 14 aa, Homo sapiens
  CDR3 for beta chain variable domain of TCR clone 134779 (TRBV7-9, TRBJ1-6)
CASRPGTVNSPLHF

SEQ ID NO: 269559 - protein, 18 aa, Homo sapiens
  CDR3 for alpha chain variable domain of TCR clone 134780 (TRAV8-4, TRAJ52)
CAVTRANAGGTSYGKLTF

SEQ ID NO: 269560 - protein, 13 aa, Homo sapiens
  CDR3 for beta chain variable domain of TCR clone 134780 (TRBV4-2, TRBJ1-1)
CASSQAGNTEAFF

SEQ ID NO: 269561 - protein, 12 aa, Homo sapiens
  CDR3 for alpha chain variable domain of TCR clone 134781 (TRAV16, TRAJ13)
CITLRGYQKVIF

SEQ ID NO: 269562 - protein, 17 aa, Homo sapiens
  CDR3 for beta chain variable domain of TCR clone 134781 (TRBV28, TRBJ2-5)
CASSGQGGLAGAETQYF

SEQ ID NO: 269563 - protein, 16 aa, Homo sapiens
  CDR3 for alpha chain variable domain of TCR clone 134782 (TRAV3, TRAJ37)
CAVRPHGSGNTGKLIF

SEQ ID NO: 269564 - protein, 16 aa, Homo sapiens
  CDR3 for beta chain variable domain of TCR clone 134782 (TRBV9, TRBJ1-2)
CASSVEEKVSPYVYTF

SEQ ID NO: 269565 - protein, 11 aa, Homo sapiens
  CDR3 for alpha chain variable domain of TCR clone 134783 (TRAV12-3, TRAJ43)
CAMSVSNDMSF

SEQ ID NO: 269566 - protein, 14 aa, Homo sapiens
  CDR3 for beta chain variable domain of TCR clone 134783 (TRBV20-1, TRBJ1-1)
SAVLHSGGGTEAFF

SEQ ID NO: 269567 - protein, 19 aa, Homo sapiens
  CDR3 for alpha chain variable domain of TCR clone 134784 (TRAV12-2, TRAJ53)
IQPPTSVPPILSSNYKLTF

SEQ ID NO: 269568 - protein, 13 aa, Homo sapiens
  CDR3 for beta chain variable domain of TCR clone 134784 (TRBV7-7, TRBJ2-3)
CASSLSRADTQYF

SEQ ID NO: 269569 - protein, 12 aa, Homo sapiens
  CDR3 for alpha chain variable domain of TCR clone 134785 (TRAV3, TRAJ43)
CAVRDPNNDMRF

SEQ ID NO: 269570 - protein, 14 aa, Homo sapiens
  CDR3 for beta chain variable domain of TCR clone 134785 (TRBV7-7, TRBJ2-2)
CATRQDSDTGELFF

SEQ ID NO: 269571 - protein, 16 aa, Homo sapiens
  CDR3 for alpha chain variable domain of TCR clone 134786 (TRAV13-1, TRAJ48)
CSASIFGNFGNEKLTF

SEQ ID NO: 269572 - protein, 16 aa, Homo sapiens
  CDR3 for beta chain variable domain of TCR clone 134786 (TRBV7-2, TRBJ2-6)
CASSERRASGANVLTF

SEQ ID NO: 269573 - protein, 13 aa, Homo sapiens
  CDR3 for alpha chain variable domain of TCR clone 134787 (TRAV12-3, TRAJ54)
CALVPQGAQELVF

SEQ ID NO: 269574 - protein, 15 aa, Homo sapiens
  CDR3 for beta chain variable domain of TCR clone 134787 (TRBV4-1, TRBJ2-2)
CARSQDSRGTGELFF

SEQ ID NO: 269575 - protein, 13 aa, Homo sapiens
  CDR3 for alpha chain variable domain of TCR clone 134788 (TRAV1-2, TRAJ12)
CAVSMDSSYKLIF

SEQ ID NO: 269576 - protein, 13 aa, Homo sapiens
  CDR3 for beta chain variable domain of TCR clone 134788 (TRBV24-1, TRBJ2-1)
CATSAGPYNEQFF

SEQ ID NO: 269577 - protein, 13 aa, Homo sapiens
  CDR3 for alpha chain variable domain of TCR clone 134789 (TRAV1-2, TRAJ9)
CAALNTGGFKTIF

SEQ ID NO: 269578 - protein, 13 aa, Homo sapiens
  CDR3 for beta chain variable domain of TCR clone 134789 (TRBV7-2, TRBJ2-2)
CASSSVRAGELVF

SEQ ID NO: 269579 - protein, 11 aa, Homo sapiens
  CDR3 for alpha chain variable domain of TCR clone 134790 (TRAV12-2, TRAJ43)
CAASNNNGMRF

SEQ ID NO: 269580 - protein, 14 aa, Homo sapiens
  CDR3 for beta chain variable domain of TCR clone 134790 (TRBV7-8, TRBJ1-2)
CASSAGTAIYGYTF

SEQ ID NO: 269581 - protein, 13 aa, Homo sapiens
  CDR3 for alpha chain variable domain of TCR clone 134791 (TRAV30, TRAJ20)
CGTEDRSDHKLSF

SEQ ID NO: 269582 - protein, 15 aa, Homo sapiens
  CDR3 for beta chain variable domain of TCR clone 134791 (TRBV2, TRBJ1-2)
CASTQVQDSNYGYTF

SEQ ID NO: 269583 - protein, 11 aa, Homo sapiens
  CDR3 for alpha chain variable domain of TCR clone 134792 (TRAV13-1, TRAJ15)
CAATPGTALIF

SEQ ID NO: 269584 - protein, 13 aa, Homo sapiens
  CDR3 for beta chain variable domain of TCR clone 134792 (TRBV7-2, TRBJ2-1)
CASSLGVYNEQCF

SEQ ID NO: 269585 - protein, 15 aa, Homo sapiens
  CDR3 for alpha chain variable domain of TCR clone 134793 (TRAV26-1, TRAJ29)
CIVRVEGSGNTPLVF

SEQ ID NO: 269586 - protein, 17 aa, Homo sapiens
  CDR3 for beta chain variable domain of TCR clone 134793 (TRBV19, TRBJ2-6)
CASSTGQVFSGANVLTF

SEQ ID NO: 269587 - protein, 17 aa, Homo sapiens
  CDR3 for alpha chain variable domain of TCR clone 134794 (TRAV38-2/DV8, TRAJ56)
CAYRSEVGTGANSKLTF

SEQ ID NO: 269588 - protein, 14 aa, Homo sapiens
  CDR3 for beta chain variable domain of TCR clone 134794 (TRBV11-1, TRBJ1-1)
CASSLEQPNTEAFF

SEQ ID NO: 269589 - protein, 14 aa, Homo sapiens
  CDR3 for alpha chain variable domain of TCR clone 134795 (TRAV26-1, TRAJ24)
CTVRRVGGWGKFQF

SEQ ID NO: 269590 - protein, 16 aa, Homo sapiens
  CDR3 for beta chain variable domain of TCR clone 134795 (TRBV6-3, TRBJ2-1)
CASSYRRGDSYNEQFF

SEQ ID NO: 269591 - protein, 16 aa, Homo sapiens
  CDR3 for alpha chain variable domain of TCR clone 134796 (TRAV12-2, TRAJ32)
CAVNMKYGGATNKLIF

SEQ ID NO: 269592 - protein, 16 aa, Homo sapiens
  CDR3 for beta chain variable domain of TCR clone 134796 (TRBV7-8, TRBJ2-3)
CASSTEGQRETDTQYF

SEQ ID NO: 269593 - protein, 16 aa, Homo sapiens
  CDR3 for alpha chain variable domain of TCR clone 134797 (TRAV16, TRAJ4)
CALSSMFSGGYNKLIF

SEQ ID NO: 269594 - protein, 16 aa, Homo sapiens
  CDR3 for beta chain variable domain of TCR clone 134797 (TRBV12-4, TRBJ1-5)
CASSRPVGGSNQPQHF

SEQ ID NO: 269595 - protein, 15 aa, Homo sapiens
  CDR3 for alpha chain variable domain of TCR clone 134798 (TRAV3, TRAJ3)
CAVRDRDSSASKIIF

SEQ ID NO: 269596 - protein, 13 aa, Homo sapiens
  CDR3 for beta chain variable domain of TCR clone 134798 (TRBV20-1, TRBJ1-1)
CSARGGGNTEAFF

SEQ ID NO: 269597 - protein, 21 aa, Homo sapiens
  CDR3 for alpha chain variable domain of TCR clone 134799 (TRAV38-1, TRAJ4)
CDVFLCFHDSLFSGGYNKLIF

SEQ ID NO: 269598 - protein, 15 aa, Homo sapiens
  CDR3 for beta chain variable domain of TCR clone 134799 (TRBV6-3, TRBJ2-7)
CASSSPGTVFYEQYF

SEQ ID NO: 269599 - protein, 12 aa, Homo sapiens
  CDR3 for alpha chain variable domain of TCR clone 134800 (TRAV13-2, TRAJ8)
CAPWLGFQKLVF

SEQ ID NO: 269600 - protein, 13 aa, Homo sapiens
  CDR3 for beta chain variable domain of TCR clone 134800 (TRBV7-9, TRBJ1-1)
CASSLSGETEAFF

SEQ ID NO: 269601 - protein, 14 aa, Homo sapiens
  CDR3 for alpha chain variable domain of TCR clone 134801 (TRAV20, TRAJ29)
CAVQAWVGITPLVF

SEQ ID NO: 269602 - protein, 14 aa, Homo sapiens
  CDR3 for beta chain variable domain of TCR clone 134801 (TRBV11-2, TRBJ2-3)
CASSRLARTDTQYF

SEQ ID NO: 269603 - protein, 11 aa, Homo sapiens
  CDR3 for alpha chain variable domain of TCR clone 134802 (TRAV5, TRAJ3)
CGGSSASKIIF

SEQ ID NO: 269604 - protein, 11 aa, Homo sapiens
  CDR3 for beta chain variable domain of TCR clone 134802 (TRBV27, TRBJ2-3)
CASSLGDTQYF

SEQ ID NO: 269605 - protein, 10 aa, Homo sapiens
  CDR3 for alpha chain variable domain of TCR clone 134803 (TRAV36/DV7, TRAJ48)
CAVGNEELTF

SEQ ID NO: 269606 - protein, 16 aa, Homo sapiens
  CDR3 for beta chain variable domain of TCR clone 134803 (TRBV4-3, TRBJ2-2)
CASSHLQGSGTGELFF

SEQ ID NO: 269607 - protein, 15 aa, Homo sapiens
  CDR3 for alpha chain variable domain of TCR clone 134804 (TRAV8-3, TRAJ28)
CAVAYSGAGSYQLTF

SEQ ID NO: 269608 - protein, 12 aa, Homo sapiens
  CDR3 for beta chain variable domain of TCR clone 134804 (TRBV2, TRBJ2-7)
CASSWISLEQYF

SEQ ID NO: 269609 - protein, 15 aa, Homo sapiens
  CDR3 for alpha chain variable domain of TCR clone 134805 (TRAV12-2, TRAJ23)
CAVKPIYNQGGKLIF

SEQ ID NO: 269610 - protein, 16 aa, Homo sapiens
  CDR3 for beta chain variable domain of TCR clone 134805 (TRBV18, TRBJ1-4)
CASSLQTVATNEKLFF

SEQ ID NO: 269611 - protein, 16 aa, Homo sapiens
  CDR3 for alpha chain variable domain of TCR clone 134806 (TRAV3, TRAJ37)
SAVRGKGSGNTGKLIF

SEQ ID NO: 269612 - protein, 13 aa, Homo sapiens
  CDR3 for beta chain variable domain of TCR clone 134806 (TRBV14, TRBJ2-7)
CASSQDRRYEQYF

SEQ ID NO: 269613 - protein, 14 aa, Homo sapiens
  CDR3 for alpha chain variable domain of TCR clone 134807 (TRAV13-1, TRAJ44)
CAAKATGTASKLTF

SEQ ID NO: 269614 - protein, 17 aa, Homo sapiens
  CDR3 for beta chain variable domain of TCR clone 134807 (TRBV7-3, TRBJ2-3)
CASSLMKRMRGPDTQYF

SEQ ID NO: 269615 - protein, 15 aa, Homo sapiens
  CDR3 for alpha chain variable domain of TCR clone 134808 (TRAV17, TRAJ23)
CATDAEDNQGGKLIF

SEQ ID NO: 269616 - protein, 13 aa, Homo sapiens
  CDR3 for beta chain variable domain of TCR clone 134808 (TRBV12-4, TRBJ2-5)
CASSLGGSRTQYF

SEQ ID NO: 269617 - protein, 12 aa, Homo sapiens
  CDR3 for alpha chain variable domain of TCR clone 134809 (TRAV12-3, TRAJ17)
CTMTLTGNKLTF

SEQ ID NO: 269618 - protein, 16 aa, Homo sapiens
  CDR3 for beta chain variable domain of TCR clone 134809 (TRBV29-1, TRBJ2-7)
CSVEDAEDGTAYEQYF

SEQ ID NO: 269619 - protein, 15 aa, Homo sapiens
  CDR3 for alpha chain variable domain of TCR clone 134810 (TRAV8-3, TRAJ45)
CASSYSGGGADGLTF

SEQ ID NO: 269620 - protein, 17 aa, Homo sapiens
  CDR3 for beta chain variable domain of TCR clone 134810 (TRBV20-1, TRBJ2-1)
CSARDPLAGVWDNEQFF

SEQ ID NO: 269621 - protein, 11 aa, Homo sapiens
  CDR3 for alpha chain variable domain of TCR clone 134811 (TRAV1-2, TRAJ40)
CAVPGTYKYIF

SEQ ID NO: 269622 - protein, 15 aa, Homo sapiens
  CDR3 for beta chain variable domain of TCR clone 134811 (TRBV25-1, TRBJ1-4)
CDSSPGDSTNEKLFF

SEQ ID NO: 269623 - protein, 17 aa, Homo sapiens
  CDR3 for alpha chain variable domain of TCR clone 134812 (TRAV8-6, TRAJ58)
CAVSSWEGETSGPRLTF

SEQ ID NO: 269624 - protein, 14 aa, Homo sapiens
  CDR3 for beta chain variable domain of TCR clone 134812 (TRBV19, TRBJ2-1)
CASPTFVLSGEQFF

SEQ ID NO: 269625 - protein, 14 aa, Homo sapiens
  CDR3 for alpha chain variable domain of TCR clone 134813 (TRAV1-1, TRAJ28)
CAAPSGAGSYQLTF

SEQ ID NO: 269626 - protein, 16 aa, Homo sapiens
  CDR3 for beta chain variable domain of TCR clone 134813 (TRBV19, TRBJ2-1)
CASSKAGPSSYNEQFF

SEQ ID NO: 269627 - protein, 13 aa, Homo sapiens
  CDR3 for alpha chain variable domain of TCR clone 134814 (TRAV1-2, TRAJ31)
CAVRPNNNARLMF

SEQ ID NO: 269628 - protein, 14 aa, Homo sapiens
  CDR3 for beta chain variable domain of TCR clone 134814 (TRBV25-1, TRBJ1-1)
CASTHLGGNTETFF

SEQ ID NO: 269629 - protein, 14 aa, Homo sapiens
  CDR3 for alpha chain variable domain of TCR clone 134815 (TRAV1-2, TRAJ16)
CAVSRFSDGQKLLF

SEQ ID NO: 269630 - protein, 13 aa, Homo sapiens
  CDR3 for beta chain variable domain of TCR clone 134815 (TRBV7-9, TRBJ2-7)
CASSFAGAYEQYF

SEQ ID NO: 269631 - protein, 13 aa, Homo sapiens
  CDR3 for alpha chain variable domain of TCR clone 134816 (TRAV26-1, TRAJ29)
CIVRRSGNIPLVF

SEQ ID NO: 269632 - protein, 16 aa, Homo sapiens
  CDR3 for beta chain variable domain of TCR clone 134816 (TRBV11-2, TRBJ2-7)
CASSLAPTGVNYEQYF

SEQ ID NO: 269633 - protein, 13 aa, Homo sapiens
  CDR3 for alpha chain variable domain of TCR clone 134817 (TRAV21, TRAJ27)
CAARPGNAGKSTF

SEQ ID NO: 269634 - protein, 16 aa, Homo sapiens
  CDR3 for beta chain variable domain of TCR clone 134817 (TRBV7-6, TRBJ2-1)
CASSAPGPSSYNGQFF

SEQ ID NO: 269635 - protein, 12 aa, Homo sapiens
  CDR3 for alpha chain variable domain of TCR clone 134818 (TRAV12-2, TRAJ31)
CAVKTPDARLMF

SEQ ID NO: 269636 - protein, 15 aa, Homo sapiens
  CDR3 for beta chain variable domain of TCR clone 134818 (TRBV4-2, TRBJ1-1)
CASSQDQGLNTEAFF

SEQ ID NO: 269637 - protein, 15 aa, Homo sapiens
  CDR3 for alpha chain variable domain of TCR clone 134819 (TRAV12-3, TRAJ11)
CAMSEENSGYSTLTL

SEQ ID NO: 269638 - protein, 16 aa, Homo sapiens
  CDR3 for beta chain variable domain of TCR clone 134819 (TRBV5-1, TRBJ2-7)
CASSLEGLAGLYEQYF

SEQ ID NO: 269639 - protein, 13 aa, Homo sapiens
  CDR3 for alpha chain variable domain of TCR clone 134820 (TRAV20, TRAJ56)
CAVQAGANSKLTF

SEQ ID NO: 269640 - protein, 16 aa, Homo sapiens
  CDR3 for beta chain variable domain of TCR clone 134820 (TRBV28, TRBJ1-1)
CASSPRTRWAEASLDK

SEQ ID NO: 269641 - protein, 14 aa, Homo sapiens
  CDR3 for alpha chain variable domain of TCR clone 134821 (TRAV4, TRAJ41)
CLVGDGDSGYALNF

SEQ ID NO: 269642 - protein, 15 aa, Homo sapiens
  CDR3 for beta chain variable domain of TCR clone 134821 (TRBV27, TRBJ2-7)
CASGLVGGGAHEQYF

SEQ ID NO: 269643 - protein, 16 aa, Homo sapiens
  CDR3 for alpha chain variable domain of TCR clone 134822 (TRAV8-3, TRAJ13)
CAVGAYPSGGYQKVTL

SEQ ID NO: 269644 - protein, 15 aa, Homo sapiens
  CDR3 for beta chain variable domain of TCR clone 134822 (TRBV19, TRBJ1-5)
CASSIVWADNQPQHF

SEQ ID NO: 269645 - protein, 14 aa, Homo sapiens
  CDR3 for alpha chain variable domain of TCR clone 134823 (TRAV3, TRAJ5)
CAVRSDQGRRALTF

SEQ ID NO: 269646 - protein, 14 aa, Homo sapiens
  CDR3 for beta chain variable domain of TCR clone 134823 (TRBV7-2, TRBJ2-3)
CASSFVMPTDTQYS

SEQ ID NO: 269647 - protein, 15 aa, Homo sapiens
  CDR3 for alpha chain variable domain of TCR clone 134824 (TRAV3, TRAJ37)
CCERKGVCNTGKLIF

SEQ ID NO: 269648 - protein, 13 aa, Homo sapiens
  CDR3 for beta chain variable domain of TCR clone 134824 (TRBV19, TRBJ1-2)
CASSVPGQDGYTF

SEQ ID NO: 269649 - protein, 10 aa, Homo sapiens
  CDR3 for alpha chain variable domain of TCR clone 134825 (TRAV4, TRAJ20)
CLVGDKVTTA

SEQ ID NO: 269650 - protein, 15 aa, Homo sapiens
  CDR3 for beta chain variable domain of TCR clone 134825 (TRBV18, TRBJ2-7)
CASSPSSTGNYEQYF

SEQ ID NO: 269651 - protein, 11 aa, Homo sapiens
  CDR3 for alpha chain variable domain of TCR clone 134826 (TRAV2, TRAJ33)
CAVESNYQLIW

SEQ ID NO: 269652 - protein, 15 aa, Homo sapiens
  CDR3 for beta chain variable domain of TCR clone 134826 (TRBV7-2, TRBJ2-3)
CASSSTGLETDTQYF

SEQ ID NO: 269653 - protein, 14 aa, Homo sapiens
  CDR3 for alpha chain variable domain of TCR clone 134827 (TRAV17, TRAJ39)
CATDPVRADNMLTF

SEQ ID NO: 269654 - protein, 15 aa, Homo sapiens
  CDR3 for beta chain variable domain of TCR clone 134827 (TRBV13, TRBJ1-5)
CACSFGQGGVKPQHF

SEQ ID NO: 269655 - protein, 13 aa, Homo sapiens
  CDR3 for alpha chain variable domain of TCR clone 134828 (TRAV21, TRAJ15)
CAVRNQAGTALIV

SEQ ID NO: 269656 - protein, 16 aa, Homo sapiens
  CDR3 for beta chain variable domain of TCR clone 134828 (TRBV20-1, TRBJ2-5)
CSPGGTSGGYMETQYF

SEQ ID NO: 269657 - protein, 17 aa, Homo sapiens
  CDR3 for alpha chain variable domain of TCR clone 134829 (TRAV3, TRAJ6)
CAVSRRTDTGGSYIPTF

SEQ ID NO: 269658 - protein, 13 aa, Homo sapiens
  CDR3 for beta chain variable domain of TCR clone 134829 (TRBV29-1, TRBJ2-2)
CSTTGVNTGELFF

SEQ ID NO: 269659 - protein, 14 aa, Homo sapiens
  CDR3 for alpha chain variable domain of TCR clone 134830 (TRAV26-1, TRAJ38)
CIADNAGNNRKLIW

SEQ ID NO: 269660 - protein, 13 aa, Homo sapiens
  CDR3 for beta chain variable domain of TCR clone 134830 (TRBV2, TRBJ1-4)
CASNRGTNEKLFF

SEQ ID NO: 269661 - protein, 20 aa, Homo sapiens
  CDR3 for alpha chain variable domain of TCR clone 134831 (TRAV14/DV4, )
CAMREISRTLPLPCTSCATL

SEQ ID NO: 269662 - protein, 14 aa, Homo sapiens
  CDR3 for beta chain variable domain of TCR clone 134831 (TRBV2, TRBJ2-1)
CASSDRAYYNEQFF

SEQ ID NO: 269663 - protein, 12 aa, Homo sapiens
  CDR3 for alpha chain variable domain of TCR clone 134832 (TRAV1-1, TRAJ39)
CAVPGVGNMLTF

SEQ ID NO: 269664 - protein, 13 aa, Homo sapiens
  CDR3 for beta chain variable domain of TCR clone 134832 (TRBV4-1, TRBJ1-1)
CASSRKMNTEAFF

SEQ ID NO: 269665 - protein, 11 aa, Homo sapiens
  CDR3 for alpha chain variable domain of TCR clone 134833 (TRAV2, TRAJ23)
CAVETRGKLIF

SEQ ID NO: 269666 - protein, 15 aa, Homo sapiens
  CDR3 for beta chain variable domain of TCR clone 134833 (TRBV4-1, TRBJ1-2)
CASSLNTGQGYGYTF

SEQ ID NO: 269667 - protein, 14 aa, Homo sapiens
  CDR3 for alpha chain variable domain of TCR clone 134834 (TRAV12-3, TRAJ10)
SHLPLTGGGNKLTF

SEQ ID NO: 269668 - protein, 13 aa, Homo sapiens
  CDR3 for beta chain variable domain of TCR clone 134834 (TRBV4-1, TRBJ2-5)
CASSQEVQETQYF

SEQ ID NO: 269669 - protein, 13 aa, Homo sapiens
  CDR3 for alpha chain variable domain of TCR clone 134835 (TRAV27, TRAJ6)
CAGGTRGSYIPTF

SEQ ID NO: 269670 - protein, 14 aa, Homo sapiens
  CDR3 for beta chain variable domain of TCR clone 134835 (TRBV18, TRBJ2-5)
CASSPGVSQETQYF

SEQ ID NO: 269671 - protein, 12 aa, Homo sapiens
  CDR3 for alpha chain variable domain of TCR clone 134836 (TRAV21, TRAJ37)
CAVRGNTGKLIF

SEQ ID NO: 269672 - protein, 13 aa, Homo sapiens
  CDR3 for beta chain variable domain of TCR clone 134836 (TRBV20-1, TRBJ1-6)
CSAPLGVGSPLHF

SEQ ID NO: 269673 - protein, 10 aa, Homo sapiens
  CDR3 for alpha chain variable domain of TCR clone 134837 (TRAV5, TRAJ34)
CAEDTDKLIF

SEQ ID NO: 269674 - protein, 12 aa, Homo sapiens
  CDR3 for beta chain variable domain of TCR clone 134837 (TRBV11-2, TRBJ2-2)
CASSLGGGELFL

SEQ ID NO: 269675 - protein, 16 aa, Homo sapiens
  CDR3 for alpha chain variable domain of TCR clone 134838 (TRAV30, TRAJ24)
CGTEIVDADSWGKFQF

SEQ ID NO: 269676 - protein, 17 aa, Homo sapiens
  CDR3 for beta chain variable domain of TCR clone 134838 (TRBV20-1, TRBJ2-1)
CSAPPRLAGTRYNEQLF

SEQ ID NO: 269677 - protein, 13 aa, Homo sapiens
  CDR3 for alpha chain variable domain of TCR clone 134839 (TRAV3, TRAJ20)
CCEAFCNDYKLSF

SEQ ID NO: 269678 - protein, 15 aa, Homo sapiens
  CDR3 for beta chain variable domain of TCR clone 134839 (TRBV19, TRBJ2-3)
CAAGDTNAPNDTQYF

SEQ ID NO: 269679 - protein, 16 aa, Homo sapiens
  CDR3 for alpha chain variable domain of TCR clone 134840 (TRAV30, TRAJ24)
CGTGIVDADSWGKFQF

SEQ ID NO: 269680 - protein, 15 aa, Homo sapiens
  CDR3 for beta chain variable domain of TCR clone 134840 (TRBV20-1, TRBJ2-7)
CSARDRVSGMDELYF

SEQ ID NO: 269681 - protein, 10 aa, Homo sapiens
  CDR3 for alpha chain variable domain of TCR clone 134841 (TRAV3, TRAJ3)
CAVVQQCFQD

SEQ ID NO: 269682 - protein, 13 aa, Homo sapiens
  CDR3 for beta chain variable domain of TCR clone 134841 (TRBV11-2, TRBJ1-6)
CASSLDVGSPLHF

SEQ ID NO: 269683 - protein, 13 aa, Homo sapiens
  CDR3 for alpha chain variable domain of TCR clone 134842 (TRAV12-3, TRAJ13)
CAMSSGGYQKVTF

SEQ ID NO: 269684 - protein, 12 aa, Homo sapiens
  CDR3 for beta chain variable domain of TCR clone 134842 (TRBV29-1, TRBJ2-3)
CSVTGGADTQYF

SEQ ID NO: 269685 - protein, 14 aa, Homo sapiens
  CDR3 for alpha chain variable domain of TCR clone 134843 (TRAV38-1, TRAJ29)
CAFITPSGNTPLAF

SEQ ID NO: 269686 - protein, 14 aa, Homo sapiens
  CDR3 for beta chain variable domain of TCR clone 134843 (TRBV18, TRBJ2-7)
CASSPGGGAYEQYF

SEQ ID NO: 269687 - protein, 13 aa, Homo sapiens
  CDR3 for alpha chain variable domain of TCR clone 134844 (TRAV4, TRAJ34)
CLVGDYNTDKLIF

SEQ ID NO: 269688 - protein, 22 aa, Homo sapiens
  CDR3 for beta chain variable domain of TCR clone 134844 (TRBV4-2, TRBJ2-3)
CQQPRSPRASSISGGRGDTQYF

SEQ ID NO: 269689 - protein, 15 aa, Homo sapiens
  CDR3 for alpha chain variable domain of TCR clone 134845 (TRAV38-1, TRAJ37)
CAFIFGSGNTGKLIF

SEQ ID NO: 269690 - protein, 17 aa, Homo sapiens
  CDR3 for beta chain variable domain of TCR clone 134845 (TRBV7-3, TRBJ2-3)
CASSLMKRMRGADTQYF

SEQ ID NO: 269691 - protein, 15 aa, Homo sapiens
  CDR3 for alpha chain variable domain of TCR clone 134846 (TRAV27, TRAJ38)
CAAHRNAGNNRKLIW

SEQ ID NO: 269692 - protein, 13 aa, Homo sapiens
  CDR3 for beta chain variable domain of TCR clone 134846 (TRBV12-5, TRBJ2-3)
CASGDRQSDTQHF

SEQ ID NO: 269693 - protein, 15 aa, Homo sapiens
  CDR3 for alpha chain variable domain of TCR clone 134847 (TRAV3, TRAJ22)
CAVRDRGGSARQLTF

SEQ ID NO: 269694 - protein, 13 aa, Homo sapiens
  CDR3 for beta chain variable domain of TCR clone 134847 (TRBV15, TRBJ1-2)
CATSRGQLYGYTF

SEQ ID NO: 269695 - protein, 12 aa, Homo sapiens
  CDR3 for alpha chain variable domain of TCR clone 134848 (TRAV2, TRAJ9)
RAVGAGGFKTIL

SEQ ID NO: 269696 - protein, 16 aa, Homo sapiens
  CDR3 for beta chain variable domain of TCR clone 134848 (TRBV13, TRBJ2-2)
CASSPRTGEHTGELFF

SEQ ID NO: 269697 - protein, 12 aa, Homo sapiens
  CDR3 for alpha chain variable domain of TCR clone 134849 (TRAV38-2/DV8, TRAJ48)
CALLSGNEKLTF

SEQ ID NO: 269698 - protein, 12 aa, Homo sapiens
  CDR3 for beta chain variable domain of TCR clone 134849 (TRBV5-4, TRBJ2-7)
CASSLEAYEQYF

SEQ ID NO: 269699 - protein, 12 aa, Homo sapiens
  CDR3 for alpha chain variable domain of TCR clone 134850 (TRAV16, TRAJ49)
CALNEGGNQFYF

SEQ ID NO: 269700 - protein, 13 aa, Homo sapiens
  CDR3 for beta chain variable domain of TCR clone 134850 (TRBV7-9, TRBJ2-1)
CQWPTGLRNEQFF

SEQ ID NO: 269701 - protein, 12 aa, Homo sapiens
  CDR3 for alpha chain variable domain of TCR clone 134851 (TRAV12-3, TRAJ5)
CAMDTGRRALTF

SEQ ID NO: 269702 - protein, 13 aa, Homo sapiens
  CDR3 for beta chain variable domain of TCR clone 134851 (TRBV7-7, TRBJ2-2)
CASSLTSAGGLFF

SEQ ID NO: 269703 - protein, 13 aa, Homo sapiens
  CDR3 for alpha chain variable domain of TCR clone 134852 (TRAV2, TRAJ29)
CAAGNSGNTPLVF

SEQ ID NO: 269704 - protein, 16 aa, Homo sapiens
  CDR3 for beta chain variable domain of TCR clone 134852 (TRBV7-9, TRBJ1-2)
CASSPGGGAINYGFTF

SEQ ID NO: 269705 - protein, 16 aa, Homo sapiens
  CDR3 for alpha chain variable domain of TCR clone 134853 (TRAV30, TRAJ24)
CGTEIVDADSWGKFQF

SEQ ID NO: 269706 - protein, 14 aa, Homo sapiens
  CDR3 for beta chain variable domain of TCR clone 134853 (TRBV13, TRBJ2-1)
CASSPRARYNEQFF

SEQ ID NO: 269707 - protein, 14 aa, Homo sapiens
  CDR3 for alpha chain variable domain of TCR clone 134854 (TRAV23/DV6, TRAJ13)
CSLAGGRGFQKVTF

SEQ ID NO: 269708 - protein, 17 aa, Homo sapiens
  CDR3 for beta chain variable domain of TCR clone 134854 (TRBV19, TRBJ2-7)
CASSISFYDSYPYEQYF

SEQ ID NO: 269709 - protein, 11 aa, Homo sapiens
  CDR3 for alpha chain variable domain of TCR clone 134855 (TRAV25, TRAJ5)
CGGGGRRALTF

SEQ ID NO: 269710 - protein, 15 aa, Homo sapiens
  CDR3 for beta chain variable domain of TCR clone 134855 (TRBV19, TRBJ2-4)
CASRGPRRGENIQYF

SEQ ID NO: 269711 - protein, 13 aa, Homo sapiens
  CDR3 for alpha chain variable domain of TCR clone 134856 (TRAV12-2, TRAJ27)
CAVTYNNAGKSTF

SEQ ID NO: 269712 - protein, 11 aa, Homo sapiens
  CDR3 for beta chain variable domain of TCR clone 134856 (TRBV7-8, TRBJ2-7)
CASSLSLEQYF

SEQ ID NO: 269713 - protein, 14 aa, Homo sapiens
  CDR3 for alpha chain variable domain of TCR clone 134857 (TRAV35, TRAJ50)
CAGHRKTSYDKVIF

SEQ ID NO: 269714 - protein, 15 aa, Homo sapiens
  CDR3 for beta chain variable domain of TCR clone 134857 (TRBV5-1, TRBJ2-7)
CASSLNGGPAREQYF

SEQ ID NO: 269715 - protein, 14 aa, Homo sapiens
  CDR3 for alpha chain variable domain of TCR clone 134858 (TRAV3, TRAJ36)
CAVRDGTGANNLFF

SEQ ID NO: 269716 - protein, 14 aa, Homo sapiens
  CDR3 for beta chain variable domain of TCR clone 134858 (TRBV18, TRBJ2-5)
CASSPGVSQETQYF

SEQ ID NO: 269717 - protein, 18 aa, Homo sapiens
  CDR3 for alpha chain variable domain of TCR clone 134859 (TRAV21, TRAJ52)
CAVRPSPAGGTSYGKLPF

SEQ ID NO: 269718 - protein, 17 aa, Homo sapiens
  CDR3 for beta chain variable domain of TCR clone 134859 (TRBV13, TRBJ2-3)
CASSLSRVAGGRNTHYF

SEQ ID NO: 269719 - protein, 12 aa, Homo sapiens
  CDR3 for alpha chain variable domain of TCR clone 134860 (TRAV13-2, TRAJ23)
CADRHRGGKLIF

SEQ ID NO: 269720 - protein, 16 aa, Homo sapiens
  CDR3 for beta chain variable domain of TCR clone 134860 (TRBV20-1, TRBJ1-4)
CGAPGQGLLTNEKLFF

SEQ ID NO: 269721 - protein, 12 aa, Homo sapiens
  CDR3 for alpha chain variable domain of TCR clone 134861 (TRAV29/DV5, TRAJ34)
CAASGNTDKLIF

SEQ ID NO: 269722 - protein, 15 aa, Homo sapiens
  CDR3 for beta chain variable domain of TCR clone 134861 (TRBV9, TRBJ1-6)
CASSVAGTGDSPLHF

SEQ ID NO: 269723 - protein, 11 aa, Homo sapiens
  CDR3 for alpha chain variable domain of TCR clone 134862 (TRAV12-3, TRAJ16)
LTGGDGQMLLF

SEQ ID NO: 269724 - protein, 13 aa, Homo sapiens
  CDR3 for beta chain variable domain of TCR clone 134862 (TRBV12-4, TRBJ1-4)
CASAMGHNEKPFF

SEQ ID NO: 269725 - protein, 12 aa, Homo sapiens
  CDR3 for alpha chain variable domain of TCR clone 134863 (TRAV25, TRAJ53)
CQSGGSNYKLTF

SEQ ID NO: 269726 - protein, 20 aa, Homo sapiens
  CDR3 for beta chain variable domain of TCR clone 134863 (TRBV11-3, TRBJ2-7)
CASSQRTSGSLRAVLRAGHQ

SEQ ID NO: 269727 - protein, 14 aa, Homo sapiens
  CDR3 for alpha chain variable domain of TCR clone 134864 (TRAV1-2, TRAJ12)
CAVSGTDSSSKLIF

SEQ ID NO: 269728 - protein, 15 aa, Homo sapiens
  CDR3 for beta chain variable domain of TCR clone 134864 (TRBV2, TRBJ2-4)
CASSGTNLAKNIQYF

SEQ ID NO: 269729 - protein, 16 aa, Homo sapiens
  CDR3 for alpha chain variable domain of TCR clone 134865 (TRAV1-2, TRAJ10)
CAVRGVLTGGGNKLTF

SEQ ID NO: 269730 - protein, 14 aa, Homo sapiens
  CDR3 for beta chain variable domain of TCR clone 134865 (TRBV7-8, TRBJ1-2)
CASSAGTAIYGYTF

SEQ ID NO: 269731 - protein, 16 aa, Homo sapiens
  CDR3 for alpha chain variable domain of TCR clone 134866 (TRAV8-3, TRAJ13)
CAVGAYPSGGYQKVTF

SEQ ID NO: 269732 - protein, 14 aa, Homo sapiens
  CDR3 for beta chain variable domain of TCR clone 134866 (TRBV4-2, TRBJ2-1)
CASGLDRAYNEQFF

SEQ ID NO: 269733 - protein, 14 aa, Homo sapiens
  CDR3 for alpha chain variable domain of TCR clone 134867 (TRAV16, TRAJ44)
CALSPTGTASELTF

SEQ ID NO: 269734 - protein, 14 aa, Homo sapiens
  CDR3 for beta chain variable domain of TCR clone 134867 (TRBV20-1, TRBJ2-7)
CSAISREASYEQYF

SEQ ID NO: 269735 - protein, 15 aa, Homo sapiens
  CDR3 for alpha chain variable domain of TCR clone 134868 (TRAV2, TRAJ32)
CAVASYGGATNKLIF

SEQ ID NO: 269736 - protein, 15 aa, Homo sapiens
  CDR3 for beta chain variable domain of TCR clone 134868 (TRBV7-7, TRBJ2-5)
CASSQLERAEETQYF

SEQ ID NO: 269737 - protein, 14 aa, Homo sapiens
  CDR3 for alpha chain variable domain of TCR clone 134869 (TRAV17, TRAJ16)
CATADFSDGQKLLF

SEQ ID NO: 269738 - protein, 14 aa, Homo sapiens
  CDR3 for beta chain variable domain of TCR clone 134869 (TRBV20-1, TRBJ1-1)
CSAQTRIGGTEAFF

SEQ ID NO: 269739 - protein, 13 aa, Homo sapiens
  CDR3 for alpha chain variable domain of TCR clone 134870 (TRAV8-3, TRAJ4)
WVFYSGGYDKLIF

SEQ ID NO: 269740 - protein, 14 aa, Homo sapiens
  CDR3 for beta chain variable domain of TCR clone 134870 (TRBV7-9, TRBJ2-3)
CASSLEDGTDTQYF

SEQ ID NO: 269741 - protein, 17 aa, Homo sapiens
  CDR3 for alpha chain variable domain of TCR clone 134871 (TRAV23/DV6, TRAJ57)
CAASSTLSQGGPEKLVF

SEQ ID NO: 269742 - protein, 13 aa, Homo sapiens
  CDR3 for beta chain variable domain of TCR clone 134871 (TRBV20-1, TRBJ2-5)
CSAREAFQETQYF

SEQ ID NO: 269743 - protein, 14 aa, Homo sapiens
  CDR3 for alpha chain variable domain of TCR clone 134872 (TRAV1-2, TRAJ16)
CSDNRFSDGQKLLF

SEQ ID NO: 269744 - protein, 17 aa, Homo sapiens
  CDR3 for beta chain variable domain of TCR clone 134872 (TRBV20-1, TRBJ2-1)
CSASSSGLAGSYNEQFF

SEQ ID NO: 269745 - protein, 15 aa, Homo sapiens
  CDR3 for alpha chain variable domain of TCR clone 134873 (TRAV26-1, TRAJ29)
CIVGVEGSGNTPLVF

SEQ ID NO: 269746 - protein, 15 aa, Homo sapiens
  CDR3 for beta chain variable domain of TCR clone 134873 (TRBV19, TRBJ1-2)
CASSVGQVLNYGYTF

SEQ ID NO: 269747 - protein, 16 aa, Homo sapiens
  CDR3 for alpha chain variable domain of TCR clone 134874 (TRAV16, TRAJ17)
CITVLSGRAAGNKLTF

SEQ ID NO: 269748 - protein, 15 aa, Homo sapiens
  CDR3 for beta chain variable domain of TCR clone 134874 (TRBV3-1, TRBJ1-2)
CASSPTRLPEGGYTF

SEQ ID NO: 269749 - protein, 14 aa, Homo sapiens
  CDR3 for alpha chain variable domain of TCR clone 134875 (TRAV12-2, TRAJ45)
CAVNIGGGTDGLTF

SEQ ID NO: 269750 - protein, 17 aa, Homo sapiens
  CDR3 for beta chain variable domain of TCR clone 134875 (TRBV20-1, TRBJ2-2)
CSASGSGQGGLTGELFF

SEQ ID NO: 269751 - protein, 14 aa, Homo sapiens
  CDR3 for alpha chain variable domain of TCR clone 134876 (TRAV1-2, TRAJ16)
CAVNRCSDGQKRLF

SEQ ID NO: 269752 - protein, 12 aa, Homo sapiens
  CDR3 for beta chain variable domain of TCR clone 134876 (TRBV5-1, TRBJ2-5)
CACSWDQETQYF

SEQ ID NO: 269753 - protein, 13 aa, Homo sapiens
  CDR3 for alpha chain variable domain of TCR clone 134877 (TRAV12-2, TRAJ18)
CAVRGSTLGRLYF

SEQ ID NO: 269754 - protein, 20 aa, Homo sapiens
  CDR3 for beta chain variable domain of TCR clone 134877 (TRBV7-8, TRBJ2-2)
GASSHLFPGPTIHITGELFF

SEQ ID NO: 269755 - protein, 16 aa, Homo sapiens
  CDR3 for alpha chain variable domain of TCR clone 134878 (TRAV3, TRAJ37)
CAVRPHGSGNTGKLIF

SEQ ID NO: 269756 - protein, 16 aa, Homo sapiens
  CDR3 for beta chain variable domain of TCR clone 134878 (TRBV9, TRBJ1-2)
CASSVEEKVSPYGFTF

SEQ ID NO: 269757 - protein, 14 aa, Homo sapiens
  CDR3 for alpha chain variable domain of TCR clone 134879 (TRAV8-3, TRAJ4)
CAGGASGGYNKLIF

SEQ ID NO: 269758 - protein, 13 aa, Homo sapiens
  CDR3 for beta chain variable domain of TCR clone 134879 (TRBV27, TRBJ2-7)
CASGRGGAYEQYF

SEQ ID NO: 269759 - protein, 11 aa, Homo sapiens
  CDR3 for alpha chain variable domain of TCR clone 134880 (TRAV12-2, TRAJ29)
CAVTLRSPLVF

SEQ ID NO: 269760 - protein, 16 aa, Homo sapiens
  CDR3 for beta chain variable domain of TCR clone 134880 (TRBV5-1, TRBJ2-2)
CASSLGGTGSIGELFF

SEQ ID NO: 269761 - protein, 10 aa, Homo sapiens
  CDR3 for alpha chain variable domain of TCR clone 134881 (TRAV12-2, TRAJ41)
CAVTGYARNF

SEQ ID NO: 269762 - protein, 15 aa, Homo sapiens
  CDR3 for beta chain variable domain of TCR clone 134881 (TRBV4-2, TRBJ2-1)
CASSQDVGLAGEQFF

SEQ ID NO: 269763 - protein, 17 aa, Homo sapiens
  CDR3 for alpha chain variable domain of TCR clone 134882 (TRAV35, TRAJ28)
CAGLQVYSGDWSYQPTL

SEQ ID NO: 269764 - protein, 15 aa, Homo sapiens
  CDR3 for beta chain variable domain of TCR clone 134882 (TRBV2, TRBJ1-2)
CASSEIGGANYGYTF

SEQ ID NO: 269765 - protein, 14 aa, Homo sapiens
  CDR3 for alpha chain variable domain of TCR clone 134883 (TRAV35, TRAJ22)
CAGLRPGSARQLTF

SEQ ID NO: 269766 - protein, 13 aa, Homo sapiens
  CDR3 for beta chain variable domain of TCR clone 134883 (TRBV6-1, TRBJ1-1)
CASSEGWGTEAFF

SEQ ID NO: 269767 - protein, 14 aa, Homo sapiens
  CDR3 for alpha chain variable domain of TCR clone 134884 (TRAV12-3, TRAJ10)
SHLPLTGGGNKLTF

SEQ ID NO: 269768 - protein, 13 aa, Homo sapiens
  CDR3 for beta chain variable domain of TCR clone 134884 (TRBV19, TRBJ2-2)
CASKVSAAGELFF

SEQ ID NO: 269769 - protein, 11 aa, Homo sapiens
  CDR3 for alpha chain variable domain of TCR clone 134885 (TRAV2, TRAJ33)
CAVESNYQLTW

SEQ ID NO: 269770 - protein, 15 aa, Homo sapiens
  CDR3 for beta chain variable domain of TCR clone 134885 (TRBV19, TRBJ1-1)
CASTSGQIQDTEAFF

SEQ ID NO: 269771 - protein, 11 aa, Homo sapiens
  CDR3 for alpha chain variable domain of TCR clone 134886 (TRAV26-1, TRAJ37)
CIVRVGRKLIF

SEQ ID NO: 269772 - protein, 15 aa, Homo sapiens
  CDR3 for beta chain variable domain of TCR clone 134886 (TRBV19, TRBJ2-1)
CASSGGGTLYNEQFF

SEQ ID NO: 269773 - protein, 13 aa, Homo sapiens
  CDR3 for alpha chain variable domain of TCR clone 134887 (TRAV14/DV4, TRAJ22)
CAMRDLSARQLTF

SEQ ID NO: 269774 - protein, 18 aa, Homo sapiens
  CDR3 for beta chain variable domain of TCR clone 134887 (TRBV19, TRBJ1-5)
CASGKGQVSIHSNQPQHF

SEQ ID NO: 269775 - protein, 14 aa, Homo sapiens
  CDR3 for alpha chain variable domain of TCR clone 134888 (TRAV35, TRAJ50)
CAGHRNTSYDKVIF

SEQ ID NO: 269776 - protein, 13 aa, Homo sapiens
  CDR3 for beta chain variable domain of TCR clone 134888 (TRBV7-7, TRBJ2-3)
CASSLSRADTQDF

SEQ ID NO: 269777 - protein, 15 aa, Homo sapiens
  CDR3 for alpha chain variable domain of TCR clone 134889 (TRAV26-1, TRAJ17)
CIVRVVKAAGNKLTC

SEQ ID NO: 269778 - protein, 16 aa, Homo sapiens
  CDR3 for beta chain variable domain of TCR clone 134889 (TRBV7-9, TRBJ2-1)
CASSLVSGPSYNEQFF

SEQ ID NO: 269779 - protein, 16 aa, Homo sapiens
  CDR3 for alpha chain variable domain of TCR clone 134890 (TRAV12-3, TRAJ53)
CAMSPGSGGSNSKLTF

SEQ ID NO: 269780 - protein, 14 aa, Homo sapiens
  CDR3 for beta chain variable domain of TCR clone 134890 (TRBV12-5, TRBJ2-5)
CASGSRTHQETQYF

SEQ ID NO: 269781 - protein, 11 aa, Homo sapiens
  CDR3 for alpha chain variable domain of TCR clone 134891 (TRAV12-1, TRAJ21)
CVVNNFNKFYF

SEQ ID NO: 269782 - protein, 13 aa, Homo sapiens
  CDR3 for beta chain variable domain of TCR clone 134891 (TRBV19, TRBJ1-1)
CASSGQVNTEAFF

SEQ ID NO: 269783 - protein, 13 aa, Homo sapiens
  CDR3 for alpha chain variable domain of TCR clone 134892 (TRAV21, TRAJ20)
CAVGLRVDYKLSF

SEQ ID NO: 269784 - protein, 11 aa, Homo sapiens
  CDR3 for beta chain variable domain of TCR clone 134892 (TRBV7-8, TRBJ2-7)
CASSLSLEQYF

SEQ ID NO: 269785 - protein, 17 aa, Homo sapiens
  CDR3 for alpha chain variable domain of TCR clone 134893 (TRAV17, TRAJ28)
CATDPRRGGAGSYQLTF

SEQ ID NO: 269786 - protein, 16 aa, Homo sapiens
  CDR3 for beta chain variable domain of TCR clone 134893 (TRBV25-1, TRBJ1-1)
RASSGDRDRGRIEAFF

SEQ ID NO: 269787 - protein, 15 aa, Homo sapiens
  CDR3 for alpha chain variable domain of TCR clone 134894 (TRAV26-1, TRAJ40)
CIDRYATSGTYKYLF

SEQ ID NO: 269788 - protein, 11 aa, Homo sapiens
  CDR3 for beta chain variable domain of TCR clone 134894 (TRBV7-9, TRBJ2-1)
CASSSQNEQFF

SEQ ID NO: 269789 - protein, 11 aa, Homo sapiens
  CDR3 for alpha chain variable domain of TCR clone 134895 (TRAV1-2, TRAJ20)
CAVANDYKLSF

SEQ ID NO: 269790 - protein, 15 aa, Homo sapiens
  CDR3 for beta chain variable domain of TCR clone 134895 (TRBV20-1, TRBJ2-6)
CSARDRGPGANVLTF

SEQ ID NO: 269791 - protein, 17 aa, Homo sapiens
  CDR3 for alpha chain variable domain of TCR clone 134896 (TRAV36/DV7, TRAJ52)
CSVAQRAGGTSYGKLTF

SEQ ID NO: 269792 - protein, 15 aa, Homo sapiens
  CDR3 for beta chain variable domain of TCR clone 134896 (TRBV28, TRBJ2-1)
CASSIIAGGRSEQFF

SEQ ID NO: 269793 - protein, 13 aa, Homo sapiens
  CDR3 for alpha chain variable domain of TCR clone 134897 (TRAV8-1, TRAJ23)
CAWRANQGGKLIF

SEQ ID NO: 269794 - protein, 13 aa, Homo sapiens
  CDR3 for beta chain variable domain of TCR clone 134897 (TRBV20-1, TRBJ2-7)
CSATHTSGYEQYF

SEQ ID NO: 269795 - protein, 14 aa, Homo sapiens
  CDR3 for alpha chain variable domain of TCR clone 134898 (TRAV8-1, TRAJ23)
CAVGTYNQGGKLIF

SEQ ID NO: 269796 - protein, 18 aa, Homo sapiens
  CDR3 for beta chain variable domain of TCR clone 134898 (TRBV18, TRBJ1-5)
CASSPSTGNSNSPSILVM

SEQ ID NO: 269797 - protein, 12 aa, Homo sapiens
  CDR3 for alpha chain variable domain of TCR clone 134899 (TRAV21, TRAJ11)
CVATSGYSTLTF

SEQ ID NO: 269798 - protein, 14 aa, Homo sapiens
  CDR3 for beta chain variable domain of TCR clone 134899 (TRBV20-1, TRBJ2-7)
CSAPELAGVGEQYF

SEQ ID NO: 269799 - protein, 14 aa, Homo sapiens
  CDR3 for alpha chain variable domain of TCR clone 134900 (TRAV1-2, TRAJ16)
CAVNRFLDGQKLLF

SEQ ID NO: 269800 - protein, 11 aa, Homo sapiens
  CDR3 for beta chain variable domain of TCR clone 134900 (TRBV11-2, TRBJ2-2)
CASSLPGELFF

SEQ ID NO: 269801 - protein, 11 aa, Homo sapiens
  CDR3 for alpha chain variable domain of TCR clone 134901 (TRAV3, TRAJ21)
CAVGNFNKFHF

SEQ ID NO: 269802 - protein, 13 aa, Homo sapiens
  CDR3 for beta chain variable domain of TCR clone 134901 (TRBV4-1, TRBJ2-2)
CASSQENTGELFF

SEQ ID NO: 269803 - protein, 16 aa, Homo sapiens
  CDR3 for alpha chain variable domain of TCR clone 134902 (TRAV26-1, TRAJ53)
CIVRVPMGGSNYKLTF

SEQ ID NO: 269804 - protein, 12 aa, Homo sapiens
  CDR3 for beta chain variable domain of TCR clone 134902 (TRBV7-9, TRBJ1-5)
CASSPQGQPQHF

SEQ ID NO: 269805 - protein, 14 aa, Homo sapiens
  CDR3 for alpha chain variable domain of TCR clone 134903 (TRAV26-1, TRAJ49)
CIVRLTNTGNQFYF

SEQ ID NO: 269806 - protein, 11 aa, Homo sapiens
  CDR3 for beta chain variable domain of TCR clone 134903 (TRBV29-1, TRBJ2-5)
SSEDRTGTQYF

SEQ ID NO: 269807 - protein, 14 aa, Homo sapiens
  CDR3 for alpha chain variable domain of TCR clone 134904 (TRAV12-2, TRAJ33)
CAVKMARSNYQLIW

SEQ ID NO: 269808 - protein, 12 aa, Homo sapiens
  CDR3 for beta chain variable domain of TCR clone 134904 (TRBV24-1, TRBJ2-3)
CATSDSTDTQYF

SEQ ID NO: 269809 - protein, 18 aa, Homo sapiens
  CDR3 for alpha chain variable domain of TCR clone 134905 (TRAV12-3, TRAJ52)
SAMSRTNAGGTSYGKLTF

SEQ ID NO: 269810 - protein, 17 aa, Homo sapiens
  CDR3 for beta chain variable domain of TCR clone 134905 (TRBV7-3, TRBJ2-3)
CARSLMKRMRGADTQYF

SEQ ID NO: 269811 - protein, 13 aa, Homo sapiens
  CDR3 for alpha chain variable domain of TCR clone 134906 (TRAV12-2, TRAJ31)
CAVKADNNAGLMF

SEQ ID NO: 269812 - protein, 15 aa, Homo sapiens
  CDR3 for beta chain variable domain of TCR clone 134906 (TRBV15, TRBJ1-5)
CATSREQGGNQHQHF

SEQ ID NO: 269813 - protein, 13 aa, Homo sapiens
  CDR3 for alpha chain variable domain of TCR clone 134907 (TRAV13-1, TRAJ43)
CAASLSNNNDMRF

SEQ ID NO: 269814 - protein, 15 aa, Homo sapiens
  CDR3 for beta chain variable domain of TCR clone 134907 (TRBV5-1, TRBJ2-1)
CASSQAGSWWNEQFF

SEQ ID NO: 269815 - protein, 16 aa, Homo sapiens
  CDR3 for alpha chain variable domain of TCR clone 134908 (TRAV16, TRAJ4)
CALSRMFSGGYNKLIF

SEQ ID NO: 269816 - protein, 15 aa, Homo sapiens
  CDR3 for beta chain variable domain of TCR clone 134908 (TRBV19, TRBJ2-1)
CASSIQATSYNEQFF

SEQ ID NO: 269817 - protein, 15 aa, Homo sapiens
  CDR3 for alpha chain variable domain of TCR clone 134909 (TRAV17, TRAJ57)
CATGPSQGGSEKLVF

SEQ ID NO: 269818 - protein, 15 aa, Homo sapiens
  CDR3 for beta chain variable domain of TCR clone 134909 (TRBV2, TRBJ2-1)
CASSEARSAYNEQFF

SEQ ID NO: 269819 - protein, 17 aa, Homo sapiens
  CDR3 for alpha chain variable domain of TCR clone 134910 (TRAV8-1, TRAJ43)
CAVTNDMRFGAGTRLTV

SEQ ID NO: 269820 - protein, 17 aa, Homo sapiens
  CDR3 for beta chain variable domain of TCR clone 134910 (TRBV5-4, TRBJ2-1)
CAISSAGGRGPYNEQFF

SEQ ID NO: 269821 - protein, 16 aa, Homo sapiens
  CDR3 for alpha chain variable domain of TCR clone 134911 (TRAV12-3, TRAJ53)
CAMSPGSGGSNYNMTF

SEQ ID NO: 269822 - protein, 16 aa, Homo sapiens
  CDR3 for beta chain variable domain of TCR clone 134911 (TRBV7-9, TRBJ1-2)
CASSLGFSSGEDGYTF

SEQ ID NO: 269823 - protein, 16 aa, Homo sapiens
  CDR3 for alpha chain variable domain of TCR clone 134912 (TRAV12-3, TRAJ18)
CAMRGSRGSTLGRLYF

SEQ ID NO: 269824 - protein, 19 aa, Homo sapiens
  CDR3 for beta chain variable domain of TCR clone 134912 (TRBV6-3, TRBJ2-7)
CASSYLTGLAGGVSGEQYF

SEQ ID NO: 269825 - protein, 15 aa, Homo sapiens
  CDR3 for alpha chain variable domain of TCR clone 134913 (TRAV27, TRAJ38)
CAGRFNAGNNRKLIW

SEQ ID NO: 269826 - protein, 13 aa, Homo sapiens
  CDR3 for beta chain variable domain of TCR clone 134913 (TRBV12-4, TRBJ2-5)
CASRLAVQETQYF

SEQ ID NO: 269827 - protein, 13 aa, Homo sapiens
  CDR3 for alpha chain variable domain of TCR clone 134914 (TRAV3, TRAJ15)
CAVRDQAGTALIF

SEQ ID NO: 269828 - protein, 15 aa, Homo sapiens
  CDR3 for beta chain variable domain of TCR clone 134914 (TRBV11-3, TRBJ2-1)
CASSLAGQTYNEQFF

SEQ ID NO: 269829 - protein, 13 aa, Homo sapiens
  CDR3 for alpha chain variable domain of TCR clone 134915 (TRAV21, TRAJ27)
CAARPGHAGKSTF

SEQ ID NO: 269830 - protein, 15 aa, Homo sapiens
  CDR3 for beta chain variable domain of TCR clone 134915 (TRBV6-3, TRBJ2-7)
CASSSPGTVFYEQYF

SEQ ID NO: 269831 - protein, 12 aa, Homo sapiens
  CDR3 for alpha chain variable domain of TCR clone 134916 (TRAV27, TRAJ34)
CAEPYNTDKLIF

SEQ ID NO: 269832 - protein, 13 aa, Homo sapiens
  CDR3 for beta chain variable domain of TCR clone 134916 (TRBV15, TRBJ1-6)
CATSGGLNSPLHF

SEQ ID NO: 269833 - protein, 14 aa, Homo sapiens
  CDR3 for alpha chain variable domain of TCR clone 134917 (TRAV1-2, TRAJ16)
CAVNRFSDGQKLLF

SEQ ID NO: 269834 - protein, 17 aa, Homo sapiens
  CDR3 for beta chain variable domain of TCR clone 134917 (TRBV20-1, TRBJ2-1)
CSASSSWLAGSYNEQFF

SEQ ID NO: 269835 - protein, 13 aa, Homo sapiens
  CDR3 for alpha chain variable domain of TCR clone 134918 (TRAV17, TRAJ5)
CALRGTGRRALTF

SEQ ID NO: 269836 - protein, 15 aa, Homo sapiens
  CDR3 for beta chain variable domain of TCR clone 134918 (TRBV9, TRBJ1-6)
CASSVAGTGDSPLHC

SEQ ID NO: 269837 - protein, 12 aa, Homo sapiens
  CDR3 for alpha chain variable domain of TCR clone 134919 (TRAV13-1, TRAJ21)
CAAKEGFNKFYF

SEQ ID NO: 269838 - protein, 14 aa, Homo sapiens
  CDR3 for beta chain variable domain of TCR clone 134919 (TRBV12-4, TRBJ2-5)
CASSLWQKQETQYF

SEQ ID NO: 269839 - protein, 12 aa, Homo sapiens
  CDR3 for alpha chain variable domain of TCR clone 134920 (TRAV23/DV6, TRAJ30)
CAASKGDEKISF

SEQ ID NO: 269840 - protein, 15 aa, Homo sapiens
  CDR3 for beta chain variable domain of TCR clone 134920 (TRBV12-4, TRBJ2-1)
CASRPTRTGYNEQFF

SEQ ID NO: 269841 - protein, 17 aa, Homo sapiens
  CDR3 for alpha chain variable domain of TCR clone 134921 (TRAV26-1, TRAJ22)
CIVRVPSHSGSATQLTF

SEQ ID NO: 269842 - protein, 16 aa, Homo sapiens
  CDR3 for beta chain variable domain of TCR clone 134921 (TRBV28, TRBJ2-1)
CASRRSGRVVGNEQFF

SEQ ID NO: 269843 - protein, 15 aa, Homo sapiens
  CDR3 for alpha chain variable domain of TCR clone 134922 (TRAV21, TRAJ24)
CAARSSTDSWGKLQF

SEQ ID NO: 269844 - protein, 13 aa, Homo sapiens
  CDR3 for beta chain variable domain of TCR clone 134922 (TRBV11-2, TRBJ2-5)
CASSSTGEETQDF

SEQ ID NO: 269845 - protein, 10 aa, Homo sapiens
  CDR3 for alpha chain variable domain of TCR clone 134923 (TRAV1-2, TRAJ18)
CAVRGEAQPW

SEQ ID NO: 269846 - protein, 13 aa, Homo sapiens
  CDR3 for beta chain variable domain of TCR clone 134923 (TRBV19, TRBJ2-7)
CASSIDRTYEQYF

SEQ ID NO: 269847 - protein, 13 aa, Homo sapiens
  CDR3 for alpha chain variable domain of TCR clone 134924 (TRAV17, TRAJ5)
CAPMDTGRRALTF

SEQ ID NO: 269848 - protein, 14 aa, Homo sapiens
  CDR3 for beta chain variable domain of TCR clone 134924 (TRBV29-1, TRBJ2-7)
CSVDQRQASYEQFF

SEQ ID NO: 269849 - protein, 12 aa, Homo sapiens
  CDR3 for alpha chain variable domain of TCR clone 134925 (TRAV17, TRAJ20)
CATQSNDYKLSF

SEQ ID NO: 269850 - protein, 13 aa, Homo sapiens
  CDR3 for beta chain variable domain of TCR clone 134925 (TRBV10-3, TRBJ1-1)
CAIIPEGGTESFF

SEQ ID NO: 269851 - protein, 14 aa, Homo sapiens
  CDR3 for alpha chain variable domain of TCR clone 134926 (TRAV2, TRAJ9)
CAVEDRSGGFKTIF

SEQ ID NO: 269852 - protein, 16 aa, Homo sapiens
  CDR3 for beta chain variable domain of TCR clone 134926 (TRBV7-3, TRBJ2-2)
CASSLKRGILSGELFF

SEQ ID NO: 269853 - protein, 13 aa, Homo sapiens
  CDR3 for alpha chain variable domain of TCR clone 134927 (TRAV13-2, TRAJ53)
FAENMGSNYKLTF

SEQ ID NO: 269854 - protein, 13 aa, Homo sapiens
  CDR3 for beta chain variable domain of TCR clone 134927 (TRBV4-1, TRBJ2-2)
CASSQENTGELFF

SEQ ID NO: 269855 - protein, 13 aa, Homo sapiens
  CDR3 for alpha chain variable domain of TCR clone 134928 (TRAV12-2, TRAJ47)
CAVFMEYGNKLVF

SEQ ID NO: 269856 - protein, 14 aa, Homo sapiens
  CDR3 for beta chain variable domain of TCR clone 134928 (TRBV4-1, TRBJ1-5)
CASSQGPTNQPQHF

SEQ ID NO: 269857 - protein, 14 aa, Homo sapiens
  CDR3 for alpha chain variable domain of TCR clone 134929 (TRAV1-1, TRAJ27)
CAVIYNTNAGKSTF

SEQ ID NO: 269858 - protein, 15 aa, Homo sapiens
  CDR3 for beta chain variable domain of TCR clone 134929 (TRBV3-1, TRBJ2-5)
CASSANLGGPETQYF

SEQ ID NO: 269859 - protein, 13 aa, Homo sapiens
  CDR3 for alpha chain variable domain of TCR clone 134930 (TRAV30, TRAJ26)
CGTEIPLGQNFVF

SEQ ID NO: 269860 - protein, 14 aa, Homo sapiens
  CDR3 for beta chain variable domain of TCR clone 134930 (TRBV7-6, TRBJ2-3)
CASSLGTVTDTQYF

SEQ ID NO: 269861 - protein, 13 aa, Homo sapiens
  CDR3 for alpha chain variable domain of TCR clone 134931 (TRAV30, TRAJ49)
CGTEIRTGNQFYF

SEQ ID NO: 269862 - protein, 13 aa, Homo sapiens
  CDR3 for beta chain variable domain of TCR clone 134931 (TRBV12-4, TRBJ2-1)
CASSLGRYNEQFF

SEQ ID NO: 269863 - protein, 14 aa, Homo sapiens
  CDR3 for alpha chain variable domain of TCR clone 134932 (TRAV13-1, TRAJ48)
CAASRSFGNGKLTF

SEQ ID NO: 269864 - protein, 16 aa, Homo sapiens
  CDR3 for beta chain variable domain of TCR clone 134932 (TRBV12-4, TRBJ2-5)
CASSFFVRGRQETQYF

SEQ ID NO: 269865 - protein, 14 aa, Homo sapiens
  CDR3 for alpha chain variable domain of TCR clone 134933 (TRAV9-2, TRAJ39)
CALYICNAGNMLTF

SEQ ID NO: 269866 - protein, 15 aa, Homo sapiens
  CDR3 for beta chain variable domain of TCR clone 134933 (TRBV28, TRBJ1-5)
CASSRTGGYVQPQHF

SEQ ID NO: 269867 - protein, 14 aa, Homo sapiens
  CDR3 for alpha chain variable domain of TCR clone 134934 (TRAV1-2, TRAJ8)
CAVREDTGFQKLVF

SEQ ID NO: 269868 - protein, 15 aa, Homo sapiens
  CDR3 for beta chain variable domain of TCR clone 134934 (TRBV4-1, TRBJ2-7)
CASSQNAGRLYEQYF

SEQ ID NO: 269869 - protein, 17 aa, Homo sapiens
  CDR3 for alpha chain variable domain of TCR clone 134935 (TRAV3, TRAJ6)
CAVRDGSRAGGSYIPTF

SEQ ID NO: 269870 - protein, 13 aa, Homo sapiens
  CDR3 for beta chain variable domain of TCR clone 134935 (TRBV27, TRBJ1-1)
CASSLSIGAEAFF

SEQ ID NO: 269871 - protein, 15 aa, Homo sapiens
  CDR3 for alpha chain variable domain of TCR clone 134936 (TRAV23/DV6, TRAJ44)
CAARTLTGTASKLTF

SEQ ID NO: 269872 - protein, 15 aa, Homo sapiens
  CDR3 for beta chain variable domain of TCR clone 134936 (TRBV4-1, TRBJ1-2)
CASSQGQGAAYGYTF

SEQ ID NO: 269873 - protein, 14 aa, Homo sapiens
  CDR3 for alpha chain variable domain of TCR clone 134937 (TRAV20, TRAJ37)
CSVQSSSNTGKLIF

SEQ ID NO: 269874 - protein, 14 aa, Homo sapiens
  CDR3 for beta chain variable domain of TCR clone 134937 (TRBV7-3, TRBJ2-2)
CASSLNSNTGELFF

SEQ ID NO: 269875 - protein, 13 aa, Homo sapiens
  CDR3 for alpha chain variable domain of TCR clone 134938 (TRAV35, TRAJ48)
CAGHEFENEKLTF

SEQ ID NO: 269876 - protein, 14 aa, Homo sapiens
  CDR3 for beta chain variable domain of TCR clone 134938 (TRBV19, TRBJ2-1)
CASPTFVLSGEQFF

SEQ ID NO: 269877 - protein, 16 aa, Homo sapiens
  CDR3 for alpha chain variable domain of TCR clone 134939 (TRAV30, TRAJ24)
CGTEIVDADSWGKFQF

SEQ ID NO: 269878 - protein, 15 aa, Homo sapiens
  CDR3 for beta chain variable domain of TCR clone 134939 (TRBV20-1, TRBJ2-7)
CSARDRISGMDEQYF

SEQ ID NO: 269879 - protein, 11 aa, Homo sapiens
  CDR3 for alpha chain variable domain of TCR clone 134940 (TRAV13-1, TRAJ15)
CAATPGTARIF

SEQ ID NO: 269880 - protein, 17 aa, Homo sapiens
  CDR3 for beta chain variable domain of TCR clone 134940 (TRBV13, TRBJ2-3)
CASSLSRVAGGRNTQYF

SEQ ID NO: 269881 - protein, 12 aa, Homo sapiens
  CDR3 for alpha chain variable domain of TCR clone 134941 (TRAV13-1, TRAJ27)
CAAHTNAGKLTF

SEQ ID NO: 269882 - protein, 14 aa, Homo sapiens
  CDR3 for beta chain variable domain of TCR clone 134941 (TRBV19, TRBJ2-2)
CASSGQGIAGELFF

SEQ ID NO: 269883 - protein, 16 aa, Homo sapiens
  CDR3 for alpha chain variable domain of TCR clone 134942 (TRAV12-2, TRAJ32)
CAVNLGQGGATNKLIF

SEQ ID NO: 269884 - protein, 14 aa, Homo sapiens
  CDR3 for beta chain variable domain of TCR clone 134942 (TRBV11-2, TRBJ2-3)
CASSRLARTDTQHV

SEQ ID NO: 269885 - protein, 11 aa, Homo sapiens
  CDR3 for alpha chain variable domain of TCR clone 134943 (TRAV27, TRAJ20)
CAGLNDYKLSF

SEQ ID NO: 269886 - protein, 15 aa, Homo sapiens
  CDR3 for beta chain variable domain of TCR clone 134943 (TRBV2, TRBJ2-1)
CASSELAGSYNEQFF

SEQ ID NO: 269887 - protein, 13 aa, Homo sapiens
  CDR3 for alpha chain variable domain of TCR clone 134944 (TRAV3, TRAJ21)
CAVREPHFNKFYF

SEQ ID NO: 269888 - protein, 14 aa, Homo sapiens
  CDR3 for beta chain variable domain of TCR clone 134944 (TRBV4-2, TRBJ2-1)
CASGLDRAYNEQFF

SEQ ID NO: 269889 - protein, 14 aa, Homo sapiens
  CDR3 for alpha chain variable domain of TCR clone 134945 (TRAV26-1, TRAJ38)
CIADNAGNNRKLIW

SEQ ID NO: 269890 - protein, 13 aa, Homo sapiens
  CDR3 for beta chain variable domain of TCR clone 134945 (TRBV20-1, TRBJ1-1)
CSARGGWNTEASF

SEQ ID NO: 269891 - protein, 15 aa, Homo sapiens
  CDR3 for alpha chain variable domain of TCR clone 134946 (TRAV2, TRAJ9)
CAVEDRGTGGFKTFF

SEQ ID NO: 269892 - protein, 15 aa, Homo sapiens
  CDR3 for beta chain variable domain of TCR clone 134946 (TRBV7-9, TRBJ1-5)
CASSQGHQPNQPQHF

SEQ ID NO: 269893 - protein, 14 aa, Homo sapiens
  CDR3 for alpha chain variable domain of TCR clone 134947 (TRAV38-1, TRAJ45)
CAYCSGGGADGLTF

SEQ ID NO: 269894 - protein, 14 aa, Homo sapiens
  CDR3 for beta chain variable domain of TCR clone 134947 (TRBV25-1, TRBJ1-1)
CASTHLGGNTEAFF

SEQ ID NO: 269895 - protein, 14 aa, Homo sapiens
  CDR3 for alpha chain variable domain of TCR clone 134948 (TRAV3, TRAJ17)
CAVRDAAAGNKLTF

SEQ ID NO: 269896 - protein, 18 aa, Homo sapiens
  CDR3 for beta chain variable domain of TCR clone 134948 (TRBV11-2, TRBJ2-3)
CASSLGGASRGAPNTQYF

SEQ ID NO: 269897 - protein, 14 aa, Homo sapiens
  CDR3 for alpha chain variable domain of TCR clone 134949 (TRAV29/DV5, TRAJ43)
CAAIHSYKNNDMRF

SEQ ID NO: 269898 - protein, 14 aa, Homo sapiens
  CDR3 for beta chain variable domain of TCR clone 134949 (TRBV12-4, TRBJ2-5)
CASSSTEGTKTQYF

SEQ ID NO: 269899 - protein, 17 aa, Homo sapiens
  CDR3 for alpha chain variable domain of TCR clone 134950 (TRAV3, TRAJ42)
CAVRDRNYGGSQGNLIF

SEQ ID NO: 269900 - protein, 14 aa, Homo sapiens
  CDR3 for beta chain variable domain of TCR clone 134950 (TRBV19, TRBJ2-2)
CTSSGQGIAGELFF

SEQ ID NO: 269901 - protein, 15 aa, Homo sapiens
  CDR3 for alpha chain variable domain of TCR clone 134951 (TRAV41, TRAJ45)
CAASYSGGGADGLTF

SEQ ID NO: 269902 - protein, 15 aa, Homo sapiens
  CDR3 for beta chain variable domain of TCR clone 134951 (TRBV6-3, TRBJ2-7)
CASSSPGTVFYEQYF

SEQ ID NO: 269903 - protein, 15 aa, Homo sapiens
  CDR3 for alpha chain variable domain of TCR clone 134952 (TRAV3, TRAJ3)
CAVRDGHSSASKIIF

SEQ ID NO: 269904 - protein, 14 aa, Homo sapiens
  CDR3 for beta chain variable domain of TCR clone 134952 (TRBV28, TRBJ1-4)
CASSCGTFDEKLFF

SEQ ID NO: 269905 - protein, 15 aa, Homo sapiens
  CDR3 for alpha chain variable domain of TCR clone 134953 (TRAV27, TRAJ38)
CAARRNAGNNRKLIW

SEQ ID NO: 269906 - protein, 16 aa, Homo sapiens
  CDR3 for beta chain variable domain of TCR clone 134953 (TRBV6-5, TRBJ2-7)
CASSTRTSGAPYEQYF

SEQ ID NO: 269907 - protein, 13 aa, Homo sapiens
  CDR3 for alpha chain variable domain of TCR clone 134954 (TRAV8-3, TRAJ44)
CAVVPGTASKLTF

SEQ ID NO: 269908 - protein, 16 aa, Homo sapiens
  CDR3 for beta chain variable domain of TCR clone 134954 (TRBV20-1, TRBJ1-4)
CSAPGQGLLANEKLFF

SEQ ID NO: 269909 - protein, 11 aa, Homo sapiens
  CDR3 for alpha chain variable domain of TCR clone 134955 (TRAV13-1, TRAJ30)
CAASRDDKIIF

SEQ ID NO: 269910 - protein, 15 aa, Homo sapiens
  CDR3 for beta chain variable domain of TCR clone 134955 (TRBV18, TRBJ1-1)
CSSSPSSWVNTEAFF

SEQ ID NO: 269911 - protein, 14 aa, Homo sapiens
  CDR3 for alpha chain variable domain of TCR clone 134956 (TRAV23/DV6, TRAJ37)
CEASTSSNTGKLIL

SEQ ID NO: 269912 - protein, 13 aa, Homo sapiens
  CDR3 for beta chain variable domain of TCR clone 134956 (TRBV7-7, TRBJ1-1)
CASSLGANTEAFF

SEQ ID NO: 269913 - protein, 23 aa, Homo sapiens
  CDR3 for alpha chain variable domain of TCR clone 134957 (TRAV12-2, TRAJ43)
SLLIRDSQPSDSATYLCAFDMRF

SEQ ID NO: 269914 - protein, 17 aa, Homo sapiens
  CDR3 for beta chain variable domain of TCR clone 134957 (TRBV13, TRBJ2-3)
CDSSLSRVAGGRNTQYF

SEQ ID NO: 269915 - protein, 13 aa, Homo sapiens
  CDR3 for alpha chain variable domain of TCR clone 134958 (TRAV39, TRAJ33)
CAANPDSNYQLIW

SEQ ID NO: 269916 - protein, 12 aa, Homo sapiens
  CDR3 for beta chain variable domain of TCR clone 134958 (TRBV19, TRBJ2-1)
CASSQISNEQFF

SEQ ID NO: 269917 - protein, 12 aa, Homo sapiens
  CDR3 for alpha chain variable domain of TCR clone 134959 (TRAV12-3, TRAJ17)
CAMTLTGNKLTF

SEQ ID NO: 269918 - protein, 16 aa, Homo sapiens
  CDR3 for beta chain variable domain of TCR clone 134959 (TRBV13, TRBJ2-2)
YASSPRTGEHTGELFF

SEQ ID NO: 269919 - protein, 11 aa, Homo sapiens
  CDR3 for alpha chain variable domain of TCR clone 134960 (TRAV3, TRAJ21)
CAVGNFNKFYF

SEQ ID NO: 269920 - protein, 14 aa, Homo sapiens
  CDR3 for beta chain variable domain of TCR clone 134960 (TRBV13, TRBJ2-5)
CASSLGRGQETQYF

SEQ ID NO: 269921 - protein, 16 aa, Homo sapiens
  CDR3 for alpha chain variable domain of TCR clone 134961 (TRAV30, TRAJ24)
CGTEIVDDDSWGKFQF

SEQ ID NO: 269922 - protein, 12 aa, Homo sapiens
  CDR3 for beta chain variable domain of TCR clone 134961 (TRBV27, TRBJ2-1)
CASRGFYNEQFF

SEQ ID NO: 269923 - protein, 16 aa, Homo sapiens
  CDR3 for alpha chain variable domain of TCR clone 134962 (TRAV23/DV6, )
CAEQDIQNPDPAVYQL

SEQ ID NO: 269924 - protein, 15 aa, Homo sapiens
  CDR3 for beta chain variable domain of TCR clone 134962 (TRBV12-4, TRBJ2-5)
CASTLNSGRGETQYF

SEQ ID NO: 269925 - protein, 13 aa, Homo sapiens
  CDR3 for alpha chain variable domain of TCR clone 134963 (TRAV2, TRAJ40)
CAVVTSGTYKYIF

SEQ ID NO: 269926 - protein, 16 aa, Homo sapiens
  CDR3 for beta chain variable domain of TCR clone 134963 (TRBV7-3, TRBJ2-1)
CASSLEGYHSYNEQFF

SEQ ID NO: 269927 - protein, 14 aa, Homo sapiens
  CDR3 for alpha chain variable domain of TCR clone 134964 (TRAV17, TRAJ35)
CATDRPGFGNVLHC

SEQ ID NO: 269928 - protein, 19 aa, Homo sapiens
  CDR3 for beta chain variable domain of TCR clone 134964 (TRBV11-3, TRBJ2-2)
CASSTRPGAKTTNTGKLFF

SEQ ID NO: 269929 - protein, 12 aa, Homo sapiens
  CDR3 for alpha chain variable domain of TCR clone 134965 (TRAV29/DV5, TRAJ49)
CAATDTGNQFYF

SEQ ID NO: 269930 - protein, 12 aa, Homo sapiens
  CDR3 for beta chain variable domain of TCR clone 134965 (TRBV7-3, TRBJ2-1)
CASSFQSGPQFF

SEQ ID NO: 269931 - protein, 14 aa, Homo sapiens
  CDR3 for alpha chain variable domain of TCR clone 134966 (TRAV13-2, TRAJ17)
CAEHSKAAGNTLNF

SEQ ID NO: 269932 - protein, 20 aa, Homo sapiens
  CDR3 for beta chain variable domain of TCR clone 134966 (TRBV28, TRBJ2-1)
CASTPIGRSPGLAGGNEQFF

SEQ ID NO: 269933 - protein, 14 aa, Homo sapiens
  CDR3 for alpha chain variable domain of TCR clone 134967 (TRAV2, TRAJ37)
CAVGFTRNTGKLIF

SEQ ID NO: 269934 - protein, 15 aa, Homo sapiens
  CDR3 for beta chain variable domain of TCR clone 134967 (TRBV20-1, TRBJ1-1)
CSASRGVTGNTEAFF

SEQ ID NO: 269935 - protein, 15 aa, Homo sapiens
  CDR3 for alpha chain variable domain of TCR clone 134968 (TRAV13-1, TRAJ36)
CAASIRQTGANNLFF

SEQ ID NO: 269936 - protein, 14 aa, Homo sapiens
  CDR3 for beta chain variable domain of TCR clone 134968 (TRBV12-5, TRBJ2-5)
CASGSRTHQETQYF

SEQ ID NO: 269937 - protein, 12 aa, Homo sapiens
  CDR3 for alpha chain variable domain of TCR clone 134969 (TRAV1-1, TRAJ9)
FAVDTGGFKTIF

SEQ ID NO: 269938 - protein, 15 aa, Homo sapiens
  CDR3 for beta chain variable domain of TCR clone 134969 (TRBV6-3, TRBJ2-7)
CASSSPGTVFYEQYF

SEQ ID NO: 269939 - protein, 15 aa, Homo sapiens
  CDR3 for alpha chain variable domain of TCR clone 134970 (TRAV27, TRAJ10)
CAGELLTGGGNKLTF

SEQ ID NO: 269940 - protein, 14 aa, Homo sapiens
  CDR3 for beta chain variable domain of TCR clone 134970 (TRBV25-1, TRBJ1-1)
CASTHLGGNTEAFF

SEQ ID NO: 269941 - protein, 14 aa, Homo sapiens
  CDR3 for alpha chain variable domain of TCR clone 134971 (TRAV14/DV4, TRAJ15)
CAMRRDQAGTALIF

SEQ ID NO: 269942 - protein, 12 aa, Homo sapiens
  CDR3 for beta chain variable domain of TCR clone 134971 (TRBV11-2, TRBJ2-2)
CASSLGGGELFF

SEQ ID NO: 269943 - protein, 14 aa, Homo sapiens
  CDR3 for alpha chain variable domain of TCR clone 134972 (TRAV35, TRAJ40)
CAGSTTSGTYKYIF

SEQ ID NO: 269944 - protein, 13 aa, Homo sapiens
  CDR3 for beta chain variable domain of TCR clone 134972 (TRBV4-2, TRBJ1-1)
CASSQAGNTEAFF

SEQ ID NO: 269945 - protein, 16 aa, Homo sapiens
  CDR3 for alpha chain variable domain of TCR clone 134973 (TRAV3, TRAJ10)
CAVRDMRAGGGNKLTF

SEQ ID NO: 269946 - protein, 13 aa, Homo sapiens
  CDR3 for beta chain variable domain of TCR clone 134973 (TRBV7-9, TRBJ1-2)
CASSLEQNYGYTF

SEQ ID NO: 269947 - protein, 11 aa, Homo sapiens
  CDR3 for alpha chain variable domain of TCR clone 134974 (TRAV12-1, TRAJ34)
CVVNKGRELIF

SEQ ID NO: 269948 - protein, 12 aa, Homo sapiens
  CDR3 for beta chain variable domain of TCR clone 134974 (TRBV7-9, TRBJ2-7)
CASSLEGYEQYF

SEQ ID NO: 269949 - protein, 14 aa, Homo sapiens
  CDR3 for alpha chain variable domain of TCR clone 134975 (TRAV26-1, TRAJ39)
CIVRGSRAGNMPTF

SEQ ID NO: 269950 - protein, 15 aa, Homo sapiens
  CDR3 for beta chain variable domain of TCR clone 134975 (TRBV7-9, TRBJ1-5)
CASSQGHPPNQPQHF

SEQ ID NO: 269951 - protein, 11 aa, Homo sapiens
  CDR3 for alpha chain variable domain of TCR clone 134976 (TRAV2, TRAJ13)
CASGGYQKVTF

SEQ ID NO: 269952 - protein, 16 aa, Homo sapiens
  CDR3 for beta chain variable domain of TCR clone 134976 (TRBV20-1, TRBJ1-5)
CSAELPGQQTNQPQHF

SEQ ID NO: 269953 - protein, 13 aa, Homo sapiens
  CDR3 for alpha chain variable domain of TCR clone 134977 (TRAV21, TRAJ27)
CAARPGNAGKSTF

SEQ ID NO: 269954 - protein, 13 aa, Homo sapiens
  CDR3 for beta chain variable domain of TCR clone 134977 (TRBV20-1, TRBJ1-2)
CSARGAADYGYTF

SEQ ID NO: 269955 - protein, 17 aa, Homo sapiens
  CDR3 for alpha chain variable domain of TCR clone 134978 (TRAV38-2/DV8, TRAJ56)
CAYRSEVGTGANSKLTF

SEQ ID NO: 269956 - protein, 14 aa, Homo sapiens
  CDR3 for beta chain variable domain of TCR clone 134978 (TRBV11-1, TRBJ1-1)
CASSLEYPNTEAFF

SEQ ID NO: 269957 - protein, 15 aa, Homo sapiens
  CDR3 for alpha chain variable domain of TCR clone 134979 (TRAV3, TRAJ30)
CAVRDRVERGDKIIF

SEQ ID NO: 269958 - protein, 10 aa, Homo sapiens
  CDR3 for beta chain variable domain of TCR clone 134979 (TRBV29-1, TRBJ2-5)
MFIEEGDQYF

SEQ ID NO: 269959 - protein, 15 aa, Homo sapiens
  CDR3 for alpha chain variable domain of TCR clone 134980 (TRAV4, TRAJ39)
CLVGPNNNAGNMLTF

SEQ ID NO: 269960 - protein, 14 aa, Homo sapiens
  CDR3 for beta chain variable domain of TCR clone 134980 (TRBV19, TRBJ2-7)
CASNFRDAFTGMYF

SEQ ID NO: 269961 - protein, 13 aa, Homo sapiens
  CDR3 for alpha chain variable domain of TCR clone 134981 (TRAV1-2, TRAJ20)
CAVRSLDDYKLSF

SEQ ID NO: 269962 - protein, 11 aa, Homo sapiens
  CDR3 for beta chain variable domain of TCR clone 134981 (TRBV4-2, TRBJ2-1)
CASSQGREQFF

SEQ ID NO: 269963 - protein, 11 aa, Homo sapiens
  CDR3 for alpha chain variable domain of TCR clone 134982 (TRAV9-2, TRAJ43)
CALNNNNEMRF

SEQ ID NO: 269964 - protein, 13 aa, Homo sapiens
  CDR3 for beta chain variable domain of TCR clone 134982 (TRBV20-1, TRBJ2-1)
CSASTGTSNEQFF

SEQ ID NO: 269965 - protein, 15 aa, Homo sapiens
  CDR3 for alpha chain variable domain of TCR clone 134983 (TRAV8-2, TRAJ27)
CVVSDRGTNAGKSTF

SEQ ID NO: 269966 - protein, 18 aa, Homo sapiens
  CDR3 for beta chain variable domain of TCR clone 134983 (TRBV12-4, TRBJ2-2)
CASSLVAGTRGRTGELFF

SEQ ID NO: 269967 - protein, 11 aa, Homo sapiens
  CDR3 for alpha chain variable domain of TCR clone 134984 (TRAV2, TRAJ13)
CASGGYQKVTF

SEQ ID NO: 269968 - protein, 16 aa, Homo sapiens
  CDR3 for beta chain variable domain of TCR clone 134984 (TRBV28, TRBJ2-7)
CASSPWVATGDLSQYF

SEQ ID NO: 269969 - protein, 15 aa, Homo sapiens
  CDR3 for alpha chain variable domain of TCR clone 134985 (TRAV12-1, TRAJ9)
CVVSFGDTGGFKTIF

SEQ ID NO: 269970 - protein, 16 aa, Homo sapiens
  CDR3 for beta chain variable domain of TCR clone 134985 (TRBV7-3, TRBJ2-2)
CASSLKRGTLSGELFF

SEQ ID NO: 269971 - protein, 11 aa, Homo sapiens
  CDR3 for alpha chain variable domain of TCR clone 134986 (TRAV12-2, TRAJ29)
CAVTLRSPLVF

SEQ ID NO: 269972 - protein, 14 aa, Homo sapiens
  CDR3 for beta chain variable domain of TCR clone 134986 (TRBV9, TRBJ2-1)
CASSVALAVNEQFF

SEQ ID NO: 269973 - protein, 14 aa, Homo sapiens
  CDR3 for alpha chain variable domain of TCR clone 134987 (TRAV9-2, TRAJ39)
CALYIYNAGNMLTF

SEQ ID NO: 269974 - protein, 17 aa, Homo sapiens
  CDR3 for beta chain variable domain of TCR clone 134987 (TRBV19, TRBJ1-1)
CASSKSGTGGPYTEAFF

SEQ ID NO: 269975 - protein, 15 aa, Homo sapiens
  CDR3 for alpha chain variable domain of TCR clone 134988 (TRAV29/DV5, TRAJ29)
CAASERSPGNKPLVF

SEQ ID NO: 269976 - protein, 17 aa, Homo sapiens
  CDR3 for beta chain variable domain of TCR clone 134988 (TRBV4-1, TRBJ1-4)
CASSQEGPRGVEEKLFF

SEQ ID NO: 269977 - protein, 14 aa, Homo sapiens
  CDR3 for alpha chain variable domain of TCR clone 134989 (TRAV1-2, TRAJ16)
CAVNWFSDGQKLLF

SEQ ID NO: 269978 - protein, 14 aa, Homo sapiens
  CDR3 for beta chain variable domain of TCR clone 134989 (TRBV6-1, TRBJ1-3)
CASVQGGGGNTIYF

SEQ ID NO: 269979 - protein, 14 aa, Homo sapiens
  CDR3 for alpha chain variable domain of TCR clone 134990 (TRAV29/DV5, TRAJ36)
CAARRKPGANNLFF

SEQ ID NO: 269980 - protein, 12 aa, Homo sapiens
  CDR3 for beta chain variable domain of TCR clone 134990 (TRBV12-5, TRBJ2-5)
CASGQGVETQYF

SEQ ID NO: 269981 - protein, 14 aa, Homo sapiens
  CDR3 for alpha chain variable domain of TCR clone 134991 (TRAV38-1, TRAJ43)
CAFMKHNNNNDMRF

SEQ ID NO: 269982 - protein, 17 aa, Homo sapiens
  CDR3 for beta chain variable domain of TCR clone 134991 (TRBV7-7, TRBJ1-4)
CASSLVGKGASNEKLFF

SEQ ID NO: 269983 - protein, 11 aa, Homo sapiens
  CDR3 for alpha chain variable domain of TCR clone 134992 (TRAV1-2, TRAJ40)
CAVPGTYKYIF

SEQ ID NO: 269984 - protein, 16 aa, Homo sapiens
  CDR3 for beta chain variable domain of TCR clone 134992 (TRBV29-1, TRBJ2-7)
CSVEVVGASRSYEQYF

SEQ ID NO: 269985 - protein, 14 aa, Homo sapiens
  CDR3 for alpha chain variable domain of TCR clone 134993 (TRAV1-2, TRAJ8)
CAVRGGSGFQKLVF

SEQ ID NO: 269986 - protein, 15 aa, Homo sapiens
  CDR3 for beta chain variable domain of TCR clone 134993 (TRBV6-3, TRBJ2-7)
CASSSPGTVFYEQYF

SEQ ID NO: 269987 - protein, 12 aa, Homo sapiens
  CDR3 for alpha chain variable domain of TCR clone 134994 (TRAV1-1, TRAJ8)
CAGCTGFQKLVF

SEQ ID NO: 269988 - protein, 15 aa, Homo sapiens
  CDR3 for beta chain variable domain of TCR clone 134994 (TRBV7-9, TRBJ1-4)
CASSRTGGFNEKLFY

SEQ ID NO: 269989 - protein, 15 aa, Homo sapiens
  CDR3 for alpha chain variable domain of TCR clone 134995 (TRAV17, TRAJ4)
CATGTWSGGYNKLIF

SEQ ID NO: 269990 - protein, 13 aa, Homo sapiens
  CDR3 for beta chain variable domain of TCR clone 134995 (TRBV6-6, TRBJ2-7)
CASSPKHLAEKYF

SEQ ID NO: 269991 - protein, 13 aa, Homo sapiens
  CDR3 for alpha chain variable domain of TCR clone 134996 (TRAV12-2, TRAJ52)
CAVSGTSYGKLTF

SEQ ID NO: 269992 - protein, 15 aa, Homo sapiens
  CDR3 for beta chain variable domain of TCR clone 134996 (TRBV7-2, TRBJ2-1)
CASTHGTGIYNEQFF

SEQ ID NO: 269993 - protein, 16 aa, Homo sapiens
  CDR3 for alpha chain variable domain of TCR clone 134997 (TRAV30, TRAJ24)
CGTEIVDADSWGKFQF

SEQ ID NO: 269994 - protein, 15 aa, Homo sapiens
  CDR3 for beta chain variable domain of TCR clone 134997 (TRBV12-5, TRBJ2-2)
CASGFQGSGTGELFF

SEQ ID NO: 269995 - protein, 15 aa, Homo sapiens
  CDR3 for alpha chain variable domain of TCR clone 134998 (TRAV4, TRAJ26)
CLVGDMHNYGQNFVF

SEQ ID NO: 269996 - protein, 16 aa, Homo sapiens
  CDR3 for beta chain variable domain of TCR clone 134998 (TRBV28, TRBJ1-4)
CASSSRTGAANEKLFF

SEQ ID NO: 269997 - protein, 16 aa, Homo sapiens
  CDR3 for alpha chain variable domain of TCR clone 134999 (TRAV8-3, TRAJ44)
CAVGASNTGTASKLTF

SEQ ID NO: 269998 - protein, 12 aa, Homo sapiens
  CDR3 for beta chain variable domain of TCR clone 134999 (TRBV29-1, TRBJ2-3)
CSVTGGADTQYF

SEQ ID NO: 269999 - protein, 13 aa, Homo sapiens
  CDR3 for alpha chain variable domain of TCR clone 135000 (TRAV12-1, TRAJ26)
CVVNDNYGQNFVF

SEQ ID NO: 270000 - protein, 15 aa, Homo sapiens
  CDR3 for beta chain variable domain of TCR clone 135000 (TRBV19, TRBJ2-1)
CASSRPGQNYNEQFF

SEQ ID NO: 270001 - protein, 15 aa, Homo sapiens
  CDR3 for alpha chain variable domain of TCR clone 135001 (TRAV3, TRAJ3)
CAVRDGHSSASKIIF

SEQ ID NO: 270002 - protein, 17 aa, Homo sapiens
  CDR3 for beta chain variable domain of TCR clone 135001 (TRBV25-1, TRBJ2-7)
CASSDARVVFSAYEQYF

SEQ ID NO: 270003 - protein, 13 aa, Homo sapiens
  CDR3 for alpha chain variable domain of TCR clone 135002 (TRAV21, TRAJ57)
CAVTQGGSEKLVF

SEQ ID NO: 270004 - protein, 12 aa, Homo sapiens
  CDR3 for beta chain variable domain of TCR clone 135002 (TRBV7-9, TRBJ1-5)
CASSPQGQPQHF

SEQ ID NO: 270005 - protein, 13 aa, Homo sapiens
  CDR3 for alpha chain variable domain of TCR clone 135003 (TRAV8-6, TRAJ49)
CAVITNTGNQFYF

SEQ ID NO: 270006 - protein, 16 aa, Homo sapiens
  CDR3 for beta chain variable domain of TCR clone 135003 (TRBV11-3, TRBJ2-5)
CASSSVVAGSTETQYF

SEQ ID NO: 270007 - protein, 14 aa, Homo sapiens
  CDR3 for alpha chain variable domain of TCR clone 135004 (TRAV12-2, TRAJ13)
WAVNPSGGYQKVTF

SEQ ID NO: 270008 - protein, 14 aa, Homo sapiens
  CDR3 for beta chain variable domain of TCR clone 135004 (TRBV12-4, TRBJ1-1)
CASSLGTGGTEAFF

SEQ ID NO: 270009 - protein, 16 aa, Homo sapiens
  CDR3 for alpha chain variable domain of TCR clone 135005 (TRAV3, TRAJ10)
CAVRDMRAGGGNKLTF

SEQ ID NO: 270010 - protein, 14 aa, Homo sapiens
  CDR3 for beta chain variable domain of TCR clone 135005 (TRBV7-2, TRBJ1-4)
CASSGVEGGEKLFF

SEQ ID NO: 270011 - protein, 17 aa, Homo sapiens
  CDR3 for alpha chain variable domain of TCR clone 135006 (TRAV29/DV5, TRAJ40)
CAASVIYTTSGTYKYIF

SEQ ID NO: 270012 - protein, 18 aa, Homo sapiens
  CDR3 for beta chain variable domain of TCR clone 135006 (TRBV6-1, TRBJ2-7)
CASSLTTSGSRTWYEQYF

SEQ ID NO: 270013 - protein, 16 aa, Homo sapiens
  CDR3 for alpha chain variable domain of TCR clone 135007 (TRAV3, TRAJ37)
CAVRGKGSGNTGKLIF

SEQ ID NO: 270014 - protein, 14 aa, Homo sapiens
  CDR3 for beta chain variable domain of TCR clone 135007 (TRBV7-2, TRBJ2-7)
CASSLDPGGGEQYF

SEQ ID NO: 270015 - protein, 14 aa, Homo sapiens
  CDR3 for alpha chain variable domain of TCR clone 135008 (TRAV17, TRAJ57)
CATDPQGGSEKLVF

SEQ ID NO: 270016 - protein, 12 aa, Homo sapiens
  CDR3 for beta chain variable domain of TCR clone 135008 (TRBV27, TRBJ2-2)
CASKLFTGELFF

SEQ ID NO: 270017 - protein, 13 aa, Homo sapiens
  CDR3 for alpha chain variable domain of TCR clone 135009 (TRAV21, TRAJ36)
CALIKTGANNLFF

SEQ ID NO: 270018 - protein, 13 aa, Homo sapiens
  CDR3 for beta chain variable domain of TCR clone 135009 (TRBV29-1, TRBJ2-3)
CSATRGGRDTQYF

SEQ ID NO: 270019 - protein, 13 aa, Homo sapiens
  CDR3 for alpha chain variable domain of TCR clone 135010 (TRAV8-4, TRAJ9)
CAVSETGGFKTIF

SEQ ID NO: 270020 - protein, 14 aa, Homo sapiens
  CDR3 for beta chain variable domain of TCR clone 135010 (TRBV13, TRBJ2-5)
CASSLERVVETQYF

SEQ ID NO: 270021 - protein, 14 aa, Homo sapiens
  CDR3 for alpha chain variable domain of TCR clone 135011 (TRAV12-3, TRAJ9)
CAMSPNTGGFKTIF

SEQ ID NO: 270022 - protein, 12 aa, Homo sapiens
  CDR3 for beta chain variable domain of TCR clone 135011 (TRBV19, TRBJ1-5)
CASSIAQQAQHV

SEQ ID NO: 270023 - protein, 14 aa, Homo sapiens
  CDR3 for alpha chain variable domain of TCR clone 135012 (TRAV13-2, TRAJ26)
CAENLGNYGQNFVF

SEQ ID NO: 270024 - protein, 15 aa, Homo sapiens
  CDR3 for beta chain variable domain of TCR clone 135012 (TRBV19, TRBJ1-1)
CASTSGQIQNTEAFF

SEQ ID NO: 270025 - protein, 11 aa, Homo sapiens
  CDR3 for alpha chain variable domain of TCR clone 135013 (TRAV21, TRAJ34)
CAHYNTDKLIF

SEQ ID NO: 270026 - protein, 15 aa, Homo sapiens
  CDR3 for beta chain variable domain of TCR clone 135013 (TRBV7-2, TRBJ2-3)
CASSLAGAFIDTQYF

SEQ ID NO: 270027 - protein, 13 aa, Homo sapiens
  CDR3 for alpha chain variable domain of TCR clone 135014 (TRAV8-6, TRAJ49)
CAVITNNGNQFYF

SEQ ID NO: 270028 - protein, 14 aa, Homo sapiens
  CDR3 for beta chain variable domain of TCR clone 135014 (TRBV19, TRBJ2-1)
CASPTFVLSGEQFF

SEQ ID NO: 270029 - protein, 13 aa, Homo sapiens
  CDR3 for alpha chain variable domain of TCR clone 135015 (TRAV12-1, TRAJ11)
CVVNRAGYSTLTF

SEQ ID NO: 270030 - protein, 14 aa, Homo sapiens
  CDR3 for beta chain variable domain of TCR clone 135015 (TRBV11-2, TRBJ2-5)
CASRPLAGRETQYF

SEQ ID NO: 270031 - protein, 16 aa, Homo sapiens
  CDR3 for alpha chain variable domain of TCR clone 135016 (TRAV3, TRAJ37)
CAVRGQGSGNTGKLIF

SEQ ID NO: 270032 - protein, 16 aa, Homo sapiens
  CDR3 for beta chain variable domain of TCR clone 135016 (TRBV12-4, TRBJ1-5)
CASSRPVGGSNQPQHF

SEQ ID NO: 270033 - protein, 14 aa, Homo sapiens
  CDR3 for alpha chain variable domain of TCR clone 135017 (TRAV12-1, TRAJ23)
CVVIVYNQGGKLIF

SEQ ID NO: 270034 - protein, 15 aa, Homo sapiens
  CDR3 for beta chain variable domain of TCR clone 135017 (TRBV20-1, TRBJ1-5)
CSAKPPGQGPQPQRF

SEQ ID NO: 270035 - protein, 11 aa, Homo sapiens
  CDR3 for alpha chain variable domain of TCR clone 135018 (TRAV3, TRAJ21)
CAVGNFNKFYF

SEQ ID NO: 270036 - protein, 16 aa, Homo sapiens
  CDR3 for beta chain variable domain of TCR clone 135018 (TRBV20-1, TRBJ1-2)
CSASMGQGVANYGYIF

SEQ ID NO: 270037 - protein, 14 aa, Homo sapiens
  CDR3 for alpha chain variable domain of TCR clone 135019 (TRAV12-2, TRAJ13)
CAVKKTGGYQKVTF

SEQ ID NO: 270038 - protein, 15 aa, Homo sapiens
  CDR3 for beta chain variable domain of TCR clone 135019 (TRBV27, TRBJ2-1)
CASSNWGGSSNGQFF

SEQ ID NO: 270039 - protein, 12 aa, Homo sapiens
  CDR3 for alpha chain variable domain of TCR clone 135020 (TRAV12-3, TRAJ17)
CAMTLTGNKLTF

SEQ ID NO: 270040 - protein, 18 aa, Homo sapiens
  CDR3 for beta chain variable domain of TCR clone 135020 (TRBV4-3, TRBJ1-6)
CASSQETPTSSYNSPLHF

SEQ ID NO: 270041 - protein, 14 aa, Homo sapiens
  CDR3 for alpha chain variable domain of TCR clone 135021 (TRAV12-2, TRAJ13)
CAVKKTGGYRKVTF

SEQ ID NO: 270042 - protein, 13 aa, Homo sapiens
  CDR3 for beta chain variable domain of TCR clone 135021 (TRBV7-2, TRBJ2-2)
CASSLAVTGELFF

SEQ ID NO: 270043 - protein, 12 aa, Homo sapiens
  CDR3 for alpha chain variable domain of TCR clone 135022 (TRAV12-3, TRAJ17)
CAMTLTGNELTF

SEQ ID NO: 270044 - protein, 15 aa, Homo sapiens
  CDR3 for beta chain variable domain of TCR clone 135022 (TRBV20-1, TRBJ2-7)
CSARDRVSGVDEQYF

SEQ ID NO: 270045 - protein, 16 aa, Homo sapiens
  CDR3 for alpha chain variable domain of TCR clone 135023 (TRAV16, TRAJ4)
CALSRMFSGGYNKLIF

SEQ ID NO: 270046 - protein, 16 aa, Homo sapiens
  CDR3 for beta chain variable domain of TCR clone 135023 (TRBV24-1, TRBJ2-3)
CATSDPGTGATHTQYF

SEQ ID NO: 270047 - protein, 14 aa, Homo sapiens
  CDR3 for alpha chain variable domain of TCR clone 135024 (TRAV12-1, TRAJ26)
CVVKGSNYGQNFVS

SEQ ID NO: 270048 - protein, 17 aa, Homo sapiens
  CDR3 for beta chain variable domain of TCR clone 135024 (TRBV11-2, TRBJ2-6)
CASSQRDIFSGANVLYF

SEQ ID NO: 270049 - protein, 12 aa, Homo sapiens
  CDR3 for alpha chain variable domain of TCR clone 135025 (TRAV12-3, TRAJ17)
CAMTLTGNKLTF

SEQ ID NO: 270050 - protein, 15 aa, Homo sapiens
  CDR3 for beta chain variable domain of TCR clone 135025 (TRBV20-1, TRBJ2-7)
CSARDRVFGMDEQYL

SEQ ID NO: 270051 - protein, 13 aa, Homo sapiens
  CDR3 for alpha chain variable domain of TCR clone 135026 (TRAV17, TRAJ5)
CAPMDTGRRALTF

SEQ ID NO: 270052 - protein, 15 aa, Homo sapiens
  CDR3 for beta chain variable domain of TCR clone 135026 (TRBV28, TRBJ2-5)
CASSPPWSYQETQYF

SEQ ID NO: 270053 - protein, 18 aa, Homo sapiens
  CDR3 for alpha chain variable domain of TCR clone 135027 (TRAV21, TRAJ52)
CAVRPSPAGGTSYGKMTF

SEQ ID NO: 270054 - protein, 15 aa, Homo sapiens
  CDR3 for beta chain variable domain of TCR clone 135027 (TRBV15, TRBJ1-1)
CATSLQGGRNTEAFF

SEQ ID NO: 270055 - protein, 11 aa, Homo sapiens
  CDR3 for alpha chain variable domain of TCR clone 135028 (TRAV35, TRAJ30)
CAGPGDDKIIF

SEQ ID NO: 270056 - protein, 14 aa, Homo sapiens
  CDR3 for beta chain variable domain of TCR clone 135028 (TRBV7-6, TRBJ1-6)
CASGQAEGGSPLHF

SEQ ID NO: 270057 - protein, 17 aa, Homo sapiens
  CDR3 for alpha chain variable domain of TCR clone 135029 (TRAV4, TRAJ13)
CLVGVQGSSGGYQKVTF

SEQ ID NO: 270058 - protein, 13 aa, Homo sapiens
  CDR3 for beta chain variable domain of TCR clone 135029 (TRBV9, TRBJ2-1)
CASSVGQGGEQFF

SEQ ID NO: 270059 - protein, 14 aa, Homo sapiens
  CDR3 for alpha chain variable domain of TCR clone 135030 (TRAV16, TRAJ42)
CALLAGGSQGNLIF

SEQ ID NO: 270060 - protein, 15 aa, Homo sapiens
  CDR3 for beta chain variable domain of TCR clone 135030 (TRBV2, TRBJ2-7)
CASSEGRARSYEQYF

SEQ ID NO: 270061 - protein, 13 aa, Homo sapiens
  CDR3 for alpha chain variable domain of TCR clone 135031 (TRAV12-2, TRAJ52)
CAVSGTSYGKLTF

SEQ ID NO: 270062 - protein, 18 aa, Homo sapiens
  CDR3 for beta chain variable domain of TCR clone 135031 (TRBV7-9, TRBJ2-7)
CASSLTTSGSRTWYEQYF

SEQ ID NO: 270063 - protein, 15 aa, Homo sapiens
  CDR3 for alpha chain variable domain of TCR clone 135032 (TRAV27, TRAJ38)
CAARRNAGNNRKLIW

SEQ ID NO: 270064 - protein, 13 aa, Homo sapiens
  CDR3 for beta chain variable domain of TCR clone 135032 (TRBV12-4, TRBJ1-2)
CASSSGLTVISTF

SEQ ID NO: 270065 - protein, 14 aa, Homo sapiens
  CDR3 for alpha chain variable domain of TCR clone 135033 (TRAV12-3, TRAJ15)
CAMIPPQAGTALIF

SEQ ID NO: 270066 - protein, 14 aa, Homo sapiens
  CDR3 for beta chain variable domain of TCR clone 135033 (TRBV20-1, TRBJ2-2)
CSVRKRLATGELFF

SEQ ID NO: 270067 - protein, 16 aa, Homo sapiens
  CDR3 for alpha chain variable domain of TCR clone 135034 (TRAV26-1, TRAJ38)
CIVRVELGGNNRKLMW

SEQ ID NO: 270068 - protein, 14 aa, Homo sapiens
  CDR3 for beta chain variable domain of TCR clone 135034 (TRBV5-1, TRBJ2-3)
CASSPGLAADTQYF

SEQ ID NO: 270069 - protein, 15 aa, Homo sapiens
  CDR3 for alpha chain variable domain of TCR clone 135035 (TRAV26-1, TRAJ24)
CIVPLTTDSWGKFKF

SEQ ID NO: 270070 - protein, 14 aa, Homo sapiens
  CDR3 for beta chain variable domain of TCR clone 135035 (TRBV10-3, TRBJ2-3)
CAISEKGLGDTQYL

SEQ ID NO: 270071 - protein, 23 aa, Homo sapiens
  CDR3 for alpha chain variable domain of TCR clone 135036 (TRAV13-1, TRAJ6)
PCTSQRPNLKTRLSTSVQRWPTF

SEQ ID NO: 270072 - protein, 14 aa, Homo sapiens
  CDR3 for beta chain variable domain of TCR clone 135036 (TRBV28, TRBJ2-3)
CASSLTDLLDTQYF

SEQ ID NO: 270073 - protein, 17 aa, Homo sapiens
  CDR3 for alpha chain variable domain of TCR clone 135037 (TRAV12-2, TRAJ22)
CAVNRIPFSGSARQLTF

SEQ ID NO: 270074 - protein, 13 aa, Homo sapiens
  CDR3 for beta chain variable domain of TCR clone 135037 (TRBV7-9, TRBJ1-2)
CASSLKQNYGYTF

SEQ ID NO: 270075 - protein, 15 aa, Homo sapiens
  CDR3 for alpha chain variable domain of TCR clone 135038 (TRAV3, TRAJ13)
CAVRDIAGGYQKVTY

SEQ ID NO: 270076 - protein, 13 aa, Homo sapiens
  CDR3 for beta chain variable domain of TCR clone 135038 (TRBV2, TRBJ2-2)
CASSKKNTGELFF

SEQ ID NO: 270077 - protein, 19 aa, Homo sapiens
  CDR3 for alpha chain variable domain of TCR clone 135039 (TRAV26-1, TRAJ52)
CIVRAHRNAGGISYGKLTI

SEQ ID NO: 270078 - protein, 15 aa, Homo sapiens
  CDR3 for beta chain variable domain of TCR clone 135039 (TRBV29-1, TRBJ2-1)
CSGRDRKSSYNEQFF

SEQ ID NO: 270079 - protein, 12 aa, Homo sapiens
  CDR3 for alpha chain variable domain of TCR clone 135040 (TRAV13-1, TRAJ49)
CAASPMGNQFYF

SEQ ID NO: 270080 - protein, 16 aa, Homo sapiens
  CDR3 for beta chain variable domain of TCR clone 135040 (TRBV27, TRBJ2-2)
CASSFRGLVRTGELFF

SEQ ID NO: 270081 - protein, 15 aa, Homo sapiens
  CDR3 for alpha chain variable domain of TCR clone 135041 (TRAV26-1, TRAJ29)
CIVRVEGSGNTPLVF

SEQ ID NO: 270082 - protein, 18 aa, Homo sapiens
  CDR3 for beta chain variable domain of TCR clone 135041 (TRBV5-1, TRBJ2-5)
CASSLLGETSGIGETQYF

SEQ ID NO: 270083 - protein, 17 aa, Homo sapiens
  CDR3 for alpha chain variable domain of TCR clone 135042 (TRAV3, TRAJ6)
CAVRDGPRAGGSYIPTF

SEQ ID NO: 270084 - protein, 19 aa, Homo sapiens
  CDR3 for beta chain variable domain of TCR clone 135042 (TRBV23-1, TRBJ2-7)
CASILLRDRARALLRAGHQ

SEQ ID NO: 270085 - protein, 11 aa, Homo sapiens
  CDR3 for alpha chain variable domain of TCR clone 135043 (TRAV23/DV6, TRAJ48)
CAPRWGEKLTF

SEQ ID NO: 270086 - protein, 12 aa, Homo sapiens
  CDR3 for beta chain variable domain of TCR clone 135043 (TRBV3-1, TRBJ2-5)
CASSQRGETQYF

SEQ ID NO: 270087 - protein, 14 aa, Homo sapiens
  CDR3 for alpha chain variable domain of TCR clone 135044 (TRAV23/DV6, TRAJ39)
CAASIGNAGNMLTF

SEQ ID NO: 270088 - protein, 14 aa, Homo sapiens
  CDR3 for beta chain variable domain of TCR clone 135044 (TRBV7-3, TRBJ1-1)
CASSLKGGNTEAFV

SEQ ID NO: 270089 - protein, 14 aa, Homo sapiens
  CDR3 for alpha chain variable domain of TCR clone 135045 (TRAV26-1, TRAJ39)
CIVRGSRAGNMLTF

SEQ ID NO: 270090 - protein, 15 aa, Homo sapiens
  CDR3 for beta chain variable domain of TCR clone 135045 (TRBV7-9, TRBJ1-5)
CASSQGHQPNQLQHF

SEQ ID NO: 270091 - protein, 13 aa, Homo sapiens
  CDR3 for alpha chain variable domain of TCR clone 135046 (TRAV13-1, TRAJ39)
CASSIWAGNMLTF

SEQ ID NO: 270092 - protein, 15 aa, Homo sapiens
  CDR3 for beta chain variable domain of TCR clone 135046 (TRBV7-9, TRBJ1-1)
CASSLLEQGGTEALF

SEQ ID NO: 270093 - protein, 14 aa, Homo sapiens
  CDR3 for alpha chain variable domain of TCR clone 135047 (TRAV13-1, TRAJ23)
CAASRLGRGGKLIF

SEQ ID NO: 270094 - protein, 16 aa, Homo sapiens
  CDR3 for beta chain variable domain of TCR clone 135047 (TRBV13, TRBJ2-2)
CASSPRTGEHTGELFF

SEQ ID NO: 270095 - protein, 13 aa, Homo sapiens
  CDR3 for alpha chain variable domain of TCR clone 135048 (TRAV36/DV7, TRAJ54)
CAVCTQGAQKLVF

SEQ ID NO: 270096 - protein, 13 aa, Homo sapiens
  CDR3 for beta chain variable domain of TCR clone 135048 (TRBV7-6, TRBJ2-7)
CASSLAHTHEQYF

SEQ ID NO: 270097 - protein, 14 aa, Homo sapiens
  CDR3 for alpha chain variable domain of TCR clone 135049 (TRAV2, TRAJ9)
CAVEDRGGGFKTIF

SEQ ID NO: 270098 - protein, 15 aa, Homo sapiens
  CDR3 for beta chain variable domain of TCR clone 135049 (TRBV11-2, TRBJ2-1)
CASSKNRGLIYEQFF

SEQ ID NO: 270099 - protein, 14 aa, Homo sapiens
  CDR3 for alpha chain variable domain of TCR clone 135050 (TRAV12-2, TRAJ45)
CAVNIGGGADGLTF

SEQ ID NO: 270100 - protein, 14 aa, Homo sapiens
  CDR3 for beta chain variable domain of TCR clone 135050 (TRBV27, TRBJ2-2)
CASSLGAATGELFF

SEQ ID NO: 270101 - protein, 13 aa, Homo sapiens
  CDR3 for alpha chain variable domain of TCR clone 135051 (TRAV8-4, TRAJ29)
CAVSATGNTPLVF

SEQ ID NO: 270102 - protein, 17 aa, Homo sapiens
  CDR3 for beta chain variable domain of TCR clone 135051 (TRBV20-1, TRBJ2-1)
CSAPPRLAGTRYNEQFF

SEQ ID NO: 270103 - protein, 18 aa, Homo sapiens
  CDR3 for alpha chain variable domain of TCR clone 135052 (TRAV8-6, TRAJ52)
CAVSRVGAVGTSYGKLTF

SEQ ID NO: 270104 - protein, 14 aa, Homo sapiens
  CDR3 for beta chain variable domain of TCR clone 135052 (TRBV7-2, TRBJ1-4)
CASSHSKTNEKLFF

SEQ ID NO: 270105 - protein, 12 aa, Homo sapiens
  CDR3 for alpha chain variable domain of TCR clone 135053 (TRAV36/DV7, TRAJ40)
SAVGTGTYKYIF

SEQ ID NO: 270106 - protein, 14 aa, Homo sapiens
  CDR3 for beta chain variable domain of TCR clone 135053 (TRBV19, TRBJ2-3)
CASSIDLGGDTQYF

SEQ ID NO: 270107 - protein, 18 aa, Homo sapiens
  CDR3 for alpha chain variable domain of TCR clone 135054 (TRAV26-1, TRAJ56)
CIVRVASRVTGANRKLTF

SEQ ID NO: 270108 - protein, 15 aa, Homo sapiens
  CDR3 for beta chain variable domain of TCR clone 135054 (TRBV7-9, TRBJ2-5)
CAGSDTGRGRETQYF

SEQ ID NO: 270109 - protein, 14 aa, Homo sapiens
  CDR3 for alpha chain variable domain of TCR clone 135055 (TRAV12-2, TRAJ36)
CAVNRPTGANNLFF

SEQ ID NO: 270110 - protein, 13 aa, Homo sapiens
  CDR3 for beta chain variable domain of TCR clone 135055 (TRBV20-1, TRBJ1-6)
CSAPTGLGSPLHF

SEQ ID NO: 270111 - protein, 11 aa, Homo sapiens
  CDR3 for alpha chain variable domain of TCR clone 135056 (TRAV9-2, TRAJ49)
CALSAGNQFYF

SEQ ID NO: 270112 - protein, 18 aa, Homo sapiens
  CDR3 for beta chain variable domain of TCR clone 135056 (TRBV12-4, TRBJ2-2)
CASSLVAGARGRTGELFF

SEQ ID NO: 270113 - protein, 13 aa, Homo sapiens
  CDR3 for alpha chain variable domain of TCR clone 135057 (TRAV27, TRAJ3)
ASLRGSSASNIIF

SEQ ID NO: 270114 - protein, 15 aa, Homo sapiens
  CDR3 for beta chain variable domain of TCR clone 135057 (TRBV28, TRBJ1-3)
CASSMGWASGNTMYF

SEQ ID NO: 270115 - protein, 15 aa, Homo sapiens
  CDR3 for alpha chain variable domain of TCR clone 135058 (TRAV17, TRAJ13)
CATDAGSGGYQKVTF

SEQ ID NO: 270116 - protein, 17 aa, Homo sapiens
  CDR3 for beta chain variable domain of TCR clone 135058 (TRBV11-2, TRBJ2-1)
CASSLYPPGVEYNERFF

SEQ ID NO: 270117 - protein, 16 aa, Homo sapiens
  CDR3 for alpha chain variable domain of TCR clone 135059 (TRAV8-3, TRAJ8)
CAVPRDGNTGFQKFVF

SEQ ID NO: 270118 - protein, 14 aa, Homo sapiens
  CDR3 for beta chain variable domain of TCR clone 135059 (TRBV28, TRBJ1-1)
CASSESGRGTEAFF

SEQ ID NO: 270119 - protein, 10 aa, Homo sapiens
  CDR3 for alpha chain variable domain of TCR clone 135060 (TRAV2, TRAJ34)
CAVVNDKLIF

SEQ ID NO: 270120 - protein, 15 aa, Homo sapiens
  CDR3 for beta chain variable domain of TCR clone 135060 (TRBV3-1, TRBJ2-2)
FASSQDWTRAGELFF

SEQ ID NO: 270121 - protein, 14 aa, Homo sapiens
  CDR3 for alpha chain variable domain of TCR clone 135061 (TRAV1-2, TRAJ16)
CAVNQFSDGQKLLF

SEQ ID NO: 270122 - protein, 12 aa, Homo sapiens
  CDR3 for beta chain variable domain of TCR clone 135061 (TRBV24-1, TRBJ1-1)
CATLYPDTEAFF

SEQ ID NO: 270123 - protein, 14 aa, Homo sapiens
  CDR3 for alpha chain variable domain of TCR clone 135062 (TRAV21, TRAJ12)
CAVRNGDSSHKLIF

SEQ ID NO: 270124 - protein, 14 aa, Homo sapiens
  CDR3 for beta chain variable domain of TCR clone 135062 (TRBV7-6, TRBJ2-7)
CASSLTVTGNEQYF

SEQ ID NO: 270125 - protein, 16 aa, Homo sapiens
  CDR3 for alpha chain variable domain of TCR clone 135063 (TRAV14/DV4, TRAJ53)
CAMREGGGGSNYKLTF

SEQ ID NO: 270126 - protein, 16 aa, Homo sapiens
  CDR3 for beta chain variable domain of TCR clone 135063 (TRBV4-1, TRBJ1-2)
CASSQDAGQVLYGYTF

SEQ ID NO: 270127 - protein, 10 aa, Homo sapiens
  CDR3 for alpha chain variable domain of TCR clone 135064 (TRAV1-2, TRAJ31)
CAFFDARLMF

SEQ ID NO: 270128 - protein, 14 aa, Homo sapiens
  CDR3 for beta chain variable domain of TCR clone 135064 (TRBV11-1, TRBJ1-1)
CASSLEHPNTEAFF

SEQ ID NO: 270129 - protein, 13 aa, Homo sapiens
  CDR3 for alpha chain variable domain of TCR clone 135065 (TRAV12-3, TRAJ40)
CAMSARGTYKYIF

SEQ ID NO: 270130 - protein, 16 aa, Homo sapiens
  CDR3 for beta chain variable domain of TCR clone 135065 (TRBV20-1, TRBJ2-3)
CSGAAGLAGGQDTQYF

SEQ ID NO: 270131 - protein, 14 aa, Homo sapiens
  CDR3 for alpha chain variable domain of TCR clone 135066 (TRAV4, TRAJ17)
CLVGDPLVGNKLTF

SEQ ID NO: 270132 - protein, 20 aa, Homo sapiens
  CDR3 for beta chain variable domain of TCR clone 135066 (TRBV20-1, TRBJ2-1)
CSARPHSVAGGPSYYNEQFF

SEQ ID NO: 270133 - protein, 13 aa, Homo sapiens
  CDR3 for alpha chain variable domain of TCR clone 135067 (TRAV23/DV6, TRAJ20)
CAAGGSHDYKLSF

SEQ ID NO: 270134 - protein, 14 aa, Homo sapiens
  CDR3 for beta chain variable domain of TCR clone 135067 (TRBV3-1, TRBJ2-7)
CASSQSGAHYEQYF

SEQ ID NO: 270135 - protein, 16 aa, Homo sapiens
  CDR3 for alpha chain variable domain of TCR clone 135068 (TRAV3, TRAJ21)
CAVRDIERGNFNKFYF

SEQ ID NO: 270136 - protein, 20 aa, Homo sapiens
  CDR3 for beta chain variable domain of TCR clone 135068 (TRBV4-1, TRBJ2-2)
CASSHASPPGLASNTGELFF

SEQ ID NO: 270137 - protein, 17 aa, Homo sapiens
  CDR3 for alpha chain variable domain of TCR clone 135069 (TRAV8-6, TRAJ58)
CAVSSWVGETSGSRLTF

SEQ ID NO: 270138 - protein, 16 aa, Homo sapiens
  CDR3 for beta chain variable domain of TCR clone 135069 (TRBV7-8, TRBJ2-4)
CASSAERTLAKNMQYF

SEQ ID NO: 270139 - protein, 14 aa, Homo sapiens
  CDR3 for alpha chain variable domain of TCR clone 135070 (TRAV1-1, TRAJ28)
CAAPSGAGSYQLTF

SEQ ID NO: 270140 - protein, 14 aa, Homo sapiens
  CDR3 for beta chain variable domain of TCR clone 135070 (TRBV7-6, TRBJ2-7)
CASSLNSGTKEQYF

SEQ ID NO: 270141 - protein, 14 aa, Homo sapiens
  CDR3 for alpha chain variable domain of TCR clone 135071 (TRAV23/DV6, TRAJ37)
CAASTSSNTGKLIF

SEQ ID NO: 270142 - protein, 14 aa, Homo sapiens
  CDR3 for beta chain variable domain of TCR clone 135071 (TRBV7-2, TRBJ2-7)
CASRSQGAAYEQYF

SEQ ID NO: 270143 - protein, 12 aa, Homo sapiens
  CDR3 for alpha chain variable domain of TCR clone 135072 (TRAV25, TRAJ29)
CAGPRGNTPLVF

SEQ ID NO: 270144 - protein, 15 aa, Homo sapiens
  CDR3 for beta chain variable domain of TCR clone 135072 (TRBV11-3, TRBJ2-7)
CASSPGPASSYEQYF

SEQ ID NO: 270145 - protein, 15 aa, Homo sapiens
  CDR3 for alpha chain variable domain of TCR clone 135073 (TRAV2, TRAJ16)
CAVEVSFLDGQKLLF

SEQ ID NO: 270146 - protein, 14 aa, Homo sapiens
  CDR3 for beta chain variable domain of TCR clone 135073 (TRBV7-8, TRBJ2-5)
CASSATGGQETQYF

SEQ ID NO: 270147 - protein, 14 aa, Homo sapiens
  CDR3 for alpha chain variable domain of TCR clone 135074 (TRAV8-1, TRAJ48)
CAVNAGFGNEKLTF

SEQ ID NO: 270148 - protein, 15 aa, Homo sapiens
  CDR3 for beta chain variable domain of TCR clone 135074 (TRBV20-1, TRBJ2-7)
CSARDRVSGMDEQYF

SEQ ID NO: 270149 - protein, 14 aa, Homo sapiens
  CDR3 for alpha chain variable domain of TCR clone 135075 (TRAV12-1, TRAJ4)
CVVPLKRGYNKLIF

SEQ ID NO: 270150 - protein, 13 aa, Homo sapiens
  CDR3 for beta chain variable domain of TCR clone 135075 (TRBV27, TRBJ2-7)
CASGRGGAYEQYF

SEQ ID NO: 270151 - protein, 14 aa, Homo sapiens
  CDR3 for alpha chain variable domain of TCR clone 135076 (TRAV12-2, TRAJ13)
CAVKKTGGYQKVTF

SEQ ID NO: 270152 - protein, 14 aa, Homo sapiens
  CDR3 for beta chain variable domain of TCR clone 135076 (TRBV2, TRBJ1-6)
CALSPSDPRSPLHF

SEQ ID NO: 270153 - protein, 15 aa, Homo sapiens
  CDR3 for alpha chain variable domain of TCR clone 135077 (TRAV21, TRAJ53)
CATLNSGGSNYKLTF

SEQ ID NO: 270154 - protein, 16 aa, Homo sapiens
  CDR3 for beta chain variable domain of TCR clone 135077 (TRBV9, TRBJ2-1)
CASSVGGGGGWCEQLF

SEQ ID NO: 270155 - protein, 11 aa, Homo sapiens
  CDR3 for alpha chain variable domain of TCR clone 135078 (TRAV16, TRAJ49)
CALRSGNQFYF

SEQ ID NO: 270156 - protein, 16 aa, Homo sapiens
  CDR3 for beta chain variable domain of TCR clone 135078 (TRBV20-1, TRBJ1-5)
CSGRDVGGGWIQPQHF

SEQ ID NO: 270157 - protein, 14 aa, Homo sapiens
  CDR3 for alpha chain variable domain of TCR clone 135079 (TRAV1-2, TRAJ8)
CAVREDTGFQKLVF

SEQ ID NO: 270158 - protein, 17 aa, Homo sapiens
  CDR3 for beta chain variable domain of TCR clone 135079 (TRBV7-6, TRBJ2-1)
CASSFGLAGGTYNEQFF

SEQ ID NO: 270159 - protein, 13 aa, Homo sapiens
  CDR3 for alpha chain variable domain of TCR clone 135080 (TRAV27, TRAJ45)
CRSSGGGADGLTF

SEQ ID NO: 270160 - protein, 19 aa, Homo sapiens
  CDR3 for beta chain variable domain of TCR clone 135080 (TRBV28, TRBJ2-7)
CASSYSGTSRLGWVYEQYF

SEQ ID NO: 270161 - protein, 16 aa, Homo sapiens
  CDR3 for alpha chain variable domain of TCR clone 135081 (TRAV30, TRAJ24)
CGTEIVDADSWGKFQF

SEQ ID NO: 270162 - protein, 16 aa, Homo sapiens
  CDR3 for beta chain variable domain of TCR clone 135081 (TRBV6-1, TRBJ2-5)
CASSETRDRGAETQYF

SEQ ID NO: 270163 - protein, 15 aa, Homo sapiens
  CDR3 for alpha chain variable domain of TCR clone 135082 (TRAV3, TRAJ22)
CAVRDRGGSARQLTF

SEQ ID NO: 270164 - protein, 17 aa, Homo sapiens
  CDR3 for beta chain variable domain of TCR clone 135082 (TRBV28, TRBJ2-5)
CASSTPEGDALEETQYF

SEQ ID NO: 270165 - protein, 11 aa, Homo sapiens
  CDR3 for alpha chain variable domain of TCR clone 135083 (TRAV1-1, TRAJ23)
CAVRQGGKLIF

SEQ ID NO: 270166 - protein, 14 aa, Homo sapiens
  CDR3 for beta chain variable domain of TCR clone 135083 (TRBV11-2, TRBJ2-7)
CASSSTGEGYEQYF

SEQ ID NO: 270167 - protein, 14 aa, Homo sapiens
  CDR3 for alpha chain variable domain of TCR clone 135084 (TRAV1-2, TRAJ8)
CAVREDTGFQKLVV

SEQ ID NO: 270168 - protein, 13 aa, Homo sapiens
  CDR3 for beta chain variable domain of TCR clone 135084 (TRBV14, TRBJ1-1)
CASSREFGTEAFF

SEQ ID NO: 270169 - protein, 18 aa, Homo sapiens
  CDR3 for alpha chain variable domain of TCR clone 135085 (TRAV21, TRAJ52)
CAVRPSPAGVTSYGKLTF

SEQ ID NO: 270170 - protein, 16 aa, Homo sapiens
  CDR3 for beta chain variable domain of TCR clone 135085 (TRBV7-3, TRBJ2-1)
CASSLEGYRSYNEQFF

SEQ ID NO: 270171 - protein, 18 aa, Homo sapiens
  CDR3 for alpha chain variable domain of TCR clone 135086 (TRAV21, TRAJ52)
CAVRPSPAGGTSYGKLTF

SEQ ID NO: 270172 - protein, 16 aa, Homo sapiens
  CDR3 for beta chain variable domain of TCR clone 135086 (TRBV6-5, TRBJ2-7)
CASSPGGREWTYEQYF

SEQ ID NO: 270173 - protein, 13 aa, Homo sapiens
  CDR3 for alpha chain variable domain of TCR clone 135087 (TRAV23/DV6, TRAJ21)
CAASRAQLQQILL

SEQ ID NO: 270174 - protein, 16 aa, Homo sapiens
  CDR3 for beta chain variable domain of TCR clone 135087 (TRBV20-1, TRBJ2-3)
CSAVRDRGPIADTQYC

SEQ ID NO: 270175 - protein, 11 aa, Homo sapiens
  CDR3 for alpha chain variable domain of TCR clone 135088 (TRAV2, TRAJ13)
CASGGYQKVTF

SEQ ID NO: 270176 - protein, 16 aa, Homo sapiens
  CDR3 for beta chain variable domain of TCR clone 135088 (TRBV6-5, TRBJ2-6)
CASSYSSQSGANVLTF

SEQ ID NO: 270177 - protein, 13 aa, Homo sapiens
  CDR3 for alpha chain variable domain of TCR clone 135089 (TRAV21, TRAJ15)
CAVANQAGTALIF

SEQ ID NO: 270178 - protein, 13 aa, Homo sapiens
  CDR3 for beta chain variable domain of TCR clone 135089 (TRBV20-1, TRBJ1-1)
CSARGGGNTEAFF

SEQ ID NO: 270179 - protein, 12 aa, Homo sapiens
  CDR3 for alpha chain variable domain of TCR clone 135090 (TRAV12-3, TRAJ17)
CAMTLTGNKLTF

SEQ ID NO: 270180 - protein, 13 aa, Homo sapiens
  CDR3 for beta chain variable domain of TCR clone 135090 (TRBV20-1, TRBJ2-5)
CSARGNYQETQYF

SEQ ID NO: 270181 - protein, 15 aa, Homo sapiens
  CDR3 for alpha chain variable domain of TCR clone 135091 (TRAV8-3, TRAJ27)
CAVGPSNTNAGKSTF

SEQ ID NO: 270182 - protein, 15 aa, Homo sapiens
  CDR3 for beta chain variable domain of TCR clone 135091 (TRBV7-2, TRBJ2-1)
CASSSGLAGGNEQSF

SEQ ID NO: 270183 - protein, 12 aa, Homo sapiens
  CDR3 for alpha chain variable domain of TCR clone 135092 (TRAV12-1, TRAJ40)
RVVPSGTYKYIF

SEQ ID NO: 270184 - protein, 15 aa, Homo sapiens
  CDR3 for beta chain variable domain of TCR clone 135092 (TRBV12-4, TRBJ2-1)
CASSPLSGRNNEQFF

SEQ ID NO: 270185 - protein, 18 aa, Homo sapiens
  CDR3 for alpha chain variable domain of TCR clone 135093 (TRAV21, TRAJ52)
CAVRPSQAGGTSYGKLTF

SEQ ID NO: 270186 - protein, 14 aa, Homo sapiens
  CDR3 for beta chain variable domain of TCR clone 135093 (TRBV28, TRBJ1-1)
CASSPRTRWAEAFF

SEQ ID NO: 270187 - protein, 13 aa, Homo sapiens
  CDR3 for alpha chain variable domain of TCR clone 135094 (TRAV8-3, TRAJ5)
CAVGPRGGRALTF

SEQ ID NO: 270188 - protein, 16 aa, Homo sapiens
  CDR3 for beta chain variable domain of TCR clone 135094 (TRBV11-3, TRBJ2-3)
CASSPGGLLGTDTQYF

SEQ ID NO: 270189 - protein, 12 aa, Homo sapiens
  CDR3 for alpha chain variable domain of TCR clone 135095 (TRAV9-2, TRAJ26)
CALRGYGQNFVF

SEQ ID NO: 270190 - protein, 13 aa, Homo sapiens
  CDR3 for beta chain variable domain of TCR clone 135095 (TRBV7-7, TRBJ2-3)
CASSLSRADTQYF

SEQ ID NO: 270191 - protein, 15 aa, Homo sapiens
  CDR3 for alpha chain variable domain of TCR clone 135096 (TRAV27, TRAJ38)
CTARRNAGNNRKLIW

SEQ ID NO: 270192 - protein, 14 aa, Homo sapiens
  CDR3 for beta chain variable domain of TCR clone 135096 (TRBV20-1, TRBJ2-5)
CSAHRQGLWETQYF

SEQ ID NO: 270193 - protein, 13 aa, Homo sapiens
  CDR3 for alpha chain variable domain of TCR clone 135097 (TRAV17, TRAJ22)
CAHHPGSARQLTF

SEQ ID NO: 270194 - protein, 14 aa, Homo sapiens
  CDR3 for beta chain variable domain of TCR clone 135097 (TRBV16, TRBJ1-1)
CASSQAGLNTEAFF

SEQ ID NO: 270195 - protein, 15 aa, Homo sapiens
  CDR3 for alpha chain variable domain of TCR clone 135098 (TRAV13-1, TRAJ17)
CAARIERAAGNKLTF

SEQ ID NO: 270196 - protein, 14 aa, Homo sapiens
  CDR3 for beta chain variable domain of TCR clone 135098 (TRBV4-1, TRBJ2-2)
CASSQAVNTGELFF

SEQ ID NO: 270197 - protein, 12 aa, Homo sapiens
  CDR3 for alpha chain variable domain of TCR clone 135099 (TRAV12-3, TRAJ17)
CAMTLTGNKLTF

SEQ ID NO: 270198 - protein, 15 aa, Homo sapiens
  CDR3 for beta chain variable domain of TCR clone 135099 (TRBV15, TRBJ2-1)
CATSRPGQGLHEQFF

SEQ ID NO: 270199 - protein, 13 aa, Homo sapiens
  CDR3 for alpha chain variable domain of TCR clone 135100 (TRAV30, TRAJ24)
CGTLTDSWGKLQF

SEQ ID NO: 270200 - protein, 14 aa, Homo sapiens
  CDR3 for beta chain variable domain of TCR clone 135100 (TRBV6-3, TRBJ2-2)
CASTYTPDTGELFF

SEQ ID NO: 270201 - protein, 18 aa, Homo sapiens
  CDR3 for alpha chain variable domain of TCR clone 135101 (TRAV21, TRAJ52)
CAVRPSPAGGTSYGRLTF

SEQ ID NO: 270202 - protein, 16 aa, Homo sapiens
  CDR3 for beta chain variable domain of TCR clone 135101 (TRBV28, TRBJ2-7)
CASSSGTSGRGYEQYF

SEQ ID NO: 270203 - protein, 12 aa, Homo sapiens
  CDR3 for alpha chain variable domain of TCR clone 135102 (TRAV27, TRAJ35)
CAGADFGNVLQC

SEQ ID NO: 270204 - protein, 15 aa, Homo sapiens
  CDR3 for beta chain variable domain of TCR clone 135102 (TRBV20-1, TRBJ2-7)
CSARDRVSGMDEQYF

SEQ ID NO: 270205 - protein, 17 aa, Homo sapiens
  CDR3 for alpha chain variable domain of TCR clone 135103 (TRAV3, TRAJ42)
CAVRDRDYGGSQGNLIF

SEQ ID NO: 270206 - protein, 12 aa, Homo sapiens
  CDR3 for beta chain variable domain of TCR clone 135103 (TRBV12-4, TRBJ1-5)
CASSLGRQPQHF

SEQ ID NO: 270207 - protein, 14 aa, Homo sapiens
  CDR3 for alpha chain variable domain of TCR clone 135104 (TRAV4, TRAJ26)
CLVGPHNYGQNFVL

SEQ ID NO: 270208 - protein, 17 aa, Homo sapiens
  CDR3 for beta chain variable domain of TCR clone 135104 (TRBV24-1, TRBJ2-1)
CATSDVSISGTYNEQFF

SEQ ID NO: 270209 - protein, 12 aa, Homo sapiens
  CDR3 for alpha chain variable domain of TCR clone 135105 (TRAV21, TRAJ37)
CAVRGNTGKLIF

SEQ ID NO: 270210 - protein, 17 aa, Homo sapiens
  CDR3 for beta chain variable domain of TCR clone 135105 (TRBV20-1, TRBJ2-2)
CSASGSGQGGLTGELFF

SEQ ID NO: 270211 - protein, 14 aa, Homo sapiens
  CDR3 for alpha chain variable domain of TCR clone 135106 (TRAV13-1, TRAJ9)
CAASALTGGFKTIF

SEQ ID NO: 270212 - protein, 14 aa, Homo sapiens
  CDR3 for beta chain variable domain of TCR clone 135106 (TRBV12-4, TRBJ1-2)
CASSSAGHIYGYTF

SEQ ID NO: 270213 - protein, 14 aa, Homo sapiens
  CDR3 for alpha chain variable domain of TCR clone 135107 (TRAV12-3, TRAJ10)
SHLPLTGGGNKLTF

SEQ ID NO: 270214 - protein, 13 aa, Homo sapiens
  CDR3 for beta chain variable domain of TCR clone 135107 (TRBV7-9, TRBJ1-1)
CASSLAGVTEAFF

SEQ ID NO: 270215 - protein, 16 aa, Homo sapiens
  CDR3 for alpha chain variable domain of TCR clone 135108 (TRAV3, TRAJ37)
CAVRPHGSGNTGKLIF

SEQ ID NO: 270216 - protein, 13 aa, Homo sapiens
  CDR3 for beta chain variable domain of TCR clone 135108 (TRBV2, TRBJ1-5)
CASGTGGYQHQHF

SEQ ID NO: 270217 - protein, 14 aa, Homo sapiens
  CDR3 for alpha chain variable domain of TCR clone 135109 (TRAV12-1, TRAJ17)
CVVNYKAAGNKLTF

SEQ ID NO: 270218 - protein, 13 aa, Homo sapiens
  CDR3 for beta chain variable domain of TCR clone 135109 (TRBV12-4, TRBJ1-2)
CASSLRQGKGYTF

SEQ ID NO: 270219 - protein, 21 aa, Homo sapiens
  CDR3 for alpha chain variable domain of TCR clone 135110 (TRAV1-1, TRAJ6)
CLLLLRCERLESTGESYIPTF

SEQ ID NO: 270220 - protein, 13 aa, Homo sapiens
  CDR3 for beta chain variable domain of TCR clone 135110 (TRBV10-2, TRBJ2-7)
CASGASGGYEQYF

SEQ ID NO: 270221 - protein, 12 aa, Homo sapiens
  CDR3 for alpha chain variable domain of TCR clone 135111 (TRAV38-2/DV8, TRAJ43)
CSYTINNNDMRF

SEQ ID NO: 270222 - protein, 15 aa, Homo sapiens
  CDR3 for beta chain variable domain of TCR clone 135111 (TRBV6-1, TRBJ1-4)
CASSLLDRANEKLFF

SEQ ID NO: 270223 - protein, 13 aa, Homo sapiens
  CDR3 for alpha chain variable domain of TCR clone 135112 (TRAV17, TRAJ33)
CATDADSNYPLIW

SEQ ID NO: 270224 - protein, 17 aa, Homo sapiens
  CDR3 for beta chain variable domain of TCR clone 135112 (TRBV20-1, TRBJ2-3)
CSAVSPGLAGGQDTQYF

SEQ ID NO: 270225 - protein, 13 aa, Homo sapiens
  CDR3 for alpha chain variable domain of TCR clone 135113 (TRAV12-1, TRAJ49)
CVVILNTGNQLYF

SEQ ID NO: 270226 - protein, 13 aa, Homo sapiens
  CDR3 for beta chain variable domain of TCR clone 135113 (TRBV10-3, TRBJ2-7)
CASKLAVNYEQYF

SEQ ID NO: 270227 - protein, 11 aa, Homo sapiens
  CDR3 for alpha chain variable domain of TCR clone 135114 (TRAV21, TRAJ34)
CAHYNTDKLIL

SEQ ID NO: 270228 - protein, 11 aa, Homo sapiens
  CDR3 for beta chain variable domain of TCR clone 135114 (TRBV11-2, TRBJ2-2)
CASSLPGELFF

SEQ ID NO: 270229 - protein, 14 aa, Homo sapiens
  CDR3 for alpha chain variable domain of TCR clone 135115 (TRAV3, TRAJ34)
CAVRAPGNTDKLIF

SEQ ID NO: 270230 - protein, 16 aa, Homo sapiens
  CDR3 for beta chain variable domain of TCR clone 135115 (TRBV29-1, TRBJ2-7)
CSVEVVGTSGSYEQYF

SEQ ID NO: 270231 - protein, 15 aa, Homo sapiens
  CDR3 for alpha chain variable domain of TCR clone 135116 (TRAV38-2/DV8, TRAJ45)
CAYWDSGGGADGLTF

SEQ ID NO: 270232 - protein, 13 aa, Homo sapiens
  CDR3 for beta chain variable domain of TCR clone 135116 (TRBV9, TRBJ2-7)
CASSVGQGGEQYF

SEQ ID NO: 270233 - protein, 13 aa, Homo sapiens
  CDR3 for alpha chain variable domain of TCR clone 135117 (TRAV12-3, TRAJ33)
CAMSVNSNYQLIW

SEQ ID NO: 270234 - protein, 13 aa, Homo sapiens
  CDR3 for beta chain variable domain of TCR clone 135117 (TRBV2, TRBJ1-1)
CARNPTRGFHAFF

SEQ ID NO: 270235 - protein, 14 aa, Homo sapiens
  CDR3 for alpha chain variable domain of TCR clone 135118 (TRAV1-2, TRAJ8)
CAVSEDTGFQKLVF

SEQ ID NO: 270236 - protein, 15 aa, Homo sapiens
  CDR3 for beta chain variable domain of TCR clone 135118 (TRBV11-3, TRBJ2-3)
CASLKDGREGDTQYF

SEQ ID NO: 270237 - protein, 14 aa, Homo sapiens
  CDR3 for alpha chain variable domain of TCR clone 135119 (TRAV8-2, TRAJ17)
CAVSEGAAGNKLTF

SEQ ID NO: 270238 - protein, 13 aa, Homo sapiens
  CDR3 for beta chain variable domain of TCR clone 135119 (TRBV19, TRBJ2-1)
CAGSMYRVNEQFF

SEQ ID NO: 270239 - protein, 14 aa, Homo sapiens
  CDR3 for alpha chain variable domain of TCR clone 135120 (TRAV8-1, TRAJ34)
CAVITTYKTDKLIF

SEQ ID NO: 270240 - protein, 14 aa, Homo sapiens
  CDR3 for beta chain variable domain of TCR clone 135120 (TRBV11-3, TRBJ1-3)
CASSHNGQGNTIYF

SEQ ID NO: 270241 - protein, 14 aa, Homo sapiens
  CDR3 for alpha chain variable domain of TCR clone 135121 (TRAV12-2, TRAJ5)
CAVNSSTGRRALTF

SEQ ID NO: 270242 - protein, 13 aa, Homo sapiens
  CDR3 for beta chain variable domain of TCR clone 135121 (TRBV20-1, TRBJ1-1)
CSARGGGNTEAFF

SEQ ID NO: 270243 - protein, 14 aa, Homo sapiens
  CDR3 for alpha chain variable domain of TCR clone 135122 (TRAV13-1, TRAJ3)
WSASKSSSASKIIF

SEQ ID NO: 270244 - protein, 13 aa, Homo sapiens
  CDR3 for beta chain variable domain of TCR clone 135122 (TRBV25-1, TRBJ2-5)
CASSESGRETQYF

SEQ ID NO: 270245 - protein, 16 aa, Homo sapiens
  CDR3 for alpha chain variable domain of TCR clone 135123 (TRAV16, TRAJ52)
YALSAAGGTSYGKLTF

SEQ ID NO: 270246 - protein, 15 aa, Homo sapiens
  CDR3 for beta chain variable domain of TCR clone 135123 (TRBV19, TRBJ1-1)
CASSGNSHPNTEAFF

SEQ ID NO: 270247 - protein, 17 aa, Homo sapiens
  CDR3 for alpha chain variable domain of TCR clone 135124 (TRAV3, TRAJ6)
CAARDGPRAGGSDIPKF

SEQ ID NO: 270248 - protein, 14 aa, Homo sapiens
  CDR3 for beta chain variable domain of TCR clone 135124 (TRBV11-2, TRBJ2-3)
CASSRLARTDTQYF

SEQ ID NO: 270249 - protein, 13 aa, Homo sapiens
  CDR3 for alpha chain variable domain of TCR clone 135125 (TRAV29/DV5, TRAJ54)
CAAHFQGAQKLVC

SEQ ID NO: 270250 - protein, 16 aa, Homo sapiens
  CDR3 for beta chain variable domain of TCR clone 135125 (TRBV7-2, TRBJ2-7)
CASSFPLAGGPLEQYF

SEQ ID NO: 270251 - protein, 12 aa, Homo sapiens
  CDR3 for alpha chain variable domain of TCR clone 135126 (TRAV29/DV5, TRAJ43)
CAAPYNNNDMRF

SEQ ID NO: 270252 - protein, 15 aa, Homo sapiens
  CDR3 for beta chain variable domain of TCR clone 135126 (TRBV18, TRBJ1-6)
CASSRIQGRNSPLLF

SEQ ID NO: 270253 - protein, 14 aa, Homo sapiens
  CDR3 for alpha chain variable domain of TCR clone 135127 (TRAV1-2, TRAJ16)
CAVNRFSDGQKLLF

SEQ ID NO: 270254 - protein, 16 aa, Homo sapiens
  CDR3 for beta chain variable domain of TCR clone 135127 (TRBV7-9, TRBJ2-1)
CASSLVSGPSYNEQFF

SEQ ID NO: 270255 - protein, 15 aa, Homo sapiens
  CDR3 for alpha chain variable domain of TCR clone 135128 (TRAV13-1, TRAJ52)
SYYNAGGTSYGKLTF

SEQ ID NO: 270256 - protein, 16 aa, Homo sapiens
  CDR3 for beta chain variable domain of TCR clone 135128 (TRBV6-1, TRBJ2-5)
CASSETLDRGAETQYF

SEQ ID NO: 270257 - protein, 15 aa, Homo sapiens
  CDR3 for alpha chain variable domain of TCR clone 135129 (TRAV12-3, TRAJ17)
CAMSPSLAAGNKPTF

SEQ ID NO: 270258 - protein, 15 aa, Homo sapiens
  CDR3 for beta chain variable domain of TCR clone 135129 (TRBV9, TRBJ1-6)
CASSVAGTGDSPLHF

SEQ ID NO: 270259 - protein, 11 aa, Homo sapiens
  CDR3 for alpha chain variable domain of TCR clone 135130 (TRAV12-2, TRAJ31)
WAILTNARLMF

SEQ ID NO: 270260 - protein, 13 aa, Homo sapiens
  CDR3 for beta chain variable domain of TCR clone 135130 (TRBV20-1, TRBJ1-1)
CSARLGQGTEAFF

SEQ ID NO: 270261 - protein, 15 aa, Homo sapiens
  CDR3 for alpha chain variable domain of TCR clone 135131 (TRAV8-4, TRAJ6)
CAVSAPSGGSYIPTF

SEQ ID NO: 270262 - protein, 15 aa, Homo sapiens
  CDR3 for beta chain variable domain of TCR clone 135131 (TRBV7-3, TRBJ2-2)
CASKDNGANTGELFF

SEQ ID NO: 270263 - protein, 14 aa, Homo sapiens
  CDR3 for alpha chain variable domain of TCR clone 135132 (TRAV27, TRAJ42)
CAGEKVGSQGNLIF

SEQ ID NO: 270264 - protein, 15 aa, Homo sapiens
  CDR3 for beta chain variable domain of TCR clone 135132 (TRBV10-1, TRBJ2-3)
CASSATSGGFDTQYF

SEQ ID NO: 270265 - protein, 14 aa, Homo sapiens
  CDR3 for alpha chain variable domain of TCR clone 135133 (TRAV1-2, TRAJ16)
CAVNRFSDGQKLLF

SEQ ID NO: 270266 - protein, 14 aa, Homo sapiens
  CDR3 for beta chain variable domain of TCR clone 135133 (TRBV20-1, TRBJ1-5)
CSAPGIGVGQPQHF

SEQ ID NO: 270267 - protein, 15 aa, Homo sapiens
  CDR3 for alpha chain variable domain of TCR clone 135134 (TRAV12-3, TRAJ47)
CAMSALVEYGNKLVF

SEQ ID NO: 270268 - protein, 13 aa, Homo sapiens
  CDR3 for beta chain variable domain of TCR clone 135134 (TRBV19, TRBJ1-2)
CASSQGQVYGDTF

SEQ ID NO: 270269 - protein, 14 aa, Homo sapiens
  CDR3 for alpha chain variable domain of TCR clone 135135 (TRAV3, TRAJ6)
CAVRDPWGSYIPTF

SEQ ID NO: 270270 - protein, 16 aa, Homo sapiens
  CDR3 for beta chain variable domain of TCR clone 135135 (TRBV20-1, TRBJ2-6)
CSASSQGYDGANVLTF

SEQ ID NO: 270271 - protein, 14 aa, Homo sapiens
  CDR3 for alpha chain variable domain of TCR clone 135136 (TRAV8-6, TRAJ49)
CAVSDPGTGNQFSF

SEQ ID NO: 270272 - protein, 16 aa, Homo sapiens
  CDR3 for beta chain variable domain of TCR clone 135136 (TRBV24-1, TRBJ2-1)
CATSGVAGANYNEQFF

SEQ ID NO: 270273 - protein, 15 aa, Homo sapiens
  CDR3 for alpha chain variable domain of TCR clone 135137 (TRAV8-3, TRAJ41)
CAVGSNSNSGYALNF

SEQ ID NO: 270274 - protein, 17 aa, Homo sapiens
  CDR3 for beta chain variable domain of TCR clone 135137 (TRBV25-1, TRBJ2-1)
CDSSAYGQGRGVYEQFF

SEQ ID NO: 270275 - protein, 14 aa, Homo sapiens
  CDR3 for alpha chain variable domain of TCR clone 135138 (TRAV12-3, TRAJ20)
CAMSARRGDYKLSF

SEQ ID NO: 270276 - protein, 14 aa, Homo sapiens
  CDR3 for beta chain variable domain of TCR clone 135138 (TRBV4-2, TRBJ2-1)
CASGLDRAYNEQFF

SEQ ID NO: 270277 - protein, 16 aa, Homo sapiens
  CDR3 for alpha chain variable domain of TCR clone 135139 (TRAV12-1, TRAJ48)
CVVNMVSNFGNEKLTF

SEQ ID NO: 270278 - protein, 12 aa, Homo sapiens
  CDR3 for beta chain variable domain of TCR clone 135139 (TRBV11-2, TRBJ2-2)
CASSLGGGELFF

SEQ ID NO: 270279 - protein, 14 aa, Homo sapiens
  CDR3 for alpha chain variable domain of TCR clone 135140 (TRAV17, TRAJ35)
CATDRPGFGNVLHC

SEQ ID NO: 270280 - protein, 16 aa, Homo sapiens
  CDR3 for beta chain variable domain of TCR clone 135140 (TRBV7-2, TRBJ2-5)
CASSSKWLSGQETQYF

SEQ ID NO: 270281 - protein, 16 aa, Homo sapiens
  CDR3 for alpha chain variable domain of TCR clone 135141 (TRAV17, TRAJ28)
CATASVSGAGSYQLTL

SEQ ID NO: 270282 - protein, 11 aa, Homo sapiens
  CDR3 for beta chain variable domain of TCR clone 135141 (TRBV7-9, TRBJ2-5)
CASSLGETQYF

SEQ ID NO: 270283 - protein, 15 aa, Homo sapiens
  CDR3 for alpha chain variable domain of TCR clone 135142 (TRAV8-3, TRAJ11)
CAVGLLNSGYSTLTF

SEQ ID NO: 270284 - protein, 12 aa, Homo sapiens
  CDR3 for beta chain variable domain of TCR clone 135142 (TRBV19, TRBJ2-1)
CASSRQGAEQFF

SEQ ID NO: 270285 - protein, 22 aa, Homo sapiens
  CDR3 for alpha chain variable domain of TCR clone 135143 (TRAV8-2, TRAJ45)
HLTKPSAHMSDAAEYSADGLTF

SEQ ID NO: 270286 - protein, 13 aa, Homo sapiens
  CDR3 for beta chain variable domain of TCR clone 135143 (TRBV7-3, TRBJ2-1)
CARSPVAYNEQFF

SEQ ID NO: 270287 - protein, 19 aa, Homo sapiens
  CDR3 for alpha chain variable domain of TCR clone 135144 (TRAV17, TRAJ40)
TASRAADTASYLCASKYIF

SEQ ID NO: 270288 - protein, 17 aa, Homo sapiens
  CDR3 for beta chain variable domain of TCR clone 135144 (TRBV11-2, TRBJ2-4)
CASSFLALGGAGDIQYF

SEQ ID NO: 270289 - protein, 14 aa, Homo sapiens
  CDR3 for alpha chain variable domain of TCR clone 135145 (TRAV8-3, TRAJ4)
CAVGSAGGYNKLIF

SEQ ID NO: 270290 - protein, 15 aa, Homo sapiens
  CDR3 for beta chain variable domain of TCR clone 135145 (TRBV11-3, TRBJ2-3)
CASLKDGREGDTQYF

SEQ ID NO: 270291 - protein, 14 aa, Homo sapiens
  CDR3 for alpha chain variable domain of TCR clone 135146 (TRAV12-3, TRAJ10)
SNLPLTGGGNKLTF

SEQ ID NO: 270292 - protein, 15 aa, Homo sapiens
  CDR3 for beta chain variable domain of TCR clone 135146 (TRBV29-1, TRBJ2-6)
CSVGDRGSGANVLTF

SEQ ID NO: 270293 - protein, 14 aa, Homo sapiens
  CDR3 for alpha chain variable domain of TCR clone 135147 (TRAV16, TRAJ57)
CALPTQGGSEKLVF

SEQ ID NO: 270294 - protein, 15 aa, Homo sapiens
  CDR3 for beta chain variable domain of TCR clone 135147 (TRBV28, TRBJ1-3)
CASWGGHRSGNTIYF

SEQ ID NO: 270295 - protein, 11 aa, Homo sapiens
  CDR3 for alpha chain variable domain of TCR clone 135148 (TRAV23/DV6, TRAJ48)
CAPRWGEKSTF

SEQ ID NO: 270296 - protein, 13 aa, Homo sapiens
  CDR3 for beta chain variable domain of TCR clone 135148 (TRBV12-4, TRBJ2-5)
CASSPGTEETQYF

SEQ ID NO: 270297 - protein, 13 aa, Homo sapiens
  CDR3 for alpha chain variable domain of TCR clone 135149 (TRAV30, TRAJ24)
CGTVTDSWGKLQF

SEQ ID NO: 270298 - protein, 13 aa, Homo sapiens
  CDR3 for beta chain variable domain of TCR clone 135149 (TRBV11-2, TRBJ2-1)
CASSLDLVNEQFF

SEQ ID NO: 270299 - protein, 14 aa, Homo sapiens
  CDR3 for alpha chain variable domain of TCR clone 135150 (TRAV12-2, TRAJ13)
CAVKKTGGYQKVTF

SEQ ID NO: 270300 - protein, 15 aa, Homo sapiens
  CDR3 for beta chain variable domain of TCR clone 135150 (TRBV7-9, TRBJ1-2)
CASSPDRGSGYGYTF

SEQ ID NO: 270301 - protein, 13 aa, Homo sapiens
  CDR3 for alpha chain variable domain of TCR clone 135151 (TRAV8-3, TRAJ36)
CAVCATGANNLFF

SEQ ID NO: 270302 - protein, 13 aa, Homo sapiens
  CDR3 for beta chain variable domain of TCR clone 135151 (TRBV12-4, TRBJ1-2)
CASSLRQGKGCTF

SEQ ID NO: 270303 - protein, 14 aa, Homo sapiens
  CDR3 for alpha chain variable domain of TCR clone 135152 (TRAV12-2, TRAJ13)
CAVKKTGGYQNVTF

SEQ ID NO: 270304 - protein, 14 aa, Homo sapiens
  CDR3 for beta chain variable domain of TCR clone 135152 (TRBV3-1, TRBJ2-5)
CASSQGPDQETQYF

SEQ ID NO: 270305 - protein, 14 aa, Homo sapiens
  CDR3 for alpha chain variable domain of TCR clone 135153 (TRAV1-2, TRAJ16)
CAVNRFSDGQKLLF

SEQ ID NO: 270306 - protein, 14 aa, Homo sapiens
  CDR3 for beta chain variable domain of TCR clone 135153 (TRBV7-2, TRBJ2-7)
CGSRSQGAAYEQYF

SEQ ID NO: 270307 - protein, 18 aa, Homo sapiens
  CDR3 for alpha chain variable domain of TCR clone 135154 (TRAV13-1, TRAJ52)
CAAKNPNAGGTSYGKPTF

SEQ ID NO: 270308 - protein, 15 aa, Homo sapiens
  CDR3 for beta chain variable domain of TCR clone 135154 (TRBV7-3, TRBJ2-1)
CASSPTGGGEVEKFF

SEQ ID NO: 270309 - protein, 14 aa, Homo sapiens
  CDR3 for alpha chain variable domain of TCR clone 135155 (TRAV29/DV5, TRAJ45)
CAASVRGGADGLTF

SEQ ID NO: 270310 - protein, 11 aa, Homo sapiens
  CDR3 for beta chain variable domain of TCR clone 135155 (TRBV11-2, TRBJ2-2)
CASSLPGELFF

SEQ ID NO: 270311 - protein, 14 aa, Homo sapiens
  CDR3 for alpha chain variable domain of TCR clone 135156 (TRAV20, TRAJ10)
CAVRVEGGGNKLTF

SEQ ID NO: 270312 - protein, 13 aa, Homo sapiens
  CDR3 for beta chain variable domain of TCR clone 135156 (TRBV27, TRBJ1-1)
CASSLSIGAEAFF

SEQ ID NO: 270313 - protein, 15 aa, Homo sapiens
  CDR3 for alpha chain variable domain of TCR clone 135157 (TRAV2, TRAJ15)
CAVEDREQAGTALIF

SEQ ID NO: 270314 - protein, 16 aa, Homo sapiens
  CDR3 for beta chain variable domain of TCR clone 135157 (TRBV11-1, TRBJ1-1)
CASSPRGAHMNSEAFF

SEQ ID NO: 270315 - protein, 12 aa, Homo sapiens
  CDR3 for alpha chain variable domain of TCR clone 135158 (TRAV36/DV7, TRAJ40)
CAVAGGTYKYIF

SEQ ID NO: 270316 - protein, 18 aa, Homo sapiens
  CDR3 for beta chain variable domain of TCR clone 135158 (TRBV27, TRBJ2-3)
CASSNGTSGRTSTDTQYF

SEQ ID NO: 270317 - protein, 15 aa, Homo sapiens
  CDR3 for alpha chain variable domain of TCR clone 135159 (TRAV27, TRAJ38)
CAARRNAGNNRKLIW

SEQ ID NO: 270318 - protein, 15 aa, Homo sapiens
  CDR3 for beta chain variable domain of TCR clone 135159 (TRBV4-3, TRBJ2-1)
CASSQESAIYNEQFF

SEQ ID NO: 270319 - protein, 15 aa, Homo sapiens
  CDR3 for alpha chain variable domain of TCR clone 135160 (TRAV4, TRAJ12)
CLVGDLMDSSYKLIF

SEQ ID NO: 270320 - protein, 17 aa, Homo sapiens
  CDR3 for beta chain variable domain of TCR clone 135160 (TRBV7-8, TRBJ2-6)
CASSAGTGGAGANVLTF

SEQ ID NO: 270321 - protein, 13 aa, Homo sapiens
  CDR3 for alpha chain variable domain of TCR clone 135161 (TRAV2, TRAJ21)
CAVEDNNFNKFYF

SEQ ID NO: 270322 - protein, 19 aa, Homo sapiens
  CDR3 for beta chain variable domain of TCR clone 135161 (TRBV2, TRBJ2-7)
CASSRGPNDQGLASYEQYF

SEQ ID NO: 270323 - protein, 14 aa, Homo sapiens
  CDR3 for alpha chain variable domain of TCR clone 135162 (TRAV1-2, TRAJ16)
CAVNRFLDGQKLLF

SEQ ID NO: 270324 - protein, 14 aa, Homo sapiens
  CDR3 for beta chain variable domain of TCR clone 135162 (TRBV19, TRBJ2-7)
CASSVDSESYEQYF

SEQ ID NO: 270325 - protein, 14 aa, Homo sapiens
  CDR3 for alpha chain variable domain of TCR clone 135163 (TRAV13-1, TRAJ39)
CAASYNNAGNMLTF

SEQ ID NO: 270326 - protein, 14 aa, Homo sapiens
  CDR3 for beta chain variable domain of TCR clone 135163 (TRBV6-1, TRBJ2-3)
CASSELTGKVTQYF

SEQ ID NO: 270327 - protein, 12 aa, Homo sapiens
  CDR3 for alpha chain variable domain of TCR clone 135164 (TRAV12-3, TRAJ17)
CAMTLTGNKLTF

SEQ ID NO: 270328 - protein, 15 aa, Homo sapiens
  CDR3 for beta chain variable domain of TCR clone 135164 (TRBV20-1, TRBJ2-7)
CSASDRVSWMDEQYF

SEQ ID NO: 270329 - protein, 14 aa, Homo sapiens
  CDR3 for alpha chain variable domain of TCR clone 135165 (TRAV12-2, TRAJ45)
CAVNIGGGADGLTF

SEQ ID NO: 270330 - protein, 13 aa, Homo sapiens
  CDR3 for beta chain variable domain of TCR clone 135165 (TRBV19, TRBJ2-2)
CANSIWSTGELFF

SEQ ID NO: 270331 - protein, 14 aa, Homo sapiens
  CDR3 for alpha chain variable domain of TCR clone 135166 (TRAV16, TRAJ53)
CALSGGGSNYKLTF

SEQ ID NO: 270332 - protein, 18 aa, Homo sapiens
  CDR3 for beta chain variable domain of TCR clone 135166 (TRBV20-1, TRBJ2-3)
CSARGWTSGRAAADTQYF

SEQ ID NO: 270333 - protein, 21 aa, Homo sapiens
  CDR3 for alpha chain variable domain of TCR clone 135167 (TRAV17, TRAJ9)
CATAITGGFKLSLEQEQDYLL

SEQ ID NO: 270334 - protein, 16 aa, Homo sapiens
  CDR3 for beta chain variable domain of TCR clone 135167 (TRBV15, TRBJ2-1)
CATSRNLAGGYNEQFF

SEQ ID NO: 270335 - protein, 14 aa, Homo sapiens
  CDR3 for alpha chain variable domain of TCR clone 135168 (TRAV1-2, TRAJ16)
CAVNRFSDGQKLLF

SEQ ID NO: 270336 - protein, 13 aa, Homo sapiens
  CDR3 for beta chain variable domain of TCR clone 135168 (TRBV7-9, TRBJ2-3)
CASSPGSTYTQYF

SEQ ID NO: 270337 - protein, 14 aa, Homo sapiens
  CDR3 for alpha chain variable domain of TCR clone 135169 (TRAV1-2, TRAJ16)
CAVNRFSDGQKLLF

SEQ ID NO: 270338 - protein, 16 aa, Homo sapiens
  CDR3 for beta chain variable domain of TCR clone 135169 (TRBV12-4, TRBJ1-5)
CASSRLVGGSNQPQHF

SEQ ID NO: 270339 - protein, 16 aa, Homo sapiens
  CDR3 for alpha chain variable domain of TCR clone 135170 (TRAV30, TRAJ24)
RGTEIVDADSWGKFQF

SEQ ID NO: 270340 - protein, 14 aa, Homo sapiens
  CDR3 for beta chain variable domain of TCR clone 135170 (TRBV12-5, TRBJ2-5)
CASGSRTHQETQYF

SEQ ID NO: 270341 - protein, 11 aa, Homo sapiens
  CDR3 for alpha chain variable domain of TCR clone 135171 (TRAV13-2, TRAJ15)
CSHQAGTALIF

SEQ ID NO: 270342 - protein, 14 aa, Homo sapiens
  CDR3 for beta chain variable domain of TCR clone 135171 (TRBV12-4, TRBJ2-1)
SAGSLGQGASEQFF

SEQ ID NO: 270343 - protein, 13 aa, Homo sapiens
  CDR3 for alpha chain variable domain of TCR clone 135172 (TRAV21, TRAJ15)
CAVANQAGTALIF

SEQ ID NO: 270344 - protein, 14 aa, Homo sapiens
  CDR3 for beta chain variable domain of TCR clone 135172 (TRBV20-1, TRBJ1-1)
SAVLGGGGNTEAFF

SEQ ID NO: 270345 - protein, 17 aa, Homo sapiens
  CDR3 for alpha chain variable domain of TCR clone 135173 (TRAV3, TRAJ6)
CAVRDGPRAGGSYRPTF

SEQ ID NO: 270346 - protein, 13 aa, Homo sapiens
  CDR3 for beta chain variable domain of TCR clone 135173 (TRBV27, TRBJ1-1)
CASSLSIGAEAFF

SEQ ID NO: 270347 - protein, 18 aa, Homo sapiens
  CDR3 for alpha chain variable domain of TCR clone 135174 (TRAV26-1, TRAJ23)
CIVRVGLEVWNQGGKLIF

SEQ ID NO: 270348 - protein, 14 aa, Homo sapiens
  CDR3 for beta chain variable domain of TCR clone 135174 (TRBV5-7, TRBJ2-7)
CASSFKGATGEQYF

SEQ ID NO: 270349 - protein, 14 aa, Homo sapiens
  CDR3 for alpha chain variable domain of TCR clone 135175 (TRAV12-3, TRAJ10)
SHLPLTGGGNKLTF

SEQ ID NO: 270350 - protein, 15 aa, Homo sapiens
  CDR3 for beta chain variable domain of TCR clone 135175 (TRBV6-5, TRBJ2-1)
CACSYDAGAGNEQFF

SEQ ID NO: 270351 - protein, 14 aa, Homo sapiens
  CDR3 for alpha chain variable domain of TCR clone 135176 (TRAV1-2, TRAJ16)
CAVNRFSDVQKLLF

SEQ ID NO: 270352 - protein, 16 aa, Homo sapiens
  CDR3 for beta chain variable domain of TCR clone 135176 (TRBV19, TRBJ2-1)
CASSKAGPSSYNEQFL

SEQ ID NO: 270353 - protein, 13 aa, Homo sapiens
  CDR3 for alpha chain variable domain of TCR clone 135177 (TRAV36/DV7, TRAJ49)
CAVEANTGNQFYF

SEQ ID NO: 270354 - protein, 14 aa, Homo sapiens
  CDR3 for beta chain variable domain of TCR clone 135177 (TRBV20-1, TRBJ2-5)
CSASSGRAAETQYL

SEQ ID NO: 270355 - protein, 12 aa, Homo sapiens
  CDR3 for alpha chain variable domain of TCR clone 135178 (TRAV13-2, TRAJ28)
CAERPGSYQLTF

SEQ ID NO: 270356 - protein, 15 aa, Homo sapiens
  CDR3 for beta chain variable domain of TCR clone 135178 (TRBV14, TRBJ1-1)
CASSQEGMGFTEAFF

SEQ ID NO: 270357 - protein, 12 aa, Homo sapiens
  CDR3 for alpha chain variable domain of TCR clone 135179 (TRAV12-3, TRAJ17)
CAMTLTGNKLTF

SEQ ID NO: 270358 - protein, 16 aa, Homo sapiens
  CDR3 for beta chain variable domain of TCR clone 135179 (TRBV12-4, TRBJ2-5)
CASSFVVRGRQETQYF

SEQ ID NO: 270359 - protein, 19 aa, Homo sapiens
  CDR3 for alpha chain variable domain of TCR clone 135180 (TRAV21, TRAJ40)
SLVTQPPTSVISGTYKYIF

SEQ ID NO: 270360 - protein, 16 aa, Homo sapiens
  CDR3 for beta chain variable domain of TCR clone 135180 (TRBV28, TRBJ2-3)
CASSSFRDPRLGTQYF

SEQ ID NO: 270361 - protein, 12 aa, Homo sapiens
  CDR3 for alpha chain variable domain of TCR clone 135181 (TRAV13-1, TRAJ21)
CAAKEGFNKFYF

SEQ ID NO: 270362 - protein, 14 aa, Homo sapiens
  CDR3 for beta chain variable domain of TCR clone 135181 (TRBV5-4, TRBJ1-1)
CASSLDSRRDEAFF

SEQ ID NO: 270363 - protein, 12 aa, Homo sapiens
  CDR3 for alpha chain variable domain of TCR clone 135182 (TRAV16, TRAJ12)
CALEDSSYKLIF

SEQ ID NO: 270364 - protein, 14 aa, Homo sapiens
  CDR3 for beta chain variable domain of TCR clone 135182 (TRBV12-4, TRBJ1-5)
CASSPTGPRGGTYL

SEQ ID NO: 270365 - protein, 12 aa, Homo sapiens
  CDR3 for alpha chain variable domain of TCR clone 135183 (TRAV16, TRAJ10)
CSRTGGGNKLTF

SEQ ID NO: 270366 - protein, 13 aa, Homo sapiens
  CDR3 for beta chain variable domain of TCR clone 135183 (TRBV12-4, TRBJ2-5)
CASSLGGSRTQYF

SEQ ID NO: 270367 - protein, 13 aa, Homo sapiens
  CDR3 for alpha chain variable domain of TCR clone 135184 (TRAV13-1, TRAJ43)
CAASKNNNNDMRF

SEQ ID NO: 270368 - protein, 15 aa, Homo sapiens
  CDR3 for beta chain variable domain of TCR clone 135184 (TRBV11-3, TRBJ2-3)
CASLKDGREGDTQYF

SEQ ID NO: 270369 - protein, 15 aa, Homo sapiens
  CDR3 for alpha chain variable domain of TCR clone 135185 (TRAV23/DV6, TRAJ33)
CAASNPGGGNYQLIW

SEQ ID NO: 270370 - protein, 15 aa, Homo sapiens
  CDR3 for beta chain variable domain of TCR clone 135185 (TRBV11-3, TRBJ2-7)
CASSPGPASSYEQYF

SEQ ID NO: 270371 - protein, 15 aa, Homo sapiens
  CDR3 for alpha chain variable domain of TCR clone 135186 (TRAV12-1, TRAJ44)
CVVDEYTGTASKLTF

SEQ ID NO: 270372 - protein, 14 aa, Homo sapiens
  CDR3 for beta chain variable domain of TCR clone 135186 (TRBV5-1, TRBJ1-2)
CASSLEAVNYGYTF

SEQ ID NO: 270373 - protein, 14 aa, Homo sapiens
  CDR3 for alpha chain variable domain of TCR clone 135187 (TRAV35, TRAJ34)
CAGQSSYNTDKLIF

SEQ ID NO: 270374 - protein, 15 aa, Homo sapiens
  CDR3 for beta chain variable domain of TCR clone 135187 (TRBV7-6, TRBJ2-1)
CASSSLAGEGNEQFF

SEQ ID NO: 270375 - protein, 12 aa, Homo sapiens
  CDR3 for alpha chain variable domain of TCR clone 135188 (TRAV3, TRAJ39)
CAVIEWSNMLTF

SEQ ID NO: 270376 - protein, 14 aa, Homo sapiens
  CDR3 for beta chain variable domain of TCR clone 135188 (TRBV7-2, TRBJ2-5)
CASSFTQGQETQYF

SEQ ID NO: 270377 - protein, 14 aa, Homo sapiens
  CDR3 for alpha chain variable domain of TCR clone 135189 (TRAV13-1, TRAJ36)
CAASINTGANNLFF

SEQ ID NO: 270378 - protein, 18 aa, Homo sapiens
  CDR3 for beta chain variable domain of TCR clone 135189 (TRBV20-1, TRBJ2-3)
CSASDPWGQGLSTDTQYF

SEQ ID NO: 270379 - protein, 13 aa, Homo sapiens
  CDR3 for alpha chain variable domain of TCR clone 135190 (TRAV8-6, TRAJ49)
CAVITNTGNQFYF

SEQ ID NO: 270380 - protein, 13 aa, Homo sapiens
  CDR3 for beta chain variable domain of TCR clone 135190 (TRBV7-9, TRBJ1-2)
CASSLKQNCGYTF

SEQ ID NO: 270381 - protein, 16 aa, Homo sapiens
  CDR3 for alpha chain variable domain of TCR clone 135191 (TRAV12-3, TRAJ53)
CARSPGSGGSNYKLTF

SEQ ID NO: 270382 - protein, 16 aa, Homo sapiens
  CDR3 for beta chain variable domain of TCR clone 135191 (TRBV19, TRBJ2-1)
CASSKAGPSSYNEQFF

SEQ ID NO: 270383 - protein, 15 aa, Homo sapiens
  CDR3 for alpha chain variable domain of TCR clone 135192 (TRAV4, TRAJ8)
CLVGEQHTGFQKLVF

SEQ ID NO: 270384 - protein, 13 aa, Homo sapiens
  CDR3 for beta chain variable domain of TCR clone 135192 (TRBV12-4, TRBJ1-1)
CASSPGTGFEAFF

SEQ ID NO: 270385 - protein, 14 aa, Homo sapiens
  CDR3 for alpha chain variable domain of TCR clone 135193 (TRAV1-1, TRAJ27)
CAVIYNPNAGKSTF

SEQ ID NO: 270386 - protein, 13 aa, Homo sapiens
  CDR3 for beta chain variable domain of TCR clone 135193 (TRBV12-5, TRBJ1-2)
CASGVRTGNGYTF

SEQ ID NO: 270387 - protein, 12 aa, Homo sapiens
  CDR3 for alpha chain variable domain of TCR clone 135194 (TRAV13-1, TRAJ27)
CAAHTNAGKSTF

SEQ ID NO: 270388 - protein, 13 aa, Homo sapiens
  CDR3 for beta chain variable domain of TCR clone 135194 (TRBV20-1, TRBJ1-1)
CSARGGGNTDAFF

SEQ ID NO: 270389 - protein, 14 aa, Homo sapiens
  CDR3 for alpha chain variable domain of TCR clone 135195 (TRAV27, TRAJ41)
CAVRTQIPGMHSTS

SEQ ID NO: 270390 - protein, 14 aa, Homo sapiens
  CDR3 for beta chain variable domain of TCR clone 135195 (TRBV7-6, TRBJ2-3)
CASSLGTVTDTQYF

SEQ ID NO: 270391 - protein, 14 aa, Homo sapiens
  CDR3 for alpha chain variable domain of TCR clone 135196 (TRAV2, TRAJ9)
CAVDPNTGGFKTIF

SEQ ID NO: 270392 - protein, 16 aa, Homo sapiens
  CDR3 for beta chain variable domain of TCR clone 135196 (TRBV4-2, TRBJ1-1)
CASSQAGFGMNTEAFF

SEQ ID NO: 270393 - protein, 14 aa, Homo sapiens
  CDR3 for alpha chain variable domain of TCR clone 135197 (TRAV17, TRAJ57)
CATDPQGGSEQLVF

SEQ ID NO: 270394 - protein, 14 aa, Homo sapiens
  CDR3 for beta chain variable domain of TCR clone 135197 (TRBV7-8, TRBJ2-7)
CASSPRDRVYEQYF

SEQ ID NO: 270395 - protein, 16 aa, Homo sapiens
  CDR3 for alpha chain variable domain of TCR clone 135198 (TRAV30, TRAJ24)
CGTAIVDADSWGKFRF

SEQ ID NO: 270396 - protein, 14 aa, Homo sapiens
  CDR3 for beta chain variable domain of TCR clone 135198 (TRBV12-5, TRBJ2-5)
CASGSRTHQETQYF

SEQ ID NO: 270397 - protein, 12 aa, Homo sapiens
  CDR3 for alpha chain variable domain of TCR clone 135199 (TRAV12-2, TRAJ21)
CAVRYNFNKFYF

SEQ ID NO: 270398 - protein, 13 aa, Homo sapiens
  CDR3 for beta chain variable domain of TCR clone 135199 (TRBV4-1, TRBJ2-1)
CASSQEVQYEQFF

SEQ ID NO: 270399 - protein, 12 aa, Homo sapiens
  CDR3 for alpha chain variable domain of TCR clone 135200 (TRAV13-1, TRAJ42)
VNYGGSQENLIF

SEQ ID NO: 270400 - protein, 15 aa, Homo sapiens
  CDR3 for beta chain variable domain of TCR clone 135200 (TRBV20-1, TRBJ2-1)
CSASSAGSSYNEQFF

SEQ ID NO: 270401 - protein, 15 aa, Homo sapiens
  CDR3 for alpha chain variable domain of TCR clone 135201 (TRAV34, TRAJ38)
CGADFTPGNNRKRIW

SEQ ID NO: 270402 - protein, 16 aa, Homo sapiens
  CDR3 for beta chain variable domain of TCR clone 135201 (TRBV12-5, TRBJ2-5)
CASVPRTSGNQETQYF

SEQ ID NO: 270403 - protein, 15 aa, Homo sapiens
  CDR3 for alpha chain variable domain of TCR clone 135202 (TRAV35, TRAJ58)
CAGRRQETSGSRLPF

SEQ ID NO: 270404 - protein, 16 aa, Homo sapiens
  CDR3 for beta chain variable domain of TCR clone 135202 (TRBV2, TRBJ2-1)
CASSVGGSLSYNEQFF

SEQ ID NO: 270405 - protein, 13 aa, Homo sapiens
  CDR3 for alpha chain variable domain of TCR clone 135203 (TRAV3, TRAJ21)
CAVREPNFNKFYF

SEQ ID NO: 270406 - protein, 14 aa, Homo sapiens
  CDR3 for beta chain variable domain of TCR clone 135203 (TRBV15, TRBJ2-3)
CATRSGTSTDTQYF

SEQ ID NO: 270407 - protein, 15 aa, Homo sapiens
  CDR3 for alpha chain variable domain of TCR clone 135204 (TRAV8-3, TRAJ7)
CAVGSISYGNNRLAF

SEQ ID NO: 270408 - protein, 17 aa, Homo sapiens
  CDR3 for beta chain variable domain of TCR clone 135204 (TRBV4-2, TRBJ1-1)
CASSQEDLPALKLSLDK

SEQ ID NO: 270409 - protein, 13 aa, Homo sapiens
  CDR3 for alpha chain variable domain of TCR clone 135205 (TRAV30, TRAJ24)
CGTVTDSWGKLQF

SEQ ID NO: 270410 - protein, 11 aa, Homo sapiens
  CDR3 for beta chain variable domain of TCR clone 135205 (TRBV2, TRBJ2-6)
CASSTPGQGAS

SEQ ID NO: 270411 - protein, 11 aa, Homo sapiens
  CDR3 for alpha chain variable domain of TCR clone 135206 (TRAV21, TRAJ33)
CADLSNYQLIW

SEQ ID NO: 270412 - protein, 15 aa, Homo sapiens
  CDR3 for beta chain variable domain of TCR clone 135206 (TRBV11-2, TRBJ2-7)
CASSLMVGGSYEQYF

SEQ ID NO: 270413 - protein, 14 aa, Homo sapiens
  CDR3 for alpha chain variable domain of TCR clone 135207 (TRAV1-2, TRAJ8)
CAVREDTGFSKLVF

SEQ ID NO: 270414 - protein, 15 aa, Homo sapiens
  CDR3 for beta chain variable domain of TCR clone 135207 (TRBV7-9, TRBJ1-5)
CASGQGHQPNQPQHF

SEQ ID NO: 270415 - protein, 18 aa, Homo sapiens
  CDR3 for alpha chain variable domain of TCR clone 135208 (TRAV8-4, TRAJ52)
CAVTRANAGGTSYGKLTF

SEQ ID NO: 270416 - protein, 14 aa, Homo sapiens
  CDR3 for beta chain variable domain of TCR clone 135208 (TRBV7-6, TRBJ2-3)
CASSLGTVTDTQYF

SEQ ID NO: 270417 - protein, 14 aa, Homo sapiens
  CDR3 for alpha chain variable domain of TCR clone 135209 (TRAV8-6, TRAJ9)
CAVSSYTVGFKTIF

SEQ ID NO: 270418 - protein, 15 aa, Homo sapiens
  CDR3 for beta chain variable domain of TCR clone 135209 (TRBV2, TRBJ1-2)
CASSESRTVNYGYTF

SEQ ID NO: 270419 - protein, 14 aa, Homo sapiens
  CDR3 for alpha chain variable domain of TCR clone 135210 (TRAV12-2, TRAJ40)
CAVKIPSGTYNYIF

SEQ ID NO: 270420 - protein, 14 aa, Homo sapiens
  CDR3 for beta chain variable domain of TCR clone 135210 (TRBV20-1, TRBJ1-1)
CSAQTRIGGTAAFF

SEQ ID NO: 270421 - protein, 12 aa, Homo sapiens
  CDR3 for alpha chain variable domain of TCR clone 135211 (TRAV3, TRAJ7)
CADLLWEQQTRF

SEQ ID NO: 270422 - protein, 15 aa, Homo sapiens
  CDR3 for beta chain variable domain of TCR clone 135211 (TRBV28, TRBJ2-1)
CASRTGAGVIARQFF

SEQ ID NO: 270423 - protein, 15 aa, Homo sapiens
  CDR3 for alpha chain variable domain of TCR clone 135212 (TRAV8-4, TRAJ45)
CAVIWTGGGAYGLTF

SEQ ID NO: 270424 - protein, 12 aa, Homo sapiens
  CDR3 for beta chain variable domain of TCR clone 135212 (TRBV29-1, TRBJ2-7)
CSVGPSGDEQYF

SEQ ID NO: 270425 - protein, 13 aa, Homo sapiens
  CDR3 for alpha chain variable domain of TCR clone 135213 (TRAV12-2, TRAJ18)
CAVRGSTLGRLDF

SEQ ID NO: 270426 - protein, 15 aa, Homo sapiens
  CDR3 for beta chain variable domain of TCR clone 135213 (TRBV12-4, TRBJ2-7)
CASSLGSGGPYEQYF

SEQ ID NO: 270427 - protein, 14 aa, Homo sapiens
  CDR3 for alpha chain variable domain of TCR clone 135214 (TRAV12-2, TRAJ44)
CAVNPAGTASKLTF

SEQ ID NO: 270428 - protein, 15 aa, Homo sapiens
  CDR3 for beta chain variable domain of TCR clone 135214 (TRBV19, TRBJ1-1)
CASTSGQIQNTEAFF

SEQ ID NO: 270429 - protein, 14 aa, Homo sapiens
  CDR3 for alpha chain variable domain of TCR clone 135215 (TRAV9-2, TRAJ39)
CALYIYNAGNMLTF

SEQ ID NO: 270430 - protein, 22 aa, Homo sapiens
  CDR3 for beta chain variable domain of TCR clone 135215 (TRBV29-1, TRBJ2-5)
TVSNMSPEDSSIYLCSAGTQYF

SEQ ID NO: 270431 - protein, 13 aa, Homo sapiens
  CDR3 for alpha chain variable domain of TCR clone 135216 (TRAV21, TRAJ32)
CAPGGGATNKLIF

SEQ ID NO: 270432 - protein, 15 aa, Homo sapiens
  CDR3 for beta chain variable domain of TCR clone 135216 (TRBV6-5, TRBJ2-1)
CASSYDAGAGNEQFF

SEQ ID NO: 270433 - protein, 16 aa, Homo sapiens
  CDR3 for alpha chain variable domain of TCR clone 135217 (TRAV30, TRAJ24)
CGTEIVDADSWGKFQF

SEQ ID NO: 270434 - protein, 16 aa, Homo sapiens
  CDR3 for beta chain variable domain of TCR clone 135217 (TRBV13, TRBJ2-2)
CASSLGRGYGTGELFF

SEQ ID NO: 270435 - protein, 12 aa, Homo sapiens
  CDR3 for alpha chain variable domain of TCR clone 135218 (TRAV16, TRAJ9)
CALSSGGFKTIF

SEQ ID NO: 270436 - protein, 13 aa, Homo sapiens
  CDR3 for beta chain variable domain of TCR clone 135218 (TRBV7-9, TRBJ1-2)
CASSLKQNYGYTF

SEQ ID NO: 270437 - protein, 13 aa, Homo sapiens
  CDR3 for alpha chain variable domain of TCR clone 135219 (TRAV8-3, TRAJ4)
WVFYSGGYNKLIF

SEQ ID NO: 270438 - protein, 14 aa, Homo sapiens
  CDR3 for beta chain variable domain of TCR clone 135219 (TRBV7-9, TRBJ2-1)
CASSPRDSLYEQFF

SEQ ID NO: 270439 - protein, 12 aa, Homo sapiens
  CDR3 for alpha chain variable domain of TCR clone 135220 (TRAV27, TRAJ36)
CAGMTGANNLVF

SEQ ID NO: 270440 - protein, 14 aa, Homo sapiens
  CDR3 for beta chain variable domain of TCR clone 135220 (TRBV12-4, TRBJ2-3)
CASSLVPSTDTQYF

SEQ ID NO: 270441 - protein, 14 aa, Homo sapiens
  CDR3 for alpha chain variable domain of TCR clone 135221 (TRAV35, TRAJ10)
CAGILTGGGNKLTF

SEQ ID NO: 270442 - protein, 15 aa, Homo sapiens
  CDR3 for beta chain variable domain of TCR clone 135221 (TRBV12-4, TRBJ2-5)
CASSPPTGLQETQYF

SEQ ID NO: 270443 - protein, 18 aa, Homo sapiens
  CDR3 for alpha chain variable domain of TCR clone 135222 (TRAV13-1, TRAJ52)
CAAKNPNAGGTSYGKLTF

SEQ ID NO: 270444 - protein, 15 aa, Homo sapiens
  CDR3 for beta chain variable domain of TCR clone 135222 (TRBV10-2, TRBJ2-6)
CASSEQGTGANVLTF

SEQ ID NO: 270445 - protein, 16 aa, Homo sapiens
  CDR3 for alpha chain variable domain of TCR clone 135223 (TRAV26-1, TRAJ45)
CIVEKYSGGGAGGLPF

SEQ ID NO: 270446 - protein, 16 aa, Homo sapiens
  CDR3 for beta chain variable domain of TCR clone 135223 (TRBV12-5, TRBJ2-5)
CASGPRTSGNQETQYF

SEQ ID NO: 270447 - protein, 11 aa, Homo sapiens
  CDR3 for alpha chain variable domain of TCR clone 135224 (TRAV1-2, TRAJ20)
CAVANDYKLSF

SEQ ID NO: 270448 - protein, 18 aa, Homo sapiens
  CDR3 for beta chain variable domain of TCR clone 135224 (TRBV20-1, TRBJ2-6)
CSAETTPTHGSGANVLIF

SEQ ID NO: 270449 - protein, 11 aa, Homo sapiens
  CDR3 for alpha chain variable domain of TCR clone 135225 (TRAV23/DV6, TRAJ58)
CAARLLRGETS

SEQ ID NO: 270450 - protein, 13 aa, Homo sapiens
  CDR3 for beta chain variable domain of TCR clone 135225 (TRBV7-2, TRBJ2-2)
CASSLAVTGELFF

SEQ ID NO: 270451 - protein, 14 aa, Homo sapiens
  CDR3 for alpha chain variable domain of TCR clone 135226 (TRAV8-4, TRAJ9)
CAVRINTGGFKAIF

SEQ ID NO: 270452 - protein, 15 aa, Homo sapiens
  CDR3 for beta chain variable domain of TCR clone 135226 (TRBV10-2, TRBJ2-6)
CASSEQGTGANVLTF

SEQ ID NO: 270453 - protein, 11 aa, Homo sapiens
  CDR3 for alpha chain variable domain of TCR clone 135227 (TRAV23/DV6, TRAJ48)
CAPRWGGKLTL

SEQ ID NO: 270454 - protein, 13 aa, Homo sapiens
  CDR3 for beta chain variable domain of TCR clone 135227 (TRBV12-4, TRBJ2-5)
CASSPGTEETQYF

SEQ ID NO: 270455 - protein, 11 aa, Homo sapiens
  CDR3 for alpha chain variable domain of TCR clone 135228 (TRAV35, TRAJ34)
CWARNTDKLIF

SEQ ID NO: 270456 - protein, 14 aa, Homo sapiens
  CDR3 for beta chain variable domain of TCR clone 135228 (TRBV5-1, TRBJ2-7)
CASSRVESLYEQYF

SEQ ID NO: 270457 - protein, 15 aa, Homo sapiens
  CDR3 for alpha chain variable domain of TCR clone 135229 (TRAV3, TRAJ3)
CAVRDMSSSASKIIF

SEQ ID NO: 270458 - protein, 14 aa, Homo sapiens
  CDR3 for beta chain variable domain of TCR clone 135229 (TRBV19, TRBJ2-1)
CASPTFVLSGEQCF

SEQ ID NO: 270459 - protein, 13 aa, Homo sapiens
  CDR3 for alpha chain variable domain of TCR clone 135230 (TRAV8-3, TRAJ36)
CAVGATGANNLFS

SEQ ID NO: 270460 - protein, 18 aa, Homo sapiens
  CDR3 for beta chain variable domain of TCR clone 135230 (TRBV7-3, TRBJ2-1)
CASSLTDPRVAAYNEQFF

SEQ ID NO: 270461 - protein, 16 aa, Homo sapiens
  CDR3 for alpha chain variable domain of TCR clone 135231 (TRAV3, TRAJ37)
RAVRVRGSCNTGKLIF

SEQ ID NO: 270462 - protein, 15 aa, Homo sapiens
  CDR3 for beta chain variable domain of TCR clone 135231 (TRBV3-1, TRBJ2-1)
CASSPRDSGFNEQFF

SEQ ID NO: 270463 - protein, 15 aa, Homo sapiens
  CDR3 for alpha chain variable domain of TCR clone 135232 (TRAV12-3, TRAJ42)
CAISGHGGSQGNLIF

SEQ ID NO: 270464 - protein, 13 aa, Homo sapiens
  CDR3 for beta chain variable domain of TCR clone 135232 (TRBV19, TRBJ2-5)
CASSGRAGETQSF

SEQ ID NO: 270465 - protein, 14 aa, Homo sapiens
  CDR3 for alpha chain variable domain of TCR clone 135233 (TRAV13-1, TRAJ40)
CAASMTSGTYKYIF

SEQ ID NO: 270466 - protein, 15 aa, Homo sapiens
  CDR3 for beta chain variable domain of TCR clone 135233 (TRBV12-4, TRBJ2-5)
CASSPPTGLQETQYF

SEQ ID NO: 270467 - protein, 14 aa, Homo sapiens
  CDR3 for alpha chain variable domain of TCR clone 135234 (TRAV1-2, TRAJ8)
CAAREDTGFQKLVF

SEQ ID NO: 270468 - protein, 15 aa, Homo sapiens
  CDR3 for beta chain variable domain of TCR clone 135234 (TRBV10-2, TRBJ2-6)
CASSEQGTGANVLTF

SEQ ID NO: 270469 - protein, 11 aa, Homo sapiens
  CDR3 for alpha chain variable domain of TCR clone 135235 (TRAV21, TRAJ48)
CAVDGNEKLTF

SEQ ID NO: 270470 - protein, 13 aa, Homo sapiens
  CDR3 for beta chain variable domain of TCR clone 135235 (TRBV5-7, TRBJ2-5)
CASSLRLQETQYF

SEQ ID NO: 270471 - protein, 12 aa, Homo sapiens
  CDR3 for alpha chain variable domain of TCR clone 135236 (TRAV8-3, TRAJ26)
CAGGNYGQNFVF

SEQ ID NO: 270472 - protein, 13 aa, Homo sapiens
  CDR3 for beta chain variable domain of TCR clone 135236 (TRBV20-1, TRBJ1-1)
CSAPLGGGTEAFF

SEQ ID NO: 270473 - protein, 13 aa, Homo sapiens
  CDR3 for alpha chain variable domain of TCR clone 135237 (TRAV29/DV5, TRAJ31)
CAASRNNNARLMF

SEQ ID NO: 270474 - protein, 14 aa, Homo sapiens
  CDR3 for beta chain variable domain of TCR clone 135237 (TRBV18, TRBJ2-5)
CASSPGVSQETQYF

SEQ ID NO: 270475 - protein, 14 aa, Homo sapiens
  CDR3 for alpha chain variable domain of TCR clone 135238 (TRAV2, TRAJ9)
CAVEDRSGGFKTTF

SEQ ID NO: 270476 - protein, 15 aa, Homo sapiens
  CDR3 for beta chain variable domain of TCR clone 135238 (TRBV11-3, TRBJ2-3)
CASLKDGREGDTQYF

SEQ ID NO: 270477 - protein, 12 aa, Homo sapiens
  CDR3 for alpha chain variable domain of TCR clone 135239 (TRAV21, TRAJ33)
CAKIDSNYQLIW

SEQ ID NO: 270478 - protein, 13 aa, Homo sapiens
  CDR3 for beta chain variable domain of TCR clone 135239 (TRBV3-1, TRBJ2-2)
CASLARGSGELFF

SEQ ID NO: 270479 - protein, 11 aa, Homo sapiens
  CDR3 for alpha chain variable domain of TCR clone 135240 (TRAV12-1, TRAJ26)
CVVAYGQNFVF

SEQ ID NO: 270480 - protein, 13 aa, Homo sapiens
  CDR3 for beta chain variable domain of TCR clone 135240 (TRBV7-2, TRBJ2-4)
CASSREHANIQYV

SEQ ID NO: 270481 - protein, 10 aa, Homo sapiens
  CDR3 for alpha chain variable domain of TCR clone 135241 (TRAV16, TRAJ22)
SAMYLRQLTF

SEQ ID NO: 270482 - protein, 13 aa, Homo sapiens
  CDR3 for beta chain variable domain of TCR clone 135241 (TRBV4-1, TRBJ2-2)
CASSQENTGELFF

SEQ ID NO: 270483 - protein, 13 aa, Homo sapiens
  CDR3 for alpha chain variable domain of TCR clone 135242 (TRAV12-1, TRAJ31)
CVVNMNNNARLMF

SEQ ID NO: 270484 - protein, 15 aa, Homo sapiens
  CDR3 for beta chain variable domain of TCR clone 135242 (TRBV4-1, TRBJ1-2)
CASSQGQGAAYAYTF

SEQ ID NO: 270485 - protein, 15 aa, Homo sapiens
  CDR3 for alpha chain variable domain of TCR clone 135243 (TRAV12-3, TRAJ6)
CAMSAASGGSYIPTF

SEQ ID NO: 270486 - protein, 13 aa, Homo sapiens
  CDR3 for beta chain variable domain of TCR clone 135243 (TRBV20-1, TRBJ1-2)
CSASTERIYGYTV

SEQ ID NO: 270487 - protein, 15 aa, Homo sapiens
  CDR3 for alpha chain variable domain of TCR clone 135244 (TRAV12-3, TRAJ49)
CAMAVTPNTGNQFYV

SEQ ID NO: 270488 - protein, 18 aa, Homo sapiens
  CDR3 for beta chain variable domain of TCR clone 135244 (TRBV4-1, TRBJ1-5)
CASSHDPRGQGLNQPQHF

SEQ ID NO: 270489 - protein, 12 aa, Homo sapiens
  CDR3 for alpha chain variable domain of TCR clone 135245 (TRAV12-3, TRAJ17)
CAMTLTGNKLTF

SEQ ID NO: 270490 - protein, 17 aa, Homo sapiens
  CDR3 for beta chain variable domain of TCR clone 135245 (TRBV13, TRBJ2-3)
CASSRSRVAGGRNTQYF

SEQ ID NO: 270491 - protein, 12 aa, Homo sapiens
  CDR3 for alpha chain variable domain of TCR clone 135246 (TRAV12-2, TRAJ10)
WGVTGGGHKLTF

SEQ ID NO: 270492 - protein, 15 aa, Homo sapiens
  CDR3 for beta chain variable domain of TCR clone 135246 (TRBV20-1, TRBJ2-7)
CSARDRVSGMDEQYF

SEQ ID NO: 270493 - protein, 16 aa, Homo sapiens
  CDR3 for alpha chain variable domain of TCR clone 135247 (TRAV12-2, TRAJ52)
CRLANAGGTSYGKLTF

SEQ ID NO: 270494 - protein, 13 aa, Homo sapiens
  CDR3 for beta chain variable domain of TCR clone 135247 (TRBV10-3, TRBJ2-7)
CASELAVNYEQYF

SEQ ID NO: 270495 - protein, 17 aa, Homo sapiens
  CDR3 for alpha chain variable domain of TCR clone 135248 (TRAV36/DV7, TRAJ52)
CAVAQRAGGTSYGKLTF

SEQ ID NO: 270496 - protein, 14 aa, Homo sapiens
  CDR3 for beta chain variable domain of TCR clone 135248 (TRBV19, TRBJ2-7)
CASNFRDTFTGMYF

SEQ ID NO: 270497 - protein, 14 aa, Homo sapiens
  CDR3 for alpha chain variable domain of TCR clone 135249 (TRAV12-3, TRAJ42)
CAMNYGGSQGNLIF

SEQ ID NO: 270498 - protein, 14 aa, Homo sapiens
  CDR3 for beta chain variable domain of TCR clone 135249 (TRBV7-9, TRBJ2-2)
CASSFDRGTGELFF

SEQ ID NO: 270499 - protein, 15 aa, Homo sapiens
  CDR3 for alpha chain variable domain of TCR clone 135250 (TRAV38-1, TRAJ37)
CAFIHGSGNTGKLIF

SEQ ID NO: 270500 - protein, 12 aa, Homo sapiens
  CDR3 for beta chain variable domain of TCR clone 135250 (TRBV7-9, TRBJ2-7)
CASSFGSYDQYF

SEQ ID NO: 270501 - protein, 13 aa, Homo sapiens
  CDR3 for alpha chain variable domain of TCR clone 135251 (TRAV27, TRAJ45)
CRSSGGGAEGLTF

SEQ ID NO: 270502 - protein, 14 aa, Homo sapiens
  CDR3 for beta chain variable domain of TCR clone 135251 (TRBV7-9, TRBJ2-1)
CASSSMVGFGEQFF

SEQ ID NO: 270503 - protein, 13 aa, Homo sapiens
  CDR3 for alpha chain variable domain of TCR clone 135252 (TRAV29/DV5, TRAJ49)
CAASTNTGNQCYF

SEQ ID NO: 270504 - protein, 13 aa, Homo sapiens
  CDR3 for beta chain variable domain of TCR clone 135252 (TRBV7-2, TRBJ1-4)
CASSLAGLEKLFF

SEQ ID NO: 270505 - protein, 21 aa, Homo sapiens
  CDR3 for alpha chain variable domain of TCR clone 135253 (TRAV1-1, TRAJ6)
CLLLLRCERLERTGGSYIPTF

SEQ ID NO: 270506 - protein, 15 aa, Homo sapiens
  CDR3 for beta chain variable domain of TCR clone 135253 (TRBV27, TRBJ2-5)
CASSLIPSGGETQYF

SEQ ID NO: 270507 - protein, 14 aa, Homo sapiens
  CDR3 for alpha chain variable domain of TCR clone 135254 (TRAV27, TRAJ22)
CAGLPYGSARQLTF

SEQ ID NO: 270508 - protein, 13 aa, Homo sapiens
  CDR3 for beta chain variable domain of TCR clone 135254 (TRBV11-2, TRBJ2-1)
CASSLRLTHEQFF

SEQ ID NO: 270509 - protein, 18 aa, Homo sapiens
  CDR3 for alpha chain variable domain of TCR clone 135255 (TRAV1-2, TRAJ18)
CAVRDMGDRGSTLGRLYF

SEQ ID NO: 270510 - protein, 16 aa, Homo sapiens
  CDR3 for beta chain variable domain of TCR clone 135255 (TRBV29-1, TRBJ1-2)
CSVEANRNRANYGYTF

SEQ ID NO: 270511 - protein, 14 aa, Homo sapiens
  CDR3 for alpha chain variable domain of TCR clone 135256 (TRAV20, TRAJ45)
SVLLRRGGADGLTF

SEQ ID NO: 270512 - protein, 14 aa, Homo sapiens
  CDR3 for beta chain variable domain of TCR clone 135256 (TRBV15, TRBJ2-5)
CATSIGGLGETQYF

SEQ ID NO: 270513 - protein, 13 aa, Homo sapiens
  CDR3 for alpha chain variable domain of TCR clone 135257 (TRAV12-2, TRAJ44)
CREPGRTASKLTF

SEQ ID NO: 270514 - protein, 13 aa, Homo sapiens
  CDR3 for beta chain variable domain of TCR clone 135257 (TRBV20-1, TRBJ1-6)
CSAPLGVGSPLHF

SEQ ID NO: 270515 - protein, 11 aa, Homo sapiens
  CDR3 for alpha chain variable domain of TCR clone 135258 (TRAV2, TRAJ21)
CAVFNFIKFYF

SEQ ID NO: 270516 - protein, 14 aa, Homo sapiens
  CDR3 for beta chain variable domain of TCR clone 135258 (TRBV15, TRBJ2-3)
CATRSGTSTDTQYF

SEQ ID NO: 270517 - protein, 17 aa, Homo sapiens
  CDR3 for alpha chain variable domain of TCR clone 135259 (TRAV3, TRAJ6)
CAVRDGPRAGGSYIPYF

SEQ ID NO: 270518 - protein, 18 aa, Homo sapiens
  CDR3 for beta chain variable domain of TCR clone 135259 (TRBV7-3, TRBJ2-3)
CASSSTGTYPGSTDTQYF

SEQ ID NO: 270519 - protein, 11 aa, Homo sapiens
  CDR3 for alpha chain variable domain of TCR clone 135260 (TRAV12-2, )
CAVASLATTIS

SEQ ID NO: 270520 - protein, 14 aa, Homo sapiens
  CDR3 for beta chain variable domain of TCR clone 135260 (TRBV20-1, TRBJ2-1)
CSAQIGGSANEQFF

SEQ ID NO: 270521 - protein, 14 aa, Homo sapiens
  CDR3 for alpha chain variable domain of TCR clone 135261 (TRAV20, TRAJ40)
CCAAGHLRNLQYIF

SEQ ID NO: 270522 - protein, 19 aa, Homo sapiens
  CDR3 for beta chain variable domain of TCR clone 135261 (TRBV28, TRBJ2-7)
CASSYSGTSRLGWVYEQYF

SEQ ID NO: 270523 - protein, 16 aa, Homo sapiens
  CDR3 for alpha chain variable domain of TCR clone 135262 (TRAV30, TRAJ24)
CGTEIVDADSWGKFKF

SEQ ID NO: 270524 - protein, 14 aa, Homo sapiens
  CDR3 for beta chain variable domain of TCR clone 135262 (TRBV12-5, TRBJ2-5)
CASGSRTHQGTQYF

SEQ ID NO: 270525 - protein, 12 aa, Homo sapiens
  CDR3 for alpha chain variable domain of TCR clone 135263 (TRAV38-1, TRAJ20)
CAFIWNDYKLSF

SEQ ID NO: 270526 - protein, 12 aa, Homo sapiens
  CDR3 for beta chain variable domain of TCR clone 135263 (TRBV11-2, TRBJ2-2)
CASSLGGGELFF

SEQ ID NO: 270527 - protein, 10 aa, Homo sapiens
  CDR3 for alpha chain variable domain of TCR clone 135264 (TRAV1-2, TRAJ23)
CAGQGGKLIF

SEQ ID NO: 270528 - protein, 15 aa, Homo sapiens
  CDR3 for beta chain variable domain of TCR clone 135264 (TRBV6-6, TRBJ2-5)
CASSYGKIIQETQYF

SEQ ID NO: 270529 - protein, 14 aa, Homo sapiens
  CDR3 for alpha chain variable domain of TCR clone 135265 (TRAV1-2, TRAJ16)
CAVNRFSDGEKLLF

SEQ ID NO: 270530 - protein, 12 aa, Homo sapiens
  CDR3 for beta chain variable domain of TCR clone 135265 (TRBV27, TRBJ2-5)
CASSPTGETQYF

SEQ ID NO: 270531 - protein, 14 aa, Homo sapiens
  CDR3 for alpha chain variable domain of TCR clone 135266 (TRAV12-2, TRAJ17)
CAVNIKAAVNKLTF

SEQ ID NO: 270532 - protein, 13 aa, Homo sapiens
  CDR3 for beta chain variable domain of TCR clone 135266 (TRBV4-1, TRBJ2-2)
CASSQENTGELFF

SEQ ID NO: 270533 - protein, 13 aa, Homo sapiens
  CDR3 for alpha chain variable domain of TCR clone 135267 (TRAV23/DV6, TRAJ47)
CAASMTRGNKLVF

SEQ ID NO: 270534 - protein, 14 aa, Homo sapiens
  CDR3 for beta chain variable domain of TCR clone 135267 (TRBV7-3, TRBJ1-1)
CASSLKGGITEAFF

SEQ ID NO: 270535 - protein, 13 aa, Homo sapiens
  CDR3 for alpha chain variable domain of TCR clone 135268 (TRAV12-2, TRAJ9)
CAGGTTGGFKTIF

SEQ ID NO: 270536 - protein, 17 aa, Homo sapiens
  CDR3 for beta chain variable domain of TCR clone 135268 (TRBV4-1, TRBJ2-1)
CASSQGRGGGLYNEQFF

SEQ ID NO: 270537 - protein, 13 aa, Homo sapiens
  CDR3 for alpha chain variable domain of TCR clone 135269 (TRAV8-3, TRAJ31)
CAVGARNNARLMF

SEQ ID NO: 270538 - protein, 16 aa, Homo sapiens
  CDR3 for beta chain variable domain of TCR clone 135269 (TRBV18, TRBJ1-3)
CASSRGILNGENTIYF

SEQ ID NO: 270539 - protein, 12 aa, Homo sapiens
  CDR3 for alpha chain variable domain of TCR clone 135270 (TRAV20, TRAJ33)
CAVRGSNYQLIC

SEQ ID NO: 270540 - protein, 15 aa, Homo sapiens
  CDR3 for beta chain variable domain of TCR clone 135270 (TRBV11-3, TRBJ2-3)
CASLKDGREGDTQYF

SEQ ID NO: 270541 - protein, 18 aa, Homo sapiens
  CDR3 for alpha chain variable domain of TCR clone 135271 (TRAV26-1, TRAJ23)
CIVRVGLEVWNQGGKLIF

SEQ ID NO: 270542 - protein, 16 aa, Homo sapiens
  CDR3 for beta chain variable domain of TCR clone 135271 (TRBV28, TRBJ1-2)
CASSHGQGVYKDGYTF

SEQ ID NO: 270543 - protein, 18 aa, Homo sapiens
  CDR3 for alpha chain variable domain of TCR clone 135272 (TRAV26-2, TRAJ45)
CILRVDKYSGGGADGLTF

SEQ ID NO: 270544 - protein, 14 aa, Homo sapiens
  CDR3 for beta chain variable domain of TCR clone 135272 (TRBV4-1, TRBJ2-2)
CASSQAVNTGELFF

SEQ ID NO: 270545 - protein, 14 aa, Homo sapiens
  CDR3 for alpha chain variable domain of TCR clone 135273 (TRAV29/DV5, TRAJ22)
CAASATGPARQLTF

SEQ ID NO: 270546 - protein, 14 aa, Homo sapiens
  CDR3 for beta chain variable domain of TCR clone 135273 (TRBV19, TRBJ2-1)
CASSPGLAPNEQFF

SEQ ID NO: 270547 - protein, 15 aa, Homo sapiens
  CDR3 for alpha chain variable domain of TCR clone 135274 (TRAV23/DV6, TRAJ37)
CAASRRSSNTGKLIF

SEQ ID NO: 270548 - protein, 16 aa, Homo sapiens
  CDR3 for beta chain variable domain of TCR clone 135274 (TRBV2, TRBJ2-3)
CASSTSVEGVTDTQYF

SEQ ID NO: 270549 - protein, 11 aa, Homo sapiens
  CDR3 for alpha chain variable domain of TCR clone 135275 (TRAV13-2, TRAJ20)
CAENMSYKLIF

SEQ ID NO: 270550 - protein, 14 aa, Homo sapiens
  CDR3 for beta chain variable domain of TCR clone 135275 (TRBV25-1, TRBJ1-1)
CASTHLGGNTEAFF

SEQ ID NO: 270551 - protein, 12 aa, Homo sapiens
  CDR3 for alpha chain variable domain of TCR clone 135276 (TRAV1-1, TRAJ30)
CAVRGRDNKIIF

SEQ ID NO: 270552 - protein, 14 aa, Homo sapiens
  CDR3 for beta chain variable domain of TCR clone 135276 (TRBV6-5, TRBJ1-1)
CASSKQGVNTEAFF

SEQ ID NO: 270553 - protein, 14 aa, Homo sapiens
  CDR3 for alpha chain variable domain of TCR clone 135277 (TRAV20, TRAJ56)
CAVQFGGANSKLTF

SEQ ID NO: 270554 - protein, 14 aa, Homo sapiens
  CDR3 for beta chain variable domain of TCR clone 135277 (TRBV20-1, TRBJ2-7)
CSAKRGRSSSEQYF

SEQ ID NO: 270555 - protein, 17 aa, Homo sapiens
  CDR3 for alpha chain variable domain of TCR clone 135278 (TRAV3, TRAJ6)
CALRDGPRAGGSYIPTF

SEQ ID NO: 270556 - protein, 15 aa, Homo sapiens
  CDR3 for beta chain variable domain of TCR clone 135278 (TRBV11-3, TRBJ2-7)
CASSPGPASSYEHYF

SEQ ID NO: 270557 - protein, 14 aa, Homo sapiens
  CDR3 for alpha chain variable domain of TCR clone 135279 (TRAV1-2, TRAJ16)
CAVNRFSDGPKLPF

SEQ ID NO: 270558 - protein, 15 aa, Homo sapiens
  CDR3 for beta chain variable domain of TCR clone 135279 (TRBV7-9, TRBJ1-6)
CASSSPGRGNSPLHF

SEQ ID NO: 270559 - protein, 17 aa, Homo sapiens
  CDR3 for alpha chain variable domain of TCR clone 135280 (TRAV26-2, TRAJ42)
CILRDVGYGGSQGYLIF

SEQ ID NO: 270560 - protein, 16 aa, Homo sapiens
  CDR3 for beta chain variable domain of TCR clone 135280 (TRBV12-4, TRBJ2-7)
CASSLIGGTGTYEQYF

SEQ ID NO: 270561 - protein, 15 aa, Homo sapiens
  CDR3 for alpha chain variable domain of TCR clone 135281 (TRAV21, TRAJ53)
CATLNSGGSNYKLTF

SEQ ID NO: 270562 - protein, 15 aa, Homo sapiens
  CDR3 for beta chain variable domain of TCR clone 135281 (TRBV7-9, TRBJ2-1)
CASSLGWGRANEQFF

SEQ ID NO: 270563 - protein, 17 aa, Homo sapiens
  CDR3 for alpha chain variable domain of TCR clone 135282 (TRAV13-1, TRAJ31)
CAPRDRLMFGDGTQLVV

SEQ ID NO: 270564 - protein, 14 aa, Homo sapiens
  CDR3 for beta chain variable domain of TCR clone 135282 (TRBV24-1, TRBJ2-5)
CATSDALKGETQYF

SEQ ID NO: 270565 - protein, 18 aa, Homo sapiens
  CDR3 for alpha chain variable domain of TCR clone 135283 (TRAV21, TRAJ52)
CAVRPSPAGGTSYGKLTF

SEQ ID NO: 270566 - protein, 17 aa, Homo sapiens
  CDR3 for beta chain variable domain of TCR clone 135283 (TRBV7-7, TRBJ1-1)
CASIGDRPNLGVTEAFF

SEQ ID NO: 270567 - protein, 15 aa, Homo sapiens
  CDR3 for alpha chain variable domain of TCR clone 135284 (TRAV13-1, TRAJ11)
CAASNRNSGYSTLTF

SEQ ID NO: 270568 - protein, 13 aa, Homo sapiens
  CDR3 for beta chain variable domain of TCR clone 135284 (TRBV4-2, TRBJ1-1)
CASSQAGNIEAFF

SEQ ID NO: 270569 - protein, 17 aa, Homo sapiens
  CDR3 for alpha chain variable domain of TCR clone 135285 (TRAV9-2, TRAJ45)
CALSGYYSGGGADGLTF

SEQ ID NO: 270570 - protein, 14 aa, Homo sapiens
  CDR3 for beta chain variable domain of TCR clone 135285 (TRBV7-2, TRBJ2-7)
CASSPKTSVYEQYF

SEQ ID NO: 270571 - protein, 11 aa, Homo sapiens
  CDR3 for alpha chain variable domain of TCR clone 135286 (TRAV13-1, TRAJ23)
CAASSRGKLIF

SEQ ID NO: 270572 - protein, 13 aa, Homo sapiens
  CDR3 for beta chain variable domain of TCR clone 135286 (TRBV7-3, TRBJ2-5)
CARSFRGGETQYF

SEQ ID NO: 270573 - protein, 14 aa, Homo sapiens
  CDR3 for alpha chain variable domain of TCR clone 135287 (TRAV1-1, TRAJ27)
CAVIYNTNAGKSTF

SEQ ID NO: 270574 - protein, 13 aa, Homo sapiens
  CDR3 for beta chain variable domain of TCR clone 135287 (TRBV23-1, TRBJ1-4)
CASRGKFNEKLFF

SEQ ID NO: 270575 - protein, 15 aa, Homo sapiens
  CDR3 for alpha chain variable domain of TCR clone 135288 (TRAV21, TRAJ24)
CAARSSTDSWGKFKF

SEQ ID NO: 270576 - protein, 15 aa, Homo sapiens
  CDR3 for beta chain variable domain of TCR clone 135288 (TRBV4-1, TRBJ2-7)
CASSQNTGRLYEQYF

SEQ ID NO: 270577 - protein, 14 aa, Homo sapiens
  CDR3 for alpha chain variable domain of TCR clone 135289 (TRAV17, TRAJ22)
CATSPSGSARQLTF

SEQ ID NO: 270578 - protein, 13 aa, Homo sapiens
  CDR3 for beta chain variable domain of TCR clone 135289 (TRBV12-4, TRBJ1-2)
CASSLRQGKGDTF

SEQ ID NO: 270579 - protein, 14 aa, Homo sapiens
  CDR3 for alpha chain variable domain of TCR clone 135290 (TRAV8-3, TRAJ4)
CAVGAAVGYNKLIF

SEQ ID NO: 270580 - protein, 18 aa, Homo sapiens
  CDR3 for beta chain variable domain of TCR clone 135290 (TRBV6-5, TRBJ1-1)
CASSYSAPGGTGGTEAFF

SEQ ID NO: 270581 - protein, 13 aa, Homo sapiens
  CDR3 for alpha chain variable domain of TCR clone 135291 (TRAV16, TRAJ26)
CITVLCLGQNFVF

SEQ ID NO: 270582 - protein, 12 aa, Homo sapiens
  CDR3 for beta chain variable domain of TCR clone 135291 (TRBV11-2, TRBJ2-1)
RASSLGNNEQFF

SEQ ID NO: 270583 - protein, 13 aa, Homo sapiens
  CDR3 for alpha chain variable domain of TCR clone 135292 (TRAV3, TRAJ21)
CAVREPDFNKFYF

SEQ ID NO: 270584 - protein, 13 aa, Homo sapiens
  CDR3 for beta chain variable domain of TCR clone 135292 (TRBV20-1, TRBJ1-1)
CSARGGGNTEAFV

SEQ ID NO: 270585 - protein, 10 aa, Homo sapiens
  CDR3 for alpha chain variable domain of TCR clone 135293 (TRAV12-2, TRAJ49)
CAVRRNQFYF

SEQ ID NO: 270586 - protein, 17 aa, Homo sapiens
  CDR3 for beta chain variable domain of TCR clone 135293 (TRBV11-2, TRBJ2-1)
CASSLYPPGVEYNEQFF

SEQ ID NO: 270587 - protein, 10 aa, Homo sapiens
  CDR3 for alpha chain variable domain of TCR clone 135294 (TRAV12-2, TRAJ22)
CAVNETQLTF

SEQ ID NO: 270588 - protein, 15 aa, Homo sapiens
  CDR3 for beta chain variable domain of TCR clone 135294 (TRBV11-3, TRBJ2-3)
CASLKDGREGDTQYF

SEQ ID NO: 270589 - protein, 18 aa, Homo sapiens
  CDR3 for alpha chain variable domain of TCR clone 135295 (TRAV21, TRAJ52)
CAVRPSPAGGISYGKLTF

SEQ ID NO: 270590 - protein, 17 aa, Homo sapiens
  CDR3 for beta chain variable domain of TCR clone 135295 (TRBV18, TRBJ2-2)
CASSQRSSGQGPGELFF

SEQ ID NO: 270591 - protein, 13 aa, Homo sapiens
  CDR3 for alpha chain variable domain of TCR clone 135296 (TRAV13-2, TRAJ48)
CAEVDFGNEKLTF

SEQ ID NO: 270592 - protein, 15 aa, Homo sapiens
  CDR3 for beta chain variable domain of TCR clone 135296 (TRBV7-9, TRBJ1-6)
CASSSPGRGNSTLHF

SEQ ID NO: 270593 - protein, 14 aa, Homo sapiens
  CDR3 for alpha chain variable domain of TCR clone 135297 (TRAV8-1, TRAJ5)
CAVSMDTGRRALTF

SEQ ID NO: 270594 - protein, 15 aa, Homo sapiens
  CDR3 for beta chain variable domain of TCR clone 135297 (TRBV19, TRBJ2-4)
CASSGPRRGENIQYF

SEQ ID NO: 270595 - protein, 17 aa, Homo sapiens
  CDR3 for alpha chain variable domain of TCR clone 135298 (TRAV13-1, TRAJ28)
CAASAPYSGAGSYQLTF

SEQ ID NO: 270596 - protein, 12 aa, Homo sapiens
  CDR3 for beta chain variable domain of TCR clone 135298 (TRBV11-2, TRBJ2-2)
CASSLPTGELFF

SEQ ID NO: 270597 - protein, 15 aa, Homo sapiens
  CDR3 for alpha chain variable domain of TCR clone 135299 (TRAV3, TRAJ5)
CAVRYLDTGRRALTF

SEQ ID NO: 270598 - protein, 12 aa, Homo sapiens
  CDR3 for beta chain variable domain of TCR clone 135299 (TRBV5-1, TRBJ2-7)
CASSLDSYEQYF

SEQ ID NO: 270599 - protein, 14 aa, Homo sapiens
  CDR3 for alpha chain variable domain of TCR clone 135300 (TRAV12-2, TRAJ17)
FAVLFKAAGNKLTF

SEQ ID NO: 270600 - protein, 17 aa, Homo sapiens
  CDR3 for beta chain variable domain of TCR clone 135300 (TRBV11-2, TRBJ2-1)
CASSLYPPGVEYNEQFF

SEQ ID NO: 270601 - protein, 11 aa, Homo sapiens
  CDR3 for alpha chain variable domain of TCR clone 135301 (TRAV17, TRAJ9)
CGFTGGFKTIF

SEQ ID NO: 270602 - protein, 14 aa, Homo sapiens
  CDR3 for beta chain variable domain of TCR clone 135301 (TRBV7-9, TRBJ2-2)
GASSLVQDTGELFF

SEQ ID NO: 270603 - protein, 16 aa, Homo sapiens
  CDR3 for alpha chain variable domain of TCR clone 135302 (TRAV16, TRAJ52)
CALSGVGGTSYGKLTF

SEQ ID NO: 270604 - protein, 17 aa, Homo sapiens
  CDR3 for beta chain variable domain of TCR clone 135302 (TRBV5-7, TRBJ2-1)
CASSSYWGLAGRNEQFF

SEQ ID NO: 270605 - protein, 15 aa, Homo sapiens
  CDR3 for alpha chain variable domain of TCR clone 135303 (TRAV8-6, TRAJ10)
CAVSDQAGGGNKLTF

SEQ ID NO: 270606 - protein, 15 aa, Homo sapiens
  CDR3 for beta chain variable domain of TCR clone 135303 (TRBV5-8, TRBJ2-2)
CASSLDRGATGELFF

SEQ ID NO: 270607 - protein, 14 aa, Homo sapiens
  CDR3 for alpha chain variable domain of TCR clone 135304 (TRAV1-2, TRAJ8)
CAVREDTGFQKLVF

SEQ ID NO: 270608 - protein, 17 aa, Homo sapiens
  CDR3 for beta chain variable domain of TCR clone 135304 (TRBV5-1, TRBJ2-1)
CASSMGLAGEGYNEQFF

SEQ ID NO: 270609 - protein, 18 aa, Homo sapiens
  CDR3 for alpha chain variable domain of TCR clone 135305 (TRAV21, TRAJ53)
CAVKGGENSGGSNYKMTF

SEQ ID NO: 270610 - protein, 14 aa, Homo sapiens
  CDR3 for beta chain variable domain of TCR clone 135305 (TRBV6-1, TRBJ1-5)
CASSAGAGSQPQHF

SEQ ID NO: 270611 - protein, 11 aa, Homo sapiens
  CDR3 for alpha chain variable domain of TCR clone 135306 (TRAV16, TRAJ29)
WAPSGNTPLVF

SEQ ID NO: 270612 - protein, 18 aa, Homo sapiens
  CDR3 for beta chain variable domain of TCR clone 135306 (TRBV28, TRBJ1-3)
CASSPPGTVTSSGNTIYF

SEQ ID NO: 270613 - protein, 12 aa, Homo sapiens
  CDR3 for alpha chain variable domain of TCR clone 135307 (TRAV12-3, TRAJ4)
CAMTGAGTRLAV

SEQ ID NO: 270614 - protein, 18 aa, Homo sapiens
  CDR3 for beta chain variable domain of TCR clone 135307 (TRBV7-9, TRBJ2-1)
CASSPPRGERGPYNEQFF

SEQ ID NO: 270615 - protein, 16 aa, Homo sapiens
  CDR3 for alpha chain variable domain of TCR clone 135308 (TRAV12-3, TRAJ53)
CAMSPGSGGSNYKLKY

SEQ ID NO: 270616 - protein, 11 aa, Homo sapiens
  CDR3 for beta chain variable domain of TCR clone 135308 (TRBV29-1, TRBJ2-5)
CSEDRTGTQYF

SEQ ID NO: 270617 - protein, 13 aa, Homo sapiens
  CDR3 for alpha chain variable domain of TCR clone 135309 (TRAV12-1, TRAJ33)
CGAAPDSNYQLIW

SEQ ID NO: 270618 - protein, 14 aa, Homo sapiens
  CDR3 for beta chain variable domain of TCR clone 135309 (TRBV13, TRBJ2-7)
CASSLKGASYEQYF

SEQ ID NO: 270619 - protein, 12 aa, Homo sapiens
  CDR3 for alpha chain variable domain of TCR clone 135310 (TRAV21, TRAJ33)
CAKMDGNYQLIW

SEQ ID NO: 270620 - protein, 13 aa, Homo sapiens
  CDR3 for beta chain variable domain of TCR clone 135310 (TRBV6-1, TRBJ1-1)
CASSRQGNTEAFF

SEQ ID NO: 270621 - protein, 16 aa, Homo sapiens
  CDR3 for alpha chain variable domain of TCR clone 135311 (TRAV27, TRAJ34)
CAGGGLGDDNTDKLIF

SEQ ID NO: 270622 - protein, 15 aa, Homo sapiens
  CDR3 for beta chain variable domain of TCR clone 135311 (TRBV9, TRBJ1-4)
CASSVGGSTNEKLFF

SEQ ID NO: 270623 - protein, 13 aa, Homo sapiens
  CDR3 for alpha chain variable domain of TCR clone 135312 (TRAV12-2, TRAJ15)
CPHTGQAGTALLF

SEQ ID NO: 270624 - protein, 15 aa, Homo sapiens
  CDR3 for beta chain variable domain of TCR clone 135312 (TRBV2, TRBJ2-7)
CASSEGLARSYEQYF

SEQ ID NO: 270625 - protein, 14 aa, Homo sapiens
  CDR3 for alpha chain variable domain of TCR clone 135313 (TRAV21, TRAJ23)
CAVSLYNQGGKLIF

SEQ ID NO: 270626 - protein, 14 aa, Homo sapiens
  CDR3 for beta chain variable domain of TCR clone 135313 (TRBV7-9, TRBJ1-2)
CASSRQGANYGYTF

SEQ ID NO: 270627 - protein, 12 aa, Homo sapiens
  CDR3 for alpha chain variable domain of TCR clone 135314 (TRAV21, TRAJ33)
SAKMASNYQLIW

SEQ ID NO: 270628 - protein, 14 aa, Homo sapiens
  CDR3 for beta chain variable domain of TCR clone 135314 (TRBV2, TRBJ2-7)
CASSLTSGGYEQYF

SEQ ID NO: 270629 - protein, 13 aa, Homo sapiens
  CDR3 for alpha chain variable domain of TCR clone 135315 (TRAV12-3, TRAJ9)
CAMSADGGFKTIF

SEQ ID NO: 270630 - protein, 16 aa, Homo sapiens
  CDR3 for beta chain variable domain of TCR clone 135315 (TRBV20-1, TRBJ2-1)
CSARGSSSGMVNEQFF

SEQ ID NO: 270631 - protein, 15 aa, Homo sapiens
  CDR3 for alpha chain variable domain of TCR clone 135316 (TRAV35, TRAJ34)
CAGTSIVRNTDKLIF

SEQ ID NO: 270632 - protein, 14 aa, Homo sapiens
  CDR3 for beta chain variable domain of TCR clone 135316 (TRBV7-3, TRBJ1-1)
CASSLKGGNTEAFF

SEQ ID NO: 270633 - protein, 16 aa, Homo sapiens
  CDR3 for alpha chain variable domain of TCR clone 135317 (TRAV30, TRAJ24)
CGTEIVDADSWGKFQF

SEQ ID NO: 270634 - protein, 15 aa, Homo sapiens
  CDR3 for beta chain variable domain of TCR clone 135317 (TRBV7-3, TRBJ1-1)
CASSQDWGLKRSLDK

SEQ ID NO: 270635 - protein, 14 aa, Homo sapiens
  CDR3 for alpha chain variable domain of TCR clone 135318 (TRAV27, TRAJ37)
CAGERSSNTGRLIF

SEQ ID NO: 270636 - protein, 15 aa, Homo sapiens
  CDR3 for beta chain variable domain of TCR clone 135318 (TRBV11-3, TRBJ1-6)
CASSLDWGANSPLHF

SEQ ID NO: 270637 - protein, 13 aa, Homo sapiens
  CDR3 for alpha chain variable domain of TCR clone 135319 (TRAV8-3, TRAJ48)
CAVVPFGNVKLTF

SEQ ID NO: 270638 - protein, 12 aa, Homo sapiens
  CDR3 for beta chain variable domain of TCR clone 135319 (TRBV11-2, TRBJ2-2)
CASSLGGGELFF

SEQ ID NO: 270639 - protein, 15 aa, Homo sapiens
  CDR3 for alpha chain variable domain of TCR clone 135320 (TRAV14/DV4, TRAJ22)
CAMREGWTTARQLTF

SEQ ID NO: 270640 - protein, 14 aa, Homo sapiens
  CDR3 for beta chain variable domain of TCR clone 135320 (TRBV7-8, TRBJ2-7)
CASSLNQGASEQYF

SEQ ID NO: 270641 - protein, 16 aa, Homo sapiens
  CDR3 for alpha chain variable domain of TCR clone 135321 (TRAV21, TRAJ45)
CAVSWGSGGGADGLTF

SEQ ID NO: 270642 - protein, 14 aa, Homo sapiens
  CDR3 for beta chain variable domain of TCR clone 135321 (TRBV4-2, TRBJ1-2)
CASSQGGSNYGYTF

SEQ ID NO: 270643 - protein, 13 aa, Homo sapiens
  CDR3 for alpha chain variable domain of TCR clone 135322 (TRAV13-1, TRAJ11)
CAASIRGYSTLTF

SEQ ID NO: 270644 - protein, 15 aa, Homo sapiens
  CDR3 for beta chain variable domain of TCR clone 135322 (TRBV27, TRBJ2-7)
CASSTAGTGSYEQYF

SEQ ID NO: 270645 - protein, 14 aa, Homo sapiens
  CDR3 for alpha chain variable domain of TCR clone 135323 (TRAV1-2, TRAJ16)
CAVNRFSDSQKLLF

SEQ ID NO: 270646 - protein, 13 aa, Homo sapiens
  CDR3 for beta chain variable domain of TCR clone 135323 (TRBV7-9, TRBJ1-2)
CASSLKQNYGYTF

SEQ ID NO: 270647 - protein, 12 aa, Homo sapiens
  CDR3 for alpha chain variable domain of TCR clone 135324 (TRAV16, TRAJ10)
CSRTGGGNKLTF

SEQ ID NO: 270648 - protein, 14 aa, Homo sapiens
  CDR3 for beta chain variable domain of TCR clone 135324 (TRBV5-1, TRBJ2-7)
CASSLTSGGYEQYF

SEQ ID NO: 270649 - protein, 18 aa, Homo sapiens
  CDR3 for alpha chain variable domain of TCR clone 135325 (TRAV12-2, )
CAVEDIQNPDPAVYQLRD

SEQ ID NO: 270650 - protein, 18 aa, Homo sapiens
  CDR3 for beta chain variable domain of TCR clone 135325 (TRBV11-2, TRBJ2-3)
CASSLGGASRGAPNTQYI

SEQ ID NO: 270651 - protein, 12 aa, Homo sapiens
  CDR3 for alpha chain variable domain of TCR clone 135326 (TRAV13-1, TRAJ21)
GAAKEGFNKFYF

SEQ ID NO: 270652 - protein, 17 aa, Homo sapiens
  CDR3 for beta chain variable domain of TCR clone 135326 (TRBV20-1, TRBJ2-1)
CSASSSGLAGSYNEQFF

SEQ ID NO: 270653 - protein, 13 aa, Homo sapiens
  CDR3 for alpha chain variable domain of TCR clone 135327 (TRAV13-1, TRAJ10)
CAATAGGGNKLTF

SEQ ID NO: 270654 - protein, 11 aa, Homo sapiens
  CDR3 for beta chain variable domain of TCR clone 135327 (TRBV11-2, TRBJ2-2)
CASSLPGELFF

SEQ ID NO: 270655 - protein, 12 aa, Homo sapiens
  CDR3 for alpha chain variable domain of TCR clone 135328 (TRAV12-1, TRAJ40)
CVLNGETYKYIF

SEQ ID NO: 270656 - protein, 14 aa, Homo sapiens
  CDR3 for beta chain variable domain of TCR clone 135328 (TRBV7-9, TRBJ1-1)
CASSSTKGNTEAFF

SEQ ID NO: 270657 - protein, 12 aa, Homo sapiens
  CDR3 for alpha chain variable domain of TCR clone 135329 (TRAV1-1, TRAJ8)
CAGGTGFQKLVF

SEQ ID NO: 270658 - protein, 13 aa, Homo sapiens
  CDR3 for beta chain variable domain of TCR clone 135329 (TRBV19, TRBJ1-2)
CASSVPGQDGYTV

SEQ ID NO: 270659 - protein, 12 aa, Homo sapiens
  CDR3 for alpha chain variable domain of TCR clone 135330 (TRAV12-2, TRAJ36)
CAAPRGANNLFF

SEQ ID NO: 270660 - protein, 14 aa, Homo sapiens
  CDR3 for beta chain variable domain of TCR clone 135330 (TRBV19, TRBJ2-1)
CASPTFVLSGEQFF

SEQ ID NO: 270661 - protein, 16 aa, Homo sapiens
  CDR3 for alpha chain variable domain of TCR clone 135331 (TRAV13-2, TRAJ32)
CAENMNYGGATKKLIF

SEQ ID NO: 270662 - protein, 14 aa, Homo sapiens
  CDR3 for beta chain variable domain of TCR clone 135331 (TRBV15, TRBJ2-5)
CATSSTGYQETQYF

SEQ ID NO: 270663 - protein, 17 aa, Homo sapiens
  CDR3 for alpha chain variable domain of TCR clone 135332 (TRAV3, TRAJ42)
CAVRDRDYGGSKGNLIF

SEQ ID NO: 270664 - protein, 13 aa, Homo sapiens
  CDR3 for beta chain variable domain of TCR clone 135332 (TRBV10-3, TRBJ2-7)
CASKLAVNYEQYV

SEQ ID NO: 270665 - protein, 17 aa, Homo sapiens
  CDR3 for alpha chain variable domain of TCR clone 135333 (TRAV3, TRAJ6)
CAVRDGTRAGGSYVPTF

SEQ ID NO: 270666 - protein, 14 aa, Homo sapiens
  CDR3 for beta chain variable domain of TCR clone 135333 (TRBV7-2, TRBJ2-7)
CASSPKTSFYEQYF

SEQ ID NO: 270667 - protein, 14 aa, Homo sapiens
  CDR3 for alpha chain variable domain of TCR clone 135334 (TRAV13-1, TRAJ35)
CAASKGGFGNVLHC

SEQ ID NO: 270668 - protein, 15 aa, Homo sapiens
  CDR3 for beta chain variable domain of TCR clone 135334 (TRBV7-3, TRBJ2-3)
CASSLGLTLGDTQYF

SEQ ID NO: 270669 - protein, 10 aa, Homo sapiens
  CDR3 for alpha chain variable domain of TCR clone 135335 (TRAV5, TRAJ34)
CAEDTDKLIF

SEQ ID NO: 270670 - protein, 12 aa, Homo sapiens
  CDR3 for beta chain variable domain of TCR clone 135335 (TRBV12-4, TRBJ2-7)
CASSLGGYEQYF

SEQ ID NO: 270671 - protein, 14 aa, Homo sapiens
  CDR3 for alpha chain variable domain of TCR clone 135336 (TRAV12-2, TRAJ17)
CAVLFRAAGNKLTF

SEQ ID NO: 270672 - protein, 13 aa, Homo sapiens
  CDR3 for beta chain variable domain of TCR clone 135336 (TRBV19, TRBJ1-2)
CASSQGQVYGHTF

SEQ ID NO: 270673 - protein, 21 aa, Homo sapiens
  CDR3 for alpha chain variable domain of TCR clone 135337 (TRAV8-3, TRAJ10)
CAVGHNHGRRKQTHLWDRHSA

SEQ ID NO: 270674 - protein, 10 aa, Homo sapiens
  CDR3 for beta chain variable domain of TCR clone 135337 (TRBV20-1, TRBJ2-5)
CSARFETQYF

SEQ ID NO: 270675 - protein, 13 aa, Homo sapiens
  CDR3 for alpha chain variable domain of TCR clone 135338 (TRAV21, TRAJ27)
CAARPGNAGKSTF

SEQ ID NO: 270676 - protein, 20 aa, Homo sapiens
  CDR3 for beta chain variable domain of TCR clone 135338 (TRBV7-9, TRBJ2-2)
CASSHLFPGPTIHITGELFF

SEQ ID NO: 270677 - protein, 14 aa, Homo sapiens
  CDR3 for alpha chain variable domain of TCR clone 135339 (TRAV1-2, TRAJ8)
CAVREDTGFQKLVF

SEQ ID NO: 270678 - protein, 16 aa, Homo sapiens
  CDR3 for beta chain variable domain of TCR clone 135339 (TRBV11-2, TRBJ2-7)
CASSPLAGGPRYEQYF

SEQ ID NO: 270679 - protein, 11 aa, Homo sapiens
  CDR3 for alpha chain variable domain of TCR clone 135340 (TRAV13-1, TRAJ39)
CASHAGNMLTF

SEQ ID NO: 270680 - protein, 14 aa, Homo sapiens
  CDR3 for beta chain variable domain of TCR clone 135340 (TRBV11-2, TRBJ1-5)
CASSLDRVRQPQHF

SEQ ID NO: 270681 - protein, 17 aa, Homo sapiens
  CDR3 for alpha chain variable domain of TCR clone 135341 (TRAV3, TRAJ6)
CAVRDGPRAGGSYIPTS

SEQ ID NO: 270682 - protein, 15 aa, Homo sapiens
  CDR3 for beta chain variable domain of TCR clone 135341 (TRBV29-1, TRBJ2-5)
CSVEGLAVNQETQYF

SEQ ID NO: 270683 - protein, 13 aa, Homo sapiens
  CDR3 for alpha chain variable domain of TCR clone 135342 (TRAV13-2, TRAJ13)
CAERPGGYQKGTF

SEQ ID NO: 270684 - protein, 16 aa, Homo sapiens
  CDR3 for beta chain variable domain of TCR clone 135342 (TRBV18, TRBJ2-5)
CASSPPSGGGAKTQYF

SEQ ID NO: 270685 - protein, 15 aa, Homo sapiens
  CDR3 for alpha chain variable domain of TCR clone 135343 (TRAV2, TRAJ38)
CAVEDRIGNNRKLIW

SEQ ID NO: 270686 - protein, 16 aa, Homo sapiens
  CDR3 for beta chain variable domain of TCR clone 135343 (TRBV7-8, TRBJ2-1)
CASSVAGTGRYNEQFF

SEQ ID NO: 270687 - protein, 12 aa, Homo sapiens
  CDR3 for alpha chain variable domain of TCR clone 135344 (TRAV13-1, TRAJ53)
AASGGSNYKLTF

SEQ ID NO: 270688 - protein, 15 aa, Homo sapiens
  CDR3 for beta chain variable domain of TCR clone 135344 (TRBV5-1, TRBJ2-1)
CDSSPPRAPYNEQFF

SEQ ID NO: 270689 - protein, 16 aa, Homo sapiens
  CDR3 for alpha chain variable domain of TCR clone 135345 (TRAV8-3, TRAJ8)
CAVPRDGNTGFQKLVF

SEQ ID NO: 270690 - protein, 15 aa, Homo sapiens
  CDR3 for beta chain variable domain of TCR clone 135345 (TRBV28, TRBJ1-2)
CASSFLFGQEVGYTF

SEQ ID NO: 270691 - protein, 13 aa, Homo sapiens
  CDR3 for alpha chain variable domain of TCR clone 135346 (TRAV21, TRAJ37)
CVVSSGNTGKLIF

SEQ ID NO: 270692 - protein, 17 aa, Homo sapiens
  CDR3 for beta chain variable domain of TCR clone 135346 (TRBV7-3, TRBJ2-3)
CASSLMKRMRGADTQYF

SEQ ID NO: 270693 - protein, 14 aa, Homo sapiens
  CDR3 for alpha chain variable domain of TCR clone 135347 (TRAV26-2, TRAJ31)
CILIPGNNNAGLMF

SEQ ID NO: 270694 - protein, 16 aa, Homo sapiens
  CDR3 for beta chain variable domain of TCR clone 135347 (TRBV7-3, TRBJ2-1)
CASSLVSGSSNNEQFF

SEQ ID NO: 270695 - protein, 18 aa, Homo sapiens
  CDR3 for alpha chain variable domain of TCR clone 135348 (TRAV26-2, TRAJ45)
CILRVDKYSGGGADGLTF

SEQ ID NO: 270696 - protein, 16 aa, Homo sapiens
  CDR3 for beta chain variable domain of TCR clone 135348 (TRBV2, TRBJ1-4)
CASNLLQGASNEKLFF

SEQ ID NO: 270697 - protein, 12 aa, Homo sapiens
  CDR3 for alpha chain variable domain of TCR clone 135349 (TRAV13-1, TRAJ9)
CASHTGGFKTIF

SEQ ID NO: 270698 - protein, 13 aa, Homo sapiens
  CDR3 for beta chain variable domain of TCR clone 135349 (TRBV12-4, TRBJ1-2)
CASSSGSEDGYTF

SEQ ID NO: 270699 - protein, 18 aa, Homo sapiens
  CDR3 for alpha chain variable domain of TCR clone 135350 (TRAV16, TRAJ45)
CAQASYPSSGGGADGLTF

SEQ ID NO: 270700 - protein, 14 aa, Homo sapiens
  CDR3 for beta chain variable domain of TCR clone 135350 (TRBV5-4, TRBJ2-5)
CASSLVGVEETQYF

SEQ ID NO: 270701 - protein, 13 aa, Homo sapiens
  CDR3 for alpha chain variable domain of TCR clone 135351 (TRAV3, TRAJ3)
CAVRALGASKIIF

SEQ ID NO: 270702 - protein, 15 aa, Homo sapiens
  CDR3 for beta chain variable domain of TCR clone 135351 (TRBV20-1, TRBJ2-7)
CSAESGTSGAYEQYF

SEQ ID NO: 270703 - protein, 13 aa, Homo sapiens
  CDR3 for alpha chain variable domain of TCR clone 135352 (TRAV8-1, TRAJ22)
CRPIFCSARQLTF

SEQ ID NO: 270704 - protein, 14 aa, Homo sapiens
  CDR3 for beta chain variable domain of TCR clone 135352 (TRBV9, TRBJ2-2)
CASSVGQGAGELFF

SEQ ID NO: 270705 - protein, 13 aa, Homo sapiens
  CDR3 for alpha chain variable domain of TCR clone 135353 (TRAV22, TRAJ29)
CAVGGSGNPPLVF

SEQ ID NO: 270706 - protein, 13 aa, Homo sapiens
  CDR3 for beta chain variable domain of TCR clone 135353 (TRBV4-2, TRBJ1-1)
CASSQAGSTEAFF

SEQ ID NO: 270707 - protein, 13 aa, Homo sapiens
  CDR3 for alpha chain variable domain of TCR clone 135354 (TRAV1-2, TRAJ17)
CAVGKAAGNKLTF

SEQ ID NO: 270708 - protein, 15 aa, Homo sapiens
  CDR3 for beta chain variable domain of TCR clone 135354 (TRBV7-9, TRBJ2-1)
RASSGTGGDYNEQFF

SEQ ID NO: 270709 - protein, 14 aa, Homo sapiens
  CDR3 for alpha chain variable domain of TCR clone 135355 (TRAV8-3, TRAJ4)
CAVGAAGGYNKLIF

SEQ ID NO: 270710 - protein, 15 aa, Homo sapiens
  CDR3 for beta chain variable domain of TCR clone 135355 (TRBV6-5, TRBJ2-1)
CASSYDAGAGNEHFF

SEQ ID NO: 270711 - protein, 15 aa, Homo sapiens
  CDR3 for alpha chain variable domain of TCR clone 135356 (TRAV3, TRAJ13)
CAVRVYSGGYQTVTF

SEQ ID NO: 270712 - protein, 15 aa, Homo sapiens
  CDR3 for beta chain variable domain of TCR clone 135356 (TRBV5-7, TRBJ1-2)
CASSLGVAANYGYAF

SEQ ID NO: 270713 - protein, 14 aa, Homo sapiens
  CDR3 for alpha chain variable domain of TCR clone 135357 (TRAV16, TRAJ33)
CALSAMDSNYQLIW

SEQ ID NO: 270714 - protein, 15 aa, Homo sapiens
  CDR3 for beta chain variable domain of TCR clone 135357 (TRBV20-1, TRBJ2-7)
CSAESGTSGAYEQYF

SEQ ID NO: 270715 - protein, 19 aa, Homo sapiens
  CDR3 for alpha chain variable domain of TCR clone 135358 (TRAV2, TRAJ20)
ILQVREADAAVYRVCKLSF

SEQ ID NO: 270716 - protein, 12 aa, Homo sapiens
  CDR3 for beta chain variable domain of TCR clone 135358 (TRBV11-2, TRBJ2-1)
CASSPGNNEQFF

SEQ ID NO: 270717 - protein, 13 aa, Homo sapiens
  CDR3 for alpha chain variable domain of TCR clone 135359 (TRAV35, TRAJ33)
CAGQLYGVYQLIW

SEQ ID NO: 270718 - protein, 15 aa, Homo sapiens
  CDR3 for beta chain variable domain of TCR clone 135359 (TRBV19, TRBJ1-1)
CASTSGQIQNTEAFF

SEQ ID NO: 270719 - protein, 10 aa, Homo sapiens
  CDR3 for alpha chain variable domain of TCR clone 135360 (TRAV23/DV6, TRAJ31)
CARGGARLMF

SEQ ID NO: 270720 - protein, 19 aa, Homo sapiens
  CDR3 for beta chain variable domain of TCR clone 135360 (TRBV25-1, TRBJ2-2)
CAILVYRVDRGRKTGELFF

SEQ ID NO: 270721 - protein, 15 aa, Homo sapiens
  CDR3 for alpha chain variable domain of TCR clone 135361 (TRAV35, TRAJ50)
CAGQLCKTSYDKVIF

SEQ ID NO: 270722 - protein, 12 aa, Homo sapiens
  CDR3 for beta chain variable domain of TCR clone 135361 (TRBV5-1, TRBJ2-5)
CASSLGLETQYF

SEQ ID NO: 270723 - protein, 10 aa, Homo sapiens
  CDR3 for alpha chain variable domain of TCR clone 135362 (TRAV21, TRAJ43)
CAVRIGDMRF

SEQ ID NO: 270724 - protein, 13 aa, Homo sapiens
  CDR3 for beta chain variable domain of TCR clone 135362 (TRBV20-1, TRBJ2-7)
CSAPGLADCEQYF

SEQ ID NO: 270725 - protein, 16 aa, Homo sapiens
  CDR3 for alpha chain variable domain of TCR clone 135363 (TRAV35, TRAJ28)
CAGQRYSGAGSYQLNF

SEQ ID NO: 270726 - protein, 14 aa, Homo sapiens
  CDR3 for beta chain variable domain of TCR clone 135363 (TRBV18, TRBJ2-7)
CASSPRGGAYEQYF

SEQ ID NO: 270727 - protein, 12 aa, Homo sapiens
  CDR3 for alpha chain variable domain of TCR clone 135364 (TRAV13-1, TRAJ49)
CAASPMGNQFYF

SEQ ID NO: 270728 - protein, 16 aa, Homo sapiens
  CDR3 for beta chain variable domain of TCR clone 135364 (TRBV19, TRBJ2-1)
CASSKAGPSSYNEQFF

SEQ ID NO: 270729 - protein, 16 aa, Homo sapiens
  CDR3 for alpha chain variable domain of TCR clone 135365 (TRAV12-1, TRAJ12)
CVVNTLLMDSSNKLIF

SEQ ID NO: 270730 - protein, 13 aa, Homo sapiens
  CDR3 for beta chain variable domain of TCR clone 135365 (TRBV11-2, TRBJ2-1)
CASSSEAYNEQFF

SEQ ID NO: 270731 - protein, 14 aa, Homo sapiens
  CDR3 for alpha chain variable domain of TCR clone 135366 (TRAV17, TRAJ57)
CATDPQGGSEKLVF

SEQ ID NO: 270732 - protein, 14 aa, Homo sapiens
  CDR3 for beta chain variable domain of TCR clone 135366 (TRBV7-9, TRBJ2-1)
CASSDNSGYNEQFF

SEQ ID NO: 270733 - protein, 15 aa, Homo sapiens
  CDR3 for alpha chain variable domain of TCR clone 135367 (TRAV17, TRAJ57)
CATGPSQGGSEKMVF

SEQ ID NO: 270734 - protein, 15 aa, Homo sapiens
  CDR3 for beta chain variable domain of TCR clone 135367 (TRBV25-1, TRBJ1-4)
CASSPGDSTNEKLFF

SEQ ID NO: 270735 - protein, 13 aa, Homo sapiens
  CDR3 for alpha chain variable domain of TCR clone 135368 (TRAV8-1, TRAJ32)
CAADGGATNKLIF

SEQ ID NO: 270736 - protein, 12 aa, Homo sapiens
  CDR3 for beta chain variable domain of TCR clone 135368 (TRBV27, TRBJ2-2)
CASSFLPGELFF

SEQ ID NO: 270737 - protein, 16 aa, Homo sapiens
  CDR3 for alpha chain variable domain of TCR clone 135369 (TRAV27, TRAJ13)
FAGAKSDSGGYQKVTF

SEQ ID NO: 270738 - protein, 17 aa, Homo sapiens
  CDR3 for beta chain variable domain of TCR clone 135369 (TRBV13, TRBJ2-3)
CASSLSRVAGGRNTQYF

SEQ ID NO: 270739 - protein, 13 aa, Homo sapiens
  CDR3 for alpha chain variable domain of TCR clone 135370 (TRAV12-2, TRAJ18)
CAVRGSTLGRLYF

SEQ ID NO: 270740 - protein, 18 aa, Homo sapiens
  CDR3 for beta chain variable domain of TCR clone 135370 (TRBV27, TRBJ2-3)
CASSLSGTTGRGTDTQYF

SEQ ID NO: 270741 - protein, 12 aa, Homo sapiens
  CDR3 for alpha chain variable domain of TCR clone 135371 (TRAV13-2, TRAJ23)
CADRHRGGKLIF

SEQ ID NO: 270742 - protein, 13 aa, Homo sapiens
  CDR3 for beta chain variable domain of TCR clone 135371 (TRBV10-3, TRBJ2-7)
CASKLAVNYEQYF

SEQ ID NO: 270743 - protein, 16 aa, Homo sapiens
  CDR3 for alpha chain variable domain of TCR clone 135372 (TRAV8-1, TRAJ39)
CAVNVPSYNAGNMLTF

SEQ ID NO: 270744 - protein, 15 aa, Homo sapiens
  CDR3 for beta chain variable domain of TCR clone 135372 (TRBV4-1, TRBJ2-3)
CASGSTRAGTDTQYF

SEQ ID NO: 270745 - protein, 13 aa, Homo sapiens
  CDR3 for alpha chain variable domain of TCR clone 135373 (TRAV3, TRAJ20)
CAVRDTPRYKPNF

SEQ ID NO: 270746 - protein, 16 aa, Homo sapiens
  CDR3 for beta chain variable domain of TCR clone 135373 (TRBV20-1, TRBJ2-7)
CSARAPGLALSYEQYF

SEQ ID NO: 270747 - protein, 13 aa, Homo sapiens
  CDR3 for alpha chain variable domain of TCR clone 135374 (TRAV9-2, )
CALSRSEISRTLT

SEQ ID NO: 270748 - protein, 13 aa, Homo sapiens
  CDR3 for beta chain variable domain of TCR clone 135374 (TRBV20-1, TRBJ1-1)
CSARGGGNTEAFF

SEQ ID NO: 270749 - protein, 16 aa, Homo sapiens
  CDR3 for alpha chain variable domain of TCR clone 135375 (TRAV12-2, TRAJ13)
CAVDSAGAGGYQKVTF

SEQ ID NO: 270750 - protein, 13 aa, Homo sapiens
  CDR3 for beta chain variable domain of TCR clone 135375 (TRBV10-3, TRBJ2-7)
CASKLAVNYEQYF

SEQ ID NO: 270751 - protein, 12 aa, Homo sapiens
  CDR3 for alpha chain variable domain of TCR clone 135376 (TRAV12-1, TRAJ40)
CVVYSGTYKYIF

SEQ ID NO: 270752 - protein, 13 aa, Homo sapiens
  CDR3 for beta chain variable domain of TCR clone 135376 (TRBV11-2, TRBJ2-5)
CASSRGPSETQYF

SEQ ID NO: 270753 - protein, 12 aa, Homo sapiens
  CDR3 for alpha chain variable domain of TCR clone 135377 (TRAV12-2, TRAJ10)
WGVTGGGNKLTF

SEQ ID NO: 270754 - protein, 16 aa, Homo sapiens
  CDR3 for beta chain variable domain of TCR clone 135377 (TRBV6-4, TRBJ1-2)
FASSEAVGDPNYGYTF

SEQ ID NO: 270755 - protein, 14 aa, Homo sapiens
  CDR3 for alpha chain variable domain of TCR clone 135378 (TRAV1-2, TRAJ16)
CAVNRFSDGQKLLF

SEQ ID NO: 270756 - protein, 16 aa, Homo sapiens
  CDR3 for beta chain variable domain of TCR clone 135378 (TRBV20-1, TRBJ2-3)
CNAVRDRGPIADTQYF

SEQ ID NO: 270757 - protein, 14 aa, Homo sapiens
  CDR3 for alpha chain variable domain of TCR clone 135379 (TRAV21, TRAJ58)
CAVGEETRGSRLTF

SEQ ID NO: 270758 - protein, 14 aa, Homo sapiens
  CDR3 for beta chain variable domain of TCR clone 135379 (TRBV7-2, TRBJ1-1)
CASSFLTGTTEAFF

SEQ ID NO: 270759 - protein, 13 aa, Homo sapiens
  CDR3 for alpha chain variable domain of TCR clone 135380 (TRAV21, TRAJ27)
CAARPGNAGKSTF

SEQ ID NO: 270760 - protein, 14 aa, Homo sapiens
  CDR3 for beta chain variable domain of TCR clone 135380 (TRBV19, TRBJ2-7)
CASSMGQGAIEQYF

SEQ ID NO: 270761 - protein, 15 aa, Homo sapiens
  CDR3 for alpha chain variable domain of TCR clone 135381 (TRAV34, TRAJ38)
CGADFTPGNNRKLIW

SEQ ID NO: 270762 - protein, 16 aa, Homo sapiens
  CDR3 for beta chain variable domain of TCR clone 135381 (TRBV12-5, TRBJ2-5)
CASGPRTNGNQETQYF

SEQ ID NO: 270763 - protein, 13 aa, Homo sapiens
  CDR3 for alpha chain variable domain of TCR clone 135382 (TRAV21, TRAJ27)
CAARPGNAGKSTF

SEQ ID NO: 270764 - protein, 17 aa, Homo sapiens
  CDR3 for beta chain variable domain of TCR clone 135382 (TRBV4-1, TRBJ1-4)
CAISQEGPRGVEEKLFF

SEQ ID NO: 270765 - protein, 15 aa, Homo sapiens
  CDR3 for alpha chain variable domain of TCR clone 135383 (TRAV8-2, TRAJ42)
CVVSDGKGSKGNLIF

SEQ ID NO: 270766 - protein, 14 aa, Homo sapiens
  CDR3 for beta chain variable domain of TCR clone 135383 (TRBV5-1, TRBJ2-1)
CATNGGSSYNEQFF

SEQ ID NO: 270767 - protein, 14 aa, Homo sapiens
  CDR3 for alpha chain variable domain of TCR clone 135384 (TRAV1-2, TRAJ16)
CAVNRFSDGQKLLF

SEQ ID NO: 270768 - protein, 17 aa, Homo sapiens
  CDR3 for beta chain variable domain of TCR clone 135384 (TRBV5-1, TRBJ2-2)
CASSLDGLSGGTGELFF

SEQ ID NO: 270769 - protein, 15 aa, Homo sapiens
  CDR3 for alpha chain variable domain of TCR clone 135385 (TRAV27, TRAJ38)
CAARRNAGNNLKRIW

SEQ ID NO: 270770 - protein, 13 aa, Homo sapiens
  CDR3 for beta chain variable domain of TCR clone 135385 (TRBV12-5, TRBJ2-3)
CASGDRQSDTQYF

SEQ ID NO: 270771 - protein, 12 aa, Homo sapiens
  CDR3 for alpha chain variable domain of TCR clone 135386 (TRAV21, TRAJ13)
PGPFGGYQKVTF

SEQ ID NO: 270772 - protein, 14 aa, Homo sapiens
  CDR3 for beta chain variable domain of TCR clone 135386 (TRBV20-1, TRBJ2-7)
CSAKDRKGAYEQYF

SEQ ID NO: 270773 - protein, 11 aa, Homo sapiens
  CDR3 for alpha chain variable domain of TCR clone 135387 (TRAV21, TRAJ23)
CAPQRRGKLIF

SEQ ID NO: 270774 - protein, 14 aa, Homo sapiens
  CDR3 for beta chain variable domain of TCR clone 135387 (TRBV12-4, TRBJ1-1)
YASTWTGHDTEAFF

SEQ ID NO: 270775 - protein, 19 aa, Homo sapiens
  CDR3 for alpha chain variable domain of TCR clone 135388 (TRAV38-1, TRAJ53)
CAFMKNGLESGGSNYKLQF

SEQ ID NO: 270776 - protein, 13 aa, Homo sapiens
  CDR3 for beta chain variable domain of TCR clone 135388 (TRBV19, TRBJ2-7)
CASSPRQSYEQYF

SEQ ID NO: 270777 - protein, 13 aa, Homo sapiens
  CDR3 for alpha chain variable domain of TCR clone 135389 (TRAV36/DV7, TRAJ54)
CAVLIQGAQKLVF

SEQ ID NO: 270778 - protein, 13 aa, Homo sapiens
  CDR3 for beta chain variable domain of TCR clone 135389 (TRBV29-1, TRBJ2-4)
CSVGEGNKNIQYF

SEQ ID NO: 270779 - protein, 15 aa, Homo sapiens
  CDR3 for alpha chain variable domain of TCR clone 135390 (TRAV2, TRAJ44)
CAVEAYTGTASKLTF

SEQ ID NO: 270780 - protein, 18 aa, Homo sapiens
  CDR3 for beta chain variable domain of TCR clone 135390 (TRBV6-5, TRBJ1-1)
CASSYSAPGGTGGTEAFF

SEQ ID NO: 270781 - protein, 11 aa, Homo sapiens
  CDR3 for alpha chain variable domain of TCR clone 135391 (TRAV3, TRAJ21)
CAVGNFNKFYF

SEQ ID NO: 270782 - protein, 18 aa, Homo sapiens
  CDR3 for beta chain variable domain of TCR clone 135391 (TRBV25-1, TRBJ1-2)
CASSGLQNGQGLIFGYTF

SEQ ID NO: 270783 - protein, 17 aa, Homo sapiens
  CDR3 for alpha chain variable domain of TCR clone 135392 (TRAV3, TRAJ42)
CAVRDRDYGGSQGNLIF

SEQ ID NO: 270784 - protein, 15 aa, Homo sapiens
  CDR3 for beta chain variable domain of TCR clone 135392 (TRBV4-3, TRBJ2-1)
CASSQLGGSYNEQFF

SEQ ID NO: 270785 - protein, 14 aa, Homo sapiens
  CDR3 for alpha chain variable domain of TCR clone 135393 (TRAV34, TRAJ22)
CGADTSGSARQLTV

SEQ ID NO: 270786 - protein, 16 aa, Homo sapiens
  CDR3 for beta chain variable domain of TCR clone 135393 (TRBV2, TRBJ2-3)
CQHRGAPRRWTDTQYF

SEQ ID NO: 270787 - protein, 11 aa, Homo sapiens
  CDR3 for alpha chain variable domain of TCR clone 135394 (TRAV12-3, TRAJ43)
CALSVSNDMRF

SEQ ID NO: 270788 - protein, 14 aa, Homo sapiens
  CDR3 for beta chain variable domain of TCR clone 135394 (TRBV20-1, TRBJ1-1)
SAVLHLGGGTEAFF

SEQ ID NO: 270789 - protein, 11 aa, Homo sapiens
  CDR3 for alpha chain variable domain of TCR clone 135395 (TRAV21, TRAJ34)
CAPYNTDKLIF

SEQ ID NO: 270790 - protein, 13 aa, Homo sapiens
  CDR3 for beta chain variable domain of TCR clone 135395 (TRBV20-1, TRBJ2-7)
CSADPGATYEQYF

SEQ ID NO: 270791 - protein, 14 aa, Homo sapiens
  CDR3 for alpha chain variable domain of TCR clone 135396 (TRAV26-1, TRAJ38)
CSADNAGNNRKLIW

SEQ ID NO: 270792 - protein, 13 aa, Homo sapiens
  CDR3 for beta chain variable domain of TCR clone 135396 (TRBV11-2, TRBJ2-1)
CASSLGLAGGRFF

SEQ ID NO: 270793 - protein, 14 aa, Homo sapiens
  CDR3 for alpha chain variable domain of TCR clone 135397 (TRAV12-2, TRAJ13)
CAVKKTGGYQKVTF

SEQ ID NO: 270794 - protein, 16 aa, Homo sapiens
  CDR3 for beta chain variable domain of TCR clone 135397 (TRBV5-5, TRBJ2-2)
CASSGRREGATGELFF

SEQ ID NO: 270795 - protein, 12 aa, Homo sapiens
  CDR3 for alpha chain variable domain of TCR clone 135398 (TRAV21, TRAJ20)
CAVRRNDYKLSF

SEQ ID NO: 270796 - protein, 13 aa, Homo sapiens
  CDR3 for beta chain variable domain of TCR clone 135398 (TRBV7-3, TRBJ1-1)
CASSQDWGAEAFF

SEQ ID NO: 270797 - protein, 11 aa, Homo sapiens
  CDR3 for alpha chain variable domain of TCR clone 135399 (TRAV12-3, TRAJ27)
CAMANAGKSTF

SEQ ID NO: 270798 - protein, 14 aa, Homo sapiens
  CDR3 for beta chain variable domain of TCR clone 135399 (TRBV19, TRBJ2-1)
CARGARSFQWEQFF

SEQ ID NO: 270799 - protein, 16 aa, Homo sapiens
  CDR3 for alpha chain variable domain of TCR clone 135400 (TRAV3, TRAJ10)
CAVRDMSAGGGNKLTF

SEQ ID NO: 270800 - protein, 15 aa, Homo sapiens
  CDR3 for beta chain variable domain of TCR clone 135400 (TRBV5-1, TRBJ2-1)
CASSPPRAPYNEQFF

SEQ ID NO: 270801 - protein, 14 aa, Homo sapiens
  CDR3 for alpha chain variable domain of TCR clone 135401 (TRAV26-1, TRAJ40)
CIVRLLSGTCKYIF

SEQ ID NO: 270802 - protein, 13 aa, Homo sapiens
  CDR3 for beta chain variable domain of TCR clone 135401 (TRBV3-1, TRBJ1-1)
CASSQLQGAEAFF

SEQ ID NO: 270803 - protein, 14 aa, Homo sapiens
  CDR3 for alpha chain variable domain of TCR clone 135402 (TRAV13-2, TRAJ17)
CAENSKAAGNKLTF

SEQ ID NO: 270804 - protein, 14 aa, Homo sapiens
  CDR3 for beta chain variable domain of TCR clone 135402 (TRBV5-4, TRBJ1-1)
CASSLDSRRDEAFF

SEQ ID NO: 270805 - protein, 15 aa, Homo sapiens
  CDR3 for alpha chain variable domain of TCR clone 135403 (TRAV8-2, TRAJ4)
CVVSEVSGGYNKLIF

SEQ ID NO: 270806 - protein, 19 aa, Homo sapiens
  CDR3 for beta chain variable domain of TCR clone 135403 (TRBV6-3, TRBJ1-5)
CASSYVQGAPFSASQPQHF

SEQ ID NO: 270807 - protein, 16 aa, Homo sapiens
  CDR3 for alpha chain variable domain of TCR clone 135404 (TRAV17, TRAJ52)
CSTSNAGGTSYGKLTF

SEQ ID NO: 270808 - protein, 13 aa, Homo sapiens
  CDR3 for beta chain variable domain of TCR clone 135404 (TRBV27, TRBJ1-6)
CASSLVLVSPLHF

SEQ ID NO: 270809 - protein, 15 aa, Homo sapiens
  CDR3 for alpha chain variable domain of TCR clone 135405 (TRAV3, TRAJ3)
CAVRDRDSSASKIIF

SEQ ID NO: 270810 - protein, 12 aa, Homo sapiens
  CDR3 for beta chain variable domain of TCR clone 135405 (TRBV18, TRBJ1-4)
CASSPSREKLFF

SEQ ID NO: 270811 - protein, 13 aa, Homo sapiens
  CDR3 for alpha chain variable domain of TCR clone 135406 (TRAV3, TRAJ27)
CAVRPLGAGKSTF

SEQ ID NO: 270812 - protein, 17 aa, Homo sapiens
  CDR3 for beta chain variable domain of TCR clone 135406 (TRBV27, TRBJ2-6)
CASSLTGVASGANVLTF

SEQ ID NO: 270813 - protein, 20 aa, Homo sapiens
  CDR3 for alpha chain variable domain of TCR clone 135407 (TRAV12-3, TRAJ41)
SLFLRDSQPSDSATPEALNF

SEQ ID NO: 270814 - protein, 15 aa, Homo sapiens
  CDR3 for beta chain variable domain of TCR clone 135407 (TRBV5-1, TRBJ2-7)
CASSLDLTSSYEQYF

SEQ ID NO: 270815 - protein, 14 aa, Homo sapiens
  CDR3 for alpha chain variable domain of TCR clone 135408 (TRAV8-2, TRAJ5)
CVVDMDTGRRSLTF

SEQ ID NO: 270816 - protein, 15 aa, Homo sapiens
  CDR3 for beta chain variable domain of TCR clone 135408 (TRBV5-7, TRBJ2-1)
CASSYISGRGNEQFF

SEQ ID NO: 270817 - protein, 13 aa, Homo sapiens
  CDR3 for alpha chain variable domain of TCR clone 135409 (TRAV13-1, TRAJ6)
CAASSGGTYIPTF

SEQ ID NO: 270818 - protein, 15 aa, Homo sapiens
  CDR3 for beta chain variable domain of TCR clone 135409 (TRBV12-4, TRBJ2-5)
CASSPPTGLQETQYF

SEQ ID NO: 270819 - protein, 15 aa, Homo sapiens
  CDR3 for alpha chain variable domain of TCR clone 135410 (TRAV26-2, TRAJ26)
CILRDFDNYGQNFVF

SEQ ID NO: 270820 - protein, 14 aa, Homo sapiens
  CDR3 for beta chain variable domain of TCR clone 135410 (TRBV29-1, TRBJ2-5)
CSFWTPSAGETQYF

SEQ ID NO: 270821 - protein, 13 aa, Homo sapiens
  CDR3 for alpha chain variable domain of TCR clone 135411 (TRAV1-1, TRAJ33)
CAVRRDSNYQLIW

SEQ ID NO: 270822 - protein, 16 aa, Homo sapiens
  CDR3 for beta chain variable domain of TCR clone 135411 (TRBV6-1, TRBJ2-2)
CASSAFRGGDTGELYF

SEQ ID NO: 270823 - protein, 16 aa, Homo sapiens
  CDR3 for alpha chain variable domain of TCR clone 135412 (TRAV30, TRAJ24)
CGTEIVDPDSWGKFKF

SEQ ID NO: 270824 - protein, 14 aa, Homo sapiens
  CDR3 for beta chain variable domain of TCR clone 135412 (TRBV12-5, TRBJ2-5)
CASGSRTHQETQYF

SEQ ID NO: 270825 - protein, 12 aa, Homo sapiens
  CDR3 for alpha chain variable domain of TCR clone 135413 (TRAV2, TRAJ3)
CAVRCSASKIIF

SEQ ID NO: 270826 - protein, 15 aa, Homo sapiens
  CDR3 for beta chain variable domain of TCR clone 135413 (TRBV15, TRBJ2-5)
CATSRDGGHQETQYF

SEQ ID NO: 270827 - protein, 13 aa, Homo sapiens
  CDR3 for alpha chain variable domain of TCR clone 135414 (TRAV6, TRAJ23)
CALDHNQGGKLIF

SEQ ID NO: 270828 - protein, 15 aa, Homo sapiens
  CDR3 for beta chain variable domain of TCR clone 135414 (TRBV28, TRBJ1-2)
CASSGSEQRAFGYTF

SEQ ID NO: 270829 - protein, 15 aa, Homo sapiens
  CDR3 for alpha chain variable domain of TCR clone 135415 (TRAV26-1, TRAJ23)
CIVRVAGYQGGKLNF

SEQ ID NO: 270830 - protein, 18 aa, Homo sapiens
  CDR3 for beta chain variable domain of TCR clone 135415 (TRBV28, TRBJ2-1)
CASSPTSGRANSYNEQFF

SEQ ID NO: 270831 - protein, 11 aa, Homo sapiens
  CDR3 for alpha chain variable domain of TCR clone 135416 (TRAV12-2, TRAJ33)
CAVTSNYQLIW

SEQ ID NO: 270832 - protein, 14 aa, Homo sapiens
  CDR3 for beta chain variable domain of TCR clone 135416 (TRBV28, TRBJ2-2)
CASRIRSGTGELFL

SEQ ID NO: 270833 - protein, 14 aa, Homo sapiens
  CDR3 for alpha chain variable domain of TCR clone 135417 (TRAV13-1, TRAJ23)
CAASRLGRGGKLIF

SEQ ID NO: 270834 - protein, 20 aa, Homo sapiens
  CDR3 for beta chain variable domain of TCR clone 135417 (TRBV28, TRBJ2-1)
CASTPIGRSPGLAGGNEQFF

SEQ ID NO: 270835 - protein, 11 aa, Homo sapiens
  CDR3 for alpha chain variable domain of TCR clone 135418 (TRAV12-3, TRAJ27)
CAMANAGKSTF

SEQ ID NO: 270836 - protein, 14 aa, Homo sapiens
  CDR3 for beta chain variable domain of TCR clone 135418 (TRBV4-1, TRBJ2-3)
CASSQDWSTDTQYF

SEQ ID NO: 270837 - protein, 13 aa, Homo sapiens
  CDR3 for alpha chain variable domain of TCR clone 135419 (TRAV12-2, TRAJ31)
CAVNRNNNARLMF

SEQ ID NO: 270838 - protein, 13 aa, Homo sapiens
  CDR3 for beta chain variable domain of TCR clone 135419 (TRBV19, TRBJ1-2)
CASSVPGQDGYTF

SEQ ID NO: 270839 - protein, 18 aa, Homo sapiens
  CDR3 for alpha chain variable domain of TCR clone 135420 (TRAV2, TRAJ45)
TTVLWRIRSGGGADGLTF

SEQ ID NO: 270840 - protein, 13 aa, Homo sapiens
  CDR3 for beta chain variable domain of TCR clone 135420 (TRBV7-9, TRBJ2-3)
CASSPGSTDTQYF

SEQ ID NO: 270841 - protein, 13 aa, Homo sapiens
  CDR3 for alpha chain variable domain of TCR clone 135421 (TRAV34, TRAJ33)
CGADMNSNYQLIW

SEQ ID NO: 270842 - protein, 15 aa, Homo sapiens
  CDR3 for beta chain variable domain of TCR clone 135421 (TRBV7-2, TRBJ2-1)
CASTSASGDYNEQFF

SEQ ID NO: 270843 - protein, 13 aa, Homo sapiens
  CDR3 for alpha chain variable domain of TCR clone 135422 (TRAV6, TRAJ33)
CALPMDSNYQLIW

SEQ ID NO: 270844 - protein, 13 aa, Homo sapiens
  CDR3 for beta chain variable domain of TCR clone 135422 (TRBV4-2, TRBJ1-1)
CASSQAGNTEAFF

SEQ ID NO: 270845 - protein, 14 aa, Homo sapiens
  CDR3 for alpha chain variable domain of TCR clone 135423 (TRAV1-2, TRAJ8)
CAVREDKGFQKLVF

SEQ ID NO: 270846 - protein, 19 aa, Homo sapiens
  CDR3 for beta chain variable domain of TCR clone 135423 (TRBV25-1, TRBJ2-2)
CAILVYRVDRGRKTGELFF

SEQ ID NO: 270847 - protein, 13 aa, Homo sapiens
  CDR3 for alpha chain variable domain of TCR clone 135424 (TRAV13-2, TRAJ13)
CAERPGGYQKVTF

SEQ ID NO: 270848 - protein, 12 aa, Homo sapiens
  CDR3 for beta chain variable domain of TCR clone 135424 (TRBV5-4, TRBJ1-1)
CASSFGQTEAFF

SEQ ID NO: 270849 - protein, 12 aa, Homo sapiens
  CDR3 for alpha chain variable domain of TCR clone 135425 (TRAV13-1, TRAJ27)
CAAHTNAGKSTF

SEQ ID NO: 270850 - protein, 15 aa, Homo sapiens
  CDR3 for beta chain variable domain of TCR clone 135425 (TRBV20-1, TRBJ2-7)
CSARDRVSGMDEQYF

SEQ ID NO: 270851 - protein, 15 aa, Homo sapiens
  CDR3 for alpha chain variable domain of TCR clone 135426 (TRAV3, TRAJ3)
CAVRDRDSSASKIIF

SEQ ID NO: 270852 - protein, 12 aa, Homo sapiens
  CDR3 for beta chain variable domain of TCR clone 135426 (TRBV25-1, TRBJ1-2)
CASSGLQNGQGL

SEQ ID NO: 270853 - protein, 12 aa, Homo sapiens
  CDR3 for alpha chain variable domain of TCR clone 135427 (TRAV27, TRAJ34)
CAGAKNTDMLIF

SEQ ID NO: 270854 - protein, 13 aa, Homo sapiens
  CDR3 for beta chain variable domain of TCR clone 135427 (TRBV4-1, TRBJ2-1)
CASSQEVQYEQFF

SEQ ID NO: 270855 - protein, 11 aa, Homo sapiens
  CDR3 for alpha chain variable domain of TCR clone 135428 (TRAV12-3, TRAJ43)
CAMSVPNDMRF

SEQ ID NO: 270856 - protein, 13 aa, Homo sapiens
  CDR3 for beta chain variable domain of TCR clone 135428 (TRBV20-1, TRBJ1-1)
CSAPLGEGTEAFF

SEQ ID NO: 270857 - protein, 14 aa, Homo sapiens
  CDR3 for alpha chain variable domain of TCR clone 135429 (TRAV12-2, TRAJ13)
CAVKKTGGYQKVTF

SEQ ID NO: 270858 - protein, 15 aa, Homo sapiens
  CDR3 for beta chain variable domain of TCR clone 135429 (TRBV28, TRBJ2-5)
CASSPRWSYQETQYF

SEQ ID NO: 270859 - protein, 15 aa, Homo sapiens
  CDR3 for alpha chain variable domain of TCR clone 135430 (TRAV26-1, TRAJ29)
GIVRVEGSGNTPLVF

SEQ ID NO: 270860 - protein, 14 aa, Homo sapiens
  CDR3 for beta chain variable domain of TCR clone 135430 (TRBV25-1, TRBJ1-1)
CASTHLGGNTEAFF

SEQ ID NO: 270861 - protein, 17 aa, Homo sapiens
  CDR3 for alpha chain variable domain of TCR clone 135431 (TRAV35, TRAJ28)
CAGLQVYSGAGSYQLTV

SEQ ID NO: 270862 - protein, 15 aa, Homo sapiens
  CDR3 for beta chain variable domain of TCR clone 135431 (TRBV2, TRBJ1-2)
CASSEIGGANYGYTF

SEQ ID NO: 270863 - protein, 14 aa, Homo sapiens
  CDR3 for alpha chain variable domain of TCR clone 135432 (TRAV8-1, TRAJ34)
CAVNPSHNTDKLIF

SEQ ID NO: 270864 - protein, 16 aa, Homo sapiens
  CDR3 for beta chain variable domain of TCR clone 135432 (TRBV7-2, TRBJ2-6)
CASSLARRSGANILTF

SEQ ID NO: 270865 - protein, 14 aa, Homo sapiens
  CDR3 for alpha chain variable domain of TCR clone 135433 (TRAV12-2, TRAJ13)
CAVKKTGGYQKVTF

SEQ ID NO: 270866 - protein, 16 aa, Homo sapiens
  CDR3 for beta chain variable domain of TCR clone 135433 (TRBV4-1, TRBJ2-4)
CASSRLRGTAKNIQYF

SEQ ID NO: 270867 - protein, 11 aa, Homo sapiens
  CDR3 for alpha chain variable domain of TCR clone 135434 (TRAV35, TRAJ22)
CAGPGVGQLTF

SEQ ID NO: 270868 - protein, 12 aa, Homo sapiens
  CDR3 for beta chain variable domain of TCR clone 135434 (TRBV14, TRBJ2-7)
CASSLYKDEQYF

SEQ ID NO: 270869 - protein, 15 aa, Homo sapiens
  CDR3 for alpha chain variable domain of TCR clone 135435 (TRAV3, TRAJ22)
CAVRVRGGSARQLTF

SEQ ID NO: 270870 - protein, 15 aa, Homo sapiens
  CDR3 for beta chain variable domain of TCR clone 135435 (TRBV11-2, TRBJ1-1)
CASSSRSSLLLSLDK

SEQ ID NO: 270871 - protein, 14 aa, Homo sapiens
  CDR3 for alpha chain variable domain of TCR clone 135436 (TRAV21, TRAJ35)
CAVMPIGFGNVLHC

SEQ ID NO: 270872 - protein, 13 aa, Homo sapiens
  CDR3 for beta chain variable domain of TCR clone 135436 (TRBV27, TRBJ2-1)
CASRTLGVGEQFF

SEQ ID NO: 270873 - protein, 16 aa, Homo sapiens
  CDR3 for alpha chain variable domain of TCR clone 135437 (TRAV26-1, TRAJ37)
CIVRGDGSGNTGKLIF

SEQ ID NO: 270874 - protein, 13 aa, Homo sapiens
  CDR3 for beta chain variable domain of TCR clone 135437 (TRBV10-2, TRBJ2-7)
CASGASGGYEQYF

SEQ ID NO: 270875 - protein, 15 aa, Homo sapiens
  CDR3 for alpha chain variable domain of TCR clone 135438 (TRAV3, TRAJ23)
CAVRDRGNQGGKLIF

SEQ ID NO: 270876 - protein, 13 aa, Homo sapiens
  CDR3 for beta chain variable domain of TCR clone 135438 (TRBV7-2, TRBJ2-7)
CASSSPSGSEQYL

SEQ ID NO: 270877 - protein, 13 aa, Homo sapiens
  CDR3 for alpha chain variable domain of TCR clone 135439 (TRAV3, TRAJ21)
CAVREPAFNKFYF

SEQ ID NO: 270878 - protein, 12 aa, Homo sapiens
  CDR3 for beta chain variable domain of TCR clone 135439 (TRBV14, TRBJ2-5)
CASSQLKETQYF

SEQ ID NO: 270879 - protein, 14 aa, Homo sapiens
  CDR3 for alpha chain variable domain of TCR clone 135440 (TRAV1-1, TRAJ9)
CAVRGGNGGFKTIF

SEQ ID NO: 270880 - protein, 13 aa, Homo sapiens
  CDR3 for beta chain variable domain of TCR clone 135440 (TRBV7-3, TRBJ2-1)
CASSLDSYNEQFF

SEQ ID NO: 270881 - protein, 13 aa, Homo sapiens
  CDR3 for alpha chain variable domain of TCR clone 135441 (TRAV9-2, TRAJ53)
CALSGGSNYKLTF

SEQ ID NO: 270882 - protein, 12 aa, Homo sapiens
  CDR3 for beta chain variable domain of TCR clone 135441 (TRBV11-2, TRBJ2-5)
CASSLGQETQYF

SEQ ID NO: 270883 - protein, 18 aa, Homo sapiens
  CDR3 for alpha chain variable domain of TCR clone 135442 (TRAV21, TRAJ52)
CAVRPSPAGGTGSGKLTF

SEQ ID NO: 270884 - protein, 18 aa, Homo sapiens
  CDR3 for beta chain variable domain of TCR clone 135442 (TRBV6-6, TRBJ1-3)
CASSYSKWDSISGNTIYF

SEQ ID NO: 270885 - protein, 12 aa, Homo sapiens
  CDR3 for alpha chain variable domain of TCR clone 135443 (TRAV2, TRAJ31)
CAVEDYNARLMF

SEQ ID NO: 270886 - protein, 16 aa, Homo sapiens
  CDR3 for beta chain variable domain of TCR clone 135443 (TRBV10-3, TRBJ2-1)
CAISGVGDGGGGEQFF

SEQ ID NO: 270887 - protein, 17 aa, Homo sapiens
  CDR3 for alpha chain variable domain of TCR clone 135444 (TRAV8-6, TRAJ8)
CAVKEGIENTVFKKLVF

SEQ ID NO: 270888 - protein, 12 aa, Homo sapiens
  CDR3 for beta chain variable domain of TCR clone 135444 (TRBV19, TRBJ1-4)
CASKDWPGGLFF

SEQ ID NO: 270889 - protein, 12 aa, Homo sapiens
  CDR3 for alpha chain variable domain of TCR clone 135445 (TRAV22, TRAJ36)
CAVGTGANNLFF

SEQ ID NO: 270890 - protein, 17 aa, Homo sapiens
  CDR3 for beta chain variable domain of TCR clone 135445 (TRBV15, TRBJ1-4)
CATSRYGTGDPNEKPFF

SEQ ID NO: 270891 - protein, 17 aa, Homo sapiens
  CDR3 for alpha chain variable domain of TCR clone 135446 (TRAV4, TRAJ10)
CLVQRRKQTHLWDRHSA

SEQ ID NO: 270892 - protein, 16 aa, Homo sapiens
  CDR3 for beta chain variable domain of TCR clone 135446 (TRBV6-1, TRBJ2-1)
CASILRQGSSYNEQFF

SEQ ID NO: 270893 - protein, 14 aa, Homo sapiens
  CDR3 for alpha chain variable domain of TCR clone 135447 (TRAV17, TRAJ6)
CATNPAGGSYIPTF

SEQ ID NO: 270894 - protein, 13 aa, Homo sapiens
  CDR3 for beta chain variable domain of TCR clone 135447 (TRBV12-5, TRBJ2-3)
FASGDRQSDTQYF

SEQ ID NO: 270895 - protein, 17 aa, Homo sapiens
  CDR3 for alpha chain variable domain of TCR clone 135448 (TRAV23/DV6, TRAJ12)
CAAIDLGAMDSSYKLVF

SEQ ID NO: 270896 - protein, 12 aa, Homo sapiens
  CDR3 for beta chain variable domain of TCR clone 135448 (TRBV10-3, TRBJ2-2)
CAIRENTGELFF

SEQ ID NO: 270897 - protein, 15 aa, Homo sapiens
  CDR3 for alpha chain variable domain of TCR clone 135449 (TRAV10, TRAJ6)
CVVSGGSGGSYIPTF

SEQ ID NO: 270898 - protein, 15 aa, Homo sapiens
  CDR3 for beta chain variable domain of TCR clone 135449 (TRBV6-5, TRBJ2-1)
CASRGDFDSDNEQFF

SEQ ID NO: 270899 - protein, 14 aa, Homo sapiens
  CDR3 for alpha chain variable domain of TCR clone 135450 (TRAV35, TRAJ33)
CAGSSQDSNYQLIW

SEQ ID NO: 270900 - protein, 14 aa, Homo sapiens
  CDR3 for beta chain variable domain of TCR clone 135450 (TRBV7-3, TRBJ2-7)
CASSLKADSYEQYF

SEQ ID NO: 270901 - protein, 14 aa, Homo sapiens
  CDR3 for alpha chain variable domain of TCR clone 135451 (TRAV17, TRAJ35)
CATDRPGFGNVLHC

SEQ ID NO: 270902 - protein, 15 aa, Homo sapiens
  CDR3 for beta chain variable domain of TCR clone 135451 (TRBV28, TRBJ2-5)
CASSSGRVIQETRYF

SEQ ID NO: 270903 - protein, 15 aa, Homo sapiens
  CDR3 for alpha chain variable domain of TCR clone 135452 (TRAV13-1, TRAJ57)
QVPPLSQGGSEKLVF

SEQ ID NO: 270904 - protein, 14 aa, Homo sapiens
  CDR3 for beta chain variable domain of TCR clone 135452 (TRBV19, TRBJ2-1)
CASPTFVLSGEQFF

SEQ ID NO: 270905 - protein, 12 aa, Homo sapiens
  CDR3 for alpha chain variable domain of TCR clone 135453 (TRAV13-2, TRAJ23)
CAERQRGGKLIF

SEQ ID NO: 270906 - protein, 16 aa, Homo sapiens
  CDR3 for beta chain variable domain of TCR clone 135453 (TRBV12-5, TRBJ2-5)
CASGPRTSGNQETQYF

SEQ ID NO: 270907 - protein, 17 aa, Homo sapiens
  CDR3 for alpha chain variable domain of TCR clone 135454 (TRAV21, TRAJ52)
CCEAFPSGCTSYGKLTF

SEQ ID NO: 270908 - protein, 13 aa, Homo sapiens
  CDR3 for beta chain variable domain of TCR clone 135454 (TRBV19, TRBJ1-2)
CASSVPGQDGYTF

SEQ ID NO: 270909 - protein, 13 aa, Homo sapiens
  CDR3 for alpha chain variable domain of TCR clone 135455 (TRAV38-2/DV8, TRAJ34)
CAYRNYNTHKLIF

SEQ ID NO: 270910 - protein, 15 aa, Homo sapiens
  CDR3 for beta chain variable domain of TCR clone 135455 (TRBV20-1, TRBJ2-5)
CSAEGTGGLQETQYF

SEQ ID NO: 270911 - protein, 14 aa, Homo sapiens
  CDR3 for alpha chain variable domain of TCR clone 135456 (TRAV27, TRAJ45)
CAGAQEEVMTDSPL

SEQ ID NO: 270912 - protein, 13 aa, Homo sapiens
  CDR3 for beta chain variable domain of TCR clone 135456 (TRBV7-7, TRBJ2-5)
CASSRSGQETQYF

SEQ ID NO: 270913 - protein, 15 aa, Homo sapiens
  CDR3 for alpha chain variable domain of TCR clone 135457 (TRAV3, TRAJ9)
CAVRARNTGGFKTIF

SEQ ID NO: 270914 - protein, 15 aa, Homo sapiens
  CDR3 for beta chain variable domain of TCR clone 135457 (TRBV10-3, TRBJ2-1)
CAIRNGTSGHNEQFF

SEQ ID NO: 270915 - protein, 10 aa, Homo sapiens
  CDR3 for alpha chain variable domain of TCR clone 135458 (TRAV1-2, TRAJ20)
CALNDYKLIF

SEQ ID NO: 270916 - protein, 11 aa, Homo sapiens
  CDR3 for beta chain variable domain of TCR clone 135458 (TRBV29-1, TRBJ2-5)
CSEDRTGTQYF

SEQ ID NO: 270917 - protein, 13 aa, Homo sapiens
  CDR3 for alpha chain variable domain of TCR clone 135459 (TRAV12-1, TRAJ6)
CVVFPGGSYIPTF

SEQ ID NO: 270918 - protein, 14 aa, Homo sapiens
  CDR3 for beta chain variable domain of TCR clone 135459 (TRBV20-1, TRBJ2-1)
CSAMGQSSYNEQFF

SEQ ID NO: 270919 - protein, 15 aa, Homo sapiens
  CDR3 for alpha chain variable domain of TCR clone 135460 (TRAV3, TRAJ3)
CAVRDRDSSASKIIF

SEQ ID NO: 270920 - protein, 15 aa, Homo sapiens
  CDR3 for beta chain variable domain of TCR clone 135460 (TRBV29-1, TRBJ2-7)
CSVEFCDRGSYEQYF

SEQ ID NO: 270921 - protein, 16 aa, Homo sapiens
  CDR3 for alpha chain variable domain of TCR clone 135461 (TRAV8-2, TRAJ7)
CVLSEGPYYGNNRLAF

SEQ ID NO: 270922 - protein, 15 aa, Homo sapiens
  CDR3 for beta chain variable domain of TCR clone 135461 (TRBV27, TRBJ2-3)
CASSLGLAATDTQYF

SEQ ID NO: 270923 - protein, 12 aa, Homo sapiens
  CDR3 for alpha chain variable domain of TCR clone 135462 (TRAV13-1, TRAJ49)
CAASPMGNQFYF

SEQ ID NO: 270924 - protein, 14 aa, Homo sapiens
  CDR3 for beta chain variable domain of TCR clone 135462 (TRBV7-8, TRBJ2-7)
CASSFGTGGREQYF

SEQ ID NO: 270925 - protein, 17 aa, Homo sapiens
  CDR3 for alpha chain variable domain of TCR clone 135463 (TRAV3, TRAJ42)
CAVRDRDYGGSQGNLIF

SEQ ID NO: 270926 - protein, 13 aa, Homo sapiens
  CDR3 for beta chain variable domain of TCR clone 135463 (TRBV24-1, TRBJ2-2)
CATSDWSTGELFF

SEQ ID NO: 270927 - protein, 12 aa, Homo sapiens
  CDR3 for alpha chain variable domain of TCR clone 135464 (TRAV12-3, TRAJ17)
CAMTLTGNKLTF

SEQ ID NO: 270928 - protein, 14 aa, Homo sapiens
  CDR3 for beta chain variable domain of TCR clone 135464 (TRBV20-1, TRBJ2-7)
CSAWTALSSYEQYF

SEQ ID NO: 270929 - protein, 15 aa, Homo sapiens
  CDR3 for alpha chain variable domain of TCR clone 135465 (TRAV26-1, TRAJ29)
CIVRVEGSGNTPLVF

SEQ ID NO: 270930 - protein, 15 aa, Homo sapiens
  CDR3 for beta chain variable domain of TCR clone 135465 (TRBV11-2, TRBJ1-2)
CASSLEGVQRNGYTF

SEQ ID NO: 270931 - protein, 16 aa, Homo sapiens
  CDR3 for alpha chain variable domain of TCR clone 135466 (TRAV8-3, TRAJ22)
CAVDLLGPGSARQRTF

SEQ ID NO: 270932 - protein, 14 aa, Homo sapiens
  CDR3 for beta chain variable domain of TCR clone 135466 (TRBV11-2, TRBJ2-7)
CASSLELEGYEQYF

SEQ ID NO: 270933 - protein, 18 aa, Homo sapiens
  CDR3 for alpha chain variable domain of TCR clone 135467 (TRAV21, TRAJ52)
CAVRPSPAGGTSYGKLTF

SEQ ID NO: 270934 - protein, 16 aa, Homo sapiens
  CDR3 for beta chain variable domain of TCR clone 135467 (TRBV7-3, TRBJ2-1)
CASSLEVYRPYNEQFF

SEQ ID NO: 270935 - protein, 17 aa, Homo sapiens
  CDR3 for alpha chain variable domain of TCR clone 135468 (TRAV4, TRAJ18)
CLVGERSVGSTLGRLYF

SEQ ID NO: 270936 - protein, 14 aa, Homo sapiens
  CDR3 for beta chain variable domain of TCR clone 135468 (TRBV6-5, TRBJ1-2)
CASSYHGTGGGYTF

SEQ ID NO: 270937 - protein, 15 aa, Homo sapiens
  CDR3 for alpha chain variable domain of TCR clone 135469 (TRAV4, TRAJ39)
CLVGPNNNAGNMLTF

SEQ ID NO: 270938 - protein, 14 aa, Homo sapiens
  CDR3 for beta chain variable domain of TCR clone 135469 (TRBV19, TRBJ2-7)
CAINFRDTFTGMYF

SEQ ID NO: 270939 - protein, 15 aa, Homo sapiens
  CDR3 for alpha chain variable domain of TCR clone 135470 (TRAV23/DV6, TRAJ33)
CAASNSGGSNYQLIW

SEQ ID NO: 270940 - protein, 14 aa, Homo sapiens
  CDR3 for beta chain variable domain of TCR clone 135470 (TRBV7-2, TRBJ2-7)
CASSLYPGRYEQYF

SEQ ID NO: 270941 - protein, 11 aa, Homo sapiens
  CDR3 for alpha chain variable domain of TCR clone 135471 (TRAV12-3, TRAJ43)
CAMSVSNDIRF

SEQ ID NO: 270942 - protein, 13 aa, Homo sapiens
  CDR3 for beta chain variable domain of TCR clone 135471 (TRBV20-1, TRBJ1-1)
CSAPLGGGTEAFL

SEQ ID NO: 270943 - protein, 12 aa, Homo sapiens
  CDR3 for alpha chain variable domain of TCR clone 135472 (TRAV2, TRAJ10)
CASTGGGNKLTF

SEQ ID NO: 270944 - protein, 13 aa, Homo sapiens
  CDR3 for beta chain variable domain of TCR clone 135472 (TRBV12-4, TRBJ1-1)
CASSPGTGFEAFF

SEQ ID NO: 270945 - protein, 14 aa, Homo sapiens
  CDR3 for alpha chain variable domain of TCR clone 135473 (TRAV17, TRAJ34)
CATVPTYNTDKLIF

SEQ ID NO: 270946 - protein, 18 aa, Homo sapiens
  CDR3 for beta chain variable domain of TCR clone 135473 (TRBV23-1, TRBJ2-1)
TVSLRQRSEKWLKNEQFV

SEQ ID NO: 270947 - protein, 14 aa, Homo sapiens
  CDR3 for alpha chain variable domain of TCR clone 135474 (TRAV8-3, TRAJ4)
CAVGAAGGYNKLIF

SEQ ID NO: 270948 - protein, 16 aa, Homo sapiens
  CDR3 for beta chain variable domain of TCR clone 135474 (TRBV4-1, TRBJ2-3)
CASSQSTSGAEDTQYF

SEQ ID NO: 270949 - protein, 13 aa, Homo sapiens
  CDR3 for alpha chain variable domain of TCR clone 135475 (TRAV26-2, TRAJ57)
RILSRGGSEKLVF

SEQ ID NO: 270950 - protein, 16 aa, Homo sapiens
  CDR3 for beta chain variable domain of TCR clone 135475 (TRBV18, TRBJ1-5)
CASSPRTGGGNQPQHF

SEQ ID NO: 270951 - protein, 16 aa, Homo sapiens
  CDR3 for alpha chain variable domain of TCR clone 135476 (TRAV12-2, TRAJ18)
CAVTTDRGSTLGRLYF

SEQ ID NO: 270952 - protein, 14 aa, Homo sapiens
  CDR3 for beta chain variable domain of TCR clone 135476 (TRBV4-2, TRBJ1-5)
CAISQDSINQPQHF

SEQ ID NO: 270953 - protein, 15 aa, Homo sapiens
  CDR3 for alpha chain variable domain of TCR clone 135477 (TRAV8-1, TRAJ6)
CAVNANPGGSYIPTF

SEQ ID NO: 270954 - protein, 15 aa, Homo sapiens
  CDR3 for beta chain variable domain of TCR clone 135477 (TRBV20-1, TRBJ1-1)
CSASRGVTGNTEAFF

SEQ ID NO: 270955 - protein, 13 aa, Homo sapiens
  CDR3 for alpha chain variable domain of TCR clone 135478 (TRAV1-2, TRAJ34)
CAVGDRDTDKLIF

SEQ ID NO: 270956 - protein, 13 aa, Homo sapiens
  CDR3 for beta chain variable domain of TCR clone 135478 (TRBV29-1, TRBJ2-1)
CSVEGGRVNEQFF

SEQ ID NO: 270957 - protein, 12 aa, Homo sapiens
  CDR3 for alpha chain variable domain of TCR clone 135479 (TRAV8-3, TRAJ20)
CAVDFNDYKLSF

SEQ ID NO: 270958 - protein, 12 aa, Homo sapiens
  CDR3 for beta chain variable domain of TCR clone 135479 (TRBV12-4, TRBJ1-3)
CASRFSGNTIYF

SEQ ID NO: 270959 - protein, 12 aa, Homo sapiens
  CDR3 for alpha chain variable domain of TCR clone 135480 (TRAV13-2, TRAJ22)
CAERGSARQLTF

SEQ ID NO: 270960 - protein, 11 aa, Homo sapiens
  CDR3 for beta chain variable domain of TCR clone 135480 (TRBV28, TRBJ2-7)
CASIWDCEQYF

SEQ ID NO: 270961 - protein, 18 aa, Homo sapiens
  CDR3 for alpha chain variable domain of TCR clone 135481 (TRAV27, TRAJ36)
ASTSVQDPPKRGANNLFF

SEQ ID NO: 270962 - protein, 15 aa, Homo sapiens
  CDR3 for beta chain variable domain of TCR clone 135481 (TRBV18, TRBJ2-7)
CASSPASTPNYEQYF

SEQ ID NO: 270963 - protein, 14 aa, Homo sapiens
  CDR3 for alpha chain variable domain of TCR clone 135482 (TRAV35, TRAJ13)
CACSPSGGYQKVTF

SEQ ID NO: 270964 - protein, 17 aa, Homo sapiens
  CDR3 for beta chain variable domain of TCR clone 135482 (TRBV7-6, TRBJ2-5)
CASSPGLADPWGETQYF

SEQ ID NO: 270965 - protein, 18 aa, Homo sapiens
  CDR3 for alpha chain variable domain of TCR clone 135483 (TRAV26-2, TRAJ54)
CILRGVEVGIQGAQKLVF

SEQ ID NO: 270966 - protein, 16 aa, Homo sapiens
  CDR3 for beta chain variable domain of TCR clone 135483 (TRBV6-1, TRBJ2-5)
CASSETLDRGTETQYF

SEQ ID NO: 270967 - protein, 14 aa, Homo sapiens
  CDR3 for alpha chain variable domain of TCR clone 135484 (TRAV1-2, TRAJ16)
CAVNRFSDGQKLLC

SEQ ID NO: 270968 - protein, 12 aa, Homo sapiens
  CDR3 for beta chain variable domain of TCR clone 135484 (TRBV7-9, TRBJ2-7)
CASRTGFDEQYF

SEQ ID NO: 270969 - protein, 14 aa, Homo sapiens
  CDR3 for alpha chain variable domain of TCR clone 135485 (TRAV9-2, TRAJ39)
CALYIYNAGKMLTF

SEQ ID NO: 270970 - protein, 15 aa, Homo sapiens
  CDR3 for beta chain variable domain of TCR clone 135485 (TRBV2, TRBJ2-7)
CASSEGLARSYEQYF

SEQ ID NO: 270971 - protein, 16 aa, Homo sapiens
  CDR3 for alpha chain variable domain of TCR clone 135486 (TRAV26-1, TRAJ32)
CIVRTNYGGATNKLIF

SEQ ID NO: 270972 - protein, 15 aa, Homo sapiens
  CDR3 for beta chain variable domain of TCR clone 135486 (TRBV28, TRBJ2-3)
CASSPDRQGANTQYF

SEQ ID NO: 270973 - protein, 18 aa, Homo sapiens
  CDR3 for alpha chain variable domain of TCR clone 135487 (TRAV13-1, TRAJ52)
CAAKNPNAGGTSYLKLTF

SEQ ID NO: 270974 - protein, 15 aa, Homo sapiens
  CDR3 for beta chain variable domain of TCR clone 135487 (TRBV6-1, TRBJ2-3)
CASSERGGITDTQYF

SEQ ID NO: 270975 - protein, 11 aa, Homo sapiens
  CDR3 for alpha chain variable domain of TCR clone 135488 (TRAV3, TRAJ21)
CAVGNFNKFYF

SEQ ID NO: 270976 - protein, 12 aa, Homo sapiens
  CDR3 for beta chain variable domain of TCR clone 135488 (TRBV7-8, TRBJ2-7)
CASSLGDREQYF

SEQ ID NO: 270977 - protein, 12 aa, Homo sapiens
  CDR3 for alpha chain variable domain of TCR clone 135489 (TRAV8-6, TRAJ11)
CAVSSGYSTLTF

SEQ ID NO: 270978 - protein, 11 aa, Homo sapiens
  CDR3 for beta chain variable domain of TCR clone 135489 (TRBV20-1, TRBJ1-5)
CSAQGDQHQHS

SEQ ID NO: 270979 - protein, 10 aa, Homo sapiens
  CDR3 for alpha chain variable domain of TCR clone 135490 (TRAV1-2, TRAJ20)
CALNDYKLSF

SEQ ID NO: 270980 - protein, 13 aa, Homo sapiens
  CDR3 for beta chain variable domain of TCR clone 135490 (TRBV7-9, TRBJ1-2)
CASSSKQNYGYTF

SEQ ID NO: 270981 - protein, 13 aa, Homo sapiens
  CDR3 for alpha chain variable domain of TCR clone 135491 (TRAV8-4, TRAJ36)
CAVSVAGANNLFF

SEQ ID NO: 270982 - protein, 15 aa, Homo sapiens
  CDR3 for beta chain variable domain of TCR clone 135491 (TRBV7-2, TRBJ2-5)
CASSLGGRGVETQYF

SEQ ID NO: 270983 - protein, 18 aa, Homo sapiens
  CDR3 for alpha chain variable domain of TCR clone 135492 (TRAV21, TRAJ52)
CAVRPSPAGGTSYGKLTF

SEQ ID NO: 270984 - protein, 15 aa, Homo sapiens
  CDR3 for beta chain variable domain of TCR clone 135492 (TRBV9, TRBJ1-2)
CASSVVGQANYGYTF

SEQ ID NO: 270985 - protein, 15 aa, Homo sapiens
  CDR3 for alpha chain variable domain of TCR clone 135493 (TRAV8-3, TRAJ45)
CASSYSGGGADGLTF

SEQ ID NO: 270986 - protein, 14 aa, Homo sapiens
  CDR3 for beta chain variable domain of TCR clone 135493 (TRBV5-1, TRBJ1-1)
CASSLERVGTEAFF

SEQ ID NO: 270987 - protein, 11 aa, Homo sapiens
  CDR3 for alpha chain variable domain of TCR clone 135494 (TRAV13-1, TRAJ20)
CAASNDYKLSF

SEQ ID NO: 270988 - protein, 13 aa, Homo sapiens
  CDR3 for beta chain variable domain of TCR clone 135494 (TRBV7-9, TRBJ1-2)
CASSLKQNYGYTF

SEQ ID NO: 270989 - protein, 16 aa, Homo sapiens
  CDR3 for alpha chain variable domain of TCR clone 135495 (TRAV1-2, TRAJ10)
CAVRGVLTGGGNKLTF

SEQ ID NO: 270990 - protein, 13 aa, Homo sapiens
  CDR3 for beta chain variable domain of TCR clone 135495 (TRBV27, TRBJ2-7)
CASSFVSSYEQYF

SEQ ID NO: 270991 - protein, 14 aa, Homo sapiens
  CDR3 for alpha chain variable domain of TCR clone 135496 (TRAV20, TRAJ56)
CAVQFGGVNSKLAF

SEQ ID NO: 270992 - protein, 14 aa, Homo sapiens
  CDR3 for beta chain variable domain of TCR clone 135496 (TRBV20-1, TRBJ2-7)
CSAKRGRSSYEQYF

SEQ ID NO: 270993 - protein, 15 aa, Homo sapiens
  CDR3 for alpha chain variable domain of TCR clone 135497 (TRAV3, TRAJ3)
CAVRDRDSSASKIIF

SEQ ID NO: 270994 - protein, 11 aa, Homo sapiens
  CDR3 for beta chain variable domain of TCR clone 135497 (TRBV11-2, TRBJ2-2)
CASSLPGELFF

SEQ ID NO: 270995 - protein, 14 aa, Homo sapiens
  CDR3 for alpha chain variable domain of TCR clone 135498 (TRAV16, TRAJ39)
CALSKNNAGNMLTF

SEQ ID NO: 270996 - protein, 16 aa, Homo sapiens
  CDR3 for beta chain variable domain of TCR clone 135498 (TRBV6-6, TRBJ2-1)
CASSYPFSGSYNEQFF

SEQ ID NO: 270997 - protein, 14 aa, Homo sapiens
  CDR3 for alpha chain variable domain of TCR clone 135499 (TRAV12-2, TRAJ40)
CAVKIPSGTYKYIF

SEQ ID NO: 270998 - protein, 13 aa, Homo sapiens
  CDR3 for beta chain variable domain of TCR clone 135499 (TRBV6-1, TRBJ2-1)
CASCSLSGNEQFF

SEQ ID NO: 270999 - protein, 13 aa, Homo sapiens
  CDR3 for alpha chain variable domain of TCR clone 135500 (TRAV4, TRAJ21)
CLVGAYNFNKFYF

SEQ ID NO: 271000 - protein, 16 aa, Homo sapiens
  CDR3 for beta chain variable domain of TCR clone 135500 (TRBV7-9, TRBJ1-2)
CASSLGFSSGEDGYTF

SEQ ID NO: 271001 - protein, 12 aa, Homo sapiens
  CDR3 for alpha chain variable domain of TCR clone 135501 (TRAV12-3, TRAJ42)
CAPGGSQGNLIF

SEQ ID NO: 271002 - protein, 13 aa, Homo sapiens
  CDR3 for beta chain variable domain of TCR clone 135501 (TRBV5-6, TRBJ2-6)
CASTSSGANDLTF

SEQ ID NO: 271003 - protein, 13 aa, Homo sapiens
  CDR3 for alpha chain variable domain of TCR clone 135502 (TRAV1-2, TRAJ20)
CAVRDGNDYKLSF

SEQ ID NO: 271004 - protein, 15 aa, Homo sapiens
  CDR3 for beta chain variable domain of TCR clone 135502 (TRBV7-9, TRBJ1-6)
CASSSPGRGNSPLHF

SEQ ID NO: 271005 - protein, 18 aa, Homo sapiens
  CDR3 for alpha chain variable domain of TCR clone 135503 (TRAV21, TRAJ52)
CAVRPSPAGGTSYGKLTF

SEQ ID NO: 271006 - protein, 13 aa, Homo sapiens
  CDR3 for beta chain variable domain of TCR clone 135503 (TRBV4-1, TRBJ2-2)
CAGSQENTGELFF

SEQ ID NO: 271007 - protein, 14 aa, Homo sapiens
  CDR3 for alpha chain variable domain of TCR clone 135504 (TRAV23/DV6, TRAJ27)
CAASRDTNAGKSPF

SEQ ID NO: 271008 - protein, 13 aa, Homo sapiens
  CDR3 for beta chain variable domain of TCR clone 135504 (TRBV20-1, TRBJ1-5)
CSASGRGNQPQHF

SEQ ID NO: 271009 - protein, 11 aa, Homo sapiens
  CDR3 for alpha chain variable domain of TCR clone 135505 (TRAV1-1, TRAJ23)
CAVRQGGTLIF

SEQ ID NO: 271010 - protein, 20 aa, Homo sapiens
  CDR3 for beta chain variable domain of TCR clone 135505 (TRBV7-8, TRBJ2-2)
CASSHSFPGPTIHITGELFF

SEQ ID NO: 271011 - protein, 12 aa, Homo sapiens
  CDR3 for alpha chain variable domain of TCR clone 135506 (TRAV1-1, TRAJ30)
CAVRGRDDKIIF

SEQ ID NO: 271012 - protein, 13 aa, Homo sapiens
  CDR3 for beta chain variable domain of TCR clone 135506 (TRBV11-3, TRBJ2-1)
CASSSRRVDEQFF

SEQ ID NO: 271013 - protein, 13 aa, Homo sapiens
  CDR3 for alpha chain variable domain of TCR clone 135507 (TRAV1-2, TRAJ9)
CAALNTGGFKTIF

SEQ ID NO: 271014 - protein, 12 aa, Homo sapiens
  CDR3 for beta chain variable domain of TCR clone 135507 (TRBV5-1, TRBJ2-5)
CASSLGLETQYF

SEQ ID NO: 271015 - protein, 17 aa, Homo sapiens
  CDR3 for alpha chain variable domain of TCR clone 135508 (TRAV3, TRAJ42)
CAVRDRDYGGSQGNLIF

SEQ ID NO: 271016 - protein, 15 aa, Homo sapiens
  CDR3 for beta chain variable domain of TCR clone 135508 (TRBV28, TRBJ1-3)
CASSMGWASGNTIYF

SEQ ID NO: 271017 - protein, 13 aa, Homo sapiens
  CDR3 for alpha chain variable domain of TCR clone 135509 (TRAV21, TRAJ27)
CAARPGNAGKSTC

SEQ ID NO: 271018 - protein, 15 aa, Homo sapiens
  CDR3 for beta chain variable domain of TCR clone 135509 (TRBV6-3, TRBJ2-7)
CASSSPGTVVYEQYF

SEQ ID NO: 271019 - protein, 13 aa, Homo sapiens
  CDR3 for alpha chain variable domain of TCR clone 135510 (TRAV8-3, TRAJ44)
CAGVPGTASKLTF

SEQ ID NO: 271020 - protein, 14 aa, Homo sapiens
  CDR3 for beta chain variable domain of TCR clone 135510 (TRBV11-2, TRBJ2-3)
CASSRLARTDTQYF

SEQ ID NO: 271021 - protein, 15 aa, Homo sapiens
  CDR3 for alpha chain variable domain of TCR clone 135511 (TRAV1-2, TRAJ28)
CAVQDSGAGSYQLTF

SEQ ID NO: 271022 - protein, 15 aa, Homo sapiens
  CDR3 for beta chain variable domain of TCR clone 135511 (TRBV11-3, TRBJ2-3)
CASLKDGREGDTQYF

SEQ ID NO: 271023 - protein, 11 aa, Homo sapiens
  CDR3 for alpha chain variable domain of TCR clone 135512 (TRAV35, TRAJ34)
CWARNTDKLIF

SEQ ID NO: 271024 - protein, 12 aa, Homo sapiens
  CDR3 for beta chain variable domain of TCR clone 135512 (TRBV12-5, TRBJ2-5)
CASGQGVENQYF

SEQ ID NO: 271025 - protein, 12 aa, Homo sapiens
  CDR3 for alpha chain variable domain of TCR clone 135513 (TRAV16, TRAJ12)
CALEDSSYKLIF

SEQ ID NO: 271026 - protein, 14 aa, Homo sapiens
  CDR3 for beta chain variable domain of TCR clone 135513 (TRBV12-4, TRBJ1-5)
CASSPTGPRGGMYF

SEQ ID NO: 271027 - protein, 16 aa, Homo sapiens
  CDR3 for alpha chain variable domain of TCR clone 135514 (TRAV12-2, TRAJ40)
CAVIRGGTSGTYKYIF

SEQ ID NO: 271028 - protein, 16 aa, Homo sapiens
  CDR3 for beta chain variable domain of TCR clone 135514 (TRBV7-9, TRBJ2-1)
CASSDEAGGSYNEQFF

SEQ ID NO: 271029 - protein, 11 aa, Homo sapiens
  CDR3 for alpha chain variable domain of TCR clone 135515 (TRAV12-1, TRAJ21)
CVVYNFNKFYF

SEQ ID NO: 271030 - protein, 14 aa, Homo sapiens
  CDR3 for beta chain variable domain of TCR clone 135515 (TRBV27, TRBJ2-5)
CASSSLKGWETQYF

SEQ ID NO: 271031 - protein, 14 aa, Homo sapiens
  CDR3 for alpha chain variable domain of TCR clone 135516 (TRAV1-1, TRAJ23)
CAVSIYNQGGKLIF

SEQ ID NO: 271032 - protein, 15 aa, Homo sapiens
  CDR3 for beta chain variable domain of TCR clone 135516 (TRBV9, TRBJ1-6)
CASSVAGTGDSPLHV

SEQ ID NO: 271033 - protein, 13 aa, Homo sapiens
  CDR3 for alpha chain variable domain of TCR clone 135517 (TRAV26-1, TRAJ48)
CIVRVVGDEKLTF

SEQ ID NO: 271034 - protein, 19 aa, Homo sapiens
  CDR3 for beta chain variable domain of TCR clone 135517 (TRBV11-3, TRBJ2-2)
CASSTRAGAKTTNTGELFF

SEQ ID NO: 271035 - protein, 15 aa, Homo sapiens
  CDR3 for alpha chain variable domain of TCR clone 135518 (TRAV27, TRAJ38)
CAARRNAGNDRKLSW

SEQ ID NO: 271036 - protein, 13 aa, Homo sapiens
  CDR3 for beta chain variable domain of TCR clone 135518 (TRBV12-5, TRBJ2-3)
CASGDRQSDTQYF

SEQ ID NO: 271037 - protein, 11 aa, Homo sapiens
  CDR3 for alpha chain variable domain of TCR clone 135519 (TRAV1-2, TRAJ31)
CAVNNNARLMF

SEQ ID NO: 271038 - protein, 12 aa, Homo sapiens
  CDR3 for beta chain variable domain of TCR clone 135519 (TRBV2, TRBJ2-1)
CASRPGPREQFF

SEQ ID NO: 271039 - protein, 12 aa, Homo sapiens
  CDR3 for alpha chain variable domain of TCR clone 135520 (TRAV8-6, TRAJ11)
CAVSEGYSTLTF

SEQ ID NO: 271040 - protein, 17 aa, Homo sapiens
  CDR3 for beta chain variable domain of TCR clone 135520 (TRBV15, TRBJ1-2)
CATSGREIDVVNYGYTF

SEQ ID NO: 271041 - protein, 12 aa, Homo sapiens
  CDR3 for alpha chain variable domain of TCR clone 135521 (TRAV12-1, TRAJ16)
CVVFRDGQKLLF

SEQ ID NO: 271042 - protein, 14 aa, Homo sapiens
  CDR3 for beta chain variable domain of TCR clone 135521 (TRBV19, TRBJ2-1)
CARGARSFQWEQFF

SEQ ID NO: 271043 - protein, 12 aa, Homo sapiens
  CDR3 for alpha chain variable domain of TCR clone 135522 (TRAV13-1, TRAJ15)
CAASQAGTALIF

SEQ ID NO: 271044 - protein, 18 aa, Homo sapiens
  CDR3 for beta chain variable domain of TCR clone 135522 (TRBV7-9, TRBJ2-3)
CASSLPINGRISTDTQYF

SEQ ID NO: 271045 - protein, 14 aa, Homo sapiens
  CDR3 for alpha chain variable domain of TCR clone 135523 (TRAV12-2, TRAJ13)
RAVKKTGGYQKVTF

SEQ ID NO: 271046 - protein, 14 aa, Homo sapiens
  CDR3 for beta chain variable domain of TCR clone 135523 (TRBV10-3, TRBJ2-1)
CAISSDLAYNEQFF

SEQ ID NO: 271047 - protein, 11 aa, Homo sapiens
  CDR3 for alpha chain variable domain of TCR clone 135524 (TRAV4, TRAJ31)
CLVGDKARLMF

SEQ ID NO: 271048 - protein, 16 aa, Homo sapiens
  CDR3 for beta chain variable domain of TCR clone 135524 (TRBV6-3, TRBJ2-2)
CASRTLAGGSTGELFF

SEQ ID NO: 271049 - protein, 15 aa, Homo sapiens
  CDR3 for alpha chain variable domain of TCR clone 135525 (TRAV17, TRAJ57)
CATGPSQVGSEKLVF

SEQ ID NO: 271050 - protein, 13 aa, Homo sapiens
  CDR3 for beta chain variable domain of TCR clone 135525 (TRBV27, TRBJ1-4)
CASSLMGDEKLFF

SEQ ID NO: 271051 - protein, 12 aa, Homo sapiens
  CDR3 for alpha chain variable domain of TCR clone 135526 (TRAV35, TRAJ31)
CAAASNNARLMF

SEQ ID NO: 271052 - protein, 14 aa, Homo sapiens
  CDR3 for beta chain variable domain of TCR clone 135526 (TRBV2, TRBJ2-2)
CASSLFGGNGDLFF

SEQ ID NO: 271053 - protein, 21 aa, Homo sapiens
  CDR3 for alpha chain variable domain of TCR clone 135527 (TRAV13-1, TRAJ26)
SLHITETQPEDSAVYFYAIVF

SEQ ID NO: 271054 - protein, 15 aa, Homo sapiens
  CDR3 for beta chain variable domain of TCR clone 135527 (TRBV12-4, TRBJ2-1)
CASSLLGRTYNEQFF

SEQ ID NO: 271055 - protein, 17 aa, Homo sapiens
  CDR3 for alpha chain variable domain of TCR clone 135528 (TRAV3, TRAJ7)
CAVRDMSPLEGTTDSLL

SEQ ID NO: 271056 - protein, 14 aa, Homo sapiens
  CDR3 for beta chain variable domain of TCR clone 135528 (TRBV7-8, TRBJ2-3)
CASSLEAGTDTQYF

SEQ ID NO: 271057 - protein, 13 aa, Homo sapiens
  CDR3 for alpha chain variable domain of TCR clone 135529 (TRAV17, TRAJ40)
CATAPGGTYTYIF

SEQ ID NO: 271058 - protein, 12 aa, Homo sapiens
  CDR3 for beta chain variable domain of TCR clone 135529 (TRBV2, TRBJ1-5)
CASSENRTPQHF

SEQ ID NO: 271059 - protein, 20 aa, Homo sapiens
  CDR3 for alpha chain variable domain of TCR clone 135530 (TRAV1-2, TRAJ34)
LLKELQMKDSASPNTDKLIF

SEQ ID NO: 271060 - protein, 12 aa, Homo sapiens
  CDR3 for beta chain variable domain of TCR clone 135530 (TRBV7-9, TRBJ2-7)
CASSLEGYEQYF

SEQ ID NO: 271061 - protein, 14 aa, Homo sapiens
  CDR3 for alpha chain variable domain of TCR clone 135531 (TRAV2, TRAJ22)
CAVGRGGSARQLTF

SEQ ID NO: 271062 - protein, 13 aa, Homo sapiens
  CDR3 for beta chain variable domain of TCR clone 135531 (TRBV12-5, TRBJ2-3)
CASGDRQSDTQYF

SEQ ID NO: 271063 - protein, 14 aa, Homo sapiens
  CDR3 for alpha chain variable domain of TCR clone 135532 (TRAV30, TRAJ44)
CGTESAGTASKLTF

SEQ ID NO: 271064 - protein, 14 aa, Homo sapiens
  CDR3 for beta chain variable domain of TCR clone 135532 (TRBV11-2, TRBJ1-5)
CASSLDRGRQPQHF

SEQ ID NO: 271065 - protein, 14 aa, Homo sapiens
  CDR3 for alpha chain variable domain of TCR clone 135533 (TRAV16, TRAJ22)
CALRGQGSARQLTF

SEQ ID NO: 271066 - protein, 14 aa, Homo sapiens
  CDR3 for beta chain variable domain of TCR clone 135533 (TRBV7-2, TRBJ1-1)
CASSFLTGTTEAFF

SEQ ID NO: 271067 - protein, 15 aa, Homo sapiens
  CDR3 for alpha chain variable domain of TCR clone 135534 (TRAV38-2/DV8, TRAJ47)
CAYRSAKGYGNKLGF

SEQ ID NO: 271068 - protein, 15 aa, Homo sapiens
  CDR3 for beta chain variable domain of TCR clone 135534 (TRBV6-6, TRBJ2-7)
CASSYSYGGSYEQYF

SEQ ID NO: 271069 - protein, 12 aa, Homo sapiens
  CDR3 for alpha chain variable domain of TCR clone 135535 (TRAV21, TRAJ49)
CAVNDGGNQFYF

SEQ ID NO: 271070 - protein, 13 aa, Homo sapiens
  CDR3 for beta chain variable domain of TCR clone 135535 (TRBV15, TRBJ1-2)
CATSMTANYGYTF

SEQ ID NO: 271071 - protein, 16 aa, Homo sapiens
  CDR3 for alpha chain variable domain of TCR clone 135536 (TRAV20, TRAJ22)
CALQASSSGSARQLTF

SEQ ID NO: 271072 - protein, 16 aa, Homo sapiens
  CDR3 for beta chain variable domain of TCR clone 135536 (TRBV20-1, TRBJ1-5)
CSASRGTGYSNQPQHF

SEQ ID NO: 271073 - protein, 11 aa, Homo sapiens
  CDR3 for alpha chain variable domain of TCR clone 135537 (TRAV41, TRAJ49)
CAVRSRNQFYF

SEQ ID NO: 271074 - protein, 15 aa, Homo sapiens
  CDR3 for beta chain variable domain of TCR clone 135537 (TRBV12-4, TRBJ2-5)
CARSFSSGGGETQYF

SEQ ID NO: 271075 - protein, 14 aa, Homo sapiens
  CDR3 for alpha chain variable domain of TCR clone 135538 (TRAV26-1, TRAJ39)
CILRGSRAGNMLTF

SEQ ID NO: 271076 - protein, 15 aa, Homo sapiens
  CDR3 for beta chain variable domain of TCR clone 135538 (TRBV7-9, TRBJ1-5)
CASSQGHQPNQPQHF

SEQ ID NO: 271077 - protein, 20 aa, Homo sapiens
  CDR3 for alpha chain variable domain of TCR clone 135539 (TRAV26-1, TRAJ42)
CCVLLHRQTYYGGSQGNLIC

SEQ ID NO: 271078 - protein, 16 aa, Homo sapiens
  CDR3 for beta chain variable domain of TCR clone 135539 (TRBV7-3, TRBJ2-2)
WASSLKRGTLSGELFF

SEQ ID NO: 271079 - protein, 13 aa, Homo sapiens
  CDR3 for alpha chain variable domain of TCR clone 135540 (TRAV1-2, TRAJ12)
CAVSMDSSYKLIF

SEQ ID NO: 271080 - protein, 16 aa, Homo sapiens
  CDR3 for beta chain variable domain of TCR clone 135540 (TRBV4-3, TRBJ2-1)
CASSPALDRGVNEQFF

SEQ ID NO: 271081 - protein, 11 aa, Homo sapiens
  CDR3 for alpha chain variable domain of TCR clone 135541 (TRAV1-2, TRAJ40)
CAVPGTYKYIF

SEQ ID NO: 271082 - protein, 15 aa, Homo sapiens
  CDR3 for beta chain variable domain of TCR clone 135541 (TRBV5-1, TRBJ2-1)
CASSPPRAPYNEQFF

SEQ ID NO: 271083 - protein, 13 aa, Homo sapiens
  CDR3 for alpha chain variable domain of TCR clone 135542 (TRAV2, TRAJ40)
CAVVTSGTYKYIF

SEQ ID NO: 271084 - protein, 15 aa, Homo sapiens
  CDR3 for beta chain variable domain of TCR clone 135542 (TRBV5-1, TRBJ2-3)
CASSSTSGSTDTQYF

SEQ ID NO: 271085 - protein, 16 aa, Homo sapiens
  CDR3 for alpha chain variable domain of TCR clone 135543 (TRAV30, TRAJ24)
CGAEIVDANSWGKFQF

SEQ ID NO: 271086 - protein, 12 aa, Homo sapiens
  CDR3 for beta chain variable domain of TCR clone 135543 (TRBV11-2, TRBJ2-1)
CASSPGNNEQFF

SEQ ID NO: 271087 - protein, 12 aa, Homo sapiens
  CDR3 for alpha chain variable domain of TCR clone 135544 (TRAV13-1, TRAJ4)
CASKGGYNKLIF

SEQ ID NO: 271088 - protein, 15 aa, Homo sapiens
  CDR3 for beta chain variable domain of TCR clone 135544 (TRBV6-3, TRBJ2-7)
CASSSPGTVFYEQYF

SEQ ID NO: 271089 - protein, 15 aa, Homo sapiens
  CDR3 for alpha chain variable domain of TCR clone 135545 (TRAV38-1, TRAJ57)
CAFMDSQGGSSKLVF

SEQ ID NO: 271090 - protein, 16 aa, Homo sapiens
  CDR3 for beta chain variable domain of TCR clone 135545 (TRBV10-3, TRBJ2-1)
CAIRGGGRGDYNEQFF

SEQ ID NO: 271091 - protein, 14 aa, Homo sapiens
  CDR3 for alpha chain variable domain of TCR clone 135546 (TRAV12-2, TRAJ13)
CAVKKTGGYQKVTF

SEQ ID NO: 271092 - protein, 17 aa, Homo sapiens
  CDR3 for beta chain variable domain of TCR clone 135546 (TRBV10-3, TRBJ2-4)
CTSVPSVNKGSKNIQYF

SEQ ID NO: 271093 - protein, 12 aa, Homo sapiens
  CDR3 for alpha chain variable domain of TCR clone 135547 (TRAV8-3, TRAJ26)
CAGDNYGQNIVF

SEQ ID NO: 271094 - protein, 12 aa, Homo sapiens
  CDR3 for beta chain variable domain of TCR clone 135547 (TRBV11-2, TRBJ2-2)
CASSLAGGELFF

SEQ ID NO: 271095 - protein, 21 aa, Homo sapiens
  CDR3 for alpha chain variable domain of TCR clone 135548 (TRAV12-1, TRAJ32)
SSVIQPPTSMNYGGATNKTIF

SEQ ID NO: 271096 - protein, 15 aa, Homo sapiens
  CDR3 for beta chain variable domain of TCR clone 135548 (TRBV7-9, TRBJ2-2)
CASGPLDTFPGELFF

SEQ ID NO: 271097 - protein, 14 aa, Homo sapiens
  CDR3 for alpha chain variable domain of TCR clone 135549 (TRAV2, TRAJ37)
CAVEDQGNTGKLIF

SEQ ID NO: 271098 - protein, 14 aa, Homo sapiens
  CDR3 for beta chain variable domain of TCR clone 135549 (TRBV18, TRBJ2-1)
CASSPQGRLNEQFF

SEQ ID NO: 271099 - protein, 14 aa, Homo sapiens
  CDR3 for alpha chain variable domain of TCR clone 135550 (TRAV29/DV5, TRAJ45)
CAASFRGGADGLTF

SEQ ID NO: 271100 - protein, 11 aa, Homo sapiens
  CDR3 for beta chain variable domain of TCR clone 135550 (TRBV11-2, TRBJ2-2)
CASSLSGELFF

SEQ ID NO: 271101 - protein, 14 aa, Homo sapiens
  CDR3 for alpha chain variable domain of TCR clone 135551 (TRAV16, TRAJ38)
CALRRAGNNRKLIW

SEQ ID NO: 271102 - protein, 13 aa, Homo sapiens
  CDR3 for beta chain variable domain of TCR clone 135551 (TRBV19, TRBJ1-1)
CASSIVGDTEAFF

SEQ ID NO: 271103 - protein, 17 aa, Homo sapiens
  CDR3 for alpha chain variable domain of TCR clone 135552 (TRAV13-1, TRAJ52)
CAASSGAGGTSYGKLTF

SEQ ID NO: 271104 - protein, 13 aa, Homo sapiens
  CDR3 for beta chain variable domain of TCR clone 135552 (TRBV4-1, TRBJ2-1)
CASSQAGGDEQFF

SEQ ID NO: 271105 - protein, 14 aa, Homo sapiens
  CDR3 for alpha chain variable domain of TCR clone 135553 (TRAV26-1, TRAJ38)
CIADNAGNNRKLIW

SEQ ID NO: 271106 - protein, 14 aa, Homo sapiens
  CDR3 for beta chain variable domain of TCR clone 135553 (TRBV20-1, TRBJ1-1)
CSAQTRIGGTESFF

SEQ ID NO: 271107 - protein, 14 aa, Homo sapiens
  CDR3 for alpha chain variable domain of TCR clone 135554 (TRAV16, TRAJ48)
CALTPGFGNEKLTI

SEQ ID NO: 271108 - protein, 14 aa, Homo sapiens
  CDR3 for beta chain variable domain of TCR clone 135554 (TRBV7-2, TRBJ2-7)
CASSSISGFSEQYF

SEQ ID NO: 271109 - protein, 14 aa, Homo sapiens
  CDR3 for alpha chain variable domain of TCR clone 135555 (TRAV13-1, TRAJ35)
CAASKGVFGNVLHC

SEQ ID NO: 271110 - protein, 13 aa, Homo sapiens
  CDR3 for beta chain variable domain of TCR clone 135555 (TRBV7-3, TRBJ1-1)
CASSQDWGAKAFF

SEQ ID NO: 271111 - protein, 14 aa, Homo sapiens
  CDR3 for alpha chain variable domain of TCR clone 135556 (TRAV1-2, TRAJ16)
CAVNRFSDGQKLLF

SEQ ID NO: 271112 - protein, 17 aa, Homo sapiens
  CDR3 for beta chain variable domain of TCR clone 135556 (TRBV28, TRBJ2-1)
CASSSARQALTYNEQFF

SEQ ID NO: 271113 - protein, 12 aa, Homo sapiens
  CDR3 for alpha chain variable domain of TCR clone 135557 (TRAV29/DV5, TRAJ15)
CASNQAGTALIF

SEQ ID NO: 271114 - protein, 15 aa, Homo sapiens
  CDR3 for beta chain variable domain of TCR clone 135557 (TRBV11-2, TRBJ2-2)
CVSSSDRVNAGELFF

SEQ ID NO: 271115 - protein, 13 aa, Homo sapiens
  CDR3 for alpha chain variable domain of TCR clone 135558 (TRAV3, TRAJ21)
CAVREPDFNKFYF

SEQ ID NO: 271116 - protein, 16 aa, Homo sapiens
  CDR3 for beta chain variable domain of TCR clone 135558 (TRBV6-5, TRBJ2-1)
CASSYSNSGWGNEQFF

SEQ ID NO: 271117 - protein, 23 aa, Homo sapiens
  CDR3 for alpha chain variable domain of TCR clone 135559 (TRAV12-2, TRAJ36)
SLLIRDSQPSDSATLERANNLFF

SEQ ID NO: 271118 - protein, 14 aa, Homo sapiens
  CDR3 for beta chain variable domain of TCR clone 135559 (TRBV7-2, TRBJ2-7)
CASSPKTSFYEQYF

SEQ ID NO: 271119 - protein, 14 aa, Homo sapiens
  CDR3 for alpha chain variable domain of TCR clone 135560 (TRAV16, TRAJ15)
CALSGAQAGTALIF

SEQ ID NO: 271120 - protein, 12 aa, Homo sapiens
  CDR3 for beta chain variable domain of TCR clone 135560 (TRBV18, TRBJ2-5)
CASSPSKETQYF

SEQ ID NO: 271121 - protein, 12 aa, Homo sapiens
  CDR3 for alpha chain variable domain of TCR clone 135561 (TRAV12-1, TRAJ34)
CVVAGATYKLIF

SEQ ID NO: 271122 - protein, 16 aa, Homo sapiens
  CDR3 for beta chain variable domain of TCR clone 135561 (TRBV7-2, TRBJ1-2)
CASSSNQDRRGHGYTF

SEQ ID NO: 271123 - protein, 14 aa, Homo sapiens
  CDR3 for alpha chain variable domain of TCR clone 135562 (TRAV13-1, TRAJ44)
CAAKATGTASKLTW

SEQ ID NO: 271124 - protein, 17 aa, Homo sapiens
  CDR3 for beta chain variable domain of TCR clone 135562 (TRBV7-3, TRBJ2-3)
CASSLMKRMRGADTQYF

SEQ ID NO: 271125 - protein, 18 aa, Homo sapiens
  CDR3 for alpha chain variable domain of TCR clone 135563 (TRAV13-1, TRAJ52)
CAAKNPNAGGTSYGKLTF

SEQ ID NO: 271126 - protein, 15 aa, Homo sapiens
  CDR3 for beta chain variable domain of TCR clone 135563 (TRBV20-1, TRBJ2-7)
RSARDRVSGMDEQYF

SEQ ID NO: 271127 - protein, 13 aa, Homo sapiens
  CDR3 for alpha chain variable domain of TCR clone 135564 (TRAV3, TRAJ20)
CAVRDTPRYKLSF

SEQ ID NO: 271128 - protein, 14 aa, Homo sapiens
  CDR3 for beta chain variable domain of TCR clone 135564 (TRBV11-1, TRBJ2-7)
CASTLAVPSYEQYF

SEQ ID NO: 271129 - protein, 12 aa, Homo sapiens
  CDR3 for alpha chain variable domain of TCR clone 135565 (TRAV1-1, TRAJ39)
CAVPVVGNMLTF

SEQ ID NO: 271130 - protein, 15 aa, Homo sapiens
  CDR3 for beta chain variable domain of TCR clone 135565 (TRBV19, TRBJ1-6)
CASSTQGAVGSPVHF

SEQ ID NO: 271131 - protein, 15 aa, Homo sapiens
  CDR3 for alpha chain variable domain of TCR clone 135566 (TRAV8-3, TRAJ41)
CAVGSNSNSGYALNF

SEQ ID NO: 271132 - protein, 12 aa, Homo sapiens
  CDR3 for beta chain variable domain of TCR clone 135566 (TRBV7-3, TRBJ2-1)
CASSLGFNEQFF

SEQ ID NO: 271133 - protein, 12 aa, Homo sapiens
  CDR3 for alpha chain variable domain of TCR clone 135567 (TRAV12-1, TRAJ40)
CVVYSGTYKYIF

SEQ ID NO: 271134 - protein, 13 aa, Homo sapiens
  CDR3 for beta chain variable domain of TCR clone 135567 (TRBV7-3, TRBJ2-1)
CASSLDSYNEQFF

SEQ ID NO: 271135 - protein, 18 aa, Homo sapiens
  CDR3 for alpha chain variable domain of TCR clone 135568 (TRAV1-1, TRAJ42)
CAVSPSAFYGGSQGNLIF

SEQ ID NO: 271136 - protein, 14 aa, Homo sapiens
  CDR3 for beta chain variable domain of TCR clone 135568 (TRBV12-4, TRBJ1-1)
CASSLGTGGTEAFF

SEQ ID NO: 271137 - protein, 12 aa, Homo sapiens
  CDR3 for alpha chain variable domain of TCR clone 135569 (TRAV3, TRAJ20)
CAVRDPDYKLSF

SEQ ID NO: 271138 - protein, 12 aa, Homo sapiens
  CDR3 for beta chain variable domain of TCR clone 135569 (TRBV7-6, TRBJ2-5)
CASSLSQETQYF

SEQ ID NO: 271139 - protein, 10 aa, Homo sapiens
  CDR3 for alpha chain variable domain of TCR clone 135570 (TRAV12-1, TRAJ43)
CVVHNNDRRF

SEQ ID NO: 271140 - protein, 13 aa, Homo sapiens
  CDR3 for beta chain variable domain of TCR clone 135570 (TRBV12-4, TRBJ1-2)
CASSSGLTVISTF

SEQ ID NO: 271141 - protein, 13 aa, Homo sapiens
  CDR3 for alpha chain variable domain of TCR clone 135571 (TRAV12-2, TRAJ20)
CAVYPSNDYKLSF

SEQ ID NO: 271142 - protein, 15 aa, Homo sapiens
  CDR3 for beta chain variable domain of TCR clone 135571 (TRBV27, TRBJ2-7)
CASSTAGTGSYEQYF

SEQ ID NO: 271143 - protein, 13 aa, Homo sapiens
  CDR3 for alpha chain variable domain of TCR clone 135572 (TRAV21, TRAJ27)
CAARSGNEGKSTF

SEQ ID NO: 271144 - protein, 14 aa, Homo sapiens
  CDR3 for beta chain variable domain of TCR clone 135572 (TRBV7-6, TRBJ2-3)
CASSLGTVTDTQYF

SEQ ID NO: 271145 - protein, 18 aa, Homo sapiens
  CDR3 for alpha chain variable domain of TCR clone 135573 (TRAV21, TRAJ52)
CAVRPSPAGGTSYGKLKF

SEQ ID NO: 271146 - protein, 13 aa, Homo sapiens
  CDR3 for beta chain variable domain of TCR clone 135573 (TRBV2, TRBJ1-5)
CATGGPGNQPQHF

SEQ ID NO: 271147 - protein, 11 aa, Homo sapiens
  CDR3 for alpha chain variable domain of TCR clone 135574 (TRAV35, TRAJ12)
RRMDSSYRLIF

SEQ ID NO: 271148 - protein, 14 aa, Homo sapiens
  CDR3 for beta chain variable domain of TCR clone 135574 (TRBV19, TRBJ1-1)
CASSPNRGDTEAFC

SEQ ID NO: 271149 - protein, 14 aa, Homo sapiens
  CDR3 for alpha chain variable domain of TCR clone 135575 (TRAV1-2, TRAJ16)
CAVNRFSDGQKLLF

SEQ ID NO: 271150 - protein, 14 aa, Homo sapiens
  CDR3 for beta chain variable domain of TCR clone 135575 (TRBV13, TRBJ2-5)
CASSLGRGQEQQYF

SEQ ID NO: 271151 - protein, 12 aa, Homo sapiens
  CDR3 for alpha chain variable domain of TCR clone 135576 (TRAV12-3, TRAJ5)
CAMYTGMRALTF

SEQ ID NO: 271152 - protein, 14 aa, Homo sapiens
  CDR3 for beta chain variable domain of TCR clone 135576 (TRBV20-1, TRBJ2-1)
CSAQIGGSANEQFF

SEQ ID NO: 271153 - protein, 13 aa, Homo sapiens
  CDR3 for alpha chain variable domain of TCR clone 135577 (TRAV3, TRAJ29)
CAVRDIIDTRLVF

SEQ ID NO: 271154 - protein, 14 aa, Homo sapiens
  CDR3 for beta chain variable domain of TCR clone 135577 (TRBV27, TRBJ2-1)
CASSATGGYNEQFF

SEQ ID NO: 271155 - protein, 14 aa, Homo sapiens
  CDR3 for alpha chain variable domain of TCR clone 135578 (TRAV8-3, TRAJ9)
CAVAYNTGGFKPIF

SEQ ID NO: 271156 - protein, 14 aa, Homo sapiens
  CDR3 for beta chain variable domain of TCR clone 135578 (TRBV7-3, TRBJ2-2)
CASSSGGYTGELFF

SEQ ID NO: 271157 - protein, 11 aa, Homo sapiens
  CDR3 for alpha chain variable domain of TCR clone 135579 (TRAV2, TRAJ13)
CAAGGYQKVTF

SEQ ID NO: 271158 - protein, 16 aa, Homo sapiens
  CDR3 for beta chain variable domain of TCR clone 135579 (TRBV12-5, TRBJ2-5)
CASGSRTSGNQETQYF

SEQ ID NO: 271159 - protein, 14 aa, Homo sapiens
  CDR3 for alpha chain variable domain of TCR clone 135580 (TRAV8-3, TRAJ4)
CAVGASGGYNKLIF

SEQ ID NO: 271160 - protein, 17 aa, Homo sapiens
  CDR3 for beta chain variable domain of TCR clone 135580 (TRBV5-4, TRBJ2-1)
CASSSAGGRGPYNEQFF

SEQ ID NO: 271161 - protein, 13 aa, Homo sapiens
  CDR3 for alpha chain variable domain of TCR clone 135581 (TRAV12-2, TRAJ17)
CRAFQSCSNKLTF

SEQ ID NO: 271162 - protein, 14 aa, Homo sapiens
  CDR3 for beta chain variable domain of TCR clone 135581 (TRBV7-7, TRBJ2-2)
CATRQDSDTGELFF

SEQ ID NO: 271163 - protein, 14 aa, Homo sapiens
  CDR3 for alpha chain variable domain of TCR clone 135582 (TRAV35, TRAJ22)
CAGLRPGSARQLTF

SEQ ID NO: 271164 - protein, 14 aa, Homo sapiens
  CDR3 for beta chain variable domain of TCR clone 135582 (TRBV4-1, TRBJ2-7)
CARSPVAGGDEQYF

SEQ ID NO: 271165 - protein, 13 aa, Homo sapiens
  CDR3 for alpha chain variable domain of TCR clone 135583 (TRAV27, TRAJ6)
CAGGTRGSSIPTF

SEQ ID NO: 271166 - protein, 14 aa, Homo sapiens
  CDR3 for beta chain variable domain of TCR clone 135583 (TRBV6-3, TRBJ1-1)
CASSYQRRDTEAFF

SEQ ID NO: 271167 - protein, 17 aa, Homo sapiens
  CDR3 for alpha chain variable domain of TCR clone 135584 (TRAV17, TRAJ52)
CATERPSGGTSYGKLTF

SEQ ID NO: 271168 - protein, 15 aa, Homo sapiens
  CDR3 for beta chain variable domain of TCR clone 135584 (TRBV5-1, TRBJ2-1)
CASSLVANSYNEQYF

SEQ ID NO: 271169 - protein, 14 aa, Homo sapiens
  CDR3 for alpha chain variable domain of TCR clone 135585 (TRAV12-3, TRAJ10)
SHLPLTGGGNKLTF

SEQ ID NO: 271170 - protein, 12 aa, Homo sapiens
  CDR3 for beta chain variable domain of TCR clone 135585 (TRBV7-8, TRBJ2-7)
CASSLAGYEQYF

SEQ ID NO: 271171 - protein, 12 aa, Homo sapiens
  CDR3 for alpha chain variable domain of TCR clone 135586 (TRAV2, TRAJ26)
CAGSPGRLWSEF

SEQ ID NO: 271172 - protein, 14 aa, Homo sapiens
  CDR3 for beta chain variable domain of TCR clone 135586 (TRBV19, TRBJ2-1)
CASPTFVLSGEQFF

SEQ ID NO: 271173 - protein, 11 aa, Homo sapiens
  CDR3 for alpha chain variable domain of TCR clone 135587 (TRAV21, TRAJ48)
CAVDGNEKLTF

SEQ ID NO: 271174 - protein, 14 aa, Homo sapiens
  CDR3 for beta chain variable domain of TCR clone 135587 (TRBV25-1, TRBJ1-2)
CASSDTTGVVGYTF

SEQ ID NO: 271175 - protein, 11 aa, Homo sapiens
  CDR3 for alpha chain variable domain of TCR clone 135588 (TRAV3, TRAJ21)
CAVGNFNTFYF

SEQ ID NO: 271176 - protein, 13 aa, Homo sapiens
  CDR3 for beta chain variable domain of TCR clone 135588 (TRBV12-5, TRBJ2-3)
CASGDRQSDTQYF

SEQ ID NO: 271177 - protein, 13 aa, Homo sapiens
  CDR3 for alpha chain variable domain of TCR clone 135589 (TRAV27, TRAJ18)
CAGRGSTLGRLYF

SEQ ID NO: 271178 - protein, 14 aa, Homo sapiens
  CDR3 for beta chain variable domain of TCR clone 135589 (TRBV27, TRBJ2-2)
CASRPGVNTGELFF

SEQ ID NO: 271179 - protein, 16 aa, Homo sapiens
  CDR3 for alpha chain variable domain of TCR clone 135590 (TRAV26-2, TRAJ57)
CILRDVGSGGSEKLVF

SEQ ID NO: 271180 - protein, 17 aa, Homo sapiens
  CDR3 for beta chain variable domain of TCR clone 135590 (TRBV13, TRBJ2-3)
CASSLSRVAGGRNTQYF

SEQ ID NO: 271181 - protein, 14 aa, Homo sapiens
  CDR3 for alpha chain variable domain of TCR clone 135591 (TRAV8-4, TRAJ54)
CAVSEGFGAQKLVF

SEQ ID NO: 271182 - protein, 13 aa, Homo sapiens
  CDR3 for beta chain variable domain of TCR clone 135591 (TRBV27, TRBJ2-7)
CASSVVSSYEQYF

SEQ ID NO: 271183 - protein, 18 aa, Homo sapiens
  CDR3 for alpha chain variable domain of TCR clone 135592 (TRAV13-1, TRAJ52)
CAAKNPNAGGTSYGKLTF

SEQ ID NO: 271184 - protein, 15 aa, Homo sapiens
  CDR3 for beta chain variable domain of TCR clone 135592 (TRBV4-3, TRBJ2-3)
CASSPSLLSTDTQYF

SEQ ID NO: 271185 - protein, 12 aa, Homo sapiens
  CDR3 for alpha chain variable domain of TCR clone 135593 (TRAV21, TRAJ31)
CVLAGNNARLMF

SEQ ID NO: 271186 - protein, 11 aa, Homo sapiens
  CDR3 for beta chain variable domain of TCR clone 135593 (TRBV7-2, TRBJ2-3)
CASSSSDTQYF

SEQ ID NO: 271187 - protein, 14 aa, Homo sapiens
  CDR3 for alpha chain variable domain of TCR clone 135594 (TRAV12-3, TRAJ58)
CAMSTETSGSRLTF

SEQ ID NO: 271188 - protein, 15 aa, Homo sapiens
  CDR3 for beta chain variable domain of TCR clone 135594 (TRBV4-1, TRBJ1-4)
CASSDTGGTNEKLFC

SEQ ID NO: 271189 - protein, 14 aa, Homo sapiens
  CDR3 for alpha chain variable domain of TCR clone 135595 (TRAV17, TRAJ54)
CATDANQGAQKLVF

SEQ ID NO: 271190 - protein, 16 aa, Homo sapiens
  CDR3 for beta chain variable domain of TCR clone 135595 (TRBV7-3, TRBJ2-2)
CASSLKRGTLSGELFF

SEQ ID NO: 271191 - protein, 11 aa, Homo sapiens
  CDR3 for alpha chain variable domain of TCR clone 135596 (TRAV17, TRAJ9)
CGFTGGFKTIF

SEQ ID NO: 271192 - protein, 12 aa, Homo sapiens
  CDR3 for beta chain variable domain of TCR clone 135596 (TRBV29-1, TRBJ2-3)
CSVTGGADTQDF

SEQ ID NO: 271193 - protein, 15 aa, Homo sapiens
  CDR3 for alpha chain variable domain of TCR clone 135597 (TRAV3, TRAJ30)
CAVRDEYGRDDKIIF

SEQ ID NO: 271194 - protein, 16 aa, Homo sapiens
  CDR3 for beta chain variable domain of TCR clone 135597 (TRBV5-1, TRBJ2-5)
CASSLANNRGRETQYF

SEQ ID NO: 271195 - protein, 12 aa, Homo sapiens
  CDR3 for alpha chain variable domain of TCR clone 135598 (TRAV16, TRAJ10)
CSRTGGGNKLTF

SEQ ID NO: 271196 - protein, 12 aa, Homo sapiens
  CDR3 for beta chain variable domain of TCR clone 135598 (TRBV6-5, TRBJ2-5)
CASSEGSETQYF

SEQ ID NO: 271197 - protein, 15 aa, Homo sapiens
  CDR3 for alpha chain variable domain of TCR clone 135599 (TRAV35, TRAJ52)
CAGPRCGTSYGKLTF

SEQ ID NO: 271198 - protein, 15 aa, Homo sapiens
  CDR3 for beta chain variable domain of TCR clone 135599 (TRBV6-5, TRBJ1-2)
CASSYSQAFNYGYTF

SEQ ID NO: 271199 - protein, 16 aa, Homo sapiens
  CDR3 for alpha chain variable domain of TCR clone 135600 (TRAV26-1, TRAJ40)
CIVRVGTTSGTYKYIF

SEQ ID NO: 271200 - protein, 12 aa, Homo sapiens
  CDR3 for beta chain variable domain of TCR clone 135600 (TRBV2, TRBJ2-1)
CASSESSGPCIF

SEQ ID NO: 271201 - protein, 18 aa, Homo sapiens
  CDR3 for alpha chain variable domain of TCR clone 135601 (TRAV17, TRAJ28)
CATDPPRGSGAGSYQLTF

SEQ ID NO: 271202 - protein, 14 aa, Homo sapiens
  CDR3 for beta chain variable domain of TCR clone 135601 (TRBV13, TRBJ2-5)
CASSLDYPQEAQYL

SEQ ID NO: 271203 - protein, 11 aa, Homo sapiens
  CDR3 for alpha chain variable domain of TCR clone 135602 (TRAV2, TRAJ13)
CASGGYQKVTL

SEQ ID NO: 271204 - protein, 13 aa, Homo sapiens
  CDR3 for beta chain variable domain of TCR clone 135602 (TRBV6-1, TRBJ1-1)
CASSRQGNTEAVF

SEQ ID NO: 271205 - protein, 11 aa, Homo sapiens
  CDR3 for alpha chain variable domain of TCR clone 135603 (TRAV35, TRAJ34)
CWARNTDKLIF

SEQ ID NO: 271206 - protein, 14 aa, Homo sapiens
  CDR3 for beta chain variable domain of TCR clone 135603 (TRBV5-1, TRBJ2-7)
CASSRGVSLYEQYF

SEQ ID NO: 271207 - protein, 17 aa, Homo sapiens
  CDR3 for alpha chain variable domain of TCR clone 135604 (TRAV3, TRAJ6)
CALRDGPRAGGIYIPTF

SEQ ID NO: 271208 - protein, 14 aa, Homo sapiens
  CDR3 for beta chain variable domain of TCR clone 135604 (TRBV7-2, TRBJ2-7)
CASSPKTSFYEQYF

SEQ ID NO: 271209 - protein, 21 aa, Homo sapiens
  CDR3 for alpha chain variable domain of TCR clone 135605 (TRAV29/DV5, TRAJ56)
CSVLLCSKPFCHTGANSKLTF

SEQ ID NO: 271210 - protein, 13 aa, Homo sapiens
  CDR3 for beta chain variable domain of TCR clone 135605 (TRBV4-1, TRBJ1-1)
CASSRKMNTEAFF

SEQ ID NO: 271211 - protein, 14 aa, Homo sapiens
  CDR3 for alpha chain variable domain of TCR clone 135606 (TRAV1-2, TRAJ8)
CAVRADTGFQKLVF

SEQ ID NO: 271212 - protein, 16 aa, Homo sapiens
  CDR3 for beta chain variable domain of TCR clone 135606 (TRBV28, TRBJ1-4)
CASSPPYRGRSEKLFF

SEQ ID NO: 271213 - protein, 18 aa, Homo sapiens
  CDR3 for alpha chain variable domain of TCR clone 135607 (TRAV29/DV5, TRAJ52)
CAAGFRGAGGTSYGKLTF

SEQ ID NO: 271214 - protein, 15 aa, Homo sapiens
  CDR3 for beta chain variable domain of TCR clone 135607 (TRBV11-3, TRBJ2-3)
CVSLKDGREGDTQYF

SEQ ID NO: 271215 - protein, 15 aa, Homo sapiens
  CDR3 for alpha chain variable domain of TCR clone 135608 (TRAV27, TRAJ38)
CAARRNAVNNRKLIW

SEQ ID NO: 271216 - protein, 16 aa, Homo sapiens
  CDR3 for beta chain variable domain of TCR clone 135608 (TRBV7-2, TRBJ2-1)
CASSPRLAGSNNEQFF

SEQ ID NO: 271217 - protein, 16 aa, Homo sapiens
  CDR3 for alpha chain variable domain of TCR clone 135609 (TRAV2, TRAJ4)
CAVEDRFSGGYNKLIF

SEQ ID NO: 271218 - protein, 15 aa, Homo sapiens
  CDR3 for beta chain variable domain of TCR clone 135609 (TRBV10-3, TRBJ2-3)
CAISLTSGGTDTQYF

SEQ ID NO: 271219 - protein, 14 aa, Homo sapiens
  CDR3 for alpha chain variable domain of TCR clone 135610 (TRAV8-3, TRAJ53)
CCGNSGGSNYKLTF

SEQ ID NO: 271220 - protein, 14 aa, Homo sapiens
  CDR3 for beta chain variable domain of TCR clone 135610 (TRBV7-3, TRBJ1-1)
CASSLGTGYTEAFF

SEQ ID NO: 271221 - protein, 11 aa, Homo sapiens
  CDR3 for alpha chain variable domain of TCR clone 135611 (TRAV8-6, TRAJ34)
CAVWNTDKLIF

SEQ ID NO: 271222 - protein, 13 aa, Homo sapiens
  CDR3 for beta chain variable domain of TCR clone 135611 (TRBV6-4, TRBJ2-1)
CASSASVNNEQFF

SEQ ID NO: 271223 - protein, 13 aa, Homo sapiens
  CDR3 for alpha chain variable domain of TCR clone 135612 (TRAV3, TRAJ21)
CAVREPDFNNFYF

SEQ ID NO: 271224 - protein, 13 aa, Homo sapiens
  CDR3 for beta chain variable domain of TCR clone 135612 (TRBV9, TRBJ2-1)
FASSPSGGNEQFF

SEQ ID NO: 271225 - protein, 15 aa, Homo sapiens
  CDR3 for alpha chain variable domain of TCR clone 135613 (TRAV12-2, TRAJ32)
CAVNHYGGATNKLIF

SEQ ID NO: 271226 - protein, 14 aa, Homo sapiens
  CDR3 for beta chain variable domain of TCR clone 135613 (TRBV27, TRBJ2-1)
CASSFGREDNEQFF

SEQ ID NO: 271227 - protein, 13 aa, Homo sapiens
  CDR3 for alpha chain variable domain of TCR clone 135614 (TRAV12-3, TRAJ33)
CAMSVNSNYQLIW

SEQ ID NO: 271228 - protein, 13 aa, Homo sapiens
  CDR3 for beta chain variable domain of TCR clone 135614 (TRBV7-2, TRBJ2-2)
CASSLVVTGELFF

SEQ ID NO: 271229 - protein, 15 aa, Homo sapiens
  CDR3 for alpha chain variable domain of TCR clone 135615 (TRAV17, TRAJ35)
CATAFVIGLGNVLHC

SEQ ID NO: 271230 - protein, 16 aa, Homo sapiens
  CDR3 for beta chain variable domain of TCR clone 135615 (TRBV11-2, TRBJ2-7)
CASSPLAGGPRYEQYF

SEQ ID NO: 271231 - protein, 11 aa, Homo sapiens
  CDR3 for alpha chain variable domain of TCR clone 135616 (TRAV17, TRAJ9)
CATTGGFKTIF

SEQ ID NO: 271232 - protein, 15 aa, Homo sapiens
  CDR3 for beta chain variable domain of TCR clone 135616 (TRBV18, TRBJ2-1)
CASSPPSASYNEQFF

SEQ ID NO: 271233 - protein, 12 aa, Homo sapiens
  CDR3 for alpha chain variable domain of TCR clone 135617 (TRAV17, TRAJ17)
CATDAESNKLTF

SEQ ID NO: 271234 - protein, 15 aa, Homo sapiens
  CDR3 for beta chain variable domain of TCR clone 135617 (TRBV5-1, TRBJ2-5)
CASSSGREMVETQYF

SEQ ID NO: 271235 - protein, 11 aa, Homo sapiens
  CDR3 for alpha chain variable domain of TCR clone 135618 (TRAV21, TRAJ48)
CAVDGNEKLTF

SEQ ID NO: 271236 - protein, 18 aa, Homo sapiens
  CDR3 for beta chain variable domain of TCR clone 135618 (TRBV12-4, TRBJ2-1)
CATSDLMFLGRGVHEQFF

SEQ ID NO: 271237 - protein, 15 aa, Homo sapiens
  CDR3 for alpha chain variable domain of TCR clone 135619 (TRAV27, TRAJ38)
CAARRNAANNRTLIW

SEQ ID NO: 271238 - protein, 13 aa, Homo sapiens
  CDR3 for beta chain variable domain of TCR clone 135619 (TRBV12-5, TRBJ2-3)
CASGDRQSDTQYF

SEQ ID NO: 271239 - protein, 13 aa, Homo sapiens
  CDR3 for alpha chain variable domain of TCR clone 135620 (TRAV12-1, TRAJ9)
CVVRNTGGFKTIF

SEQ ID NO: 271240 - protein, 14 aa, Homo sapiens
  CDR3 for beta chain variable domain of TCR clone 135620 (TRBV20-1, TRBJ2-1)
CSAQIGGCANEQFF

SEQ ID NO: 271241 - protein, 12 aa, Homo sapiens
  CDR3 for alpha chain variable domain of TCR clone 135621 (TRAV17, TRAJ29)
CATPHQETHLLF

SEQ ID NO: 271242 - protein, 17 aa, Homo sapiens
  CDR3 for beta chain variable domain of TCR clone 135621 (TRBV20-1, TRBJ2-2)
CSASGSGQGGLTGELFF

SEQ ID NO: 271243 - protein, 12 aa, Homo sapiens
  CDR3 for alpha chain variable domain of TCR clone 135622 (TRAV3, TRAJ43)
CAVRDPNNDMRF

SEQ ID NO: 271244 - protein, 16 aa, Homo sapiens
  CDR3 for beta chain variable domain of TCR clone 135622 (TRBV20-1, TRBJ2-3)
CSGEAGLAGGQDTQYF

SEQ ID NO: 271245 - protein, 16 aa, Homo sapiens
  CDR3 for alpha chain variable domain of TCR clone 135623 (TRAV12-1, TRAJ12)
CVVNTLLMDSSYKLIF

SEQ ID NO: 271246 - protein, 16 aa, Homo sapiens
  CDR3 for beta chain variable domain of TCR clone 135623 (TRBV7-2, TRBJ2-7)
CASSLEAGGPWYEQYF

SEQ ID NO: 271247 - protein, 12 aa, Homo sapiens
  CDR3 for alpha chain variable domain of TCR clone 135624 (TRAV12-1, TRAJ16)
CVVFRDGQKLLF

SEQ ID NO: 271248 - protein, 16 aa, Homo sapiens
  CDR3 for beta chain variable domain of TCR clone 135624 (TRBV5-7, TRBJ2-5)
CASIRGQTGYQETQYF

SEQ ID NO: 271249 - protein, 15 aa, Homo sapiens
  CDR3 for alpha chain variable domain of TCR clone 135625 (TRAV26-1, TRAJ29)
CIVRVEGSGNIPLVF

SEQ ID NO: 271250 - protein, 14 aa, Homo sapiens
  CDR3 for beta chain variable domain of TCR clone 135625 (TRBV18, TRBJ2-5)
CASPPGVSQETQYF

SEQ ID NO: 271251 - protein, 13 aa, Homo sapiens
  CDR3 for alpha chain variable domain of TCR clone 135626 (TRAV17, TRAJ9)
CATFLTGGFKTIF

SEQ ID NO: 271252 - protein, 16 aa, Homo sapiens
  CDR3 for beta chain variable domain of TCR clone 135626 (TRBV5-6, TRBJ1-4)
CASSPSGGLETEKLFF

SEQ ID NO: 271253 - protein, 15 aa, Homo sapiens
  CDR3 for alpha chain variable domain of TCR clone 135627 (TRAV26-2, TRAJ13)
CILRDLSGGSQKVTF

SEQ ID NO: 271254 - protein, 11 aa, Homo sapiens
  CDR3 for beta chain variable domain of TCR clone 135627 (TRBV7-9, TRBJ2-3)
CASSYTDTQYF

SEQ ID NO: 271255 - protein, 19 aa, Homo sapiens
  CDR3 for alpha chain variable domain of TCR clone 135628 (TRAV2, TRAJ20)
ILQVREADAAVYRDCKLSF

SEQ ID NO: 271256 - protein, 14 aa, Homo sapiens
  CDR3 for beta chain variable domain of TCR clone 135628 (TRBV27, TRBJ2-2)
CASSLGAATGELFF

SEQ ID NO: 271257 - protein, 16 aa, Homo sapiens
  CDR3 for alpha chain variable domain of TCR clone 135629 (TRAV27, TRAJ13)
CAGAKCDSGGYQKVTF

SEQ ID NO: 271258 - protein, 15 aa, Homo sapiens
  CDR3 for beta chain variable domain of TCR clone 135629 (TRBV29-1, TRBJ2-1)
CSVGRHALFYNEQFF

SEQ ID NO: 271259 - protein, 23 aa, Homo sapiens
  CDR3 for alpha chain variable domain of TCR clone 135630 (TRAV26-1, TRAJ38)
CIADNAGNNHIQNPDPAVYQLRD

SEQ ID NO: 271260 - protein, 17 aa, Homo sapiens
  CDR3 for beta chain variable domain of TCR clone 135630 (TRBV11-2, TRBJ2-6)
CASSQRDMFSGANVLTF

SEQ ID NO: 271261 - protein, 17 aa, Homo sapiens
  CDR3 for alpha chain variable domain of TCR clone 135631 (TRAV38-2/DV8, TRAJ38)
CAYRSARGAGNNRKLIW

SEQ ID NO: 271262 - protein, 16 aa, Homo sapiens
  CDR3 for beta chain variable domain of TCR clone 135631 (TRBV12-5, TRBJ2-5)
CASGPRTSGNQETQYF

SEQ ID NO: 271263 - protein, 13 aa, Homo sapiens
  CDR3 for alpha chain variable domain of TCR clone 135632 (TRAV30, TRAJ16)
CGTFGGDGQKLLF

SEQ ID NO: 271264 - protein, 14 aa, Homo sapiens
  CDR3 for beta chain variable domain of TCR clone 135632 (TRBV13, TRBJ2-5)
CASSLERVGETQYF

SEQ ID NO: 271265 - protein, 11 aa, Homo sapiens
  CDR3 for alpha chain variable domain of TCR clone 135633 (TRAV13-1, TRAJ52)
PGGTSYGKQTF

SEQ ID NO: 271266 - protein, 16 aa, Homo sapiens
  CDR3 for beta chain variable domain of TCR clone 135633 (TRBV28, TRBJ2-7)
CASSPWVATGDLSQYF

SEQ ID NO: 271267 - protein, 15 aa, Homo sapiens
  CDR3 for alpha chain variable domain of TCR clone 135634 (TRAV12-2, TRAJ43)
CAFDMRFGAGTRLTV

SEQ ID NO: 271268 - protein, 12 aa, Homo sapiens
  CDR3 for beta chain variable domain of TCR clone 135634 (TRBV12-4, TRBJ2-3)
CASSSTTDTQYF

SEQ ID NO: 271269 - protein, 14 aa, Homo sapiens
  CDR3 for alpha chain variable domain of TCR clone 135635 (TRAV8-3, TRAJ12)
CAVGARDSSYKLIF

SEQ ID NO: 271270 - protein, 14 aa, Homo sapiens
  CDR3 for beta chain variable domain of TCR clone 135635 (TRBV18, TRBJ2-2)
CASSPPSLPGELFF

SEQ ID NO: 271271 - protein, 11 aa, Homo sapiens
  CDR3 for alpha chain variable domain of TCR clone 135636 (TRAV23/DV6, TRAJ58)
CAARLLRGETS

SEQ ID NO: 271272 - protein, 14 aa, Homo sapiens
  CDR3 for beta chain variable domain of TCR clone 135636 (TRBV28, TRBJ1-1)
CASSESGRGTEAFF

SEQ ID NO: 271273 - protein, 18 aa, Homo sapiens
  CDR3 for alpha chain variable domain of TCR clone 135637 (TRAV21, TRAJ52)
CAVRPSPAGGTSYGKLTF

SEQ ID NO: 271274 - protein, 13 aa, Homo sapiens
  CDR3 for beta chain variable domain of TCR clone 135637 (TRBV2, TRBJ1-1)
CASSVLMNTEAFF

SEQ ID NO: 271275 - protein, 12 aa, Homo sapiens
  CDR3 for alpha chain variable domain of TCR clone 135638 (TRAV12-3, TRAJ17)
CAMTHTGNKLTF

SEQ ID NO: 271276 - protein, 20 aa, Homo sapiens
  CDR3 for beta chain variable domain of TCR clone 135638 (TRBV7-8, TRBJ2-2)
CASSHLFPGPTIHITGELFF

SEQ ID NO: 271277 - protein, 14 aa, Homo sapiens
  CDR3 for alpha chain variable domain of TCR clone 135639 (TRAV8-4, TRAJ16)
CAVGPVGRWPEAAL

SEQ ID NO: 271278 - protein, 14 aa, Homo sapiens
  CDR3 for beta chain variable domain of TCR clone 135639 (TRBV23-1, TRBJ2-5)
CASSFLRSQETQYF

SEQ ID NO: 271279 - protein, 15 aa, Homo sapiens
  CDR3 for alpha chain variable domain of TCR clone 135640 (TRAV3, TRAJ22)
CAVRDRGGSARQLPF

SEQ ID NO: 271280 - protein, 13 aa, Homo sapiens
  CDR3 for beta chain variable domain of TCR clone 135640 (TRBV7-9, TRBJ1-2)
CASSLKQNYGYTF

SEQ ID NO: 271281 - protein, 18 aa, Homo sapiens
  CDR3 for alpha chain variable domain of TCR clone 135641 (TRAV21, TRAJ52)
CAVRPSPAGGTSYGKLKF

SEQ ID NO: 271282 - protein, 15 aa, Homo sapiens
  CDR3 for beta chain variable domain of TCR clone 135641 (TRBV6-3, TRBJ1-3)
CASRGGGSSGNTIYF

SEQ ID NO: 271283 - protein, 13 aa, Homo sapiens
  CDR3 for alpha chain variable domain of TCR clone 135642 (TRAV36/DV7, TRAJ49)
CAVEANTGNQFYF

SEQ ID NO: 271284 - protein, 13 aa, Homo sapiens
  CDR3 for beta chain variable domain of TCR clone 135642 (TRBV10-3, TRBJ2-7)
CASKLVVNYEQYF

SEQ ID NO: 271285 - protein, 13 aa, Homo sapiens
  CDR3 for alpha chain variable domain of TCR clone 135643 (TRAV30, TRAJ6)
CGTEAGGSYIPTF

SEQ ID NO: 271286 - protein, 14 aa, Homo sapiens
  CDR3 for beta chain variable domain of TCR clone 135643 (TRBV7-9, TRBJ2-1)
CASSLANYYNEQFF

SEQ ID NO: 271287 - protein, 16 aa, Homo sapiens
  CDR3 for alpha chain variable domain of TCR clone 135644 (TRAV14/DV4, TRAJ53)
CAMREGGGGSNYKLTF

SEQ ID NO: 271288 - protein, 15 aa, Homo sapiens
  CDR3 for beta chain variable domain of TCR clone 135644 (TRBV4-1, TRBJ2-3)
CASRSTRAGTDTQYF

SEQ ID NO: 271289 - protein, 16 aa, Homo sapiens
  CDR3 for alpha chain variable domain of TCR clone 135645 (TRAV12-2, TRAJ43)
CAGDDMRFGAGTRLTV

SEQ ID NO: 271290 - protein, 16 aa, Homo sapiens
  CDR3 for beta chain variable domain of TCR clone 135645 (TRBV7-2, TRBJ1-4)
CASSPVGRFDREKLFF

SEQ ID NO: 271291 - protein, 16 aa, Homo sapiens
  CDR3 for alpha chain variable domain of TCR clone 135646 (TRAV12-3, TRAJ53)
CEMSVGSGGSNYKLTF

SEQ ID NO: 271292 - protein, 13 aa, Homo sapiens
  CDR3 for beta chain variable domain of TCR clone 135646 (TRBV7-6, TRBJ1-2)
CASSLVADYGYTF

SEQ ID NO: 271293 - protein, 14 aa, Homo sapiens
  CDR3 for alpha chain variable domain of TCR clone 135647 (TRAV13-1, TRAJ44)
CAAKATGTASKLTF

SEQ ID NO: 271294 - protein, 19 aa, Homo sapiens
  CDR3 for beta chain variable domain of TCR clone 135647 (TRBV7-2, TRBJ2-3)
CASSFLSRNWGGGTDTQYF

SEQ ID NO: 271295 - protein, 18 aa, Homo sapiens
  CDR3 for alpha chain variable domain of TCR clone 135648 (TRAV21, TRAJ52)
CALRPSPAGGTIYGKLTF

SEQ ID NO: 271296 - protein, 17 aa, Homo sapiens
  CDR3 for beta chain variable domain of TCR clone 135648 (TRBV13, TRBJ2-3)
CASSLSRVAGGRNTQYF

SEQ ID NO: 271297 - protein, 16 aa, Homo sapiens
  CDR3 for alpha chain variable domain of TCR clone 135649 (TRAV3, TRAJ10)
RAVRDMRAGGGNKLTF

SEQ ID NO: 271298 - protein, 16 aa, Homo sapiens
  CDR3 for beta chain variable domain of TCR clone 135649 (TRBV5-1, TRBJ2-5)
CASSFQGLADQETQYF

SEQ ID NO: 271299 - protein, 15 aa, Homo sapiens
  CDR3 for alpha chain variable domain of TCR clone 135650 (TRAV27, TRAJ50)
CAGRERGTSYDKVIF

SEQ ID NO: 271300 - protein, 16 aa, Homo sapiens
  CDR3 for beta chain variable domain of TCR clone 135650 (TRBV10-3, TRBJ1-5)
CAISDQVGAPNQPQYF

SEQ ID NO: 271301 - protein, 21 aa, Homo sapiens
  CDR3 for alpha chain variable domain of TCR clone 135651 (TRAV6, TRAJ36)
CARQTTSSLGLERDSPLFLIS

SEQ ID NO: 271302 - protein, 15 aa, Homo sapiens
  CDR3 for beta chain variable domain of TCR clone 135651 (TRBV6-1, TRBJ2-3)
CASSERGGITDTQYF

SEQ ID NO: 271303 - protein, 10 aa, Homo sapiens
  CDR3 for alpha chain variable domain of TCR clone 135652 (TRAV25, TRAJ20)
CAVNDYKISF

SEQ ID NO: 271304 - protein, 17 aa, Homo sapiens
  CDR3 for beta chain variable domain of TCR clone 135652 (TRBV5-4, TRBJ2-1)
CASSSAGGRGPYNEQFF

SEQ ID NO: 271305 - protein, 16 aa, Homo sapiens
  CDR3 for alpha chain variable domain of TCR clone 135653 (TRAV30, TRAJ24)
CGIEIVDADSWGKFQF

SEQ ID NO: 271306 - protein, 14 aa, Homo sapiens
  CDR3 for beta chain variable domain of TCR clone 135653 (TRBV19, TRBJ2-2)
CASSGQGIAGELFF

SEQ ID NO: 271307 - protein, 16 aa, Homo sapiens
  CDR3 for alpha chain variable domain of TCR clone 135654 (TRAV35, TRAJ28)
CAGQKYSGAGSYQLTF

SEQ ID NO: 271308 - protein, 16 aa, Homo sapiens
  CDR3 for beta chain variable domain of TCR clone 135654 (TRBV7-3, TRBJ2-2)
CASSLKRGTLYGELFF

SEQ ID NO: 271309 - protein, 14 aa, Homo sapiens
  CDR3 for alpha chain variable domain of TCR clone 135655 (TRAV12-2, TRAJ44)
CAVNPAGTASKLTF

SEQ ID NO: 271310 - protein, 13 aa, Homo sapiens
  CDR3 for beta chain variable domain of TCR clone 135655 (TRBV20-1, TRBJ1-6)
CSAPWGVGSPLHF

SEQ ID NO: 271311 - protein, 18 aa, Homo sapiens
  CDR3 for alpha chain variable domain of TCR clone 135656 (TRAV21, TRAJ52)
CAVRPSPAGGTSYGKLTF

SEQ ID NO: 271312 - protein, 17 aa, Homo sapiens
  CDR3 for beta chain variable domain of TCR clone 135656 (TRBV13, TRBJ2-3)
CASRLSRVAGGKNTQYF

SEQ ID NO: 271313 - protein, 14 aa, Homo sapiens
  CDR3 for alpha chain variable domain of TCR clone 135657 (TRAV12-3, TRAJ53)
CAMRSGGSNSKLTF

SEQ ID NO: 271314 - protein, 14 aa, Homo sapiens
  CDR3 for beta chain variable domain of TCR clone 135657 (TRBV18, TRBJ2-7)
CASSPPAGAPEQYF

SEQ ID NO: 271315 - protein, 14 aa, Homo sapiens
  CDR3 for alpha chain variable domain of TCR clone 135658 (TRAV25, TRAJ9)
CAGPGNTGGFKTIF

SEQ ID NO: 271316 - protein, 17 aa, Homo sapiens
  CDR3 for beta chain variable domain of TCR clone 135658 (TRBV20-1, TRBJ2-1)
CSASSLGLAGSYNEQFF

SEQ ID NO: 271317 - protein, 14 aa, Homo sapiens
  CDR3 for alpha chain variable domain of TCR clone 135659 (TRAV30, TRAJ33)
CGTVAPRSNYQLIW

SEQ ID NO: 271318 - protein, 16 aa, Homo sapiens
  CDR3 for beta chain variable domain of TCR clone 135659 (TRBV3-1, TRBJ2-5)
CTSSPGQFNGFGTQYV

SEQ ID NO: 271319 - protein, 13 aa, Homo sapiens
  CDR3 for alpha chain variable domain of TCR clone 135660 (TRAV26-1, )
CIVSHRVEGFWNQ

SEQ ID NO: 271320 - protein, 13 aa, Homo sapiens
  CDR3 for beta chain variable domain of TCR clone 135660 (TRBV7-3, TRBJ1-1)
CASSQDWGAEAFF

SEQ ID NO: 271321 - protein, 12 aa, Homo sapiens
  CDR3 for alpha chain variable domain of TCR clone 135661 (TRAV38-1, TRAJ47)
CAFETYGNKLVF

SEQ ID NO: 271322 - protein, 15 aa, Homo sapiens
  CDR3 for beta chain variable domain of TCR clone 135661 (TRBV20-1, TRBJ2-7)
CSARKGLAESYEQYC

SEQ ID NO: 271323 - protein, 14 aa, Homo sapiens
  CDR3 for alpha chain variable domain of TCR clone 135662 (TRAV23/DV6, TRAJ6)
CTAIPSGGSYIPTF

SEQ ID NO: 271324 - protein, 17 aa, Homo sapiens
  CDR3 for beta chain variable domain of TCR clone 135662 (TRBV7-2, TRBJ2-3)
CASSLGGRAAWRDTQYF

SEQ ID NO: 271325 - protein, 13 aa, Homo sapiens
  CDR3 for alpha chain variable domain of TCR clone 135663 (TRAV19, TRAJ57)
CALLQGGSEKLFF

SEQ ID NO: 271326 - protein, 14 aa, Homo sapiens
  CDR3 for beta chain variable domain of TCR clone 135663 (TRBV7-2, TRBJ1-1)
CASSFLTGTTEAFF

SEQ ID NO: 271327 - protein, 10 aa, Homo sapiens
  CDR3 for alpha chain variable domain of TCR clone 135664 (TRAV38-1, TRAJ34)
CAFMDDKLIF

SEQ ID NO: 271328 - protein, 17 aa, Homo sapiens
  CDR3 for beta chain variable domain of TCR clone 135664 (TRBV7-3, TRBJ2-3)
CASSLMKRMRGADTQYF

SEQ ID NO: 271329 - protein, 17 aa, Homo sapiens
  CDR3 for alpha chain variable domain of TCR clone 135665 (TRAV14/DV4, TRAJ28)
CAMREVSSGAGSYQLTF

SEQ ID NO: 271330 - protein, 17 aa, Homo sapiens
  CDR3 for beta chain variable domain of TCR clone 135665 (TRBV11-2, TRBJ1-6)
CASTLRETGNSPLHLGT

SEQ ID NO: 271331 - protein, 14 aa, Homo sapiens
  CDR3 for alpha chain variable domain of TCR clone 135666 (TRAV13-1, TRAJ9)
CAASALTGGFKTIF

SEQ ID NO: 271332 - protein, 16 aa, Homo sapiens
  CDR3 for beta chain variable domain of TCR clone 135666 (TRBV7-8, TRBJ2-4)
CASSAQRTLAKNIQYF

SEQ ID NO: 271333 - protein, 13 aa, Homo sapiens
  CDR3 for alpha chain variable domain of TCR clone 135667 (TRAV27, TRAJ41)
CAGEGNSGYALNF

SEQ ID NO: 271334 - protein, 13 aa, Homo sapiens
  CDR3 for beta chain variable domain of TCR clone 135667 (TRBV5-1, TRBJ1-2)
CASSSTGVYGYTF

SEQ ID NO: 271335 - protein, 15 aa, Homo sapiens
  CDR3 for alpha chain variable domain of TCR clone 135668 (TRAV8-3, TRAJ27)
CAVGPSKTNAGKSTF

SEQ ID NO: 271336 - protein, 16 aa, Homo sapiens
  CDR3 for beta chain variable domain of TCR clone 135668 (TRBV9, TRBJ2-1)
CASSVGGGGNYNEQFF

SEQ ID NO: 271337 - protein, 14 aa, Homo sapiens
  CDR3 for alpha chain variable domain of TCR clone 135669 (TRAV23/DV6, TRAJ24)
CAASLSDSWGTLQF

SEQ ID NO: 271338 - protein, 15 aa, Homo sapiens
  CDR3 for beta chain variable domain of TCR clone 135669 (TRBV9, TRBJ1-6)
CASSVAGTGDSPLHF

SEQ ID NO: 271339 - protein, 16 aa, Homo sapiens
  CDR3 for alpha chain variable domain of TCR clone 135670 (TRAV30, TRAJ24)
CGTEIVDADSWGKFQS

SEQ ID NO: 271340 - protein, 14 aa, Homo sapiens
  CDR3 for beta chain variable domain of TCR clone 135670 (TRBV7-8, TRBJ2-3)
CASSLEAGTGTQYF

SEQ ID NO: 271341 - protein, 15 aa, Homo sapiens
  CDR3 for alpha chain variable domain of TCR clone 135671 (TRAV3, TRAJ22)
CAVRDRGGSARQLTF

SEQ ID NO: 271342 - protein, 15 aa, Homo sapiens
  CDR3 for beta chain variable domain of TCR clone 135671 (TRBV19, TRBJ2-1)
CASSPPGQGPMSSSS

SEQ ID NO: 271343 - protein, 14 aa, Homo sapiens
  CDR3 for alpha chain variable domain of TCR clone 135672 (TRAV23/DV6, TRAJ13)
CAAMYSGGYQKVTF

SEQ ID NO: 271344 - protein, 15 aa, Homo sapiens
  CDR3 for beta chain variable domain of TCR clone 135672 (TRBV19, TRBJ1-1)
CASTSGQIQNTEAFF

SEQ ID NO: 271345 - protein, 17 aa, Homo sapiens
  CDR3 for alpha chain variable domain of TCR clone 135673 (TRAV4, )
CLVDIQNPDPAGYQLRD

SEQ ID NO: 271346 - protein, 13 aa, Homo sapiens
  CDR3 for beta chain variable domain of TCR clone 135673 (TRBV7-9, TRBJ1-2)
CASSLKQNYGYIF

SEQ ID NO: 271347 - protein, 14 aa, Homo sapiens
  CDR3 for alpha chain variable domain of TCR clone 135674 (TRAV13-2, TRAJ4)
CAEKGPKGYDKLIF

SEQ ID NO: 271348 - protein, 16 aa, Homo sapiens
  CDR3 for beta chain variable domain of TCR clone 135674 (TRBV11-3, TRBJ2-5)
CASSSVVAGSTETQYF

SEQ ID NO: 271349 - protein, 14 aa, Homo sapiens
  CDR3 for alpha chain variable domain of TCR clone 135675 (TRAV12-2, TRAJ13)
CAVQKTGGYQKVTF

SEQ ID NO: 271350 - protein, 13 aa, Homo sapiens
  CDR3 for beta chain variable domain of TCR clone 135675 (TRBV7-9, TRBJ1-2)
CASSLKQNYGYTF

SEQ ID NO: 271351 - protein, 14 aa, Homo sapiens
  CDR3 for alpha chain variable domain of TCR clone 135676 (TRAV12-2, TRAJ44)
CAVNKAGTASKLTF

SEQ ID NO: 271352 - protein, 12 aa, Homo sapiens
  CDR3 for beta chain variable domain of TCR clone 135676 (TRBV19, TRBJ1-4)
CASKDWTGGLFF

SEQ ID NO: 271353 - protein, 14 aa, Homo sapiens
  CDR3 for alpha chain variable domain of TCR clone 135677 (TRAV13-2, TRAJ11)
FAETGNSGYSTLTF

SEQ ID NO: 271354 - protein, 11 aa, Homo sapiens
  CDR3 for beta chain variable domain of TCR clone 135677 (TRBV10-3, TRBJ2-7)
CVISEGLEQYF

SEQ ID NO: 271355 - protein, 13 aa, Homo sapiens
  CDR3 for alpha chain variable domain of TCR clone 135678 (TRAV12-3, TRAJ7)
CAMTPYGNNRPAF

SEQ ID NO: 271356 - protein, 16 aa, Homo sapiens
  CDR3 for beta chain variable domain of TCR clone 135678 (TRBV20-1, TRBJ1-4)
CSARPYGGELNEELFF

SEQ ID NO: 271357 - protein, 17 aa, Homo sapiens
  CDR3 for alpha chain variable domain of TCR clone 135679 (TRAV13-1, TRAJ52)
CAAGRNAGGTSHGKLTF

SEQ ID NO: 271358 - protein, 15 aa, Homo sapiens
  CDR3 for beta chain variable domain of TCR clone 135679 (TRBV6-3, TRBJ2-7)
CASSSPGTVFYEQYF

SEQ ID NO: 271359 - protein, 12 aa, Homo sapiens
  CDR3 for alpha chain variable domain of TCR clone 135680 (TRAV14/DV4, TRAJ6)
CAPMKGSYIPTF

SEQ ID NO: 271360 - protein, 14 aa, Homo sapiens
  CDR3 for beta chain variable domain of TCR clone 135680 (TRBV28, TRBJ2-7)
CASSPGQGAYEQYL

SEQ ID NO: 271361 - protein, 16 aa, Homo sapiens
  CDR3 for alpha chain variable domain of TCR clone 135681 (TRAV12-2, TRAJ40)
CAVIRGGTSGTYKYIF

SEQ ID NO: 271362 - protein, 13 aa, Homo sapiens
  CDR3 for beta chain variable domain of TCR clone 135681 (TRBV6-3, TRBJ2-1)
CASSYDNYNEQFF

SEQ ID NO: 271363 - protein, 14 aa, Homo sapiens
  CDR3 for alpha chain variable domain of TCR clone 135682 (TRAV4, TRAJ9)
CLVGSGTGGIKTIF

SEQ ID NO: 271364 - protein, 15 aa, Homo sapiens
  CDR3 for beta chain variable domain of TCR clone 135682 (TRBV7-2, TRBJ2-1)
CASSLASGRVNEQFF

SEQ ID NO: 271365 - protein, 14 aa, Homo sapiens
  CDR3 for alpha chain variable domain of TCR clone 135683 (TRAV12-2, TRAJ17)
CAVNIKAAGNKLTF

SEQ ID NO: 271366 - protein, 13 aa, Homo sapiens
  CDR3 for beta chain variable domain of TCR clone 135683 (TRBV7-8, TRBJ2-7)
CASSLTGGREQCF

SEQ ID NO: 271367 - protein, 13 aa, Homo sapiens
  CDR3 for alpha chain variable domain of TCR clone 135684 (TRAV2, TRAJ29)
CAAQNSGNTPLVF

SEQ ID NO: 271368 - protein, 14 aa, Homo sapiens
  CDR3 for beta chain variable domain of TCR clone 135684 (TRBV7-9, TRBJ2-4)
CASSLAMGCNIQYF

SEQ ID NO: 271369 - protein, 10 aa, Homo sapiens
  CDR3 for alpha chain variable domain of TCR clone 135685 (TRAV23/DV6, TRAJ31)
CARGGARLMF

SEQ ID NO: 271370 - protein, 14 aa, Homo sapiens
  CDR3 for beta chain variable domain of TCR clone 135685 (TRBV7-2, TRBJ2-5)
CASWQERFRETQYF

SEQ ID NO: 271371 - protein, 12 aa, Homo sapiens
  CDR3 for alpha chain variable domain of TCR clone 135686 (TRAV8-4, TRAJ43)
CAVSVNNNDMRF

SEQ ID NO: 271372 - protein, 14 aa, Homo sapiens
  CDR3 for beta chain variable domain of TCR clone 135686 (TRBV11-2, TRBJ1-2)
CASSLGTADYGYTF

SEQ ID NO: 271373 - protein, 13 aa, Homo sapiens
  CDR3 for alpha chain variable domain of TCR clone 135687 (TRAV12-2, TRAJ13)
CAVTAGGYQKVTF

SEQ ID NO: 271374 - protein, 14 aa, Homo sapiens
  CDR3 for beta chain variable domain of TCR clone 135687 (TRBV19, TRBJ2-2)
CASSTLHRSGELFF

SEQ ID NO: 271375 - protein, 16 aa, Homo sapiens
  CDR3 for alpha chain variable domain of TCR clone 135688 (TRAV26-1, TRAJ23)
CIVRVERYNQGGKLIF

SEQ ID NO: 271376 - protein, 14 aa, Homo sapiens
  CDR3 for beta chain variable domain of TCR clone 135688 (TRBV7-9, TRBJ2-2)
CASSLGHRTGELFF

SEQ ID NO: 271377 - protein, 13 aa, Homo sapiens
  CDR3 for alpha chain variable domain of TCR clone 135689 (TRAV12-2, TRAJ20)
CAVHPSNDYKLSF

SEQ ID NO: 271378 - protein, 17 aa, Homo sapiens
  CDR3 for beta chain variable domain of TCR clone 135689 (TRBV11-2, TRBJ2-1)
CASSLYPPGVEYNEQFF

SEQ ID NO: 271379 - protein, 13 aa, Homo sapiens
  CDR3 for alpha chain variable domain of TCR clone 135690 (TRAV2, TRAJ40)
CAVVLSGTYKYIF

SEQ ID NO: 271380 - protein, 14 aa, Homo sapiens
  CDR3 for beta chain variable domain of TCR clone 135690 (TRBV19, TRBJ2-1)
CASPTFVLSGEQFF

SEQ ID NO: 271381 - protein, 14 aa, Homo sapiens
  CDR3 for alpha chain variable domain of TCR clone 135691 (TRAV12-2, TRAJ40)
CAVKIPSGTYKYIF

SEQ ID NO: 271382 - protein, 12 aa, Homo sapiens
  CDR3 for beta chain variable domain of TCR clone 135691 (TRBV11-2, TRBJ2-1)
CASSLGNNEQFF

SEQ ID NO: 271383 - protein, 11 aa, Homo sapiens
  CDR3 for alpha chain variable domain of TCR clone 135692 (TRAV2, TRAJ23)
CAVETRGKLIF

SEQ ID NO: 271384 - protein, 18 aa, Homo sapiens
  CDR3 for beta chain variable domain of TCR clone 135692 (TRBV7-2, TRBJ2-3)
CASSLETSRGRKADTQYF

SEQ ID NO: 271385 - protein, 16 aa, Homo sapiens
  CDR3 for alpha chain variable domain of TCR clone 135693 (TRAV12-1, TRAJ22)
CVVNIISSGSARQLTF

SEQ ID NO: 271386 - protein, 14 aa, Homo sapiens
  CDR3 for beta chain variable domain of TCR clone 135693 (TRBV4-2, TRBJ1-2)
CASSPGGSNYGYTF

SEQ ID NO: 271387 - protein, 16 aa, Homo sapiens
  CDR3 for alpha chain variable domain of TCR clone 135694 (TRAV16, TRAJ52)
SALSAAGGTSYGKLKF

SEQ ID NO: 271388 - protein, 12 aa, Homo sapiens
  CDR3 for beta chain variable domain of TCR clone 135694 (TRBV12-4, TRBJ1-3)
CASSFSGNTIYF

SEQ ID NO: 271389 - protein, 11 aa, Homo sapiens
  CDR3 for alpha chain variable domain of TCR clone 135695 (TRAV1-2, TRAJ20)
CAGANDYKLSF

SEQ ID NO: 271390 - protein, 18 aa, Homo sapiens
  CDR3 for beta chain variable domain of TCR clone 135695 (TRBV20-1, TRBJ2-6)
CSAETTPTHGSGANVLTF

SEQ ID NO: 271391 - protein, 17 aa, Homo sapiens
  CDR3 for alpha chain variable domain of TCR clone 135696 (TRAV13-1, TRAJ52)
CAASSGAGSTSYGKLTF

SEQ ID NO: 271392 - protein, 15 aa, Homo sapiens
  CDR3 for beta chain variable domain of TCR clone 135696 (TRBV2, TRBJ2-1)
CASSELAGSYNEQFF

SEQ ID NO: 271393 - protein, 15 aa, Homo sapiens
  CDR3 for alpha chain variable domain of TCR clone 135697 (TRAV29/DV5, TRAJ28)
CAAGYSGAGSYQLTF

SEQ ID NO: 271394 - protein, 16 aa, Homo sapiens
  CDR3 for beta chain variable domain of TCR clone 135697 (TRBV7-9, TRBJ2-1)
CASSLVSGPSYNEQFF

SEQ ID NO: 271395 - protein, 14 aa, Homo sapiens
  CDR3 for alpha chain variable domain of TCR clone 135698 (TRAV12-1, TRAJ17)
CVVNYKAAGNKLTF

SEQ ID NO: 271396 - protein, 10 aa, Homo sapiens
  CDR3 for beta chain variable domain of TCR clone 135698 (TRBV15, TRBJ2-7)
AETGGYEQYF

SEQ ID NO: 271397 - protein, 15 aa, Homo sapiens
  CDR3 for alpha chain variable domain of TCR clone 135699 (TRAV12-2, TRAJ23)
CAVKPIYNQGGKLIF

SEQ ID NO: 271398 - protein, 16 aa, Homo sapiens
  CDR3 for beta chain variable domain of TCR clone 135699 (TRBV7-9, TRBJ2-1)
CASSDVAGGSYNEQFF

SEQ ID NO: 271399 - protein, 12 aa, Homo sapiens
  CDR3 for alpha chain variable domain of TCR clone 135700 (TRAV13-1, TRAJ21)
CAAKEGFNKFYF

SEQ ID NO: 271400 - protein, 17 aa, Homo sapiens
  CDR3 for beta chain variable domain of TCR clone 135700 (TRBV7-9, TRBJ2-1)
CASSLVASYPSYNEQFF

SEQ ID NO: 271401 - protein, 14 aa, Homo sapiens
  CDR3 for alpha chain variable domain of TCR clone 135701 (TRAV12-2, TRAJ44)
CAVNKAGTASKLTF

SEQ ID NO: 271402 - protein, 12 aa, Homo sapiens
  CDR3 for beta chain variable domain of TCR clone 135701 (TRBV19, TRBJ1-4)
CAIKDWPGGLFF

SEQ ID NO: 271403 - protein, 15 aa, Homo sapiens
  CDR3 for alpha chain variable domain of TCR clone 135702 (TRAV8-3, TRAJ45)
CASSYSGGGADGLTF

SEQ ID NO: 271404 - protein, 16 aa, Homo sapiens
  CDR3 for beta chain variable domain of TCR clone 135702 (TRBV27, TRBJ2-2)
CASSFRGLVRTGELYF

SEQ ID NO: 271405 - protein, 13 aa, Homo sapiens
  CDR3 for alpha chain variable domain of TCR clone 135703 (TRAV17, TRAJ9)
CATDYTGGLKPIF

SEQ ID NO: 271406 - protein, 16 aa, Homo sapiens
  CDR3 for beta chain variable domain of TCR clone 135703 (TRBV7-7, TRBJ2-1)
CASSLASGTSYNEQFF

SEQ ID NO: 271407 - protein, 11 aa, Homo sapiens
  CDR3 for alpha chain variable domain of TCR clone 135704 (TRAV1-1, TRAJ16)
CAAGDGQKLLF

SEQ ID NO: 271408 - protein, 15 aa, Homo sapiens
  CDR3 for beta chain variable domain of TCR clone 135704 (TRBV28, TRBJ1-2)
CASIPQGSDDSGYTF

SEQ ID NO: 271409 - protein, 12 aa, Homo sapiens
  CDR3 for alpha chain variable domain of TCR clone 135705 (TRAV1-1, TRAJ30)
CAVRGRDDKIIF

SEQ ID NO: 271410 - protein, 13 aa, Homo sapiens
  CDR3 for beta chain variable domain of TCR clone 135705 (TRBV19, TRBJ1-2)
CASSVPGQDGYTF

SEQ ID NO: 271411 - protein, 14 aa, Homo sapiens
  CDR3 for alpha chain variable domain of TCR clone 135706 (TRAV14/DV4, TRAJ15)
CAMSRDQAGTALIF

SEQ ID NO: 271412 - protein, 16 aa, Homo sapiens
  CDR3 for beta chain variable domain of TCR clone 135706 (TRBV15, TRBJ2-3)
CATSRDLGIVADTQYF

SEQ ID NO: 271413 - protein, 13 aa, Homo sapiens
  CDR3 for alpha chain variable domain of TCR clone 135707 (TRAV13-1, TRAJ6)
CAASKGGSYIPTF

SEQ ID NO: 271414 - protein, 14 aa, Homo sapiens
  CDR3 for beta chain variable domain of TCR clone 135707 (TRBV7-2, TRBJ1-1)
CASSFLTGTTEAFF

SEQ ID NO: 271415 - protein, 13 aa, Homo sapiens
  CDR3 for alpha chain variable domain of TCR clone 135708 (TRAV22, TRAJ29)
CAVRGSGNTPLVF

SEQ ID NO: 271416 - protein, 14 aa, Homo sapiens
  CDR3 for beta chain variable domain of TCR clone 135708 (TRBV5-4, TRBJ1-1)
CASSLDSRRDEAFF

SEQ ID NO: 271417 - protein, 15 aa, Homo sapiens
  CDR3 for alpha chain variable domain of TCR clone 135709 (TRAV23/DV6, TRAJ18)
CAARYRGSTLGRLSF

SEQ ID NO: 271418 - protein, 16 aa, Homo sapiens
  CDR3 for beta chain variable domain of TCR clone 135709 (TRBV5-1, TRBJ2-1)
CASSIRSGGSYNEQFF

SEQ ID NO: 271419 - protein, 13 aa, Homo sapiens
  CDR3 for alpha chain variable domain of TCR clone 135710 (TRAV13-2, TRAJ41)
CAESINSGYAINF

SEQ ID NO: 271420 - protein, 14 aa, Homo sapiens
  CDR3 for beta chain variable domain of TCR clone 135710 (TRBV2, TRBJ2-1)
CASSEALDGNEQFF

SEQ ID NO: 271421 - protein, 13 aa, Homo sapiens
  CDR3 for alpha chain variable domain of TCR clone 135711 (TRAV12-1, TRAJ5)
CGFTDTGRRALTF

SEQ ID NO: 271422 - protein, 14 aa, Homo sapiens
  CDR3 for beta chain variable domain of TCR clone 135711 (TRBV20-1, TRBJ2-5)
CSARDGRAGETQYF

SEQ ID NO: 271423 - protein, 14 aa, Homo sapiens
  CDR3 for alpha chain variable domain of TCR clone 135712 (TRAV29/DV5, TRAJ36)
CAARRKTGANNIFF

SEQ ID NO: 271424 - protein, 12 aa, Homo sapiens
  CDR3 for beta chain variable domain of TCR clone 135712 (TRBV12-5, TRBJ2-5)
CASGQGVETQYF

SEQ ID NO: 271425 - protein, 13 aa, Homo sapiens
  CDR3 for alpha chain variable domain of TCR clone 135713 (TRAV13-1, TRAJ10)
CAALEGGGNKLNF

SEQ ID NO: 271426 - protein, 11 aa, Homo sapiens
  CDR3 for beta chain variable domain of TCR clone 135713 (TRBV6-3, TRBJ2-7)
CASSFSYEQYF

SEQ ID NO: 271427 - protein, 13 aa, Homo sapiens
  CDR3 for alpha chain variable domain of TCR clone 135714 (TRAV8-3, TRAJ15)
CAVGIQAGTALIF

SEQ ID NO: 271428 - protein, 17 aa, Homo sapiens
  CDR3 for beta chain variable domain of TCR clone 135714 (TRBV20-1, TRBJ2-1)
CSARDPRAGVSYNEQFF

SEQ ID NO: 271429 - protein, 16 aa, Homo sapiens
  CDR3 for alpha chain variable domain of TCR clone 135715 (TRAV3, TRAJ37)
CVVRGKGSGKTGKRIF

SEQ ID NO: 271430 - protein, 15 aa, Homo sapiens
  CDR3 for beta chain variable domain of TCR clone 135715 (TRBV7-9, TRBJ2-2)
CASGPLDTFPGELFF

SEQ ID NO: 271431 - protein, 15 aa, Homo sapiens
  CDR3 for alpha chain variable domain of TCR clone 135716 (TRAV8-3, TRAJ42)
CAGTNYGGSQGNLIF

SEQ ID NO: 271432 - protein, 12 aa, Homo sapiens
  CDR3 for beta chain variable domain of TCR clone 135716 (TRBV29-1, TRBJ2-3)
CSVTGGADTQYF

SEQ ID NO: 271433 - protein, 13 aa, Homo sapiens
  CDR3 for alpha chain variable domain of TCR clone 135717 (TRAV29/DV5, TRAJ31)
CAASRNNNARLMF

SEQ ID NO: 271434 - protein, 15 aa, Homo sapiens
  CDR3 for beta chain variable domain of TCR clone 135717 (TRBV20-1, TRBJ1-1)
CSASRGVTGNTEAFF

SEQ ID NO: 271435 - protein, 12 aa, Homo sapiens
  CDR3 for alpha chain variable domain of TCR clone 135718 (TRAV13-2, TRAJ32)
MNYGSATNKLIF

SEQ ID NO: 271436 - protein, 14 aa, Homo sapiens
  CDR3 for beta chain variable domain of TCR clone 135718 (TRBV15, TRBJ2-5)
CATSSTGYQETQYF

SEQ ID NO: 271437 - protein, 14 aa, Homo sapiens
  CDR3 for alpha chain variable domain of TCR clone 135719 (TRAV1-2, TRAJ16)
CAVNRFSDGQELLF

SEQ ID NO: 271438 - protein, 14 aa, Homo sapiens
  CDR3 for beta chain variable domain of TCR clone 135719 (TRBV3-1, TRBJ2-5)
CASSQGPDQETQYF

SEQ ID NO: 271439 - protein, 14 aa, Homo sapiens
  CDR3 for alpha chain variable domain of TCR clone 135720 (TRAV23/DV6, TRAJ37)
CAASTSSNTVKLIF

SEQ ID NO: 271440 - protein, 12 aa, Homo sapiens
  CDR3 for beta chain variable domain of TCR clone 135720 (TRBV27, TRBJ2-2)
CASKLFTGELFF

SEQ ID NO: 271441 - protein, 14 aa, Homo sapiens
  CDR3 for alpha chain variable domain of TCR clone 135721 (TRAV1-2, TRAJ8)
CAVREDTGFQKLVF

SEQ ID NO: 271442 - protein, 15 aa, Homo sapiens
  CDR3 for beta chain variable domain of TCR clone 135721 (TRBV11-2, TRBJ2-1)
CASSRNRGLMYEQFF

SEQ ID NO: 271443 - protein, 15 aa, Homo sapiens
  CDR3 for alpha chain variable domain of TCR clone 135722 (TRAV21, TRAJ53)
CATLNSGGSNYKLTF

SEQ ID NO: 271444 - protein, 13 aa, Homo sapiens
  CDR3 for beta chain variable domain of TCR clone 135722 (TRBV19, TRBJ1-3)
CASRLSLGNTIYF

SEQ ID NO: 271445 - protein, 16 aa, Homo sapiens
  CDR3 for alpha chain variable domain of TCR clone 135723 (TRAV4, TRAJ22)
CLVGDLSSGSARQLTF

SEQ ID NO: 271446 - protein, 16 aa, Homo sapiens
  CDR3 for beta chain variable domain of TCR clone 135723 (TRBV7-9, TRBJ2-1)
CASSDVAGGSYNEQVF

SEQ ID NO: 271447 - protein, 14 aa, Homo sapiens
  CDR3 for alpha chain variable domain of TCR clone 135724 (TRAV8-1, TRAJ22)
CAAPSSGFARQLTF

SEQ ID NO: 271448 - protein, 14 aa, Homo sapiens
  CDR3 for beta chain variable domain of TCR clone 135724 (TRBV9, TRBJ2-2)
CASSVGQGAGELFF

SEQ ID NO: 271449 - protein, 14 aa, Homo sapiens
  CDR3 for alpha chain variable domain of TCR clone 135725 (TRAV1-2, TRAJ8)
CAVREDTGVQKLVF

SEQ ID NO: 271450 - protein, 16 aa, Homo sapiens
  CDR3 for beta chain variable domain of TCR clone 135725 (TRBV4-2, TRBJ2-1)
CASSQGEGSIHNEQFF

SEQ ID NO: 271451 - protein, 12 aa, Homo sapiens
  CDR3 for alpha chain variable domain of TCR clone 135726 (TRAV23/DV6, TRAJ16)
CAATGTGQKLLF

SEQ ID NO: 271452 - protein, 14 aa, Homo sapiens
  CDR3 for beta chain variable domain of TCR clone 135726 (TRBV6-3, TRBJ2-1)
CASLHSAYYNEQFF

SEQ ID NO: 271453 - protein, 14 aa, Homo sapiens
  CDR3 for alpha chain variable domain of TCR clone 135727 (TRAV17, TRAJ22)
CATVLSGSARQLTF

SEQ ID NO: 271454 - protein, 14 aa, Homo sapiens
  CDR3 for beta chain variable domain of TCR clone 135727 (TRBV11-2, TRBJ2-3)
CASSRLARTDTQYF

SEQ ID NO: 271455 - protein, 12 aa, Homo sapiens
  CDR3 for alpha chain variable domain of TCR clone 135728 (TRAV8-1, TRAJ31)
CAVINNNAKLMF

SEQ ID NO: 271456 - protein, 15 aa, Homo sapiens
  CDR3 for beta chain variable domain of TCR clone 135728 (TRBV20-1, TRBJ2-2)
CSARGGQGNTGELFF

SEQ ID NO: 271457 - protein, 14 aa, Homo sapiens
  CDR3 for alpha chain variable domain of TCR clone 135729 (TRAV8-4, TRAJ34)
CAVSDPGDTDKLIF

SEQ ID NO: 271458 - protein, 15 aa, Homo sapiens
  CDR3 for beta chain variable domain of TCR clone 135729 (TRBV6-6, TRBJ1-1)
CASSPRGDVETEACF

SEQ ID NO: 271459 - protein, 13 aa, Homo sapiens
  CDR3 for alpha chain variable domain of TCR clone 135730 (TRAV26-1, TRAJ34)
CIVRGHNTDKLIF

SEQ ID NO: 271460 - protein, 15 aa, Homo sapiens
  CDR3 for beta chain variable domain of TCR clone 135730 (TRBV4-1, TRBJ2-7)
CASSQEWGPSYEQFF

SEQ ID NO: 271461 - protein, 12 aa, Homo sapiens
  CDR3 for alpha chain variable domain of TCR clone 135731 (TRAV13-1, TRAJ21)
CAAKEGFKKFYF

SEQ ID NO: 271462 - protein, 12 aa, Homo sapiens
  CDR3 for beta chain variable domain of TCR clone 135731 (TRBV7-8, TRBJ2-7)
CASSLGDREQYF

SEQ ID NO: 271463 - protein, 11 aa, Homo sapiens
  CDR3 for alpha chain variable domain of TCR clone 135732 (TRAV8-3, TRAJ49)
CAVNTGNQFYF

SEQ ID NO: 271464 - protein, 12 aa, Homo sapiens
  CDR3 for beta chain variable domain of TCR clone 135732 (TRBV11-2, TRBJ2-7)
CASRPPADEQYF

SEQ ID NO: 271465 - protein, 15 aa, Homo sapiens
  CDR3 for alpha chain variable domain of TCR clone 135733 (TRAV3, TRAJ5)
CAVRDLDTGRRALTF

SEQ ID NO: 271466 - protein, 11 aa, Homo sapiens
  CDR3 for beta chain variable domain of TCR clone 135733 (TRBV6-1, TRBJ2-1)
CASISSNEQFF

SEQ ID NO: 271467 - protein, 15 aa, Homo sapiens
  CDR3 for alpha chain variable domain of TCR clone 135734 (TRAV12-3, TRAJ6)
CAMSATSGGSYIPTF

SEQ ID NO: 271468 - protein, 11 aa, Homo sapiens
  CDR3 for beta chain variable domain of TCR clone 135734 (TRBV20-1, TRBJ1-5)
CRAQGDQPQHF

SEQ ID NO: 271469 - protein, 10 aa, Homo sapiens
  CDR3 for alpha chain variable domain of TCR clone 135735 (TRAV23/DV6, TRAJ43)
CAAAVAALEQ

SEQ ID NO: 271470 - protein, 13 aa, Homo sapiens
  CDR3 for beta chain variable domain of TCR clone 135735 (TRBV12-4, TRBJ1-2)
CASSLRHGKGYTF

SEQ ID NO: 271471 - protein, 12 aa, Homo sapiens
  CDR3 for alpha chain variable domain of TCR clone 135736 (TRAV3, TRAJ34)
CAVSSYTDKLIF

SEQ ID NO: 271472 - protein, 14 aa, Homo sapiens
  CDR3 for beta chain variable domain of TCR clone 135736 (TRBV20-1, TRBJ1-1)
CSAQTRIGGTEAFF

SEQ ID NO: 271473 - protein, 15 aa, Homo sapiens
  CDR3 for alpha chain variable domain of TCR clone 135737 (TRAV3, TRAJ3)
CAVRDRDSSSSKITF

SEQ ID NO: 271474 - protein, 12 aa, Homo sapiens
  CDR3 for beta chain variable domain of TCR clone 135737 (TRBV29-1, TRBJ2-3)
CSVTGGADTQYF

SEQ ID NO: 271475 - protein, 15 aa, Homo sapiens
  CDR3 for alpha chain variable domain of TCR clone 135738 (TRAV3, TRAJ3)
CAVRDRDSSASKIIF

SEQ ID NO: 271476 - protein, 18 aa, Homo sapiens
  CDR3 for beta chain variable domain of TCR clone 135738 (TRBV25-1, TRBJ1-2)
CGSSGLQNGQGLIFGYTF

SEQ ID NO: 271477 - protein, 10 aa, Homo sapiens
  CDR3 for alpha chain variable domain of TCR clone 135739 (TRAV25, TRAJ20)
CAVNDYKLSC

SEQ ID NO: 271478 - protein, 13 aa, Homo sapiens
  CDR3 for beta chain variable domain of TCR clone 135739 (TRBV6-3, TRBJ2-7)
CASSFSGGYEQYF

SEQ ID NO: 271479 - protein, 14 aa, Homo sapiens
  CDR3 for alpha chain variable domain of TCR clone 135740 (TRAV38-1, TRAJ29)
CAFITPSGNTPLVF

SEQ ID NO: 271480 - protein, 17 aa, Homo sapiens
  CDR3 for beta chain variable domain of TCR clone 135740 (TRBV29-1, TRBJ2-1)
CSVVGLAGAYSYNEQFF

SEQ ID NO: 271481 - protein, 13 aa, Homo sapiens
  CDR3 for alpha chain variable domain of TCR clone 135741 (TRAV1-2, TRAJ31)
CAVRGYNNARLMF

SEQ ID NO: 271482 - protein, 15 aa, Homo sapiens
  CDR3 for beta chain variable domain of TCR clone 135741 (TRBV5-7, TRBJ2-7)
CASSLGPGRGREQYF

SEQ ID NO: 271483 - protein, 14 aa, Homo sapiens
  CDR3 for alpha chain variable domain of TCR clone 135742 (TRAV12-2, TRAJ53)
CAVKGGGSNYKMTF

SEQ ID NO: 271484 - protein, 15 aa, Homo sapiens
  CDR3 for beta chain variable domain of TCR clone 135742 (TRBV11-2, TRBJ2-2)
CASSSDRVSAGELFF

SEQ ID NO: 271485 - protein, 11 aa, Homo sapiens
  CDR3 for alpha chain variable domain of TCR clone 135743 (TRAV3, TRAJ21)
CAVGNFNKFYF

SEQ ID NO: 271486 - protein, 14 aa, Homo sapiens
  CDR3 for beta chain variable domain of TCR clone 135743 (TRBV27, TRBJ1-1)
CASSPQGKRAEAVF

SEQ ID NO: 271487 - protein, 12 aa, Homo sapiens
  CDR3 for alpha chain variable domain of TCR clone 135744 (TRAV12-1, TRAJ40)
GVVYSGTYKYIF

SEQ ID NO: 271488 - protein, 14 aa, Homo sapiens
  CDR3 for beta chain variable domain of TCR clone 135744 (TRBV20-1, TRBJ2-3)
CSARGGTSTDTQYF

SEQ ID NO: 271489 - protein, 10 aa, Homo sapiens
  CDR3 for alpha chain variable domain of TCR clone 135745 (TRAV12-1, TRAJ23)
CVVSGGKLIF

SEQ ID NO: 271490 - protein, 14 aa, Homo sapiens
  CDR3 for beta chain variable domain of TCR clone 135745 (TRBV18, TRBJ2-7)
CASSPRGGAYEQYF

SEQ ID NO: 271491 - protein, 12 aa, Homo sapiens
  CDR3 for alpha chain variable domain of TCR clone 135746 (TRAV13-1, TRAJ15)
CAASQAGTALIF

SEQ ID NO: 271492 - protein, 14 aa, Homo sapiens
  CDR3 for beta chain variable domain of TCR clone 135746 (TRBV19, TRBJ2-1)
CASPIFVLSGEQFF

SEQ ID NO: 271493 - protein, 19 aa, Homo sapiens
  CDR3 for alpha chain variable domain of TCR clone 135747 (TRAV26-1, TRAJ28)
CIVRVAHAYSGAGSYQLTF

SEQ ID NO: 271494 - protein, 10 aa, Homo sapiens
  CDR3 for beta chain variable domain of TCR clone 135747 (TRBV9, TRBJ2-2)
CASSVGGQGT

SEQ ID NO: 271495 - protein, 14 aa, Homo sapiens
  CDR3 for alpha chain variable domain of TCR clone 135748 (TRAV12-1, TRAJ46)
CVVTAKSSGDKLTF

SEQ ID NO: 271496 - protein, 17 aa, Homo sapiens
  CDR3 for beta chain variable domain of TCR clone 135748 (TRBV4-1, TRBJ2-3)
CASSQDPAGVPLDTQYF

SEQ ID NO: 271497 - protein, 13 aa, Homo sapiens
  CDR3 for alpha chain variable domain of TCR clone 135749 (TRAV13-2, TRAJ53)
CAENMGSNYKLTF

SEQ ID NO: 271498 - protein, 12 aa, Homo sapiens
  CDR3 for beta chain variable domain of TCR clone 135749 (TRBV4-1, TRBJ2-2)
CASSLGGGELFF

SEQ ID NO: 271499 - protein, 17 aa, Homo sapiens
  CDR3 for alpha chain variable domain of TCR clone 135750 (TRAV1-2, TRAJ9)
CLLPLCCLKYWRLKTIF

SEQ ID NO: 271500 - protein, 13 aa, Homo sapiens
  CDR3 for beta chain variable domain of TCR clone 135750 (TRBV19, TRBJ1-2)
CASSVPGQDGYTF

SEQ ID NO: 271501 - protein, 20 aa, Homo sapiens
  CDR3 for alpha chain variable domain of TCR clone 135751 (TRAV26-1, TRAJ42)
CCVLLHRQTYYRGSQGNLIF

SEQ ID NO: 271502 - protein, 16 aa, Homo sapiens
  CDR3 for beta chain variable domain of TCR clone 135751 (TRBV7-3, TRBJ2-2)
CASSLKRGTLSGELFF

SEQ ID NO: 271503 - protein, 18 aa, Homo sapiens
  CDR3 for alpha chain variable domain of TCR clone 135752 (TRAV13-1, TRAJ10)
CAASKGRAVTGGGNKLTI

SEQ ID NO: 271504 - protein, 14 aa, Homo sapiens
  CDR3 for beta chain variable domain of TCR clone 135752 (TRBV18, TRBJ2-7)
CASSPRGGAYEQYF

SEQ ID NO: 271505 - protein, 16 aa, Homo sapiens
  CDR3 for alpha chain variable domain of TCR clone 135753 (TRAV30, TRAJ24)
CGTEIVDADSWGKFQF

SEQ ID NO: 271506 - protein, 17 aa, Homo sapiens
  CDR3 for beta chain variable domain of TCR clone 135753 (TRBV18, TRBJ2-1)
CASSPRVAGGSYNEQFF

SEQ ID NO: 271507 - protein, 18 aa, Homo sapiens
  CDR3 for alpha chain variable domain of TCR clone 135754 (TRAV12-3, TRAJ52)
CAMSRTNAGGTSYGKLTF

SEQ ID NO: 271508 - protein, 17 aa, Homo sapiens
  CDR3 for beta chain variable domain of TCR clone 135754 (TRBV7-3, TRBJ2-3)
CDSSLMKWMRGADTQYF

SEQ ID NO: 271509 - protein, 11 aa, Homo sapiens
  CDR3 for alpha chain variable domain of TCR clone 135755 (TRAV26-1, TRAJ37)
CIVRVGRKLIF

SEQ ID NO: 271510 - protein, 15 aa, Homo sapiens
  CDR3 for beta chain variable domain of TCR clone 135755 (TRBV19, TRBJ2-7)
CASSIGLAVSYEQYC

SEQ ID NO: 271511 - protein, 15 aa, Homo sapiens
  CDR3 for alpha chain variable domain of TCR clone 135756 (TRAV2, TRAJ37)
CAVEDGSSNTGKLIF

SEQ ID NO: 271512 - protein, 15 aa, Homo sapiens
  CDR3 for beta chain variable domain of TCR clone 135756 (TRBV20-1, TRBJ2-7)
CSARDRVSGMDEQYF

SEQ ID NO: 271513 - protein, 18 aa, Homo sapiens
  CDR3 for alpha chain variable domain of TCR clone 135757 (TRAV26-1, TRAJ22)
CIVRVALISSGSARQLTF

SEQ ID NO: 271514 - protein, 12 aa, Homo sapiens
  CDR3 for beta chain variable domain of TCR clone 135757 (TRBV12-4, TRBJ2-7)
CASSLGGYEQYF

SEQ ID NO: 271515 - protein, 13 aa, Homo sapiens
  CDR3 for alpha chain variable domain of TCR clone 135758 (TRAV21, TRAJ27)
CAARPGNAGKSTF

SEQ ID NO: 271516 - protein, 14 aa, Homo sapiens
  CDR3 for beta chain variable domain of TCR clone 135758 (TRBV28, TRBJ2-3)
CASRSRDSTDTQYF

SEQ ID NO: 271517 - protein, 13 aa, Homo sapiens
  CDR3 for alpha chain variable domain of TCR clone 135759 (TRAV17, TRAJ39)
CATGDNAGNMLTF

SEQ ID NO: 271518 - protein, 11 aa, Homo sapiens
  CDR3 for beta chain variable domain of TCR clone 135759 (TRBV19, TRBJ1-2)
CASSPTGGEVA

SEQ ID NO: 271519 - protein, 15 aa, Homo sapiens
  CDR3 for alpha chain variable domain of TCR clone 135760 (TRAV8-2, TRAJ15)
CVVTMGNQAGPALTF

SEQ ID NO: 271520 - protein, 12 aa, Homo sapiens
  CDR3 for beta chain variable domain of TCR clone 135760 (TRBV6-1, TRBJ2-7)
CASSDYSYEQYF

SEQ ID NO: 271521 - protein, 13 aa, Homo sapiens
  CDR3 for alpha chain variable domain of TCR clone 135761 (TRAV13-1, TRAJ43)
CAASKNNNNDMRF

SEQ ID NO: 271522 - protein, 14 aa, Homo sapiens
  CDR3 for beta chain variable domain of TCR clone 135761 (TRBV12-5, TRBJ2-5)
CASGSRTHQETQYF

SEQ ID NO: 271523 - protein, 17 aa, Homo sapiens
  CDR3 for alpha chain variable domain of TCR clone 135762 (TRAV13-1, TRAJ4)
CSKYWTPPPGGYNMLIF

SEQ ID NO: 271524 - protein, 17 aa, Homo sapiens
  CDR3 for beta chain variable domain of TCR clone 135762 (TRBV7-8, TRBJ2-6)
CASSAGTGGAGANVLTF

SEQ ID NO: 271525 - protein, 14 aa, Homo sapiens
  CDR3 for alpha chain variable domain of TCR clone 135763 (TRAV1-2, TRAJ16)
CAVNRFSDGQKLLF

SEQ ID NO: 271526 - protein, 12 aa, Homo sapiens
  CDR3 for beta chain variable domain of TCR clone 135763 (TRBV28, TRBJ2-6)
CAIQVGANVLTF

SEQ ID NO: 271527 - protein, 14 aa, Homo sapiens
  CDR3 for alpha chain variable domain of TCR clone 135764 (TRAV12-3, TRAJ53)
CAMRSGGSNYKLTF

SEQ ID NO: 271528 - protein, 14 aa, Homo sapiens
  CDR3 for beta chain variable domain of TCR clone 135764 (TRBV18, TRBJ2-7)
RASSPPAGAPEQYF

SEQ ID NO: 271529 - protein, 14 aa, Homo sapiens
  CDR3 for alpha chain variable domain of TCR clone 135765 (TRAV8-6, TRAJ12)
CAVKAAYSSYKLIF

SEQ ID NO: 271530 - protein, 15 aa, Homo sapiens
  CDR3 for beta chain variable domain of TCR clone 135765 (TRBV5-1, TRBJ2-5)
CASSLGLAEQETRYF

SEQ ID NO: 271531 - protein, 12 aa, Homo sapiens
  CDR3 for alpha chain variable domain of TCR clone 135766 (TRAV13-2, TRAJ23)
CAERHRGGKLIF

SEQ ID NO: 271532 - protein, 15 aa, Homo sapiens
  CDR3 for beta chain variable domain of TCR clone 135766 (TRBV7-9, TRBJ2-2)
CASGPLDTFPGELFF

SEQ ID NO: 271533 - protein, 11 aa, Homo sapiens
  CDR3 for alpha chain variable domain of TCR clone 135767 (TRAV13-1, TRAJ30)
CTASRDDKIIF

SEQ ID NO: 271534 - protein, 15 aa, Homo sapiens
  CDR3 for beta chain variable domain of TCR clone 135767 (TRBV18, TRBJ1-1)
CASSPSSWVNTEAFF

SEQ ID NO: 271535 - protein, 15 aa, Homo sapiens
  CDR3 for alpha chain variable domain of TCR clone 135768 (TRAV17, TRAJ22)
CGTVAPSGSARQLTF

SEQ ID NO: 271536 - protein, 14 aa, Homo sapiens
  CDR3 for beta chain variable domain of TCR clone 135768 (TRBV20-1, TRBJ1-5)
CSARDGGSGQPQHF

SEQ ID NO: 271537 - protein, 10 aa, Homo sapiens
  CDR3 for alpha chain variable domain of TCR clone 135769 (TRAV1-2, TRAJ20)
CAVTDYKLSF

SEQ ID NO: 271538 - protein, 15 aa, Homo sapiens
  CDR3 for beta chain variable domain of TCR clone 135769 (TRBV7-2, TRBJ2-7)
CASSLLSSGSYEQYF

SEQ ID NO: 271539 - protein, 15 aa, Homo sapiens
  CDR3 for alpha chain variable domain of TCR clone 135770 (TRAV3, TRAJ37)
CAVRGVSGNTGKLIF

SEQ ID NO: 271540 - protein, 15 aa, Homo sapiens
  CDR3 for beta chain variable domain of TCR clone 135770 (TRBV7-3, TRBJ2-1)
CASSPTGGGEVEQFF

SEQ ID NO: 271541 - protein, 15 aa, Homo sapiens
  CDR3 for alpha chain variable domain of TCR clone 135771 (TRAV20, TRAJ43)
CAVQAGKSSNNDMRF

SEQ ID NO: 271542 - protein, 13 aa, Homo sapiens
  CDR3 for beta chain variable domain of TCR clone 135771 (TRBV27, TRBJ1-1)
CASSLSIGAEPFF

SEQ ID NO: 271543 - protein, 12 aa, Homo sapiens
  CDR3 for alpha chain variable domain of TCR clone 135772 (TRAV30, TRAJ39)
CGRGNAGNMLTF

SEQ ID NO: 271544 - protein, 14 aa, Homo sapiens
  CDR3 for beta chain variable domain of TCR clone 135772 (TRBV7-9, TRBJ2-5)
CASSLDTAQETQYF

SEQ ID NO: 271545 - protein, 14 aa, Homo sapiens
  CDR3 for alpha chain variable domain of TCR clone 135773 (TRAV26-1, TRAJ5)
CIVRVRFNRRALTF

SEQ ID NO: 271546 - protein, 17 aa, Homo sapiens
  CDR3 for beta chain variable domain of TCR clone 135773 (TRBV29-1, TRBJ2-3)
RSVEVLAGETSTDTQYF

SEQ ID NO: 271547 - protein, 14 aa, Homo sapiens
  CDR3 for alpha chain variable domain of TCR clone 135774 (TRAV16, TRAJ11)
CALSGLSGYSTLTF

SEQ ID NO: 271548 - protein, 13 aa, Homo sapiens
  CDR3 for beta chain variable domain of TCR clone 135774 (TRBV27, TRBJ2-7)
CASSLTTGYEQYF

SEQ ID NO: 271549 - protein, 15 aa, Homo sapiens
  CDR3 for alpha chain variable domain of TCR clone 135775 (TRAV17, TRAJ45)
CATAELRGCADGLTF

SEQ ID NO: 271550 - protein, 14 aa, Homo sapiens
  CDR3 for beta chain variable domain of TCR clone 135775 (TRBV3-1, TRBJ2-5)
CASSQAVRQETQYF

SEQ ID NO: 271551 - protein, 15 aa, Homo sapiens
  CDR3 for alpha chain variable domain of TCR clone 135776 (TRAV26-1, TRAJ29)
CIVRVEGSGNTPLVF

SEQ ID NO: 271552 - protein, 15 aa, Homo sapiens
  CDR3 for beta chain variable domain of TCR clone 135776 (TRBV20-1, TRBJ2-7)
CSARVPAAYFYEQYF

SEQ ID NO: 271553 - protein, 18 aa, Homo sapiens
  CDR3 for alpha chain variable domain of TCR clone 135777 (TRAV21, TRAJ52)
CAVRPSPAGGTSYGKLTF

SEQ ID NO: 271554 - protein, 13 aa, Homo sapiens
  CDR3 for beta chain variable domain of TCR clone 135777 (TRBV7-6, TRBJ2-3)
CASSLRSDNTQYF

SEQ ID NO: 271555 - protein, 12 aa, Homo sapiens
  CDR3 for alpha chain variable domain of TCR clone 135778 (TRAV12-1, TRAJ34)
CVVAGATDKLIF

SEQ ID NO: 271556 - protein, 15 aa, Homo sapiens
  CDR3 for beta chain variable domain of TCR clone 135778 (TRBV10-2, TRBJ2-6)
CASSEQGTGANVLTF

SEQ ID NO: 271557 - protein, 10 aa, Homo sapiens
  CDR3 for alpha chain variable domain of TCR clone 135779 (TRAV12-1, TRAJ37)
ARGNTGKLIF

SEQ ID NO: 271558 - protein, 15 aa, Homo sapiens
  CDR3 for beta chain variable domain of TCR clone 135779 (TRBV11-3, TRBJ2-1)
CASSLGTSGLNEQFF

SEQ ID NO: 271559 - protein, 16 aa, Homo sapiens
  CDR3 for alpha chain variable domain of TCR clone 135780 (TRAV17, TRAJ9)
CATGEWGGTGGFHTIF

SEQ ID NO: 271560 - protein, 12 aa, Homo sapiens
  CDR3 for beta chain variable domain of TCR clone 135780 (TRBV11-2, TRBJ2-1)
CASSPGNNEQFF

SEQ ID NO: 271561 - protein, 14 aa, Homo sapiens
  CDR3 for alpha chain variable domain of TCR clone 135781 (TRAV13-1, TRAJ26)
FAAPKGPDGQNFVF

SEQ ID NO: 271562 - protein, 15 aa, Homo sapiens
  CDR3 for beta chain variable domain of TCR clone 135781 (TRBV28, TRBJ2-5)
CASSFRQGALETQYF

SEQ ID NO: 271563 - protein, 16 aa, Homo sapiens
  CDR3 for alpha chain variable domain of TCR clone 135782 (TRAV30, TRAJ24)
CGTEIVDADSWGKFQF

SEQ ID NO: 271564 - protein, 16 aa, Homo sapiens
  CDR3 for beta chain variable domain of TCR clone 135782 (TRBV9, TRBJ1-2)
CASSVEEKVSPYGYTF

SEQ ID NO: 271565 - protein, 10 aa, Homo sapiens
  CDR3 for alpha chain variable domain of TCR clone 135783 (TRAV26-1, TRAJ40)
CIAGTYKYIF

SEQ ID NO: 271566 - protein, 15 aa, Homo sapiens
  CDR3 for beta chain variable domain of TCR clone 135783 (TRBV19, TRBJ2-1)
CASSSPGVPLEEQFF

SEQ ID NO: 271567 - protein, 12 aa, Homo sapiens
  CDR3 for alpha chain variable domain of TCR clone 135784 (TRAV3, TRAJ7)
CADLLWEQQTHF

SEQ ID NO: 271568 - protein, 13 aa, Homo sapiens
  CDR3 for beta chain variable domain of TCR clone 135784 (TRBV7-3, TRBJ2-5)
CASSFRGGETQYF

SEQ ID NO: 271569 - protein, 14 aa, Homo sapiens
  CDR3 for alpha chain variable domain of TCR clone 135785 (TRAV16, TRAJ37)
CALDISGNTGKLIF

SEQ ID NO: 271570 - protein, 13 aa, Homo sapiens
  CDR3 for beta chain variable domain of TCR clone 135785 (TRBV4-1, TRBJ2-2)
CASSQENTGELFF

SEQ ID NO: 271571 - protein, 18 aa, Homo sapiens
  CDR3 for alpha chain variable domain of TCR clone 135786 (TRAV16, TRAJ10)
CAPAREEKQTHLWDRHSA

SEQ ID NO: 271572 - protein, 15 aa, Homo sapiens
  CDR3 for beta chain variable domain of TCR clone 135786 (TRBV6-3, TRBJ2-7)
CASSSPGTVFYEQYF

SEQ ID NO: 271573 - protein, 13 aa, Homo sapiens
  CDR3 for alpha chain variable domain of TCR clone 135787 (TRAV13-2, TRAJ48)
CAEMDFGNEKLTF

SEQ ID NO: 271574 - protein, 13 aa, Homo sapiens
  CDR3 for beta chain variable domain of TCR clone 135787 (TRBV7-3, TRBJ1-1)
CASSLTQGTEAFF

SEQ ID NO: 271575 - protein, 12 aa, Homo sapiens
  CDR3 for alpha chain variable domain of TCR clone 135788 (TRAV12-1, TRAJ23)
CVVNWGGGKLIF

SEQ ID NO: 271576 - protein, 10 aa, Homo sapiens
  CDR3 for beta chain variable domain of TCR clone 135788 (TRBV27, TRBJ2-7)
VPSGGPKQYF

SEQ ID NO: 271577 - protein, 17 aa, Homo sapiens
  CDR3 for alpha chain variable domain of TCR clone 135789 (TRAV3, TRAJ6)
CAVRDGPRAGGSYIPKF

SEQ ID NO: 271578 - protein, 16 aa, Homo sapiens
  CDR3 for beta chain variable domain of TCR clone 135789 (TRBV4-1, TRBJ2-7)
CASSLTAGQATYEQYF

SEQ ID NO: 271579 - protein, 13 aa, Homo sapiens
  CDR3 for alpha chain variable domain of TCR clone 135790 (TRAV27, TRAJ41)
CAGEGNSGYALNF

SEQ ID NO: 271580 - protein, 12 aa, Homo sapiens
  CDR3 for beta chain variable domain of TCR clone 135790 (TRBV11-2, TRBJ2-1)
CASSPGNNEQFF

SEQ ID NO: 271581 - protein, 17 aa, Homo sapiens
  CDR3 for alpha chain variable domain of TCR clone 135791 (TRAV3, TRAJ38)
CAVRDCLNAGNNRKLIW

SEQ ID NO: 271582 - protein, 15 aa, Homo sapiens
  CDR3 for beta chain variable domain of TCR clone 135791 (TRBV4-2, TRBJ1-3)
CASSQDGAQGNTIYF

SEQ ID NO: 271583 - protein, 13 aa, Homo sapiens
  CDR3 for alpha chain variable domain of TCR clone 135792 (TRAV8-3, TRAJ43)
CAVGPDNNNDMRF

SEQ ID NO: 271584 - protein, 19 aa, Homo sapiens
  CDR3 for beta chain variable domain of TCR clone 135792 (TRBV7-2, TRBJ2-3)
CASSFLSRNWGGRTDTQYF

SEQ ID NO: 271585 - protein, 14 aa, Homo sapiens
  CDR3 for alpha chain variable domain of TCR clone 135793 (TRAV4, TRAJ17)
CLVGDMAAGNQLTF

SEQ ID NO: 271586 - protein, 13 aa, Homo sapiens
  CDR3 for beta chain variable domain of TCR clone 135793 (TRBV18, TRBJ2-7)
CASQSGGGYEQYF

SEQ ID NO: 271587 - protein, 13 aa, Homo sapiens
  CDR3 for alpha chain variable domain of TCR clone 135794 (TRAV12-2, TRAJ42)
CAVKRGSQGNLIF

SEQ ID NO: 271588 - protein, 12 aa, Homo sapiens
  CDR3 for beta chain variable domain of TCR clone 135794 (TRBV5-7, TRBJ1-2)
CAGSLVQNGDTF

SEQ ID NO: 271589 - protein, 14 aa, Homo sapiens
  CDR3 for alpha chain variable domain of TCR clone 135795 (TRAV1-2, TRAJ16)
CAVNRFSDGQKLRF

SEQ ID NO: 271590 - protein, 15 aa, Homo sapiens
  CDR3 for beta chain variable domain of TCR clone 135795 (TRBV11-3, TRBJ2-2)
CASSLGGRPTGELFF

SEQ ID NO: 271591 - protein, 14 aa, Homo sapiens
  CDR3 for alpha chain variable domain of TCR clone 135796 (TRAV1-2, TRAJ8)
CAVREATGFQNLVF

SEQ ID NO: 271592 - protein, 15 aa, Homo sapiens
  CDR3 for beta chain variable domain of TCR clone 135796 (TRBV4-1, TRBJ2-7)
CASSQNTGRLYEQYF

SEQ ID NO: 271593 - protein, 13 aa, Homo sapiens
  CDR3 for alpha chain variable domain of TCR clone 135797 (TRAV35, TRAJ42)
CAGFPASQGNLIF

SEQ ID NO: 271594 - protein, 14 aa, Homo sapiens
  CDR3 for beta chain variable domain of TCR clone 135797 (TRBV19, TRBJ2-1)
CASPTFVLSGEQFF

SEQ ID NO: 271595 - protein, 15 aa, Homo sapiens
  CDR3 for alpha chain variable domain of TCR clone 135798 (TRAV21, TRAJ24)
CAARSSTDSWGKLQF

SEQ ID NO: 271596 - protein, 11 aa, Homo sapiens
  CDR3 for beta chain variable domain of TCR clone 135798 (TRBV11-2, TRBJ2-2)
CASSVPGELFF

SEQ ID NO: 271597 - protein, 12 aa, Homo sapiens
  CDR3 for alpha chain variable domain of TCR clone 135799 (TRAV21, TRAJ11)
CAATSGYSTLTF

SEQ ID NO: 271598 - protein, 13 aa, Homo sapiens
  CDR3 for beta chain variable domain of TCR clone 135799 (TRBV20-1, TRBJ2-7)
CSAPELGVGEQYF

SEQ ID NO: 271599 - protein, 13 aa, Homo sapiens
  CDR3 for alpha chain variable domain of TCR clone 135800 (TRAV8-6, TRAJ49)
CAVITNNGNPFYF

SEQ ID NO: 271600 - protein, 14 aa, Homo sapiens
  CDR3 for beta chain variable domain of TCR clone 135800 (TRBV25-1, TRBJ1-1)
CASTHLGGNTEAFF

SEQ ID NO: 271601 - protein, 13 aa, Homo sapiens
  CDR3 for alpha chain variable domain of TCR clone 135801 (TRAV17, TRAJ37)
CATDPGNTGKLIF

SEQ ID NO: 271602 - protein, 14 aa, Homo sapiens
  CDR3 for beta chain variable domain of TCR clone 135801 (TRBV7-2, TRBJ2-7)
CASSPKTSFYEQYF

SEQ ID NO: 271603 - protein, 13 aa, Homo sapiens
  CDR3 for alpha chain variable domain of TCR clone 135802 (TRAV27, TRAJ3)
ASLRGSSASKIIF

SEQ ID NO: 271604 - protein, 17 aa, Homo sapiens
  CDR3 for beta chain variable domain of TCR clone 135802 (TRBV7-8, TRBJ2-6)
CASSAGTGGAGANVLTF

SEQ ID NO: 271605 - protein, 13 aa, Homo sapiens
  CDR3 for alpha chain variable domain of TCR clone 135803 (TRAV29/DV5, TRAJ31)
CAASRNNNARLMF

SEQ ID NO: 271606 - protein, 17 aa, Homo sapiens
  CDR3 for beta chain variable domain of TCR clone 135803 (TRBV20-1, TRBJ2-7)
CSAAGASGGGSSYEQYF

SEQ ID NO: 271607 - protein, 14 aa, Homo sapiens
  CDR3 for alpha chain variable domain of TCR clone 135804 (TRAV4, TRAJ26)
CLVGPHNYGQNFVF

SEQ ID NO: 271608 - protein, 17 aa, Homo sapiens
  CDR3 for beta chain variable domain of TCR clone 135804 (TRBV20-1, TRBJ2-1)
CSASSSGRAGSYNEQFF

SEQ ID NO: 271609 - protein, 14 aa, Homo sapiens
  CDR3 for alpha chain variable domain of TCR clone 135805 (TRAV26-2, TRAJ32)
CCVGYGGATNKLIF

SEQ ID NO: 271610 - protein, 15 aa, Homo sapiens
  CDR3 for beta chain variable domain of TCR clone 135805 (TRBV27, TRBJ2-1)
CASSNGGGSSNEQFF

SEQ ID NO: 271611 - protein, 13 aa, Homo sapiens
  CDR3 for alpha chain variable domain of TCR clone 135806 (TRAV27, TRAJ17)
CAGAATAGNKLTF

SEQ ID NO: 271612 - protein, 13 aa, Homo sapiens
  CDR3 for beta chain variable domain of TCR clone 135806 (TRBV7-7, TRBJ2-3)
CASSLSRADTQYF

SEQ ID NO: 271613 - protein, 19 aa, Homo sapiens
  CDR3 for alpha chain variable domain of TCR clone 135807 (TRAV13-1, TRAJ52)
CAASPYQNAGGTSYGKLTF

SEQ ID NO: 271614 - protein, 16 aa, Homo sapiens
  CDR3 for beta chain variable domain of TCR clone 135807 (TRBV6-1, TRBJ2-5)
CASSETLYRGAETQYF

SEQ ID NO: 271615 - protein, 15 aa, Homo sapiens
  CDR3 for alpha chain variable domain of TCR clone 135808 (TRAV12-3, TRAJ42)
CAMSGHGGSQGNLIF

SEQ ID NO: 271616 - protein, 15 aa, Homo sapiens
  CDR3 for beta chain variable domain of TCR clone 135808 (TRBV11-3, TRBJ2-3)
CASLKDGREGDTQYF

SEQ ID NO: 271617 - protein, 14 aa, Homo sapiens
  CDR3 for alpha chain variable domain of TCR clone 135809 (TRAV2, TRAJ37)
CAVDFTSKTGKLIL

SEQ ID NO: 271618 - protein, 15 aa, Homo sapiens
  CDR3 for beta chain variable domain of TCR clone 135809 (TRBV20-1, TRBJ1-1)
CSASRGVTGNTEAFF

SEQ ID NO: 271619 - protein, 14 aa, Homo sapiens
  CDR3 for alpha chain variable domain of TCR clone 135810 (TRAV3, TRAJ17)
CAVRDAAAGNKLTF

SEQ ID NO: 271620 - protein, 14 aa, Homo sapiens
  CDR3 for beta chain variable domain of TCR clone 135810 (TRBV4-1, TRBJ2-2)
CASSQAVNTGELFF

SEQ ID NO: 271621 - protein, 16 aa, Homo sapiens
  CDR3 for alpha chain variable domain of TCR clone 135811 (TRAV3, TRAJ37)
CAVRGKGSGNTGKLIF

SEQ ID NO: 271622 - protein, 16 aa, Homo sapiens
  CDR3 for beta chain variable domain of TCR clone 135811 (TRBV12-4, TRBJ1-5)
CASSRLVGGSNQPQHF

SEQ ID NO: 271623 - protein, 14 aa, Homo sapiens
  CDR3 for alpha chain variable domain of TCR clone 135812 (TRAV20, TRAJ10)
CAVRVKGGGNKLTF

SEQ ID NO: 271624 - protein, 14 aa, Homo sapiens
  CDR3 for beta chain variable domain of TCR clone 135812 (TRBV7-2, TRBJ1-2)
CASSQTGSTYGYTF

SEQ ID NO: 271625 - protein, 15 aa, Homo sapiens
  CDR3 for alpha chain variable domain of TCR clone 135813 (TRAV23/DV6, TRAJ4)
CAASPLRGGYNKLIF

SEQ ID NO: 271626 - protein, 15 aa, Homo sapiens
  CDR3 for beta chain variable domain of TCR clone 135813 (TRBV7-9, TRBJ1-6)
CASSSPGRGNSPIHF

SEQ ID NO: 271627 - protein, 17 aa, Homo sapiens
  CDR3 for alpha chain variable domain of TCR clone 135814 (TRAV13-1, TRAJ52)
CAAGSNACGTSYGKLTF

SEQ ID NO: 271628 - protein, 13 aa, Homo sapiens
  CDR3 for beta chain variable domain of TCR clone 135814 (TRBV7-2, TRBJ1-1)
CASNLKGAKVAFF

SEQ ID NO: 271629 - protein, 14 aa, Homo sapiens
  CDR3 for alpha chain variable domain of TCR clone 135815 (TRAV12-2, TRAJ11)
CAVNREPGYSTLTF

SEQ ID NO: 271630 - protein, 13 aa, Homo sapiens
  CDR3 for beta chain variable domain of TCR clone 135815 (TRBV7-9, TRBJ1-2)
CASSLKQNYGYTF

SEQ ID NO: 271631 - protein, 16 aa, Homo sapiens
  CDR3 for alpha chain variable domain of TCR clone 135816 (TRAV30, TRAJ24)
CGTEIVDAYSWGKFQF

SEQ ID NO: 271632 - protein, 12 aa, Homo sapiens
  CDR3 for beta chain variable domain of TCR clone 135816 (TRBV11-2, TRBJ2-1)
CASSPGNNEQFF

SEQ ID NO: 271633 - protein, 14 aa, Homo sapiens
  CDR3 for alpha chain variable domain of TCR clone 135817 (TRAV12-2, TRAJ17)
CAVLFKAAGNKLTF

SEQ ID NO: 271634 - protein, 11 aa, Homo sapiens
  CDR3 for beta chain variable domain of TCR clone 135817 (TRBV29-1, TRBJ2-5)
CSEERTGTQYF

SEQ ID NO: 271635 - protein, 14 aa, Homo sapiens
  CDR3 for alpha chain variable domain of TCR clone 135818 (TRAV12-2, TRAJ6)
CAGGVSGGSYIPTF

SEQ ID NO: 271636 - protein, 14 aa, Homo sapiens
  CDR3 for beta chain variable domain of TCR clone 135818 (TRBV7-2, TRBJ2-7)
CASSPKTSFYEQYF

SEQ ID NO: 271637 - protein, 16 aa, Homo sapiens
  CDR3 for alpha chain variable domain of TCR clone 135819 (TRAV26-1, TRAJ22)
CIVRVPSSGSARQLTF

SEQ ID NO: 271638 - protein, 17 aa, Homo sapiens
  CDR3 for beta chain variable domain of TCR clone 135819 (TRBV28, TRBJ2-5)
CASSRQGGLAGAETQYF

SEQ ID NO: 271639 - protein, 12 aa, Homo sapiens
  CDR3 for alpha chain variable domain of TCR clone 135820 (TRAV16, TRAJ10)
CSRTGGGSKLTF

SEQ ID NO: 271640 - protein, 15 aa, Homo sapiens
  CDR3 for beta chain variable domain of TCR clone 135820 (TRBV6-3, TRBJ2-7)
CASSSPGTVFYEQYV

SEQ ID NO: 271641 - protein, 15 aa, Homo sapiens
  CDR3 for alpha chain variable domain of TCR clone 135821 (TRAV12-2, TRAJ53)
CAVNGGEGSNYKLTF

SEQ ID NO: 271642 - protein, 12 aa, Homo sapiens
  CDR3 for beta chain variable domain of TCR clone 135821 (TRBV27, TRBJ1-6)
CASKLFQGPLHF

SEQ ID NO: 271643 - protein, 13 aa, Homo sapiens
  CDR3 for alpha chain variable domain of TCR clone 135822 (TRAV36/DV7, TRAJ49)
CAGDSNTGNQFYF

SEQ ID NO: 271644 - protein, 16 aa, Homo sapiens
  CDR3 for beta chain variable domain of TCR clone 135822 (TRBV2, TRBJ2-3)
CASSTSVEGVTDTQYF

SEQ ID NO: 271645 - protein, 20 aa, Homo sapiens
  CDR3 for alpha chain variable domain of TCR clone 135823 (TRAV1-2, TRAJ8)
CAVREDTGFQKLVLELAPDF

SEQ ID NO: 271646 - protein, 14 aa, Homo sapiens
  CDR3 for beta chain variable domain of TCR clone 135823 (TRBV7-9, TRBJ1-1)
CASSLGGANTEAFF

SEQ ID NO: 271647 - protein, 14 aa, Homo sapiens
  CDR3 for alpha chain variable domain of TCR clone 135824 (TRAV16, TRAJ31)
CALSGRNNNARLMV

SEQ ID NO: 271648 - protein, 12 aa, Homo sapiens
  CDR3 for beta chain variable domain of TCR clone 135824 (TRBV11-2, TRBJ1-2)
CASSREGDGYTL

SEQ ID NO: 271649 - protein, 15 aa, Homo sapiens
  CDR3 for alpha chain variable domain of TCR clone 135825 (TRAV13-1, TRAJ52)
CALSTGGTSYGKLTF

SEQ ID NO: 271650 - protein, 14 aa, Homo sapiens
  CDR3 for beta chain variable domain of TCR clone 135825 (TRBV20-1, TRBJ2-5)
CSASDSGSGETQYF

SEQ ID NO: 271651 - protein, 14 aa, Homo sapiens
  CDR3 for alpha chain variable domain of TCR clone 135826 (TRAV12-2, TRAJ15)
CAPHTGQAGTALIF

SEQ ID NO: 271652 - protein, 14 aa, Homo sapiens
  CDR3 for beta chain variable domain of TCR clone 135826 (TRBV7-6, TRBJ2-3)
CASSLGTVTDTQYF

SEQ ID NO: 271653 - protein, 12 aa, Homo sapiens
  CDR3 for alpha chain variable domain of TCR clone 135827 (TRAV8-3, TRAJ26)
CAGDNYGQNFVF

SEQ ID NO: 271654 - protein, 13 aa, Homo sapiens
  CDR3 for beta chain variable domain of TCR clone 135827 (TRBV9, TRBJ2-7)
CASSVGTAYEQYF

SEQ ID NO: 271655 - protein, 17 aa, Homo sapiens
  CDR3 for alpha chain variable domain of TCR clone 135828 (TRAV20, TRAJ53)
CAVQAQGSGGSNYKLTS

SEQ ID NO: 271656 - protein, 11 aa, Homo sapiens
  CDR3 for beta chain variable domain of TCR clone 135828 (TRBV18, TRBJ2-5)
CASSPRETQYF

SEQ ID NO: 271657 - protein, 14 aa, Homo sapiens
  CDR3 for alpha chain variable domain of TCR clone 135829 (TRAV1-2, TRAJ16)
CAVNRFSDGQKLLF

SEQ ID NO: 271658 - protein, 19 aa, Homo sapiens
  CDR3 for beta chain variable domain of TCR clone 135829 (TRBV25-1, TRBJ2-2)
CAILVSRVDRGRKTGELFF

SEQ ID NO: 271659 - protein, 14 aa, Homo sapiens
  CDR3 for alpha chain variable domain of TCR clone 135830 (TRAV9-2, TRAJ39)
CALYNYNAGNMLTF

SEQ ID NO: 271660 - protein, 17 aa, Homo sapiens
  CDR3 for beta chain variable domain of TCR clone 135830 (TRBV9, TRBJ2-3)
CASRSTAGGPSTDTQYF

SEQ ID NO: 271661 - protein, 12 aa, Homo sapiens
  CDR3 for alpha chain variable domain of TCR clone 135831 (TRAV8-4, TRAJ43)
CAVSVNNNDMRF

SEQ ID NO: 271662 - protein, 14 aa, Homo sapiens
  CDR3 for beta chain variable domain of TCR clone 135831 (TRBV11-2, TRBJ1-2)
CASGLGTANYGYTF

SEQ ID NO: 271663 - protein, 14 aa, Homo sapiens
  CDR3 for alpha chain variable domain of TCR clone 135832 (TRAV17, TRAJ54)
CATDDNQGAQKLVF

SEQ ID NO: 271664 - protein, 14 aa, Homo sapiens
  CDR3 for beta chain variable domain of TCR clone 135832 (TRBV28, TRBJ2-1)
CASSLVAPYNEQFF

SEQ ID NO: 271665 - protein, 15 aa, Homo sapiens
  CDR3 for alpha chain variable domain of TCR clone 135833 (TRAV21, TRAJ53)
CATLNSGGSDYKLTF

SEQ ID NO: 271666 - protein, 12 aa, Homo sapiens
  CDR3 for beta chain variable domain of TCR clone 135833 (TRBV14, TRBJ2-4)
CASSNLKSIQYF

SEQ ID NO: 271667 - protein, 14 aa, Homo sapiens
  CDR3 for alpha chain variable domain of TCR clone 135834 (TRAV12-2, TRAJ32)
CAHPESGATNKLIF

SEQ ID NO: 271668 - protein, 14 aa, Homo sapiens
  CDR3 for beta chain variable domain of TCR clone 135834 (TRBV4-2, TRBJ2-3)
CASRETRAPGMRYF

SEQ ID NO: 271669 - protein, 16 aa, Homo sapiens
  CDR3 for alpha chain variable domain of TCR clone 135835 (TRAV30, TRAJ24)
CGAEIVDADSWGKFQF

SEQ ID NO: 271670 - protein, 13 aa, Homo sapiens
  CDR3 for beta chain variable domain of TCR clone 135835 (TRBV5-5, TRBJ2-2)
CASTLGGAGELFF

SEQ ID NO: 271671 - protein, 11 aa, Homo sapiens
  CDR3 for alpha chain variable domain of TCR clone 135836 (TRAV3, TRAJ21)
CAVGNFNNFYF

SEQ ID NO: 271672 - protein, 16 aa, Homo sapiens
  CDR3 for beta chain variable domain of TCR clone 135836 (TRBV19, TRBJ2-1)
CASSKAGPRSYNEQFF

SEQ ID NO: 271673 - protein, 15 aa, Homo sapiens
  CDR3 for alpha chain variable domain of TCR clone 135837 (TRAV8-3, TRAJ27)
CAVGPSKTNAVKSTF

SEQ ID NO: 271674 - protein, 15 aa, Homo sapiens
  CDR3 for beta chain variable domain of TCR clone 135837 (TRBV7-2, TRBJ2-1)
CASSSGLAGGNEQSF

SEQ ID NO: 271675 - protein, 13 aa, Homo sapiens
  CDR3 for alpha chain variable domain of TCR clone 135838 (TRAV17, TRAJ9)
CATDYTGGFKTIF

SEQ ID NO: 271676 - protein, 16 aa, Homo sapiens
  CDR3 for beta chain variable domain of TCR clone 135838 (TRBV7-9, TRBJ1-2)
CASSLGFSSGEDGYTF

SEQ ID NO: 271677 - protein, 13 aa, Homo sapiens
  CDR3 for alpha chain variable domain of TCR clone 135839 (TRAV5, TRAJ13)
CAESLGGYQKVIF

SEQ ID NO: 271678 - protein, 16 aa, Homo sapiens
  CDR3 for beta chain variable domain of TCR clone 135839 (TRBV11-2, TRBJ2-3)
CASSSRTSGGAGTQYF

SEQ ID NO: 271679 - protein, 12 aa, Homo sapiens
  CDR3 for alpha chain variable domain of TCR clone 135840 (TRAV13-2, TRAJ23)
CAERRRGGKLIF

SEQ ID NO: 271680 - protein, 19 aa, Homo sapiens
  CDR3 for beta chain variable domain of TCR clone 135840 (TRBV19, TRBJ2-5)
CASSIGQVTDFFLGETQYF

SEQ ID NO: 271681 - protein, 13 aa, Homo sapiens
  CDR3 for alpha chain variable domain of TCR clone 135841 (TRAV12-2, TRAJ24)
CAVSTDSWEKLQF

SEQ ID NO: 271682 - protein, 12 aa, Homo sapiens
  CDR3 for beta chain variable domain of TCR clone 135841 (TRBV7-6, TRBJ2-7)
CASSLADSEQYF

SEQ ID NO: 271683 - protein, 16 aa, Homo sapiens
  CDR3 for alpha chain variable domain of TCR clone 135842 (TRAV3, TRAJ37)
CAVRGKGSGNTAKLIF

SEQ ID NO: 271684 - protein, 13 aa, Homo sapiens
  CDR3 for beta chain variable domain of TCR clone 135842 (TRBV7-2, TRBJ2-2)
CASSSVRAGELFF

SEQ ID NO: 271685 - protein, 14 aa, Homo sapiens
  CDR3 for alpha chain variable domain of TCR clone 135843 (TRAV8-2, TRAJ4)
CVVSPSGGYNKLFF

SEQ ID NO: 271686 - protein, 15 aa, Homo sapiens
  CDR3 for beta chain variable domain of TCR clone 135843 (TRBV2, TRBJ2-1)
CASSELAGSYNEQFF

SEQ ID NO: 271687 - protein, 14 aa, Homo sapiens
  CDR3 for alpha chain variable domain of TCR clone 135844 (TRAV1-2, TRAJ8)
CAVREDTGFQKLVF

SEQ ID NO: 271688 - protein, 15 aa, Homo sapiens
  CDR3 for beta chain variable domain of TCR clone 135844 (TRBV3-1, TRBJ2-1)
CASSQDYTPRGEQFF

SEQ ID NO: 271689 - protein, 14 aa, Homo sapiens
  CDR3 for alpha chain variable domain of TCR clone 135845 (TRAV1-2, TRAJ8)
CAVREDTGFQKLVF

SEQ ID NO: 271690 - protein, 14 aa, Homo sapiens
  CDR3 for beta chain variable domain of TCR clone 135845 (TRBV9, TRBJ2-1)
CASSVVAAYNEQFF

SEQ ID NO: 271691 - protein, 20 aa, Homo sapiens
  CDR3 for alpha chain variable domain of TCR clone 135846 (TRAV4, TRAJ28)
CLVGDNRAETLGLGVTNSIS

SEQ ID NO: 271692 - protein, 13 aa, Homo sapiens
  CDR3 for beta chain variable domain of TCR clone 135846 (TRBV20-1, TRBJ2-7)
CSATHTSGYEQYF

SEQ ID NO: 271693 - protein, 13 aa, Homo sapiens
  CDR3 for alpha chain variable domain of TCR clone 135847 (TRAV3, TRAJ21)
CAVREPDFNKFYF

SEQ ID NO: 271694 - protein, 12 aa, Homo sapiens
  CDR3 for beta chain variable domain of TCR clone 135847 (TRBV5-1, TRBJ2-4)
LAGEWTKNSQYF

SEQ ID NO: 271695 - protein, 12 aa, Homo sapiens
  CDR3 for alpha chain variable domain of TCR clone 135848 (TRAV12-3, TRAJ32)
CAMGGATNKLIF

SEQ ID NO: 271696 - protein, 12 aa, Homo sapiens
  CDR3 for beta chain variable domain of TCR clone 135848 (TRBV2, TRBJ2-1)
CAKREGYNEQFF

SEQ ID NO: 271697 - protein, 12 aa, Homo sapiens
  CDR3 for alpha chain variable domain of TCR clone 135849 (TRAV17, TRAJ53)
CATEGCNYKLTF

SEQ ID NO: 271698 - protein, 15 aa, Homo sapiens
  CDR3 for beta chain variable domain of TCR clone 135849 (TRBV19, TRBJ2-1)
CASSRPGQNYNEQFF

SEQ ID NO: 271699 - protein, 14 aa, Homo sapiens
  CDR3 for alpha chain variable domain of TCR clone 135850 (TRAV26-1, TRAJ38)
CIADNAGNNRKLIW

SEQ ID NO: 271700 - protein, 12 aa, Homo sapiens
  CDR3 for beta chain variable domain of TCR clone 135850 (TRBV5-1, TRBJ2-4)
LAGEWTKNIQYF

SEQ ID NO: 271701 - protein, 12 aa, Homo sapiens
  CDR3 for alpha chain variable domain of TCR clone 135851 (TRAV1-2, TRAJ20)
TSVLANDYKLSF

SEQ ID NO: 271702 - protein, 13 aa, Homo sapiens
  CDR3 for beta chain variable domain of TCR clone 135851 (TRBV24-1, TRBJ2-2)
CATSDWSTGELFF

SEQ ID NO: 271703 - protein, 14 aa, Homo sapiens
  CDR3 for alpha chain variable domain of TCR clone 135852 (TRAV8-4, TRAJ17)
CAVSDQAAGNKLTF

SEQ ID NO: 271704 - protein, 15 aa, Homo sapiens
  CDR3 for beta chain variable domain of TCR clone 135852 (TRBV7-2, TRBJ1-2)
CASSLAPERGLGYTF

SEQ ID NO: 271705 - protein, 13 aa, Homo sapiens
  CDR3 for alpha chain variable domain of TCR clone 135853 (TRAV23/DV6, TRAJ22)
CAPYSGTARQLTF

SEQ ID NO: 271706 - protein, 15 aa, Homo sapiens
  CDR3 for beta chain variable domain of TCR clone 135853 (TRBV11-2, TRBJ1-6)
CASSLDPWAVSPLHF

SEQ ID NO: 271707 - protein, 13 aa, Homo sapiens
  CDR3 for alpha chain variable domain of TCR clone 135854 (TRAV24, TRAJ23)
CASHWNQGGKLIF

SEQ ID NO: 271708 - protein, 13 aa, Homo sapiens
  CDR3 for beta chain variable domain of TCR clone 135854 (TRBV5-1, TRBJ2-1)
CASSSEGFEEQFF

SEQ ID NO: 271709 - protein, 14 aa, Homo sapiens
  CDR3 for alpha chain variable domain of TCR clone 135855 (TRAV29/DV5, TRAJ36)
CAARRKTGANNLFF

SEQ ID NO: 271710 - protein, 16 aa, Homo sapiens
  CDR3 for beta chain variable domain of TCR clone 135855 (TRBV4-2, TRBJ2-1)
CASSQAGTFAAGEQFF

SEQ ID NO: 271711 - protein, 16 aa, Homo sapiens
  CDR3 for alpha chain variable domain of TCR clone 135856 (TRAV12-1, TRAJ13)
CLVNLEVSGGYQKVTF

SEQ ID NO: 271712 - protein, 16 aa, Homo sapiens
  CDR3 for beta chain variable domain of TCR clone 135856 (TRBV24-1, TRBJ2-6)
CATSDRRASGANVLTF

SEQ ID NO: 271713 - protein, 13 aa, Homo sapiens
  CDR3 for alpha chain variable domain of TCR clone 135857 (TRAV2, TRAJ40)
CAVVTSGTYKYIF

SEQ ID NO: 271714 - protein, 14 aa, Homo sapiens
  CDR3 for beta chain variable domain of TCR clone 135857 (TRBV14, TRBJ2-1)
CASSQVQGRGEQFF

SEQ ID NO: 271715 - protein, 16 aa, Homo sapiens
  CDR3 for alpha chain variable domain of TCR clone 135858 (TRAV8-2, TRAJ7)
CVVSEGPYYGNNRRAC

SEQ ID NO: 271716 - protein, 13 aa, Homo sapiens
  CDR3 for beta chain variable domain of TCR clone 135858 (TRBV19, TRBJ2-1)
FASSMYRVNEQFF

SEQ ID NO: 271717 - protein, 14 aa, Homo sapiens
  CDR3 for alpha chain variable domain of TCR clone 135859 (TRAV9-2, TRAJ39)
CALYIYNAGNMLTF

SEQ ID NO: 271718 - protein, 11 aa, Homo sapiens
  CDR3 for beta chain variable domain of TCR clone 135859 (TRBV28, TRBJ2-3)
CASSSDPPQYF

SEQ ID NO: 271719 - protein, 14 aa, Homo sapiens
  CDR3 for alpha chain variable domain of TCR clone 135860 (TRAV8-1, TRAJ34)
CALPRGTTSSSLGL

SEQ ID NO: 271720 - protein, 14 aa, Homo sapiens
  CDR3 for beta chain variable domain of TCR clone 135860 (TRBV7-6, TRBJ2-3)
CASSLGTVTDTQYF

SEQ ID NO: 271721 - protein, 13 aa, Homo sapiens
  CDR3 for alpha chain variable domain of TCR clone 135861 (TRAV27, TRAJ41)
CAGEGHSGYALNF

SEQ ID NO: 271722 - protein, 14 aa, Homo sapiens
  CDR3 for beta chain variable domain of TCR clone 135861 (TRBV25-1, TRBJ1-1)
CASTHLGGNTEAFF

SEQ ID NO: 271723 - protein, 23 aa, Homo sapiens
  CDR3 for alpha chain variable domain of TCR clone 135862 (TRAV12-1, TRAJ21)
SLLIRDSKLGDSATPETFNKFYF

SEQ ID NO: 271724 - protein, 14 aa, Homo sapiens
  CDR3 for beta chain variable domain of TCR clone 135862 (TRBV6-5, TRBJ2-7)
CASSYHPGSYAQYF

SEQ ID NO: 271725 - protein, 18 aa, Homo sapiens
  CDR3 for alpha chain variable domain of TCR clone 135863 (TRAV21, TRAJ52)
CAVRPSPAGGTSYGKLTF

SEQ ID NO: 271726 - protein, 15 aa, Homo sapiens
  CDR3 for beta chain variable domain of TCR clone 135863 (TRBV27, TRBJ2-1)
CASSNGEGPPMSSSS

SEQ ID NO: 271727 - protein, 15 aa, Homo sapiens
  CDR3 for alpha chain variable domain of TCR clone 135864 (TRAV21, TRAJ37)
CPVRPTLSNTGKLIF

SEQ ID NO: 271728 - protein, 16 aa, Homo sapiens
  CDR3 for beta chain variable domain of TCR clone 135864 (TRBV24-1, TRBJ2-3)
CATSDRRQDLTDTQYF

SEQ ID NO: 271729 - protein, 18 aa, Homo sapiens
  CDR3 for alpha chain variable domain of TCR clone 135865 (TRAV12-3, TRAJ52)
CAMSVGGAGGTSYGQLTF

SEQ ID NO: 271730 - protein, 19 aa, Homo sapiens
  CDR3 for beta chain variable domain of TCR clone 135865 (TRBV25-1, TRBJ2-2)
CAILVYRVDRGRKTGELFF

SEQ ID NO: 271731 - protein, 11 aa, Homo sapiens
  CDR3 for alpha chain variable domain of TCR clone 135866 (TRAV21, TRAJ34)
CAHYNTDKLMF

SEQ ID NO: 271732 - protein, 13 aa, Homo sapiens
  CDR3 for beta chain variable domain of TCR clone 135866 (TRBV7-6, TRBJ1-2)
CASSLVADYGYTF

SEQ ID NO: 271733 - protein, 16 aa, Homo sapiens
  CDR3 for alpha chain variable domain of TCR clone 135867 (TRAV23/DV6, TRAJ9)
CAASIGGNTGGFKTIF

SEQ ID NO: 271734 - protein, 14 aa, Homo sapiens
  CDR3 for beta chain variable domain of TCR clone 135867 (TRBV5-1, TRBJ1-1)
CASSKPGPNTEAFF

SEQ ID NO: 271735 - protein, 12 aa, Homo sapiens
  CDR3 for alpha chain variable domain of TCR clone 135868 (TRAV20, TRAJ20)
CAVRFNDYKLSF

SEQ ID NO: 271736 - protein, 14 aa, Homo sapiens
  CDR3 for beta chain variable domain of TCR clone 135868 (TRBV20-1, TRBJ2-1)
CSAQIGESANEQFF

SEQ ID NO: 271737 - protein, 12 aa, Homo sapiens
  CDR3 for alpha chain variable domain of TCR clone 135869 (TRAV13-1, TRAJ21)
CAAKEGFNKFYF

SEQ ID NO: 271738 - protein, 15 aa, Homo sapiens
  CDR3 for beta chain variable domain of TCR clone 135869 (TRBV15, TRBJ1-5)
CATSRDPVSNKPQHF

SEQ ID NO: 271739 - protein, 10 aa, Homo sapiens
  CDR3 for alpha chain variable domain of TCR clone 135870 (TRAV8-3, TRAJ43)
CAVALADMRF

SEQ ID NO: 271740 - protein, 13 aa, Homo sapiens
  CDR3 for beta chain variable domain of TCR clone 135870 (TRBV7-9, TRBJ1-2)
CASSLKQNYGYTF

SEQ ID NO: 271741 - protein, 12 aa, Homo sapiens
  CDR3 for alpha chain variable domain of TCR clone 135871 (TRAV23/DV6, TRAJ16)
CAARGRGQKLLF

SEQ ID NO: 271742 - protein, 15 aa, Homo sapiens
  CDR3 for beta chain variable domain of TCR clone 135871 (TRBV19, TRBJ1-1)
CASTSGQIQNTEAFF

SEQ ID NO: 271743 - protein, 17 aa, Homo sapiens
  CDR3 for alpha chain variable domain of TCR clone 135872 (TRAV3, TRAJ6)
CAVRDGPRAGGSFIPTF

SEQ ID NO: 271744 - protein, 15 aa, Homo sapiens
  CDR3 for beta chain variable domain of TCR clone 135872 (TRBV20-1, TRBJ1-1)
CSASWDRFLNTEAFF

SEQ ID NO: 271745 - protein, 14 aa, Homo sapiens
  CDR3 for alpha chain variable domain of TCR clone 135873 (TRAV13-1, TRAJ5)
CAASPDTGRRALTF

SEQ ID NO: 271746 - protein, 15 aa, Homo sapiens
  CDR3 for beta chain variable domain of TCR clone 135873 (TRBV20-1, TRBJ2-7)
CSARDRVSGMDEQYF

SEQ ID NO: 271747 - protein, 16 aa, Homo sapiens
  CDR3 for alpha chain variable domain of TCR clone 135874 (TRAV12-1, TRAJ15)
CVVSPAGQPGRNCSDL

SEQ ID NO: 271748 - protein, 15 aa, Homo sapiens
  CDR3 for beta chain variable domain of TCR clone 135874 (TRBV7-3, TRBJ2-1)
CQQLAPSGSYNEQFF

SEQ ID NO: 271749 - protein, 11 aa, Homo sapiens
  CDR3 for alpha chain variable domain of TCR clone 135875 (TRAV16, TRAJ26)
CALTRWSEFCL

SEQ ID NO: 271750 - protein, 14 aa, Homo sapiens
  CDR3 for beta chain variable domain of TCR clone 135875 (TRBV12-5, TRBJ2-5)
CASGSRTHQETQYF

SEQ ID NO: 271751 - protein, 10 aa, Homo sapiens
  CDR3 for alpha chain variable domain of TCR clone 135876 (TRAV38-2/DV8, TRAJ40)
CASGTYKYIF

SEQ ID NO: 271752 - protein, 14 aa, Homo sapiens
  CDR3 for beta chain variable domain of TCR clone 135876 (TRBV7-9, TRBJ2-1)
CASSPRDSLYEQLF

SEQ ID NO: 271753 - protein, 14 aa, Homo sapiens
  CDR3 for alpha chain variable domain of TCR clone 135877 (TRAV12-3, TRAJ58)
CAMSTETSGSRLTF

SEQ ID NO: 271754 - protein, 15 aa, Homo sapiens
  CDR3 for beta chain variable domain of TCR clone 135877 (TRBV11-3, TRBJ2-3)
FASLKDGREGDTQYF

SEQ ID NO: 271755 - protein, 14 aa, Homo sapiens
  CDR3 for alpha chain variable domain of TCR clone 135878 (TRAV8-3, TRAJ44)
CAVGLTDTASKLTF

SEQ ID NO: 271756 - protein, 12 aa, Homo sapiens
  CDR3 for beta chain variable domain of TCR clone 135878 (TRBV7-3, TRBJ2-1)
CASSLGFNEQFF

SEQ ID NO: 271757 - protein, 11 aa, Homo sapiens
  CDR3 for alpha chain variable domain of TCR clone 135879 (TRAV12-1, TRAJ31)
CVVNGDARLMF

SEQ ID NO: 271758 - protein, 17 aa, Homo sapiens
  CDR3 for beta chain variable domain of TCR clone 135879 (TRBV4-3, TRBJ1-5)
CASSRWGDGGPNQPQHF

SEQ ID NO: 271759 - protein, 14 aa, Homo sapiens
  CDR3 for alpha chain variable domain of TCR clone 135880 (TRAV13-1, TRAJ35)
CAASKGGFGNVLHC

SEQ ID NO: 271760 - protein, 16 aa, Homo sapiens
  CDR3 for beta chain variable domain of TCR clone 135880 (TRBV4-3, TRBJ2-1)
CASSPALDRGVNEQFF

SEQ ID NO: 271761 - protein, 12 aa, Homo sapiens
  CDR3 for alpha chain variable domain of TCR clone 135881 (TRAV13-1, TRAJ21)
CAAKEGFNKFYF

SEQ ID NO: 271762 - protein, 20 aa, Homo sapiens
  CDR3 for beta chain variable domain of TCR clone 135881 (TRBV28, TRBJ2-1)
CDSTPIGRSPGLAGGNEQFF

SEQ ID NO: 271763 - protein, 12 aa, Homo sapiens
  CDR3 for alpha chain variable domain of TCR clone 135882 (TRAV30, TRAJ20)
CGTESNDYKLSF

SEQ ID NO: 271764 - protein, 13 aa, Homo sapiens
  CDR3 for beta chain variable domain of TCR clone 135882 (TRBV19, TRBJ1-2)
CASSVPGQDGYTF

SEQ ID NO: 271765 - protein, 15 aa, Homo sapiens
  CDR3 for alpha chain variable domain of TCR clone 135883 (TRAV3, TRAJ17)
CAVSLKEAAGNKLTF

SEQ ID NO: 271766 - protein, 14 aa, Homo sapiens
  CDR3 for beta chain variable domain of TCR clone 135883 (TRBV5-1, TRBJ2-3)
CASSLFGPTDTQYF

SEQ ID NO: 271767 - protein, 13 aa, Homo sapiens
  CDR3 for alpha chain variable domain of TCR clone 135884 (TRAV20, TRAJ21)
CAVEGYNFNKFYF

SEQ ID NO: 271768 - protein, 14 aa, Homo sapiens
  CDR3 for beta chain variable domain of TCR clone 135884 (TRBV3-1, TRBJ2-5)
FASSQGPDQETQYF

SEQ ID NO: 271769 - protein, 15 aa, Homo sapiens
  CDR3 for alpha chain variable domain of TCR clone 135885 (TRAV3, TRAJ20)
CAVRDIKLSDYKLSF

SEQ ID NO: 271770 - protein, 15 aa, Homo sapiens
  CDR3 for beta chain variable domain of TCR clone 135885 (TRBV7-9, TRBJ1-6)
CASSSPRCGNSPLHF

SEQ ID NO: 271771 - protein, 18 aa, Homo sapiens
  CDR3 for alpha chain variable domain of TCR clone 135886 (TRAV21, TRAJ52)
CAVRPSPAGGTSYGKLTF

SEQ ID NO: 271772 - protein, 13 aa, Homo sapiens
  CDR3 for beta chain variable domain of TCR clone 135886 (TRBV12-4, TRBJ1-2)
CVSSLTGLVGYTF

SEQ ID NO: 271773 - protein, 14 aa, Homo sapiens
  CDR3 for alpha chain variable domain of TCR clone 135887 (TRAV12-3, TRAJ29)
CAMSFYSGNTPLVF

SEQ ID NO: 271774 - protein, 15 aa, Homo sapiens
  CDR3 for beta chain variable domain of TCR clone 135887 (TRBV5-1, TRBJ2-3)
CASSTGGGRTDTQYF

SEQ ID NO: 271775 - protein, 13 aa, Homo sapiens
  CDR3 for alpha chain variable domain of TCR clone 135888 (TRAV2, TRAJ40)
CAVVTSGTYKYIF

SEQ ID NO: 271776 - protein, 14 aa, Homo sapiens
  CDR3 for beta chain variable domain of TCR clone 135888 (TRBV19, TRBJ2-1)
RASPTFVLGGEQFF

SEQ ID NO: 271777 - protein, 11 aa, Homo sapiens
  CDR3 for alpha chain variable domain of TCR clone 135889 (TRAV1-1, TRAJ23)
CAVRQGGKLIF

SEQ ID NO: 271778 - protein, 19 aa, Homo sapiens
  CDR3 for beta chain variable domain of TCR clone 135889 (TRBV7-8, TRBJ2-2)
CASSHLFPGPTIHITGELF

SEQ ID NO: 271779 - protein, 14 aa, Homo sapiens
  CDR3 for alpha chain variable domain of TCR clone 135890 (TRAV8-2, TRAJ37)
CVVSISGNTGKLIF

SEQ ID NO: 271780 - protein, 11 aa, Homo sapiens
  CDR3 for beta chain variable domain of TCR clone 135890 (TRBV18, TRBJ2-5)
CASSPRETQYI

SEQ ID NO: 271781 - protein, 14 aa, Homo sapiens
  CDR3 for alpha chain variable domain of TCR clone 135891 (TRAV23/DV6, TRAJ11)
CAASLESGYSTLTF

SEQ ID NO: 271782 - protein, 16 aa, Homo sapiens
  CDR3 for beta chain variable domain of TCR clone 135891 (TRBV7-7, TRBJ2-1)
CASSPGLAGGFNEQFF

SEQ ID NO: 271783 - protein, 13 aa, Homo sapiens
  CDR3 for alpha chain variable domain of TCR clone 135892 (TRAV23/DV6, TRAJ22)
CALWGGSARQLTF

SEQ ID NO: 271784 - protein, 14 aa, Homo sapiens
  CDR3 for beta chain variable domain of TCR clone 135892 (TRBV18, TRBJ2-7)
CASSPTSGGYEQYF

SEQ ID NO: 271785 - protein, 14 aa, Homo sapiens
  CDR3 for alpha chain variable domain of TCR clone 135893 (TRAV12-1, TRAJ34)
CVVNLDYNTDKLIF

SEQ ID NO: 271786 - protein, 14 aa, Homo sapiens
  CDR3 for beta chain variable domain of TCR clone 135893 (TRBV25-1, TRBJ1-1)
CASTHLGGNTEAFF

SEQ ID NO: 271787 - protein, 14 aa, Homo sapiens
  CDR3 for alpha chain variable domain of TCR clone 135894 (TRAV26-2, TRAJ32)
CILFRGGATNKLIF

SEQ ID NO: 271788 - protein, 13 aa, Homo sapiens
  CDR3 for beta chain variable domain of TCR clone 135894 (TRBV7-9, TRBJ2-4)
CATEGLAGNIQYF

SEQ ID NO: 271789 - protein, 11 aa, Homo sapiens
  CDR3 for alpha chain variable domain of TCR clone 135895 (TRAV2, TRAJ33)
CAVDSNYQLIW

SEQ ID NO: 271790 - protein, 15 aa, Homo sapiens
  CDR3 for beta chain variable domain of TCR clone 135895 (TRBV6-1, TRBJ2-5)
CASSEGWGIQETQYF

SEQ ID NO: 271791 - protein, 15 aa, Homo sapiens
  CDR3 for alpha chain variable domain of TCR clone 135896 (TRAV38-2/DV8, TRAJ28)
CAYRSRGAGSYQLTF

SEQ ID NO: 271792 - protein, 12 aa, Homo sapiens
  CDR3 for beta chain variable domain of TCR clone 135896 (TRBV11-2, TRBJ2-2)
CASSLGGGELFF

SEQ ID NO: 271793 - protein, 14 aa, Homo sapiens
  CDR3 for alpha chain variable domain of TCR clone 135897 (TRAV36/DV7, TRAJ57)
CAVGFPGGFEKLVF

SEQ ID NO: 271794 - protein, 12 aa, Homo sapiens
  CDR3 for beta chain variable domain of TCR clone 135897 (TRBV19, TRBJ2-7)
CASTSGTYEQYF

SEQ ID NO: 271795 - protein, 15 aa, Homo sapiens
  CDR3 for alpha chain variable domain of TCR clone 135898 (TRAV12-3, TRAJ6)
CAMSASTGGSNIPTF

SEQ ID NO: 271796 - protein, 16 aa, Homo sapiens
  CDR3 for beta chain variable domain of TCR clone 135898 (TRBV20-1, TRBJ1-2)
CSASMGQGVANYGYTF

SEQ ID NO: 271797 - protein, 13 aa, Homo sapiens
  CDR3 for alpha chain variable domain of TCR clone 135899 (TRAV21, TRAJ57)
CAVTQGGSEKLVF

SEQ ID NO: 271798 - protein, 12 aa, Homo sapiens
  CDR3 for beta chain variable domain of TCR clone 135899 (TRBV29-1, TRBJ2-3)
CSVTGGADTQYF

SEQ ID NO: 271799 - protein, 16 aa, Homo sapiens
  CDR3 for alpha chain variable domain of TCR clone 135900 (TRAV4, TRAJ18)
CCVLLIGGSTLGRLYF

SEQ ID NO: 271800 - protein, 15 aa, Homo sapiens
  CDR3 for beta chain variable domain of TCR clone 135900 (TRBV4-2, TRBJ1-2)
CASSRNTGAGYGYTF

SEQ ID NO: 271801 - protein, 16 aa, Homo sapiens
  CDR3 for alpha chain variable domain of TCR clone 135901 (TRAV13-1, TRAJ45)
CAARGSRKGGADGLTF

SEQ ID NO: 271802 - protein, 14 aa, Homo sapiens
  CDR3 for beta chain variable domain of TCR clone 135901 (TRBV7-8, TRBJ2-5)
CASSATGGQETQYF

SEQ ID NO: 271803 - protein, 14 aa, Homo sapiens
  CDR3 for alpha chain variable domain of TCR clone 135902 (TRAV12-2, TRAJ24)
CAVTPADSWGKWQF

SEQ ID NO: 271804 - protein, 13 aa, Homo sapiens
  CDR3 for beta chain variable domain of TCR clone 135902 (TRBV6-4, TRBJ1-5)
CASSADLNQPQHF

SEQ ID NO: 271805 - protein, 16 aa, Homo sapiens
  CDR3 for alpha chain variable domain of TCR clone 135903 (TRAV30, TRAJ24)
CGTEIVDADSWGKFQF

SEQ ID NO: 271806 - protein, 12 aa, Homo sapiens
  CDR3 for beta chain variable domain of TCR clone 135903 (TRBV19, TRBJ1-1)
CASSIGTEEAFF

SEQ ID NO: 271807 - protein, 15 aa, Homo sapiens
  CDR3 for alpha chain variable domain of TCR clone 135904 (TRAV26-2, TRAJ13)
CILRDLSGGYQKVTF

SEQ ID NO: 271808 - protein, 16 aa, Homo sapiens
  CDR3 for beta chain variable domain of TCR clone 135904 (TRBV4-2, TRBJ1-1)
CASSQAGFGMNTEAFF

SEQ ID NO: 271809 - protein, 13 aa, Homo sapiens
  CDR3 for alpha chain variable domain of TCR clone 135905 (TRAV13-1, TRAJ21)
CAASIYNFNKFYF

SEQ ID NO: 271810 - protein, 13 aa, Homo sapiens
  CDR3 for beta chain variable domain of TCR clone 135905 (TRBV7-3, TRBJ1-1)
CASSQDWGAKAFF

SEQ ID NO: 271811 - protein, 12 aa, Homo sapiens
  CDR3 for alpha chain variable domain of TCR clone 135906 (TRAV35, TRAJ12)
GRRIDSSYKLIF

SEQ ID NO: 271812 - protein, 14 aa, Homo sapiens
  CDR3 for beta chain variable domain of TCR clone 135906 (TRBV19, TRBJ1-1)
CASSPNRGDTEAFF

SEQ ID NO: 271813 - protein, 14 aa, Homo sapiens
  CDR3 for alpha chain variable domain of TCR clone 135907 (TRAV23/DV6, TRAJ39)
CAATREEAGNMLTF

SEQ ID NO: 271814 - protein, 15 aa, Homo sapiens
  CDR3 for beta chain variable domain of TCR clone 135907 (TRBV11-2, TRBJ2-2)
CASSLDGGNTGELFF

SEQ ID NO: 271815 - protein, 15 aa, Homo sapiens
  CDR3 for alpha chain variable domain of TCR clone 135908 (TRAV8-3, TRAJ27)
CAVGPSKTNAGKSTF

SEQ ID NO: 271816 - protein, 15 aa, Homo sapiens
  CDR3 for beta chain variable domain of TCR clone 135908 (TRBV5-5, TRBJ2-2)
CASSRQASGAGELFF

SEQ ID NO: 271817 - protein, 15 aa, Homo sapiens
  CDR3 for alpha chain variable domain of TCR clone 135909 (TRAV17, TRAJ13)
CATDAGSGGYQKVTF

SEQ ID NO: 271818 - protein, 13 aa, Homo sapiens
  CDR3 for beta chain variable domain of TCR clone 135909 (TRBV27, TRBJ2-3)
CATSRGGLYTQYF

SEQ ID NO: 271819 - protein, 13 aa, Homo sapiens
  CDR3 for alpha chain variable domain of TCR clone 135910 (TRAV27, TRAJ49)
CAPRPYTGNQLYF

SEQ ID NO: 271820 - protein, 16 aa, Homo sapiens
  CDR3 for beta chain variable domain of TCR clone 135910 (TRBV4-1, TRBJ1-2)
CASSQDAGQVLYCYTF

SEQ ID NO: 271821 - protein, 16 aa, Homo sapiens
  CDR3 for alpha chain variable domain of TCR clone 135911 (TRAV1-2, TRAJ10)
CAVRGVLTGGGNKPNF

SEQ ID NO: 271822 - protein, 12 aa, Homo sapiens
  CDR3 for beta chain variable domain of TCR clone 135911 (TRBV7-8, TRBJ2-7)
CASSLGDREQYF

SEQ ID NO: 271823 - protein, 12 aa, Homo sapiens
  CDR3 for alpha chain variable domain of TCR clone 135912 (TRAV12-3, TRAJ17)
CAMTLTGNKLTF

SEQ ID NO: 271824 - protein, 15 aa, Homo sapiens
  CDR3 for beta chain variable domain of TCR clone 135912 (TRBV20-1, TRBJ2-7)
SSARDQVSGMDEQYF

SEQ ID NO: 271825 - protein, 12 aa, Homo sapiens
  CDR3 for alpha chain variable domain of TCR clone 135913 (TRAV17, TRAJ39)
CATGAAGNMLTF

SEQ ID NO: 271826 - protein, 17 aa, Homo sapiens
  CDR3 for beta chain variable domain of TCR clone 135913 (TRBV7-8, TRBJ2-6)
CASSAGTGGARANVLTF

SEQ ID NO: 271827 - protein, 11 aa, Homo sapiens
  CDR3 for alpha chain variable domain of TCR clone 135914 (TRAV3, TRAJ21)
CAVGNFNKFYF

SEQ ID NO: 271828 - protein, 15 aa, Homo sapiens
  CDR3 for beta chain variable domain of TCR clone 135914 (TRBV11-2, TRBJ2-1)
CASSLGPDSYNEQFF

SEQ ID NO: 271829 - protein, 22 aa, Homo sapiens
  CDR3 for alpha chain variable domain of TCR clone 135915 (TRAV12-1, TRAJ30)
CVVNIGGRDDKIIFGKAHDFIF

SEQ ID NO: 271830 - protein, 13 aa, Homo sapiens
  CDR3 for beta chain variable domain of TCR clone 135915 (TRBV12-5, TRBJ2-1)
CASGLGRGNEQFF

SEQ ID NO: 271831 - protein, 12 aa, Homo sapiens
  CDR3 for alpha chain variable domain of TCR clone 135916 (TRAV2, TRAJ37)
CAVTMNTGKLIF

SEQ ID NO: 271832 - protein, 15 aa, Homo sapiens
  CDR3 for beta chain variable domain of TCR clone 135916 (TRBV5-1, TRBJ2-5)
CASSFGGPPKETQYF

SEQ ID NO: 271833 - protein, 14 aa, Homo sapiens
  CDR3 for alpha chain variable domain of TCR clone 135917 (TRAV8-4, TRAJ13)
CAVTLSGGYQKVTF

SEQ ID NO: 271834 - protein, 15 aa, Homo sapiens
  CDR3 for beta chain variable domain of TCR clone 135917 (TRBV7-9, TRBJ1-4)
CASSRTGGFNEKLFF

SEQ ID NO: 271835 - protein, 15 aa, Homo sapiens
  CDR3 for alpha chain variable domain of TCR clone 135918 (TRAV3, TRAJ5)
CAVRDLDTGRRALTF

SEQ ID NO: 271836 - protein, 16 aa, Homo sapiens
  CDR3 for beta chain variable domain of TCR clone 135918 (TRBV18, TRBJ1-5)
CASSPSTGNSNQPQHF

SEQ ID NO: 271837 - protein, 10 aa, Homo sapiens
  CDR3 for alpha chain variable domain of TCR clone 135919 (TRAV25, TRAJ20)
CAVNEYKLSF

SEQ ID NO: 271838 - protein, 13 aa, Homo sapiens
  CDR3 for beta chain variable domain of TCR clone 135919 (TRBV6-3, TRBJ2-7)
CASSFSGGYEQYF

SEQ ID NO: 271839 - protein, 12 aa, Homo sapiens
  CDR3 for alpha chain variable domain of TCR clone 135920 (TRAV12-3, TRAJ17)
CAMTLTGNNLTF

SEQ ID NO: 271840 - protein, 15 aa, Homo sapiens
  CDR3 for beta chain variable domain of TCR clone 135920 (TRBV11-2, TRBJ2-2)
CASSSDRVNAGELFF

SEQ ID NO: 271841 - protein, 11 aa, Homo sapiens
  CDR3 for alpha chain variable domain of TCR clone 135921 (TRAV8-3, TRAJ15)
CAVSPGTALIF

SEQ ID NO: 271842 - protein, 15 aa, Homo sapiens
  CDR3 for beta chain variable domain of TCR clone 135921 (TRBV7-9, TRBJ2-7)
CASSLALAEAYEQYF

SEQ ID NO: 271843 - protein, 13 aa, Homo sapiens
  CDR3 for alpha chain variable domain of TCR clone 135922 (TRAV12-1, TRAJ26)
CVVRRNYGQNFVF

SEQ ID NO: 271844 - protein, 18 aa, Homo sapiens
  CDR3 for beta chain variable domain of TCR clone 135922 (TRBV18, TRBJ1-3)
CASSPRGGAGPSGNTIYF

SEQ ID NO: 271845 - protein, 15 aa, Homo sapiens
  CDR3 for alpha chain variable domain of TCR clone 135923 (TRAV8-3, TRAJ35)
CAVGATIGFWNVLHC

SEQ ID NO: 271846 - protein, 11 aa, Homo sapiens
  CDR3 for beta chain variable domain of TCR clone 135923 (TRBV24-1, TRBJ2-5)
CATSIGETQYF

SEQ ID NO: 271847 - protein, 14 aa, Homo sapiens
  CDR3 for alpha chain variable domain of TCR clone 135924 (TRAV13-1, TRAJ35)
CAARKGGFGNVLHR

SEQ ID NO: 271848 - protein, 13 aa, Homo sapiens
  CDR3 for beta chain variable domain of TCR clone 135924 (TRBV7-3, TRBJ1-1)
CASSQDWGAEAFF

SEQ ID NO: 271849 - protein, 13 aa, Homo sapiens
  CDR3 for alpha chain variable domain of TCR clone 135925 (TRAV8-3, TRAJ28)
FAVGAVGSYQLTF

SEQ ID NO: 271850 - protein, 13 aa, Homo sapiens
  CDR3 for beta chain variable domain of TCR clone 135925 (TRBV19, TRBJ1-2)
CASSVPGQDGYTF

SEQ ID NO: 271851 - protein, 17 aa, Homo sapiens
  CDR3 for alpha chain variable domain of TCR clone 135926 (TRAV3, TRAJ12)
CAMRDGGRMDSSYKLIF

SEQ ID NO: 271852 - protein, 13 aa, Homo sapiens
  CDR3 for beta chain variable domain of TCR clone 135926 (TRBV15, TRBJ1-6)
CATSGGPNSPLHF

SEQ ID NO: 271853 - protein, 13 aa, Homo sapiens
  CDR3 for alpha chain variable domain of TCR clone 135927 (TRAV8-6, TRAJ50)
CAVFKTSYDKVIF

SEQ ID NO: 271854 - protein, 15 aa, Homo sapiens
  CDR3 for beta chain variable domain of TCR clone 135927 (TRBV7-2, TRBJ2-2)
CASRRPGQNTGELFF

SEQ ID NO: 271855 - protein, 11 aa, Homo sapiens
  CDR3 for alpha chain variable domain of TCR clone 135928 (TRAV13-2, TRAJ36)
CAETGANNLSF

SEQ ID NO: 271856 - protein, 13 aa, Homo sapiens
  CDR3 for beta chain variable domain of TCR clone 135928 (TRBV7-9, TRBJ2-4)
CATEGLAGNIQYF

SEQ ID NO: 271857 - protein, 16 aa, Homo sapiens
  CDR3 for alpha chain variable domain of TCR clone 135929 (TRAV1-2, TRAJ26)
CAVRDLITMVRMFSLF

SEQ ID NO: 271858 - protein, 15 aa, Homo sapiens
  CDR3 for beta chain variable domain of TCR clone 135929 (TRBV9, TRBJ1-6)
CASSVAGTGDSPLHF

SEQ ID NO: 271859 - protein, 11 aa, Homo sapiens
  CDR3 for alpha chain variable domain of TCR clone 135930 (TRAV22, TRAJ27)
CAVLNAGKSTF

SEQ ID NO: 271860 - protein, 16 aa, Homo sapiens
  CDR3 for beta chain variable domain of TCR clone 135930 (TRBV4-1, TRBJ2-3)
CASSQSTSGAEDTQYF

SEQ ID NO: 271861 - protein, 11 aa, Homo sapiens
  CDR3 for alpha chain variable domain of TCR clone 135931 (TRAV13-1, TRAJ49)
CASVGGNQFYF

SEQ ID NO: 271862 - protein, 16 aa, Homo sapiens
  CDR3 for beta chain variable domain of TCR clone 135931 (TRBV11-2, TRBJ2-2)
CASSLRTGNLIGELFF

SEQ ID NO: 271863 - protein, 13 aa, Homo sapiens
  CDR3 for alpha chain variable domain of TCR clone 135932 (TRAV12-3, TRAJ13)
CAMCSGGYQKVTF

SEQ ID NO: 271864 - protein, 13 aa, Homo sapiens
  CDR3 for beta chain variable domain of TCR clone 135932 (TRBV11-2, TRBJ2-1)
CASSLDLVNEQFF

SEQ ID NO: 271865 - protein, 13 aa, Homo sapiens
  CDR3 for alpha chain variable domain of TCR clone 135933 (TRAV29/DV5, TRAJ47)
CSASAEYGNKLVF

SEQ ID NO: 271866 - protein, 15 aa, Homo sapiens
  CDR3 for beta chain variable domain of TCR clone 135933 (TRBV7-9, TRBJ1-4)
CASSARTGGNEKLFF

SEQ ID NO: 271867 - protein, 14 aa, Homo sapiens
  CDR3 for alpha chain variable domain of TCR clone 135934 (TRAV13-2, TRAJ57)
CAESTQGGSEKLAF

SEQ ID NO: 271868 - protein, 14 aa, Homo sapiens
  CDR3 for beta chain variable domain of TCR clone 135934 (TRBV10-3, TRBJ2-2)
CAISEVSHSGELFF

SEQ ID NO: 271869 - protein, 14 aa, Homo sapiens
  CDR3 for alpha chain variable domain of TCR clone 135935 (TRAV26-1, TRAJ57)
SIRAGQGGSEKLVF

SEQ ID NO: 271870 - protein, 13 aa, Homo sapiens
  CDR3 for beta chain variable domain of TCR clone 135935 (TRBV19, TRBJ2-7)
CASSLTTSYEQYF

SEQ ID NO: 271871 - protein, 15 aa, Homo sapiens
  CDR3 for alpha chain variable domain of TCR clone 135936 (TRAV3, TRAJ3)
CAVRDRDSSASKIIF

SEQ ID NO: 271872 - protein, 14 aa, Homo sapiens
  CDR3 for beta chain variable domain of TCR clone 135936 (TRBV7-9, TRBJ2-3)
CASSLEDGTDTQYF

SEQ ID NO: 271873 - protein, 17 aa, Homo sapiens
  CDR3 for alpha chain variable domain of TCR clone 135937 (TRAV3, TRAJ42)
CAVRDRDYGGSQGNLIF

SEQ ID NO: 271874 - protein, 18 aa, Homo sapiens
  CDR3 for beta chain variable domain of TCR clone 135937 (TRBV20-1, TRBJ2-3)
CRASGLAGGPGTTDTQYF

SEQ ID NO: 271875 - protein, 16 aa, Homo sapiens
  CDR3 for alpha chain variable domain of TCR clone 135938 (TRAV1-2, TRAJ10)
CAVREVLTGGGNKLTF

SEQ ID NO: 271876 - protein, 15 aa, Homo sapiens
  CDR3 for beta chain variable domain of TCR clone 135938 (TRBV7-9, TRBJ1-6)
CASSSPGRGNSPLHF

SEQ ID NO: 271877 - protein, 17 aa, Homo sapiens
  CDR3 for alpha chain variable domain of TCR clone 135939 (TRAV26-1, TRAJ53)
CIVRVDDSGGSNYKLTF

SEQ ID NO: 271878 - protein, 13 aa, Homo sapiens
  CDR3 for beta chain variable domain of TCR clone 135939 (TRBV20-1, TRBJ1-6)
CSAPLGVGSPLHF

SEQ ID NO: 271879 - protein, 14 aa, Homo sapiens
  CDR3 for alpha chain variable domain of TCR clone 135940 (TRAV1-2, TRAJ16)
RAVNLFSDGQKLLF

SEQ ID NO: 271880 - protein, 14 aa, Homo sapiens
  CDR3 for beta chain variable domain of TCR clone 135940 (TRBV7-9, TRBJ2-3)
CASSLEDGTGTQYF

SEQ ID NO: 271881 - protein, 12 aa, Homo sapiens
  CDR3 for alpha chain variable domain of TCR clone 135941 (TRAV29/DV5, TRAJ49)
CAATDTGTSSIL

SEQ ID NO: 271882 - protein, 19 aa, Homo sapiens
  CDR3 for beta chain variable domain of TCR clone 135941 (TRBV25-1, TRBJ2-2)
CAILVYRVDRGRKTGELFF

SEQ ID NO: 271883 - protein, 14 aa, Homo sapiens
  CDR3 for alpha chain variable domain of TCR clone 135942 (TRAV2, TRAJ9)
CAVEDRSGGFKTIF

SEQ ID NO: 271884 - protein, 16 aa, Homo sapiens
  CDR3 for beta chain variable domain of TCR clone 135942 (TRBV7-3, TRBJ2-3)
CASSLSGYRPEDTQYF

SEQ ID NO: 271885 - protein, 16 aa, Homo sapiens
  CDR3 for alpha chain variable domain of TCR clone 135943 (TRAV38-1, TRAJ45)
CAFMKGSGGGSDGLTF

SEQ ID NO: 271886 - protein, 15 aa, Homo sapiens
  CDR3 for beta chain variable domain of TCR clone 135943 (TRBV20-1, TRBJ2-7)
CSAREGRDSLYEQYF

SEQ ID NO: 271887 - protein, 14 aa, Homo sapiens
  CDR3 for alpha chain variable domain of TCR clone 135944 (TRAV17, TRAJ11)
CATDTSRGYSTLTF

SEQ ID NO: 271888 - protein, 16 aa, Homo sapiens
  CDR3 for beta chain variable domain of TCR clone 135944 (TRBV19, TRBJ2-7)
CASSLTGTSELGEQYF

SEQ ID NO: 271889 - protein, 12 aa, Homo sapiens
  CDR3 for alpha chain variable domain of TCR clone 135945 (TRAV1-2, TRAJ33)
CAALDSNYQLIW

SEQ ID NO: 271890 - protein, 14 aa, Homo sapiens
  CDR3 for beta chain variable domain of TCR clone 135945 (TRBV18, TRBJ2-7)
CASSPRGGAYEQYF

SEQ ID NO: 271891 - protein, 15 aa, Homo sapiens
  CDR3 for alpha chain variable domain of TCR clone 135946 (TRAV17, TRAJ35)
CATAFVIGSGNVLHC

SEQ ID NO: 271892 - protein, 14 aa, Homo sapiens
  CDR3 for beta chain variable domain of TCR clone 135946 (TRBV7-2, TRBJ2-7)
CASSPKTSFYEQYF

SEQ ID NO: 271893 - protein, 14 aa, Homo sapiens
  CDR3 for alpha chain variable domain of TCR clone 135947 (TRAV13-1, TRAJ44)
CAAKATGTASKLTF

SEQ ID NO: 271894 - protein, 13 aa, Homo sapiens
  CDR3 for beta chain variable domain of TCR clone 135947 (TRBV5-5, TRBJ1-2)
CASSFWRGEYYTF

SEQ ID NO: 271895 - protein, 12 aa, Homo sapiens
  CDR3 for alpha chain variable domain of TCR clone 135948 (TRAV2, TRAJ26)
CAGYTGRLWSEF

SEQ ID NO: 271896 - protein, 16 aa, Homo sapiens
  CDR3 for beta chain variable domain of TCR clone 135948 (TRBV13, TRBJ2-2)
CASSPRTGEHTGELFF

SEQ ID NO: 271897 - protein, 11 aa, Homo sapiens
  CDR3 for alpha chain variable domain of TCR clone 135949 (TRAV21, TRAJ45)
CAVSSPEVLTD

SEQ ID NO: 271898 - protein, 15 aa, Homo sapiens
  CDR3 for beta chain variable domain of TCR clone 135949 (TRBV12-4, TRBJ1-2)
CASSLAHRDGQAYTF

SEQ ID NO: 271899 - protein, 17 aa, Homo sapiens
  CDR3 for alpha chain variable domain of TCR clone 135950 (TRAV3, TRAJ6)
CAVRDGARAGGSYIPTF

SEQ ID NO: 271900 - protein, 16 aa, Homo sapiens
  CDR3 for beta chain variable domain of TCR clone 135950 (TRBV7-8, TRBJ2-3)
CASSTEGQRETDTQYF

SEQ ID NO: 271901 - protein, 15 aa, Homo sapiens
  CDR3 for alpha chain variable domain of TCR clone 135951 (TRAV13-1, TRAJ4)
CAASLISGGYNKSIF

SEQ ID NO: 271902 - protein, 15 aa, Homo sapiens
  CDR3 for beta chain variable domain of TCR clone 135951 (TRBV28, TRBJ2-3)
CASTPRGENTDTQYF

SEQ ID NO: 271903 - protein, 15 aa, Homo sapiens
  CDR3 for alpha chain variable domain of TCR clone 135952 (TRAV25, TRAJ52)
CAGRPGGTSYGKMTF

SEQ ID NO: 271904 - protein, 17 aa, Homo sapiens
  CDR3 for beta chain variable domain of TCR clone 135952 (TRBV7-8, TRBJ2-6)
CTSSAGTGGAGANVLTF

SEQ ID NO: 271905 - protein, 16 aa, Homo sapiens
  CDR3 for alpha chain variable domain of TCR clone 135953 (TRAV13-2, TRAJ32)
CSENMNYGGATNKLIF

SEQ ID NO: 271906 - protein, 14 aa, Homo sapiens
  CDR3 for beta chain variable domain of TCR clone 135953 (TRBV4-3, TRBJ2-7)
CASSQDVAGGEQYF

SEQ ID NO: 271907 - protein, 16 aa, Homo sapiens
  CDR3 for alpha chain variable domain of TCR clone 135954 (TRAV3, TRAJ10)
CAVRDMRAGGGNKLTF

SEQ ID NO: 271908 - protein, 19 aa, Homo sapiens
  CDR3 for beta chain variable domain of TCR clone 135954 (TRBV12-4, TRBJ2-1)
CASTLAFYPRDKEANEQFF

SEQ ID NO: 271909 - protein, 13 aa, Homo sapiens
  CDR3 for alpha chain variable domain of TCR clone 135955 (TRAV17, TRAJ9)
CATDYTGGFKTIF

SEQ ID NO: 271910 - protein, 15 aa, Homo sapiens
  CDR3 for beta chain variable domain of TCR clone 135955 (TRBV7-7, TRBJ2-1)
CASSSGLAGGNEQFF

SEQ ID NO: 271911 - protein, 13 aa, Homo sapiens
  CDR3 for alpha chain variable domain of TCR clone 135956 (TRAV3, TRAJ21)
CAVREPDFNKFYF

SEQ ID NO: 271912 - protein, 18 aa, Homo sapiens
  CDR3 for beta chain variable domain of TCR clone 135956 (TRBV28, TRBJ2-1)
CASSSTSGRANSYNEQFF

SEQ ID NO: 271913 - protein, 11 aa, Homo sapiens
  CDR3 for alpha chain variable domain of TCR clone 135957 (TRAV25, TRAJ49)
CAEGTGNQFYF

SEQ ID NO: 271914 - protein, 12 aa, Homo sapiens
  CDR3 for beta chain variable domain of TCR clone 135957 (TRBV6-5, TRBJ2-1)
CASRNDRGQQFF

SEQ ID NO: 271915 - protein, 14 aa, Homo sapiens
  CDR3 for alpha chain variable domain of TCR clone 135958 (TRAV12-2, TRAJ40)
CAVKISSGTYKYIF

SEQ ID NO: 271916 - protein, 14 aa, Homo sapiens
  CDR3 for beta chain variable domain of TCR clone 135958 (TRBV20-1, TRBJ1-1)
CSAQTRVGGTEAFF

SEQ ID NO: 271917 - protein, 11 aa, Homo sapiens
  CDR3 for alpha chain variable domain of TCR clone 135959 (TRAV1-2, TRAJ13)
GRSGGYQKVTF

SEQ ID NO: 271918 - protein, 12 aa, Homo sapiens
  CDR3 for beta chain variable domain of TCR clone 135959 (TRBV5-5, TRBJ2-5)
CASSYFGETQYF

SEQ ID NO: 271919 - protein, 13 aa, Homo sapiens
  CDR3 for alpha chain variable domain of TCR clone 135960 (TRAV21, TRAJ27)
CAARPGNAGKSTF

SEQ ID NO: 271920 - protein, 16 aa, Homo sapiens
  CDR3 for beta chain variable domain of TCR clone 135960 (TRBV7-9, TRBJ2-7)
CASSSPSANTVNEQYF

SEQ ID NO: 271921 - protein, 13 aa, Homo sapiens
  CDR3 for alpha chain variable domain of TCR clone 135961 (TRAV26-1, TRAJ33)
CIVRVEGNYQLIW

SEQ ID NO: 271922 - protein, 15 aa, Homo sapiens
  CDR3 for beta chain variable domain of TCR clone 135961 (TRBV11-2, TRBJ2-1)
CASSLAPRAHNEQFF

SEQ ID NO: 271923 - protein, 12 aa, Homo sapiens
  CDR3 for alpha chain variable domain of TCR clone 135962 (TRAV12-1, TRAJ30)
CVVNPRDDKIIF

SEQ ID NO: 271924 - protein, 18 aa, Homo sapiens
  CDR3 for beta chain variable domain of TCR clone 135962 (TRBV5-1, TRBJ2-7)
CASSLAGLGGMSSYEQYF

SEQ ID NO: 271925 - protein, 14 aa, Homo sapiens
  CDR3 for alpha chain variable domain of TCR clone 135963 (TRAV12-1, TRAJ54)
CVVNIYQGAQKLVF

SEQ ID NO: 271926 - protein, 15 aa, Homo sapiens
  CDR3 for beta chain variable domain of TCR clone 135963 (TRBV19, TRBJ1-3)
CASRGLRLSGNTIYF

SEQ ID NO: 271927 - protein, 18 aa, Homo sapiens
  CDR3 for alpha chain variable domain of TCR clone 135964 (TRAV13-1, TRAJ52)
CAASKRSAGGTSYGKMKF

SEQ ID NO: 271928 - protein, 13 aa, Homo sapiens
  CDR3 for beta chain variable domain of TCR clone 135964 (TRBV12-4, TRBJ1-2)
CASSLRQGKGYTF

SEQ ID NO: 271929 - protein, 13 aa, Homo sapiens
  CDR3 for alpha chain variable domain of TCR clone 135965 (TRAV9-2, TRAJ49)
CALRHFTGNQFYF

SEQ ID NO: 271930 - protein, 16 aa, Homo sapiens
  CDR3 for beta chain variable domain of TCR clone 135965 (TRBV7-9, TRBJ2-1)
CASSPRLGSSYNDQFF

SEQ ID NO: 271931 - protein, 15 aa, Homo sapiens
  CDR3 for alpha chain variable domain of TCR clone 135966 (TRAV4, TRAJ39)
CLVGPNNNAGNMLTF

SEQ ID NO: 271932 - protein, 13 aa, Homo sapiens
  CDR3 for beta chain variable domain of TCR clone 135966 (TRBV7-9, TRBJ1-4)
CASSLPGIEKLFF

SEQ ID NO: 271933 - protein, 16 aa, Homo sapiens
  CDR3 for alpha chain variable domain of TCR clone 135967 (TRAV26-1, TRAJ52)
CIVSNAGGTSYGKLPF

SEQ ID NO: 271934 - protein, 16 aa, Homo sapiens
  CDR3 for beta chain variable domain of TCR clone 135967 (TRBV5-1, TRBJ2-1)
CASSLEGRGLYNEQFF

SEQ ID NO: 271935 - protein, 13 aa, Homo sapiens
  CDR3 for alpha chain variable domain of TCR clone 135968 (TRAV3, TRAJ8)
CAVRHTGFQKLVF

SEQ ID NO: 271936 - protein, 15 aa, Homo sapiens
  CDR3 for beta chain variable domain of TCR clone 135968 (TRBV20-1, TRBJ2-7)
CSARDRVSGMDEQYF

SEQ ID NO: 271937 - protein, 14 aa, Homo sapiens
  CDR3 for alpha chain variable domain of TCR clone 135969 (TRAV23/DV6, TRAJ11)
CAASLESGYSTLTF

SEQ ID NO: 271938 - protein, 13 aa, Homo sapiens
  CDR3 for beta chain variable domain of TCR clone 135969 (TRBV4-1, TRBJ2-5)
CASSLTRGEAQYF

SEQ ID NO: 271939 - protein, 14 aa, Homo sapiens
  CDR3 for alpha chain variable domain of TCR clone 135970 (TRAV13-1, TRAJ35)
CAASKGGFGNVLHC

SEQ ID NO: 271940 - protein, 13 aa, Homo sapiens
  CDR3 for beta chain variable domain of TCR clone 135970 (TRBV7-3, TRBJ1-1)
CASSQDCGAEAFF

SEQ ID NO: 271941 - protein, 14 aa, Homo sapiens
  CDR3 for alpha chain variable domain of TCR clone 135971 (TRAV13-1, TRAJ9)
FAASALTGGFKTIF

SEQ ID NO: 271942 - protein, 16 aa, Homo sapiens
  CDR3 for beta chain variable domain of TCR clone 135971 (TRBV7-8, TRBJ2-4)
CASSAERTLAKNSQYF

SEQ ID NO: 271943 - protein, 14 aa, Homo sapiens
  CDR3 for alpha chain variable domain of TCR clone 135972 (TRAV12-3, TRAJ54)
CAMSALQGAQKLVF

SEQ ID NO: 271944 - protein, 14 aa, Homo sapiens
  CDR3 for beta chain variable domain of TCR clone 135972 (TRBV11-2, TRBJ1-5)
CASSLDRGRQPQHF

SEQ ID NO: 271945 - protein, 14 aa, Homo sapiens
  CDR3 for alpha chain variable domain of TCR clone 135973 (TRAV1-2, TRAJ16)
CAVNRFSDGQKLLF

SEQ ID NO: 271946 - protein, 13 aa, Homo sapiens
  CDR3 for beta chain variable domain of TCR clone 135973 (TRBV12-4, TRBJ2-5)
CDSSLGGSRTQYF

SEQ ID NO: 271947 - protein, 14 aa, Homo sapiens
  CDR3 for alpha chain variable domain of TCR clone 135974 (TRAV3, TRAJ5)
CAVRSDTGRRALTF

SEQ ID NO: 271948 - protein, 13 aa, Homo sapiens
  CDR3 for beta chain variable domain of TCR clone 135974 (TRBV7-2, TRBJ2-2)
CASSLAVTGELFF

SEQ ID NO: 271949 - protein, 13 aa, Homo sapiens
  CDR3 for alpha chain variable domain of TCR clone 135975 (TRAV16, TRAJ58)
CALSIPSGSRVTF

SEQ ID NO: 271950 - protein, 14 aa, Homo sapiens
  CDR3 for beta chain variable domain of TCR clone 135975 (TRBV6-5, TRBJ2-7)
CASSPHRGLREQYF

SEQ ID NO: 271951 - protein, 14 aa, Homo sapiens
  CDR3 for alpha chain variable domain of TCR clone 135976 (TRAV8-3, TRAJ35)
CAVGPQGFGNVLHC

SEQ ID NO: 271952 - protein, 15 aa, Homo sapiens
  CDR3 for beta chain variable domain of TCR clone 135976 (TRBV6-1, TRBJ2-2)
CASSAGQGYTGELFF

SEQ ID NO: 271953 - protein, 20 aa, Homo sapiens
  CDR3 for alpha chain variable domain of TCR clone 135977 (TRAV26-1, TRAJ52)
CCVLLHRPSAGGTSYGKMTF

SEQ ID NO: 271954 - protein, 14 aa, Homo sapiens
  CDR3 for beta chain variable domain of TCR clone 135977 (TRBV7-2, TRBJ1-4)
CASSHSKTNEKLFF

SEQ ID NO: 271955 - protein, 13 aa, Homo sapiens
  CDR3 for alpha chain variable domain of TCR clone 135978 (TRAV23/DV6, TRAJ3)
CAAPTFALGGAVL

SEQ ID NO: 271956 - protein, 15 aa, Homo sapiens
  CDR3 for beta chain variable domain of TCR clone 135978 (TRBV19, TRBJ1-6)
CASSTQGAVGSPLHF

SEQ ID NO: 271957 - protein, 12 aa, Homo sapiens
  CDR3 for alpha chain variable domain of TCR clone 135979 (TRAV1-1, TRAJ39)
CAVPVVGNMLTF

SEQ ID NO: 271958 - protein, 15 aa, Homo sapiens
  CDR3 for beta chain variable domain of TCR clone 135979 (TRBV7-3, TRBJ2-2)
CASSETGQGTGELVF

SEQ ID NO: 271959 - protein, 16 aa, Homo sapiens
  CDR3 for alpha chain variable domain of TCR clone 135980 (TRAV3, TRAJ10)
CAVRDMRAGGGNKITF

SEQ ID NO: 271960 - protein, 11 aa, Homo sapiens
  CDR3 for beta chain variable domain of TCR clone 135980 (TRBV29-1, TRBJ2-5)
CSEDRTGTQYF

SEQ ID NO: 271961 - protein, 14 aa, Homo sapiens
  CDR3 for alpha chain variable domain of TCR clone 135981 (TRAV20, TRAJ16)
CAVQENSDGQKLLF

SEQ ID NO: 271962 - protein, 13 aa, Homo sapiens
  CDR3 for beta chain variable domain of TCR clone 135981 (TRBV27, TRBJ2-3)
CDSSSLPGDTQYF

SEQ ID NO: 271963 - protein, 14 aa, Homo sapiens
  CDR3 for alpha chain variable domain of TCR clone 135982 (TRAV1-2, TRAJ16)
CAVNRFSDGQKLPF

SEQ ID NO: 271964 - protein, 15 aa, Homo sapiens
  CDR3 for beta chain variable domain of TCR clone 135982 (TRBV7-2, TRBJ2-1)
CASSSGLAGGNEQFF

SEQ ID NO: 271965 - protein, 14 aa, Homo sapiens
  CDR3 for alpha chain variable domain of TCR clone 135983 (TRAV29/DV5, TRAJ44)
CPAFLVGTASKLTF

SEQ ID NO: 271966 - protein, 15 aa, Homo sapiens
  CDR3 for beta chain variable domain of TCR clone 135983 (TRBV7-3, TRBJ2-2)
CASSETGQGTGELFF

SEQ ID NO: 271967 - protein, 17 aa, Homo sapiens
  CDR3 for alpha chain variable domain of TCR clone 135984 (TRAV3, TRAJ6)
CAVRDGPRAGGSYIPTI

SEQ ID NO: 271968 - protein, 16 aa, Homo sapiens
  CDR3 for beta chain variable domain of TCR clone 135984 (TRBV7-9, TRBJ1-3)
CASSQTSGLRMGTIYF

SEQ ID NO: 271969 - protein, 14 aa, Homo sapiens
  CDR3 for alpha chain variable domain of TCR clone 135985 (TRAV3, TRAJ24)
CAVILTDSWGKLQF

SEQ ID NO: 271970 - protein, 15 aa, Homo sapiens
  CDR3 for beta chain variable domain of TCR clone 135985 (TRBV5-1, TRBJ2-1)
CASSPPRAPYNEQFF

SEQ ID NO: 271971 - protein, 18 aa, Homo sapiens
  CDR3 for alpha chain variable domain of TCR clone 135986 (TRAV12-3, TRAJ52)
CAVSVGGAGGTSYGKLTF

SEQ ID NO: 271972 - protein, 16 aa, Homo sapiens
  CDR3 for beta chain variable domain of TCR clone 135986 (TRBV7-9, TRBJ1-2)
CASSISLDRGGYGYTF

SEQ ID NO: 271973 - protein, 13 aa, Homo sapiens
  CDR3 for alpha chain variable domain of TCR clone 135987 (TRAV27, TRAJ3)
ASLRGSSASKIIF

SEQ ID NO: 271974 - protein, 14 aa, Homo sapiens
  CDR3 for beta chain variable domain of TCR clone 135987 (TRBV25-1, TRBJ1-1)
CASTHLGGNTEAFF

SEQ ID NO: 271975 - protein, 14 aa, Homo sapiens
  CDR3 for alpha chain variable domain of TCR clone 135988 (TRAV13-1, TRAJ35)
CAASKGGLGNVLHC

SEQ ID NO: 271976 - protein, 13 aa, Homo sapiens
  CDR3 for beta chain variable domain of TCR clone 135988 (TRBV7-3, TRBJ1-1)
CASGQDWGAEAFF

SEQ ID NO: 271977 - protein, 14 aa, Homo sapiens
  CDR3 for alpha chain variable domain of TCR clone 135989 (TRAV8-2, TRAJ11)
CVVSKSQDTAPSPL

SEQ ID NO: 271978 - protein, 16 aa, Homo sapiens
  CDR3 for beta chain variable domain of TCR clone 135989 (TRBV28, TRBJ2-1)
CASSSPEYPRDNEQFF

SEQ ID NO: 271979 - protein, 11 aa, Homo sapiens
  CDR3 for alpha chain variable domain of TCR clone 135990 (TRAV23/DV6, TRAJ44)
CAAPTPGKLTF

SEQ ID NO: 271980 - protein, 13 aa, Homo sapiens
  CDR3 for beta chain variable domain of TCR clone 135990 (TRBV28, TRBJ2-7)
CASTPGLAGEQYF

SEQ ID NO: 271981 - protein, 10 aa, Homo sapiens
  CDR3 for alpha chain variable domain of TCR clone 135991 (TRAV25, TRAJ20)
CAVNDYKLSF

SEQ ID NO: 271982 - protein, 13 aa, Homo sapiens
  CDR3 for beta chain variable domain of TCR clone 135991 (TRBV10-3, TRBJ2-7)
CASKLAVNYEQYF

SEQ ID NO: 271983 - protein, 13 aa, Homo sapiens
  CDR3 for alpha chain variable domain of TCR clone 135992 (TRAV12-2, TRAJ39)
CAVNNNAGNMLTF

SEQ ID NO: 271984 - protein, 14 aa, Homo sapiens
  CDR3 for beta chain variable domain of TCR clone 135992 (TRBV20-1, TRBJ2-7)
CSAPELAGVGEQYF

SEQ ID NO: 271985 - protein, 17 aa, Homo sapiens
  CDR3 for alpha chain variable domain of TCR clone 135993 (TRAV1-1, TRAJ15)
CLLLLRCPNQAGTALIF

SEQ ID NO: 271986 - protein, 14 aa, Homo sapiens
  CDR3 for beta chain variable domain of TCR clone 135993 (TRBV19, TRBJ2-1)
CASPTFVLSGEQFF

SEQ ID NO: 271987 - protein, 14 aa, Homo sapiens
  CDR3 for alpha chain variable domain of TCR clone 135994 (TRAV8-2, TRAJ4)
CVVSRSGGYNKLIF

SEQ ID NO: 271988 - protein, 15 aa, Homo sapiens
  CDR3 for beta chain variable domain of TCR clone 135994 (TRBV2, TRBJ2-1)
CASSELAGSYNEQFF

SEQ ID NO: 271989 - protein, 15 aa, Homo sapiens
  CDR3 for alpha chain variable domain of TCR clone 135995 (TRAV2, TRAJ15)
CAVEDRGQAGTALIF

SEQ ID NO: 271990 - protein, 15 aa, Homo sapiens
  CDR3 for beta chain variable domain of TCR clone 135995 (TRBV20-1, TRBJ2-7)
CSARDRVSGMDEQYF

SEQ ID NO: 271991 - protein, 13 aa, Homo sapiens
  CDR3 for alpha chain variable domain of TCR clone 135996 (TRAV21, TRAJ27)
CAARPGNAGKSNL

SEQ ID NO: 271992 - protein, 14 aa, Homo sapiens
  CDR3 for beta chain variable domain of TCR clone 135996 (TRBV7-6, TRBJ2-3)
CASSLGTVTDTQYF

SEQ ID NO: 271993 - protein, 13 aa, Homo sapiens
  CDR3 for alpha chain variable domain of TCR clone 135997 (TRAV20, TRAJ20)
CAVQAGSGYKLSF

SEQ ID NO: 271994 - protein, 13 aa, Homo sapiens
  CDR3 for beta chain variable domain of TCR clone 135997 (TRBV20-1, TRBJ1-3)
CSARVQGRDTIYF

SEQ ID NO: 271995 - protein, 14 aa, Homo sapiens
  CDR3 for alpha chain variable domain of TCR clone 135998 (TRAV8-3, TRAJ4)
CAVGAAGGYNKLIF

SEQ ID NO: 271996 - protein, 16 aa, Homo sapiens
  CDR3 for beta chain variable domain of TCR clone 135998 (TRBV12-5, TRBJ2-5)
CASGPRTSGDQETQYF

SEQ ID NO: 271997 - protein, 14 aa, Homo sapiens
  CDR3 for alpha chain variable domain of TCR clone 135999 (TRAV12-2, TRAJ52)
CRCAGGTSHGKLTF

SEQ ID NO: 271998 - protein, 13 aa, Homo sapiens
  CDR3 for beta chain variable domain of TCR clone 135999 (TRBV11-2, TRBJ2-1)
CASTLRLTHEQFF

SEQ ID NO: 271999 - protein, 15 aa, Homo sapiens
  CDR3 for alpha chain variable domain of TCR clone 136000 (TRAV20, TRAJ53)
CAVQERGGSNYKLTF

SEQ ID NO: 272000 - protein, 12 aa, Homo sapiens
  CDR3 for beta chain variable domain of TCR clone 136000 (TRBV5-7, TRBJ1-1)
CASSLGRGKAFF

SEQ ID NO: 272001 - protein, 13 aa, Homo sapiens
  CDR3 for alpha chain variable domain of TCR clone 136001 (TRAV27, TRAJ8)
CAGGPTGFQKLVF

SEQ ID NO: 272002 - protein, 15 aa, Homo sapiens
  CDR3 for beta chain variable domain of TCR clone 136001 (TRBV7-9, TRBJ1-6)
CASSSPGRGNSPLHL

SEQ ID NO: 272003 - protein, 13 aa, Homo sapiens
  CDR3 for alpha chain variable domain of TCR clone 136002 (TRAV8-1, TRAJ30)
CAVIMNRDDKIIF

SEQ ID NO: 272004 - protein, 14 aa, Homo sapiens
  CDR3 for beta chain variable domain of TCR clone 136002 (TRBV19, TRBJ2-1)
CASGKSTQYNEQFF

SEQ ID NO: 272005 - protein, 13 aa, Homo sapiens
  CDR3 for alpha chain variable domain of TCR clone 136003 (TRAV13-1, TRAJ33)
WAASRAGNYQLIW

SEQ ID NO: 272006 - protein, 15 aa, Homo sapiens
  CDR3 for beta chain variable domain of TCR clone 136003 (TRBV2, TRBJ2-7)
EDSAMYFCASSEQYF

SEQ ID NO: 272007 - protein, 16 aa, Homo sapiens
  CDR3 for alpha chain variable domain of TCR clone 136004 (TRAV8-3, TRAJ8)
CAVPRDGNTGFQKLVF

SEQ ID NO: 272008 - protein, 15 aa, Homo sapiens
  CDR3 for beta chain variable domain of TCR clone 136004 (TRBV6-1, TRBJ2-6)
CASSSRPSGANILTF

SEQ ID NO: 272009 - protein, 14 aa, Homo sapiens
  CDR3 for alpha chain variable domain of TCR clone 136005 (TRAV12-1, TRAJ17)
CVVNYKAAGNKLTF

SEQ ID NO: 272010 - protein, 13 aa, Homo sapiens
  CDR3 for beta chain variable domain of TCR clone 136005 (TRBV6-1, TRBJ2-1)
CASSHDRNNEQFF

SEQ ID NO: 272011 - protein, 12 aa, Homo sapiens
  CDR3 for alpha chain variable domain of TCR clone 136006 (TRAV13-2, TRAJ23)
CAERHRGGKLIF

SEQ ID NO: 272012 - protein, 13 aa, Homo sapiens
  CDR3 for beta chain variable domain of TCR clone 136006 (TRBV7-2, TRBJ2-3)
CASSTDNLDTQYF

SEQ ID NO: 272013 - protein, 11 aa, Homo sapiens
  CDR3 for alpha chain variable domain of TCR clone 136007 (TRAV12-1, TRAJ15)
CMVNAGTALIF

SEQ ID NO: 272014 - protein, 16 aa, Homo sapiens
  CDR3 for beta chain variable domain of TCR clone 136007 (TRBV28, TRBJ2-1)
CASSSRVRDSYNEQFF

SEQ ID NO: 272015 - protein, 14 aa, Homo sapiens
  CDR3 for alpha chain variable domain of TCR clone 136008 (TRAV29/DV5, TRAJ36)
CAARRKTGANNLCF

SEQ ID NO: 272016 - protein, 14 aa, Homo sapiens
  CDR3 for beta chain variable domain of TCR clone 136008 (TRBV9, TRBJ1-2)
CASSVSGTLYGYTF

SEQ ID NO: 272017 - protein, 12 aa, Homo sapiens
  CDR3 for alpha chain variable domain of TCR clone 136009 (TRAV3, TRAJ21)
CAVRTGLQQILL

SEQ ID NO: 272018 - protein, 13 aa, Homo sapiens
  CDR3 for beta chain variable domain of TCR clone 136009 (TRBV9, TRBJ2-1)
CASSPSGGNEQFF

SEQ ID NO: 272019 - protein, 14 aa, Homo sapiens
  CDR3 for alpha chain variable domain of TCR clone 136010 (TRAV12-3, TRAJ10)
SHLPPTGGGNKLTF

SEQ ID NO: 272020 - protein, 15 aa, Homo sapiens
  CDR3 for beta chain variable domain of TCR clone 136010 (TRBV29-1, TRBJ2-6)
CSVGDRGSGANVLTF

SEQ ID NO: 272021 - protein, 14 aa, Homo sapiens
  CDR3 for alpha chain variable domain of TCR clone 136011 (TRAV1-2, TRAJ8)
CAVREDTGFQKLVF

SEQ ID NO: 272022 - protein, 17 aa, Homo sapiens
  CDR3 for beta chain variable domain of TCR clone 136011 (TRBV7-2, TRBJ2-3)
CASSLAGGLAGTAGQYF

SEQ ID NO: 272023 - protein, 14 aa, Homo sapiens
  CDR3 for alpha chain variable domain of TCR clone 136012 (TRAV8-3, TRAJ4)
CAVGAAGGYNKLMF

SEQ ID NO: 272024 - protein, 13 aa, Homo sapiens
  CDR3 for beta chain variable domain of TCR clone 136012 (TRBV3-1, TRBJ1-1)
CASSPGVITEAFF

SEQ ID NO: 272025 - protein, 13 aa, Homo sapiens
  CDR3 for alpha chain variable domain of TCR clone 136013 (TRAV12-3, TRAJ33)
CAMSVNNNYQLIW

SEQ ID NO: 272026 - protein, 11 aa, Homo sapiens
  CDR3 for beta chain variable domain of TCR clone 136013 (TRBV12-4, TRBJ2-2)
CASSLTGELFF

SEQ ID NO: 272027 - protein, 13 aa, Homo sapiens
  CDR3 for alpha chain variable domain of TCR clone 136014 (TRAV3, TRAJ27)
CAVRPLGAGKSTF

SEQ ID NO: 272028 - protein, 13 aa, Homo sapiens
  CDR3 for beta chain variable domain of TCR clone 136014 (TRBV2, TRBJ1-1)
CASNLLRNTEAFF

SEQ ID NO: 272029 - protein, 10 aa, Homo sapiens
  CDR3 for alpha chain variable domain of TCR clone 136015 (TRAV12-2, TRAJ52)
RSTRYGKLTF

SEQ ID NO: 272030 - protein, 11 aa, Homo sapiens
  CDR3 for beta chain variable domain of TCR clone 136015 (TRBV11-3, TRBJ2-2)
CASSLPGELFF

SEQ ID NO: 272031 - protein, 13 aa, Homo sapiens
  CDR3 for alpha chain variable domain of TCR clone 136016 (TRAV2, TRAJ40)
CAVVTSGTYKYIF

SEQ ID NO: 272032 - protein, 14 aa, Homo sapiens
  CDR3 for beta chain variable domain of TCR clone 136016 (TRBV19, TRBJ2-1)
CACPTCVLSGEQFF

SEQ ID NO: 272033 - protein, 15 aa, Homo sapiens
  CDR3 for alpha chain variable domain of TCR clone 136017 (TRAV23/DV6, TRAJ44)
CAARTLTGTASKLTF

SEQ ID NO: 272034 - protein, 14 aa, Homo sapiens
  CDR3 for beta chain variable domain of TCR clone 136017 (TRBV7-2, TRBJ2-2)
CASRGQGAAGELFF

SEQ ID NO: 272035 - protein, 14 aa, Homo sapiens
  CDR3 for alpha chain variable domain of TCR clone 136018 (TRAV23/DV6, TRAJ22)
CAASRSGSARQLTF

SEQ ID NO: 272036 - protein, 13 aa, Homo sapiens
  CDR3 for beta chain variable domain of TCR clone 136018 (TRBV12-4, TRBJ2-2)
CASSITGSGELFF

SEQ ID NO: 272037 - protein, 15 aa, Homo sapiens
  CDR3 for alpha chain variable domain of TCR clone 136019 (TRAV17, TRAJ57)
CATGPSQGGSEKLVF

SEQ ID NO: 272038 - protein, 15 aa, Homo sapiens
  CDR3 for beta chain variable domain of TCR clone 136019 (TRBV7-9, TRBJ1-6)
CASSSPGRGNSPLNF

SEQ ID NO: 272039 - protein, 10 aa, Homo sapiens
  CDR3 for alpha chain variable domain of TCR clone 136020 (TRAV20, TRAJ22)
CAAPARQLTF

SEQ ID NO: 272040 - protein, 16 aa, Homo sapiens
  CDR3 for beta chain variable domain of TCR clone 136020 (TRBV19, TRBJ2-1)
CASSKAGPSSYNEQFF

SEQ ID NO: 272041 - protein, 13 aa, Homo sapiens
  CDR3 for alpha chain variable domain of TCR clone 136021 (TRAV21, TRAJ36)
CAVIKTGANNLFF

SEQ ID NO: 272042 - protein, 13 aa, Homo sapiens
  CDR3 for beta chain variable domain of TCR clone 136021 (TRBV29-1, TRBJ2-3)
CSATRGGRDTQYF

SEQ ID NO: 272043 - protein, 14 aa, Homo sapiens
  CDR3 for alpha chain variable domain of TCR clone 136022 (TRAV9-2, TRAJ38)
CALRNAGNNRKLIW

SEQ ID NO: 272044 - protein, 15 aa, Homo sapiens
  CDR3 for beta chain variable domain of TCR clone 136022 (TRBV9, TRBJ2-1)
CASSLAGSSYNEQFF

SEQ ID NO: 272045 - protein, 15 aa, Homo sapiens
  CDR3 for alpha chain variable domain of TCR clone 136023 (TRAV12-1, TRAJ8)
CVVNVENTGFQKLVF

SEQ ID NO: 272046 - protein, 14 aa, Homo sapiens
  CDR3 for beta chain variable domain of TCR clone 136023 (TRBV28, TRBJ1-5)
CASSLGVLVKPQHF

SEQ ID NO: 272047 - protein, 12 aa, Homo sapiens
  CDR3 for alpha chain variable domain of TCR clone 136024 (TRAV12-3, TRAJ20)
CAMVRVDYKLSF

SEQ ID NO: 272048 - protein, 14 aa, Homo sapiens
  CDR3 for beta chain variable domain of TCR clone 136024 (TRBV5-5, TRBJ1-5)
CASSGQGVDQPQHF

SEQ ID NO: 272049 - protein, 15 aa, Homo sapiens
  CDR3 for alpha chain variable domain of TCR clone 136025 (TRAV13-2, TRAJ10)
FAENRDSGGGNKLTF

SEQ ID NO: 272050 - protein, 16 aa, Homo sapiens
  CDR3 for beta chain variable domain of TCR clone 136025 (TRBV2, TRBJ1-3)
CASSRTGGSTGNTIYF

SEQ ID NO: 272051 - protein, 11 aa, Homo sapiens
  CDR3 for alpha chain variable domain of TCR clone 136026 (TRAV1-2, TRAJ20)
CAVSNDYKLSF

SEQ ID NO: 272052 - protein, 16 aa, Homo sapiens
  CDR3 for beta chain variable domain of TCR clone 136026 (TRBV29-1, TRBJ2-6)
CSVEDITYAGANVPTF

SEQ ID NO: 272053 - protein, 12 aa, Homo sapiens
  CDR3 for alpha chain variable domain of TCR clone 136027 (TRAV29/DV5, TRAJ43)
CAAPYNNNDMRF

SEQ ID NO: 272054 - protein, 16 aa, Homo sapiens
  CDR3 for beta chain variable domain of TCR clone 136027 (TRBV20-1, TRBJ1-4)
CSAPGQGLLTNEKLFF

SEQ ID NO: 272055 - protein, 12 aa, Homo sapiens
  CDR3 for alpha chain variable domain of TCR clone 136028 (TRAV9-2, TRAJ36)
CALKKGANNLFF

SEQ ID NO: 272056 - protein, 16 aa, Homo sapiens
  CDR3 for beta chain variable domain of TCR clone 136028 (TRBV20-1, TRBJ1-4)
CSAPGQGLLTNDKLFF

SEQ ID NO: 272057 - protein, 18 aa, Homo sapiens
  CDR3 for alpha chain variable domain of TCR clone 136029 (TRAV8-4, TRAJ52)
CAVSRANAGGTSYGKLTF

SEQ ID NO: 272058 - protein, 12 aa, Homo sapiens
  CDR3 for beta chain variable domain of TCR clone 136029 (TRBV12-4, TRBJ2-7)
CASSLGGYEQYF

SEQ ID NO: 272059 - protein, 14 aa, Homo sapiens
  CDR3 for alpha chain variable domain of TCR clone 136030 (TRAV12-3, TRAJ41)
CAMSAGNSGYALNF

SEQ ID NO: 272060 - protein, 19 aa, Homo sapiens
  CDR3 for beta chain variable domain of TCR clone 136030 (TRBV11-3, TRBJ2-2)
CASSTRPGAKTTNTGELFF

SEQ ID NO: 272061 - protein, 13 aa, Homo sapiens
  CDR3 for alpha chain variable domain of TCR clone 136031 (TRAV1-2, TRAJ9)
CAVLNTGGFKTIF

SEQ ID NO: 272062 - protein, 14 aa, Homo sapiens
  CDR3 for beta chain variable domain of TCR clone 136031 (TRBV20-1, TRBJ2-3)
CSARGGTSTDRQYF

SEQ ID NO: 272063 - protein, 11 aa, Homo sapiens
  CDR3 for alpha chain variable domain of TCR clone 136032 (TRAV12-3, TRAJ27)
CAMANAGKSTF

SEQ ID NO: 272064 - protein, 12 aa, Homo sapiens
  CDR3 for beta chain variable domain of TCR clone 136032 (TRBV11-2, TRBJ2-2)
CACSLGGGELFF

SEQ ID NO: 272065 - protein, 13 aa, Homo sapiens
  CDR3 for alpha chain variable domain of TCR clone 136033 (TRAV20, TRAJ56)
CAVHCLANSKLTF

SEQ ID NO: 272066 - protein, 12 aa, Homo sapiens
  CDR3 for beta chain variable domain of TCR clone 136033 (TRBV7-2, TRBJ2-1)
CASSPQDMEQFF

SEQ ID NO: 272067 - protein, 16 aa, Homo sapiens
  CDR3 for alpha chain variable domain of TCR clone 136034 (TRAV12-2, TRAJ10)
CAVTRVLTGGGNKLPF

SEQ ID NO: 272068 - protein, 12 aa, Homo sapiens
  CDR3 for beta chain variable domain of TCR clone 136034 (TRBV28, TRBJ2-7)
CASSFSSYEQYF

SEQ ID NO: 272069 - protein, 16 aa, Homo sapiens
  CDR3 for alpha chain variable domain of TCR clone 136035 (TRAV30, TRAJ24)
CGTEIVDADSWGKFQF

SEQ ID NO: 272070 - protein, 14 aa, Homo sapiens
  CDR3 for beta chain variable domain of TCR clone 136035 (TRBV7-2, TRBJ2-7)
CANSPKTSFYEQYF

SEQ ID NO: 272071 - protein, 11 aa, Homo sapiens
  CDR3 for alpha chain variable domain of TCR clone 136036 (TRAV1-1, TRAJ23)
CAVRQGGKLIF

SEQ ID NO: 272072 - protein, 13 aa, Homo sapiens
  CDR3 for beta chain variable domain of TCR clone 136036 (TRBV7-3, TRBJ1-1)
CSSSQDWGAEAFF

SEQ ID NO: 272073 - protein, 12 aa, Homo sapiens
  CDR3 for alpha chain variable domain of TCR clone 136037 (TRAV1-1, TRAJ30)
CAVRGRDDKIIF

SEQ ID NO: 272074 - protein, 15 aa, Homo sapiens
  CDR3 for beta chain variable domain of TCR clone 136037 (TRBV5-1, TRBJ2-4)
CASSLGGGGSYIQYF

SEQ ID NO: 272075 - protein, 14 aa, Homo sapiens
  CDR3 for alpha chain variable domain of TCR clone 136038 (TRAV1-2, TRAJ8)
CAVREDTGFQKLVF

SEQ ID NO: 272076 - protein, 15 aa, Homo sapiens
  CDR3 for beta chain variable domain of TCR clone 136038 (TRBV5-1, TRBJ2-3)
CASSVTAGSTDTQYF

SEQ ID NO: 272077 - protein, 15 aa, Homo sapiens
  CDR3 for alpha chain variable domain of TCR clone 136039 (TRAV13-1, TRAJ18)
CAASGGVSTLGRLYF

SEQ ID NO: 272078 - protein, 13 aa, Homo sapiens
  CDR3 for beta chain variable domain of TCR clone 136039 (TRBV18, TRBJ2-1)
CASGLASNNEQFF

SEQ ID NO: 272079 - protein, 14 aa, Homo sapiens
  CDR3 for alpha chain variable domain of TCR clone 136040 (TRAV12-3, TRAJ10)
SHLPLTGGGNKLTF

SEQ ID NO: 272080 - protein, 12 aa, Homo sapiens
  CDR3 for beta chain variable domain of TCR clone 136040 (TRBV7-8, TRBJ2-7)
CASSLGDREQYV

SEQ ID NO: 272081 - protein, 15 aa, Homo sapiens
  CDR3 for alpha chain variable domain of TCR clone 136041 (TRAV17, TRAJ23)
CATDAGDNQGGKLIF

SEQ ID NO: 272082 - protein, 12 aa, Homo sapiens
  CDR3 for beta chain variable domain of TCR clone 136041 (TRBV2, TRBJ2-1)
CAKREGYNEQFF

SEQ ID NO: 272083 - protein, 13 aa, Homo sapiens
  CDR3 for alpha chain variable domain of TCR clone 136042 (TRAV26-1, TRAJ31)
CIVRVDGNARLMF

SEQ ID NO: 272084 - protein, 17 aa, Homo sapiens
  CDR3 for beta chain variable domain of TCR clone 136042 (TRBV11-2, TRBJ2-1)
CASSLYPPGVEYNEQFI

SEQ ID NO: 272085 - protein, 11 aa, Homo sapiens
  CDR3 for alpha chain variable domain of TCR clone 136043 (TRAV12-1, TRAJ42)
CEGGSQGNLIF

SEQ ID NO: 272086 - protein, 18 aa, Homo sapiens
  CDR3 for beta chain variable domain of TCR clone 136043 (TRBV11-2, TRBJ2-3)
CAGSLGGASRGAPNTQYF

SEQ ID NO: 272087 - protein, 14 aa, Homo sapiens
  CDR3 for alpha chain variable domain of TCR clone 136044 (TRAV12-1, TRAJ17)
CVVNYEAAGNKLTF

SEQ ID NO: 272088 - protein, 17 aa, Homo sapiens
  CDR3 for beta chain variable domain of TCR clone 136044 (TRBV20-1, TRBJ2-1)
CSASSSGLAGSYNGQFF

SEQ ID NO: 272089 - protein, 12 aa, Homo sapiens
  CDR3 for alpha chain variable domain of TCR clone 136045 (TRAV3, TRAJ26)
CAVRDYGQNFVF

SEQ ID NO: 272090 - protein, 16 aa, Homo sapiens
  CDR3 for beta chain variable domain of TCR clone 136045 (TRBV11-2, TRBJ1-2)
CASSHSGREANYGYTF

SEQ ID NO: 272091 - protein, 12 aa, Homo sapiens
  CDR3 for alpha chain variable domain of TCR clone 136046 (TRAV17, TRAJ53)
CAGGGSNYKLTF

SEQ ID NO: 272092 - protein, 16 aa, Homo sapiens
  CDR3 for beta chain variable domain of TCR clone 136046 (TRBV11-2, TRBJ2-3)
CASSFQGQGALDTQYF

SEQ ID NO: 272093 - protein, 13 aa, Homo sapiens
  CDR3 for alpha chain variable domain of TCR clone 136047 (TRAV3, TRAJ21)
CAVREPDFNKFYF

SEQ ID NO: 272094 - protein, 12 aa, Homo sapiens
  CDR3 for beta chain variable domain of TCR clone 136047 (TRBV7-9, TRBJ2-7)
CASSQGVYEQYF

SEQ ID NO: 272095 - protein, 15 aa, Homo sapiens
  CDR3 for alpha chain variable domain of TCR clone 136048 (TRAV12-3, TRAJ52)
CNGGAGGTSYGRLTS

SEQ ID NO: 272096 - protein, 13 aa, Homo sapiens
  CDR3 for beta chain variable domain of TCR clone 136048 (TRBV20-1, TRBJ2-5)
CSARGDYQETQYF

SEQ ID NO: 272097 - protein, 15 aa, Homo sapiens
  CDR3 for alpha chain variable domain of TCR clone 136049 (TRAV12-1, TRAJ15)
CVVARANQAGTALIF

SEQ ID NO: 272098 - protein, 14 aa, Homo sapiens
  CDR3 for beta chain variable domain of TCR clone 136049 (TRBV5-1, TRBJ1-1)
CASSLVPINTEAFF

SEQ ID NO: 272099 - protein, 12 aa, Homo sapiens
  CDR3 for alpha chain variable domain of TCR clone 136050 (TRAV12-1, TRAJ31)
CFSWNNNARLMF

SEQ ID NO: 272100 - protein, 15 aa, Homo sapiens
  CDR3 for beta chain variable domain of TCR clone 136050 (TRBV7-2, TRBJ1-5)
CASSLDRGQDQPQHF

SEQ ID NO: 272101 - protein, 13 aa, Homo sapiens
  CDR3 for alpha chain variable domain of TCR clone 136051 (TRAV12-2, TRAJ20)
CSVYPSNDYKPSF

SEQ ID NO: 272102 - protein, 15 aa, Homo sapiens
  CDR3 for beta chain variable domain of TCR clone 136051 (TRBV27, TRBJ2-5)
CASSLYPRGGETQYF

SEQ ID NO: 272103 - protein, 10 aa, Homo sapiens
  CDR3 for alpha chain variable domain of TCR clone 136052 (TRAV2, TRAJ15)
RGQAGTALIF

SEQ ID NO: 272104 - protein, 20 aa, Homo sapiens
  CDR3 for beta chain variable domain of TCR clone 136052 (TRBV7-8, TRBJ2-2)
CASSHLFPGPTIHITGELFF

SEQ ID NO: 272105 - protein, 13 aa, Homo sapiens
  CDR3 for alpha chain variable domain of TCR clone 136053 (TRAV23/DV6, TRAJ31)
CAARRGNNARLMF

SEQ ID NO: 272106 - protein, 16 aa, Homo sapiens
  CDR3 for beta chain variable domain of TCR clone 136053 (TRBV7-3, TRBJ2-1)
CASSLEGYRSYNEQFF

SEQ ID NO: 272107 - protein, 16 aa, Homo sapiens
  CDR3 for alpha chain variable domain of TCR clone 136054 (TRAV23/DV6, TRAJ52)
CAARSSGGTSYGKLTF

SEQ ID NO: 272108 - protein, 13 aa, Homo sapiens
  CDR3 for beta chain variable domain of TCR clone 136054 (TRBV7-9, TRBJ1-1)
CASSLSGETEAFF

SEQ ID NO: 272109 - protein, 12 aa, Homo sapiens
  CDR3 for alpha chain variable domain of TCR clone 136055 (TRAV8-3, TRAJ20)
CAVGASDYKLIF

SEQ ID NO: 272110 - protein, 16 aa, Homo sapiens
  CDR3 for beta chain variable domain of TCR clone 136055 (TRBV19, TRBJ2-2)
CASRSPGTGATGELLF

SEQ ID NO: 272111 - protein, 14 aa, Homo sapiens
  CDR3 for alpha chain variable domain of TCR clone 136056 (TRAV12-3, TRAJ10)
SHLPLTGGGNKLTF

SEQ ID NO: 272112 - protein, 12 aa, Homo sapiens
  CDR3 for beta chain variable domain of TCR clone 136056 (TRBV25-1, TRBJ2-7)
CASKRGTGEQYF

SEQ ID NO: 272113 - protein, 14 aa, Homo sapiens
  CDR3 for alpha chain variable domain of TCR clone 136057 (TRAV9-2, TRAJ39)
CALYIYNAGNMLTF

SEQ ID NO: 272114 - protein, 16 aa, Homo sapiens
  CDR3 for beta chain variable domain of TCR clone 136057 (TRBV4-2, TRBJ2-1)
CASSQGEGRTVNEQFF

SEQ ID NO: 272115 - protein, 15 aa, Homo sapiens
  CDR3 for alpha chain variable domain of TCR clone 136058 (TRAV29/DV5, TRAJ53)
CAARYSGGSNYKLTF

SEQ ID NO: 272116 - protein, 16 aa, Homo sapiens
  CDR3 for beta chain variable domain of TCR clone 136058 (TRBV7-2, TRBJ2-5)
CASSSKWLSGQETQYF

SEQ ID NO: 272117 - protein, 19 aa, Homo sapiens
  CDR3 for alpha chain variable domain of TCR clone 136059 (TRAV16, )
CALSGDIQNPDPAVYQLRE

SEQ ID NO: 272118 - protein, 16 aa, Homo sapiens
  CDR3 for beta chain variable domain of TCR clone 136059 (TRBV12-5, TRBJ2-5)
CTSGPRTSGNQETQYF

SEQ ID NO: 272119 - protein, 12 aa, Homo sapiens
  CDR3 for alpha chain variable domain of TCR clone 136060 (TRAV12-3, TRAJ17)
CAMTLTGNKLTF

SEQ ID NO: 272120 - protein, 15 aa, Homo sapiens
  CDR3 for beta chain variable domain of TCR clone 136060 (TRBV20-1, TRBJ2-7)
WSARDRVSGMDEQYF

SEQ ID NO: 272121 - protein, 14 aa, Homo sapiens
  CDR3 for alpha chain variable domain of TCR clone 136061 (TRAV12-3, TRAJ40)
CAVKIPSGTYKYIF

SEQ ID NO: 272122 - protein, 17 aa, Homo sapiens
  CDR3 for beta chain variable domain of TCR clone 136061 (TRBV11-2, TRBJ2-1)
CASSLYPPGVEYNEQFF

SEQ ID NO: 272123 - protein, 15 aa, Homo sapiens
  CDR3 for alpha chain variable domain of TCR clone 136062 (TRAV13-1, TRAJ44)
CAASRGGGTACKLTF

SEQ ID NO: 272124 - protein, 14 aa, Homo sapiens
  CDR3 for beta chain variable domain of TCR clone 136062 (TRBV7-2, TRBJ2-5)
CASSPRGSSETQYF

SEQ ID NO: 272125 - protein, 14 aa, Homo sapiens
  CDR3 for alpha chain variable domain of TCR clone 136063 (TRAV1-2, TRAJ8)
CAVREDTGFQKLVF

SEQ ID NO: 272126 - protein, 17 aa, Homo sapiens
  CDR3 for beta chain variable domain of TCR clone 136063 (TRBV6-5, TRBJ2-7)
CAVRPSVGEVQHYEQYF

SEQ ID NO: 272127 - protein, 14 aa, Homo sapiens
  CDR3 for alpha chain variable domain of TCR clone 136064 (TRAV29/DV5, TRAJ45)
CAASFRGGADGLTF

SEQ ID NO: 272128 - protein, 14 aa, Homo sapiens
  CDR3 for beta chain variable domain of TCR clone 136064 (TRBV11-2, TRBJ2-3)
CASSLEDGTDTQYF

SEQ ID NO: 272129 - protein, 14 aa, Homo sapiens
  CDR3 for alpha chain variable domain of TCR clone 136065 (TRAV38-1, TRAJ40)
CALRPTSGTYKYIF

SEQ ID NO: 272130 - protein, 14 aa, Homo sapiens
  CDR3 for beta chain variable domain of TCR clone 136065 (TRBV25-1, TRBJ1-1)
CASTHLGGNNEAFF

SEQ ID NO: 272131 - protein, 14 aa, Homo sapiens
  CDR3 for alpha chain variable domain of TCR clone 136066 (TRAV13-1, TRAJ3)
CASEGYSSASKLIF

SEQ ID NO: 272132 - protein, 13 aa, Homo sapiens
  CDR3 for beta chain variable domain of TCR clone 136066 (TRBV5-7, TRBJ1-1)
CASSLFQNTEAFF

SEQ ID NO: 272133 - protein, 17 aa, Homo sapiens
  CDR3 for alpha chain variable domain of TCR clone 136067 (TRAV3, TRAJ38)
CAVRHCLNAGNNRKLIW

SEQ ID NO: 272134 - protein, 16 aa, Homo sapiens
  CDR3 for beta chain variable domain of TCR clone 136067 (TRBV20-1, TRBJ1-4)
CSAPGQGLLTNEKLFF

SEQ ID NO: 272135 - protein, 16 aa, Homo sapiens
  CDR3 for alpha chain variable domain of TCR clone 136068 (TRAV30, TRAJ24)
CGTEIVDADSWGKCQF

SEQ ID NO: 272136 - protein, 14 aa, Homo sapiens
  CDR3 for beta chain variable domain of TCR clone 136068 (TRBV20-1, TRBJ2-5)
CSARDGRAGETQYF

SEQ ID NO: 272137 - protein, 13 aa, Homo sapiens
  CDR3 for alpha chain variable domain of TCR clone 136069 (TRAV8-4, TRAJ30)
CAVSVNRDDKIIS

SEQ ID NO: 272138 - protein, 13 aa, Homo sapiens
  CDR3 for beta chain variable domain of TCR clone 136069 (TRBV3-1, TRBJ2-2)
CASLARGSGELFF

SEQ ID NO: 272139 - protein, 13 aa, Homo sapiens
  CDR3 for alpha chain variable domain of TCR clone 136070 (TRAV8-4, TRAJ48)
CAVSVFGNEKLTF

SEQ ID NO: 272140 - protein, 15 aa, Homo sapiens
  CDR3 for beta chain variable domain of TCR clone 136070 (TRBV20-1, TRBJ2-7)
CSARKGLAESYEQYF

SEQ ID NO: 272141 - protein, 14 aa, Homo sapiens
  CDR3 for alpha chain variable domain of TCR clone 136071 (TRAV8-3, TRAJ4)
CAVGAAGGYNKLIF

SEQ ID NO: 272142 - protein, 13 aa, Homo sapiens
  CDR3 for beta chain variable domain of TCR clone 136071 (TRBV25-1, TRBJ2-5)
CASSESGRETQYF

SEQ ID NO: 272143 - protein, 12 aa, Homo sapiens
  CDR3 for alpha chain variable domain of TCR clone 136072 (TRAV25, TRAJ11)
CAGASGYSTLTF

SEQ ID NO: 272144 - protein, 14 aa, Homo sapiens
  CDR3 for beta chain variable domain of TCR clone 136072 (TRBV12-4, TRBJ1-1)
CASASSEFYTEAFF

SEQ ID NO: 272145 - protein, 14 aa, Homo sapiens
  CDR3 for alpha chain variable domain of TCR clone 136073 (TRAV12-1, TRAJ43)
CVVNGRSNNNDMRF

SEQ ID NO: 272146 - protein, 14 aa, Homo sapiens
  CDR3 for beta chain variable domain of TCR clone 136073 (TRBV6-1, TRBJ1-3)
CASVQGGGGNTIYF

SEQ ID NO: 272147 - protein, 15 aa, Homo sapiens
  CDR3 for alpha chain variable domain of TCR clone 136074 (TRAV34, TRAJ38)
CGADFTPGNNRELIW

SEQ ID NO: 272148 - protein, 19 aa, Homo sapiens
  CDR3 for beta chain variable domain of TCR clone 136074 (TRBV2, TRBJ2-7)
CASSDDETSGRANDYEQYF

SEQ ID NO: 272149 - protein, 15 aa, Homo sapiens
  CDR3 for alpha chain variable domain of TCR clone 136075 (TRAV17, TRAJ57)
CATGPSQGGSEKLVF

SEQ ID NO: 272150 - protein, 15 aa, Homo sapiens
  CDR3 for beta chain variable domain of TCR clone 136075 (TRBV25-1, TRBJ1-4)
CASSPGDNTNEKLFF

SEQ ID NO: 272151 - protein, 14 aa, Homo sapiens
  CDR3 for alpha chain variable domain of TCR clone 136076 (TRAV3, TRAJ7)
CAVREEEREQQTRF

SEQ ID NO: 272152 - protein, 15 aa, Homo sapiens
  CDR3 for beta chain variable domain of TCR clone 136076 (TRBV5-4, TRBJ2-5)
CASSFFGEGMETQYF

SEQ ID NO: 272153 - protein, 19 aa, Homo sapiens
  CDR3 for alpha chain variable domain of TCR clone 136077 (TRAV26-1, TRAJ28)
CIVRVAHAYSGAWSYQLTF

SEQ ID NO: 272154 - protein, 12 aa, Homo sapiens
  CDR3 for beta chain variable domain of TCR clone 136077 (TRBV27, TRBJ2-2)
CASKLFTGELFF

SEQ ID NO: 272155 - protein, 16 aa, Homo sapiens
  CDR3 for alpha chain variable domain of TCR clone 136078 (TRAV3, TRAJ37)
CAVRGKGSGNTVKLIF

SEQ ID NO: 272156 - protein, 15 aa, Homo sapiens
  CDR3 for beta chain variable domain of TCR clone 136078 (TRBV9, TRBJ1-4)
CASSVGGSTNEKLFF

SEQ ID NO: 272157 - protein, 15 aa, Homo sapiens
  CDR3 for alpha chain variable domain of TCR clone 136079 (TRAV25, TRAJ10)
CAGPLLTGGGNKLTF

SEQ ID NO: 272158 - protein, 13 aa, Homo sapiens
  CDR3 for beta chain variable domain of TCR clone 136079 (TRBV4-1, TRBJ2-1)
CASSQAGGDEQFF

SEQ ID NO: 272159 - protein, 11 aa, Homo sapiens
  CDR3 for alpha chain variable domain of TCR clone 136080 (TRAV4, TRAJ31)
CLVGANARLMF

SEQ ID NO: 272160 - protein, 16 aa, Homo sapiens
  CDR3 for beta chain variable domain of TCR clone 136080 (TRBV7-2, TRBJ2-5)
CASSSKWLSGQETQYF

SEQ ID NO: 272161 - protein, 15 aa, Homo sapiens
  CDR3 for alpha chain variable domain of TCR clone 136081 (TRAV8-4, TRAJ13)
CAVRDWGGGYQKGTF

SEQ ID NO: 272162 - protein, 15 aa, Homo sapiens
  CDR3 for beta chain variable domain of TCR clone 136081 (TRBV25-1, TRBJ1-4)
CASSPGDSTNEKLFF

SEQ ID NO: 272163 - protein, 12 aa, Homo sapiens
  CDR3 for alpha chain variable domain of TCR clone 136082 (TRAV25, TRAJ5)
CRGGGGRRALTF

SEQ ID NO: 272164 - protein, 15 aa, Homo sapiens
  CDR3 for beta chain variable domain of TCR clone 136082 (TRBV19, TRBJ2-4)
CASRGPRRGENMQYF

SEQ ID NO: 272165 - protein, 13 aa, Homo sapiens
  CDR3 for alpha chain variable domain of TCR clone 136083 (TRAV27, TRAJ29)
CAGAHSGHTPLVF

SEQ ID NO: 272166 - protein, 14 aa, Homo sapiens
  CDR3 for beta chain variable domain of TCR clone 136083 (TRBV7-9, TRBJ2-7)
CASSIGQGAGEQYF

SEQ ID NO: 272167 - protein, 13 aa, Homo sapiens
  CDR3 for alpha chain variable domain of TCR clone 136084 (TRAV20, TRAJ31)
CAVQAWNNARLMF

SEQ ID NO: 272168 - protein, 13 aa, Homo sapiens
  CDR3 for beta chain variable domain of TCR clone 136084 (TRBV12-4, TRBJ1-2)
CASSLRQGKGYTV

SEQ ID NO: 272169 - protein, 14 aa, Homo sapiens
  CDR3 for alpha chain variable domain of TCR clone 136085 (TRAV29/DV5, TRAJ45)
CAASCRGGADGLTF

SEQ ID NO: 272170 - protein, 13 aa, Homo sapiens
  CDR3 for beta chain variable domain of TCR clone 136085 (TRBV12-5, TRBJ2-3)
CASGDRQSDTQYF

SEQ ID NO: 272171 - protein, 10 aa, Homo sapiens
  CDR3 for alpha chain variable domain of TCR clone 136086 (TRAV26-1, TRAJ40)
CIAGTYKYIF

SEQ ID NO: 272172 - protein, 15 aa, Homo sapiens
  CDR3 for beta chain variable domain of TCR clone 136086 (TRBV19, TRBJ2-1)
CASSSPGVPVDEQFF

SEQ ID NO: 272173 - protein, 14 aa, Homo sapiens
  CDR3 for alpha chain variable domain of TCR clone 136087 (TRAV17, TRAJ16)
CATADFSDGQKLLF

SEQ ID NO: 272174 - protein, 16 aa, Homo sapiens
  CDR3 for beta chain variable domain of TCR clone 136087 (TRBV3-1, TRBJ2-5)
CASSQDWASGQETQYF

SEQ ID NO: 272175 - protein, 11 aa, Homo sapiens
  CDR3 for alpha chain variable domain of TCR clone 136088 (TRAV21, TRAJ39)
LLVNAGNMLTF

SEQ ID NO: 272176 - protein, 13 aa, Homo sapiens
  CDR3 for beta chain variable domain of TCR clone 136088 (TRBV7-3, TRBJ1-1)
CASSQDWGAEAFF

SEQ ID NO: 272177 - protein, 15 aa, Homo sapiens
  CDR3 for alpha chain variable domain of TCR clone 136089 (TRAV27, TRAJ53)
CRAINSGGSNYKLTF

SEQ ID NO: 272178 - protein, 15 aa, Homo sapiens
  CDR3 for beta chain variable domain of TCR clone 136089 (TRBV7-3, TRBJ2-2)
CASSETGQGTGELFF

SEQ ID NO: 272179 - protein, 14 aa, Homo sapiens
  CDR3 for alpha chain variable domain of TCR clone 136090 (TRAV13-1, TRAJ53)
CAASISGRNYKLTF

SEQ ID NO: 272180 - protein, 15 aa, Homo sapiens
  CDR3 for beta chain variable domain of TCR clone 136090 (TRBV4-1, TRBJ1-4)
CASSDTGGTNEKLFF

SEQ ID NO: 272181 - protein, 14 aa, Homo sapiens
  CDR3 for alpha chain variable domain of TCR clone 136091 (TRAV13-1, TRAJ35)
CAASKGGFGNGLHC

SEQ ID NO: 272182 - protein, 13 aa, Homo sapiens
  CDR3 for beta chain variable domain of TCR clone 136091 (TRBV7-3, TRBJ1-1)
CASSQDGGAEAFF

SEQ ID NO: 272183 - protein, 13 aa, Homo sapiens
  CDR3 for alpha chain variable domain of TCR clone 136092 (TRAV21, TRAJ37)
CAVISGNTGKLIF

SEQ ID NO: 272184 - protein, 15 aa, Homo sapiens
  CDR3 for beta chain variable domain of TCR clone 136092 (TRBV12-4, TRBJ1-2)
CASSFVDRGNYGYTF

SEQ ID NO: 272185 - protein, 13 aa, Homo sapiens
  CDR3 for alpha chain variable domain of TCR clone 136093 (TRAV8-4, TRAJ30)
CAVNRNRDDTIIF

SEQ ID NO: 272186 - protein, 17 aa, Homo sapiens
  CDR3 for beta chain variable domain of TCR clone 136093 (TRBV20-1, TRBJ2-2)
CSASGSGQGGLTGELFF

SEQ ID NO: 272187 - protein, 16 aa, Homo sapiens
  CDR3 for alpha chain variable domain of TCR clone 136094 (TRAV27, TRAJ52)
CAGAPAGGTSYGQLTF

SEQ ID NO: 272188 - protein, 12 aa, Homo sapiens
  CDR3 for beta chain variable domain of TCR clone 136094 (TRBV27, TRBJ2-1)
CASRGFYNEQLF

SEQ ID NO: 272189 - protein, 15 aa, Homo sapiens
  CDR3 for alpha chain variable domain of TCR clone 136095 (TRAV26-1, TRAJ21)
CILRVPNYNFNKFYF

SEQ ID NO: 272190 - protein, 16 aa, Homo sapiens
  CDR3 for beta chain variable domain of TCR clone 136095 (TRBV7-9, TRBJ2-3)
CASSLQGNPGTDTQYF

SEQ ID NO: 272191 - protein, 16 aa, Homo sapiens
  CDR3 for alpha chain variable domain of TCR clone 136096 (TRAV3, TRAJ37)
CAVRGKGSGNTGKLIF

SEQ ID NO: 272192 - protein, 13 aa, Homo sapiens
  CDR3 for beta chain variable domain of TCR clone 136096 (TRBV14, TRBJ2-7)
CGSSQGRRYEQYF

SEQ ID NO: 272193 - protein, 14 aa, Homo sapiens
  CDR3 for alpha chain variable domain of TCR clone 136097 (TRAV12-1, TRAJ12)
CVVTRMDSSYKLIF

SEQ ID NO: 272194 - protein, 15 aa, Homo sapiens
  CDR3 for beta chain variable domain of TCR clone 136097 (TRBV2, TRBJ2-1)
CASSEEREGDNEQFF

SEQ ID NO: 272195 - protein, 14 aa, Homo sapiens
  CDR3 for alpha chain variable domain of TCR clone 136098 (TRAV1-2, TRAJ8)
CAVREDTGFKKLVF

SEQ ID NO: 272196 - protein, 15 aa, Homo sapiens
  CDR3 for beta chain variable domain of TCR clone 136098 (TRBV10-2, TRBJ2-6)
CASSEQGTGANVLTF

SEQ ID NO: 272197 - protein, 19 aa, Homo sapiens
  CDR3 for alpha chain variable domain of TCR clone 136099 (TRAV26-1, TRAJ46)
CTIASSESEKNSSGDKLTF

SEQ ID NO: 272198 - protein, 16 aa, Homo sapiens
  CDR3 for beta chain variable domain of TCR clone 136099 (TRBV27, TRBJ2-2)
CASSFRGLVRTGELFF

SEQ ID NO: 272199 - protein, 12 aa, Homo sapiens
  CDR3 for alpha chain variable domain of TCR clone 136100 (TRAV2, TRAJ26)
CAGSPGRLWSEF

SEQ ID NO: 272200 - protein, 13 aa, Homo sapiens
  CDR3 for beta chain variable domain of TCR clone 136100 (TRBV7-9, TRBJ1-2)
CASGLKQNYGYSF

SEQ ID NO: 272201 - protein, 14 aa, Homo sapiens
  CDR3 for alpha chain variable domain of TCR clone 136101 (TRAV13-1, TRAJ3)
WAAEGYSRASKIIF

SEQ ID NO: 272202 - protein, 14 aa, Homo sapiens
  CDR3 for beta chain variable domain of TCR clone 136101 (TRBV19, TRBJ2-5)
CASSSSGIQETQYF

SEQ ID NO: 272203 - protein, 13 aa, Homo sapiens
  CDR3 for alpha chain variable domain of TCR clone 136102 (TRAV8-3, TRAJ43)
CAVGPDNNNDMRF

SEQ ID NO: 272204 - protein, 14 aa, Homo sapiens
  CDR3 for beta chain variable domain of TCR clone 136102 (TRBV7-2, TRBJ2-7)
CASRSQGAAYEQYF

SEQ ID NO: 272205 - protein, 14 aa, Homo sapiens
  CDR3 for alpha chain variable domain of TCR clone 136103 (TRAV30, TRAJ33)
CGTVAPRSNYQLIW

SEQ ID NO: 272206 - protein, 15 aa, Homo sapiens
  CDR3 for beta chain variable domain of TCR clone 136103 (TRBV9, TRBJ1-6)
CASSVAGTGDSPLHF

SEQ ID NO: 272207 - protein, 13 aa, Homo sapiens
  CDR3 for alpha chain variable domain of TCR clone 136104 (TRAV21, TRAJ27)
CAARPCNAGKSNF

SEQ ID NO: 272208 - protein, 14 aa, Homo sapiens
  CDR3 for beta chain variable domain of TCR clone 136104 (TRBV7-6, TRBJ2-3)
CASSLGTVTDTQYF

SEQ ID NO: 272209 - protein, 14 aa, Homo sapiens
  CDR3 for alpha chain variable domain of TCR clone 136105 (TRAV12-3, TRAJ9)
CAMSPNNGGFKTIF

SEQ ID NO: 272210 - protein, 12 aa, Homo sapiens
  CDR3 for beta chain variable domain of TCR clone 136105 (TRBV11-2, TRBJ2-2)
CASSLGGGELFF

SEQ ID NO: 272211 - protein, 15 aa, Homo sapiens
  CDR3 for alpha chain variable domain of TCR clone 136106 (TRAV21, TRAJ13)
SAVRPTSGGYQKVTF

SEQ ID NO: 272212 - protein, 15 aa, Homo sapiens
  CDR3 for beta chain variable domain of TCR clone 136106 (TRBV28, TRBJ2-7)
CASSPGGRGFYEQYF

SEQ ID NO: 272213 - protein, 16 aa, Homo sapiens
  CDR3 for alpha chain variable domain of TCR clone 136107 (TRAV22, TRAJ45)
CAVERGKRGGADGLTF

SEQ ID NO: 272214 - protein, 14 aa, Homo sapiens
  CDR3 for beta chain variable domain of TCR clone 136107 (TRBV25-1, TRBJ1-6)
CASSLSADISPLHF

SEQ ID NO: 272215 - protein, 12 aa, Homo sapiens
  CDR3 for alpha chain variable domain of TCR clone 136108 (TRAV38-1, TRAJ47)
CAFEIYGNKLVF

SEQ ID NO: 272216 - protein, 15 aa, Homo sapiens
  CDR3 for beta chain variable domain of TCR clone 136108 (TRBV5-7, TRBJ2-7)
CASSGGRPVPYEQYF

SEQ ID NO: 272217 - protein, 18 aa, Homo sapiens
  CDR3 for alpha chain variable domain of TCR clone 136109 (TRAV21, TRAJ52)
CAVRPSPAGGTSFGKLTF

SEQ ID NO: 272218 - protein, 16 aa, Homo sapiens
  CDR3 for beta chain variable domain of TCR clone 136109 (TRBV19, TRBJ2-1)
CASSKAGPSSYNEQFF

SEQ ID NO: 272219 - protein, 15 aa, Homo sapiens
  CDR3 for alpha chain variable domain of TCR clone 136110 (TRAV23/DV6, TRAJ15)
CAALPAGRNGSDLWE

SEQ ID NO: 272220 - protein, 14 aa, Homo sapiens
  CDR3 for beta chain variable domain of TCR clone 136110 (TRBV7-9, TRBJ1-2)
CASSRQGANYGYTF

SEQ ID NO: 272221 - protein, 10 aa, Homo sapiens
  CDR3 for alpha chain variable domain of TCR clone 136111 (TRAV13-1, TRAJ15)
CRTPGTALIF

SEQ ID NO: 272222 - protein, 15 aa, Homo sapiens
  CDR3 for beta chain variable domain of TCR clone 136111 (TRBV28, TRBJ2-5)
CASSPPWSYQETQYF

SEQ ID NO: 272223 - protein, 15 aa, Homo sapiens
  CDR3 for alpha chain variable domain of TCR clone 136112 (TRAV8-3, TRAJ23)
CAVGDRYNQGGKLIF

SEQ ID NO: 272224 - protein, 17 aa, Homo sapiens
  CDR3 for beta chain variable domain of TCR clone 136112 (TRBV4-1, TRBJ1-4)
CASSQEGPRGLEEKLFF

SEQ ID NO: 272225 - protein, 12 aa, Homo sapiens
  CDR3 for alpha chain variable domain of TCR clone 136113 (TRAV12-3, TRAJ17)
CAMTLTGNKLTF

SEQ ID NO: 272226 - protein, 15 aa, Homo sapiens
  CDR3 for beta chain variable domain of TCR clone 136113 (TRBV7-2, TRBJ1-2)
CASSQVWAATSGYTF

SEQ ID NO: 272227 - protein, 15 aa, Homo sapiens
  CDR3 for alpha chain variable domain of TCR clone 136114 (TRAV3, TRAJ11)
CPVRDRGSGYSTLTF

SEQ ID NO: 272228 - protein, 13 aa, Homo sapiens
  CDR3 for beta chain variable domain of TCR clone 136114 (TRBV7-9, TRBJ1-2)
CASSLKQNYGYTF

SEQ ID NO: 272229 - protein, 15 aa, Homo sapiens
  CDR3 for alpha chain variable domain of TCR clone 136115 (TRAV23/DV6, TRAJ18)
CAARYRGSTLGRLYF

SEQ ID NO: 272230 - protein, 14 aa, Homo sapiens
  CDR3 for beta chain variable domain of TCR clone 136115 (TRBV19, TRBJ2-2)
CASKRAPNTGELFF

SEQ ID NO: 272231 - protein, 13 aa, Homo sapiens
  CDR3 for alpha chain variable domain of TCR clone 136116 (TRAV21, TRAJ20)
CAVGVFADYKLSF

SEQ ID NO: 272232 - protein, 16 aa, Homo sapiens
  CDR3 for beta chain variable domain of TCR clone 136116 (TRBV24-1, TRBJ2-3)
CATSDPGTGATDTQYF

SEQ ID NO: 272233 - protein, 14 aa, Homo sapiens
  CDR3 for alpha chain variable domain of TCR clone 136117 (TRAV4, TRAJ17)
CLVGDMAAANKLTF

SEQ ID NO: 272234 - protein, 13 aa, Homo sapiens
  CDR3 for beta chain variable domain of TCR clone 136117 (TRBV18, TRBJ2-7)
CASQSGGGYEQYF

SEQ ID NO: 272235 - protein, 12 aa, Homo sapiens
  CDR3 for alpha chain variable domain of TCR clone 136118 (TRAV2, TRAJ26)
CAGSPGRLWPEF

SEQ ID NO: 272236 - protein, 16 aa, Homo sapiens
  CDR3 for beta chain variable domain of TCR clone 136118 (TRBV3-1, TRBJ2-7)
CASSQGATGVAYEQYF

SEQ ID NO: 272237 - protein, 10 aa, Homo sapiens
  CDR3 for alpha chain variable domain of TCR clone 136119 (TRAV23/DV6, TRAJ31)
CARGGARPMF

SEQ ID NO: 272238 - protein, 14 aa, Homo sapiens
  CDR3 for beta chain variable domain of TCR clone 136119 (TRBV7-8, TRBJ1-2)
CASSPDSLSYGDTF

SEQ ID NO: 272239 - protein, 14 aa, Homo sapiens
  CDR3 for alpha chain variable domain of TCR clone 136120 (TRAV26-1, TRAJ49)
CIVTLTNTGNQFYF

SEQ ID NO: 272240 - protein, 13 aa, Homo sapiens
  CDR3 for beta chain variable domain of TCR clone 136120 (TRBV4-1, TRBJ2-7)
CASSQGQAYEQYF

SEQ ID NO: 272241 - protein, 16 aa, Homo sapiens
  CDR3 for alpha chain variable domain of TCR clone 136121 (TRAV8-3, TRAJ8)
CAVPRDGNTGFQKLVF

SEQ ID NO: 272242 - protein, 13 aa, Homo sapiens
  CDR3 for beta chain variable domain of TCR clone 136121 (TRBV10-2, TRBJ2-7)
CASGASGGYEQYF

SEQ ID NO: 272243 - protein, 14 aa, Homo sapiens
  CDR3 for alpha chain variable domain of TCR clone 136122 (TRAV12-2, TRAJ13)
CAVKKTGGYQKVTF

SEQ ID NO: 272244 - protein, 15 aa, Homo sapiens
  CDR3 for beta chain variable domain of TCR clone 136122 (TRBV20-1, TRBJ2-1)
CSARGIGGTSNEQFF

SEQ ID NO: 272245 - protein, 12 aa, Homo sapiens
  CDR3 for alpha chain variable domain of TCR clone 136123 (TRAV30, TRAJ43)
CVPEERGNDMRF

SEQ ID NO: 272246 - protein, 11 aa, Homo sapiens
  CDR3 for beta chain variable domain of TCR clone 136123 (TRBV29-1, TRBJ2-5)
CSEDRTGTQYL

SEQ ID NO: 272247 - protein, 13 aa, Homo sapiens
  CDR3 for alpha chain variable domain of TCR clone 136124 (TRAV16, TRAJ54)
CALAKGGAQKLVF

SEQ ID NO: 272248 - protein, 17 aa, Homo sapiens
  CDR3 for beta chain variable domain of TCR clone 136124 (TRBV13, TRBJ2-3)
CASSLSRVAGGRNTQYF

SEQ ID NO: 272249 - protein, 14 aa, Homo sapiens
  CDR3 for alpha chain variable domain of TCR clone 136125 (TRAV1-2, TRAJ8)
CAAREDTGFQKLVF

SEQ ID NO: 272250 - protein, 13 aa, Homo sapiens
  CDR3 for beta chain variable domain of TCR clone 136125 (TRBV19, TRBJ1-2)
CASSQGQVYGYTF

SEQ ID NO: 272251 - protein, 15 aa, Homo sapiens
  CDR3 for alpha chain variable domain of TCR clone 136126 (TRAV26-1, TRAJ48)
CTAHWSWFGNEKLTF

SEQ ID NO: 272252 - protein, 12 aa, Homo sapiens
  CDR3 for beta chain variable domain of TCR clone 136126 (TRBV19, TRBJ2-5)
CASSISEETQYF

SEQ ID NO: 272253 - protein, 13 aa, Homo sapiens
  CDR3 for alpha chain variable domain of TCR clone 136127 (TRAV12-1, TRAJ11)
CVVNQAGYSTLTF

SEQ ID NO: 272254 - protein, 16 aa, Homo sapiens
  CDR3 for beta chain variable domain of TCR clone 136127 (TRBV27, TRBJ2-2)
CASSLRPGGAPGELFF

SEQ ID NO: 272255 - protein, 14 aa, Homo sapiens
  CDR3 for alpha chain variable domain of TCR clone 136128 (TRAV35, TRAJ22)
CAGLRPGSARQLTF

SEQ ID NO: 272256 - protein, 13 aa, Homo sapiens
  CDR3 for beta chain variable domain of TCR clone 136128 (TRBV12-4, TRBJ2-5)
CASSPGTEETQYF

SEQ ID NO: 272257 - protein, 14 aa, Homo sapiens
  CDR3 for alpha chain variable domain of TCR clone 136129 (TRAV1-2, TRAJ16)
CAVNGFSDGQKLLF

SEQ ID NO: 272258 - protein, 14 aa, Homo sapiens
  CDR3 for beta chain variable domain of TCR clone 136129 (TRBV7-9, TRBJ2-3)
CASSLEDGTDTQYF

SEQ ID NO: 272259 - protein, 11 aa, Homo sapiens
  CDR3 for alpha chain variable domain of TCR clone 136130 (TRAV12-3, TRAJ41)
CAMNAREALNF

SEQ ID NO: 272260 - protein, 14 aa, Homo sapiens
  CDR3 for beta chain variable domain of TCR clone 136130 (TRBV7-6, TRBJ2-3)
CASSVAGGTDTQYF

SEQ ID NO: 272261 - protein, 14 aa, Homo sapiens
  CDR3 for alpha chain variable domain of TCR clone 136131 (TRAV1-2, TRAJ8)
CAVREDTGFQKLVF

SEQ ID NO: 272262 - protein, 12 aa, Homo sapiens
  CDR3 for beta chain variable domain of TCR clone 136131 (TRBV11-2, TRBJ2-1)
CASSAGNNEQFF

SEQ ID NO: 272263 - protein, 15 aa, Homo sapiens
  CDR3 for alpha chain variable domain of TCR clone 136132 (TRAV9-2, TRAJ39)
CALSDRNNAGNILTF

SEQ ID NO: 272264 - protein, 15 aa, Homo sapiens
  CDR3 for beta chain variable domain of TCR clone 136132 (TRBV10-3, TRBJ2-2)
CAISPGRTNTGELFF

SEQ ID NO: 272265 - protein, 13 aa, Homo sapiens
  CDR3 for alpha chain variable domain of TCR clone 136133 (TRAV27, TRAJ3)
ASLRGSSASKIIF

SEQ ID NO: 272266 - protein, 15 aa, Homo sapiens
  CDR3 for beta chain variable domain of TCR clone 136133 (TRBV28, TRBJ1-3)
CASSMGWPSGNTIYF

SEQ ID NO: 272267 - protein, 12 aa, Homo sapiens
  CDR3 for alpha chain variable domain of TCR clone 136134 (TRAV12-1, TRAJ40)
CVVYSGTYKYIF

SEQ ID NO: 272268 - protein, 17 aa, Homo sapiens
  CDR3 for beta chain variable domain of TCR clone 136134 (TRBV11-2, TRBJ2-3)
CQQLRGASRGAPNTHYF

SEQ ID NO: 272269 - protein, 17 aa, Homo sapiens
  CDR3 for alpha chain variable domain of TCR clone 136135 (TRAV13-1, TRAJ52)
CAASSGAGGTSYGKLTF

SEQ ID NO: 272270 - protein, 15 aa, Homo sapiens
  CDR3 for beta chain variable domain of TCR clone 136135 (TRBV2, TRBJ2-1)
CASSELEGSYNEQFV

SEQ ID NO: 272271 - protein, 12 aa, Homo sapiens
  CDR3 for alpha chain variable domain of TCR clone 136136 (TRAV8-3, TRAJ41)
CAVALSGYALNF

SEQ ID NO: 272272 - protein, 13 aa, Homo sapiens
  CDR3 for beta chain variable domain of TCR clone 136136 (TRBV10-3, TRBJ2-1)
CAISEFSGREQFF

SEQ ID NO: 272273 - protein, 13 aa, Homo sapiens
  CDR3 for alpha chain variable domain of TCR clone 136137 (TRAV8-3, TRAJ28)
CAVGAVGSYQLTF

SEQ ID NO: 272274 - protein, 16 aa, Homo sapiens
  CDR3 for beta chain variable domain of TCR clone 136137 (TRBV11-2, TRBJ2-7)
CASSPLAGGPRYEQYF

SEQ ID NO: 272275 - protein, 16 aa, Homo sapiens
  CDR3 for alpha chain variable domain of TCR clone 136138 (TRAV4, TRAJ9)
CLVGDPNRPGGFKTTF

SEQ ID NO: 272276 - protein, 16 aa, Homo sapiens
  CDR3 for beta chain variable domain of TCR clone 136138 (TRBV28, TRBJ1-4)
CASSTPYRGRSEKLFF

SEQ ID NO: 272277 - protein, 12 aa, Homo sapiens
  CDR3 for alpha chain variable domain of TCR clone 136139 (TRAV12-3, TRAJ17)
CAMTLTGSKLTF

SEQ ID NO: 272278 - protein, 15 aa, Homo sapiens
  CDR3 for beta chain variable domain of TCR clone 136139 (TRBV20-1, TRBJ2-7)
CSARDRVAGMDEQYF

SEQ ID NO: 272279 - protein, 12 aa, Homo sapiens
  CDR3 for alpha chain variable domain of TCR clone 136140 (TRAV17, TRAJ20)
CATQSNYYKLGF

SEQ ID NO: 272280 - protein, 13 aa, Homo sapiens
  CDR3 for beta chain variable domain of TCR clone 136140 (TRBV10-3, TRBJ1-1)
CAIIPEGGTEAFF

SEQ ID NO: 272281 - protein, 12 aa, Homo sapiens
  CDR3 for alpha chain variable domain of TCR clone 136141 (TRAV23/DV6, TRAJ26)
CAASKFGQNFFF

SEQ ID NO: 272282 - protein, 13 aa, Homo sapiens
  CDR3 for beta chain variable domain of TCR clone 136141 (TRBV11-2, TRBJ1-5)
CASSLDRNQPQHF

SEQ ID NO: 272283 - protein, 16 aa, Homo sapiens
  CDR3 for alpha chain variable domain of TCR clone 136142 (TRAV13-1, TRAJ10)
CAAGYILTGGGNKLTF

SEQ ID NO: 272284 - protein, 15 aa, Homo sapiens
  CDR3 for beta chain variable domain of TCR clone 136142 (TRBV12-4, TRBJ2-7)
CASSPTGAISYEQYF

SEQ ID NO: 272285 - protein, 11 aa, Homo sapiens
  CDR3 for alpha chain variable domain of TCR clone 136143 (TRAV36/DV7, TRAJ45)
SGGGGADGLTF

SEQ ID NO: 272286 - protein, 17 aa, Homo sapiens
  CDR3 for beta chain variable domain of TCR clone 136143 (TRBV13, TRBJ2-3)
CASSLSRVAGGRNTQYF

SEQ ID NO: 272287 - protein, 18 aa, Homo sapiens
  CDR3 for alpha chain variable domain of TCR clone 136144 (TRAV21, TRAJ52)
CAVRPSPAGGTSYGKLTF

SEQ ID NO: 272288 - protein, 14 aa, Homo sapiens
  CDR3 for beta chain variable domain of TCR clone 136144 (TRBV29-1, TRBJ2-2)
CSVLAETNTGELFC

SEQ ID NO: 272289 - protein, 17 aa, Homo sapiens
  CDR3 for alpha chain variable domain of TCR clone 136145 (TRAV13-1, TRAJ52)
CAAGRNAGGTSSGKLKF

SEQ ID NO: 272290 - protein, 15 aa, Homo sapiens
  CDR3 for beta chain variable domain of TCR clone 136145 (TRBV6-3, TRBJ2-7)
CASSSPGTVFYEQYF

SEQ ID NO: 272291 - protein, 12 aa, Homo sapiens
  CDR3 for alpha chain variable domain of TCR clone 136146 (TRAV1-1, TRAJ39)
CAVPVVGNMLPF

SEQ ID NO: 272292 - protein, 17 aa, Homo sapiens
  CDR3 for beta chain variable domain of TCR clone 136146 (TRBV28, TRBJ2-5)
CASSTPEGDALQETHYF

SEQ ID NO: 272293 - protein, 13 aa, Homo sapiens
  CDR3 for alpha chain variable domain of TCR clone 136147 (TRAV3, TRAJ21)
CAVREPDFNKFYF

SEQ ID NO: 272294 - protein, 15 aa, Homo sapiens
  CDR3 for beta chain variable domain of TCR clone 136147 (TRBV12-4, TRBJ2-7)
CASGRGLAGGTEQYF

SEQ ID NO: 272295 - protein, 14 aa, Homo sapiens
  CDR3 for alpha chain variable domain of TCR clone 136148 (TRAV38-1, TRAJ45)
SASHSGGGADGLTF

SEQ ID NO: 272296 - protein, 13 aa, Homo sapiens
  CDR3 for beta chain variable domain of TCR clone 136148 (TRBV10-3, TRBJ1-2)
CAISERDSYGYTF

SEQ ID NO: 272297 - protein, 11 aa, Homo sapiens
  CDR3 for alpha chain variable domain of TCR clone 136149 (TRAV27, TRAJ47)
CRSNQGKKLGF

SEQ ID NO: 272298 - protein, 16 aa, Homo sapiens
  CDR3 for beta chain variable domain of TCR clone 136149 (TRBV7-9, TRBJ2-1)
CASSDVAGGSYNEQFF

SEQ ID NO: 272299 - protein, 17 aa, Homo sapiens
  CDR3 for alpha chain variable domain of TCR clone 136150 (TRAV13-1, TRAJ31)
CAPRDRLMFGDGTQLVV

SEQ ID NO: 272300 - protein, 13 aa, Homo sapiens
  CDR3 for beta chain variable domain of TCR clone 136150 (TRBV7-3, TRBJ1-1)
CASSLTQGTEAFF

SEQ ID NO: 272301 - protein, 15 aa, Homo sapiens
  CDR3 for alpha chain variable domain of TCR clone 136151 (TRAV1-1, TRAJ24)
CALSGGTDSWGKSQF

SEQ ID NO: 272302 - protein, 16 aa, Homo sapiens
  CDR3 for beta chain variable domain of TCR clone 136151 (TRBV2, TRBJ2-7)
CASSEPWTGPSYEQYF

SEQ ID NO: 272303 - protein, 14 aa, Homo sapiens
  CDR3 for alpha chain variable domain of TCR clone 136152 (TRAV8-4, TRAJ9)
CAVRINTGGFKTIF

SEQ ID NO: 272304 - protein, 14 aa, Homo sapiens
  CDR3 for beta chain variable domain of TCR clone 136152 (TRBV5-1, TRBJ1-1)
CASSLQGASTGAFF

SEQ ID NO: 272305 - protein, 13 aa, Homo sapiens
  CDR3 for alpha chain variable domain of TCR clone 136153 (TRAV16, TRAJ27)
CALRRTNAGNSTF

SEQ ID NO: 272306 - protein, 15 aa, Homo sapiens
  CDR3 for beta chain variable domain of TCR clone 136153 (TRBV18, TRBJ2-1)
CASSPPSASYNEQFF

SEQ ID NO: 272307 - protein, 16 aa, Homo sapiens
  CDR3 for alpha chain variable domain of TCR clone 136154 (TRAV20, TRAJ53)
CAVQAESGGSNYKLTF

SEQ ID NO: 272308 - protein, 14 aa, Homo sapiens
  CDR3 for beta chain variable domain of TCR clone 136154 (TRBV6-1, TRBJ1-3)
CASVQGGGGNTIYF

SEQ ID NO: 272309 - protein, 10 aa, Homo sapiens
  CDR3 for alpha chain variable domain of TCR clone 136155 (TRAV26-2, TRAJ49)
CILLGNQCYF

SEQ ID NO: 272310 - protein, 13 aa, Homo sapiens
  CDR3 for beta chain variable domain of TCR clone 136155 (TRBV20-1, TRBJ2-7)
CSADPGATYEQYF

SEQ ID NO: 272311 - protein, 15 aa, Homo sapiens
  CDR3 for alpha chain variable domain of TCR clone 136156 (TRAV12-2, TRAJ53)
CAVNGGGGSNYKLTF

SEQ ID NO: 272312 - protein, 14 aa, Homo sapiens
  CDR3 for beta chain variable domain of TCR clone 136156 (TRBV19, TRBJ2-2)
CASSTLHRSGELFL

SEQ ID NO: 272313 - protein, 13 aa, Homo sapiens
  CDR3 for alpha chain variable domain of TCR clone 136157 (TRAV13-1, TRAJ5)
CAASDTGRRALTF

SEQ ID NO: 272314 - protein, 15 aa, Homo sapiens
  CDR3 for beta chain variable domain of TCR clone 136157 (TRBV11-2, TRBJ2-2)
CASSSDRVNAGELFF

SEQ ID NO: 272315 - protein, 13 aa, Homo sapiens
  CDR3 for alpha chain variable domain of TCR clone 136158 (TRAV3, TRAJ5)
CAVRDTGRRALTF

SEQ ID NO: 272316 - protein, 12 aa, Homo sapiens
  CDR3 for beta chain variable domain of TCR clone 136158 (TRBV7-9, TRBJ1-5)
CASSPQGQPQHF

SEQ ID NO: 272317 - protein, 12 aa, Homo sapiens
  CDR3 for alpha chain variable domain of TCR clone 136159 (TRAV2, TRAJ33)
CAVEDSNYQLIW

SEQ ID NO: 272318 - protein, 16 aa, Homo sapiens
  CDR3 for beta chain variable domain of TCR clone 136159 (TRBV29-1, TRBJ2-7)
CSVEDAEDGTAYEQYF

SEQ ID NO: 272319 - protein, 14 aa, Homo sapiens
  CDR3 for alpha chain variable domain of TCR clone 136160 (TRAV12-2, TRAJ17)
CAVLFKAAGNKLTF

SEQ ID NO: 272320 - protein, 14 aa, Homo sapiens
  CDR3 for beta chain variable domain of TCR clone 136160 (TRBV7-3, TRBJ1-1)
CASSMKGGNTEAFF

SEQ ID NO: 272321 - protein, 14 aa, Homo sapiens
  CDR3 for alpha chain variable domain of TCR clone 136161 (TRAV12-1, TRAJ8)
CVVNSNTGFQKLVF

SEQ ID NO: 272322 - protein, 17 aa, Homo sapiens
  CDR3 for beta chain variable domain of TCR clone 136161 (TRBV7-8, TRBJ2-6)
SASSAGTGGAGANVLTF

SEQ ID NO: 272323 - protein, 17 aa, Homo sapiens
  CDR3 for alpha chain variable domain of TCR clone 136162 (TRAV8-2, )
CVVNIQNPDPAVYHLRD

SEQ ID NO: 272324 - protein, 14 aa, Homo sapiens
  CDR3 for beta chain variable domain of TCR clone 136162 (TRBV7-9, TRBJ2-5)
CASSLVGGEETQYF

SEQ ID NO: 272325 - protein, 17 aa, Homo sapiens
  CDR3 for alpha chain variable domain of TCR clone 136163 (TRAV4, TRAJ42)
CLVGVLNYGGSQGNLIF

SEQ ID NO: 272326 - protein, 12 aa, Homo sapiens
  CDR3 for beta chain variable domain of TCR clone 136163 (TRBV20-1, TRBJ2-1)
CRAQYTYNEQFF

SEQ ID NO: 272327 - protein, 11 aa, Homo sapiens
  CDR3 for alpha chain variable domain of TCR clone 136164 (TRAV35, TRAJ58)
CAGTSGSRLTF

SEQ ID NO: 272328 - protein, 13 aa, Homo sapiens
  CDR3 for beta chain variable domain of TCR clone 136164 (TRBV20-1, TRBJ2-2)
CSALAGAPGELFF

SEQ ID NO: 272329 - protein, 12 aa, Homo sapiens
  CDR3 for alpha chain variable domain of TCR clone 136165 (TRAV21, TRAJ23)
CAVMLQGGKLIF

SEQ ID NO: 272330 - protein, 14 aa, Homo sapiens
  CDR3 for beta chain variable domain of TCR clone 136165 (TRBV7-9, TRBJ2-2)
CASSLVQDTGELFF

SEQ ID NO: 272331 - protein, 12 aa, Homo sapiens
  CDR3 for alpha chain variable domain of TCR clone 136166 (TRAV1-1, TRAJ9)
CAVDTGGFKTIF

SEQ ID NO: 272332 - protein, 15 aa, Homo sapiens
  CDR3 for beta chain variable domain of TCR clone 136166 (TRBV3-1, TRBJ2-7)
CASSQVRQGAYEQYF

SEQ ID NO: 272333 - protein, 14 aa, Homo sapiens
  CDR3 for alpha chain variable domain of TCR clone 136167 (TRAV14/DV4, TRAJ11)
CAMSSNSEYSTLTF

SEQ ID NO: 272334 - protein, 11 aa, Homo sapiens
  CDR3 for beta chain variable domain of TCR clone 136167 (TRBV7-9, TRBJ2-3)
CASSGPDTQYF

SEQ ID NO: 272335 - protein, 16 aa, Homo sapiens
  CDR3 for alpha chain variable domain of TCR clone 136168 (TRAV30, TRAJ57)
CGTGWAPQGGSGKLVF

SEQ ID NO: 272336 - protein, 14 aa, Homo sapiens
  CDR3 for beta chain variable domain of TCR clone 136168 (TRBV18, TRBJ1-1)
CASSPGFQGVEAFF

SEQ ID NO: 272337 - protein, 16 aa, Homo sapiens
  CDR3 for alpha chain variable domain of TCR clone 136169 (TRAV4, TRAJ22)
CLVGDLYSGSARQLTF

SEQ ID NO: 272338 - protein, 15 aa, Homo sapiens
  CDR3 for beta chain variable domain of TCR clone 136169 (TRBV7-9, TRBJ1-4)
CASSRTGGFNETLFF

SEQ ID NO: 272339 - protein, 13 aa, Homo sapiens
  CDR3 for alpha chain variable domain of TCR clone 136170 (TRAV1-2, TRAJ9)
CAALNTGGFKTIF

SEQ ID NO: 272340 - protein, 16 aa, Homo sapiens
  CDR3 for beta chain variable domain of TCR clone 136170 (TRBV2, TRBJ2-1)
CASSVVGSLSYNEQFF

SEQ ID NO: 272341 - protein, 16 aa, Homo sapiens
  CDR3 for alpha chain variable domain of TCR clone 136171 (TRAV3, TRAJ37)
CAVRGKRSGNTGKLIF

SEQ ID NO: 272342 - protein, 15 aa, Homo sapiens
  CDR3 for beta chain variable domain of TCR clone 136171 (TRBV7-9, TRBJ1-6)
CASSSPGRGNSPLHF

SEQ ID NO: 272343 - protein, 14 aa, Homo sapiens
  CDR3 for alpha chain variable domain of TCR clone 136172 (TRAV9-2, TRAJ39)
CALYIYNAGNMLTF

SEQ ID NO: 272344 - protein, 15 aa, Homo sapiens
  CDR3 for beta chain variable domain of TCR clone 136172 (TRBV12-4, TRBJ2-7)
CASSLGSGGPYEQFF

SEQ ID NO: 272345 - protein, 17 aa, Homo sapiens
  CDR3 for alpha chain variable domain of TCR clone 136173 (TRAV13-1, TRAJ41)
CAASTRRAQIPGMHSTS

SEQ ID NO: 272346 - protein, 14 aa, Homo sapiens
  CDR3 for beta chain variable domain of TCR clone 136173 (TRBV7-2, TRBJ2-6)
CASRQSSGANVLTF

SEQ ID NO: 272347 - protein, 13 aa, Homo sapiens
  CDR3 for alpha chain variable domain of TCR clone 136174 (TRAV27, TRAJ45)
CRSSGGGADGLTF

SEQ ID NO: 272348 - protein, 17 aa, Homo sapiens
  CDR3 for beta chain variable domain of TCR clone 136174 (TRBV11-2, TRBJ2-1)
CASSLYPPGVEYNEQFF

SEQ ID NO: 272349 - protein, 12 aa, Homo sapiens
  CDR3 for alpha chain variable domain of TCR clone 136175 (TRAV12-1, TRAJ40)
CVVYSGTYKYIF

SEQ ID NO: 272350 - protein, 14 aa, Homo sapiens
  CDR3 for beta chain variable domain of TCR clone 136175 (TRBV7-9, TRBJ2-5)
CASSLGTAQETQYF

SEQ ID NO: 272351 - protein, 13 aa, Homo sapiens
  CDR3 for alpha chain variable domain of TCR clone 136176 (TRAV1-2, TRAJ11)
CAVRDSGYSTLTF

SEQ ID NO: 272352 - protein, 15 aa, Homo sapiens
  CDR3 for beta chain variable domain of TCR clone 136176 (TRBV11-3, TRBJ2-3)
CASLKDGREGDTQYF

SEQ ID NO: 272353 - protein, 13 aa, Homo sapiens
  CDR3 for alpha chain variable domain of TCR clone 136177 (TRAV13-2, TRAJ5)
CAVMVTGRRALTF

SEQ ID NO: 272354 - protein, 15 aa, Homo sapiens
  CDR3 for beta chain variable domain of TCR clone 136177 (TRBV27, TRBJ2-1)
CASSLARGAYNEQFF

SEQ ID NO: 272355 - protein, 10 aa, Homo sapiens
  CDR3 for alpha chain variable domain of TCR clone 136178 (TRAV30, TRAJ48)
CGIGNEKLTF

SEQ ID NO: 272356 - protein, 14 aa, Homo sapiens
  CDR3 for beta chain variable domain of TCR clone 136178 (TRBV11-2, TRBJ2-5)
CASSRTGGIETQYF

SEQ ID NO: 272357 - protein, 14 aa, Homo sapiens
  CDR3 for alpha chain variable domain of TCR clone 136179 (TRAV12-3, TRAJ57)
CAMSAWGGSEKLVF

SEQ ID NO: 272358 - protein, 18 aa, Homo sapiens
  CDR3 for beta chain variable domain of TCR clone 136179 (TRBV7-6, TRBJ1-3)
CASSSPIGGDSSGNTIYF

SEQ ID NO: 272359 - protein, 15 aa, Homo sapiens
  CDR3 for alpha chain variable domain of TCR clone 136180 (TRAV35, TRAJ58)
CAGRRQETSGSRLTF

SEQ ID NO: 272360 - protein, 17 aa, Homo sapiens
  CDR3 for beta chain variable domain of TCR clone 136180 (TRBV7-3, TRBJ2-3)
CASSLMKRMRGADTQYF

SEQ ID NO: 272361 - protein, 11 aa, Homo sapiens
  CDR3 for alpha chain variable domain of TCR clone 136181 (TRAV2, TRAJ13)
CASGGYQKVTF

SEQ ID NO: 272362 - protein, 13 aa, Homo sapiens
  CDR3 for beta chain variable domain of TCR clone 136181 (TRBV24-1, TRBJ2-3)
CATSTGGTDTQYV

SEQ ID NO: 272363 - protein, 14 aa, Homo sapiens
  CDR3 for alpha chain variable domain of TCR clone 136182 (TRAV16, TRAJ33)
CALSAMDSNYQLIW

SEQ ID NO: 272364 - protein, 16 aa, Homo sapiens
  CDR3 for beta chain variable domain of TCR clone 136182 (TRBV12-4, TRBJ2-3)
CASSFPSNTNTDTPYF

SEQ ID NO: 272365 - protein, 12 aa, Homo sapiens
  CDR3 for alpha chain variable domain of TCR clone 136183 (TRAV8-6, TRAJ36)
CAVSDWLWQTTS

SEQ ID NO: 272366 - protein, 15 aa, Homo sapiens
  CDR3 for beta chain variable domain of TCR clone 136183 (TRBV10-3, TRBJ2-2)
CAISVATSNTGELFF

SEQ ID NO: 272367 - protein, 16 aa, Homo sapiens
  CDR3 for alpha chain variable domain of TCR clone 136184 (TRAV3, TRAJ37)
CAVRGKGSGNTGKLIF

SEQ ID NO: 272368 - protein, 13 aa, Homo sapiens
  CDR3 for beta chain variable domain of TCR clone 136184 (TRBV7-3, TRBJ1-1)
CAISQDWGAEAFF

SEQ ID NO: 272369 - protein, 15 aa, Homo sapiens
  CDR3 for alpha chain variable domain of TCR clone 136185 (TRAV8-1, TRAJ6)
CAVNEGAGGSYITTF

SEQ ID NO: 272370 - protein, 14 aa, Homo sapiens
  CDR3 for beta chain variable domain of TCR clone 136185 (TRBV25-1, TRBJ1-6)
CASSLSADISPLHF

SEQ ID NO: 272371 - protein, 12 aa, Homo sapiens
  CDR3 for alpha chain variable domain of TCR clone 136186 (TRAV13-1, TRAJ48)
CAANFGNEKLTF

SEQ ID NO: 272372 - protein, 12 aa, Homo sapiens
  CDR3 for beta chain variable domain of TCR clone 136186 (TRBV20-1, TRBJ2-1)
CSARLGTDEQFF

SEQ ID NO: 272373 - protein, 16 aa, Homo sapiens
  CDR3 for alpha chain variable domain of TCR clone 136187 (TRAV35, TRAJ28)
CAGYLYSGAGSYQLTF

SEQ ID NO: 272374 - protein, 16 aa, Homo sapiens
  CDR3 for beta chain variable domain of TCR clone 136187 (TRBV5-1, TRBJ2-1)
CASSHGLAGPQNEQFV

SEQ ID NO: 272375 - protein, 15 aa, Homo sapiens
  CDR3 for alpha chain variable domain of TCR clone 136188 (TRAV26-1, TRAJ40)
CIDRYATSGTYKYIF

SEQ ID NO: 272376 - protein, 13 aa, Homo sapiens
  CDR3 for beta chain variable domain of TCR clone 136188 (TRBV11-2, TRBJ2-5)
CASSSTGEETQYF

SEQ ID NO: 272377 - protein, 14 aa, Homo sapiens
  CDR3 for alpha chain variable domain of TCR clone 136189 (TRAV12-1, TRAJ24)
CVVRSTDSWGKFQC

SEQ ID NO: 272378 - protein, 13 aa, Homo sapiens
  CDR3 for beta chain variable domain of TCR clone 136189 (TRBV2, TRBJ2-3)
CASILAGGQGQYF

SEQ ID NO: 272379 - protein, 23 aa, Homo sapiens
  CDR3 for alpha chain variable domain of TCR clone 136190 (TRAV8-3, TRAJ38)
CAVGASNAGNNHIQKPDPAVYQL

SEQ ID NO: 272380 - protein, 15 aa, Homo sapiens
  CDR3 for beta chain variable domain of TCR clone 136190 (TRBV11-3, TRBJ1-3)
CASSLFGPSGNTTYF

SEQ ID NO: 272381 - protein, 19 aa, Homo sapiens
  CDR3 for alpha chain variable domain of TCR clone 136191 (TRAV1-2, TRAJ26)
CLLPLCCERPDNYGQNFVF

SEQ ID NO: 272382 - protein, 13 aa, Homo sapiens
  CDR3 for beta chain variable domain of TCR clone 136191 (TRBV15, TRBJ1-1)
CATSRIRNTEAFF

SEQ ID NO: 272383 - protein, 12 aa, Homo sapiens
  CDR3 for alpha chain variable domain of TCR clone 136192 (TRAV13-2, TRAJ23)
CAERHRGGKLIF

SEQ ID NO: 272384 - protein, 15 aa, Homo sapiens
  CDR3 for beta chain variable domain of TCR clone 136192 (TRBV7-8, TRBJ1-5)
CASSLEGSGNQPQHF

SEQ ID NO: 272385 - protein, 14 aa, Homo sapiens
  CDR3 for alpha chain variable domain of TCR clone 136193 (TRAV8-2, TRAJ4)
CVVSTCGGYNKLIF

SEQ ID NO: 272386 - protein, 15 aa, Homo sapiens
  CDR3 for beta chain variable domain of TCR clone 136193 (TRBV4-1, TRBJ1-4)
CASSDTGGTNEKLFF

SEQ ID NO: 272387 - protein, 15 aa, Homo sapiens
  CDR3 for alpha chain variable domain of TCR clone 136194 (TRAV20, TRAJ43)
CAVQAGKSSNNDMRF

SEQ ID NO: 272388 - protein, 16 aa, Homo sapiens
  CDR3 for beta chain variable domain of TCR clone 136194 (TRBV11-2, TRBJ2-2)
CASSTHRGSDTGELFF

SEQ ID NO: 272389 - protein, 12 aa, Homo sapiens
  CDR3 for alpha chain variable domain of TCR clone 136195 (TRAV12-3, TRAJ42)
CAPGGSKGNLIF

SEQ ID NO: 272390 - protein, 14 aa, Homo sapiens
  CDR3 for beta chain variable domain of TCR clone 136195 (TRBV5-4, TRBJ1-1)
CASSLDSRRDEAFF

SEQ ID NO: 272391 - protein, 14 aa, Homo sapiens
  CDR3 for alpha chain variable domain of TCR clone 136196 (TRAV16, TRAJ33)
CALSAMDSNYQLIW

SEQ ID NO: 272392 - protein, 16 aa, Homo sapiens
  CDR3 for beta chain variable domain of TCR clone 136196 (TRBV25-1, TRBJ2-7)
CASSELTGGGIYEQYV

SEQ ID NO: 272393 - protein, 14 aa, Homo sapiens
  CDR3 for alpha chain variable domain of TCR clone 136197 (TRAV1-2, TRAJ16)
CAVNRFSDGQKLLF

SEQ ID NO: 272394 - protein, 12 aa, Homo sapiens
  CDR3 for beta chain variable domain of TCR clone 136197 (TRBV14, TRBJ2-7)
CDSSRLKGEQYF

SEQ ID NO: 272395 - protein, 13 aa, Homo sapiens
  CDR3 for alpha chain variable domain of TCR clone 136198 (TRAV20, TRAJ21)
CAVEGYNFNKFYF

SEQ ID NO: 272396 - protein, 15 aa, Homo sapiens
  CDR3 for beta chain variable domain of TCR clone 136198 (TRBV6-5, TRBJ2-1)
CASSYDAGAGNEQFF

SEQ ID NO: 272397 - protein, 13 aa, Homo sapiens
  CDR3 for alpha chain variable domain of TCR clone 136199 (TRAV13-1, TRAJ12)
CAASPDSSYKLIF

SEQ ID NO: 272398 - protein, 13 aa, Homo sapiens
  CDR3 for beta chain variable domain of TCR clone 136199 (TRBV7-9, TRBJ1-2)
CASSLKQNYGHTC

SEQ ID NO: 272399 - protein, 15 aa, Homo sapiens
  CDR3 for alpha chain variable domain of TCR clone 136200 (TRAV12-3, TRAJ6)
CAMSATSGGSYIPTF

SEQ ID NO: 272400 - protein, 11 aa, Homo sapiens
  CDR3 for beta chain variable domain of TCR clone 136200 (TRBV20-1, TRBJ1-5)
CSAQGDQPKHF

SEQ ID NO: 272401 - protein, 15 aa, Homo sapiens
  CDR3 for alpha chain variable domain of TCR clone 136201 (TRAV8-3, TRAJ27)
CAVGPSKTNEGKSSF

SEQ ID NO: 272402 - protein, 15 aa, Homo sapiens
  CDR3 for beta chain variable domain of TCR clone 136201 (TRBV7-2, TRBJ2-1)
CASSSGLAGGNEQFF

SEQ ID NO: 272403 - protein, 13 aa, Homo sapiens
  CDR3 for alpha chain variable domain of TCR clone 136202 (TRAV27, TRAJ41)
CAGEGNSGDALNF

SEQ ID NO: 272404 - protein, 13 aa, Homo sapiens
  CDR3 for beta chain variable domain of TCR clone 136202 (TRBV19, TRBJ1-2)
CASSAPGQDGYTF

SEQ ID NO: 272405 - protein, 10 aa, Homo sapiens
  CDR3 for alpha chain variable domain of TCR clone 136203 (TRAV12-2, TRAJ10)
CAAWTGVETH

SEQ ID NO: 272406 - protein, 14 aa, Homo sapiens
  CDR3 for beta chain variable domain of TCR clone 136203 (TRBV5-7, TRBJ2-1)
CASSSVANYNEQFF

SEQ ID NO: 272407 - protein, 15 aa, Homo sapiens
  CDR3 for alpha chain variable domain of TCR clone 136204 (TRAV26-1, TRAJ22)
CIVRVSFWFCKATDL

SEQ ID NO: 272408 - protein, 14 aa, Homo sapiens
  CDR3 for beta chain variable domain of TCR clone 136204 (TRBV18, TRBJ2-7)
CAISPRGGAYEQYF

SEQ ID NO: 272409 - protein, 14 aa, Homo sapiens
  CDR3 for alpha chain variable domain of TCR clone 136205 (TRAV2, TRAJ37)
CAVDFTSNTGKLIF

SEQ ID NO: 272410 - protein, 16 aa, Homo sapiens
  CDR3 for beta chain variable domain of TCR clone 136205 (TRBV28, TRBJ1-4)
CASSPPYRGRSEKLFF

SEQ ID NO: 272411 - protein, 15 aa, Homo sapiens
  CDR3 for alpha chain variable domain of TCR clone 136206 (TRAV1-2, TRAJ26)
CAVRDLITMVRILSL

SEQ ID NO: 272412 - protein, 14 aa, Homo sapiens
  CDR3 for beta chain variable domain of TCR clone 136206 (TRBV18, TRBJ1-1)
CASSQGQGNTEAFF

SEQ ID NO: 272413 - protein, 14 aa, Homo sapiens
  CDR3 for alpha chain variable domain of TCR clone 136207 (TRAV8-2, TRAJ44)
CVVSLTGTASKLTF

SEQ ID NO: 272414 - protein, 15 aa, Homo sapiens
  CDR3 for beta chain variable domain of TCR clone 136207 (TRBV20-1, TRBJ2-7)
CSARKGLAESYEQYF

SEQ ID NO: 272415 - protein, 14 aa, Homo sapiens
  CDR3 for alpha chain variable domain of TCR clone 136208 (TRAV1-2, TRAJ16)
CAVNRCSDGQKLLF

SEQ ID NO: 272416 - protein, 13 aa, Homo sapiens
  CDR3 for beta chain variable domain of TCR clone 136208 (TRBV4-1, TRBJ2-1)
CASSQAGGDEQFF

SEQ ID NO: 272417 - protein, 12 aa, Homo sapiens
  CDR3 for alpha chain variable domain of TCR clone 136209 (TRAV13-1, TRAJ20)
SVQQVNDYKLSF

SEQ ID NO: 272418 - protein, 17 aa, Homo sapiens
  CDR3 for beta chain variable domain of TCR clone 136209 (TRBV11-3, TRBJ2-1)
CASSLYPPGVEYNEQFF

SEQ ID NO: 272419 - protein, 10 aa, Homo sapiens
  CDR3 for alpha chain variable domain of TCR clone 136210 (TRAV3, TRAJ30)
CAVGEIEIIF

SEQ ID NO: 272420 - protein, 12 aa, Homo sapiens
  CDR3 for beta chain variable domain of TCR clone 136210 (TRBV20-1, TRBJ2-3)
CSADGAGDTQYF

SEQ ID NO: 272421 - protein, 15 aa, Homo sapiens
  CDR3 for alpha chain variable domain of TCR clone 136211 (TRAV13-1, TRAJ57)
QVPPLSQGGSEKLVF

SEQ ID NO: 272422 - protein, 17 aa, Homo sapiens
  CDR3 for beta chain variable domain of TCR clone 136211 (TRBV7-3, TRBJ2-3)
CASSLMKRMRGADTQYL

SEQ ID NO: 272423 - protein, 18 aa, Homo sapiens
  CDR3 for alpha chain variable domain of TCR clone 136212 (TRAV8-6, TRAJ52)
CAVSRANAGGTSYGKLTF

SEQ ID NO: 272424 - protein, 19 aa, Homo sapiens
  CDR3 for beta chain variable domain of TCR clone 136212 (TRBV7-2, TRBJ2-3)
WASSSQGGPRLAGADTQYF

SEQ ID NO: 272425 - protein, 12 aa, Homo sapiens
  CDR3 for alpha chain variable domain of TCR clone 136213 (TRAV1-2, TRAJ24)
CAVGGSWGKFQF

SEQ ID NO: 272426 - protein, 14 aa, Homo sapiens
  CDR3 for beta chain variable domain of TCR clone 136213 (TRBV7-2, TRBJ1-2)
CASSQTGSTYGYAF

SEQ ID NO: 272427 - protein, 11 aa, Homo sapiens
  CDR3 for alpha chain variable domain of TCR clone 136214 (TRAV27, TRAJ43)
CVRYNNNDMRF

SEQ ID NO: 272428 - protein, 13 aa, Homo sapiens
  CDR3 for beta chain variable domain of TCR clone 136214 (TRBV13, TRBJ2-5)
CASSPEVGETQYF

SEQ ID NO: 272429 - protein, 14 aa, Homo sapiens
  CDR3 for alpha chain variable domain of TCR clone 136215 (TRAV13-1, TRAJ10)
FAASSTGGGNKLNF

SEQ ID NO: 272430 - protein, 11 aa, Homo sapiens
  CDR3 for beta chain variable domain of TCR clone 136215 (TRBV11-2, TRBJ2-2)
CASSLPGELFF

SEQ ID NO: 272431 - protein, 14 aa, Homo sapiens
  CDR3 for alpha chain variable domain of TCR clone 136216 (TRAV35, TRAJ22)
CAGHLSGSARQLTF

SEQ ID NO: 272432 - protein, 16 aa, Homo sapiens
  CDR3 for beta chain variable domain of TCR clone 136216 (TRBV7-3, TRBJ2-2)
CASSLKRGTLSGELFF

SEQ ID NO: 272433 - protein, 13 aa, Homo sapiens
  CDR3 for alpha chain variable domain of TCR clone 136217 (TRAV13-1, TRAJ28)
CAANEAGSYQLTF

SEQ ID NO: 272434 - protein, 14 aa, Homo sapiens
  CDR3 for beta chain variable domain of TCR clone 136217 (TRBV7-3, TRBJ2-1)
CASSLAGGTNEQFF

SEQ ID NO: 272435 - protein, 13 aa, Homo sapiens
  CDR3 for alpha chain variable domain of TCR clone 136218 (TRAV27, TRAJ54)
CAGAGQGALKLVF

SEQ ID NO: 272436 - protein, 15 aa, Homo sapiens
  CDR3 for beta chain variable domain of TCR clone 136218 (TRBV18, TRBJ2-6)
CASSPSYAGANVLTF

SEQ ID NO: 272437 - protein, 14 aa, Homo sapiens
  CDR3 for alpha chain variable domain of TCR clone 136219 (TRAV14/DV4, TRAJ15)
CAMRRDQAGNALIF

SEQ ID NO: 272438 - protein, 16 aa, Homo sapiens
  CDR3 for beta chain variable domain of TCR clone 136219 (TRBV15, TRBJ2-3)
CATSRDLGSVTDTQYF

SEQ ID NO: 272439 - protein, 14 aa, Homo sapiens
  CDR3 for alpha chain variable domain of TCR clone 136220 (TRAV1-2, TRAJ16)
CAVNRFSDGQKLLF

SEQ ID NO: 272440 - protein, 16 aa, Homo sapiens
  CDR3 for beta chain variable domain of TCR clone 136220 (TRBV3-1, TRBJ2-5)
CASSRDWASGQETQYF

SEQ ID NO: 272441 - protein, 12 aa, Homo sapiens
  CDR3 for alpha chain variable domain of TCR clone 136221 (TRAV1-1, TRAJ8)
CAGGTGFQKLVF

SEQ ID NO: 272442 - protein, 14 aa, Homo sapiens
  CDR3 for beta chain variable domain of TCR clone 136221 (TRBV4-2, TRBJ2-1)
CASGPDRAYNEQFF

SEQ ID NO: 272443 - protein, 13 aa, Homo sapiens
  CDR3 for alpha chain variable domain of TCR clone 136222 (TRAV23/DV6, TRAJ12)
CAPRADSSYKLIF

SEQ ID NO: 272444 - protein, 12 aa, Homo sapiens
  CDR3 for beta chain variable domain of TCR clone 136222 (TRBV7-8, TRBJ2-7)
CASSLGDREQYF

SEQ ID NO: 272445 - protein, 13 aa, Homo sapiens
  CDR3 for alpha chain variable domain of TCR clone 136223 (TRAV12-3, TRAJ10)
SHLPLTGGNKLTF

SEQ ID NO: 272446 - protein, 15 aa, Homo sapiens
  CDR3 for beta chain variable domain of TCR clone 136223 (TRBV10-3, TRBJ1-3)
CAISDSQGAGNTIYF

SEQ ID NO: 272447 - protein, 15 aa, Homo sapiens
  CDR3 for alpha chain variable domain of TCR clone 136224 (TRAV8-3, TRAJ45)
CASSYSGGGSDGLTF

SEQ ID NO: 272448 - protein, 13 aa, Homo sapiens
  CDR3 for beta chain variable domain of TCR clone 136224 (TRBV10-3, TRBJ2-7)
CASKLAVDYEQYF

SEQ ID NO: 272449 - protein, 14 aa, Homo sapiens
  CDR3 for alpha chain variable domain of TCR clone 136225 (TRAV12-3, TRAJ28)
CATNSGAGSYQLTF

SEQ ID NO: 272450 - protein, 13 aa, Homo sapiens
  CDR3 for beta chain variable domain of TCR clone 136225 (TRBV4-2, TRBJ1-1)
CASSQAGNTEAFF

SEQ ID NO: 272451 - protein, 18 aa, Homo sapiens
  CDR3 for alpha chain variable domain of TCR clone 136226 (TRAV21, TRAJ52)
CAVRPSPAGGTSYGKPTF

SEQ ID NO: 272452 - protein, 15 aa, Homo sapiens
  CDR3 for beta chain variable domain of TCR clone 136226 (TRBV20-1, TRBJ2-7)
CSARDRVSGMDEQYF

SEQ ID NO: 272453 - protein, 11 aa, Homo sapiens
  CDR3 for alpha chain variable domain of TCR clone 136227 (TRAV1-2, TRAJ11)
CAVRGDSTLTF

SEQ ID NO: 272454 - protein, 15 aa, Homo sapiens
  CDR3 for beta chain variable domain of TCR clone 136227 (TRBV3-1, TRBJ2-2)
CASSQDWTRAGELFF

SEQ ID NO: 272455 - protein, 14 aa, Homo sapiens
  CDR3 for alpha chain variable domain of TCR clone 136228 (TRAV8-6, TRAJ12)
CGVKAADSSYKLIF

SEQ ID NO: 272456 - protein, 15 aa, Homo sapiens
  CDR3 for beta chain variable domain of TCR clone 136228 (TRBV5-1, TRBJ2-5)
CASSLGLAEQETQYF

SEQ ID NO: 272457 - protein, 14 aa, Homo sapiens
  CDR3 for alpha chain variable domain of TCR clone 136229 (TRAV1-2, TRAJ16)
CAVNRFSDGQKLLF

SEQ ID NO: 272458 - protein, 15 aa, Homo sapiens
  CDR3 for beta chain variable domain of TCR clone 136229 (TRBV5-1, TRBJ2-2)
CASSPQGGNTGELFF

SEQ ID NO: 272459 - protein, 14 aa, Homo sapiens
  CDR3 for alpha chain variable domain of TCR clone 136230 (TRAV12-2, TRAJ13)
CAVKKTGGYQKVTF

SEQ ID NO: 272460 - protein, 11 aa, Homo sapiens
  CDR3 for beta chain variable domain of TCR clone 136230 (TRBV29-1, TRBJ2-5)
CSEDRTGTQDF

SEQ ID NO: 272461 - protein, 16 aa, Homo sapiens
  CDR3 for alpha chain variable domain of TCR clone 136231 (TRAV30, TRAJ24)
CGTEVVDADSWGKFQF

SEQ ID NO: 272462 - protein, 14 aa, Homo sapiens
  CDR3 for beta chain variable domain of TCR clone 136231 (TRBV12-5, TRBJ2-5)
CASGSRTHQETQYL

SEQ ID NO: 272463 - protein, 19 aa, Homo sapiens
  CDR3 for alpha chain variable domain of TCR clone 136232 (TRAV26-1, TRAJ52)
CIVRAHRNAGGTSYGKLTF

SEQ ID NO: 272464 - protein, 15 aa, Homo sapiens
  CDR3 for beta chain variable domain of TCR clone 136232 (TRBV29-1, TRBJ2-1)
CSGRGRKSSYNEQFF

SEQ ID NO: 272465 - protein, 11 aa, Homo sapiens
  CDR3 for alpha chain variable domain of TCR clone 136233 (TRAV21, TRAJ34)
CAVTNTDKPIF

SEQ ID NO: 272466 - protein, 14 aa, Homo sapiens
  CDR3 for beta chain variable domain of TCR clone 136233 (TRBV12-4, TRBJ2-1)
CARSLGQGASEQFF

SEQ ID NO: 272467 - protein, 15 aa, Homo sapiens
  CDR3 for alpha chain variable domain of TCR clone 136234 (TRAV29/DV5, TRAJ24)
CAASGATDSWVKFQF

SEQ ID NO: 272468 - protein, 13 aa, Homo sapiens
  CDR3 for beta chain variable domain of TCR clone 136234 (TRBV19, TRBJ1-2)
CASSVPGQDGYTF

SEQ ID NO: 272469 - protein, 14 aa, Homo sapiens
  CDR3 for alpha chain variable domain of TCR clone 136235 (TRAV17, TRAJ32)
CATDPGGATNQLIF

SEQ ID NO: 272470 - protein, 14 aa, Homo sapiens
  CDR3 for beta chain variable domain of TCR clone 136235 (TRBV2, TRBJ1-5)
CASSENRGGQPQHF

SEQ ID NO: 272471 - protein, 15 aa, Homo sapiens
  CDR3 for alpha chain variable domain of TCR clone 136236 (TRAV1-2, TRAJ30)
CAVRPHGNRDDKIIF

SEQ ID NO: 272472 - protein, 13 aa, Homo sapiens
  CDR3 for beta chain variable domain of TCR clone 136236 (TRBV4-1, TRBJ2-7)
FAISQGQAYEQYF

SEQ ID NO: 272473 - protein, 12 aa, Homo sapiens
  CDR3 for alpha chain variable domain of TCR clone 136237 (TRAV21, TRAJ8)
CAVNTGFQKLVF

SEQ ID NO: 272474 - protein, 13 aa, Homo sapiens
  CDR3 for beta chain variable domain of TCR clone 136237 (TRBV6-3, TRBJ2-1)
CASSYDNYNEQFL

SEQ ID NO: 272475 - protein, 19 aa, Homo sapiens
  CDR3 for alpha chain variable domain of TCR clone 136238 (TRAV1-1, TRAJ8)
CAGGHRLSETCIWNWHPTS

SEQ ID NO: 272476 - protein, 15 aa, Homo sapiens
  CDR3 for beta chain variable domain of TCR clone 136238 (TRBV7-9, TRBJ1-4)
CASSRTGGFNEKLFV

SEQ ID NO: 272477 - protein, 13 aa, Homo sapiens
  CDR3 for alpha chain variable domain of TCR clone 136239 (TRAV8-3, TRAJ15)
CAVGIQAGTALIF

SEQ ID NO: 272478 - protein, 17 aa, Homo sapiens
  CDR3 for beta chain variable domain of TCR clone 136239 (TRBV20-1, TRBJ2-1)
CSARDPLAGVPYNEQFF

SEQ ID NO: 272479 - protein, 12 aa, Homo sapiens
  CDR3 for alpha chain variable domain of TCR clone 136240 (TRAV12-3, TRAJ5)
CAMDTGRRALTF

SEQ ID NO: 272480 - protein, 14 aa, Homo sapiens
  CDR3 for beta chain variable domain of TCR clone 136240 (TRBV7-9, TRBJ2-1)
CASSPRDSLYEQFF

SEQ ID NO: 272481 - protein, 13 aa, Homo sapiens
  CDR3 for alpha chain variable domain of TCR clone 136241 (TRAV12-2, TRAJ52)
CAVSGTSYGKLTF

SEQ ID NO: 272482 - protein, 12 aa, Homo sapiens
  CDR3 for beta chain variable domain of TCR clone 136241 (TRBV11-3, TRBJ2-2)
CASSLGGGELFF

SEQ ID NO: 272483 - protein, 13 aa, Homo sapiens
  CDR3 for alpha chain variable domain of TCR clone 136242 (TRAV17, TRAJ9)
CAMDYTGGFKTIF

SEQ ID NO: 272484 - protein, 14 aa, Homo sapiens
  CDR3 for beta chain variable domain of TCR clone 136242 (TRBV19, TRBJ2-5)
CASSMTGQQETKYF

SEQ ID NO: 272485 - protein, 15 aa, Homo sapiens
  CDR3 for alpha chain variable domain of TCR clone 136243 (TRAV3, TRAJ5)
CAVRDLDTGRRALTF

SEQ ID NO: 272486 - protein, 13 aa, Homo sapiens
  CDR3 for beta chain variable domain of TCR clone 136243 (TRBV28, TRBJ2-7)
CASSLGGAYEQYF

SEQ ID NO: 272487 - protein, 15 aa, Homo sapiens
  CDR3 for alpha chain variable domain of TCR clone 136244 (TRAV29/DV5, TRAJ29)
CAASERSSGNTPLVF

SEQ ID NO: 272488 - protein, 15 aa, Homo sapiens
  CDR3 for beta chain variable domain of TCR clone 136244 (TRBV7-9, TRBJ1-5)
CASSQGHQPNQPQHF

SEQ ID NO: 272489 - protein, 15 aa, Homo sapiens
  CDR3 for alpha chain variable domain of TCR clone 136245 (TRAV26-1, TRAJ29)
CIVRVEGSGNTPLVF

SEQ ID NO: 272490 - protein, 15 aa, Homo sapiens
  CDR3 for beta chain variable domain of TCR clone 136245 (TRBV7-9, TRBJ1-5)
CASSKGQQPNQPQHF

SEQ ID NO: 272491 - protein, 16 aa, Homo sapiens
  CDR3 for alpha chain variable domain of TCR clone 136246 (TRAV38-1, TRAJ32)
CAFMKGGGGATNKLIF

SEQ ID NO: 272492 - protein, 16 aa, Homo sapiens
  CDR3 for beta chain variable domain of TCR clone 136246 (TRBV7-3, TRBJ2-1)
CASSLTVESSYNEQFF

SEQ ID NO: 272493 - protein, 15 aa, Homo sapiens
  CDR3 for alpha chain variable domain of TCR clone 136247 (TRAV8-2, TRAJ40)
CVVLGTTSGTYKYIF

SEQ ID NO: 272494 - protein, 14 aa, Homo sapiens
  CDR3 for beta chain variable domain of TCR clone 136247 (TRBV19, TRBJ1-2)
CASSPTGGAGGYTF

SEQ ID NO: 272495 - protein, 16 aa, Homo sapiens
  CDR3 for alpha chain variable domain of TCR clone 136248 (TRAV26-1, )
CIDIQNPDPAVYQLRD

SEQ ID NO: 272496 - protein, 19 aa, Homo sapiens
  CDR3 for beta chain variable domain of TCR clone 136248 (TRBV19, TRBJ2-5)
CACSIGQVTDFFLGETQYF

SEQ ID NO: 272497 - protein, 14 aa, Homo sapiens
  CDR3 for alpha chain variable domain of TCR clone 136249 (TRAV8-1, TRAJ4)
CAVPFSGGYNKLIF

SEQ ID NO: 272498 - protein, 16 aa, Homo sapiens
  CDR3 for beta chain variable domain of TCR clone 136249 (TRBV6-1, TRBJ1-2)
CASSGAWQGRSHGYTV

SEQ ID NO: 272499 - protein, 13 aa, Homo sapiens
  CDR3 for alpha chain variable domain of TCR clone 136250 (TRAV29/DV5, TRAJ40)
CAVVTSGTYKYIF

SEQ ID NO: 272500 - protein, 14 aa, Homo sapiens
  CDR3 for beta chain variable domain of TCR clone 136250 (TRBV19, TRBJ2-1)
CASPTFVLSGEQFF

SEQ ID NO: 272501 - protein, 15 aa, Homo sapiens
  CDR3 for alpha chain variable domain of TCR clone 136251 (TRAV17, TRAJ28)
CATDPSGAGSYQLTF

SEQ ID NO: 272502 - protein, 14 aa, Homo sapiens
  CDR3 for beta chain variable domain of TCR clone 136251 (TRBV7-2, TRBJ1-1)
CASSFLTGTTEAFF

SEQ ID NO: 272503 - protein, 14 aa, Homo sapiens
  CDR3 for alpha chain variable domain of TCR clone 136252 (TRAV13-1, TRAJ35)
CAASKGGFGAVLHC

SEQ ID NO: 272504 - protein, 13 aa, Homo sapiens
  CDR3 for beta chain variable domain of TCR clone 136252 (TRBV7-3, TRBJ1-1)
CASSQDWGAEAFF

SEQ ID NO: 272505 - protein, 12 aa, Homo sapiens
  CDR3 for alpha chain variable domain of TCR clone 136253 (TRAV12-2, TRAJ9)
CAVNTGGFKTIF

SEQ ID NO: 272506 - protein, 13 aa, Homo sapiens
  CDR3 for beta chain variable domain of TCR clone 136253 (TRBV4-1, TRBJ2-1)
CASSQEVQYEQFF

SEQ ID NO: 272507 - protein, 15 aa, Homo sapiens
  CDR3 for alpha chain variable domain of TCR clone 136254 (TRAV34, TRAJ38)
CGADFTPGNNRKLLW

SEQ ID NO: 272508 - protein, 16 aa, Homo sapiens
  CDR3 for beta chain variable domain of TCR clone 136254 (TRBV12-5, TRBJ2-5)
CASGPRTSGNQETQYF

SEQ ID NO: 272509 - protein, 16 aa, Homo sapiens
  CDR3 for alpha chain variable domain of TCR clone 136255 (TRAV12-2, TRAJ32)
CAVNLGQGGATNKLIF

SEQ ID NO: 272510 - protein, 15 aa, Homo sapiens
  CDR3 for beta chain variable domain of TCR clone 136255 (TRBV20-1, TRBJ2-7)
CSARGPLAEGREQYF

SEQ ID NO: 272511 - protein, 15 aa, Homo sapiens
  CDR3 for alpha chain variable domain of TCR clone 136256 (TRAV12-2, TRAJ53)
CAVNGGGGSHYKLTF

SEQ ID NO: 272512 - protein, 12 aa, Homo sapiens
  CDR3 for beta chain variable domain of TCR clone 136256 (TRBV7-6, TRBJ2-5)
CASSLSQETQYF

SEQ ID NO: 272513 - protein, 11 aa, Homo sapiens
  CDR3 for alpha chain variable domain of TCR clone 136257 (TRAV3, TRAJ21)
CAVGNFNKFYF

SEQ ID NO: 272514 - protein, 17 aa, Homo sapiens
  CDR3 for beta chain variable domain of TCR clone 136257 (TRBV6-3, TRBJ2-2)
CASSYAGQGINTGELFF

SEQ ID NO: 272515 - protein, 23 aa, Homo sapiens
  CDR3 for alpha chain variable domain of TCR clone 136258 (TRAV1-1, TRAJ29)
LLQELQMKDSASYFLGGNSPLVF

SEQ ID NO: 272516 - protein, 13 aa, Homo sapiens
  CDR3 for beta chain variable domain of TCR clone 136258 (TRBV25-1, TRBJ2-7)
CASSEDGDYEQYF

SEQ ID NO: 272517 - protein, 14 aa, Homo sapiens
  CDR3 for alpha chain variable domain of TCR clone 136259 (TRAV12-2, TRAJ13)
CAVKKTGGYQKVTF

SEQ ID NO: 272518 - protein, 16 aa, Homo sapiens
  CDR3 for beta chain variable domain of TCR clone 136259 (TRBV12-5, TRBJ2-5)
CASGPRTSGNQDTQYF

SEQ ID NO: 272519 - protein, 16 aa, Homo sapiens
  CDR3 for alpha chain variable domain of TCR clone 136260 (TRAV26-1, TRAJ53)
CIVRVAMGGSNYKLTF

SEQ ID NO: 272520 - protein, 13 aa, Homo sapiens
  CDR3 for beta chain variable domain of TCR clone 136260 (TRBV7-7, TRBJ2-3)
CASSLSRADTQYF

SEQ ID NO: 272521 - protein, 15 aa, Homo sapiens
  CDR3 for alpha chain variable domain of TCR clone 136261 (TRAV1-1, TRAJ20)
CAVRDNVANDYKLSF

SEQ ID NO: 272522 - protein, 12 aa, Homo sapiens
  CDR3 for beta chain variable domain of TCR clone 136261 (TRBV11-2, TRBJ2-2)
CASSLGGGELFF

SEQ ID NO: 272523 - protein, 18 aa, Homo sapiens
  CDR3 for alpha chain variable domain of TCR clone 136262 (TRAV21, TRAJ52)
CAVRPSPAGGTISGKLTF

SEQ ID NO: 272524 - protein, 17 aa, Homo sapiens
  CDR3 for beta chain variable domain of TCR clone 136262 (TRBV13, TRBJ2-3)
CASSLSRVAGGRNTQYF

SEQ ID NO: 272525 - protein, 15 aa, Homo sapiens
  CDR3 for alpha chain variable domain of TCR clone 136263 (TRAV3, TRAJ29)
CAVRDLYSGNTPLVF

SEQ ID NO: 272526 - protein, 15 aa, Homo sapiens
  CDR3 for beta chain variable domain of TCR clone 136263 (TRBV4-3, TRBJ2-7)
CASSQDLGSSYEQYF

SEQ ID NO: 272527 - protein, 12 aa, Homo sapiens
  CDR3 for alpha chain variable domain of TCR clone 136264 (TRAV12-1, TRAJ29)
CVADSGNTPLVF

SEQ ID NO: 272528 - protein, 14 aa, Homo sapiens
  CDR3 for beta chain variable domain of TCR clone 136264 (TRBV7-6, TRBJ2-3)
CASSVAGGTDTQYF

SEQ ID NO: 272529 - protein, 14 aa, Homo sapiens
  CDR3 for alpha chain variable domain of TCR clone 136265 (TRAV23/DV6, TRAJ13)
CAASDSGGYQKVTF

SEQ ID NO: 272530 - protein, 15 aa, Homo sapiens
  CDR3 for beta chain variable domain of TCR clone 136265 (TRBV12-4, TRBJ2-7)
CTSGPAVFGGAGQYF

SEQ ID NO: 272531 - protein, 13 aa, Homo sapiens
  CDR3 for alpha chain variable domain of TCR clone 136266 (TRAV3, TRAJ8)
CAVRFTGFQKLVF

SEQ ID NO: 272532 - protein, 15 aa, Homo sapiens
  CDR3 for beta chain variable domain of TCR clone 136266 (TRBV7-8, TRBJ2-1)
CASSLADSLYNEQFF

SEQ ID NO: 272533 - protein, 13 aa, Homo sapiens
  CDR3 for alpha chain variable domain of TCR clone 136267 (TRAV12-3, TRAJ7)
CAMSASGNNRLAF

SEQ ID NO: 272534 - protein, 14 aa, Homo sapiens
  CDR3 for beta chain variable domain of TCR clone 136267 (TRBV13, TRBJ2-5)
CASSLGPRGETQYL

SEQ ID NO: 272535 - protein, 12 aa, Homo sapiens
  CDR3 for alpha chain variable domain of TCR clone 136268 (TRAV13-1, TRAJ21)
CAAKEGFNKFYF

SEQ ID NO: 272536 - protein, 14 aa, Homo sapiens
  CDR3 for beta chain variable domain of TCR clone 136268 (TRBV18, TRBJ2-3)
CASSLGGGSDTQYF

SEQ ID NO: 272537 - protein, 15 aa, Homo sapiens
  CDR3 for alpha chain variable domain of TCR clone 136269 (TRAV3, TRAJ22)
CAVRDRRGSARQLTF

SEQ ID NO: 272538 - protein, 16 aa, Homo sapiens
  CDR3 for beta chain variable domain of TCR clone 136269 (TRBV5-4, TRBJ2-3)
CASQQPGAGGADTQYF

SEQ ID NO: 272539 - protein, 11 aa, Homo sapiens
  CDR3 for alpha chain variable domain of TCR clone 136270 (TRAV3, TRAJ21)
CVVGNFNRFYF

SEQ ID NO: 272540 - protein, 16 aa, Homo sapiens
  CDR3 for beta chain variable domain of TCR clone 136270 (TRBV19, TRBJ2-1)
CASSKAGPSSYNEQFF

SEQ ID NO: 272541 - protein, 12 aa, Homo sapiens
  CDR3 for alpha chain variable domain of TCR clone 136271 (TRAV3, TRAJ31)
CAVRDGNARLMF

SEQ ID NO: 272542 - protein, 18 aa, Homo sapiens
  CDR3 for beta chain variable domain of TCR clone 136271 (TRBV7-2, TRBJ2-3)
CASSLKREGGGITDTQYF

SEQ ID NO: 272543 - protein, 13 aa, Homo sapiens
  CDR3 for alpha chain variable domain of TCR clone 136272 (TRAV27, TRAJ53)
CAGQGGSNYKLTF

SEQ ID NO: 272544 - protein, 15 aa, Homo sapiens
  CDR3 for beta chain variable domain of TCR clone 136272 (TRBV29-1, TRBJ1-1)
CSVSRGSGLKLSLDK

SEQ ID NO: 272545 - protein, 17 aa, Homo sapiens
  CDR3 for alpha chain variable domain of TCR clone 136273 (TRAV1-1, TRAJ4)
CALFNKLIFGAGTRLAV

SEQ ID NO: 272546 - protein, 16 aa, Homo sapiens
  CDR3 for beta chain variable domain of TCR clone 136273 (TRBV7-3, TRBJ2-2)
CASSLKRGTLSGELFF

SEQ ID NO: 272547 - protein, 15 aa, Homo sapiens
  CDR3 for alpha chain variable domain of TCR clone 136274 (TRAV21, TRAJ53)
CATLNSGGSNYKLTF

SEQ ID NO: 272548 - protein, 22 aa, Homo sapiens
  CDR3 for beta chain variable domain of TCR clone 136274 (TRBV14, TRBJ1-5)
CASSQDGVTPYLPPIGNQPQHF

SEQ ID NO: 272549 - protein, 14 aa, Homo sapiens
  CDR3 for alpha chain variable domain of TCR clone 136275 (TRAV36/DV7, TRAJ33)
CVVLPRDSNYQLIW

SEQ ID NO: 272550 - protein, 17 aa, Homo sapiens
  CDR3 for beta chain variable domain of TCR clone 136275 (TRBV23-1, TRBJ2-5)
CASSPTLNVIGVETQYF

SEQ ID NO: 272551 - protein, 16 aa, Homo sapiens
  CDR3 for alpha chain variable domain of TCR clone 136276 (TRAV20, TRAJ53)
CAVQAESGGSNYKMAF

SEQ ID NO: 272552 - protein, 14 aa, Homo sapiens
  CDR3 for beta chain variable domain of TCR clone 136276 (TRBV27, TRBJ2-5)
CASSRTFLVDTQYF

SEQ ID NO: 272553 - protein, 15 aa, Homo sapiens
  CDR3 for alpha chain variable domain of TCR clone 136277 (TRAV24, TRAJ4)
CAFSPGSGGYNKLIF

SEQ ID NO: 272554 - protein, 13 aa, Homo sapiens
  CDR3 for beta chain variable domain of TCR clone 136277 (TRBV12-4, TRBJ2-2)
CASSITGSGELFF

SEQ ID NO: 272555 - protein, 21 aa, Homo sapiens
  CDR3 for alpha chain variable domain of TCR clone 136278 (TRAV26-1, TRAJ38)
CIADNAGNNHIQNPDPPVYQL

SEQ ID NO: 272556 - protein, 13 aa, Homo sapiens
  CDR3 for beta chain variable domain of TCR clone 136278 (TRBV20-1, TRBJ1-1)
CSARGGGNTEAFF

SEQ ID NO: 272557 - protein, 12 aa, Homo sapiens
  CDR3 for alpha chain variable domain of TCR clone 136279 (TRAV35, TRAJ33)
CCLMDSNYQLIW

SEQ ID NO: 272558 - protein, 13 aa, Homo sapiens
  CDR3 for beta chain variable domain of TCR clone 136279 (TRBV10-3, TRBJ2-1)
CAISEFSGREQFF

SEQ ID NO: 272559 - protein, 15 aa, Homo sapiens
  CDR3 for alpha chain variable domain of TCR clone 136280 (TRAV12-3, TRAJ6)
CAMSATTGGSYIPTF

SEQ ID NO: 272560 - protein, 15 aa, Homo sapiens
  CDR3 for beta chain variable domain of TCR clone 136280 (TRBV5-1, TRBJ2-7)
RASSLNGGPAREQYF

SEQ ID NO: 272561 - protein, 17 aa, Homo sapiens
  CDR3 for alpha chain variable domain of TCR clone 136281 (TRAV35, TRAJ47)
GLLDCRTHTEYGNQLGF

SEQ ID NO: 272562 - protein, 11 aa, Homo sapiens
  CDR3 for beta chain variable domain of TCR clone 136281 (TRBV29-1, TRBJ1-1)
CSVEVGTRTFF

SEQ ID NO: 272563 - protein, 13 aa, Homo sapiens
  CDR3 for alpha chain variable domain of TCR clone 136282 (TRAV27, TRAJ56)
CAGKPGDNSKLTF

SEQ ID NO: 272564 - protein, 18 aa, Homo sapiens
  CDR3 for beta chain variable domain of TCR clone 136282 (TRBV11-2, TRBJ2-3)
CASSLGGASRGAPNTQYF

SEQ ID NO: 272565 - protein, 11 aa, Homo sapiens
  CDR3 for alpha chain variable domain of TCR clone 136283 (TRAV3, TRAJ21)
FSVGNFNKFYF

SEQ ID NO: 272566 - protein, 16 aa, Homo sapiens
  CDR3 for beta chain variable domain of TCR clone 136283 (TRBV19, TRBJ2-1)
CASSKAGPSSYNEQFF

SEQ ID NO: 272567 - protein, 15 aa, Homo sapiens
  CDR3 for alpha chain variable domain of TCR clone 136284 (TRAV36/DV7, TRAJ54)
CAVEKPVQGAQKLVF

SEQ ID NO: 272568 - protein, 17 aa, Homo sapiens
  CDR3 for beta chain variable domain of TCR clone 136284 (TRBV6-5, TRBJ1-2)
CASSSPWEGAFDYGYAF

SEQ ID NO: 272569 - protein, 16 aa, Homo sapiens
  CDR3 for alpha chain variable domain of TCR clone 136285 (TRAV16, TRAJ52)
CALSGVGGTSYGKLTF

SEQ ID NO: 272570 - protein, 14 aa, Homo sapiens
  CDR3 for beta chain variable domain of TCR clone 136285 (TRBV19, TRBJ1-2)
CAGSLQGQAYGYTF

SEQ ID NO: 272571 - protein, 17 aa, Homo sapiens
  CDR3 for alpha chain variable domain of TCR clone 136286 (TRAV2, TRAJ22)
ILQVREADAAEQRQLTF

SEQ ID NO: 272572 - protein, 15 aa, Homo sapiens
  CDR3 for beta chain variable domain of TCR clone 136286 (TRBV28, TRBJ2-5)
CASSSGRTIQETQYF

SEQ ID NO: 272573 - protein, 11 aa, Homo sapiens
  CDR3 for alpha chain variable domain of TCR clone 136287 (TRAV17, TRAJ36)
CAPTGANNLFF

SEQ ID NO: 272574 - protein, 20 aa, Homo sapiens
  CDR3 for beta chain variable domain of TCR clone 136287 (TRBV7-8, TRBJ2-2)
CDSSHLFPGPTIHITGELFF

SEQ ID NO: 272575 - protein, 14 aa, Homo sapiens
  CDR3 for alpha chain variable domain of TCR clone 136288 (TRAV1-2, TRAJ16)
CAVNRFSDGQKLLF

SEQ ID NO: 272576 - protein, 14 aa, Homo sapiens
  CDR3 for beta chain variable domain of TCR clone 136288 (TRBV5-1, TRBJ2-1)
CASSFGGGLNEQFF

SEQ ID NO: 272577 - protein, 15 aa, Homo sapiens
  CDR3 for alpha chain variable domain of TCR clone 136289 (TRAV3, TRAJ40)
CAVSDGPGGTYKYIF

SEQ ID NO: 272578 - protein, 16 aa, Homo sapiens
  CDR3 for beta chain variable domain of TCR clone 136289 (TRBV5-1, TRBJ1-1)
CASSSGGNSLNTEAFF

SEQ ID NO: 272579 - protein, 15 aa, Homo sapiens
  CDR3 for alpha chain variable domain of TCR clone 136290 (TRAV26-1, TRAJ29)
CIVRVEGSGNTPLVF

SEQ ID NO: 272580 - protein, 10 aa, Homo sapiens
  CDR3 for beta chain variable domain of TCR clone 136290 (TRBV10-3, TRBJ2-7)
CAATSNEQYF

SEQ ID NO: 272581 - protein, 14 aa, Homo sapiens
  CDR3 for alpha chain variable domain of TCR clone 136291 (TRAV27, TRAJ17)
CRSTIRAAGNKLTF

SEQ ID NO: 272582 - protein, 16 aa, Homo sapiens
  CDR3 for beta chain variable domain of TCR clone 136291 (TRBV4-2, TRBJ2-3)
CASSQELAGDTDTQYF

SEQ ID NO: 272583 - protein, 12 aa, Homo sapiens
  CDR3 for alpha chain variable domain of TCR clone 136292 (TRAV36/DV7, TRAJ40)
CAVAGGTYNYIF

SEQ ID NO: 272584 - protein, 18 aa, Homo sapiens
  CDR3 for beta chain variable domain of TCR clone 136292 (TRBV27, TRBJ2-3)
CASSKGTSGRTSTDTQYF

SEQ ID NO: 272585 - protein, 14 aa, Homo sapiens
  CDR3 for alpha chain variable domain of TCR clone 136293 (TRAV35, TRAJ33)
CAGSSQDSNYQLIW

SEQ ID NO: 272586 - protein, 18 aa, Homo sapiens
  CDR3 for beta chain variable domain of TCR clone 136293 (TRBV4-1, TRBJ1-5)
CASSQDPRGQGLNQPQHF

SEQ ID NO: 272587 - protein, 12 aa, Homo sapiens
  CDR3 for alpha chain variable domain of TCR clone 136294 (TRAV16, TRAJ10)
CSRTGGRNKLTF

SEQ ID NO: 272588 - protein, 19 aa, Homo sapiens
  CDR3 for beta chain variable domain of TCR clone 136294 (TRBV25-1, TRBJ2-2)
CAILVYRVDRGRKTGELFF

SEQ ID NO: 272589 - protein, 14 aa, Homo sapiens
  CDR3 for alpha chain variable domain of TCR clone 136295 (TRAV13-1, TRAJ4)
CAATLPSGYNKLIF

SEQ ID NO: 272590 - protein, 17 aa, Homo sapiens
  CDR3 for beta chain variable domain of TCR clone 136295 (TRBV20-1, TRBJ2-1)
CSASSSGLAGSYNEQFF

SEQ ID NO: 272591 - protein, 12 aa, Homo sapiens
  CDR3 for alpha chain variable domain of TCR clone 136296 (TRAV13-1, TRAJ43)
CAAGRFNNDMRF

SEQ ID NO: 272592 - protein, 15 aa, Homo sapiens
  CDR3 for beta chain variable domain of TCR clone 136296 (TRBV27, TRBJ1-2)
CASSLSSTVNYGYTF

SEQ ID NO: 272593 - protein, 13 aa, Homo sapiens
  CDR3 for alpha chain variable domain of TCR clone 136297 (TRAV1-1, TRAJ23)
CAVVANQGGKVIF

SEQ ID NO: 272594 - protein, 16 aa, Homo sapiens
  CDR3 for beta chain variable domain of TCR clone 136297 (TRBV5-5, TRBJ1-2)
CASSPTWGRGLYGYTF

SEQ ID NO: 272595 - protein, 15 aa, Homo sapiens
  CDR3 for alpha chain variable domain of TCR clone 136298 (TRAV26-1, TRAJ29)
CIVRVEGSGNTPLVF

SEQ ID NO: 272596 - protein, 15 aa, Homo sapiens
  CDR3 for beta chain variable domain of TCR clone 136298 (TRBV20-1, TRBJ2-5)
CSAEGTGGLQETQYF

SEQ ID NO: 272597 - protein, 16 aa, Homo sapiens
  CDR3 for alpha chain variable domain of TCR clone 136299 (TRAV12-2, TRAJ40)
CAVIRGGTSGTYKYIF

SEQ ID NO: 272598 - protein, 15 aa, Homo sapiens
  CDR3 for beta chain variable domain of TCR clone 136299 (TRBV19, TRBJ2-1)
CASIKGRGPYNEQFF

SEQ ID NO: 272599 - protein, 14 aa, Homo sapiens
  CDR3 for alpha chain variable domain of TCR clone 136300 (TRAV23/DV6, TRAJ4)
CAAPSSGGYNKLIF

SEQ ID NO: 272600 - protein, 16 aa, Homo sapiens
  CDR3 for beta chain variable domain of TCR clone 136300 (TRBV12-4, TRBJ1-5)
CASSRPVGGSNQPQHF

SEQ ID NO: 272601 - protein, 12 aa, Homo sapiens
  CDR3 for alpha chain variable domain of TCR clone 136301 (TRAV29/DV5, TRAJ49)
CAATDTGNQSIL

SEQ ID NO: 272602 - protein, 12 aa, Homo sapiens
  CDR3 for beta chain variable domain of TCR clone 136301 (TRBV12-4, TRBJ2-7)
CASSLGGYEQYF

SEQ ID NO: 272603 - protein, 14 aa, Homo sapiens
  CDR3 for alpha chain variable domain of TCR clone 136302 (TRAV26-1, TRAJ48)
CIVRVPFGNEKLTF

SEQ ID NO: 272604 - protein, 16 aa, Homo sapiens
  CDR3 for beta chain variable domain of TCR clone 136302 (TRBV18, TRBJ2-1)
CASSPYLSIGGDEQFF

SEQ ID NO: 272605 - protein, 17 aa, Homo sapiens
  CDR3 for alpha chain variable domain of TCR clone 136303 (TRAV38-2/DV8, TRAJ28)
CAYRFAYSGAGSYQLTF

SEQ ID NO: 272606 - protein, 17 aa, Homo sapiens
  CDR3 for beta chain variable domain of TCR clone 136303 (TRBV4-3, TRBJ2-2)
CASSQDTSARSPRELFF

SEQ ID NO: 272607 - protein, 14 aa, Homo sapiens
  CDR3 for alpha chain variable domain of TCR clone 136304 (TRAV12-1, TRAJ17)
CVVNYKAASNKLTF

SEQ ID NO: 272608 - protein, 14 aa, Homo sapiens
  CDR3 for beta chain variable domain of TCR clone 136304 (TRBV7-8, TRBJ2-3)
CASSLEAGTDTQYF

SEQ ID NO: 272609 - protein, 14 aa, Homo sapiens
  CDR3 for alpha chain variable domain of TCR clone 136305 (TRAV8-2, TRAJ17)
CAVREGAAGNKLTF

SEQ ID NO: 272610 - protein, 13 aa, Homo sapiens
  CDR3 for beta chain variable domain of TCR clone 136305 (TRBV19, TRBJ2-1)
CASSMYRVNEQFF

SEQ ID NO: 272611 - protein, 10 aa, Homo sapiens
  CDR3 for alpha chain variable domain of TCR clone 136306 (TRAV8-3, TRAJ45)
SGGGADGLTF

SEQ ID NO: 272612 - protein, 13 aa, Homo sapiens
  CDR3 for beta chain variable domain of TCR clone 136306 (TRBV10-3, TRBJ2-7)
CASKLAVNYEQYS

SEQ ID NO: 272613 - protein, 15 aa, Homo sapiens
  CDR3 for alpha chain variable domain of TCR clone 136307 (TRAV27, TRAJ38)
CAARRNAGNNRKLIG

SEQ ID NO: 272614 - protein, 13 aa, Homo sapiens
  CDR3 for beta chain variable domain of TCR clone 136307 (TRBV12-5, TRBJ2-3)
CASGDRQSDTQYV

SEQ ID NO: 272615 - protein, 14 aa, Homo sapiens
  CDR3 for alpha chain variable domain of TCR clone 136308 (TRAV12-3, TRAJ58)
CAMSTETSCSRLTF

SEQ ID NO: 272616 - protein, 13 aa, Homo sapiens
  CDR3 for beta chain variable domain of TCR clone 136308 (TRBV27, TRBJ2-3)
CASSWGRTDTQYF

SEQ ID NO: 272617 - protein, 20 aa, Homo sapiens
  CDR3 for alpha chain variable domain of TCR clone 136309 (TRAV12-3, TRAJ42)
SPVIQPPTSVKGGSQGNLIF

SEQ ID NO: 272618 - protein, 18 aa, Homo sapiens
  CDR3 for beta chain variable domain of TCR clone 136309 (TRBV11-2, TRBJ2-3)
CASSLGGASRGAPNTLYF

SEQ ID NO: 272619 - protein, 15 aa, Homo sapiens
  CDR3 for alpha chain variable domain of TCR clone 136310 (TRAV26-1, TRAJ29)
CIVRDEGSGNTPLAF

SEQ ID NO: 272620 - protein, 15 aa, Homo sapiens
  CDR3 for beta chain variable domain of TCR clone 136310 (TRBV7-9, TRBJ1-5)
CASSQGHQPNQPQHF

SEQ ID NO: 272621 - protein, 13 aa, Homo sapiens
  CDR3 for alpha chain variable domain of TCR clone 136311 (TRAV2, TRAJ15)
CAVASQAGTALIF

SEQ ID NO: 272622 - protein, 14 aa, Homo sapiens
  CDR3 for beta chain variable domain of TCR clone 136311 (TRBV20-1, TRBJ1-1)
SSAQTRIGGTEAFF

SEQ ID NO: 272623 - protein, 15 aa, Homo sapiens
  CDR3 for alpha chain variable domain of TCR clone 136312 (TRAV8-3, TRAJ32)
CDVGPYGGATNKLIF

SEQ ID NO: 272624 - protein, 14 aa, Homo sapiens
  CDR3 for beta chain variable domain of TCR clone 136312 (TRBV29-1, TRBJ2-2)
CSVLAETNTGELFF

SEQ ID NO: 272625 - protein, 18 aa, Homo sapiens
  CDR3 for alpha chain variable domain of TCR clone 136313 (TRAV12-2, )
CAVEDIQNPDPAVYQLRD

SEQ ID NO: 272626 - protein, 15 aa, Homo sapiens
  CDR3 for beta chain variable domain of TCR clone 136313 (TRBV7-9, TRBJ2-7)
CASSLALAEAYEQYF

SEQ ID NO: 272627 - protein, 14 aa, Homo sapiens
  CDR3 for alpha chain variable domain of TCR clone 136314 (TRAV13-2, TRAJ45)
CAEMPGGGADGLTC

SEQ ID NO: 272628 - protein, 11 aa, Homo sapiens
  CDR3 for beta chain variable domain of TCR clone 136314 (TRBV7-3, TRBJ2-5)
CASSLSETQYF

SEQ ID NO: 272629 - protein, 10 aa, Homo sapiens
  CDR3 for alpha chain variable domain of TCR clone 136315 (TRAV23/DV6, TRAJ57)
CAASSTLSQG

SEQ ID NO: 272630 - protein, 16 aa, Homo sapiens
  CDR3 for beta chain variable domain of TCR clone 136315 (TRBV2, TRBJ1-4)
CASNLLQGATNEKLFF

SEQ ID NO: 272631 - protein, 12 aa, Homo sapiens
  CDR3 for alpha chain variable domain of TCR clone 136316 (TRAV22, TRAJ22)
CAPGGSARQLTF

SEQ ID NO: 272632 - protein, 13 aa, Homo sapiens
  CDR3 for beta chain variable domain of TCR clone 136316 (TRBV2, TRBJ2-7)
CASSVGGSGEQYF

SEQ ID NO: 272633 - protein, 15 aa, Homo sapiens
  CDR3 for alpha chain variable domain of TCR clone 136317 (TRAV2, TRAJ9)
CAVEDRGTGVFKPIF

SEQ ID NO: 272634 - protein, 16 aa, Homo sapiens
  CDR3 for beta chain variable domain of TCR clone 136317 (TRBV24-1, TRBJ2-3)
CATSDPGTGATDTQYF

SEQ ID NO: 272635 - protein, 14 aa, Homo sapiens
  CDR3 for alpha chain variable domain of TCR clone 136318 (TRAV26-1, TRAJ38)
CIADNAGNNRKLIW

SEQ ID NO: 272636 - protein, 13 aa, Homo sapiens
  CDR3 for beta chain variable domain of TCR clone 136318 (TRBV5-4, TRBJ2-5)
CASSRQEGETQYF

SEQ ID NO: 272637 - protein, 13 aa, Homo sapiens
  CDR3 for alpha chain variable domain of TCR clone 136319 (TRAV29/DV5, TRAJ47)
CAASAEYGNNLVF

SEQ ID NO: 272638 - protein, 15 aa, Homo sapiens
  CDR3 for beta chain variable domain of TCR clone 136319 (TRBV7-9, TRBJ1-4)
CASSARTGGNEKLFF

SEQ ID NO: 272639 - protein, 14 aa, Homo sapiens
  CDR3 for alpha chain variable domain of TCR clone 136320 (TRAV8-3, TRAJ39)
CAVGANNAGNMINF

SEQ ID NO: 272640 - protein, 12 aa, Homo sapiens
  CDR3 for beta chain variable domain of TCR clone 136320 (TRBV11-3, TRBJ1-1)
CASSHRQGEAFF

SEQ ID NO: 272641 - protein, 19 aa, Homo sapiens
  CDR3 for alpha chain variable domain of TCR clone 136321 (TRAV25, TRAJ20)
TATQTTDIGILPHDYKLSF

SEQ ID NO: 272642 - protein, 17 aa, Homo sapiens
  CDR3 for beta chain variable domain of TCR clone 136321 (TRBV4-3, TRBJ2-1)
CASSQFSSGRASGEQFF

SEQ ID NO: 272643 - protein, 14 aa, Homo sapiens
  CDR3 for alpha chain variable domain of TCR clone 136322 (TRAV8-4, TRAJ13)
CAVTLSGGYQKVTF

SEQ ID NO: 272644 - protein, 14 aa, Homo sapiens
  CDR3 for beta chain variable domain of TCR clone 136322 (TRBV7-2, TRBJ1-2)
RASSQTVSTYGCTF

SEQ ID NO: 272645 - protein, 15 aa, Homo sapiens
  CDR3 for alpha chain variable domain of TCR clone 136323 (TRAV21, TRAJ40)
CAVRPQTSGTYKYIF

SEQ ID NO: 272646 - protein, 16 aa, Homo sapiens
  CDR3 for beta chain variable domain of TCR clone 136323 (TRBV6-1, TRBJ2-5)
CASSETLDRGAETQYF

SEQ ID NO: 272647 - protein, 16 aa, Homo sapiens
  CDR3 for alpha chain variable domain of TCR clone 136324 (TRAV23/DV6, TRAJ9)
CAASIGGNTGGFKTIF

SEQ ID NO: 272648 - protein, 16 aa, Homo sapiens
  CDR3 for beta chain variable domain of TCR clone 136324 (TRBV15, TRBJ2-1)
CATSRNLAGGHNEQFF

SEQ ID NO: 272649 - protein, 15 aa, Homo sapiens
  CDR3 for alpha chain variable domain of TCR clone 136325 (TRAV13-1, TRAJ52)
CAASSPSTSYGKLTF

SEQ ID NO: 272650 - protein, 13 aa, Homo sapiens
  CDR3 for beta chain variable domain of TCR clone 136325 (TRBV27, TRBJ2-5)
CASGLSSLETQYF

SEQ ID NO: 272651 - protein, 18 aa, Homo sapiens
  CDR3 for alpha chain variable domain of TCR clone 136326 (TRAV26-2, TRAJ45)
CFLRLWGYSGGGADGLTF

SEQ ID NO: 272652 - protein, 17 aa, Homo sapiens
  CDR3 for beta chain variable domain of TCR clone 136326 (TRBV28, TRBJ2-3)
CASSPTPAGGRVDTQYF

SEQ ID NO: 272653 - protein, 14 aa, Homo sapiens
  CDR3 for alpha chain variable domain of TCR clone 136327 (TRAV1-1, TRAJ27)
CAVIYNTNAAKSPF

SEQ ID NO: 272654 - protein, 16 aa, Homo sapiens
  CDR3 for beta chain variable domain of TCR clone 136327 (TRBV28, TRBJ2-1)
CASSSPGLAKGDEQFF

SEQ ID NO: 272655 - protein, 12 aa, Homo sapiens
  CDR3 for alpha chain variable domain of TCR clone 136328 (TRAV21, TRAJ31)
CVLAGNNARLMF

SEQ ID NO: 272656 - protein, 15 aa, Homo sapiens
  CDR3 for beta chain variable domain of TCR clone 136328 (TRBV7-9, TRBJ1-6)
CASSSPGRGNSPLHF

SEQ ID NO: 272657 - protein, 21 aa, Homo sapiens
  CDR3 for alpha chain variable domain of TCR clone 136329 (TRAV8-4, TRAJ47)
HLTKPSAHMSDAAERGNKLVF

SEQ ID NO: 272658 - protein, 14 aa, Homo sapiens
  CDR3 for beta chain variable domain of TCR clone 136329 (TRBV19, TRBJ2-1)
CASPTFVLSGEQFF

SEQ ID NO: 272659 - protein, 14 aa, Homo sapiens
  CDR3 for alpha chain variable domain of TCR clone 136330 (TRAV35, TRAJ22)
CSGLRPGSASQLTF

SEQ ID NO: 272660 - protein, 15 aa, Homo sapiens
  CDR3 for beta chain variable domain of TCR clone 136330 (TRBV12-4, TRBJ2-5)
CASSPPTGLQETQYF

SEQ ID NO: 272661 - protein, 13 aa, Homo sapiens
  CDR3 for alpha chain variable domain of TCR clone 136331 (TRAV2, TRAJ15)
CAVEAQAGTALIF

SEQ ID NO: 272662 - protein, 15 aa, Homo sapiens
  CDR3 for beta chain variable domain of TCR clone 136331 (TRBV5-1, TRBJ2-3)
CASSVTSGSTDTQYF

SEQ ID NO: 272663 - protein, 14 aa, Homo sapiens
  CDR3 for alpha chain variable domain of TCR clone 136332 (TRAV8-1, TRAJ5)
CAMSMDTGRRALTF

SEQ ID NO: 272664 - protein, 15 aa, Homo sapiens
  CDR3 for beta chain variable domain of TCR clone 136332 (TRBV19, TRBJ2-4)
CASRGPRRGENIQYF

SEQ ID NO: 272665 - protein, 17 aa, Homo sapiens
  CDR3 for alpha chain variable domain of TCR clone 136333 (TRAV1-2, TRAJ8)
CAVRDPDENTGFQNLLF

SEQ ID NO: 272666 - protein, 16 aa, Homo sapiens
  CDR3 for beta chain variable domain of TCR clone 136333 (TRBV7-9, TRBJ2-2)
CASSGFGGANTGELFF

SEQ ID NO: 272667 - protein, 16 aa, Homo sapiens
  CDR3 for alpha chain variable domain of TCR clone 136334 (TRAV27, TRAJ53)
CAAPEGSGGSNYKLTF

SEQ ID NO: 272668 - protein, 15 aa, Homo sapiens
  CDR3 for beta chain variable domain of TCR clone 136334 (TRBV20-1, TRBJ1-1)
CSASRGVKGNTEAFF

SEQ ID NO: 272669 - protein, 13 aa, Homo sapiens
  CDR3 for alpha chain variable domain of TCR clone 136335 (TRAV22, TRAJ12)
CAGRMDSSYKLIF

SEQ ID NO: 272670 - protein, 17 aa, Homo sapiens
  CDR3 for beta chain variable domain of TCR clone 136335 (TRBV13, TRBJ2-3)
CASSLSRVAGGGNTQYF

SEQ ID NO: 272671 - protein, 15 aa, Homo sapiens
  CDR3 for alpha chain variable domain of TCR clone 136336 (TRAV13-1, TRAJ17)
CAASIERAAGNKLTF

SEQ ID NO: 272672 - protein, 14 aa, Homo sapiens
  CDR3 for beta chain variable domain of TCR clone 136336 (TRBV7-9, TRBJ2-1)
CASSPRDSPYEQFF

SEQ ID NO: 272673 - protein, 14 aa, Homo sapiens
  CDR3 for alpha chain variable domain of TCR clone 136337 (TRAV9-2, TRAJ39)
CALYIYNAGNMLTF

SEQ ID NO: 272674 - protein, 17 aa, Homo sapiens
  CDR3 for beta chain variable domain of TCR clone 136337 (TRBV2, TRBJ1-5)
CASSVGTGMRGYQPQHF

SEQ ID NO: 272675 - protein, 23 aa, Homo sapiens
  CDR3 for alpha chain variable domain of TCR clone 136338 (TRAV12-2, TRAJ22)
CAVSFRVHPGPPIVSGSARQLTF

SEQ ID NO: 272676 - protein, 16 aa, Homo sapiens
  CDR3 for beta chain variable domain of TCR clone 136338 (TRBV4-3, TRBJ1-6)
CASSAQPGGEGSPLHF

SEQ ID NO: 272677 - protein, 14 aa, Homo sapiens
  CDR3 for alpha chain variable domain of TCR clone 136339 (TRAV12-2, TRAJ13)
CAVKKTGGYQKVTF

SEQ ID NO: 272678 - protein, 17 aa, Homo sapiens
  CDR3 for beta chain variable domain of TCR clone 136339 (TRBV5-1, TRBJ2-5)
CASSRLGLAANQETQYF

SEQ ID NO: 272679 - protein, 11 aa, Homo sapiens
  CDR3 for alpha chain variable domain of TCR clone 136340 (TRAV3, TRAJ21)
CAVGNFNKFYF

SEQ ID NO: 272680 - protein, 16 aa, Homo sapiens
  CDR3 for beta chain variable domain of TCR clone 136340 (TRBV19, TRBJ2-1)
CASIRAGPSSYNEQFF

SEQ ID NO: 272681 - protein, 13 aa, Homo sapiens
  CDR3 for alpha chain variable domain of TCR clone 136341 (TRAV13-1, TRAJ42)
CAASELWRKPRKY

SEQ ID NO: 272682 - protein, 15 aa, Homo sapiens
  CDR3 for beta chain variable domain of TCR clone 136341 (TRBV20-1, TRBJ2-1)
CNASSAGSSYNEQFF

SEQ ID NO: 272683 - protein, 13 aa, Homo sapiens
  CDR3 for alpha chain variable domain of TCR clone 136342 (TRAV1-2, TRAJ9)
CAALNTGGFKTIF

SEQ ID NO: 272684 - protein, 13 aa, Homo sapiens
  CDR3 for beta chain variable domain of TCR clone 136342 (TRBV19, TRBJ1-2)
RASSVPGHDGYTF

SEQ ID NO: 272685 - protein, 13 aa, Homo sapiens
  CDR3 for alpha chain variable domain of TCR clone 136343 (TRAV21, TRAJ27)
CAARPGNADKSTL

SEQ ID NO: 272686 - protein, 20 aa, Homo sapiens
  CDR3 for beta chain variable domain of TCR clone 136343 (TRBV7-8, TRBJ2-2)
CASSHLFPGPTIHITGELFF

SEQ ID NO: 272687 - protein, 14 aa, Homo sapiens
  CDR3 for alpha chain variable domain of TCR clone 136344 (TRAV1-2, TRAJ16)
CAVNRFSDGQKLLF

SEQ ID NO: 272688 - protein, 16 aa, Homo sapiens
  CDR3 for beta chain variable domain of TCR clone 136344 (TRBV25-1, TRBJ2-2)
CASSLSGFWVTGELFF

SEQ ID NO: 272689 - protein, 16 aa, Homo sapiens
  CDR3 for alpha chain variable domain of TCR clone 136345 (TRAV24, TRAJ37)
CAFPLIGSGNTGKLIF

SEQ ID NO: 272690 - protein, 15 aa, Homo sapiens
  CDR3 for beta chain variable domain of TCR clone 136345 (TRBV24-1, TRBJ2-1)
CATSGSGGFYNEQFF

SEQ ID NO: 272691 - protein, 13 aa, Homo sapiens
  CDR3 for alpha chain variable domain of TCR clone 136346 (TRAV23/DV6, TRAJ24)
CAASEDSWGQLQF

SEQ ID NO: 272692 - protein, 13 aa, Homo sapiens
  CDR3 for beta chain variable domain of TCR clone 136346 (TRBV7-9, TRBJ1-2)
CASSLKQNYGYTF

SEQ ID NO: 272693 - protein, 16 aa, Homo sapiens
  CDR3 for alpha chain variable domain of TCR clone 136347 (TRAV2, TRAJ20)
TTVLRSFRSNDYKLSF

SEQ ID NO: 272694 - protein, 12 aa, Homo sapiens
  CDR3 for beta chain variable domain of TCR clone 136347 (TRBV7-6, TRBJ2-3)
CASSTGTDTQYF

SEQ ID NO: 272695 - protein, 15 aa, Homo sapiens
  CDR3 for alpha chain variable domain of TCR clone 136348 (TRAV23/DV6, TRAJ18)
CAARYRGSTLGRLYF

SEQ ID NO: 272696 - protein, 19 aa, Homo sapiens
  CDR3 for beta chain variable domain of TCR clone 136348 (TRBV7-2, TRBJ2-3)
CASSFVGTSGRDLPDTQYF

SEQ ID NO: 272697 - protein, 16 aa, Homo sapiens
  CDR3 for alpha chain variable domain of TCR clone 136349 (TRAV30, TRAJ24)
CGTEIVDADIWGKFQF

SEQ ID NO: 272698 - protein, 18 aa, Homo sapiens
  CDR3 for beta chain variable domain of TCR clone 136349 (TRBV20-1, TRBJ2-6)
CSAETTPTHGSGANVLTF

SEQ ID NO: 272699 - protein, 12 aa, Homo sapiens
  CDR3 for alpha chain variable domain of TCR clone 136350 (TRAV8-3, TRAJ26)
CAGDNYGQNFVF

SEQ ID NO: 272700 - protein, 11 aa, Homo sapiens
  CDR3 for beta chain variable domain of TCR clone 136350 (TRBV19, TRBJ1-1)
CARSSGSEAFF

SEQ ID NO: 272701 - protein, 20 aa, Homo sapiens
  CDR3 for alpha chain variable domain of TCR clone 136351 (TRAV4, TRAJ29)
CCVLLPCGCVPFSGNTPLVF

SEQ ID NO: 272702 - protein, 12 aa, Homo sapiens
  CDR3 for beta chain variable domain of TCR clone 136351 (TRBV6-1, TRBJ2-7)
CASSDYSYEQYF

SEQ ID NO: 272703 - protein, 14 aa, Homo sapiens
  CDR3 for alpha chain variable domain of TCR clone 136352 (TRAV12-1, TRAJ30)
CVVNIGGRDDKIIF

SEQ ID NO: 272704 - protein, 13 aa, Homo sapiens
  CDR3 for beta chain variable domain of TCR clone 136352 (TRBV12-5, TRBJ2-1)
CASGWGGGNEQFF

SEQ ID NO: 272705 - protein, 16 aa, Homo sapiens
  CDR3 for alpha chain variable domain of TCR clone 136353 (TRAV4, TRAJ22)
CLVGDLYSGSARQRTF

SEQ ID NO: 272706 - protein, 16 aa, Homo sapiens
  CDR3 for beta chain variable domain of TCR clone 136353 (TRBV7-9, TRBJ2-1)
CASSDVAGGSYNERFF

SEQ ID NO: 272707 - protein, 14 aa, Homo sapiens
  CDR3 for alpha chain variable domain of TCR clone 136354 (TRAV17, TRAJ53)
CATDAGCSNYKLTF

SEQ ID NO: 272708 - protein, 16 aa, Homo sapiens
  CDR3 for beta chain variable domain of TCR clone 136354 (TRBV4-1, TRBJ1-1)
CASSQDAGMGNTEAFF

SEQ ID NO: 272709 - protein, 14 aa, Homo sapiens
  CDR3 for alpha chain variable domain of TCR clone 136355 (TRAV20, TRAJ42)
CAVQAGGSQGNLIF

SEQ ID NO: 272710 - protein, 14 aa, Homo sapiens
  CDR3 for beta chain variable domain of TCR clone 136355 (TRBV28, TRBJ1-2)
CASRVQGASYGYTF

SEQ ID NO: 272711 - protein, 16 aa, Homo sapiens
  CDR3 for alpha chain variable domain of TCR clone 136356 (TRAV12-1, TRAJ43)
CVVNPHRFGAGTRLTV

SEQ ID NO: 272712 - protein, 13 aa, Homo sapiens
  CDR3 for beta chain variable domain of TCR clone 136356 (TRBV12-4, TRBJ1-2)
FASSSGPNYGYTF

SEQ ID NO: 272713 - protein, 15 aa, Homo sapiens
  CDR3 for alpha chain variable domain of TCR clone 136357 (TRAV13-1, TRAJ17)
CAASIHGGCRQQANF

SEQ ID NO: 272714 - protein, 14 aa, Homo sapiens
  CDR3 for beta chain variable domain of TCR clone 136357 (TRBV20-1, TRBJ2-4)
CSSRDRGQGGIQYF

SEQ ID NO: 272715 - protein, 14 aa, Homo sapiens
  CDR3 for alpha chain variable domain of TCR clone 136358 (TRAV8-4, TRAJ9)
CAVTFNTGGFKTIF

SEQ ID NO: 272716 - protein, 15 aa, Homo sapiens
  CDR3 for beta chain variable domain of TCR clone 136358 (TRBV7-9, TRBJ2-2)
CAISPETGAGGELFF

SEQ ID NO: 272717 - protein, 10 aa, Homo sapiens
  CDR3 for alpha chain variable domain of TCR clone 136359 (TRAV30, TRAJ48)
CGIGNEKLTF

SEQ ID NO: 272718 - protein, 15 aa, Homo sapiens
  CDR3 for beta chain variable domain of TCR clone 136359 (TRBV19, TRBJ2-7)
CASSPAGSGEALRYF

SEQ ID NO: 272719 - protein, 13 aa, Homo sapiens
  CDR3 for alpha chain variable domain of TCR clone 136360 (TRAV26-1, TRAJ33)
CIVRVEGNFQLIW

SEQ ID NO: 272720 - protein, 16 aa, Homo sapiens
  CDR3 for beta chain variable domain of TCR clone 136360 (TRBV15, TRBJ2-7)
CATSRDRGRRRGEQYF

SEQ ID NO: 272721 - protein, 18 aa, Homo sapiens
  CDR3 for alpha chain variable domain of TCR clone 136361 (TRAV9-2, TRAJ52)
CALSRHNAGGTSYGKLTF

SEQ ID NO: 272722 - protein, 13 aa, Homo sapiens
  CDR3 for beta chain variable domain of TCR clone 136361 (TRBV6-5, TRBJ1-2)
CASRPQGVYGYTF

SEQ ID NO: 272723 - protein, 13 aa, Homo sapiens
  CDR3 for alpha chain variable domain of TCR clone 136362 (TRAV23/DV6, TRAJ22)
CAPWGGSATQLTF

SEQ ID NO: 272724 - protein, 14 aa, Homo sapiens
  CDR3 for beta chain variable domain of TCR clone 136362 (TRBV18, TRBJ2-7)
CASSPTSGGYEQYF

SEQ ID NO: 272725 - protein, 12 aa, Homo sapiens
  CDR3 for alpha chain variable domain of TCR clone 136363 (TRAV30, TRAJ43)
CGTEERGNDMRF

SEQ ID NO: 272726 - protein, 13 aa, Homo sapiens
  CDR3 for beta chain variable domain of TCR clone 136363 (TRBV7-9, TRBJ2-3)
CVSSPGSTDTQYF

SEQ ID NO: 272727 - protein, 15 aa, Homo sapiens
  CDR3 for alpha chain variable domain of TCR clone 136364 (TRAV25, TRAJ10)
CAGLGLTGGGNKLTF

SEQ ID NO: 272728 - protein, 14 aa, Homo sapiens
  CDR3 for beta chain variable domain of TCR clone 136364 (TRBV10-2, TRBJ2-1)
CASSEGTSEDEQFF

SEQ ID NO: 272729 - protein, 16 aa, Homo sapiens
  CDR3 for alpha chain variable domain of TCR clone 136365 (TRAV30, TRAJ24)
CGTEIVDADSWGKFQF

SEQ ID NO: 272730 - protein, 14 aa, Homo sapiens
  CDR3 for beta chain variable domain of TCR clone 136365 (TRBV12-5, TRBJ2-5)
CASGARTHQETQYV

SEQ ID NO: 272731 - protein, 15 aa, Homo sapiens
  CDR3 for alpha chain variable domain of TCR clone 136366 (TRAV2, TRAJ22)
CAVPSRGGSARQLTF

SEQ ID NO: 272732 - protein, 13 aa, Homo sapiens
  CDR3 for beta chain variable domain of TCR clone 136366 (TRBV10-2, TRBJ2-7)
CASGASGGYEQYF

SEQ ID NO: 272733 - protein, 12 aa, Homo sapiens
  CDR3 for alpha chain variable domain of TCR clone 136367 (TRAV8-3, TRAJ20)
CAVGGGDYTLSF

SEQ ID NO: 272734 - protein, 14 aa, Homo sapiens
  CDR3 for beta chain variable domain of TCR clone 136367 (TRBV5-1, TRBJ2-7)
CASSRGESLYEQYF

SEQ ID NO: 272735 - protein, 15 aa, Homo sapiens
  CDR3 for alpha chain variable domain of TCR clone 136368 (TRAV13-1, TRAJ57)
QVPPLSQGGAEKLVF

SEQ ID NO: 272736 - protein, 13 aa, Homo sapiens
  CDR3 for beta chain variable domain of TCR clone 136368 (TRBV9, TRBJ2-7)
CASSVGTAYEQYF

SEQ ID NO: 272737 - protein, 14 aa, Homo sapiens
  CDR3 for alpha chain variable domain of TCR clone 136369 (TRAV1-2, TRAJ8)
RAVREDTGFQKLVF

SEQ ID NO: 272738 - protein, 16 aa, Homo sapiens
  CDR3 for beta chain variable domain of TCR clone 136369 (TRBV12-4, TRBJ2-5)
CASSFFVRGRQETQYF

SEQ ID NO: 272739 - protein, 18 aa, Homo sapiens
  CDR3 for alpha chain variable domain of TCR clone 136370 (TRAV26-1, TRAJ44)
CIVRVAGGGISTASELTF

SEQ ID NO: 272740 - protein, 16 aa, Homo sapiens
  CDR3 for beta chain variable domain of TCR clone 136370 (TRBV20-1, TRBJ2-3)
CSAIFPIGGLTDTQYF

SEQ ID NO: 272741 - protein, 11 aa, Homo sapiens
  CDR3 for alpha chain variable domain of TCR clone 136371 (TRAV12-3, TRAJ43)
CAMSVSNDMRF

SEQ ID NO: 272742 - protein, 13 aa, Homo sapiens
  CDR3 for beta chain variable domain of TCR clone 136371 (TRBV20-1, TRBJ1-1)
CRAPLEGGTEAFF

SEQ ID NO: 272743 - protein, 11 aa, Homo sapiens
  CDR3 for alpha chain variable domain of TCR clone 136372 (TRAV17, TRAJ43)
CATPRSNDMRF

SEQ ID NO: 272744 - protein, 15 aa, Homo sapiens
  CDR3 for beta chain variable domain of TCR clone 136372 (TRBV19, TRBJ2-1)
CASSSPGVPLDEQFF

SEQ ID NO: 272745 - protein, 13 aa, Homo sapiens
  CDR3 for alpha chain variable domain of TCR clone 136373 (TRAV21, TRAJ15)
CAVANQAGTALIF

SEQ ID NO: 272746 - protein, 13 aa, Homo sapiens
  CDR3 for beta chain variable domain of TCR clone 136373 (TRBV29-1, TRBJ1-1)
CSVGDSRNTEAFF

SEQ ID NO: 272747 - protein, 15 aa, Homo sapiens
  CDR3 for alpha chain variable domain of TCR clone 136374 (TRAV3, TRAJ3)
CCERPRYNSASKIIF

SEQ ID NO: 272748 - protein, 16 aa, Homo sapiens
  CDR3 for beta chain variable domain of TCR clone 136374 (TRBV19, TRBJ1-5)
CASSIDRGGPRQPQHF

SEQ ID NO: 272749 - protein, 13 aa, Homo sapiens
  CDR3 for alpha chain variable domain of TCR clone 136375 (TRAV1-2, TRAJ9)
CAALNTGGFKTIF

SEQ ID NO: 272750 - protein, 15 aa, Homo sapiens
  CDR3 for beta chain variable domain of TCR clone 136375 (TRBV18, TRBJ2-7)
CASSPSSTGNYEQYF

SEQ ID NO: 272751 - protein, 11 aa, Homo sapiens
  CDR3 for alpha chain variable domain of TCR clone 136376 (TRAV26-1, TRAJ37)
CIVRVGRKLIF

SEQ ID NO: 272752 - protein, 16 aa, Homo sapiens
  CDR3 for beta chain variable domain of TCR clone 136376 (TRBV7-3, TRBJ2-6)
CASSLTLAGGDNVLTF

SEQ ID NO: 272753 - protein, 13 aa, Homo sapiens
  CDR3 for alpha chain variable domain of TCR clone 136377 (TRAV38-1, TRAJ42)
CARWGGSQGNLIF

SEQ ID NO: 272754 - protein, 17 aa, Homo sapiens
  CDR3 for beta chain variable domain of TCR clone 136377 (TRBV20-1, TRBJ2-1)
CSARDPQAGVWDNEQFF

SEQ ID NO: 272755 - protein, 14 aa, Homo sapiens
  CDR3 for alpha chain variable domain of TCR clone 136378 (TRAV13-1, TRAJ44)
CAAKATGTASKHTF

SEQ ID NO: 272756 - protein, 14 aa, Homo sapiens
  CDR3 for beta chain variable domain of TCR clone 136378 (TRBV19, TRBJ2-2)
CASSTLHRSGELFF

SEQ ID NO: 272757 - protein, 14 aa, Homo sapiens
  CDR3 for alpha chain variable domain of TCR clone 136379 (TRAV1-2, TRAJ8)
CAVREDTGFHKLVF

SEQ ID NO: 272758 - protein, 15 aa, Homo sapiens
  CDR3 for beta chain variable domain of TCR clone 136379 (TRBV29-1, TRBJ2-1)
CSVPTGLALYNEQFF

SEQ ID NO: 272759 - protein, 13 aa, Homo sapiens
  CDR3 for alpha chain variable domain of TCR clone 136380 (TRAV24, TRAJ15)
CAFKDQAGIALIF

SEQ ID NO: 272760 - protein, 14 aa, Homo sapiens
  CDR3 for beta chain variable domain of TCR clone 136380 (TRBV2, TRBJ2-1)
CASSLSGSQGEQFF

SEQ ID NO: 272761 - protein, 14 aa, Homo sapiens
  CDR3 for alpha chain variable domain of TCR clone 136381 (TRAV1-2, TRAJ8)
CAVREDTGFQKLVF

SEQ ID NO: 272762 - protein, 16 aa, Homo sapiens
  CDR3 for beta chain variable domain of TCR clone 136381 (TRBV6-1, TRBJ2-5)
CASSETLDRGAETLYF

SEQ ID NO: 272763 - protein, 11 aa, Homo sapiens
  CDR3 for alpha chain variable domain of TCR clone 136382 (TRAV30, TRAJ24)
WMLTAGGKFQF

SEQ ID NO: 272764 - protein, 16 aa, Homo sapiens
  CDR3 for beta chain variable domain of TCR clone 136382 (TRBV2, TRBJ1-3)
CASSGGAGRSGNTIYF

SEQ ID NO: 272765 - protein, 15 aa, Homo sapiens
  CDR3 for alpha chain variable domain of TCR clone 136383 (TRAV17, TRAJ4)
CATGTWSGGYNKLIF

SEQ ID NO: 272766 - protein, 13 aa, Homo sapiens
  CDR3 for beta chain variable domain of TCR clone 136383 (TRBV6-6, TRBJ2-7)
CASCPKHLAEQYF

SEQ ID NO: 272767 - protein, 14 aa, Homo sapiens
  CDR3 for alpha chain variable domain of TCR clone 136384 (TRAV26-1, TRAJ38)
CIADNDGNNSKLIW

SEQ ID NO: 272768 - protein, 13 aa, Homo sapiens
  CDR3 for beta chain variable domain of TCR clone 136384 (TRBV20-1, TRBJ1-1)
CSARGGGNTEAFF

SEQ ID NO: 272769 - protein, 15 aa, Homo sapiens
  CDR3 for alpha chain variable domain of TCR clone 136385 (TRAV8-4, TRAJ37)
CAVTYGSSNTGKLIF

SEQ ID NO: 272770 - protein, 17 aa, Homo sapiens
  CDR3 for beta chain variable domain of TCR clone 136385 (TRBV4-2, TRBJ2-5)
CASSPGRWRNFQETQYF

SEQ ID NO: 272771 - protein, 14 aa, Homo sapiens
  CDR3 for alpha chain variable domain of TCR clone 136386 (TRAV12-2, TRAJ13)
CAVKKTGDYQKVTF

SEQ ID NO: 272772 - protein, 12 aa, Homo sapiens
  CDR3 for beta chain variable domain of TCR clone 136386 (TRBV12-4, TRBJ1-2)
CASSFIWLHLRF

SEQ ID NO: 272773 - protein, 13 aa, Homo sapiens
  CDR3 for alpha chain variable domain of TCR clone 136387 (TRAV12-3, TRAJ33)
CAMSVNSNYQLIW

SEQ ID NO: 272774 - protein, 12 aa, Homo sapiens
  CDR3 for beta chain variable domain of TCR clone 136387 (TRBV5-1, TRBJ2-5)
CASSFSWETQYF

SEQ ID NO: 272775 - protein, 14 aa, Homo sapiens
  CDR3 for alpha chain variable domain of TCR clone 136388 (TRAV25, TRAJ27)
CAGEHLTDAGKSTF

SEQ ID NO: 272776 - protein, 13 aa, Homo sapiens
  CDR3 for beta chain variable domain of TCR clone 136388 (TRBV12-4, TRBJ2-7)
CASSPTETYEQYF

SEQ ID NO: 272777 - protein, 15 aa, Homo sapiens
  CDR3 for alpha chain variable domain of TCR clone 136389 (TRAV4, TRAJ10)
CLVGDGSGGGNKLTF

SEQ ID NO: 272778 - protein, 15 aa, Homo sapiens
  CDR3 for beta chain variable domain of TCR clone 136389 (TRBV27, TRBJ2-3)
CASSSLAGVIDAQYF

SEQ ID NO: 272779 - protein, 13 aa, Homo sapiens
  CDR3 for alpha chain variable domain of TCR clone 136390 (TRAV12-3, TRAJ13)
CAMSSGGYQKVTF

SEQ ID NO: 272780 - protein, 16 aa, Homo sapiens
  CDR3 for beta chain variable domain of TCR clone 136390 (TRBV7-3, TRBJ2-1)
CASSLEGYRSYNEQFF

SEQ ID NO: 272781 - protein, 13 aa, Homo sapiens
  CDR3 for alpha chain variable domain of TCR clone 136391 (TRAV12-3, TRAJ13)
CAMSSGGYQKVTF

SEQ ID NO: 272782 - protein, 12 aa, Homo sapiens
  CDR3 for beta chain variable domain of TCR clone 136391 (TRBV20-1, TRBJ1-1)
QCSSRGHTEAFF

SEQ ID NO: 272783 - protein, 15 aa, Homo sapiens
  CDR3 for alpha chain variable domain of TCR clone 136392 (TRAV8-1, TRAJ34)
CAVNSRTYNTDKLIF

SEQ ID NO: 272784 - protein, 11 aa, Homo sapiens
  CDR3 for beta chain variable domain of TCR clone 136392 (TRBV5-6, TRBJ2-1)
CASSTNNGQFF

SEQ ID NO: 272785 - protein, 13 aa, Homo sapiens
  CDR3 for alpha chain variable domain of TCR clone 136393 (TRAV13-1, TRAJ20)
CAARVSNDYKLSV

SEQ ID NO: 272786 - protein, 12 aa, Homo sapiens
  CDR3 for beta chain variable domain of TCR clone 136393 (TRBV20-1, TRBJ2-1)
CSARLGTDEQFF

SEQ ID NO: 272787 - protein, 13 aa, Homo sapiens
  CDR3 for alpha chain variable domain of TCR clone 136394 (TRAV12-1, TRAJ26)
SATYPYYGQNFVF

SEQ ID NO: 272788 - protein, 15 aa, Homo sapiens
  CDR3 for beta chain variable domain of TCR clone 136394 (TRBV5-1, TRBJ2-6)
CASSLDASGANVLTF

SEQ ID NO: 272789 - protein, 14 aa, Homo sapiens
  CDR3 for alpha chain variable domain of TCR clone 136395 (TRAV12-1, TRAJ26)
CVVKGSNYGQNFVF

SEQ ID NO: 272790 - protein, 17 aa, Homo sapiens
  CDR3 for beta chain variable domain of TCR clone 136395 (TRBV11-2, TRBJ2-6)
FAISQRDIFSGANVLTF

SEQ ID NO: 272791 - protein, 13 aa, Homo sapiens
  CDR3 for alpha chain variable domain of TCR clone 136396 (TRAV36/DV7, TRAJ37)
CAVFSSNTGKLIF

SEQ ID NO: 272792 - protein, 15 aa, Homo sapiens
  CDR3 for beta chain variable domain of TCR clone 136396 (TRBV27, TRBJ2-1)
CASSNGGGSSNEQFF

SEQ ID NO: 272793 - protein, 12 aa, Homo sapiens
  CDR3 for alpha chain variable domain of TCR clone 136397 (TRAV21, TRAJ33)
CAKMDSNYQLIW

SEQ ID NO: 272794 - protein, 16 aa, Homo sapiens
  CDR3 for beta chain variable domain of TCR clone 136397 (TRBV12-4, TRBJ2-5)
CASSWRPSGDLETQYF

SEQ ID NO: 272795 - protein, 17 aa, Homo sapiens
  CDR3 for alpha chain variable domain of TCR clone 136398 (TRAV3, TRAJ42)
CAVRDRDYGGSQGNLIF

SEQ ID NO: 272796 - protein, 12 aa, Homo sapiens
  CDR3 for beta chain variable domain of TCR clone 136398 (TRBV7-9, TRBJ2-7)
CASSLFDYEQYF

SEQ ID NO: 272797 - protein, 14 aa, Homo sapiens
  CDR3 for alpha chain variable domain of TCR clone 136399 (TRAV1-2, TRAJ6)
CAVSLSGGSYIPTF

SEQ ID NO: 272798 - protein, 15 aa, Homo sapiens
  CDR3 for beta chain variable domain of TCR clone 136399 (TRBV28, TRBJ2-7)
CASSPGGMGFYEQYF

SEQ ID NO: 272799 - protein, 14 aa, Homo sapiens
  CDR3 for alpha chain variable domain of TCR clone 136400 (TRAV2, TRAJ12)
CAVDAMDSSYKLSF

SEQ ID NO: 272800 - protein, 13 aa, Homo sapiens
  CDR3 for beta chain variable domain of TCR clone 136400 (TRBV19, TRBJ2-1)
CASKVGAGGEQFF

SEQ ID NO: 272801 - protein, 17 aa, Homo sapiens
  CDR3 for alpha chain variable domain of TCR clone 136401 (TRAV26-1, TRAJ37)
CIVRVITVSSNTGKLIF

SEQ ID NO: 272802 - protein, 15 aa, Homo sapiens
  CDR3 for beta chain variable domain of TCR clone 136401 (TRBV9, TRBJ1-6)
CASRVAGTGDSPLHF

SEQ ID NO: 272803 - protein, 13 aa, Homo sapiens
  CDR3 for alpha chain variable domain of TCR clone 136402 (TRAV26-1, TRAJ24)
CIVGVDSWGKLQF

SEQ ID NO: 272804 - protein, 20 aa, Homo sapiens
  CDR3 for beta chain variable domain of TCR clone 136402 (TRBV7-8, TRBJ2-2)
CASSHLFPGPTIHITGELFF

SEQ ID NO: 272805 - protein, 11 aa, Homo sapiens
  CDR3 for alpha chain variable domain of TCR clone 136403 (TRAV1-1, TRAJ23)
FAVRQGGTLIF

SEQ ID NO: 272806 - protein, 20 aa, Homo sapiens
  CDR3 for beta chain variable domain of TCR clone 136403 (TRBV7-8, TRBJ2-2)
CASSHLFPGPTIHITGELFF

SEQ ID NO: 272807 - protein, 21 aa, Homo sapiens
  CDR3 for alpha chain variable domain of TCR clone 136404 (TRAV1-1, TRAJ28)
CLLLLRCGPAYSGAGSYQLTF

SEQ ID NO: 272808 - protein, 14 aa, Homo sapiens
  CDR3 for beta chain variable domain of TCR clone 136404 (TRBV19, TRBJ2-1)
CASPTFVLSGEQFF

SEQ ID NO: 272809 - protein, 14 aa, Homo sapiens
  CDR3 for alpha chain variable domain of TCR clone 136405 (TRAV12-3, TRAJ10)
SHLPLTVGGNKLTF

SEQ ID NO: 272810 - protein, 15 aa, Homo sapiens
  CDR3 for beta chain variable domain of TCR clone 136405 (TRBV6-3, TRBJ2-7)
CASSSPGTVFYEQYF

SEQ ID NO: 272811 - protein, 15 aa, Homo sapiens
  CDR3 for alpha chain variable domain of TCR clone 136406 (TRAV2, TRAJ22)
CAVPSRGGSARQLIF

SEQ ID NO: 272812 - protein, 13 aa, Homo sapiens
  CDR3 for beta chain variable domain of TCR clone 136406 (TRBV7-3, TRBJ1-1)
CASSQDWGAEAFF

SEQ ID NO: 272813 - protein, 10 aa, Homo sapiens
  CDR3 for alpha chain variable domain of TCR clone 136407 (TRAV1-2, TRAJ20)
CAINDYKFSF

SEQ ID NO: 272814 - protein, 16 aa, Homo sapiens
  CDR3 for beta chain variable domain of TCR clone 136407 (TRBV20-1, TRBJ1-1)
CSARALTQGMNTEAFF

SEQ ID NO: 272815 - protein, 18 aa, Homo sapiens
  CDR3 for alpha chain variable domain of TCR clone 136408 (TRAV26-2, TRAJ45)
CILRVDKYSGGGADGLTF

SEQ ID NO: 272816 - protein, 16 aa, Homo sapiens
  CDR3 for beta chain variable domain of TCR clone 136408 (TRBV5-1, TRBJ2-3)
CASSLALAVVSDTQYF

SEQ ID NO: 272817 - protein, 14 aa, Homo sapiens
  CDR3 for alpha chain variable domain of TCR clone 136409 (TRAV8-3, TRAJ10)
CAVGNAGGGNKLTF

SEQ ID NO: 272818 - protein, 12 aa, Homo sapiens
  CDR3 for beta chain variable domain of TCR clone 136409 (TRBV11-2, TRBJ2-2)
CASSLGGGELFF

SEQ ID NO: 272819 - protein, 17 aa, Homo sapiens
  CDR3 for alpha chain variable domain of TCR clone 136410 (TRAV17, TRAJ28)
CATDPRRGGVGSYQLTF

SEQ ID NO: 272820 - protein, 16 aa, Homo sapiens
  CDR3 for beta chain variable domain of TCR clone 136410 (TRBV25-1, TRBJ1-1)
CASSGDRDRGRIEAFF

SEQ ID NO: 272821 - protein, 15 aa, Homo sapiens
  CDR3 for alpha chain variable domain of TCR clone 136411 (TRAV23/DV6, TRAJ17)
CAASGYGAAGNKLTF

SEQ ID NO: 272822 - protein, 16 aa, Homo sapiens
  CDR3 for beta chain variable domain of TCR clone 136411 (TRBV4-1, TRBJ2-5)
CASSSGLAGVLGTQYF

SEQ ID NO: 272823 - protein, 13 aa, Homo sapiens
  CDR3 for alpha chain variable domain of TCR clone 136412 (TRAV17, TRAJ21)
CDTDGGNFNKFYF

SEQ ID NO: 272824 - protein, 16 aa, Homo sapiens
  CDR3 for beta chain variable domain of TCR clone 136412 (TRBV2, TRBJ1-3)
CASSRTGGSTGNTIYF

SEQ ID NO: 272825 - protein, 13 aa, Homo sapiens
  CDR3 for alpha chain variable domain of TCR clone 136413 (TRAV12-3, TRAJ40)
CAMSDSGTYKYIF

SEQ ID NO: 272826 - protein, 22 aa, Homo sapiens
  CDR3 for beta chain variable domain of TCR clone 136413 (TRBV14, TRBJ1-5)
CASSQYGVTPYLPPIGNQPQHF

SEQ ID NO: 272827 - protein, 10 aa, Homo sapiens
  CDR3 for alpha chain variable domain of TCR clone 136414 (TRAV20, TRAJ22)
CAAPARQLTF

SEQ ID NO: 272828 - protein, 14 aa, Homo sapiens
  CDR3 for beta chain variable domain of TCR clone 136414 (TRBV19, TRBJ2-1)
CASSMGSGRRSSSS

SEQ ID NO: 272829 - protein, 12 aa, Homo sapiens
  CDR3 for alpha chain variable domain of TCR clone 136415 (TRAV29/DV5, TRAJ26)
CAAIPSGQNFVF

SEQ ID NO: 272830 - protein, 15 aa, Homo sapiens
  CDR3 for beta chain variable domain of TCR clone 136415 (TRBV19, TRBJ1-5)
CASSDSGPRNQAQHF

SEQ ID NO: 272831 - protein, 15 aa, Homo sapiens
  CDR3 for alpha chain variable domain of TCR clone 136416 (TRAV13-1, TRAJ16)
CAARYQLARSCSLQG

SEQ ID NO: 272832 - protein, 13 aa, Homo sapiens
  CDR3 for beta chain variable domain of TCR clone 136416 (TRBV4-1, TRBJ2-1)
CASSQAGGDEQFF

SEQ ID NO: 272833 - protein, 17 aa, Homo sapiens
  CDR3 for alpha chain variable domain of TCR clone 136417 (TRAV3, TRAJ42)
CAVRDRDYGGSQGNLIF

SEQ ID NO: 272834 - protein, 12 aa, Homo sapiens
  CDR3 for beta chain variable domain of TCR clone 136417 (TRBV24-1, TRBJ1-1)
CATLYPDTEAFF

SEQ ID NO: 272835 - protein, 15 aa, Homo sapiens
  CDR3 for alpha chain variable domain of TCR clone 136418 (TRAV3, TRAJ40)
CAVRDVTSGTYKYLF

SEQ ID NO: 272836 - protein, 13 aa, Homo sapiens
  CDR3 for beta chain variable domain of TCR clone 136418 (TRBV7-9, TRBJ1-2)
CASSLKQNYGYTF

SEQ ID NO: 272837 - protein, 17 aa, Homo sapiens
  CDR3 for alpha chain variable domain of TCR clone 136419 (TRAV3, TRAJ42)
CAVRDRDYGGSQGNIIF

SEQ ID NO: 272838 - protein, 15 aa, Homo sapiens
  CDR3 for beta chain variable domain of TCR clone 136419 (TRBV27, TRBJ1-6)
CDSSFDRGLGSPLHF

SEQ ID NO: 272839 - protein, 15 aa, Homo sapiens
  CDR3 for alpha chain variable domain of TCR clone 136420 (TRAV14/DV4, TRAJ9)
CAMREGNTGGFKTII

SEQ ID NO: 272840 - protein, 16 aa, Homo sapiens
  CDR3 for beta chain variable domain of TCR clone 136420 (TRBV13, TRBJ2-5)
CASSRGAGIRQETQYF

SEQ ID NO: 272841 - protein, 14 aa, Homo sapiens
  CDR3 for alpha chain variable domain of TCR clone 136421 (TRAV2, TRAJ37)
CAVDFTSNTGKLIF

SEQ ID NO: 272842 - protein, 15 aa, Homo sapiens
  CDR3 for beta chain variable domain of TCR clone 136421 (TRBV2, TRBJ2-7)
CASSGDGRGRYEQYF

SEQ ID NO: 272843 - protein, 12 aa, Homo sapiens
  CDR3 for alpha chain variable domain of TCR clone 136422 (TRAV2, TRAJ10)
CASTGGGNKLTF

SEQ ID NO: 272844 - protein, 16 aa, Homo sapiens
  CDR3 for beta chain variable domain of TCR clone 136422 (TRBV27, TRBJ2-7)
CASSSERRDSAYEQYF

SEQ ID NO: 272845 - protein, 13 aa, Homo sapiens
  CDR3 for alpha chain variable domain of TCR clone 136423 (TRAV27, TRAJ16)
CAGGTRGSDIPTF

SEQ ID NO: 272846 - protein, 12 aa, Homo sapiens
  CDR3 for beta chain variable domain of TCR clone 136423 (TRBV11-2, TRBJ2-2)
CASSLGGGELFF

SEQ ID NO: 272847 - protein, 16 aa, Homo sapiens
  CDR3 for alpha chain variable domain of TCR clone 136424 (TRAV12-2, TRAJ40)
CAVIRGGTSGTYKYIF

SEQ ID NO: 272848 - protein, 16 aa, Homo sapiens
  CDR3 for beta chain variable domain of TCR clone 136424 (TRBV4-1, TRBJ1-5)
CASSQGGHTTNQPQHF

SEQ ID NO: 272849 - protein, 13 aa, Homo sapiens
  CDR3 for alpha chain variable domain of TCR clone 136425 (TRAV21, TRAJ27)
CAARPGNAGKSTF

SEQ ID NO: 272850 - protein, 14 aa, Homo sapiens
  CDR3 for beta chain variable domain of TCR clone 136425 (TRBV11-2, TRBJ2-7)
CASSLGEGAYEQYF

SEQ ID NO: 272851 - protein, 11 aa, Homo sapiens
  CDR3 for alpha chain variable domain of TCR clone 136426 (TRAV27, TRAJ43)
CSGANNNDMRF

SEQ ID NO: 272852 - protein, 15 aa, Homo sapiens
  CDR3 for beta chain variable domain of TCR clone 136426 (TRBV20-1, TRBJ2-7)
CSARDRVSGMDEQYF

SEQ ID NO: 272853 - protein, 16 aa, Homo sapiens
  CDR3 for alpha chain variable domain of TCR clone 136427 (TRAV3, TRAJ37)
CAVRVRGSGNPGKLIV

SEQ ID NO: 272854 - protein, 11 aa, Homo sapiens
  CDR3 for beta chain variable domain of TCR clone 136427 (TRBV11-2, TRBJ2-2)
CASSLPGELFF

SEQ ID NO: 272855 - protein, 13 aa, Homo sapiens
  CDR3 for alpha chain variable domain of TCR clone 136428 (TRAV12-2, TRAJ13)
CAVTAGGYQKVTF

SEQ ID NO: 272856 - protein, 14 aa, Homo sapiens
  CDR3 for beta chain variable domain of TCR clone 136428 (TRBV7-2, TRBJ2-7)
CASRSQGAAYEQYF

SEQ ID NO: 272857 - protein, 14 aa, Homo sapiens
  CDR3 for alpha chain variable domain of TCR clone 136429 (TRAV29/DV5, TRAJ36)
CAARRKTGANNLSL

SEQ ID NO: 272858 - protein, 14 aa, Homo sapiens
  CDR3 for beta chain variable domain of TCR clone 136429 (TRBV12-5, TRBJ2-5)
CASGSRTHQETQYF

SEQ ID NO: 272859 - protein, 13 aa, Homo sapiens
  CDR3 for alpha chain variable domain of TCR clone 136430 (TRAV6, TRAJ45)
SPFPGGGADGLTF

SEQ ID NO: 272860 - protein, 16 aa, Homo sapiens
  CDR3 for beta chain variable domain of TCR clone 136430 (TRBV7-3, TRBJ2-1)
CASSLEGYRSYNEQFV

SEQ ID NO: 272861 - protein, 15 aa, Homo sapiens
  CDR3 for alpha chain variable domain of TCR clone 136431 (TRAV4, TRAJ17)
CLVGDIGAAGNKLTF

SEQ ID NO: 272862 - protein, 13 aa, Homo sapiens
  CDR3 for beta chain variable domain of TCR clone 136431 (TRBV7-9, TRBJ1-2)
CASSLKQNYGYTF

SEQ ID NO: 272863 - protein, 13 aa, Homo sapiens
  CDR3 for alpha chain variable domain of TCR clone 136432 (TRAV12-1, TRAJ26)
CVVRRNYGQNFVF

SEQ ID NO: 272864 - protein, 14 aa, Homo sapiens
  CDR3 for beta chain variable domain of TCR clone 136432 (TRBV7-3, TRBJ2-1)
CASSLSGSYNEQFF

SEQ ID NO: 272865 - protein, 11 aa, Homo sapiens
  CDR3 for alpha chain variable domain of TCR clone 136433 (TRAV12-2, TRAJ23)
CARGRGGKLIF

SEQ ID NO: 272866 - protein, 15 aa, Homo sapiens
  CDR3 for beta chain variable domain of TCR clone 136433 (TRBV28, TRBJ2-1)
CASSIIAGGRSEQFF

SEQ ID NO: 272867 - protein, 14 aa, Homo sapiens
  CDR3 for alpha chain variable domain of TCR clone 136434 (TRAV1-2, TRAJ8)
CAVREDTGFRKLVF

SEQ ID NO: 272868 - protein, 18 aa, Homo sapiens
  CDR3 for beta chain variable domain of TCR clone 136434 (TRBV14, TRBJ1-1)
ISVPAAKIRGIENTEAFF

SEQ ID NO: 272869 - protein, 23 aa, Homo sapiens
  CDR3 for alpha chain variable domain of TCR clone 136435 (TRAV8-4, TRAJ32)
CAAYMVVLQTSSSLELALCLLSS

SEQ ID NO: 272870 - protein, 16 aa, Homo sapiens
  CDR3 for beta chain variable domain of TCR clone 136435 (TRBV27, TRBJ2-2)
CASSTLAAANTGELFF

SEQ ID NO: 272871 - protein, 14 aa, Homo sapiens
  CDR3 for alpha chain variable domain of TCR clone 136436 (TRAV1-2, TRAJ8)
CAVKEDTGFQKLVF

SEQ ID NO: 272872 - protein, 13 aa, Homo sapiens
  CDR3 for beta chain variable domain of TCR clone 136436 (TRBV12-5, TRBJ2-3)
CASGDRQSDTQYF

SEQ ID NO: 272873 - protein, 12 aa, Homo sapiens
  CDR3 for alpha chain variable domain of TCR clone 136437 (TRAV8-3, TRAJ6)
CAVAGGSYIPTF

SEQ ID NO: 272874 - protein, 14 aa, Homo sapiens
  CDR3 for beta chain variable domain of TCR clone 136437 (TRBV27, TRBJ2-7)
CASATGTERPEQYF

SEQ ID NO: 272875 - protein, 11 aa, Homo sapiens
  CDR3 for alpha chain variable domain of TCR clone 136438 (TRAV17, TRAJ31)
CATDRTARLMF

SEQ ID NO: 272876 - protein, 14 aa, Homo sapiens
  CDR3 for beta chain variable domain of TCR clone 136438 (TRBV4-1, TRBJ2-2)
CASSQAVNTGELFF

SEQ ID NO: 272877 - protein, 13 aa, Homo sapiens
  CDR3 for alpha chain variable domain of TCR clone 136439 (TRAV27, TRAJ6)
CAGGTRGSYIPTF

SEQ ID NO: 272878 - protein, 13 aa, Homo sapiens
  CDR3 for beta chain variable domain of TCR clone 136439 (TRBV4-1, TRBJ2-2)
CASSQANTGELFF

SEQ ID NO: 272879 - protein, 13 aa, Homo sapiens
  CDR3 for alpha chain variable domain of TCR clone 136440 (TRAV13-1, TRAJ6)
CAASKGGSYIPPF

SEQ ID NO: 272880 - protein, 13 aa, Homo sapiens
  CDR3 for beta chain variable domain of TCR clone 136440 (TRBV7-9, TRBJ2-5)
CASLPSGRETQYF

SEQ ID NO: 272881 - protein, 14 aa, Homo sapiens
  CDR3 for alpha chain variable domain of TCR clone 136441 (TRAV17, TRAJ45)
CATASGGGADGVTF

SEQ ID NO: 272882 - protein, 13 aa, Homo sapiens
  CDR3 for beta chain variable domain of TCR clone 136441 (TRBV15, TRBJ2-7)
CATSTTGHYEQYF

SEQ ID NO: 272883 - protein, 12 aa, Homo sapiens
  CDR3 for alpha chain variable domain of TCR clone 136442 (TRAV12-3, TRAJ3)
CAIDSRASKIIF

SEQ ID NO: 272884 - protein, 17 aa, Homo sapiens
  CDR3 for beta chain variable domain of TCR clone 136442 (TRBV7-9, TRBJ2-3)
CASSLEEAGAYPGTQYF

SEQ ID NO: 272885 - protein, 13 aa, Homo sapiens
  CDR3 for alpha chain variable domain of TCR clone 136443 (TRAV23/DV6, TRAJ47)
CAASIRNGIWKQT

SEQ ID NO: 272886 - protein, 11 aa, Homo sapiens
  CDR3 for beta chain variable domain of TCR clone 136443 (TRBV29-1, TRBJ2-5)
CSEDRTGTQYF

SEQ ID NO: 272887 - protein, 15 aa, Homo sapiens
  CDR3 for alpha chain variable domain of TCR clone 136444 (TRAV38-1, TRAJ57)
CAFMDSQGGSEKLVF

SEQ ID NO: 272888 - protein, 14 aa, Homo sapiens
  CDR3 for beta chain variable domain of TCR clone 136444 (TRBV4-2, TRBJ2-1)
CASGLDRAYNEQFF

SEQ ID NO: 272889 - protein, 16 aa, Homo sapiens
  CDR3 for alpha chain variable domain of TCR clone 136445 (TRAV3, TRAJ37)
CAVRGKGSGNTGKLIF

SEQ ID NO: 272890 - protein, 13 aa, Homo sapiens
  CDR3 for beta chain variable domain of TCR clone 136445 (TRBV14, TRBJ2-7)
CASSQHRRYEQYF

SEQ ID NO: 272891 - protein, 18 aa, Homo sapiens
  CDR3 for alpha chain variable domain of TCR clone 136446 (TRAV29/DV5, TRAJ52)
CAAGFRGAGGTSYGKLTF

SEQ ID NO: 272892 - protein, 16 aa, Homo sapiens
  CDR3 for beta chain variable domain of TCR clone 136446 (TRBV7-9, TRBJ2-1)
CASSDVAGGSYNEQFF

SEQ ID NO: 272893 - protein, 12 aa, Homo sapiens
  CDR3 for alpha chain variable domain of TCR clone 136447 (TRAV26-1, TRAJ21)
CIVDYNFNKFYF

SEQ ID NO: 272894 - protein, 17 aa, Homo sapiens
  CDR3 for beta chain variable domain of TCR clone 136447 (TRBV20-1, TRBJ2-2)
CSASGSGQGGLTGELFF

SEQ ID NO: 272895 - protein, 18 aa, Homo sapiens
  CDR3 for alpha chain variable domain of TCR clone 136448 (TRAV21, TRAJ52)
CAVRPSPAGGTSYGKLTF

SEQ ID NO: 272896 - protein, 16 aa, Homo sapiens
  CDR3 for beta chain variable domain of TCR clone 136448 (TRBV20-1, TRBJ2-3)
CSARLHSAGAIDTQYF

SEQ ID NO: 272897 - protein, 13 aa, Homo sapiens
  CDR3 for alpha chain variable domain of TCR clone 136449 (TRAV2, TRAJ15)
CAVASQAGTALIF

SEQ ID NO: 272898 - protein, 16 aa, Homo sapiens
  CDR3 for beta chain variable domain of TCR clone 136449 (TRBV5-1, TRBJ1-1)
FASSSGGNSLNTEAFF

SEQ ID NO: 272899 - protein, 14 aa, Homo sapiens
  CDR3 for alpha chain variable domain of TCR clone 136450 (TRAV1-2, TRAJ16)
CAVNRFSDGLKLLF

SEQ ID NO: 272900 - protein, 16 aa, Homo sapiens
  CDR3 for beta chain variable domain of TCR clone 136450 (TRBV11-2, TRBJ1-2)
CASSLDTGGADYGYTF

SEQ ID NO: 272901 - protein, 14 aa, Homo sapiens
  CDR3 for alpha chain variable domain of TCR clone 136451 (TRAV27, TRAJ37)
CAGERPSNTGKLIF

SEQ ID NO: 272902 - protein, 15 aa, Homo sapiens
  CDR3 for beta chain variable domain of TCR clone 136451 (TRBV11-3, TRBJ1-6)
CASSLDWGANSPLHS

SEQ ID NO: 272903 - protein, 11 aa, Homo sapiens
  CDR3 for alpha chain variable domain of TCR clone 136452 (TRAV2, TRAJ33)
CAVESNYQLIS

SEQ ID NO: 272904 - protein, 15 aa, Homo sapiens
  CDR3 for beta chain variable domain of TCR clone 136452 (TRBV19, TRBJ1-1)
CASTSGQIQNTEAFF

SEQ ID NO: 272905 - protein, 19 aa, Homo sapiens
  CDR3 for alpha chain variable domain of TCR clone 136453 (TRAV1-2, TRAJ26)
CLLPLCCERPDNYGQNFVF

SEQ ID NO: 272906 - protein, 13 aa, Homo sapiens
  CDR3 for beta chain variable domain of TCR clone 136453 (TRBV5-7, TRBJ2-3)
CASSLGRTDTQYF

SEQ ID NO: 272907 - protein, 13 aa, Homo sapiens
  CDR3 for alpha chain variable domain of TCR clone 136454 (TRAV17, TRAJ26)
CAKVDNYGQNFVF

SEQ ID NO: 272908 - protein, 16 aa, Homo sapiens
  CDR3 for beta chain variable domain of TCR clone 136454 (TRBV2, TRBJ2-1)
CASSVGGSLSYNEQFF

SEQ ID NO: 272909 - protein, 13 aa, Homo sapiens
  CDR3 for alpha chain variable domain of TCR clone 136455 (TRAV12-2, TRAJ50)
CAVIVTSYDKVIF

SEQ ID NO: 272910 - protein, 13 aa, Homo sapiens
  CDR3 for beta chain variable domain of TCR clone 136455 (TRBV10-1, TRBJ2-1)
CASSAGPDNEQFF

SEQ ID NO: 272911 - protein, 16 aa, Homo sapiens
  CDR3 for alpha chain variable domain of TCR clone 136456 (TRAV12-3, TRAJ53)
CAMSVGSEGSNYKLTF

SEQ ID NO: 272912 - protein, 11 aa, Homo sapiens
  CDR3 for beta chain variable domain of TCR clone 136456 (TRBV29-1, TRBJ2-5)
CSVAGGETQYF

SEQ ID NO: 272913 - protein, 13 aa, Homo sapiens
  CDR3 for alpha chain variable domain of TCR clone 136457 (TRAV8-3, TRAJ44)
CAVVPGTASKLTF

SEQ ID NO: 272914 - protein, 13 aa, Homo sapiens
  CDR3 for beta chain variable domain of TCR clone 136457 (TRBV10-2, TRBJ2-7)
CASGASGGYEQYF

SEQ ID NO: 272915 - protein, 14 aa, Homo sapiens
  CDR3 for alpha chain variable domain of TCR clone 136458 (TRAV1-2, TRAJ33)
CAVRAPDSNSQLIW

SEQ ID NO: 272916 - protein, 15 aa, Homo sapiens
  CDR3 for beta chain variable domain of TCR clone 136458 (TRBV10-3, TRBJ2-3)
CAISLTSGGTDTQYF

SEQ ID NO: 272917 - protein, 13 aa, Homo sapiens
  CDR3 for alpha chain variable domain of TCR clone 136459 (TRAV2, TRAJ26)
CAVVGNYGQNFVF

SEQ ID NO: 272918 - protein, 15 aa, Homo sapiens
  CDR3 for beta chain variable domain of TCR clone 136459 (TRBV27, TRBJ2-1)
CASSNGGGSSNAQFF

SEQ ID NO: 272919 - protein, 13 aa, Homo sapiens
  CDR3 for alpha chain variable domain of TCR clone 136460 (TRAV1-1, TRAJ31)
CASYLNNNARLMF

SEQ ID NO: 272920 - protein, 16 aa, Homo sapiens
  CDR3 for beta chain variable domain of TCR clone 136460 (TRBV24-1, TRBJ2-3)
CAASDPGTGATDTQYF

SEQ ID NO: 272921 - protein, 15 aa, Homo sapiens
  CDR3 for alpha chain variable domain of TCR clone 136461 (TRAV8-2, TRAJ13)
CVVSDLSGGYQKVTF

SEQ ID NO: 272922 - protein, 15 aa, Homo sapiens
  CDR3 for beta chain variable domain of TCR clone 136461 (TRBV28, TRBJ2-1)
CASSIIAGGRSEQFF

SEQ ID NO: 272923 - protein, 14 aa, Homo sapiens
  CDR3 for alpha chain variable domain of TCR clone 136462 (TRAV8-6, TRAJ9)
CAVSSYTGGFKTIF

SEQ ID NO: 272924 - protein, 14 aa, Homo sapiens
  CDR3 for beta chain variable domain of TCR clone 136462 (TRBV11-2, TRBJ2-3)
CASSLGGGANTQYF

SEQ ID NO: 272925 - protein, 12 aa, Homo sapiens
  CDR3 for alpha chain variable domain of TCR clone 136463 (TRAV3, TRAJ43)
CAVRDPNNDMRF

SEQ ID NO: 272926 - protein, 16 aa, Homo sapiens
  CDR3 for beta chain variable domain of TCR clone 136463 (TRBV11-3, TRBJ2-5)
CASSSVVAGSTETQYF

SEQ ID NO: 272927 - protein, 12 aa, Homo sapiens
  CDR3 for alpha chain variable domain of TCR clone 136464 (TRAV38-1, TRAJ20)
CAFIWNDYKLSF

SEQ ID NO: 272928 - protein, 16 aa, Homo sapiens
  CDR3 for beta chain variable domain of TCR clone 136464 (TRBV4-1, TRBJ2-7)
CASSQEWTSGPLEQYF

SEQ ID NO: 272929 - protein, 15 aa, Homo sapiens
  CDR3 for alpha chain variable domain of TCR clone 136465 (TRAV8-3, TRAJ45)
CASSYSGGGADGLTF

SEQ ID NO: 272930 - protein, 14 aa, Homo sapiens
  CDR3 for beta chain variable domain of TCR clone 136465 (TRBV5-1, TRBJ1-2)
CASSLGERNYGYTF

SEQ ID NO: 272931 - protein, 13 aa, Homo sapiens
  CDR3 for alpha chain variable domain of TCR clone 136466 (TRAV1-2, TRAJ9)
CAALNTGGFKTIF

SEQ ID NO: 272932 - protein, 13 aa, Homo sapiens
  CDR3 for beta chain variable domain of TCR clone 136466 (TRBV19, TRBJ1-2)
CASSLPGQDGYTF

SEQ ID NO: 272933 - protein, 13 aa, Homo sapiens
  CDR3 for alpha chain variable domain of TCR clone 136467 (TRAV12-2, TRAJ6)
CAVNVSRKLHTYN

SEQ ID NO: 272934 - protein, 12 aa, Homo sapiens
  CDR3 for beta chain variable domain of TCR clone 136467 (TRBV29-1, TRBJ2-3)
CSVTGGADTQYF

SEQ ID NO: 272935 - protein, 16 aa, Homo sapiens
  CDR3 for alpha chain variable domain of TCR clone 136468 (TRAV8-4, TRAJ56)
CAVSDLRGGANSKLTF

SEQ ID NO: 272936 - protein, 14 aa, Homo sapiens
  CDR3 for beta chain variable domain of TCR clone 136468 (TRBV7-8, TRBJ2-3)
CASSFKSSTETQYF

SEQ ID NO: 272937 - protein, 13 aa, Homo sapiens
  CDR3 for alpha chain variable domain of TCR clone 136469 (TRAV20, TRAJ37)
CAGCSSNTGKLIF

SEQ ID NO: 272938 - protein, 11 aa, Homo sapiens
  CDR3 for beta chain variable domain of TCR clone 136469 (TRBV2, TRBJ2-3)
CASTATDTQYF

SEQ ID NO: 272939 - protein, 13 aa, Homo sapiens
  CDR3 for alpha chain variable domain of TCR clone 136470 (TRAV21, TRAJ57)
CAVTQGGSEKLVF

SEQ ID NO: 272940 - protein, 16 aa, Homo sapiens
  CDR3 for beta chain variable domain of TCR clone 136470 (TRBV5-4, TRBJ2-3)
CASSFGAGEGTDTQYF

SEQ ID NO: 272941 - protein, 11 aa, Homo sapiens
  CDR3 for alpha chain variable domain of TCR clone 136471 (TRAV16, TRAJ49)
CSVNTGNQFYF

SEQ ID NO: 272942 - protein, 12 aa, Homo sapiens
  CDR3 for beta chain variable domain of TCR clone 136471 (TRBV7-9, TRBJ1-4)
CASSTDREKLFF

SEQ ID NO: 272943 - protein, 12 aa, Homo sapiens
  CDR3 for alpha chain variable domain of TCR clone 136472 (TRAV25, TRAJ35)
CAGIGFGNVLHC

SEQ ID NO: 272944 - protein, 12 aa, Homo sapiens
  CDR3 for beta chain variable domain of TCR clone 136472 (TRBV6-3, TRBJ2-7)
CASSRQGYKQYF

SEQ ID NO: 272945 - protein, 23 aa, Homo sapiens
  CDR3 for alpha chain variable domain of TCR clone 136473 (TRAV20, TRAJ32)
CAEDGMVVLQTSSSLELALCLLS

SEQ ID NO: 272946 - protein, 16 aa, Homo sapiens
  CDR3 for beta chain variable domain of TCR clone 136473 (TRBV19, TRBJ2-2)
CASRSPGTGATGELFF

SEQ ID NO: 272947 - protein, 16 aa, Homo sapiens
  CDR3 for alpha chain variable domain of TCR clone 136474 (TRAV26-1, TRAJ37)
CIVRGDGSGNTGKLIF

SEQ ID NO: 272948 - protein, 12 aa, Homo sapiens
  CDR3 for beta chain variable domain of TCR clone 136474 (TRBV7-3, TRBJ2-1)
CASSFINNEQFF

SEQ ID NO: 272949 - protein, 15 aa, Homo sapiens
  CDR3 for alpha chain variable domain of TCR clone 136475 (TRAV3, TRAJ29)
CAVREINSGNTPLVF

SEQ ID NO: 272950 - protein, 16 aa, Homo sapiens
  CDR3 for beta chain variable domain of TCR clone 136475 (TRBV4-1, TRBJ2-5)
CASSQTFYGDQETQYF

SEQ ID NO: 272951 - protein, 17 aa, Homo sapiens
  CDR3 for alpha chain variable domain of TCR clone 136476 (TRAV12-2, TRAJ6)
CAPQGPPRAGGSYIPTF

SEQ ID NO: 272952 - protein, 16 aa, Homo sapiens
  CDR3 for beta chain variable domain of TCR clone 136476 (TRBV19, TRBJ2-2)
CASSTDRASNTGELFF

SEQ ID NO: 272953 - protein, 14 aa, Homo sapiens
  CDR3 for alpha chain variable domain of TCR clone 136477 (TRAV21, TRAJ58)
CAVRRGMSGSRLTF

SEQ ID NO: 272954 - protein, 13 aa, Homo sapiens
  CDR3 for beta chain variable domain of TCR clone 136477 (TRBV7-2, TRBJ1-6)
CASSLKFDSPLHF

SEQ ID NO: 272955 - protein, 18 aa, Homo sapiens
  CDR3 for alpha chain variable domain of TCR clone 136478 (TRAV26-2, TRAJ32)
CILRAPLNYGGATSKPIF

SEQ ID NO: 272956 - protein, 13 aa, Homo sapiens
  CDR3 for beta chain variable domain of TCR clone 136478 (TRBV7-3, TRBJ2-1)
CASSLWPYNEQFF

SEQ ID NO: 272957 - protein, 14 aa, Homo sapiens
  CDR3 for alpha chain variable domain of TCR clone 136479 (TRAV12-3, TRAJ10)
SHLPLTRGGNKLTF

SEQ ID NO: 272958 - protein, 15 aa, Homo sapiens
  CDR3 for beta chain variable domain of TCR clone 136479 (TRBV6-3, TRBJ2-7)
CASSSPGTVFYEQYF

SEQ ID NO: 272959 - protein, 20 aa, Homo sapiens
  CDR3 for alpha chain variable domain of TCR clone 136480 (TRAV29/DV5, TRAJ45)
CSVLLCSKQTSGGGADGLTF

SEQ ID NO: 272960 - protein, 15 aa, Homo sapiens
  CDR3 for beta chain variable domain of TCR clone 136480 (TRBV20-1, TRBJ1-1)
CSASRGVTGNTEAFF

SEQ ID NO: 272961 - protein, 12 aa, Homo sapiens
  CDR3 for alpha chain variable domain of TCR clone 136481 (TRAV12-3, TRAJ17)
CAMTLTGNKLTF

SEQ ID NO: 272962 - protein, 15 aa, Homo sapiens
  CDR3 for beta chain variable domain of TCR clone 136481 (TRBV4-1, TRBJ1-4)
CASSDTVGTNEKLFF

SEQ ID NO: 272963 - protein, 14 aa, Homo sapiens
  CDR3 for alpha chain variable domain of TCR clone 136482 (TRAV9-2, TRAJ39)
CALYIYNAGNMLTF

SEQ ID NO: 272964 - protein, 16 aa, Homo sapiens
  CDR3 for beta chain variable domain of TCR clone 136482 (TRBV19, TRBJ2-2)
CASRPPGTGATGELFF

SEQ ID NO: 272965 - protein, 14 aa, Homo sapiens
  CDR3 for alpha chain variable domain of TCR clone 136483 (TRAV21, TRAJ52)
CGRAGGTSYGKLTF

SEQ ID NO: 272966 - protein, 14 aa, Homo sapiens
  CDR3 for beta chain variable domain of TCR clone 136483 (TRBV19, TRBJ1-2)
CASSVLGYNYGYIF

SEQ ID NO: 272967 - protein, 13 aa, Homo sapiens
  CDR3 for alpha chain variable domain of TCR clone 136484 (TRAV12-3, TRAJ54)
CALVPQGAQKLVF

SEQ ID NO: 272968 - protein, 15 aa, Homo sapiens
  CDR3 for beta chain variable domain of TCR clone 136484 (TRBV4-1, TRBJ2-2)
CASSQDSRGTGELFL

SEQ ID NO: 272969 - protein, 12 aa, Homo sapiens
  CDR3 for alpha chain variable domain of TCR clone 136485 (TRAV13-2, TRAJ23)
CAERHRGGKLIF

SEQ ID NO: 272970 - protein, 14 aa, Homo sapiens
  CDR3 for beta chain variable domain of TCR clone 136485 (TRBV20-1, TRBJ2-4)
CSASGRVGENMQYF

SEQ ID NO: 272971 - protein, 14 aa, Homo sapiens
  CDR3 for alpha chain variable domain of TCR clone 136486 (TRAV13-1, TRAJ44)
CAAKATGTASKLTF

SEQ ID NO: 272972 - protein, 17 aa, Homo sapiens
  CDR3 for beta chain variable domain of TCR clone 136486 (TRBV11-2, TRBJ2-1)
CASSLSPPGVEYNEQFF

SEQ ID NO: 272973 - protein, 14 aa, Homo sapiens
  CDR3 for alpha chain variable domain of TCR clone 136487 (TRAV13-1, TRAJ32)
CAARGSGATNKLIF

SEQ ID NO: 272974 - protein, 15 aa, Homo sapiens
  CDR3 for beta chain variable domain of TCR clone 136487 (TRBV5-5, TRBJ1-1)
CASSLVGKDNTEAFV

SEQ ID NO: 272975 - protein, 13 aa, Homo sapiens
  CDR3 for alpha chain variable domain of TCR clone 136488 (TRAV3, TRAJ27)
CAVRPLGAGKSTF

SEQ ID NO: 272976 - protein, 15 aa, Homo sapiens
  CDR3 for beta chain variable domain of TCR clone 136488 (TRBV20-1, TRBJ2-7)
CSAKDRVSGMDEQYF

SEQ ID NO: 272977 - protein, 14 aa, Homo sapiens
  CDR3 for alpha chain variable domain of TCR clone 136489 (TRAV8-3, TRAJ3)
CAVVPRSSASKIIF

SEQ ID NO: 272978 - protein, 14 aa, Homo sapiens
  CDR3 for beta chain variable domain of TCR clone 136489 (TRBV2, TRBJ1-5)
CASSENRGGQPQHF

SEQ ID NO: 272979 - protein, 12 aa, Homo sapiens
  CDR3 for alpha chain variable domain of TCR clone 136490 (TRAV27, TRAJ13)
CAGVRGYQKVTF

SEQ ID NO: 272980 - protein, 15 aa, Homo sapiens
  CDR3 for beta chain variable domain of TCR clone 136490 (TRBV2, TRBJ2-3)
CASSDFEKATDTQYF

SEQ ID NO: 272981 - protein, 18 aa, Homo sapiens
  CDR3 for alpha chain variable domain of TCR clone 136491 (TRAV12-3, TRAJ52)
CAMSRTNAGGTSYGKLSF

SEQ ID NO: 272982 - protein, 17 aa, Homo sapiens
  CDR3 for beta chain variable domain of TCR clone 136491 (TRBV7-3, TRBJ2-3)
CASSLMKRMRGADTQYF

SEQ ID NO: 272983 - protein, 15 aa, Homo sapiens
  CDR3 for alpha chain variable domain of TCR clone 136492 (TRAV36/DV7, TRAJ21)
CALKFSFGSGTKLNV

SEQ ID NO: 272984 - protein, 13 aa, Homo sapiens
  CDR3 for beta chain variable domain of TCR clone 136492 (TRBV11-3, TRBJ2-5)
CASSSGLQETQYF

SEQ ID NO: 272985 - protein, 10 aa, Homo sapiens
  CDR3 for alpha chain variable domain of TCR clone 136493 (TRAV23/DV6, TRAJ57)
CSASSTLSQG

SEQ ID NO: 272986 - protein, 16 aa, Homo sapiens
  CDR3 for beta chain variable domain of TCR clone 136493 (TRBV7-9, TRBJ1-2)
CASSLGFSSGEDGYTF

SEQ ID NO: 272987 - protein, 14 aa, Homo sapiens
  CDR3 for alpha chain variable domain of TCR clone 136494 (TRAV1-2, TRAJ8)
CAVREDTGFQKLVF

SEQ ID NO: 272988 - protein, 15 aa, Homo sapiens
  CDR3 for beta chain variable domain of TCR clone 136494 (TRBV6-5, TRBJ2-7)
CASSSPGTVFYEQYF

SEQ ID NO: 272989 - protein, 13 aa, Homo sapiens
  CDR3 for alpha chain variable domain of TCR clone 136495 (TRAV8-3, TRAJ43)
CAVGPDNNNDMRF

SEQ ID NO: 272990 - protein, 15 aa, Homo sapiens
  CDR3 for beta chain variable domain of TCR clone 136495 (TRBV11-3, TRBJ2-5)
CASSDTSGGIETQYF

SEQ ID NO: 272991 - protein, 17 aa, Homo sapiens
  CDR3 for alpha chain variable domain of TCR clone 136496 (TRAV13-1, TRAJ52)
CAASSGAGGTSYGQLTF

SEQ ID NO: 272992 - protein, 15 aa, Homo sapiens
  CDR3 for beta chain variable domain of TCR clone 136496 (TRBV2, TRBJ2-1)
CASSELAGSYNEQFF

SEQ ID NO: 272993 - protein, 12 aa, Homo sapiens
  CDR3 for alpha chain variable domain of TCR clone 136497 (TRAV13-1, TRAJ27)
CAAHTNAGKSTF

SEQ ID NO: 272994 - protein, 16 aa, Homo sapiens
  CDR3 for beta chain variable domain of TCR clone 136497 (TRBV12-4, TRBJ2-5)
CTSSFFVRGRQETQYF

SEQ ID NO: 272995 - protein, 11 aa, Homo sapiens
  CDR3 for alpha chain variable domain of TCR clone 136498 (TRAV13-1, TRAJ15)
CAATPGTALIF

SEQ ID NO: 272996 - protein, 15 aa, Homo sapiens
  CDR3 for beta chain variable domain of TCR clone 136498 (TRBV6-3, TRBJ2-7)
CARSSPGTVFYEQYF

SEQ ID NO: 272997 - protein, 16 aa, Homo sapiens
  CDR3 for alpha chain variable domain of TCR clone 136499 (TRAV30, TRAJ24)
CGTEIVDADSWGKFQF

SEQ ID NO: 272998 - protein, 15 aa, Homo sapiens
  CDR3 for beta chain variable domain of TCR clone 136499 (TRBV7-9, TRBJ2-7)
CASSFGTSGAYEQYF

SEQ ID NO: 272999 - protein, 17 aa, Homo sapiens
  CDR3 for alpha chain variable domain of TCR clone 136500 (TRAV8-6, TRAJ58)
CAVSSWVGETSGSRLTF

SEQ ID NO: 273000 - protein, 14 aa, Homo sapiens
  CDR3 for beta chain variable domain of TCR clone 136500 (TRBV4-2, TRBJ2-1)
SASGLNRAYNEQFF

SEQ ID NO: 273001 - protein, 13 aa, Homo sapiens
  CDR3 for alpha chain variable domain of TCR clone 136501 (TRAV13-1, TRAJ39)
CAASIWAGNLLTF

SEQ ID NO: 273002 - protein, 15 aa, Homo sapiens
  CDR3 for beta chain variable domain of TCR clone 136501 (TRBV7-9, TRBJ1-1)
CASSLLEQGGTEVFF

SEQ ID NO: 273003 - protein, 12 aa, Homo sapiens
  CDR3 for alpha chain variable domain of TCR clone 136502 (TRAV12-3, TRAJ17)
CPMTLTGNKLTF

SEQ ID NO: 273004 - protein, 16 aa, Homo sapiens
  CDR3 for beta chain variable domain of TCR clone 136502 (TRBV20-1, TRBJ1-4)
CSAPGQGLLTNEKLFF

SEQ ID NO: 273005 - protein, 13 aa, Homo sapiens
  CDR3 for alpha chain variable domain of TCR clone 136503 (TRAV38-1, TRAJ42)
CARWGGSQGNLIF

SEQ ID NO: 273006 - protein, 15 aa, Homo sapiens
  CDR3 for beta chain variable domain of TCR clone 136503 (TRBV7-2, TRBJ2-1)
CASSLASGRVNEQSF

SEQ ID NO: 273007 - protein, 18 aa, Homo sapiens
  CDR3 for alpha chain variable domain of TCR clone 136504 (TRAV13-1, TRAJ52)
CAAKNPNAGGTSYGKLTF

SEQ ID NO: 273008 - protein, 17 aa, Homo sapiens
  CDR3 for beta chain variable domain of TCR clone 136504 (TRBV4-1, TRBJ2-7)
CASSPFLTGGGVVEQYF

SEQ ID NO: 273009 - protein, 17 aa, Homo sapiens
  CDR3 for alpha chain variable domain of TCR clone 136505 (TRAV3, TRAJ12)
CAVRDGGRMDSSYKLIL

SEQ ID NO: 273010 - protein, 15 aa, Homo sapiens
  CDR3 for beta chain variable domain of TCR clone 136505 (TRBV20-1, TRBJ2-5)
CSAEGTGGLQETQYF

SEQ ID NO: 273011 - protein, 12 aa, Homo sapiens
  CDR3 for alpha chain variable domain of TCR clone 136506 (TRAV12-3, TRAJ42)
CAPGGSTGNLIF

SEQ ID NO: 273012 - protein, 13 aa, Homo sapiens
  CDR3 for beta chain variable domain of TCR clone 136506 (TRBV5-7, TRBJ2-6)
CASTSGGANVLTF

SEQ ID NO: 273013 - protein, 23 aa, Homo sapiens
  CDR3 for alpha chain variable domain of TCR clone 136507 (TRAV1-2, TRAJ26)
CAVRDLITMVRIFSLVPEPNCPF

SEQ ID NO: 273014 - protein, 11 aa, Homo sapiens
  CDR3 for beta chain variable domain of TCR clone 136507 (TRBV29-1, TRBJ2-5)
CSEDRTGTQYF

SEQ ID NO: 273015 - protein, 15 aa, Homo sapiens
  CDR3 for alpha chain variable domain of TCR clone 136508 (TRAV17, TRAJ56)
CATDANTGANSKLTF

SEQ ID NO: 273016 - protein, 14 aa, Homo sapiens
  CDR3 for beta chain variable domain of TCR clone 136508 (TRBV19, TRBJ1-5)
CANSLGTGGQPQHF

SEQ ID NO: 273017 - protein, 11 aa, Homo sapiens
  CDR3 for alpha chain variable domain of TCR clone 136509 (TRAV3, TRAJ21)
CVVCNFNKFYF

SEQ ID NO: 273018 - protein, 16 aa, Homo sapiens
  CDR3 for beta chain variable domain of TCR clone 136509 (TRBV19, TRBJ2-1)
CASSKAGPSSYNEQFF

SEQ ID NO: 273019 - protein, 14 aa, Homo sapiens
  CDR3 for alpha chain variable domain of TCR clone 136510 (TRAV12-2, TRAJ53)
CRERGGGSNYKLTF

SEQ ID NO: 273020 - protein, 14 aa, Homo sapiens
  CDR3 for beta chain variable domain of TCR clone 136510 (TRBV7-9, TRBJ2-2)
CASSGLADTGELFF

SEQ ID NO: 273021 - protein, 14 aa, Homo sapiens
  CDR3 for alpha chain variable domain of TCR clone 136511 (TRAV2, TRAJ20)
CAVDFRKHDYKLSF

SEQ ID NO: 273022 - protein, 15 aa, Homo sapiens
  CDR3 for beta chain variable domain of TCR clone 136511 (TRBV11-3, TRBJ2-7)
CASSLLSGSSYEQYF

SEQ ID NO: 273023 - protein, 13 aa, Homo sapiens
  CDR3 for alpha chain variable domain of TCR clone 136512 (TRAV17, TRAJ9)
RATDGTGGFKTIF

SEQ ID NO: 273024 - protein, 13 aa, Homo sapiens
  CDR3 for beta chain variable domain of TCR clone 136512 (TRBV11-2, TRBJ2-5)
CASSSTGEETQYF

SEQ ID NO: 273025 - protein, 16 aa, Homo sapiens
  CDR3 for alpha chain variable domain of TCR clone 136513 (TRAV30, TRAJ24)
CGTEIVDADSWGKFQF

SEQ ID NO: 273026 - protein, 13 aa, Homo sapiens
  CDR3 for beta chain variable domain of TCR clone 136513 (TRBV18, TRBJ1-2)
CASSASATEGHTF

SEQ ID NO: 273027 - protein, 12 aa, Homo sapiens
  CDR3 for alpha chain variable domain of TCR clone 136514 (TRAV21, TRAJ42)
CAVGGSQGNLIF

SEQ ID NO: 273028 - protein, 14 aa, Homo sapiens
  CDR3 for beta chain variable domain of TCR clone 136514 (TRBV12-4, TRBJ1-1)
FASSLGTGGTEAFF

SEQ ID NO: 273029 - protein, 14 aa, Homo sapiens
  CDR3 for alpha chain variable domain of TCR clone 136515 (TRAV17, TRAJ37)
CATDGSSNTGKLIF

SEQ ID NO: 273030 - protein, 17 aa, Homo sapiens
  CDR3 for beta chain variable domain of TCR clone 136515 (TRBV13, TRBJ2-3)
CASSLSRVAGGRNTQYF

SEQ ID NO: 273031 - protein, 15 aa, Homo sapiens
  CDR3 for alpha chain variable domain of TCR clone 136516 (TRAV3, TRAJ22)
CAVRDRGGSARQLTF

SEQ ID NO: 273032 - protein, 13 aa, Homo sapiens
  CDR3 for beta chain variable domain of TCR clone 136516 (TRBV7-9, TRBJ1-2)
CASSLKRNYGYTF

SEQ ID NO: 273033 - protein, 12 aa, Homo sapiens
  CDR3 for alpha chain variable domain of TCR clone 136517 (TRAV12-2, TRAJ34)
CAVNFFTDKLIF

SEQ ID NO: 273034 - protein, 14 aa, Homo sapiens
  CDR3 for beta chain variable domain of TCR clone 136517 (TRBV11-2, TRBJ2-3)
CASSLGGGANTQYF

SEQ ID NO: 273035 - protein, 14 aa, Homo sapiens
  CDR3 for alpha chain variable domain of TCR clone 136518 (TRAV8-1, TRAJ13)
CAVKRSGGYQKVTF

SEQ ID NO: 273036 - protein, 22 aa, Homo sapiens
  CDR3 for beta chain variable domain of TCR clone 136518 (TRBV11-2, TRBJ1-4)
YASSLDITRRGIPRKDNEKLFF

SEQ ID NO: 273037 - protein, 16 aa, Homo sapiens
  CDR3 for alpha chain variable domain of TCR clone 136519 (TRAV1-2, TRAJ10)
CAVRGVLTGGGNKLTF

SEQ ID NO: 273038 - protein, 14 aa, Homo sapiens
  CDR3 for beta chain variable domain of TCR clone 136519 (TRBV19, TRBJ2-1)
CASPSFVLSGEQFF

SEQ ID NO: 273039 - protein, 11 aa, Homo sapiens
  CDR3 for alpha chain variable domain of TCR clone 136520 (TRAV29/DV5, TRAJ31)
CAASYRDRLMF

SEQ ID NO: 273040 - protein, 19 aa, Homo sapiens
  CDR3 for beta chain variable domain of TCR clone 136520 (TRBV19, TRBJ2-5)
CASSIGHVTDFFLGETQYF

SEQ ID NO: 273041 - protein, 12 aa, Homo sapiens
  CDR3 for alpha chain variable domain of TCR clone 136521 (TRAV12-3, TRAJ40)
CAMSSGTYKYIF

SEQ ID NO: 273042 - protein, 15 aa, Homo sapiens
  CDR3 for beta chain variable domain of TCR clone 136521 (TRBV28, TRBJ1-2)
CASSSHSIANYGYTF

SEQ ID NO: 273043 - protein, 13 aa, Homo sapiens
  CDR3 for alpha chain variable domain of TCR clone 136522 (TRAV9-2, TRAJ49)
CALIQIGGNQFYF

SEQ ID NO: 273044 - protein, 16 aa, Homo sapiens
  CDR3 for beta chain variable domain of TCR clone 136522 (TRBV6-1, TRBJ2-5)
CASSETLDRGAETQYF

SEQ ID NO: 273045 - protein, 13 aa, Homo sapiens
  CDR3 for alpha chain variable domain of TCR clone 136523 (TRAV12-3, TRAJ9)
CAMRNTGGFKTIF

SEQ ID NO: 273046 - protein, 16 aa, Homo sapiens
  CDR3 for beta chain variable domain of TCR clone 136523 (TRBV13, TRBJ2-2)
CASSPRTGEHTRELFF

SEQ ID NO: 273047 - protein, 13 aa, Homo sapiens
  CDR3 for alpha chain variable domain of TCR clone 136524 (TRAV12-3, TRAJ13)
CAMGTGGYQKVTF

SEQ ID NO: 273048 - protein, 14 aa, Homo sapiens
  CDR3 for beta chain variable domain of TCR clone 136524 (TRBV7-2, TRBJ2-5)
CAGSTGGELKTQYF

SEQ ID NO: 273049 - protein, 16 aa, Homo sapiens
  CDR3 for alpha chain variable domain of TCR clone 136525 (TRAV3, TRAJ27)
CAVRDPQGANAGKSTF

SEQ ID NO: 273050 - protein, 17 aa, Homo sapiens
  CDR3 for beta chain variable domain of TCR clone 136525 (TRBV4-1, TRBJ2-7)
CASSQGRGLQTSYEQYR

SEQ ID NO: 273051 - protein, 14 aa, Homo sapiens
  CDR3 for alpha chain variable domain of TCR clone 136526 (TRAV12-2, TRAJ17)
CAVLFNAACNKLTF

SEQ ID NO: 273052 - protein, 17 aa, Homo sapiens
  CDR3 for beta chain variable domain of TCR clone 136526 (TRBV20-1, TRBJ2-2)
CSASGSGQGGLTGELFF

SEQ ID NO: 273053 - protein, 12 aa, Homo sapiens
  CDR3 for alpha chain variable domain of TCR clone 136527 (TRAV13-2, TRAJ24)
CAATDSWGKLQF

SEQ ID NO: 273054 - protein, 17 aa, Homo sapiens
  CDR3 for beta chain variable domain of TCR clone 136527 (TRBV12-4, TRBJ2-5)
CASSLSSTTGGRETQYF

SEQ ID NO: 273055 - protein, 14 aa, Homo sapiens
  CDR3 for alpha chain variable domain of TCR clone 136528 (TRAV3, TRAJ40)
CAVRDMTGTYKYIF

SEQ ID NO: 273056 - protein, 16 aa, Homo sapiens
  CDR3 for beta chain variable domain of TCR clone 136528 (TRBV18, TRBJ2-7)
SASSPGRAGGAYEQYF

SEQ ID NO: 273057 - protein, 15 aa, Homo sapiens
  CDR3 for alpha chain variable domain of TCR clone 136529 (TRAV2, TRAJ9)
CAVEDRGTGGFKTIF

SEQ ID NO: 273058 - protein, 17 aa, Homo sapiens
  CDR3 for beta chain variable domain of TCR clone 136529 (TRBV28, TRBJ2-3)
CASSPTPAGGRVDTQYF

SEQ ID NO: 273059 - protein, 14 aa, Homo sapiens
  CDR3 for alpha chain variable domain of TCR clone 136530 (TRAV14/DV4, TRAJ15)
CAMRRDQAGTAPIF

SEQ ID NO: 273060 - protein, 16 aa, Homo sapiens
  CDR3 for beta chain variable domain of TCR clone 136530 (TRBV15, TRBJ2-3)
CATSRDLGIVTDTQYF

SEQ ID NO: 273061 - protein, 16 aa, Homo sapiens
  CDR3 for alpha chain variable domain of TCR clone 136531 (TRAV12-3, TRAJ53)
CAMGPGSGASNYKLTF

SEQ ID NO: 273062 - protein, 11 aa, Homo sapiens
  CDR3 for beta chain variable domain of TCR clone 136531 (TRBV29-1, TRBJ2-5)
CSEDRTGTQYF

SEQ ID NO: 273063 - protein, 13 aa, Homo sapiens
  CDR3 for alpha chain variable domain of TCR clone 136532 (TRAV27, TRAJ29)
CAGAHSGNTPLVF

SEQ ID NO: 273064 - protein, 16 aa, Homo sapiens
  CDR3 for beta chain variable domain of TCR clone 136532 (TRBV19, TRBJ2-4)
CATGGLAGGTKNIQYF

SEQ ID NO: 273065 - protein, 17 aa, Homo sapiens
  CDR3 for alpha chain variable domain of TCR clone 136533 (TRAV3, TRAJ6)
CAVRDGPRAGGSYLPQF

SEQ ID NO: 273066 - protein, 14 aa, Homo sapiens
  CDR3 for beta chain variable domain of TCR clone 136533 (TRBV7-2, TRBJ2-7)
CASSPKTSFYEQYF

SEQ ID NO: 273067 - protein, 14 aa, Homo sapiens
  CDR3 for alpha chain variable domain of TCR clone 136534 (TRAV12-2, TRAJ11)
CAVEGGSGYSTLPF

SEQ ID NO: 273068 - protein, 11 aa, Homo sapiens
  CDR3 for beta chain variable domain of TCR clone 136534 (TRBV12-4, TRBJ2-3)
CASTATDTQYF

SEQ ID NO: 273069 - protein, 13 aa, Homo sapiens
  CDR3 for alpha chain variable domain of TCR clone 136535 (TRAV3, TRAJ27)
CAVRPLGAGKSTF

SEQ ID NO: 273070 - protein, 17 aa, Homo sapiens
  CDR3 for beta chain variable domain of TCR clone 136535 (TRBV28, TRBJ2-5)
GASSTPEGDALQETQYF

SEQ ID NO: 273071 - protein, 14 aa, Homo sapiens
  CDR3 for alpha chain variable domain of TCR clone 136536 (TRAV13-2, TRAJ22)
CADGTLGSARQLTF

SEQ ID NO: 273072 - protein, 15 aa, Homo sapiens
  CDR3 for beta chain variable domain of TCR clone 136536 (TRBV6-3, TRBJ2-7)
CASSSLGTVFYEQYF

SEQ ID NO: 273073 - protein, 12 aa, Homo sapiens
  CDR3 for alpha chain variable domain of TCR clone 136537 (TRAV17, TRAJ12)
CATLRSSYKLIF

SEQ ID NO: 273074 - protein, 15 aa, Homo sapiens
  CDR3 for beta chain variable domain of TCR clone 136537 (TRBV27, TRBJ1-6)
CASSFDRGLGSPLHF

SEQ ID NO: 273075 - protein, 12 aa, Homo sapiens
  CDR3 for alpha chain variable domain of TCR clone 136538 (TRAV21, TRAJ42)
CAVGGSQGNLIF

SEQ ID NO: 273076 - protein, 18 aa, Homo sapiens
  CDR3 for beta chain variable domain of TCR clone 136538 (TRBV11-2, TRBJ2-3)
CASSLGGASRGAPNTQYF

SEQ ID NO: 273077 - protein, 14 aa, Homo sapiens
  CDR3 for alpha chain variable domain of TCR clone 136539 (TRAV26-1, TRAJ39)
WIVRGSRAGNMLTF

SEQ ID NO: 273078 - protein, 15 aa, Homo sapiens
  CDR3 for beta chain variable domain of TCR clone 136539 (TRBV7-9, TRBJ1-5)
CASSQGHQPNQPQHF

SEQ ID NO: 273079 - protein, 15 aa, Homo sapiens
  CDR3 for alpha chain variable domain of TCR clone 136540 (TRAV21, TRAJ40)
CAVRPQTSGTYKYIF

SEQ ID NO: 273080 - protein, 15 aa, Homo sapiens
  CDR3 for beta chain variable domain of TCR clone 136540 (TRBV5-1, TRBJ2-1)
GASSPPRAPYNEQSF

SEQ ID NO: 273081 - protein, 13 aa, Homo sapiens
  CDR3 for alpha chain variable domain of TCR clone 136541 (TRAV35, TRAJ48)
FAGHEFGNEKLTF

SEQ ID NO: 273082 - protein, 16 aa, Homo sapiens
  CDR3 for beta chain variable domain of TCR clone 136541 (TRBV12-5, TRBJ2-5)
CASGPRTSGNQETQYF

SEQ ID NO: 273083 - protein, 14 aa, Homo sapiens
  CDR3 for alpha chain variable domain of TCR clone 136542 (TRAV16, TRAJ33)
CALSAMDSDYQLIW

SEQ ID NO: 273084 - protein, 12 aa, Homo sapiens
  CDR3 for beta chain variable domain of TCR clone 136542 (TRBV28, TRBJ2-6)
CAIQAGANVLTF

SEQ ID NO: 273085 - protein, 13 aa, Homo sapiens
  CDR3 for alpha chain variable domain of TCR clone 136543 (TRAV16, TRAJ9)
CSLSNTVGFKTIF

SEQ ID NO: 273086 - protein, 13 aa, Homo sapiens
  CDR3 for beta chain variable domain of TCR clone 136543 (TRBV7-9, TRBJ1-2)
CASSLKQNYGYTF

SEQ ID NO: 273087 - protein, 11 aa, Homo sapiens
  CDR3 for alpha chain variable domain of TCR clone 136544 (TRAV4, TRAJ31)
CLVGDNARLMF

SEQ ID NO: 273088 - protein, 16 aa, Homo sapiens
  CDR3 for beta chain variable domain of TCR clone 136544 (TRBV7-2, TRBJ2-5)
CASSSKWLSGQETPYS

SEQ ID NO: 273089 - protein, 14 aa, Homo sapiens
  CDR3 for alpha chain variable domain of TCR clone 136545 (TRAV1-2, TRAJ29)
CSVRELTSATPLVF

SEQ ID NO: 273090 - protein, 14 aa, Homo sapiens
  CDR3 for beta chain variable domain of TCR clone 136545 (TRBV3-1, TRBJ2-5)
CASSQGPDQETQYF

SEQ ID NO: 273091 - protein, 12 aa, Homo sapiens
  CDR3 for alpha chain variable domain of TCR clone 136546 (TRAV13-2, TRAJ23)
CAERHRGGKLIF

SEQ ID NO: 273092 - protein, 16 aa, Homo sapiens
  CDR3 for beta chain variable domain of TCR clone 136546 (TRBV20-1, TRBJ1-4)
GSAPGQGLLTNEKLFF

SEQ ID NO: 273093 - protein, 14 aa, Homo sapiens
  CDR3 for alpha chain variable domain of TCR clone 136547 (TRAV1-2, TRAJ16)
CAVNRFSDGKKLLF

SEQ ID NO: 273094 - protein, 13 aa, Homo sapiens
  CDR3 for beta chain variable domain of TCR clone 136547 (TRBV2, TRBJ2-7)
CASSVGGSGEQYF

SEQ ID NO: 273095 - protein, 12 aa, Homo sapiens
  CDR3 for alpha chain variable domain of TCR clone 136548 (TRAV8-3, TRAJ26)
CAGDNYGQNFVF

SEQ ID NO: 273096 - protein, 15 aa, Homo sapiens
  CDR3 for beta chain variable domain of TCR clone 136548 (TRBV5-1, TRBJ2-3)
CAGSVTSGSTDTQYF

SEQ ID NO: 273097 - protein, 12 aa, Homo sapiens
  CDR3 for alpha chain variable domain of TCR clone 136549 (TRAV1-2, TRAJ29)
CAVRNLNTPIVF

SEQ ID NO: 273098 - protein, 18 aa, Homo sapiens
  CDR3 for beta chain variable domain of TCR clone 136549 (TRBV15, TRBJ2-1)
CVPPPGCSGGPTTNEQFF

SEQ ID NO: 273099 - protein, 14 aa, Homo sapiens
  CDR3 for alpha chain variable domain of TCR clone 136550 (TRAV1-2, TRAJ8)
CAVREDTGFQNLVF

SEQ ID NO: 273100 - protein, 11 aa, Homo sapiens
  CDR3 for beta chain variable domain of TCR clone 136550 (TRBV11-3, TRBJ2-7)
CASSRTYEQYF

SEQ ID NO: 273101 - protein, 12 aa, Homo sapiens
  CDR3 for alpha chain variable domain of TCR clone 136551 (TRAV13-1, TRAJ20)
CAASWGDYKLSF

SEQ ID NO: 273102 - protein, 15 aa, Homo sapiens
  CDR3 for beta chain variable domain of TCR clone 136551 (TRBV20-1, TRBJ2-7)
CSARDRVSGMDEQYF

SEQ ID NO: 273103 - protein, 13 aa, Homo sapiens
  CDR3 for alpha chain variable domain of TCR clone 136552 (TRAV6, TRAJ33)
CALPMDSNYQLIW

SEQ ID NO: 273104 - protein, 15 aa, Homo sapiens
  CDR3 for beta chain variable domain of TCR clone 136552 (TRBV7-9, TRBJ2-2)
CASGPLDTFPGELFF

SEQ ID NO: 273105 - protein, 12 aa, Homo sapiens
  CDR3 for alpha chain variable domain of TCR clone 136553 (TRAV27, TRAJ9)
CAGESGGFKTIF

SEQ ID NO: 273106 - protein, 15 aa, Homo sapiens
  CDR3 for beta chain variable domain of TCR clone 136553 (TRBV11-2, TRBJ2-1)
CASSKNRGLIYEQFF

SEQ ID NO: 273107 - protein, 15 aa, Homo sapiens
  CDR3 for alpha chain variable domain of TCR clone 136554 (TRAV8-4, TRAJ3)
CAVTGENLVQQCFQD

SEQ ID NO: 273108 - protein, 15 aa, Homo sapiens
  CDR3 for beta chain variable domain of TCR clone 136554 (TRBV9, TRBJ1-6)
CASSVAGTGDSPLHF

SEQ ID NO: 273109 - protein, 18 aa, Homo sapiens
  CDR3 for alpha chain variable domain of TCR clone 136555 (TRAV21, TRAJ52)
CAVRPSPAGGTSYGKLTF

SEQ ID NO: 273110 - protein, 15 aa, Homo sapiens
  CDR3 for beta chain variable domain of TCR clone 136555 (TRBV7-2, TRBJ2-2)
CASSFQRGETGELFF

SEQ ID NO: 273111 - protein, 18 aa, Homo sapiens
  CDR3 for alpha chain variable domain of TCR clone 136556 (TRAV9-2, TRAJ36)
IGVLPCSSLRTGANNLFF

SEQ ID NO: 273112 - protein, 14 aa, Homo sapiens
  CDR3 for beta chain variable domain of TCR clone 136556 (TRBV2, TRBJ1-2)
CASSELQVNYGYTF

SEQ ID NO: 273113 - protein, 11 aa, Homo sapiens
  CDR3 for alpha chain variable domain of TCR clone 136557 (TRAV4, TRAJ31)
CLVGDNARLMF

SEQ ID NO: 273114 - protein, 14 aa, Homo sapiens
  CDR3 for beta chain variable domain of TCR clone 136557 (TRBV6-5, TRBJ1-1)
CASNRQRSDTEAFF

SEQ ID NO: 273115 - protein, 15 aa, Homo sapiens
  CDR3 for alpha chain variable domain of TCR clone 136558 (TRAV1-2, TRAJ28)
CAVPYSGAGSYQLTF

SEQ ID NO: 273116 - protein, 15 aa, Homo sapiens
  CDR3 for beta chain variable domain of TCR clone 136558 (TRBV6-5, TRBJ1-6)
CASSLGQGFRSPLHF

SEQ ID NO: 273117 - protein, 15 aa, Homo sapiens
  CDR3 for alpha chain variable domain of TCR clone 136559 (TRAV22, TRAJ45)
CAAKCSGGGADGLTF

SEQ ID NO: 273118 - protein, 14 aa, Homo sapiens
  CDR3 for beta chain variable domain of TCR clone 136559 (TRBV5-1, TRBJ2-3)
CASSLFGPTDTQYF

SEQ ID NO: 273119 - protein, 11 aa, Homo sapiens
  CDR3 for alpha chain variable domain of TCR clone 136560 (TRAV35, TRAJ30)
CAGPGDDNIIF

SEQ ID NO: 273120 - protein, 14 aa, Homo sapiens
  CDR3 for beta chain variable domain of TCR clone 136560 (TRBV7-6, TRBJ1-6)
CASSQAGGGSPLHF

SEQ ID NO: 273121 - protein, 12 aa, Homo sapiens
  CDR3 for alpha chain variable domain of TCR clone 136561 (TRAV20, TRAJ33)
CAVRGSNYQLLW

SEQ ID NO: 273122 - protein, 15 aa, Homo sapiens
  CDR3 for beta chain variable domain of TCR clone 136561 (TRBV11-3, TRBJ2-3)
CASLKDGREGDTQYF

SEQ ID NO: 273123 - protein, 14 aa, Homo sapiens
  CDR3 for alpha chain variable domain of TCR clone 136562 (TRAV13-1, TRAJ35)
CAASKGGFGNVLHC

SEQ ID NO: 273124 - protein, 14 aa, Homo sapiens
  CDR3 for beta chain variable domain of TCR clone 136562 (TRBV27, TRBJ1-1)
CASSLLSGLSEAFF

SEQ ID NO: 273125 - protein, 13 aa, Homo sapiens
  CDR3 for alpha chain variable domain of TCR clone 136563 (TRAV17, TRAJ26)
CATVDNYGQNFVF

SEQ ID NO: 273126 - protein, 16 aa, Homo sapiens
  CDR3 for beta chain variable domain of TCR clone 136563 (TRBV7-7, TRBJ2-1)
CASSLASGTSYNEQFF

SEQ ID NO: 273127 - protein, 19 aa, Homo sapiens
  CDR3 for alpha chain variable domain of TCR clone 136564 (TRAV26-1, TRAJ52)
CIVRVANNAGGTNYGKLTF

SEQ ID NO: 273128 - protein, 14 aa, Homo sapiens
  CDR3 for beta chain variable domain of TCR clone 136564 (TRBV19, TRBJ1-2)
CASSIGAGSYGYTF

SEQ ID NO: 273129 - protein, 14 aa, Homo sapiens
  CDR3 for alpha chain variable domain of TCR clone 136565 (TRAV12-2, TRAJ13)
CAVKQTGGYQKFTF

SEQ ID NO: 273130 - protein, 15 aa, Homo sapiens
  CDR3 for beta chain variable domain of TCR clone 136565 (TRBV27, TRBJ2-1)
CASSNGGGSSNEQFF

SEQ ID NO: 273131 - protein, 12 aa, Homo sapiens
  CDR3 for alpha chain variable domain of TCR clone 136566 (TRAV8-3, TRAJ20)
CAVGANDYKLSF

SEQ ID NO: 273132 - protein, 13 aa, Homo sapiens
  CDR3 for beta chain variable domain of TCR clone 136566 (TRBV20-1, TRBJ2-7)
CSARAGSPYERYF

SEQ ID NO: 273133 - protein, 15 aa, Homo sapiens
  CDR3 for alpha chain variable domain of TCR clone 136567 (TRAV3, TRAJ4)
CAVGDGTGGYNKRIF

SEQ ID NO: 273134 - protein, 15 aa, Homo sapiens
  CDR3 for beta chain variable domain of TCR clone 136567 (TRBV27, TRBJ2-7)
CASSPDQGRLYEQYF

SEQ ID NO: 273135 - protein, 13 aa, Homo sapiens
  CDR3 for alpha chain variable domain of TCR clone 136568 (TRAV27, TRAJ57)
CRSAQGGSEKLVF

SEQ ID NO: 273136 - protein, 13 aa, Homo sapiens
  CDR3 for beta chain variable domain of TCR clone 136568 (TRBV11-2, TRBJ1-1)
CASSINTEAFLDK

SEQ ID NO: 273137 - protein, 13 aa, Homo sapiens
  CDR3 for alpha chain variable domain of TCR clone 136569 (TRAV13-2, TRAJ13)
CAEGPGGYQKDTF

SEQ ID NO: 273138 - protein, 14 aa, Homo sapiens
  CDR3 for beta chain variable domain of TCR clone 136569 (TRBV4-1, TRBJ2-2)
CASSQAVNTGELFF

SEQ ID NO: 273139 - protein, 11 aa, Homo sapiens
  CDR3 for alpha chain variable domain of TCR clone 136570 (TRAV21, TRAJ34)
CAHYNTDKLIF

SEQ ID NO: 273140 - protein, 13 aa, Homo sapiens
  CDR3 for beta chain variable domain of TCR clone 136570 (TRBV7-9, TRBJ2-7)
CASSFAGAYEQYF

SEQ ID NO: 273141 - protein, 12 aa, Homo sapiens
  CDR3 for alpha chain variable domain of TCR clone 136571 (TRAV16, TRAJ57)
CALEGGSEKLVF

SEQ ID NO: 273142 - protein, 19 aa, Homo sapiens
  CDR3 for beta chain variable domain of TCR clone 136571 (TRBV25-1, TRBJ2-2)
CAILVYRVDRGRKTGELFF

SEQ ID NO: 273143 - protein, 17 aa, Homo sapiens
  CDR3 for alpha chain variable domain of TCR clone 136572 (TRAV8-6, TRAJ58)
CAVSSWVGETSGSRLTF

SEQ ID NO: 273144 - protein, 15 aa, Homo sapiens
  CDR3 for beta chain variable domain of TCR clone 136572 (TRBV20-1, TRBJ2-7)
CSAGDRVSGMDEQYF

SEQ ID NO: 273145 - protein, 17 aa, Homo sapiens
  CDR3 for alpha chain variable domain of TCR clone 136573 (TRAV1-2, TRAJ8)
CAVRDPDENTGFQKLVF

SEQ ID NO: 273146 - protein, 14 aa, Homo sapiens
  CDR3 for beta chain variable domain of TCR clone 136573 (TRBV4-3, TRBJ2-1)
CASGLDRAYNEQFF

SEQ ID NO: 273147 - protein, 12 aa, Homo sapiens
  CDR3 for alpha chain variable domain of TCR clone 136574 (TRAV21, TRAJ13)
PGPSGGYQKVTF

SEQ ID NO: 273148 - protein, 14 aa, Homo sapiens
  CDR3 for beta chain variable domain of TCR clone 136574 (TRBV20-1, TRBJ2-7)
CSAKDRKGAYEQYI

SEQ ID NO: 273149 - protein, 13 aa, Homo sapiens
  CDR3 for alpha chain variable domain of TCR clone 136575 (TRAV27, TRAJ39)
CAGGNNAGNMLTF

SEQ ID NO: 273150 - protein, 14 aa, Homo sapiens
  CDR3 for beta chain variable domain of TCR clone 136575 (TRBV27, TRBJ2-7)
CASSLYLGLYEQYF

SEQ ID NO: 273151 - protein, 13 aa, Homo sapiens
  CDR3 for alpha chain variable domain of TCR clone 136576 (TRAV2, TRAJ40)
CAVVTSGTYKYIL

SEQ ID NO: 273152 - protein, 15 aa, Homo sapiens
  CDR3 for beta chain variable domain of TCR clone 136576 (TRBV4-1, TRBJ1-1)
CASSQEWGHYTEAFF

SEQ ID NO: 273153 - protein, 15 aa, Homo sapiens
  CDR3 for alpha chain variable domain of TCR clone 136577 (TRAV3, TRAJ47)
CAVRDIGEYGNKLVF

SEQ ID NO: 273154 - protein, 14 aa, Homo sapiens
  CDR3 for beta chain variable domain of TCR clone 136577 (TRBV13, TRBJ2-5)
CASSLERVEETQYF

SEQ ID NO: 273155 - protein, 16 aa, Homo sapiens
  CDR3 for alpha chain variable domain of TCR clone 136578 (TRAV8-2, TRAJ7)
CVVSEGPYYGNNRLAF

SEQ ID NO: 273156 - protein, 14 aa, Homo sapiens
  CDR3 for beta chain variable domain of TCR clone 136578 (TRBV11-2, TRBJ1-5)
CASSLDRGRQPQHF

SEQ ID NO: 273157 - protein, 14 aa, Homo sapiens
  CDR3 for alpha chain variable domain of TCR clone 136579 (TRAV8-4, TRAJ54)
CAVSEVLGAQKLVF

SEQ ID NO: 273158 - protein, 12 aa, Homo sapiens
  CDR3 for beta chain variable domain of TCR clone 136579 (TRBV11-2, TRBJ2-2)
CASSLGGGELFF

SEQ ID NO: 273159 - protein, 12 aa, Homo sapiens
  CDR3 for alpha chain variable domain of TCR clone 136580 (TRAV29/DV5, TRAJ49)
CAATDTGNQFYF

SEQ ID NO: 273160 - protein, 14 aa, Homo sapiens
  CDR3 for beta chain variable domain of TCR clone 136580 (TRBV7-2, TRBJ2-7)
CASSPKTSFYEQYF

SEQ ID NO: 273161 - protein, 16 aa, Homo sapiens
  CDR3 for alpha chain variable domain of TCR clone 136581 (TRAV35, TRAJ28)
CAGQRYSGAGSYKLTF

SEQ ID NO: 273162 - protein, 15 aa, Homo sapiens
  CDR3 for beta chain variable domain of TCR clone 136581 (TRBV4-1, TRBJ2-5)
CASSQSRGDQETQYF

SEQ ID NO: 273163 - protein, 14 aa, Homo sapiens
  CDR3 for alpha chain variable domain of TCR clone 136582 (TRAV26-1, TRAJ40)
CIVRLLSGTYKYIF

SEQ ID NO: 273164 - protein, 16 aa, Homo sapiens
  CDR3 for beta chain variable domain of TCR clone 136582 (TRBV7-2, TRBJ2-7)
CASSFPLAGGPLEQYF

SEQ ID NO: 273165 - protein, 14 aa, Homo sapiens
  CDR3 for alpha chain variable domain of TCR clone 136583 (TRAV17, TRAJ56)
CATDYTGAKSKLTF

SEQ ID NO: 273166 - protein, 14 aa, Homo sapiens
  CDR3 for beta chain variable domain of TCR clone 136583 (TRBV18, TRBJ2-1)
CASSPVRGDNEQFF

SEQ ID NO: 273167 - protein, 12 aa, Homo sapiens
  CDR3 for alpha chain variable domain of TCR clone 136584 (TRAV12-3, TRAJ43)
CAISSNNNDMRF

SEQ ID NO: 273168 - protein, 15 aa, Homo sapiens
  CDR3 for beta chain variable domain of TCR clone 136584 (TRBV27, TRBJ1-4)
CASSPRHATNDKLFF

SEQ ID NO: 273169 - protein, 14 aa, Homo sapiens
  CDR3 for alpha chain variable domain of TCR clone 136585 (TRAV3, TRAJ6)
CAVSDWGGSYIPTF

SEQ ID NO: 273170 - protein, 20 aa, Homo sapiens
  CDR3 for beta chain variable domain of TCR clone 136585 (TRBV7-8, TRBJ2-2)
CASSHLFPGPTIHITGELFF

SEQ ID NO: 273171 - protein, 12 aa, Homo sapiens
  CDR3 for alpha chain variable domain of TCR clone 136586 (TRAV8-2, TRAJ45)
CVQGGGADGLTV

SEQ ID NO: 273172 - protein, 15 aa, Homo sapiens
  CDR3 for beta chain variable domain of TCR clone 136586 (TRBV19, TRBJ1-1)
CASSIRRQMNTEAFF

SEQ ID NO: 273173 - protein, 14 aa, Homo sapiens
  CDR3 for alpha chain variable domain of TCR clone 136587 (TRAV1-2, TRAJ8)
CAAREDTGSQKLGF

SEQ ID NO: 273174 - protein, 13 aa, Homo sapiens
  CDR3 for beta chain variable domain of TCR clone 136587 (TRBV19, TRBJ1-2)
CASSVPGQDGYTF

SEQ ID NO: 273175 - protein, 14 aa, Homo sapiens
  CDR3 for alpha chain variable domain of TCR clone 136588 (TRAV13-1, TRAJ44)
CAAKATGTASKLTF

SEQ ID NO: 273176 - protein, 16 aa, Homo sapiens
  CDR3 for beta chain variable domain of TCR clone 136588 (TRBV7-9, TRBJ2-6)
CASSWKGPLRANVLSF

SEQ ID NO: 273177 - protein, 14 aa, Homo sapiens
  CDR3 for alpha chain variable domain of TCR clone 136589 (TRAV13-1, TRAJ35)
CAASKGGVGNVLHG

SEQ ID NO: 273178 - protein, 14 aa, Homo sapiens
  CDR3 for beta chain variable domain of TCR clone 136589 (TRBV19, TRBJ2-1)
CASPTFVLSGEQFF

SEQ ID NO: 273179 - protein, 13 aa, Homo sapiens
  CDR3 for alpha chain variable domain of TCR clone 136590 (TRAV27, TRAJ29)
CAGAHSGNTPLVF

SEQ ID NO: 273180 - protein, 14 aa, Homo sapiens
  CDR3 for beta chain variable domain of TCR clone 136590 (TRBV7-9, TRBJ2-7)
CASSVGQGAGEQYF

SEQ ID NO: 273181 - protein, 15 aa, Homo sapiens
  CDR3 for alpha chain variable domain of TCR clone 136591 (TRAV13-1, TRAJ57)
QVPPLSQGGSEKLVF

SEQ ID NO: 273182 - protein, 15 aa, Homo sapiens
  CDR3 for beta chain variable domain of TCR clone 136591 (TRBV28, TRBJ2-4)
CAAGSGTLLMGIQYF

SEQ ID NO: 273183 - protein, 13 aa, Homo sapiens
  CDR3 for alpha chain variable domain of TCR clone 136592 (TRAV17, TRAJ9)
CATGSTGGFKTIF

SEQ ID NO: 273184 - protein, 15 aa, Homo sapiens
  CDR3 for beta chain variable domain of TCR clone 136592 (TRBV2, TRBJ2-1)
CASSEEREGAMSSSS

SEQ ID NO: 273185 - protein, 13 aa, Homo sapiens
  CDR3 for alpha chain variable domain of TCR clone 136593 (TRAV26-2, TRAJ43)
CILRSVNNNDLRF

SEQ ID NO: 273186 - protein, 15 aa, Homo sapiens
  CDR3 for beta chain variable domain of TCR clone 136593 (TRBV7-2, TRBJ2-1)
CASTHGTGIYNEQFF

SEQ ID NO: 273187 - protein, 11 aa, Homo sapiens
  CDR3 for alpha chain variable domain of TCR clone 136594 (TRAV21, TRAJ34)
CAATNTDKLIF

SEQ ID NO: 273188 - protein, 12 aa, Homo sapiens
  CDR3 for beta chain variable domain of TCR clone 136594 (TRBV7-9, TRBJ1-1)
CASSLVRGEAFF

SEQ ID NO: 273189 - protein, 12 aa, Homo sapiens
  CDR3 for alpha chain variable domain of TCR clone 136595 (TRAV12-2, TRAJ10)
WGVTGGGNKLTF

SEQ ID NO: 273190 - protein, 17 aa, Homo sapiens
  CDR3 for beta chain variable domain of TCR clone 136595 (TRBV5-1, TRBJ1-5)
CASSLAFLTRGNQPQHF

SEQ ID NO: 273191 - protein, 14 aa, Homo sapiens
  CDR3 for alpha chain variable domain of TCR clone 136596 (TRAV8-1, TRAJ24)
CAVNAAGSWGKLQF

SEQ ID NO: 273192 - protein, 16 aa, Homo sapiens
  CDR3 for beta chain variable domain of TCR clone 136596 (TRBV4-3, TRBJ2-1)
CASSPALDRGVNEQFF

SEQ ID NO: 273193 - protein, 15 aa, Homo sapiens
  CDR3 for alpha chain variable domain of TCR clone 136597 (TRAV21, TRAJ24)
CAALSSTDSWGKLQF

SEQ ID NO: 273194 - protein, 15 aa, Homo sapiens
  CDR3 for beta chain variable domain of TCR clone 136597 (TRBV4-1, TRBJ2-7)
CASSQNTGRLYEQYF

SEQ ID NO: 273195 - protein, 16 aa, Homo sapiens
  CDR3 for alpha chain variable domain of TCR clone 136598 (TRAV26-1, TRAJ53)
CIVRVAMGGSNSKLTF

SEQ ID NO: 273196 - protein, 12 aa, Homo sapiens
  CDR3 for beta chain variable domain of TCR clone 136598 (TRBV7-9, TRBJ1-5)
CASSPQGQTQHF

SEQ ID NO: 273197 - protein, 17 aa, Homo sapiens
  CDR3 for alpha chain variable domain of TCR clone 136599 (TRAV2, TRAJ22)
ILQVREADAAEQRQLTF

SEQ ID NO: 273198 - protein, 16 aa, Homo sapiens
  CDR3 for beta chain variable domain of TCR clone 136599 (TRBV2, TRBJ2-5)
CASSETKGVGEETQYF

SEQ ID NO: 273199 - protein, 15 aa, Homo sapiens
  CDR3 for alpha chain variable domain of TCR clone 136600 (TRAV3, TRAJ32)
CAVRDPGGATNKLIF

SEQ ID NO: 273200 - protein, 13 aa, Homo sapiens
  CDR3 for beta chain variable domain of TCR clone 136600 (TRBV5-5, TRBJ1-2)
CASSFWRGEDYTF

SEQ ID NO: 273201 - protein, 14 aa, Homo sapiens
  CDR3 for alpha chain variable domain of TCR clone 136601 (TRAV1-2, TRAJ8)
CAVREDTGFQKLVY

SEQ ID NO: 273202 - protein, 14 aa, Homo sapiens
  CDR3 for beta chain variable domain of TCR clone 136601 (TRBV12-5, TRBJ2-5)
CASGSRTHQETQYF

SEQ ID NO: 273203 - protein, 11 aa, Homo sapiens
  CDR3 for alpha chain variable domain of TCR clone 136602 (TRAV35, TRAJ34)
CWARNTDKLIF

SEQ ID NO: 273204 - protein, 13 aa, Homo sapiens
  CDR3 for beta chain variable domain of TCR clone 136602 (TRBV14, TRBJ2-7)
CASSQDRRYEQYF

SEQ ID NO: 273205 - protein, 14 aa, Homo sapiens
  CDR3 for alpha chain variable domain of TCR clone 136603 (TRAV12-2, TRAJ40)
CAVKIPSGTYKYIF

SEQ ID NO: 273206 - protein, 15 aa, Homo sapiens
  CDR3 for beta chain variable domain of TCR clone 136603 (TRBV20-1, TRBJ1-6)
CSARVQGQGVSPLHF

SEQ ID NO: 273207 - protein, 14 aa, Homo sapiens
  CDR3 for alpha chain variable domain of TCR clone 136604 (TRAV30, TRAJ33)
CGTVAPRSNYQLIW

SEQ ID NO: 273208 - protein, 12 aa, Homo sapiens
  CDR3 for beta chain variable domain of TCR clone 136604 (TRBV19, TRBJ1-5)
CASSIAQQPQHF

SEQ ID NO: 273209 - protein, 11 aa, Homo sapiens
  CDR3 for alpha chain variable domain of TCR clone 136605 (TRAV4, TRAJ31)
CLVGDNARLMF

SEQ ID NO: 273210 - protein, 16 aa, Homo sapiens
  CDR3 for beta chain variable domain of TCR clone 136605 (TRBV7-2, TRBJ2-5)
CAISSKWLSGQETQYF

SEQ ID NO: 273211 - protein, 14 aa, Homo sapiens
  CDR3 for alpha chain variable domain of TCR clone 136606 (TRAV1-2, TRAJ8)
CAVREDTGFQTLVF

SEQ ID NO: 273212 - protein, 15 aa, Homo sapiens
  CDR3 for beta chain variable domain of TCR clone 136606 (TRBV7-9, TRBJ1-1)
CASSHRGTVNTEAFF

SEQ ID NO: 273213 - protein, 13 aa, Homo sapiens
  CDR3 for alpha chain variable domain of TCR clone 136607 (TRAV13-2, TRAJ53)
CAENMGGNYKLTF

SEQ ID NO: 273214 - protein, 13 aa, Homo sapiens
  CDR3 for beta chain variable domain of TCR clone 136607 (TRBV4-1, TRBJ2-2)
CASSQANTGELFF

SEQ ID NO: 273215 - protein, 13 aa, Homo sapiens
  CDR3 for alpha chain variable domain of TCR clone 136608 (TRAV8-6, TRAJ49)
CAVITNTGNQFYF

SEQ ID NO: 273216 - protein, 14 aa, Homo sapiens
  CDR3 for beta chain variable domain of TCR clone 136608 (TRBV7-9, TRBJ2-1)
CASSPRDSLYEQFF

SEQ ID NO: 273217 - protein, 13 aa, Homo sapiens
  CDR3 for alpha chain variable domain of TCR clone 136609 (TRAV16, TRAJ54)
CALMVQGAQKLVF

SEQ ID NO: 273218 - protein, 13 aa, Homo sapiens
  CDR3 for beta chain variable domain of TCR clone 136609 (TRBV7-3, TRBJ2-1)
CASSLDSYNEQFF

SEQ ID NO: 273219 - protein, 17 aa, Homo sapiens
  CDR3 for alpha chain variable domain of TCR clone 136610 (TRAV3, TRAJ12)
CAVRDGGRMDSSYRLIF

SEQ ID NO: 273220 - protein, 16 aa, Homo sapiens
  CDR3 for beta chain variable domain of TCR clone 136610 (TRBV9, TRBJ2-2)
CASSAMGKGNTGELFF

SEQ ID NO: 273221 - protein, 17 aa, Homo sapiens
  CDR3 for alpha chain variable domain of TCR clone 136611 (TRAV12-3, TRAJ18)
CAMIRADRGSTLGRLYF

SEQ ID NO: 273222 - protein, 14 aa, Homo sapiens
  CDR3 for beta chain variable domain of TCR clone 136611 (TRBV5-7, TRBJ1-6)
CASPPWPADSPLHF

SEQ ID NO: 273223 - protein, 13 aa, Homo sapiens
  CDR3 for alpha chain variable domain of TCR clone 136612 (TRAV2, TRAJ29)
CAAGNSGNTPLVF

SEQ ID NO: 273224 - protein, 16 aa, Homo sapiens
  CDR3 for beta chain variable domain of TCR clone 136612 (TRBV7-9, TRBJ1-2)
CASSPGGGAISYGYTF

SEQ ID NO: 273225 - protein, 14 aa, Homo sapiens
  CDR3 for alpha chain variable domain of TCR clone 136613 (TRAV8-3, TRAJ4)
CAVGAAGGYNKLIF

SEQ ID NO: 273226 - protein, 15 aa, Homo sapiens
  CDR3 for beta chain variable domain of TCR clone 136613 (TRBV5-1, TRBJ2-7)
CASSLDLTSSYEQYF

SEQ ID NO: 273227 - protein, 15 aa, Homo sapiens
  CDR3 for alpha chain variable domain of TCR clone 136614 (TRAV26-1, TRAJ22)
CIVRVSFWFCKATDL

SEQ ID NO: 273228 - protein, 13 aa, Homo sapiens
  CDR3 for beta chain variable domain of TCR clone 136614 (TRBV12-4, TRBJ1-1)
CASSPGTGFEAFF

SEQ ID NO: 273229 - protein, 19 aa, Homo sapiens
  CDR3 for alpha chain variable domain of TCR clone 136615 (TRAV2, TRAJ20)
ILQVREADAAVYRDGKLSF

SEQ ID NO: 273230 - protein, 16 aa, Homo sapiens
  CDR3 for beta chain variable domain of TCR clone 136615 (TRBV9, TRBJ2-2)
CASSAMGKGNTGELFF

SEQ ID NO: 273231 - protein, 14 aa, Homo sapiens
  CDR3 for alpha chain variable domain of TCR clone 136616 (TRAV17, TRAJ34)
CATVPTYNTDKFIF

SEQ ID NO: 273232 - protein, 18 aa, Homo sapiens
  CDR3 for beta chain variable domain of TCR clone 136616 (TRBV23-1, TRBJ2-1)
TVSLRQRSEKWLKNEQFF

SEQ ID NO: 273233 - protein, 18 aa, Homo sapiens
  CDR3 for alpha chain variable domain of TCR clone 136617 (TRAV12-2, TRAJ52)
CAVRPSPAGGTSYGNLTF

SEQ ID NO: 273234 - protein, 17 aa, Homo sapiens
  CDR3 for beta chain variable domain of TCR clone 136617 (TRBV13, TRBJ2-3)
CASSLSRVAGGRNTQYF

SEQ ID NO: 273235 - protein, 14 aa, Homo sapiens
  CDR3 for alpha chain variable domain of TCR clone 136618 (TRAV8-4, TRAJ8)
CAFSLNTGFQKLVF

SEQ ID NO: 273236 - protein, 13 aa, Homo sapiens
  CDR3 for beta chain variable domain of TCR clone 136618 (TRBV7-9, TRBJ2-3)
CASSPGSTDTQYF

SEQ ID NO: 273237 - protein, 15 aa, Homo sapiens
  CDR3 for alpha chain variable domain of TCR clone 136619 (TRAV12-1, TRAJ44)
CVVFVNTGTASKLTF

SEQ ID NO: 273238 - protein, 11 aa, Homo sapiens
  CDR3 for beta chain variable domain of TCR clone 136619 (TRBV7-8, TRBJ2-7)
CASSLSLEQYF

SEQ ID NO: 273239 - protein, 15 aa, Homo sapiens
  CDR3 for alpha chain variable domain of TCR clone 136620 (TRAV13-2, TRAJ29)
CAETPRNSGNTPLVF

SEQ ID NO: 273240 - protein, 13 aa, Homo sapiens
  CDR3 for beta chain variable domain of TCR clone 136620 (TRBV10-2, TRBJ2-7)
CASGASGGYEQYF

SEQ ID NO: 273241 - protein, 16 aa, Homo sapiens
  CDR3 for alpha chain variable domain of TCR clone 136621 (TRAV30, TRAJ24)
CGTEIVDADSWGKFQF

SEQ ID NO: 273242 - protein, 13 aa, Homo sapiens
  CDR3 for beta chain variable domain of TCR clone 136621 (TRBV11-2, TRBJ1-5)
CASSLDRNQPQHF

SEQ ID NO: 273243 - protein, 16 aa, Homo sapiens
  CDR3 for alpha chain variable domain of TCR clone 136622 (TRAV3, TRAJ37)
CAVRVRGSCNTGKLIF

SEQ ID NO: 273244 - protein, 11 aa, Homo sapiens
  CDR3 for beta chain variable domain of TCR clone 136622 (TRBV11-2, TRBJ2-2)
CASSLPGELFF

SEQ ID NO: 273245 - protein, 13 aa, Homo sapiens
  CDR3 for alpha chain variable domain of TCR clone 136623 (TRAV38-1, TRAJ57)
CALVQGGSEKLVF

SEQ ID NO: 273246 - protein, 17 aa, Homo sapiens
  CDR3 for beta chain variable domain of TCR clone 136623 (TRBV29-1, TRBJ2-3)
CSVDSPPRGARTDTHYF

SEQ ID NO: 273247 - protein, 15 aa, Homo sapiens
  CDR3 for alpha chain variable domain of TCR clone 136624 (TRAV8-3, TRAJ45)
CASSYSGGGADGLTF

SEQ ID NO: 273248 - protein, 14 aa, Homo sapiens
  CDR3 for beta chain variable domain of TCR clone 136624 (TRBV20-1, TRBJ2-5)
CSASDSGSGETQYF

SEQ ID NO: 273249 - protein, 16 aa, Homo sapiens
  CDR3 for alpha chain variable domain of TCR clone 136625 (TRAV26-1, TRAJ38)
CIVRAYKAGNNRKLIW

SEQ ID NO: 273250 - protein, 13 aa, Homo sapiens
  CDR3 for beta chain variable domain of TCR clone 136625 (TRBV4-2, TRBJ2-7)
CASSRDPHDEQYF

SEQ ID NO: 273251 - protein, 16 aa, Homo sapiens
  CDR3 for alpha chain variable domain of TCR clone 136626 (TRAV27, TRAJ13)
CAGAKSDSGGYQKVTF

SEQ ID NO: 273252 - protein, 15 aa, Homo sapiens
  CDR3 for beta chain variable domain of TCR clone 136626 (TRBV29-1, TRBJ2-1)
CSVGRHALFYNEQLF

SEQ ID NO: 273253 - protein, 17 aa, Homo sapiens
  CDR3 for alpha chain variable domain of TCR clone 136627 (TRAV29/DV5, TRAJ52)
CSATSTADGTSYGKLTF

SEQ ID NO: 273254 - protein, 15 aa, Homo sapiens
  CDR3 for beta chain variable domain of TCR clone 136627 (TRBV3-1, TRBJ2-7)
CASSQEWTGSYEQYF

SEQ ID NO: 273255 - protein, 14 aa, Homo sapiens
  CDR3 for alpha chain variable domain of TCR clone 136628 (TRAV1-2, TRAJ8)
CAVSEDTGFQKLVS

SEQ ID NO: 273256 - protein, 15 aa, Homo sapiens
  CDR3 for beta chain variable domain of TCR clone 136628 (TRBV6-3, TRBJ2-7)
CASSSPGTVFYEQYF

SEQ ID NO: 273257 - protein, 14 aa, Homo sapiens
  CDR3 for alpha chain variable domain of TCR clone 136629 (TRAV2, TRAJ9)
CAVEDRSGGFKTIF

SEQ ID NO: 273258 - protein, 14 aa, Homo sapiens
  CDR3 for beta chain variable domain of TCR clone 136629 (TRBV7-9, TRBJ2-7)
CASSPAGGQNEQYF

SEQ ID NO: 273259 - protein, 14 aa, Homo sapiens
  CDR3 for alpha chain variable domain of TCR clone 136630 (TRAV4, TRAJ20)
CLVGRRSNDYKLSL

SEQ ID NO: 273260 - protein, 18 aa, Homo sapiens
  CDR3 for beta chain variable domain of TCR clone 136630 (TRBV2, TRBJ2-5)
CASSGDPQGRGAQETQYF

SEQ ID NO: 273261 - protein, 14 aa, Homo sapiens
  CDR3 for alpha chain variable domain of TCR clone 136631 (TRAV8-3, TRAJ15)
CAVGRHQAGTALIF

SEQ ID NO: 273262 - protein, 13 aa, Homo sapiens
  CDR3 for beta chain variable domain of TCR clone 136631 (TRBV9, TRBJ2-7)
CASSASDSDEQYF

SEQ ID NO: 273263 - protein, 13 aa, Homo sapiens
  CDR3 for alpha chain variable domain of TCR clone 136632 (TRAV27, TRAJ53)
CAGQGGSNYKLTF

SEQ ID NO: 273264 - protein, 14 aa, Homo sapiens
  CDR3 for beta chain variable domain of TCR clone 136632 (TRBV7-2, TRBJ2-7)
CASSPKTSFYEQYF

SEQ ID NO: 273265 - protein, 13 aa, Homo sapiens
  CDR3 for alpha chain variable domain of TCR clone 136633 (TRAV36/DV7, TRAJ37)
CAVFSSNTGKLIF

SEQ ID NO: 273266 - protein, 14 aa, Homo sapiens
  CDR3 for beta chain variable domain of TCR clone 136633 (TRBV6-3, TRBJ1-1)
CASSYQRRDTEAFF

SEQ ID NO: 273267 - protein, 15 aa, Homo sapiens
  CDR3 for alpha chain variable domain of TCR clone 136634 (TRAV26-1, TRAJ44)
CIVRANTGAASELTF

SEQ ID NO: 273268 - protein, 16 aa, Homo sapiens
  CDR3 for beta chain variable domain of TCR clone 136634 (TRBV7-7, TRBJ2-1)
CASSLASGTSYNEQFF

SEQ ID NO: 273269 - protein, 15 aa, Homo sapiens
  CDR3 for alpha chain variable domain of TCR clone 136635 (TRAV8-3, TRAJ40)
CSAPSLGSGTYKYIF

SEQ ID NO: 273270 - protein, 13 aa, Homo sapiens
  CDR3 for beta chain variable domain of TCR clone 136635 (TRBV10-3, TRBJ2-7)
CASKLAVNYEQYF

SEQ ID NO: 273271 - protein, 14 aa, Homo sapiens
  CDR3 for alpha chain variable domain of TCR clone 136636 (TRAV26-1, TRAJ38)
CIADNAGNNRKLLW

SEQ ID NO: 273272 - protein, 16 aa, Homo sapiens
  CDR3 for beta chain variable domain of TCR clone 136636 (TRBV7-3, TRBJ2-2)
CASSLKRGTLSGELFF

SEQ ID NO: 273273 - protein, 14 aa, Homo sapiens
  CDR3 for alpha chain variable domain of TCR clone 136637 (TRAV20, TRAJ42)
CAVQAGGSQGILIF

SEQ ID NO: 273274 - protein, 14 aa, Homo sapiens
  CDR3 for beta chain variable domain of TCR clone 136637 (TRBV28, TRBJ1-2)
CASRIQGANYGYTF

SEQ ID NO: 273275 - protein, 20 aa, Homo sapiens
  CDR3 for alpha chain variable domain of TCR clone 136638 (TRAV30, TRAJ54)
SAAQSRSETQVVQGAQELVF

SEQ ID NO: 273276 - protein, 14 aa, Homo sapiens
  CDR3 for beta chain variable domain of TCR clone 136638 (TRBV25-1, TRBJ2-4)
CASPETKTFSASAP

SEQ ID NO: 273277 - protein, 12 aa, Homo sapiens
  CDR3 for alpha chain variable domain of TCR clone 136639 (TRAV16, TRAJ56)
CAPTGANSKLTF

SEQ ID NO: 273278 - protein, 16 aa, Homo sapiens
  CDR3 for beta chain variable domain of TCR clone 136639 (TRBV7-2, TRBJ2-6)
CAILSGVSSGANVLTF

SEQ ID NO: 273279 - protein, 14 aa, Homo sapiens
  CDR3 for alpha chain variable domain of TCR clone 136640 (TRAV8-1, TRAJ5)
CAVRTHTGMRALTF

SEQ ID NO: 273280 - protein, 15 aa, Homo sapiens
  CDR3 for beta chain variable domain of TCR clone 136640 (TRBV6-3, TRBJ2-7)
CASSSPGTVFYEQYF

SEQ ID NO: 273281 - protein, 11 aa, Homo sapiens
  CDR3 for alpha chain variable domain of TCR clone 136641 (TRAV12-3, TRAJ43)
CAMRVSNDMRF

SEQ ID NO: 273282 - protein, 14 aa, Homo sapiens
  CDR3 for beta chain variable domain of TCR clone 136641 (TRBV20-1, TRBJ1-1)
CSAQTRIGGTEAVF

SEQ ID NO: 273283 - protein, 18 aa, Homo sapiens
  CDR3 for alpha chain variable domain of TCR clone 136642 (TRAV12-3, TRAJ52)
CAMSRTNAGGTSYGKLTF

SEQ ID NO: 273284 - protein, 17 aa, Homo sapiens
  CDR3 for beta chain variable domain of TCR clone 136642 (TRBV7-3, TRBJ2-3)
CASSLLKRMRGADTQYF

SEQ ID NO: 273285 - protein, 15 aa, Homo sapiens
  CDR3 for alpha chain variable domain of TCR clone 136643 (TRAV17, TRAJ13)
CATDAGSGGYEKVTF

SEQ ID NO: 273286 - protein, 17 aa, Homo sapiens
  CDR3 for beta chain variable domain of TCR clone 136643 (TRBV11-2, TRBJ2-1)
CASSLYPPGVEYNEQFF

SEQ ID NO: 273287 - protein, 19 aa, Homo sapiens
  CDR3 for alpha chain variable domain of TCR clone 136644 (TRAV1-2, TRAJ26)
CLLPLCCDRPDNYGQNFVF

SEQ ID NO: 273288 - protein, 17 aa, Homo sapiens
  CDR3 for beta chain variable domain of TCR clone 136644 (TRBV28, TRBJ2-5)
CASSRQGGLAGAETQYF

SEQ ID NO: 273289 - protein, 16 aa, Homo sapiens
  CDR3 for alpha chain variable domain of TCR clone 136645 (TRAV16, TRAJ4)
CALSRMFSGGYNKLIF

SEQ ID NO: 273290 - protein, 16 aa, Homo sapiens
  CDR3 for beta chain variable domain of TCR clone 136645 (TRBV7-6, TRBJ1-6)
CASSLSSRIGDSPLHF

SEQ ID NO: 273291 - protein, 14 aa, Homo sapiens
  CDR3 for alpha chain variable domain of TCR clone 136646 (TRAV12-2, TRAJ40)
CAVKIPSGTYKYIF

SEQ ID NO: 273292 - protein, 15 aa, Homo sapiens
  CDR3 for beta chain variable domain of TCR clone 136646 (TRBV20-1, TRBJ2-5)
CSAEGTGGLQETQYF

SEQ ID NO: 273293 - protein, 22 aa, Homo sapiens
  CDR3 for alpha chain variable domain of TCR clone 136647 (TRAV12-3, TRAJ26)
CSSETHSPVIQPPTSPNQNFVF

SEQ ID NO: 273294 - protein, 14 aa, Homo sapiens
  CDR3 for beta chain variable domain of TCR clone 136647 (TRBV12-5, TRBJ2-5)
CASGSRTHQETQYF

SEQ ID NO: 273295 - protein, 11 aa, Homo sapiens
  CDR3 for alpha chain variable domain of TCR clone 136648 (TRAV12-1, TRAJ30)
CVVNGQDKIIF

SEQ ID NO: 273296 - protein, 14 aa, Homo sapiens
  CDR3 for beta chain variable domain of TCR clone 136648 (TRBV19, TRBJ2-2)
CASSGQGIAGELFF

SEQ ID NO: 273297 - protein, 14 aa, Homo sapiens
  CDR3 for alpha chain variable domain of TCR clone 136649 (TRAV12-3, TRAJ10)
SHLPLTGGGNKLTF

SEQ ID NO: 273298 - protein, 12 aa, Homo sapiens
  CDR3 for beta chain variable domain of TCR clone 136649 (TRBV12-4, TRBJ1-2)
CASSFIWLHLRF

SEQ ID NO: 273299 - protein, 18 aa, Homo sapiens
  CDR3 for alpha chain variable domain of TCR clone 136650 (TRAV29/DV5, TRAJ52)
CAAGFRGAGGTSYGKLTF

SEQ ID NO: 273300 - protein, 15 aa, Homo sapiens
  CDR3 for beta chain variable domain of TCR clone 136650 (TRBV11-2, TRBJ2-1)
CASSKNRGLIYEQFF

SEQ ID NO: 273301 - protein, 15 aa, Homo sapiens
  CDR3 for alpha chain variable domain of TCR clone 136651 (TRAV35, TRAJ23)
CAGPLGNNQGGKFIF

SEQ ID NO: 273302 - protein, 14 aa, Homo sapiens
  CDR3 for beta chain variable domain of TCR clone 136651 (TRBV7-9, TRBJ1-1)
CASTPLQSYTEAFF

SEQ ID NO: 273303 - protein, 17 aa, Homo sapiens
  CDR3 for alpha chain variable domain of TCR clone 136652 (TRAV27, TRAJ42)
CAERVIYYGGSQGNLIF

SEQ ID NO: 273304 - protein, 14 aa, Homo sapiens
  CDR3 for beta chain variable domain of TCR clone 136652 (TRBV11-3, TRBJ2-7)
CASSPDRNTYEQYF

SEQ ID NO: 273305 - protein, 12 aa, Homo sapiens
  CDR3 for alpha chain variable domain of TCR clone 136653 (TRAV13-1, TRAJ20)
CAASMGDYKLSF

SEQ ID NO: 273306 - protein, 15 aa, Homo sapiens
  CDR3 for beta chain variable domain of TCR clone 136653 (TRBV11-3, TRBJ2-3)
CASSGGLDSTDTQYF

SEQ ID NO: 273307 - protein, 14 aa, Homo sapiens
  CDR3 for alpha chain variable domain of TCR clone 136654 (TRAV12-3, TRAJ54)
CAMRGIQGAQKLVF

SEQ ID NO: 273308 - protein, 13 aa, Homo sapiens
  CDR3 for beta chain variable domain of TCR clone 136654 (TRBV20-1, TRBJ1-1)
CSARGGGNTEAFF

SEQ ID NO: 273309 - protein, 14 aa, Homo sapiens
  CDR3 for alpha chain variable domain of TCR clone 136655 (TRAV23/DV6, TRAJ4)
CAANLSGGYNKLIF

SEQ ID NO: 273310 - protein, 11 aa, Homo sapiens
  CDR3 for beta chain variable domain of TCR clone 136655 (TRBV7-9, TRBJ2-3)
CASSTTDTQYF

SEQ ID NO: 273311 - protein, 14 aa, Homo sapiens
  CDR3 for alpha chain variable domain of TCR clone 136656 (TRAV1-2, TRAJ8)
CAVREDTGFQKLLF

SEQ ID NO: 273312 - protein, 14 aa, Homo sapiens
  CDR3 for beta chain variable domain of TCR clone 136656 (TRBV7-2, TRBJ2-5)
CASSFTQGQETQYF

SEQ ID NO: 273313 - protein, 15 aa, Homo sapiens
  CDR3 for alpha chain variable domain of TCR clone 136657 (TRAV30, TRAJ32)
CVTEILGGATNKLIF

SEQ ID NO: 273314 - protein, 17 aa, Homo sapiens
  CDR3 for beta chain variable domain of TCR clone 136657 (TRBV5-4, TRBJ2-1)
CASSSAGGRGPYNEQFF

SEQ ID NO: 273315 - protein, 14 aa, Homo sapiens
  CDR3 for alpha chain variable domain of TCR clone 136658 (TRAV13-1, TRAJ35)
CAASKGGFGNVLHF

SEQ ID NO: 273316 - protein, 13 aa, Homo sapiens
  CDR3 for beta chain variable domain of TCR clone 136658 (TRBV7-3, TRBJ1-1)
GASSQDWGAEAFF

SEQ ID NO: 273317 - protein, 15 aa, Homo sapiens
  CDR3 for alpha chain variable domain of TCR clone 136659 (TRAV8-2, TRAJ36)
CVVSENWGKQPLLWD

SEQ ID NO: 273318 - protein, 15 aa, Homo sapiens
  CDR3 for beta chain variable domain of TCR clone 136659 (TRBV20-1, TRBJ2-5)
CSAEGTGGLKETQYF

SEQ ID NO: 273319 - protein, 14 aa, Homo sapiens
  CDR3 for alpha chain variable domain of TCR clone 136660 (TRAV1-2, TRAJ8)
CAVREDTGFPKLVF

SEQ ID NO: 273320 - protein, 15 aa, Homo sapiens
  CDR3 for beta chain variable domain of TCR clone 136660 (TRBV4-1, TRBJ2-7)
CASSQNTGRLYEQYF

SEQ ID NO: 273321 - protein, 15 aa, Homo sapiens
  CDR3 for alpha chain variable domain of TCR clone 136661 (TRAV26-1, TRAJ29)
CIVRVEGSGNTPLVC

SEQ ID NO: 273322 - protein, 15 aa, Homo sapiens
  CDR3 for beta chain variable domain of TCR clone 136661 (TRBV7-9, TRBJ1-5)
CASRQGHQPNQHQYF

SEQ ID NO: 273323 - protein, 14 aa, Homo sapiens
  CDR3 for alpha chain variable domain of TCR clone 136662 (TRAV29/DV5, TRAJ36)
CAARRKTGANNLFF

SEQ ID NO: 273324 - protein, 14 aa, Homo sapiens
  CDR3 for beta chain variable domain of TCR clone 136662 (TRBV12-5, TRBJ2-5)
CASGSRTYQENQYF

SEQ ID NO: 273325 - protein, 16 aa, Homo sapiens
  CDR3 for alpha chain variable domain of TCR clone 136663 (TRAV12-3, TRAJ53)
CAMSPGSGRSNYKLTF

SEQ ID NO: 273326 - protein, 11 aa, Homo sapiens
  CDR3 for beta chain variable domain of TCR clone 136663 (TRBV29-1, TRBJ2-5)
CSGDRTGTQYF

SEQ ID NO: 273327 - protein, 13 aa, Homo sapiens
  CDR3 for alpha chain variable domain of TCR clone 136664 (TRAV8-3, TRAJ6)
CAARRGGSYIPTF

SEQ ID NO: 273328 - protein, 15 aa, Homo sapiens
  CDR3 for beta chain variable domain of TCR clone 136664 (TRBV4-1, TRBJ2-3)
CASSNLAGGRDTQNF

SEQ ID NO: 273329 - protein, 14 aa, Homo sapiens
  CDR3 for alpha chain variable domain of TCR clone 136665 (TRAV12-2, TRAJ13)
CAVNPSGGYQKVTF

SEQ ID NO: 273330 - protein, 13 aa, Homo sapiens
  CDR3 for beta chain variable domain of TCR clone 136665 (TRBV20-1, TRBJ1-6)
CSAKLGETSPLHF

SEQ ID NO: 273331 - protein, 12 aa, Homo sapiens
  CDR3 for alpha chain variable domain of TCR clone 136666 (TRAV13-2, TRAJ23)
CAERHRGGKLIF

SEQ ID NO: 273332 - protein, 16 aa, Homo sapiens
  CDR3 for beta chain variable domain of TCR clone 136666 (TRBV7-2, TRBJ2-6)
GAILSGVSSGANVLTF

SEQ ID NO: 273333 - protein, 13 aa, Homo sapiens
  CDR3 for alpha chain variable domain of TCR clone 136667 (TRAV27, TRAJ39)
CAGVNNAGNMLTF

SEQ ID NO: 273334 - protein, 13 aa, Homo sapiens
  CDR3 for beta chain variable domain of TCR clone 136667 (TRBV18, TRBJ1-1)
CASSPNGDTEAFF

SEQ ID NO: 273335 - protein, 19 aa, Homo sapiens
  CDR3 for alpha chain variable domain of TCR clone 136668 (TRAV12-3, TRAJ4)
CAMTGAGTRRAVHPYIQTP

SEQ ID NO: 273336 - protein, 14 aa, Homo sapiens
  CDR3 for beta chain variable domain of TCR clone 136668 (TRBV10-3, TRBJ1-1)
CAISDTDRGVEAFF

SEQ ID NO: 273337 - protein, 12 aa, Homo sapiens
  CDR3 for alpha chain variable domain of TCR clone 136669 (TRAV1-2, TRAJ33)
CAALDSNCQLIW

SEQ ID NO: 273338 - protein, 16 aa, Homo sapiens
  CDR3 for beta chain variable domain of TCR clone 136669 (TRBV6-4, TRBJ1-2)
CASSEAVGDPNYGYTF

SEQ ID NO: 273339 - protein, 14 aa, Homo sapiens
  CDR3 for alpha chain variable domain of TCR clone 136670 (TRAV8-3, TRAJ4)
CAVGAAGGYNKLIF

SEQ ID NO: 273340 - protein, 12 aa, Homo sapiens
  CDR3 for beta chain variable domain of TCR clone 136670 (TRBV7-8, TRBJ2-5)
CASSPRVETQYF

SEQ ID NO: 273341 - protein, 11 aa, Homo sapiens
  CDR3 for alpha chain variable domain of TCR clone 136671 (TRAV16, TRAJ31)
CALFNNARLMF

SEQ ID NO: 273342 - protein, 15 aa, Homo sapiens
  CDR3 for beta chain variable domain of TCR clone 136671 (TRBV18, TRBJ1-1)
CASSPRKGENTEAFF

SEQ ID NO: 273343 - protein, 15 aa, Homo sapiens
  CDR3 for alpha chain variable domain of TCR clone 136672 (TRAV2, TRAJ32)
CAVANYGGATNKLIF

SEQ ID NO: 273344 - protein, 14 aa, Homo sapiens
  CDR3 for beta chain variable domain of TCR clone 136672 (TRBV6-1, TRBJ1-3)
CASVQGGGGNTIYF

SEQ ID NO: 273345 - protein, 12 aa, Homo sapiens
  CDR3 for alpha chain variable domain of TCR clone 136673 (TRAV1-2, TRAJ42)
CVAGGSQGNLIF

SEQ ID NO: 273346 - protein, 14 aa, Homo sapiens
  CDR3 for beta chain variable domain of TCR clone 136673 (TRBV12-4, TRBJ1-2)
CASSPPGPGGGYTF

SEQ ID NO: 273347 - protein, 13 aa, Homo sapiens
  CDR3 for alpha chain variable domain of TCR clone 136674 (TRAV3, TRAJ21)
CAVREPDFNKFYF

SEQ ID NO: 273348 - protein, 15 aa, Homo sapiens
  CDR3 for beta chain variable domain of TCR clone 136674 (TRBV12-4, TRBJ2-5)
CASSGTGQAQETQYF

SEQ ID NO: 273349 - protein, 11 aa, Homo sapiens
  CDR3 for alpha chain variable domain of TCR clone 136675 (TRAV1-2, TRAJ40)
CAVPGTYKYIF

SEQ ID NO: 273350 - protein, 16 aa, Homo sapiens
  CDR3 for beta chain variable domain of TCR clone 136675 (TRBV7-8, TRBJ2-4)
CASSAERTLAKNMQYF

SEQ ID NO: 273351 - protein, 16 aa, Homo sapiens
  CDR3 for alpha chain variable domain of TCR clone 136676 (TRAV3, TRAJ10)
CAVRDMRAGGGNKLTF

SEQ ID NO: 273352 - protein, 13 aa, Homo sapiens
  CDR3 for beta chain variable domain of TCR clone 136676 (TRBV7-9, TRBJ1-2)
CASSLQQNYGYTF

SEQ ID NO: 273353 - protein, 11 aa, Homo sapiens
  CDR3 for alpha chain variable domain of TCR clone 136677 (TRAV24, TRAJ34)
CAFPVTDKLIF

SEQ ID NO: 273354 - protein, 16 aa, Homo sapiens
  CDR3 for beta chain variable domain of TCR clone 136677 (TRBV18, TRBJ2-2)
CASSPGDRGDTGELFF

SEQ ID NO: 273355 - protein, 12 aa, Homo sapiens
  CDR3 for alpha chain variable domain of TCR clone 136678 (TRAV16, TRAJ12)
CALEDSSYKLIF

SEQ ID NO: 273356 - protein, 15 aa, Homo sapiens
  CDR3 for beta chain variable domain of TCR clone 136678 (TRBV7-9, TRBJ1-6)
CASSSPGRGNSPLHF

SEQ ID NO: 273357 - protein, 10 aa, Homo sapiens
  CDR3 for alpha chain variable domain of TCR clone 136679 (TRAV21, TRAJ31)
CAVDNARLLF

SEQ ID NO: 273358 - protein, 15 aa, Homo sapiens
  CDR3 for beta chain variable domain of TCR clone 136679 (TRBV27, TRBJ2-1)
CASSNGGGSSNEQFF

SEQ ID NO: 273359 - protein, 14 aa, Homo sapiens
  CDR3 for alpha chain variable domain of TCR clone 136680 (TRAV8-4, TRAJ9)
CSVSINTVGVKTIF

SEQ ID NO: 273360 - protein, 15 aa, Homo sapiens
  CDR3 for beta chain variable domain of TCR clone 136680 (TRBV10-2, TRBJ2-6)
CASSEQGTGANVLTF

SEQ ID NO: 273361 - protein, 14 aa, Homo sapiens
  CDR3 for alpha chain variable domain of TCR clone 136681 (TRAV1-2, TRAJ8)
CAVREDTGFQKLGF

SEQ ID NO: 273362 - protein, 15 aa, Homo sapiens
  CDR3 for beta chain variable domain of TCR clone 136681 (TRBV7-3, TRBJ2-1)
CASSQRGGALIEQFF

SEQ ID NO: 273363 - protein, 13 aa, Homo sapiens
  CDR3 for alpha chain variable domain of TCR clone 136682 (TRAV35, TRAJ27)
CAGENTNAGKSTF

SEQ ID NO: 273364 - protein, 16 aa, Homo sapiens
  CDR3 for beta chain variable domain of TCR clone 136682 (TRBV7-3, TRBJ2-1)
CASSPGAGAYYNEQFF

SEQ ID NO: 273365 - protein, 13 aa, Homo sapiens
  CDR3 for alpha chain variable domain of TCR clone 136683 (TRAV21, TRAJ20)
CAVGLRVDYKLSF

SEQ ID NO: 273366 - protein, 14 aa, Homo sapiens
  CDR3 for beta chain variable domain of TCR clone 136683 (TRBV4-2, TRBJ2-5)
CASSQNRGRETQYF

SEQ ID NO: 273367 - protein, 16 aa, Homo sapiens
  CDR3 for alpha chain variable domain of TCR clone 136684 (TRAV3, TRAJ21)
CAVRDIERGNFNKFYF

SEQ ID NO: 273368 - protein, 13 aa, Homo sapiens
  CDR3 for beta chain variable domain of TCR clone 136684 (TRBV27, TRBJ2-7)
CSSSLTTGYEQYF

SEQ ID NO: 273369 - protein, 11 aa, Homo sapiens
  CDR3 for alpha chain variable domain of TCR clone 136685 (TRAV3, TRAJ32)
CAVSPKGMVVL

SEQ ID NO: 273370 - protein, 15 aa, Homo sapiens
  CDR3 for beta chain variable domain of TCR clone 136685 (TRBV28, TRBJ2-4)
CAAGSGTLLMGIQYF

SEQ ID NO: 273371 - protein, 18 aa, Homo sapiens
  CDR3 for alpha chain variable domain of TCR clone 136686 (TRAV21, TRAJ52)
CAVRPSPVGGTSYGKLTF

SEQ ID NO: 273372 - protein, 15 aa, Homo sapiens
  CDR3 for beta chain variable domain of TCR clone 136686 (TRBV27, TRBJ2-7)
CASSTAGTGSYEQYF

SEQ ID NO: 273373 - protein, 15 aa, Homo sapiens
  CDR3 for alpha chain variable domain of TCR clone 136687 (TRAV20, TRAJ53)
CAVQERGGSNYKLTF

SEQ ID NO: 273374 - protein, 17 aa, Homo sapiens
  CDR3 for beta chain variable domain of TCR clone 136687 (TRBV11-3, TRBJ2-5)
CASSLPGVRGGKETQYF

SEQ ID NO: 273375 - protein, 14 aa, Homo sapiens
  CDR3 for alpha chain variable domain of TCR clone 136688 (TRAV12-3, TRAJ10)
SHLPLTGGGNKLTF

SEQ ID NO: 273376 - protein, 17 aa, Homo sapiens
  CDR3 for beta chain variable domain of TCR clone 136688 (TRBV7-9, TRBJ2-5)
CASSLGGLAGGLKTQYF

SEQ ID NO: 273377 - protein, 15 aa, Homo sapiens
  CDR3 for alpha chain variable domain of TCR clone 136689 (TRAV36/DV7, TRAJ40)
CAVGPFGSGTYKYIF

SEQ ID NO: 273378 - protein, 16 aa, Homo sapiens
  CDR3 for beta chain variable domain of TCR clone 136689 (TRBV7-2, TRBJ2-6)
CAILSGVSSGANVLTF

SEQ ID NO: 273379 - protein, 18 aa, Homo sapiens
  CDR3 for alpha chain variable domain of TCR clone 136690 (TRAV26-2, TRAJ45)
CILRVDKYSGGGADGLPF

SEQ ID NO: 273380 - protein, 12 aa, Homo sapiens
  CDR3 for beta chain variable domain of TCR clone 136690 (TRBV11-2, TRBJ2-2)
CASSLGGGELFF

SEQ ID NO: 273381 - protein, 15 aa, Homo sapiens
  CDR3 for alpha chain variable domain of TCR clone 136691 (TRAV27, TRAJ28)
ASTSHSGAGSYQLTF

SEQ ID NO: 273382 - protein, 15 aa, Homo sapiens
  CDR3 for beta chain variable domain of TCR clone 136691 (TRBV2, TRBJ2-2)
CASSRETVGTGELFL

SEQ ID NO: 273383 - protein, 14 aa, Homo sapiens
  CDR3 for alpha chain variable domain of TCR clone 136692 (TRAV2, TRAJ9)
CAVEDRSGGFKTIS

SEQ ID NO: 273384 - protein, 16 aa, Homo sapiens
  CDR3 for beta chain variable domain of TCR clone 136692 (TRBV28, TRBJ1-5)
CASSLTGQGWNQPQHF

SEQ ID NO: 273385 - protein, 16 aa, Homo sapiens
  CDR3 for alpha chain variable domain of TCR clone 136693 (TRAV22, TRAJ45)
CAVARGRRGGADGLTF

SEQ ID NO: 273386 - protein, 11 aa, Homo sapiens
  CDR3 for beta chain variable domain of TCR clone 136693 (TRBV29-1, TRBJ2-5)
CSEDRTGTQYF

SEQ ID NO: 273387 - protein, 18 aa, Homo sapiens
  CDR3 for alpha chain variable domain of TCR clone 136694 (TRAV21, TRAJ52)
CAVRPSPAGGNSYGKLTF

SEQ ID NO: 273388 - protein, 13 aa, Homo sapiens
  CDR3 for beta chain variable domain of TCR clone 136694 (TRBV7-3, TRBJ1-1)
CASSQDWGAEAFF

SEQ ID NO: 273389 - protein, 15 aa, Homo sapiens
  CDR3 for alpha chain variable domain of TCR clone 136695 (TRAV27, TRAJ38)
CAARRNAGNNRKLFC

SEQ ID NO: 273390 - protein, 13 aa, Homo sapiens
  CDR3 for beta chain variable domain of TCR clone 136695 (TRBV12-5, TRBJ2-3)
CASGDRQSDTQYF

SEQ ID NO: 273391 - protein, 13 aa, Homo sapiens
  CDR3 for alpha chain variable domain of TCR clone 136696 (TRAV1-1, TRAJ30)
CAVRSDRDDKIIF

SEQ ID NO: 273392 - protein, 14 aa, Homo sapiens
  CDR3 for beta chain variable domain of TCR clone 136696 (TRBV11-2, TRBJ2-5)
CASSRTGGIETQYF

SEQ ID NO: 273393 - protein, 12 aa, Homo sapiens
  CDR3 for alpha chain variable domain of TCR clone 136697 (TRAV12-1, TRAJ40)
CVVYSGTYKYIF

SEQ ID NO: 273394 - protein, 16 aa, Homo sapiens
  CDR3 for beta chain variable domain of TCR clone 136697 (TRBV3-1, TRBJ2-5)
CASSQDWASGQETQYF

SEQ ID NO: 273395 - protein, 16 aa, Homo sapiens
  CDR3 for alpha chain variable domain of TCR clone 136698 (TRAV12-3, TRAJ53)
CAMSPGSGGSNYKLTF

SEQ ID NO: 273396 - protein, 13 aa, Homo sapiens
  CDR3 for beta chain variable domain of TCR clone 136698 (TRBV7-3, TRBJ1-1)
CASSQYWGAEAFF

SEQ ID NO: 273397 - protein, 13 aa, Homo sapiens
  CDR3 for alpha chain variable domain of TCR clone 136699 (TRAV21, TRAJ20)
CAVGLRVDYKLSF

SEQ ID NO: 273398 - protein, 15 aa, Homo sapiens
  CDR3 for beta chain variable domain of TCR clone 136699 (TRBV13, TRBJ2-1)
CASSLLSGLNNEQFF

SEQ ID NO: 273399 - protein, 15 aa, Homo sapiens
  CDR3 for alpha chain variable domain of TCR clone 136700 (TRAV26-1, TRAJ22)
CTVRVSFWFCKATDL

SEQ ID NO: 273400 - protein, 15 aa, Homo sapiens
  CDR3 for beta chain variable domain of TCR clone 136700 (TRBV7-9, TRBJ1-6)
CASSSATADNSPLHF

SEQ ID NO: 273401 - protein, 14 aa, Homo sapiens
  CDR3 for alpha chain variable domain of TCR clone 136701 (TRAV26-1, TRAJ38)
CIADTAGNNRKLIW

SEQ ID NO: 273402 - protein, 14 aa, Homo sapiens
  CDR3 for beta chain variable domain of TCR clone 136701 (TRBV4-1, TRBJ2-2)
CASSQAVNTGELFF

SEQ ID NO: 273403 - protein, 13 aa, Homo sapiens
  CDR3 for alpha chain variable domain of TCR clone 136702 (TRAV12-1, TRAJ16)
CVVNGPDGQKLLF

SEQ ID NO: 273404 - protein, 12 aa, Homo sapiens
  CDR3 for beta chain variable domain of TCR clone 136702 (TRBV2, TRBJ1-1)
CQESTGGFHAFF

SEQ ID NO: 273405 - protein, 17 aa, Homo sapiens
  CDR3 for alpha chain variable domain of TCR clone 136703 (TRAV23/DV6, TRAJ57)
CAASSTLSQGGSEKLVF

SEQ ID NO: 273406 - protein, 14 aa, Homo sapiens
  CDR3 for beta chain variable domain of TCR clone 136703 (TRBV25-1, TRBJ1-1)
CASTHLGGHTEAFF

SEQ ID NO: 273407 - protein, 14 aa, Homo sapiens
  CDR3 for alpha chain variable domain of TCR clone 136704 (TRAV1-2, TRAJ8)
CAVREDTGFQKLVF

SEQ ID NO: 273408 - protein, 16 aa, Homo sapiens
  CDR3 for beta chain variable domain of TCR clone 136704 (TRBV5-1, TRBJ2-2)
CASSLWETTNTGELFF

SEQ ID NO: 273409 - protein, 13 aa, Homo sapiens
  CDR3 for alpha chain variable domain of TCR clone 136705 (TRAV12-2, TRAJ18)
CAVRGPTLGRLYF

SEQ ID NO: 273410 - protein, 20 aa, Homo sapiens
  CDR3 for beta chain variable domain of TCR clone 136705 (TRBV7-8, TRBJ2-2)
CASSHLFPGLTIHITGELFF

SEQ ID NO: 273411 - protein, 16 aa, Homo sapiens
  CDR3 for alpha chain variable domain of TCR clone 136706 (TRAV3, TRAJ37)
CAVRPHGSGNTGKLTF

SEQ ID NO: 273412 - protein, 14 aa, Homo sapiens
  CDR3 for beta chain variable domain of TCR clone 136706 (TRBV20-1, TRBJ2-1)
CSARGGSSYNEQFF

SEQ ID NO: 273413 - protein, 11 aa, Homo sapiens
  CDR3 for alpha chain variable domain of TCR clone 136707 (TRAV2, TRAJ33)
CAVDSNYQLIW

SEQ ID NO: 273414 - protein, 13 aa, Homo sapiens
  CDR3 for beta chain variable domain of TCR clone 136707 (TRBV7-2, TRBJ2-7)
CASSSPSWSEQYF

SEQ ID NO: 273415 - protein, 11 aa, Homo sapiens
  CDR3 for alpha chain variable domain of TCR clone 136708 (TRAV16, TRAJ26)
CSRSYGQNFVF

SEQ ID NO: 273416 - protein, 14 aa, Homo sapiens
  CDR3 for beta chain variable domain of TCR clone 136708 (TRBV10-3, TRBJ2-1)
CAISSDLAYNEQFF

SEQ ID NO: 273417 - protein, 14 aa, Homo sapiens
  CDR3 for alpha chain variable domain of TCR clone 136709 (TRAV1-2, TRAJ16)
CAVNRFSDGQKLLF

SEQ ID NO: 273418 - protein, 15 aa, Homo sapiens
  CDR3 for beta chain variable domain of TCR clone 136709 (TRBV19, TRBJ2-1)
CASSIGLAGWDEQFF

SEQ ID NO: 273419 - protein, 14 aa, Homo sapiens
  CDR3 for alpha chain variable domain of TCR clone 136710 (TRAV40, TRAJ44)
CILVDTGTASKLTF

SEQ ID NO: 273420 - protein, 17 aa, Homo sapiens
  CDR3 for beta chain variable domain of TCR clone 136710 (TRBV20-1, TRBJ2-1)
CSASSSGLAGSYNEQFF

SEQ ID NO: 273421 - protein, 14 aa, Homo sapiens
  CDR3 for alpha chain variable domain of TCR clone 136711 (TRAV35, TRAJ33)
CWPRGRDSNYQLIW

SEQ ID NO: 273422 - protein, 11 aa, Homo sapiens
  CDR3 for beta chain variable domain of TCR clone 136711 (TRBV10-3, TRBJ2-7)
CAISEELEQYF

SEQ ID NO: 273423 - protein, 15 aa, Homo sapiens
  CDR3 for alpha chain variable domain of TCR clone 136712 (TRAV29/DV5, TRAJ53)
CAATASGGSNYKLTF

SEQ ID NO: 273424 - protein, 19 aa, Homo sapiens
  CDR3 for beta chain variable domain of TCR clone 136712 (TRBV5-1, TRBJ2-3)
CASSLWLAGGITTTDTQYF

SEQ ID NO: 273425 - protein, 14 aa, Homo sapiens
  CDR3 for alpha chain variable domain of TCR clone 136713 (TRAV13-1, TRAJ35)
CAASKGGFGNVLHC

SEQ ID NO: 273426 - protein, 13 aa, Homo sapiens
  CDR3 for beta chain variable domain of TCR clone 136713 (TRBV7-3, TRBJ1-1)
CARSQDWGAAAFF

SEQ ID NO: 273427 - protein, 15 aa, Homo sapiens
  CDR3 for alpha chain variable domain of TCR clone 136714 (TRAV17, TRAJ10)
CATVLLTGGGNKITF

SEQ ID NO: 273428 - protein, 17 aa, Homo sapiens
  CDR3 for beta chain variable domain of TCR clone 136714 (TRBV11-2, TRBJ2-1)
CASSLCPPGVEYNEQFS

SEQ ID NO: 273429 - protein, 13 aa, Homo sapiens
  CDR3 for alpha chain variable domain of TCR clone 136715 (TRAV1-2, TRAJ26)
CAVRPNYGQNFVF

SEQ ID NO: 273430 - protein, 14 aa, Homo sapiens
  CDR3 for beta chain variable domain of TCR clone 136715 (TRBV4-1, TRBJ2-5)
CASSQDLALETQDF

SEQ ID NO: 273431 - protein, 14 aa, Homo sapiens
  CDR3 for alpha chain variable domain of TCR clone 136716 (TRAV12-3, TRAJ10)
SHLPLTGGGNKLTF

SEQ ID NO: 273432 - protein, 15 aa, Homo sapiens
  CDR3 for beta chain variable domain of TCR clone 136716 (TRBV20-1, TRBJ2-7)
CSARREAGAPREQYF

SEQ ID NO: 273433 - protein, 17 aa, Homo sapiens
  CDR3 for alpha chain variable domain of TCR clone 136717 (TRAV26-2, TRAJ42)
CIRREVGYGGGQGNLIF

SEQ ID NO: 273434 - protein, 16 aa, Homo sapiens
  CDR3 for beta chain variable domain of TCR clone 136717 (TRBV12-4, TRBJ2-7)
CASSLIGGTGTYEQYF

SEQ ID NO: 273435 - protein, 13 aa, Homo sapiens
  CDR3 for alpha chain variable domain of TCR clone 136718 (TRAV30, TRAJ16)
CGTFGGDGQKLLF

SEQ ID NO: 273436 - protein, 16 aa, Homo sapiens
  CDR3 for beta chain variable domain of TCR clone 136718 (TRBV19, TRBJ2-2)
CASRSPGTGATGELFF

SEQ ID NO: 273437 - protein, 15 aa, Homo sapiens
  CDR3 for alpha chain variable domain of TCR clone 136719 (TRAV8-3, TRAJ7)
CAVGSITYGNNRLAF

SEQ ID NO: 273438 - protein, 15 aa, Homo sapiens
  CDR3 for beta chain variable domain of TCR clone 136719 (TRBV4-2, TRBJ1-1)
CASSQEDLPRTEAFF

SEQ ID NO: 273439 - protein, 23 aa, Homo sapiens
  CDR3 for alpha chain variable domain of TCR clone 136720 (TRAV8-6, TRAJ36)
CAGSDWLGQTASSLGLERDSPLF

SEQ ID NO: 273440 - protein, 12 aa, Homo sapiens
  CDR3 for beta chain variable domain of TCR clone 136720 (TRBV11-2, TRBJ2-2)
CASSLPTGALFF

SEQ ID NO: 273441 - protein, 16 aa, Homo sapiens
  CDR3 for alpha chain variable domain of TCR clone 136721 (TRAV21, TRAJ33)
CAVSPASMDSNYQLIG

SEQ ID NO: 273442 - protein, 15 aa, Homo sapiens
  CDR3 for beta chain variable domain of TCR clone 136721 (TRBV6-6, TRBJ2-7)
CASSYSYGGSYEQYF

SEQ ID NO: 273443 - protein, 13 aa, Homo sapiens
  CDR3 for alpha chain variable domain of TCR clone 136722 (TRAV2, TRAJ40)
CAVVTSGTYKYIF

SEQ ID NO: 273444 - protein, 14 aa, Homo sapiens
  CDR3 for beta chain variable domain of TCR clone 136722 (TRBV28, TRBJ2-7)
CASIPGLARDKQYF

SEQ ID NO: 273445 - protein, 13 aa, Homo sapiens
  CDR3 for alpha chain variable domain of TCR clone 136723 (TRAV17, TRAJ9)
CATFLTGGFKTIF

SEQ ID NO: 273446 - protein, 13 aa, Homo sapiens
  CDR3 for beta chain variable domain of TCR clone 136723 (TRBV5-4, TRBJ1-1)
CASSFQVNTEAFF

SEQ ID NO: 273447 - protein, 13 aa, Homo sapiens
  CDR3 for alpha chain variable domain of TCR clone 136724 (TRAV13-1, TRAJ21)
CAASIYNFNKFYF

SEQ ID NO: 273448 - protein, 16 aa, Homo sapiens
  CDR3 for beta chain variable domain of TCR clone 136724 (TRBV27, TRBJ2-1)
CASSSLTSGSGNEQFF

SEQ ID NO: 273449 - protein, 17 aa, Homo sapiens
  CDR3 for alpha chain variable domain of TCR clone 136725 (TRAV23/DV6, TRAJ12)
CAAIDLGAMDSSYKFIF

SEQ ID NO: 273450 - protein, 14 aa, Homo sapiens
  CDR3 for beta chain variable domain of TCR clone 136725 (TRBV20-1, TRBJ2-1)
CSARRGGSYNEQFF

SEQ ID NO: 273451 - protein, 14 aa, Homo sapiens
  CDR3 for alpha chain variable domain of TCR clone 136726 (TRAV1-2, TRAJ8)
CAVREDTGFQKLVF

SEQ ID NO: 273452 - protein, 13 aa, Homo sapiens
  CDR3 for beta chain variable domain of TCR clone 136726 (TRBV12-4, TRBJ2-7)
CASSFVPTAEQYY

SEQ ID NO: 273453 - protein, 17 aa, Homo sapiens
  CDR3 for alpha chain variable domain of TCR clone 136727 (TRAV27, TRAJ42)
CAERVIYYGGSQGNLIF

SEQ ID NO: 273454 - protein, 16 aa, Homo sapiens
  CDR3 for beta chain variable domain of TCR clone 136727 (TRBV28, TRBJ1-4)
CASSPPYRGRSEKLFF

SEQ ID NO: 273455 - protein, 14 aa, Homo sapiens
  CDR3 for alpha chain variable domain of TCR clone 136728 (TRAV1-2, TRAJ16)
CAVNRFSDGQKLLF

SEQ ID NO: 273456 - protein, 17 aa, Homo sapiens
  CDR3 for beta chain variable domain of TCR clone 136728 (TRBV14, TRBJ2-5)
CASSQASGRPSTSGQAR

SEQ ID NO: 273457 - protein, 15 aa, Homo sapiens
  CDR3 for alpha chain variable domain of TCR clone 136729 (TRAV3, TRAJ22)
CAVSDRGGSARQLTL

SEQ ID NO: 273458 - protein, 16 aa, Homo sapiens
  CDR3 for beta chain variable domain of TCR clone 136729 (TRBV5-4, TRBJ2-3)
CASQQPGAGGADTQYF

SEQ ID NO: 273459 - protein, 16 aa, Homo sapiens
  CDR3 for alpha chain variable domain of TCR clone 136730 (TRAV3, TRAJ4)
CAVRPSPSGGYNKLFF

SEQ ID NO: 273460 - protein, 12 aa, Homo sapiens
  CDR3 for beta chain variable domain of TCR clone 136730 (TRBV7-9, TRBJ2-7)
CASSQGVYEQYF

SEQ ID NO: 273461 - protein, 10 aa, Homo sapiens
  CDR3 for alpha chain variable domain of TCR clone 136731 (TRAV23/DV6, TRAJ57)
CAASSTLSQG

SEQ ID NO: 273462 - protein, 11 aa, Homo sapiens
  CDR3 for beta chain variable domain of TCR clone 136731 (TRBV11-2, TRBJ1-1)
CASSINTEAFF

SEQ ID NO: 273463 - protein, 14 aa, Homo sapiens
  CDR3 for alpha chain variable domain of TCR clone 136732 (TRAV13-1, TRAJ35)
WAASKGGFVNVLHC

SEQ ID NO: 273464 - protein, 13 aa, Homo sapiens
  CDR3 for beta chain variable domain of TCR clone 136732 (TRBV7-3, TRBJ1-1)
CASSQDWGAEAFF

SEQ ID NO: 273465 - protein, 12 aa, Homo sapiens
  CDR3 for alpha chain variable domain of TCR clone 136733 (TRAV23/DV6, TRAJ30)
CAASQGDDKIIF

SEQ ID NO: 273466 - protein, 13 aa, Homo sapiens
  CDR3 for beta chain variable domain of TCR clone 136733 (TRBV19, TRBJ1-2)
CASSVTGQDGYSF

SEQ ID NO: 273467 - protein, 19 aa, Homo sapiens
  CDR3 for alpha chain variable domain of TCR clone 136734 (TRAV26-1, TRAJ28)
CIVRVAHAYSGAGSYQLIF

SEQ ID NO: 273468 - protein, 17 aa, Homo sapiens
  CDR3 for beta chain variable domain of TCR clone 136734 (TRBV9, TRBJ2-2)
CASSVGGQGTDTGELFF

SEQ ID NO: 273469 - protein, 14 aa, Homo sapiens
  CDR3 for alpha chain variable domain of TCR clone 136735 (TRAV13-2, TRAJ39)
CAEKHNNAGNMLTF

SEQ ID NO: 273470 - protein, 13 aa, Homo sapiens
  CDR3 for beta chain variable domain of TCR clone 136735 (TRBV4-3, TRBJ2-1)
CASSQKLERQQFF

SEQ ID NO: 273471 - protein, 19 aa, Homo sapiens
  CDR3 for alpha chain variable domain of TCR clone 136736 (TRAV13-1, TRAJ52)
CGASPYQNAGGTSYGKLTF

SEQ ID NO: 273472 - protein, 14 aa, Homo sapiens
  CDR3 for beta chain variable domain of TCR clone 136736 (TRBV19, TRBJ2-7)
CASTIQGRPYEQYF

SEQ ID NO: 273473 - protein, 15 aa, Homo sapiens
  CDR3 for alpha chain variable domain of TCR clone 136737 (TRAV12-3, TRAJ22)
CAMRTISGSARQLTF

SEQ ID NO: 273474 - protein, 12 aa, Homo sapiens
  CDR3 for beta chain variable domain of TCR clone 136737 (TRBV11-2, TRBJ2-2)
CASSLGGGELFF

SEQ ID NO: 273475 - protein, 18 aa, Homo sapiens
  CDR3 for alpha chain variable domain of TCR clone 136738 (TRAV21, TRAJ52)
CAVRPSPAGGTSSGKLTF

SEQ ID NO: 273476 - protein, 17 aa, Homo sapiens
  CDR3 for beta chain variable domain of TCR clone 136738 (TRBV13, TRBJ2-3)
CARSLSRVAGGRNTQYF

SEQ ID NO: 273477 - protein, 16 aa, Homo sapiens
  CDR3 for alpha chain variable domain of TCR clone 136739 (TRAV30, TRAJ24)
CGTEIVDADSRGKFQF

SEQ ID NO: 273478 - protein, 12 aa, Homo sapiens
  CDR3 for beta chain variable domain of TCR clone 136739 (TRBV11-2, TRBJ2-2)
CASSLPTGELFF

SEQ ID NO: 273479 - protein, 14 aa, Homo sapiens
  CDR3 for alpha chain variable domain of TCR clone 136740 (TRAV12-2, TRAJ17)
CALLFKAAGNKLTF

SEQ ID NO: 273480 - protein, 13 aa, Homo sapiens
  CDR3 for beta chain variable domain of TCR clone 136740 (TRBV10-3, TRBJ2-7)
CASKLAVNYEQYF

SEQ ID NO: 273481 - protein, 12 aa, Homo sapiens
  CDR3 for alpha chain variable domain of TCR clone 136741 (TRAV13-2, TRAJ23)
CAERHRGGKLIF

SEQ ID NO: 273482 - protein, 13 aa, Homo sapiens
  CDR3 for beta chain variable domain of TCR clone 136741 (TRBV10-2, TRBJ2-7)
CASGASGGYEQYF

SEQ ID NO: 273483 - protein, 18 aa, Homo sapiens
  CDR3 for alpha chain variable domain of TCR clone 136742 (TRAV12-3, TRAJ52)
CAMSVGGAGGTSYGKLTF

SEQ ID NO: 273484 - protein, 17 aa, Homo sapiens
  CDR3 for beta chain variable domain of TCR clone 136742 (TRBV13, TRBJ2-3)
CAGSLSRVAGGRNTQYF

SEQ ID NO: 273485 - protein, 15 aa, Homo sapiens
  CDR3 for alpha chain variable domain of TCR clone 136743 (TRAV3, TRAJ22)
CAVRDRGGSARQLTF

SEQ ID NO: 273486 - protein, 16 aa, Homo sapiens
  CDR3 for beta chain variable domain of TCR clone 136743 (TRBV5-1, TRBJ2-5)
CASSLRRTSGQETQYF

SEQ ID NO: 273487 - protein, 12 aa, Homo sapiens
  CDR3 for alpha chain variable domain of TCR clone 136744 (TRAV13-1, TRAJ15)
CAANQAGTDLIF

SEQ ID NO: 273488 - protein, 14 aa, Homo sapiens
  CDR3 for beta chain variable domain of TCR clone 136744 (TRBV7-2, TRBJ2-5)
CASSPLGQSETQYF

SEQ ID NO: 273489 - protein, 11 aa, Homo sapiens
  CDR3 for alpha chain variable domain of TCR clone 136745 (TRAV3, TRAJ21)
CAVGNFKKIYF

SEQ ID NO: 273490 - protein, 16 aa, Homo sapiens
  CDR3 for beta chain variable domain of TCR clone 136745 (TRBV19, TRBJ2-1)
CASSKAGPSSYNEQFF

SEQ ID NO: 273491 - protein, 14 aa, Homo sapiens
  CDR3 for alpha chain variable domain of TCR clone 136746 (TRAV35, TRAJ42)
CAGRYGGSQGNLIF

SEQ ID NO: 273492 - protein, 15 aa, Homo sapiens
  CDR3 for beta chain variable domain of TCR clone 136746 (TRBV7-9, TRBJ2-1)
CASSLDGGRANEQFF

SEQ ID NO: 273493 - protein, 16 aa, Homo sapiens
  CDR3 for alpha chain variable domain of TCR clone 136747 (TRAV12-2, TRAJ40)
CAVIRGGTSGTYKYIF

SEQ ID NO: 273494 - protein, 11 aa, Homo sapiens
  CDR3 for beta chain variable domain of TCR clone 136747 (TRBV19, TRBJ1-1)
CASSIGSEAFF

SEQ ID NO: 273495 - protein, 14 aa, Homo sapiens
  CDR3 for alpha chain variable domain of TCR clone 136748 (TRAV2, TRAJ23)
CAVIIYNQGGKLIL

SEQ ID NO: 273496 - protein, 13 aa, Homo sapiens
  CDR3 for beta chain variable domain of TCR clone 136748 (TRBV20-1, TRBJ2-3)
CSATSGGAGTQYF

SEQ ID NO: 273497 - protein, 15 aa, Homo sapiens
  CDR3 for alpha chain variable domain of TCR clone 136749 (TRAV13-1, TRAJ32)
CAASIYGGATNKLIF

SEQ ID NO: 273498 - protein, 15 aa, Homo sapiens
  CDR3 for beta chain variable domain of TCR clone 136749 (TRBV10-2, TRBJ2-6)
CASSEQGTGANVLTF

SEQ ID NO: 273499 - protein, 14 aa, Homo sapiens
  CDR3 for alpha chain variable domain of TCR clone 136750 (TRAV26-1, TRAJ38)
CIADNAGNNRKRIW

SEQ ID NO: 273500 - protein, 15 aa, Homo sapiens
  CDR3 for beta chain variable domain of TCR clone 136750 (TRBV20-1, TRBJ2-7)
CSARDRVSGMDEQYF

SEQ ID NO: 273501 - protein, 13 aa, Homo sapiens
  CDR3 for alpha chain variable domain of TCR clone 136751 (TRAV1-1, TRAJ9)
CAAKNTGGFKTIF

SEQ ID NO: 273502 - protein, 14 aa, Homo sapiens
  CDR3 for beta chain variable domain of TCR clone 136751 (TRBV7-6, TRBJ2-7)
CASSFRQGADEQYF

SEQ ID NO: 273503 - protein, 13 aa, Homo sapiens
  CDR3 for alpha chain variable domain of TCR clone 136752 (TRAV12-2, TRAJ40)
CAVKRTGTYKYIF

SEQ ID NO: 273504 - protein, 15 aa, Homo sapiens
  CDR3 for beta chain variable domain of TCR clone 136752 (TRBV11-2, TRBJ2-1)
CASSLGTSGLNEQFF

SEQ ID NO: 273505 - protein, 15 aa, Homo sapiens
  CDR3 for alpha chain variable domain of TCR clone 136753 (TRAV12-2, TRAJ53)
CAVNGGGGSNYKLTF

SEQ ID NO: 273506 - protein, 13 aa, Homo sapiens
  CDR3 for beta chain variable domain of TCR clone 136753 (TRBV5-5, TRBJ1-2)
CASSFWRGEDYTF

SEQ ID NO: 273507 - protein, 13 aa, Homo sapiens
  CDR3 for alpha chain variable domain of TCR clone 136754 (TRAV27, TRAJ11)
CAGGGSGYSTLPF

SEQ ID NO: 273508 - protein, 15 aa, Homo sapiens
  CDR3 for beta chain variable domain of TCR clone 136754 (TRBV5-1, TRBJ1-1)
CASSLGQGRFAEAFF

SEQ ID NO: 273509 - protein, 16 aa, Homo sapiens
  CDR3 for alpha chain variable domain of TCR clone 136755 (TRAV21, TRAJ52)
CAVTNAGGTSFGELTF

SEQ ID NO: 273510 - protein, 13 aa, Homo sapiens
  CDR3 for beta chain variable domain of TCR clone 136755 (TRBV20-1, TRBJ2-3)
CSARLAGTDTQYF

SEQ ID NO: 273511 - protein, 12 aa, Homo sapiens
  CDR3 for alpha chain variable domain of TCR clone 136756 (TRAV26-1, TRAJ54)
CIGGWGAQKLVF

SEQ ID NO: 273512 - protein, 14 aa, Homo sapiens
  CDR3 for beta chain variable domain of TCR clone 136756 (TRBV11-2, TRBJ1-2)
CASSSGQAGDGYTL

SEQ ID NO: 273513 - protein, 17 aa, Homo sapiens
  CDR3 for alpha chain variable domain of TCR clone 136757 (TRAV1-2, TRAJ8)
CAVRDPDENTGFQKLVF

SEQ ID NO: 273514 - protein, 16 aa, Homo sapiens
  CDR3 for beta chain variable domain of TCR clone 136757 (TRBV7-9, TRBJ2-2)
CASSGFGGADTGELFL

SEQ ID NO: 273515 - protein, 11 aa, Homo sapiens
  CDR3 for alpha chain variable domain of TCR clone 136758 (TRAV3, TRAJ17)
CAEAAGTKLTF

SEQ ID NO: 273516 - protein, 15 aa, Homo sapiens
  CDR3 for beta chain variable domain of TCR clone 136758 (TRBV12-4, TRBJ2-7)
CASSLGSGGPYEQYF

SEQ ID NO: 273517 - protein, 12 aa, Homo sapiens
  CDR3 for alpha chain variable domain of TCR clone 136759 (TRAV20, TRAJ45)
CAVRGGADGLTF

SEQ ID NO: 273518 - protein, 14 aa, Homo sapiens
  CDR3 for beta chain variable domain of TCR clone 136759 (TRBV5-7, TRBJ2-5)
CASRETGDSGTQYF

SEQ ID NO: 273519 - protein, 16 aa, Homo sapiens
  CDR3 for alpha chain variable domain of TCR clone 136760 (TRAV8-3, TRAJ8)
CAVPRDGNTGFQKLVF

SEQ ID NO: 273520 - protein, 13 aa, Homo sapiens
  CDR3 for beta chain variable domain of TCR clone 136760 (TRBV6-1, TRBJ1-1)
CASSRQGNTEAFF

SEQ ID NO: 273521 - protein, 14 aa, Homo sapiens
  CDR3 for alpha chain variable domain of TCR clone 136761 (TRAV12-3, TRAJ10)
SHLPLTGGGNKLTF

SEQ ID NO: 273522 - protein, 14 aa, Homo sapiens
  CDR3 for beta chain variable domain of TCR clone 136761 (TRBV7-2, TRBJ2-1)
CASSLGVGYNEQFF

SEQ ID NO: 273523 - protein, 13 aa, Homo sapiens
  CDR3 for alpha chain variable domain of TCR clone 136762 (TRAV27, TRAJ40)
CAGPPSGTYKYIF

SEQ ID NO: 273524 - protein, 18 aa, Homo sapiens
  CDR3 for beta chain variable domain of TCR clone 136762 (TRBV7-9, TRBJ2-1)
CASGTGLAEGSSYNEQFF

SEQ ID NO: 273525 - protein, 12 aa, Homo sapiens
  CDR3 for alpha chain variable domain of TCR clone 136763 (TRAV2, TRAJ36)
CAELTGANNLFF

SEQ ID NO: 273526 - protein, 14 aa, Homo sapiens
  CDR3 for beta chain variable domain of TCR clone 136763 (TRBV13, TRBJ2-5)
CASSLGPRGETQYF

SEQ ID NO: 273527 - protein, 11 aa, Homo sapiens
  CDR3 for alpha chain variable domain of TCR clone 136764 (TRAV8-4, TRAJ20)
CAVTNVLTTTS

SEQ ID NO: 273528 - protein, 14 aa, Homo sapiens
  CDR3 for beta chain variable domain of TCR clone 136764 (TRBV6-6, TRBJ2-7)
CASSDSGAGYEQYF

SEQ ID NO: 273529 - protein, 13 aa, Homo sapiens
  CDR3 for alpha chain variable domain of TCR clone 136765 (TRAV12-2, TRAJ15)
CAVFNQAGTALIF

SEQ ID NO: 273530 - protein, 12 aa, Homo sapiens
  CDR3 for beta chain variable domain of TCR clone 136765 (TRBV7-8, TRBJ2-7)
CASSLGDREQYF

SEQ ID NO: 273531 - protein, 14 aa, Homo sapiens
  CDR3 for alpha chain variable domain of TCR clone 136766 (TRAV35, TRAJ22)
CAGLRPGSARQLTL

SEQ ID NO: 273532 - protein, 14 aa, Homo sapiens
  CDR3 for beta chain variable domain of TCR clone 136766 (TRBV4-1, TRBJ2-7)
CASSPVAGGDEQYF

SEQ ID NO: 273533 - protein, 11 aa, Homo sapiens
  CDR3 for alpha chain variable domain of TCR clone 136767 (TRAV12-2, TRAJ43)
CASPIGNDMRF

SEQ ID NO: 273534 - protein, 16 aa, Homo sapiens
  CDR3 for beta chain variable domain of TCR clone 136767 (TRBV12-4, TRBJ1-5)
CASSRPVGGSNQPQHF

SEQ ID NO: 273535 - protein, 15 aa, Homo sapiens
  CDR3 for alpha chain variable domain of TCR clone 136768 (TRAV8-2, TRAJ24)
CVVSDRTDSWGELQF

SEQ ID NO: 273536 - protein, 11 aa, Homo sapiens
  CDR3 for beta chain variable domain of TCR clone 136768 (TRBV20-1, TRBJ1-2)
CSVQGAGGYTF

SEQ ID NO: 273537 - protein, 14 aa, Homo sapiens
  CDR3 for alpha chain variable domain of TCR clone 136769 (TRAV1-2, TRAJ8)
CAGREDTGFQKLVF

SEQ ID NO: 273538 - protein, 14 aa, Homo sapiens
  CDR3 for beta chain variable domain of TCR clone 136769 (TRBV29-1, TRBJ1-4)
CSVTGTGGNEKLFF

SEQ ID NO: 273539 - protein, 16 aa, Homo sapiens
  CDR3 for alpha chain variable domain of TCR clone 136770 (TRAV30, TRAJ24)
CGTEIVDADSWGKFQF

SEQ ID NO: 273540 - protein, 13 aa, Homo sapiens
  CDR3 for beta chain variable domain of TCR clone 136770 (TRBV20-1, TRBJ2-5)
CSARYTGEETQYF

SEQ ID NO: 273541 - protein, 14 aa, Homo sapiens
  CDR3 for alpha chain variable domain of TCR clone 136771 (TRAV35, TRAJ42)
CAGRYGGSQGNLIF

SEQ ID NO: 273542 - protein, 15 aa, Homo sapiens
  CDR3 for beta chain variable domain of TCR clone 136771 (TRBV7-9, TRBJ2-1)
CASSLDWGRANEQFF

SEQ ID NO: 273543 - protein, 13 aa, Homo sapiens
  CDR3 for alpha chain variable domain of TCR clone 136772 (TRAV21, TRAJ57)
CAVTQGGSEKLVF

SEQ ID NO: 273544 - protein, 17 aa, Homo sapiens
  CDR3 for beta chain variable domain of TCR clone 136772 (TRBV13, TRBJ2-3)
WASSLSMVAGGRNTQYF

SEQ ID NO: 273545 - protein, 14 aa, Homo sapiens
  CDR3 for alpha chain variable domain of TCR clone 136773 (TRAV8-4, TRAJ5)
CAVSTDTGRRALTF

SEQ ID NO: 273546 - protein, 12 aa, Homo sapiens
  CDR3 for beta chain variable domain of TCR clone 136773 (TRBV2, TRBJ2-7)
CASTYRTDEQYF

SEQ ID NO: 273547 - protein, 14 aa, Homo sapiens
  CDR3 for alpha chain variable domain of TCR clone 136774 (TRAV35, TRAJ50)
CAGHRKTYDDKVIF

SEQ ID NO: 273548 - protein, 13 aa, Homo sapiens
  CDR3 for beta chain variable domain of TCR clone 136774 (TRBV7-7, TRBJ2-3)
CASSLSRADTQDF

SEQ ID NO: 273549 - protein, 14 aa, Homo sapiens
  CDR3 for alpha chain variable domain of TCR clone 136775 (TRAV12-2, TRAJ13)
CAVKKTGGYQKVTF

SEQ ID NO: 273550 - protein, 17 aa, Homo sapiens
  CDR3 for beta chain variable domain of TCR clone 136775 (TRBV13, TRBJ2-3)
CASSLSRVAGGSNTQYF

SEQ ID NO: 273551 - protein, 16 aa, Homo sapiens
  CDR3 for alpha chain variable domain of TCR clone 136776 (TRAV3, TRAJ10)
CAVRDMRAGGGNKLTF

SEQ ID NO: 273552 - protein, 16 aa, Homo sapiens
  CDR3 for beta chain variable domain of TCR clone 136776 (TRBV5-1, TRBJ2-1)
CASSPCTSGEYNEQFF

SEQ ID NO: 273553 - protein, 18 aa, Homo sapiens
  CDR3 for alpha chain variable domain of TCR clone 136777 (TRAV21, TRAJ52)
CAVRPSPAGGTSYGKLTF

SEQ ID NO: 273554 - protein, 16 aa, Homo sapiens
  CDR3 for beta chain variable domain of TCR clone 136777 (TRBV7-9, TRBJ2-1)
CASSDVAGGSYNEQFF

SEQ ID NO: 273555 - protein, 11 aa, Homo sapiens
  CDR3 for alpha chain variable domain of TCR clone 136778 (TRAV1-2, TRAJ10)
CFTGGGNKLAF

SEQ ID NO: 273556 - protein, 12 aa, Homo sapiens
  CDR3 for beta chain variable domain of TCR clone 136778 (TRBV2, TRBJ2-1)
CAYGPPGNEQFF

SEQ ID NO: 273557 - protein, 23 aa, Homo sapiens
  CDR3 for alpha chain variable domain of TCR clone 136779 (TRAV2, TRAJ26)
GRQMLLFTTVLGPPGDYGQNFVF

SEQ ID NO: 273558 - protein, 17 aa, Homo sapiens
  CDR3 for beta chain variable domain of TCR clone 136779 (TRBV11-2, TRBJ2-1)
CASSLHPPGVEYNEQFF

SEQ ID NO: 273559 - protein, 15 aa, Homo sapiens
  CDR3 for alpha chain variable domain of TCR clone 136780 (TRAV23/DV6, TRAJ44)
CSARTLTGTASTLTF

SEQ ID NO: 273560 - protein, 17 aa, Homo sapiens
  CDR3 for beta chain variable domain of TCR clone 136780 (TRBV24-1, TRBJ2-1)
CATSDVSTSGTYNEQFF

SEQ ID NO: 273561 - protein, 14 aa, Homo sapiens
  CDR3 for alpha chain variable domain of TCR clone 136781 (TRAV8-6, TRAJ29)
FAVSRASGNTPLVF

SEQ ID NO: 273562 - protein, 13 aa, Homo sapiens
  CDR3 for beta chain variable domain of TCR clone 136781 (TRBV19, TRBJ1-5)
CASSEGSNQPQHF

SEQ ID NO: 273563 - protein, 16 aa, Homo sapiens
  CDR3 for alpha chain variable domain of TCR clone 136782 (TRAV22, TRAJ45)
CAVVRGKRGGADGLTF

SEQ ID NO: 273564 - protein, 13 aa, Homo sapiens
  CDR3 for beta chain variable domain of TCR clone 136782 (TRBV20-1, TRBJ1-1)
CSARGGGNTEAFF

SEQ ID NO: 273565 - protein, 12 aa, Homo sapiens
  CDR3 for alpha chain variable domain of TCR clone 136783 (TRAV12-3, TRAJ33)
CAFMDSNYQLIW

SEQ ID NO: 273566 - protein, 17 aa, Homo sapiens
  CDR3 for beta chain variable domain of TCR clone 136783 (TRBV13, TRBJ2-3)
CASSLSRVAGGRNTQYF

SEQ ID NO: 273567 - protein, 14 aa, Homo sapiens
  CDR3 for alpha chain variable domain of TCR clone 136784 (TRAV12-1, TRAJ43)
CVVNGRSNNNDMRF

SEQ ID NO: 273568 - protein, 15 aa, Homo sapiens
  CDR3 for beta chain variable domain of TCR clone 136784 (TRBV28, TRBJ2-1)
CASSIIAGGRSEQFF

SEQ ID NO: 273569 - protein, 13 aa, Homo sapiens
  CDR3 for alpha chain variable domain of TCR clone 136785 (TRAV12-2, TRAJ9)
CAVNRAGGFKTIF

SEQ ID NO: 273570 - protein, 13 aa, Homo sapiens
  CDR3 for beta chain variable domain of TCR clone 136785 (TRBV19, TRBJ2-7)
CASRKAGGSEQYF

SEQ ID NO: 273571 - protein, 15 aa, Homo sapiens
  CDR3 for alpha chain variable domain of TCR clone 136786 (TRAV3, TRAJ3)
CAVRDMSSSSSKIIF

SEQ ID NO: 273572 - protein, 15 aa, Homo sapiens
  CDR3 for beta chain variable domain of TCR clone 136786 (TRBV18, TRBJ2-1)
CASSPPSASYNEQFF

SEQ ID NO: 273573 - protein, 16 aa, Homo sapiens
  CDR3 for alpha chain variable domain of TCR clone 136787 (TRAV30, TRAJ24)
CGIEIVDVDSWGKFQF

SEQ ID NO: 273574 - protein, 15 aa, Homo sapiens
  CDR3 for beta chain variable domain of TCR clone 136787 (TRBV20-1, TRBJ2-7)
CSARDRVSGMDEQYF

SEQ ID NO: 273575 - protein, 15 aa, Homo sapiens
  CDR3 for alpha chain variable domain of TCR clone 136788 (TRAV17, TRAJ52)
CATEAGGTSYGKLTF

SEQ ID NO: 273576 - protein, 14 aa, Homo sapiens
  CDR3 for beta chain variable domain of TCR clone 136788 (TRBV28, TRBJ1-5)
CASSLGVLDKPQHF

SEQ ID NO: 273577 - protein, 15 aa, Homo sapiens
  CDR3 for alpha chain variable domain of TCR clone 136789 (TRAV20, TRAJ16)
CAVQIRFSDGQKLLF

SEQ ID NO: 273578 - protein, 17 aa, Homo sapiens
  CDR3 for beta chain variable domain of TCR clone 136789 (TRBV7-8, TRBJ2-6)
CASSAGTGGAGANVLTF

SEQ ID NO: 273579 - protein, 14 aa, Homo sapiens
  CDR3 for alpha chain variable domain of TCR clone 136790 (TRAV8-3, TRAJ13)
CAVGGTVGYQKVPF

SEQ ID NO: 273580 - protein, 17 aa, Homo sapiens
  CDR3 for beta chain variable domain of TCR clone 136790 (TRBV7-9, TRBJ2-1)
CASSAATLGRSYNEQFF

SEQ ID NO: 273581 - protein, 14 aa, Homo sapiens
  CDR3 for alpha chain variable domain of TCR clone 136791 (TRAV9-2, TRAJ20)
CALRDPLNDYKLSF

SEQ ID NO: 273582 - protein, 14 aa, Homo sapiens
  CDR3 for beta chain variable domain of TCR clone 136791 (TRBV25-1, TRBJ1-1)
CASTHLGGNTEAFF

SEQ ID NO: 273583 - protein, 16 aa, Homo sapiens
  CDR3 for alpha chain variable domain of TCR clone 136792 (TRAV3, TRAJ5)
YAVRNLMDTGRRALTF

SEQ ID NO: 273584 - protein, 16 aa, Homo sapiens
  CDR3 for beta chain variable domain of TCR clone 136792 (TRBV4-2, TRBJ2-7)
CASSQEGLANSYEQYF

SEQ ID NO: 273585 - protein, 14 aa, Homo sapiens
  CDR3 for alpha chain variable domain of TCR clone 136793 (TRAV2, TRAJ9)
CAVEDRSGGFNTIF

SEQ ID NO: 273586 - protein, 19 aa, Homo sapiens
  CDR3 for beta chain variable domain of TCR clone 136793 (TRBV25-1, TRBJ2-2)
CAILVYRVDRGRKTGELFF

SEQ ID NO: 273587 - protein, 12 aa, Homo sapiens
  CDR3 for alpha chain variable domain of TCR clone 136794 (TRAV21, TRAJ23)
CAVGPQGGKLIF

SEQ ID NO: 273588 - protein, 13 aa, Homo sapiens
  CDR3 for beta chain variable domain of TCR clone 136794 (TRBV20-1, TRBJ2-7)
CSARTGAGHEQYF

SEQ ID NO: 273589 - protein, 14 aa, Homo sapiens
  CDR3 for alpha chain variable domain of TCR clone 136795 (TRAV26-1, TRAJ38)
CIADNAGNNRKLIW

SEQ ID NO: 273590 - protein, 16 aa, Homo sapiens
  CDR3 for beta chain variable domain of TCR clone 136795 (TRBV2, TRBJ2-1)
CASSANPRDWQAEQFF

SEQ ID NO: 273591 - protein, 16 aa, Homo sapiens
  CDR3 for alpha chain variable domain of TCR clone 136796 (TRAV30, TRAJ24)
CGTAIVDADSWGKFQF

SEQ ID NO: 273592 - protein, 12 aa, Homo sapiens
  CDR3 for beta chain variable domain of TCR clone 136796 (TRBV11-2, TRBJ2-2)
CASSLGGGELFV

SEQ ID NO: 273593 - protein, 14 aa, Homo sapiens
  CDR3 for alpha chain variable domain of TCR clone 136797 (TRAV1-2, TRAJ16)
CAVNRFSDGQKLLF

SEQ ID NO: 273594 - protein, 15 aa, Homo sapiens
  CDR3 for beta chain variable domain of TCR clone 136797 (TRBV27, TRBJ1-1)
CASSPYADPYTEAVF

SEQ ID NO: 273595 - protein, 14 aa, Homo sapiens
  CDR3 for alpha chain variable domain of TCR clone 136798 (TRAV17, TRAJ57)
CATDPQGGSEKLVF

SEQ ID NO: 273596 - protein, 15 aa, Homo sapiens
  CDR3 for beta chain variable domain of TCR clone 136798 (TRBV7-2, TRBJ2-7)
CASSLKGALTYEQYF

SEQ ID NO: 273597 - protein, 12 aa, Homo sapiens
  CDR3 for alpha chain variable domain of TCR clone 136799 (TRAV21, TRAJ8)
CAVNTGFQKLVI

SEQ ID NO: 273598 - protein, 13 aa, Homo sapiens
  CDR3 for beta chain variable domain of TCR clone 136799 (TRBV6-3, TRBJ2-1)
CASSYDNYNEQFF

SEQ ID NO: 273599 - protein, 12 aa, Homo sapiens
  CDR3 for alpha chain variable domain of TCR clone 136800 (TRAV13-1, TRAJ21)
CAAKEGFNKFYF

SEQ ID NO: 273600 - protein, 20 aa, Homo sapiens
  CDR3 for beta chain variable domain of TCR clone 136800 (TRBV7-8, TRBJ2-2)
CASSLLFPGPTIHITGELFF

SEQ ID NO: 273601 - protein, 15 aa, Homo sapiens
  CDR3 for alpha chain variable domain of TCR clone 136801 (TRAV1-2, TRAJ36)
CSASADQTGANNLFF

SEQ ID NO: 273602 - protein, 15 aa, Homo sapiens
  CDR3 for beta chain variable domain of TCR clone 136801 (TRBV5-1, TRBJ2-7)
CASSFSTDSVYEQYF

SEQ ID NO: 273603 - protein, 12 aa, Homo sapiens
  CDR3 for alpha chain variable domain of TCR clone 136802 (TRAV36/DV7, TRAJ54)
CAVVRGAQKLVF

SEQ ID NO: 273604 - protein, 13 aa, Homo sapiens
  CDR3 for beta chain variable domain of TCR clone 136802 (TRBV11-2, TRBJ2-5)
CASSSTGEETQYF

SEQ ID NO: 273605 - protein, 13 aa, Homo sapiens
  CDR3 for alpha chain variable domain of TCR clone 136803 (TRAV12-1, TRAJ16)
CLVNGPDGQKLLF

SEQ ID NO: 273606 - protein, 13 aa, Homo sapiens
  CDR3 for beta chain variable domain of TCR clone 136803 (TRBV2, TRBJ1-1)
CDRNPTGGFHAFF

SEQ ID NO: 273607 - protein, 14 aa, Homo sapiens
  CDR3 for alpha chain variable domain of TCR clone 136804 (TRAV13-1, TRAJ44)
CAAKATGTASKLTF

SEQ ID NO: 273608 - protein, 15 aa, Homo sapiens
  CDR3 for beta chain variable domain of TCR clone 136804 (TRBV19, TRBJ1-2)
CASGRDGGGGYGYTF

SEQ ID NO: 273609 - protein, 12 aa, Homo sapiens
  CDR3 for alpha chain variable domain of TCR clone 136805 (TRAV12-3, TRAJ17)
CAMTLTGNKLTF

SEQ ID NO: 273610 - protein, 16 aa, Homo sapiens
  CDR3 for beta chain variable domain of TCR clone 136805 (TRBV19, TRBJ2-1)
CASSMGGGSSYNEQFF

SEQ ID NO: 273611 - protein, 17 aa, Homo sapiens
  CDR3 for alpha chain variable domain of TCR clone 136806 (TRAV3, TRAJ42)
CAVRDRDYGGSQGKLIF

SEQ ID NO: 273612 - protein, 14 aa, Homo sapiens
  CDR3 for beta chain variable domain of TCR clone 136806 (TRBV12-5, TRBJ2-5)
CTSGSRTHQETQYF

SEQ ID NO: 273613 - protein, 12 aa, Homo sapiens
  CDR3 for alpha chain variable domain of TCR clone 136807 (TRAV13-1, TRAJ49)
CAASNTGNQFYF

SEQ ID NO: 273614 - protein, 14 aa, Homo sapiens
  CDR3 for beta chain variable domain of TCR clone 136807 (TRBV7-2, TRBJ2-7)
CASSPKTSFYEHYF

SEQ ID NO: 273615 - protein, 15 aa, Homo sapiens
  CDR3 for alpha chain variable domain of TCR clone 136808 (TRAV3, TRAJ22)
CAVRDRGGSARQLPF

SEQ ID NO: 273616 - protein, 16 aa, Homo sapiens
  CDR3 for beta chain variable domain of TCR clone 136808 (TRBV11-2, TRBJ2-1)
CASARGSYSHHNEQFF

SEQ ID NO: 273617 - protein, 14 aa, Homo sapiens
  CDR3 for alpha chain variable domain of TCR clone 136809 (TRAV12-2, TRAJ13)
CAVTKTGGSQNVTF

SEQ ID NO: 273618 - protein, 15 aa, Homo sapiens
  CDR3 for beta chain variable domain of TCR clone 136809 (TRBV27, TRBJ2-1)
CASSNGGGSSNEQFF

SEQ ID NO: 273619 - protein, 15 aa, Homo sapiens
  CDR3 for alpha chain variable domain of TCR clone 136810 (TRAV12-3, TRAJ49)
CAMAVTPNTGNQFYF

SEQ ID NO: 273620 - protein, 14 aa, Homo sapiens
  CDR3 for beta chain variable domain of TCR clone 136810 (TRBV19, TRBJ2-1)
CASPTFVLSGEQFF

SEQ ID NO: 273621 - protein, 15 aa, Homo sapiens
  CDR3 for alpha chain variable domain of TCR clone 136811 (TRAV8-3, TRAJ45)
CASSYSGGGADGLPF

SEQ ID NO: 273622 - protein, 15 aa, Homo sapiens
  CDR3 for beta chain variable domain of TCR clone 136811 (TRBV7-6, TRBJ1-2)
CASSSGGRGGYGYTF

SEQ ID NO: 273623 - protein, 14 aa, Homo sapiens
  CDR3 for alpha chain variable domain of TCR clone 136812 (TRAV26-1, TRAJ34)
CIVRESYNTDKLIF

SEQ ID NO: 273624 - protein, 13 aa, Homo sapiens
  CDR3 for beta chain variable domain of TCR clone 136812 (TRBV19, TRBJ2-1)
CATSRGVYNEHFF

SEQ ID NO: 273625 - protein, 13 aa, Homo sapiens
  CDR3 for alpha chain variable domain of TCR clone 136813 (TRAV27, TRAJ41)
CAGEGNSGYALNF

SEQ ID NO: 273626 - protein, 15 aa, Homo sapiens
  CDR3 for beta chain variable domain of TCR clone 136813 (TRBV10-3, TRBJ2-3)
CAISLTSGGTDTQYF

SEQ ID NO: 273627 - protein, 11 aa, Homo sapiens
  CDR3 for alpha chain variable domain of TCR clone 136814 (TRAV12-3, TRAJ17)
CAMTLRQQANF

SEQ ID NO: 273628 - protein, 14 aa, Homo sapiens
  CDR3 for beta chain variable domain of TCR clone 136814 (TRBV7-3, TRBJ1-1)
CASSLGTGYTEAFS

SEQ ID NO: 273629 - protein, 12 aa, Homo sapiens
  CDR3 for alpha chain variable domain of TCR clone 136815 (TRAV36/DV7, TRAJ54)
CAVVRGAQKLVF

SEQ ID NO: 273630 - protein, 13 aa, Homo sapiens
  CDR3 for beta chain variable domain of TCR clone 136815 (TRBV29-1, TRBJ2-2)
CSTTGVNTGELFF

SEQ ID NO: 273631 - protein, 11 aa, Homo sapiens
  CDR3 for alpha chain variable domain of TCR clone 136816 (TRAV12-3, TRAJ43)
CAMSVSNDMRF

SEQ ID NO: 273632 - protein, 14 aa, Homo sapiens
  CDR3 for beta chain variable domain of TCR clone 136816 (TRBV28, TRBJ1-5)
CASSLGVLVKPQHF

SEQ ID NO: 273633 - protein, 14 aa, Homo sapiens
  CDR3 for alpha chain variable domain of TCR clone 136817 (TRAV29/DV5, TRAJ45)
CAASFREGADGLTF

SEQ ID NO: 273634 - protein, 11 aa, Homo sapiens
  CDR3 for beta chain variable domain of TCR clone 136817 (TRBV11-2, TRBJ2-2)
CASSLPGELFF

SEQ ID NO: 273635 - protein, 15 aa, Homo sapiens
  CDR3 for alpha chain variable domain of TCR clone 136818 (TRAV12-1, TRAJ52)
CVGNAGGTSYGKLTF

SEQ ID NO: 273636 - protein, 12 aa, Homo sapiens
  CDR3 for beta chain variable domain of TCR clone 136818 (TRBV11-2, TRBJ2-2)
CASSLPTGELFL

SEQ ID NO: 273637 - protein, 11 aa, Homo sapiens
  CDR3 for alpha chain variable domain of TCR clone 136819 (TRAV12-2, TRAJ11)
CAVNPYSTLTF

SEQ ID NO: 273638 - protein, 16 aa, Homo sapiens
  CDR3 for beta chain variable domain of TCR clone 136819 (TRBV11-2, TRBJ2-7)
CASSPTTGGVSYEQYF

SEQ ID NO: 273639 - protein, 14 aa, Homo sapiens
  CDR3 for alpha chain variable domain of TCR clone 136820 (TRAV1-2, TRAJ16)
CAVNRFSDGQNLPF

SEQ ID NO: 273640 - protein, 15 aa, Homo sapiens
  CDR3 for beta chain variable domain of TCR clone 136820 (TRBV7-9, TRBJ1-6)
CASSSPGRGNSPLHF

SEQ ID NO: 273641 - protein, 12 aa, Homo sapiens
  CDR3 for alpha chain variable domain of TCR clone 136821 (TRAV12-3, TRAJ3)
CAIDSSASTIIF

SEQ ID NO: 273642 - protein, 17 aa, Homo sapiens
  CDR3 for beta chain variable domain of TCR clone 136821 (TRBV7-9, TRBJ2-3)
CAGSLEEAGAYPDTQYF

SEQ ID NO: 273643 - protein, 14 aa, Homo sapiens
  CDR3 for alpha chain variable domain of TCR clone 136822 (TRAV9-2, TRAJ39)
CALCIYNAGNMLTF

SEQ ID NO: 273644 - protein, 20 aa, Homo sapiens
  CDR3 for beta chain variable domain of TCR clone 136822 (TRBV7-8, TRBJ2-2)
CASSHLFPGPTIHITGELFF

SEQ ID NO: 273645 - protein, 15 aa, Homo sapiens
  CDR3 for alpha chain variable domain of TCR clone 136823 (TRAV27, TRAJ22)
CAGAPLKGSARQLTF

SEQ ID NO: 273646 - protein, 13 aa, Homo sapiens
  CDR3 for beta chain variable domain of TCR clone 136823 (TRBV4-2, TRBJ1-1)
CASSQAGNTEAFF

SEQ ID NO: 273647 - protein, 13 aa, Homo sapiens
  CDR3 for alpha chain variable domain of TCR clone 136824 (TRAV26-2, TRAJ43)
CILRAVNNNDTRF

SEQ ID NO: 273648 - protein, 15 aa, Homo sapiens
  CDR3 for beta chain variable domain of TCR clone 136824 (TRBV7-2, TRBJ2-1)
CASTHGTGIYNEQLF

SEQ ID NO: 273649 - protein, 10 aa, Homo sapiens
  CDR3 for alpha chain variable domain of TCR clone 136825 (TRAV17, TRAJ37)
CATDRQQLIF

SEQ ID NO: 273650 - protein, 12 aa, Homo sapiens
  CDR3 for beta chain variable domain of TCR clone 136825 (TRBV7-9, TRBJ1-4)
CASSTDREKLFF

SEQ ID NO: 273651 - protein, 13 aa, Homo sapiens
  CDR3 for alpha chain variable domain of TCR clone 136826 (TRAV12-2, TRAJ42)
CAVKRGSRGNLIF

SEQ ID NO: 273652 - protein, 13 aa, Homo sapiens
  CDR3 for beta chain variable domain of TCR clone 136826 (TRBV9, TRBJ2-1)
CASSVGQGGEQFF

SEQ ID NO: 273653 - protein, 14 aa, Homo sapiens
  CDR3 for alpha chain variable domain of TCR clone 136827 (TRAV21, TRAJ37)
CAVKGSSNTGKLII

SEQ ID NO: 273654 - protein, 14 aa, Homo sapiens
  CDR3 for beta chain variable domain of TCR clone 136827 (TRBV7-2, TRBJ2-1)
CASSRGGARNEQFF

SEQ ID NO: 273655 - protein, 12 aa, Homo sapiens
  CDR3 for alpha chain variable domain of TCR clone 136828 (TRAV13-2, TRAJ23)
CAERHRGGNLIF

SEQ ID NO: 273656 - protein, 16 aa, Homo sapiens
  CDR3 for beta chain variable domain of TCR clone 136828 (TRBV20-1, TRBJ1-4)
CSAPGQGLLTNEKLFF

SEQ ID NO: 273657 - protein, 13 aa, Homo sapiens
  CDR3 for alpha chain variable domain of TCR clone 136829 (TRAV8-3, TRAJ28)
CAVGAVGSYQLTF

SEQ ID NO: 273658 - protein, 12 aa, Homo sapiens
  CDR3 for beta chain variable domain of TCR clone 136829 (TRBV2, TRBJ1-2)
CASSGQTYGYTF

SEQ ID NO: 273659 - protein, 16 aa, Homo sapiens
  CDR3 for alpha chain variable domain of TCR clone 136830 (TRAV26-1, TRAJ45)
CIVEKYSGGGADGLTF

SEQ ID NO: 273660 - protein, 16 aa, Homo sapiens
  CDR3 for beta chain variable domain of TCR clone 136830 (TRBV28, TRBJ1-4)
CASSPPYRGRSEELFF

SEQ ID NO: 273661 - protein, 10 aa, Homo sapiens
  CDR3 for alpha chain variable domain of TCR clone 136831 (TRAV1-2, TRAJ34)
CAVNTDKLIF

SEQ ID NO: 273662 - protein, 12 aa, Homo sapiens
  CDR3 for beta chain variable domain of TCR clone 136831 (TRBV4-3, TRBJ2-1)
CASSLSGYEQFF

SEQ ID NO: 273663 - protein, 18 aa, Homo sapiens
  CDR3 for alpha chain variable domain of TCR clone 136832 (TRAV21, TRAJ52)
CAVRPSPAGGTSYVKLTF

SEQ ID NO: 273664 - protein, 16 aa, Homo sapiens
  CDR3 for beta chain variable domain of TCR clone 136832 (TRBV13, TRBJ2-2)
CASSPRTGEHTGELFF

SEQ ID NO: 273665 - protein, 13 aa, Homo sapiens
  CDR3 for alpha chain variable domain of TCR clone 136833 (TRAV1-2, TRAJ31)
CAASRNNNARLMF

SEQ ID NO: 273666 - protein, 18 aa, Homo sapiens
  CDR3 for beta chain variable domain of TCR clone 136833 (TRBV7-2, TRBJ2-3)
CASSLGLAGGSDTDTQYF

SEQ ID NO: 273667 - protein, 15 aa, Homo sapiens
  CDR3 for alpha chain variable domain of TCR clone 136834 (TRAV17, TRAJ57)
CATGPSQGGSEKLVF

SEQ ID NO: 273668 - protein, 11 aa, Homo sapiens
  CDR3 for beta chain variable domain of TCR clone 136834 (TRBV11-2, TRBJ2-2)
CASSLPGELVF

SEQ ID NO: 273669 - protein, 10 aa, Homo sapiens
  CDR3 for alpha chain variable domain of TCR clone 136835 (TRAV12-3, TRAJ49)
CAMNDDQFYF

SEQ ID NO: 273670 - protein, 17 aa, Homo sapiens
  CDR3 for beta chain variable domain of TCR clone 136835 (TRBV20-1, TRBJ2-4)
CSARDWASGGRENIQYF

SEQ ID NO: 273671 - protein, 13 aa, Homo sapiens
  CDR3 for alpha chain variable domain of TCR clone 136836 (TRAV2, TRAJ40)
CAVVTSGTYKYIF

SEQ ID NO: 273672 - protein, 16 aa, Homo sapiens
  CDR3 for beta chain variable domain of TCR clone 136836 (TRBV6-5, TRBJ2-6)
CASSQQGGAGANVLTF

SEQ ID NO: 273673 - protein, 12 aa, Homo sapiens
  CDR3 for alpha chain variable domain of TCR clone 136837 (TRAV17, TRAJ29)
CATDSGNTPLVF

SEQ ID NO: 273674 - protein, 12 aa, Homo sapiens
  CDR3 for beta chain variable domain of TCR clone 136837 (TRBV12-4, TRBJ2-7)
CASSLGGYEQYF

SEQ ID NO: 273675 - protein, 15 aa, Homo sapiens
  CDR3 for alpha chain variable domain of TCR clone 136838 (TRAV25, TRAJ52)
CAGTSGGTSYGKLTF

SEQ ID NO: 273676 - protein, 16 aa, Homo sapiens
  CDR3 for beta chain variable domain of TCR clone 136838 (TRBV15, TRBJ1-2)
CATSRGPRTGGGGFTF

SEQ ID NO: 273677 - protein, 12 aa, Homo sapiens
  CDR3 for alpha chain variable domain of TCR clone 136839 (TRAV21, TRAJ33)
CAKMDSNYQIIW

SEQ ID NO: 273678 - protein, 15 aa, Homo sapiens
  CDR3 for beta chain variable domain of TCR clone 136839 (TRBV9, TRBJ1-6)
CASSVAGTGDSPLHF

SEQ ID NO: 273679 - protein, 13 aa, Homo sapiens
  CDR3 for alpha chain variable domain of TCR clone 136840 (TRAV13-1, TRAJ6)
CAASKGGSYIPTF

SEQ ID NO: 273680 - protein, 13 aa, Homo sapiens
  CDR3 for beta chain variable domain of TCR clone 136840 (TRBV7-9, TRBJ2-5)
CASLPSGREIQYF

SEQ ID NO: 273681 - protein, 15 aa, Homo sapiens
  CDR3 for alpha chain variable domain of TCR clone 136841 (TRAV30, TRAJ32)
CGTEILGGATNKLIF

SEQ ID NO: 273682 - protein, 17 aa, Homo sapiens
  CDR3 for beta chain variable domain of TCR clone 136841 (TRBV5-4, TRBJ2-1)
CASGSAGGRGPYNEQFF

SEQ ID NO: 273683 - protein, 15 aa, Homo sapiens
  CDR3 for alpha chain variable domain of TCR clone 136842 (TRAV13-1, TRAJ39)
CAASRLGNAGNMLTF

SEQ ID NO: 273684 - protein, 14 aa, Homo sapiens
  CDR3 for beta chain variable domain of TCR clone 136842 (TRBV28, TRBJ1-2)
CASRIQGANYGYTF

SEQ ID NO: 273685 - protein, 13 aa, Homo sapiens
  CDR3 for alpha chain variable domain of TCR clone 136843 (TRAV1-1, TRAJ9)
CAAKNTGGFITIF

SEQ ID NO: 273686 - protein, 14 aa, Homo sapiens
  CDR3 for beta chain variable domain of TCR clone 136843 (TRBV12-5, TRBJ2-5)
CASGSRTHQETQYF

SEQ ID NO: 273687 - protein, 16 aa, Homo sapiens
  CDR3 for alpha chain variable domain of TCR clone 136844 (TRAV3, TRAJ37)
CAVRDSGSGNTGKLIF

SEQ ID NO: 273688 - protein, 15 aa, Homo sapiens
  CDR3 for beta chain variable domain of TCR clone 136844 (TRBV27, TRBJ1-6)
CASSFDRGLGSPLHF

SEQ ID NO: 273689 - protein, 14 aa, Homo sapiens
  CDR3 for alpha chain variable domain of TCR clone 136845 (TRAV12-3, TRAJ10)
SHLPLTGGGNKLTF

SEQ ID NO: 273690 - protein, 15 aa, Homo sapiens
  CDR3 for beta chain variable domain of TCR clone 136845 (TRBV27, TRBJ1-5)
CASSLWTGFDQPQHF

SEQ ID NO: 273691 - protein, 14 aa, Homo sapiens
  CDR3 for alpha chain variable domain of TCR clone 136846 (TRAV12-2, TRAJ13)
CAVKKTGGYQKLTF

SEQ ID NO: 273692 - protein, 23 aa, Homo sapiens
  CDR3 for beta chain variable domain of TCR clone 136846 (TRBV4-2, TRBJ2-3)
CASSQDPPRASSISGGRGDTQYF

SEQ ID NO: 273693 - protein, 12 aa, Homo sapiens
  CDR3 for alpha chain variable domain of TCR clone 136847 (TRAV1-2, TRAJ8)
CAVRTGFQKLVF

SEQ ID NO: 273694 - protein, 17 aa, Homo sapiens
  CDR3 for beta chain variable domain of TCR clone 136847 (TRBV13, TRBJ2-3)
CASSLSRVAGGRNTQYF

SEQ ID NO: 273695 - protein, 14 aa, Homo sapiens
  CDR3 for alpha chain variable domain of TCR clone 136848 (TRAV8-4, TRAJ13)
CAVTLSGGYQKVTF

SEQ ID NO: 273696 - protein, 14 aa, Homo sapiens
  CDR3 for beta chain variable domain of TCR clone 136848 (TRBV7-2, TRBJ1-2)
CASGQTGSTYGYAF

SEQ ID NO: 273697 - protein, 13 aa, Homo sapiens
  CDR3 for alpha chain variable domain of TCR clone 136849 (TRAV1-2, TRAJ27)
CAVFNTNAGKSTF

SEQ ID NO: 273698 - protein, 14 aa, Homo sapiens
  CDR3 for beta chain variable domain of TCR clone 136849 (TRBV25-1, TRBJ1-1)
CASTHLGGDTEAFF

SEQ ID NO: 273699 - protein, 14 aa, Homo sapiens
  CDR3 for alpha chain variable domain of TCR clone 136850 (TRAV30, TRAJ26)
CGTEIVSYGQNFAF

SEQ ID NO: 273700 - protein, 13 aa, Homo sapiens
  CDR3 for beta chain variable domain of TCR clone 136850 (TRBV19, TRBJ1-3)
CASRLSLGNTIYY

SEQ ID NO: 273701 - protein, 14 aa, Homo sapiens
  CDR3 for alpha chain variable domain of TCR clone 136851 (TRAV29/DV5, TRAJ32)
CAAAYVGATNKLIF

SEQ ID NO: 273702 - protein, 14 aa, Homo sapiens
  CDR3 for beta chain variable domain of TCR clone 136851 (TRBV20-1, TRBJ1-1)
CSAQTRIGGTEAFF

SEQ ID NO: 273703 - protein, 14 aa, Homo sapiens
  CDR3 for alpha chain variable domain of TCR clone 136852 (TRAV1-2, TRAJ16)
CAVNRFSDGQKLLF

SEQ ID NO: 273704 - protein, 15 aa, Homo sapiens
  CDR3 for beta chain variable domain of TCR clone 136852 (TRBV7-2, TRBJ1-5)
CASSLDRGQDQPQHF

SEQ ID NO: 273705 - protein, 14 aa, Homo sapiens
  CDR3 for alpha chain variable domain of TCR clone 136853 (TRAV12-2, TRAJ13)
CAVKKTGGYQKVTF

SEQ ID NO: 273706 - protein, 13 aa, Homo sapiens
  CDR3 for beta chain variable domain of TCR clone 136853 (TRBV28, TRBJ2-7)
CASSNSGNYEQYF

SEQ ID NO: 273707 - protein, 18 aa, Homo sapiens
  CDR3 for alpha chain variable domain of TCR clone 136854 (TRAV21, TRAJ52)
CAVRPSPAGGTSYGKLTF

SEQ ID NO: 273708 - protein, 15 aa, Homo sapiens
  CDR3 for beta chain variable domain of TCR clone 136854 (TRBV11-2, TRBJ2-1)
CASSRNRGLMYEQFF

SEQ ID NO: 273709 - protein, 16 aa, Homo sapiens
  CDR3 for alpha chain variable domain of TCR clone 136855 (TRAV3, TRAJ23)
CAVKIGIYNQGGKLIF

SEQ ID NO: 273710 - protein, 17 aa, Homo sapiens
  CDR3 for beta chain variable domain of TCR clone 136855 (TRBV10-3, TRBJ2-6)
CAVSESTAPSGANVLTF

SEQ ID NO: 273711 - protein, 13 aa, Homo sapiens
  CDR3 for alpha chain variable domain of TCR clone 136856 (TRAV38-2/DV8, TRAJ34)
CAYRNYNTDKLIF

SEQ ID NO: 273712 - protein, 15 aa, Homo sapiens
  CDR3 for beta chain variable domain of TCR clone 136856 (TRBV20-1, TRBJ2-5)
CSAEGTGVLQETQYF

SEQ ID NO: 273713 - protein, 19 aa, Homo sapiens
  CDR3 for alpha chain variable domain of TCR clone 136857 (TRAV1-2, TRAJ26)
CLLTLCCERPDNYGQNFVF

SEQ ID NO: 273714 - protein, 15 aa, Homo sapiens
  CDR3 for beta chain variable domain of TCR clone 136857 (TRBV9, TRBJ1-6)
CASSVAGTGDSPLHF

SEQ ID NO: 273715 - protein, 18 aa, Homo sapiens
  CDR3 for alpha chain variable domain of TCR clone 136858 (TRAV21, TRAJ52)
CAVRPSPAGGTSYGKLTF

SEQ ID NO: 273716 - protein, 14 aa, Homo sapiens
  CDR3 for beta chain variable domain of TCR clone 136858 (TRBV5-1, TRBJ2-7)
CASSLTSGGYEQYF

SEQ ID NO: 273717 - protein, 20 aa, Homo sapiens
  CDR3 for alpha chain variable domain of TCR clone 136859 (TRAV8-6, TRAJ24)
SPYKRHGCVHPTDSWGKFQF

SEQ ID NO: 273718 - protein, 14 aa, Homo sapiens
  CDR3 for beta chain variable domain of TCR clone 136859 (TRBV27, TRBJ1-2)
CASSLSYTDYGYTF

SEQ ID NO: 273719 - protein, 15 aa, Homo sapiens
  CDR3 for alpha chain variable domain of TCR clone 136860 (TRAV12-2, TRAJ53)
CAVNGGGGSNYKLTF

SEQ ID NO: 273720 - protein, 14 aa, Homo sapiens
  CDR3 for beta chain variable domain of TCR clone 136860 (TRBV7-2, TRBJ2-7)
RASSLYPGRYEQYF

SEQ ID NO: 273721 - protein, 16 aa, Homo sapiens
  CDR3 for alpha chain variable domain of TCR clone 136861 (TRAV4, TRAJ18)
CCVLLIGGSTLGRLNF

SEQ ID NO: 273722 - protein, 12 aa, Homo sapiens
  CDR3 for beta chain variable domain of TCR clone 136861 (TRBV6-3, TRBJ2-7)
CASSLTPYEQYF

SEQ ID NO: 273723 - protein, 13 aa, Homo sapiens
  CDR3 for alpha chain variable domain of TCR clone 136862 (TRAV26-2, TRAJ54)
CIPRVGGAQKLVV

SEQ ID NO: 273724 - protein, 16 aa, Homo sapiens
  CDR3 for beta chain variable domain of TCR clone 136862 (TRBV4-1, TRBJ1-1)
CASSSMSERPNTEAFF

SEQ ID NO: 273725 - protein, 15 aa, Homo sapiens
  CDR3 for alpha chain variable domain of TCR clone 136863 (TRAV3, TRAJ20)
CAVRDSRSNDYKLSF

SEQ ID NO: 273726 - protein, 14 aa, Homo sapiens
  CDR3 for beta chain variable domain of TCR clone 136863 (TRBV20-1, TRBJ2-7)
CSARRGNRIYEQYF

SEQ ID NO: 273727 - protein, 15 aa, Homo sapiens
  CDR3 for alpha chain variable domain of TCR clone 136864 (TRAV1-2, TRAJ18)
CAWEGRGSTLGRLYF

SEQ ID NO: 273728 - protein, 15 aa, Homo sapiens
  CDR3 for beta chain variable domain of TCR clone 136864 (TRBV20-1, TRBJ2-7)
CSARDRVSGMDEQYF

SEQ ID NO: 273729 - protein, 14 aa, Homo sapiens
  CDR3 for alpha chain variable domain of TCR clone 136865 (TRAV13-1, TRAJ13)
CAASRVGGYQKVTF

SEQ ID NO: 273730 - protein, 17 aa, Homo sapiens
  CDR3 for beta chain variable domain of TCR clone 136865 (TRBV15, TRBJ1-5)
CVPPAGPHPGHEISQHF

SEQ ID NO: 273731 - protein, 18 aa, Homo sapiens
  CDR3 for alpha chain variable domain of TCR clone 136866 (TRAV12-3, TRAJ52)
CAMSRTNAGGTSYGKLTF

SEQ ID NO: 273732 - protein, 18 aa, Homo sapiens
  CDR3 for beta chain variable domain of TCR clone 136866 (TRBV7-2, TRBJ2-3)
CASSLETSRGRKADTQYF

SEQ ID NO: 273733 - protein, 13 aa, Homo sapiens
  CDR3 for alpha chain variable domain of TCR clone 136867 (TRAV23/DV6, TRAJ16)
CAASISDGQKLLF

SEQ ID NO: 273734 - protein, 14 aa, Homo sapiens
  CDR3 for beta chain variable domain of TCR clone 136867 (TRBV7-3, TRBJ2-1)
CASSLAGGTNEQFF

SEQ ID NO: 273735 - protein, 15 aa, Homo sapiens
  CDR3 for alpha chain variable domain of TCR clone 136868 (TRAV21, TRAJ37)
CAVRPTLSNTGKLIF

SEQ ID NO: 273736 - protein, 12 aa, Homo sapiens
  CDR3 for beta chain variable domain of TCR clone 136868 (TRBV29-1, TRBJ2-3)
CSVTGGADTQYF

SEQ ID NO: 273737 - protein, 18 aa, Homo sapiens
  CDR3 for alpha chain variable domain of TCR clone 136869 (TRAV26-1, TRAJ23)
CFVRVGLEVWNQGGKRIF

SEQ ID NO: 273738 - protein, 16 aa, Homo sapiens
  CDR3 for beta chain variable domain of TCR clone 136869 (TRBV12-4, TRBJ2-5)
CASSFFVRGRQETQYF

SEQ ID NO: 273739 - protein, 17 aa, Homo sapiens
  CDR3 for alpha chain variable domain of TCR clone 136870 (TRAV3, TRAJ38)
CAVRDCLNAGNNCKLIW

SEQ ID NO: 273740 - protein, 13 aa, Homo sapiens
  CDR3 for beta chain variable domain of TCR clone 136870 (TRBV23-1, TRBJ1-4)
CASRGKFNEKLFF

SEQ ID NO: 273741 - protein, 16 aa, Homo sapiens
  CDR3 for alpha chain variable domain of TCR clone 136871 (TRAV26-1, TRAJ23)
CIVRVHTYNQGGKLIF

SEQ ID NO: 273742 - protein, 15 aa, Homo sapiens
  CDR3 for beta chain variable domain of TCR clone 136871 (TRBV5-7, TRBJ2-7)
CASSPYFEGSYEQYF

SEQ ID NO: 273743 - protein, 13 aa, Homo sapiens
  CDR3 for alpha chain variable domain of TCR clone 136872 (TRAV12-1, TRAJ21)
CVVNEYNFNKFYF

SEQ ID NO: 273744 - protein, 12 aa, Homo sapiens
  CDR3 for beta chain variable domain of TCR clone 136872 (TRBV3-1, TRBJ2-2)
CASSLFPGELFF

SEQ ID NO: 273745 - protein, 14 aa, Homo sapiens
  CDR3 for alpha chain variable domain of TCR clone 136873 (TRAV8-4, TRAJ34)
CAVSDPVDTDKLIF

SEQ ID NO: 273746 - protein, 14 aa, Homo sapiens
  CDR3 for beta chain variable domain of TCR clone 136873 (TRBV20-1, TRBJ2-5)
CSARDGRAGETQYF

SEQ ID NO: 273747 - protein, 12 aa, Homo sapiens
  CDR3 for alpha chain variable domain of TCR clone 136874 (TRAV1-1, TRAJ8)
CAGGTGFQKLVF

SEQ ID NO: 273748 - protein, 15 aa, Homo sapiens
  CDR3 for beta chain variable domain of TCR clone 136874 (TRBV7-9, TRBJ1-4)
CASSRTGGYNEKLFF

SEQ ID NO: 273749 - protein, 15 aa, Homo sapiens
  CDR3 for alpha chain variable domain of TCR clone 136875 (TRAV8-3, TRAJ40)
CAAPSLGSGAYTYIF

SEQ ID NO: 273750 - protein, 16 aa, Homo sapiens
  CDR3 for beta chain variable domain of TCR clone 136875 (TRBV7-3, TRBJ2-3)
CASSLSGYRPEDTQYF

SEQ ID NO: 273751 - protein, 17 aa, Homo sapiens
  CDR3 for alpha chain variable domain of TCR clone 136876 (TRAV3, TRAJ6)
CAVRDGPRAGGSYIPTF

SEQ ID NO: 273752 - protein, 12 aa, Homo sapiens
  CDR3 for beta chain variable domain of TCR clone 136876 (TRBV29-1, TRBJ2-3)
CSVTGRADTQYF

SEQ ID NO: 273753 - protein, 11 aa, Homo sapiens
  CDR3 for alpha chain variable domain of TCR clone 136877 (TRAV12-2, TRAJ43)
CAAYNNNDMRF

SEQ ID NO: 273754 - protein, 14 aa, Homo sapiens
  CDR3 for beta chain variable domain of TCR clone 136877 (TRBV19, TRBJ2-1)
CASPTFVLSGEQFF

SEQ ID NO: 273755 - protein, 12 aa, Homo sapiens
  CDR3 for alpha chain variable domain of TCR clone 136878 (TRAV12-3, TRAJ17)
CAMTLTGNKLTF

SEQ ID NO: 273756 - protein, 15 aa, Homo sapiens
  CDR3 for beta chain variable domain of TCR clone 136878 (TRBV19, TRBJ1-1)
CASSKTGSTNTEAFF

SEQ ID NO: 273757 - protein, 15 aa, Homo sapiens
  CDR3 for alpha chain variable domain of TCR clone 136879 (TRAV3, TRAJ22)
CAVRDRGGSARQLTF

SEQ ID NO: 273758 - protein, 16 aa, Homo sapiens
  CDR3 for beta chain variable domain of TCR clone 136879 (TRBV5-4, TRBJ2-3)
CASQQPGAGGADTQYF

SEQ ID NO: 273759 - protein, 14 aa, Homo sapiens
  CDR3 for alpha chain variable domain of TCR clone 136880 (TRAV26-1, TRAJ38)
CIADNAGNNRKLIW

SEQ ID NO: 273760 - protein, 11 aa, Homo sapiens
  CDR3 for beta chain variable domain of TCR clone 136880 (TRBV2, TRBJ1-1)
CASREGTEAFF

SEQ ID NO: 273761 - protein, 11 aa, Homo sapiens
  CDR3 for alpha chain variable domain of TCR clone 136881 (TRAV2, TRAJ21)
CAVFNFNKFYF

SEQ ID NO: 273762 - protein, 16 aa, Homo sapiens
  CDR3 for beta chain variable domain of TCR clone 136881 (TRBV29-1, TRBJ2-7)
CSVEVVGTSGSYEQYF

SEQ ID NO: 273763 - protein, 10 aa, Homo sapiens
  CDR3 for alpha chain variable domain of TCR clone 136882 (TRAV3, TRAJ30)
CAVREIEIIF

SEQ ID NO: 273764 - protein, 14 aa, Homo sapiens
  CDR3 for beta chain variable domain of TCR clone 136882 (TRBV15, TRBJ2-3)
CATRSGTSTDTQYC

SEQ ID NO: 273765 - protein, 13 aa, Homo sapiens
  CDR3 for alpha chain variable domain of TCR clone 136883 (TRAV8-3, TRAJ31)
CAVGARNNARLMF

SEQ ID NO: 273766 - protein, 16 aa, Homo sapiens
  CDR3 for beta chain variable domain of TCR clone 136883 (TRBV18, TRBJ1-3)
CASSLGILNGENNIYF

SEQ ID NO: 273767 - protein, 14 aa, Homo sapiens
  CDR3 for alpha chain variable domain of TCR clone 136884 (TRAV23/DV6, TRAJ37)
CAASTSSNTGKLIF

SEQ ID NO: 273768 - protein, 12 aa, Homo sapiens
  CDR3 for beta chain variable domain of TCR clone 136884 (TRBV7-9, TRBJ2-7)
CASSFGSYEQYF

SEQ ID NO: 273769 - protein, 14 aa, Homo sapiens
  CDR3 for alpha chain variable domain of TCR clone 136885 (TRAV12-3, TRAJ10)
SHLPLTGGGNKLTF

SEQ ID NO: 273770 - protein, 13 aa, Homo sapiens
  CDR3 for beta chain variable domain of TCR clone 136885 (TRBV10-3, TRBJ2-1)
CATGLADNNEQFF

SEQ ID NO: 273771 - protein, 13 aa, Homo sapiens
  CDR3 for alpha chain variable domain of TCR clone 136886 (TRAV8-3, TRAJ48)
CAVVPFGNEKLTF

SEQ ID NO: 273772 - protein, 13 aa, Homo sapiens
  CDR3 for beta chain variable domain of TCR clone 136886 (TRBV19, TRBJ1-2)
CASSVPGQDGYTF

SEQ ID NO: 273773 - protein, 13 aa, Homo sapiens
  CDR3 for alpha chain variable domain of TCR clone 136887 (TRAV35, TRAJ40)
CAGQLSGTSKYIF

SEQ ID NO: 273774 - protein, 14 aa, Homo sapiens
  CDR3 for beta chain variable domain of TCR clone 136887 (TRBV3-1, TRBJ2-5)
CASSLQLAGETQYF

SEQ ID NO: 273775 - protein, 16 aa, Homo sapiens
  CDR3 for alpha chain variable domain of TCR clone 136888 (TRAV4, TRAJ18)
CCVLLIGGSTLGRLYF

SEQ ID NO: 273776 - protein, 14 aa, Homo sapiens
  CDR3 for beta chain variable domain of TCR clone 136888 (TRBV6-3, TRBJ2-7)
CASSLPPTSSTSGR

SEQ ID NO: 273777 - protein, 12 aa, Homo sapiens
  CDR3 for alpha chain variable domain of TCR clone 136889 (TRAV16, TRAJ26)
CASKDGGQNFVF

SEQ ID NO: 273778 - protein, 13 aa, Homo sapiens
  CDR3 for beta chain variable domain of TCR clone 136889 (TRBV25-1, TRBJ1-1)
RASSDRGRAEAFF

SEQ ID NO: 273779 - protein, 13 aa, Homo sapiens
  CDR3 for alpha chain variable domain of TCR clone 136890 (TRAV21, TRAJ20)
CAVGVFADYKLSF

SEQ ID NO: 273780 - protein, 16 aa, Homo sapiens
  CDR3 for beta chain variable domain of TCR clone 136890 (TRBV12-5, TRBJ2-5)
CASGPRTSGNQETQYF

SEQ ID NO: 273781 - protein, 15 aa, Homo sapiens
  CDR3 for alpha chain variable domain of TCR clone 136891 (TRAV26-1, TRAJ40)
CIVRAVPSGTYKYIF

SEQ ID NO: 273782 - protein, 14 aa, Homo sapiens
  CDR3 for beta chain variable domain of TCR clone 136891 (TRBV2, TRBJ2-1)
CASSDRAYYNEQFF

SEQ ID NO: 273783 - protein, 13 aa, Homo sapiens
  CDR3 for alpha chain variable domain of TCR clone 136892 (TRAV8-1, TRAJ23)
CAWRDNQGGKLIF

SEQ ID NO: 273784 - protein, 13 aa, Homo sapiens
  CDR3 for beta chain variable domain of TCR clone 136892 (TRBV20-1, TRBJ2-7)
CSATQTSGYEQYF

SEQ ID NO: 273785 - protein, 14 aa, Homo sapiens
  CDR3 for alpha chain variable domain of TCR clone 136893 (TRAV1-2, TRAJ16)
CAVNRFSDGQKLPF

SEQ ID NO: 273786 - protein, 13 aa, Homo sapiens
  CDR3 for beta chain variable domain of TCR clone 136893 (TRBV18, TRBJ2-5)
CASSPAGKETQYF

SEQ ID NO: 273787 - protein, 13 aa, Homo sapiens
  CDR3 for alpha chain variable domain of TCR clone 136894 (TRAV8-3, TRAJ28)
CAVGAVGSYQLTF

SEQ ID NO: 273788 - protein, 14 aa, Homo sapiens
  CDR3 for beta chain variable domain of TCR clone 136894 (TRBV7-9, TRBJ1-5)
CQQPRYQPNQPQHF

SEQ ID NO: 273789 - protein, 13 aa, Homo sapiens
  CDR3 for alpha chain variable domain of TCR clone 136895 (TRAV25, TRAJ48)
CAGPKGGNEKLTC

SEQ ID NO: 273790 - protein, 15 aa, Homo sapiens
  CDR3 for beta chain variable domain of TCR clone 136895 (TRBV9, TRBJ2-6)
CASSVLWNGANVLTF

SEQ ID NO: 273791 - protein, 13 aa, Homo sapiens
  CDR3 for alpha chain variable domain of TCR clone 136896 (TRAV2, TRAJ11)
CAVEEIGYSTLTF

SEQ ID NO: 273792 - protein, 17 aa, Homo sapiens
  CDR3 for beta chain variable domain of TCR clone 136896 (TRBV7-2, TRBJ2-1)
CASSRGTIGAVGWEQFF

SEQ ID NO: 273793 - protein, 16 aa, Homo sapiens
  CDR3 for alpha chain variable domain of TCR clone 136897 (TRAV3, TRAJ34)
CAVRARGTPTSSSLGL

SEQ ID NO: 273794 - protein, 16 aa, Homo sapiens
  CDR3 for beta chain variable domain of TCR clone 136897 (TRBV20-1, TRBJ1-4)
CSAPGQGLLTNEKLFF

SEQ ID NO: 273795 - protein, 13 aa, Homo sapiens
  CDR3 for alpha chain variable domain of TCR clone 136898 (TRAV8-6, TRAJ8)
CAVSNTGFQKLVF

SEQ ID NO: 273796 - protein, 15 aa, Homo sapiens
  CDR3 for beta chain variable domain of TCR clone 136898 (TRBV28, TRBJ2-5)
CSSSSGRTIQGTQYF

SEQ ID NO: 273797 - protein, 16 aa, Homo sapiens
  CDR3 for alpha chain variable domain of TCR clone 136899 (TRAV30, TRAJ24)
CGTEIVDADSWGKFQF

SEQ ID NO: 273798 - protein, 12 aa, Homo sapiens
  CDR3 for beta chain variable domain of TCR clone 136899 (TRBV11-2, TRBJ2-5)
CASSLVGETQYF

SEQ ID NO: 273799 - protein, 22 aa, Homo sapiens
  CDR3 for alpha chain variable domain of TCR clone 136900 (TRAV8-3, TRAJ6)
CAVAYQDEATYLHLEEEPALLF

SEQ ID NO: 273800 - protein, 13 aa, Homo sapiens
  CDR3 for beta chain variable domain of TCR clone 136900 (TRBV6-5, TRBJ2-5)
CATAPSPQETQYF

SEQ ID NO: 273801 - protein, 14 aa, Homo sapiens
  CDR3 for alpha chain variable domain of TCR clone 136901 (TRAV12-3, TRAJ58)
CTMSTETSGSRLTF

SEQ ID NO: 273802 - protein, 11 aa, Homo sapiens
  CDR3 for beta chain variable domain of TCR clone 136901 (TRBV29-1, TRBJ2-5)
CSEDRTGTQYF

SEQ ID NO: 273803 - protein, 14 aa, Homo sapiens
  CDR3 for alpha chain variable domain of TCR clone 136902 (TRAV21, TRAJ45)
CAVSSGGGADGLTF

SEQ ID NO: 273804 - protein, 13 aa, Homo sapiens
  CDR3 for beta chain variable domain of TCR clone 136902 (TRBV2, TRBJ2-7)
CASSVGGSGEQYF

SEQ ID NO: 273805 - protein, 12 aa, Homo sapiens
  CDR3 for alpha chain variable domain of TCR clone 136903 (TRAV17, TRAJ45)
CAAGGGVDGLTF

SEQ ID NO: 273806 - protein, 14 aa, Homo sapiens
  CDR3 for beta chain variable domain of TCR clone 136903 (TRBV20-1, TRBJ1-1)
CSAQTRIGGTEAFF

SEQ ID NO: 273807 - protein, 16 aa, Homo sapiens
  CDR3 for alpha chain variable domain of TCR clone 136904 (TRAV3, TRAJ37)
CAVRPHGSGNTRNLIF

SEQ ID NO: 273808 - protein, 16 aa, Homo sapiens
  CDR3 for beta chain variable domain of TCR clone 136904 (TRBV9, TRBJ1-2)
CASSVEEKVSPYGYTF

SEQ ID NO: 273809 - protein, 14 aa, Homo sapiens
  CDR3 for alpha chain variable domain of TCR clone 136905 (TRAV2, TRAJ29)
CAGPFQYGNTPLVF

SEQ ID NO: 273810 - protein, 16 aa, Homo sapiens
  CDR3 for beta chain variable domain of TCR clone 136905 (TRBV19, TRBJ2-2)
CASRSPGTGATGELFF

SEQ ID NO: 273811 - protein, 11 aa, Homo sapiens
  CDR3 for alpha chain variable domain of TCR clone 136906 (TRAV8-3, TRAJ49)
CAVNTGNQFYF

SEQ ID NO: 273812 - protein, 17 aa, Homo sapiens
  CDR3 for beta chain variable domain of TCR clone 136906 (TRBV5-1, TRBJ2-7)
CASSKPEGREASYEQYF

SEQ ID NO: 273813 - protein, 15 aa, Homo sapiens
  CDR3 for alpha chain variable domain of TCR clone 136907 (TRAV21, TRAJ53)
CATLNSGGSNYKLTF

SEQ ID NO: 273814 - protein, 15 aa, Homo sapiens
  CDR3 for beta chain variable domain of TCR clone 136907 (TRBV7-2, TRBJ2-1)
CASSFQADEYNEQFF

SEQ ID NO: 273815 - protein, 16 aa, Homo sapiens
  CDR3 for alpha chain variable domain of TCR clone 136908 (TRAV4, TRAJ18)
CCVLLIGGSTLGRLYF

SEQ ID NO: 273816 - protein, 13 aa, Homo sapiens
  CDR3 for beta chain variable domain of TCR clone 136908 (TRBV11-2, TRBJ2-5)
CASGHGAKETQYF

SEQ ID NO: 273817 - protein, 10 aa, Homo sapiens
  CDR3 for alpha chain variable domain of TCR clone 136909 (TRAV1-2, TRAJ31)
CAFFDARLMF

SEQ ID NO: 273818 - protein, 13 aa, Homo sapiens
  CDR3 for beta chain variable domain of TCR clone 136909 (TRBV11-2, TRBJ2-5)
CASSSTGEETQYF

SEQ ID NO: 273819 - protein, 15 aa, Homo sapiens
  CDR3 for alpha chain variable domain of TCR clone 136910 (TRAV13-2, TRAJ5)
CAENPHWTGRRALTF

SEQ ID NO: 273820 - protein, 14 aa, Homo sapiens
  CDR3 for beta chain variable domain of TCR clone 136910 (TRBV5-7, TRBJ2-7)
CASSFKGAPGEQYF

SEQ ID NO: 273821 - protein, 12 aa, Homo sapiens
  CDR3 for alpha chain variable domain of TCR clone 136911 (TRAV13-1, TRAJ49)
CAAPHTGNQFYF

SEQ ID NO: 273822 - protein, 17 aa, Homo sapiens
  CDR3 for beta chain variable domain of TCR clone 136911 (TRBV25-1, TRBJ2-7)
CASSDARVVFSSYEQHF

SEQ ID NO: 273823 - protein, 17 aa, Homo sapiens
  CDR3 for alpha chain variable domain of TCR clone 136912 (TRAV3, TRAJ6)
CAVRDGPSAGGSYIPTF

SEQ ID NO: 273824 - protein, 18 aa, Homo sapiens
  CDR3 for beta chain variable domain of TCR clone 136912 (TRBV7-3, TRBJ2-3)
CASSSTGTYPGSTDTQYF

SEQ ID NO: 273825 - protein, 16 aa, Homo sapiens
  CDR3 for alpha chain variable domain of TCR clone 136913 (TRAV3, TRAJ37)
CAVRGKGSGNTGKLIF

SEQ ID NO: 273826 - protein, 13 aa, Homo sapiens
  CDR3 for beta chain variable domain of TCR clone 136913 (TRBV14, TRBJ2-7)
CASSQDRRYQQYF

SEQ ID NO: 273827 - protein, 18 aa, Homo sapiens
  CDR3 for alpha chain variable domain of TCR clone 136914 (TRAV13-1, TRAJ52)
CAAKNPNAGGSSYGKLTF

SEQ ID NO: 273828 - protein, 15 aa, Homo sapiens
  CDR3 for beta chain variable domain of TCR clone 136914 (TRBV6-1, TRBJ2-3)
CASSERGGITDTQYF

SEQ ID NO: 273829 - protein, 13 aa, Homo sapiens
  CDR3 for alpha chain variable domain of TCR clone 136915 (TRAV21, TRAJ20)
CAVGVFADFKLSF

SEQ ID NO: 273830 - protein, 14 aa, Homo sapiens
  CDR3 for beta chain variable domain of TCR clone 136915 (TRBV4-2, TRBJ1-4)
CASSPSSGNEKLFF

SEQ ID NO: 273831 - protein, 13 aa, Homo sapiens
  CDR3 for alpha chain variable domain of TCR clone 136916 (TRAV17, TRAJ5)
CPTMDTGRRALTF

SEQ ID NO: 273832 - protein, 13 aa, Homo sapiens
  CDR3 for beta chain variable domain of TCR clone 136916 (TRBV7-9, TRBJ1-2)
CASSLKQNYGYTF

SEQ ID NO: 273833 - protein, 13 aa, Homo sapiens
  CDR3 for alpha chain variable domain of TCR clone 136917 (TRAV29/DV5, TRAJ31)
CAASRNNNARLMF

SEQ ID NO: 273834 - protein, 16 aa, Homo sapiens
  CDR3 for beta chain variable domain of TCR clone 136917 (TRBV15, TRBJ2-3)
CATRLSGGRAPDTQYF

SEQ ID NO: 273835 - protein, 15 aa, Homo sapiens
  CDR3 for alpha chain variable domain of TCR clone 136918 (TRAV23/DV6, TRAJ18)
CAARYRGSTLGRLYF

SEQ ID NO: 273836 - protein, 13 aa, Homo sapiens
  CDR3 for beta chain variable domain of TCR clone 136918 (TRBV19, TRBJ2-7)
CASRKAGGSEQYF

SEQ ID NO: 273837 - protein, 12 aa, Homo sapiens
  CDR3 for alpha chain variable domain of TCR clone 136919 (TRAV3, TRAJ43)
CCERGRNNDVRF

SEQ ID NO: 273838 - protein, 12 aa, Homo sapiens
  CDR3 for beta chain variable domain of TCR clone 136919 (TRBV5-1, TRBJ2-7)
CASSLDSYEQYF

SEQ ID NO: 273839 - protein, 20 aa, Homo sapiens
  CDR3 for alpha chain variable domain of TCR clone 136920 (TRAV26-1, TRAJ47)
CCVLLHRQSSFMEYGNKLVF

SEQ ID NO: 273840 - protein, 14 aa, Homo sapiens
  CDR3 for beta chain variable domain of TCR clone 136920 (TRBV9, TRBJ2-7)
CASSVGVGSYEQYF

SEQ ID NO: 273841 - protein, 12 aa, Homo sapiens
  CDR3 for alpha chain variable domain of TCR clone 136921 (TRAV8-3, TRAJ26)
CAGYNYGQNFVF

SEQ ID NO: 273842 - protein, 16 aa, Homo sapiens
  CDR3 for beta chain variable domain of TCR clone 136921 (TRBV6-1, TRBJ2-5)
CASSETLDRGAETQYF

SEQ ID NO: 273843 - protein, 16 aa, Homo sapiens
  CDR3 for alpha chain variable domain of TCR clone 136922 (TRAV12-1, TRAJ53)
CVVTSVAGGSNYKLTF

SEQ ID NO: 273844 - protein, 12 aa, Homo sapiens
  CDR3 for beta chain variable domain of TCR clone 136922 (TRBV11-2, TRBJ2-2)
CASSLGGGELFF

SEQ ID NO: 273845 - protein, 14 aa, Homo sapiens
  CDR3 for alpha chain variable domain of TCR clone 136923 (TRAV26-1, TRAJ39)
CIVFTNNAGNMLTF

SEQ ID NO: 273846 - protein, 15 aa, Homo sapiens
  CDR3 for beta chain variable domain of TCR clone 136923 (TRBV19, TRBJ2-4)
CASSLTGVTKNIQYF

SEQ ID NO: 273847 - protein, 11 aa, Homo sapiens
  CDR3 for alpha chain variable domain of TCR clone 136924 (TRAV12-1, TRAJ34)
CVVYKGRELIF

SEQ ID NO: 273848 - protein, 16 aa, Homo sapiens
  CDR3 for beta chain variable domain of TCR clone 136924 (TRBV5-4, TRBJ2-3)
CASQQPGAGGADTQYF

SEQ ID NO: 273849 - protein, 13 aa, Homo sapiens
  CDR3 for alpha chain variable domain of TCR clone 136925 (TRAV2, TRAJ40)
CAVVTSGTNKYIF

SEQ ID NO: 273850 - protein, 15 aa, Homo sapiens
  CDR3 for beta chain variable domain of TCR clone 136925 (TRBV7-3, TRBJ2-2)
CASSETGQGTGELFF

SEQ ID NO: 273851 - protein, 14 aa, Homo sapiens
  CDR3 for alpha chain variable domain of TCR clone 136926 (TRAV38-1, TRAJ54)
CAFIIIQGAQKLVF

SEQ ID NO: 273852 - protein, 13 aa, Homo sapiens
  CDR3 for beta chain variable domain of TCR clone 136926 (TRBV7-9, TRBJ1-2)
CASSLKQNYGYTF

SEQ ID NO: 273853 - protein, 11 aa, Homo sapiens
  CDR3 for alpha chain variable domain of TCR clone 136927 (TRAV26-2, TRAJ33)
CILRSRQATIS

SEQ ID NO: 273854 - protein, 15 aa, Homo sapiens
  CDR3 for beta chain variable domain of TCR clone 136927 (TRBV7-8, TRBJ2-1)
CASSLAGGLYNEQFF

SEQ ID NO: 273855 - protein, 16 aa, Homo sapiens
  CDR3 for alpha chain variable domain of TCR clone 136928 (TRAV20, TRAJ52)
CAVLPDGGTSYGTLTF

SEQ ID NO: 273856 - protein, 12 aa, Homo sapiens
  CDR3 for beta chain variable domain of TCR clone 136928 (TRBV19, TRBJ2-1)
CASSQISNEQFF

SEQ ID NO: 273857 - protein, 13 aa, Homo sapiens
  CDR3 for alpha chain variable domain of TCR clone 136929 (TRAV27, TRAJ45)
CRSPGGGADGLTF

SEQ ID NO: 273858 - protein, 17 aa, Homo sapiens
  CDR3 for beta chain variable domain of TCR clone 136929 (TRBV11-2, TRBJ2-1)
CASSLYPPGVEYNAQFF

SEQ ID NO: 273859 - protein, 13 aa, Homo sapiens
  CDR3 for alpha chain variable domain of TCR clone 136930 (TRAV8-2, TRAJ47)
CVVSGREGNKLVF

SEQ ID NO: 273860 - protein, 15 aa, Homo sapiens
  CDR3 for beta chain variable domain of TCR clone 136930 (TRBV6-3, TRBJ2-7)
CASSSPGTVFYEQYF

SEQ ID NO: 273861 - protein, 13 aa, Homo sapiens
  CDR3 for alpha chain variable domain of TCR clone 136931 (TRAV2, TRAJ24)
CAVEDSSWGKLQF

SEQ ID NO: 273862 - protein, 18 aa, Homo sapiens
  CDR3 for beta chain variable domain of TCR clone 136931 (TRBV11-2, TRBJ2-1)
CASSLNAPGLAGGNEQFF

SEQ ID NO: 273863 - protein, 14 aa, Homo sapiens
  CDR3 for alpha chain variable domain of TCR clone 136932 (TRAV1-2, TRAJ16)
CAVNRFSDGQQLLF

SEQ ID NO: 273864 - protein, 14 aa, Homo sapiens
  CDR3 for beta chain variable domain of TCR clone 136932 (TRBV13, TRBJ2-5)
CASSLGRGQETQYF

SEQ ID NO: 273865 - protein, 14 aa, Homo sapiens
  CDR3 for alpha chain variable domain of TCR clone 136933 (TRAV12-1, TRAJ3)
CGAARYSSASKIIF

SEQ ID NO: 273866 - protein, 15 aa, Homo sapiens
  CDR3 for beta chain variable domain of TCR clone 136933 (TRBV20-1, TRBJ2-7)
CSARKGLAESYEQYF

SEQ ID NO: 273867 - protein, 12 aa, Homo sapiens
  CDR3 for alpha chain variable domain of TCR clone 136934 (TRAV8-3, TRAJ26)
CAGDNYGQNFVF

SEQ ID NO: 273868 - protein, 11 aa, Homo sapiens
  CDR3 for beta chain variable domain of TCR clone 136934 (TRBV19, TRBJ1-1)
CASSIGSEAVF

SEQ ID NO: 273869 - protein, 15 aa, Homo sapiens
  CDR3 for alpha chain variable domain of TCR clone 136935 (TRAV21, TRAJ24)
CAARSSTGSWGKLQF

SEQ ID NO: 273870 - protein, 13 aa, Homo sapiens
  CDR3 for beta chain variable domain of TCR clone 136935 (TRBV11-2, TRBJ2-5)
CASSATGEETQYF

SEQ ID NO: 273871 - protein, 14 aa, Homo sapiens
  CDR3 for alpha chain variable domain of TCR clone 136936 (TRAV13-1, TRAJ12)
CSNYPMDSSYKLIF

SEQ ID NO: 273872 - protein, 11 aa, Homo sapiens
  CDR3 for beta chain variable domain of TCR clone 136936 (TRBV20-1, TRBJ2-1)
SAVYSGSEQFF

SEQ ID NO: 273873 - protein, 14 aa, Homo sapiens
  CDR3 for alpha chain variable domain of TCR clone 136937 (TRAV1-2, TRAJ8)
CAVREDTGFPKLVF

SEQ ID NO: 273874 - protein, 11 aa, Homo sapiens
  CDR3 for beta chain variable domain of TCR clone 136937 (TRBV11-2, TRBJ2-2)
CASSLPGELFF

SEQ ID NO: 273875 - protein, 14 aa, Homo sapiens
  CDR3 for alpha chain variable domain of TCR clone 136938 (TRAV16, TRAJ26)
CALSSANYGQNFVF

SEQ ID NO: 273876 - protein, 15 aa, Homo sapiens
  CDR3 for beta chain variable domain of TCR clone 136938 (TRBV20-1, TRBJ2-7)
CSARKGLAESYEQYF

SEQ ID NO: 273877 - protein, 14 aa, Homo sapiens
  CDR3 for alpha chain variable domain of TCR clone 136939 (TRAV23/DV6, TRAJ11)
CAASLESVYSTLTF

SEQ ID NO: 273878 - protein, 15 aa, Homo sapiens
  CDR3 for beta chain variable domain of TCR clone 136939 (TRBV28, TRBJ2-7)
CASSSPGTEPFEQYF

SEQ ID NO: 273879 - protein, 11 aa, Homo sapiens
  CDR3 for alpha chain variable domain of TCR clone 136940 (TRAV12-1, TRAJ30)
CVVNGQDKIIF

SEQ ID NO: 273880 - protein, 15 aa, Homo sapiens
  CDR3 for beta chain variable domain of TCR clone 136940 (TRBV28, TRBJ2-5)
CASSSGRTIQETQYC

SEQ ID NO: 273881 - protein, 15 aa, Homo sapiens
  CDR3 for alpha chain variable domain of TCR clone 136941 (TRAV2, TRAJ9)
CAVEDRGTGGFKTIF

SEQ ID NO: 273882 - protein, 14 aa, Homo sapiens
  CDR3 for beta chain variable domain of TCR clone 136941 (TRBV14, TRBJ2-1)
CASSQVQGRGEQFF

SEQ ID NO: 273883 - protein, 13 aa, Homo sapiens
  CDR3 for alpha chain variable domain of TCR clone 136942 (TRAV30, TRAJ6)
CGSIEGGSYIPTF

SEQ ID NO: 273884 - protein, 13 aa, Homo sapiens
  CDR3 for beta chain variable domain of TCR clone 136942 (TRBV5-4, TRBJ2-5)
CASSPVSQETQYF

SEQ ID NO: 273885 - protein, 14 aa, Homo sapiens
  CDR3 for alpha chain variable domain of TCR clone 136943 (TRAV1-2, TRAJ16)
CAVNRFSDGQKLLF

SEQ ID NO: 273886 - protein, 16 aa, Homo sapiens
  CDR3 for beta chain variable domain of TCR clone 136943 (TRBV18, TRBJ1-4)
CASSLQAVATNEKLFF

SEQ ID NO: 273887 - protein, 16 aa, Homo sapiens
  CDR3 for alpha chain variable domain of TCR clone 136944 (TRAV21, TRAJ52)
CAVTNAGGTSYGKLKF

SEQ ID NO: 273888 - protein, 13 aa, Homo sapiens
  CDR3 for beta chain variable domain of TCR clone 136944 (TRBV20-1, TRBJ2-3)
CSARLAGTDTQYF

SEQ ID NO: 273889 - protein, 14 aa, Homo sapiens
  CDR3 for alpha chain variable domain of TCR clone 136945 (TRAV29/DV5, TRAJ57)
CAARSQGGSEKLVF

SEQ ID NO: 273890 - protein, 15 aa, Homo sapiens
  CDR3 for beta chain variable domain of TCR clone 136945 (TRBV28, TRBJ2-4)
CAAGSRTLLMGMQYF

SEQ ID NO: 273891 - protein, 12 aa, Homo sapiens
  CDR3 for alpha chain variable domain of TCR clone 136946 (TRAV17, TRAJ12)
CATLRSSYKLIF

SEQ ID NO: 273892 - protein, 12 aa, Homo sapiens
  CDR3 for beta chain variable domain of TCR clone 136946 (TRBV5-5, TRBJ2-5)
CASSYFGETQYF

SEQ ID NO: 273893 - protein, 13 aa, Homo sapiens
  CDR3 for alpha chain variable domain of TCR clone 136947 (TRAV1-1, TRAJ31)
CASYLNNNARLMF

SEQ ID NO: 273894 - protein, 13 aa, Homo sapiens
  CDR3 for beta chain variable domain of TCR clone 136947 (TRBV15, TRBJ1-6)
CATSGGLNSPLHL

SEQ ID NO: 273895 - protein, 14 aa, Homo sapiens
  CDR3 for alpha chain variable domain of TCR clone 136948 (TRAV13-1, TRAJ17)
CAASRGAAGNKLTF

SEQ ID NO: 273896 - protein, 17 aa, Homo sapiens
  CDR3 for beta chain variable domain of TCR clone 136948 (TRBV20-1, TRBJ2-1)
CSARDPLAGVWDNEQFF

SEQ ID NO: 273897 - protein, 13 aa, Homo sapiens
  CDR3 for alpha chain variable domain of TCR clone 136949 (TRAV8-4, TRAJ27)
CSVSPRNAGKSTF

SEQ ID NO: 273898 - protein, 17 aa, Homo sapiens
  CDR3 for beta chain variable domain of TCR clone 136949 (TRBV19, TRBJ2-3)
CASSIDPAGGGTDTQYF

SEQ ID NO: 273899 - protein, 13 aa, Homo sapiens
  CDR3 for alpha chain variable domain of TCR clone 136950 (TRAV4, TRAJ33)
CRVGDMNNYQLIW

SEQ ID NO: 273900 - protein, 14 aa, Homo sapiens
  CDR3 for beta chain variable domain of TCR clone 136950 (TRBV7-9, TRBJ1-1)
CASSLGGANTVAFF

SEQ ID NO: 273901 - protein, 13 aa, Homo sapiens
  CDR3 for alpha chain variable domain of TCR clone 136951 (TRAV17, TRAJ9)
CATDYTGGFNTIF

SEQ ID NO: 273902 - protein, 13 aa, Homo sapiens
  CDR3 for beta chain variable domain of TCR clone 136951 (TRBV7-9, TRBJ1-2)
CASSLKQNYGYTF

SEQ ID NO: 273903 - protein, 13 aa, Homo sapiens
  CDR3 for alpha chain variable domain of TCR clone 136952 (TRAV27, TRAJ6)
CAGGTRGSYIPTF

SEQ ID NO: 273904 - protein, 15 aa, Homo sapiens
  CDR3 for beta chain variable domain of TCR clone 136952 (TRBV27, TRBJ2-5)
CASSLIPSGGETQYF

SEQ ID NO: 273905 - protein, 13 aa, Homo sapiens
  CDR3 for alpha chain variable domain of TCR clone 136953 (TRAV13-2, TRAJ49)
CAETLHGGNQFYF

SEQ ID NO: 273906 - protein, 16 aa, Homo sapiens
  CDR3 for beta chain variable domain of TCR clone 136953 (TRBV19, TRBJ2-2)
CASRSPGTGATGELFF

SEQ ID NO: 273907 - protein, 14 aa, Homo sapiens
  CDR3 for alpha chain variable domain of TCR clone 136954 (TRAV26-1, TRAJ39)
CIVRVEGSGNILTF

SEQ ID NO: 273908 - protein, 15 aa, Homo sapiens
  CDR3 for beta chain variable domain of TCR clone 136954 (TRBV7-9, TRBJ1-5)
CASSQGHQPNQPQHF

SEQ ID NO: 273909 - protein, 14 aa, Homo sapiens
  CDR3 for alpha chain variable domain of TCR clone 136955 (TRAV35, TRAJ22)
CAGLRPGSARQLTF

SEQ ID NO: 273910 - protein, 16 aa, Homo sapiens
  CDR3 for beta chain variable domain of TCR clone 136955 (TRBV4-1, TRBJ2-7)
CASSPVAGVTSSTSGR

SEQ ID NO: 273911 - protein, 13 aa, Homo sapiens
  CDR3 for alpha chain variable domain of TCR clone 136956 (TRAV16, TRAJ22)
CVFRKGSARQLTF

SEQ ID NO: 273912 - protein, 15 aa, Homo sapiens
  CDR3 for beta chain variable domain of TCR clone 136956 (TRBV7-2, TRBJ2-3)
CASSLAGAFIDTQYF

SEQ ID NO: 273913 - protein, 17 aa, Homo sapiens
  CDR3 for alpha chain variable domain of TCR clone 136957 (TRAV3, TRAJ6)
CAVRDGPRAGGSYIPTF

SEQ ID NO: 273914 - protein, 13 aa, Homo sapiens
  CDR3 for beta chain variable domain of TCR clone 136957 (TRBV27, TRBJ1-1)
CASSVSIGAEAFF

SEQ ID NO: 273915 - protein, 18 aa, Homo sapiens
  CDR3 for alpha chain variable domain of TCR clone 136958 (TRAV26-1, TRAJ37)
CIVRVDMHGSSHTGKLIF

SEQ ID NO: 273916 - protein, 15 aa, Homo sapiens
  CDR3 for beta chain variable domain of TCR clone 136958 (TRBV20-1, TRBJ2-7)
CSARVLASPLYEQYF

SEQ ID NO: 273917 - protein, 14 aa, Homo sapiens
  CDR3 for alpha chain variable domain of TCR clone 136959 (TRAV13-1, TRAJ20)
CAVRPGSNDYKLSF

SEQ ID NO: 273918 - protein, 16 aa, Homo sapiens
  CDR3 for beta chain variable domain of TCR clone 136959 (TRBV28, TRBJ2-3)
CASSLFTGVSTDTQYF

SEQ ID NO: 273919 - protein, 10 aa, Homo sapiens
  CDR3 for alpha chain variable domain of TCR clone 136960 (TRAV13-1, TRAJ52)
CAAKTPMLVG

SEQ ID NO: 273920 - protein, 14 aa, Homo sapiens
  CDR3 for beta chain variable domain of TCR clone 136960 (TRBV6-5, TRBJ1-1)
CASSFGQGLTEAFF

SEQ ID NO: 273921 - protein, 13 aa, Homo sapiens
  CDR3 for alpha chain variable domain of TCR clone 136961 (TRAV2, TRAJ15)
CAVASQAGTALIF

SEQ ID NO: 273922 - protein, 15 aa, Homo sapiens
  CDR3 for beta chain variable domain of TCR clone 136961 (TRBV6-3, TRBJ1-5)
CASSPEVGFNQPQHF

SEQ ID NO: 273923 - protein, 13 aa, Homo sapiens
  CDR3 for alpha chain variable domain of TCR clone 136962 (TRAV13-2, TRAJ13)
CAERPGGYQKVTF

SEQ ID NO: 273924 - protein, 16 aa, Homo sapiens
  CDR3 for beta chain variable domain of TCR clone 136962 (TRBV29-1, TRBJ2-7)
CSVEDAEDGTAYEQYF

SEQ ID NO: 273925 - protein, 15 aa, Homo sapiens
  CDR3 for alpha chain variable domain of TCR clone 136963 (TRAV3, TRAJ29)
CAVRDPLSGNTPLVF

SEQ ID NO: 273926 - protein, 16 aa, Homo sapiens
  CDR3 for beta chain variable domain of TCR clone 136963 (TRBV5-4, TRBJ2-3)
CASQQPGAGGADTQYF

SEQ ID NO: 273927 - protein, 14 aa, Homo sapiens
  CDR3 for alpha chain variable domain of TCR clone 136964 (TRAV21, TRAJ35)
CAVMPIGFGIVLYC

SEQ ID NO: 273928 - protein, 12 aa, Homo sapiens
  CDR3 for beta chain variable domain of TCR clone 136964 (TRBV7-9, TRBJ2-7)
CASSIKREEQYF

SEQ ID NO: 273929 - protein, 11 aa, Homo sapiens
  CDR3 for alpha chain variable domain of TCR clone 136965 (TRAV21, TRAJ48)
CPVDGNEKLTF

SEQ ID NO: 273930 - protein, 16 aa, Homo sapiens
  CDR3 for beta chain variable domain of TCR clone 136965 (TRBV12-4, TRBJ1-5)
CASSSGPRGSNQPQHF

SEQ ID NO: 273931 - protein, 10 aa, Homo sapiens
  CDR3 for alpha chain variable domain of TCR clone 136966 (TRAV1-2, TRAJ31)
CVSEDARLMF

SEQ ID NO: 273932 - protein, 13 aa, Homo sapiens
  CDR3 for beta chain variable domain of TCR clone 136966 (TRBV7-8, TRBJ2-1)
CASTRDAVDEQFF

SEQ ID NO: 273933 - protein, 13 aa, Homo sapiens
  CDR3 for alpha chain variable domain of TCR clone 136967 (TRAV13-1, TRAJ27)
CAASTHQCRQINR

SEQ ID NO: 273934 - protein, 16 aa, Homo sapiens
  CDR3 for beta chain variable domain of TCR clone 136967 (TRBV27, TRBJ2-2)
CASSLRGLVRTGELFF

SEQ ID NO: 273935 - protein, 13 aa, Homo sapiens
  CDR3 for alpha chain variable domain of TCR clone 136968 (TRAV13-1, TRAJ37)
CAAVSGKTGKLIF

SEQ ID NO: 273936 - protein, 17 aa, Homo sapiens
  CDR3 for beta chain variable domain of TCR clone 136968 (TRBV10-2, TRBJ1-6)
CASSENRGSSYNSPLHF

SEQ ID NO: 273937 - protein, 13 aa, Homo sapiens
  CDR3 for alpha chain variable domain of TCR clone 136969 (TRAV21, TRAJ27)
CSARPGNAGKSTF

SEQ ID NO: 273938 - protein, 14 aa, Homo sapiens
  CDR3 for beta chain variable domain of TCR clone 136969 (TRBV20-1, TRBJ2-1)
CSAAGSGEYNEQFF

SEQ ID NO: 273939 - protein, 15 aa, Homo sapiens
  CDR3 for alpha chain variable domain of TCR clone 136970 (TRAV25, TRAJ52)
CAGTSGGTSYGKLTF

SEQ ID NO: 273940 - protein, 13 aa, Homo sapiens
  CDR3 for beta chain variable domain of TCR clone 136970 (TRBV6-5, TRBJ2-5)
CASSPQGGDTQYF

SEQ ID NO: 273941 - protein, 17 aa, Homo sapiens
  CDR3 for alpha chain variable domain of TCR clone 136971 (TRAV38-2/DV8, TRAJ28)
CAFLTLYSGAGSYQLTF

SEQ ID NO: 273942 - protein, 22 aa, Homo sapiens
  CDR3 for beta chain variable domain of TCR clone 136971 (TRBV7-2, TRBJ2-5)
RRTRPCISGPAACQGGGETQYF

SEQ ID NO: 273943 - protein, 14 aa, Homo sapiens
  CDR3 for alpha chain variable domain of TCR clone 136972 (TRAV12-3, TRAJ9)
CAMSPNTGGFKTIF

SEQ ID NO: 273944 - protein, 17 aa, Homo sapiens
  CDR3 for beta chain variable domain of TCR clone 136972 (TRBV7-8, TRBJ2-6)
CASSAGTGGAGANVLTF

SEQ ID NO: 273945 - protein, 11 aa, Homo sapiens
  CDR3 for alpha chain variable domain of TCR clone 136973 (TRAV2, TRAJ33)
CAVESNYQLIC

SEQ ID NO: 273946 - protein, 15 aa, Homo sapiens
  CDR3 for beta chain variable domain of TCR clone 136973 (TRBV5-1, TRBJ2-1)
CASSPPRAPYNEQFF

SEQ ID NO: 273947 - protein, 15 aa, Homo sapiens
  CDR3 for alpha chain variable domain of TCR clone 136974 (TRAV26-1, TRAJ29)
CIVRVEGSGNKPLVF

SEQ ID NO: 273948 - protein, 13 aa, Homo sapiens
  CDR3 for beta chain variable domain of TCR clone 136974 (TRBV12-4, TRBJ1-2)
CASSLRQGKGYTF

SEQ ID NO: 273949 - protein, 10 aa, Homo sapiens
  CDR3 for alpha chain variable domain of TCR clone 136975 (TRAV13-1, TRAJ30)
CAARDDKIIF

SEQ ID NO: 273950 - protein, 13 aa, Homo sapiens
  CDR3 for beta chain variable domain of TCR clone 136975 (TRBV6-5, TRBJ2-2)
CASSLPGVGELFF

SEQ ID NO: 273951 - protein, 16 aa, Homo sapiens
  CDR3 for alpha chain variable domain of TCR clone 136976 (TRAV29/DV5, TRAJ36)
FAASAHYQSGANNLFF

SEQ ID NO: 273952 - protein, 14 aa, Homo sapiens
  CDR3 for beta chain variable domain of TCR clone 136976 (TRBV12-5, TRBJ2-5)
CASGLRTHQETQYF

SEQ ID NO: 273953 - protein, 14 aa, Homo sapiens
  CDR3 for alpha chain variable domain of TCR clone 136977 (TRAV4, TRAJ26)
CLVGPHNYGQNFVF

SEQ ID NO: 273954 - protein, 20 aa, Homo sapiens
  CDR3 for beta chain variable domain of TCR clone 136977 (TRBV7-8, TRBJ2-2)
CASSHLFPGPTIHITGELFF

SEQ ID NO: 273955 - protein, 17 aa, Homo sapiens
  CDR3 for alpha chain variable domain of TCR clone 136978 (TRAV13-1, TRAJ28)
GAASPPYSGAGSYQLTF

SEQ ID NO: 273956 - protein, 15 aa, Homo sapiens
  CDR3 for beta chain variable domain of TCR clone 136978 (TRBV20-1, TRBJ2-1)
CSARGGTRYYNEQFF

SEQ ID NO: 273957 - protein, 14 aa, Homo sapiens
  CDR3 for alpha chain variable domain of TCR clone 136979 (TRAV23/DV6, TRAJ22)
CAASVSGSARQLTF

SEQ ID NO: 273958 - protein, 18 aa, Homo sapiens
  CDR3 for beta chain variable domain of TCR clone 136979 (TRBV11-2, TRBJ2-3)
CASSLGGASRGAPNTQYF

SEQ ID NO: 273959 - protein, 14 aa, Homo sapiens
  CDR3 for alpha chain variable domain of TCR clone 136980 (TRAV23/DV6, TRAJ37)
CAASTSSNTGKLIY

SEQ ID NO: 273960 - protein, 15 aa, Homo sapiens
  CDR3 for beta chain variable domain of TCR clone 136980 (TRBV7-9, TRBJ2-7)
CASSPGGGLTYEQYF

SEQ ID NO: 273961 - protein, 14 aa, Homo sapiens
  CDR3 for alpha chain variable domain of TCR clone 136981 (TRAV17, TRAJ57)
CATDPQGGSEKLVF

SEQ ID NO: 273962 - protein, 14 aa, Homo sapiens
  CDR3 for beta chain variable domain of TCR clone 136981 (TRBV4-1, TRBJ1-1)
CASSRSGQSFEAFF

SEQ ID NO: 273963 - protein, 14 aa, Homo sapiens
  CDR3 for alpha chain variable domain of TCR clone 136982 (TRAV12-2, TRAJ15)
CAPRTGQAGTALIF

SEQ ID NO: 273964 - protein, 17 aa, Homo sapiens
  CDR3 for beta chain variable domain of TCR clone 136982 (TRBV5-5, TRBJ1-2)
CASSLGSLDGQSEGYTF

SEQ ID NO: 273965 - protein, 20 aa, Homo sapiens
  CDR3 for alpha chain variable domain of TCR clone 136983 (TRAV25, TRAJ21)
TATQTTDVGTYHLSFNKFYF

SEQ ID NO: 273966 - protein, 14 aa, Homo sapiens
  CDR3 for beta chain variable domain of TCR clone 136983 (TRBV6-1, TRBJ2-1)
CASAKDGFYNEQFF

SEQ ID NO: 273967 - protein, 13 aa, Homo sapiens
  CDR3 for alpha chain variable domain of TCR clone 136984 (TRAV8-1, TRAJ15)
CAVENQAGTALIF

SEQ ID NO: 273968 - protein, 15 aa, Homo sapiens
  CDR3 for beta chain variable domain of TCR clone 136984 (TRBV7-3, TRBJ2-7)
CASSVTPTGYDEQYF

SEQ ID NO: 273969 - protein, 16 aa, Homo sapiens
  CDR3 for alpha chain variable domain of TCR clone 136985 (TRAV26-2, TRAJ57)
CILSDVGSGGSAKLVF

SEQ ID NO: 273970 - protein, 13 aa, Homo sapiens
  CDR3 for beta chain variable domain of TCR clone 136985 (TRBV18, TRBJ2-3)
CASSPGVTDTQYF

SEQ ID NO: 273971 - protein, 14 aa, Homo sapiens
  CDR3 for alpha chain variable domain of TCR clone 136986 (TRAV12-3, TRAJ42)
CAMNYGGSQGNLIF

SEQ ID NO: 273972 - protein, 15 aa, Homo sapiens
  CDR3 for beta chain variable domain of TCR clone 136986 (TRBV5-7, TRBJ1-5)
CASSYGKLWDKPQYF

SEQ ID NO: 273973 - protein, 15 aa, Homo sapiens
  CDR3 for alpha chain variable domain of TCR clone 136987 (TRAV26-2, TRAJ13)
CILRDLSGGYQKVTF

SEQ ID NO: 273974 - protein, 14 aa, Homo sapiens
  CDR3 for beta chain variable domain of TCR clone 136987 (TRBV19, TRBJ1-4)
CASSINRGGEKLFF

SEQ ID NO: 273975 - protein, 14 aa, Homo sapiens
  CDR3 for alpha chain variable domain of TCR clone 136988 (TRAV12-1, TRAJ17)
CVVYYKAAGNKLTF

SEQ ID NO: 273976 - protein, 17 aa, Homo sapiens
  CDR3 for beta chain variable domain of TCR clone 136988 (TRBV11-2, TRBJ2-1)
CASSLYPPGVEYNEQFF

SEQ ID NO: 273977 - protein, 14 aa, Homo sapiens
  CDR3 for alpha chain variable domain of TCR clone 136989 (TRAV1-2, TRAJ16)
CAVNRFSDGQKLPF

SEQ ID NO: 273978 - protein, 13 aa, Homo sapiens
  CDR3 for beta chain variable domain of TCR clone 136989 (TRBV29-1, TRBJ1-1)
CSVGDSRNTEAFF

SEQ ID NO: 273979 - protein, 10 aa, Homo sapiens
  CDR3 for alpha chain variable domain of TCR clone 136990 (TRAV23/DV6, TRAJ43)
CAAAVAALEQ

SEQ ID NO: 273980 - protein, 15 aa, Homo sapiens
  CDR3 for beta chain variable domain of TCR clone 136990 (TRBV20-1, TRBJ1-1)
CSASRRVTGNTEAFF

SEQ ID NO: 273981 - protein, 13 aa, Homo sapiens
  CDR3 for alpha chain variable domain of TCR clone 136991 (TRAV16, TRAJ9)
CALSHTGGFKTIF

SEQ ID NO: 273982 - protein, 14 aa, Homo sapiens
  CDR3 for beta chain variable domain of TCR clone 136991 (TRBV5-1, TRBJ2-1)
CASSLEGPVYEQFF

SEQ ID NO: 273983 - protein, 14 aa, Homo sapiens
  CDR3 for alpha chain variable domain of TCR clone 136992 (TRAV17, TRAJ32)
SATDPGGATNKLIF

SEQ ID NO: 273984 - protein, 14 aa, Homo sapiens
  CDR3 for beta chain variable domain of TCR clone 136992 (TRBV2, TRBJ1-5)
CASSENRGSQPQHF

SEQ ID NO: 273985 - protein, 14 aa, Homo sapiens
  CDR3 for alpha chain variable domain of TCR clone 136993 (TRAV12-2, TRAJ29)
CAVRRNSGNTPLIF

SEQ ID NO: 273986 - protein, 13 aa, Homo sapiens
  CDR3 for beta chain variable domain of TCR clone 136993 (TRBV12-4, TRBJ2-1)
CASSHYTDNEQFF

SEQ ID NO: 273987 - protein, 12 aa, Homo sapiens
  CDR3 for alpha chain variable domain of TCR clone 136994 (TRAV12-3, TRAJ17)
CAMTLTGNKLTF

SEQ ID NO: 273988 - protein, 14 aa, Homo sapiens
  CDR3 for beta chain variable domain of TCR clone 136994 (TRBV6-1, TRBJ1-1)
CASRYAQRNTEAFF

SEQ ID NO: 273989 - protein, 13 aa, Homo sapiens
  CDR3 for alpha chain variable domain of TCR clone 136995 (TRAV13-1, TRAJ9)
CAARGTGGFKTIF

SEQ ID NO: 273990 - protein, 14 aa, Homo sapiens
  CDR3 for beta chain variable domain of TCR clone 136995 (TRBV2, TRBJ2-3)
CASSEGQNTDTQYF

SEQ ID NO: 273991 - protein, 12 aa, Homo sapiens
  CDR3 for alpha chain variable domain of TCR clone 136996 (TRAV30, TRAJ43)
CGTEERGNDLRF

SEQ ID NO: 273992 - protein, 13 aa, Homo sapiens
  CDR3 for beta chain variable domain of TCR clone 136996 (TRBV27, TRBJ2-7)
CASSVSQGYEQYF

SEQ ID NO: 273993 - protein, 12 aa, Homo sapiens
  CDR3 for alpha chain variable domain of TCR clone 136997 (TRAV8-3, TRAJ43)
CAVGAGNNDMRF

SEQ ID NO: 273994 - protein, 14 aa, Homo sapiens
  CDR3 for beta chain variable domain of TCR clone 136997 (TRBV7-2, TRBJ2-5)
CASSFTQGQETQYF

SEQ ID NO: 273995 - protein, 14 aa, Homo sapiens
  CDR3 for alpha chain variable domain of TCR clone 136998 (TRAV12-2, TRAJ40)
CAVKIPSGTYNYIF

SEQ ID NO: 273996 - protein, 14 aa, Homo sapiens
  CDR3 for beta chain variable domain of TCR clone 136998 (TRBV20-1, TRBJ1-1)
CSAQTRIGGTEAVF

SEQ ID NO: 273997 - protein, 16 aa, Homo sapiens
  CDR3 for alpha chain variable domain of TCR clone 136999 (TRAV12-3, TRAJ53)
CAMSPGSGGSNSKLTF

SEQ ID NO: 273998 - protein, 11 aa, Homo sapiens
  CDR3 for beta chain variable domain of TCR clone 136999 (TRBV29-1, TRBJ2-5)
CSEDRTGTRYF

SEQ ID NO: 273999 - protein, 14 aa, Homo sapiens
  CDR3 for alpha chain variable domain of TCR clone 137000 (TRAV13-1, TRAJ8)
CAASITGGFQKLVF

SEQ ID NO: 274000 - protein, 14 aa, Homo sapiens
  CDR3 for beta chain variable domain of TCR clone 137000 (TRBV6-1, TRBJ2-2)
CASSLFVGGGELFF

SEQ ID NO: 274001 - protein, 13 aa, Homo sapiens
  CDR3 for alpha chain variable domain of TCR clone 137001 (TRAV2, TRAJ29)
CAAGSSENTPLVF

SEQ ID NO: 274002 - protein, 16 aa, Homo sapiens
  CDR3 for beta chain variable domain of TCR clone 137001 (TRBV7-9, TRBJ1-2)
CASSPGGGAINYGYTF

SEQ ID NO: 274003 - protein, 15 aa, Homo sapiens
  CDR3 for alpha chain variable domain of TCR clone 137002 (TRAV26-1, TRAJ29)
CIVSVEGSGDTPLVF

SEQ ID NO: 274004 - protein, 14 aa, Homo sapiens
  CDR3 for beta chain variable domain of TCR clone 137002 (TRBV18, TRBJ2-5)
CASSPGVSQETQYF

SEQ ID NO: 274005 - protein, 17 aa, Homo sapiens
  CDR3 for alpha chain variable domain of TCR clone 137003 (TRAV4, TRAJ18)
CLVGERSVGSTLGRLYF

SEQ ID NO: 274006 - protein, 14 aa, Homo sapiens
  CDR3 for beta chain variable domain of TCR clone 137003 (TRBV6-5, TRBJ1-2)
CASSYDGTGGDYTF

SEQ ID NO: 274007 - protein, 15 aa, Homo sapiens
  CDR3 for alpha chain variable domain of TCR clone 137004 (TRAV3, TRAJ20)
CAVREIKLRDYKLSF

SEQ ID NO: 274008 - protein, 15 aa, Homo sapiens
  CDR3 for beta chain variable domain of TCR clone 137004 (TRBV7-9, TRBJ1-6)
CASSSPGRGNSPLHF

SEQ ID NO: 274009 - protein, 14 aa, Homo sapiens
  CDR3 for alpha chain variable domain of TCR clone 137005 (TRAV12-1, TRAJ30)
CVPTGTNRDAKIIF

SEQ ID NO: 274010 - protein, 11 aa, Homo sapiens
  CDR3 for beta chain variable domain of TCR clone 137005 (TRBV4-1, TRBJ2-2)
CASEHTGELFF

SEQ ID NO: 274011 - protein, 12 aa, Homo sapiens
  CDR3 for alpha chain variable domain of TCR clone 137006 (TRAV21, TRAJ33)
CAQMDSNYQLIW

SEQ ID NO: 274012 - protein, 12 aa, Homo sapiens
  CDR3 for beta chain variable domain of TCR clone 137006 (TRBV11-2, TRBJ2-2)
CASSLGGGELFF

SEQ ID NO: 274013 - protein, 14 aa, Homo sapiens
  CDR3 for alpha chain variable domain of TCR clone 137007 (TRAV9-2, TRAJ20)
CALRDPLNDYKLSF

SEQ ID NO: 274014 - protein, 14 aa, Homo sapiens
  CDR3 for beta chain variable domain of TCR clone 137007 (TRBV5-1, TRBJ2-5)
CASSLWQIQETQYF

SEQ ID NO: 274015 - protein, 15 aa, Homo sapiens
  CDR3 for alpha chain variable domain of TCR clone 137008 (TRAV8-3, TRAJ11)
CAVGLLNSGYSTLTF

SEQ ID NO: 274016 - protein, 12 aa, Homo sapiens
  CDR3 for beta chain variable domain of TCR clone 137008 (TRBV12-4, TRBJ2-7)
CASSLGGYEQYF

SEQ ID NO: 274017 - protein, 17 aa, Homo sapiens
  CDR3 for alpha chain variable domain of TCR clone 137009 (TRAV27, TRAJ26)
CAGARAPWDNYGQNFVF

SEQ ID NO: 274018 - protein, 15 aa, Homo sapiens
  CDR3 for beta chain variable domain of TCR clone 137009 (TRBV11-2, TRBJ2-5)
CASSPRSGGLETQYF

SEQ ID NO: 274019 - protein, 14 aa, Homo sapiens
  CDR3 for alpha chain variable domain of TCR clone 137010 (TRAV2, TRAJ20)
CSVEDGTNDYKLSF

SEQ ID NO: 274020 - protein, 13 aa, Homo sapiens
  CDR3 for beta chain variable domain of TCR clone 137010 (TRBV7-2, TRBJ1-1)
CASSRNTNTEAFF

SEQ ID NO: 274021 - protein, 14 aa, Homo sapiens
  CDR3 for alpha chain variable domain of TCR clone 137011 (TRAV2, TRAJ9)
CAVEDRSGGFKTIF

SEQ ID NO: 274022 - protein, 16 aa, Homo sapiens
  CDR3 for beta chain variable domain of TCR clone 137011 (TRBV11-2, TRBJ1-2)
CASSPSGREANYGYTF

SEQ ID NO: 274023 - protein, 12 aa, Homo sapiens
  CDR3 for alpha chain variable domain of TCR clone 137012 (TRAV13-1, TRAJ39)
CSKYMAGNMLTF

SEQ ID NO: 274024 - protein, 15 aa, Homo sapiens
  CDR3 for beta chain variable domain of TCR clone 137012 (TRBV7-9, TRBJ1-1)
CASSLLEQGGTEAFF

SEQ ID NO: 274025 - protein, 15 aa, Homo sapiens
  CDR3 for alpha chain variable domain of TCR clone 137013 (TRAV21, TRAJ53)
CATLNSGVSNYKLTF

SEQ ID NO: 274026 - protein, 14 aa, Homo sapiens
  CDR3 for beta chain variable domain of TCR clone 137013 (TRBV7-2, TRBJ2-7)
CASRSQGAAYEQYF

SEQ ID NO: 274027 - protein, 13 aa, Homo sapiens
  CDR3 for alpha chain variable domain of TCR clone 137014 (TRAV8-3, TRAJ43)
CAVGPDNNNDMRF

SEQ ID NO: 274028 - protein, 16 aa, Homo sapiens
  CDR3 for beta chain variable domain of TCR clone 137014 (TRBV7-3, TRBJ2-2)
CASSLKRGTLSGELFF

SEQ ID NO: 274029 - protein, 12 aa, Homo sapiens
  CDR3 for alpha chain variable domain of TCR clone 137015 (TRAV4, TRAJ26)
CLVGDYGQNFVS

SEQ ID NO: 274030 - protein, 16 aa, Homo sapiens
  CDR3 for beta chain variable domain of TCR clone 137015 (TRBV7-2, TRBJ1-2)
CASSSNQDRRGHGDTF

SEQ ID NO: 274031 - protein, 13 aa, Homo sapiens
  CDR3 for alpha chain variable domain of TCR clone 137016 (TRAV26-1, TRAJ30)
CIVRVESNDKIIF

SEQ ID NO: 274032 - protein, 11 aa, Homo sapiens
  CDR3 for beta chain variable domain of TCR clone 137016 (TRBV12-4, TRBJ2-3)
CASTATDTQYF

SEQ ID NO: 274033 - protein, 16 aa, Homo sapiens
  CDR3 for alpha chain variable domain of TCR clone 137017 (TRAV3, TRAJ23)
WAVKIGIYNQGGKLIF

SEQ ID NO: 274034 - protein, 17 aa, Homo sapiens
  CDR3 for beta chain variable domain of TCR clone 137017 (TRBV10-3, TRBJ2-6)
CAISESTAPSGANVLTF

SEQ ID NO: 274035 - protein, 16 aa, Homo sapiens
  CDR3 for alpha chain variable domain of TCR clone 137018 (TRAV30, TRAJ24)
CGTEIVDADSWGKFQC

SEQ ID NO: 274036 - protein, 13 aa, Homo sapiens
  CDR3 for beta chain variable domain of TCR clone 137018 (TRBV7-3, TRBJ1-1)
CASSQDWGAEAFF

SEQ ID NO: 274037 - protein, 22 aa, Homo sapiens
  CDR3 for alpha chain variable domain of TCR clone 137019 (TRAV13-1, TRAJ37)
CAARIGGLWQHRQTNLWARDNF

SEQ ID NO: 274038 - protein, 13 aa, Homo sapiens
  CDR3 for beta chain variable domain of TCR clone 137019 (TRBV7-9, TRBJ1-2)
CASSLKQNYGYTF

SEQ ID NO: 274039 - protein, 12 aa, Homo sapiens
  CDR3 for alpha chain variable domain of TCR clone 137020 (TRAV13-2, TRAJ23)
CAELHRGGKLIF

SEQ ID NO: 274040 - protein, 16 aa, Homo sapiens
  CDR3 for beta chain variable domain of TCR clone 137020 (TRBV20-1, TRBJ1-4)
CSAPGRCLLTNEKLFF

SEQ ID NO: 274041 - protein, 13 aa, Homo sapiens
  CDR3 for alpha chain variable domain of TCR clone 137021 (TRAV8-3, TRAJ28)
CAVVRLGVTNSLS

SEQ ID NO: 274042 - protein, 15 aa, Homo sapiens
  CDR3 for beta chain variable domain of TCR clone 137021 (TRBV7-9, TRBJ1-5)
CASSQGHQPNQPQHF

SEQ ID NO: 274043 - protein, 14 aa, Homo sapiens
  CDR3 for alpha chain variable domain of TCR clone 137022 (TRAV12-2, TRAJ13)
CAVKKTGGYQKVTF

SEQ ID NO: 274044 - protein, 14 aa, Homo sapiens
  CDR3 for beta chain variable domain of TCR clone 137022 (TRBV4-1, TRBJ2-2)
CASSQAVSTGELFF

SEQ ID NO: 274045 - protein, 17 aa, Homo sapiens
  CDR3 for alpha chain variable domain of TCR clone 137023 (TRAV3, TRAJ12)
CAVRDGGRMDSSYKLIF

SEQ ID NO: 274046 - protein, 16 aa, Homo sapiens
  CDR3 for beta chain variable domain of TCR clone 137023 (TRBV29-1, TRBJ2-6)
CSVEDITYSGANVLTF

SEQ ID NO: 274047 - protein, 13 aa, Homo sapiens
  CDR3 for alpha chain variable domain of TCR clone 137024 (TRAV13-2, TRAJ53)
CAENMGSNYKLTF

SEQ ID NO: 274048 - protein, 13 aa, Homo sapiens
  CDR3 for beta chain variable domain of TCR clone 137024 (TRBV4-1, TRBJ2-2)
CASNQENTGELFF

SEQ ID NO: 274049 - protein, 16 aa, Homo sapiens
  CDR3 for alpha chain variable domain of TCR clone 137025 (TRAV26-2, TRAJ57)
CILRDVGSGGSEKLVF

SEQ ID NO: 274050 - protein, 17 aa, Homo sapiens
  CDR3 for beta chain variable domain of TCR clone 137025 (TRBV7-8, TRBJ2-6)
CASSAGTGGAGANVLTF

SEQ ID NO: 274051 - protein, 11 aa, Homo sapiens
  CDR3 for alpha chain variable domain of TCR clone 137026 (TRAV12-2, TRAJ49)
CAVNTGNQFYF

SEQ ID NO: 274052 - protein, 16 aa, Homo sapiens
  CDR3 for beta chain variable domain of TCR clone 137026 (TRBV19, TRBJ2-2)
CASSAAGTGGTGELFF

SEQ ID NO: 274053 - protein, 15 aa, Homo sapiens
  CDR3 for alpha chain variable domain of TCR clone 137027 (TRAV12-2, TRAJ53)
CAVNVGGGSNYKLTF

SEQ ID NO: 274054 - protein, 13 aa, Homo sapiens
  CDR3 for beta chain variable domain of TCR clone 137027 (TRBV3-1, TRBJ1-1)
CASSPGVITEAFF

SEQ ID NO: 274055 - protein, 13 aa, Homo sapiens
  CDR3 for alpha chain variable domain of TCR clone 137028 (TRAV12-2, TRAJ52)
YAAHGTIYGKLTF

SEQ ID NO: 274056 - protein, 15 aa, Homo sapiens
  CDR3 for beta chain variable domain of TCR clone 137028 (TRBV10-3, TRBJ2-7)
CAISTFSGVKGEQYF

SEQ ID NO: 274057 - protein, 15 aa, Homo sapiens
  CDR3 for alpha chain variable domain of TCR clone 137029 (TRAV12-3, TRAJ10)
CASYILTGGGNKLTL

SEQ ID NO: 274058 - protein, 15 aa, Homo sapiens
  CDR3 for beta chain variable domain of TCR clone 137029 (TRBV7-2, TRBJ1-6)
CASSLGPDRGMPLHF

SEQ ID NO: 274059 - protein, 14 aa, Homo sapiens
  CDR3 for alpha chain variable domain of TCR clone 137030 (TRAV25, TRAJ35)
CARRMEGFGNVLHC

SEQ ID NO: 274060 - protein, 13 aa, Homo sapiens
  CDR3 for beta chain variable domain of TCR clone 137030 (TRBV7-2, TRAJ28)
CASSLAGLEKLFF

SEQ ID NO: 274061 - protein, 17 aa, Homo sapiens
  CDR3 for alpha chain variable domain of TCR clone 137031 (TRAV38-2/DV8, TRAJ28)
CAFLNLYSGAGSYQLTF

SEQ ID NO: 274062 - protein, 14 aa, Homo sapiens
  CDR3 for beta chain variable domain of TCR clone 137031 (TRBV7-2, TRBJ2-5)
CASSLSGGGETQYF

SEQ ID NO: 274063 - protein, 18 aa, Homo sapiens
  CDR3 for alpha chain variable domain of TCR clone 137032 (TRAV1-1, TRAJ12)
CLLLLRCERGDSSYKLIF

SEQ ID NO: 274064 - protein, 15 aa, Homo sapiens
  CDR3 for beta chain variable domain of TCR clone 137032 (TRBV18, TRBJ2-5)
CASTDKGPRQETQYF

SEQ ID NO: 274065 - protein, 15 aa, Homo sapiens
  CDR3 for alpha chain variable domain of TCR clone 137033 (TRAV17, TRAJ23)
CATDAEDNQGGKLIF

SEQ ID NO: 274066 - protein, 13 aa, Homo sapiens
  CDR3 for beta chain variable domain of TCR clone 137033 (TRBV11-2, TRBJ1-3)
CASSPTGGNTIYF

SEQ ID NO: 274067 - protein, 10 aa, Homo sapiens
  CDR3 for alpha chain variable domain of TCR clone 137034 (TRAV1-2, TRAJ31)
CVSEDARLMF

SEQ ID NO: 274068 - protein, 15 aa, Homo sapiens
  CDR3 for beta chain variable domain of TCR clone 137034 (TRBV7-9, TRBJ1-4)
CASSRTGGFNEKLFF

SEQ ID NO: 274069 - protein, 11 aa, Homo sapiens
  CDR3 for alpha chain variable domain of TCR clone 137035 (TRAV21, TRAJ4)
HVSGGYNKLIF

SEQ ID NO: 274070 - protein, 13 aa, Homo sapiens
  CDR3 for beta chain variable domain of TCR clone 137035 (TRBV7-3, TRBJ2-5)
CASSLTVGETQYF

SEQ ID NO: 274071 - protein, 13 aa, Homo sapiens
  CDR3 for alpha chain variable domain of TCR clone 137036 (TRAV20, TRAJ37)
CAGCSSNTGKLIF

SEQ ID NO: 274072 - protein, 16 aa, Homo sapiens
  CDR3 for beta chain variable domain of TCR clone 137036 (TRBV19, TRBJ2-2)
CASSFPGQGLAGELFF

SEQ ID NO: 274073 - protein, 14 aa, Homo sapiens
  CDR3 for alpha chain variable domain of TCR clone 137037 (TRAV23/DV6, TRAJ24)
CAASLSDSWGKLQF

SEQ ID NO: 274074 - protein, 16 aa, Homo sapiens
  CDR3 for beta chain variable domain of TCR clone 137037 (TRBV7-9, TRBJ2-6)
CASSLKGPLRANVQTF

SEQ ID NO: 274075 - protein, 15 aa, Homo sapiens
  CDR3 for alpha chain variable domain of TCR clone 137038 (TRAV12-1, TRAJ44)
CVVDEYTGTASKLTL

SEQ ID NO: 274076 - protein, 14 aa, Homo sapiens
  CDR3 for beta chain variable domain of TCR clone 137038 (TRBV5-1, TRBJ1-2)
CASSLEPVNYGYTF

SEQ ID NO: 274077 - protein, 13 aa, Homo sapiens
  CDR3 for alpha chain variable domain of TCR clone 137039 (TRAV21, TRAJ27)
CAARPGNAGKSTF

SEQ ID NO: 274078 - protein, 12 aa, Homo sapiens
  CDR3 for beta chain variable domain of TCR clone 137039 (TRBV2, TRBJ2-1)
GRGLPSYNEQFF

SEQ ID NO: 274079 - protein, 12 aa, Homo sapiens
  CDR3 for alpha chain variable domain of TCR clone 137040 (TRAV2, TRAJ33)
CAFPDSNYQLIW

SEQ ID NO: 274080 - protein, 12 aa, Homo sapiens
  CDR3 for beta chain variable domain of TCR clone 137040 (TRBV7-8, TRBJ2-7)
CASSLGDREQYF

SEQ ID NO: 274081 - protein, 13 aa, Homo sapiens
  CDR3 for alpha chain variable domain of TCR clone 137041 (TRAV8-6, TRAJ49)
CAVITNTGNQFYF

SEQ ID NO: 274082 - protein, 15 aa, Homo sapiens
  CDR3 for beta chain variable domain of TCR clone 137041 (TRBV6-3, TRBJ2-7)
CASSSPGTDFYEQYF

SEQ ID NO: 274083 - protein, 13 aa, Homo sapiens
  CDR3 for alpha chain variable domain of TCR clone 137042 (TRAV8-3, TRAJ43)
CAVVPYNNNDMRF

SEQ ID NO: 274084 - protein, 15 aa, Homo sapiens
  CDR3 for beta chain variable domain of TCR clone 137042 (TRBV5-1, TRBJ2-3)
CASSSTSGSTDTQYF

SEQ ID NO: 274085 - protein, 10 aa, Homo sapiens
  CDR3 for alpha chain variable domain of TCR clone 137043 (TRAV3, TRAJ30)
CAVREIEIIF

SEQ ID NO: 274086 - protein, 14 aa, Homo sapiens
  CDR3 for beta chain variable domain of TCR clone 137043 (TRBV15, TRBJ2-3)
CAARSGTSTDTQYF

SEQ ID NO: 274087 - protein, 15 aa, Homo sapiens
  CDR3 for alpha chain variable domain of TCR clone 137044 (TRAV8-3, TRAJ11)
CAVGLLNSGYSTLTF

SEQ ID NO: 274088 - protein, 23 aa, Homo sapiens
  CDR3 for beta chain variable domain of TCR clone 137044 (TRBV7-9, TRBJ1-2)
VAQLEKSRLLSDRFSSGEDGYTF

SEQ ID NO: 274089 - protein, 16 aa, Homo sapiens
  CDR3 for alpha chain variable domain of TCR clone 137045 (TRAV8-3, TRAJ13)
CAVGAYPPGGYQKVTF

SEQ ID NO: 274090 - protein, 14 aa, Homo sapiens
  CDR3 for beta chain variable domain of TCR clone 137045 (TRBV18, TRBJ2-5)
CASSPGVSQETQYF

SEQ ID NO: 274091 - protein, 11 aa, Homo sapiens
  CDR3 for alpha chain variable domain of TCR clone 137046 (TRAV21, TRAJ11)
CAVNGYSTLTF

SEQ ID NO: 274092 - protein, 12 aa, Homo sapiens
  CDR3 for beta chain variable domain of TCR clone 137046 (TRBV12-5, TRBJ2-5)
CASGQGVETQYF

SEQ ID NO: 274093 - protein, 15 aa, Homo sapiens
  CDR3 for alpha chain variable domain of TCR clone 137047 (TRAV13-1, TRAJ44)
CAASRNTGTASKLTF

SEQ ID NO: 274094 - protein, 15 aa, Homo sapiens
  CDR3 for beta chain variable domain of TCR clone 137047 (TRBV12-4, TRBJ2-5)
CASTLNSGRGETQYF

SEQ ID NO: 274095 - protein, 13 aa, Homo sapiens
  CDR3 for alpha chain variable domain of TCR clone 137048 (TRAV21, TRAJ20)
CAGSRLGDYKLSF

SEQ ID NO: 274096 - protein, 13 aa, Homo sapiens
  CDR3 for beta chain variable domain of TCR clone 137048 (TRBV7-3, TRBJ1-1)
CASSPAGGLEAFF

SEQ ID NO: 274097 - protein, 14 aa, Homo sapiens
  CDR3 for alpha chain variable domain of TCR clone 137049 (TRAV30, TRAJ33)
CGTVAPRSNYQLIW

SEQ ID NO: 274098 - protein, 16 aa, Homo sapiens
  CDR3 for beta chain variable domain of TCR clone 137049 (TRBV19, TRBJ2-7)
CASSTPGQASSYEQYF

SEQ ID NO: 274099 - protein, 16 aa, Homo sapiens
  CDR3 for alpha chain variable domain of TCR clone 137050 (TRAV12-3, TRAJ53)
CAMSPGSGGSNNKLTF

SEQ ID NO: 274100 - protein, 12 aa, Homo sapiens
  CDR3 for beta chain variable domain of TCR clone 137050 (TRBV11-2, TRBJ2-2)
CASSLGGGELFF

SEQ ID NO: 274101 - protein, 16 aa, Homo sapiens
  CDR3 for alpha chain variable domain of TCR clone 137051 (TRAV2, TRAJ20)
TTVLWRFRSNDYKLSF

SEQ ID NO: 274102 - protein, 13 aa, Homo sapiens
  CDR3 for beta chain variable domain of TCR clone 137051 (TRBV7-8, TRBJ2-1)
CASSLMAYNEQFF

SEQ ID NO: 274103 - protein, 12 aa, Homo sapiens
  CDR3 for alpha chain variable domain of TCR clone 137052 (TRAV2, TRAJ9)
CAVGAGGFKTIF

SEQ ID NO: 274104 - protein, 12 aa, Homo sapiens
  CDR3 for beta chain variable domain of TCR clone 137052 (TRBV13, TRBJ2-2)
CASSPRTGEHTG

SEQ ID NO: 274105 - protein, 13 aa, Homo sapiens
  CDR3 for alpha chain variable domain of TCR clone 137053 (TRAV12-3, TRAJ43)
CAMIRPNNNDMRF

SEQ ID NO: 274106 - protein, 14 aa, Homo sapiens
  CDR3 for beta chain variable domain of TCR clone 137053 (TRBV7-3, TRBJ2-1)
CASSLAGGTNEQFF

SEQ ID NO: 274107 - protein, 14 aa, Homo sapiens
  CDR3 for alpha chain variable domain of TCR clone 137054 (TRAV12-2, TRAJ17)
CAVLFKAAGNKLTF

SEQ ID NO: 274108 - protein, 17 aa, Homo sapiens
  CDR3 for beta chain variable domain of TCR clone 137054 (TRBV11-2, TRBJ2-1)
CASSLYPPGVEYNVQFF

SEQ ID NO: 274109 - protein, 11 aa, Homo sapiens
  CDR3 for alpha chain variable domain of TCR clone 137055 (TRAV2, TRAJ13)
CASAGYQKVTF

SEQ ID NO: 274110 - protein, 18 aa, Homo sapiens
  CDR3 for beta chain variable domain of TCR clone 137055 (TRBV11-2, TRBJ2-3)
CASSLGGASRGAPNTQYF

SEQ ID NO: 274111 - protein, 14 aa, Homo sapiens
  CDR3 for alpha chain variable domain of TCR clone 137056 (TRAV1-1, TRAJ30)
CAVRSLNRDDKIIF

SEQ ID NO: 274112 - protein, 15 aa, Homo sapiens
  CDR3 for beta chain variable domain of TCR clone 137056 (TRBV27, TRBJ1-5)
CASTFNRGSNQPQHF

SEQ ID NO: 274113 - protein, 13 aa, Homo sapiens
  CDR3 for alpha chain variable domain of TCR clone 137057 (TRAV17, TRAJ31)
CATDENNNARLMF

SEQ ID NO: 274114 - protein, 15 aa, Homo sapiens
  CDR3 for beta chain variable domain of TCR clone 137057 (TRBV11-2, TRBJ2-2)
CASSSDRVNAGELFF

SEQ ID NO: 274115 - protein, 14 aa, Homo sapiens
  CDR3 for alpha chain variable domain of TCR clone 137058 (TRAV2, TRAJ29)
CAGPFQYGNTPLAF

SEQ ID NO: 274116 - protein, 11 aa, Homo sapiens
  CDR3 for beta chain variable domain of TCR clone 137058 (TRBV29-1, TRBJ2-5)
CSEDRTGTQYF

SEQ ID NO: 274117 - protein, 16 aa, Homo sapiens
  CDR3 for alpha chain variable domain of TCR clone 137059 (TRAV26-1, TRAJ34)
CALLHRQTLDNRKLIF

SEQ ID NO: 274118 - protein, 13 aa, Homo sapiens
  CDR3 for beta chain variable domain of TCR clone 137059 (TRBV5-1, TRBJ2-1)
CASSLGSYNEQFF

SEQ ID NO: 274119 - protein, 16 aa, Homo sapiens
  CDR3 for alpha chain variable domain of TCR clone 137060 (TRAV8-3, TRAJ10)
CAVGPGVTGGGNKLTF

SEQ ID NO: 274120 - protein, 13 aa, Homo sapiens
  CDR3 for beta chain variable domain of TCR clone 137060 (TRBV18, TRBJ1-1)
CASSPGASGEAFF

SEQ ID NO: 274121 - protein, 11 aa, Homo sapiens
  CDR3 for alpha chain variable domain of TCR clone 137061 (TRAV1-1, TRAJ5)
CAVRVRRALTF

SEQ ID NO: 274122 - protein, 17 aa, Homo sapiens
  CDR3 for beta chain variable domain of TCR clone 137061 (TRBV7-3, TRBJ2-5)
CASSLGSGRSGSETQYF

SEQ ID NO: 274123 - protein, 17 aa, Homo sapiens
  CDR3 for alpha chain variable domain of TCR clone 137062 (TRAV14/DV4, TRAJ3)
CAMREGPEYSSASKIIF

SEQ ID NO: 274124 - protein, 17 aa, Homo sapiens
  CDR3 for beta chain variable domain of TCR clone 137062 (TRBV20-1, TRBJ1-5)
GSARVGGERQGNQPQHF

SEQ ID NO: 274125 - protein, 13 aa, Homo sapiens
  CDR3 for alpha chain variable domain of TCR clone 137063 (TRAV12-3, TRAJ43)
CAMIRPDNNDMRF

SEQ ID NO: 274126 - protein, 15 aa, Homo sapiens
  CDR3 for beta chain variable domain of TCR clone 137063 (TRBV11-3, TRBJ2-3)
CASLKDGREGDTQYF

SEQ ID NO: 274127 - protein, 15 aa, Homo sapiens
  CDR3 for alpha chain variable domain of TCR clone 137064 (TRAV26-2, TRAJ57)
CILRDIRGGSEKLVF

SEQ ID NO: 274128 - protein, 15 aa, Homo sapiens
  CDR3 for beta chain variable domain of TCR clone 137064 (TRBV2, TRBJ2-1)
CASVIGLAGEGEQFF

SEQ ID NO: 274129 - protein, 14 aa, Homo sapiens
  CDR3 for alpha chain variable domain of TCR clone 137065 (TRAV8-4, TRAJ54)
CAVSEVLGAQKLVS

SEQ ID NO: 274130 - protein, 17 aa, Homo sapiens
  CDR3 for beta chain variable domain of TCR clone 137065 (TRBV4-1, TRBJ1-4)
CASSQEGPRGVEEKLFF

SEQ ID NO: 274131 - protein, 11 aa, Homo sapiens
  CDR3 for alpha chain variable domain of TCR clone 137066 (TRAV1-2, TRAJ20)
CAVANDYKLSF

SEQ ID NO: 274132 - protein, 18 aa, Homo sapiens
  CDR3 for beta chain variable domain of TCR clone 137066 (TRBV20-1, TRBJ2-6)
CSAGTTPAHGSGANVLTF

SEQ ID NO: 274133 - protein, 14 aa, Homo sapiens
  CDR3 for alpha chain variable domain of TCR clone 137067 (TRAV26-1, TRAJ38)
CIADNTGNNRKLIW

SEQ ID NO: 274134 - protein, 15 aa, Homo sapiens
  CDR3 for beta chain variable domain of TCR clone 137067 (TRBV7-6, TRBJ1-4)
CASSLGAGAGEKLFF

SEQ ID NO: 274135 - protein, 15 aa, Homo sapiens
  CDR3 for alpha chain variable domain of TCR clone 137068 (TRAV8-3, TRAJ11)
CAVGLLNSGYSTLTF

SEQ ID NO: 274136 - protein, 15 aa, Homo sapiens
  CDR3 for beta chain variable domain of TCR clone 137068 (TRBV5-1, TRBJ1-1)
CASSPTGFDVTEAFF

SEQ ID NO: 274137 - protein, 15 aa, Homo sapiens
  CDR3 for alpha chain variable domain of TCR clone 137069 (TRAV29/DV5, TRAJ29)
CAANERSSGNTPLVF

SEQ ID NO: 274138 - protein, 17 aa, Homo sapiens
  CDR3 for beta chain variable domain of TCR clone 137069 (TRBV4-1, TRBJ1-4)
CASSQEGPRGVEEKLFF

SEQ ID NO: 274139 - protein, 16 aa, Homo sapiens
  CDR3 for alpha chain variable domain of TCR clone 137070 (TRAV12-2, TRAJ43)
CAGDDMRFGAGTRLTV

SEQ ID NO: 274140 - protein, 14 aa, Homo sapiens
  CDR3 for beta chain variable domain of TCR clone 137070 (TRBV7-2, TRBJ2-7)
CASSPKTSFYEQYF

SEQ ID NO: 274141 - protein, 13 aa, Homo sapiens
  CDR3 for alpha chain variable domain of TCR clone 137071 (TRAV3, TRAJ21)
CAVREPEFNKFYF

SEQ ID NO: 274142 - protein, 17 aa, Homo sapiens
  CDR3 for beta chain variable domain of TCR clone 137071 (TRBV7-8, TRBJ2-6)
CASSAGTGGAGANVLTF

SEQ ID NO: 274143 - protein, 14 aa, Homo sapiens
  CDR3 for alpha chain variable domain of TCR clone 137072 (TRAV3, TRAJ36)
CAVRDGTGANNLFF

SEQ ID NO: 274144 - protein, 13 aa, Homo sapiens
  CDR3 for beta chain variable domain of TCR clone 137072 (TRBV7-2, TRBJ2-2)
CASSLAVTGELFF

SEQ ID NO: 274145 - protein, 18 aa, Homo sapiens
  CDR3 for alpha chain variable domain of TCR clone 137073 (TRAV21, TRAJ52)
CAVRPSPAGGTSYGKLTF

SEQ ID NO: 274146 - protein, 12 aa, Homo sapiens
  CDR3 for beta chain variable domain of TCR clone 137073 (TRBV19, TRBJ2-1)
CASSRQGAEQFF

SEQ ID NO: 274147 - protein, 15 aa, Homo sapiens
  CDR3 for alpha chain variable domain of TCR clone 137074 (TRAV12-3, TRAJ5)
CAMSGLGTVRRALTF

SEQ ID NO: 274148 - protein, 16 aa, Homo sapiens
  CDR3 for beta chain variable domain of TCR clone 137074 (TRBV20-1, TRBJ2-3)
CSARLHSAGAIDTQYF

SEQ ID NO: 274149 - protein, 14 aa, Homo sapiens
  CDR3 for alpha chain variable domain of TCR clone 137075 (TRAV1-2, TRAJ16)
CAVNRFSDGQKLLF

SEQ ID NO: 274150 - protein, 12 aa, Homo sapiens
  CDR3 for beta chain variable domain of TCR clone 137075 (TRBV5-5, TRBJ2-5)
CASSYFGEAQYF

SEQ ID NO: 274151 - protein, 14 aa, Homo sapiens
  CDR3 for alpha chain variable domain of TCR clone 137076 (TRAV12-2, TRAJ11)
CAVNRESGYSTLTF

SEQ ID NO: 274152 - protein, 10 aa, Homo sapiens
  CDR3 for beta chain variable domain of TCR clone 137076 (TRBV20-1, TRBJ2-5)
CSARFDTQYF

SEQ ID NO: 274153 - protein, 15 aa, Homo sapiens
  CDR3 for alpha chain variable domain of TCR clone 137077 (TRAV25, TRAJ52)
CAGTSGGTSYGKLTF

SEQ ID NO: 274154 - protein, 16 aa, Homo sapiens
  CDR3 for beta chain variable domain of TCR clone 137077 (TRBV15, TRBJ1-2)
CATSRGPMTGGGGYTF

SEQ ID NO: 274155 - protein, 13 aa, Homo sapiens
  CDR3 for alpha chain variable domain of TCR clone 137078 (TRAV13-1, TRAJ10)
CAATAGGGNKLTF

SEQ ID NO: 274156 - protein, 14 aa, Homo sapiens
  CDR3 for beta chain variable domain of TCR clone 137078 (TRBV12-4, TRBJ2-7)
CANSPAGLKYEQYF

SEQ ID NO: 274157 - protein, 16 aa, Homo sapiens
  CDR3 for alpha chain variable domain of TCR clone 137079 (TRAV27, TRAJ53)
CAAPEGSGGSNYKLTF

SEQ ID NO: 274158 - protein, 15 aa, Homo sapiens
  CDR3 for beta chain variable domain of TCR clone 137079 (TRBV20-1, TRBJ2-7)
CSARDRVSGMDEQYF

SEQ ID NO: 274159 - protein, 15 aa, Homo sapiens
  CDR3 for alpha chain variable domain of TCR clone 137080 (TRAV35, TRAJ50)
CAGQLRKTSYDKRIF

SEQ ID NO: 274160 - protein, 12 aa, Homo sapiens
  CDR3 for beta chain variable domain of TCR clone 137080 (TRBV5-1, TRBJ2-5)
CASSLGLETQYF

SEQ ID NO: 274161 - protein, 15 aa, Homo sapiens
  CDR3 for alpha chain variable domain of TCR clone 137081 (TRAV26-1, TRAJ44)
CIDRANTGTASKLTF

SEQ ID NO: 274162 - protein, 16 aa, Homo sapiens
  CDR3 for beta chain variable domain of TCR clone 137081 (TRBV7-7, TRBJ2-1)
CASSLASGTSYNEQFF

SEQ ID NO: 274163 - protein, 13 aa, Homo sapiens
  CDR3 for alpha chain variable domain of TCR clone 137082 (TRAV3, TRAJ20)
CAVRDIGDYKLSF

SEQ ID NO: 274164 - protein, 13 aa, Homo sapiens
  CDR3 for beta chain variable domain of TCR clone 137082 (TRBV19, TRBJ2-2)
CASSIWSTGELFF

SEQ ID NO: 274165 - protein, 17 aa, Homo sapiens
  CDR3 for alpha chain variable domain of TCR clone 137083 (TRAV12-2, TRAJ39)
CAVNNMLTFGGGTRLMF

SEQ ID NO: 274166 - protein, 16 aa, Homo sapiens
  CDR3 for beta chain variable domain of TCR clone 137083 (TRBV9, TRBJ2-7)
CASSAGPDRSPYEQYF

SEQ ID NO: 274167 - protein, 15 aa, Homo sapiens
  CDR3 for alpha chain variable domain of TCR clone 137084 (TRAV9-2, TRAJ49)
CALSPPAHTGNQFYF

SEQ ID NO: 274168 - protein, 10 aa, Homo sapiens
  CDR3 for beta chain variable domain of TCR clone 137084 (TRBV15, TRBJ2-7)
AETGGYEQYF

SEQ ID NO: 274169 - protein, 14 aa, Homo sapiens
  CDR3 for alpha chain variable domain of TCR clone 137085 (TRAV12-2, TRAJ40)
CAVKIPSGTYKYIF

SEQ ID NO: 274170 - protein, 17 aa, Homo sapiens
  CDR3 for beta chain variable domain of TCR clone 137085 (TRBV7-8, TRBJ2-6)
CASSAGTWGAGANVLTF

SEQ ID NO: 274171 - protein, 11 aa, Homo sapiens
  CDR3 for alpha chain variable domain of TCR clone 137086 (TRAV21, TRAJ31)
CTVRNNARLMF

SEQ ID NO: 274172 - protein, 15 aa, Homo sapiens
  CDR3 for beta chain variable domain of TCR clone 137086 (TRBV20-1, TRBJ2-7)
CSARDRVSGMDEQYF

SEQ ID NO: 274173 - protein, 14 aa, Homo sapiens
  CDR3 for alpha chain variable domain of TCR clone 137087 (TRAV23/DV6, TRAJ17)
CVARGRAAGNKLTF

SEQ ID NO: 274174 - protein, 13 aa, Homo sapiens
  CDR3 for beta chain variable domain of TCR clone 137087 (TRBV7-6, TRBJ1-2)
CASSLVADYGYTF

SEQ ID NO: 274175 - protein, 14 aa, Homo sapiens
  CDR3 for alpha chain variable domain of TCR clone 137088 (TRAV23/DV6, TRAJ5)
CAAKRPAGRRALTF

SEQ ID NO: 274176 - protein, 15 aa, Homo sapiens
  CDR3 for beta chain variable domain of TCR clone 137088 (TRBV6-6, TRBJ2-5)
CASSPGGGLEETQYF

SEQ ID NO: 274177 - protein, 16 aa, Homo sapiens
  CDR3 for alpha chain variable domain of TCR clone 137089 (TRAV12-2, TRAJ40)
CAVIRGGTSGTYKYIF

SEQ ID NO: 274178 - protein, 13 aa, Homo sapiens
  CDR3 for beta chain variable domain of TCR clone 137089 (TRBV10-3, TRBJ2-7)
CASRLAVNYEQYF

SEQ ID NO: 274179 - protein, 15 aa, Homo sapiens
  CDR3 for alpha chain variable domain of TCR clone 137090 (TRAV23/DV6, TRAJ33)
CAASNSGGWQLSVNL

SEQ ID NO: 274180 - protein, 14 aa, Homo sapiens
  CDR3 for beta chain variable domain of TCR clone 137090 (TRBV7-2, TRBJ2-7)
CASSLYPGRYEQYF

SEQ ID NO: 274181 - protein, 13 aa, Homo sapiens
  CDR3 for alpha chain variable domain of TCR clone 137091 (TRAV13-1, TRAJ49)
CAAMLYTGNQFYF

SEQ ID NO: 274182 - protein, 15 aa, Homo sapiens
  CDR3 for beta chain variable domain of TCR clone 137091 (TRBV12-4, TRBJ1-5)
CASTRGYGFGQPQHF

SEQ ID NO: 274183 - protein, 15 aa, Homo sapiens
  CDR3 for alpha chain variable domain of TCR clone 137092 (TRAV26-1, TRAJ40)
CIVKAVPSGTYKYIF

SEQ ID NO: 274184 - protein, 14 aa, Homo sapiens
  CDR3 for beta chain variable domain of TCR clone 137092 (TRBV19, TRBJ2-1)
CASKDPGLANEQFF

SEQ ID NO: 274185 - protein, 14 aa, Homo sapiens
  CDR3 for alpha chain variable domain of TCR clone 137093 (TRAV2, TRAJ37)
CAVDFTSNTGKLIF

SEQ ID NO: 274186 - protein, 15 aa, Homo sapiens
  CDR3 for beta chain variable domain of TCR clone 137093 (TRBV7-2, TRBJ2-7)
CASSLKGALTYEQYF

SEQ ID NO: 274187 - protein, 15 aa, Homo sapiens
  CDR3 for alpha chain variable domain of TCR clone 137094 (TRAV26-1, TRAJ56)
CIVRVATGANSKLTF

SEQ ID NO: 274188 - protein, 15 aa, Homo sapiens
  CDR3 for beta chain variable domain of TCR clone 137094 (TRBV27, TRBJ2-7)
CASSPQREGQREQSF

SEQ ID NO: 274189 - protein, 11 aa, Homo sapiens
  CDR3 for alpha chain variable domain of TCR clone 137095 (TRAV35, TRAJ34)
CWARNTDKLIF

SEQ ID NO: 274190 - protein, 13 aa, Homo sapiens
  CDR3 for beta chain variable domain of TCR clone 137095 (TRBV7-3, TRBJ2-3)
CASSPGGHVTQYF

SEQ ID NO: 274191 - protein, 15 aa, Homo sapiens
  CDR3 for alpha chain variable domain of TCR clone 137096 (TRAV8-4, TRAJ7)
CAVSGGHYGNNRLAF

SEQ ID NO: 274192 - protein, 11 aa, Homo sapiens
  CDR3 for beta chain variable domain of TCR clone 137096 (TRBV20-1, TRBJ2-1)
CSLSSGSEQFF

SEQ ID NO: 274193 - protein, 23 aa, Homo sapiens
  CDR3 for alpha chain variable domain of TCR clone 137097 (TRAV26-1, )
CIADNAGNNNIQNPDPAVYKLRD

SEQ ID NO: 274194 - protein, 16 aa, Homo sapiens
  CDR3 for beta chain variable domain of TCR clone 137097 (TRBV7-9, TRBJ1-2)
CASSLGFSSGEDGYTF

SEQ ID NO: 274195 - protein, 17 aa, Homo sapiens
  CDR3 for alpha chain variable domain of TCR clone 137098 (TRAV26-1, TRAJ37)
CIVRVIAVSSNTGKLIF

SEQ ID NO: 274196 - protein, 11 aa, Homo sapiens
  CDR3 for beta chain variable domain of TCR clone 137098 (TRBV29-1, TRBJ2-5)
CSEDRTGTQYF

SEQ ID NO: 274197 - protein, 14 aa, Homo sapiens
  CDR3 for alpha chain variable domain of TCR clone 137099 (TRAV4, TRAJ9)
CLVGSGTGGFKTIF

SEQ ID NO: 274198 - protein, 16 aa, Homo sapiens
  CDR3 for beta chain variable domain of TCR clone 137099 (TRBV7-3, TRBJ2-2)
CANSLKRGTLSGELFF

SEQ ID NO: 274199 - protein, 15 aa, Homo sapiens
  CDR3 for alpha chain variable domain of TCR clone 137100 (TRAV13-1, TRAJ44)
CAASRNTGTASKLTF

SEQ ID NO: 274200 - protein, 14 aa, Homo sapiens
  CDR3 for beta chain variable domain of TCR clone 137100 (TRBV11-2, TRBJ1-2)
CASGLYRGNYGYTF

SEQ ID NO: 274201 - protein, 15 aa, Homo sapiens
  CDR3 for alpha chain variable domain of TCR clone 137101 (TRAV26-1, TRAJ29)
CIVRVEGSGNTPLVY

SEQ ID NO: 274202 - protein, 15 aa, Homo sapiens
  CDR3 for beta chain variable domain of TCR clone 137101 (TRBV28, TRBJ2-5)
CASSPGQGSIETQYF

SEQ ID NO: 274203 - protein, 15 aa, Homo sapiens
  CDR3 for alpha chain variable domain of TCR clone 137102 (TRAV4, TRAJ32)
CLVGEDGGATNKLIF

SEQ ID NO: 274204 - protein, 14 aa, Homo sapiens
  CDR3 for beta chain variable domain of TCR clone 137102 (TRBV18, TRBJ2-7)
CASSPRGGAYEQYF

SEQ ID NO: 274205 - protein, 12 aa, Homo sapiens
  CDR3 for alpha chain variable domain of TCR clone 137103 (TRAV21, TRAJ49)
CAVNDGGNQFSF

SEQ ID NO: 274206 - protein, 13 aa, Homo sapiens
  CDR3 for beta chain variable domain of TCR clone 137103 (TRBV18, TRBJ2-7)
CQLTPGGSYEQYF

SEQ ID NO: 274207 - protein, 17 aa, Homo sapiens
  CDR3 for alpha chain variable domain of TCR clone 137104 (TRAV3, TRAJ42)
CAVRGRDYGGSQGNRIF

SEQ ID NO: 274208 - protein, 14 aa, Homo sapiens
  CDR3 for beta chain variable domain of TCR clone 137104 (TRBV5-4, TRBJ1-1)
CASSLDSRRDEAFF

SEQ ID NO: 274209 - protein, 12 aa, Homo sapiens
  CDR3 for alpha chain variable domain of TCR clone 137105 (TRAV36/DV7, TRAJ50)
CAVEPENLLRQG

SEQ ID NO: 274210 - protein, 12 aa, Homo sapiens
  CDR3 for beta chain variable domain of TCR clone 137105 (TRBV20-1, TRBJ2-5)
CSVGTGSETQYF

SEQ ID NO: 274211 - protein, 14 aa, Homo sapiens
  CDR3 for alpha chain variable domain of TCR clone 137106 (TRAV1-1, TRAJ27)
CAVIYNTNAGKLTF

SEQ ID NO: 274212 - protein, 13 aa, Homo sapiens
  CDR3 for beta chain variable domain of TCR clone 137106 (TRBV7-9, TRBJ1-2)
CASSLKQNYGYTF

SEQ ID NO: 274213 - protein, 11 aa, Homo sapiens
  CDR3 for alpha chain variable domain of TCR clone 137107 (TRAV2, TRAJ33)
CAVDSNYQLIW

SEQ ID NO: 274214 - protein, 16 aa, Homo sapiens
  CDR3 for beta chain variable domain of TCR clone 137107 (TRBV7-2, TRBJ1-6)
CASSSFESSYNSPLHF

SEQ ID NO: 274215 - protein, 14 aa, Homo sapiens
  CDR3 for alpha chain variable domain of TCR clone 137108 (TRAV1-2, TRAJ16)
CAVNRFSDGQKLLF

SEQ ID NO: 274216 - protein, 16 aa, Homo sapiens
  CDR3 for beta chain variable domain of TCR clone 137108 (TRBV19, TRBJ1-2)
CASSIGSNQDGYGYTF

SEQ ID NO: 274217 - protein, 15 aa, Homo sapiens
  CDR3 for alpha chain variable domain of TCR clone 137109 (TRAV21, TRAJ24)
CAARSSTDSWGKLQF

SEQ ID NO: 274218 - protein, 15 aa, Homo sapiens
  CDR3 for beta chain variable domain of TCR clone 137109 (TRBV6-6, TRBJ1-1)
CASSPRGDVETEAFF

SEQ ID NO: 274219 - protein, 17 aa, Homo sapiens
  CDR3 for alpha chain variable domain of TCR clone 137110 (TRAV3, TRAJ6)
CAVRDGPRAGGSYMPTC

SEQ ID NO: 274220 - protein, 14 aa, Homo sapiens
  CDR3 for beta chain variable domain of TCR clone 137110 (TRBV7-2, TRBJ2-7)
CASSPKTSFYEQYF

SEQ ID NO: 274221 - protein, 11 aa, Homo sapiens
  CDR3 for alpha chain variable domain of TCR clone 137111 (TRAV13-1, TRAJ43)
CAAHNNNDMRF

SEQ ID NO: 274222 - protein, 16 aa, Homo sapiens
  CDR3 for beta chain variable domain of TCR clone 137111 (TRBV7-3, TRBJ2-2)
CASSLKRGTLSGELFF

SEQ ID NO: 274223 - protein, 14 aa, Homo sapiens
  CDR3 for alpha chain variable domain of TCR clone 137112 (TRAV16, TRAJ31)
CSKWRRGDNARLMF

SEQ ID NO: 274224 - protein, 15 aa, Homo sapiens
  CDR3 for beta chain variable domain of TCR clone 137112 (TRBV7-9, TRBJ2-7)
CASSLALAEAYEQYF

SEQ ID NO: 274225 - protein, 11 aa, Homo sapiens
  CDR3 for alpha chain variable domain of TCR clone 137113 (TRAV12-1, TRAJ8)
CVVTGFQQLAF

SEQ ID NO: 274226 - protein, 14 aa, Homo sapiens
  CDR3 for beta chain variable domain of TCR clone 137113 (TRBV19, TRBJ2-1)
CASGKSTQYNEQFF

SEQ ID NO: 274227 - protein, 13 aa, Homo sapiens
  CDR3 for alpha chain variable domain of TCR clone 137114 (TRAV1-1, TRAJ23)
CAVVANQGGKLIF

SEQ ID NO: 274228 - protein, 15 aa, Homo sapiens
  CDR3 for beta chain variable domain of TCR clone 137114 (TRBV28, TRBJ2-5)
CANSPPWSYQETQYF

SEQ ID NO: 274229 - protein, 13 aa, Homo sapiens
  CDR3 for alpha chain variable domain of TCR clone 137115 (TRAV2, TRAJ15)
CALASQAGTALIF

SEQ ID NO: 274230 - protein, 16 aa, Homo sapiens
  CDR3 for beta chain variable domain of TCR clone 137115 (TRBV7-8, TRBJ2-4)
CASSAERTLAKNIQYF

SEQ ID NO: 274231 - protein, 13 aa, Homo sapiens
  CDR3 for alpha chain variable domain of TCR clone 137116 (TRAV12-1, TRAJ10)
CVVSTGGGDKLTF

SEQ ID NO: 274232 - protein, 16 aa, Homo sapiens
  CDR3 for beta chain variable domain of TCR clone 137116 (TRBV12-4, TRBJ1-5)
CASSRPVGGSNQPQHF

SEQ ID NO: 274233 - protein, 14 aa, Homo sapiens
  CDR3 for alpha chain variable domain of TCR clone 137117 (TRAV8-2, TRAJ4)
CVVTPSGGYNKLIF

SEQ ID NO: 274234 - protein, 15 aa, Homo sapiens
  CDR3 for beta chain variable domain of TCR clone 137117 (TRBV4-1, TRBJ1-4)
CASSDTGGTNEKLFF

SEQ ID NO: 274235 - protein, 14 aa, Homo sapiens
  CDR3 for alpha chain variable domain of TCR clone 137118 (TRAV38-1, TRAJ45)
CASHSGGGADGLTF

SEQ ID NO: 274236 - protein, 16 aa, Homo sapiens
  CDR3 for beta chain variable domain of TCR clone 137118 (TRBV27, TRBJ2-2)
CASSVRGLVRTGELFF

SEQ ID NO: 274237 - protein, 10 aa, Homo sapiens
  CDR3 for alpha chain variable domain of TCR clone 137119 (TRAV36/DV7, TRAJ31)
CAVGEARLMF

SEQ ID NO: 274238 - protein, 16 aa, Homo sapiens
  CDR3 for beta chain variable domain of TCR clone 137119 (TRBV7-8, TRBJ2-4)
CASSAEGTLAKNIQYF

SEQ ID NO: 274239 - protein, 11 aa, Homo sapiens
  CDR3 for alpha chain variable domain of TCR clone 137120 (TRAV2, TRAJ13)
GASGGYQKVTF

SEQ ID NO: 274240 - protein, 14 aa, Homo sapiens
  CDR3 for beta chain variable domain of TCR clone 137120 (TRBV19, TRBJ2-1)
CASPTFVLSGEQFF

SEQ ID NO: 274241 - protein, 15 aa, Homo sapiens
  CDR3 for alpha chain variable domain of TCR clone 137121 (TRAV21, TRAJ53)
CDTLNSGGSNYKLTF

SEQ ID NO: 274242 - protein, 15 aa, Homo sapiens
  CDR3 for beta chain variable domain of TCR clone 137121 (TRBV29-1, TRBJ2-1)
CSGRDRKSSYNEQFF

SEQ ID NO: 274243 - protein, 13 aa, Homo sapiens
  CDR3 for alpha chain variable domain of TCR clone 137122 (TRAV3, TRAJ20)
CAVRDRGDYKLSF

SEQ ID NO: 274244 - protein, 16 aa, Homo sapiens
  CDR3 for beta chain variable domain of TCR clone 137122 (TRBV4-1, TRBJ2-5)
CASSQTSGGPLETQYF

SEQ ID NO: 274245 - protein, 13 aa, Homo sapiens
  CDR3 for alpha chain variable domain of TCR clone 137123 (TRAV8-3, TRAJ28)
CAVGAVGSYQLTF

SEQ ID NO: 274246 - protein, 16 aa, Homo sapiens
  CDR3 for beta chain variable domain of TCR clone 137123 (TRBV5-1, TRBJ2-2)
CASSSRTGGRTGELFF

SEQ ID NO: 274247 - protein, 15 aa, Homo sapiens
  CDR3 for alpha chain variable domain of TCR clone 137124 (TRAV3, TRAJ7)
CAVRDKDNGNNRLAF

SEQ ID NO: 274248 - protein, 19 aa, Homo sapiens
  CDR3 for beta chain variable domain of TCR clone 137124 (TRBV5-8, TRBJ2-3)
CASSFLGTSGSHRTYTQYF

SEQ ID NO: 274249 - protein, 15 aa, Homo sapiens
  CDR3 for alpha chain variable domain of TCR clone 137125 (TRAV8-3, TRAJ45)
CAASYSGGGADGLTF

SEQ ID NO: 274250 - protein, 13 aa, Homo sapiens
  CDR3 for beta chain variable domain of TCR clone 137125 (TRBV10-3, TRBJ2-7)
CASKLAMNYEQYF

SEQ ID NO: 274251 - protein, 12 aa, Homo sapiens
  CDR3 for alpha chain variable domain of TCR clone 137126 (TRAV41, TRAJ58)
CAVETSGSRLTF

SEQ ID NO: 274252 - protein, 15 aa, Homo sapiens
  CDR3 for beta chain variable domain of TCR clone 137126 (TRBV29-1, TRBJ2-6)
CSVGDRGSEANVLTF

SEQ ID NO: 274253 - protein, 12 aa, Homo sapiens
  CDR3 for alpha chain variable domain of TCR clone 137127 (TRAV16, TRAJ9)
CALSSGGFTTIF

SEQ ID NO: 274254 - protein, 14 aa, Homo sapiens
  CDR3 for beta chain variable domain of TCR clone 137127 (TRBV7-9, TRBJ2-1)
CASSLAGPYNEQFF

SEQ ID NO: 274255 - protein, 16 aa, Homo sapiens
  CDR3 for alpha chain variable domain of TCR clone 137128 (TRAV21, TRAJ33)
CAVSPASMDSNYQLIW

SEQ ID NO: 274256 - protein, 11 aa, Homo sapiens
  CDR3 for beta chain variable domain of TCR clone 137128 (TRBV11-2, TRBJ2-2)
CASSLPGELFF

SEQ ID NO: 274257 - protein, 14 aa, Homo sapiens
  CDR3 for alpha chain variable domain of TCR clone 137129 (TRAV23/DV6, TRAJ26)
CAPPCGNCGKNFVF

SEQ ID NO: 274258 - protein, 16 aa, Homo sapiens
  CDR3 for beta chain variable domain of TCR clone 137129 (TRBV7-6, TRBJ2-2)
CASSPGLADYTGELFF

SEQ ID NO: 274259 - protein, 14 aa, Homo sapiens
  CDR3 for alpha chain variable domain of TCR clone 137130 (TRAV12-3, TRAJ10)
SHLPLTGGGNKLTF

SEQ ID NO: 274260 - protein, 15 aa, Homo sapiens
  CDR3 for beta chain variable domain of TCR clone 137130 (TRBV13, TRBJ2-1)
CASGLLSGLNNEQFF

SEQ ID NO: 274261 - protein, 15 aa, Homo sapiens
  CDR3 for alpha chain variable domain of TCR clone 137131 (TRAV3, TRAJ3)
CAVRDRDSSASKIIF

SEQ ID NO: 274262 - protein, 13 aa, Homo sapiens
  CDR3 for beta chain variable domain of TCR clone 137131 (TRBV11-2, TRBJ2-5)
CASSFSSQETQYF

SEQ ID NO: 274263 - protein, 15 aa, Homo sapiens
  CDR3 for alpha chain variable domain of TCR clone 137132 (TRAV8-6, TRAJ10)
CAVSSKGEEETNSPL

SEQ ID NO: 274264 - protein, 18 aa, Homo sapiens
  CDR3 for beta chain variable domain of TCR clone 137132 (TRBV12-4, TRBJ2-4)
CASSRTGAVDVAKNIQYF

SEQ ID NO: 274265 - protein, 15 aa, Homo sapiens
  CDR3 for alpha chain variable domain of TCR clone 137133 (TRAV8-3, TRAJ23)
CAVGDRYNHGGKLIF

SEQ ID NO: 274266 - protein, 17 aa, Homo sapiens
  CDR3 for beta chain variable domain of TCR clone 137133 (TRBV4-1, TRBJ1-4)
CASSQEGPRGVEEKLFF

SEQ ID NO: 274267 - protein, 11 aa, Homo sapiens
  CDR3 for alpha chain variable domain of TCR clone 137134 (TRAV29/DV5, TRAJ37)
CATSNKGKLIF

SEQ ID NO: 274268 - protein, 12 aa, Homo sapiens
  CDR3 for beta chain variable domain of TCR clone 137134 (TRBV29-1, TRBJ2-3)
CSVTGGADTQYF

SEQ ID NO: 274269 - protein, 12 aa, Homo sapiens
  CDR3 for alpha chain variable domain of TCR clone 137135 (TRAV12-2, TRAJ8)
CAVATGFQKLVF

SEQ ID NO: 274270 - protein, 17 aa, Homo sapiens
  CDR3 for beta chain variable domain of TCR clone 137135 (TRBV13, TRBJ2-3)
CASSLSRVAGGRNTQYF

SEQ ID NO: 274271 - protein, 12 aa, Homo sapiens
  CDR3 for alpha chain variable domain of TCR clone 137136 (TRAV12-3, TRAJ17)
CAMTLTGNKLTF

SEQ ID NO: 274272 - protein, 17 aa, Homo sapiens
  CDR3 for beta chain variable domain of TCR clone 137136 (TRBV11-2, TRBJ2-6)
CASSQRDIFSGANVLTF

SEQ ID NO: 274273 - protein, 14 aa, Homo sapiens
  CDR3 for alpha chain variable domain of TCR clone 137137 (TRAV4, TRAJ20)
CLVGDFINDYKLSF

SEQ ID NO: 274274 - protein, 16 aa, Homo sapiens
  CDR3 for beta chain variable domain of TCR clone 137137 (TRBV2, TRBJ2-3)
CASSTSVEGVTDTQYF

SEQ ID NO: 274275 - protein, 14 aa, Homo sapiens
  CDR3 for alpha chain variable domain of TCR clone 137138 (TRAV16, TRAJ39)
CALSKNDAGNMLTF

SEQ ID NO: 274276 - protein, 17 aa, Homo sapiens
  CDR3 for beta chain variable domain of TCR clone 137138 (TRBV23-1, TRBJ1-2)
CASSNTGGGLLWLHLRF

SEQ ID NO: 274277 - protein, 14 aa, Homo sapiens
  CDR3 for alpha chain variable domain of TCR clone 137139 (TRAV12-2, TRAJ17)
CAVLFKAAGNKLTF

SEQ ID NO: 274278 - protein, 12 aa, Homo sapiens
  CDR3 for beta chain variable domain of TCR clone 137139 (TRBV14, TRBJ2-7)
CASSLYKDEQYF

SEQ ID NO: 274279 - protein, 15 aa, Homo sapiens
  CDR3 for alpha chain variable domain of TCR clone 137140 (TRAV3, TRAJ45)
CAVRTPWGGADGLTF

SEQ ID NO: 274280 - protein, 16 aa, Homo sapiens
  CDR3 for beta chain variable domain of TCR clone 137140 (TRBV6-1, TRBJ2-2)
CASCFGQGANTGELFF

SEQ ID NO: 274281 - protein, 14 aa, Homo sapiens
  CDR3 for alpha chain variable domain of TCR clone 137141 (TRAV3, TRAJ40)
CAVRDRRGTYKYIF

SEQ ID NO: 274282 - protein, 15 aa, Homo sapiens
  CDR3 for beta chain variable domain of TCR clone 137141 (TRBV11-1, TRBJ1-3)
CASTDPRACGNTMYF

SEQ ID NO: 274283 - protein, 15 aa, Homo sapiens
  CDR3 for alpha chain variable domain of TCR clone 137142 (TRAV8-3, TRAJ45)
CASSYSGGGADGLTF

SEQ ID NO: 274284 - protein, 12 aa, Homo sapiens
  CDR3 for beta chain variable domain of TCR clone 137142 (TRBV12-4, TRBJ2-7)
CARSLGGYEQYF

SEQ ID NO: 274285 - protein, 14 aa, Homo sapiens
  CDR3 for alpha chain variable domain of TCR clone 137143 (TRAV16, TRAJ31)
CAISGRDNNARLMF

SEQ ID NO: 274286 - protein, 12 aa, Homo sapiens
  CDR3 for beta chain variable domain of TCR clone 137143 (TRBV11-2, TRBJ1-2)
CASSREGDGYTF

SEQ ID NO: 274287 - protein, 12 aa, Homo sapiens
  CDR3 for alpha chain variable domain of TCR clone 137144 (TRAV12-1, TRAJ40)
CVVYSGTYKYIF

SEQ ID NO: 274288 - protein, 19 aa, Homo sapiens
  CDR3 for beta chain variable domain of TCR clone 137144 (TRBV7-2, TRBJ2-3)
CASSFLSRNWGGGTETQYF

SEQ ID NO: 274289 - protein, 14 aa, Homo sapiens
  CDR3 for alpha chain variable domain of TCR clone 137145 (TRAV8-4, TRAJ15)
CAVSEYEAGTALIF

SEQ ID NO: 274290 - protein, 14 aa, Homo sapiens
  CDR3 for beta chain variable domain of TCR clone 137145 (TRBV7-2, TRBJ2-7)
CASSPKTSFYEQYF

SEQ ID NO: 274291 - protein, 13 aa, Homo sapiens
  CDR3 for alpha chain variable domain of TCR clone 137146 (TRAV12-3, TRAJ40)
CAMSDSGTYKYIF

SEQ ID NO: 274292 - protein, 23 aa, Homo sapiens
  CDR3 for beta chain variable domain of TCR clone 137146 (TRBV7-9, TRBJ1-2)
EAQLEKSRLLSDRFSSGEDGYTF

SEQ ID NO: 274293 - protein, 23 aa, Homo sapiens
  CDR3 for alpha chain variable domain of TCR clone 137147 (TRAV26-1, )
CIVRAFNAGNNHIQNPDPAVYQL

SEQ ID NO: 274294 - protein, 12 aa, Homo sapiens
  CDR3 for beta chain variable domain of TCR clone 137147 (TRBV12-4, TRBJ2-1)
CASSPGRNEQFF

SEQ ID NO: 274295 - protein, 12 aa, Homo sapiens
  CDR3 for alpha chain variable domain of TCR clone 137148 (TRAV12-3, TRAJ17)
CAMTLTGSKLTF

SEQ ID NO: 274296 - protein, 15 aa, Homo sapiens
  CDR3 for beta chain variable domain of TCR clone 137148 (TRBV20-1, TRBJ2-7)
CSARDRVSGMDEQHF

SEQ ID NO: 274297 - protein, 12 aa, Homo sapiens
  CDR3 for alpha chain variable domain of TCR clone 137149 (TRAV23/DV6, TRAJ31)
FAARRIGARLMF

SEQ ID NO: 274298 - protein, 15 aa, Homo sapiens
  CDR3 for beta chain variable domain of TCR clone 137149 (TRBV28, TRBJ2-7)
CASKAGGYTSSTSGR

SEQ ID NO: 274299 - protein, 15 aa, Homo sapiens
  CDR3 for alpha chain variable domain of TCR clone 137150 (TRAV8-6, TRAJ6)
CAASGESGGSYIPTF

SEQ ID NO: 274300 - protein, 15 aa, Homo sapiens
  CDR3 for beta chain variable domain of TCR clone 137150 (TRBV20-1, TRBJ2-7)
CSARDRVSGMDEQYF

SEQ ID NO: 274301 - protein, 13 aa, Homo sapiens
  CDR3 for alpha chain variable domain of TCR clone 137151 (TRAV17, TRAJ9)
CATDYTGGFKTIF

SEQ ID NO: 274302 - protein, 16 aa, Homo sapiens
  CDR3 for beta chain variable domain of TCR clone 137151 (TRBV7-7, TRBJ2-1)
CASILASGTSYNEQFF

SEQ ID NO: 274303 - protein, 15 aa, Homo sapiens
  CDR3 for alpha chain variable domain of TCR clone 137152 (TRAV13-1, TRAJ11)
CAASHRNSGYSTLTF

SEQ ID NO: 274304 - protein, 11 aa, Homo sapiens
  CDR3 for beta chain variable domain of TCR clone 137152 (TRBV20-1, TRBJ2-7)
CSARLSYEQYF

SEQ ID NO: 274305 - protein, 14 aa, Homo sapiens
  CDR3 for alpha chain variable domain of TCR clone 137153 (TRAV14/DV4, TRAJ49)
CAMREGVNGNHFYF

SEQ ID NO: 274306 - protein, 14 aa, Homo sapiens
  CDR3 for beta chain variable domain of TCR clone 137153 (TRBV5-5, TRBJ2-7)
CASSLGLAVYEQYF

SEQ ID NO: 274307 - protein, 17 aa, Homo sapiens
  CDR3 for alpha chain variable domain of TCR clone 137154 (TRAV8-6, TRAJ58)
CAVSSWVGETSDSRLTF

SEQ ID NO: 274308 - protein, 14 aa, Homo sapiens
  CDR3 for beta chain variable domain of TCR clone 137154 (TRBV19, TRBJ1-4)
CASSMGRHNEKLFF

SEQ ID NO: 274309 - protein, 11 aa, Homo sapiens
  CDR3 for alpha chain variable domain of TCR clone 137155 (TRAV8-3, TRAJ15)
CAVGPGTALIF

SEQ ID NO: 274310 - protein, 18 aa, Homo sapiens
  CDR3 for beta chain variable domain of TCR clone 137155 (TRBV18, TRBJ2-3)
CASSYTSGAAGGTDTQYF

SEQ ID NO: 274311 - protein, 12 aa, Homo sapiens
  CDR3 for alpha chain variable domain of TCR clone 137156 (TRAV1-2, TRAJ9)
CAGYTGGFKTIF

SEQ ID NO: 274312 - protein, 15 aa, Homo sapiens
  CDR3 for beta chain variable domain of TCR clone 137156 (TRBV11-2, TRBJ2-1)
CASSPAGQSLNDQFF

SEQ ID NO: 274313 - protein, 14 aa, Homo sapiens
  CDR3 for alpha chain variable domain of TCR clone 137157 (TRAV8-2, TRAJ37)
CVVSISGNTGKLIF

SEQ ID NO: 274314 - protein, 18 aa, Homo sapiens
  CDR3 for beta chain variable domain of TCR clone 137157 (TRBV5-1, TRBJ2-5)
CASSLLGETSGIGETQYF

SEQ ID NO: 274315 - protein, 12 aa, Homo sapiens
  CDR3 for alpha chain variable domain of TCR clone 137158 (TRAV13-2, TRAJ23)
CAERHRGGKLIF

SEQ ID NO: 274316 - protein, 13 aa, Homo sapiens
  CDR3 for beta chain variable domain of TCR clone 137158 (TRBV4-1, TRBJ2-1)
CASSQEVQYEQFF

SEQ ID NO: 274317 - protein, 19 aa, Homo sapiens
  CDR3 for alpha chain variable domain of TCR clone 137159 (TRAV3, TRAJ37)
CAVRDIVGGYPSTTGKLIF

SEQ ID NO: 274318 - protein, 14 aa, Homo sapiens
  CDR3 for beta chain variable domain of TCR clone 137159 (TRBV7-8, TRBJ2-3)
CASSLEAGTDTQYF

SEQ ID NO: 274319 - protein, 13 aa, Homo sapiens
  CDR3 for alpha chain variable domain of TCR clone 137160 (TRAV21, TRAJ57)
CAVTQGGSEKLVF

SEQ ID NO: 274320 - protein, 16 aa, Homo sapiens
  CDR3 for beta chain variable domain of TCR clone 137160 (TRBV5-1, TRBJ1-4)
CASSLDRVGDNEKLFF

SEQ ID NO: 274321 - protein, 14 aa, Homo sapiens
  CDR3 for alpha chain variable domain of TCR clone 137161 (TRAV23/DV6, TRAJ4)
CAAPSSGGYNKLIF

SEQ ID NO: 274322 - protein, 15 aa, Homo sapiens
  CDR3 for beta chain variable domain of TCR clone 137161 (TRBV28, TRBJ2-5)
CASSPGQGSIETQYF

SEQ ID NO: 274323 - protein, 15 aa, Homo sapiens
  CDR3 for alpha chain variable domain of TCR clone 137162 (TRAV26-2, TRAJ45)
CILRNRVDQEEVLTD

SEQ ID NO: 274324 - protein, 15 aa, Homo sapiens
  CDR3 for beta chain variable domain of TCR clone 137162 (TRBV7-6, TRBJ2-5)
CASSKPTGPQETQYF

SEQ ID NO: 274325 - protein, 14 aa, Homo sapiens
  CDR3 for alpha chain variable domain of TCR clone 137163 (TRAV1-2, TRAJ8)
CAVREDTGFQKIVF

SEQ ID NO: 274326 - protein, 16 aa, Homo sapiens
  CDR3 for beta chain variable domain of TCR clone 137163 (TRBV19, TRBJ2-1)
CASSKAGPSSYNEQFF

SEQ ID NO: 274327 - protein, 14 aa, Homo sapiens
  CDR3 for alpha chain variable domain of TCR clone 137164 (TRAV1-2, TRAJ16)
CAVNRFSDVQKLLF

SEQ ID NO: 274328 - protein, 13 aa, Homo sapiens
  CDR3 for beta chain variable domain of TCR clone 137164 (TRBV7-3, TRBJ1-1)
CASSQDWGAEAFF

SEQ ID NO: 274329 - protein, 16 aa, Homo sapiens
  CDR3 for alpha chain variable domain of TCR clone 137165 (TRAV3, TRAJ32)
CCERRDYGGATNKLIF

SEQ ID NO: 274330 - protein, 13 aa, Homo sapiens
  CDR3 for beta chain variable domain of TCR clone 137165 (TRBV2, TRBJ1-1)
CASSEGGNTEAFF

SEQ ID NO: 274331 - protein, 13 aa, Homo sapiens
  CDR3 for alpha chain variable domain of TCR clone 137166 (TRAV20, TRAJ42)
CAVQGGSQGSLIF

SEQ ID NO: 274332 - protein, 15 aa, Homo sapiens
  CDR3 for beta chain variable domain of TCR clone 137166 (TRBV10-1, TRBJ2-1)
CASSEWRGTYNEQFF

SEQ ID NO: 274333 - protein, 15 aa, Homo sapiens
  CDR3 for alpha chain variable domain of TCR clone 137167 (TRAV26-2, TRAJ28)
CILVESGAGSYQLTF

SEQ ID NO: 274334 - protein, 13 aa, Homo sapiens
  CDR3 for beta chain variable domain of TCR clone 137167 (TRBV7-9, TRBJ1-2)
CASSPSNFWGYTF

SEQ ID NO: 274335 - protein, 15 aa, Homo sapiens
  CDR3 for alpha chain variable domain of TCR clone 137168 (TRAV21, TRAJ53)
CATLNSGGSNYKLTF

SEQ ID NO: 274336 - protein, 13 aa, Homo sapiens
  CDR3 for beta chain variable domain of TCR clone 137168 (TRBV20-1, TRBJ2-1)
CSASTGGYNEQFF

SEQ ID NO: 274337 - protein, 11 aa, Homo sapiens
  CDR3 for alpha chain variable domain of TCR clone 137169 (TRAV17, TRAJ9)
CATTAGFKTIF

SEQ ID NO: 274338 - protein, 14 aa, Homo sapiens
  CDR3 for beta chain variable domain of TCR clone 137169 (TRBV7-9, TRBJ2-2)
CDSSGLADTGELFF

SEQ ID NO: 274339 - protein, 11 aa, Homo sapiens
  CDR3 for alpha chain variable domain of TCR clone 137170 (TRAV4, TRAJ31)
CLVGLNARLMF

SEQ ID NO: 274340 - protein, 16 aa, Homo sapiens
  CDR3 for beta chain variable domain of TCR clone 137170 (TRBV15, TRBJ2-6)
YATSVNGGFLANVLTF

SEQ ID NO: 274341 - protein, 13 aa, Homo sapiens
  CDR3 for alpha chain variable domain of TCR clone 137171 (TRAV25, TRAJ24)
CAGGTDSWGKFQF

SEQ ID NO: 274342 - protein, 16 aa, Homo sapiens
  CDR3 for beta chain variable domain of TCR clone 137171 (TRBV7-3, TRBJ2-2)
CASSLKRGTLSGELFF

SEQ ID NO: 274343 - protein, 15 aa, Homo sapiens
  CDR3 for alpha chain variable domain of TCR clone 137172 (TRAV17, TRAJ57)
CATGPSQGGSEKLGF

SEQ ID NO: 274344 - protein, 14 aa, Homo sapiens
  CDR3 for beta chain variable domain of TCR clone 137172 (TRBV25-1, TRBJ1-1)
CASTHLGGNTEAFF

SEQ ID NO: 274345 - protein, 13 aa, Homo sapiens
  CDR3 for alpha chain variable domain of TCR clone 137173 (TRAV12-3, TRAJ43)
CAMRPYNNNAMRF

SEQ ID NO: 274346 - protein, 16 aa, Homo sapiens
  CDR3 for beta chain variable domain of TCR clone 137173 (TRBV11-2, TRBJ2-1)
CASSLLLLSSSNEQFF

SEQ ID NO: 274347 - protein, 15 aa, Homo sapiens
  CDR3 for alpha chain variable domain of TCR clone 137174 (TRAV23/DV6, TRAJ13)
CAAWPGGGGYQKVTF

SEQ ID NO: 274348 - protein, 15 aa, Homo sapiens
  CDR3 for beta chain variable domain of TCR clone 137174 (TRBV20-1, TRBJ2-1)
CSASSAGSSYNEQFF

SEQ ID NO: 274349 - protein, 15 aa, Homo sapiens
  CDR3 for alpha chain variable domain of TCR clone 137175 (TRAV8-3, TRAJ45)
CASSYSGGGAAGLPF

SEQ ID NO: 274350 - protein, 13 aa, Homo sapiens
  CDR3 for beta chain variable domain of TCR clone 137175 (TRBV10-3, TRBJ2-7)
CASKLAVNYEQYF

SEQ ID NO: 274351 - protein, 13 aa, Homo sapiens
  CDR3 for alpha chain variable domain of TCR clone 137176 (TRAV39, TRAJ58)
CAGEETGGSRLTF

SEQ ID NO: 274352 - protein, 13 aa, Homo sapiens
  CDR3 for beta chain variable domain of TCR clone 137176 (TRBV15, TRBJ2-7)
YATSTTGHYEQYF

SEQ ID NO: 274353 - protein, 15 aa, Homo sapiens
  CDR3 for alpha chain variable domain of TCR clone 137177 (TRAV12-2, TRAJ53)
CAVNGGGGSNYKLTF

SEQ ID NO: 274354 - protein, 15 aa, Homo sapiens
  CDR3 for beta chain variable domain of TCR clone 137177 (TRBV11-2, TRBJ2-1)
CASSLGTSGLNEQFF

SEQ ID NO: 274355 - protein, 14 aa, Homo sapiens
  CDR3 for alpha chain variable domain of TCR clone 137178 (TRAV17, TRAJ6)
CATPAMGGSYIPTF

SEQ ID NO: 274356 - protein, 12 aa, Homo sapiens
  CDR3 for beta chain variable domain of TCR clone 137178 (TRBV7-9, TRBJ1-4)
CASSTDREKLFF

SEQ ID NO: 274357 - protein, 15 aa, Homo sapiens
  CDR3 for alpha chain variable domain of TCR clone 137179 (TRAV13-2, TRAJ38)
CAVAPNAGNNRKLIW

SEQ ID NO: 274358 - protein, 14 aa, Homo sapiens
  CDR3 for beta chain variable domain of TCR clone 137179 (TRBV7-6, TRBJ2-3)
CASSLGTVTDTQYF

SEQ ID NO: 274359 - protein, 11 aa, Homo sapiens
  CDR3 for alpha chain variable domain of TCR clone 137180 (TRAV1-1, TRAJ23)
FAVRQGGKLIF

SEQ ID NO: 274360 - protein, 20 aa, Homo sapiens
  CDR3 for beta chain variable domain of TCR clone 137180 (TRBV7-8, TRBJ2-2)
GASSHLFPGPTIHITGELFF

SEQ ID NO: 274361 - protein, 13 aa, Homo sapiens
  CDR3 for alpha chain variable domain of TCR clone 137181 (TRAV1-1, TRAJ13)
CAVNSGGYQKVTF

SEQ ID NO: 274362 - protein, 11 aa, Homo sapiens
  CDR3 for beta chain variable domain of TCR clone 137181 (TRBV28, TRBJ2-1)
CQQCQINEQFF

SEQ ID NO: 274363 - protein, 12 aa, Homo sapiens
  CDR3 for alpha chain variable domain of TCR clone 137182 (TRAV3, TRAJ20)
CAVRDGDYKLSF

SEQ ID NO: 274364 - protein, 15 aa, Homo sapiens
  CDR3 for beta chain variable domain of TCR clone 137182 (TRBV7-2, TRBJ2-7)
CASSWGQGAIYEQYF

SEQ ID NO: 274365 - protein, 14 aa, Homo sapiens
  CDR3 for alpha chain variable domain of TCR clone 137183 (TRAV1-2, TRAJ16)
CAVNRFSDGQKLLY

SEQ ID NO: 274366 - protein, 15 aa, Homo sapiens
  CDR3 for beta chain variable domain of TCR clone 137183 (TRBV12-4, TRBJ2-5)
CASSPPTGLQETQYF

SEQ ID NO: 274367 - protein, 12 aa, Homo sapiens
  CDR3 for alpha chain variable domain of TCR clone 137184 (TRAV12-1, TRAJ40)
CVVYSGTYKYIF

SEQ ID NO: 274368 - protein, 15 aa, Homo sapiens
  CDR3 for beta chain variable domain of TCR clone 137184 (TRBV7-9, TRBJ1-6)
CASSSPGRGHSPLHF

SEQ ID NO: 274369 - protein, 14 aa, Homo sapiens
  CDR3 for alpha chain variable domain of TCR clone 137185 (TRAV16, TRAJ17)
CAHRIKAAGNKLNF

SEQ ID NO: 274370 - protein, 17 aa, Homo sapiens
  CDR3 for beta chain variable domain of TCR clone 137185 (TRBV7-2, TRBJ2-3)
CASSSYSGTRRADTQYF

SEQ ID NO: 274371 - protein, 15 aa, Homo sapiens
  CDR3 for alpha chain variable domain of TCR clone 137186 (TRAV14/DV4, TRAJ10)
CAMRALTGGGNKLPF

SEQ ID NO: 274372 - protein, 18 aa, Homo sapiens
  CDR3 for beta chain variable domain of TCR clone 137186 (TRBV7-9, TRBJ2-7)
CASSLTTSGSRTWYEQYF

SEQ ID NO: 274373 - protein, 16 aa, Homo sapiens
  CDR3 for alpha chain variable domain of TCR clone 137187 (TRAV26-1, TRAJ37)
CIVRGDVSGNTGKLIF

SEQ ID NO: 274374 - protein, 17 aa, Homo sapiens
  CDR3 for beta chain variable domain of TCR clone 137187 (TRBV4-1, TRBJ2-7)
CASSRDPLGVRGGEPYF

SEQ ID NO: 274375 - protein, 11 aa, Homo sapiens
  CDR3 for alpha chain variable domain of TCR clone 137188 (TRAV3, TRAJ21)
CAVCNFNKFYF

SEQ ID NO: 274376 - protein, 14 aa, Homo sapiens
  CDR3 for beta chain variable domain of TCR clone 137188 (TRBV11-2, TRBJ1-2)
CASSLGTANYGYTF

SEQ ID NO: 274377 - protein, 13 aa, Homo sapiens
  CDR3 for alpha chain variable domain of TCR clone 137189 (TRAV1-2, TRAJ9)
CAALNTGGFKTIF

SEQ ID NO: 274378 - protein, 10 aa, Homo sapiens
  CDR3 for beta chain variable domain of TCR clone 137189 (TRBV19, TRBJ1-2)
CASSVPGQEG

SEQ ID NO: 274379 - protein, 18 aa, Homo sapiens
  CDR3 for alpha chain variable domain of TCR clone 137190 (TRAV13-1, TRAJ52)
CAASKRSAGGTSYGKLTF

SEQ ID NO: 274380 - protein, 14 aa, Homo sapiens
  CDR3 for beta chain variable domain of TCR clone 137190 (TRBV12-4, TRBJ2-3)
CASSLGQGTDTQYF

SEQ ID NO: 274381 - protein, 14 aa, Homo sapiens
  CDR3 for alpha chain variable domain of TCR clone 137191 (TRAV12-2, TRAJ13)
CAVKKTVGYQKVTF

SEQ ID NO: 274382 - protein, 20 aa, Homo sapiens
  CDR3 for beta chain variable domain of TCR clone 137191 (TRBV7-8, TRBJ2-2)
CASSHLFPGPTIHITGELFF

SEQ ID NO: 274383 - protein, 16 aa, Homo sapiens
  CDR3 for alpha chain variable domain of TCR clone 137192 (TRAV8-1, TRAJ26)
CAVNALGPYWGQNFVF

SEQ ID NO: 274384 - protein, 13 aa, Homo sapiens
  CDR3 for beta chain variable domain of TCR clone 137192 (TRBV6-1, TRBJ2-7)
CASSEALSYEQYF

SEQ ID NO: 274385 - protein, 18 aa, Homo sapiens
  CDR3 for alpha chain variable domain of TCR clone 137193 (TRAV21, TRAJ52)
CAVRPSPAGGTSYGKLTF

SEQ ID NO: 274386 - protein, 14 aa, Homo sapiens
  CDR3 for beta chain variable domain of TCR clone 137193 (TRBV5-1, TRBJ1-2)
CASSLEPVNYGYTF

SEQ ID NO: 274387 - protein, 16 aa, Homo sapiens
  CDR3 for alpha chain variable domain of TCR clone 137194 (TRAV30, TRAJ24)
CGTEIVDADSWGKYQF

SEQ ID NO: 274388 - protein, 12 aa, Homo sapiens
  CDR3 for beta chain variable domain of TCR clone 137194 (TRBV11-2, TRBJ2-2)
CASSLPTGELFF

SEQ ID NO: 274389 - protein, 16 aa, Homo sapiens
  CDR3 for alpha chain variable domain of TCR clone 137195 (TRAV3, TRAJ37)
CAVRGKGSGNTAKLIF

SEQ ID NO: 274390 - protein, 12 aa, Homo sapiens
  CDR3 for beta chain variable domain of TCR clone 137195 (TRBV11-2, TRBJ2-2)
RASSLGGGELFF

SEQ ID NO: 274391 - protein, 15 aa, Homo sapiens
  CDR3 for alpha chain variable domain of TCR clone 137196 (TRAV23/DV6, TRAJ18)
CAARYRGSTLGSLYF

SEQ ID NO: 274392 - protein, 13 aa, Homo sapiens
  CDR3 for beta chain variable domain of TCR clone 137196 (TRBV7-2, TRBJ2-7)
CASNSPSGSEQYF

SEQ ID NO: 274393 - protein, 13 aa, Homo sapiens
  CDR3 for alpha chain variable domain of TCR clone 137197 (TRAV36/DV7, TRAJ49)
CAGDSNTSNQFYF

SEQ ID NO: 274394 - protein, 12 aa, Homo sapiens
  CDR3 for beta chain variable domain of TCR clone 137197 (TRBV11-2, TRBJ2-2)
CASSLGGGELFF

SEQ ID NO: 274395 - protein, 14 aa, Homo sapiens
  CDR3 for alpha chain variable domain of TCR clone 137198 (TRAV12-3, TRAJ24)
CAMSATDSWGKLQF

SEQ ID NO: 274396 - protein, 16 aa, Homo sapiens
  CDR3 for beta chain variable domain of TCR clone 137198 (TRBV28, TRBJ2-6)
CASSVNRNPGANVLTF

SEQ ID NO: 274397 - protein, 11 aa, Homo sapiens
  CDR3 for alpha chain variable domain of TCR clone 137199 (TRAV13-1, TRAJ48)
CSKLWNEKLTF

SEQ ID NO: 274398 - protein, 13 aa, Homo sapiens
  CDR3 for beta chain variable domain of TCR clone 137199 (TRBV27, TRBJ1-6)
CASSLVLVSPLHF

SEQ ID NO: 274399 - protein, 16 aa, Homo sapiens
  CDR3 for alpha chain variable domain of TCR clone 137200 (TRAV21, TRAJ45)
CAVTMYSGGGADGLTF

SEQ ID NO: 274400 - protein, 16 aa, Homo sapiens
  CDR3 for beta chain variable domain of TCR clone 137200 (TRBV24-1, TRBJ2-3)
CATSDAISGIADTQYF

SEQ ID NO: 274401 - protein, 14 aa, Homo sapiens
  CDR3 for alpha chain variable domain of TCR clone 137201 (TRAV4, TRAJ17)
CLVGDMAAGNKLTF

SEQ ID NO: 274402 - protein, 15 aa, Homo sapiens
  CDR3 for beta chain variable domain of TCR clone 137201 (TRBV5-5, TRBJ1-5)
SASSSTPGSNQPQHF

SEQ ID NO: 274403 - protein, 13 aa, Homo sapiens
  CDR3 for alpha chain variable domain of TCR clone 137202 (TRAV2, TRAJ40)
CAVVTSGTYKYIF

SEQ ID NO: 274404 - protein, 12 aa, Homo sapiens
  CDR3 for beta chain variable domain of TCR clone 137202 (TRBV7-8, TRBJ2-1)
CASSLGHNEQFF

SEQ ID NO: 274405 - protein, 18 aa, Homo sapiens
  CDR3 for alpha chain variable domain of TCR clone 137203 (TRAV13-1, TRAJ52)
CAAKNPDAGGTSYGKLTF

SEQ ID NO: 274406 - protein, 15 aa, Homo sapiens
  CDR3 for beta chain variable domain of TCR clone 137203 (TRBV5-1, TRBJ2-1)
CASSPPRAPYNEQFF

SEQ ID NO: 274407 - protein, 11 aa, Homo sapiens
  CDR3 for alpha chain variable domain of TCR clone 137204 (TRAV12-2, TRAJ31)
CAVTRWARLMF

SEQ ID NO: 274408 - protein, 15 aa, Homo sapiens
  CDR3 for beta chain variable domain of TCR clone 137204 (TRBV19, TRBJ2-7)
CASSIGGGLVDEQYF

SEQ ID NO: 274409 - protein, 12 aa, Homo sapiens
  CDR3 for alpha chain variable domain of TCR clone 137205 (TRAV17, TRAJ20)
CATQANDYKLSF

SEQ ID NO: 274410 - protein, 14 aa, Homo sapiens
  CDR3 for beta chain variable domain of TCR clone 137205 (TRBV25-1, TRBJ1-1)
CASTPLGGNTEAFF

SEQ ID NO: 274411 - protein, 13 aa, Homo sapiens
  CDR3 for alpha chain variable domain of TCR clone 137206 (TRAV12-1, TRAJ49)
CVVNTNTGNQFYF

SEQ ID NO: 274412 - protein, 20 aa, Homo sapiens
  CDR3 for beta chain variable domain of TCR clone 137206 (TRBV19, TRBJ2-1)
CASSISRTVTSTRLNNEQFF

SEQ ID NO: 274413 - protein, 16 aa, Homo sapiens
  CDR3 for alpha chain variable domain of TCR clone 137207 (TRAV3, TRAJ37)
CAVRGKGSGTTGKLIF

SEQ ID NO: 274414 - protein, 13 aa, Homo sapiens
  CDR3 for beta chain variable domain of TCR clone 137207 (TRBV19, TRBJ1-2)
CASSVPGQDGYTF

SEQ ID NO: 274415 - protein, 12 aa, Homo sapiens
  CDR3 for alpha chain variable domain of TCR clone 137208 (TRAV27, TRAJ9)
CAVESGGFKTIF

SEQ ID NO: 274416 - protein, 18 aa, Homo sapiens
  CDR3 for beta chain variable domain of TCR clone 137208 (TRBV10-2, TRBJ2-2)
CISAPAVHRQADAGELFF

SEQ ID NO: 274417 - protein, 14 aa, Homo sapiens
  CDR3 for alpha chain variable domain of TCR clone 137209 (TRAV2, TRAJ37)
CAVDFTSNTGKLIF

SEQ ID NO: 274418 - protein, 13 aa, Homo sapiens
  CDR3 for beta chain variable domain of TCR clone 137209 (TRBV6-1, TRBJ1-1)
CASSWTVDTEAFF

SEQ ID NO: 274419 - protein, 15 aa, Homo sapiens
  CDR3 for alpha chain variable domain of TCR clone 137210 (TRAV14/DV4, TRAJ22)
CNERGPPGSARQLTF

SEQ ID NO: 274420 - protein, 16 aa, Homo sapiens
  CDR3 for beta chain variable domain of TCR clone 137210 (TRBV19, TRBJ1-6)
CASSVAPVAGNSPLHF

SEQ ID NO: 274421 - protein, 14 aa, Homo sapiens
  CDR3 for alpha chain variable domain of TCR clone 137211 (TRAV14/DV4, TRAJ54)
CAMREAPGAQKLEF

SEQ ID NO: 274422 - protein, 15 aa, Homo sapiens
  CDR3 for beta chain variable domain of TCR clone 137211 (TRBV10-3, TRBJ2-3)
CAISLTSGGTDTQYF

SEQ ID NO: 274423 - protein, 14 aa, Homo sapiens
  CDR3 for alpha chain variable domain of TCR clone 137212 (TRAV13-2, TRAJ26)
CAENLGNYGQNFVF

SEQ ID NO: 274424 - protein, 15 aa, Homo sapiens
  CDR3 for beta chain variable domain of TCR clone 137212 (TRBV7-9, TRBJ2-7)
CASSLALAEAYEQYF

SEQ ID NO: 274425 - protein, 23 aa, Homo sapiens
  CDR3 for alpha chain variable domain of TCR clone 137213 (TRAV25, TRAJ26)
PAHHSHPDYRCRNRGVYGQNFVF

SEQ ID NO: 274426 - protein, 16 aa, Homo sapiens
  CDR3 for beta chain variable domain of TCR clone 137213 (TRBV19, TRBJ2-1)
CASSKAGPSSYNEQFF

SEQ ID NO: 274427 - protein, 10 aa, Homo sapiens
  CDR3 for alpha chain variable domain of TCR clone 137214 (TRAV21, TRAJ43)
CAVRIGDMRF

SEQ ID NO: 274428 - protein, 13 aa, Homo sapiens
  CDR3 for beta chain variable domain of TCR clone 137214 (TRBV20-1, TRBJ2-7)
CSAPELADYEQYF

SEQ ID NO: 274429 - protein, 14 aa, Homo sapiens
  CDR3 for alpha chain variable domain of TCR clone 137215 (TRAV17, TRAJ54)
CATDANQGAQKLVF

SEQ ID NO: 274430 - protein, 13 aa, Homo sapiens
  CDR3 for beta chain variable domain of TCR clone 137215 (TRBV20-1, TRBJ1-6)
CSAPLGVGSPLHF

SEQ ID NO: 274431 - protein, 14 aa, Homo sapiens
  CDR3 for alpha chain variable domain of TCR clone 137216 (TRAV8-2, TRAJ23)
CVVSDDNQGGKLIF

SEQ ID NO: 274432 - protein, 15 aa, Homo sapiens
  CDR3 for beta chain variable domain of TCR clone 137216 (TRBV19, TRBJ1-2)
CASSVGQVLNYGYTF

SEQ ID NO: 274433 - protein, 13 aa, Homo sapiens
  CDR3 for alpha chain variable domain of TCR clone 137217 (TRAV13-1, TRAJ11)
CVAVLAGYSTLTF

SEQ ID NO: 274434 - protein, 17 aa, Homo sapiens
  CDR3 for beta chain variable domain of TCR clone 137217 (TRBV25-1, TRBJ2-7)
CASSDARVVFSSYEQYF

SEQ ID NO: 274435 - protein, 15 aa, Homo sapiens
  CDR3 for alpha chain variable domain of TCR clone 137218 (TRAV8-3, TRAJ45)
CASSYSGGGAYGLTF

SEQ ID NO: 274436 - protein, 13 aa, Homo sapiens
  CDR3 for beta chain variable domain of TCR clone 137218 (TRBV7-9, TRBJ2-7)
CASSFAGAYEQYF

SEQ ID NO: 274437 - protein, 19 aa, Homo sapiens
  CDR3 for alpha chain variable domain of TCR clone 137219 (TRAV3, TRAJ6)
CTVRDRIPSRSGGSYIPTF

SEQ ID NO: 274438 - protein, 15 aa, Homo sapiens
  CDR3 for beta chain variable domain of TCR clone 137219 (TRBV18, TRBJ2-7)
CASSPTFMDSYEQYF

SEQ ID NO: 274439 - protein, 18 aa, Homo sapiens
  CDR3 for alpha chain variable domain of TCR clone 137220 (TRAV21, TRAJ52)
CAVRPSSAGGNSYGKLTF

SEQ ID NO: 274440 - protein, 17 aa, Homo sapiens
  CDR3 for beta chain variable domain of TCR clone 137220 (TRBV13, TRBJ2-3)
CASSLSRVAGGRNTQYF

SEQ ID NO: 274441 - protein, 14 aa, Homo sapiens
  CDR3 for alpha chain variable domain of TCR clone 137221 (TRAV1-2, TRAJ16)
CAVNRFSDGQKLLF

SEQ ID NO: 274442 - protein, 17 aa, Homo sapiens
  CDR3 for beta chain variable domain of TCR clone 137221 (TRBV7-8, TRBJ2-6)
CASSAGTGVAGANVLTF

SEQ ID NO: 274443 - protein, 13 aa, Homo sapiens
  CDR3 for alpha chain variable domain of TCR clone 137222 (TRAV27, TRAJ43)
CAGAGNNNNDIRF

SEQ ID NO: 274444 - protein, 14 aa, Homo sapiens
  CDR3 for beta chain variable domain of TCR clone 137222 (TRBV7-2, TRBJ2-7)
CASRSQGEAYEQYF

SEQ ID NO: 274445 - protein, 12 aa, Homo sapiens
  CDR3 for alpha chain variable domain of TCR clone 137223 (TRAV36/DV7, TRAJ40)
CAVGTGTYKYIF

SEQ ID NO: 274446 - protein, 13 aa, Homo sapiens
  CDR3 for beta chain variable domain of TCR clone 137223 (TRBV7-7, TRBJ1-5)
CASSPGKNQPKHF

SEQ ID NO: 274447 - protein, 12 aa, Homo sapiens
  CDR3 for alpha chain variable domain of TCR clone 137224 (TRAV16, TRAJ40)
CAPTGANSKLTF

SEQ ID NO: 274448 - protein, 14 aa, Homo sapiens
  CDR3 for beta chain variable domain of TCR clone 137224 (TRBV19, TRBJ2-1)
CASPTFVLSGEQFF

SEQ ID NO: 274449 - protein, 15 aa, Homo sapiens
  CDR3 for alpha chain variable domain of TCR clone 137225 (TRAV27, TRAJ38)
CAGRFNAGNNRKRIW

SEQ ID NO: 274450 - protein, 11 aa, Homo sapiens
  CDR3 for beta chain variable domain of TCR clone 137225 (TRBV2, TRBJ1-3)
CASSAGNTIYF

SEQ ID NO: 274451 - protein, 14 aa, Homo sapiens
  CDR3 for alpha chain variable domain of TCR clone 137226 (TRAV21, TRAJ15)
CATGPNQAGTALIF

SEQ ID NO: 274452 - protein, 12 aa, Homo sapiens
  CDR3 for beta chain variable domain of TCR clone 137226 (TRBV20-1, TRBJ2-1)
CSARLGTDEQFF

SEQ ID NO: 274453 - protein, 14 aa, Homo sapiens
  CDR3 for alpha chain variable domain of TCR clone 137227 (TRAV1-2, TRAJ16)
CAVNRFSDGQKLPF

SEQ ID NO: 274454 - protein, 13 aa, Homo sapiens
  CDR3 for beta chain variable domain of TCR clone 137227 (TRBV19, TRBJ2-7)
CASSTSGSYEQYF

SEQ ID NO: 274455 - protein, 14 aa, Homo sapiens
  CDR3 for alpha chain variable domain of TCR clone 137228 (TRAV16, TRAJ26)
CALSSANYGQNFFF

SEQ ID NO: 274456 - protein, 16 aa, Homo sapiens
  CDR3 for beta chain variable domain of TCR clone 137228 (TRBV20-1, TRBJ1-4)
CSAPGQGLLTNEKLFF

SEQ ID NO: 274457 - protein, 11 aa, Homo sapiens
  CDR3 for alpha chain variable domain of TCR clone 137229 (TRAV13-1, TRAJ39)
CASHTGNMLTF

SEQ ID NO: 274458 - protein, 15 aa, Homo sapiens
  CDR3 for beta chain variable domain of TCR clone 137229 (TRBV6-3, TRBJ2-7)
CASSSPGTVFYEQYF

SEQ ID NO: 274459 - protein, 15 aa, Homo sapiens
  CDR3 for alpha chain variable domain of TCR clone 137230 (TRAV8-3, TRAJ45)
CASSYSGGGADGLTF

SEQ ID NO: 274460 - protein, 12 aa, Homo sapiens
  CDR3 for beta chain variable domain of TCR clone 137230 (TRBV7-9, TRBJ1-1)
CASSLSGGVAFF

SEQ ID NO: 274461 - protein, 17 aa, Homo sapiens
  CDR3 for alpha chain variable domain of TCR clone 137231 (TRAV13-1, TRAJ28)
CAASPPYSGAGSYQLTF

SEQ ID NO: 274462 - protein, 16 aa, Homo sapiens
  CDR3 for beta chain variable domain of TCR clone 137231 (TRBV11-2, TRBJ1-2)
CASSPSGREANYGYTF

SEQ ID NO: 274463 - protein, 12 aa, Homo sapiens
  CDR3 for alpha chain variable domain of TCR clone 137232 (TRAV13-1, TRAJ9)
CASHTGGFKTIF

SEQ ID NO: 274464 - protein, 15 aa, Homo sapiens
  CDR3 for beta chain variable domain of TCR clone 137232 (TRBV7-9, TRBJ1-5)
CASSQGHQPNQPQHF

SEQ ID NO: 274465 - protein, 15 aa, Homo sapiens
  CDR3 for alpha chain variable domain of TCR clone 137233 (TRAV3, TRAJ12)
CAVRDIRDSSYKLIF

SEQ ID NO: 274466 - protein, 16 aa, Homo sapiens
  CDR3 for beta chain variable domain of TCR clone 137233 (TRBV2, TRBJ2-1)
CASSVGGSLSYNEQFF

SEQ ID NO: 274467 - protein, 13 aa, Homo sapiens
  CDR3 for alpha chain variable domain of TCR clone 137234 (TRAV36/DV7, TRAJ41)
CAVEANSGYALNF

SEQ ID NO: 274468 - protein, 15 aa, Homo sapiens
  CDR3 for beta chain variable domain of TCR clone 137234 (TRBV12-4, TRBJ2-2)
CASLRRGDLTGELFF

SEQ ID NO: 274469 - protein, 16 aa, Homo sapiens
  CDR3 for alpha chain variable domain of TCR clone 137235 (TRAV3, TRAJ28)
CAVLPRSGAGSCQLTF

SEQ ID NO: 274470 - protein, 13 aa, Homo sapiens
  CDR3 for beta chain variable domain of TCR clone 137235 (TRBV12-4, TRBJ2-5)
CASRLAVQETQYF

SEQ ID NO: 274471 - protein, 15 aa, Homo sapiens
  CDR3 for alpha chain variable domain of TCR clone 137236 (TRAV8-3, TRAJ27)
CAVGPSKTNAGKSTF

SEQ ID NO: 274472 - protein, 16 aa, Homo sapiens
  CDR3 for beta chain variable domain of TCR clone 137236 (TRBV14, TRBJ1-2)
CASSQGPTTANYGYTF

SEQ ID NO: 274473 - protein, 16 aa, Homo sapiens
  CDR3 for alpha chain variable domain of TCR clone 137237 (TRAV30, TRAJ24)
CGTEIVDADSWGKFQF

SEQ ID NO: 274474 - protein, 15 aa, Homo sapiens
  CDR3 for beta chain variable domain of TCR clone 137237 (TRBV3-1, TRBJ2-1)
CASSTGDTNYNEQFF

SEQ ID NO: 274475 - protein, 14 aa, Homo sapiens
  CDR3 for alpha chain variable domain of TCR clone 137238 (TRAV17, TRAJ40)
CATALTSGTYKYIF

SEQ ID NO: 274476 - protein, 15 aa, Homo sapiens
  CDR3 for beta chain variable domain of TCR clone 137238 (TRBV12-4, TRBJ2-7)
CASSQRTSGNYEQYF

SEQ ID NO: 274477 - protein, 14 aa, Homo sapiens
  CDR3 for alpha chain variable domain of TCR clone 137239 (TRAV13-1, TRAJ3)
CAAEGYSSASKIIF

SEQ ID NO: 274478 - protein, 14 aa, Homo sapiens
  CDR3 for beta chain variable domain of TCR clone 137239 (TRBV19, TRBJ2-1)
CASPTFVLSGEQFF

SEQ ID NO: 274479 - protein, 13 aa, Homo sapiens
  CDR3 for alpha chain variable domain of TCR clone 137240 (TRAV8-3, TRAJ43)
CAAGPDNNNDMLF

SEQ ID NO: 274480 - protein, 19 aa, Homo sapiens
  CDR3 for beta chain variable domain of TCR clone 137240 (TRBV7-2, TRBJ2-3)
CASSFLSRNWGGGTDTQYF

SEQ ID NO: 274481 - protein, 12 aa, Homo sapiens
  CDR3 for alpha chain variable domain of TCR clone 137241 (TRAV20, TRAJ37)
CALPSNTGKLIF

SEQ ID NO: 274482 - protein, 16 aa, Homo sapiens
  CDR3 for beta chain variable domain of TCR clone 137241 (TRBV19, TRBJ2-1)
CASSQERLAGFNEQFF

SEQ ID NO: 274483 - protein, 15 aa, Homo sapiens
  CDR3 for alpha chain variable domain of TCR clone 137242 (TRAV3, TRAJ37)
CCERKGVWQHSKLIF

SEQ ID NO: 274484 - protein, 16 aa, Homo sapiens
  CDR3 for beta chain variable domain of TCR clone 137242 (TRBV12-4, TRBJ1-5)
CASSRPVGGSNQPQHF

SEQ ID NO: 274485 - protein, 12 aa, Homo sapiens
  CDR3 for alpha chain variable domain of TCR clone 137243 (TRAV12-3, TRAJ17)
CAMTLTGNKLTF

SEQ ID NO: 274486 - protein, 15 aa, Homo sapiens
  CDR3 for beta chain variable domain of TCR clone 137243 (TRBV6-6, TRBJ2-5)
WASSPGGGLEETQYF

SEQ ID NO: 274487 - protein, 12 aa, Homo sapiens
  CDR3 for alpha chain variable domain of TCR clone 137244 (TRAV6, TRAJ9)
CALNTGGFKTIF

SEQ ID NO: 274488 - protein, 14 aa, Homo sapiens
  CDR3 for beta chain variable domain of TCR clone 137244 (TRBV4-2, TRBJ2-1)
CASGLDRAYNEQFF

SEQ ID NO: 274489 - protein, 13 aa, Homo sapiens
  CDR3 for alpha chain variable domain of TCR clone 137245 (TRAV36/DV7, TRAJ49)
CAGDSNTGNQFSF

SEQ ID NO: 274490 - protein, 15 aa, Homo sapiens
  CDR3 for beta chain variable domain of TCR clone 137245 (TRBV6-5, TRBJ1-6)
CASSLGQGFRSPLHF

SEQ ID NO: 274491 - protein, 14 aa, Homo sapiens
  CDR3 for alpha chain variable domain of TCR clone 137246 (TRAV26-1, TRAJ38)
CIADNADNNRKLIW

SEQ ID NO: 274492 - protein, 13 aa, Homo sapiens
  CDR3 for beta chain variable domain of TCR clone 137246 (TRBV7-9, TRBJ1-2)
CASSLKQNYGYTF

SEQ ID NO: 274493 - protein, 12 aa, Homo sapiens
  CDR3 for alpha chain variable domain of TCR clone 137247 (TRAV2, TRAJ31)
CAVEDNNARLMF

SEQ ID NO: 274494 - protein, 17 aa, Homo sapiens
  CDR3 for beta chain variable domain of TCR clone 137247 (TRBV7-7, TRBJ2-2)
CASSSVPAGGEIGELFF

SEQ ID NO: 274495 - protein, 13 aa, Homo sapiens
  CDR3 for alpha chain variable domain of TCR clone 137248 (TRAV2, TRAJ15)
CAVGGQAGTALIF

SEQ ID NO: 274496 - protein, 12 aa, Homo sapiens
  CDR3 for beta chain variable domain of TCR clone 137248 (TRBV19, TRBJ2-7)
CASTSGTYEQYF

SEQ ID NO: 274497 - protein, 12 aa, Homo sapiens
  CDR3 for alpha chain variable domain of TCR clone 137249 (TRAV2, TRAJ24)
CAATDSWGKFQF

SEQ ID NO: 274498 - protein, 13 aa, Homo sapiens
  CDR3 for beta chain variable domain of TCR clone 137249 (TRBV7-9, TRBJ1-2)
CASSLKQNYGYTF

SEQ ID NO: 274499 - protein, 13 aa, Homo sapiens
  CDR3 for alpha chain variable domain of TCR clone 137250 (TRAV13-1, TRAJ20)
CAARVSNDYKLSF

SEQ ID NO: 274500 - protein, 12 aa, Homo sapiens
  CDR3 for beta chain variable domain of TCR clone 137250 (TRBV20-1, TRBJ2-1)
CSARLGADEQFF

SEQ ID NO: 274501 - protein, 13 aa, Homo sapiens
  CDR3 for alpha chain variable domain of TCR clone 137251 (TRAV27, TRAJ27)
CAGGITNAGKSTF

SEQ ID NO: 274502 - protein, 13 aa, Homo sapiens
  CDR3 for beta chain variable domain of TCR clone 137251 (TRBV20-1, TRBJ1-2)
CSASLGVGYGYSF

SEQ ID NO: 274503 - protein, 14 aa, Homo sapiens
  CDR3 for alpha chain variable domain of TCR clone 137252 (TRAV12-3, TRAJ10)
SHLPLTGGGNKLTF

SEQ ID NO: 274504 - protein, 16 aa, Homo sapiens
  CDR3 for beta chain variable domain of TCR clone 137252 (TRBV5-8, TRBJ2-2)
CDSSLINPGGAGELFF

SEQ ID NO: 274505 - protein, 17 aa, Homo sapiens
  CDR3 for alpha chain variable domain of TCR clone 137253 (TRAV1-2, TRAJ8)
CAVRDPDENTGFQKLVF

SEQ ID NO: 274506 - protein, 14 aa, Homo sapiens
  CDR3 for beta chain variable domain of TCR clone 137253 (TRBV7-9, TRBJ2-1)
CASSPRDSLYEQFF

SEQ ID NO: 274507 - protein, 13 aa, Homo sapiens
  CDR3 for alpha chain variable domain of TCR clone 137254 (TRAV17, TRAJ40)
CAGALGGTYKYIF

SEQ ID NO: 274508 - protein, 16 aa, Homo sapiens
  CDR3 for beta chain variable domain of TCR clone 137254 (TRBV7-2, TRBJ1-4)
CASSLAPGRREEKLFF

SEQ ID NO: 274509 - protein, 12 aa, Homo sapiens
  CDR3 for alpha chain variable domain of TCR clone 137255 (TRAV12-3, TRAJ17)
CAMTLTGNKLTF

SEQ ID NO: 274510 - protein, 14 aa, Homo sapiens
  CDR3 for beta chain variable domain of TCR clone 137255 (TRBV4-2, TRBJ2-1)
CAGGLDRAYNEQFF

SEQ ID NO: 274511 - protein, 15 aa, Homo sapiens
  CDR3 for alpha chain variable domain of TCR clone 137256 (TRAV23/DV6, TRAJ38)
CAAGGGAGNNRKLIW

SEQ ID NO: 274512 - protein, 13 aa, Homo sapiens
  CDR3 for beta chain variable domain of TCR clone 137256 (TRBV7-2, TRBJ1-2)
CASSLPGLYGYTF

SEQ ID NO: 274513 - protein, 14 aa, Homo sapiens
  CDR3 for alpha chain variable domain of TCR clone 137257 (TRAV13-1, TRAJ24)
CAASRTDSWGKLQF

SEQ ID NO: 274514 - protein, 16 aa, Homo sapiens
  CDR3 for beta chain variable domain of TCR clone 137257 (TRBV29-1, TRBJ2-7)
CSVEVVGTSGSYEQYF

SEQ ID NO: 274515 - protein, 14 aa, Homo sapiens
  CDR3 for alpha chain variable domain of TCR clone 137258 (TRAV13-1, TRAJ40)
CAARSTSGTYKYIF

SEQ ID NO: 274516 - protein, 13 aa, Homo sapiens
  CDR3 for beta chain variable domain of TCR clone 137258 (TRBV5-1, TRBJ1-1)
CASSADWDTEAFF

SEQ ID NO: 274517 - protein, 15 aa, Homo sapiens
  CDR3 for alpha chain variable domain of TCR clone 137259 (TRAV23/DV6, TRAJ44)
CAASGGTGTASTLTF

SEQ ID NO: 274518 - protein, 15 aa, Homo sapiens
  CDR3 for beta chain variable domain of TCR clone 137259 (TRBV6-3, TRBJ2-7)
CASSSPGTVFYEQYF

SEQ ID NO: 274519 - protein, 18 aa, Homo sapiens
  CDR3 for alpha chain variable domain of TCR clone 137260 (TRAV12-3, TRAJ52)
CAMSRTNAGGTSYGKLTF

SEQ ID NO: 274520 - protein, 17 aa, Homo sapiens
  CDR3 for beta chain variable domain of TCR clone 137260 (TRBV7-3, TRBJ2-3)
CASSLMKRMRGADAQYF

SEQ ID NO: 274521 - protein, 15 aa, Homo sapiens
  CDR3 for alpha chain variable domain of TCR clone 137261 (TRAV27, TRAJ38)
CAGRFNAGNNRKLIW

SEQ ID NO: 274522 - protein, 15 aa, Homo sapiens
  CDR3 for beta chain variable domain of TCR clone 137261 (TRBV7-9, TRBJ2-2)
CASSFGQLNTGELFF

SEQ ID NO: 274523 - protein, 13 aa, Homo sapiens
  CDR3 for alpha chain variable domain of TCR clone 137262 (TRAV8-3, TRAJ12)
WVLRMDSSYKLIF

SEQ ID NO: 274524 - protein, 16 aa, Homo sapiens
  CDR3 for beta chain variable domain of TCR clone 137262 (TRBV20-1, TRBJ1-4)
CSAPGQGLLTNEKLFF

SEQ ID NO: 274525 - protein, 12 aa, Homo sapiens
  CDR3 for alpha chain variable domain of TCR clone 137263 (TRAV26-1, TRAJ36)
CLVRVRADNLFF

SEQ ID NO: 274526 - protein, 15 aa, Homo sapiens
  CDR3 for beta chain variable domain of TCR clone 137263 (TRBV6-3, TRBJ2-7)
CASSSPGTVFYEQYF

SEQ ID NO: 274527 - protein, 11 aa, Homo sapiens
  CDR3 for alpha chain variable domain of TCR clone 137264 (TRAV16, TRAJ29)
WAPSGNTPLVF

SEQ ID NO: 274528 - protein, 15 aa, Homo sapiens
  CDR3 for beta chain variable domain of TCR clone 137264 (TRBV5-7, TRBJ2-7)
CASSPYFKGSYEQYF

SEQ ID NO: 274529 - protein, 15 aa, Homo sapiens
  CDR3 for alpha chain variable domain of TCR clone 137265 (TRAV26-1, TRAJ42)
FIVRVKGGSQGNLIF

SEQ ID NO: 274530 - protein, 14 aa, Homo sapiens
  CDR3 for beta chain variable domain of TCR clone 137265 (TRBV19, TRBJ2-2)
CATTGQANTGELFF

SEQ ID NO: 274531 - protein, 14 aa, Homo sapiens
  CDR3 for alpha chain variable domain of TCR clone 137266 (TRAV4, TRAJ9)
CLVGSGTGGFKTIF

SEQ ID NO: 274532 - protein, 15 aa, Homo sapiens
  CDR3 for beta chain variable domain of TCR clone 137266 (TRBV7-9, TRBJ2-7)
CASSPGGGLTYEQYF

SEQ ID NO: 274533 - protein, 14 aa, Homo sapiens
  CDR3 for alpha chain variable domain of TCR clone 137267 (TRAV12-2, TRAJ45)
CALPERGGADGLTF

SEQ ID NO: 274534 - protein, 14 aa, Homo sapiens
  CDR3 for beta chain variable domain of TCR clone 137267 (TRBV18, TRBJ1-5)
CSSSPGNSNQPQDF

SEQ ID NO: 274535 - protein, 12 aa, Homo sapiens
  CDR3 for alpha chain variable domain of TCR clone 137268 (TRAV3, TRAJ20)
CAVRDPDYKLSF

SEQ ID NO: 274536 - protein, 14 aa, Homo sapiens
  CDR3 for beta chain variable domain of TCR clone 137268 (TRBV7-8, TRBJ2-3)
CASSLEAGTDTQYF

SEQ ID NO: 274537 - protein, 15 aa, Homo sapiens
  CDR3 for alpha chain variable domain of TCR clone 137269 (TRAV27, TRAJ38)
CAGRFNAGNNRKLIW

SEQ ID NO: 274538 - protein, 11 aa, Homo sapiens
  CDR3 for beta chain variable domain of TCR clone 137269 (TRBV20-1, TRBJ2-1)
CSLSSGSEQFF

SEQ ID NO: 274539 - protein, 12 aa, Homo sapiens
  CDR3 for alpha chain variable domain of TCR clone 137270 (TRAV3, TRAJ39)
CAVIEWINMLTF

SEQ ID NO: 274540 - protein, 14 aa, Homo sapiens
  CDR3 for beta chain variable domain of TCR clone 137270 (TRBV7-8, TRBJ2-3)
CASSFPDGQDTQYF

SEQ ID NO: 274541 - protein, 11 aa, Homo sapiens
  CDR3 for alpha chain variable domain of TCR clone 137271 (TRAV3, TRAJ21)
CAVGNFNKFYF

SEQ ID NO: 274542 - protein, 12 aa, Homo sapiens
  CDR3 for beta chain variable domain of TCR clone 137271 (TRBV12-4, TRBJ2-3)
CASSSTTDTQYF

SEQ ID NO: 274543 - protein, 14 aa, Homo sapiens
  CDR3 for alpha chain variable domain of TCR clone 137272 (TRAV12-2, TRAJ17)
CAVLFKAAGNKLTF

SEQ ID NO: 274544 - protein, 14 aa, Homo sapiens
  CDR3 for beta chain variable domain of TCR clone 137272 (TRBV7-3, TRBJ1-1)
CASSLKGGNTEAFC

SEQ ID NO: 274545 - protein, 13 aa, Homo sapiens
  CDR3 for alpha chain variable domain of TCR clone 137273 (TRAV29/DV5, TRAJ31)
CAASRNNNARLMF

SEQ ID NO: 274546 - protein, 15 aa, Homo sapiens
  CDR3 for beta chain variable domain of TCR clone 137273 (TRBV28, TRBJ2-7)
CASSPGGRGFYEQYF

SEQ ID NO: 274547 - protein, 15 aa, Homo sapiens
  CDR3 for alpha chain variable domain of TCR clone 137274 (TRAV27, TRAJ33)
CGGADIMDSNYQLIW

SEQ ID NO: 274548 - protein, 13 aa, Homo sapiens
  CDR3 for beta chain variable domain of TCR clone 137274 (TRBV28, TRBJ1-2)
CASSLQGRGGYTF

SEQ ID NO: 274549 - protein, 14 aa, Homo sapiens
  CDR3 for alpha chain variable domain of TCR clone 137275 (TRAV12-2, TRAJ24)
CAVTPADSWGKLQF

SEQ ID NO: 274550 - protein, 14 aa, Homo sapiens
  CDR3 for beta chain variable domain of TCR clone 137275 (TRBV7-2, TRBJ2-7)
CGSSPKTSFYEQYF

SEQ ID NO: 274551 - protein, 12 aa, Homo sapiens
  CDR3 for alpha chain variable domain of TCR clone 137276 (TRAV2, TRAJ10)
CASTGGGNKLTF

SEQ ID NO: 274552 - protein, 15 aa, Homo sapiens
  CDR3 for beta chain variable domain of TCR clone 137276 (TRBV7-6, TRBJ2-7)
CASSGRRDTFGEQYF

SEQ ID NO: 274553 - protein, 16 aa, Homo sapiens
  CDR3 for alpha chain variable domain of TCR clone 137277 (TRAV17, TRAJ22)
CATGPISSGSARQLTF

SEQ ID NO: 274554 - protein, 16 aa, Homo sapiens
  CDR3 for beta chain variable domain of TCR clone 137277 (TRBV4-1, TRBJ2-5)
CASSQAIAASSATQYF

SEQ ID NO: 274555 - protein, 12 aa, Homo sapiens
  CDR3 for alpha chain variable domain of TCR clone 137278 (TRAV35, TRAJ30)
SAGLSRDDKIIF

SEQ ID NO: 274556 - protein, 15 aa, Homo sapiens
  CDR3 for beta chain variable domain of TCR clone 137278 (TRBV18, TRBJ2-3)
CASSPLAGETDTQYF

SEQ ID NO: 274557 - protein, 15 aa, Homo sapiens
  CDR3 for alpha chain variable domain of TCR clone 137279 (TRAV29/DV5, TRAJ40)
CAASAQGSGTYKYIF

SEQ ID NO: 274558 - protein, 18 aa, Homo sapiens
  CDR3 for beta chain variable domain of TCR clone 137279 (TRBV7-2, TRBJ2-3)
CASSLKREGSGITDTQYF

SEQ ID NO: 274559 - protein, 15 aa, Homo sapiens
  CDR3 for alpha chain variable domain of TCR clone 137280 (TRAV12-1, TRAJ43)
CVVNRGRYNNNDMRF

SEQ ID NO: 274560 - protein, 14 aa, Homo sapiens
  CDR3 for beta chain variable domain of TCR clone 137280 (TRBV12-5, TRBJ2-5)
CASGSRTHQETQYF

SEQ ID NO: 274561 - protein, 14 aa, Homo sapiens
  CDR3 for alpha chain variable domain of TCR clone 137281 (TRAV23/DV6, TRAJ22)
CAASVSGSEGQLTF

SEQ ID NO: 274562 - protein, 13 aa, Homo sapiens
  CDR3 for beta chain variable domain of TCR clone 137281 (TRBV29-1, TRBJ2-1)
CSVEGGRVNEQFF

SEQ ID NO: 274563 - protein, 12 aa, Homo sapiens
  CDR3 for alpha chain variable domain of TCR clone 137282 (TRAV12-3, TRAJ17)
CAMTVTGNKLTF

SEQ ID NO: 274564 - protein, 17 aa, Homo sapiens
  CDR3 for beta chain variable domain of TCR clone 137282 (TRBV20-1, TRBJ2-3)
CSARDPKGVSATDTQYF

SEQ ID NO: 274565 - protein, 18 aa, Homo sapiens
  CDR3 for alpha chain variable domain of TCR clone 137283 (TRAV13-1, TRAJ52)
CAAKNPNAVGTSYGKLTF

SEQ ID NO: 274566 - protein, 18 aa, Homo sapiens
  CDR3 for beta chain variable domain of TCR clone 137283 (TRBV12-4, TRBJ2-4)
CASSRTGAVDVAKNIQYF

SEQ ID NO: 274567 - protein, 15 aa, Homo sapiens
  CDR3 for alpha chain variable domain of TCR clone 137284 (TRAV16, TRAJ12)
CSKWPLRDSSYKLIF

SEQ ID NO: 274568 - protein, 14 aa, Homo sapiens
  CDR3 for beta chain variable domain of TCR clone 137284 (TRBV11-2, TRBJ2-1)
CASSLSGPYNEKFF

SEQ ID NO: 274569 - protein, 16 aa, Homo sapiens
  CDR3 for alpha chain variable domain of TCR clone 137285 (TRAV21, TRAJ37)
CAVRTAGSSNTGKLIF

SEQ ID NO: 274570 - protein, 16 aa, Homo sapiens
  CDR3 for beta chain variable domain of TCR clone 137285 (TRBV20-1, TRBJ1-4)
CSAPGQGLLTNEKLFF

SEQ ID NO: 274571 - protein, 11 aa, Homo sapiens
  CDR3 for alpha chain variable domain of TCR clone 137286 (TRAV17, TRAJ20)
CATDGGYKLSF

SEQ ID NO: 274572 - protein, 14 aa, Homo sapiens
  CDR3 for beta chain variable domain of TCR clone 137286 (TRBV11-2, TRBJ2-5)
CASSRTGGIETQYF

SEQ ID NO: 274573 - protein, 16 aa, Homo sapiens
  CDR3 for alpha chain variable domain of TCR clone 137287 (TRAV35, TRAJ37)
CWAFLRGSSNTGKLIF

SEQ ID NO: 274574 - protein, 15 aa, Homo sapiens
  CDR3 for beta chain variable domain of TCR clone 137287 (TRBV4-1, TRBJ1-4)
CASSDTGGTNEKLFF

SEQ ID NO: 274575 - protein, 12 aa, Homo sapiens
  CDR3 for alpha chain variable domain of TCR clone 137288 (TRAV1-2, TRAJ33)
CAALDSNYQLIC

SEQ ID NO: 274576 - protein, 13 aa, Homo sapiens
  CDR3 for beta chain variable domain of TCR clone 137288 (TRBV7-2, TRBJ2-7)
CASSFGQEKEQYL

SEQ ID NO: 274577 - protein, 14 aa, Homo sapiens
  CDR3 for alpha chain variable domain of TCR clone 137289 (TRAV27, TRAJ40)
CGGSLLRGTYKYIF

SEQ ID NO: 274578 - protein, 15 aa, Homo sapiens
  CDR3 for beta chain variable domain of TCR clone 137289 (TRBV6-3, TRBJ1-4)
CASSSPGQENEKLFF

SEQ ID NO: 274579 - protein, 17 aa, Homo sapiens
  CDR3 for alpha chain variable domain of TCR clone 137290 (TRAV14/DV4, TRAJ15)
CNERVHPTGQAGTALIF

SEQ ID NO: 274580 - protein, 15 aa, Homo sapiens
  CDR3 for beta chain variable domain of TCR clone 137290 (TRBV6-1, TRBJ2-6)
CASSSRPSGANVLTF

SEQ ID NO: 274581 - protein, 15 aa, Homo sapiens
  CDR3 for alpha chain variable domain of TCR clone 137291 (TRAV39, TRAJ32)
CAVDMEGGATNKLIF

SEQ ID NO: 274582 - protein, 13 aa, Homo sapiens
  CDR3 for beta chain variable domain of TCR clone 137291 (TRBV7-9, TRBJ1-2)
CASSLKQNYGYTF

SEQ ID NO: 274583 - protein, 15 aa, Homo sapiens
  CDR3 for alpha chain variable domain of TCR clone 137292 (TRAV12-1, TRAJ36)
CVVNEHQNGANNPFF

SEQ ID NO: 274584 - protein, 12 aa, Homo sapiens
  CDR3 for beta chain variable domain of TCR clone 137292 (TRBV29-1, TRBJ2-3)
CSVTGGADTQYF

SEQ ID NO: 274585 - protein, 14 aa, Homo sapiens
  CDR3 for alpha chain variable domain of TCR clone 137293 (TRAV35, TRAJ33)
CWPRGRDSNYQLIW

SEQ ID NO: 274586 - protein, 15 aa, Homo sapiens
  CDR3 for beta chain variable domain of TCR clone 137293 (TRBV4-3, TRBJ2-7)
CASSQGDWGDYEQYF

SEQ ID NO: 274587 - protein, 11 aa, Homo sapiens
  CDR3 for alpha chain variable domain of TCR clone 137294 (TRAV12-2, TRAJ48)
CAVSGNEKLTF

SEQ ID NO: 274588 - protein, 16 aa, Homo sapiens
  CDR3 for beta chain variable domain of TCR clone 137294 (TRBV7-3, TRBJ2-2)
CASSLKRGTLSGELFF

SEQ ID NO: 274589 - protein, 14 aa, Homo sapiens
  CDR3 for alpha chain variable domain of TCR clone 137295 (TRAV12-1, TRAJ17)
CVVNYKAAGNQLTF

SEQ ID NO: 274590 - protein, 15 aa, Homo sapiens
  CDR3 for beta chain variable domain of TCR clone 137295 (TRBV18, TRBJ2-7)
CASSPTFMDSYEQYF

SEQ ID NO: 274591 - protein, 12 aa, Homo sapiens
  CDR3 for alpha chain variable domain of TCR clone 137296 (TRAV35, TRAJ34)
CAGRGTPTSSSL

SEQ ID NO: 274592 - protein, 12 aa, Homo sapiens
  CDR3 for beta chain variable domain of TCR clone 137296 (TRBV12-5, TRBJ2-5)
CASGQGVETQYF

SEQ ID NO: 274593 - protein, 15 aa, Homo sapiens
  CDR3 for alpha chain variable domain of TCR clone 137297 (TRAV26-1, TRAJ29)
GIVRVEGSGNTPLVF

SEQ ID NO: 274594 - protein, 14 aa, Homo sapiens
  CDR3 for beta chain variable domain of TCR clone 137297 (TRBV18, TRBJ2-5)
CASSPGVSQEAQYF

SEQ ID NO: 274595 - protein, 15 aa, Homo sapiens
  CDR3 for alpha chain variable domain of TCR clone 137298 (TRAV8-1, TRAJ6)
CAVNTPPGGSYIPIF

SEQ ID NO: 274596 - protein, 14 aa, Homo sapiens
  CDR3 for beta chain variable domain of TCR clone 137298 (TRBV12-4, TRBJ2-1)
CASSLGQGASEQFF

SEQ ID NO: 274597 - protein, 14 aa, Homo sapiens
  CDR3 for alpha chain variable domain of TCR clone 137299 (TRAV12-3, TRAJ57)
CAMSAWGGSEKLVF

SEQ ID NO: 274598 - protein, 15 aa, Homo sapiens
  CDR3 for beta chain variable domain of TCR clone 137299 (TRBV20-1, TRBJ1-5)
CSAFKNGQRNQPQHF

SEQ ID NO: 274599 - protein, 13 aa, Homo sapiens
  CDR3 for alpha chain variable domain of TCR clone 137300 (TRAV13-1, TRAJ5)
CSASDTGRRALTF

SEQ ID NO: 274600 - protein, 12 aa, Homo sapiens
  CDR3 for beta chain variable domain of TCR clone 137300 (TRBV28, TRBJ2-3)
CASNLYRDTQYF

SEQ ID NO: 274601 - protein, 10 aa, Homo sapiens
  CDR3 for alpha chain variable domain of TCR clone 137301 (TRAV1-2, TRAJ20)
CVPNDYKLSF

SEQ ID NO: 274602 - protein, 17 aa, Homo sapiens
  CDR3 for beta chain variable domain of TCR clone 137301 (TRBV11-2, TRBJ2-1)
CASSLYPPGVEYNEQFF

SEQ ID NO: 274603 - protein, 14 aa, Homo sapiens
  CDR3 for alpha chain variable domain of TCR clone 137302 (TRAV12-2, TRAJ32)
CAHPESGATNKLIF

SEQ ID NO: 274604 - protein, 13 aa, Homo sapiens
  CDR3 for beta chain variable domain of TCR clone 137302 (TRBV4-2, TRBJ2-3)
CQRETRAPGMQYF

SEQ ID NO: 274605 - protein, 13 aa, Homo sapiens
  CDR3 for alpha chain variable domain of TCR clone 137303 (TRAV20, TRAJ49)
FAVQARTGNQFYF

SEQ ID NO: 274606 - protein, 14 aa, Homo sapiens
  CDR3 for beta chain variable domain of TCR clone 137303 (TRBV5-1, TRBJ1-1)
CASSLQGASTEAFF

SEQ ID NO: 274607 - protein, 17 aa, Homo sapiens
  CDR3 for alpha chain variable domain of TCR clone 137304 (TRAV13-1, TRAJ57)
CSAGSSSFSGRILKAGL

SEQ ID NO: 274608 - protein, 17 aa, Homo sapiens
  CDR3 for beta chain variable domain of TCR clone 137304 (TRBV7-3, TRBJ2-3)
CASSLMKRMRGADTQYF

SEQ ID NO: 274609 - protein, 14 aa, Homo sapiens
  CDR3 for alpha chain variable domain of TCR clone 137305 (TRAV2, TRAJ20)
CAVDLRKHDYKLSF

SEQ ID NO: 274610 - protein, 17 aa, Homo sapiens
  CDR3 for beta chain variable domain of TCR clone 137305 (TRBV7-8, TRBJ2-6)
CASSAGTGGAGANVLTF

SEQ ID NO: 274611 - protein, 14 aa, Homo sapiens
  CDR3 for alpha chain variable domain of TCR clone 137306 (TRAV2, TRAJ9)
CAVEDRSGGFKTIF

SEQ ID NO: 274612 - protein, 18 aa, Homo sapiens
  CDR3 for beta chain variable domain of TCR clone 137306 (TRBV11-2, TRBJ2-3)
CASSFGGASRGAPNTQYF

SEQ ID NO: 274613 - protein, 14 aa, Homo sapiens
  CDR3 for alpha chain variable domain of TCR clone 137307 (TRAV12-2, TRAJ40)
CAVKIPSGTYKYIF

SEQ ID NO: 274614 - protein, 16 aa, Homo sapiens
  CDR3 for beta chain variable domain of TCR clone 137307 (TRBV5-4, TRBJ2-1)
CASSLALAGAYNEQFF

SEQ ID NO: 274615 - protein, 17 aa, Homo sapiens
  CDR3 for alpha chain variable domain of TCR clone 137308 (TRAV13-1, TRAJ52)
CAAGRNAGGTSYGKLTF

SEQ ID NO: 274616 - protein, 12 aa, Homo sapiens
  CDR3 for beta chain variable domain of TCR clone 137308 (TRBV29-1, TRBJ1-3)
CSARDSGNTIYF

SEQ ID NO: 274617 - protein, 13 aa, Homo sapiens
  CDR3 for alpha chain variable domain of TCR clone 137309 (TRAV12-2, TRAJ47)
CAVFMDYGNKLVF

SEQ ID NO: 274618 - protein, 13 aa, Homo sapiens
  CDR3 for beta chain variable domain of TCR clone 137309 (TRBV6-5, TRBJ2-5)
CASSPQGGETQYF

SEQ ID NO: 274619 - protein, 11 aa, Homo sapiens
  CDR3 for alpha chain variable domain of TCR clone 137310 (TRAV21, TRAJ11)
CAVNGYSTLTF

SEQ ID NO: 274620 - protein, 15 aa, Homo sapiens
  CDR3 for beta chain variable domain of TCR clone 137310 (TRBV2, TRBJ2-7)
CASSEGLARSYEQYF

SEQ ID NO: 274621 - protein, 15 aa, Homo sapiens
  CDR3 for alpha chain variable domain of TCR clone 137311 (TRAV29/DV5, TRAJ24)
CAASGATDSWVKFQF

SEQ ID NO: 274622 - protein, 12 aa, Homo sapiens
  CDR3 for beta chain variable domain of TCR clone 137311 (TRBV11-2, TRBJ2-2)
CASSLPTGELFF

SEQ ID NO: 274623 - protein, 12 aa, Homo sapiens
  CDR3 for alpha chain variable domain of TCR clone 137312 (TRAV16, TRAJ10)
CSRTGGGNNLTF

SEQ ID NO: 274624 - protein, 13 aa, Homo sapiens
  CDR3 for beta chain variable domain of TCR clone 137312 (TRBV15, TRBJ2-7)
CATSTTGHYEQYF

SEQ ID NO: 274625 - protein, 13 aa, Homo sapiens
  CDR3 for alpha chain variable domain of TCR clone 137313 (TRAV27, TRAJ11)
CAGAGSGYSTLTF

SEQ ID NO: 274626 - protein, 15 aa, Homo sapiens
  CDR3 for beta chain variable domain of TCR clone 137313 (TRBV5-1, TRBJ1-1)
CASSLGQGRFAEAFF

SEQ ID NO: 274627 - protein, 13 aa, Homo sapiens
  CDR3 for alpha chain variable domain of TCR clone 137314 (TRAV27, TRAJ3)
ASLRGSSASKIIF

SEQ ID NO: 274628 - protein, 15 aa, Homo sapiens
  CDR3 for beta chain variable domain of TCR clone 137314 (TRBV28, TRBJ2-7)
CASKKPSGRAYEQYF

SEQ ID NO: 274629 - protein, 16 aa, Homo sapiens
  CDR3 for alpha chain variable domain of TCR clone 137315 (TRAV3, TRAJ37)
FAVRGKGSGNTGKLIF

SEQ ID NO: 274630 - protein, 16 aa, Homo sapiens
  CDR3 for beta chain variable domain of TCR clone 137315 (TRBV12-4, TRBJ1-5)
CASSRPVGGSNQPQHF

SEQ ID NO: 274631 - protein, 14 aa, Homo sapiens
  CDR3 for alpha chain variable domain of TCR clone 137316 (TRAV1-2, TRAJ8)
CAVREATCFQKLVF

SEQ ID NO: 274632 - protein, 16 aa, Homo sapiens
  CDR3 for beta chain variable domain of TCR clone 137316 (TRBV4-3, TRBJ2-1)
CASSPALDRGVNEQFF

SEQ ID NO: 274633 - protein, 14 aa, Homo sapiens
  CDR3 for alpha chain variable domain of TCR clone 137317 (TRAV12-3, TRAJ10)
SHLPVTGGGNKLTF

SEQ ID NO: 274634 - protein, 12 aa, Homo sapiens
  CDR3 for beta chain variable domain of TCR clone 137317 (TRBV7-9, TRBJ2-7)
CASSIKREEQYF

SEQ ID NO: 274635 - protein, 10 aa, Homo sapiens
  CDR3 for alpha chain variable domain of TCR clone 137318 (TRAV8-3, TRAJ40)
CAIGTYKYIF

SEQ ID NO: 274636 - protein, 11 aa, Homo sapiens
  CDR3 for beta chain variable domain of TCR clone 137318 (TRBV29-1, TRBJ2-5)
CSEDRTGTQYF

SEQ ID NO: 274637 - protein, 13 aa, Homo sapiens
  CDR3 for alpha chain variable domain of TCR clone 137319 (TRAV23/DV6, TRAJ58)
FAASEIGGSRLTF

SEQ ID NO: 274638 - protein, 15 aa, Homo sapiens
  CDR3 for beta chain variable domain of TCR clone 137319 (TRBV19, TRBJ1-1)
CASTSGQIQNTEAFF

SEQ ID NO: 274639 - protein, 15 aa, Homo sapiens
  CDR3 for alpha chain variable domain of TCR clone 137320 (TRAV12-3, TRAJ6)
CAMSATTGGSHIPTF

SEQ ID NO: 274640 - protein, 16 aa, Homo sapiens
  CDR3 for beta chain variable domain of TCR clone 137320 (TRBV20-1, TRBJ1-2)
CSASMGQGAANYGYTF

SEQ ID NO: 274641 - protein, 14 aa, Homo sapiens
  CDR3 for alpha chain variable domain of TCR clone 137321 (TRAV12-2, TRAJ45)
CAVNIGGGADGLTF

SEQ ID NO: 274642 - protein, 17 aa, Homo sapiens
  CDR3 for beta chain variable domain of TCR clone 137321 (TRBV7-8, TRBJ2-6)
CANSAGTGGAGANVLTF

SEQ ID NO: 274643 - protein, 15 aa, Homo sapiens
  CDR3 for alpha chain variable domain of TCR clone 137322 (TRAV8-2, TRAJ40)
CVVSDRGSGTYKYIF

SEQ ID NO: 274644 - protein, 19 aa, Homo sapiens
  CDR3 for beta chain variable domain of TCR clone 137322 (TRBV2, TRBJ2-7)
WASSDDETSGRANDYEQYF

SEQ ID NO: 274645 - protein, 10 aa, Homo sapiens
  CDR3 for alpha chain variable domain of TCR clone 137323 (TRAV30, TRAJ48)
CGIGNEKLTF

SEQ ID NO: 274646 - protein, 15 aa, Homo sapiens
  CDR3 for beta chain variable domain of TCR clone 137323 (TRBV20-1, TRBJ2-7)
CSARGPLAGGREQYF

SEQ ID NO: 274647 - protein, 17 aa, Homo sapiens
  CDR3 for alpha chain variable domain of TCR clone 137324 (TRAV12-1, TRAJ42)
IQPPTSVKGGSQGNLIS

SEQ ID NO: 274648 - protein, 18 aa, Homo sapiens
  CDR3 for beta chain variable domain of TCR clone 137324 (TRBV11-2, TRBJ2-3)
CASSLGGASRGAPNTQYF

SEQ ID NO: 274649 - protein, 12 aa, Homo sapiens
  CDR3 for alpha chain variable domain of TCR clone 137325 (TRAV1-2, TRAJ17)
CAVRAAGNKLTF

SEQ ID NO: 274650 - protein, 15 aa, Homo sapiens
  CDR3 for beta chain variable domain of TCR clone 137325 (TRBV2, TRBJ2-1)
CASSELAGSYNEQFF

SEQ ID NO: 274651 - protein, 14 aa, Homo sapiens
  CDR3 for alpha chain variable domain of TCR clone 137326 (TRAV12-2, TRAJ45)
CAVNKGGGADGLTF

SEQ ID NO: 274652 - protein, 15 aa, Homo sapiens
  CDR3 for beta chain variable domain of TCR clone 137326 (TRBV15, TRBJ2-7)
CATSSGTTTTYEQYF

SEQ ID NO: 274653 - protein, 19 aa, Homo sapiens
  CDR3 for alpha chain variable domain of TCR clone 137327 (TRAV2, TRAJ32)
CCCLLLCLHYGGATNKLIF

SEQ ID NO: 274654 - protein, 16 aa, Homo sapiens
  CDR3 for beta chain variable domain of TCR clone 137327 (TRBV7-9, TRBJ2-7)
CASSYPDREGGYEQYF

SEQ ID NO: 274655 - protein, 16 aa, Homo sapiens
  CDR3 for alpha chain variable domain of TCR clone 137328 (TRAV8-4, TRAJ52)
CAVRLEGGTSYGKLTF

SEQ ID NO: 274656 - protein, 16 aa, Homo sapiens
  CDR3 for beta chain variable domain of TCR clone 137328 (TRBV15, TRBJ2-3)
CATRLSGGRAPDTQYF

SEQ ID NO: 274657 - protein, 17 aa, Homo sapiens
  CDR3 for alpha chain variable domain of TCR clone 137329 (TRAV13-1, TRAJ28)
CAASPPYSGAGSYQLTF

SEQ ID NO: 274658 - protein, 13 aa, Homo sapiens
  CDR3 for beta chain variable domain of TCR clone 137329 (TRBV7-9, TRBJ2-7)
CASSFAGAYEQYF

SEQ ID NO: 274659 - protein, 14 aa, Homo sapiens
  CDR3 for alpha chain variable domain of TCR clone 137330 (TRAV17, TRAJ43)
CATDHPYNNNDMRF

SEQ ID NO: 274660 - protein, 11 aa, Homo sapiens
  CDR3 for beta chain variable domain of TCR clone 137330 (TRBV6-3, TRBJ2-3)
CATGQADTQYF

SEQ ID NO: 274661 - protein, 15 aa, Homo sapiens
  CDR3 for alpha chain variable domain of TCR clone 137331 (TRAV12-2, TRAJ8)
CAVREENTGFQQLVF

SEQ ID NO: 274662 - protein, 16 aa, Homo sapiens
  CDR3 for beta chain variable domain of TCR clone 137331 (TRBV7-3, TRBJ2-2)
CASSLKRGTLSGELFF

SEQ ID NO: 274663 - protein, 13 aa, Homo sapiens
  CDR3 for alpha chain variable domain of TCR clone 137332 (TRAV8-3, TRAJ43)
CAVVPYNNNDMRF

SEQ ID NO: 274664 - protein, 15 aa, Homo sapiens
  CDR3 for beta chain variable domain of TCR clone 137332 (TRBV6-3, TRBJ2-7)
FASSSPGTVFYEQYF

SEQ ID NO: 274665 - protein, 13 aa, Homo sapiens
  CDR3 for alpha chain variable domain of TCR clone 137333 (TRAV20, TRAJ29)
CAVQAVGHTPLVF

SEQ ID NO: 274666 - protein, 15 aa, Homo sapiens
  CDR3 for beta chain variable domain of TCR clone 137333 (TRBV10-2, TRBJ2-5)
CASRGSGGPQETQYF

SEQ ID NO: 274667 - protein, 12 aa, Homo sapiens
  CDR3 for alpha chain variable domain of TCR clone 137334 (TRAV23/DV6, TRAJ30)
CAASKGDDKIIF

SEQ ID NO: 274668 - protein, 13 aa, Homo sapiens
  CDR3 for beta chain variable domain of TCR clone 137334 (TRBV19, TRBJ1-2)
CASSVPGQDGDTF

SEQ ID NO: 274669 - protein, 13 aa, Homo sapiens
  CDR3 for alpha chain variable domain of TCR clone 137335 (TRAV12-3, TRAJ9)
CALSGGGGFNTIF

SEQ ID NO: 274670 - protein, 15 aa, Homo sapiens
  CDR3 for beta chain variable domain of TCR clone 137335 (TRBV20-1, TRBJ2-1)
CSARVGGVGVLEQFF

SEQ ID NO: 274671 - protein, 13 aa, Homo sapiens
  CDR3 for alpha chain variable domain of TCR clone 137336 (TRAV27, TRAJ49)
CAPRPYTGNQFYF

SEQ ID NO: 274672 - protein, 15 aa, Homo sapiens
  CDR3 for beta chain variable domain of TCR clone 137336 (TRBV6-1, TRBJ2-2)
CAILTGTRDTGELFF

SEQ ID NO: 274673 - protein, 14 aa, Homo sapiens
  CDR3 for alpha chain variable domain of TCR clone 137337 (TRAV1-2, TRAJ16)
CAVNRISDGQKLLF

SEQ ID NO: 274674 - protein, 20 aa, Homo sapiens
  CDR3 for beta chain variable domain of TCR clone 137337 (TRBV28, TRBJ2-1)
CASTPIGRSPGLAGGNEQFF

SEQ ID NO: 274675 - protein, 14 aa, Homo sapiens
  CDR3 for alpha chain variable domain of TCR clone 137338 (TRAV17, TRAJ22)
CSTSPSCSARQLTF

SEQ ID NO: 274676 - protein, 15 aa, Homo sapiens
  CDR3 for beta chain variable domain of TCR clone 137338 (TRBV4-1, TRBJ2-5)
CASSQWDLYQETQYF

SEQ ID NO: 274677 - protein, 14 aa, Homo sapiens
  CDR3 for alpha chain variable domain of TCR clone 137339 (TRAV1-2, TRAJ8)
CAVREDTGFQKLVF

SEQ ID NO: 274678 - protein, 17 aa, Homo sapiens
  CDR3 for beta chain variable domain of TCR clone 137339 (TRBV11-1, TRBJ2-7)
CASSLTGSFGLDYEQYF

SEQ ID NO: 274679 - protein, 14 aa, Homo sapiens
  CDR3 for alpha chain variable domain of TCR clone 137340 (TRAV3, TRAJ17)
CAVRDAAAGNKLTF

SEQ ID NO: 274680 - protein, 15 aa, Homo sapiens
  CDR3 for beta chain variable domain of TCR clone 137340 (TRBV3-1, TRBJ2-2)
CASSQDWTRAGELFF

SEQ ID NO: 274681 - protein, 14 aa, Homo sapiens
  CDR3 for alpha chain variable domain of TCR clone 137341 (TRAV26-1, TRAJ38)
CIADNAGKNRKLIW

SEQ ID NO: 274682 - protein, 13 aa, Homo sapiens
  CDR3 for beta chain variable domain of TCR clone 137341 (TRBV20-1, TRBJ1-1)
CSARGGGNSEAFF

SEQ ID NO: 274683 - protein, 16 aa, Homo sapiens
  CDR3 for alpha chain variable domain of TCR clone 137342 (TRAV23/DV6, TRAJ9)
CAASIGGNTGGFQTIF

SEQ ID NO: 274684 - protein, 17 aa, Homo sapiens
  CDR3 for beta chain variable domain of TCR clone 137342 (TRBV13, TRBJ2-3)
CASSLSRVAGGRNTQYF

SEQ ID NO: 274685 - protein, 12 aa, Homo sapiens
  CDR3 for alpha chain variable domain of TCR clone 137343 (TRAV27, TRAJ13)
CAGVRGYQKVTF

SEQ ID NO: 274686 - protein, 12 aa, Homo sapiens
  CDR3 for beta chain variable domain of TCR clone 137343 (TRBV11-2, TRBJ2-1)
CASSPGNNEQFF

SEQ ID NO: 274687 - protein, 15 aa, Homo sapiens
  CDR3 for alpha chain variable domain of TCR clone 137344 (TRAV27, TRAJ38)
CAGRFNAGNNRKLIW

SEQ ID NO: 274688 - protein, 13 aa, Homo sapiens
  CDR3 for beta chain variable domain of TCR clone 137344 (TRBV12-5, TRBJ2-3)
CASKNRGTDTQYF

SEQ ID NO: 274689 - protein, 14 aa, Homo sapiens
  CDR3 for alpha chain variable domain of TCR clone 137345 (TRAV16, TRAJ31)
CALSGRNNNARLMF

SEQ ID NO: 274690 - protein, 12 aa, Homo sapiens
  CDR3 for beta chain variable domain of TCR clone 137345 (TRBV11-2, TRBJ1-2)
CASSREGDRYTF

SEQ ID NO: 274691 - protein, 11 aa, Homo sapiens
  CDR3 for alpha chain variable domain of TCR clone 137346 (TRAV2, TRAJ13)
CASGGYQKVTF

SEQ ID NO: 274692 - protein, 13 aa, Homo sapiens
  CDR3 for beta chain variable domain of TCR clone 137346 (TRBV6-1, TRBJ1-1)
CASSWTVDTEAFF

SEQ ID NO: 274693 - protein, 15 aa, Homo sapiens
  CDR3 for alpha chain variable domain of TCR clone 137347 (TRAV21, TRAJ13)
CAVRPTSGGYQKVTF

SEQ ID NO: 274694 - protein, 15 aa, Homo sapiens
  CDR3 for beta chain variable domain of TCR clone 137347 (TRBV28, TRBJ2-7)
CASSPGGRGFYEQYV

SEQ ID NO: 274695 - protein, 16 aa, Homo sapiens
  CDR3 for alpha chain variable domain of TCR clone 137348 (TRAV38-2/DV8, TRAJ45)
CACRGNSGGGADGLTF

SEQ ID NO: 274696 - protein, 17 aa, Homo sapiens
  CDR3 for beta chain variable domain of TCR clone 137348 (TRBV11-3, TRBJ2-5)
CASSLPGVRGGKETQYF

SEQ ID NO: 274697 - protein, 14 aa, Homo sapiens
  CDR3 for alpha chain variable domain of TCR clone 137349 (TRAV26-1, TRAJ38)
CIADNAGNNRKLIW

SEQ ID NO: 274698 - protein, 17 aa, Homo sapiens
  CDR3 for beta chain variable domain of TCR clone 137349 (TRBV15, TRBJ1-1)
RATSRVGGADGDTEAFF

SEQ ID NO: 274699 - protein, 13 aa, Homo sapiens
  CDR3 for alpha chain variable domain of TCR clone 137350 (TRAV17, TRAJ21)
CATDGGNFNKFYF

SEQ ID NO: 274700 - protein, 13 aa, Homo sapiens
  CDR3 for beta chain variable domain of TCR clone 137350 (TRBV11-3, TRBJ1-1)
CASTGSLNTKAFF

SEQ ID NO: 274701 - protein, 12 aa, Homo sapiens
  CDR3 for alpha chain variable domain of TCR clone 137351 (TRAV23/DV6, TRAJ30)
CAASKGDDKIIC

SEQ ID NO: 274702 - protein, 18 aa, Homo sapiens
  CDR3 for beta chain variable domain of TCR clone 137351 (TRBV10-3, TRBJ2-3)
CAISESRVGPMRGDTQYF

SEQ ID NO: 274703 - protein, 12 aa, Homo sapiens
  CDR3 for alpha chain variable domain of TCR clone 137352 (TRAV13-1, TRAJ21)
CAAKEGFNKFYF

SEQ ID NO: 274704 - protein, 18 aa, Homo sapiens
  CDR3 for beta chain variable domain of TCR clone 137352 (TRBV23-1, TRBJ2-5)
CASSFLRSQETVLRARHA

SEQ ID NO: 274705 - protein, 16 aa, Homo sapiens
  CDR3 for alpha chain variable domain of TCR clone 137353 (TRAV30, TRAJ24)
CGTEIVDADSWGKFQF

SEQ ID NO: 274706 - protein, 16 aa, Homo sapiens
  CDR3 for beta chain variable domain of TCR clone 137353 (TRBV2, TRBJ1-3)
WASSGGAGRSGNTMYF

SEQ ID NO: 274707 - protein, 11 aa, Homo sapiens
  CDR3 for alpha chain variable domain of TCR clone 137354 (TRAV17, TRAJ9)
CGFTGGFKTIF

SEQ ID NO: 274708 - protein, 11 aa, Homo sapiens
  CDR3 for beta chain variable domain of TCR clone 137354 (TRBV20-1, TRBJ1-5)
CSAQGDQPQHF

SEQ ID NO: 274709 - protein, 10 aa, Homo sapiens
  CDR3 for alpha chain variable domain of TCR clone 137355 (TRAV23/DV6, TRAJ57)
CAASSTLSQG

SEQ ID NO: 274710 - protein, 15 aa, Homo sapiens
  CDR3 for beta chain variable domain of TCR clone 137355 (TRBV9, TRBJ2-1)
CASSLAGSSYNEQFF

SEQ ID NO: 274711 - protein, 15 aa, Homo sapiens
  CDR3 for alpha chain variable domain of TCR clone 137356 (TRAV25, TRAJ53)
CAATGGGGSNYKLTF

SEQ ID NO: 274712 - protein, 19 aa, Homo sapiens
  CDR3 for beta chain variable domain of TCR clone 137356 (TRBV7-2, TRBJ2-3)
CASSLLSRNWGGGTDTQYF

SEQ ID NO: 274713 - protein, 12 aa, Homo sapiens
  CDR3 for alpha chain variable domain of TCR clone 137357 (TRAV13-1, TRAJ53)
AASGGGNYKLTF

SEQ ID NO: 274714 - protein, 16 aa, Homo sapiens
  CDR3 for beta chain variable domain of TCR clone 137357 (TRBV28, TRBJ2-6)
CASSNRRGSGANVLTF

SEQ ID NO: 274715 - protein, 14 aa, Homo sapiens
  CDR3 for alpha chain variable domain of TCR clone 137358 (TRAV27, TRAJ22)
CAGVVPGSARQLTF

SEQ ID NO: 274716 - protein, 16 aa, Homo sapiens
  CDR3 for beta chain variable domain of TCR clone 137358 (TRBV9, TRBJ2-7)
WASSVGLGGGTYEQYF

SEQ ID NO: 274717 - protein, 16 aa, Homo sapiens
  CDR3 for alpha chain variable domain of TCR clone 137359 (TRAV12-3, TRAJ57)
FAMSYGTQGGSEKLVF

SEQ ID NO: 274718 - protein, 15 aa, Homo sapiens
  CDR3 for beta chain variable domain of TCR clone 137359 (TRBV9, TRBJ1-6)
CASSVAGTGDSALHF

SEQ ID NO: 274719 - protein, 13 aa, Homo sapiens
  CDR3 for alpha chain variable domain of TCR clone 137360 (TRAV8-6, TRAJ8)
CAFMNTGLQKLVF

SEQ ID NO: 274720 - protein, 15 aa, Homo sapiens
  CDR3 for beta chain variable domain of TCR clone 137360 (TRBV28, TRBJ2-5)
CASSSGRVIQETQYF

SEQ ID NO: 274721 - protein, 12 aa, Homo sapiens
  CDR3 for alpha chain variable domain of TCR clone 137361 (TRAV21, TRAJ49)
CAVSWTSNQFYF

SEQ ID NO: 274722 - protein, 18 aa, Homo sapiens
  CDR3 for beta chain variable domain of TCR clone 137361 (TRBV7-8, TRBJ2-1)
CASSPAEGLAGGLNEQFF

SEQ ID NO: 274723 - protein, 16 aa, Homo sapiens
  CDR3 for alpha chain variable domain of TCR clone 137362 (TRAV30, TRAJ24)
CGTEIVDADSWGIFQF

SEQ ID NO: 274724 - protein, 16 aa, Homo sapiens
  CDR3 for beta chain variable domain of TCR clone 137362 (TRBV7-7, TRBJ2-1)
CASSLASGTSYNEQFF

SEQ ID NO: 274725 - protein, 15 aa, Homo sapiens
  CDR3 for alpha chain variable domain of TCR clone 137363 (TRAV12-2, TRAJ50)
CAVNGLETSYDKVIF

SEQ ID NO: 274726 - protein, 16 aa, Homo sapiens
  CDR3 for beta chain variable domain of TCR clone 137363 (TRBV5-4, TRBJ2-3)
WASQQPGAGGADTQYF

SEQ ID NO: 274727 - protein, 12 aa, Homo sapiens
  CDR3 for alpha chain variable domain of TCR clone 137364 (TRAV27, TRAJ11)
CAGASGYSTLTF

SEQ ID NO: 274728 - protein, 14 aa, Homo sapiens
  CDR3 for beta chain variable domain of TCR clone 137364 (TRBV20-1, TRBJ2-7)
CSAKTGTGGYEQYF

SEQ ID NO: 274729 - protein, 12 aa, Homo sapiens
  CDR3 for alpha chain variable domain of TCR clone 137365 (TRAV26-2, TRAJ21)
CILKGNFNKFYF

SEQ ID NO: 274730 - protein, 14 aa, Homo sapiens
  CDR3 for beta chain variable domain of TCR clone 137365 (TRBV7-9, TRBJ1-1)
CASSFLTGTTEAFF

SEQ ID NO: 274731 - protein, 15 aa, Homo sapiens
  CDR3 for alpha chain variable domain of TCR clone 137366 (TRAV26-1, TRAJ29)
CIVRVEGSGNTPLVF

SEQ ID NO: 274732 - protein, 16 aa, Homo sapiens
  CDR3 for beta chain variable domain of TCR clone 137366 (TRBV15, TRBJ2-7)
CATSRDGGIPSYEQYF

SEQ ID NO: 274733 - protein, 15 aa, Homo sapiens
  CDR3 for alpha chain variable domain of TCR clone 137367 (TRAV12-2, TRAJ33)
CAVNIPMDSNYQLIW

SEQ ID NO: 274734 - protein, 15 aa, Homo sapiens
  CDR3 for beta chain variable domain of TCR clone 137367 (TRBV7-6, TRBJ1-2)
CASSSGGRGGYGYTF

SEQ ID NO: 274735 - protein, 15 aa, Homo sapiens
  CDR3 for alpha chain variable domain of TCR clone 137368 (TRAV13-1, TRAJ10)
CAAIIFTGGGNKLTF

SEQ ID NO: 274736 - protein, 11 aa, Homo sapiens
  CDR3 for beta chain variable domain of TCR clone 137368 (TRBV7-9, TRBJ2-3)
CASSGPDTQYF

SEQ ID NO: 274737 - protein, 13 aa, Homo sapiens
  CDR3 for alpha chain variable domain of TCR clone 137369 (TRAV8-6, TRAJ50)
CAVIKTSYDKVIF

SEQ ID NO: 274738 - protein, 14 aa, Homo sapiens
  CDR3 for beta chain variable domain of TCR clone 137369 (TRBV11-2, TRBJ2-5)
CASSRTGGIETQYF

SEQ ID NO: 274739 - protein, 14 aa, Homo sapiens
  CDR3 for alpha chain variable domain of TCR clone 137370 (TRAV17, TRAJ57)
CATDPQGGSEKLVF

SEQ ID NO: 274740 - protein, 13 aa, Homo sapiens
  CDR3 for beta chain variable domain of TCR clone 137370 (TRBV6-1, TRBJ1-1)
CASSWTVDTEAFF

SEQ ID NO: 274741 - protein, 16 aa, Homo sapiens
  CDR3 for alpha chain variable domain of TCR clone 137371 (TRAV8-3, TRAJ52)
CAVLPAGGTSYGKLTF

SEQ ID NO: 274742 - protein, 15 aa, Homo sapiens
  CDR3 for beta chain variable domain of TCR clone 137371 (TRBV11-2, TRBJ2-7)
CASSLAGGVATEQYF

SEQ ID NO: 274743 - protein, 14 aa, Homo sapiens
  CDR3 for alpha chain variable domain of TCR clone 137372 (TRAV17, TRAJ12)
CAILPMDSSSKLIF

SEQ ID NO: 274744 - protein, 11 aa, Homo sapiens
  CDR3 for beta chain variable domain of TCR clone 137372 (TRBV19, TRBJ1-1)
CASSIGSEAFF

SEQ ID NO: 274745 - protein, 12 aa, Homo sapiens
  CDR3 for alpha chain variable domain of TCR clone 137373 (TRAV8-6, TRAJ11)
CAVSSGYSTLTF

SEQ ID NO: 274746 - protein, 13 aa, Homo sapiens
  CDR3 for beta chain variable domain of TCR clone 137373 (TRBV7-3, TRBJ1-1)
CASSQDWGAEAFF

SEQ ID NO: 274747 - protein, 18 aa, Homo sapiens
  CDR3 for alpha chain variable domain of TCR clone 137374 (TRAV21, TRAJ52)
CAVRPSPAGGTSYGKLKF

SEQ ID NO: 274748 - protein, 12 aa, Homo sapiens
  CDR3 for beta chain variable domain of TCR clone 137374 (TRBV11-2, TRBJ2-2)
CASSLGGGELFF

SEQ ID NO: 274749 - protein, 14 aa, Homo sapiens
  CDR3 for alpha chain variable domain of TCR clone 137375 (TRAV12-1, TRAJ43)
CVVNGRSNINDMRF

SEQ ID NO: 274750 - protein, 13 aa, Homo sapiens
  CDR3 for beta chain variable domain of TCR clone 137375 (TRBV27, TRBJ1-1)
CASSLSIGAEAFF

SEQ ID NO: 274751 - protein, 15 aa, Homo sapiens
  CDR3 for alpha chain variable domain of TCR clone 137376 (TRAV35, TRAJ42)
CAGQGYGGSQGNLIF

SEQ ID NO: 274752 - protein, 15 aa, Homo sapiens
  CDR3 for beta chain variable domain of TCR clone 137376 (TRBV7-2, TRBJ1-1)
CASSLVQGLKLSLDK

SEQ ID NO: 274753 - protein, 13 aa, Homo sapiens
  CDR3 for alpha chain variable domain of TCR clone 137377 (TRAV2, TRAJ40)
CAVVTSGTYKYIF

SEQ ID NO: 274754 - protein, 15 aa, Homo sapiens
  CDR3 for beta chain variable domain of TCR clone 137377 (TRBV11-3, TRBJ2-3)
CASLKDGREGVTQYF

SEQ ID NO: 274755 - protein, 13 aa, Homo sapiens
  CDR3 for alpha chain variable domain of TCR clone 137378 (TRAV12-3, TRAJ5)
CAMIYTGRRALTF

SEQ ID NO: 274756 - protein, 12 aa, Homo sapiens
  CDR3 for beta chain variable domain of TCR clone 137378 (TRBV18, TRBJ1-4)
CASSPSRENLFF

SEQ ID NO: 274757 - protein, 11 aa, Homo sapiens
  CDR3 for alpha chain variable domain of TCR clone 137379 (TRAV1-1, TRAJ23)
CAVRQGGKLIF

SEQ ID NO: 274758 - protein, 20 aa, Homo sapiens
  CDR3 for beta chain variable domain of TCR clone 137379 (TRBV7-8, TRBJ2-2)
CASNHLFPGPTIHITGELFV

SEQ ID NO: 274759 - protein, 14 aa, Homo sapiens
  CDR3 for alpha chain variable domain of TCR clone 137380 (TRAV3, TRAJ21)
CAVRDPYNFNKFYF

SEQ ID NO: 274760 - protein, 16 aa, Homo sapiens
  CDR3 for beta chain variable domain of TCR clone 137380 (TRBV20-1, TRBJ1-4)
CSAPGQGLLTNEKLFF

SEQ ID NO: 274761 - protein, 22 aa, Homo sapiens
  CDR3 for alpha chain variable domain of TCR clone 137381 (TRAV27, TRAJ38)
CAARRNAGNNHIQNPDPAVYQL

SEQ ID NO: 274762 - protein, 16 aa, Homo sapiens
  CDR3 for beta chain variable domain of TCR clone 137381 (TRBV7-3, TRBJ2-2)
CASSLKRGTLSGELCF

SEQ ID NO: 274763 - protein, 14 aa, Homo sapiens
  CDR3 for alpha chain variable domain of TCR clone 137382 (TRAV12-2, TRAJ40)
CAVKIPSGTYKYIF

SEQ ID NO: 274764 - protein, 14 aa, Homo sapiens
  CDR3 for beta chain variable domain of TCR clone 137382 (TRBV5-1, TRBJ1-1)
CASSRTTGDTEAFF

SEQ ID NO: 274765 - protein, 14 aa, Homo sapiens
  CDR3 for alpha chain variable domain of TCR clone 137383 (TRAV12-1, TRAJ23)
CVVIVYNQGGKLIF

SEQ ID NO: 274766 - protein, 15 aa, Homo sapiens
  CDR3 for beta chain variable domain of TCR clone 137383 (TRBV20-1, TRBJ1-5)
YSAKPPGQGPQPQHF

SEQ ID NO: 274767 - protein, 12 aa, Homo sapiens
  CDR3 for alpha chain variable domain of TCR clone 137384 (TRAV21, TRAJ11)
CAATSGYSTLTF

SEQ ID NO: 274768 - protein, 16 aa, Homo sapiens
  CDR3 for beta chain variable domain of TCR clone 137384 (TRBV28, TRBJ2-2)
RASSLEGGSNTGELFF

SEQ ID NO: 274769 - protein, 15 aa, Homo sapiens
  CDR3 for alpha chain variable domain of TCR clone 137385 (TRAV3, TRAJ17)
CAVSPKEAPGNKLTF

SEQ ID NO: 274770 - protein, 12 aa, Homo sapiens
  CDR3 for beta chain variable domain of TCR clone 137385 (TRBV7-9, TRBJ1-6)
CASSLMTSPLHF

SEQ ID NO: 274771 - protein, 17 aa, Homo sapiens
  CDR3 for alpha chain variable domain of TCR clone 137386 (TRAV3, TRAJ42)
CAVRDREYGGSQGNLIF

SEQ ID NO: 274772 - protein, 18 aa, Homo sapiens
  CDR3 for beta chain variable domain of TCR clone 137386 (TRBV20-1, TRBJ2-3)
CSASGLAGGPGTTDTQYF

SEQ ID NO: 274773 - protein, 12 aa, Homo sapiens
  CDR3 for alpha chain variable domain of TCR clone 137387 (TRAV17, TRAJ39)
CATGAAGNVLTF

SEQ ID NO: 274774 - protein, 14 aa, Homo sapiens
  CDR3 for beta chain variable domain of TCR clone 137387 (TRBV7-9, TRBJ2-7)
CASRSQGAAYEQYF

SEQ ID NO: 274775 - protein, 13 aa, Homo sapiens
  CDR3 for alpha chain variable domain of TCR clone 137388 (TRAV8-1, TRAJ23)
CAWRDNQGGKLIF

SEQ ID NO: 274776 - protein, 14 aa, Homo sapiens
  CDR3 for beta chain variable domain of TCR clone 137388 (TRBV11-2, TRBJ2-5)
CASSRTGGIETQYF

SEQ ID NO: 274777 - protein, 11 aa, Homo sapiens
  CDR3 for alpha chain variable domain of TCR clone 137389 (TRAV16, TRAJ49)
CSLNTGNKFYF

SEQ ID NO: 274778 - protein, 12 aa, Homo sapiens
  CDR3 for beta chain variable domain of TCR clone 137389 (TRBV7-9, TRBJ1-4)
CASSTDREKLFF

SEQ ID NO: 274779 - protein, 16 aa, Homo sapiens
  CDR3 for alpha chain variable domain of TCR clone 137390 (TRAV12-3, TRAJ53)
CAMMEFREGSNYKLTF

SEQ ID NO: 274780 - protein, 17 aa, Homo sapiens
  CDR3 for beta chain variable domain of TCR clone 137390 (TRBV13, TRBJ2-3)
CASSLSRVAGGRNTQYF

SEQ ID NO: 274781 - protein, 15 aa, Homo sapiens
  CDR3 for alpha chain variable domain of TCR clone 137391 (TRAV12-1, TRAJ42)
CVVTRDGGSQGNLIF

SEQ ID NO: 274782 - protein, 13 aa, Homo sapiens
  CDR3 for beta chain variable domain of TCR clone 137391 (TRBV19, TRBJ1-2)
CVSSVPGQDGYTF

SEQ ID NO: 274783 - protein, 15 aa, Homo sapiens
  CDR3 for alpha chain variable domain of TCR clone 137392 (TRAV26-1, TRAJ17)
CIVRVVKAAGNKLTF

SEQ ID NO: 274784 - protein, 13 aa, Homo sapiens
  CDR3 for beta chain variable domain of TCR clone 137392 (TRBV20-1, TRBJ2-3)
CSADQGVSDTQYF

SEQ ID NO: 274785 - protein, 12 aa, Homo sapiens
  CDR3 for alpha chain variable domain of TCR clone 137393 (TRAV8-3, TRAJ41)
CAVALSGCALNF

SEQ ID NO: 274786 - protein, 16 aa, Homo sapiens
  CDR3 for beta chain variable domain of TCR clone 137393 (TRBV27, TRBJ2-7)
CASSSERRDSAYEQYF

SEQ ID NO: 274787 - protein, 14 aa, Homo sapiens
  CDR3 for alpha chain variable domain of TCR clone 137394 (TRAV13-1, TRAJ44)
CAAKATGTASKLTF

SEQ ID NO: 274788 - protein, 13 aa, Homo sapiens
  CDR3 for beta chain variable domain of TCR clone 137394 (TRBV5-5, TRBJ1-2)
CASSFWRGEDYSL

SEQ ID NO: 274789 - protein, 11 aa, Homo sapiens
  CDR3 for alpha chain variable domain of TCR clone 137395 (TRAV23/DV6, TRAJ43)
CAASWNNDMRF

SEQ ID NO: 274790 - protein, 16 aa, Homo sapiens
  CDR3 for beta chain variable domain of TCR clone 137395 (TRBV20-1, TRBJ1-4)
CSAPGQGLLTNEKLFF

SEQ ID NO: 274791 - protein, 11 aa, Homo sapiens
  CDR3 for alpha chain variable domain of TCR clone 137396 (TRAV2, TRAJ13)
CASGGYQKVTF

SEQ ID NO: 274792 - protein, 15 aa, Homo sapiens
  CDR3 for beta chain variable domain of TCR clone 137396 (TRBV6-1, TRBJ2-5)
CQSETLDRGAETQYF

SEQ ID NO: 274793 - protein, 19 aa, Homo sapiens
  CDR3 for alpha chain variable domain of TCR clone 137397 (TRAV2, TRAJ20)
ILQVREADAAVYRDCKLSF

SEQ ID NO: 274794 - protein, 14 aa, Homo sapiens
  CDR3 for beta chain variable domain of TCR clone 137397 (TRBV20-1, TRBJ2-1)
CSPNDEASYNEQFF

SEQ ID NO: 274795 - protein, 13 aa, Homo sapiens
  CDR3 for alpha chain variable domain of TCR clone 137398 (TRAV13-1, TRAJ5)
CAALGTGRRALTF

SEQ ID NO: 274796 - protein, 14 aa, Homo sapiens
  CDR3 for beta chain variable domain of TCR clone 137398 (TRBV12-5, TRBJ2-5)
CASGSRTHQETQYF

SEQ ID NO: 274797 - protein, 16 aa, Homo sapiens
  CDR3 for alpha chain variable domain of TCR clone 137399 (TRAV16, TRAJ52)
CALSAAGGTSYGKLTF

SEQ ID NO: 274798 - protein, 19 aa, Homo sapiens
  CDR3 for beta chain variable domain of TCR clone 137399 (TRBV19, TRBJ2-5)
CASSIGQVTDFFRGENQYF

SEQ ID NO: 274799 - protein, 15 aa, Homo sapiens
  CDR3 for alpha chain variable domain of TCR clone 137400 (TRAV8-2, TRAJ21)
CVVSGRASTNFTLDL

SEQ ID NO: 274800 - protein, 15 aa, Homo sapiens
  CDR3 for beta chain variable domain of TCR clone 137400 (TRBV11-1, TRBJ2-1)
CASSLLWGLGYEQFF

SEQ ID NO: 274801 - protein, 18 aa, Homo sapiens
  CDR3 for alpha chain variable domain of TCR clone 137401 (TRAV17, TRAJ45)
CATSLDLYSGVGADGLTF

SEQ ID NO: 274802 - protein, 13 aa, Homo sapiens
  CDR3 for beta chain variable domain of TCR clone 137401 (TRBV10-3, TRBJ2-7)
CASKLAVNYEQYF

SEQ ID NO: 274803 - protein, 14 aa, Homo sapiens
  CDR3 for alpha chain variable domain of TCR clone 137402 (TRAV20, TRAJ22)
CAVQVSGSARQLTF

SEQ ID NO: 274804 - protein, 15 aa, Homo sapiens
  CDR3 for beta chain variable domain of TCR clone 137402 (TRBV6-1, TRBJ2-4)
CASSEAVWTINIQYF

SEQ ID NO: 274805 - protein, 14 aa, Homo sapiens
  CDR3 for alpha chain variable domain of TCR clone 137403 (TRAV13-1, TRAJ23)
CAASRLGRGGKLIF

SEQ ID NO: 274806 - protein, 15 aa, Homo sapiens
  CDR3 for beta chain variable domain of TCR clone 137403 (TRBV6-3, TRBJ2-2)
CASSFLATLTGELFF

SEQ ID NO: 274807 - protein, 14 aa, Homo sapiens
  CDR3 for alpha chain variable domain of TCR clone 137404 (TRAV12-2, TRAJ13)
CAVKKTGGYQKVTF

SEQ ID NO: 274808 - protein, 12 aa, Homo sapiens
  CDR3 for beta chain variable domain of TCR clone 137404 (TRBV12-4, TRBJ2-7)
CASSLGGYEQYV

SEQ ID NO: 274809 - protein, 14 aa, Homo sapiens
  CDR3 for alpha chain variable domain of TCR clone 137405 (TRAV26-1, TRAJ48)
CIVRVARGNEKLTF

SEQ ID NO: 274810 - protein, 13 aa, Homo sapiens
  CDR3 for beta chain variable domain of TCR clone 137405 (TRBV12-4, TRBJ1-2)
CASSYRVNYGYTF

SEQ ID NO: 274811 - protein, 21 aa, Homo sapiens
  CDR3 for alpha chain variable domain of TCR clone 137406 (TRAV25, TRAJ47)
TATQTTDVGTYFWAYGNKLVF

SEQ ID NO: 274812 - protein, 16 aa, Homo sapiens
  CDR3 for beta chain variable domain of TCR clone 137406 (TRBV6-6, TRBJ2-1)
CASSWGGQGPYNEQFF

SEQ ID NO: 274813 - protein, 21 aa, Homo sapiens
  CDR3 for alpha chain variable domain of TCR clone 137407 (TRAV30, TRAJ43)
GLPAQLLRNLLPIIELNDMRF

SEQ ID NO: 274814 - protein, 17 aa, Homo sapiens
  CDR3 for beta chain variable domain of TCR clone 137407 (TRBV4-1, TRBJ1-4)
CASSQEGPRGVEEKLFF

SEQ ID NO: 274815 - protein, 16 aa, Homo sapiens
  CDR3 for alpha chain variable domain of TCR clone 137408 (TRAV30, TRAJ24)
CGTEIVDADSWGKFQF

SEQ ID NO: 274816 - protein, 14 aa, Homo sapiens
  CDR3 for beta chain variable domain of TCR clone 137408 (TRBV2, TRBJ1-5)
CASSEAAGGQPQHF

SEQ ID NO: 274817 - protein, 14 aa, Homo sapiens
  CDR3 for alpha chain variable domain of TCR clone 137409 (TRAV1-2, TRAJ16)
CAVNRVSDGQKLLF

SEQ ID NO: 274818 - protein, 13 aa, Homo sapiens
  CDR3 for beta chain variable domain of TCR clone 137409 (TRBV4-2, TRBJ1-1)
CASSQAGNTEAFF

SEQ ID NO: 274819 - protein, 14 aa, Homo sapiens
  CDR3 for alpha chain variable domain of TCR clone 137410 (TRAV27, TRAJ53)
CAGDRGGSNYKLTF

SEQ ID NO: 274820 - protein, 16 aa, Homo sapiens
  CDR3 for beta chain variable domain of TCR clone 137410 (TRBV20-1, TRBJ1-4)
CSAPGQGLLTNEKLFF

SEQ ID NO: 274821 - protein, 17 aa, Homo sapiens
  CDR3 for alpha chain variable domain of TCR clone 137411 (TRAV26-1, TRAJ53)
CIVRVDDSGGSNYKLIF

SEQ ID NO: 274822 - protein, 15 aa, Homo sapiens
  CDR3 for beta chain variable domain of TCR clone 137411 (TRBV20-1, TRBJ2-7)
CSARVPAAYFYEQYF

SEQ ID NO: 274823 - protein, 16 aa, Homo sapiens
  CDR3 for alpha chain variable domain of TCR clone 137412 (TRAV20, TRAJ52)
CAVLPDGGTSYGKLTF

SEQ ID NO: 274824 - protein, 11 aa, Homo sapiens
  CDR3 for beta chain variable domain of TCR clone 137412 (TRBV19, TRBJ2-1)
CSSQISNEQFF

SEQ ID NO: 274825 - protein, 13 aa, Homo sapiens
  CDR3 for alpha chain variable domain of TCR clone 137413 (TRAV2, TRAJ40)
CAVVTSGTYKYIF

SEQ ID NO: 274826 - protein, 14 aa, Homo sapiens
  CDR3 for beta chain variable domain of TCR clone 137413 (TRBV11-3, TRBJ2-3)
CQPEGRAGRYTQYF

SEQ ID NO: 274827 - protein, 16 aa, Homo sapiens
  CDR3 for alpha chain variable domain of TCR clone 137414 (TRAV12-3, TRAJ53)
CAMSVGSGGSNYKLTF

SEQ ID NO: 274828 - protein, 12 aa, Homo sapiens
  CDR3 for beta chain variable domain of TCR clone 137414 (TRBV11-2, TRBJ2-2)
CASSLPTGELFF

SEQ ID NO: 274829 - protein, 12 aa, Homo sapiens
  CDR3 for alpha chain variable domain of TCR clone 137415 (TRAV1-1, TRAJ8)
CAGGTGFQKLVY

SEQ ID NO: 274830 - protein, 15 aa, Homo sapiens
  CDR3 for beta chain variable domain of TCR clone 137415 (TRBV7-9, TRBJ1-4)
CASSRTGGFNERLFF

SEQ ID NO: 274831 - protein, 12 aa, Homo sapiens
  CDR3 for alpha chain variable domain of TCR clone 137416 (TRAV2, TRAJ33)
CAFMDSNYQLIW

SEQ ID NO: 274832 - protein, 16 aa, Homo sapiens
  CDR3 for beta chain variable domain of TCR clone 137416 (TRBV9, TRBJ2-3)
CASSVASGTGNVTQYF

SEQ ID NO: 274833 - protein, 15 aa, Homo sapiens
  CDR3 for alpha chain variable domain of TCR clone 137417 (TRAV35, TRAJ40)
CAGQLGTSGTYKYIF

SEQ ID NO: 274834 - protein, 14 aa, Homo sapiens
  CDR3 for beta chain variable domain of TCR clone 137417 (TRBV12-5, TRBJ2-5)
CASGSRTHQETQYF

SEQ ID NO: 274835 - protein, 13 aa, Homo sapiens
  CDR3 for alpha chain variable domain of TCR clone 137418 (TRAV16, TRAJ37)
FALGSGNTGKLIF

SEQ ID NO: 274836 - protein, 14 aa, Homo sapiens
  CDR3 for beta chain variable domain of TCR clone 137418 (TRBV27, TRBJ2-5)
CASSSLKGWETQYF

SEQ ID NO: 274837 - protein, 16 aa, Homo sapiens
  CDR3 for alpha chain variable domain of TCR clone 137419 (TRAV3, TRAJ10)
CAVRDMRAGGGNKLTF

SEQ ID NO: 274838 - protein, 15 aa, Homo sapiens
  CDR3 for beta chain variable domain of TCR clone 137419 (TRBV7-2, TRBJ1-5)
CASSRGQGDNQAQHF

SEQ ID NO: 274839 - protein, 14 aa, Homo sapiens
  CDR3 for alpha chain variable domain of TCR clone 137420 (TRAV38-1, TRAJ29)
CAFITPSGNTPLVF

SEQ ID NO: 274840 - protein, 13 aa, Homo sapiens
  CDR3 for beta chain variable domain of TCR clone 137420 (TRBV14, TRBJ2-7)
CASSQDRRYEQYF

SEQ ID NO: 274841 - protein, 13 aa, Homo sapiens
  CDR3 for alpha chain variable domain of TCR clone 137421 (TRAV2, TRAJ40)
CAVVTSGTYKYIF

SEQ ID NO: 274842 - protein, 16 aa, Homo sapiens
  CDR3 for beta chain variable domain of TCR clone 137421 (TRBV7-2, TRBJ1-3)
CASSRLEASSGNTIYF

SEQ ID NO: 274843 - protein, 16 aa, Homo sapiens
  CDR3 for alpha chain variable domain of TCR clone 137422 (TRAV13-1, TRAJ13)
CTAFFLGVTRKLPLEM

SEQ ID NO: 274844 - protein, 15 aa, Homo sapiens
  CDR3 for beta chain variable domain of TCR clone 137422 (TRBV7-8, TRBJ2-1)
CASSLADSLYNEQFF

SEQ ID NO: 274845 - protein, 13 aa, Homo sapiens
  CDR3 for alpha chain variable domain of TCR clone 137423 (TRAV13-1, TRAJ12)
CAASPDSSYKLIF

SEQ ID NO: 274846 - protein, 16 aa, Homo sapiens
  CDR3 for beta chain variable domain of TCR clone 137423 (TRBV15, TRBJ2-1)
CATSRERLAGSYEQFF

SEQ ID NO: 274847 - protein, 12 aa, Homo sapiens
  CDR3 for alpha chain variable domain of TCR clone 137424 (TRAV12-3, TRAJ20)
CAMVRGDYKLSF

SEQ ID NO: 274848 - protein, 17 aa, Homo sapiens
  CDR3 for beta chain variable domain of TCR clone 137424 (TRBV24-1, TRBJ2-1)
CATSDVSTSGTYNEQFF

SEQ ID NO: 274849 - protein, 15 aa, Homo sapiens
  CDR3 for alpha chain variable domain of TCR clone 137425 (TRAV21, TRAJ53)
CAVRQSGGSNYKLTF

SEQ ID NO: 274850 - protein, 12 aa, Homo sapiens
  CDR3 for beta chain variable domain of TCR clone 137425 (TRBV3-1, TRBJ2-5)
CASSQRGETQYF

SEQ ID NO: 274851 - protein, 12 aa, Homo sapiens
  CDR3 for alpha chain variable domain of TCR clone 137426 (TRAV27, TRAJ42)
CAGGGSQGNLIF

SEQ ID NO: 274852 - protein, 13 aa, Homo sapiens
  CDR3 for beta chain variable domain of TCR clone 137426 (TRBV19, TRBJ2-7)
CASSISSSYEQYF

SEQ ID NO: 274853 - protein, 15 aa, Homo sapiens
  CDR3 for alpha chain variable domain of TCR clone 137427 (TRAV14/DV4, TRAJ10)
CAMRELTGGGNKLTF

SEQ ID NO: 274854 - protein, 18 aa, Homo sapiens
  CDR3 for beta chain variable domain of TCR clone 137427 (TRBV7-9, TRBJ2-7)
YASSLTTSGSRAWDEQYF

SEQ ID NO: 274855 - protein, 14 aa, Homo sapiens
  CDR3 for alpha chain variable domain of TCR clone 137428 (TRAV1-2, TRAJ16)
CAVNRFSDGQKLLF

SEQ ID NO: 274856 - protein, 15 aa, Homo sapiens
  CDR3 for beta chain variable domain of TCR clone 137428 (TRBV11-3, TRBJ2-3)
CASPKDGREGDTQYF

SEQ ID NO: 274857 - protein, 13 aa, Homo sapiens
  CDR3 for alpha chain variable domain of TCR clone 137429 (TRAV4, TRAJ22)
CLGGSGSARRLTF

SEQ ID NO: 274858 - protein, 15 aa, Homo sapiens
  CDR3 for beta chain variable domain of TCR clone 137429 (TRBV7-9, TRBJ1-6)
CASSSPGRGNSPLHF

SEQ ID NO: 274859 - protein, 13 aa, Homo sapiens
  CDR3 for alpha chain variable domain of TCR clone 137430 (TRAV13-2, TRAJ53)
CAENMGSNYKLTF

SEQ ID NO: 274860 - protein, 13 aa, Homo sapiens
  CDR3 for beta chain variable domain of TCR clone 137430 (TRBV4-1, TRBJ2-2)
CASRPANTGELFF

SEQ ID NO: 274861 - protein, 14 aa, Homo sapiens
  CDR3 for alpha chain variable domain of TCR clone 137431 (TRAV17, TRAJ6)
CSTDASGGSYIPTF

SEQ ID NO: 274862 - protein, 19 aa, Homo sapiens
  CDR3 for beta chain variable domain of TCR clone 137431 (TRBV4-3, TRBJ2-7)
CASSQEFIGWQVTPYEQYF

SEQ ID NO: 274863 - protein, 15 aa, Homo sapiens
  CDR3 for alpha chain variable domain of TCR clone 137432 (TRAV8-3, TRAJ45)
CASSYSGGGADGLTF

SEQ ID NO: 274864 - protein, 16 aa, Homo sapiens
  CDR3 for beta chain variable domain of TCR clone 137432 (TRBV7-9, TRBJ2-5)
CASSPSGQGVKGTQYF

SEQ ID NO: 274865 - protein, 15 aa, Homo sapiens
  CDR3 for alpha chain variable domain of TCR clone 137433 (TRAV3, TRAJ20)
CAVRDIKLSDYKLSF

SEQ ID NO: 274866 - protein, 14 aa, Homo sapiens
  CDR3 for beta chain variable domain of TCR clone 137433 (TRBV7-9, TRBJ2-7)
CASSLGGSSYEQYF

SEQ ID NO: 274867 - protein, 10 aa, Homo sapiens
  CDR3 for alpha chain variable domain of TCR clone 137434 (TRAV12-2, TRAJ52)
CAANRWWYEL

SEQ ID NO: 274868 - protein, 13 aa, Homo sapiens
  CDR3 for beta chain variable domain of TCR clone 137434 (TRBV12-4, TRBJ1-1)
CASSPGTGFEAFF

SEQ ID NO: 274869 - protein, 16 aa, Homo sapiens
  CDR3 for alpha chain variable domain of TCR clone 137435 (TRAV12-3, TRAJ53)
CAMSPGSGGSNDKLTF

SEQ ID NO: 274870 - protein, 16 aa, Homo sapiens
  CDR3 for beta chain variable domain of TCR clone 137435 (TRBV7-9, TRBJ1-2)
CASSLGFSSGEDGYTF

SEQ ID NO: 274871 - protein, 13 aa, Homo sapiens
  CDR3 for alpha chain variable domain of TCR clone 137436 (TRAV3, TRAJ16)
CAVRDRNGQELLF

SEQ ID NO: 274872 - protein, 15 aa, Homo sapiens
  CDR3 for beta chain variable domain of TCR clone 137436 (TRBV5-1, TRBJ2-1)
CASSPPRAPYNKQFF

SEQ ID NO: 274873 - protein, 14 aa, Homo sapiens
  CDR3 for alpha chain variable domain of TCR clone 137437 (TRAV23/DV6, TRAJ17)
CAARGRAAGNKLTF

SEQ ID NO: 274874 - protein, 16 aa, Homo sapiens
  CDR3 for beta chain variable domain of TCR clone 137437 (TRBV12-5, TRBJ2-5)
CASGPRTSGNQETQYF

SEQ ID NO: 274875 - protein, 13 aa, Homo sapiens
  CDR3 for alpha chain variable domain of TCR clone 137438 (TRAV2, TRAJ40)
CAVVTSGTYKYIF

SEQ ID NO: 274876 - protein, 13 aa, Homo sapiens
  CDR3 for beta chain variable domain of TCR clone 137438 (TRBV9, TRBJ2-1)
CASSPSGGYEQFF

SEQ ID NO: 274877 - protein, 17 aa, Homo sapiens
  CDR3 for alpha chain variable domain of TCR clone 137439 (TRAV36/DV7, TRAJ52)
CAVAQRAGGTSYGKLTF

SEQ ID NO: 274878 - protein, 15 aa, Homo sapiens
  CDR3 for beta chain variable domain of TCR clone 137439 (TRBV19, TRBJ1-1)
CASTSGQIQNTEAFF

SEQ ID NO: 274879 - protein, 13 aa, Homo sapiens
  CDR3 for alpha chain variable domain of TCR clone 137440 (TRAV29/DV5, TRAJ48)
CAASSFGNETLTF

SEQ ID NO: 274880 - protein, 14 aa, Homo sapiens
  CDR3 for beta chain variable domain of TCR clone 137440 (TRBV3-1, TRBJ2-2)
CASSQDWVQGELFF

SEQ ID NO: 274881 - protein, 13 aa, Homo sapiens
  CDR3 for alpha chain variable domain of TCR clone 137441 (TRAV8-4, TRAJ49)
CAVRTRTGNQFYF

SEQ ID NO: 274882 - protein, 16 aa, Homo sapiens
  CDR3 for beta chain variable domain of TCR clone 137441 (TRBV5-7, TRBJ2-5)
CASTLAPAGGRETQYF

SEQ ID NO: 274883 - protein, 12 aa, Homo sapiens
  CDR3 for alpha chain variable domain of TCR clone 137442 (TRAV12-1, TRAJ29)
CVADSGNTPHVF

SEQ ID NO: 274884 - protein, 12 aa, Homo sapiens
  CDR3 for beta chain variable domain of TCR clone 137442 (TRBV2, TRBJ2-7)
CASKRGSYEQYF

SEQ ID NO: 274885 - protein, 13 aa, Homo sapiens
  CDR3 for alpha chain variable domain of TCR clone 137443 (TRAV21, TRAJ27)
CAARPGNAGKPTF

SEQ ID NO: 274886 - protein, 14 aa, Homo sapiens
  CDR3 for beta chain variable domain of TCR clone 137443 (TRBV7-6, TRBJ2-3)
CASSLGTVTDTQYL

SEQ ID NO: 274887 - protein, 11 aa, Homo sapiens
  CDR3 for alpha chain variable domain of TCR clone 137444 (TRAV2, TRAJ20)
CAVVNDYKLSF

SEQ ID NO: 274888 - protein, 18 aa, Homo sapiens
  CDR3 for beta chain variable domain of TCR clone 137444 (TRBV7-2, TRBJ2-2)
CASSLASRGAGGPGELFF

SEQ ID NO: 274889 - protein, 13 aa, Homo sapiens
  CDR3 for alpha chain variable domain of TCR clone 137445 (TRAV2, TRAJ40)
CAVVTSGTYKYIF

SEQ ID NO: 274890 - protein, 22 aa, Homo sapiens
  CDR3 for beta chain variable domain of TCR clone 137445 (TRBV19, TRBJ2-1)
CASPTFVSSGEPCPWPEELLTV

SEQ ID NO: 274891 - protein, 16 aa, Homo sapiens
  CDR3 for alpha chain variable domain of TCR clone 137446 (TRAV30, TRAJ24)
CGTEIVDADSWGKFQF

SEQ ID NO: 274892 - protein, 12 aa, Homo sapiens
  CDR3 for beta chain variable domain of TCR clone 137446 (TRBV27, TRBJ2-5)
CASSPTGETQYF

SEQ ID NO: 274893 - protein, 14 aa, Homo sapiens
  CDR3 for alpha chain variable domain of TCR clone 137447 (TRAV1-2, TRAJ8)
CAVREDTGFQKLVF

SEQ ID NO: 274894 - protein, 13 aa, Homo sapiens
  CDR3 for beta chain variable domain of TCR clone 137447 (TRBV20-1, TRBJ2-2)
CSASAAGTGELFS

SEQ ID NO: 274895 - protein, 14 aa, Homo sapiens
  CDR3 for alpha chain variable domain of TCR clone 137448 (TRAV12-1, TRAJ23)
CVVMIYNQGGKLIF

SEQ ID NO: 274896 - protein, 12 aa, Homo sapiens
  CDR3 for beta chain variable domain of TCR clone 137448 (TRBV12-4, TRBJ2-3)
CASSTLPDTQYF

SEQ ID NO: 274897 - protein, 16 aa, Homo sapiens
  CDR3 for alpha chain variable domain of TCR clone 137449 (TRAV3, TRAJ37)
CAVRPHGSGNTGQIIF

SEQ ID NO: 274898 - protein, 16 aa, Homo sapiens
  CDR3 for beta chain variable domain of TCR clone 137449 (TRBV9, TRBJ1-2)
CASSVEEKVSPYGYTF

SEQ ID NO: 274899 - protein, 13 aa, Homo sapiens
  CDR3 for alpha chain variable domain of TCR clone 137450 (TRAV25, TRAJ10)
GAGRTGGGNKLTF

SEQ ID NO: 274900 - protein, 15 aa, Homo sapiens
  CDR3 for beta chain variable domain of TCR clone 137450 (TRBV19, TRBJ2-1)
CASSSPGVPLDEQFF

SEQ ID NO: 274901 - protein, 15 aa, Homo sapiens
  CDR3 for alpha chain variable domain of TCR clone 137451 (TRAV21, TRAJ24)
CAARSSTDSWGKLQF

SEQ ID NO: 274902 - protein, 14 aa, Homo sapiens
  CDR3 for beta chain variable domain of TCR clone 137451 (TRBV28, TRBJ2-1)
CASSIQGTVGEQFF

SEQ ID NO: 274903 - protein, 12 aa, Homo sapiens
  CDR3 for alpha chain variable domain of TCR clone 137452 (TRAV12-3, TRAJ40)
CAMSSGTYKYIF

SEQ ID NO: 274904 - protein, 15 aa, Homo sapiens
  CDR3 for beta chain variable domain of TCR clone 137452 (TRBV7-3, TRBJ2-2)
CASSETGQGTGEPFF

SEQ ID NO: 274905 - protein, 15 aa, Homo sapiens
  CDR3 for alpha chain variable domain of TCR clone 137453 (TRAV26-1, TRAJ29)
CIVRVEGSGNTPLVF

SEQ ID NO: 274906 - protein, 16 aa, Homo sapiens
  CDR3 for beta chain variable domain of TCR clone 137453 (TRBV7-2, TRBJ1-2)
CASSSNQDRRGHGYTF

SEQ ID NO: 274907 - protein, 11 aa, Homo sapiens
  CDR3 for alpha chain variable domain of TCR clone 137454 (TRAV3, TRAJ21)
CAVGNFNKFYF

SEQ ID NO: 274908 - protein, 13 aa, Homo sapiens
  CDR3 for beta chain variable domain of TCR clone 137454 (TRBV19, TRBJ1-2)
CASSIGQVYGYTF

SEQ ID NO: 274909 - protein, 13 aa, Homo sapiens
  CDR3 for alpha chain variable domain of TCR clone 137455 (TRAV13-2, TRAJ13)
CAERPGGYQKVTF

SEQ ID NO: 274910 - protein, 14 aa, Homo sapiens
  CDR3 for beta chain variable domain of TCR clone 137455 (TRBV23-1, TRBJ2-5)
CASSFRRSQETQYF

SEQ ID NO: 274911 - protein, 18 aa, Homo sapiens
  CDR3 for alpha chain variable domain of TCR clone 137456 (TRAV13-1, TRAJ52)
CADNNPNAGGTSYGKMTF

SEQ ID NO: 274912 - protein, 15 aa, Homo sapiens
  CDR3 for beta chain variable domain of TCR clone 137456 (TRBV6-1, TRBJ2-3)
CASSERGGITDTQYF

SEQ ID NO: 274913 - protein, 14 aa, Homo sapiens
  CDR3 for alpha chain variable domain of TCR clone 137457 (TRAV1-2, TRAJ16)
CAVNRFSDGQKLLF

SEQ ID NO: 274914 - protein, 14 aa, Homo sapiens
  CDR3 for beta chain variable domain of TCR clone 137457 (TRBV7-2, TRBJ2-7)
CASSGLAGRGEQYF

SEQ ID NO: 274915 - protein, 15 aa, Homo sapiens
  CDR3 for alpha chain variable domain of TCR clone 137458 (TRAV12-3, TRAJ6)
CAMSATTGGSYIPTL

SEQ ID NO: 274916 - protein, 17 aa, Homo sapiens
  CDR3 for beta chain variable domain of TCR clone 137458 (TRBV13, TRBJ2-3)
CASSLSRVAGGRNTQYF

SEQ ID NO: 274917 - protein, 13 aa, Homo sapiens
  CDR3 for alpha chain variable domain of TCR clone 137459 (TRAV27, TRAJ6)
CAGGTRGSYLPTF

SEQ ID NO: 274918 - protein, 15 aa, Homo sapiens
  CDR3 for beta chain variable domain of TCR clone 137459 (TRBV5-5, TRBJ2-7)
CASSLAAPLSYEQYF

SEQ ID NO: 274919 - protein, 18 aa, Homo sapiens
  CDR3 for alpha chain variable domain of TCR clone 137460 (TRAV12-3, TRAJ52)
CAMSVGGAGGPSYGNLTF

SEQ ID NO: 274920 - protein, 15 aa, Homo sapiens
  CDR3 for beta chain variable domain of TCR clone 137460 (TRBV27, TRBJ1-6)
CASSFDRGLGSPLHF

SEQ ID NO: 274921 - protein, 14 aa, Homo sapiens
  CDR3 for alpha chain variable domain of TCR clone 137461 (TRAV8-3, TRAJ21)
CAVDARGNFNKFYF

SEQ ID NO: 274922 - protein, 16 aa, Homo sapiens
  CDR3 for beta chain variable domain of TCR clone 137461 (TRBV20-1, TRBJ2-1)
CSARDLAGHSYNEQFF

SEQ ID NO: 274923 - protein, 14 aa, Homo sapiens
  CDR3 for alpha chain variable domain of TCR clone 137462 (TRAV3, TRAJ7)
CALREEEREQQTRF

SEQ ID NO: 274924 - protein, 14 aa, Homo sapiens
  CDR3 for beta chain variable domain of TCR clone 137462 (TRBV7-7, TRBJ2-2)
CASSTRASGGELFF

SEQ ID NO: 274925 - protein, 12 aa, Homo sapiens
  CDR3 for alpha chain variable domain of TCR clone 137463 (TRAV12-2, TRAJ43)
CAVNVNNDDMRF

SEQ ID NO: 274926 - protein, 14 aa, Homo sapiens
  CDR3 for beta chain variable domain of TCR clone 137463 (TRBV7-2, TRBJ2-7)
CASSFLGRVYEQYF

SEQ ID NO: 274927 - protein, 11 aa, Homo sapiens
  CDR3 for alpha chain variable domain of TCR clone 137464 (TRAV3, TRAJ21)
FAGGNFNKFYF

SEQ ID NO: 274928 - protein, 16 aa, Homo sapiens
  CDR3 for beta chain variable domain of TCR clone 137464 (TRBV19, TRBJ2-1)
CASSKAGPSSYNEQFF

SEQ ID NO: 274929 - protein, 14 aa, Homo sapiens
  CDR3 for alpha chain variable domain of TCR clone 137465 (TRAV13-2, TRAJ10)
CAETFTGGGNKLPF

SEQ ID NO: 274930 - protein, 16 aa, Homo sapiens
  CDR3 for beta chain variable domain of TCR clone 137465 (TRBV18, TRBJ2-7)
CASSPRSQGISYEQYF

SEQ ID NO: 274931 - protein, 15 aa, Homo sapiens
  CDR3 for alpha chain variable domain of TCR clone 137466 (TRAV2, TRAJ22)
CAAPSRGGSARQLTF

SEQ ID NO: 274932 - protein, 11 aa, Homo sapiens
  CDR3 for beta chain variable domain of TCR clone 137466 (TRBV27, TRBJ2-3)
CAGSLGDTQYF

SEQ ID NO: 274933 - protein, 13 aa, Homo sapiens
  CDR3 for alpha chain variable domain of TCR clone 137467 (TRAV12-1, TRAJ9)
CVVLYTGGFKTIF

SEQ ID NO: 274934 - protein, 15 aa, Homo sapiens
  CDR3 for beta chain variable domain of TCR clone 137467 (TRBV19, TRBJ2-1)
CASSGGGTLYNGQFF

SEQ ID NO: 274935 - protein, 14 aa, Homo sapiens
  CDR3 for alpha chain variable domain of TCR clone 137468 (TRAV8-3, TRAJ15)
CAVGRHQAGTALIS

SEQ ID NO: 274936 - protein, 13 aa, Homo sapiens
  CDR3 for beta chain variable domain of TCR clone 137468 (TRBV9, TRBJ2-7)
CASSASDSYEQYF

SEQ ID NO: 274937 - protein, 22 aa, Homo sapiens
  CDR3 for alpha chain variable domain of TCR clone 137469 (TRAV2, TRAJ10)
ILQVREADAAVYYTGGGNKLTV

SEQ ID NO: 274938 - protein, 16 aa, Homo sapiens
  CDR3 for beta chain variable domain of TCR clone 137469 (TRBV5-7, TRBJ1-2)
CASSRGVTGGSYGYTF

SEQ ID NO: 274939 - protein, 16 aa, Homo sapiens
  CDR3 for alpha chain variable domain of TCR clone 137470 (TRAV16, TRAJ37)
CSKWPDGSSNTGKLIF

SEQ ID NO: 274940 - protein, 16 aa, Homo sapiens
  CDR3 for beta chain variable domain of TCR clone 137470 (TRBV12-5, TRBJ2-5)
CASGPRTSGNQETQYF

SEQ ID NO: 274941 - protein, 12 aa, Homo sapiens
  CDR3 for alpha chain variable domain of TCR clone 137471 (TRAV3, TRAJ20)
CAVRDPDYKLSF

SEQ ID NO: 274942 - protein, 15 aa, Homo sapiens
  CDR3 for beta chain variable domain of TCR clone 137471 (TRBV10-3, TRBJ2-3)
CAISLTSGGTDTQYF

SEQ ID NO: 274943 - protein, 14 aa, Homo sapiens
  CDR3 for alpha chain variable domain of TCR clone 137472 (TRAV12-2, TRAJ13)
CAVKKTGGYHKVTF

SEQ ID NO: 274944 - protein, 14 aa, Homo sapiens
  CDR3 for beta chain variable domain of TCR clone 137472 (TRBV10-3, TRBJ2-1)
CAISSDLAYNEQFF

SEQ ID NO: 274945 - protein, 14 aa, Homo sapiens
  CDR3 for alpha chain variable domain of TCR clone 137473 (TRAV2, TRAJ22)
CAVGRGGSARQLTC

SEQ ID NO: 274946 - protein, 12 aa, Homo sapiens
  CDR3 for beta chain variable domain of TCR clone 137473 (TRBV19, TRBJ2-1)
CASSMQDTEQFF

SEQ ID NO: 274947 - protein, 13 aa, Homo sapiens
  CDR3 for alpha chain variable domain of TCR clone 137474 (TRAV8-1, TRAJ28)
CSVSGAGSYQLTF

SEQ ID NO: 274948 - protein, 14 aa, Homo sapiens
  CDR3 for beta chain variable domain of TCR clone 137474 (TRBV7-2, TRBJ2-2)
CASRGQGAAGELFF

SEQ ID NO: 274949 - protein, 13 aa, Homo sapiens
  CDR3 for alpha chain variable domain of TCR clone 137475 (TRAV13-2, TRAJ13)
CAERPGGYQKVTF

SEQ ID NO: 274950 - protein, 16 aa, Homo sapiens
  CDR3 for beta chain variable domain of TCR clone 137475 (TRBV18, TRBJ2-5)
CASSPPSSGGAKTHYF

SEQ ID NO: 274951 - protein, 13 aa, Homo sapiens
  CDR3 for alpha chain variable domain of TCR clone 137476 (TRAV21, TRAJ27)
CAARPGNARKSTF

SEQ ID NO: 274952 - protein, 15 aa, Homo sapiens
  CDR3 for beta chain variable domain of TCR clone 137476 (TRBV11-3, TRBJ2-7)
CASSPGPASSYEQYF

SEQ ID NO: 274953 - protein, 13 aa, Homo sapiens
  CDR3 for alpha chain variable domain of TCR clone 137477 (TRAV29/DV5, TRAJ9)
CAASETGGFKTIL

SEQ ID NO: 274954 - protein, 15 aa, Homo sapiens
  CDR3 for beta chain variable domain of TCR clone 137477 (TRBV19, TRBJ2-1)
CASSMGSGTGRQQFF

SEQ ID NO: 274955 - protein, 14 aa, Homo sapiens
  CDR3 for alpha chain variable domain of TCR clone 137478 (TRAV21, TRAJ37)
CAVKGSSNTGKLIF

SEQ ID NO: 274956 - protein, 14 aa, Homo sapiens
  CDR3 for beta chain variable domain of TCR clone 137478 (TRBV7-2, TRBJ2-1)
CASSRGGARNEKFF

SEQ ID NO: 274957 - protein, 10 aa, Homo sapiens
  CDR3 for alpha chain variable domain of TCR clone 137479 (TRAV12-1, TRAJ33)
CLASNYQLIW

SEQ ID NO: 274958 - protein, 15 aa, Homo sapiens
  CDR3 for beta chain variable domain of TCR clone 137479 (TRBV5-4, TRBJ1-4)
CASSHGDGENEKLFF

SEQ ID NO: 274959 - protein, 13 aa, Homo sapiens
  CDR3 for alpha chain variable domain of TCR clone 137480 (TRAV17, TRAJ54)
CAAGIQGAQKLVF

SEQ ID NO: 274960 - protein, 13 aa, Homo sapiens
  CDR3 for beta chain variable domain of TCR clone 137480 (TRBV11-2, TRBJ2-7)
CASSGTRPYEQYF

SEQ ID NO: 274961 - protein, 13 aa, Homo sapiens
  CDR3 for alpha chain variable domain of TCR clone 137481 (TRAV12-2, TRAJ34)
CAVRGYNTDKLIF

SEQ ID NO: 274962 - protein, 15 aa, Homo sapiens
  CDR3 for beta chain variable domain of TCR clone 137481 (TRBV28, TRBJ2-1)
CASRTGAGVIDRQFF

SEQ ID NO: 274963 - protein, 18 aa, Homo sapiens
  CDR3 for alpha chain variable domain of TCR clone 137482 (TRAV26-2, TRAJ45)
CILRLWGYSVGGSDGLTF

SEQ ID NO: 274964 - protein, 17 aa, Homo sapiens
  CDR3 for beta chain variable domain of TCR clone 137482 (TRBV28, TRBJ2-3)
CASSPTPAGGRVDTQYF

SEQ ID NO: 274965 - protein, 12 aa, Homo sapiens
  CDR3 for alpha chain variable domain of TCR clone 137483 (TRAV3, TRAJ26)
CAVRDYGQNFVF

SEQ ID NO: 274966 - protein, 15 aa, Homo sapiens
  CDR3 for beta chain variable domain of TCR clone 137483 (TRBV5-1, TRBJ1-1)
CASSSTTGTNTEAFF

SEQ ID NO: 274967 - protein, 13 aa, Homo sapiens
  CDR3 for alpha chain variable domain of TCR clone 137484 (TRAV27, TRAJ49)
CAPRAYTGNQFYF

SEQ ID NO: 274968 - protein, 16 aa, Homo sapiens
  CDR3 for beta chain variable domain of TCR clone 137484 (TRBV4-1, TRBJ1-2)
CASSQDAGQVLYGYTF

SEQ ID NO: 274969 - protein, 15 aa, Homo sapiens
  CDR3 for alpha chain variable domain of TCR clone 137485 (TRAV8-3, TRAJ34)
CAVAPHGGNTDKLIF

SEQ ID NO: 274970 - protein, 15 aa, Homo sapiens
  CDR3 for beta chain variable domain of TCR clone 137485 (TRBV29-1, TRBJ2-1)
CSGRDKKSSYNEQFF

SEQ ID NO: 274971 - protein, 16 aa, Homo sapiens
  CDR3 for alpha chain variable domain of TCR clone 137486 (TRAV21, TRAJ37)
CAVRTAGSSNTGTLIF

SEQ ID NO: 274972 - protein, 13 aa, Homo sapiens
  CDR3 for beta chain variable domain of TCR clone 137486 (TRBV7-9, TRBJ2-5)
CASLPSGREAQYF

SEQ ID NO: 274973 - protein, 12 aa, Homo sapiens
  CDR3 for alpha chain variable domain of TCR clone 137487 (TRAV20, TRAJ54)
CAVQEGAQKLVF

SEQ ID NO: 274974 - protein, 17 aa, Homo sapiens
  CDR3 for beta chain variable domain of TCR clone 137487 (TRBV13, TRBJ2-3)
CASSLSRVAGGEEYAVF

SEQ ID NO: 274975 - protein, 14 aa, Homo sapiens
  CDR3 for alpha chain variable domain of TCR clone 137488 (TRAV23/DV6, TRAJ4)
CAANLSGGYNMLIF

SEQ ID NO: 274976 - protein, 11 aa, Homo sapiens
  CDR3 for beta chain variable domain of TCR clone 137488 (TRBV7-9, TRBJ2-3)
CASSPTDTQYF

SEQ ID NO: 274977 - protein, 18 aa, Homo sapiens
  CDR3 for alpha chain variable domain of TCR clone 137489 (TRAV26-1, TRAJ34)
CCVLLHRQSRVNTDKLIF

SEQ ID NO: 274978 - protein, 15 aa, Homo sapiens
  CDR3 for beta chain variable domain of TCR clone 137489 (TRBV20-1, TRBJ2-7)
CSARVPAAYFYEQYF

SEQ ID NO: 274979 - protein, 16 aa, Homo sapiens
  CDR3 for alpha chain variable domain of TCR clone 137490 (TRAV30, TRAJ24)
CGTEIVDADSWGKFQF

SEQ ID NO: 274980 - protein, 16 aa, Homo sapiens
  CDR3 for beta chain variable domain of TCR clone 137490 (TRBV6-3, TRBJ1-1)
CASTDLGTVPNTEAFC

SEQ ID NO: 274981 - protein, 19 aa, Homo sapiens
  CDR3 for alpha chain variable domain of TCR clone 137491 (TRAV26-1, TRAJ22)
CCVLLHRWVFSGSARQLTF

SEQ ID NO: 274982 - protein, 14 aa, Homo sapiens
  CDR3 for beta chain variable domain of TCR clone 137491 (TRBV4-1, TRBJ2-2)
CASSQAVNTGELFF

SEQ ID NO: 274983 - protein, 12 aa, Homo sapiens
  CDR3 for alpha chain variable domain of TCR clone 137492 (TRAV2, TRAJ33)
CAFMDSNYQLIW

SEQ ID NO: 274984 - protein, 13 aa, Homo sapiens
  CDR3 for beta chain variable domain of TCR clone 137492 (TRBV7-7, TRBJ2-3)
CASSLSRADTQYF

SEQ ID NO: 274985 - protein, 13 aa, Homo sapiens
  CDR3 for alpha chain variable domain of TCR clone 137493 (TRAV21, TRAJ27)
CAARPGNAGKSTF

SEQ ID NO: 274986 - protein, 13 aa, Homo sapiens
  CDR3 for beta chain variable domain of TCR clone 137493 (TRBV13, TRBJ2-1)
CASILAGRGEQFF

SEQ ID NO: 274987 - protein, 12 aa, Homo sapiens
  CDR3 for alpha chain variable domain of TCR clone 137494 (TRAV12-3, TRAJ17)
CAMTLTGNKLTL

SEQ ID NO: 274988 - protein, 15 aa, Homo sapiens
  CDR3 for beta chain variable domain of TCR clone 137494 (TRBV20-1, TRBJ2-7)
RSARDRVSGMDEQYF

SEQ ID NO: 274989 - protein, 14 aa, Homo sapiens
  CDR3 for alpha chain variable domain of TCR clone 137495 (TRAV12-2, TRAJ11)
CAVNGESGHSTLTF

SEQ ID NO: 274990 - protein, 10 aa, Homo sapiens
  CDR3 for beta chain variable domain of TCR clone 137495 (TRBV20-1, TRBJ2-5)
CSARFETQYF

SEQ ID NO: 274991 - protein, 10 aa, Homo sapiens
  CDR3 for alpha chain variable domain of TCR clone 137496 (TRAV23/DV6, TRAJ57)
CAASSTLSQG

SEQ ID NO: 274992 - protein, 14 aa, Homo sapiens
  CDR3 for beta chain variable domain of TCR clone 137496 (TRBV20-1, TRBJ2-7)
CSAKRGRSAYEQYF

SEQ ID NO: 274993 - protein, 12 aa, Homo sapiens
  CDR3 for alpha chain variable domain of TCR clone 137497 (TRAV8-4, TRAJ43)
CAVSVNNNDMRF

SEQ ID NO: 274994 - protein, 17 aa, Homo sapiens
  CDR3 for beta chain variable domain of TCR clone 137497 (TRBV7-2, TRBJ2-6)
CASSPSQGLRGANVLTF

SEQ ID NO: 274995 - protein, 10 aa, Homo sapiens
  CDR3 for alpha chain variable domain of TCR clone 137498 (TRAV5, TRAJ34)
CAEDTDKLIF

SEQ ID NO: 274996 - protein, 12 aa, Homo sapiens
  CDR3 for beta chain variable domain of TCR clone 137498 (TRBV11-2, TRBJ2-2)
CASGLGGGELFF

SEQ ID NO: 274997 - protein, 14 aa, Homo sapiens
  CDR3 for alpha chain variable domain of TCR clone 137499 (TRAV13-1, TRAJ40)
CAASMTSGTYKYIF

SEQ ID NO: 274998 - protein, 16 aa, Homo sapiens
  CDR3 for beta chain variable domain of TCR clone 137499 (TRBV28, TRBJ1-4)
CASSPPYRGRSEKLFF

SEQ ID NO: 274999 - protein, 11 aa, Homo sapiens
  CDR3 for alpha chain variable domain of TCR clone 137500 (TRAV4, TRAJ31)
CLVGDNARLML

SEQ ID NO: 275000 - protein, 16 aa, Homo sapiens
  CDR3 for beta chain variable domain of TCR clone 137500 (TRBV20-1, TRBJ1-1)
CSARALTQGMNTEAFF

SEQ ID NO: 275001 - protein, 15 aa, Homo sapiens
  CDR3 for alpha chain variable domain of TCR clone 137501 (TRAV12-1, TRAJ9)
CVVSFGDTGGFKTIF

SEQ ID NO: 275002 - protein, 13 aa, Homo sapiens
  CDR3 for beta chain variable domain of TCR clone 137501 (TRBV2, TRBJ2-3)
CASGRGRTDTQYF

SEQ ID NO: 275003 - protein, 12 aa, Homo sapiens
  CDR3 for alpha chain variable domain of TCR clone 137502 (TRAV12-3, TRAJ17)
CAMTPTGNKPTF

SEQ ID NO: 275004 - protein, 15 aa, Homo sapiens
  CDR3 for beta chain variable domain of TCR clone 137502 (TRBV20-1, TRBJ2-7)
CSARDRVSGMDEQYF

SEQ ID NO: 275005 - protein, 13 aa, Homo sapiens
  CDR3 for alpha chain variable domain of TCR clone 137503 (TRAV36/DV7, TRAJ49)
CAGDSNTGNQFYF

SEQ ID NO: 275006 - protein, 13 aa, Homo sapiens
  CDR3 for beta chain variable domain of TCR clone 137503 (TRBV11-2, TRBJ2-5)
CASSSTGEETQYF

SEQ ID NO: 275007 - protein, 16 aa, Homo sapiens
  CDR3 for alpha chain variable domain of TCR clone 137504 (TRAV26-1, TRAJ37)
CTYARHGSSNTGKLIF

SEQ ID NO: 275008 - protein, 16 aa, Homo sapiens
  CDR3 for beta chain variable domain of TCR clone 137504 (TRBV19, TRBJ2-4)
CATGGLAGGTKNIHYF

SEQ ID NO: 275009 - protein, 18 aa, Homo sapiens
  CDR3 for alpha chain variable domain of TCR clone 137505 (TRAV21, TRAJ52)
CAVRPSPAGGTSYGKLTF

SEQ ID NO: 275010 - protein, 15 aa, Homo sapiens
  CDR3 for beta chain variable domain of TCR clone 137505 (TRBV7-2, TRBJ1-6)
CASSSPGQDNSPLHF

SEQ ID NO: 275011 - protein, 15 aa, Homo sapiens
  CDR3 for alpha chain variable domain of TCR clone 137506 (TRAV2, TRAJ22)
CAVPSRGGSARQLTF

SEQ ID NO: 275012 - protein, 11 aa, Homo sapiens
  CDR3 for beta chain variable domain of TCR clone 137506 (TRBV27, TRBJ2-3)
YASSLGDTQYF

SEQ ID NO: 275013 - protein, 13 aa, Homo sapiens
  CDR3 for alpha chain variable domain of TCR clone 137507 (TRAV3, TRAJ20)
CAVRYGGDYKLSF

SEQ ID NO: 275014 - protein, 16 aa, Homo sapiens
  CDR3 for beta chain variable domain of TCR clone 137507 (TRBV4-1, TRBJ2-5)
CASSQTSGGPLETQYF

SEQ ID NO: 275015 - protein, 18 aa, Homo sapiens
  CDR3 for alpha chain variable domain of TCR clone 137508 (TRAV12-3, TRAJ52)
CAMSVGGAGGTSYGKLSF

SEQ ID NO: 275016 - protein, 15 aa, Homo sapiens
  CDR3 for beta chain variable domain of TCR clone 137508 (TRBV27, TRBJ1-6)
CASSFDRGLGSPLHF

SEQ ID NO: 275017 - protein, 14 aa, Homo sapiens
  CDR3 for alpha chain variable domain of TCR clone 137509 (TRAV25, TRAJ27)
CAGPGNTNAGTSTF

SEQ ID NO: 275018 - protein, 16 aa, Homo sapiens
  CDR3 for beta chain variable domain of TCR clone 137509 (TRBV4-1, TRBJ2-6)
CASSQDGGPGANVLTF

SEQ ID NO: 275019 - protein, 14 aa, Homo sapiens
  CDR3 for alpha chain variable domain of TCR clone 137510 (TRAV25, TRAJ23)
CAGQGDNQGGKLIF

SEQ ID NO: 275020 - protein, 12 aa, Homo sapiens
  CDR3 for beta chain variable domain of TCR clone 137510 (TRBV7-9, TRBJ1-1)
YASSLVRGEAFF

SEQ ID NO: 275021 - protein, 14 aa, Homo sapiens
  CDR3 for alpha chain variable domain of TCR clone 137511 (TRAV1-1, TRAJ35)
CAVRSIGFGNVLHC

SEQ ID NO: 275022 - protein, 12 aa, Homo sapiens
  CDR3 for beta chain variable domain of TCR clone 137511 (TRBV12-4, TRBJ2-1)
CASSLQGSEQFF

SEQ ID NO: 275023 - protein, 19 aa, Homo sapiens
  CDR3 for alpha chain variable domain of TCR clone 137512 (TRAV8-4, TRAJ3)
CAVTGENPVQQCFQDNLWI

SEQ ID NO: 275024 - protein, 16 aa, Homo sapiens
  CDR3 for beta chain variable domain of TCR clone 137512 (TRBV4-2, TRBJ1-1)
CASSQAGFGMNTEAFF

SEQ ID NO: 275025 - protein, 13 aa, Homo sapiens
  CDR3 for alpha chain variable domain of TCR clone 137513 (TRAV21, TRAJ11)
CAVPNPGYSTLTF

SEQ ID NO: 275026 - protein, 13 aa, Homo sapiens
  CDR3 for beta chain variable domain of TCR clone 137513 (TRBV3-1, TRBJ2-7)
CASSLRDGYEQYF

SEQ ID NO: 275027 - protein, 15 aa, Homo sapiens
  CDR3 for alpha chain variable domain of TCR clone 137514 (TRAV8-2, TRAJ40)
GVVLGTTSGTYKSIF

SEQ ID NO: 275028 - protein, 16 aa, Homo sapiens
  CDR3 for beta chain variable domain of TCR clone 137514 (TRBV7-3, TRBJ2-1)
CASSLEGYRSYNEQFF

SEQ ID NO: 275029 - protein, 12 aa, Homo sapiens
  CDR3 for alpha chain variable domain of TCR clone 137515 (TRAV13-1, TRAJ45)
CAATRGADGLTF

SEQ ID NO: 275030 - protein, 14 aa, Homo sapiens
  CDR3 for beta chain variable domain of TCR clone 137515 (TRBV7-2, TRBJ2-7)
CASRSQGAAYEQYF

SEQ ID NO: 275031 - protein, 14 aa, Homo sapiens
  CDR3 for alpha chain variable domain of TCR clone 137516 (TRAV1-2, TRAJ33)
CAVRAPDSNYQLIW

SEQ ID NO: 275032 - protein, 13 aa, Homo sapiens
  CDR3 for beta chain variable domain of TCR clone 137516 (TRBV7-3, TRBJ1-1)
CASSQDWGAEAFF

SEQ ID NO: 275033 - protein, 12 aa, Homo sapiens
  CDR3 for alpha chain variable domain of TCR clone 137517 (TRAV13-1, TRAJ40)
CAANSGTYKYIF

SEQ ID NO: 275034 - protein, 12 aa, Homo sapiens
  CDR3 for beta chain variable domain of TCR clone 137517 (TRBV12-4, TRBJ2-7)
CASSLGGYGQYF

SEQ ID NO: 275035 - protein, 15 aa, Homo sapiens
  CDR3 for alpha chain variable domain of TCR clone 137518 (TRAV3, TRAJ22)
CAVRDRGGSARQLPF

SEQ ID NO: 275036 - protein, 16 aa, Homo sapiens
  CDR3 for beta chain variable domain of TCR clone 137518 (TRBV5-4, TRBJ2-3)
CASQQPGAGGSDTQYF

SEQ ID NO: 275037 - protein, 12 aa, Homo sapiens
  CDR3 for alpha chain variable domain of TCR clone 137519 (TRAV17, TRAJ57)
CATDGGSEKLVF

SEQ ID NO: 275038 - protein, 14 aa, Homo sapiens
  CDR3 for beta chain variable domain of TCR clone 137519 (TRBV2, TRBJ2-2)
CASSWQGATGELFF

SEQ ID NO: 275039 - protein, 14 aa, Homo sapiens
  CDR3 for alpha chain variable domain of TCR clone 137520 (TRAV13-2, TRAJ43)
CAEIPTYNNNDMRF

SEQ ID NO: 275040 - protein, 17 aa, Homo sapiens
  CDR3 for beta chain variable domain of TCR clone 137520 (TRBV7-9, TRBJ2-1)
CASSLGGQGSSYNEQFF

SEQ ID NO: 275041 - protein, 12 aa, Homo sapiens
  CDR3 for alpha chain variable domain of TCR clone 137521 (TRAV3, TRAJ31)
CAAQRANARLMF

SEQ ID NO: 275042 - protein, 15 aa, Homo sapiens
  CDR3 for beta chain variable domain of TCR clone 137521 (TRBV10-2, TRBJ1-4)
CASTPIDRGKENLFF

SEQ ID NO: 275043 - protein, 13 aa, Homo sapiens
  CDR3 for alpha chain variable domain of TCR clone 137522 (TRAV13-1, TRAJ9)
CAVSGTGGFKTIF

SEQ ID NO: 275044 - protein, 13 aa, Homo sapiens
  CDR3 for beta chain variable domain of TCR clone 137522 (TRBV12-4, TRBJ2-7)
CASSLERVREQYF

SEQ ID NO: 275045 - protein, 20 aa, Homo sapiens
  CDR3 for alpha chain variable domain of TCR clone 137523 (TRAV26-1, TRAJ37)
CCVLLHRQINGSSNTGKLIF

SEQ ID NO: 275046 - protein, 13 aa, Homo sapiens
  CDR3 for beta chain variable domain of TCR clone 137523 (TRBV20-1, TRBJ2-7)
CSTRTSGNYEQYF

SEQ ID NO: 275047 - protein, 15 aa, Homo sapiens
  CDR3 for alpha chain variable domain of TCR clone 137524 (TRAV3, TRAJ22)
CAVRDRGGSARQLTF

SEQ ID NO: 275048 - protein, 15 aa, Homo sapiens
  CDR3 for beta chain variable domain of TCR clone 137524 (TRBV24-1, TRBJ2-1)
CATSDSGVSYNEQFF

SEQ ID NO: 275049 - protein, 11 aa, Homo sapiens
  CDR3 for alpha chain variable domain of TCR clone 137525 (TRAV2, TRAJ21)
CAVFNFNKFYF

SEQ ID NO: 275050 - protein, 13 aa, Homo sapiens
  CDR3 for beta chain variable domain of TCR clone 137525 (TRBV20-1, TRBJ1-6)
CSAKSSYNSPLHF

SEQ ID NO: 275051 - protein, 14 aa, Homo sapiens
  CDR3 for alpha chain variable domain of TCR clone 137526 (TRAV20, TRAJ56)
CGVQFGGANSKLTF

SEQ ID NO: 275052 - protein, 14 aa, Homo sapiens
  CDR3 for beta chain variable domain of TCR clone 137526 (TRBV20-1, TRBJ2-7)
CSAKRGRSSYEQYF

SEQ ID NO: 275053 - protein, 14 aa, Homo sapiens
  CDR3 for alpha chain variable domain of TCR clone 137527 (TRAV29/DV5, TRAJ44)
CAAFLVGTPSKLTL

SEQ ID NO: 275054 - protein, 15 aa, Homo sapiens
  CDR3 for beta chain variable domain of TCR clone 137527 (TRBV7-3, TRBJ2-2)
CASSETGQGTGELFF

SEQ ID NO: 275055 - protein, 14 aa, Homo sapiens
  CDR3 for alpha chain variable domain of TCR clone 137528 (TRAV12-2, TRAJ13)
CAVKNTGGYQKVTF

SEQ ID NO: 275056 - protein, 14 aa, Homo sapiens
  CDR3 for beta chain variable domain of TCR clone 137528 (TRBV6-1, TRBJ1-3)
CASVQGGGGNTIYF

SEQ ID NO: 275057 - protein, 14 aa, Homo sapiens
  CDR3 for alpha chain variable domain of TCR clone 137529 (TRAV26-1, TRAJ38)
CIADNAGNNRKLIW

SEQ ID NO: 275058 - protein, 13 aa, Homo sapiens
  CDR3 for beta chain variable domain of TCR clone 137529 (TRBV19, TRBJ1-2)
CASSVPGQDGYAF

SEQ ID NO: 275059 - protein, 11 aa, Homo sapiens
  CDR3 for alpha chain variable domain of TCR clone 137530 (TRAV17, TRAJ9)
CGFTGGFKTIF

SEQ ID NO: 275060 - protein, 15 aa, Homo sapiens
  CDR3 for beta chain variable domain of TCR clone 137530 (TRBV10-2, TRBJ2-5)
CASKPEDRRQETQYF

SEQ ID NO: 275061 - protein, 13 aa, Homo sapiens
  CDR3 for alpha chain variable domain of TCR clone 137531 (TRAV21, TRAJ3)
CAVRGSSASKIIF

SEQ ID NO: 275062 - protein, 17 aa, Homo sapiens
  CDR3 for beta chain variable domain of TCR clone 137531 (TRBV5-6, TRBJ2-5)
CASSWIQDRGREGTQYF

SEQ ID NO: 275063 - protein, 11 aa, Homo sapiens
  CDR3 for alpha chain variable domain of TCR clone 137532 (TRAV21, TRAJ26)
CAVRERSEFCF

SEQ ID NO: 275064 - protein, 12 aa, Homo sapiens
  CDR3 for beta chain variable domain of TCR clone 137532 (TRBV11-2, TRBJ2-1)
CASSPRNNEQFF

SEQ ID NO: 275065 - protein, 12 aa, Homo sapiens
  CDR3 for alpha chain variable domain of TCR clone 137533 (TRAV13-1, TRAJ21)
CAANEGFNKFYF

SEQ ID NO: 275066 - protein, 15 aa, Homo sapiens
  CDR3 for beta chain variable domain of TCR clone 137533 (TRBV15, TRBJ1-5)
CATSRDPVSNQPQHF

SEQ ID NO: 275067 - protein, 16 aa, Homo sapiens
  CDR3 for alpha chain variable domain of TCR clone 137534 (TRAV3, TRAJ37)
CAVRPHGSGNTGKLIL

SEQ ID NO: 275068 - protein, 14 aa, Homo sapiens
  CDR3 for beta chain variable domain of TCR clone 137534 (TRBV25-1, TRBJ1-1)
CASTHLGGNTEAFS

SEQ ID NO: 275069 - protein, 15 aa, Homo sapiens
  CDR3 for alpha chain variable domain of TCR clone 137535 (TRAV3, TRAJ22)
CAVRDRGGSARQLTF

SEQ ID NO: 275070 - protein, 15 aa, Homo sapiens
  CDR3 for beta chain variable domain of TCR clone 137535 (TRBV7-2, TRBJ2-1)
CASSFQADEYNEQFF

SEQ ID NO: 275071 - protein, 14 aa, Homo sapiens
  CDR3 for alpha chain variable domain of TCR clone 137536 (TRAV23/DV6, TRAJ11)
CAATLASGYSTLTF

SEQ ID NO: 275072 - protein, 13 aa, Homo sapiens
  CDR3 for beta chain variable domain of TCR clone 137536 (TRBV4-1, TRBJ2-5)
CASSLTRGETQYF

SEQ ID NO: 275073 - protein, 15 aa, Homo sapiens
  CDR3 for alpha chain variable domain of TCR clone 137537 (TRAV8-3, TRAJ45)
VASSYSGGGADGLTF

SEQ ID NO: 275074 - protein, 15 aa, Homo sapiens
  CDR3 for beta chain variable domain of TCR clone 137537 (TRBV7-2, TRBJ2-2)
CASSSLTGGTGELFF

SEQ ID NO: 275075 - protein, 16 aa, Homo sapiens
  CDR3 for alpha chain variable domain of TCR clone 137538 (TRAV3, TRAJ37)
CAVRGKGSGNTGKLIF

SEQ ID NO: 275076 - protein, 15 aa, Homo sapiens
  CDR3 for beta chain variable domain of TCR clone 137538 (TRBV18, TRBJ1-1)
CASSPRQGENTEAFF

SEQ ID NO: 275077 - protein, 11 aa, Homo sapiens
  CDR3 for alpha chain variable domain of TCR clone 137539 (TRAV12-1, TRAJ34)
CVVNKGRELIF

SEQ ID NO: 275078 - protein, 16 aa, Homo sapiens
  CDR3 for beta chain variable domain of TCR clone 137539 (TRBV5-1, TRBJ2-3)
CASSLGLAVYTDTQYF

SEQ ID NO: 275079 - protein, 17 aa, Homo sapiens
  CDR3 for alpha chain variable domain of TCR clone 137540 (TRAV16, TRAJ53)
CALPAMNSGGSNYKLTF

SEQ ID NO: 275080 - protein, 15 aa, Homo sapiens
  CDR3 for beta chain variable domain of TCR clone 137540 (TRBV11-2, TRBJ2-1)
CASSLGPDSYNEQFF

SEQ ID NO: 275081 - protein, 15 aa, Homo sapiens
  CDR3 for alpha chain variable domain of TCR clone 137541 (TRAV12-2, TRAJ53)
CAVNGGGGSNYKLTF

SEQ ID NO: 275082 - protein, 14 aa, Homo sapiens
  CDR3 for beta chain variable domain of TCR clone 137541 (TRBV19, TRBJ2-2)
CASSSLHRSGELFF

SEQ ID NO: 275083 - protein, 10 aa, Homo sapiens
  CDR3 for alpha chain variable domain of TCR clone 137542 (TRAV23/DV6, TRAJ43)
CAAGVAALEQ

SEQ ID NO: 275084 - protein, 13 aa, Homo sapiens
  CDR3 for beta chain variable domain of TCR clone 137542 (TRBV12-4, TRBJ1-2)
CASSLRQGKGYTF

SEQ ID NO: 275085 - protein, 13 aa, Homo sapiens
  CDR3 for alpha chain variable domain of TCR clone 137543 (TRAV14/DV4, TRAJ20)
CAMRESNDYKLSF

SEQ ID NO: 275086 - protein, 15 aa, Homo sapiens
  CDR3 for beta chain variable domain of TCR clone 137543 (TRBV7-9, TRBJ1-1)
CASSRPRTANTEAFF

SEQ ID NO: 275087 - protein, 13 aa, Homo sapiens
  CDR3 for alpha chain variable domain of TCR clone 137544 (TRAV13-1, TRAJ39)
CAASIVMQATFSP

SEQ ID NO: 275088 - protein, 13 aa, Homo sapiens
  CDR3 for beta chain variable domain of TCR clone 137544 (TRBV7-9, TRBJ1-2)
CASSLKQNYGYTF

SEQ ID NO: 275089 - protein, 13 aa, Homo sapiens
  CDR3 for alpha chain variable domain of TCR clone 137545 (TRAV17, TRAJ9)
CATDYTGGFKTIF

SEQ ID NO: 275090 - protein, 15 aa, Homo sapiens
  CDR3 for beta chain variable domain of TCR clone 137545 (TRBV28, TRBJ2-2)
CASRLAGARTGELFF

SEQ ID NO: 275091 - protein, 16 aa, Homo sapiens
  CDR3 for alpha chain variable domain of TCR clone 137546 (TRAV12-3, TRAJ50)
CAMRDPMKTSYYKVIF

SEQ ID NO: 275092 - protein, 13 aa, Homo sapiens
  CDR3 for beta chain variable domain of TCR clone 137546 (TRBV4-1, TRBJ2-3)
CASSLDFTDTQYF

SEQ ID NO: 275093 - protein, 16 aa, Homo sapiens
  CDR3 for alpha chain variable domain of TCR clone 137547 (TRAV38-1, TRAJ56)
CAFMKRQTGANSKLTF

SEQ ID NO: 275094 - protein, 15 aa, Homo sapiens
  CDR3 for beta chain variable domain of TCR clone 137547 (TRBV7-3, TRBJ2-2)
CASSETGQGTGELFF

SEQ ID NO: 275095 - protein, 18 aa, Homo sapiens
  CDR3 for alpha chain variable domain of TCR clone 137548 (TRAV13-1, TRAJ52)
CAASKRSAGGTSYGKMTF

SEQ ID NO: 275096 - protein, 13 aa, Homo sapiens
  CDR3 for beta chain variable domain of TCR clone 137548 (TRBV12-4, TRBJ1-2)
CASSVRQGKGYTF

SEQ ID NO: 275097 - protein, 14 aa, Homo sapiens
  CDR3 for alpha chain variable domain of TCR clone 137549 (TRAV1-2, TRAJ16)
CAVNRFSDGQKLLF

SEQ ID NO: 275098 - protein, 14 aa, Homo sapiens
  CDR3 for beta chain variable domain of TCR clone 137549 (TRBV19, TRBJ2-1)
CASPTFVVSGEQFC

SEQ ID NO: 275099 - protein, 13 aa, Homo sapiens
  CDR3 for alpha chain variable domain of TCR clone 137550 (TRAV38-1, TRAJ42)
CARWGGSQGNLIF

SEQ ID NO: 275100 - protein, 17 aa, Homo sapiens
  CDR3 for beta chain variable domain of TCR clone 137550 (TRBV20-1, TRBJ2-1)
CSARDPLAGVWDIEQFF

SEQ ID NO: 275101 - protein, 11 aa, Homo sapiens
  CDR3 for alpha chain variable domain of TCR clone 137551 (TRAV1-2, TRAJ20)
CAVSNDYKLSF

SEQ ID NO: 275102 - protein, 15 aa, Homo sapiens
  CDR3 for beta chain variable domain of TCR clone 137551 (TRBV11-2, TRBJ2-1)
CASSKNRGLIYEQFF

SEQ ID NO: 275103 - protein, 14 aa, Homo sapiens
  CDR3 for alpha chain variable domain of TCR clone 137552 (TRAV1-2, TRAJ8)
CAVREDTGFQKLVF

SEQ ID NO: 275104 - protein, 13 aa, Homo sapiens
  CDR3 for beta chain variable domain of TCR clone 137552 (TRBV7-7, TRBJ2-3)
CASSLSRTDTQYF

SEQ ID NO: 275105 - protein, 18 aa, Homo sapiens
  CDR3 for alpha chain variable domain of TCR clone 137553 (TRAV12-3, TRAJ52)
CAMSVGGAGGTSYGKLTF

SEQ ID NO: 275106 - protein, 16 aa, Homo sapiens
  CDR3 for beta chain variable domain of TCR clone 137553 (TRBV5-1, TRBJ2-2)
CASSLWDTTNTGELFF

SEQ ID NO: 275107 - protein, 14 aa, Homo sapiens
  CDR3 for alpha chain variable domain of TCR clone 137554 (TRAV26-1, TRAJ48)
CIVRVPFGNEILTF

SEQ ID NO: 275108 - protein, 16 aa, Homo sapiens
  CDR3 for beta chain variable domain of TCR clone 137554 (TRBV18, TRBJ2-1)
CASSPYLSIRGDEQFF

SEQ ID NO: 275109 - protein, 11 aa, Homo sapiens
  CDR3 for alpha chain variable domain of TCR clone 137555 (TRAV36/DV7, TRAJ57)
GFPGGSEKLVF

SEQ ID NO: 275110 - protein, 12 aa, Homo sapiens
  CDR3 for beta chain variable domain of TCR clone 137555 (TRBV19, TRBJ2-7)
CASTSGTYEQYF

SEQ ID NO: 275111 - protein, 12 aa, Homo sapiens
  CDR3 for alpha chain variable domain of TCR clone 137556 (TRAV12-2, TRAJ42)
CAGGGSQGNLIV

SEQ ID NO: 275112 - protein, 15 aa, Homo sapiens
  CDR3 for beta chain variable domain of TCR clone 137556 (TRBV9, TRBJ1-6)
CASSVAGTGDSPLHF

SEQ ID NO: 275113 - protein, 14 aa, Homo sapiens
  CDR3 for alpha chain variable domain of TCR clone 137557 (TRAV1-2, TRAJ16)
CAVNRFSEGQKLLF

SEQ ID NO: 275114 - protein, 18 aa, Homo sapiens
  CDR3 for beta chain variable domain of TCR clone 137557 (TRBV20-1, TRBJ2-3)
CSASGLAGGPGTTDTQYF

SEQ ID NO: 275115 - protein, 13 aa, Homo sapiens
  CDR3 for alpha chain variable domain of TCR clone 137558 (TRAV13-2, TRAJ48)
CAEMDFGNEELTF

SEQ ID NO: 275116 - protein, 12 aa, Homo sapiens
  CDR3 for beta chain variable domain of TCR clone 137558 (TRBV5-1, TRBJ1-2)
CASSQDTYGYTF

SEQ ID NO: 275117 - protein, 16 aa, Homo sapiens
  CDR3 for alpha chain variable domain of TCR clone 137559 (TRAV30, TRAJ24)
CGTEIVDADSWVKFQF

SEQ ID NO: 275118 - protein, 15 aa, Homo sapiens
  CDR3 for beta chain variable domain of TCR clone 137559 (TRBV5-1, TRBJ1-1)
CASSLAPRGNTEAFF

SEQ ID NO: 275119 - protein, 17 aa, Homo sapiens
  CDR3 for alpha chain variable domain of TCR clone 137560 (TRAV26-1, TRAJ58)
CIVRVGAEETSGSRVPF

SEQ ID NO: 275120 - protein, 13 aa, Homo sapiens
  CDR3 for beta chain variable domain of TCR clone 137560 (TRBV12-5, TRBJ1-2)
CASGVRTGNGYTF

SEQ ID NO: 275121 - protein, 13 aa, Homo sapiens
  CDR3 for alpha chain variable domain of TCR clone 137561 (TRAV1-2, TRAJ12)
CAVSMESSYKLIF

SEQ ID NO: 275122 - protein, 14 aa, Homo sapiens
  CDR3 for beta chain variable domain of TCR clone 137561 (TRBV7-2, TRBJ2-7)
CASSPKTSFYEQYF

SEQ ID NO: 275123 - protein, 18 aa, Homo sapiens
  CDR3 for alpha chain variable domain of TCR clone 137562 (TRAV13-1, TRAJ52)
CAASKRSAGGTSYGKLTF

SEQ ID NO: 275124 - protein, 14 aa, Homo sapiens
  CDR3 for beta chain variable domain of TCR clone 137562 (TRBV12-5, TRBJ2-5)
CASGSRTHQKTQYF

SEQ ID NO: 275125 - protein, 14 aa, Homo sapiens
  CDR3 for alpha chain variable domain of TCR clone 137563 (TRAV2, TRAJ9)
CAVEDRSGGFKTIF

SEQ ID NO: 275126 - protein, 13 aa, Homo sapiens
  CDR3 for beta chain variable domain of TCR clone 137563 (TRBV7-3, TRBJ1-1)
CASSQDWGAEAFL

SEQ ID NO: 275127 - protein, 12 aa, Homo sapiens
  CDR3 for alpha chain variable domain of TCR clone 137564 (TRAV13-1, TRAJ21)
CAAKEGFNKFYF

SEQ ID NO: 275128 - protein, 18 aa, Homo sapiens
  CDR3 for beta chain variable domain of TCR clone 137564 (TRBV11-2, TRBJ2-3)
CASSVRTSGSKKTDTQYF

SEQ ID NO: 275129 - protein, 12 aa, Homo sapiens
  CDR3 for alpha chain variable domain of TCR clone 137565 (TRAV3, TRAJ20)
CAVRDPDYKLSF

SEQ ID NO: 275130 - protein, 13 aa, Homo sapiens
  CDR3 for beta chain variable domain of TCR clone 137565 (TRBV2, TRBJ1-5)
CATAGPGNQPQHF

SEQ ID NO: 275131 - protein, 14 aa, Homo sapiens
  CDR3 for alpha chain variable domain of TCR clone 137566 (TRAV16, TRAJ48)
CALTPAFGNEKLTF

SEQ ID NO: 275132 - protein, 14 aa, Homo sapiens
  CDR3 for beta chain variable domain of TCR clone 137566 (TRBV7-2, TRBJ2-7)
CASSSISGFSEQYF

SEQ ID NO: 275133 - protein, 12 aa, Homo sapiens
  CDR3 for alpha chain variable domain of TCR clone 137567 (TRAV12-1, TRAJ40)
CVFYSGTYKYIF

SEQ ID NO: 275134 - protein, 13 aa, Homo sapiens
  CDR3 for beta chain variable domain of TCR clone 137567 (TRBV28, TRBJ2-7)
CASKAGGVYEQYF

SEQ ID NO: 275135 - protein, 13 aa, Homo sapiens
  CDR3 for alpha chain variable domain of TCR clone 137568 (TRAV10, TRAJ40)
CVVSALGTYKYIF

SEQ ID NO: 275136 - protein, 13 aa, Homo sapiens
  CDR3 for beta chain variable domain of TCR clone 137568 (TRBV20-1, TRBJ2-3)
CSARLAGTATQYF

SEQ ID NO: 275137 - protein, 18 aa, Homo sapiens
  CDR3 for alpha chain variable domain of TCR clone 137569 (TRAV26-1, TRAJ23)
CIVRVGLEVWKQGGKLIF

SEQ ID NO: 275138 - protein, 15 aa, Homo sapiens
  CDR3 for beta chain variable domain of TCR clone 137569 (TRBV10-3, TRBJ2-3)
CAISDWDRDTDTQYF

SEQ ID NO: 275139 - protein, 16 aa, Homo sapiens
  CDR3 for alpha chain variable domain of TCR clone 137570 (TRAV30, TRAJ24)
CGTEIVDADSWGKCQF

SEQ ID NO: 275140 - protein, 15 aa, Homo sapiens
  CDR3 for beta chain variable domain of TCR clone 137570 (TRBV7-9, TRBJ1-5)
CASSQGHQPNQPQHF

SEQ ID NO: 275141 - protein, 14 aa, Homo sapiens
  CDR3 for alpha chain variable domain of TCR clone 137571 (TRAV17, TRAJ45)
CATASGGGADGLTF

SEQ ID NO: 275142 - protein, 16 aa, Homo sapiens
  CDR3 for beta chain variable domain of TCR clone 137571 (TRBV12-4, TRBJ1-5)
CASSSGPRGSNQPQHF

SEQ ID NO: 275143 - protein, 15 aa, Homo sapiens
  CDR3 for alpha chain variable domain of TCR clone 137572 (TRAV26-1, TRAJ29)
CIVRVEGSGNTPLVF

SEQ ID NO: 275144 - protein, 14 aa, Homo sapiens
  CDR3 for beta chain variable domain of TCR clone 137572 (TRBV25-1, TRBJ1-1)
CASTRLGGNTEDFF

SEQ ID NO: 275145 - protein, 16 aa, Homo sapiens
  CDR3 for alpha chain variable domain of TCR clone 137573 (TRAV12-2, TRAJ5)
CAVTRGSGPGRRALTF

SEQ ID NO: 275146 - protein, 15 aa, Homo sapiens
  CDR3 for beta chain variable domain of TCR clone 137573 (TRBV9, TRBJ2-1)
CASSVGTGELNEQFF

SEQ ID NO: 275147 - protein, 16 aa, Homo sapiens
  CDR3 for alpha chain variable domain of TCR clone 137574 (TRAV30, TRAJ24)
CGTEIVDADSWGKFQF

SEQ ID NO: 275148 - protein, 16 aa, Homo sapiens
  CDR3 for beta chain variable domain of TCR clone 137574 (TRBV27, TRBJ2-5)
CASSLSRTAGGETQYF

SEQ ID NO: 275149 - protein, 22 aa, Homo sapiens
  CDR3 for alpha chain variable domain of TCR clone 137575 (TRAV12-2, TRAJ32)
CSSETPSPVIQPPKSATNKLIC

SEQ ID NO: 275150 - protein, 14 aa, Homo sapiens
  CDR3 for beta chain variable domain of TCR clone 137575 (TRBV7-3, TRBJ2-1)
CASSLSGSYNEQFF

SEQ ID NO: 275151 - protein, 12 aa, Homo sapiens
  CDR3 for alpha chain variable domain of TCR clone 137576 (TRAV27, TRAJ41)
CAGRNSGYALNF

SEQ ID NO: 275152 - protein, 15 aa, Homo sapiens
  CDR3 for beta chain variable domain of TCR clone 137576 (TRBV20-1, TRBJ1-5)
CSATSDRGLGQPEHF

SEQ ID NO: 275153 - protein, 12 aa, Homo sapiens
  CDR3 for alpha chain variable domain of TCR clone 137577 (TRAV29/DV5, TRAJ49)
CAATDTGNQFYF

SEQ ID NO: 275154 - protein, 19 aa, Homo sapiens
  CDR3 for beta chain variable domain of TCR clone 137577 (TRBV25-1, TRBJ2-2)
CAILVYRVDRGRKAGELFF

SEQ ID NO: 275155 - protein, 13 aa, Homo sapiens
  CDR3 for alpha chain variable domain of TCR clone 137578 (TRAV21, TRAJ27)
CAARPGNAGKSTF

SEQ ID NO: 275156 - protein, 13 aa, Homo sapiens
  CDR3 for beta chain variable domain of TCR clone 137578 (TRBV27, TRBJ2-1)
CASRTLGVGEQFC

SEQ ID NO: 275157 - protein, 15 aa, Homo sapiens
  CDR3 for alpha chain variable domain of TCR clone 137579 (TRAV21, TRAJ53)
CATLNSGGSNYKLTF

SEQ ID NO: 275158 - protein, 14 aa, Homo sapiens
  CDR3 for beta chain variable domain of TCR clone 137579 (TRBV15, TRBJ1-2)
CATSGASVNYGYTF

SEQ ID NO: 275159 - protein, 17 aa, Homo sapiens
  CDR3 for alpha chain variable domain of TCR clone 137580 (TRAV3, TRAJ6)
CAVRDGPRAGGSYRPTF

SEQ ID NO: 275160 - protein, 14 aa, Homo sapiens
  CDR3 for beta chain variable domain of TCR clone 137580 (TRBV7-2, TRBJ2-7)
CASSPKTSFYEQYF

SEQ ID NO: 275161 - protein, 12 aa, Homo sapiens
  CDR3 for alpha chain variable domain of TCR clone 137581 (TRAV9-2, TRAJ36)
CALKKGANNLFF

SEQ ID NO: 275162 - protein, 15 aa, Homo sapiens
  CDR3 for beta chain variable domain of TCR clone 137581 (TRBV11-3, TRBJ2-1)
CASSPGDREGNEQFF

SEQ ID NO: 275163 - protein, 21 aa, Homo sapiens
  CDR3 for alpha chain variable domain of TCR clone 137582 (TRAV12-1, TRAJ32)
SSVIQPPTSMNYCGATNKLIF

SEQ ID NO: 275164 - protein, 15 aa, Homo sapiens
  CDR3 for beta chain variable domain of TCR clone 137582 (TRBV7-9, TRBJ2-2)
CASGPLDTFPGELFF

SEQ ID NO: 275165 - protein, 15 aa, Homo sapiens
  CDR3 for alpha chain variable domain of TCR clone 137583 (TRAV3, TRAJ3)
CAVRDGHSSASKIIV

SEQ ID NO: 275166 - protein, 17 aa, Homo sapiens
  CDR3 for beta chain variable domain of TCR clone 137583 (TRBV25-1, TRBJ2-7)
CASSDARVVFSSYEQYF

SEQ ID NO: 275167 - protein, 13 aa, Homo sapiens
  CDR3 for alpha chain variable domain of TCR clone 137584 (TRAV17, TRAJ22)
CAHHSGSARQLPF

SEQ ID NO: 275168 - protein, 14 aa, Homo sapiens
  CDR3 for beta chain variable domain of TCR clone 137584 (TRBV16, TRBJ1-1)
CASSQAGPNTEAFF

SEQ ID NO: 275169 - protein, 14 aa, Homo sapiens
  CDR3 for alpha chain variable domain of TCR clone 137585 (TRAV38-1, TRAJ27)
CAFIHNTNAGKSTF

SEQ ID NO: 275170 - protein, 14 aa, Homo sapiens
  CDR3 for beta chain variable domain of TCR clone 137585 (TRBV7-2, TRBJ2-5)
CASSLSGGGETQYF

SEQ ID NO: 275171 - protein, 12 aa, Homo sapiens
  CDR3 for alpha chain variable domain of TCR clone 137586 (TRAV13-1, TRAJ27)
CAAHTNAGKSTF

SEQ ID NO: 275172 - protein, 13 aa, Homo sapiens
  CDR3 for beta chain variable domain of TCR clone 137586 (TRBV29-1, TRBJ1-1)
CSVGDSRNTEAFF

SEQ ID NO: 275173 - protein, 11 aa, Homo sapiens
  CDR3 for alpha chain variable domain of TCR clone 137587 (TRAV13-1, TRAJ15)
CAATPGTALTF

SEQ ID NO: 275174 - protein, 13 aa, Homo sapiens
  CDR3 for beta chain variable domain of TCR clone 137587 (TRBV7-3, TRBJ1-1)
CASSQDWGAEAFF

SEQ ID NO: 275175 - protein, 17 aa, Homo sapiens
  CDR3 for alpha chain variable domain of TCR clone 137588 (TRAV21, TRAJ52)
CLRPSPAGGTSYGKLTF

SEQ ID NO: 275176 - protein, 17 aa, Homo sapiens
  CDR3 for beta chain variable domain of TCR clone 137588 (TRBV13, TRBJ2-3)
CASSLSRVAGGRNTQYF

SEQ ID NO: 275177 - protein, 17 aa, Homo sapiens
  CDR3 for alpha chain variable domain of TCR clone 137589 (TRAV26-1, TRAJ37)
CIVRVITVSSNTGKLIF

SEQ ID NO: 275178 - protein, 16 aa, Homo sapiens
  CDR3 for beta chain variable domain of TCR clone 137589 (TRBV12-5, TRBJ2-5)
CASGPRTSGNQETQYF

SEQ ID NO: 275179 - protein, 14 aa, Homo sapiens
  CDR3 for alpha chain variable domain of TCR clone 137590 (TRAV35, TRAJ13)
CAGSPSGGYQKVTF

SEQ ID NO: 275180 - protein, 15 aa, Homo sapiens
  CDR3 for beta chain variable domain of TCR clone 137590 (TRBV6-3, TRBJ2-7)
CASSSPGTVFYEQYF

SEQ ID NO: 275181 - protein, 19 aa, Homo sapiens
  CDR3 for alpha chain variable domain of TCR clone 137591 (TRAV29/DV5, TRAJ49)
CSVLLCSKLTVDTGNQFNF

SEQ ID NO: 275182 - protein, 17 aa, Homo sapiens
  CDR3 for beta chain variable domain of TCR clone 137591 (TRBV13, TRBJ2-3)
CASSLSRVAGGRNTQYF

SEQ ID NO: 275183 - protein, 11 aa, Homo sapiens
  CDR3 for alpha chain variable domain of TCR clone 137592 (TRAV3, TRAJ31)
CVVRPDARLMF

SEQ ID NO: 275184 - protein, 15 aa, Homo sapiens
  CDR3 for beta chain variable domain of TCR clone 137592 (TRBV19, TRBJ1-2)
CASSVGQVLNYGYTF

SEQ ID NO: 275185 - protein, 15 aa, Homo sapiens
  CDR3 for alpha chain variable domain of TCR clone 137593 (TRAV27, TRAJ24)
CAGSMTTDSWGKSKF

SEQ ID NO: 275186 - protein, 15 aa, Homo sapiens
  CDR3 for beta chain variable domain of TCR clone 137593 (TRBV6-6, TRBJ1-5)
CASSSPRGQGQPQHF

SEQ ID NO: 275187 - protein, 18 aa, Homo sapiens
  CDR3 for alpha chain variable domain of TCR clone 137594 (TRAV13-1, TRAJ52)
CAAKNPNAGGTRYGKLTF

SEQ ID NO: 275188 - protein, 18 aa, Homo sapiens
  CDR3 for beta chain variable domain of TCR clone 137594 (TRBV4-1, TRBJ1-4)
CASSPRTGGAWTNEKLFF

SEQ ID NO: 275189 - protein, 15 aa, Homo sapiens
  CDR3 for alpha chain variable domain of TCR clone 137595 (TRAV21, TRAJ53)
CATLNSGGSNYKLTF

SEQ ID NO: 275190 - protein, 14 aa, Homo sapiens
  CDR3 for beta chain variable domain of TCR clone 137595 (TRBV19, TRBJ2-1)
CASSLAGTYNEQFF

SEQ ID NO: 275191 - protein, 14 aa, Homo sapiens
  CDR3 for alpha chain variable domain of TCR clone 137596 (TRAV12-3, TRAJ9)
CAMSPNTGGFKTIF

SEQ ID NO: 275192 - protein, 13 aa, Homo sapiens
  CDR3 for beta chain variable domain of TCR clone 137596 (TRBV20-1, TRBJ1-1)
CSARGGGNTEAFF

SEQ ID NO: 275193 - protein, 19 aa, Homo sapiens
  CDR3 for alpha chain variable domain of TCR clone 137597 (TRAV8-3, TRAJ8)
LSTSVLWDPMKTGFQKLVF

SEQ ID NO: 275194 - protein, 13 aa, Homo sapiens
  CDR3 for beta chain variable domain of TCR clone 137597 (TRBV10-2, TRBJ2-3)
CASSESGDHTQYF

SEQ ID NO: 275195 - protein, 15 aa, Homo sapiens
  CDR3 for alpha chain variable domain of TCR clone 137598 (TRAV13-1, TRAJ43)
CAATPELGGNNDMRF

SEQ ID NO: 275196 - protein, 15 aa, Homo sapiens
  CDR3 for beta chain variable domain of TCR clone 137598 (TRBV5-1, TRBJ2-1)
CASSPPRAPYNEQFF

SEQ ID NO: 275197 - protein, 11 aa, Homo sapiens
  CDR3 for alpha chain variable domain of TCR clone 137599 (TRAV8-4, TRAJ20)
CAGTNVLTTTS

SEQ ID NO: 275198 - protein, 13 aa, Homo sapiens
  CDR3 for beta chain variable domain of TCR clone 137599 (TRBV19, TRBJ2-3)
CATWDKITDTQYF

SEQ ID NO: 275199 - protein, 11 aa, Homo sapiens
  CDR3 for alpha chain variable domain of TCR clone 137600 (TRAV4, TRAJ23)
CLVAPGGKLIF

SEQ ID NO: 275200 - protein, 16 aa, Homo sapiens
  CDR3 for beta chain variable domain of TCR clone 137600 (TRBV4-3, TRBJ2-2)
CASSHLQGSGTGELFF

SEQ ID NO: 275201 - protein, 10 aa, Homo sapiens
  CDR3 for alpha chain variable domain of TCR clone 137601 (TRAV23/DV6, TRAJ57)
CAASSTLSQG

SEQ ID NO: 275202 - protein, 15 aa, Homo sapiens
  CDR3 for beta chain variable domain of TCR clone 137601 (TRBV7-2, TRBJ2-1)
CASSSGLAGGNEQFF

SEQ ID NO: 275203 - protein, 16 aa, Homo sapiens
  CDR3 for alpha chain variable domain of TCR clone 137602 (TRAV30, TRAJ24)
CGTEVVDAYSWGKFQF

SEQ ID NO: 275204 - protein, 14 aa, Homo sapiens
  CDR3 for beta chain variable domain of TCR clone 137602 (TRBV12-5, TRBJ2-5)
CASGSRTHQETQYF

SEQ ID NO: 275205 - protein, 11 aa, Homo sapiens
  CDR3 for alpha chain variable domain of TCR clone 137603 (TRAV26-1, TRAJ37)
CIVRVGRKLIF

SEQ ID NO: 275206 - protein, 13 aa, Homo sapiens
  CDR3 for beta chain variable domain of TCR clone 137603 (TRBV15, TRBJ1-6)
CATSGGLNSPLHF

SEQ ID NO: 275207 - protein, 13 aa, Homo sapiens
  CDR3 for alpha chain variable domain of TCR clone 137604 (TRAV23/DV6, TRAJ36)
CAASQTGANKLFF

SEQ ID NO: 275208 - protein, 13 aa, Homo sapiens
  CDR3 for beta chain variable domain of TCR clone 137604 (TRBV5-4, TRBJ1-5)
CASSLGGDQPQHF

SEQ ID NO: 275209 - protein, 12 aa, Homo sapiens
  CDR3 for alpha chain variable domain of TCR clone 137605 (TRAV12-3, TRAJ42)
CAPGGSQGNHIF

SEQ ID NO: 275210 - protein, 13 aa, Homo sapiens
  CDR3 for beta chain variable domain of TCR clone 137605 (TRBV5-7, TRBJ2-6)
CASTSSGANVLTF

SEQ ID NO: 275211 - protein, 15 aa, Homo sapiens
  CDR3 for alpha chain variable domain of TCR clone 137606 (TRAV3, TRAJ47)
CAVRDIGEYGNKLVF

SEQ ID NO: 275212 - protein, 15 aa, Homo sapiens
  CDR3 for beta chain variable domain of TCR clone 137606 (TRBV11-2, TRBJ2-5)
CASSPSTGGYETQYF

SEQ ID NO: 275213 - protein, 13 aa, Homo sapiens
  CDR3 for alpha chain variable domain of TCR clone 137607 (TRAV26-1, TRAJ34)
CIVRPSITDKLIF

SEQ ID NO: 275214 - protein, 13 aa, Homo sapiens
  CDR3 for beta chain variable domain of TCR clone 137607 (TRBV5-1, TRBJ2-1)
CASSLGSYNEQFF

SEQ ID NO: 275215 - protein, 13 aa, Homo sapiens
  CDR3 for alpha chain variable domain of TCR clone 137608 (TRAV1-2, TRAJ13)
CAVNSGGYQKVNF

SEQ ID NO: 275216 - protein, 14 aa, Homo sapiens
  CDR3 for beta chain variable domain of TCR clone 137608 (TRBV4-1, TRBJ1-5)
CASSPKGDNQPQHF

SEQ ID NO: 275217 - protein, 12 aa, Homo sapiens
  CDR3 for alpha chain variable domain of TCR clone 137609 (TRAV8-3, TRAJ26)
CAGDNYVQNFVF

SEQ ID NO: 275218 - protein, 12 aa, Homo sapiens
  CDR3 for beta chain variable domain of TCR clone 137609 (TRBV11-2, TRBJ2-2)
CASSLGGGELFF

SEQ ID NO: 275219 - protein, 15 aa, Homo sapiens
  CDR3 for alpha chain variable domain of TCR clone 137610 (TRAV38-1, TRAJ37)
CAFIHGSGYTGKLIF

SEQ ID NO: 275220 - protein, 12 aa, Homo sapiens
  CDR3 for beta chain variable domain of TCR clone 137610 (TRBV7-9, TRBJ2-7)
CASSFGSYEQYF

SEQ ID NO: 275221 - protein, 15 aa, Homo sapiens
  CDR3 for alpha chain variable domain of TCR clone 137611 (TRAV3, TRAJ5)
CAVRDLDTVRSALTF

SEQ ID NO: 275222 - protein, 13 aa, Homo sapiens
  CDR3 for beta chain variable domain of TCR clone 137611 (TRBV12-4, TRBJ2-7)
CASSPTETYEQYF

SEQ ID NO: 275223 - protein, 17 aa, Homo sapiens
  CDR3 for alpha chain variable domain of TCR clone 137612 (TRAV8-6, TRAJ58)
CAVSSWVGATSGSRLTF

SEQ ID NO: 275224 - protein, 14 aa, Homo sapiens
  CDR3 for beta chain variable domain of TCR clone 137612 (TRBV20-1, TRBJ2-1)
CSAQIGGSANEQFF

SEQ ID NO: 275225 - protein, 13 aa, Homo sapiens
  CDR3 for alpha chain variable domain of TCR clone 137613 (TRAV3, TRAJ21)
CAVRELDFNKFYF

SEQ ID NO: 275226 - protein, 18 aa, Homo sapiens
  CDR3 for beta chain variable domain of TCR clone 137613 (TRBV11-2, TRBJ2-3)
CASSLGGASRGAPNTQYF

SEQ ID NO: 275227 - protein, 15 aa, Homo sapiens
  CDR3 for alpha chain variable domain of TCR clone 137614 (TRAV8-4, TRAJ37)
CAVTYGSSNTGKLIF

SEQ ID NO: 275228 - protein, 19 aa, Homo sapiens
  CDR3 for beta chain variable domain of TCR clone 137614 (TRBV25-1, TRBJ2-2)
CAILVYRVDRGRKTGELFF

SEQ ID NO: 275229 - protein, 16 aa, Homo sapiens
  CDR3 for alpha chain variable domain of TCR clone 137615 (TRAV1-2, TRAJ10)
CAVRGVLTGGGNKLTF

SEQ ID NO: 275230 - protein, 14 aa, Homo sapiens
  CDR3 for beta chain variable domain of TCR clone 137615 (TRBV28, TRBJ2-1)
CASSSRPGNNEQFF

SEQ ID NO: 275231 - protein, 16 aa, Homo sapiens
  CDR3 for alpha chain variable domain of TCR clone 137616 (TRAV26-1, TRAJ23)
CIVRPHGNNQGGKLIF

SEQ ID NO: 275232 - protein, 16 aa, Homo sapiens
  CDR3 for beta chain variable domain of TCR clone 137616 (TRBV5-4, TRBJ2-7)
CQQLRSEPRSSDEQYF

SEQ ID NO: 275233 - protein, 13 aa, Homo sapiens
  CDR3 for alpha chain variable domain of TCR clone 137617 (TRAV8-4, TRAJ10)
CAAFTGGGNKFTF

SEQ ID NO: 275234 - protein, 16 aa, Homo sapiens
  CDR3 for beta chain variable domain of TCR clone 137617 (TRBV25-1, TRBJ1-1)
CASSGDRDRGRIEAFF

SEQ ID NO: 275235 - protein, 14 aa, Homo sapiens
  CDR3 for alpha chain variable domain of TCR clone 137618 (TRAV20, TRAJ22)
FAVQVSGSARQLTF

SEQ ID NO: 275236 - protein, 13 aa, Homo sapiens
  CDR3 for beta chain variable domain of TCR clone 137618 (TRBV20-1, TRBJ2-5)
CSAREGGKETQYF

SEQ ID NO: 275237 - protein, 16 aa, Homo sapiens
  CDR3 for alpha chain variable domain of TCR clone 137619 (TRAV16, TRAJ42)
CARKMNYVGSQGNLIF

SEQ ID NO: 275238 - protein, 13 aa, Homo sapiens
  CDR3 for beta chain variable domain of TCR clone 137619 (TRBV20-1, TRBJ2-7)
CSASPPSSYEQYF

SEQ ID NO: 275239 - protein, 14 aa, Homo sapiens
  CDR3 for alpha chain variable domain of TCR clone 137620 (TRAV1-2, TRAJ8)
CAFREDTGFQKLVF

SEQ ID NO: 275240 - protein, 14 aa, Homo sapiens
  CDR3 for beta chain variable domain of TCR clone 137620 (TRBV15, TRBJ2-7)
CATSRVARGYEQYF

SEQ ID NO: 275241 - protein, 15 aa, Homo sapiens
  CDR3 for alpha chain variable domain of TCR clone 137621 (TRAV16, TRAJ4)
CALEDPSGGYNKLIF

SEQ ID NO: 275242 - protein, 12 aa, Homo sapiens
  CDR3 for beta chain variable domain of TCR clone 137621 (TRBV7-3, TRBJ2-7)
CQQPSRGYEQYF

SEQ ID NO: 275243 - protein, 14 aa, Homo sapiens
  CDR3 for alpha chain variable domain of TCR clone 137622 (TRAV3, TRAJ36)
CAVRDGTGANNLFF

SEQ ID NO: 275244 - protein, 17 aa, Homo sapiens
  CDR3 for beta chain variable domain of TCR clone 137622 (TRBV7-3, TRBJ2-3)
CASSLMKRMRGADTQYF

SEQ ID NO: 275245 - protein, 11 aa, Homo sapiens
  CDR3 for alpha chain variable domain of TCR clone 137623 (TRAV21, TRAJ34)
CAVTNTDKLIF

SEQ ID NO: 275246 - protein, 16 aa, Homo sapiens
  CDR3 for beta chain variable domain of TCR clone 137623 (TRBV6-1, TRBJ2-5)
CASSETLDRGAETQYV

SEQ ID NO: 275247 - protein, 14 aa, Homo sapiens
  CDR3 for alpha chain variable domain of TCR clone 137624 (TRAV1-2, TRAJ8)
CAVREDTGCQKLVF

SEQ ID NO: 275248 - protein, 14 aa, Homo sapiens
  CDR3 for beta chain variable domain of TCR clone 137624 (TRBV11-2, TRBJ2-3)
CASSRLARTDTQYF

SEQ ID NO: 275249 - protein, 14 aa, Homo sapiens
  CDR3 for alpha chain variable domain of TCR clone 137625 (TRAV8-1, TRAJ15)
CAVNGQQAGTALIF

SEQ ID NO: 275250 - protein, 16 aa, Homo sapiens
  CDR3 for beta chain variable domain of TCR clone 137625 (TRBV7-2, TRBJ1-5)
CASSPWGPEGNQPQHF

SEQ ID NO: 275251 - protein, 14 aa, Homo sapiens
  CDR3 for alpha chain variable domain of TCR clone 137626 (TRAV1-2, TRAJ13)
CAVLNSGGYQKVTF

SEQ ID NO: 275252 - protein, 15 aa, Homo sapiens
  CDR3 for beta chain variable domain of TCR clone 137626 (TRBV20-1, TRBJ2-7)
CSARDRVSGMDEQYF

SEQ ID NO: 275253 - protein, 14 aa, Homo sapiens
  CDR3 for alpha chain variable domain of TCR clone 137627 (TRAV13-1, TRAJ35)
CAASKGGFGNVLHC

SEQ ID NO: 275254 - protein, 15 aa, Homo sapiens
  CDR3 for beta chain variable domain of TCR clone 137627 (TRBV19, TRBJ1-5)
CASSIVWADNQPQHF

SEQ ID NO: 275255 - protein, 12 aa, Homo sapiens
  CDR3 for alpha chain variable domain of TCR clone 137628 (TRAV12-1, TRAJ40)
CVVYSGTYKYIF

SEQ ID NO: 275256 - protein, 12 aa, Homo sapiens
  CDR3 for beta chain variable domain of TCR clone 137628 (TRBV5-1, TRBJ2-7)
CASSLDSYEQYF

SEQ ID NO: 275257 - protein, 14 aa, Homo sapiens
  CDR3 for alpha chain variable domain of TCR clone 137629 (TRAV12-2, TRAJ20)
CAVNVGGNDYKLSF

SEQ ID NO: 275258 - protein, 13 aa, Homo sapiens
  CDR3 for beta chain variable domain of TCR clone 137629 (TRBV10-3, TRBJ1-2)
CAISERDSYGYTF

SEQ ID NO: 275259 - protein, 11 aa, Homo sapiens
  CDR3 for alpha chain variable domain of TCR clone 137630 (TRAV12-1, TRAJ21)
CVVYNFNKFYF

SEQ ID NO: 275260 - protein, 12 aa, Homo sapiens
  CDR3 for beta chain variable domain of TCR clone 137630 (TRBV6-3, TRBJ2-7)
CASSRQGYEQYF

SEQ ID NO: 275261 - protein, 14 aa, Homo sapiens
  CDR3 for alpha chain variable domain of TCR clone 137631 (TRAV1-1, TRAJ27)
CAVIYHTNAGKSTF

SEQ ID NO: 275262 - protein, 15 aa, Homo sapiens
  CDR3 for beta chain variable domain of TCR clone 137631 (TRBV6-3, TRBJ2-7)
CASSSPGTVFYEQYF

SEQ ID NO: 275263 - protein, 12 aa, Homo sapiens
  CDR3 for alpha chain variable domain of TCR clone 137632 (TRAV2, TRAJ31)
CAVEDNNARLMF

SEQ ID NO: 275264 - protein, 12 aa, Homo sapiens
  CDR3 for beta chain variable domain of TCR clone 137632 (TRBV7-9, TRBJ2-7)
CASSIKREEQYF

SEQ ID NO: 275265 - protein, 13 aa, Homo sapiens
  CDR3 for alpha chain variable domain of TCR clone 137633 (TRAV12-3, TRAJ13)
CAMSSGGDQKVTF

SEQ ID NO: 275266 - protein, 14 aa, Homo sapiens
  CDR3 for beta chain variable domain of TCR clone 137633 (TRBV2, TRBJ2-1)
CASRTGSSYNEQFF

SEQ ID NO: 275267 - protein, 14 aa, Homo sapiens
  CDR3 for alpha chain variable domain of TCR clone 137634 (TRAV1-2, TRAJ8)
CAVREDTGVQKLVF

SEQ ID NO: 275268 - protein, 15 aa, Homo sapiens
  CDR3 for beta chain variable domain of TCR clone 137634 (TRBV12-4, TRBJ2-5)
CASSPPTGLQETQYF

SEQ ID NO: 275269 - protein, 15 aa, Homo sapiens
  CDR3 for alpha chain variable domain of TCR clone 137635 (TRAV26-1, TRAJ40)
CIVRVTTSGTYKYIF

SEQ ID NO: 275270 - protein, 15 aa, Homo sapiens
  CDR3 for beta chain variable domain of TCR clone 137635 (TRBV27, TRBJ2-1)
CASSNGGGSSNEQFF

SEQ ID NO: 275271 - protein, 16 aa, Homo sapiens
  CDR3 for alpha chain variable domain of TCR clone 137636 (TRAV3, TRAJ37)
CAVRVRGSGNTGKLIF

SEQ ID NO: 275272 - protein, 11 aa, Homo sapiens
  CDR3 for beta chain variable domain of TCR clone 137636 (TRBV11-2, TRBJ2-2)
CASSLHGALFF

SEQ ID NO: 275273 - protein, 15 aa, Homo sapiens
  CDR3 for alpha chain variable domain of TCR clone 137637 (TRAV29/DV5, TRAJ53)
CAASASGGSNYKLTF

SEQ ID NO: 275274 - protein, 15 aa, Homo sapiens
  CDR3 for beta chain variable domain of TCR clone 137637 (TRBV9, TRBJ1-6)
CASSVAGTGDSPLHF

SEQ ID NO: 275275 - protein, 12 aa, Homo sapiens
  CDR3 for alpha chain variable domain of TCR clone 137638 (TRAV12-3, TRAJ17)
CAMTLTGNKLTF

SEQ ID NO: 275276 - protein, 14 aa, Homo sapiens
  CDR3 for beta chain variable domain of TCR clone 137638 (TRBV2, TRBJ2-2)
CASSLFGGNGELFF

SEQ ID NO: 275277 - protein, 15 aa, Homo sapiens
  CDR3 for alpha chain variable domain of TCR clone 137639 (TRAV13-1, TRAJ43)
CAATPELGGNNDMRF

SEQ ID NO: 275278 - protein, 15 aa, Homo sapiens
  CDR3 for beta chain variable domain of TCR clone 137639 (TRBV10-2, TRBJ2-6)
CASCEQGTGANVLTF

SEQ ID NO: 275279 - protein, 13 aa, Homo sapiens
  CDR3 for alpha chain variable domain of TCR clone 137640 (TRAV12-2, TRAJ4)
CAVFFGGYNKLIF

SEQ ID NO: 275280 - protein, 13 aa, Homo sapiens
  CDR3 for beta chain variable domain of TCR clone 137640 (TRBV12-5, TRBJ2-3)
CASGDRQSDTQYF

SEQ ID NO: 275281 - protein, 14 aa, Homo sapiens
  CDR3 for alpha chain variable domain of TCR clone 137641 (TRAV3, TRAJ21)
CAVESQANFNKFYF

SEQ ID NO: 275282 - protein, 14 aa, Homo sapiens
  CDR3 for beta chain variable domain of TCR clone 137641 (TRBV5-4, TRBJ1-1)
CASSLDSRRDEAFF

SEQ ID NO: 275283 - protein, 13 aa, Homo sapiens
  CDR3 for alpha chain variable domain of TCR clone 137642 (TRAV23/DV6, TRAJ22)
CAPYSGSARQLTF

SEQ ID NO: 275284 - protein, 13 aa, Homo sapiens
  CDR3 for beta chain variable domain of TCR clone 137642 (TRBV29-1, TRBJ2-2)
CSTTGVNAGELFF

SEQ ID NO: 275285 - protein, 14 aa, Homo sapiens
  CDR3 for alpha chain variable domain of TCR clone 137643 (TRAV1-2, TRAJ8)
CAVREDTGFQKLVF

SEQ ID NO: 275286 - protein, 14 aa, Homo sapiens
  CDR3 for beta chain variable domain of TCR clone 137643 (TRBV7-6, TRBJ2-3)
CASILGTVTDTQYF

SEQ ID NO: 275287 - protein, 15 aa, Homo sapiens
  CDR3 for alpha chain variable domain of TCR clone 137644 (TRAV3, TRAJ5)
CALRDLYTGRRALTF

SEQ ID NO: 275288 - protein, 16 aa, Homo sapiens
  CDR3 for beta chain variable domain of TCR clone 137644 (TRBV20-1, TRBJ1-4)
CSAPGQGLLTNEKLFF

SEQ ID NO: 275289 - protein, 14 aa, Homo sapiens
  CDR3 for alpha chain variable domain of TCR clone 137645 (TRAV1-2, TRAJ8)
CAVREDTGFQKLVF

SEQ ID NO: 275290 - protein, 15 aa, Homo sapiens
  CDR3 for beta chain variable domain of TCR clone 137645 (TRBV10-2, TRBJ2-6)
CASSEQGTGAIVLTF

SEQ ID NO: 275291 - protein, 12 aa, Homo sapiens
  CDR3 for alpha chain variable domain of TCR clone 137646 (TRAV13-1, TRAJ21)
CAAKEGFNKFYF

SEQ ID NO: 275292 - protein, 13 aa, Homo sapiens
  CDR3 for beta chain variable domain of TCR clone 137646 (TRBV15, TRBJ1-1)
CATSRGIQARAFF

SEQ ID NO: 275293 - protein, 15 aa, Homo sapiens
  CDR3 for alpha chain variable domain of TCR clone 137647 (TRAV27, TRAJ38)
CAARRNAGNNRKLIW

SEQ ID NO: 275294 - protein, 15 aa, Homo sapiens
  CDR3 for beta chain variable domain of TCR clone 137647 (TRBV5-1, TRBJ2-1)
CASSPPRAPYNEQYF

SEQ ID NO: 275295 - protein, 14 aa, Homo sapiens
  CDR3 for alpha chain variable domain of TCR clone 137648 (TRAV30, TRAJ33)
CGTVAPRSNYQLIW

SEQ ID NO: 275296 - protein, 16 aa, Homo sapiens
  CDR3 for beta chain variable domain of TCR clone 137648 (TRBV20-1, TRBJ1-4)
CSARPYGGELNEKLFF

SEQ ID NO: 275297 - protein, 13 aa, Homo sapiens
  CDR3 for alpha chain variable domain of TCR clone 137649 (TRAV12-1, TRAJ9)
CVVLNTGGFKTIF

SEQ ID NO: 275298 - protein, 14 aa, Homo sapiens
  CDR3 for beta chain variable domain of TCR clone 137649 (TRBV12-5, TRBJ2-5)
CASGSRTHQGTQYF

SEQ ID NO: 275299 - protein, 15 aa, Homo sapiens
  CDR3 for alpha chain variable domain of TCR clone 137650 (TRAV12-3, TRAJ10)
CASYILTGGGNKLTF

SEQ ID NO: 275300 - protein, 22 aa, Homo sapiens
  CDR3 for beta chain variable domain of TCR clone 137650 (TRBV11-2, TRBJ1-4)
CASSLDITRRGIPRKDNEKLFF

SEQ ID NO: 275301 - protein, 12 aa, Homo sapiens
  CDR3 for alpha chain variable domain of TCR clone 137651 (TRAV1-2, TRAJ33)
CAALDSNYQLIW

SEQ ID NO: 275302 - protein, 17 aa, Homo sapiens
  CDR3 for beta chain variable domain of TCR clone 137651 (TRBV28, TRBJ2-5)
CASSTPEGDALQETQCF

SEQ ID NO: 275303 - protein, 12 aa, Homo sapiens
  CDR3 for alpha chain variable domain of TCR clone 137652 (TRAV13-1, TRAJ21)
CAAKEGFNKFYF

SEQ ID NO: 275304 - protein, 14 aa, Homo sapiens
  CDR3 for beta chain variable domain of TCR clone 137652 (TRBV5-4, TRBJ1-1)
CASSMDSRRDEAFV

SEQ ID NO: 275305 - protein, 11 aa, Homo sapiens
  CDR3 for alpha chain variable domain of TCR clone 137653 (TRAV3, TRAJ21)
CAVGNFNNFYF

SEQ ID NO: 275306 - protein, 14 aa, Homo sapiens
  CDR3 for beta chain variable domain of TCR clone 137653 (TRBV20-1, TRBJ2-2)
CSAPGTANTGELFF

SEQ ID NO: 275307 - protein, 11 aa, Homo sapiens
  CDR3 for alpha chain variable domain of TCR clone 137654 (TRAV8-1, TRAJ8)
CAMTGFQKLVF

SEQ ID NO: 275308 - protein, 14 aa, Homo sapiens
  CDR3 for beta chain variable domain of TCR clone 137654 (TRBV5-4, TRBJ1-2)
CASTRQTDNYGYTL

SEQ ID NO: 275309 - protein, 15 aa, Homo sapiens
  CDR3 for alpha chain variable domain of TCR clone 137655 (TRAV12-1, TRAJ45)
CVVLSGGGGADGLTF

SEQ ID NO: 275310 - protein, 12 aa, Homo sapiens
  CDR3 for beta chain variable domain of TCR clone 137655 (TRBV12-5, TRBJ2-5)
CASGQGVGTQYF

SEQ ID NO: 275311 - protein, 12 aa, Homo sapiens
  CDR3 for alpha chain variable domain of TCR clone 137656 (TRAV16, TRAJ29)
CSLSLGNTPLVF

SEQ ID NO: 275312 - protein, 14 aa, Homo sapiens
  CDR3 for beta chain variable domain of TCR clone 137656 (TRBV7-2, TRBJ2-1)
CASSLAGSWYEQFF

SEQ ID NO: 275313 - protein, 13 aa, Homo sapiens
  CDR3 for alpha chain variable domain of TCR clone 137657 (TRAV35, TRAJ48)
CAGHEFGNKKLTF

SEQ ID NO: 275314 - protein, 15 aa, Homo sapiens
  CDR3 for beta chain variable domain of TCR clone 137657 (TRBV27, TRBJ2-7)
CASSPQREGQREQYF

SEQ ID NO: 275315 - protein, 15 aa, Homo sapiens
  CDR3 for alpha chain variable domain of TCR clone 137658 (TRAV20, TRAJ53)
CAVQASGGSNYKLTF

SEQ ID NO: 275316 - protein, 15 aa, Homo sapiens
  CDR3 for beta chain variable domain of TCR clone 137658 (TRBV9, TRBJ2-1)
CASSLAGSSYNEQFF

SEQ ID NO: 275317 - protein, 13 aa, Homo sapiens
  CDR3 for alpha chain variable domain of TCR clone 137659 (TRAV13-2, TRAJ15)
CSEKNQAGTALIF

SEQ ID NO: 275318 - protein, 15 aa, Homo sapiens
  CDR3 for beta chain variable domain of TCR clone 137659 (TRBV29-1, TRBJ2-5)
CSVAPGQGARETQYF

SEQ ID NO: 275319 - protein, 17 aa, Homo sapiens
  CDR3 for alpha chain variable domain of TCR clone 137660 (TRAV4, TRAJ13)
CLVGVQGSSGGYQKVTF

SEQ ID NO: 275320 - protein, 14 aa, Homo sapiens
  CDR3 for beta chain variable domain of TCR clone 137660 (TRBV12-5, TRBJ2-5)
CASGSRTHQETQYF

SEQ ID NO: 275321 - protein, 11 aa, Homo sapiens
  CDR3 for alpha chain variable domain of TCR clone 137661 (TRAV13-1, TRAJ39)
CASHAGNMLTF

SEQ ID NO: 275322 - protein, 17 aa, Homo sapiens
  CDR3 for beta chain variable domain of TCR clone 137661 (TRBV27, TRBJ2-6)
CASSLTGFASGANVLTF

SEQ ID NO: 275323 - protein, 14 aa, Homo sapiens
  CDR3 for alpha chain variable domain of TCR clone 137662 (TRAV20, TRAJ56)
CAVQFGGANSKLTF

SEQ ID NO: 275324 - protein, 15 aa, Homo sapiens
  CDR3 for beta chain variable domain of TCR clone 137662 (TRBV11-3, TRBJ2-3)
CASLKDGREGDTQYF

SEQ ID NO: 275325 - protein, 14 aa, Homo sapiens
  CDR3 for alpha chain variable domain of TCR clone 137663 (TRAV8-4, TRAJ37)
CAVSEPSNTGKLIF

SEQ ID NO: 275326 - protein, 20 aa, Homo sapiens
  CDR3 for beta chain variable domain of TCR clone 137663 (TRBV28, TRBJ2-1)
CASTPIGRSPGLAGGNEQFF

SEQ ID NO: 275327 - protein, 14 aa, Homo sapiens
  CDR3 for alpha chain variable domain of TCR clone 137664 (TRAV8-4, TRAJ13)
CAVTLSGGYRKVTF

SEQ ID NO: 275328 - protein, 15 aa, Homo sapiens
  CDR3 for beta chain variable domain of TCR clone 137664 (TRBV11-3, TRBJ2-1)
CASSGGTSSLDEQFF

SEQ ID NO: 275329 - protein, 14 aa, Homo sapiens
  CDR3 for alpha chain variable domain of TCR clone 137665 (TRAV1-2, TRAJ16)
CAVNRFSDGQKLLF

SEQ ID NO: 275330 - protein, 16 aa, Homo sapiens
  CDR3 for beta chain variable domain of TCR clone 137665 (TRBV7-9, TRBJ2-3)
CASSWRGPNFTDTQYF

SEQ ID NO: 275331 - protein, 13 aa, Homo sapiens
  CDR3 for alpha chain variable domain of TCR clone 137666 (TRAV8-2, TRAJ21)
CVVSQYNFNKFYF

SEQ ID NO: 275332 - protein, 13 aa, Homo sapiens
  CDR3 for beta chain variable domain of TCR clone 137666 (TRBV12-4, TRBJ1-1)
CASSPGTGFEAFF

SEQ ID NO: 275333 - protein, 15 aa, Homo sapiens
  CDR3 for alpha chain variable domain of TCR clone 137667 (TRAV16, TRAJ12)
CSKWPLRDSSYKLIL

SEQ ID NO: 275334 - protein, 14 aa, Homo sapiens
  CDR3 for beta chain variable domain of TCR clone 137667 (TRBV7-9, TRBJ2-1)
CASSPRDSLYEQFF

SEQ ID NO: 275335 - protein, 13 aa, Homo sapiens
  CDR3 for alpha chain variable domain of TCR clone 137668 (TRAV23/DV6, TRAJ12)
CAPRVDSSYRLIF

SEQ ID NO: 275336 - protein, 12 aa, Homo sapiens
  CDR3 for beta chain variable domain of TCR clone 137668 (TRBV7-8, TRBJ2-7)
CASSLGDREQYF

SEQ ID NO: 275337 - protein, 11 aa, Homo sapiens
  CDR3 for alpha chain variable domain of TCR clone 137669 (TRAV12-1, TRAJ30)
CAVNGQDKIIF

SEQ ID NO: 275338 - protein, 15 aa, Homo sapiens
  CDR3 for beta chain variable domain of TCR clone 137669 (TRBV28, TRBJ2-5)
CASSSGRTIQETQYF

SEQ ID NO: 275339 - protein, 10 aa, Homo sapiens
  CDR3 for alpha chain variable domain of TCR clone 137670 (TRAV1-2, TRAJ20)
CALNDYKLSF

SEQ ID NO: 275340 - protein, 16 aa, Homo sapiens
  CDR3 for beta chain variable domain of TCR clone 137670 (TRBV24-1, TRBJ2-3)
CATSDRRQDLTDTQYF

SEQ ID NO: 275341 - protein, 13 aa, Homo sapiens
  CDR3 for alpha chain variable domain of TCR clone 137671 (TRAV25, TRAJ47)
CAGHREYGNKLGF

SEQ ID NO: 275342 - protein, 17 aa, Homo sapiens
  CDR3 for beta chain variable domain of TCR clone 137671 (TRBV7-8, TRBJ2-5)
CASSLASGGRFQETQYF

SEQ ID NO: 275343 - protein, 12 aa, Homo sapiens
  CDR3 for alpha chain variable domain of TCR clone 137672 (TRAV17, TRAJ57)
CATDGGSEKLVF

SEQ ID NO: 275344 - protein, 13 aa, Homo sapiens
  CDR3 for beta chain variable domain of TCR clone 137672 (TRBV11-2, TRBJ2-1)
CASSLDLVNEQFF

SEQ ID NO: 275345 - protein, 15 aa, Homo sapiens
  CDR3 for alpha chain variable domain of TCR clone 137673 (TRAV8-3, TRAJ40)
CAAPSLGSGTYKYIF

SEQ ID NO: 275346 - protein, 16 aa, Homo sapiens
  CDR3 for beta chain variable domain of TCR clone 137673 (TRBV7-3, TRBJ2-3)
CASSSSGYRPEDTQYF

SEQ ID NO: 275347 - protein, 11 aa, Homo sapiens
  CDR3 for alpha chain variable domain of TCR clone 137674 (TRAV23/DV6, TRAJ58)
CAARLLRGETS

SEQ ID NO: 275348 - protein, 15 aa, Homo sapiens
  CDR3 for beta chain variable domain of TCR clone 137674 (TRBV12-4, TRBJ2-1)
CASSLLATGNNEQFF

SEQ ID NO: 275349 - protein, 13 aa, Homo sapiens
  CDR3 for alpha chain variable domain of TCR clone 137675 (TRAV22, TRAJ26)
CAVEHNYSQNFVF

SEQ ID NO: 275350 - protein, 16 aa, Homo sapiens
  CDR3 for beta chain variable domain of TCR clone 137675 (TRBV7-2, TRBJ2-6)
CASSERRASGANVLTF

SEQ ID NO: 275351 - protein, 14 aa, Homo sapiens
  CDR3 for alpha chain variable domain of TCR clone 137676 (TRAV16, TRAJ33)
CALSAMDSNYQLIW

SEQ ID NO: 275352 - protein, 15 aa, Homo sapiens
  CDR3 for beta chain variable domain of TCR clone 137676 (TRBV28, TRBJ2-7)
CASSVEADPIYEQYF

SEQ ID NO: 275353 - protein, 15 aa, Homo sapiens
  CDR3 for alpha chain variable domain of TCR clone 137677 (TRAV17, TRAJ6)
CATDLPSGGSYLHTF

SEQ ID NO: 275354 - protein, 16 aa, Homo sapiens
  CDR3 for beta chain variable domain of TCR clone 137677 (TRBV4-1, TRBJ2-7)
CASSQDPTGYSYEQYL

SEQ ID NO: 275355 - protein, 11 aa, Homo sapiens
  CDR3 for alpha chain variable domain of TCR clone 137678 (TRAV2, TRAJ21)
CAVFNFNKFYF

SEQ ID NO: 275356 - protein, 14 aa, Homo sapiens
  CDR3 for beta chain variable domain of TCR clone 137678 (TRBV5-1, TRBJ1-1)
CASSLQGASTEAFF

SEQ ID NO: 275357 - protein, 14 aa, Homo sapiens
  CDR3 for alpha chain variable domain of TCR clone 137679 (TRAV23/DV6, TRAJ13)
CAAMYSGGYQKVAF

SEQ ID NO: 275358 - protein, 16 aa, Homo sapiens
  CDR3 for beta chain variable domain of TCR clone 137679 (TRBV9, TRBJ2-1)
CASSALGGIGNNEQFL

SEQ ID NO: 275359 - protein, 13 aa, Homo sapiens
  CDR3 for alpha chain variable domain of TCR clone 137680 (TRAV2, TRAJ15)
CAVASQAGTALIF

SEQ ID NO: 275360 - protein, 13 aa, Homo sapiens
  CDR3 for beta chain variable domain of TCR clone 137680 (TRBV19, TRBJ1-3)
CASRLSLGNTIYF

SEQ ID NO: 275361 - protein, 14 aa, Homo sapiens
  CDR3 for alpha chain variable domain of TCR clone 137681 (TRAV1-2, TRAJ16)
CAVNRFSDGQKLLF

SEQ ID NO: 275362 - protein, 10 aa, Homo sapiens
  CDR3 for beta chain variable domain of TCR clone 137681 (TRBV2, TRBJ2-5)
CASGAATQYF

SEQ ID NO: 275363 - protein, 13 aa, Homo sapiens
  CDR3 for alpha chain variable domain of TCR clone 137682 (TRAV21, TRAJ15)
CAVANQAGTAMIF

SEQ ID NO: 275364 - protein, 13 aa, Homo sapiens
  CDR3 for beta chain variable domain of TCR clone 137682 (TRBV11-2, TRBJ2-5)
CASSSTGEETQYF

SEQ ID NO: 275365 - protein, 13 aa, Homo sapiens
  CDR3 for alpha chain variable domain of TCR clone 137683 (TRAV1-2, TRAJ35)
CAASRGFGNVLHC

SEQ ID NO: 275366 - protein, 15 aa, Homo sapiens
  CDR3 for beta chain variable domain of TCR clone 137683 (TRBV6-1, TRBJ2-5)
CASSEGWGIQETQYF

SEQ ID NO: 275367 - protein, 14 aa, Homo sapiens
  CDR3 for alpha chain variable domain of TCR clone 137684 (TRAV1-2, TRAJ16)
CAVNRFSDGQKLIF

SEQ ID NO: 275368 - protein, 12 aa, Homo sapiens
  CDR3 for beta chain variable domain of TCR clone 137684 (TRBV28, TRBJ2-6)
CAIQAGAIVLTF

SEQ ID NO: 275369 - protein, 13 aa, Homo sapiens
  CDR3 for alpha chain variable domain of TCR clone 137685 (TRAV13-1, TRAJ39)
CSKYSNAGNMLTF

SEQ ID NO: 275370 - protein, 18 aa, Homo sapiens
  CDR3 for beta chain variable domain of TCR clone 137685 (TRBV11-2, TRBJ2-3)
CASSLGGASRGAPNTQYF

SEQ ID NO: 275371 - protein, 15 aa, Homo sapiens
  CDR3 for alpha chain variable domain of TCR clone 137686 (TRAV25, TRAJ52)
CAGRPGGTSYGKLTF

SEQ ID NO: 275372 - protein, 18 aa, Homo sapiens
  CDR3 for beta chain variable domain of TCR clone 137686 (TRBV13, TRBJ2-6)
CASSPMTSGGSGANVLTF

SEQ ID NO: 275373 - protein, 13 aa, Homo sapiens
  CDR3 for alpha chain variable domain of TCR clone 137687 (TRAV21, TRAJ27)
CAARPSNAGKSTL

SEQ ID NO: 275374 - protein, 14 aa, Homo sapiens
  CDR3 for beta chain variable domain of TCR clone 137687 (TRBV7-6, TRBJ2-3)
CASSLGTVTDTQYF

SEQ ID NO: 275375 - protein, 17 aa, Homo sapiens
  CDR3 for alpha chain variable domain of TCR clone 137688 (TRAV13-1, TRAJ28)
CAASPPYSGAGSYQLTL

SEQ ID NO: 275376 - protein, 15 aa, Homo sapiens
  CDR3 for beta chain variable domain of TCR clone 137688 (TRBV7-2, TRBJ2-1)
CASSFQADEYNEQFC

SEQ ID NO: 275377 - protein, 13 aa, Homo sapiens
  CDR3 for alpha chain variable domain of TCR clone 137689 (TRAV21, TRAJ45)
CAVMGGGADGLTF

SEQ ID NO: 275378 - protein, 14 aa, Homo sapiens
  CDR3 for beta chain variable domain of TCR clone 137689 (TRBV4-3, TRBJ1-4)
CASSPLQRNEKLFL

SEQ ID NO: 275379 - protein, 16 aa, Homo sapiens
  CDR3 for alpha chain variable domain of TCR clone 137690 (TRAV12-2, TRAJ6)
CAAPLAGSGGSYIPTV

SEQ ID NO: 275380 - protein, 10 aa, Homo sapiens
  CDR3 for beta chain variable domain of TCR clone 137690 (TRBV28, TRBJ1-2)
CASSSDRAVF

SEQ ID NO: 275381 - protein, 16 aa, Homo sapiens
  CDR3 for alpha chain variable domain of TCR clone 137691 (TRAV3, TRAJ37)
CAVRVRGSGNTGKLIF

SEQ ID NO: 275382 - protein, 17 aa, Homo sapiens
  CDR3 for beta chain variable domain of TCR clone 137691 (TRBV11-2, TRBJ2-1)
CASSLYPPGVEYNEQFF

SEQ ID NO: 275383 - protein, 15 aa, Homo sapiens
  CDR3 for alpha chain variable domain of TCR clone 137692 (TRAV3, TRAJ5)
CAVRDLYTCRRALTF

SEQ ID NO: 275384 - protein, 13 aa, Homo sapiens
  CDR3 for beta chain variable domain of TCR clone 137692 (TRBV12-4, TRBJ2-7)
CASSPTETYEQYF

SEQ ID NO: 275385 - protein, 13 aa, Homo sapiens
  CDR3 for alpha chain variable domain of TCR clone 137693 (TRAV27, TRAJ41)
CAGEGNTGYAFNL

SEQ ID NO: 275386 - protein, 14 aa, Homo sapiens
  CDR3 for beta chain variable domain of TCR clone 137693 (TRBV7-2, TRBJ1-1)
CASSFLTGTTEAFF

SEQ ID NO: 275387 - protein, 16 aa, Homo sapiens
  CDR3 for alpha chain variable domain of TCR clone 137694 (TRAV12-1, TRAJ48)
CVVNTFREFGNEKLTF

SEQ ID NO: 275388 - protein, 17 aa, Homo sapiens
  CDR3 for beta chain variable domain of TCR clone 137694 (TRBV13, TRBJ2-3)
CASILSRVAGGRNTQYF

SEQ ID NO: 275389 - protein, 15 aa, Homo sapiens
  CDR3 for alpha chain variable domain of TCR clone 137695 (TRAV3, TRAJ17)
CAVRDTGAAGNKLTF

SEQ ID NO: 275390 - protein, 13 aa, Homo sapiens
  CDR3 for beta chain variable domain of TCR clone 137695 (TRBV11-2, TRBJ2-7)
CASSGTRPYEQYF

SEQ ID NO: 275391 - protein, 14 aa, Homo sapiens
  CDR3 for alpha chain variable domain of TCR clone 137696 (TRAV12-1, TRAJ30)
CVVYIGGRDDKIIF

SEQ ID NO: 275392 - protein, 13 aa, Homo sapiens
  CDR3 for beta chain variable domain of TCR clone 137696 (TRBV12-5, TRBJ2-1)
CASGLGRGNEQFF

SEQ ID NO: 275393 - protein, 14 aa, Homo sapiens
  CDR3 for alpha chain variable domain of TCR clone 137697 (TRAV17, TRAJ56)
CATVPAGANSKLTF

SEQ ID NO: 275394 - protein, 15 aa, Homo sapiens
  CDR3 for beta chain variable domain of TCR clone 137697 (TRBV7-9, TRBJ1-6)
CASSSPGRGNSPLHF

SEQ ID NO: 275395 - protein, 13 aa, Homo sapiens
  CDR3 for alpha chain variable domain of TCR clone 137698 (TRAV3, TRAJ21)
CAVREPDFNKFYI

SEQ ID NO: 275396 - protein, 13 aa, Homo sapiens
  CDR3 for beta chain variable domain of TCR clone 137698 (TRBV9, TRBJ2-1)
CASSPSGGNEQFF

SEQ ID NO: 275397 - protein, 13 aa, Homo sapiens
  CDR3 for alpha chain variable domain of TCR clone 137699 (TRAV8-3, TRAJ44)
CAVVPGIASKLTF

SEQ ID NO: 275398 - protein, 14 aa, Homo sapiens
  CDR3 for beta chain variable domain of TCR clone 137699 (TRBV11-2, TRBJ2-3)
CASRRLARTDKQYF

SEQ ID NO: 275399 - protein, 14 aa, Homo sapiens
  CDR3 for alpha chain variable domain of TCR clone 137700 (TRAV12-1, TRAJ26)
CVVKGSNYGQNFVF

SEQ ID NO: 275400 - protein, 13 aa, Homo sapiens
  CDR3 for beta chain variable domain of TCR clone 137700 (TRBV6-5, TRBJ2-5)
CASSPQGGETQYF

SEQ ID NO: 275401 - protein, 16 aa, Homo sapiens
  CDR3 for alpha chain variable domain of TCR clone 137701 (TRAV30, TRAJ24)
CGTEIVDADSWGKFQF

SEQ ID NO: 275402 - protein, 13 aa, Homo sapiens
  CDR3 for beta chain variable domain of TCR clone 137701 (TRBV2, TRBJ2-3)
CASILAGGQGQYF

SEQ ID NO: 275403 - protein, 13 aa, Homo sapiens
  CDR3 for alpha chain variable domain of TCR clone 137702 (TRAV12-1, TRAJ13)
CVVNLGGYQKVTF

SEQ ID NO: 275404 - protein, 18 aa, Homo sapiens
  CDR3 for beta chain variable domain of TCR clone 137702 (TRBV7-2, TRBJ2-3)
CASSLRRADPPCTDTQYF

SEQ ID NO: 275405 - protein, 12 aa, Homo sapiens
  CDR3 for alpha chain variable domain of TCR clone 137703 (TRAV12-3, TRAJ17)
CAMTLTGNKLTF

SEQ ID NO: 275406 - protein, 16 aa, Homo sapiens
  CDR3 for beta chain variable domain of TCR clone 137703 (TRBV19, TRBJ2-1)
CASSIWGQGARNEQFF

SEQ ID NO: 275407 - protein, 16 aa, Homo sapiens
  CDR3 for alpha chain variable domain of TCR clone 137704 (TRAV12-2, TRAJ40)
CAVIRGGTSGTNKYIF

SEQ ID NO: 275408 - protein, 16 aa, Homo sapiens
  CDR3 for beta chain variable domain of TCR clone 137704 (TRBV7-9, TRBJ2-1)
CASSDVAGGSYNEQFF

SEQ ID NO: 275409 - protein, 13 aa, Homo sapiens
  CDR3 for alpha chain variable domain of TCR clone 137705 (TRAV12-1, TRAJ13)
CVVALLGSQKVTF

SEQ ID NO: 275410 - protein, 13 aa, Homo sapiens
  CDR3 for beta chain variable domain of TCR clone 137705 (TRBV20-1, TRBJ2-5)
CSSILTGQETQYF

SEQ ID NO: 275411 - protein, 14 aa, Homo sapiens
  CDR3 for alpha chain variable domain of TCR clone 137706 (TRAV1-1, TRAJ27)
CAVIYNTNAGKSTV

SEQ ID NO: 275412 - protein, 15 aa, Homo sapiens
  CDR3 for beta chain variable domain of TCR clone 137706 (TRBV6-3, TRBJ2-7)
CASSSPGTVFYEQYF

SEQ ID NO: 275413 - protein, 14 aa, Homo sapiens
  CDR3 for alpha chain variable domain of TCR clone 137707 (TRAV1-2, TRAJ16)
CAVNRFSDGQKLSF

SEQ ID NO: 275414 - protein, 15 aa, Homo sapiens
  CDR3 for beta chain variable domain of TCR clone 137707 (TRBV4-2, TRBJ1-1)
CASSQQGAGDTEAFF

SEQ ID NO: 275415 - protein, 15 aa, Homo sapiens
  CDR3 for alpha chain variable domain of TCR clone 137708 (TRAV12-3, TRAJ53)
CNERPIEGSHYKLTF

SEQ ID NO: 275416 - protein, 13 aa, Homo sapiens
  CDR3 for beta chain variable domain of TCR clone 137708 (TRBV15, TRBJ1-1)
CATSRGIQARAFF

SEQ ID NO: 275417 - protein, 14 aa, Homo sapiens
  CDR3 for alpha chain variable domain of TCR clone 137709 (TRAV12-3, TRAJ10)
SHLPLTGGGNKLNF

SEQ ID NO: 275418 - protein, 17 aa, Homo sapiens
  CDR3 for beta chain variable domain of TCR clone 137709 (TRBV28, TRBJ2-5)
CASSTPEGDALQETQYF

SEQ ID NO: 275419 - protein, 12 aa, Homo sapiens
  CDR3 for alpha chain variable domain of TCR clone 137710 (TRAV30, TRAJ43)
CGTEERGNDMRF

SEQ ID NO: 275420 - protein, 15 aa, Homo sapiens
  CDR3 for beta chain variable domain of TCR clone 137710 (TRBV19, TRBJ2-7)
CASSIGLAVSYEQYF

SEQ ID NO: 275421 - protein, 12 aa, Homo sapiens
  CDR3 for alpha chain variable domain of TCR clone 137711 (TRAV12-1, TRAJ40)
CVVYSGTYKYIL

SEQ ID NO: 275422 - protein, 17 aa, Homo sapiens
  CDR3 for beta chain variable domain of TCR clone 137711 (TRBV11-3, TRBJ1-5)
CASSPLTGLRGNQPHHF

SEQ ID NO: 275423 - protein, 16 aa, Homo sapiens
  CDR3 for alpha chain variable domain of TCR clone 137712 (TRAV8-3, TRAJ10)
CAVGPILTGGGNKLTF

SEQ ID NO: 275424 - protein, 16 aa, Homo sapiens
  CDR3 for beta chain variable domain of TCR clone 137712 (TRBV7-2, TRBJ2-5)
CASSSKWLSSQETQYF

SEQ ID NO: 275425 - protein, 11 aa, Homo sapiens
  CDR3 for alpha chain variable domain of TCR clone 137713 (TRAV12-1, TRAJ43)
CVEYDNNDMRF

SEQ ID NO: 275426 - protein, 15 aa, Homo sapiens
  CDR3 for beta chain variable domain of TCR clone 137713 (TRBV18, TRBJ2-5)
CDSSPRASEAETQYF

SEQ ID NO: 275427 - protein, 17 aa, Homo sapiens
  CDR3 for alpha chain variable domain of TCR clone 137714 (TRAV35, TRAJ38)
CAGQLQRNAGNNRKLIW

SEQ ID NO: 275428 - protein, 15 aa, Homo sapiens
  CDR3 for beta chain variable domain of TCR clone 137714 (TRBV7-9, TRBJ2-1)
CASNLGLAGGTEQFF

SEQ ID NO: 275429 - protein, 13 aa, Homo sapiens
  CDR3 for alpha chain variable domain of TCR clone 137715 (TRAV13-1, TRAJ6)
CAASRGGSYIPTF

SEQ ID NO: 275430 - protein, 14 aa, Homo sapiens
  CDR3 for beta chain variable domain of TCR clone 137715 (TRBV7-2, TRBJ2-5)
CASSFGGAKETQYF

SEQ ID NO: 275431 - protein, 16 aa, Homo sapiens
  CDR3 for alpha chain variable domain of TCR clone 137716 (TRAV22, TRAJ45)
CAVERGKRGGTDGLTF

SEQ ID NO: 275432 - protein, 11 aa, Homo sapiens
  CDR3 for beta chain variable domain of TCR clone 137716 (TRBV29-1, TRBJ2-5)
CSEDRTGTQYF

SEQ ID NO: 275433 - protein, 13 aa, Homo sapiens
  CDR3 for alpha chain variable domain of TCR clone 137717 (TRAV13-1, TRAJ21)
CAASIYNFNKFYF

SEQ ID NO: 275434 - protein, 14 aa, Homo sapiens
  CDR3 for beta chain variable domain of TCR clone 137717 (TRBV7-2, TRBJ2-2)
CASRGQGAAGELFF

SEQ ID NO: 275435 - protein, 15 aa, Homo sapiens
  CDR3 for alpha chain variable domain of TCR clone 137718 (TRAV26-1, TRAJ29)
CICRVEGSGNTPLVF

SEQ ID NO: 275436 - protein, 15 aa, Homo sapiens
  CDR3 for beta chain variable domain of TCR clone 137718 (TRBV7-9, TRBJ1-5)
CASSQGHQPNQPQHF

SEQ ID NO: 275437 - protein, 13 aa, Homo sapiens
  CDR3 for alpha chain variable domain of TCR clone 137719 (TRAV30, TRAJ34)
CGTVGYNTDKLIF

SEQ ID NO: 275438 - protein, 16 aa, Homo sapiens
  CDR3 for beta chain variable domain of TCR clone 137719 (TRBV7-9, TRBJ1-2)
CASSSGFSSGEDGYTF

SEQ ID NO: 275439 - protein, 13 aa, Homo sapiens
  CDR3 for alpha chain variable domain of TCR clone 137720 (TRAV26-2, TRAJ54)
CIPRVGGAQTLVF

SEQ ID NO: 275440 - protein, 16 aa, Homo sapiens
  CDR3 for beta chain variable domain of TCR clone 137720 (TRBV4-1, TRBJ1-1)
CASSSMSERPNTEAFF

SEQ ID NO: 275441 - protein, 12 aa, Homo sapiens
  CDR3 for alpha chain variable domain of TCR clone 137721 (TRAV8-3, TRAJ20)
CAVGANAYKLSV

SEQ ID NO: 275442 - protein, 16 aa, Homo sapiens
  CDR3 for beta chain variable domain of TCR clone 137721 (TRBV19, TRBJ2-2)
CASRSPGTGATGELFF

SEQ ID NO: 275443 - protein, 12 aa, Homo sapiens
  CDR3 for alpha chain variable domain of TCR clone 137722 (TRAV13-1, TRAJ21)
CAAKEGFNKFYF

SEQ ID NO: 275444 - protein, 15 aa, Homo sapiens
  CDR3 for beta chain variable domain of TCR clone 137722 (TRBV7-8, TRBJ2-1)
CASSLADSLYNEQFF

SEQ ID NO: 275445 - protein, 13 aa, Homo sapiens
  CDR3 for alpha chain variable domain of TCR clone 137723 (TRAV2, TRAJ40)
CAVVTSGTYKYIF

SEQ ID NO: 275446 - protein, 15 aa, Homo sapiens
  CDR3 for beta chain variable domain of TCR clone 137723 (TRBV18, TRBJ2-1)
CASPPPSAAYNEQFF

SEQ ID NO: 275447 - protein, 14 aa, Homo sapiens
  CDR3 for alpha chain variable domain of TCR clone 137724 (TRAV1-2, TRAJ8)
CDVREDTGFQKLVF

SEQ ID NO: 275448 - protein, 15 aa, Homo sapiens
  CDR3 for beta chain variable domain of TCR clone 137724 (TRBV11-3, TRBJ2-3)
CASLKDGREGDTQYF

SEQ ID NO: 275449 - protein, 15 aa, Homo sapiens
  CDR3 for alpha chain variable domain of TCR clone 137725 (TRAV25, TRAJ52)
CAWTSGGTSYVKLTF

SEQ ID NO: 275450 - protein, 14 aa, Homo sapiens
  CDR3 for beta chain variable domain of TCR clone 137725 (TRBV7-2, TRBJ2-3)
CASSQTGSSYTQYF

SEQ ID NO: 275451 - protein, 15 aa, Homo sapiens
  CDR3 for alpha chain variable domain of TCR clone 137726 (TRAV3, TRAJ20)
CAVRDIKLSDYKLSF

SEQ ID NO: 275452 - protein, 13 aa, Homo sapiens
  CDR3 for beta chain variable domain of TCR clone 137726 (TRBV12-4, TRBJ1-2)
CASSSGLTVISTF

SEQ ID NO: 275453 - protein, 12 aa, Homo sapiens
  CDR3 for alpha chain variable domain of TCR clone 137727 (TRAV12-2, TRAJ45)
CAVTGGADGRTF

SEQ ID NO: 275454 - protein, 12 aa, Homo sapiens
  CDR3 for beta chain variable domain of TCR clone 137727 (TRBV11-2, TRBJ2-2)
CASSLGGGELFF

SEQ ID NO: 275455 - protein, 14 aa, Homo sapiens
  CDR3 for alpha chain variable domain of TCR clone 137728 (TRAV13-1, TRAJ40)
CAASMTSGTYKYIF

SEQ ID NO: 275456 - protein, 15 aa, Homo sapiens
  CDR3 for beta chain variable domain of TCR clone 137728 (TRBV4-1, TRBJ1-4)
CASSLATATNEKLFF

SEQ ID NO: 275457 - protein, 12 aa, Homo sapiens
  CDR3 for alpha chain variable domain of TCR clone 137729 (TRAV1-2, TRAJ33)
CAALDSNYQLIW

SEQ ID NO: 275458 - protein, 14 aa, Homo sapiens
  CDR3 for beta chain variable domain of TCR clone 137729 (TRBV12-4, TRBJ1-1)
CASSLRSSGTEAFF

SEQ ID NO: 275459 - protein, 12 aa, Homo sapiens
  CDR3 for alpha chain variable domain of TCR clone 137730 (TRAV12-2, TRAJ31)
CAVNTPDARRMF

SEQ ID NO: 275460 - protein, 17 aa, Homo sapiens
  CDR3 for beta chain variable domain of TCR clone 137730 (TRBV20-1, TRBJ1-6)
CSARGGYTFSYNSPLHF

SEQ ID NO: 275461 - protein, 14 aa, Homo sapiens
  CDR3 for alpha chain variable domain of TCR clone 137731 (TRAV12-2, TRAJ24)
CAVTPADSWGNLQF

SEQ ID NO: 275462 - protein, 15 aa, Homo sapiens
  CDR3 for beta chain variable domain of TCR clone 137731 (TRBV9, TRBJ1-6)
CASSVAGTGDSPLHF

SEQ ID NO: 275463 - protein, 14 aa, Homo sapiens
  CDR3 for alpha chain variable domain of TCR clone 137732 (TRAV12-1, TRAJ12)
CVVNRPDSSYKLIF

SEQ ID NO: 275464 - protein, 14 aa, Homo sapiens
  CDR3 for beta chain variable domain of TCR clone 137732 (TRBV7-2, TRBJ2-7)
CASRSQGAAYEQYF

SEQ ID NO: 275465 - protein, 14 aa, Homo sapiens
  CDR3 for alpha chain variable domain of TCR clone 137733 (TRAV13-1, TRAJ22)
CAASSSGSARQLTF

SEQ ID NO: 275466 - protein, 13 aa, Homo sapiens
  CDR3 for beta chain variable domain of TCR clone 137733 (TRBV6-3, TRBJ1-2)
CASSLTGDYGYTF

SEQ ID NO: 275467 - protein, 14 aa, Homo sapiens
  CDR3 for alpha chain variable domain of TCR clone 137734 (TRAV1-2, TRAJ8)
CALREDTGFQKLVF

SEQ ID NO: 275468 - protein, 12 aa, Homo sapiens
  CDR3 for beta chain variable domain of TCR clone 137734 (TRBV14, TRBJ2-7)
CASSSLKGEQYF

SEQ ID NO: 275469 - protein, 12 aa, Homo sapiens
  CDR3 for alpha chain variable domain of TCR clone 137735 (TRAV20, TRAJ23)
CAVHNQGGKLIF

SEQ ID NO: 275470 - protein, 16 aa, Homo sapiens
  CDR3 for beta chain variable domain of TCR clone 137735 (TRBV7-3, TRBJ2-2)
CASGLKRGTLSGELFF

SEQ ID NO: 275471 - protein, 12 aa, Homo sapiens
  CDR3 for alpha chain variable domain of TCR clone 137736 (TRAV13-1, TRAJ21)
CATKEGFNKFYF

SEQ ID NO: 275472 - protein, 16 aa, Homo sapiens
  CDR3 for beta chain variable domain of TCR clone 137736 (TRBV12-5, TRBJ2-5)
CASGPRTSGNQETQYF

SEQ ID NO: 275473 - protein, 13 aa, Homo sapiens
  CDR3 for alpha chain variable domain of TCR clone 137737 (TRAV1-1, TRAJ9)
CAAKNTGGFKTIF

SEQ ID NO: 275474 - protein, 16 aa, Homo sapiens
  CDR3 for beta chain variable domain of TCR clone 137737 (TRBV12-5, TRBJ2-5)
CASGPRSSGNQETQYF

SEQ ID NO: 275475 - protein, 15 aa, Homo sapiens
  CDR3 for alpha chain variable domain of TCR clone 137738 (TRAV8-2, TRAJ42)
CVVSAYMGSQGNLIF

SEQ ID NO: 275476 - protein, 11 aa, Homo sapiens
  CDR3 for beta chain variable domain of TCR clone 137738 (TRBV5-1, TRBJ2-1)
CASSIGQEQFF

SEQ ID NO: 275477 - protein, 18 aa, Homo sapiens
  CDR3 for alpha chain variable domain of TCR clone 137739 (TRAV21, TRAJ52)
CAVRPSPAGGTSYGKLTF

SEQ ID NO: 275478 - protein, 13 aa, Homo sapiens
  CDR3 for beta chain variable domain of TCR clone 137739 (TRBV7-3, TRBJ1-1)
CASSQDWGAEGFF

SEQ ID NO: 275479 - protein, 14 aa, Homo sapiens
  CDR3 for alpha chain variable domain of TCR clone 137740 (TRAV16, TRAJ15)
SALSGPQAGTALIF

SEQ ID NO: 275480 - protein, 12 aa, Homo sapiens
  CDR3 for beta chain variable domain of TCR clone 137740 (TRBV18, TRBJ2-5)
CASSPSKETQYF

SEQ ID NO: 275481 - protein, 14 aa, Homo sapiens
  CDR3 for alpha chain variable domain of TCR clone 137741 (TRAV17, TRAJ6)
CATNPAGGSYIPTF

SEQ ID NO: 275482 - protein, 14 aa, Homo sapiens
  CDR3 for beta chain variable domain of TCR clone 137741 (TRBV12-4, TRBJ1-1)
CASSLGTGGTEAFF

SEQ ID NO: 275483 - protein, 13 aa, Homo sapiens
  CDR3 for alpha chain variable domain of TCR clone 137742 (TRAV36/DV7, TRAJ37)
CAVFSSNTGELIF

SEQ ID NO: 275484 - protein, 15 aa, Homo sapiens
  CDR3 for beta chain variable domain of TCR clone 137742 (TRBV5-1, TRBJ2-2)
CASSSQGGNTGELFF

SEQ ID NO: 275485 - protein, 13 aa, Homo sapiens
  CDR3 for alpha chain variable domain of TCR clone 137743 (TRAV8-3, TRAJ36)
CALGATGANNLFF

SEQ ID NO: 275486 - protein, 16 aa, Homo sapiens
  CDR3 for beta chain variable domain of TCR clone 137743 (TRBV20-1, TRBJ1-4)
CSAPGQGLLTNEKLFF

SEQ ID NO: 275487 - protein, 14 aa, Homo sapiens
  CDR3 for alpha chain variable domain of TCR clone 137744 (TRAV3, TRAJ7)
CAVREEEREQKTRF

SEQ ID NO: 275488 - protein, 13 aa, Homo sapiens
  CDR3 for beta chain variable domain of TCR clone 137744 (TRBV20-1, TRBJ2-2)
CSASAAGTGELFF

SEQ ID NO: 275489 - protein, 15 aa, Homo sapiens
  CDR3 for alpha chain variable domain of TCR clone 137745 (TRAV1-2, TRAJ30)
CAVRPHGNRDDKIFF

SEQ ID NO: 275490 - protein, 13 aa, Homo sapiens
  CDR3 for beta chain variable domain of TCR clone 137745 (TRBV4-1, TRBJ2-7)
CASSQGQAYEQYF

SEQ ID NO: 275491 - protein, 13 aa, Homo sapiens
  CDR3 for alpha chain variable domain of TCR clone 137746 (TRAV3, TRAJ21)
CAVIPPPFNKFYF

SEQ ID NO: 275492 - protein, 16 aa, Homo sapiens
  CDR3 for beta chain variable domain of TCR clone 137746 (TRBV5-5, TRBJ2-2)
CASSGRREGATGELFF

SEQ ID NO: 275493 - protein, 13 aa, Homo sapiens
  CDR3 for alpha chain variable domain of TCR clone 137747 (TRAV1-2, TRAJ9)
CAALNTGGFKTIF

SEQ ID NO: 275494 - protein, 11 aa, Homo sapiens
  CDR3 for beta chain variable domain of TCR clone 137747 (TRBV20-1, TRBJ2-5)
CSADRAETQYF

SEQ ID NO: 275495 - protein, 14 aa, Homo sapiens
  CDR3 for alpha chain variable domain of TCR clone 137748 (TRAV1-2, TRAJ8)
CAVREDTGFQKLVF

SEQ ID NO: 275496 - protein, 16 aa, Homo sapiens
  CDR3 for beta chain variable domain of TCR clone 137748 (TRBV12-5, TRBJ2-5)
YASGPRTSGNQETQYF

SEQ ID NO: 275497 - protein, 13 aa, Homo sapiens
  CDR3 for alpha chain variable domain of TCR clone 137749 (TRAV8-3, TRAJ6)
CAARRGGSYIPTF

SEQ ID NO: 275498 - protein, 15 aa, Homo sapiens
  CDR3 for beta chain variable domain of TCR clone 137749 (TRBV4-1, TRBJ2-3)
CASSNLAGGRDTQYL

SEQ ID NO: 275499 - protein, 14 aa, Homo sapiens
  CDR3 for alpha chain variable domain of TCR clone 137750 (TRAV26-1, TRAJ45)
FIVRVVGGADRLTF

SEQ ID NO: 275500 - protein, 16 aa, Homo sapiens
  CDR3 for beta chain variable domain of TCR clone 137750 (TRBV7-9, TRBJ1-1)
CASSLTQVRSNTEDFF

SEQ ID NO: 275501 - protein, 13 aa, Homo sapiens
  CDR3 for alpha chain variable domain of TCR clone 137751 (TRAV26-1, TRAJ48)
CIVRVVGDENLTF

SEQ ID NO: 275502 - protein, 17 aa, Homo sapiens
  CDR3 for beta chain variable domain of TCR clone 137751 (TRBV7-3, TRBJ2-2)
CASSLSGTSGGTGELFF

SEQ ID NO: 275503 - protein, 16 aa, Homo sapiens
  CDR3 for alpha chain variable domain of TCR clone 137752 (TRAV12-3, TRAJ28)
CAMRANSGAGSYQFTF

SEQ ID NO: 275504 - protein, 16 aa, Homo sapiens
  CDR3 for beta chain variable domain of TCR clone 137752 (TRBV7-2, TRBJ1-3)
CASSRLEASSGNTIYF

SEQ ID NO: 275505 - protein, 12 aa, Homo sapiens
  CDR3 for alpha chain variable domain of TCR clone 137753 (TRAV17, TRAJ12)
CATLRSSYKLIF

SEQ ID NO: 275506 - protein, 17 aa, Homo sapiens
  CDR3 for beta chain variable domain of TCR clone 137753 (TRBV13, TRBJ2-3)
CASNLSRVAGGRNTQYF

SEQ ID NO: 275507 - protein, 15 aa, Homo sapiens
  CDR3 for alpha chain variable domain of TCR clone 137754 (TRAV12-1, TRAJ44)
CVADLPTGTASKLTF

SEQ ID NO: 275508 - protein, 15 aa, Homo sapiens
  CDR3 for beta chain variable domain of TCR clone 137754 (TRBV28, TRBJ2-5)
CASSSGRTIQETQYF

SEQ ID NO: 275509 - protein, 15 aa, Homo sapiens
  CDR3 for alpha chain variable domain of TCR clone 137755 (TRAV17, TRAJ57)
CATGPSQVGSEKLFF

SEQ ID NO: 275510 - protein, 13 aa, Homo sapiens
  CDR3 for beta chain variable domain of TCR clone 137755 (TRBV27, TRBJ2-1)
CASRTLGVGEQFF

SEQ ID NO: 275511 - protein, 13 aa, Homo sapiens
  CDR3 for alpha chain variable domain of TCR clone 137756 (TRAV12-1, TRAJ7)
CVVNMRGNNRLAS

SEQ ID NO: 275512 - protein, 15 aa, Homo sapiens
  CDR3 for beta chain variable domain of TCR clone 137756 (TRBV27, TRBJ2-3)
CASSLGRAATDTQYF

SEQ ID NO: 275513 - protein, 17 aa, Homo sapiens
  CDR3 for alpha chain variable domain of TCR clone 137757 (TRAV20, TRAJ42)
CAVQAWGYGGSQGNLIF

SEQ ID NO: 275514 - protein, 16 aa, Homo sapiens
  CDR3 for beta chain variable domain of TCR clone 137757 (TRBV29-1, TRBJ2-5)
CSVEVLAGDYQETQYF

SEQ ID NO: 275515 - protein, 16 aa, Homo sapiens
  CDR3 for alpha chain variable domain of TCR clone 137758 (TRAV20, TRAJ53)
CAVQGNSGGSNYKLTF

SEQ ID NO: 275516 - protein, 16 aa, Homo sapiens
  CDR3 for beta chain variable domain of TCR clone 137758 (TRBV29-1, TRBJ2-6)
CSVEDITYSGANGLTF

SEQ ID NO: 275517 - protein, 16 aa, Homo sapiens
  CDR3 for alpha chain variable domain of TCR clone 137759 (TRAV3, TRAJ10)
CAVRDMWAGGGNKLTF

SEQ ID NO: 275518 - protein, 14 aa, Homo sapiens
  CDR3 for beta chain variable domain of TCR clone 137759 (TRBV7-3, TRBJ2-2)
CASSSGGYTGELFF

SEQ ID NO: 275519 - protein, 10 aa, Homo sapiens
  CDR3 for alpha chain variable domain of TCR clone 137760 (TRAV1-2, TRAJ31)
CAFFRCQTHV

SEQ ID NO: 275520 - protein, 13 aa, Homo sapiens
  CDR3 for beta chain variable domain of TCR clone 137760 (TRBV12-4, TRBJ2-7)
CASSPTETYEQYF

SEQ ID NO: 275521 - protein, 13 aa, Homo sapiens
  CDR3 for alpha chain variable domain of TCR clone 137761 (TRAV6, TRAJ20)
CALAVSDDYKLSF

SEQ ID NO: 275522 - protein, 16 aa, Homo sapiens
  CDR3 for beta chain variable domain of TCR clone 137761 (TRBV7-9, TRBJ2-1)
CASSDVAGGSYNEQFF

SEQ ID NO: 275523 - protein, 15 aa, Homo sapiens
  CDR3 for alpha chain variable domain of TCR clone 137762 (TRAV35, TRAJ58)
CAGRRQETSGSRLTF

SEQ ID NO: 275524 - protein, 16 aa, Homo sapiens
  CDR3 for beta chain variable domain of TCR clone 137762 (TRBV4-1, TRBJ2-3)
CASSQRAGGLTDTQYF

SEQ ID NO: 275525 - protein, 12 aa, Homo sapiens
  CDR3 for alpha chain variable domain of TCR clone 137763 (TRAV2, TRAJ33)
CAVPDSNYQLIW

SEQ ID NO: 275526 - protein, 16 aa, Homo sapiens
  CDR3 for beta chain variable domain of TCR clone 137763 (TRBV19, TRBJ2-2)
CASSFPGQGLAGELFF

SEQ ID NO: 275527 - protein, 13 aa, Homo sapiens
  CDR3 for alpha chain variable domain of TCR clone 137764 (TRAV21, TRAJ27)
CAQWGGNSGKSTF

SEQ ID NO: 275528 - protein, 14 aa, Homo sapiens
  CDR3 for beta chain variable domain of TCR clone 137764 (TRBV2, TRBJ2-3)
CAVGGTISTDTQYF

SEQ ID NO: 275529 - protein, 15 aa, Homo sapiens
  CDR3 for alpha chain variable domain of TCR clone 137765 (TRAV3, TRAJ8)
CAVRDNETGFQKLVF

SEQ ID NO: 275530 - protein, 12 aa, Homo sapiens
  CDR3 for beta chain variable domain of TCR clone 137765 (TRBV11-2, TRBJ2-2)
CASSLGGGELFF

SEQ ID NO: 275531 - protein, 14 aa, Homo sapiens
  CDR3 for alpha chain variable domain of TCR clone 137766 (TRAV12-2, TRAJ8)
CAVKIPSGTYKYIF

SEQ ID NO: 275532 - protein, 12 aa, Homo sapiens
  CDR3 for beta chain variable domain of TCR clone 137766 (TRBV11-2, TRBJ2-1)
CASSPGNNEQFF

SEQ ID NO: 275533 - protein, 13 aa, Homo sapiens
  CDR3 for alpha chain variable domain of TCR clone 137767 (TRAV13-1, TRAJ39)
CAASIWAGNMLTF

SEQ ID NO: 275534 - protein, 13 aa, Homo sapiens
  CDR3 for beta chain variable domain of TCR clone 137767 (TRBV4-1, TRBJ2-2)
CASSQENTGELFF

SEQ ID NO: 275535 - protein, 14 aa, Homo sapiens
  CDR3 for alpha chain variable domain of TCR clone 137768 (TRAV29/DV5, TRAJ36)
CAARRKTGANDLFF

SEQ ID NO: 275536 - protein, 13 aa, Homo sapiens
  CDR3 for beta chain variable domain of TCR clone 137768 (TRBV28, TRBJ2-3)
CASSLPQVDTQYF

SEQ ID NO: 275537 - protein, 14 aa, Homo sapiens
  CDR3 for alpha chain variable domain of TCR clone 137769 (TRAV8-3, TRAJ30)
CAVGDMNRDDKIIF

SEQ ID NO: 275538 - protein, 17 aa, Homo sapiens
  CDR3 for beta chain variable domain of TCR clone 137769 (TRBV19, TRBJ2-2)
CASSRNTGGFGTGELFF

SEQ ID NO: 275539 - protein, 16 aa, Homo sapiens
  CDR3 for alpha chain variable domain of TCR clone 137770 (TRAV26-1, TRAJ36)
CIVRVPDQTGANNLFF

SEQ ID NO: 275540 - protein, 17 aa, Homo sapiens
  CDR3 for beta chain variable domain of TCR clone 137770 (TRBV11-2, TRBJ2-1)
CASSLYPPGVEYNEQFF

SEQ ID NO: 275541 - protein, 15 aa, Homo sapiens
  CDR3 for alpha chain variable domain of TCR clone 137771 (TRAV26-1, TRAJ29)
CIVRLEGSGNTPLVF

SEQ ID NO: 275542 - protein, 14 aa, Homo sapiens
  CDR3 for beta chain variable domain of TCR clone 137771 (TRBV18, TRBJ2-5)
CASSPGVSQETQYF

SEQ ID NO: 275543 - protein, 12 aa, Homo sapiens
  CDR3 for alpha chain variable domain of TCR clone 137772 (TRAV17, TRAJ20)
CATYSNDYKLSF

SEQ ID NO: 275544 - protein, 14 aa, Homo sapiens
  CDR3 for beta chain variable domain of TCR clone 137772 (TRBV25-1, TRBJ1-1)
CASTHLWGNTEAFF

SEQ ID NO: 275545 - protein, 12 aa, Homo sapiens
  CDR3 for alpha chain variable domain of TCR clone 137773 (TRAV12-3, TRAJ20)
CAMVRGDYKLSF

SEQ ID NO: 275546 - protein, 14 aa, Homo sapiens
  CDR3 for beta chain variable domain of TCR clone 137773 (TRBV12-4, TRBJ1-1)
CASSLGTGGTEAFF

SEQ ID NO: 275547 - protein, 14 aa, Homo sapiens
  CDR3 for alpha chain variable domain of TCR clone 137774 (TRAV8-1, TRAJ23)
CAVGTYKQGGKLIF

SEQ ID NO: 275548 - protein, 16 aa, Homo sapiens
  CDR3 for beta chain variable domain of TCR clone 137774 (TRBV18, TRBJ1-5)
CASSPSTGNSNQPQHF

SEQ ID NO: 275549 - protein, 15 aa, Homo sapiens
  CDR3 for alpha chain variable domain of TCR clone 137775 (TRAV12-3, TRAJ5)
CAMSGLDTGRRALTF

SEQ ID NO: 275550 - protein, 15 aa, Homo sapiens
  CDR3 for beta chain variable domain of TCR clone 137775 (TRBV19, TRBJ1-1)
CASTSGQIQNTEAFF

SEQ ID NO: 275551 - protein, 14 aa, Homo sapiens
  CDR3 for alpha chain variable domain of TCR clone 137776 (TRAV2, TRAJ37)
CAVDFTSNTVKLLF

SEQ ID NO: 275552 - protein, 15 aa, Homo sapiens
  CDR3 for beta chain variable domain of TCR clone 137776 (TRBV20-1, TRBJ1-1)
CSASRGVTGNTEAFF

SEQ ID NO: 275553 - protein, 13 aa, Homo sapiens
  CDR3 for alpha chain variable domain of TCR clone 137777 (TRAV21, TRAJ27)
CAALNTNAGKSTF

SEQ ID NO: 275554 - protein, 12 aa, Homo sapiens
  CDR3 for beta chain variable domain of TCR clone 137777 (TRBV7-3, TRBJ2-1)
CASSFQSGPQFF

SEQ ID NO: 275555 - protein, 22 aa, Homo sapiens
  CDR3 for alpha chain variable domain of TCR clone 137778 (TRAV1-1, TRAJ11)
CLLLLRCERLKLMNSGYSTLTF

SEQ ID NO: 275556 - protein, 19 aa, Homo sapiens
  CDR3 for beta chain variable domain of TCR clone 137778 (TRBV7-2, TRBJ2-3)
CASSFLSRNWGGGTDTQYF

SEQ ID NO: 275557 - protein, 15 aa, Homo sapiens
  CDR3 for alpha chain variable domain of TCR clone 137779 (TRAV8-3, TRAJ6)
CAVGPLGGGSYIPTC

SEQ ID NO: 275558 - protein, 14 aa, Homo sapiens
  CDR3 for beta chain variable domain of TCR clone 137779 (TRBV19, TRBJ2-2)
CASSTGQGAGELFF

SEQ ID NO: 275559 - protein, 10 aa, Homo sapiens
  CDR3 for alpha chain variable domain of TCR clone 137780 (TRAV25, TRAJ21)
CLYNFNKFYF

SEQ ID NO: 275560 - protein, 16 aa, Homo sapiens
  CDR3 for beta chain variable domain of TCR clone 137780 (TRBV18, TRBJ1-5)
CASSPRTGGGNQPQHF

SEQ ID NO: 275561 - protein, 16 aa, Homo sapiens
  CDR3 for alpha chain variable domain of TCR clone 137781 (TRAV30, TRAJ24)
CGTEIVDADSWGKFQF

SEQ ID NO: 275562 - protein, 15 aa, Homo sapiens
  CDR3 for beta chain variable domain of TCR clone 137781 (TRBV10-3, TRBJ2-1)
CAISDVQDRAYEQFF

SEQ ID NO: 275563 - protein, 20 aa, Homo sapiens
  CDR3 for alpha chain variable domain of TCR clone 137782 (TRAV13-1, TRAJ9)
CASHTGGFKISLEQEQDYLL

SEQ ID NO: 275564 - protein, 18 aa, Homo sapiens
  CDR3 for beta chain variable domain of TCR clone 137782 (TRBV11-2, TRBJ2-3)
CASSLGGASRGAPNTQYF

SEQ ID NO: 275565 - protein, 14 aa, Homo sapiens
  CDR3 for alpha chain variable domain of TCR clone 137783 (TRAV1-2, TRAJ16)
CAVNRFSDGQKLLF

SEQ ID NO: 275566 - protein, 13 aa, Homo sapiens
  CDR3 for beta chain variable domain of TCR clone 137783 (TRBV7-7, TRBJ2-2)
CASSLTSAGELFV

SEQ ID NO: 275567 - protein, 14 aa, Homo sapiens
  CDR3 for alpha chain variable domain of TCR clone 137784 (TRAV1-2, TRAJ8)
CAVREDTGFQKLVF

SEQ ID NO: 275568 - protein, 14 aa, Homo sapiens
  CDR3 for beta chain variable domain of TCR clone 137784 (TRBV27, TRBJ2-5)
CASSSLKGWETQYF

SEQ ID NO: 275569 - protein, 11 aa, Homo sapiens
  CDR3 for alpha chain variable domain of TCR clone 137785 (TRAV12-3, TRAJ26)
CAMSHGQNFVF

SEQ ID NO: 275570 - protein, 13 aa, Homo sapiens
  CDR3 for beta chain variable domain of TCR clone 137785 (TRBV11-2, TRBJ1-1)
CASSFTENTEAFF

SEQ ID NO: 275571 - protein, 22 aa, Homo sapiens
  CDR3 for alpha chain variable domain of TCR clone 137786 (TRAV4, )
CLVGPHNYDIQNPDPAVYQLRD

SEQ ID NO: 275572 - protein, 13 aa, Homo sapiens
  CDR3 for beta chain variable domain of TCR clone 137786 (TRBV10-3, TRBJ1-2)
CAISERDSYGYTF

SEQ ID NO: 275573 - protein, 15 aa, Homo sapiens
  CDR3 for alpha chain variable domain of TCR clone 137787 (TRAV12-2, TRAJ53)
CAVKGGGGSNYKLTF

SEQ ID NO: 275574 - protein, 13 aa, Homo sapiens
  CDR3 for beta chain variable domain of TCR clone 137787 (TRBV3-1, TRBJ1-1)
CASSPGVITEAFF

SEQ ID NO: 275575 - protein, 13 aa, Homo sapiens
  CDR3 for alpha chain variable domain of TCR clone 137788 (TRAV8-6, TRAJ49)
CAVITNTCNQFYF

SEQ ID NO: 275576 - protein, 15 aa, Homo sapiens
  CDR3 for beta chain variable domain of TCR clone 137788 (TRBV18, TRBJ2-1)
CASSPPSASYNEQFF

SEQ ID NO: 275577 - protein, 12 aa, Homo sapiens
  CDR3 for alpha chain variable domain of TCR clone 137789 (TRAV17, TRAJ16)
CATVLPGQKPLF

SEQ ID NO: 275578 - protein, 16 aa, Homo sapiens
  CDR3 for beta chain variable domain of TCR clone 137789 (TRBV6-1, TRBJ2-5)
CASSETLDRGAETQYF

SEQ ID NO: 275579 - protein, 16 aa, Homo sapiens
  CDR3 for alpha chain variable domain of TCR clone 137790 (TRAV13-1, TRAJ18)
CAASRMRGSTLGRLYF

SEQ ID NO: 275580 - protein, 15 aa, Homo sapiens
  CDR3 for beta chain variable domain of TCR clone 137790 (TRBV9, TRBJ1-6)
CASSVAGTGDSPLHF

SEQ ID NO: 275581 - protein, 13 aa, Homo sapiens
  CDR3 for alpha chain variable domain of TCR clone 137791 (TRAV12-3, TRAJ13)
CAMTSGAYQKVTF

SEQ ID NO: 275582 - protein, 13 aa, Homo sapiens
  CDR3 for beta chain variable domain of TCR clone 137791 (TRBV7-9, TRBJ1-2)
CASSLKQNYGYTF

SEQ ID NO: 275583 - protein, 13 aa, Homo sapiens
  CDR3 for alpha chain variable domain of TCR clone 137792 (TRAV14/DV4, TRAJ23)
CAMREVKGGKLIF

SEQ ID NO: 275584 - protein, 12 aa, Homo sapiens
  CDR3 for beta chain variable domain of TCR clone 137792 (TRBV7-9, TRBJ2-7)
CASSFGSYEQYF

SEQ ID NO: 275585 - protein, 11 aa, Homo sapiens
  CDR3 for alpha chain variable domain of TCR clone 137793 (TRAV12-1, TRAJ21)
CVVNNFNKFYF

SEQ ID NO: 275586 - protein, 14 aa, Homo sapiens
  CDR3 for beta chain variable domain of TCR clone 137793 (TRBV15, TRBJ1-5)
CATSREQSNQPQHV

SEQ ID NO: 275587 - protein, 15 aa, Homo sapiens
  CDR3 for alpha chain variable domain of TCR clone 137794 (TRAV26-1, TRAJ17)
CIVRVVKAAGNKLAF

SEQ ID NO: 275588 - protein, 16 aa, Homo sapiens
  CDR3 for beta chain variable domain of TCR clone 137794 (TRBV7-9, TRBJ2-1)
CASSLVSGPSYNEQFF

SEQ ID NO: 275589 - protein, 14 aa, Homo sapiens
  CDR3 for alpha chain variable domain of TCR clone 137795 (TRAV29/DV5, TRAJ32)
CAAAYGGGTNKLIF

SEQ ID NO: 275590 - protein, 15 aa, Homo sapiens
  CDR3 for beta chain variable domain of TCR clone 137795 (TRBV27, TRBJ2-7)
CASSTAGTGSYEQYF

SEQ ID NO: 275591 - protein, 13 aa, Homo sapiens
  CDR3 for alpha chain variable domain of TCR clone 137796 (TRAV23/DV6, TRAJ6)
CAEKTGGSYIPTF

SEQ ID NO: 275592 - protein, 15 aa, Homo sapiens
  CDR3 for beta chain variable domain of TCR clone 137796 (TRBV5-1, TRBJ1-2)
CASSSYGEFDYGYTF

SEQ ID NO: 275593 - protein, 15 aa, Homo sapiens
  CDR3 for alpha chain variable domain of TCR clone 137797 (TRAV26-1, TRAJ56)
CIVRVDNGANSKLTF

SEQ ID NO: 275594 - protein, 15 aa, Homo sapiens
  CDR3 for beta chain variable domain of TCR clone 137797 (TRBV20-1, TRBJ2-7)
CSARDTTEVGHEQYF

SEQ ID NO: 275595 - protein, 16 aa, Homo sapiens
  CDR3 for alpha chain variable domain of TCR clone 137798 (TRAV30, TRAJ24)
CGTEIVDADSWGKFQF

SEQ ID NO: 275596 - protein, 14 aa, Homo sapiens
  CDR3 for beta chain variable domain of TCR clone 137798 (TRBV20-1, TRBJ2-7)
CSAKTGTGGYEQYF

SEQ ID NO: 275597 - protein, 13 aa, Homo sapiens
  CDR3 for alpha chain variable domain of TCR clone 137799 (TRAV24, TRAJ43)
CAFTRHNNNDMRF

SEQ ID NO: 275598 - protein, 15 aa, Homo sapiens
  CDR3 for beta chain variable domain of TCR clone 137799 (TRBV7-9, TRBJ2-7)
CASSLALAEAYEQYF

SEQ ID NO: 275599 - protein, 13 aa, Homo sapiens
  CDR3 for alpha chain variable domain of TCR clone 137800 (TRAV17, TRAJ5)
CALRGTGRRALTF

SEQ ID NO: 275600 - protein, 16 aa, Homo sapiens
  CDR3 for beta chain variable domain of TCR clone 137800 (TRBV7-9, TRBJ2-1)
CASSDVAGGSYNEQFF

SEQ ID NO: 275601 - protein, 13 aa, Homo sapiens
  CDR3 for alpha chain variable domain of TCR clone 137801 (TRAV8-4, TRAJ10)
CAALTGRGNKLTF

SEQ ID NO: 275602 - protein, 15 aa, Homo sapiens
  CDR3 for beta chain variable domain of TCR clone 137801 (TRBV2, TRBJ2-3)
CASSDFEKATDTQYF

SEQ ID NO: 275603 - protein, 14 aa, Homo sapiens
  CDR3 for alpha chain variable domain of TCR clone 137802 (TRAV17, TRAJ12)
CAILSMDSSYKLIF

SEQ ID NO: 275604 - protein, 11 aa, Homo sapiens
  CDR3 for beta chain variable domain of TCR clone 137802 (TRBV19, TRBJ1-1)
CASSIGSEAFF

SEQ ID NO: 275605 - protein, 15 aa, Homo sapiens
  CDR3 for alpha chain variable domain of TCR clone 137803 (TRAV35, TRAJ40)
CAGQLGTSGTYKYIF

SEQ ID NO: 275606 - protein, 13 aa, Homo sapiens
  CDR3 for beta chain variable domain of TCR clone 137803 (TRBV19, TRBJ1-3)
CASRLSLGNTIYF

SEQ ID NO: 275607 - protein, 13 aa, Homo sapiens
  CDR3 for alpha chain variable domain of TCR clone 137804 (TRAV8-2, TRAJ47)
CVVSEREGNKLVF

SEQ ID NO: 275608 - protein, 16 aa, Homo sapiens
  CDR3 for beta chain variable domain of TCR clone 137804 (TRBV5-1, TRBJ1-1)
CASSKTGAEVGTEAFF

SEQ ID NO: 275609 - protein, 12 aa, Homo sapiens
  CDR3 for alpha chain variable domain of TCR clone 137805 (TRAV2, TRAJ45)
CAEEEVLTVSPL

SEQ ID NO: 275610 - protein, 14 aa, Homo sapiens
  CDR3 for beta chain variable domain of TCR clone 137805 (TRBV27, TRBJ2-5)
CASSWREGLETQYF

SEQ ID NO: 275611 - protein, 12 aa, Homo sapiens
  CDR3 for alpha chain variable domain of TCR clone 137806 (TRAV23/DV6, TRAJ16)
CAARGHGQKLLF

SEQ ID NO: 275612 - protein, 15 aa, Homo sapiens
  CDR3 for beta chain variable domain of TCR clone 137806 (TRBV15, TRBJ2-1)
CATSRPGQGLHEQFF

SEQ ID NO: 275613 - protein, 18 aa, Homo sapiens
  CDR3 for alpha chain variable domain of TCR clone 137807 (TRAV38-2/DV8, TRAJ42)
CAYRSADLTGGSKGNLIF

SEQ ID NO: 275614 - protein, 12 aa, Homo sapiens
  CDR3 for beta chain variable domain of TCR clone 137807 (TRBV11-2, TRBJ2-2)
CASSLGGGELFF

SEQ ID NO: 275615 - protein, 11 aa, Homo sapiens
  CDR3 for alpha chain variable domain of TCR clone 137808 (TRAV2, TRAJ33)
CAVDSNYQLIW

SEQ ID NO: 275616 - protein, 16 aa, Homo sapiens
  CDR3 for beta chain variable domain of TCR clone 137808 (TRBV29-1, TRBJ2-7)
CSVEVVWTSGSYEQYF

SEQ ID NO: 275617 - protein, 15 aa, Homo sapiens
  CDR3 for alpha chain variable domain of TCR clone 137809 (TRAV12-2, TRAJ20)
CAVKGGFGAGTTVTV

SEQ ID NO: 275618 - protein, 13 aa, Homo sapiens
  CDR3 for beta chain variable domain of TCR clone 137809 (TRBV12-4, TRBJ2-7)
CASSPGQLYEQFF

SEQ ID NO: 275619 - protein, 16 aa, Homo sapiens
  CDR3 for alpha chain variable domain of TCR clone 137810 (TRAV26-1, TRAJ37)
CIVRGDDSGNTGKLIF

SEQ ID NO: 275620 - protein, 13 aa, Homo sapiens
  CDR3 for beta chain variable domain of TCR clone 137810 (TRBV4-1, TRBJ2-2)
CASSQENTGELFF

SEQ ID NO: 275621 - protein, 11 aa, Homo sapiens
  CDR3 for alpha chain variable domain of TCR clone 137811 (TRAV2, TRAJ33)
CAVESNSQLIW

SEQ ID NO: 275622 - protein, 15 aa, Homo sapiens
  CDR3 for beta chain variable domain of TCR clone 137811 (TRBV19, TRBJ1-1)
CASTSGQIQNTESFF

SEQ ID NO: 275623 - protein, 12 aa, Homo sapiens
  CDR3 for alpha chain variable domain of TCR clone 137812 (TRAV13-2, TRAJ23)
CAERHRGGKLIF

SEQ ID NO: 275624 - protein, 16 aa, Homo sapiens
  CDR3 for beta chain variable domain of TCR clone 137812 (TRBV23-1, TRBJ2-1)
CISAPATGPTYNEQFF

SEQ ID NO: 275625 - protein, 15 aa, Homo sapiens
  CDR3 for alpha chain variable domain of TCR clone 137813 (TRAV13-2, TRAJ10)
CAENRDTGGGNKVTF

SEQ ID NO: 275626 - protein, 16 aa, Homo sapiens
  CDR3 for beta chain variable domain of TCR clone 137813 (TRBV2, TRBJ1-3)
CASSRTGGSTGNTIYF

SEQ ID NO: 275627 - protein, 14 aa, Homo sapiens
  CDR3 for alpha chain variable domain of TCR clone 137814 (TRAV12-2, TRAJ13)
CAVKKNGGYQKVTF

SEQ ID NO: 275628 - protein, 15 aa, Homo sapiens
  CDR3 for beta chain variable domain of TCR clone 137814 (TRBV5-1, TRBJ2-5)
CASSLGLAEQETQYF

SEQ ID NO: 275629 - protein, 11 aa, Homo sapiens
  CDR3 for alpha chain variable domain of TCR clone 137815 (TRAV21, TRAJ34)
CAHYNTDKLIF

SEQ ID NO: 275630 - protein, 13 aa, Homo sapiens
  CDR3 for beta chain variable domain of TCR clone 137815 (TRBV7-6, TRBJ1-2)
CASSFVADYGYTF

SEQ ID NO: 275631 - protein, 14 aa, Homo sapiens
  CDR3 for alpha chain variable domain of TCR clone 137816 (TRAV16, TRAJ26)
CALSSANYGHNFVF

SEQ ID NO: 275632 - protein, 12 aa, Homo sapiens
  CDR3 for beta chain variable domain of TCR clone 137816 (TRBV6-5, TRBJ2-2)
CASRTGTGELFF

SEQ ID NO: 275633 - protein, 14 aa, Homo sapiens
  CDR3 for alpha chain variable domain of TCR clone 137817 (TRAV12-2, TRAJ44)
CAVNKAGTASKLTF

SEQ ID NO: 275634 - protein, 15 aa, Homo sapiens
  CDR3 for beta chain variable domain of TCR clone 137817 (TRBV28, TRBJ2-1)
CASSIIAGGRSEQFF

SEQ ID NO: 275635 - protein, 15 aa, Homo sapiens
  CDR3 for alpha chain variable domain of TCR clone 137818 (TRAV8-4, TRAJ37)
CAVSRGSGNTGKLTF

SEQ ID NO: 275636 - protein, 16 aa, Homo sapiens
  CDR3 for beta chain variable domain of TCR clone 137818 (TRBV7-3, TRBJ2-3)
CASSLSGYRPEDTQYF

SEQ ID NO: 275637 - protein, 15 aa, Homo sapiens
  CDR3 for alpha chain variable domain of TCR clone 137819 (TRAV26-1, TRAJ29)
CIVRVEGSGNTPPVF

SEQ ID NO: 275638 - protein, 13 aa, Homo sapiens
  CDR3 for beta chain variable domain of TCR clone 137819 (TRBV25-1, TRBJ2-5)
CASSPGGVETQYF

SEQ ID NO: 275639 - protein, 13 aa, Homo sapiens
  CDR3 for alpha chain variable domain of TCR clone 137820 (TRAV20, TRAJ20)
CAVRWVRDYKLSF

SEQ ID NO: 275640 - protein, 14 aa, Homo sapiens
  CDR3 for beta chain variable domain of TCR clone 137820 (TRBV19, TRBJ2-2)
CASTVTANTGEVFF

SEQ ID NO: 275641 - protein, 13 aa, Homo sapiens
  CDR3 for alpha chain variable domain of TCR clone 137821 (TRAV13-2, TRAJ48)
CAEMDFGNEKLTF

SEQ ID NO: 275642 - protein, 15 aa, Homo sapiens
  CDR3 for beta chain variable domain of TCR clone 137821 (TRBV20-1, TRBJ1-1)
CSASRGVTGNTEAFF

SEQ ID NO: 275643 - protein, 12 aa, Homo sapiens
  CDR3 for alpha chain variable domain of TCR clone 137822 (TRAV17, TRAJ30)
CATDARDNKIIF

SEQ ID NO: 275644 - protein, 15 aa, Homo sapiens
  CDR3 for beta chain variable domain of TCR clone 137822 (TRBV4-1, TRBJ2-1)
CASSQGGELYNEQFF

SEQ ID NO: 275645 - protein, 11 aa, Homo sapiens
  CDR3 for alpha chain variable domain of TCR clone 137823 (TRAV3, TRAJ21)
SAVGNFNKFYF

SEQ ID NO: 275646 - protein, 14 aa, Homo sapiens
  CDR3 for beta chain variable domain of TCR clone 137823 (TRBV18, TRBJ2-5)
CASSPGVSQETQYF

SEQ ID NO: 275647 - protein, 16 aa, Homo sapiens
  CDR3 for alpha chain variable domain of TCR clone 137824 (TRAV16, TRAJ52)
CALSAAGGTSYGKLTF

SEQ ID NO: 275648 - protein, 16 aa, Homo sapiens
  CDR3 for beta chain variable domain of TCR clone 137824 (TRBV7-3, TRBJ2-3)
CASSPGAGRFTDTQYF

SEQ ID NO: 275649 - protein, 15 aa, Homo sapiens
  CDR3 for alpha chain variable domain of TCR clone 137825 (TRAV8-3, TRAJ11)
CAVGLLNSGYSTLTF

SEQ ID NO: 275650 - protein, 17 aa, Homo sapiens
  CDR3 for beta chain variable domain of TCR clone 137825 (TRBV7-3, TRBJ2-3)
CASSLMKRMRGADTQYF

SEQ ID NO: 275651 - protein, 11 aa, Homo sapiens
  CDR3 for alpha chain variable domain of TCR clone 137826 (TRAV12-3, TRAJ43)
CAMSVSNDMRF

SEQ ID NO: 275652 - protein, 16 aa, Homo sapiens
  CDR3 for beta chain variable domain of TCR clone 137826 (TRBV4-2, TRBJ2-7)
CASSQDGVERGYEQYF

SEQ ID NO: 275653 - protein, 14 aa, Homo sapiens
  CDR3 for alpha chain variable domain of TCR clone 137827 (TRAV8-3, TRAJ39)
CAVGANNAGNMLTF

SEQ ID NO: 275654 - protein, 15 aa, Homo sapiens
  CDR3 for beta chain variable domain of TCR clone 137827 (TRBV4-3, TRBJ1-1)
CASSQELGRGTEAFF

SEQ ID NO: 275655 - protein, 12 aa, Homo sapiens
  CDR3 for alpha chain variable domain of TCR clone 137828 (TRAV12-3, TRAJ17)
CAMTLTGNKLTF

SEQ ID NO: 275656 - protein, 14 aa, Homo sapiens
  CDR3 for beta chain variable domain of TCR clone 137828 (TRBV19, TRBJ2-2)
CGSSTLHRSGELFF

SEQ ID NO: 275657 - protein, 12 aa, Homo sapiens
  CDR3 for alpha chain variable domain of TCR clone 137829 (TRAV12-1, )
CVVNSWISRTLT

SEQ ID NO: 275658 - protein, 13 aa, Homo sapiens
  CDR3 for beta chain variable domain of TCR clone 137829 (TRBV27, TRBJ2-7)
CASGRGGAYEQYF

SEQ ID NO: 275659 - protein, 13 aa, Homo sapiens
  CDR3 for alpha chain variable domain of TCR clone 137830 (TRAV26-1, TRAJ33)
CIVRVDSNYQLIW

SEQ ID NO: 275660 - protein, 15 aa, Homo sapiens
  CDR3 for beta chain variable domain of TCR clone 137830 (TRBV7-2, TRBJ1-5)
CASSFSAAINQPQHF

SEQ ID NO: 275661 - protein, 17 aa, Homo sapiens
  CDR3 for alpha chain variable domain of TCR clone 137831 (TRAV14/DV4, TRAJ28)
CAMREVSSGAGSYQLTS

SEQ ID NO: 275662 - protein, 15 aa, Homo sapiens
  CDR3 for beta chain variable domain of TCR clone 137831 (TRBV11-2, TRBJ1-6)
CASTLRETGNSPLHF

SEQ ID NO: 275663 - protein, 19 aa, Homo sapiens
  CDR3 for alpha chain variable domain of TCR clone 137832 (TRAV1-2, TRAJ26)
CLLPLCCERRDNYGQNFVF

SEQ ID NO: 275664 - protein, 17 aa, Homo sapiens
  CDR3 for beta chain variable domain of TCR clone 137832 (TRBV28, TRBJ2-5)
CASSRQGGLAGAETQYF

SEQ ID NO: 275665 - protein, 12 aa, Homo sapiens
  CDR3 for alpha chain variable domain of TCR clone 137833 (TRAV12-3, TRAJ29)
CAASEGNTPLVF

SEQ ID NO: 275666 - protein, 17 aa, Homo sapiens
  CDR3 for beta chain variable domain of TCR clone 137833 (TRBV18, TRBJ2-1)
CASSPLAAGAGDNEQFF

SEQ ID NO: 275667 - protein, 10 aa, Homo sapiens
  CDR3 for alpha chain variable domain of TCR clone 137834 (TRAV1-2, TRAJ20)
CACNDYKLSF

SEQ ID NO: 275668 - protein, 16 aa, Homo sapiens
  CDR3 for beta chain variable domain of TCR clone 137834 (TRBV20-1, TRBJ2-1)
CSARDLKQCMNNEQFF

SEQ ID NO: 275669 - protein, 12 aa, Homo sapiens
  CDR3 for alpha chain variable domain of TCR clone 137835 (TRAV1-1, TRAJ39)
CAVPVVGNMLTF

SEQ ID NO: 275670 - protein, 15 aa, Homo sapiens
  CDR3 for beta chain variable domain of TCR clone 137835 (TRBV7-9, TRBJ1-5)
CASSQGHQPNQTQHF

SEQ ID NO: 275671 - protein, 16 aa, Homo sapiens
  CDR3 for alpha chain variable domain of TCR clone 137836 (TRAV26-1, TRAJ53)
CIVRVAMGDSNYKLTF

SEQ ID NO: 275672 - protein, 12 aa, Homo sapiens
  CDR3 for beta chain variable domain of TCR clone 137836 (TRBV7-9, TRBJ1-5)
CASSPQGQPQHF

SEQ ID NO: 275673 - protein, 16 aa, Homo sapiens
  CDR3 for alpha chain variable domain of TCR clone 137837 (TRAV35, TRAJ28)
CAGQRYSGAGSYQLTF

SEQ ID NO: 275674 - protein, 15 aa, Homo sapiens
  CDR3 for beta chain variable domain of TCR clone 137837 (TRBV19, TRBJ2-4)
CASRGPRRGENIQYF

SEQ ID NO: 275675 - protein, 12 aa, Homo sapiens
  CDR3 for alpha chain variable domain of TCR clone 137838 (TRAV12-2, TRAJ8)
RAVNTGFQKLVF

SEQ ID NO: 275676 - protein, 15 aa, Homo sapiens
  CDR3 for beta chain variable domain of TCR clone 137838 (TRBV7-8, TRBJ1-5)
CASSLERRGLEPQHF

SEQ ID NO: 275677 - protein, 13 aa, Homo sapiens
  CDR3 for alpha chain variable domain of TCR clone 137839 (TRAV8-3, TRAJ43)
CAVVADNNNDMRF

SEQ ID NO: 275678 - protein, 13 aa, Homo sapiens
  CDR3 for beta chain variable domain of TCR clone 137839 (TRBV4-2, TRBJ1-1)
CASSQAGNTEAFF

SEQ ID NO: 275679 - protein, 16 aa, Homo sapiens
  CDR3 for alpha chain variable domain of TCR clone 137840 (TRAV27, TRAJ13)
CAGAKSDSGGYQKVTF

SEQ ID NO: 275680 - protein, 15 aa, Homo sapiens
  CDR3 for beta chain variable domain of TCR clone 137840 (TRBV20-1, TRBJ2-7)
CSARDQVSGMDEQYF

SEQ ID NO: 275681 - protein, 14 aa, Homo sapiens
  CDR3 for alpha chain variable domain of TCR clone 137841 (TRAV12-3, TRAJ10)
SHLPLTGGGNKLTF

SEQ ID NO: 275682 - protein, 13 aa, Homo sapiens
  CDR3 for beta chain variable domain of TCR clone 137841 (TRBV25-1, TRBJ1-1)
CASRGPAVTEAFF

SEQ ID NO: 275683 - protein, 14 aa, Homo sapiens
  CDR3 for alpha chain variable domain of TCR clone 137842 (TRAV13-1, TRAJ9)
CAASALTGGFKTIF

SEQ ID NO: 275684 - protein, 14 aa, Homo sapiens
  CDR3 for beta chain variable domain of TCR clone 137842 (TRBV12-4, TRBJ1-3)
CASSLRGSGNTIYF

SEQ ID NO: 275685 - protein, 11 aa, Homo sapiens
  CDR3 for alpha chain variable domain of TCR clone 137843 (TRAV3, TRAJ13)
CALTSYQKVTF

SEQ ID NO: 275686 - protein, 15 aa, Homo sapiens
  CDR3 for beta chain variable domain of TCR clone 137843 (TRBV7-9, TRBJ2-7)
CASSSSGLAVYEQFF

SEQ ID NO: 275687 - protein, 12 aa, Homo sapiens
  CDR3 for alpha chain variable domain of TCR clone 137844 (TRAV1-1, TRAJ24)
CAATDSWGKLQF

SEQ ID NO: 275688 - protein, 14 aa, Homo sapiens
  CDR3 for beta chain variable domain of TCR clone 137844 (TRBV4-2, TRBJ2-1)
CASGLDRAYNEQFF

SEQ ID NO: 275689 - protein, 15 aa, Homo sapiens
  CDR3 for alpha chain variable domain of TCR clone 137845 (TRAV12-1, TRAJ45)
CVVLIGGGGADGLTF

SEQ ID NO: 275690 - protein, 14 aa, Homo sapiens
  CDR3 for beta chain variable domain of TCR clone 137845 (TRBV11-2, TRBJ2-5)
CASSRTGGIETQYF

SEQ ID NO: 275691 - protein, 16 aa, Homo sapiens
  CDR3 for alpha chain variable domain of TCR clone 137846 (TRAV17, TRAJ28)
CATASVSGAGSYQLTF

SEQ ID NO: 275692 - protein, 13 aa, Homo sapiens
  CDR3 for beta chain variable domain of TCR clone 137846 (TRBV7-9, TRBJ2-5)
CASLSPGQETQYF

SEQ ID NO: 275693 - protein, 13 aa, Homo sapiens
  CDR3 for alpha chain variable domain of TCR clone 137847 (TRAV12-2, TRAJ20)
CAVYPSNDYKPSF

SEQ ID NO: 275694 - protein, 15 aa, Homo sapiens
  CDR3 for beta chain variable domain of TCR clone 137847 (TRBV27, TRBJ2-5)
CASSLYPRGGGTQYF

SEQ ID NO: 275695 - protein, 11 aa, Homo sapiens
  CDR3 for alpha chain variable domain of TCR clone 137848 (TRAV17, TRAJ43)
WATPRSNDMRF

SEQ ID NO: 275696 - protein, 15 aa, Homo sapiens
  CDR3 for beta chain variable domain of TCR clone 137848 (TRBV11-2, TRBJ2-1)
CASSLGTSGLNGQFF

SEQ ID NO: 275697 - protein, 14 aa, Homo sapiens
  CDR3 for alpha chain variable domain of TCR clone 137849 (TRAV12-3, TRAJ10)
SDLPLTGGGNKLTF

SEQ ID NO: 275698 - protein, 15 aa, Homo sapiens
  CDR3 for beta chain variable domain of TCR clone 137849 (TRBV25-1, TRBJ2-4)
CASSETESAKNIQYF

SEQ ID NO: 275699 - protein, 23 aa, Homo sapiens
  CDR3 for alpha chain variable domain of TCR clone 137850 (TRAV26-1, TRAJ38)
CIADNAGNNHIQNPDPAVYQLRD

SEQ ID NO: 275700 - protein, 13 aa, Homo sapiens
  CDR3 for beta chain variable domain of TCR clone 137850 (TRBV15, TRBJ1-6)
CATSGGLNSPLHF

SEQ ID NO: 275701 - protein, 13 aa, Homo sapiens
  CDR3 for alpha chain variable domain of TCR clone 137851 (TRAV30, TRAJ26)
CGTEIPLGQNFVF

SEQ ID NO: 275702 - protein, 13 aa, Homo sapiens
  CDR3 for beta chain variable domain of TCR clone 137851 (TRBV12-4, TRBJ1-1)
CASSPGTGFEAFF

SEQ ID NO: 275703 - protein, 12 aa, Homo sapiens
  CDR3 for alpha chain variable domain of TCR clone 137852 (TRAV2, TRAJ31)
CAVEDNNARLMF

SEQ ID NO: 275704 - protein, 16 aa, Homo sapiens
  CDR3 for beta chain variable domain of TCR clone 137852 (TRBV10-3, TRBJ2-1)
CAISGVWDGGGGEQFF

SEQ ID NO: 275705 - protein, 14 aa, Homo sapiens
  CDR3 for alpha chain variable domain of TCR clone 137853 (TRAV8-2, TRAJ23)
FVVSDDNQGGKLIF

SEQ ID NO: 275706 - protein, 16 aa, Homo sapiens
  CDR3 for beta chain variable domain of TCR clone 137853 (TRBV3-1, TRBJ1-2)
CASSQGQGVQRDGYTF

SEQ ID NO: 275707 - protein, 13 aa, Homo sapiens
  CDR3 for alpha chain variable domain of TCR clone 137854 (TRAV21, TRAJ27)
CAARPGNAGKSTF

SEQ ID NO: 275708 - protein, 14 aa, Homo sapiens
  CDR3 for beta chain variable domain of TCR clone 137854 (TRBV19, TRBJ2-1)
CASPTCVLSGEQFF

SEQ ID NO: 275709 - protein, 11 aa, Homo sapiens
  CDR3 for alpha chain variable domain of TCR clone 137855 (TRAV29/DV5, TRAJ49)
CAAVPDNQFYF

SEQ ID NO: 275710 - protein, 17 aa, Homo sapiens
  CDR3 for beta chain variable domain of TCR clone 137855 (TRBV4-2, TRBJ1-1)
CASTQFGGGSGNTEAFF

SEQ ID NO: 275711 - protein, 18 aa, Homo sapiens
  CDR3 for alpha chain variable domain of TCR clone 137856 (TRAV26-2, TRAJ54)
CILRDVEVGIQGAQKLVF

SEQ ID NO: 275712 - protein, 17 aa, Homo sapiens
  CDR3 for beta chain variable domain of TCR clone 137856 (TRBV28, TRBJ2-5)
CASSRQGGLAGAETQYF

SEQ ID NO: 275713 - protein, 17 aa, Homo sapiens
  CDR3 for alpha chain variable domain of TCR clone 137857 (TRAV13-2, TRAJ42)
CAEGASHYGGSQGNLIS

SEQ ID NO: 275714 - protein, 16 aa, Homo sapiens
  CDR3 for beta chain variable domain of TCR clone 137857 (TRBV10-3, TRBJ2-7)
CAISADFADRPYEQYF

SEQ ID NO: 275715 - protein, 15 aa, Homo sapiens
  CDR3 for alpha chain variable domain of TCR clone 137858 (TRAV3, TRAJ45)
CAVRTPWGGADGLTF

SEQ ID NO: 275716 - protein, 13 aa, Homo sapiens
  CDR3 for beta chain variable domain of TCR clone 137858 (TRBV27, TRBJ2-1)
CASRTLGVGEQFF

SEQ ID NO: 275717 - protein, 14 aa, Homo sapiens
  CDR3 for alpha chain variable domain of TCR clone 137859 (TRAV17, TRAJ31)
CATVLRKNNARLMF

SEQ ID NO: 275718 - protein, 14 aa, Homo sapiens
  CDR3 for beta chain variable domain of TCR clone 137859 (TRBV12-4, TRBJ2-5)
CASSLWQKQETQYF

SEQ ID NO: 275719 - protein, 13 aa, Homo sapiens
  CDR3 for alpha chain variable domain of TCR clone 137860 (TRAV38-1, TRAJ42)
CARWGGSQGNPIF

SEQ ID NO: 275720 - protein, 14 aa, Homo sapiens
  CDR3 for beta chain variable domain of TCR clone 137860 (TRBV12-4, TRBJ2-1)
CASSLGQGASEQFF

SEQ ID NO: 275721 - protein, 23 aa, Homo sapiens
  CDR3 for alpha chain variable domain of TCR clone 137861 (TRAV12-2, TRAJ36)
SLLIRDSQPSDSATLERANNLFF

SEQ ID NO: 275722 - protein, 15 aa, Homo sapiens
  CDR3 for beta chain variable domain of TCR clone 137861 (TRBV11-3, TRBJ2-3)
CASLKDGREGDTQYF

SEQ ID NO: 275723 - protein, 14 aa, Homo sapiens
  CDR3 for alpha chain variable domain of TCR clone 137862 (TRAV12-3, TRAJ10)
SHLPLTGGGNKLTF

SEQ ID NO: 275724 - protein, 16 aa, Homo sapiens
  CDR3 for beta chain variable domain of TCR clone 137862 (TRBV18, TRBJ1-3)
CASSLGILNSENTIYF

SEQ ID NO: 275725 - protein, 12 aa, Homo sapiens
  CDR3 for alpha chain variable domain of TCR clone 137863 (TRAV25, TRAJ11)
CAGASGYSTLAF

SEQ ID NO: 275726 - protein, 14 aa, Homo sapiens
  CDR3 for beta chain variable domain of TCR clone 137863 (TRBV5-8, TRBJ2-3)
CASSLGQGTDTQYF

SEQ ID NO: 275727 - protein, 14 aa, Homo sapiens
  CDR3 for alpha chain variable domain of TCR clone 137864 (TRAV2, TRAJ9)
CAVEDRSGGSKTIF

SEQ ID NO: 275728 - protein, 15 aa, Homo sapiens
  CDR3 for beta chain variable domain of TCR clone 137864 (TRBV19, TRBJ2-1)
CASSSPGVPLDEQFF

SEQ ID NO: 275729 - protein, 15 aa, Homo sapiens
  CDR3 for alpha chain variable domain of TCR clone 137865 (TRAV36/DV7, TRAJ44)
CAVCRNTGTARKITF

SEQ ID NO: 275730 - protein, 13 aa, Homo sapiens
  CDR3 for beta chain variable domain of TCR clone 137865 (TRBV18, TRBJ2-3)
CASSTGRTDTQYF

SEQ ID NO: 275731 - protein, 12 aa, Homo sapiens
  CDR3 for alpha chain variable domain of TCR clone 137866 (TRAV38-1, TRAJ20)
CAFIWNDYKLSF

SEQ ID NO: 275732 - protein, 14 aa, Homo sapiens
  CDR3 for beta chain variable domain of TCR clone 137866 (TRBV19, TRBJ2-1)
CASSVGSGATEQFF

SEQ ID NO: 275733 - protein, 14 aa, Homo sapiens
  CDR3 for alpha chain variable domain of TCR clone 137867 (TRAV12-3, TRAJ10)
SHLPLTGGGNKLTF

SEQ ID NO: 275734 - protein, 15 aa, Homo sapiens
  CDR3 for beta chain variable domain of TCR clone 137867 (TRBV7-2, TRBJ2-7)
CASSLALGSAYEQYF

SEQ ID NO: 275735 - protein, 13 aa, Homo sapiens
  CDR3 for alpha chain variable domain of TCR clone 137868 (TRAV21, TRAJ20)
CAVGLRVDYKLSF

SEQ ID NO: 275736 - protein, 17 aa, Homo sapiens
  CDR3 for beta chain variable domain of TCR clone 137868 (TRBV28, TRBJ1-1)
CASSLSGTGYENTEAFF

SEQ ID NO: 275737 - protein, 15 aa, Homo sapiens
  CDR3 for alpha chain variable domain of TCR clone 137869 (TRAV17, TRAJ16)
CATALRFSDGQKLLF

SEQ ID NO: 275738 - protein, 15 aa, Homo sapiens
  CDR3 for beta chain variable domain of TCR clone 137869 (TRBV13, TRBJ1-5)
CASSSGQGCVQPQHF

SEQ ID NO: 275739 - protein, 13 aa, Homo sapiens
  CDR3 for alpha chain variable domain of TCR clone 137870 (TRAV38-1, TRAJ42)
GARWGESQGNLIF

SEQ ID NO: 275740 - protein, 17 aa, Homo sapiens
  CDR3 for beta chain variable domain of TCR clone 137870 (TRBV20-1, TRBJ2-1)
CGARDPLAGVWDNEQFF

SEQ ID NO: 275741 - protein, 12 aa, Homo sapiens
  CDR3 for alpha chain variable domain of TCR clone 137871 (TRAV38-2/DV8, TRAJ48)
CALLSGHEQLTF

SEQ ID NO: 275742 - protein, 15 aa, Homo sapiens
  CDR3 for beta chain variable domain of TCR clone 137871 (TRBV6-1, TRBJ2-1)
CASSELRGQYNEQFF

SEQ ID NO: 275743 - protein, 12 aa, Homo sapiens
  CDR3 for alpha chain variable domain of TCR clone 137872 (TRAV3, TRAJ17)
CAVRSCRQHANF

SEQ ID NO: 275744 - protein, 15 aa, Homo sapiens
  CDR3 for beta chain variable domain of TCR clone 137872 (TRBV2, TRBJ2-4)
CASSGTNLAKNIQYF

SEQ ID NO: 275745 - protein, 11 aa, Homo sapiens
  CDR3 for alpha chain variable domain of TCR clone 137873 (TRAV12-1, TRAJ3)
CVVSSASKIIF

SEQ ID NO: 275746 - protein, 14 aa, Homo sapiens
  CDR3 for beta chain variable domain of TCR clone 137873 (TRBV20-1, TRBJ2-5)
CSASGTSGGETQYF

SEQ ID NO: 275747 - protein, 17 aa, Homo sapiens
  CDR3 for alpha chain variable domain of TCR clone 137874 (TRAV3, TRAJ6)
CAVRDGPRAGGSYIPTF

SEQ ID NO: 275748 - protein, 14 aa, Homo sapiens
  CDR3 for beta chain variable domain of TCR clone 137874 (TRBV7-3, TRBJ2-7)
CASSLKADSYEQYF

SEQ ID NO: 275749 - protein, 15 aa, Homo sapiens
  CDR3 for alpha chain variable domain of TCR clone 137875 (TRAV3, TRAJ13)
CAVRGYSGGYQKVTF

SEQ ID NO: 275750 - protein, 15 aa, Homo sapiens
  CDR3 for beta chain variable domain of TCR clone 137875 (TRBV5-7, TRBJ1-2)
CASSLGVAANYGYTF

SEQ ID NO: 275751 - protein, 15 aa, Homo sapiens
  CDR3 for alpha chain variable domain of TCR clone 137876 (TRAV35, TRAJ23)
CAGRRGYNQGGKLIF

SEQ ID NO: 275752 - protein, 16 aa, Homo sapiens
  CDR3 for beta chain variable domain of TCR clone 137876 (TRBV27, TRBJ2-1)
CASSSRLAGNYNEQFF

SEQ ID NO: 275753 - protein, 14 aa, Homo sapiens
  CDR3 for alpha chain variable domain of TCR clone 137877 (TRAV12-2, TRAJ13)
CAVKTTGGYQKVTF

SEQ ID NO: 275754 - protein, 13 aa, Homo sapiens
  CDR3 for beta chain variable domain of TCR clone 137877 (TRBV28, TRBJ2-7)
CASKAGGVYEQYF

SEQ ID NO: 275755 - protein, 11 aa, Homo sapiens
  CDR3 for alpha chain variable domain of TCR clone 137878 (TRAV21, TRAJ11)
CAVNGYSTLNF

SEQ ID NO: 275756 - protein, 11 aa, Homo sapiens
  CDR3 for beta chain variable domain of TCR clone 137878 (TRBV19, TRBJ1-1)
CFSSIGSEAFF

SEQ ID NO: 275757 - protein, 14 aa, Homo sapiens
  CDR3 for alpha chain variable domain of TCR clone 137879 (TRAV2, TRAJ37)
CAVDFTSNTGKLIF

SEQ ID NO: 275758 - protein, 15 aa, Homo sapiens
  CDR3 for beta chain variable domain of TCR clone 137879 (TRBV20-1, TRBJ1-1)
CSASRGVTGKTEAFF

SEQ ID NO: 275759 - protein, 14 aa, Homo sapiens
  CDR3 for alpha chain variable domain of TCR clone 137880 (TRAV1-2, TRAJ16)
CAVNRFSDGQKRLF

SEQ ID NO: 275760 - protein, 13 aa, Homo sapiens
  CDR3 for beta chain variable domain of TCR clone 137880 (TRBV6-5, TRBJ1-1)
QTSVYFCALRAFF

SEQ ID NO: 275761 - protein, 13 aa, Homo sapiens
  CDR3 for alpha chain variable domain of TCR clone 137881 (TRAV20, TRAJ21)
CAVEGYNFNKFYF

SEQ ID NO: 275762 - protein, 16 aa, Homo sapiens
  CDR3 for beta chain variable domain of TCR clone 137881 (TRBV19, TRBJ1-5)
CASSIDRGGPRQPQHF

SEQ ID NO: 275763 - protein, 13 aa, Homo sapiens
  CDR3 for alpha chain variable domain of TCR clone 137882 (TRAV3, TRAJ26)
CAVSRGYGQNFVF

SEQ ID NO: 275764 - protein, 15 aa, Homo sapiens
  CDR3 for beta chain variable domain of TCR clone 137882 (TRBV6-5, TRBJ2-2)
CASSSGLGGTGELFF

SEQ ID NO: 275765 - protein, 16 aa, Homo sapiens
  CDR3 for alpha chain variable domain of TCR clone 137883 (TRAV3, TRAJ10)
CAVRDWLTGGGNKLTF

SEQ ID NO: 275766 - protein, 13 aa, Homo sapiens
  CDR3 for beta chain variable domain of TCR clone 137883 (TRBV7-9, TRBJ1-2)
CASSLKQNYGYTF

SEQ ID NO: 275767 - protein, 16 aa, Homo sapiens
  CDR3 for alpha chain variable domain of TCR clone 137884 (TRAV26-1, TRAJ23)
CIVRPHGNNQGGKLIF

SEQ ID NO: 275768 - protein, 15 aa, Homo sapiens
  CDR3 for beta chain variable domain of TCR clone 137884 (TRBV28, TRBJ2-4)
CAAGSGTLLMGIQYF

SEQ ID NO: 275769 - protein, 16 aa, Homo sapiens
  CDR3 for alpha chain variable domain of TCR clone 137885 (TRAV26-1, TRAJ52)
CIVRVSGGTSYGKLTF

SEQ ID NO: 275770 - protein, 16 aa, Homo sapiens
  CDR3 for beta chain variable domain of TCR clone 137885 (TRBV3-1, TRBJ2-3)
CASSQRAGDPTDTQYV

SEQ ID NO: 275771 - protein, 17 aa, Homo sapiens
  CDR3 for alpha chain variable domain of TCR clone 137886 (TRAV3, TRAJ42)
CAVRDRDYGGSQGNLII

SEQ ID NO: 275772 - protein, 15 aa, Homo sapiens
  CDR3 for beta chain variable domain of TCR clone 137886 (TRBV6-6, TRBJ2-7)
CASSYSYGGSYEQYF

SEQ ID NO: 275773 - protein, 15 aa, Homo sapiens
  CDR3 for alpha chain variable domain of TCR clone 137887 (TRAV26-2, TRAJ28)
CILVESGAGSYQLTF

SEQ ID NO: 275774 - protein, 11 aa, Homo sapiens
  CDR3 for beta chain variable domain of TCR clone 137887 (TRBV25-1, TRBJ2-7)
CASRTSYEQYF

SEQ ID NO: 275775 - protein, 18 aa, Homo sapiens
  CDR3 for alpha chain variable domain of TCR clone 137888 (TRAV21, TRAJ52)
CAVRPSPAGGTSYGKLTF

SEQ ID NO: 275776 - protein, 17 aa, Homo sapiens
  CDR3 for beta chain variable domain of TCR clone 137888 (TRBV20-1, TRBJ2-2)
CSASGSGQGGLTGELFC

SEQ ID NO: 275777 - protein, 17 aa, Homo sapiens
  CDR3 for alpha chain variable domain of TCR clone 137889 (TRAV3, TRAJ28)
CAVREAYSGAGSYQLTF

SEQ ID NO: 275778 - protein, 15 aa, Homo sapiens
  CDR3 for beta chain variable domain of TCR clone 137889 (TRBV7-8, TRBJ2-1)
CASSLAGGLYNEQFF

SEQ ID NO: 275779 - protein, 14 aa, Homo sapiens
  CDR3 for alpha chain variable domain of TCR clone 137890 (TRAV26-1, TRAJ21)
CIVIVAHNFNKFYF

SEQ ID NO: 275780 - protein, 14 aa, Homo sapiens
  CDR3 for beta chain variable domain of TCR clone 137890 (TRBV5-1, TRBJ2-7)
CASSRGESLYEQYF

SEQ ID NO: 275781 - protein, 10 aa, Homo sapiens
  CDR3 for alpha chain variable domain of TCR clone 137891 (TRAV16, TRAJ22)
SAMYLRQLTF

SEQ ID NO: 275782 - protein, 17 aa, Homo sapiens
  CDR3 for beta chain variable domain of TCR clone 137891 (TRBV7-3, TRBJ2-3)
CASSLMKRMRGADTQYF

SEQ ID NO: 275783 - protein, 11 aa, Homo sapiens
  CDR3 for alpha chain variable domain of TCR clone 137892 (TRAV38-1, TRAJ35)
CAFMSLDRLWE

SEQ ID NO: 275784 - protein, 15 aa, Homo sapiens
  CDR3 for beta chain variable domain of TCR clone 137892 (TRBV11-2, TRBJ1-3)
CASSLDGTVGNTIYF

SEQ ID NO: 275785 - protein, 17 aa, Homo sapiens
  CDR3 for alpha chain variable domain of TCR clone 137893 (TRAV14/DV4, TRAJ3)
CAMREGPEYSSASKIIF

SEQ ID NO: 275786 - protein, 17 aa, Homo sapiens
  CDR3 for beta chain variable domain of TCR clone 137893 (TRBV20-1, TRBJ1-5)
CSARVGGERQGNQPQHS

SEQ ID NO: 275787 - protein, 11 aa, Homo sapiens
  CDR3 for alpha chain variable domain of TCR clone 137894 (TRAV1-2, TRAJ20)
CAVANDYKLSF

SEQ ID NO: 275788 - protein, 18 aa, Homo sapiens
  CDR3 for beta chain variable domain of TCR clone 137894 (TRBV20-1, TRBJ2-6)
CSADTAPTRGSGANVLTF

SEQ ID NO: 275789 - protein, 12 aa, Homo sapiens
  CDR3 for alpha chain variable domain of TCR clone 137895 (TRAV13-1, TRAJ21)
RAAKEGFNKFYF

SEQ ID NO: 275790 - protein, 13 aa, Homo sapiens
  CDR3 for beta chain variable domain of TCR clone 137895 (TRBV20-1, TRBJ1-1)
CSAPLGGGTEAFF

SEQ ID NO: 275791 - protein, 15 aa, Homo sapiens
  CDR3 for alpha chain variable domain of TCR clone 137896 (TRAV12-1, TRAJ5)
CVVNMLETGRSALTF

SEQ ID NO: 275792 - protein, 12 aa, Homo sapiens
  CDR3 for beta chain variable domain of TCR clone 137896 (TRBV11-2, TRBJ2-2)
CASSRGGGELFF

SEQ ID NO: 275793 - protein, 13 aa, Homo sapiens
  CDR3 for alpha chain variable domain of TCR clone 137897 (TRAV13-1, TRAJ33)
CAASRAGNYQLIW

SEQ ID NO: 275794 - protein, 15 aa, Homo sapiens
  CDR3 for beta chain variable domain of TCR clone 137897 (TRBV2, TRBJ2-7)
EGSAMYFCASREQYF

SEQ ID NO: 275795 - protein, 13 aa, Homo sapiens
  CDR3 for alpha chain variable domain of TCR clone 137898 (TRAV13-1, TRAJ39)
CAASIWAGNMLTF

SEQ ID NO: 275796 - protein, 15 aa, Homo sapiens
  CDR3 for beta chain variable domain of TCR clone 137898 (TRBV7-9, TRBJ1-1)
CATSLLEQGGTEAFF

SEQ ID NO: 275797 - protein, 14 aa, Homo sapiens
  CDR3 for alpha chain variable domain of TCR clone 137899 (TRAV12-2, TRAJ13)
CAVKKTGGYQKVTF

SEQ ID NO: 275798 - protein, 11 aa, Homo sapiens
  CDR3 for beta chain variable domain of TCR clone 137899 (TRBV29-1, TRBJ2-5)
CSEDRAGTQYF

SEQ ID NO: 275799 - protein, 14 aa, Homo sapiens
  CDR3 for alpha chain variable domain of TCR clone 137900 (TRAV1-2, TRAJ8)
CAVREDTGFQRLVF

SEQ ID NO: 275800 - protein, 15 aa, Homo sapiens
  CDR3 for beta chain variable domain of TCR clone 137900 (TRBV11-3, TRBJ2-3)
CASLKDGREGDTQYF

SEQ ID NO: 275801 - protein, 17 aa, Homo sapiens
  CDR3 for alpha chain variable domain of TCR clone 137901 (TRAV3, TRAJ42)
CAVRDRDYGGSQGNIIF

SEQ ID NO: 275802 - protein, 14 aa, Homo sapiens
  CDR3 for beta chain variable domain of TCR clone 137901 (TRBV25-1, TRBJ1-1)
CASTHLGGNTEAFF

SEQ ID NO: 275803 - protein, 13 aa, Homo sapiens
  CDR3 for alpha chain variable domain of TCR clone 137902 (TRAV2, TRAJ40)
CAVVTSGTYKYIF

SEQ ID NO: 275804 - protein, 17 aa, Homo sapiens
  CDR3 for beta chain variable domain of TCR clone 137902 (TRBV12-4, TRBJ2-1)
CASSPGLAGGRINEQFF

SEQ ID NO: 275805 - protein, 15 aa, Homo sapiens
  CDR3 for alpha chain variable domain of TCR clone 137903 (TRAV1-2, TRAJ12)
CAVRDWMDSSYKLIF

SEQ ID NO: 275806 - protein, 15 aa, Homo sapiens
  CDR3 for beta chain variable domain of TCR clone 137903 (TRBV29-1, TRBJ2-5)
CSVAPGQGARETQYF

SEQ ID NO: 275807 - protein, 10 aa, Homo sapiens
  CDR3 for alpha chain variable domain of TCR clone 137904 (TRAV23/DV6, TRAJ43)
CAAAVEALEQ

SEQ ID NO: 275808 - protein, 12 aa, Homo sapiens
  CDR3 for beta chain variable domain of TCR clone 137904 (TRBV7-9, TRBJ2-7)
CASSIKREEQYF

SEQ ID NO: 275809 - protein, 15 aa, Homo sapiens
  CDR3 for alpha chain variable domain of TCR clone 137905 (TRAV21, TRAJ53)
CAVRQSGGSNYKLTF

SEQ ID NO: 275810 - protein, 14 aa, Homo sapiens
  CDR3 for beta chain variable domain of TCR clone 137905 (TRBV4-1, TRBJ2-2)
CASSQAVNTGELFF

SEQ ID NO: 275811 - protein, 12 aa, Homo sapiens
  CDR3 for alpha chain variable domain of TCR clone 137906 (TRAV12-3, TRAJ17)
RAMTLTGNKLTF

SEQ ID NO: 275812 - protein, 15 aa, Homo sapiens
  CDR3 for beta chain variable domain of TCR clone 137906 (TRBV20-1, TRBJ2-7)
CSARDRVSGMDEQYF

SEQ ID NO: 275813 - protein, 13 aa, Homo sapiens
  CDR3 for alpha chain variable domain of TCR clone 137907 (TRAV8-6, TRAJ9)
CAVWDTGGFTTIF

SEQ ID NO: 275814 - protein, 18 aa, Homo sapiens
  CDR3 for beta chain variable domain of TCR clone 137907 (TRBV11-2, TRBJ2-3)
CASSLGGASRGAPNTQYF

SEQ ID NO: 275815 - protein, 14 aa, Homo sapiens
  CDR3 for alpha chain variable domain of TCR clone 137908 (TRAV17, TRAJ57)
CATDASGGSEQLVF

SEQ ID NO: 275816 - protein, 14 aa, Homo sapiens
  CDR3 for beta chain variable domain of TCR clone 137908 (TRBV4-2, TRBJ2-1)
CASGLDRAYNEQFF

SEQ ID NO: 275817 - protein, 14 aa, Homo sapiens
  CDR3 for alpha chain variable domain of TCR clone 137909 (TRAV23/DV6, TRAJ27)
CAASRDTNAGKSTF

SEQ ID NO: 275818 - protein, 14 aa, Homo sapiens
  CDR3 for beta chain variable domain of TCR clone 137909 (TRBV20-1, TRBJ1-5)
SAVLVGEAISPSIF

SEQ ID NO: 275819 - protein, 16 aa, Homo sapiens
  CDR3 for alpha chain variable domain of TCR clone 137910 (TRAV3, TRAJ37)
CAVRVRGSGNTGKLIF

SEQ ID NO: 275820 - protein, 14 aa, Homo sapiens
  CDR3 for beta chain variable domain of TCR clone 137910 (TRBV20-1, TRBJ2-7)
CSAKRGRSSYEQYF

SEQ ID NO: 275821 - protein, 14 aa, Homo sapiens
  CDR3 for alpha chain variable domain of TCR clone 137911 (TRAV1-2, TRAJ16)
CAVNRFSDGQKLLF

SEQ ID NO: 275822 - protein, 15 aa, Homo sapiens
  CDR3 for beta chain variable domain of TCR clone 137911 (TRBV7-2, TRBJ2-2)
CASRRPGQSTGELFL

SEQ ID NO: 275823 - protein, 14 aa, Homo sapiens
  CDR3 for alpha chain variable domain of TCR clone 137912 (TRAV13-1, TRAJ35)
CAASKGGVGNVLHC

SEQ ID NO: 275824 - protein, 13 aa, Homo sapiens
  CDR3 for beta chain variable domain of TCR clone 137912 (TRBV7-3, TRBJ1-1)
CASSQDWGAEAFC

SEQ ID NO: 275825 - protein, 13 aa, Homo sapiens
  CDR3 for alpha chain variable domain of TCR clone 137913 (TRAV12-2, TRAJ37)
CAGGPGNTCKLIF

SEQ ID NO: 275826 - protein, 13 aa, Homo sapiens
  CDR3 for beta chain variable domain of TCR clone 137913 (TRBV4-1, TRBJ2-2)
CASSQENTGELFF

SEQ ID NO: 275827 - protein, 12 aa, Homo sapiens
  CDR3 for alpha chain variable domain of TCR clone 137914 (TRAV12-1, TRAJ40)
CVVYSGTYKYIF

SEQ ID NO: 275828 - protein, 17 aa, Homo sapiens
  CDR3 for beta chain variable domain of TCR clone 137914 (TRBV13, TRBJ2-7)
CASSLKPGASGTYEQYF

SEQ ID NO: 275829 - protein, 11 aa, Homo sapiens
  CDR3 for alpha chain variable domain of TCR clone 137915 (TRAV12-1, TRAJ31)
CVVNGDARLMF

SEQ ID NO: 275830 - protein, 17 aa, Homo sapiens
  CDR3 for beta chain variable domain of TCR clone 137915 (TRBV4-3, TRBJ1-5)
CASSPWGDGGPNQPQHF

SEQ ID NO: 275831 - protein, 17 aa, Homo sapiens
  CDR3 for alpha chain variable domain of TCR clone 137916 (TRAV13-1, TRAJ28)
CAASPPYSGAGSYQLTF

SEQ ID NO: 275832 - protein, 11 aa, Homo sapiens
  CDR3 for beta chain variable domain of TCR clone 137916 (TRBV29-1, TRBJ2-5)
CSEDRTGTQYF

SEQ ID NO: 275833 - protein, 16 aa, Homo sapiens
  CDR3 for alpha chain variable domain of TCR clone 137917 (TRAV16, TRAJ4)
CITVLPFSGGYNKLIF

SEQ ID NO: 275834 - protein, 16 aa, Homo sapiens
  CDR3 for beta chain variable domain of TCR clone 137917 (TRBV20-1, TRBJ1-5)
CSASRGTGYSNQPQHF

SEQ ID NO: 275835 - protein, 12 aa, Homo sapiens
  CDR3 for alpha chain variable domain of TCR clone 137918 (TRAV8-3, TRAJ26)
CAGDNYVQNFVF

SEQ ID NO: 275836 - protein, 16 aa, Homo sapiens
  CDR3 for beta chain variable domain of TCR clone 137918 (TRBV20-1, TRBJ1-4)
CSAPGQGLLTNEKLFF

SEQ ID NO: 275837 - protein, 14 aa, Homo sapiens
  CDR3 for alpha chain variable domain of TCR clone 137919 (TRAV13-1, TRAJ39)
CAASYNNAGIMLTF

SEQ ID NO: 275838 - protein, 13 aa, Homo sapiens
  CDR3 for beta chain variable domain of TCR clone 137919 (TRBV24-1, TRBJ1-4)
CATNNGRSEKLFF

SEQ ID NO: 275839 - protein, 12 aa, Homo sapiens
  CDR3 for alpha chain variable domain of TCR clone 137920 (TRAV13-1, TRAJ53)
AASGGSNYKMTF

SEQ ID NO: 275840 - protein, 17 aa, Homo sapiens
  CDR3 for beta chain variable domain of TCR clone 137920 (TRBV11-2, TRBJ2-1)
CASSLYPPGVEYNEQFF

SEQ ID NO: 275841 - protein, 14 aa, Homo sapiens
  CDR3 for alpha chain variable domain of TCR clone 137921 (TRAV1-2, TRAJ16)
CAVNRFSDGQKLLF

SEQ ID NO: 275842 - protein, 17 aa, Homo sapiens
  CDR3 for beta chain variable domain of TCR clone 137921 (TRBV11-2, TRBJ2-1)
CASSLYTPGVEYNEQFF

SEQ ID NO: 275843 - protein, 14 aa, Homo sapiens
  CDR3 for alpha chain variable domain of TCR clone 137922 (TRAV14/DV4, TRAJ15)
CAMRRDQAGTALTF

SEQ ID NO: 275844 - protein, 15 aa, Homo sapiens
  CDR3 for beta chain variable domain of TCR clone 137922 (TRBV20-1, TRBJ2-7)
CSARDRVSGMDEQYF

SEQ ID NO: 275845 - protein, 13 aa, Homo sapiens
  CDR3 for alpha chain variable domain of TCR clone 137923 (TRAV29/DV5, TRAJ48)
CASSSFGNEKLTF

SEQ ID NO: 275846 - protein, 14 aa, Homo sapiens
  CDR3 for beta chain variable domain of TCR clone 137923 (TRBV3-1, TRBJ2-2)
CASSQDWVQGELFC

SEQ ID NO: 275847 - protein, 15 aa, Homo sapiens
  CDR3 for alpha chain variable domain of TCR clone 137924 (TRAV29/DV5, TRAJ42)
CAAKTDGGSQGHLIF

SEQ ID NO: 275848 - protein, 15 aa, Homo sapiens
  CDR3 for beta chain variable domain of TCR clone 137924 (TRBV5-1, TRBJ2-2)
CASSSQGGNTGELFF

SEQ ID NO: 275849 - protein, 11 aa, Homo sapiens
  CDR3 for alpha chain variable domain of TCR clone 137925 (TRAV17, TRAJ9)
CATTGGFKTIF

SEQ ID NO: 275850 - protein, 14 aa, Homo sapiens
  CDR3 for beta chain variable domain of TCR clone 137925 (TRBV18, TRBJ2-5)
CASSPGVSQETQYF

SEQ ID NO: 275851 - protein, 14 aa, Homo sapiens
  CDR3 for alpha chain variable domain of TCR clone 137926 (TRAV35, TRAJ22)
CAGLRPGSARQLTF

SEQ ID NO: 275852 - protein, 12 aa, Homo sapiens
  CDR3 for beta chain variable domain of TCR clone 137926 (TRBV12-4, TRBJ2-1)
CASSLVRVEQFF

SEQ ID NO: 275853 - protein, 17 aa, Homo sapiens
  CDR3 for alpha chain variable domain of TCR clone 137927 (TRAV36/DV7, TRAJ52)
CAVAQRAGGTSYGKLTF

SEQ ID NO: 275854 - protein, 14 aa, Homo sapiens
  CDR3 for beta chain variable domain of TCR clone 137927 (TRBV27, TRBJ1-1)
CASSLLSGLSEAFS

SEQ ID NO: 275855 - protein, 12 aa, Homo sapiens
  CDR3 for alpha chain variable domain of TCR clone 137928 (TRAV16, TRAJ26)
CALTRWSEFFLW

SEQ ID NO: 275856 - protein, 16 aa, Homo sapiens
  CDR3 for beta chain variable domain of TCR clone 137928 (TRBV9, TRBJ2-1)
CASSVGGGGNYNEQFF

SEQ ID NO: 275857 - protein, 12 aa, Homo sapiens
  CDR3 for alpha chain variable domain of TCR clone 137929 (TRAV12-3, TRAJ17)
RAMTLTGNKLTF

SEQ ID NO: 275858 - protein, 14 aa, Homo sapiens
  CDR3 for beta chain variable domain of TCR clone 137929 (TRBV12-4, TRBJ1-1)
CASSLGTGGTEAFF

SEQ ID NO: 275859 - protein, 18 aa, Homo sapiens
  CDR3 for alpha chain variable domain of TCR clone 137930 (TRAV13-1, TRAJ52)
CAAKNPNAGVTSDGKLTF

SEQ ID NO: 275860 - protein, 15 aa, Homo sapiens
  CDR3 for beta chain variable domain of TCR clone 137930 (TRBV28, TRBJ2-4)
CAAGSGTLLMGTQYF

SEQ ID NO: 275861 - protein, 11 aa, Homo sapiens
  CDR3 for alpha chain variable domain of TCR clone 137931 (TRAV8-2, TRAJ26)
CVVTLLLGSEF

SEQ ID NO: 275862 - protein, 12 aa, Homo sapiens
  CDR3 for beta chain variable domain of TCR clone 137931 (TRBV11-2, TRBJ2-2)
CASSLGGGELFF

SEQ ID NO: 275863 - protein, 13 aa, Homo sapiens
  CDR3 for alpha chain variable domain of TCR clone 137932 (TRAV17, TRAJ9)
CATGSTGGFRTIF

SEQ ID NO: 275864 - protein, 14 aa, Homo sapiens
  CDR3 for beta chain variable domain of TCR clone 137932 (TRBV7-8, TRBJ2-7)
CASTFRGGPNEQYF

SEQ ID NO: 275865 - protein, 15 aa, Homo sapiens
  CDR3 for alpha chain variable domain of TCR clone 137933 (TRAV26-1, TRAJ29)
CIVRVEGSGNTPLVF

SEQ ID NO: 275866 - protein, 13 aa, Homo sapiens
  CDR3 for beta chain variable domain of TCR clone 137933 (TRBV6-5, TRBJ2-5)
CASSPQGGEAQYF

SEQ ID NO: 275867 - protein, 16 aa, Homo sapiens
  CDR3 for alpha chain variable domain of TCR clone 137934 (TRAV3, TRAJ37)
CAVRGKGSGNTGKLIF

SEQ ID NO: 275868 - protein, 15 aa, Homo sapiens
  CDR3 for beta chain variable domain of TCR clone 137934 (TRBV28, TRBJ2-5)
CASSPGQGSIETQYF

SEQ ID NO: 275869 - protein, 15 aa, Homo sapiens
  CDR3 for alpha chain variable domain of TCR clone 137935 (TRAV8-3, TRAJ11)
CAVVLLNSGYSTLTF

SEQ ID NO: 275870 - protein, 16 aa, Homo sapiens
  CDR3 for beta chain variable domain of TCR clone 137935 (TRBV15, TRBJ1-2)
CATSRGPRTGGGGYTF

SEQ ID NO: 275871 - protein, 12 aa, Homo sapiens
  CDR3 for alpha chain variable domain of TCR clone 137936 (TRAV8-3, TRAJ26)
CAGDNYGQNFVF

SEQ ID NO: 275872 - protein, 15 aa, Homo sapiens
  CDR3 for beta chain variable domain of TCR clone 137936 (TRBV9, TRBJ2-1)
CASSLAGSSYNERFF

SEQ ID NO: 275873 - protein, 13 aa, Homo sapiens
  CDR3 for alpha chain variable domain of TCR clone 137937 (TRAV20, TRAJ54)
CAVQAGGAQKLVF

SEQ ID NO: 275874 - protein, 14 aa, Homo sapiens
  CDR3 for beta chain variable domain of TCR clone 137937 (TRBV20-1, TRBJ2-7)
CSAKSGTGGYEQYF

SEQ ID NO: 275875 - protein, 13 aa, Homo sapiens
  CDR3 for alpha chain variable domain of TCR clone 137938 (TRAV12-2, TRAJ6)
CAVNVSRKLHTYI

SEQ ID NO: 275876 - protein, 17 aa, Homo sapiens
  CDR3 for beta chain variable domain of TCR clone 137938 (TRBV28, TRBJ1-5)
CASSLSWLVSSNQPQHF

SEQ ID NO: 275877 - protein, 16 aa, Homo sapiens
  CDR3 for alpha chain variable domain of TCR clone 137939 (TRAV1-2, TRAJ6)
CAVRDQGTGGSYIPTF

SEQ ID NO: 275878 - protein, 14 aa, Homo sapiens
  CDR3 for beta chain variable domain of TCR clone 137939 (TRBV13, TRBJ2-3)
CASSSGSPTDTQYF

SEQ ID NO: 275879 - protein, 16 aa, Homo sapiens
  CDR3 for alpha chain variable domain of TCR clone 137940 (TRAV14/DV4, TRAJ54)
CAMREGRIQGAQKLVF

SEQ ID NO: 275880 - protein, 16 aa, Homo sapiens
  CDR3 for beta chain variable domain of TCR clone 137940 (TRBV19, TRBJ2-2)
CASRSPGTGATGELFF

SEQ ID NO: 275881 - protein, 16 aa, Homo sapiens
  CDR3 for alpha chain variable domain of TCR clone 137941 (TRAV27, TRAJ53)
CAAPEGSGGSNYKLTF

SEQ ID NO: 275882 - protein, 15 aa, Homo sapiens
  CDR3 for beta chain variable domain of TCR clone 137941 (TRBV20-1, TRBJ1-1)
CSASRGLTGNTEAFF

SEQ ID NO: 275883 - protein, 12 aa, Homo sapiens
  CDR3 for alpha chain variable domain of TCR clone 137942 (TRAV9-2, TRAJ20)
CAVSEGDYKLSF

SEQ ID NO: 275884 - protein, 13 aa, Homo sapiens
  CDR3 for beta chain variable domain of TCR clone 137942 (TRBV11-2, TRBJ1-6)
CASSLAGVSPLHF

SEQ ID NO: 275885 - protein, 15 aa, Homo sapiens
  CDR3 for alpha chain variable domain of TCR clone 137943 (TRAV20, TRAJ4)
CAVEGSSGGYNKMIF

SEQ ID NO: 275886 - protein, 14 aa, Homo sapiens
  CDR3 for beta chain variable domain of TCR clone 137943 (TRBV7-8, TRBJ2-7)
CASTLGGALGEQYF

SEQ ID NO: 275887 - protein, 15 aa, Homo sapiens
  CDR3 for alpha chain variable domain of TCR clone 137944 (TRAV3, TRAJ30)
CAVRDRCERGDKIIF

SEQ ID NO: 275888 - protein, 13 aa, Homo sapiens
  CDR3 for beta chain variable domain of TCR clone 137944 (TRBV29-1, TRBJ2-5)
CSACSSRRETQYF

SEQ ID NO: 275889 - protein, 15 aa, Homo sapiens
  CDR3 for alpha chain variable domain of TCR clone 137945 (TRAV8-3, TRAJ45)
CASSYLGGGADGLTF

SEQ ID NO: 275890 - protein, 13 aa, Homo sapiens
  CDR3 for beta chain variable domain of TCR clone 137945 (TRBV10-3, TRBJ2-7)
CAAKLAVNYEQYF

SEQ ID NO: 275891 - protein, 13 aa, Homo sapiens
  CDR3 for alpha chain variable domain of TCR clone 137946 (TRAV8-3, TRAJ44)
CAVVSGTASKLTF

SEQ ID NO: 275892 - protein, 14 aa, Homo sapiens
  CDR3 for beta chain variable domain of TCR clone 137946 (TRBV11-2, TRBJ2-3)
CASSRRARTDTQYF

SEQ ID NO: 275893 - protein, 12 aa, Homo sapiens
  CDR3 for alpha chain variable domain of TCR clone 137947 (TRAV12-3, TRAJ17)
CAMTLTGNKLTF

SEQ ID NO: 275894 - protein, 14 aa, Homo sapiens
  CDR3 for beta chain variable domain of TCR clone 137947 (TRBV6-3, TRBJ1-1)
CASSYQRRDTEAFF

SEQ ID NO: 275895 - protein, 14 aa, Homo sapiens
  CDR3 for alpha chain variable domain of TCR clone 137948 (TRAV12-2, TRAJ13)
CAVKKTGGYKKVTF

SEQ ID NO: 275896 - protein, 19 aa, Homo sapiens
  CDR3 for beta chain variable domain of TCR clone 137948 (TRBV7-2, TRBJ2-3)
CASSFLSRNWGGGTDTQYF

SEQ ID NO: 275897 - protein, 14 aa, Homo sapiens
  CDR3 for alpha chain variable domain of TCR clone 137949 (TRAV17, TRAJ57)
CATDPKGGSEKLVF

SEQ ID NO: 275898 - protein, 14 aa, Homo sapiens
  CDR3 for beta chain variable domain of TCR clone 137949 (TRBV5-8, TRBJ2-3)
CASSLGQGTDTQYF

SEQ ID NO: 275899 - protein, 11 aa, Homo sapiens
  CDR3 for alpha chain variable domain of TCR clone 137950 (TRAV12-3, TRAJ27)
CAMANAGKSAF

SEQ ID NO: 275900 - protein, 12 aa, Homo sapiens
  CDR3 for beta chain variable domain of TCR clone 137950 (TRBV12-4, TRBJ2-7)
CASSLGGCEQYF

SEQ ID NO: 275901 - protein, 14 aa, Homo sapiens
  CDR3 for alpha chain variable domain of TCR clone 137951 (TRAV12-2, TRAJ40)
CAVKIPSGTYKYLF

SEQ ID NO: 275902 - protein, 13 aa, Homo sapiens
  CDR3 for beta chain variable domain of TCR clone 137951 (TRBV20-1, TRBJ1-3)
CSARVQGRDTIYF

SEQ ID NO: 275903 - protein, 14 aa, Homo sapiens
  CDR3 for alpha chain variable domain of TCR clone 137952 (TRAV12-3, TRAJ11)
CAMTTNSGYSTLTF

SEQ ID NO: 275904 - protein, 16 aa, Homo sapiens
  CDR3 for beta chain variable domain of TCR clone 137952 (TRBV20-1, TRBJ1-1)
CSARALKQGMNTEAFF

SEQ ID NO: 275905 - protein, 18 aa, Homo sapiens
  CDR3 for alpha chain variable domain of TCR clone 137953 (TRAV12-3, TRAJ52)
CAMSRTNAGGTSYGKLTF

SEQ ID NO: 275906 - protein, 15 aa, Homo sapiens
  CDR3 for beta chain variable domain of TCR clone 137953 (TRBV7-2, TRBJ2-1)
CASSLVAGGYNEQFF

SEQ ID NO: 275907 - protein, 15 aa, Homo sapiens
  CDR3 for alpha chain variable domain of TCR clone 137954 (TRAV2, TRAJ15)
CAVEDRGQAGTALTC

SEQ ID NO: 275908 - protein, 13 aa, Homo sapiens
  CDR3 for beta chain variable domain of TCR clone 137954 (TRBV10-2, TRBJ2-7)
CASGASGGYEQYF

SEQ ID NO: 275909 - protein, 15 aa, Homo sapiens
  CDR3 for alpha chain variable domain of TCR clone 137955 (TRAV12-3, TRAJ6)
CAMSATTGGSYIPTF

SEQ ID NO: 275910 - protein, 14 aa, Homo sapiens
  CDR3 for beta chain variable domain of TCR clone 137955 (TRBV28, TRBJ2-1)
CASSLNGRNNEQFF

SEQ ID NO: 275911 - protein, 14 aa, Homo sapiens
  CDR3 for alpha chain variable domain of TCR clone 137956 (TRAV3, TRAJ9)
CAVRLNTGGFKTIF

SEQ ID NO: 275912 - protein, 12 aa, Homo sapiens
  CDR3 for beta chain variable domain of TCR clone 137956 (TRBV11-2, TRBJ2-5)
CASSPPAETQYF

SEQ ID NO: 275913 - protein, 12 aa, Homo sapiens
  CDR3 for alpha chain variable domain of TCR clone 137957 (TRAV17, TRAJ20)
CATDSHDYKLSF

SEQ ID NO: 275914 - protein, 15 aa, Homo sapiens
  CDR3 for beta chain variable domain of TCR clone 137957 (TRBV6-6, TRBJ1-5)
CASSSIQGANQPQHF

SEQ ID NO: 275915 - protein, 12 aa, Homo sapiens
  CDR3 for alpha chain variable domain of TCR clone 137958 (TRAV12-3, TRAJ17)
CAMTLKGNKLTF

SEQ ID NO: 275916 - protein, 13 aa, Homo sapiens
  CDR3 for beta chain variable domain of TCR clone 137958 (TRBV7-2, TRBJ2-2)
CASSLAVTGELFF

SEQ ID NO: 275917 - protein, 13 aa, Homo sapiens
  CDR3 for alpha chain variable domain of TCR clone 137959 (TRAV27, TRAJ57)
CRSAQGGSEKLVF

SEQ ID NO: 275918 - protein, 14 aa, Homo sapiens
  CDR3 for beta chain variable domain of TCR clone 137959 (TRBV19, TRBJ2-1)
CASPTFVLSGEQFF

SEQ ID NO: 275919 - protein, 12 aa, Homo sapiens
  CDR3 for alpha chain variable domain of TCR clone 137960 (TRAV16, TRAJ10)
CSRTGGGNKLTF

SEQ ID NO: 275920 - protein, 13 aa, Homo sapiens
  CDR3 for beta chain variable domain of TCR clone 137960 (TRBV7-2, TRBJ2-4)
CASSREHANIQYF

SEQ ID NO: 275921 - protein, 12 aa, Homo sapiens
  CDR3 for alpha chain variable domain of TCR clone 137961 (TRAV13-1, TRAJ43)
CAAGRFNNDMRL

SEQ ID NO: 275922 - protein, 14 aa, Homo sapiens
  CDR3 for beta chain variable domain of TCR clone 137961 (TRBV6-3, TRBJ2-5)
CASRRDGGEETQYF

SEQ ID NO: 275923 - protein, 15 aa, Homo sapiens
  CDR3 for alpha chain variable domain of TCR clone 137962 (TRAV25, TRAJ52)
CAGRPGGTSYGKLTF

SEQ ID NO: 275924 - protein, 14 aa, Homo sapiens
  CDR3 for beta chain variable domain of TCR clone 137962 (TRBV7-9, TRBJ2-7)
CASSLDRPTDEQYF

SEQ ID NO: 275925 - protein, 15 aa, Homo sapiens
  CDR3 for alpha chain variable domain of TCR clone 137963 (TRAV14/DV4, TRAJ39)
CAMRAVNNAGNMLTF

SEQ ID NO: 275926 - protein, 14 aa, Homo sapiens
  CDR3 for beta chain variable domain of TCR clone 137963 (TRBV2, TRBJ2-3)
CASSEGQNTDTQYF

SEQ ID NO: 275927 - protein, 16 aa, Homo sapiens
  CDR3 for alpha chain variable domain of TCR clone 137964 (TRAV17, TRAJ52)
CATSNAGGTSYGKLRF

SEQ ID NO: 275928 - protein, 13 aa, Homo sapiens
  CDR3 for beta chain variable domain of TCR clone 137964 (TRBV27, TRBJ1-6)
CASSLVLVSPLHF

SEQ ID NO: 275929 - protein, 13 aa, Homo sapiens
  CDR3 for alpha chain variable domain of TCR clone 137965 (TRAV12-3, TRAJ4)
CNEQAGGYNKLIC

SEQ ID NO: 275930 - protein, 15 aa, Homo sapiens
  CDR3 for beta chain variable domain of TCR clone 137965 (TRBV5-1, TRBJ1-1)
CASSLSDLGGTEAFF

SEQ ID NO: 275931 - protein, 14 aa, Homo sapiens
  CDR3 for alpha chain variable domain of TCR clone 137966 (TRAV26-1, TRAJ38)
CIADNAGNNRKLIW

SEQ ID NO: 275932 - protein, 15 aa, Homo sapiens
  CDR3 for beta chain variable domain of TCR clone 137966 (TRBV9, TRBJ2-1)
CASSLAGSSYSEQFF

SEQ ID NO: 275933 - protein, 14 aa, Homo sapiens
  CDR3 for alpha chain variable domain of TCR clone 137967 (TRAV13-2, TRAJ9)
CAENLETGGFKTNF

SEQ ID NO: 275934 - protein, 16 aa, Homo sapiens
  CDR3 for beta chain variable domain of TCR clone 137967 (TRBV28, TRBJ2-5)
CASSFSPAGGWETQYF

SEQ ID NO: 275935 - protein, 11 aa, Homo sapiens
  CDR3 for alpha chain variable domain of TCR clone 137968 (TRAV12-3, TRAJ43)
CAMSVSNDMRF

SEQ ID NO: 275936 - protein, 17 aa, Homo sapiens
  CDR3 for beta chain variable domain of TCR clone 137968 (TRBV19, TRBJ2-7)
CASSISFYDSYPDEQYF

SEQ ID NO: 275937 - protein, 12 aa, Homo sapiens
  CDR3 for alpha chain variable domain of TCR clone 137969 (TRAV12-3, TRAJ17)
CAMTLTGNKLTF

SEQ ID NO: 275938 - protein, 16 aa, Homo sapiens
  CDR3 for beta chain variable domain of TCR clone 137969 (TRBV25-1, TRBJ2-7)
CASSELTGGGIYEQYF

SEQ ID NO: 275939 - protein, 13 aa, Homo sapiens
  CDR3 for alpha chain variable domain of TCR clone 137970 (TRAV8-6, TRAJ49)
CAVITNTGNQFYF

SEQ ID NO: 275940 - protein, 15 aa, Homo sapiens
  CDR3 for beta chain variable domain of TCR clone 137970 (TRBV27, TRBJ2-1)
CASSNGGGSPMSSSS

SEQ ID NO: 275941 - protein, 15 aa, Homo sapiens
  CDR3 for alpha chain variable domain of TCR clone 137971 (TRAV27, TRAJ38)
CASRRNAGNNRNLIW

SEQ ID NO: 275942 - protein, 13 aa, Homo sapiens
  CDR3 for beta chain variable domain of TCR clone 137971 (TRBV12-5, TRBJ2-3)
CASGDRQSDTQYF

SEQ ID NO: 275943 - protein, 13 aa, Homo sapiens
  CDR3 for alpha chain variable domain of TCR clone 137972 (TRAV8-4, TRAJ48)
CAVSLFGNEKLTF

SEQ ID NO: 275944 - protein, 15 aa, Homo sapiens
  CDR3 for beta chain variable domain of TCR clone 137972 (TRBV2, TRBJ2-1)
CASRGTGANYNEQFF

SEQ ID NO: 275945 - protein, 14 aa, Homo sapiens
  CDR3 for alpha chain variable domain of TCR clone 137973 (TRAV2, TRAJ20)
CAVEDVVNDYKLSF

SEQ ID NO: 275946 - protein, 16 aa, Homo sapiens
  CDR3 for beta chain variable domain of TCR clone 137973 (TRBV13, TRBJ2-2)
CASSPRTGEHTGELFF

SEQ ID NO: 275947 - protein, 16 aa, Homo sapiens
  CDR3 for alpha chain variable domain of TCR clone 137974 (TRAV8-3, TRAJ13)
CAVGAYPSGGYQKVTF

SEQ ID NO: 275948 - protein, 15 aa, Homo sapiens
  CDR3 for beta chain variable domain of TCR clone 137974 (TRBV20-1, TRBJ2-7)
CSARVPAAYFYEQYF

SEQ ID NO: 275949 - protein, 13 aa, Homo sapiens
  CDR3 for alpha chain variable domain of TCR clone 137975 (TRAV2, TRAJ40)
CTVVPSGTYKYIF

SEQ ID NO: 275950 - protein, 14 aa, Homo sapiens
  CDR3 for beta chain variable domain of TCR clone 137975 (TRBV19, TRBJ2-1)
CASPTFVLSGEQFF

SEQ ID NO: 275951 - protein, 14 aa, Homo sapiens
  CDR3 for alpha chain variable domain of TCR clone 137976 (TRAV1-2, TRAJ16)
CAVNRFSDGQKLLF

SEQ ID NO: 275952 - protein, 17 aa, Homo sapiens
  CDR3 for beta chain variable domain of TCR clone 137976 (TRBV5-1, TRBJ2-2)
CASSLACLSGGTGELFF

SEQ ID NO: 275953 - protein, 13 aa, Homo sapiens
  CDR3 for alpha chain variable domain of TCR clone 137977 (TRAV12-1, TRAJ47)
CVVNMEYGNKLVF

SEQ ID NO: 275954 - protein, 13 aa, Homo sapiens
  CDR3 for beta chain variable domain of TCR clone 137977 (TRBV11-2, TRBJ2-5)
CASSSTGEETQYF

SEQ ID NO: 275955 - protein, 11 aa, Homo sapiens
  CDR3 for alpha chain variable domain of TCR clone 137978 (TRAV21, TRAJ52)
CAVTNAGGTSY

SEQ ID NO: 275956 - protein, 11 aa, Homo sapiens
  CDR3 for beta chain variable domain of TCR clone 137978 (TRBV2, TRBJ1-1)
CASREGTEAFF

SEQ ID NO: 275957 - protein, 14 aa, Homo sapiens
  CDR3 for alpha chain variable domain of TCR clone 137979 (TRAV26-1, TRAJ38)
CIAANAGNNRKLIC

SEQ ID NO: 275958 - protein, 13 aa, Homo sapiens
  CDR3 for beta chain variable domain of TCR clone 137979 (TRBV20-1, TRBJ1-1)
CSARGGGNTEAFF

SEQ ID NO: 275959 - protein, 12 aa, Homo sapiens
  CDR3 for alpha chain variable domain of TCR clone 137980 (TRAV12-2, TRAJ30)
CAVRNRDDKIIF

SEQ ID NO: 275960 - protein, 14 aa, Homo sapiens
  CDR3 for beta chain variable domain of TCR clone 137980 (TRBV4-1, TRBJ2-7)
CASRLTSGSYEQYF

SEQ ID NO: 275961 - protein, 16 aa, Homo sapiens
  CDR3 for alpha chain variable domain of TCR clone 137981 (TRAV27, TRAJ53)
CAAPEGSGGSNYKLTF

SEQ ID NO: 275962 - protein, 15 aa, Homo sapiens
  CDR3 for beta chain variable domain of TCR clone 137981 (TRBV20-1, TRBJ1-1)
CSASRGVTGTTEDFF

SEQ ID NO: 275963 - protein, 13 aa, Homo sapiens
  CDR3 for alpha chain variable domain of TCR clone 137982 (TRAV3, TRAJ20)
CAVRDIGDYKLSF

SEQ ID NO: 275964 - protein, 14 aa, Homo sapiens
  CDR3 for beta chain variable domain of TCR clone 137982 (TRBV19, TRBJ2-1)
CASPTFVLSGEQFF

SEQ ID NO: 275965 - protein, 15 aa, Homo sapiens
  CDR3 for alpha chain variable domain of TCR clone 137983 (TRAV12-3, TRAJ47)
CAMSALVEYGNKLVF

SEQ ID NO: 275966 - protein, 12 aa, Homo sapiens
  CDR3 for beta chain variable domain of TCR clone 137983 (TRBV28, TRBJ2-3)
CASSLYRDTQYF

SEQ ID NO: 275967 - protein, 15 aa, Homo sapiens
  CDR3 for alpha chain variable domain of TCR clone 137984 (TRAV8-3, TRAJ32)
CAVDLYGGATNKLIF

SEQ ID NO: 275968 - protein, 12 aa, Homo sapiens
  CDR3 for beta chain variable domain of TCR clone 137984 (TRBV7-8, TRBJ2-7)
CASSLAGYEQYF

SEQ ID NO: 275969 - protein, 17 aa, Homo sapiens
  CDR3 for alpha chain variable domain of TCR clone 137985 (TRAV3, TRAJ38)
CAVRDCLNAGNNRKLIW

SEQ ID NO: 275970 - protein, 11 aa, Homo sapiens
  CDR3 for beta chain variable domain of TCR clone 137985 (TRBV20-1, TRBJ2-7)
CSARTSYEQYF

SEQ ID NO: 275971 - protein, 17 aa, Homo sapiens
  CDR3 for alpha chain variable domain of TCR clone 137986 (TRAV12-2, TRAJ4)
CAMNVRPVSGGYNKLIF

SEQ ID NO: 275972 - protein, 17 aa, Homo sapiens
  CDR3 for beta chain variable domain of TCR clone 137986 (TRBV6-3, TRBJ2-1)
CASSYSSGTRGLDEQFF

SEQ ID NO: 275973 - protein, 11 aa, Homo sapiens
  CDR3 for alpha chain variable domain of TCR clone 137987 (TRAV13-1, TRAJ15)
CAATPGTALIF

SEQ ID NO: 275974 - protein, 13 aa, Homo sapiens
  CDR3 for beta chain variable domain of TCR clone 137987 (TRBV19, TRBJ2-1)
CATSRGVSNEQFF

SEQ ID NO: 275975 - protein, 14 aa, Homo sapiens
  CDR3 for alpha chain variable domain of TCR clone 137988 (TRAV30, TRAJ33)
CGTVAPRSNYQLIW

SEQ ID NO: 275976 - protein, 16 aa, Homo sapiens
  CDR3 for beta chain variable domain of TCR clone 137988 (TRBV3-1, TRBJ2-5)
CASSPGQLNGFGTLYF

SEQ ID NO: 275977 - protein, 18 aa, Homo sapiens
  CDR3 for alpha chain variable domain of TCR clone 137989 (TRAV13-1, TRAJ52)
CAASKRSAGGTSYGKLTF

SEQ ID NO: 275978 - protein, 13 aa, Homo sapiens
  CDR3 for beta chain variable domain of TCR clone 137989 (TRBV12-4, TRBJ1-2)
SASSLRQGKGYTF

SEQ ID NO: 275979 - protein, 13 aa, Homo sapiens
  CDR3 for alpha chain variable domain of TCR clone 137990 (TRAV13-1, TRAJ11)
CAASIRGYSTLTF

SEQ ID NO: 275980 - protein, 17 aa, Homo sapiens
  CDR3 for beta chain variable domain of TCR clone 137990 (TRBV4-3, TRBJ1-2)
CASSSILQAGGSVGYTF

SEQ ID NO: 275981 - protein, 14 aa, Homo sapiens
  CDR3 for alpha chain variable domain of TCR clone 137991 (TRAV14/DV4, TRAJ15)
CAMRRDQAGTALIV

SEQ ID NO: 275982 - protein, 11 aa, Homo sapiens
  CDR3 for beta chain variable domain of TCR clone 137991 (TRBV7-2, TRBJ2-7)
CASSSGLWQYF

SEQ ID NO: 275983 - protein, 14 aa, Homo sapiens
  CDR3 for alpha chain variable domain of TCR clone 137992 (TRAV12-2, TRAJ45)
CAVNIGGGADGLTF

SEQ ID NO: 275984 - protein, 17 aa, Homo sapiens
  CDR3 for beta chain variable domain of TCR clone 137992 (TRBV7-8, TRBJ2-6)
CASSTGTGGAGANVLHF

SEQ ID NO: 275985 - protein, 15 aa, Homo sapiens
  CDR3 for alpha chain variable domain of TCR clone 137993 (TRAV12-2, TRAJ53)
CAVNGGGGSNYKLTF

SEQ ID NO: 275986 - protein, 16 aa, Homo sapiens
  CDR3 for beta chain variable domain of TCR clone 137993 (TRBV7-3, TRBJ2-3)
CQQLNEKDGGADTQYF

SEQ ID NO: 275987 - protein, 15 aa, Homo sapiens
  CDR3 for alpha chain variable domain of TCR clone 137994 (TRAV9-2, TRAJ49)
CALSPPDHTGNQFYF

SEQ ID NO: 275988 - protein, 14 aa, Homo sapiens
  CDR3 for beta chain variable domain of TCR clone 137994 (TRBV4-2, TRBJ2-1)
CASGLDRAYNEQFF

SEQ ID NO: 275989 - protein, 13 aa, Homo sapiens
  CDR3 for alpha chain variable domain of TCR clone 137995 (TRAV23/DV6, TRAJ24)
CSGSACSWGKLQF

SEQ ID NO: 275990 - protein, 14 aa, Homo sapiens
  CDR3 for beta chain variable domain of TCR clone 137995 (TRBV11-2, TRBJ2-7)
CASSLGAGAYEQYF

SEQ ID NO: 275991 - protein, 11 aa, Homo sapiens
  CDR3 for alpha chain variable domain of TCR clone 137996 (TRAV2, TRAJ33)
CAVESNYQLIW

SEQ ID NO: 275992 - protein, 16 aa, Homo sapiens
  CDR3 for beta chain variable domain of TCR clone 137996 (TRBV20-1, TRBJ1-4)
CSAPGQGLLTNKKLFF

SEQ ID NO: 275993 - protein, 12 aa, Homo sapiens
  CDR3 for alpha chain variable domain of TCR clone 137997 (TRAV12-3, TRAJ20)
CAMVRGDYKLSF

SEQ ID NO: 275994 - protein, 14 aa, Homo sapiens
  CDR3 for beta chain variable domain of TCR clone 137997 (TRBV19, TRBJ1-3)
CASSEGRGGYTIYF

SEQ ID NO: 275995 - protein, 14 aa, Homo sapiens
  CDR3 for alpha chain variable domain of TCR clone 137998 (TRAV4, TRAJ9)
CLVGSGTGGFKTIF

SEQ ID NO: 275996 - protein, 16 aa, Homo sapiens
  CDR3 for beta chain variable domain of TCR clone 137998 (TRBV7-6, TRBJ2-1)
CASSAPGPSSYNEQFF

SEQ ID NO: 275997 - protein, 17 aa, Homo sapiens
  CDR3 for alpha chain variable domain of TCR clone 137999 (TRAV36/DV7, TRAJ52)
CAVAQRACGTSYGKLTF

SEQ ID NO: 275998 - protein, 15 aa, Homo sapiens
  CDR3 for beta chain variable domain of TCR clone 137999 (TRBV6-5, TRBJ1-2)
CASSYSQAFNYGYTF

SEQ ID NO: 275999 - protein, 13 aa, Homo sapiens
  CDR3 for alpha chain variable domain of TCR clone 138000 (TRAV12-1, TRAJ31)
CVVIPNNNASLMF

SEQ ID NO: 276000 - protein, 15 aa, Homo sapiens
  CDR3 for beta chain variable domain of TCR clone 138000 (TRBV6-3, TRBJ2-7)
CASSSPGTVFYEQYF

SEQ ID NO: 276001 - protein, 15 aa, Homo sapiens
  CDR3 for alpha chain variable domain of TCR clone 138001 (TRAV14/DV4, TRAJ33)
CAMREGRDSNYQLIW

SEQ ID NO: 276002 - protein, 13 aa, Homo sapiens
  CDR3 for beta chain variable domain of TCR clone 138001 (TRBV4-2, TRBJ1-1)
CASSQAGNTEAFF

SEQ ID NO: 276003 - protein, 12 aa, Homo sapiens
  CDR3 for alpha chain variable domain of TCR clone 138002 (TRAV8-3, TRAJ26)
CAGDNYGQNFVF

SEQ ID NO: 276004 - protein, 12 aa, Homo sapiens
  CDR3 for beta chain variable domain of TCR clone 138002 (TRBV11-1, TRBJ1-1)
CASSLDRGEAFF

SEQ ID NO: 276005 - protein, 16 aa, Homo sapiens
  CDR3 for alpha chain variable domain of TCR clone 138003 (TRAV1-2, TRAJ16)
CAVTGFQMARSCSLQG

SEQ ID NO: 276006 - protein, 14 aa, Homo sapiens
  CDR3 for beta chain variable domain of TCR clone 138003 (TRBV14, TRBJ2-1)
CASSQVQGRGEQFF

SEQ ID NO: 276007 - protein, 16 aa, Homo sapiens
  CDR3 for alpha chain variable domain of TCR clone 138004 (TRAV3, TRAJ37)
CAVRPHGSGNTGKLIF

SEQ ID NO: 276008 - protein, 16 aa, Homo sapiens
  CDR3 for beta chain variable domain of TCR clone 138004 (TRBV9, TRBJ1-2)
CASGVEEKVSPYGYTF

SEQ ID NO: 276009 - protein, 16 aa, Homo sapiens
  CDR3 for alpha chain variable domain of TCR clone 138005 (TRAV3, TRAJ37)
CAVRGKGYGNTGKLIF

SEQ ID NO: 276010 - protein, 12 aa, Homo sapiens
  CDR3 for beta chain variable domain of TCR clone 138005 (TRBV12-4, TRBJ2-3)
CASSTLPDTQYF

SEQ ID NO: 276011 - protein, 13 aa, Homo sapiens
  CDR3 for alpha chain variable domain of TCR clone 138006 (TRAV36/DV7, TRAJ50)
CAVSKTSYDKVLF

SEQ ID NO: 276012 - protein, 13 aa, Homo sapiens
  CDR3 for beta chain variable domain of TCR clone 138006 (TRBV18, TRBJ2-7)
CASSPGRNYEQYF

SEQ ID NO: 276013 - protein, 16 aa, Homo sapiens
  CDR3 for alpha chain variable domain of TCR clone 138007 (TRAV3, TRAJ37)
CAVRGKGSGNTGKLIF

SEQ ID NO: 276014 - protein, 16 aa, Homo sapiens
  CDR3 for beta chain variable domain of TCR clone 138007 (TRBV5-4, TRBJ2-1)
CASSLVGSGQDNEQFF

SEQ ID NO: 276015 - protein, 14 aa, Homo sapiens
  CDR3 for alpha chain variable domain of TCR clone 138008 (TRAV12-1, TRAJ27)
CGEHIRTNAGKSTF

SEQ ID NO: 276016 - protein, 15 aa, Homo sapiens
  CDR3 for beta chain variable domain of TCR clone 138008 (TRBV27, TRBJ1-6)
CASSFDRGLGSPLHF

SEQ ID NO: 276017 - protein, 16 aa, Homo sapiens
  CDR3 for alpha chain variable domain of TCR clone 138009 (TRAV3, TRAJ37)
CAVRGKGSGNTGKLIF

SEQ ID NO: 276018 - protein, 17 aa, Homo sapiens
  CDR3 for beta chain variable domain of TCR clone 138009 (TRBV7-3, TRBJ2-3)
CASSLMKRMRGADTQYF

SEQ ID NO: 276019 - protein, 13 aa, Homo sapiens
  CDR3 for alpha chain variable domain of TCR clone 138010 (TRAV12-1, TRAJ6)
CVLASGGSYIPTF

SEQ ID NO: 276020 - protein, 17 aa, Homo sapiens
  CDR3 for beta chain variable domain of TCR clone 138010 (TRBV4-1, TRBJ2-7)
CASSRDPLGVRGGEQYF

SEQ ID NO: 276021 - protein, 14 aa, Homo sapiens
  CDR3 for alpha chain variable domain of TCR clone 138011 (TRAV12-3, TRAJ10)
SHLPLTGGGNELTF

SEQ ID NO: 276022 - protein, 15 aa, Homo sapiens
  CDR3 for beta chain variable domain of TCR clone 138011 (TRBV12-4, TRBJ2-5)
CASSPPTGLQETQYF

SEQ ID NO: 276023 - protein, 13 aa, Homo sapiens
  CDR3 for alpha chain variable domain of TCR clone 138012 (TRAV27, TRAJ8)
CAGGPTGFQKLVF

SEQ ID NO: 276024 - protein, 15 aa, Homo sapiens
  CDR3 for beta chain variable domain of TCR clone 138012 (TRBV19, TRBJ2-4)
CASRGPRRGENIQYF

SEQ ID NO: 276025 - protein, 13 aa, Homo sapiens
  CDR3 for alpha chain variable domain of TCR clone 138013 (TRAV8-3, TRAJ43)
CAVVPYNNNDMRF

SEQ ID NO: 276026 - protein, 17 aa, Homo sapiens
  CDR3 for beta chain variable domain of TCR clone 138013 (TRBV7-7, TRBJ1-1)
CSRIGDRPNLGVTEAFF

SEQ ID NO: 276027 - protein, 22 aa, Homo sapiens
  CDR3 for alpha chain variable domain of TCR clone 138014 (TRAV34, TRAJ52)
STSVEQTRRSNAGGTSSGKLTF

SEQ ID NO: 276028 - protein, 15 aa, Homo sapiens
  CDR3 for beta chain variable domain of TCR clone 138014 (TRBV5-1, TRBJ2-7)
CASSLNGGPAREQYF

SEQ ID NO: 276029 - protein, 12 aa, Homo sapiens
  CDR3 for alpha chain variable domain of TCR clone 138015 (TRAV12-3, TRAJ17)
CARTLTGNKLTF

SEQ ID NO: 276030 - protein, 15 aa, Homo sapiens
  CDR3 for beta chain variable domain of TCR clone 138015 (TRBV10-2, TRBJ2-6)
CASSEQGTGANVLTF

SEQ ID NO: 276031 - protein, 13 aa, Homo sapiens
  CDR3 for alpha chain variable domain of TCR clone 138016 (TRAV27, TRAJ49)
CAPRPYTGNQFYF

SEQ ID NO: 276032 - protein, 16 aa, Homo sapiens
  CDR3 for beta chain variable domain of TCR clone 138016 (TRBV7-8, TRBJ2-6)
CASRVRDSSGANVLTF

SEQ ID NO: 276033 - protein, 11 aa, Homo sapiens
  CDR3 for alpha chain variable domain of TCR clone 138017 (TRAV3, TRAJ21)
CAVGNLNKFSF

SEQ ID NO: 276034 - protein, 16 aa, Homo sapiens
  CDR3 for beta chain variable domain of TCR clone 138017 (TRBV19, TRBJ2-1)
CASSKAGPSAYNEQFF

SEQ ID NO: 276035 - protein, 14 aa, Homo sapiens
  CDR3 for alpha chain variable domain of TCR clone 138018 (TRAV8-3, TRAJ4)
CAVGASGGYNKLMF

SEQ ID NO: 276036 - protein, 13 aa, Homo sapiens
  CDR3 for beta chain variable domain of TCR clone 138018 (TRBV27, TRBJ2-7)
CASGRGGAYEQYF

SEQ ID NO: 276037 - protein, 13 aa, Homo sapiens
  CDR3 for alpha chain variable domain of TCR clone 138019 (TRAV12-1, TRAJ6)
SVVYPGGSYIPTF

SEQ ID NO: 276038 - protein, 13 aa, Homo sapiens
  CDR3 for beta chain variable domain of TCR clone 138019 (TRBV4-2, TRBJ1-1)
CASSQAGNTEAFF

SEQ ID NO: 276039 - protein, 14 aa, Homo sapiens
  CDR3 for alpha chain variable domain of TCR clone 138020 (TRAV1-2, TRAJ16)
CSVNRFSDCQKLLF

SEQ ID NO: 276040 - protein, 16 aa, Homo sapiens
  CDR3 for beta chain variable domain of TCR clone 138020 (TRBV9, TRBJ2-1)
CASSVGGGGNYNEQFS

SEQ ID NO: 276041 - protein, 12 aa, Homo sapiens
  CDR3 for alpha chain variable domain of TCR clone 138021 (TRAV26-2, TRAJ48)
CILRKGNEKLTF

SEQ ID NO: 276042 - protein, 12 aa, Homo sapiens
  CDR3 for beta chain variable domain of TCR clone 138021 (TRBV19, TRBJ1-5)
CASSIAQQPQHF

SEQ ID NO: 276043 - protein, 14 aa, Homo sapiens
  CDR3 for alpha chain variable domain of TCR clone 138022 (TRAV38-1, TRAJ27)
CAFIHNTIAGKSTF

SEQ ID NO: 276044 - protein, 12 aa, Homo sapiens
  CDR3 for beta chain variable domain of TCR clone 138022 (TRBV7-8, TRBJ2-7)
CASSLGDREQYF

SEQ ID NO: 276045 - protein, 16 aa, Homo sapiens
  CDR3 for alpha chain variable domain of TCR clone 138023 (TRAV3, TRAJ10)
CAVRDMRAGGGNKLTF

SEQ ID NO: 276046 - protein, 17 aa, Homo sapiens
  CDR3 for beta chain variable domain of TCR clone 138023 (TRBV4-1, TRBJ1-3)
CASSPQRGIRFGNTIYF

SEQ ID NO: 276047 - protein, 15 aa, Homo sapiens
  CDR3 for alpha chain variable domain of TCR clone 138024 (TRAV12-1, TRAJ8)
CVVNVENTGFQQLVF

SEQ ID NO: 276048 - protein, 12 aa, Homo sapiens
  CDR3 for beta chain variable domain of TCR clone 138024 (TRBV12-4, TRBJ2-7)
CASSLGGYEQYF

SEQ ID NO: 276049 - protein, 13 aa, Homo sapiens
  CDR3 for alpha chain variable domain of TCR clone 138025 (TRAV21, TRAJ57)
CAVTQGGSGKLVF

SEQ ID NO: 276050 - protein, 15 aa, Homo sapiens
  CDR3 for beta chain variable domain of TCR clone 138025 (TRBV28, TRBJ2-4)
CAAGSGTLLMGIQYF

SEQ ID NO: 276051 - protein, 14 aa, Homo sapiens
  CDR3 for alpha chain variable domain of TCR clone 138026 (TRAV38-1, TRAJ29)
CAFMKLGRKHTSCL

SEQ ID NO: 276052 - protein, 12 aa, Homo sapiens
  CDR3 for beta chain variable domain of TCR clone 138026 (TRBV18, TRBJ2-1)
CASSPGTSEGFF

SEQ ID NO: 276053 - protein, 15 aa, Homo sapiens
  CDR3 for alpha chain variable domain of TCR clone 138027 (TRAV12-1, TRAJ40)
CVVNRDTSGPYKYIF

SEQ ID NO: 276054 - protein, 13 aa, Homo sapiens
  CDR3 for beta chain variable domain of TCR clone 138027 (TRBV6-1, TRBJ2-1)
CASEGSSYNEQFF

SEQ ID NO: 276055 - protein, 13 aa, Homo sapiens
  CDR3 for alpha chain variable domain of TCR clone 138028 (TRAV27, TRAJ29)
CAGAHSGNTPLVF

SEQ ID NO: 276056 - protein, 18 aa, Homo sapiens
  CDR3 for beta chain variable domain of TCR clone 138028 (TRBV11-2, TRBJ2-3)
CASSLGGASRGAPNTQYF

SEQ ID NO: 276057 - protein, 13 aa, Homo sapiens
  CDR3 for alpha chain variable domain of TCR clone 138029 (TRAV8-2, TRAJ49)
CVGSPSTGNQFYF

SEQ ID NO: 276058 - protein, 14 aa, Homo sapiens
  CDR3 for beta chain variable domain of TCR clone 138029 (TRBV11-2, TRBJ2-7)
CASSRSGGAGEQYF

SEQ ID NO: 276059 - protein, 13 aa, Homo sapiens
  CDR3 for alpha chain variable domain of TCR clone 138030 (TRAV21, TRAJ56)
CTVRLGANSKLTF

SEQ ID NO: 276060 - protein, 12 aa, Homo sapiens
  CDR3 for beta chain variable domain of TCR clone 138030 (TRBV12-4, TRBJ2-3)
CASSSTTDTQYF

SEQ ID NO: 276061 - protein, 16 aa, Homo sapiens
  CDR3 for alpha chain variable domain of TCR clone 138031 (TRAV20, TRAJ26)
CAVQHRRDNYVQNFVF

SEQ ID NO: 276062 - protein, 15 aa, Homo sapiens
  CDR3 for beta chain variable domain of TCR clone 138031 (TRBV7-2, TRBJ2-7)
CASSWGQGAIYEQYF

SEQ ID NO: 276063 - protein, 14 aa, Homo sapiens
  CDR3 for alpha chain variable domain of TCR clone 138032 (TRAV8-4, TRAJ13)
CAATLSGGYQKVTF

SEQ ID NO: 276064 - protein, 13 aa, Homo sapiens
  CDR3 for beta chain variable domain of TCR clone 138032 (TRBV7-2, TRBJ1-6)
CASSLKFDSPLHF

SEQ ID NO: 276065 - protein, 14 aa, Homo sapiens
  CDR3 for alpha chain variable domain of TCR clone 138033 (TRAV3, TRAJ22)
CAVRDYGSARQLTF

SEQ ID NO: 276066 - protein, 13 aa, Homo sapiens
  CDR3 for beta chain variable domain of TCR clone 138033 (TRBV11-2, TRBJ2-5)
CASGYGAKETQFF

SEQ ID NO: 276067 - protein, 13 aa, Homo sapiens
  CDR3 for alpha chain variable domain of TCR clone 138034 (TRAV2, TRAJ40)
CAVVTSGTYKYIF

SEQ ID NO: 276068 - protein, 16 aa, Homo sapiens
  CDR3 for beta chain variable domain of TCR clone 138034 (TRBV19, TRBJ2-1)
CASSKAGPSAYNEQFF

SEQ ID NO: 276069 - protein, 15 aa, Homo sapiens
  CDR3 for alpha chain variable domain of TCR clone 138035 (TRAV3, TRAJ47)
CAVRDMGEYGNKLVF

SEQ ID NO: 276070 - protein, 14 aa, Homo sapiens
  CDR3 for beta chain variable domain of TCR clone 138035 (TRBV13, TRBJ2-5)
CASSLERVGETQYF

SEQ ID NO: 276071 - protein, 14 aa, Homo sapiens
  CDR3 for alpha chain variable domain of TCR clone 138036 (TRAV1-2, TRAJ8)
CAAREDTGFQKLVF

SEQ ID NO: 276072 - protein, 13 aa, Homo sapiens
  CDR3 for beta chain variable domain of TCR clone 138036 (TRBV15, TRBJ2-7)
CATSTTGHYEQYF

SEQ ID NO: 276073 - protein, 14 aa, Homo sapiens
  CDR3 for alpha chain variable domain of TCR clone 138037 (TRAV26-1, TRAJ21)
CIVRPPYNFNKFYF

SEQ ID NO: 276074 - protein, 14 aa, Homo sapiens
  CDR3 for beta chain variable domain of TCR clone 138037 (TRBV19, TRBJ2-1)
CASPTFVLSGEEFF

SEQ ID NO: 276075 - protein, 15 aa, Homo sapiens
  CDR3 for alpha chain variable domain of TCR clone 138038 (TRAV8-3, TRAJ45)
CASSYSGGGADGLTF

SEQ ID NO: 276076 - protein, 15 aa, Homo sapiens
  CDR3 for beta chain variable domain of TCR clone 138038 (TRBV7-2, TRBJ2-2)
CSSSSLTGGTGELFF

SEQ ID NO: 276077 - protein, 13 aa, Homo sapiens
  CDR3 for alpha chain variable domain of TCR clone 138039 (TRAV3, TRAJ21)
CAVATSANFTLDL

SEQ ID NO: 276078 - protein, 16 aa, Homo sapiens
  CDR3 for beta chain variable domain of TCR clone 138039 (TRBV19, TRBJ2-1)
CASSKAGPSSYNEQFF

SEQ ID NO: 276079 - protein, 14 aa, Homo sapiens
  CDR3 for alpha chain variable domain of TCR clone 138040 (TRAV1-2, TRAJ16)
CAVNRFSDGLKLLF

SEQ ID NO: 276080 - protein, 13 aa, Homo sapiens
  CDR3 for beta chain variable domain of TCR clone 138040 (TRBV18, TRBJ2-5)
CASSPAGKETQYF

SEQ ID NO: 276081 - protein, 15 aa, Homo sapiens
  CDR3 for alpha chain variable domain of TCR clone 138041 (TRAV8-3, TRAJ45)
CASSYSGGGADGLTF

SEQ ID NO: 276082 - protein, 17 aa, Homo sapiens
  CDR3 for beta chain variable domain of TCR clone 138041 (TRBV19, TRBJ2-2)
CASSRNPGGFGTGELFF

SEQ ID NO: 276083 - protein, 15 aa, Homo sapiens
  CDR3 for alpha chain variable domain of TCR clone 138042 (TRAV26-1, TRAJ56)
CIVSVETGANSKLTF

SEQ ID NO: 276084 - protein, 15 aa, Homo sapiens
  CDR3 for beta chain variable domain of TCR clone 138042 (TRBV27, TRBJ2-7)
CASSPQREGQREQYF

SEQ ID NO: 276085 - protein, 12 aa, Homo sapiens
  CDR3 for alpha chain variable domain of TCR clone 138043 (TRAV13-1, TRAJ53)
CAETGGNYKLTF

SEQ ID NO: 276086 - protein, 12 aa, Homo sapiens
  CDR3 for beta chain variable domain of TCR clone 138043 (TRBV5-1, TRBJ2-7)
CASSLDSYEQYF

SEQ ID NO: 276087 - protein, 15 aa, Homo sapiens
  CDR3 for alpha chain variable domain of TCR clone 138044 (TRAV23/DV6, TRAJ18)
CAARYRGSTLGRLYF

SEQ ID NO: 276088 - protein, 15 aa, Homo sapiens
  CDR3 for beta chain variable domain of TCR clone 138044 (TRBV5-5, TRBJ1-5)
CASSSTPGSNQPQHF

SEQ ID NO: 276089 - protein, 13 aa, Homo sapiens
  CDR3 for alpha chain variable domain of TCR clone 138045 (TRAV13-2, TRAJ8)
CALMNTGFQKLVF

SEQ ID NO: 276090 - protein, 17 aa, Homo sapiens
  CDR3 for beta chain variable domain of TCR clone 138045 (TRBV28, TRBJ2-1)
CASSSARQALTYNEQFF

SEQ ID NO: 276091 - protein, 12 aa, Homo sapiens
  CDR3 for alpha chain variable domain of TCR clone 138046 (TRAV8-3, TRAJ26)
CAGDNYGQNFVF

SEQ ID NO: 276092 - protein, 15 aa, Homo sapiens
  CDR3 for beta chain variable domain of TCR clone 138046 (TRBV7-9, TRBJ1-6)
CASSSPGRGNSPPHF

SEQ ID NO: 276093 - protein, 15 aa, Homo sapiens
  CDR3 for alpha chain variable domain of TCR clone 138047 (TRAV8-3, TRAJ11)
CAGGLLNSGYSTLTF

SEQ ID NO: 276094 - protein, 13 aa, Homo sapiens
  CDR3 for beta chain variable domain of TCR clone 138047 (TRBV4-2, TRBJ2-5)
CASSRAGGETQYF

SEQ ID NO: 276095 - protein, 20 aa, Homo sapiens
  CDR3 for alpha chain variable domain of TCR clone 138048 (TRAV26-1, TRAJ47)
CCVLLHRQSCFMEYGNKLVF

SEQ ID NO: 276096 - protein, 14 aa, Homo sapiens
  CDR3 for beta chain variable domain of TCR clone 138048 (TRBV7-2, TRBJ1-2)
CASSRGGTNYGYTF

SEQ ID NO: 276097 - protein, 13 aa, Homo sapiens
  CDR3 for alpha chain variable domain of TCR clone 138049 (TRAV27, TRAJ29)
CAGAHSGNTPVVF

SEQ ID NO: 276098 - protein, 14 aa, Homo sapiens
  CDR3 for beta chain variable domain of TCR clone 138049 (TRBV7-9, TRBJ2-7)
CASSIGQGAGEQYF

SEQ ID NO: 276099 - protein, 14 aa, Homo sapiens
  CDR3 for alpha chain variable domain of TCR clone 138050 (TRAV12-2, TRAJ15)
CAPHTGQAGTALIF

SEQ ID NO: 276100 - protein, 14 aa, Homo sapiens
  CDR3 for beta chain variable domain of TCR clone 138050 (TRBV12-5, TRBJ2-5)
CASGSRTQQETQYF

SEQ ID NO: 276101 - protein, 18 aa, Homo sapiens
  CDR3 for alpha chain variable domain of TCR clone 138051 (TRAV21, TRAJ52)
CAVRPSPAGGTRYGKLTF

SEQ ID NO: 276102 - protein, 13 aa, Homo sapiens
  CDR3 for beta chain variable domain of TCR clone 138051 (TRBV2, TRBJ1-5)
CATAGPGNQPQHF

SEQ ID NO: 276103 - protein, 14 aa, Homo sapiens
  CDR3 for alpha chain variable domain of TCR clone 138052 (TRAV23/DV6, TRAJ40)
CAARKNSGTYKYIF

SEQ ID NO: 276104 - protein, 14 aa, Homo sapiens
  CDR3 for beta chain variable domain of TCR clone 138052 (TRBV10-3, TRBJ2-5)
CAISERDYQETQSF

SEQ ID NO: 276105 - protein, 14 aa, Homo sapiens
  CDR3 for alpha chain variable domain of TCR clone 138053 (TRAV17, TRAJ32)
CAADPGGATNKLIF

SEQ ID NO: 276106 - protein, 13 aa, Homo sapiens
  CDR3 for beta chain variable domain of TCR clone 138053 (TRBV7-9, TRBJ1-2)
CASSLKQNYGYTF

SEQ ID NO: 276107 - protein, 11 aa, Homo sapiens
  CDR3 for alpha chain variable domain of TCR clone 138054 (TRAV21, TRAJ11)
CAVNGYSTLTS

SEQ ID NO: 276108 - protein, 15 aa, Homo sapiens
  CDR3 for beta chain variable domain of TCR clone 138054 (TRBV6-3, TRBJ2-7)
CASSSPGTVFYEQYF

SEQ ID NO: 276109 - protein, 11 aa, Homo sapiens
  CDR3 for alpha chain variable domain of TCR clone 138055 (TRAV12-3, TRAJ43)
CAMSVSNDMRF

SEQ ID NO: 276110 - protein, 15 aa, Homo sapiens
  CDR3 for beta chain variable domain of TCR clone 138055 (TRBV19, TRBJ2-7)
CASSIAGTGGYEQYF

SEQ ID NO: 276111 - protein, 12 aa, Homo sapiens
  CDR3 for alpha chain variable domain of TCR clone 138056 (TRAV26-1, TRAJ54)
CIGGWGAQKLGF

SEQ ID NO: 276112 - protein, 14 aa, Homo sapiens
  CDR3 for beta chain variable domain of TCR clone 138056 (TRBV11-2, TRBJ1-2)
CTSSSGQAGDGYTF

SEQ ID NO: 276113 - protein, 13 aa, Homo sapiens
  CDR3 for alpha chain variable domain of TCR clone 138057 (TRAV8-6, TRAJ40)
CAVSVTGTYKYIL

SEQ ID NO: 276114 - protein, 15 aa, Homo sapiens
  CDR3 for beta chain variable domain of TCR clone 138057 (TRBV4-1, TRBJ2-3)
CASGRGQGIPGTQYF

SEQ ID NO: 276115 - protein, 13 aa, Homo sapiens
  CDR3 for alpha chain variable domain of TCR clone 138058 (TRAV13-1, TRAJ40)
CAASTSGTYKYIF

SEQ ID NO: 276116 - protein, 13 aa, Homo sapiens
  CDR3 for beta chain variable domain of TCR clone 138058 (TRBV4-3, TRBJ2-3)
CASSQGYTDTQYF

SEQ ID NO: 276117 - protein, 13 aa, Homo sapiens
  CDR3 for alpha chain variable domain of TCR clone 138059 (TRAV12-2, TRAJ15)
CAVFNQAETALIF

SEQ ID NO: 276118 - protein, 15 aa, Homo sapiens
  CDR3 for beta chain variable domain of TCR clone 138059 (TRBV7-8, TRBJ1-5)
CASSRGGGAGQPQHF

SEQ ID NO: 276119 - protein, 15 aa, Homo sapiens
  CDR3 for alpha chain variable domain of TCR clone 138060 (TRAV21, TRAJ37)
CAVRPTVSNTGKLIF

SEQ ID NO: 276120 - protein, 16 aa, Homo sapiens
  CDR3 for beta chain variable domain of TCR clone 138060 (TRBV24-1, TRBJ2-3)
CATSDRRQDLTDTQYF

SEQ ID NO: 276121 - protein, 17 aa, Homo sapiens
  CDR3 for alpha chain variable domain of TCR clone 138061 (TRAV4, )
CLVDIQNPDPAVYQLRD

SEQ ID NO: 276122 - protein, 16 aa, Homo sapiens
  CDR3 for beta chain variable domain of TCR clone 138061 (TRBV28, TRBJ1-1)
CASSLSGTGWKTEAFF

SEQ ID NO: 276123 - protein, 16 aa, Homo sapiens
  CDR3 for alpha chain variable domain of TCR clone 138062 (TRAV30, TRAJ24)
CGTEIVDADSWGKFQV

SEQ ID NO: 276124 - protein, 13 aa, Homo sapiens
  CDR3 for beta chain variable domain of TCR clone 138062 (TRBV18, TRBJ1-2)
CASSASATEGYTF

SEQ ID NO: 276125 - protein, 13 aa, Homo sapiens
  CDR3 for alpha chain variable domain of TCR clone 138063 (TRAV27, TRAJ29)
CAGAHSGNTPLFF

SEQ ID NO: 276126 - protein, 14 aa, Homo sapiens
  CDR3 for beta chain variable domain of TCR clone 138063 (TRBV12-5, TRBJ2-5)
CASGSRTHQETQYF

SEQ ID NO: 276127 - protein, 12 aa, Homo sapiens
  CDR3 for alpha chain variable domain of TCR clone 138064 (TRAV23/DV6, TRAJ30)
CAASKGDDKIIF

SEQ ID NO: 276128 - protein, 13 aa, Homo sapiens
  CDR3 for beta chain variable domain of TCR clone 138064 (TRBV19, TRBJ1-2)
CASSVPGQGGYTF

SEQ ID NO: 276129 - protein, 15 aa, Homo sapiens
  CDR3 for alpha chain variable domain of TCR clone 138065 (TRAV27, TRAJ38)
CAGRFNAGNNRKLIW

SEQ ID NO: 276130 - protein, 13 aa, Homo sapiens
  CDR3 for beta chain variable domain of TCR clone 138065 (TRBV12-5, TRBJ2-3)
CARQNRGTDTQYF

SEQ ID NO: 276131 - protein, 17 aa, Homo sapiens
  CDR3 for alpha chain variable domain of TCR clone 138066 (TRAV29/DV5, TRAJ52)
CAATSTADGTSYGKLTF

SEQ ID NO: 276132 - protein, 15 aa, Homo sapiens
  CDR3 for beta chain variable domain of TCR clone 138066 (TRBV3-1, TRBJ2-7)
CASSQEWTGSYEHYF

SEQ ID NO: 276133 - protein, 14 aa, Homo sapiens
  CDR3 for alpha chain variable domain of TCR clone 138067 (TRAV1-2, TRAJ16)
CAVNGFSDGQKLLF

SEQ ID NO: 276134 - protein, 15 aa, Homo sapiens
  CDR3 for beta chain variable domain of TCR clone 138067 (TRBV2, TRBJ2-1)
CASSEEREGDNEQFF

SEQ ID NO: 276135 - protein, 16 aa, Homo sapiens
  CDR3 for alpha chain variable domain of TCR clone 138068 (TRAV38-2/DV8, TRAJ47)
CAYRSAIMEYGNKLVF

SEQ ID NO: 276136 - protein, 11 aa, Homo sapiens
  CDR3 for beta chain variable domain of TCR clone 138068 (TRBV7-8, TRBJ2-7)
CASSLSLEQYF

SEQ ID NO: 276137 - protein, 14 aa, Homo sapiens
  CDR3 for alpha chain variable domain of TCR clone 138069 (TRAV8-1, TRAJ5)
CAVRTDTGRRALTF

SEQ ID NO: 276138 - protein, 14 aa, Homo sapiens
  CDR3 for beta chain variable domain of TCR clone 138069 (TRBV7-8, TRBJ2-3)
CVGSFPDGQDTQYF

SEQ ID NO: 276139 - protein, 12 aa, Homo sapiens
  CDR3 for alpha chain variable domain of TCR clone 138070 (TRAV21, TRAJ49)
CAVRNTGNQFYF

SEQ ID NO: 276140 - protein, 15 aa, Homo sapiens
  CDR3 for beta chain variable domain of TCR clone 138070 (TRBV5-1, TRBJ2-1)
CASSPPRAPYNEQFF

SEQ ID NO: 276141 - protein, 12 aa, Homo sapiens
  CDR3 for alpha chain variable domain of TCR clone 138071 (TRAV35, TRAJ28)
GVEGAGSYQLTF

SEQ ID NO: 276142 - protein, 13 aa, Homo sapiens
  CDR3 for beta chain variable domain of TCR clone 138071 (TRBV9, TRBJ2-1)
CASSPSWGSEQFF

SEQ ID NO: 276143 - protein, 18 aa, Homo sapiens
  CDR3 for alpha chain variable domain of TCR clone 138072 (TRAV12-3, TRAJ52)
CAMSVGGAGGTSYGKLTF

SEQ ID NO: 276144 - protein, 14 aa, Homo sapiens
  CDR3 for beta chain variable domain of TCR clone 138072 (TRBV7-6, TRBJ2-7)
CASSFRQGADEQYF

SEQ ID NO: 276145 - protein, 14 aa, Homo sapiens
  CDR3 for alpha chain variable domain of TCR clone 138073 (TRAV2, TRAJ9)
CAVEDRCGGFKTIF

SEQ ID NO: 276146 - protein, 13 aa, Homo sapiens
  CDR3 for beta chain variable domain of TCR clone 138073 (TRBV27, TRBJ1-1)
CASSLSIGAEAFF

SEQ ID NO: 276147 - protein, 16 aa, Homo sapiens
  CDR3 for alpha chain variable domain of TCR clone 138074 (TRAV30, TRAJ24)
CGTEIVDADSWGKFQF

SEQ ID NO: 276148 - protein, 12 aa, Homo sapiens
  CDR3 for beta chain variable domain of TCR clone 138074 (TRBV7-8, TRBJ2-7)
CASSLGDMEQYF

SEQ ID NO: 276149 - protein, 18 aa, Homo sapiens
  CDR3 for alpha chain variable domain of TCR clone 138075 (TRAV21, TRAJ52)
CAVRPSPAGGTSYGKLTF

SEQ ID NO: 276150 - protein, 17 aa, Homo sapiens
  CDR3 for beta chain variable domain of TCR clone 138075 (TRBV13, TRBJ2-3)
CASSLTRVAGGGNTQYF

SEQ ID NO: 276151 - protein, 16 aa, Homo sapiens
  CDR3 for alpha chain variable domain of TCR clone 138076 (TRAV26-1, TRAJ32)
CIVRTNYGGATNKLIF

SEQ ID NO: 276152 - protein, 13 aa, Homo sapiens
  CDR3 for beta chain variable domain of TCR clone 138076 (TRBV19, TRBJ2-2)
CASSIWSTGELFF

SEQ ID NO: 276153 - protein, 15 aa, Homo sapiens
  CDR3 for alpha chain variable domain of TCR clone 138077 (TRAV25, TRAJ53)
CAATGGGGSNYKLTL

SEQ ID NO: 276154 - protein, 15 aa, Homo sapiens
  CDR3 for beta chain variable domain of TCR clone 138077 (TRBV2, TRBJ2-7)
CASSEGQARSYEQYF

SEQ ID NO: 276155 - protein, 12 aa, Homo sapiens
  CDR3 for alpha chain variable domain of TCR clone 138078 (TRAV2, TRAJ33)
CAVEDSNYQLIW

SEQ ID NO: 276156 - protein, 14 aa, Homo sapiens
  CDR3 for beta chain variable domain of TCR clone 138078 (TRBV19, TRBJ1-4)
CACSINRGGEKLFF

SEQ ID NO: 276157 - protein, 10 aa, Homo sapiens
  CDR3 for alpha chain variable domain of TCR clone 138079 (TRAV25, TRAJ20)
CAGNDYKLSF

SEQ ID NO: 276158 - protein, 13 aa, Homo sapiens
  CDR3 for beta chain variable domain of TCR clone 138079 (TRBV14, TRBJ1-1)
CASSQEAGTEAFF

SEQ ID NO: 276159 - protein, 13 aa, Homo sapiens
  CDR3 for alpha chain variable domain of TCR clone 138080 (TRAV4, TRAJ31)
CLVYRNNNARLMF

SEQ ID NO: 276160 - protein, 14 aa, Homo sapiens
  CDR3 for beta chain variable domain of TCR clone 138080 (TRBV12-5, TRBJ2-5)
CASGSRTHQETQYF

SEQ ID NO: 276161 - protein, 14 aa, Homo sapiens
  CDR3 for alpha chain variable domain of TCR clone 138081 (TRAV17, TRAJ31)
CATDLRNNNARLMF

SEQ ID NO: 276162 - protein, 14 aa, Homo sapiens
  CDR3 for beta chain variable domain of TCR clone 138081 (TRBV12-4, TRBJ2-5)
CASSLWQKQETQYF

SEQ ID NO: 276163 - protein, 11 aa, Homo sapiens
  CDR3 for alpha chain variable domain of TCR clone 138082 (TRAV17, TRAJ43)
CATPRSNDMRF

SEQ ID NO: 276164 - protein, 13 aa, Homo sapiens
  CDR3 for beta chain variable domain of TCR clone 138082 (TRBV12-4, TRBJ2-5)
CASSPGTEETQYF

SEQ ID NO: 276165 - protein, 12 aa, Homo sapiens
  CDR3 for alpha chain variable domain of TCR clone 138083 (TRAV21, TRAJ33)
CAKMDSNYQLIW

SEQ ID NO: 276166 - protein, 13 aa, Homo sapiens
  CDR3 for beta chain variable domain of TCR clone 138083 (TRBV2, TRBJ2-7)
CQQPNPGGYEQYF

SEQ ID NO: 276167 - protein, 12 aa, Homo sapiens
  CDR3 for alpha chain variable domain of TCR clone 138084 (TRAV21, TRAJ31)
CAVWGNNARLMF

SEQ ID NO: 276168 - protein, 16 aa, Homo sapiens
  CDR3 for beta chain variable domain of TCR clone 138084 (TRBV27, TRBJ2-5)
CAISYGPGGQMETQYF

SEQ ID NO: 276169 - protein, 14 aa, Homo sapiens
  CDR3 for alpha chain variable domain of TCR clone 138085 (TRAV26-1, TRAJ6)
CVVSPVGGSYIPTF

SEQ ID NO: 276170 - protein, 16 aa, Homo sapiens
  CDR3 for beta chain variable domain of TCR clone 138085 (TRBV4-1, TRBJ2-5)
CASSSGLAGVLGTQYF

SEQ ID NO: 276171 - protein, 15 aa, Homo sapiens
  CDR3 for alpha chain variable domain of TCR clone 138086 (TRAV2, TRAJ37)
CAVEDGSSNTGKLIV

SEQ ID NO: 276172 - protein, 13 aa, Homo sapiens
  CDR3 for beta chain variable domain of TCR clone 138086 (TRBV20-1, TRBJ1-6)
CSTFREGNSPLHF

SEQ ID NO: 276173 - protein, 13 aa, Homo sapiens
  CDR3 for alpha chain variable domain of TCR clone 138087 (TRAV3, TRAJ8)
CAVRFTGSQKLVF

SEQ ID NO: 276174 - protein, 12 aa, Homo sapiens
  CDR3 for beta chain variable domain of TCR clone 138087 (TRBV2, TRBJ1-2)
CASSGQTYGYTF

SEQ ID NO: 276175 - protein, 16 aa, Homo sapiens
  CDR3 for alpha chain variable domain of TCR clone 138088 (TRAV1-2, TRAJ10)
CAVRGVLPGGGNKLTF

SEQ ID NO: 276176 - protein, 14 aa, Homo sapiens
  CDR3 for beta chain variable domain of TCR clone 138088 (TRBV27, TRBJ2-7)
CQQSIVTGAYEQYF

SEQ ID NO: 276177 - protein, 14 aa, Homo sapiens
  CDR3 for alpha chain variable domain of TCR clone 138089 (TRAV38-2/DV8, TRAJ23)
CAYRSQNQGGKLIF

SEQ ID NO: 276178 - protein, 17 aa, Homo sapiens
  CDR3 for beta chain variable domain of TCR clone 138089 (TRBV13, TRBJ2-3)
CASSLSRVAGGRNTQYF

SEQ ID NO: 276179 - protein, 15 aa, Homo sapiens
  CDR3 for alpha chain variable domain of TCR clone 138090 (TRAV12-2, TRAJ53)
CAVNGGGGSNYNLTF

SEQ ID NO: 276180 - protein, 17 aa, Homo sapiens
  CDR3 for beta chain variable domain of TCR clone 138090 (TRBV7-3, TRBJ2-3)
CASSVMKRMRGADTQYF

SEQ ID NO: 276181 - protein, 16 aa, Homo sapiens
  CDR3 for alpha chain variable domain of TCR clone 138091 (TRAV3, TRAJ42)
CAVRDIEGGSQGNLIF

SEQ ID NO: 276182 - protein, 14 aa, Homo sapiens
  CDR3 for beta chain variable domain of TCR clone 138091 (TRBV12-5, TRBJ2-5)
CASGSRTHQETQYF

SEQ ID NO: 276183 - protein, 11 aa, Homo sapiens
  CDR3 for alpha chain variable domain of TCR clone 138092 (TRAV20, TRAJ34)
CTRDNTDKHIF

SEQ ID NO: 276184 - protein, 15 aa, Homo sapiens
  CDR3 for beta chain variable domain of TCR clone 138092 (TRBV2, TRBJ2-1)
CASSVTSEGTDEQFF

SEQ ID NO: 276185 - protein, 14 aa, Homo sapiens
  CDR3 for alpha chain variable domain of TCR clone 138093 (TRAV12-2, TRAJ13)
CAVKKTGGYQKVTF

SEQ ID NO: 276186 - protein, 14 aa, Homo sapiens
  CDR3 for beta chain variable domain of TCR clone 138093 (TRBV13, TRBJ2-5)
CASSLGPRGETQYF

SEQ ID NO: 276187 - protein, 14 aa, Homo sapiens
  CDR3 for alpha chain variable domain of TCR clone 138094 (TRAV23/DV6, TRAJ17)
CAASIWAAGNKPTF

SEQ ID NO: 276188 - protein, 12 aa, Homo sapiens
  CDR3 for beta chain variable domain of TCR clone 138094 (TRBV20-1, TRBJ2-5)
CSAGGAGETQYF

SEQ ID NO: 276189 - protein, 15 aa, Homo sapiens
  CDR3 for alpha chain variable domain of TCR clone 138095 (TRAV26-1, TRAJ23)
CIVRVAGYQGGKLIF

SEQ ID NO: 276190 - protein, 15 aa, Homo sapiens
  CDR3 for beta chain variable domain of TCR clone 138095 (TRBV28, TRBJ1-3)
CASSMGWASGNTIYF

SEQ ID NO: 276191 - protein, 14 aa, Homo sapiens
  CDR3 for alpha chain variable domain of TCR clone 138096 (TRAV27, TRAJ23)
CAGAFDNQGGKLIC

SEQ ID NO: 276192 - protein, 15 aa, Homo sapiens
  CDR3 for beta chain variable domain of TCR clone 138096 (TRBV7-3, TRBJ2-7)
CASSLTGQGKYEQYF

SEQ ID NO: 276193 - protein, 12 aa, Homo sapiens
  CDR3 for alpha chain variable domain of TCR clone 138097 (TRAV2, TRAJ26)
CPPGDYGQHFVF

SEQ ID NO: 276194 - protein, 13 aa, Homo sapiens
  CDR3 for beta chain variable domain of TCR clone 138097 (TRBV7-9, TRBJ1-2)
CASSLKQNYGYTF

SEQ ID NO: 276195 - protein, 11 aa, Homo sapiens
  CDR3 for alpha chain variable domain of TCR clone 138098 (TRAV12-2, TRAJ49)
CALQGGNQFNF

SEQ ID NO: 276196 - protein, 14 aa, Homo sapiens
  CDR3 for beta chain variable domain of TCR clone 138098 (TRBV7-2, TRBJ2-7)
CASSPKTSFYEQYF

SEQ ID NO: 276197 - protein, 11 aa, Homo sapiens
  CDR3 for alpha chain variable domain of TCR clone 138099 (TRAV16, TRAJ26)
CALTRWSEFCL

SEQ ID NO: 276198 - protein, 16 aa, Homo sapiens
  CDR3 for beta chain variable domain of TCR clone 138099 (TRBV3-1, TRBJ2-7)
CASSQGATGVAYEQYF

SEQ ID NO: 276199 - protein, 11 aa, Homo sapiens
  CDR3 for alpha chain variable domain of TCR clone 138100 (TRAV13-2, TRAJ20)
CADPNDYKLSF

SEQ ID NO: 276200 - protein, 12 aa, Homo sapiens
  CDR3 for beta chain variable domain of TCR clone 138100 (TRBV11-2, TRBJ2-2)
CASSLGGGELFF

SEQ ID NO: 276201 - protein, 16 aa, Homo sapiens
  CDR3 for alpha chain variable domain of TCR clone 138101 (TRAV3, TRAJ10)
CAVRDMRAGGGNKLTF

SEQ ID NO: 276202 - protein, 15 aa, Homo sapiens
  CDR3 for beta chain variable domain of TCR clone 138101 (TRBV20-1, TRBJ2-1)
CSAEGGLLAGDEQFV

SEQ ID NO: 276203 - protein, 18 aa, Homo sapiens
  CDR3 for alpha chain variable domain of TCR clone 138102 (TRAV29/DV5, TRAJ52)
CAAGFRGAGGTSYGKLTF

SEQ ID NO: 276204 - protein, 16 aa, Homo sapiens
  CDR3 for beta chain variable domain of TCR clone 138102 (TRBV7-3, TRBJ2-2)
CASSLKQGTLSGELFF

SEQ ID NO: 276205 - protein, 13 aa, Homo sapiens
  CDR3 for alpha chain variable domain of TCR clone 138103 (TRAV12-3, TRAJ4)
CAMTGRGYNKLIF

SEQ ID NO: 276206 - protein, 17 aa, Homo sapiens
  CDR3 for beta chain variable domain of TCR clone 138103 (TRBV28, TRBJ2-3)
CASSLQVGPSSTDTQYF

SEQ ID NO: 276207 - protein, 14 aa, Homo sapiens
  CDR3 for alpha chain variable domain of TCR clone 138104 (TRAV13-1, TRAJ40)
CAASMTSGTYKYNF

SEQ ID NO: 276208 - protein, 15 aa, Homo sapiens
  CDR3 for beta chain variable domain of TCR clone 138104 (TRBV7-3, TRBJ2-1)
CASSPTGGGEGEQFF

SEQ ID NO: 276209 - protein, 15 aa, Homo sapiens
  CDR3 for alpha chain variable domain of TCR clone 138105 (TRAV26-1, TRAJ44)
CIVRANTGTASKLTF

SEQ ID NO: 276210 - protein, 13 aa, Homo sapiens
  CDR3 for beta chain variable domain of TCR clone 138105 (TRBV12-5, TRBJ2-3)
CASGDRQSDTQYY

SEQ ID NO: 276211 - protein, 19 aa, Homo sapiens
  CDR3 for alpha chain variable domain of TCR clone 138106 (TRAV21, TRAJ20)
GLVTQPPTSVLPNDYKLSF

SEQ ID NO: 276212 - protein, 14 aa, Homo sapiens
  CDR3 for beta chain variable domain of TCR clone 138106 (TRBV7-2, TRBJ1-3)
CASSRLRSGNTIYF

SEQ ID NO: 276213 - protein, 15 aa, Homo sapiens
  CDR3 for alpha chain variable domain of TCR clone 138107 (TRAV25, TRAJ53)
CAATGGGGGNYKLTF

SEQ ID NO: 276214 - protein, 15 aa, Homo sapiens
  CDR3 for beta chain variable domain of TCR clone 138107 (TRBV27, TRBJ1-5)
CASSLGTGFDQPQHF

SEQ ID NO: 276215 - protein, 14 aa, Homo sapiens
  CDR3 for alpha chain variable domain of TCR clone 138108 (TRAV26-1, TRAJ22)
CIVRVYGSARQLTF

SEQ ID NO: 276216 - protein, 17 aa, Homo sapiens
  CDR3 for beta chain variable domain of TCR clone 138108 (TRBV7-3, TRBJ2-3)
GASSPGGLAGFGDTQYF

SEQ ID NO: 276217 - protein, 11 aa, Homo sapiens
  CDR3 for alpha chain variable domain of TCR clone 138109 (TRAV12-2, TRAJ23)
CARGRGGNLIF

SEQ ID NO: 276218 - protein, 14 aa, Homo sapiens
  CDR3 for beta chain variable domain of TCR clone 138109 (TRBV28, TRBJ2-5)
CASSLGDRAETQYF

SEQ ID NO: 276219 - protein, 16 aa, Homo sapiens
  CDR3 for alpha chain variable domain of TCR clone 138110 (TRAV1-2, TRAJ6)
CAVRDQGTGGSYIPTL

SEQ ID NO: 276220 - protein, 13 aa, Homo sapiens
  CDR3 for beta chain variable domain of TCR clone 138110 (TRBV28, TRBJ2-7)
CASTPGLAGEQYF

SEQ ID NO: 276221 - protein, 11 aa, Homo sapiens
  CDR3 for alpha chain variable domain of TCR clone 138111 (TRAV1-2, TRAJ40)
CAVPGTYKYIF

SEQ ID NO: 276222 - protein, 15 aa, Homo sapiens
  CDR3 for beta chain variable domain of TCR clone 138111 (TRBV10-2, TRBJ2-6)
CASSEQGTGANVLTF

SEQ ID NO: 276223 - protein, 15 aa, Homo sapiens
  CDR3 for alpha chain variable domain of TCR clone 138112 (TRAV25, TRAJ52)
CAGRPGGTSYGKLTF

SEQ ID NO: 276224 - protein, 14 aa, Homo sapiens
  CDR3 for beta chain variable domain of TCR clone 138112 (TRBV7-3, TRBJ2-2)
CASRPGLLTGELFF

SEQ ID NO: 276225 - protein, 14 aa, Homo sapiens
  CDR3 for alpha chain variable domain of TCR clone 138113 (TRAV20, TRAJ42)
CAVQARGSQGNLIF

SEQ ID NO: 276226 - protein, 13 aa, Homo sapiens
  CDR3 for beta chain variable domain of TCR clone 138113 (TRBV2, TRBJ2-7)
CASSVGGSGEQYF

SEQ ID NO: 276227 - protein, 13 aa, Homo sapiens
  CDR3 for alpha chain variable domain of TCR clone 138114 (TRAV2, TRAJ23)
CAVEANQGGKLIF

SEQ ID NO: 276228 - protein, 16 aa, Homo sapiens
  CDR3 for beta chain variable domain of TCR clone 138114 (TRBV2, TRBJ1-2)
CASSEGQANSGYGYTF

SEQ ID NO: 276229 - protein, 16 aa, Homo sapiens
  CDR3 for alpha chain variable domain of TCR clone 138115 (TRAV17, TRAJ53)
CATDALSGGSNYKLTF

SEQ ID NO: 276230 - protein, 12 aa, Homo sapiens
  CDR3 for beta chain variable domain of TCR clone 138115 (TRBV12-4, TRBJ2-7)
CASSLGGYEQYF

SEQ ID NO: 276231 - protein, 14 aa, Homo sapiens
  CDR3 for alpha chain variable domain of TCR clone 138116 (TRAV9-2, TRAJ39)
CALYIYNAGKMLTF

SEQ ID NO: 276232 - protein, 14 aa, Homo sapiens
  CDR3 for beta chain variable domain of TCR clone 138116 (TRBV6-1, TRBJ1-3)
CASVQGGGGNTIYF

SEQ ID NO: 276233 - protein, 12 aa, Homo sapiens
  CDR3 for alpha chain variable domain of TCR clone 138117 (TRAV12-3, TRAJ42)
CAPGGSQGNLIF

SEQ ID NO: 276234 - protein, 13 aa, Homo sapiens
  CDR3 for beta chain variable domain of TCR clone 138117 (TRBV5-7, TRBJ2-6)
CASTSSGSNVLTF

SEQ ID NO: 276235 - protein, 14 aa, Homo sapiens
  CDR3 for alpha chain variable domain of TCR clone 138118 (TRAV1-2, TRAJ33)
CAVRAPDSNYQLIW

SEQ ID NO: 276236 - protein, 15 aa, Homo sapiens
  CDR3 for beta chain variable domain of TCR clone 138118 (TRBV10-3, TRBJ2-3)
CTISLTSGGTDTQYF

SEQ ID NO: 276237 - protein, 15 aa, Homo sapiens
  CDR3 for alpha chain variable domain of TCR clone 138119 (TRAV8-1, TRAJ6)
CAVNANAGGSYIPTF

SEQ ID NO: 276238 - protein, 12 aa, Homo sapiens
  CDR3 for beta chain variable domain of TCR clone 138119 (TRBV5-7, TRBJ2-7)
CASSVQGGEQYF

SEQ ID NO: 276239 - protein, 16 aa, Homo sapiens
  CDR3 for alpha chain variable domain of TCR clone 138120 (TRAV10, TRAJ41)
CVVSLATSNSGYALNF

SEQ ID NO: 276240 - protein, 13 aa, Homo sapiens
  CDR3 for beta chain variable domain of TCR clone 138120 (TRBV15, TRBJ1-2)
CATSRGQLYGYTF

SEQ ID NO: 276241 - protein, 15 aa, Homo sapiens
  CDR3 for alpha chain variable domain of TCR clone 138121 (TRAV14/DV4, TRAJ10)
CAMRELTGGGNKLTF

SEQ ID NO: 276242 - protein, 17 aa, Homo sapiens
  CDR3 for beta chain variable domain of TCR clone 138121 (TRBV13, TRBJ2-3)
CASSLSRVAGGRNTQYF

SEQ ID NO: 276243 - protein, 11 aa, Homo sapiens
  CDR3 for alpha chain variable domain of TCR clone 138122 (TRAV1-2, TRAJ40)
CAVPGTYTYIF

SEQ ID NO: 276244 - protein, 15 aa, Homo sapiens
  CDR3 for beta chain variable domain of TCR clone 138122 (TRBV7-9, TRBJ2-7)
CASSLALAEAYEQYF

SEQ ID NO: 276245 - protein, 15 aa, Homo sapiens
  CDR3 for alpha chain variable domain of TCR clone 138123 (TRAV8-3, TRAJ11)
CAVGLLHSGYSTLTF

SEQ ID NO: 276246 - protein, 11 aa, Homo sapiens
  CDR3 for beta chain variable domain of TCR clone 138123 (TRBV29-1, TRBJ2-5)
CSEDRTGTQYF

SEQ ID NO: 276247 - protein, 14 aa, Homo sapiens
  CDR3 for alpha chain variable domain of TCR clone 138124 (TRAV26-1, TRAJ11)
CIVPLYSGYSTLTF

SEQ ID NO: 276248 - protein, 13 aa, Homo sapiens
  CDR3 for beta chain variable domain of TCR clone 138124 (TRBV19, TRBJ1-2)
CASSVPGQDGYTF

SEQ ID NO: 276249 - protein, 15 aa, Homo sapiens
  CDR3 for alpha chain variable domain of TCR clone 138125 (TRAV17, TRAJ57)
CATGPSQGGSEKLVF

SEQ ID NO: 276250 - protein, 17 aa, Homo sapiens
  CDR3 for beta chain variable domain of TCR clone 138125 (TRBV20-1, TRBJ2-1)
CSTSSSGLAGSYNEQFF

SEQ ID NO: 276251 - protein, 12 aa, Homo sapiens
  CDR3 for alpha chain variable domain of TCR clone 138126 (TRAV2, TRAJ9)
CAVGAGGFKTIF

SEQ ID NO: 276252 - protein, 12 aa, Homo sapiens
  CDR3 for beta chain variable domain of TCR clone 138126 (TRBV18, TRBJ2-5)
CASSPSKETQYF

SEQ ID NO: 276253 - protein, 14 aa, Homo sapiens
  CDR3 for alpha chain variable domain of TCR clone 138127 (TRAV1-2, TRAJ8)
CAVREDTGFQKLVF

SEQ ID NO: 276254 - protein, 13 aa, Homo sapiens
  CDR3 for beta chain variable domain of TCR clone 138127 (TRBV7-9, TRBJ1-2)
CAGSLKQNYGYAF

SEQ ID NO: 276255 - protein, 16 aa, Homo sapiens
  CDR3 for alpha chain variable domain of TCR clone 138128 (TRAV14/DV4, TRAJ12)
CAMREVLMDSSYKLIF

SEQ ID NO: 276256 - protein, 14 aa, Homo sapiens
  CDR3 for beta chain variable domain of TCR clone 138128 (TRBV25-1, TRBJ1-1)
CAGTHLGGNTEAFF

SEQ ID NO: 276257 - protein, 15 aa, Homo sapiens
  CDR3 for alpha chain variable domain of TCR clone 138129 (TRAV12-1, TRAJ36)
CVVNEHQTGANNLFF

SEQ ID NO: 276258 - protein, 15 aa, Homo sapiens
  CDR3 for beta chain variable domain of TCR clone 138129 (TRBV7-2, TRBJ1-2)
CASSLVSGGDYGYTF

SEQ ID NO: 276259 - protein, 14 aa, Homo sapiens
  CDR3 for alpha chain variable domain of TCR clone 138130 (TRAV20, TRAJ42)
CAVLAGGSQGNLIF

SEQ ID NO: 276260 - protein, 14 aa, Homo sapiens
  CDR3 for beta chain variable domain of TCR clone 138130 (TRBV28, TRBJ1-2)
CASRIQGANYGYTF

SEQ ID NO: 276261 - protein, 13 aa, Homo sapiens
  CDR3 for alpha chain variable domain of TCR clone 138131 (TRAV12-3, TRAJ43)
CAMIRPNNNDKRF

SEQ ID NO: 276262 - protein, 12 aa, Homo sapiens
  CDR3 for beta chain variable domain of TCR clone 138131 (TRBV11-2, TRBJ2-5)
CASSLGQETQYF

SEQ ID NO: 276263 - protein, 13 aa, Homo sapiens
  CDR3 for alpha chain variable domain of TCR clone 138132 (TRAV2, TRAJ40)
CAVVTSGTYKYIF

SEQ ID NO: 276264 - protein, 14 aa, Homo sapiens
  CDR3 for beta chain variable domain of TCR clone 138132 (TRBV18, TRBJ1-1)
CASSPPTGRTEAFF

SEQ ID NO: 276265 - protein, 10 aa, Homo sapiens
  CDR3 for alpha chain variable domain of TCR clone 138133 (TRAV12-2, TRAJ27)
CGANAGKSTF

SEQ ID NO: 276266 - protein, 13 aa, Homo sapiens
  CDR3 for beta chain variable domain of TCR clone 138133 (TRBV2, TRBJ1-5)
CASSQGGSQPQHF

SEQ ID NO: 276267 - protein, 13 aa, Homo sapiens
  CDR3 for alpha chain variable domain of TCR clone 138134 (TRAV12-2, TRAJ37)
CAGGSGNPGKLIF

SEQ ID NO: 276268 - protein, 16 aa, Homo sapiens
  CDR3 for beta chain variable domain of TCR clone 138134 (TRBV7-8, TRBJ2-3)
CASSTEGQRETDTQYF

SEQ ID NO: 276269 - protein, 16 aa, Homo sapiens
  CDR3 for alpha chain variable domain of TCR clone 138135 (TRAV21, TRAJ37)
CAVRTAGSSNTGKLIF

SEQ ID NO: 276270 - protein, 13 aa, Homo sapiens
  CDR3 for beta chain variable domain of TCR clone 138135 (TRBV7-9, TRBJ2-5)
CDSRPSGRETQYF

SEQ ID NO: 276271 - protein, 11 aa, Homo sapiens
  CDR3 for alpha chain variable domain of TCR clone 138136 (TRAV1-1, TRAJ37)
CAVSPQGKLIF

SEQ ID NO: 276272 - protein, 15 aa, Homo sapiens
  CDR3 for beta chain variable domain of TCR clone 138136 (TRBV27, TRBJ1-2)
CASSLSSTVNYGYSF

SEQ ID NO: 276273 - protein, 15 aa, Homo sapiens
  CDR3 for alpha chain variable domain of TCR clone 138137 (TRAV8-3, TRAJ45)
CASSYQGGGADGLTF

SEQ ID NO: 276274 - protein, 13 aa, Homo sapiens
  CDR3 for beta chain variable domain of TCR clone 138137 (TRBV10-3, TRBJ2-7)
CASKLAVNYEQYF

SEQ ID NO: 276275 - protein, 14 aa, Homo sapiens
  CDR3 for alpha chain variable domain of TCR clone 138138 (TRAV1-2, TRAJ16)
CAVNRFSDGQKLLF

SEQ ID NO: 276276 - protein, 15 aa, Homo sapiens
  CDR3 for beta chain variable domain of TCR clone 138138 (TRBV7-9, TRBJ1-6)
CASSAPGRGTSPLHF

SEQ ID NO: 276277 - protein, 13 aa, Homo sapiens
  CDR3 for alpha chain variable domain of TCR clone 138139 (TRAV8-6, TRAJ21)
SAVSPSSLNKFYF

SEQ ID NO: 276278 - protein, 14 aa, Homo sapiens
  CDR3 for beta chain variable domain of TCR clone 138139 (TRBV7-9, TRBJ2-5)
CASSLDTAQETQCF

SEQ ID NO: 276279 - protein, 15 aa, Homo sapiens
  CDR3 for alpha chain variable domain of TCR clone 138140 (TRAV13-1, TRAJ15)
CAASIERQAGTALIF

SEQ ID NO: 276280 - protein, 14 aa, Homo sapiens
  CDR3 for beta chain variable domain of TCR clone 138140 (TRBV25-1, TRBJ1-1)
CASTHLGGNTEAFF

SEQ ID NO: 276281 - protein, 15 aa, Homo sapiens
  CDR3 for alpha chain variable domain of TCR clone 138141 (TRAV26-1, TRAJ29)
CIVRVEGSGNTPLVF

SEQ ID NO: 276282 - protein, 14 aa, Homo sapiens
  CDR3 for beta chain variable domain of TCR clone 138141 (TRBV2, TRBJ2-1)
CASRTGSSYNEQFF

SEQ ID NO: 276283 - protein, 14 aa, Homo sapiens
  CDR3 for alpha chain variable domain of TCR clone 138142 (TRAV12-3, TRAJ10)
SHLPLTGGGNKLTF

SEQ ID NO: 276284 - protein, 12 aa, Homo sapiens
  CDR3 for beta chain variable domain of TCR clone 138142 (TRBV7-9, TRBJ1-6)
CASSLMTSPLHF

SEQ ID NO: 276285 - protein, 13 aa, Homo sapiens
  CDR3 for alpha chain variable domain of TCR clone 138143 (TRAV13-1, TRAJ6)
CAASSGGGYIPTF

SEQ ID NO: 276286 - protein, 15 aa, Homo sapiens
  CDR3 for beta chain variable domain of TCR clone 138143 (TRBV12-4, TRBJ2-5)
CASSPPTGLQETQYF

SEQ ID NO: 276287 - protein, 12 aa, Homo sapiens
  CDR3 for alpha chain variable domain of TCR clone 138144 (TRAV21, TRAJ11)
CAATSGYSTLTF

SEQ ID NO: 276288 - protein, 14 aa, Homo sapiens
  CDR3 for beta chain variable domain of TCR clone 138144 (TRBV5-1, TRBJ2-7)
CASSRGESLYEQYF

SEQ ID NO: 276289 - protein, 15 aa, Homo sapiens
  CDR3 for alpha chain variable domain of TCR clone 138145 (TRAV21, TRAJ40)
CAVRPQTPGTYKYIF

SEQ ID NO: 276290 - protein, 13 aa, Homo sapiens
  CDR3 for beta chain variable domain of TCR clone 138145 (TRBV7-2, TRBJ2-2)
CANSSVRAGELFF

SEQ ID NO: 276291 - protein, 17 aa, Homo sapiens
  CDR3 for alpha chain variable domain of TCR clone 138146 (TRAV29/DV5, TRAJ40)
CAASGIYTTPGTYKYIF

SEQ ID NO: 276292 - protein, 13 aa, Homo sapiens
  CDR3 for beta chain variable domain of TCR clone 138146 (TRBV6-1, TRBJ2-1)
CASSHDRNNEQFF

SEQ ID NO: 276293 - protein, 14 aa, Homo sapiens
  CDR3 for alpha chain variable domain of TCR clone 138147 (TRAV12-1, TRAJ9)
CVVTGYTGGFTTIF

SEQ ID NO: 276294 - protein, 13 aa, Homo sapiens
  CDR3 for beta chain variable domain of TCR clone 138147 (TRBV20-1, TRBJ1-1)
CSARAGGNTEAFF

SEQ ID NO: 276295 - protein, 11 aa, Homo sapiens
  CDR3 for alpha chain variable domain of TCR clone 138148 (TRAV2, TRAJ13)
CASGGYQKVTF

SEQ ID NO: 276296 - protein, 15 aa, Homo sapiens
  CDR3 for beta chain variable domain of TCR clone 138148 (TRBV19, TRBJ2-1)
CASSIVRGEGREQFF

SEQ ID NO: 276297 - protein, 16 aa, Homo sapiens
  CDR3 for alpha chain variable domain of TCR clone 138149 (TRAV1-2, TRAJ10)
CAVRGVLTGGGNKLTF

SEQ ID NO: 276298 - protein, 18 aa, Homo sapiens
  CDR3 for beta chain variable domain of TCR clone 138149 (TRBV12-4, TRBJ2-2)
CASSLVAGTRGRTGELFF

SEQ ID NO: 276299 - protein, 13 aa, Homo sapiens
  CDR3 for alpha chain variable domain of TCR clone 138150 (TRAV3, TRAJ20)
CAVRSLNDYKLSF

SEQ ID NO: 276300 - protein, 18 aa, Homo sapiens
  CDR3 for beta chain variable domain of TCR clone 138150 (TRBV11-2, TRBJ2-3)
CASSLGGASRGAPNTQYF

SEQ ID NO: 276301 - protein, 15 aa, Homo sapiens
  CDR3 for alpha chain variable domain of TCR clone 138151 (TRAV3, TRAJ22)
CAVRDRGGFARELTF

SEQ ID NO: 276302 - protein, 13 aa, Homo sapiens
  CDR3 for beta chain variable domain of TCR clone 138151 (TRBV2, TRBJ1-5)
CATAGPGNQPQHF

SEQ ID NO: 276303 - protein, 14 aa, Homo sapiens
  CDR3 for alpha chain variable domain of TCR clone 138152 (TRAV27, TRAJ22)
CAGVVPGSARQLTF

SEQ ID NO: 276304 - protein, 15 aa, Homo sapiens
  CDR3 for beta chain variable domain of TCR clone 138152 (TRBV10-3, TRBJ2-1)
CAIRNGTSGHNEQFF

SEQ ID NO: 276305 - protein, 19 aa, Homo sapiens
  CDR3 for alpha chain variable domain of TCR clone 138153 (TRAV20, )
CAVTGVSQNPDPAVYQLRD

SEQ ID NO: 276306 - protein, 12 aa, Homo sapiens
  CDR3 for beta chain variable domain of TCR clone 138153 (TRBV11-2, TRBJ2-4)
CASSSASGSEYF

SEQ ID NO: 276307 - protein, 16 aa, Homo sapiens
  CDR3 for alpha chain variable domain of TCR clone 138154 (TRAV30, TRAJ24)
CGTEIVDADSLGKFQF

SEQ ID NO: 276308 - protein, 16 aa, Homo sapiens
  CDR3 for beta chain variable domain of TCR clone 138154 (TRBV11-2, TRBJ1-2)
CASSLDTGGADYGYTF

SEQ ID NO: 276309 - protein, 15 aa, Homo sapiens
  CDR3 for alpha chain variable domain of TCR clone 138155 (TRAV8-6, TRAJ9)
CAVSDRDTGGFKTIF

SEQ ID NO: 276310 - protein, 16 aa, Homo sapiens
  CDR3 for beta chain variable domain of TCR clone 138155 (TRBV19, TRBJ2-3)
CASSPVWDRGTDTQYF

SEQ ID NO: 276311 - protein, 14 aa, Homo sapiens
  CDR3 for alpha chain variable domain of TCR clone 138156 (TRAV1-2, TRAJ16)
CAVNRFSDGQKLRF

SEQ ID NO: 276312 - protein, 14 aa, Homo sapiens
  CDR3 for beta chain variable domain of TCR clone 138156 (TRBV7-8, TRBJ1-2)
CASSPDSLSYGYTF

SEQ ID NO: 276313 - protein, 15 aa, Homo sapiens
  CDR3 for alpha chain variable domain of TCR clone 138157 (TRAV26-1, TRAJ3)
CIVRSWYSSASKIIF

SEQ ID NO: 276314 - protein, 14 aa, Homo sapiens
  CDR3 for beta chain variable domain of TCR clone 138157 (TRBV13, TRBJ2-5)
CASYRRLAEETQYF

SEQ ID NO: 276315 - protein, 14 aa, Homo sapiens
  CDR3 for alpha chain variable domain of TCR clone 138158 (TRAV8-4, TRAJ3)
CAVIEYSSASKIIF

SEQ ID NO: 276316 - protein, 14 aa, Homo sapiens
  CDR3 for beta chain variable domain of TCR clone 138158 (TRBV4-1, TRBJ2-2)
CASSQAVNTGELFF

SEQ ID NO: 276317 - protein, 16 aa, Homo sapiens
  CDR3 for alpha chain variable domain of TCR clone 138159 (TRAV3, TRAJ37)
CAVRGRGSGNPGKLIF

SEQ ID NO: 276318 - protein, 13 aa, Homo sapiens
  CDR3 for beta chain variable domain of TCR clone 138159 (TRBV14, TRBJ2-7)
CASSQDRRGEQYF

SEQ ID NO: 276319 - protein, 13 aa, Homo sapiens
  CDR3 for alpha chain variable domain of TCR clone 138160 (TRAV8-6, TRAJ24)
CAVSSVSWGKLQF

SEQ ID NO: 276320 - protein, 15 aa, Homo sapiens
  CDR3 for beta chain variable domain of TCR clone 138160 (TRBV6-1, TRBJ1-3)
CASSDFGFSGNTIYF

SEQ ID NO: 276321 - protein, 14 aa, Homo sapiens
  CDR3 for alpha chain variable domain of TCR clone 138161 (TRAV12-2, TRAJ13)
CAVKKTGGYQKITF

SEQ ID NO: 276322 - protein, 14 aa, Homo sapiens
  CDR3 for beta chain variable domain of TCR clone 138161 (TRBV20-1, TRBJ2-1)
CSAQIGGSANEQFF

SEQ ID NO: 276323 - protein, 13 aa, Homo sapiens
  CDR3 for alpha chain variable domain of TCR clone 138162 (TRAV13-1, TRAJ33)
WAASRAGNYQLIW

SEQ ID NO: 276324 - protein, 12 aa, Homo sapiens
  CDR3 for beta chain variable domain of TCR clone 138162 (TRBV11-2, TRBJ1-2)
CASSREGDGYTF

SEQ ID NO: 276325 - protein, 13 aa, Homo sapiens
  CDR3 for alpha chain variable domain of TCR clone 138163 (TRAV2, TRAJ40)
CAVVTLGTYKYIF

SEQ ID NO: 276326 - protein, 16 aa, Homo sapiens
  CDR3 for beta chain variable domain of TCR clone 138163 (TRBV20-1, TRBJ2-6)
CSASSQGYDGANVLTF

SEQ ID NO: 276327 - protein, 14 aa, Homo sapiens
  CDR3 for alpha chain variable domain of TCR clone 138164 (TRAV12-2, TRAJ9)
CAVNALAGGFKTIF

SEQ ID NO: 276328 - protein, 16 aa, Homo sapiens
  CDR3 for beta chain variable domain of TCR clone 138164 (TRBV19, TRBJ1-6)
CASSVAPVAGNSPLHF

SEQ ID NO: 276329 - protein, 15 aa, Homo sapiens
  CDR3 for alpha chain variable domain of TCR clone 138165 (TRAV8-6, TRAJ6)
CAVSGESGGSYIPTF

SEQ ID NO: 276330 - protein, 15 aa, Homo sapiens
  CDR3 for beta chain variable domain of TCR clone 138165 (TRBV5-1, TRBJ2-3)
CASSVTSGSTDTQYF

SEQ ID NO: 276331 - protein, 14 aa, Homo sapiens
  CDR3 for alpha chain variable domain of TCR clone 138166 (TRAV12-3, TRAJ10)
SHLPLTGGGNKLTF

SEQ ID NO: 276332 - protein, 12 aa, Homo sapiens
  CDR3 for beta chain variable domain of TCR clone 138166 (TRBV28, TRBJ2-1)
CASSRLVGEQFF

SEQ ID NO: 276333 - protein, 11 aa, Homo sapiens
  CDR3 for alpha chain variable domain of TCR clone 138167 (TRAV3, TRAJ21)
SAVGNCNKFYF

SEQ ID NO: 276334 - protein, 16 aa, Homo sapiens
  CDR3 for beta chain variable domain of TCR clone 138167 (TRBV19, TRBJ2-1)
CASSKAGPSSYNEQFF

SEQ ID NO: 276335 - protein, 13 aa, Homo sapiens
  CDR3 for alpha chain variable domain of TCR clone 138168 (TRAV21, TRAJ45)
CAVMGGGADGLTF

SEQ ID NO: 276336 - protein, 16 aa, Homo sapiens
  CDR3 for beta chain variable domain of TCR clone 138168 (TRBV20-1, TRBJ2-1)
CRARDHLAGGRGEQFF

SEQ ID NO: 276337 - protein, 14 aa, Homo sapiens
  CDR3 for alpha chain variable domain of TCR clone 138169 (TRAV17, TRAJ54)
CATDANQGAQKLVF

SEQ ID NO: 276338 - protein, 14 aa, Homo sapiens
  CDR3 for beta chain variable domain of TCR clone 138169 (TRBV11-2, TRBJ2-7)
CASSLGAGAYEQYF

SEQ ID NO: 276339 - protein, 16 aa, Homo sapiens
  CDR3 for alpha chain variable domain of TCR clone 138170 (TRAV3, TRAJ6)
CAVRDGPRAEEATYLH

SEQ ID NO: 276340 - protein, 14 aa, Homo sapiens
  CDR3 for beta chain variable domain of TCR clone 138170 (TRBV7-2, TRBJ2-7)
CASSPKTSFYEQYF

SEQ ID NO: 276341 - protein, 12 aa, Homo sapiens
  CDR3 for alpha chain variable domain of TCR clone 138171 (TRAV12-3, TRAJ17)
CAMTLTGNKLNF

SEQ ID NO: 276342 - protein, 13 aa, Homo sapiens
  CDR3 for beta chain variable domain of TCR clone 138171 (TRBV7-3, TRBJ1-1)
CASSQDWGAEAFF

SEQ ID NO: 276343 - protein, 10 aa, Homo sapiens
  CDR3 for alpha chain variable domain of TCR clone 138172 (TRAV30, TRAJ48)
CGIGNEKLTF

SEQ ID NO: 276344 - protein, 18 aa, Homo sapiens
  CDR3 for beta chain variable domain of TCR clone 138172 (TRBV12-4, TRBJ2-2)
CASSLVAGTRGRTGELFF

SEQ ID NO: 276345 - protein, 13 aa, Homo sapiens
  CDR3 for alpha chain variable domain of TCR clone 138173 (TRAV2, TRAJ15)
CAVASQAGTARIF

SEQ ID NO: 276346 - protein, 16 aa, Homo sapiens
  CDR3 for beta chain variable domain of TCR clone 138173 (TRBV5-1, TRBJ1-1)
CASSSGGNSLNTEAFF

SEQ ID NO: 276347 - protein, 16 aa, Homo sapiens
  CDR3 for alpha chain variable domain of TCR clone 138174 (TRAV3, TRAJ10)
CAVRDMRAGGGNKLTF

SEQ ID NO: 276348 - protein, 16 aa, Homo sapiens
  CDR3 for beta chain variable domain of TCR clone 138174 (TRBV5-1, TRBJ2-3)
CASSLGLAVYTDTQYF

SEQ ID NO: 276349 - protein, 13 aa, Homo sapiens
  CDR3 for alpha chain variable domain of TCR clone 138175 (TRAV27, TRAJ53)
CAGQGGSNSKLTF

SEQ ID NO: 276350 - protein, 13 aa, Homo sapiens
  CDR3 for beta chain variable domain of TCR clone 138175 (TRBV29-1, TRBJ1-1)
CSVESGFGTEAFF

SEQ ID NO: 276351 - protein, 12 aa, Homo sapiens
  CDR3 for alpha chain variable domain of TCR clone 138176 (TRAV13-1, TRAJ15)
CAASQAGTALIL

SEQ ID NO: 276352 - protein, 14 aa, Homo sapiens
  CDR3 for beta chain variable domain of TCR clone 138176 (TRBV19, TRBJ2-1)
CASPTFVLSGGQFF

SEQ ID NO: 276353 - protein, 16 aa, Homo sapiens
  CDR3 for alpha chain variable domain of TCR clone 138177 (TRAV3, TRAJ18)
CAVRDGRGSTLGRLYF

SEQ ID NO: 276354 - protein, 11 aa, Homo sapiens
  CDR3 for beta chain variable domain of TCR clone 138177 (TRBV11-2, TRBJ2-2)
CASSLPGELFF

SEQ ID NO: 276355 - protein, 14 aa, Homo sapiens
  CDR3 for alpha chain variable domain of TCR clone 138178 (TRAV3, TRAJ17)
CAVRDAAACNKLTF

SEQ ID NO: 276356 - protein, 15 aa, Homo sapiens
  CDR3 for beta chain variable domain of TCR clone 138178 (TRBV9, TRBJ1-6)
CASSVAGTGDSPLHF

SEQ ID NO: 276357 - protein, 16 aa, Homo sapiens
  CDR3 for alpha chain variable domain of TCR clone 138179 (TRAV17, TRAJ53)
CATDALSGGSNYKLTF

SEQ ID NO: 276358 - protein, 12 aa, Homo sapiens
  CDR3 for beta chain variable domain of TCR clone 138179 (TRBV5-1, TRBJ2-7)
WASSFRGYEQYF

SEQ ID NO: 276359 - protein, 14 aa, Homo sapiens
  CDR3 for alpha chain variable domain of TCR clone 138180 (TRAV1-2, TRAJ16)
CAVNRISDGQKLLF

SEQ ID NO: 276360 - protein, 15 aa, Homo sapiens
  CDR3 for beta chain variable domain of TCR clone 138180 (TRBV9, TRBJ1-6)
CASSVAGTGDSPLHY

SEQ ID NO: 276361 - protein, 14 aa, Homo sapiens
  CDR3 for alpha chain variable domain of TCR clone 138181 (TRAV12-2, TRAJ17)
CAALFKAAGNKLTF

SEQ ID NO: 276362 - protein, 15 aa, Homo sapiens
  CDR3 for beta chain variable domain of TCR clone 138181 (TRBV18, TRBJ2-3)
GASSPLAGETDTQYF

SEQ ID NO: 276363 - protein, 13 aa, Homo sapiens
  CDR3 for alpha chain variable domain of TCR clone 138182 (TRAV3, TRAJ41)
CAVSANSGYALNF

SEQ ID NO: 276364 - protein, 12 aa, Homo sapiens
  CDR3 for beta chain variable domain of TCR clone 138182 (TRBV2, TRBJ2-1)
CASRPGPREQFF

SEQ ID NO: 276365 - protein, 14 aa, Homo sapiens
  CDR3 for alpha chain variable domain of TCR clone 138183 (TRAV26-1, TRAJ45)
CIEVTGGGADGLTF

SEQ ID NO: 276366 - protein, 14 aa, Homo sapiens
  CDR3 for beta chain variable domain of TCR clone 138183 (TRBV7-8, TRBJ2-7)
CASSPGLADYEQYF

SEQ ID NO: 276367 - protein, 13 aa, Homo sapiens
  CDR3 for alpha chain variable domain of TCR clone 138184 (TRAV17, TRAJ13)
CATDSGGYQKVTF

SEQ ID NO: 276368 - protein, 12 aa, Homo sapiens
  CDR3 for beta chain variable domain of TCR clone 138184 (TRBV11-2, TRBJ2-2)
CASSLGGGELFF

SEQ ID NO: 276369 - protein, 10 aa, Homo sapiens
  CDR3 for alpha chain variable domain of TCR clone 138185 (TRAV21, TRAJ34)
CAADTDKLIF

SEQ ID NO: 276370 - protein, 17 aa, Homo sapiens
  CDR3 for beta chain variable domain of TCR clone 138185 (TRBV19, TRBJ2-6)
CASSTGQVFSGANDLTF

SEQ ID NO: 276371 - protein, 15 aa, Homo sapiens
  CDR3 for alpha chain variable domain of TCR clone 138186 (TRAV8-2, TRAJ40)
CVVSDRGSGTYKYIF

SEQ ID NO: 276372 - protein, 20 aa, Homo sapiens
  CDR3 for beta chain variable domain of TCR clone 138186 (TRBV7-8, TRBJ2-2)
CASSHLFPGPTIHITGELFF

SEQ ID NO: 276373 - protein, 17 aa, Homo sapiens
  CDR3 for alpha chain variable domain of TCR clone 138187 (TRAV4, TRAJ18)
CLVGERSVGSTLGRLYF

SEQ ID NO: 276374 - protein, 11 aa, Homo sapiens
  CDR3 for beta chain variable domain of TCR clone 138187 (TRBV20-1, TRBJ2-7)
CSARLSYEQYF

SEQ ID NO: 276375 - protein, 12 aa, Homo sapiens
  CDR3 for alpha chain variable domain of TCR clone 138188 (TRAV12-3, TRAJ3)
CAIDSSASKLIF

SEQ ID NO: 276376 - protein, 17 aa, Homo sapiens
  CDR3 for beta chain variable domain of TCR clone 138188 (TRBV7-9, TRBJ2-3)
CASSLEEAGAYPETQYF

SEQ ID NO: 276377 - protein, 17 aa, Homo sapiens
  CDR3 for alpha chain variable domain of TCR clone 138189 (TRAV3, TRAJ12)
CCERRDGTMDSRYKLIF

SEQ ID NO: 276378 - protein, 15 aa, Homo sapiens
  CDR3 for beta chain variable domain of TCR clone 138189 (TRBV5-5, TRBJ1-5)
CASSLKGGGEQPQHF

SEQ ID NO: 276379 - protein, 16 aa, Homo sapiens
  CDR3 for alpha chain variable domain of TCR clone 138190 (TRAV3, TRAJ5)
CAVRNLMDTGKRALTF

SEQ ID NO: 276380 - protein, 16 aa, Homo sapiens
  CDR3 for beta chain variable domain of TCR clone 138190 (TRBV4-2, TRBJ2-7)
CASSQEGLANSYEQYF

SEQ ID NO: 276381 - protein, 14 aa, Homo sapiens
  CDR3 for alpha chain variable domain of TCR clone 138191 (TRAV13-1, TRAJ6)
CAASITGGSYIPTF

SEQ ID NO: 276382 - protein, 15 aa, Homo sapiens
  CDR3 for beta chain variable domain of TCR clone 138191 (TRBV20-1, TRBJ2-7)
CSARGPLAGGREQYF

SEQ ID NO: 276383 - protein, 18 aa, Homo sapiens
  CDR3 for alpha chain variable domain of TCR clone 138192 (TRAV13-1, TRAJ10)
CAASKGRVVTGGGNKLTF

SEQ ID NO: 276384 - protein, 14 aa, Homo sapiens
  CDR3 for beta chain variable domain of TCR clone 138192 (TRBV18, TRBJ2-7)
CASSPRGGAYEQYF

SEQ ID NO: 276385 - protein, 12 aa, Homo sapiens
  CDR3 for alpha chain variable domain of TCR clone 138193 (TRAV26-2, TRAJ21)
CIMKGNFNKFYF

SEQ ID NO: 276386 - protein, 14 aa, Homo sapiens
  CDR3 for beta chain variable domain of TCR clone 138193 (TRBV12-4, TRBJ1-1)
CASSLGTGGTEAFF

SEQ ID NO: 276387 - protein, 12 aa, Homo sapiens
  CDR3 for alpha chain variable domain of TCR clone 138194 (TRAV27, TRAJ35)
CAGADFGNVLHC

SEQ ID NO: 276388 - protein, 10 aa, Homo sapiens
  CDR3 for beta chain variable domain of TCR clone 138194 (TRBV5-1, TRBJ2-7)
LAELPNEQYF

SEQ ID NO: 276389 - protein, 14 aa, Homo sapiens
  CDR3 for alpha chain variable domain of TCR clone 138195 (TRAV26-1, TRAJ38)
CIADNAGNNRKLIW

SEQ ID NO: 276390 - protein, 14 aa, Homo sapiens
  CDR3 for beta chain variable domain of TCR clone 138195 (TRBV7-3, TRBJ1-1)
CASSLGTGYTEAFV

SEQ ID NO: 276391 - protein, 15 aa, Homo sapiens
  CDR3 for alpha chain variable domain of TCR clone 138196 (TRAV34, TRAJ38)
CGADFTPANNRKLIW

SEQ ID NO: 276392 - protein, 16 aa, Homo sapiens
  CDR3 for beta chain variable domain of TCR clone 138196 (TRBV12-5, TRBJ2-5)
CASGPRTSGNQETQYF

SEQ ID NO: 276393 - protein, 12 aa, Homo sapiens
  CDR3 for alpha chain variable domain of TCR clone 138197 (TRAV8-3, TRAJ20)
CAVGANDYKLSF

SEQ ID NO: 276394 - protein, 15 aa, Homo sapiens
  CDR3 for beta chain variable domain of TCR clone 138197 (TRBV5-1, TRBJ2-7)
CASSLGDFTTYEQYF

SEQ ID NO: 276395 - protein, 15 aa, Homo sapiens
  CDR3 for alpha chain variable domain of TCR clone 138198 (TRAV38-2/DV8, TRAJ45)
CAYWDSGGGADGLTF

SEQ ID NO: 276396 - protein, 17 aa, Homo sapiens
  CDR3 for beta chain variable domain of TCR clone 138198 (TRBV2, TRBJ1-6)
CASSLRSGGLMTSPLHF

SEQ ID NO: 276397 - protein, 14 aa, Homo sapiens
  CDR3 for alpha chain variable domain of TCR clone 138199 (TRAV17, TRAJ15)
CATAPNQAGTALIF

SEQ ID NO: 276398 - protein, 14 aa, Homo sapiens
  CDR3 for beta chain variable domain of TCR clone 138199 (TRBV19, TRBJ2-7)
CASSMGQGANEQYF

SEQ ID NO: 276399 - protein, 12 aa, Homo sapiens
  CDR3 for alpha chain variable domain of TCR clone 138200 (TRAV12-2, TRAJ47)
CAVAEYGNKLVF

SEQ ID NO: 276400 - protein, 16 aa, Homo sapiens
  CDR3 for beta chain variable domain of TCR clone 138200 (TRBV7-6, TRBJ2-1)
CASSAPGPSSYNEQFF

SEQ ID NO: 276401 - protein, 14 aa, Homo sapiens
  CDR3 for alpha chain variable domain of TCR clone 138201 (TRAV13-1, TRAJ44)
CAAKATGTASKLTF

SEQ ID NO: 276402 - protein, 17 aa, Homo sapiens
  CDR3 for beta chain variable domain of TCR clone 138201 (TRBV7-3, TRBJ2-3)
CASSLMKRMRGADSQYF

SEQ ID NO: 276403 - protein, 15 aa, Homo sapiens
  CDR3 for alpha chain variable domain of TCR clone 138202 (TRAV12-2, TRAJ53)
CAVNGGGDGNYKLTF

SEQ ID NO: 276404 - protein, 17 aa, Homo sapiens
  CDR3 for beta chain variable domain of TCR clone 138202 (TRBV7-3, TRBJ2-3)
CASSLMKRMRGADTQYF

SEQ ID NO: 276405 - protein, 23 aa, Homo sapiens
  CDR3 for alpha chain variable domain of TCR clone 138203 (TRAV12-3, TRAJ6)
CAMSATTGGSYIPTIGRGNSLIF

SEQ ID NO: 276406 - protein, 16 aa, Homo sapiens
  CDR3 for beta chain variable domain of TCR clone 138203 (TRBV9, TRBJ2-1)
CASSPTTGASYNEQFF

SEQ ID NO: 276407 - protein, 13 aa, Homo sapiens
  CDR3 for alpha chain variable domain of TCR clone 138204 (TRAV27, TRAJ41)
CSGEGNSGYALNF

SEQ ID NO: 276408 - protein, 13 aa, Homo sapiens
  CDR3 for beta chain variable domain of TCR clone 138204 (TRBV27, TRBJ2-7)
CASSFVSSYEQYF

SEQ ID NO: 276409 - protein, 14 aa, Homo sapiens
  CDR3 for alpha chain variable domain of TCR clone 138205 (TRAV1-2, TRAJ16)
CAVNRFSDGQKLLF

SEQ ID NO: 276410 - protein, 17 aa, Homo sapiens
  CDR3 for beta chain variable domain of TCR clone 138205 (TRBV11-1, TRBJ2-6)
CASSPYGQGSGANVLTF

SEQ ID NO: 276411 - protein, 14 aa, Homo sapiens
  CDR3 for alpha chain variable domain of TCR clone 138206 (TRAV8-3, TRAJ6)
CAVGASGGSYIPIF

SEQ ID NO: 276412 - protein, 17 aa, Homo sapiens
  CDR3 for beta chain variable domain of TCR clone 138206 (TRBV18, TRBJ2-2)
CASSPSDPWQNTGELFF

SEQ ID NO: 276413 - protein, 12 aa, Homo sapiens
  CDR3 for alpha chain variable domain of TCR clone 138207 (TRAV13-2, TRAJ23)
CAERNRGGKLIF

SEQ ID NO: 276414 - protein, 13 aa, Homo sapiens
  CDR3 for beta chain variable domain of TCR clone 138207 (TRBV7-9, TRBJ2-3)
CASSPGSTDTQYF

SEQ ID NO: 276415 - protein, 15 aa, Homo sapiens
  CDR3 for alpha chain variable domain of TCR clone 138208 (TRAV12-2, TRAJ53)
CAVNGGGGSNYKLTF

SEQ ID NO: 276416 - protein, 12 aa, Homo sapiens
  CDR3 for beta chain variable domain of TCR clone 138208 (TRBV14, TRBJ2-7)
CASSLYKDEQYF

SEQ ID NO: 276417 - protein, 14 aa, Homo sapiens
  CDR3 for alpha chain variable domain of TCR clone 138209 (TRAV1-2, TRAJ8)
CAVREGTGFQKLVF

SEQ ID NO: 276418 - protein, 15 aa, Homo sapiens
  CDR3 for beta chain variable domain of TCR clone 138209 (TRBV6-3, TRBJ2-7)
CASSSPGTVFYEQFF

SEQ ID NO: 276419 - protein, 15 aa, Homo sapiens
  CDR3 for alpha chain variable domain of TCR clone 138210 (TRAV21, TRAJ13)
CAVRPTSGGYQKVTF

SEQ ID NO: 276420 - protein, 15 aa, Homo sapiens
  CDR3 for beta chain variable domain of TCR clone 138210 (TRBV28, TRBJ2-7)
CASSPGGRGFCEQYF

SEQ ID NO: 276421 - protein, 13 aa, Homo sapiens
  CDR3 for alpha chain variable domain of TCR clone 138211 (TRAV17, TRAJ5)
CALRGTGRRALTF

SEQ ID NO: 276422 - protein, 17 aa, Homo sapiens
  CDR3 for beta chain variable domain of TCR clone 138211 (TRBV20-1, TRBJ2-1)
CSARDRRRASSYNEQFF

SEQ ID NO: 276423 - protein, 15 aa, Homo sapiens
  CDR3 for alpha chain variable domain of TCR clone 138212 (TRAV26-1, TRAJ29)
CIVKVEGSGNTPLVF

SEQ ID NO: 276424 - protein, 14 aa, Homo sapiens
  CDR3 for beta chain variable domain of TCR clone 138212 (TRBV18, TRBJ2-5)
CASSPGVSQETQYL

SEQ ID NO: 276425 - protein, 13 aa, Homo sapiens
  CDR3 for alpha chain variable domain of TCR clone 138213 (TRAV41, TRAJ54)
CAVRIQGAHKLVF

SEQ ID NO: 276426 - protein, 14 aa, Homo sapiens
  CDR3 for beta chain variable domain of TCR clone 138213 (TRBV2, TRBJ2-1)
CAGRTGSSYNEQIF

SEQ ID NO: 276427 - protein, 14 aa, Homo sapiens
  CDR3 for alpha chain variable domain of TCR clone 138214 (TRAV1-2, TRAJ16)
CAVNRFSDGQKLLF

SEQ ID NO: 276428 - protein, 15 aa, Homo sapiens
  CDR3 for beta chain variable domain of TCR clone 138214 (TRBV10-3, TRBJ1-3)
CAISDSQGAGNTIYF

SEQ ID NO: 276429 - protein, 15 aa, Homo sapiens
  CDR3 for alpha chain variable domain of TCR clone 138215 (TRAV1-2, TRAJ15)
CAVDVMGSTGTALIF

SEQ ID NO: 276430 - protein, 13 aa, Homo sapiens
  CDR3 for beta chain variable domain of TCR clone 138215 (TRBV7-2, TRBJ2-5)
CASSQTGAETQYF

SEQ ID NO: 276431 - protein, 12 aa, Homo sapiens
  CDR3 for alpha chain variable domain of TCR clone 138216 (TRAV8-3, TRAJ26)
CAGDNYGQNFVF

SEQ ID NO: 276432 - protein, 12 aa, Homo sapiens
  CDR3 for beta chain variable domain of TCR clone 138216 (TRBV7-6, TRBJ2-5)
CASSLSQETQYF

SEQ ID NO: 276433 - protein, 13 aa, Homo sapiens
  CDR3 for alpha chain variable domain of TCR clone 138217 (TRAV41, TRAJ54)
CAVRIQGAQKLVF

SEQ ID NO: 276434 - protein, 14 aa, Homo sapiens
  CDR3 for beta chain variable domain of TCR clone 138217 (TRBV2, TRBJ2-1)
CASGTGSSYNEQFF

SEQ ID NO: 276435 - protein, 16 aa, Homo sapiens
  CDR3 for alpha chain variable domain of TCR clone 138218 (TRAV3, TRAJ21)
CAVRDIERGNFNKFYF

SEQ ID NO: 276436 - protein, 16 aa, Homo sapiens
  CDR3 for beta chain variable domain of TCR clone 138218 (TRBV11-3, TRBJ2-5)
CASSSVVAGSTETQYF

SEQ ID NO: 276437 - protein, 11 aa, Homo sapiens
  CDR3 for alpha chain variable domain of TCR clone 138219 (TRAV12-3, TRAJ26)
CAMSHGQNFVF

SEQ ID NO: 276438 - protein, 16 aa, Homo sapiens
  CDR3 for beta chain variable domain of TCR clone 138219 (TRBV12-4, TRBJ1-5)
CASSRPVGGSNQPQHF

SEQ ID NO: 276439 - protein, 15 aa, Homo sapiens
  CDR3 for alpha chain variable domain of TCR clone 138220 (TRAV13-1, TRAJ16)
CAARYQMSRSCSLQG

SEQ ID NO: 276440 - protein, 13 aa, Homo sapiens
  CDR3 for beta chain variable domain of TCR clone 138220 (TRBV4-1, TRBJ2-1)
CASSQAGGDEQFF

SEQ ID NO: 276441 - protein, 13 aa, Homo sapiens
  CDR3 for alpha chain variable domain of TCR clone 138221 (TRAV12-2, TRAJ40)
CLKIPSGTYKYIF

SEQ ID NO: 276442 - protein, 14 aa, Homo sapiens
  CDR3 for beta chain variable domain of TCR clone 138221 (TRBV20-1, TRBJ1-1)
CSAQTRIGGTEAFF

SEQ ID NO: 276443 - protein, 15 aa, Homo sapiens
  CDR3 for alpha chain variable domain of TCR clone 138222 (TRAV13-1, TRAJ27)
CAARELNTNAGKSTF

SEQ ID NO: 276444 - protein, 13 aa, Homo sapiens
  CDR3 for beta chain variable domain of TCR clone 138222 (TRBV20-1, TRBJ1-1)
CSARGGGNTEAFF

SEQ ID NO: 276445 - protein, 13 aa, Homo sapiens
  CDR3 for alpha chain variable domain of TCR clone 138223 (TRAV13-1, TRAJ37)
CAAVSGNTGKLIF

SEQ ID NO: 276446 - protein, 17 aa, Homo sapiens
  CDR3 for beta chain variable domain of TCR clone 138223 (TRBV10-2, TRBJ1-6)
CASSENRGSSYNSPLLF

SEQ ID NO: 276447 - protein, 12 aa, Homo sapiens
  CDR3 for alpha chain variable domain of TCR clone 138224 (TRAV16, TRAJ10)
CSRTGGGNKLTF

SEQ ID NO: 276448 - protein, 13 aa, Homo sapiens
  CDR3 for beta chain variable domain of TCR clone 138224 (TRBV7-6, TRBJ2-7)
CASSLDHTHEQYF

SEQ ID NO: 276449 - protein, 13 aa, Homo sapiens
  CDR3 for alpha chain variable domain of TCR clone 138225 (TRAV21, TRAJ27)
CAARPGNAGKSTF

SEQ ID NO: 276450 - protein, 16 aa, Homo sapiens
  CDR3 for beta chain variable domain of TCR clone 138225 (TRBV20-1, TRBJ2-1)
CSARDFSGRIGDEQFF

SEQ ID NO: 276451 - protein, 14 aa, Homo sapiens
  CDR3 for alpha chain variable domain of TCR clone 138226 (TRAV26-1, TRAJ34)
CIVRVAYNTDKPIF

SEQ ID NO: 276452 - protein, 16 aa, Homo sapiens
  CDR3 for beta chain variable domain of TCR clone 138226 (TRBV2, TRBJ2-3)
CASSTSVEGVTDTQYF

SEQ ID NO: 276453 - protein, 13 aa, Homo sapiens
  CDR3 for alpha chain variable domain of TCR clone 138227 (TRAV36/DV7, TRAJ33)
CAVDMDSNYQLIW

SEQ ID NO: 276454 - protein, 16 aa, Homo sapiens
  CDR3 for beta chain variable domain of TCR clone 138227 (TRBV15, TRBJ2-3)
CATRLSGGRAPDTEYF

SEQ ID NO: 276455 - protein, 11 aa, Homo sapiens
  CDR3 for alpha chain variable domain of TCR clone 138228 (TRAV39, TRAJ49)
CAVDISTQFYF

SEQ ID NO: 276456 - protein, 13 aa, Homo sapiens
  CDR3 for beta chain variable domain of TCR clone 138228 (TRBV19, TRBJ2-5)
CASSGRAGETQYF

SEQ ID NO: 276457 - protein, 12 aa, Homo sapiens
  CDR3 for alpha chain variable domain of TCR clone 138229 (TRAV12-1, TRAJ23)
CVVNIPGGKLII

SEQ ID NO: 276458 - protein, 15 aa, Homo sapiens
  CDR3 for beta chain variable domain of TCR clone 138229 (TRBV7-2, TRBJ2-7)
CASSLVSSGSYEQYF

SEQ ID NO: 276459 - protein, 17 aa, Homo sapiens
  CDR3 for alpha chain variable domain of TCR clone 138230 (TRAV3, TRAJ6)
CAVRDGPRAAGSYIPTF

SEQ ID NO: 276460 - protein, 16 aa, Homo sapiens
  CDR3 for beta chain variable domain of TCR clone 138230 (TRBV12-4, TRBJ2-7)
CASSLIGGTGTYEQYF

SEQ ID NO: 276461 - protein, 11 aa, Homo sapiens
  CDR3 for alpha chain variable domain of TCR clone 138231 (TRAV36/DV7, TRAJ45)
SGGGGADGLPF

SEQ ID NO: 276462 - protein, 13 aa, Homo sapiens
  CDR3 for beta chain variable domain of TCR clone 138231 (TRBV28, TRBJ2-7)
CASSPSGTYEQYF

SEQ ID NO: 276463 - protein, 13 aa, Homo sapiens
  CDR3 for alpha chain variable domain of TCR clone 138232 (TRAV23/DV6, TRAJ22)
CASRAGSARQQTF

SEQ ID NO: 276464 - protein, 14 aa, Homo sapiens
  CDR3 for beta chain variable domain of TCR clone 138232 (TRBV7-2, TRBJ2-7)
CASSPKTSFYEQYF

SEQ ID NO: 276465 - protein, 12 aa, Homo sapiens
  CDR3 for alpha chain variable domain of TCR clone 138233 (TRAV12-1, TRAJ40)
CVVYSGTYKYIF

SEQ ID NO: 276466 - protein, 18 aa, Homo sapiens
  CDR3 for beta chain variable domain of TCR clone 138233 (TRBV11-2, TRBJ2-3)
CASSLGGGSRAAPNTQYF

SEQ ID NO: 276467 - protein, 13 aa, Homo sapiens
  CDR3 for alpha chain variable domain of TCR clone 138234 (TRAV3, TRAJ29)
CAVRDIIDTPLVF

SEQ ID NO: 276468 - protein, 14 aa, Homo sapiens
  CDR3 for beta chain variable domain of TCR clone 138234 (TRBV27, TRBJ2-1)
CASSATGGYNEQFV

SEQ ID NO: 276469 - protein, 13 aa, Homo sapiens
  CDR3 for alpha chain variable domain of TCR clone 138235 (TRAV16, TRAJ9)
CALRATGGFKTTF

SEQ ID NO: 276470 - protein, 16 aa, Homo sapiens
  CDR3 for beta chain variable domain of TCR clone 138235 (TRBV5-1, TRBJ1-3)
CASSRSGEDSGNTIYF

SEQ ID NO: 276471 - protein, 13 aa, Homo sapiens
  CDR3 for alpha chain variable domain of TCR clone 138236 (TRAV21, TRAJ27)
CAARPGNAGTSTF

SEQ ID NO: 276472 - protein, 14 aa, Homo sapiens
  CDR3 for beta chain variable domain of TCR clone 138236 (TRBV7-6, TRBJ2-3)
CASSLGAVTDTQYF

SEQ ID NO: 276473 - protein, 13 aa, Homo sapiens
  CDR3 for alpha chain variable domain of TCR clone 138237 (TRAV14/DV4, TRAJ20)
CAMGEGRDYKLSF

SEQ ID NO: 276474 - protein, 15 aa, Homo sapiens
  CDR3 for beta chain variable domain of TCR clone 138237 (TRBV20-1, TRBJ2-7)
CSARDRVSGMDEQYF

SEQ ID NO: 276475 - protein, 16 aa, Homo sapiens
  CDR3 for alpha chain variable domain of TCR clone 138238 (TRAV23/DV6, TRAJ34)
CAASGALSYNTDKLIF

SEQ ID NO: 276476 - protein, 14 aa, Homo sapiens
  CDR3 for beta chain variable domain of TCR clone 138238 (TRBV7-2, TRBJ2-7)
CASRSQGAAYEQYF

SEQ ID NO: 276477 - protein, 22 aa, Homo sapiens
  CDR3 for alpha chain variable domain of TCR clone 138239 (TRAV12-2, TRAJ53)
SPVIQPPTSVPPILSSNYKLTF

SEQ ID NO: 276478 - protein, 14 aa, Homo sapiens
  CDR3 for beta chain variable domain of TCR clone 138239 (TRBV6-1, TRBJ2-1)
CASAKDGFYNEQFF

SEQ ID NO: 276479 - protein, 15 aa, Homo sapiens
  CDR3 for alpha chain variable domain of TCR clone 138240 (TRAV8-4, TRAJ37)
CAVSKVSGNTGKLIF

SEQ ID NO: 276480 - protein, 14 aa, Homo sapiens
  CDR3 for beta chain variable domain of TCR clone 138240 (TRBV12-5, TRBJ2-5)
CASCSRTHQETQYF

SEQ ID NO: 276481 - protein, 11 aa, Homo sapiens
  CDR3 for alpha chain variable domain of TCR clone 138241 (TRAV1-2, TRAJ20)
CAVANDYKLTF

SEQ ID NO: 276482 - protein, 17 aa, Homo sapiens
  CDR3 for beta chain variable domain of TCR clone 138241 (TRBV20-1, TRBJ2-1)
CSASSSGLAGSYNEQFF

SEQ ID NO: 276483 - protein, 13 aa, Homo sapiens
  CDR3 for alpha chain variable domain of TCR clone 138242 (TRAV17, TRAJ39)
CATDSNAGNMLTF

SEQ ID NO: 276484 - protein, 14 aa, Homo sapiens
  CDR3 for beta chain variable domain of TCR clone 138242 (TRBV20-1, TRBJ1-1)
CSARAVNGYTEAFF

SEQ ID NO: 276485 - protein, 14 aa, Homo sapiens
  CDR3 for alpha chain variable domain of TCR clone 138243 (TRAV8-4, TRAJ9)
CAVRINTGGFKTIF

SEQ ID NO: 276486 - protein, 17 aa, Homo sapiens
  CDR3 for beta chain variable domain of TCR clone 138243 (TRBV20-1, TRBJ2-2)
CSASGSGQGGLTGELFF

SEQ ID NO: 276487 - protein, 17 aa, Homo sapiens
  CDR3 for alpha chain variable domain of TCR clone 138244 (TRAV4, TRAJ18)
CLVGERSVGSTLGRLYC

SEQ ID NO: 276488 - protein, 18 aa, Homo sapiens
  CDR3 for beta chain variable domain of TCR clone 138244 (TRBV11-2, TRBJ2-3)
CASSLGGASRGAPNTQYF

SEQ ID NO: 276489 - protein, 13 aa, Homo sapiens
  CDR3 for alpha chain variable domain of TCR clone 138245 (TRAV12-1, TRAJ7)
CVVNMRGNNRLAF

SEQ ID NO: 276490 - protein, 17 aa, Homo sapiens
  CDR3 for beta chain variable domain of TCR clone 138245 (TRBV4-1, TRBJ1-3)
CASSPQRGIRFGNTIYF

SEQ ID NO: 276491 - protein, 15 aa, Homo sapiens
  CDR3 for alpha chain variable domain of TCR clone 138246 (TRAV12-1, TRAJ45)
CVVLSGGGGADGLTF

SEQ ID NO: 276492 - protein, 16 aa, Homo sapiens
  CDR3 for beta chain variable domain of TCR clone 138246 (TRBV19, TRBJ2-1)
CASSKAGPSSYNEQFF

SEQ ID NO: 276493 - protein, 14 aa, Homo sapiens
  CDR3 for alpha chain variable domain of TCR clone 138247 (TRAV12-3, TRAJ9)
CAMSPNTGGFKTIF

SEQ ID NO: 276494 - protein, 14 aa, Homo sapiens
  CDR3 for beta chain variable domain of TCR clone 138247 (TRBV11-2, TRBJ2-7)
CASSLGNSLYEQYF

SEQ ID NO: 276495 - protein, 14 aa, Homo sapiens
  CDR3 for alpha chain variable domain of TCR clone 138248 (TRAV12-2, TRAJ53)
CAVKGGGSNYKLTF

SEQ ID NO: 276496 - protein, 14 aa, Homo sapiens
  CDR3 for beta chain variable domain of TCR clone 138248 (TRBV7-7, TRBJ2-2)
CATRQESDTGELFL

SEQ ID NO: 276497 - protein, 13 aa, Homo sapiens
  CDR3 for alpha chain variable domain of TCR clone 138249 (TRAV2, TRAJ15)
CAVAFQAGTALIF

SEQ ID NO: 276498 - protein, 16 aa, Homo sapiens
  CDR3 for beta chain variable domain of TCR clone 138249 (TRBV5-1, TRBJ1-1)
CASSSGGNSLNTEAFF

SEQ ID NO: 276499 - protein, 11 aa, Homo sapiens
  CDR3 for alpha chain variable domain of TCR clone 138250 (TRAV4, TRAJ31)
CLVGLNAGLMF

SEQ ID NO: 276500 - protein, 16 aa, Homo sapiens
  CDR3 for beta chain variable domain of TCR clone 138250 (TRBV15, TRBJ2-6)
CATSVNGGFLANVLTF

SEQ ID NO: 276501 - protein, 14 aa, Homo sapiens
  CDR3 for alpha chain variable domain of TCR clone 138251 (TRAV12-2, TRAJ17)
CAVLFKAAGNKLTF

SEQ ID NO: 276502 - protein, 16 aa, Homo sapiens
  CDR3 for beta chain variable domain of TCR clone 138251 (TRBV6-6, TRBJ2-6)
CASTPGAGNGANVLTF

SEQ ID NO: 276503 - protein, 16 aa, Homo sapiens
  CDR3 for alpha chain variable domain of TCR clone 138252 (TRAV30, TRAJ24)
CGTEIVDADSWGKFQF

SEQ ID NO: 276504 - protein, 14 aa, Homo sapiens
  CDR3 for beta chain variable domain of TCR clone 138252 (TRBV12-5, TRBJ2-5)
WASGSRTHQETQYF

SEQ ID NO: 276505 - protein, 12 aa, Homo sapiens
  CDR3 for alpha chain variable domain of TCR clone 138253 (TRAV21, TRAJ23)
CTVMLQGGKLIF

SEQ ID NO: 276506 - protein, 14 aa, Homo sapiens
  CDR3 for beta chain variable domain of TCR clone 138253 (TRBV7-9, TRBJ1-4)
CAVTEGEANEKLFF

SEQ ID NO: 276507 - protein, 12 aa, Homo sapiens
  CDR3 for alpha chain variable domain of TCR clone 138254 (TRAV20, TRAJ56)
CAVTGANSKLTF

SEQ ID NO: 276508 - protein, 12 aa, Homo sapiens
  CDR3 for beta chain variable domain of TCR clone 138254 (TRBV6-1, TRBJ1-1)
CASNSPTAEAFF

SEQ ID NO: 276509 - protein, 18 aa, Homo sapiens
  CDR3 for alpha chain variable domain of TCR clone 138255 (TRAV12-2, )
CAVEDIQNPDPAVYQLRD

SEQ ID NO: 276510 - protein, 16 aa, Homo sapiens
  CDR3 for beta chain variable domain of TCR clone 138255 (TRBV28, TRBJ1-1)
CASSSGGQPVATEAFF

SEQ ID NO: 276511 - protein, 14 aa, Homo sapiens
  CDR3 for alpha chain variable domain of TCR clone 138256 (TRAV9-2, TRAJ39)
CALYIYNAGNMLTF

SEQ ID NO: 276512 - protein, 14 aa, Homo sapiens
  CDR3 for beta chain variable domain of TCR clone 138256 (TRBV7-8, TRBJ2-7)
CASSVGQGAYEQYF

SEQ ID NO: 276513 - protein, 16 aa, Homo sapiens
  CDR3 for alpha chain variable domain of TCR clone 138257 (TRAV21, TRAJ45)
CAVSWGSGGGADGLAF

SEQ ID NO: 276514 - protein, 16 aa, Homo sapiens
  CDR3 for beta chain variable domain of TCR clone 138257 (TRBV24-1, TRBJ2-3)
CATSDPGTGATDTQYF

SEQ ID NO: 276515 - protein, 12 aa, Homo sapiens
  CDR3 for alpha chain variable domain of TCR clone 138258 (TRAV8-6, TRAJ11)
CAVSSGHSTLTF

SEQ ID NO: 276516 - protein, 11 aa, Homo sapiens
  CDR3 for beta chain variable domain of TCR clone 138258 (TRBV20-1, TRBJ1-5)
CSAQGDQPQHF

SEQ ID NO: 276517 - protein, 15 aa, Homo sapiens
  CDR3 for alpha chain variable domain of TCR clone 138259 (TRAV34, TRAJ38)
CGADFTPGNNRKLIW

SEQ ID NO: 276518 - protein, 16 aa, Homo sapiens
  CDR3 for beta chain variable domain of TCR clone 138259 (TRBV12-5, TRBJ2-5)
CASGPRTSGNHETQYF

SEQ ID NO: 276519 - protein, 14 aa, Homo sapiens
  CDR3 for alpha chain variable domain of TCR clone 138260 (TRAV2, TRAJ39)
CAVEGDNAGNVLTF

SEQ ID NO: 276520 - protein, 15 aa, Homo sapiens
  CDR3 for beta chain variable domain of TCR clone 138260 (TRBV5-1, TRBJ2-7)
CASSLDLTSSYEQYF

SEQ ID NO: 276521 - protein, 16 aa, Homo sapiens
  CDR3 for alpha chain variable domain of TCR clone 138261 (TRAV16, TRAJ4)
CALSRMFSGGYNKLIF

SEQ ID NO: 276522 - protein, 13 aa, Homo sapiens
  CDR3 for beta chain variable domain of TCR clone 138261 (TRBV19, TRBJ2-1)
CASKVGAGGEQFF

SEQ ID NO: 276523 - protein, 16 aa, Homo sapiens
  CDR3 for alpha chain variable domain of TCR clone 138262 (TRAV16, TRAJ42)
CARKMNYGGSQGNHIF

SEQ ID NO: 276524 - protein, 13 aa, Homo sapiens
  CDR3 for beta chain variable domain of TCR clone 138262 (TRBV20-1, TRBJ2-7)
CSASPPSSYEQYF

SEQ ID NO: 276525 - protein, 23 aa, Homo sapiens
  CDR3 for alpha chain variable domain of TCR clone 138263 (TRAV27, TRAJ47)
TAAQPGDKGLYLSIGEYGNKLVF

SEQ ID NO: 276526 - protein, 18 aa, Homo sapiens
  CDR3 for beta chain variable domain of TCR clone 138263 (TRBV2, TRBJ2-1)
CASRGLAGGPRTYNEQFF

SEQ ID NO: 276527 - protein, 14 aa, Homo sapiens
  CDR3 for alpha chain variable domain of TCR clone 138264 (TRAV21, TRAJ12)
CAVRNGDSSYKLIF

SEQ ID NO: 276528 - protein, 14 aa, Homo sapiens
  CDR3 for beta chain variable domain of TCR clone 138264 (TRBV7-6, TRBJ2-7)
CASSLTGTGNEQDF

SEQ ID NO: 276529 - protein, 14 aa, Homo sapiens
  CDR3 for alpha chain variable domain of TCR clone 138265 (TRAV1-1, TRAJ27)
CAVIYNTNAGKSTF

SEQ ID NO: 276530 - protein, 15 aa, Homo sapiens
  CDR3 for beta chain variable domain of TCR clone 138265 (TRBV7-2, TRBJ2-1)
CSSSSGLAGGNEQFF

SEQ ID NO: 276531 - protein, 14 aa, Homo sapiens
  CDR3 for alpha chain variable domain of TCR clone 138266 (TRAV1-2, TRAJ16)
CAVNRFSDGQKLLF

SEQ ID NO: 276532 - protein, 16 aa, Homo sapiens
  CDR3 for beta chain variable domain of TCR clone 138266 (TRBV5-7, TRBJ2-5)
CASTLAPAGGRETQYF

SEQ ID NO: 276533 - protein, 15 aa, Homo sapiens
  CDR3 for alpha chain variable domain of TCR clone 138267 (TRAV29/DV5, TRAJ24)
CAASVATDSWGKFQF

SEQ ID NO: 276534 - protein, 12 aa, Homo sapiens
  CDR3 for beta chain variable domain of TCR clone 138267 (TRBV11-2, TRBJ2-2)
CASSLPTGELFF

SEQ ID NO: 276535 - protein, 15 aa, Homo sapiens
  CDR3 for alpha chain variable domain of TCR clone 138268 (TRAV6, TRAJ13)
CALGGDSGGFQKVTF

SEQ ID NO: 276536 - protein, 12 aa, Homo sapiens
  CDR3 for beta chain variable domain of TCR clone 138268 (TRBV5-7, TRBJ1-2)
CASSDRIHGYTF

SEQ ID NO: 276537 - protein, 17 aa, Homo sapiens
  CDR3 for alpha chain variable domain of TCR clone 138269 (TRAV3, TRAJ6)
CAVRDGPRAGGSYKPTF

SEQ ID NO: 276538 - protein, 14 aa, Homo sapiens
  CDR3 for beta chain variable domain of TCR clone 138269 (TRBV7-2, TRBJ2-7)
CASTPKTSFYEQYF

SEQ ID NO: 276539 - protein, 13 aa, Homo sapiens
  CDR3 for alpha chain variable domain of TCR clone 138270 (TRAV17, TRAJ4)
CATKSGGYNKLIF

SEQ ID NO: 276540 - protein, 14 aa, Homo sapiens
  CDR3 for beta chain variable domain of TCR clone 138270 (TRBV20-1, TRBJ1-5)
CSARDDRGNQPHHF

SEQ ID NO: 276541 - protein, 14 aa, Homo sapiens
  CDR3 for alpha chain variable domain of TCR clone 138271 (TRAV21, TRAJ21)
CAVKGTGNFNKFYF

SEQ ID NO: 276542 - protein, 13 aa, Homo sapiens
  CDR3 for beta chain variable domain of TCR clone 138271 (TRBV18, TRBJ1-1)
CASSPETKPEAFF

SEQ ID NO: 276543 - protein, 15 aa, Homo sapiens
  CDR3 for alpha chain variable domain of TCR clone 138272 (TRAV8-4, TRAJ29)
CAVSEDFRGNTPLVF

SEQ ID NO: 276544 - protein, 15 aa, Homo sapiens
  CDR3 for beta chain variable domain of TCR clone 138272 (TRBV27, TRBJ2-1)
CASSNGGGSSNEQFF

SEQ ID NO: 276545 - protein, 11 aa, Homo sapiens
  CDR3 for alpha chain variable domain of TCR clone 138273 (TRAV12-1, TRAJ15)
CVVNARTALIF

SEQ ID NO: 276546 - protein, 16 aa, Homo sapiens
  CDR3 for beta chain variable domain of TCR clone 138273 (TRBV28, TRBJ2-1)
CASSSRVRDSYNEQFF

SEQ ID NO: 276547 - protein, 13 aa, Homo sapiens
  CDR3 for alpha chain variable domain of TCR clone 138274 (TRAV21, TRAJ57)
CAVTQGGSEKLVF

SEQ ID NO: 276548 - protein, 20 aa, Homo sapiens
  CDR3 for beta chain variable domain of TCR clone 138274 (TRBV11-3, TRBJ2-7)
CASSQRTSGSLRAVLRAGHQ

SEQ ID NO: 276549 - protein, 12 aa, Homo sapiens
  CDR3 for alpha chain variable domain of TCR clone 138275 (TRAV27, TRAJ35)
CAGADFGNVLHL

SEQ ID NO: 276550 - protein, 16 aa, Homo sapiens
  CDR3 for beta chain variable domain of TCR clone 138275 (TRBV6-1, TRBJ2-1)
CASILRQGSSYNEQFF

SEQ ID NO: 276551 - protein, 13 aa, Homo sapiens
  CDR3 for alpha chain variable domain of TCR clone 138276 (TRAV2, TRAJ40)
CAVVTSGAYKYIF

SEQ ID NO: 276552 - protein, 17 aa, Homo sapiens
  CDR3 for beta chain variable domain of TCR clone 138276 (TRBV11-2, TRBJ2-1)
CASSLYPPGVEYNEQFF

SEQ ID NO: 276553 - protein, 12 aa, Homo sapiens
  CDR3 for alpha chain variable domain of TCR clone 138277 (TRAV1-1, TRAJ8)
CAGGTGFQKLVF

SEQ ID NO: 276554 - protein, 15 aa, Homo sapiens
  CDR3 for beta chain variable domain of TCR clone 138277 (TRBV7-9, TRBJ1-4)
CACSRTGGFNENLFF

SEQ ID NO: 276555 - protein, 14 aa, Homo sapiens
  CDR3 for alpha chain variable domain of TCR clone 138278 (TRAV12-3, TRAJ58)
CVMSTETSGSRLTF

SEQ ID NO: 276556 - protein, 15 aa, Homo sapiens
  CDR3 for beta chain variable domain of TCR clone 138278 (TRBV4-1, TRBJ1-4)
CASSDTGGTNEKLFF

SEQ ID NO: 276557 - protein, 14 aa, Homo sapiens
  CDR3 for alpha chain variable domain of TCR clone 138279 (TRAV12-2, TRAJ13)
CAVKKTGGYQKVTF

SEQ ID NO: 276558 - protein, 12 aa, Homo sapiens
  CDR3 for beta chain variable domain of TCR clone 138279 (TRBV12-4, TRBJ1-2)
CASSFIWLHLLF

SEQ ID NO: 276559 - protein, 14 aa, Homo sapiens
  CDR3 for alpha chain variable domain of TCR clone 138280 (TRAV17, TRAJ6)
CATDASGGSYIPTF

SEQ ID NO: 276560 - protein, 16 aa, Homo sapiens
  CDR3 for beta chain variable domain of TCR clone 138280 (TRBV7-2, TRBJ2-5)
CASSYKTGISLETQYF

SEQ ID NO: 276561 - protein, 13 aa, Homo sapiens
  CDR3 for alpha chain variable domain of TCR clone 138281 (TRAV12-1, TRAJ11)
CVVNRAGYSTLTF

SEQ ID NO: 276562 - protein, 15 aa, Homo sapiens
  CDR3 for beta chain variable domain of TCR clone 138281 (TRBV10-2, TRBJ2-6)
CASSEQGTGANVLTF

SEQ ID NO: 276563 - protein, 14 aa, Homo sapiens
  CDR3 for alpha chain variable domain of TCR clone 138282 (TRAV26-1, TRAJ49)
CIVRPSNAGNQFYF

SEQ ID NO: 276564 - protein, 15 aa, Homo sapiens
  CDR3 for beta chain variable domain of TCR clone 138282 (TRBV19, TRBJ1-1)
CASMGFRDVNTEAFF

SEQ ID NO: 276565 - protein, 16 aa, Homo sapiens
  CDR3 for alpha chain variable domain of TCR clone 138283 (TRAV30, TRAJ24)
CGTEIVDADSWGKFQF

SEQ ID NO: 276566 - protein, 16 aa, Homo sapiens
  CDR3 for beta chain variable domain of TCR clone 138283 (TRBV7-8, TRBJ2-5)
CASSPAGGRNQETQYF

SEQ ID NO: 276567 - protein, 12 aa, Homo sapiens
  CDR3 for alpha chain variable domain of TCR clone 138284 (TRAV27, TRAJ13)
CAGAGGYQKVTF

SEQ ID NO: 276568 - protein, 11 aa, Homo sapiens
  CDR3 for beta chain variable domain of TCR clone 138284 (TRBV19, TRBJ1-1)
CASSIGSEAFF

SEQ ID NO: 276569 - protein, 14 aa, Homo sapiens
  CDR3 for alpha chain variable domain of TCR clone 138285 (TRAV13-1, TRAJ24)
CAASRTDSWEKLQF

SEQ ID NO: 276570 - protein, 15 aa, Homo sapiens
  CDR3 for beta chain variable domain of TCR clone 138285 (TRBV7-9, TRBJ1-5)
CASSQGHQPNQPQHF

SEQ ID NO: 276571 - protein, 16 aa, Homo sapiens
  CDR3 for alpha chain variable domain of TCR clone 138286 (TRAV21, TRAJ52)
CAVSYAGGTSYGKLTF

SEQ ID NO: 276572 - protein, 13 aa, Homo sapiens
  CDR3 for beta chain variable domain of TCR clone 138286 (TRBV7-3, TRBJ2-5)
CASSFRGSQTQYF

SEQ ID NO: 276573 - protein, 13 aa, Homo sapiens
  CDR3 for alpha chain variable domain of TCR clone 138287 (TRAV13-1, TRAJ21)
CAASIYNFNKFYF

SEQ ID NO: 276574 - protein, 13 aa, Homo sapiens
  CDR3 for beta chain variable domain of TCR clone 138287 (TRBV20-1, TRBJ1-1)
CSARGGGNTEAFF

SEQ ID NO: 276575 - protein, 13 aa, Homo sapiens
  CDR3 for alpha chain variable domain of TCR clone 138288 (TRAV20, TRAJ42)
CAVQGGSQGNLIF

SEQ ID NO: 276576 - protein, 12 aa, Homo sapiens
  CDR3 for beta chain variable domain of TCR clone 138288 (TRBV5-1, TRBJ2-7)
CASSFRGYEQYF

SEQ ID NO: 276577 - protein, 14 aa, Homo sapiens
  CDR3 for alpha chain variable domain of TCR clone 138289 (TRAV12-3, TRAJ10)
SHLPLTGGGKKLTF

SEQ ID NO: 276578 - protein, 19 aa, Homo sapiens
  CDR3 for beta chain variable domain of TCR clone 138289 (TRBV4-1, TRBJ1-1)
CASSRIILTPRGVNTEAFF

SEQ ID NO: 276579 - protein, 14 aa, Homo sapiens
  CDR3 for alpha chain variable domain of TCR clone 138290 (TRAV26-1, TRAJ21)
CTVRPPYNFNKCYF

SEQ ID NO: 276580 - protein, 14 aa, Homo sapiens
  CDR3 for beta chain variable domain of TCR clone 138290 (TRBV11-3, TRBJ2-1)
CASSATTSGSIQFF

SEQ ID NO: 276581 - protein, 14 aa, Homo sapiens
  CDR3 for alpha chain variable domain of TCR clone 138291 (TRAV17, TRAJ54)
CATDANQGAQKLVF

SEQ ID NO: 276582 - protein, 12 aa, Homo sapiens
  CDR3 for beta chain variable domain of TCR clone 138291 (TRBV7-9, TRBJ2-7)
CASSIKREDQYF

SEQ ID NO: 276583 - protein, 13 aa, Homo sapiens
  CDR3 for alpha chain variable domain of TCR clone 138292 (TRAV13-1, TRAJ47)
CAATLTGGNKLVF

SEQ ID NO: 276584 - protein, 16 aa, Homo sapiens
  CDR3 for beta chain variable domain of TCR clone 138292 (TRBV5-4, TRBJ2-3)
CASQQPGAGGADTQYF

SEQ ID NO: 276585 - protein, 14 aa, Homo sapiens
  CDR3 for alpha chain variable domain of TCR clone 138293 (TRAV4, TRAJ22)
CLARLSGSARQLTF

SEQ ID NO: 276586 - protein, 14 aa, Homo sapiens
  CDR3 for beta chain variable domain of TCR clone 138293 (TRBV7-2, TRBJ2-7)
CASRSQGAAYEQYF

SEQ ID NO: 276587 - protein, 15 aa, Homo sapiens
  CDR3 for alpha chain variable domain of TCR clone 138294 (TRAV38-1, TRAJ37)
CAFIFGSGNTGKLIF

SEQ ID NO: 276588 - protein, 15 aa, Homo sapiens
  CDR3 for beta chain variable domain of TCR clone 138294 (TRBV4-1, TRBJ2-5)
CASSQWDLYQETQYF

SEQ ID NO: 276589 - protein, 12 aa, Homo sapiens
  CDR3 for alpha chain variable domain of TCR clone 138295 (TRAV13-1, TRAJ9)
CASHPGGFKTIF

SEQ ID NO: 276590 - protein, 18 aa, Homo sapiens
  CDR3 for beta chain variable domain of TCR clone 138295 (TRBV11-2, TRBJ2-3)
CASSLGGASRGAPNTQYF

SEQ ID NO: 276591 - protein, 13 aa, Homo sapiens
  CDR3 for alpha chain variable domain of TCR clone 138296 (TRAV13-1, TRAJ40)
CAARTAGTYKYIF

SEQ ID NO: 276592 - protein, 17 aa, Homo sapiens
  CDR3 for beta chain variable domain of TCR clone 138296 (TRBV4-1, TRBJ2-3)
CASGQGYVSGGTDTQYF

SEQ ID NO: 276593 - protein, 13 aa, Homo sapiens
  CDR3 for alpha chain variable domain of TCR clone 138297 (TRAV8-6, TRAJ21)
CAVSPSSLNKFYF

SEQ ID NO: 276594 - protein, 17 aa, Homo sapiens
  CDR3 for beta chain variable domain of TCR clone 138297 (TRBV20-1, TRBJ2-1)
CSASSSGLAGSYNEQFF

SEQ ID NO: 276595 - protein, 12 aa, Homo sapiens
  CDR3 for alpha chain variable domain of TCR clone 138298 (TRAV13-2, TRAJ23)
CADRHRGGKLIF

SEQ ID NO: 276596 - protein, 16 aa, Homo sapiens
  CDR3 for beta chain variable domain of TCR clone 138298 (TRBV12-5, TRBJ2-5)
CASGPRTSGNQETQYF

SEQ ID NO: 276597 - protein, 17 aa, Homo sapiens
  CDR3 for alpha chain variable domain of TCR clone 138299 (TRAV27, TRAJ18)
CAGLQRGRGSTLGRLYF

SEQ ID NO: 276598 - protein, 14 aa, Homo sapiens
  CDR3 for beta chain variable domain of TCR clone 138299 (TRBV20-1, TRBJ1-5)
CSARGRGSNQPQHF

SEQ ID NO: 276599 - protein, 15 aa, Homo sapiens
  CDR3 for alpha chain variable domain of TCR clone 138300 (TRAV20, TRAJ6)
CCAGTPSGGSYIPTF

SEQ ID NO: 276600 - protein, 14 aa, Homo sapiens
  CDR3 for beta chain variable domain of TCR clone 138300 (TRBV4-2, TRBJ2-1)
CASGLDRAYNEQFF

SEQ ID NO: 276601 - protein, 20 aa, Homo sapiens
  CDR3 for alpha chain variable domain of TCR clone 138301 (TRAV1-1, TRAJ39)
CLLLLRCESSAYNAGNMPTF

SEQ ID NO: 276602 - protein, 13 aa, Homo sapiens
  CDR3 for beta chain variable domain of TCR clone 138301 (TRBV12-4, TRBJ1-5)
CASSPDRAQPQHF

SEQ ID NO: 276603 - protein, 14 aa, Homo sapiens
  CDR3 for alpha chain variable domain of TCR clone 138302 (TRAV26-2, TRAJ27)
RILRDISDAGKSTF

SEQ ID NO: 276604 - protein, 15 aa, Homo sapiens
  CDR3 for beta chain variable domain of TCR clone 138302 (TRBV10-3, TRBJ2-7)
CATREQGLRSYEQYF

SEQ ID NO: 276605 - protein, 17 aa, Homo sapiens
  CDR3 for alpha chain variable domain of TCR clone 138303 (TRAV3, TRAJ6)
CEVRDGPRAGGSYIPTF

SEQ ID NO: 276606 - protein, 14 aa, Homo sapiens
  CDR3 for beta chain variable domain of TCR clone 138303 (TRBV7-2, TRBJ2-7)
CASSPKTSFYEQYF

SEQ ID NO: 276607 - protein, 15 aa, Homo sapiens
  CDR3 for alpha chain variable domain of TCR clone 138304 (TRAV13-1, TRAJ17)
CAARIERAAGNKLTF

SEQ ID NO: 276608 - protein, 15 aa, Homo sapiens
  CDR3 for beta chain variable domain of TCR clone 138304 (TRBV6-3, TRBJ2-7)
CASSSPGTVFYEQYF

SEQ ID NO: 276609 - protein, 13 aa, Homo sapiens
  CDR3 for alpha chain variable domain of TCR clone 138305 (TRAV21, TRAJ56)
CAVRNGANSKLTF

SEQ ID NO: 276610 - protein, 15 aa, Homo sapiens
  CDR3 for beta chain variable domain of TCR clone 138305 (TRBV7-9, TRBJ1-1)
CASSHRGTVNTEAFF

SEQ ID NO: 276611 - protein, 12 aa, Homo sapiens
  CDR3 for alpha chain variable domain of TCR clone 138306 (TRAV13-2, TRAJ8)
FAPWLGFQKLVF

SEQ ID NO: 276612 - protein, 16 aa, Homo sapiens
  CDR3 for beta chain variable domain of TCR clone 138306 (TRBV7-8, TRBJ2-5)
CASSFGGQPAQETQYF

SEQ ID NO: 276613 - protein, 11 aa, Homo sapiens
  CDR3 for alpha chain variable domain of TCR clone 138307 (TRAV17, TRAJ43)
CAPPRSNDMRF

SEQ ID NO: 276614 - protein, 15 aa, Homo sapiens
  CDR3 for beta chain variable domain of TCR clone 138307 (TRBV11-2, TRBJ2-1)
CASSLGTSGLNEQFF

SEQ ID NO: 276615 - protein, 14 aa, Homo sapiens
  CDR3 for alpha chain variable domain of TCR clone 138308 (TRAV1-2, TRAJ8)
CAVREVTGFQKLVF

SEQ ID NO: 276616 - protein, 16 aa, Homo sapiens
  CDR3 for beta chain variable domain of TCR clone 138308 (TRBV27, TRBJ2-2)
CASSFRGLVRTGELFF

SEQ ID NO: 276617 - protein, 15 aa, Homo sapiens
  CDR3 for alpha chain variable domain of TCR clone 138309 (TRAV8-2, TRAJ16)
CVVSDGFSDGQKLLF

SEQ ID NO: 276618 - protein, 17 aa, Homo sapiens
  CDR3 for beta chain variable domain of TCR clone 138309 (TRBV7-3, TRBJ2-3)
CASSRGLAGEVPDTQYF

SEQ ID NO: 276619 - protein, 16 aa, Homo sapiens
  CDR3 for alpha chain variable domain of TCR clone 138310 (TRAV17, TRAJ52)
CATGIIAGTSYGKLTF

SEQ ID NO: 276620 - protein, 12 aa, Homo sapiens
  CDR3 for beta chain variable domain of TCR clone 138310 (TRBV7-3, TRBJ2-1)
CASSFINNEQFF

SEQ ID NO: 276621 - protein, 17 aa, Homo sapiens
  CDR3 for alpha chain variable domain of TCR clone 138311 (TRAV13-1, TRAJ52)
CAAGRNAGGTSYGKLTF

SEQ ID NO: 276622 - protein, 15 aa, Homo sapiens
  CDR3 for beta chain variable domain of TCR clone 138311 (TRBV27, TRBJ2-1)
CASSNGGGSSNEQFF

SEQ ID NO: 276623 - protein, 16 aa, Homo sapiens
  CDR3 for alpha chain variable domain of TCR clone 138312 (TRAV26-1, TRAJ45)
CIVEKYSGGGADGLTF

SEQ ID NO: 276624 - protein, 15 aa, Homo sapiens
  CDR3 for beta chain variable domain of TCR clone 138312 (TRBV15, TRBJ2-7)
CHQQRPNQQAYEQYF

SEQ ID NO: 276625 - protein, 14 aa, Homo sapiens
  CDR3 for alpha chain variable domain of TCR clone 138313 (TRAV13-2, TRAJ17)
FAENSKAAGNKLTF

SEQ ID NO: 276626 - protein, 15 aa, Homo sapiens
  CDR3 for beta chain variable domain of TCR clone 138313 (TRBV27, TRBJ2-1)
CASSNGGGSSNEQFF

SEQ ID NO: 276627 - protein, 13 aa, Homo sapiens
  CDR3 for alpha chain variable domain of TCR clone 138314 (TRAV2, TRAJ15)
CAVASQAGTALIF

SEQ ID NO: 276628 - protein, 14 aa, Homo sapiens
  CDR3 for beta chain variable domain of TCR clone 138314 (TRBV27, TRBJ2-3)
CASSSGTNTGTQYF

SEQ ID NO: 276629 - protein, 12 aa, Homo sapiens
  CDR3 for alpha chain variable domain of TCR clone 138315 (TRAV12-3, TRAJ17)
CAMTLTGNKLTF

SEQ ID NO: 276630 - protein, 16 aa, Homo sapiens
  CDR3 for beta chain variable domain of TCR clone 138315 (TRBV7-9, TRBJ2-1)
CASSLGTGWDYNEQFF

SEQ ID NO: 276631 - protein, 15 aa, Homo sapiens
  CDR3 for alpha chain variable domain of TCR clone 138316 (TRAV21, TRAJ53)
CATLNSGGSNYKLTF

SEQ ID NO: 276632 - protein, 13 aa, Homo sapiens
  CDR3 for beta chain variable domain of TCR clone 138316 (TRBV3-1, TRBJ1-1)
CASSPGVITEAFF

SEQ ID NO: 276633 - protein, 12 aa, Homo sapiens
  CDR3 for alpha chain variable domain of TCR clone 138317 (TRAV13-1, TRAJ21)
CAAKEGFNKFYF

SEQ ID NO: 276634 - protein, 15 aa, Homo sapiens
  CDR3 for beta chain variable domain of TCR clone 138317 (TRBV25-1, TRBJ1-4)
CASSPGDCTNEKLFF

SEQ ID NO: 276635 - protein, 13 aa, Homo sapiens
  CDR3 for alpha chain variable domain of TCR clone 138318 (TRAV13-1, TRAJ47)
CAATLTGRNKLVF

SEQ ID NO: 276636 - protein, 14 aa, Homo sapiens
  CDR3 for beta chain variable domain of TCR clone 138318 (TRBV12-4, TRBJ1-2)
CASSTLRGNYGYTF

SEQ ID NO: 276637 - protein, 20 aa, Homo sapiens
  CDR3 for alpha chain variable domain of TCR clone 138319 (TRAV26-2, TRAJ48)
CCVLLHPEPPFNFGNEKLTF

SEQ ID NO: 276638 - protein, 15 aa, Homo sapiens
  CDR3 for beta chain variable domain of TCR clone 138319 (TRBV20-1, TRBJ2-3)
CSARVEGTYTDTQYF

SEQ ID NO: 276639 - protein, 17 aa, Homo sapiens
  CDR3 for alpha chain variable domain of TCR clone 138320 (TRAV12-3, TRAJ6)
CATSARGGAGGSYVPTF

SEQ ID NO: 276640 - protein, 12 aa, Homo sapiens
  CDR3 for beta chain variable domain of TCR clone 138320 (TRBV12-4, TRBJ2-3)
CASSTLPDTQYF

SEQ ID NO: 276641 - protein, 10 aa, Homo sapiens
  CDR3 for alpha chain variable domain of TCR clone 138321 (TRAV12-3, TRAJ18)
CAMSAEAQPW

SEQ ID NO: 276642 - protein, 16 aa, Homo sapiens
  CDR3 for beta chain variable domain of TCR clone 138321 (TRBV19, TRBJ2-1)
CASSKAGPSSYNEQFF

SEQ ID NO: 276643 - protein, 15 aa, Homo sapiens
  CDR3 for alpha chain variable domain of TCR clone 138322 (TRAV1-2, TRAJ30)
CAVRHHGNRDDKIIF

SEQ ID NO: 276644 - protein, 15 aa, Homo sapiens
  CDR3 for beta chain variable domain of TCR clone 138322 (TRBV28, TRBJ1-5)
CASSRTGGYVQPQHF

SEQ ID NO: 276645 - protein, 13 aa, Homo sapiens
  CDR3 for alpha chain variable domain of TCR clone 138323 (TRAV8-4, TRAJ30)
CATYKNRDDKIIF

SEQ ID NO: 276646 - protein, 11 aa, Homo sapiens
  CDR3 for beta chain variable domain of TCR clone 138323 (TRBV6-1, TRBJ2-5)
CASMGYNEQFF

SEQ ID NO: 276647 - protein, 13 aa, Homo sapiens
  CDR3 for alpha chain variable domain of TCR clone 138324 (TRAV12-1, TRAJ39)
CVARSGAGNMLTF

SEQ ID NO: 276648 - protein, 16 aa, Homo sapiens
  CDR3 for beta chain variable domain of TCR clone 138324 (TRBV27, TRBJ2-2)
CAGSFRGLVRTGELFF

SEQ ID NO: 276649 - protein, 14 aa, Homo sapiens
  CDR3 for alpha chain variable domain of TCR clone 138325 (TRAV1-2, TRAJ8)
CDVREDTGFQKLVF

SEQ ID NO: 276650 - protein, 15 aa, Homo sapiens
  CDR3 for beta chain variable domain of TCR clone 138325 (TRBV6-3, TRBJ2-7)
CASSSPGTVFYEQYF

SEQ ID NO: 276651 - protein, 15 aa, Homo sapiens
  CDR3 for alpha chain variable domain of TCR clone 138326 (TRAV8-6, TRAJ10)
CAVSDQAGGGNKLTF

SEQ ID NO: 276652 - protein, 15 aa, Homo sapiens
  CDR3 for beta chain variable domain of TCR clone 138326 (TRBV27, TRBJ2-1)
CASSNGGGSSNEQFF

SEQ ID NO: 276653 - protein, 14 aa, Homo sapiens
  CDR3 for alpha chain variable domain of TCR clone 138327 (TRAV29/DV5, TRAJ45)
CTASFRGGADGLTF

SEQ ID NO: 276654 - protein, 15 aa, Homo sapiens
  CDR3 for beta chain variable domain of TCR clone 138327 (TRBV27, TRBJ2-1)
CASSNGGGSSNEQFF

SEQ ID NO: 276655 - protein, 14 aa, Homo sapiens
  CDR3 for alpha chain variable domain of TCR clone 138328 (TRAV1-2, TRAJ16)
CAVNRFSDGQKLLF

SEQ ID NO: 276656 - protein, 16 aa, Homo sapiens
  CDR3 for beta chain variable domain of TCR clone 138328 (TRBV7-9, TRBJ1-4)
CAITEGEANERLFLAV

SEQ ID NO: 276657 - protein, 12 aa, Homo sapiens
  CDR3 for alpha chain variable domain of TCR clone 138329 (TRAV2, TRAJ9)
CAVGAGGFKTIF

SEQ ID NO: 276658 - protein, 14 aa, Homo sapiens
  CDR3 for beta chain variable domain of TCR clone 138329 (TRBV12-4, TRBJ2-5)
CASSLWQKQETQYF

SEQ ID NO: 276659 - protein, 12 aa, Homo sapiens
  CDR3 for alpha chain variable domain of TCR clone 138330 (TRAV1-1, TRAJ8)
CAGGTGFQKLVF

SEQ ID NO: 276660 - protein, 13 aa, Homo sapiens
  CDR3 for beta chain variable domain of TCR clone 138330 (TRBV10-2, TRBJ2-7)
CASGASGGYEQYF

SEQ ID NO: 276661 - protein, 11 aa, Homo sapiens
  CDR3 for alpha chain variable domain of TCR clone 138331 (TRAV3, TRAJ21)
CAVGNFNKFYF

SEQ ID NO: 276662 - protein, 14 aa, Homo sapiens
  CDR3 for beta chain variable domain of TCR clone 138331 (TRBV20-1, TRBJ2-2)
CSAPDTANTGELFF

SEQ ID NO: 276663 - protein, 13 aa, Homo sapiens
  CDR3 for alpha chain variable domain of TCR clone 138332 (TRAV27, TRAJ45)
CRSPGGGADGLTF

SEQ ID NO: 276664 - protein, 17 aa, Homo sapiens
  CDR3 for beta chain variable domain of TCR clone 138332 (TRBV11-3, TRBJ2-1)
CASSLYPPGVEYNEQFF

SEQ ID NO: 276665 - protein, 12 aa, Homo sapiens
  CDR3 for alpha chain variable domain of TCR clone 138333 (TRAV29/DV5, TRAJ49)
CAATDTGNQCYF

SEQ ID NO: 276666 - protein, 19 aa, Homo sapiens
  CDR3 for beta chain variable domain of TCR clone 138333 (TRBV25-1, TRBJ2-2)
CAILVYRVDRGRKTGELFF

SEQ ID NO: 276667 - protein, 12 aa, Homo sapiens
  CDR3 for alpha chain variable domain of TCR clone 138334 (TRAV1-1, TRAJ30)
CAVRGRDDKIIF

SEQ ID NO: 276668 - protein, 15 aa, Homo sapiens
  CDR3 for beta chain variable domain of TCR clone 138334 (TRBV11-2, TRBJ2-1)
CASSLGPDSYNEQFF

SEQ ID NO: 276669 - protein, 11 aa, Homo sapiens
  CDR3 for alpha chain variable domain of TCR clone 138335 (TRAV12-3, TRAJ27)
CAMANAGKLTF

SEQ ID NO: 276670 - protein, 15 aa, Homo sapiens
  CDR3 for beta chain variable domain of TCR clone 138335 (TRBV11-2, TRBJ2-1)
CASSPAGQSLNEQFF

SEQ ID NO: 276671 - protein, 16 aa, Homo sapiens
  CDR3 for alpha chain variable domain of TCR clone 138336 (TRAV38-1, TRAJ45)
CAFMKGSGGGADGVTF

SEQ ID NO: 276672 - protein, 15 aa, Homo sapiens
  CDR3 for beta chain variable domain of TCR clone 138336 (TRBV20-1, TRBJ2-7)
CSAREGRDSLYEQYF

SEQ ID NO: 276673 - protein, 12 aa, Homo sapiens
  CDR3 for alpha chain variable domain of TCR clone 138337 (TRAV12-3, TRAJ29)
CAAREGNTPLVF

SEQ ID NO: 276674 - protein, 17 aa, Homo sapiens
  CDR3 for beta chain variable domain of TCR clone 138337 (TRBV18, TRBJ2-1)
CASSPLAAGAGDNEQFC

SEQ ID NO: 276675 - protein, 17 aa, Homo sapiens
  CDR3 for alpha chain variable domain of TCR clone 138338 (TRAV3, TRAJ4)
CAVRDIMFSGGYNKLIF

SEQ ID NO: 276676 - protein, 12 aa, Homo sapiens
  CDR3 for beta chain variable domain of TCR clone 138338 (TRBV5-4, TRBJ2-7)
CASSWAGQGENF

SEQ ID NO: 276677 - protein, 10 aa, Homo sapiens
  CDR3 for alpha chain variable domain of TCR clone 138339 (TRAV16, TRAJ22)
SAMYLRQLTF

SEQ ID NO: 276678 - protein, 16 aa, Homo sapiens
  CDR3 for beta chain variable domain of TCR clone 138339 (TRBV28, TRBJ1-1)
CASSSGGQPVATEAFF

SEQ ID NO: 276679 - protein, 11 aa, Homo sapiens
  CDR3 for alpha chain variable domain of TCR clone 138340 (TRAV12-3, TRAJ43)
CAMSVSNDMRF

SEQ ID NO: 276680 - protein, 16 aa, Homo sapiens
  CDR3 for beta chain variable domain of TCR clone 138340 (TRBV20-1, TRBJ2-1)
CSACDSLGAVYNEQFF

SEQ ID NO: 276681 - protein, 13 aa, Homo sapiens
  CDR3 for alpha chain variable domain of TCR clone 138341 (TRAV9-2, TRAJ53)
CALSGGSNYKLTF

SEQ ID NO: 276682 - protein, 17 aa, Homo sapiens
  CDR3 for beta chain variable domain of TCR clone 138341 (TRBV11-2, TRBJ2-1)
WASSLYPPGVEYNEQFF

SEQ ID NO: 276683 - protein, 11 aa, Homo sapiens
  CDR3 for alpha chain variable domain of TCR clone 138342 (TRAV13-1, TRAJ20)
CSPHGLFKLSF

SEQ ID NO: 276684 - protein, 14 aa, Homo sapiens
  CDR3 for beta chain variable domain of TCR clone 138342 (TRBV28, TRBJ2-5)
CASTGAGGVETQYF

SEQ ID NO: 276685 - protein, 12 aa, Homo sapiens
  CDR3 for alpha chain variable domain of TCR clone 138343 (TRAV8-3, TRAJ37)
CAVVGNTVKLIF

SEQ ID NO: 276686 - protein, 17 aa, Homo sapiens
  CDR3 for beta chain variable domain of TCR clone 138343 (TRBV12-4, TRBJ2-3)
CASSSGLAGRHFDTQYF

SEQ ID NO: 276687 - protein, 14 aa, Homo sapiens
  CDR3 for alpha chain variable domain of TCR clone 138344 (TRAV36/DV7, TRAJ13)
WGPGENGGYQKVSF

SEQ ID NO: 276688 - protein, 15 aa, Homo sapiens
  CDR3 for beta chain variable domain of TCR clone 138344 (TRBV19, TRBJ2-1)
CASSTGTSSYNEQFF

SEQ ID NO: 276689 - protein, 15 aa, Homo sapiens
  CDR3 for alpha chain variable domain of TCR clone 138345 (TRAV20, TRAJ53)
CAVQASGGSNYKLTV

SEQ ID NO: 276690 - protein, 14 aa, Homo sapiens
  CDR3 for beta chain variable domain of TCR clone 138345 (TRBV7-2, TRBJ1-2)
CASSQTGSTYGYTF

SEQ ID NO: 276691 - protein, 11 aa, Homo sapiens
  CDR3 for alpha chain variable domain of TCR clone 138346 (TRAV17, TRAJ9)
CGFTGGFKTIF

SEQ ID NO: 276692 - protein, 12 aa, Homo sapiens
  CDR3 for beta chain variable domain of TCR clone 138346 (TRBV11-2, TRBJ2-2)
CASSLPTGELFF

SEQ ID NO: 276693 - protein, 14 aa, Homo sapiens
  CDR3 for alpha chain variable domain of TCR clone 138347 (TRAV38-2/DV8, TRAJ54)
CAYRRYQGAQKLVF

SEQ ID NO: 276694 - protein, 15 aa, Homo sapiens
  CDR3 for beta chain variable domain of TCR clone 138347 (TRBV7-9, TRBJ1-4)
CASSRTGGFNEKLFF

SEQ ID NO: 276695 - protein, 14 aa, Homo sapiens
  CDR3 for alpha chain variable domain of TCR clone 138348 (TRAV6, TRAJ17)
CSLDLKAAGNKLTF

SEQ ID NO: 276696 - protein, 17 aa, Homo sapiens
  CDR3 for beta chain variable domain of TCR clone 138348 (TRBV7-8, TRBJ2-7)
CASSFTSGRPPSYEQYF

SEQ ID NO: 276697 - protein, 15 aa, Homo sapiens
  CDR3 for alpha chain variable domain of TCR clone 138349 (TRAV36/DV7, TRAJ53)
WEGENSGGSNYKLTF

SEQ ID NO: 276698 - protein, 15 aa, Homo sapiens
  CDR3 for beta chain variable domain of TCR clone 138349 (TRBV6-5, TRBJ2-1)
CASSYDAGAGNEQFF

SEQ ID NO: 276699 - protein, 11 aa, Homo sapiens
  CDR3 for alpha chain variable domain of TCR clone 138350 (TRAV12-3, TRAJ43)
CAMSVANDIRF

SEQ ID NO: 276700 - protein, 13 aa, Homo sapiens
  CDR3 for beta chain variable domain of TCR clone 138350 (TRBV20-1, TRBJ1-1)
CSAPLGGGTEAFF

SEQ ID NO: 276701 - protein, 14 aa, Homo sapiens
  CDR3 for alpha chain variable domain of TCR clone 138351 (TRAV13-1, TRAJ44)
CAAKATGTASKLTF

SEQ ID NO: 276702 - protein, 15 aa, Homo sapiens
  CDR3 for beta chain variable domain of TCR clone 138351 (TRBV5-5, TRBJ2-7)
CASSLAAPLSYEQYF

SEQ ID NO: 276703 - protein, 11 aa, Homo sapiens
  CDR3 for alpha chain variable domain of TCR clone 138352 (TRAV2, TRAJ33)
CAVESNYQLIW

SEQ ID NO: 276704 - protein, 13 aa, Homo sapiens
  CDR3 for beta chain variable domain of TCR clone 138352 (TRBV2, TRBJ2-7)
CASSEGGQFEQYF

SEQ ID NO: 276705 - protein, 15 aa, Homo sapiens
  CDR3 for alpha chain variable domain of TCR clone 138353 (TRAV21, TRAJ52)
CAVSGGGTSYGKLTF

SEQ ID NO: 276706 - protein, 13 aa, Homo sapiens
  CDR3 for beta chain variable domain of TCR clone 138353 (TRBV6-5, TRBJ2-5)
CATAPSPQETQYF

SEQ ID NO: 276707 - protein, 17 aa, Homo sapiens
  CDR3 for alpha chain variable domain of TCR clone 138354 (TRAV27, TRAJ26)
CAGARAPLDNYVPNFVF

SEQ ID NO: 276708 - protein, 15 aa, Homo sapiens
  CDR3 for beta chain variable domain of TCR clone 138354 (TRBV11-2, TRBJ2-5)
CASSPRSGGLETQYF

SEQ ID NO: 276709 - protein, 15 aa, Homo sapiens
  CDR3 for alpha chain variable domain of TCR clone 138355 (TRAV1-1, TRAJ23)
CAVSEGPGRKAYLRT

SEQ ID NO: 276710 - protein, 14 aa, Homo sapiens
  CDR3 for beta chain variable domain of TCR clone 138355 (TRBV10-2, TRBJ2-1)
CASSEGTLSMSSSS

SEQ ID NO: 276711 - protein, 14 aa, Homo sapiens
  CDR3 for alpha chain variable domain of TCR clone 138356 (TRAV12-3, TRAJ10)
SNLPLTGGGNKLTF

SEQ ID NO: 276712 - protein, 12 aa, Homo sapiens
  CDR3 for beta chain variable domain of TCR clone 138356 (TRBV7-8, TRBJ2-7)
CASSLGDREQYF

SEQ ID NO: 276713 - protein, 13 aa, Homo sapiens
  CDR3 for alpha chain variable domain of TCR clone 138357 (TRAV27, TRAJ49)
CAPRPYTGNQFSF

SEQ ID NO: 276714 - protein, 16 aa, Homo sapiens
  CDR3 for beta chain variable domain of TCR clone 138357 (TRBV4-1, TRBJ1-2)
CASSQDAGQVLYGYAF

SEQ ID NO: 276715 - protein, 11 aa, Homo sapiens
  CDR3 for alpha chain variable domain of TCR clone 138358 (TRAV12-3, TRAJ43)
CAMSVSSDMRF

SEQ ID NO: 276716 - protein, 15 aa, Homo sapiens
  CDR3 for beta chain variable domain of TCR clone 138358 (TRBV5-1, TRBJ2-1)
CASSPPRAPYNEQFF

SEQ ID NO: 276717 - protein, 12 aa, Homo sapiens
  CDR3 for alpha chain variable domain of TCR clone 138359 (TRAV13-1, TRAJ42)
SVLRGSQGNLIF

SEQ ID NO: 276718 - protein, 13 aa, Homo sapiens
  CDR3 for beta chain variable domain of TCR clone 138359 (TRBV2, TRBJ1-4)
CASSELGVEKLFC

SEQ ID NO: 276719 - protein, 14 aa, Homo sapiens
  CDR3 for alpha chain variable domain of TCR clone 138360 (TRAV26-1, TRAJ34)
CIVRVAYNTDKLIF

SEQ ID NO: 276720 - protein, 14 aa, Homo sapiens
  CDR3 for beta chain variable domain of TCR clone 138360 (TRBV25-1, TRBJ1-4)
CASSGGGQPEKLFF

SEQ ID NO: 276721 - protein, 11 aa, Homo sapiens
  CDR3 for alpha chain variable domain of TCR clone 138361 (TRAV12-3, TRAJ49)
CATNTGNQFYF

SEQ ID NO: 276722 - protein, 12 aa, Homo sapiens
  CDR3 for beta chain variable domain of TCR clone 138361 (TRBV6-3, TRBJ2-7)
CASSEPGFEQYF

SEQ ID NO: 276723 - protein, 15 aa, Homo sapiens
  CDR3 for alpha chain variable domain of TCR clone 138362 (TRAV21, TRAJ24)
CAARSSTDSWGKLQF

SEQ ID NO: 276724 - protein, 15 aa, Homo sapiens
  CDR3 for beta chain variable domain of TCR clone 138362 (TRBV20-1, TRBJ1-1)
CSASRGVTGNTEDFF

SEQ ID NO: 276725 - protein, 13 aa, Homo sapiens
  CDR3 for alpha chain variable domain of TCR clone 138363 (TRAV21, TRAJ27)
CAALNTTAGKSTF

SEQ ID NO: 276726 - protein, 14 aa, Homo sapiens
  CDR3 for beta chain variable domain of TCR clone 138363 (TRBV27, TRBJ1-1)
CASSLLSGLSEAFF

SEQ ID NO: 276727 - protein, 11 aa, Homo sapiens
  CDR3 for alpha chain variable domain of TCR clone 138364 (TRAV1-2, TRAJ40)
CAVPGTYKYIF

SEQ ID NO: 276728 - protein, 14 aa, Homo sapiens
  CDR3 for beta chain variable domain of TCR clone 138364 (TRBV4-1, TRBJ2-7)
CASRLTSGSYEQYF

SEQ ID NO: 276729 - protein, 17 aa, Homo sapiens
  CDR3 for alpha chain variable domain of TCR clone 138365 (TRAV12-2, TRAJ22)
CAVNRISFSGSARQLTF

SEQ ID NO: 276730 - protein, 13 aa, Homo sapiens
  CDR3 for beta chain variable domain of TCR clone 138365 (TRBV11-3, TRBJ1-1)
CASSSNRDTEAFF

SEQ ID NO: 276731 - protein, 12 aa, Homo sapiens
  CDR3 for alpha chain variable domain of TCR clone 138366 (TRAV2, TRAJ31)
CAVEDNNARLMF

SEQ ID NO: 276732 - protein, 12 aa, Homo sapiens
  CDR3 for beta chain variable domain of TCR clone 138366 (TRBV28, TRBJ2-3)
CASSLYRDAQYF

SEQ ID NO: 276733 - protein, 14 aa, Homo sapiens
  CDR3 for alpha chain variable domain of TCR clone 138367 (TRAV26-1, TRAJ48)
CTVRTNFGNEKLTF

SEQ ID NO: 276734 - protein, 12 aa, Homo sapiens
  CDR3 for beta chain variable domain of TCR clone 138367 (TRBV14, TRBJ2-5)
CASSHLKETQYF

SEQ ID NO: 276735 - protein, 12 aa, Homo sapiens
  CDR3 for alpha chain variable domain of TCR clone 138368 (TRAV10, TRAJ43)
CVVVRVGNDVRC

SEQ ID NO: 276736 - protein, 15 aa, Homo sapiens
  CDR3 for beta chain variable domain of TCR clone 138368 (TRBV2, TRBJ2-7)
CASSEGLARSYEQYF

SEQ ID NO: 276737 - protein, 14 aa, Homo sapiens
  CDR3 for alpha chain variable domain of TCR clone 138369 (TRAV1-2, TRAJ8)
CAVREDTGFEKLVF

SEQ ID NO: 276738 - protein, 14 aa, Homo sapiens
  CDR3 for beta chain variable domain of TCR clone 138369 (TRBV7-8, TRBJ2-3)
CASSFPDGQDTQYF

SEQ ID NO: 276739 - protein, 21 aa, Homo sapiens
  CDR3 for alpha chain variable domain of TCR clone 138370 (TRAV12-1, TRAJ37)
CVVNGGLWQHRQTNLWARDNF

SEQ ID NO: 276740 - protein, 16 aa, Homo sapiens
  CDR3 for beta chain variable domain of TCR clone 138370 (TRBV7-2, TRBJ1-6)
CASSLAPGNLNSPLHF

SEQ ID NO: 276741 - protein, 13 aa, Homo sapiens
  CDR3 for alpha chain variable domain of TCR clone 138371 (TRAV36/DV7, TRAJ37)
CAVFSSNTGKLIF

SEQ ID NO: 276742 - protein, 16 aa, Homo sapiens
  CDR3 for beta chain variable domain of TCR clone 138371 (TRBV7-9, TRBJ1-4)
CASSNRYSGTNEKLFF

SEQ ID NO: 276743 - protein, 14 aa, Homo sapiens
  CDR3 for alpha chain variable domain of TCR clone 138372 (TRAV12-3, TRAJ10)
SHLPLTGGGNKLTF

SEQ ID NO: 276744 - protein, 15 aa, Homo sapiens
  CDR3 for beta chain variable domain of TCR clone 138372 (TRBV11-3, TRBJ2-3)
CAGLKDGREGDTQYF

SEQ ID NO: 276745 - protein, 16 aa, Homo sapiens
  CDR3 for alpha chain variable domain of TCR clone 138373 (TRAV30, TRAJ24)
CGTEIVDADSWGKFRF

SEQ ID NO: 276746 - protein, 17 aa, Homo sapiens
  CDR3 for beta chain variable domain of TCR clone 138373 (TRBV20-1, TRBJ2-2)
CSASGSGQGGLTGELFF

SEQ ID NO: 276747 - protein, 16 aa, Homo sapiens
  CDR3 for alpha chain variable domain of TCR clone 138374 (TRAV3, TRAJ10)
CAVRDMRAGGGNKLTF

SEQ ID NO: 276748 - protein, 14 aa, Homo sapiens
  CDR3 for beta chain variable domain of TCR clone 138374 (TRBV7-2, TRBJ1-1)
CANSFLTWTTEAFF

SEQ ID NO: 276749 - protein, 13 aa, Homo sapiens
  CDR3 for alpha chain variable domain of TCR clone 138375 (TRAV8-6, TRAJ16)
CAVSRWVGQKLIF

SEQ ID NO: 276750 - protein, 15 aa, Homo sapiens
  CDR3 for beta chain variable domain of TCR clone 138375 (TRBV12-4, TRBJ2-1)
CASSLSTGVSNEQFF

SEQ ID NO: 276751 - protein, 16 aa, Homo sapiens
  CDR3 for alpha chain variable domain of TCR clone 138376 (TRAV26-1, TRAJ53)
CIVRVAMGGSNYKLTF

SEQ ID NO: 276752 - protein, 13 aa, Homo sapiens
  CDR3 for beta chain variable domain of TCR clone 138376 (TRBV7-2, TRBJ2-2)
CASSLAVTGELFF

SEQ ID NO: 276753 - protein, 16 aa, Homo sapiens
  CDR3 for alpha chain variable domain of TCR clone 138377 (TRAV3, TRAJ42)
CAVRDIEGGSQGNLIF

SEQ ID NO: 276754 - protein, 14 aa, Homo sapiens
  CDR3 for beta chain variable domain of TCR clone 138377 (TRBV18, TRBJ1-1)
CASSPPTGRTEDFF

SEQ ID NO: 276755 - protein, 14 aa, Homo sapiens
  CDR3 for alpha chain variable domain of TCR clone 138378 (TRAV12-2, TRAJ17)
CAVLFKAAGNKLTF

SEQ ID NO: 276756 - protein, 12 aa, Homo sapiens
  CDR3 for beta chain variable domain of TCR clone 138378 (TRBV20-1, TRBJ2-7)
CSARDEVHEQYF

SEQ ID NO: 276757 - protein, 14 aa, Homo sapiens
  CDR3 for alpha chain variable domain of TCR clone 138379 (TRAV8-3, TRAJ30)
CAVGDMNRDDKISF

SEQ ID NO: 276758 - protein, 17 aa, Homo sapiens
  CDR3 for beta chain variable domain of TCR clone 138379 (TRBV19, TRBJ2-2)
CASSRNPGGFGTGELFF

SEQ ID NO: 276759 - protein, 13 aa, Homo sapiens
  CDR3 for alpha chain variable domain of TCR clone 138380 (TRAV17, TRAJ5)
CATGDTGRRALTF

SEQ ID NO: 276760 - protein, 19 aa, Homo sapiens
  CDR3 for beta chain variable domain of TCR clone 138380 (TRBV19, TRBJ2-2)
CASTRPGLAGGRVTGELFF

SEQ ID NO: 276761 - protein, 15 aa, Homo sapiens
  CDR3 for alpha chain variable domain of TCR clone 138381 (TRAV27, TRAJ38)
CAAHRNAGNNRKLIW

SEQ ID NO: 276762 - protein, 15 aa, Homo sapiens
  CDR3 for beta chain variable domain of TCR clone 138381 (TRBV5-1, TRBJ2-1)
CASSPPRAPYNEQFF

SEQ ID NO: 276763 - protein, 10 aa, Homo sapiens
  CDR3 for alpha chain variable domain of TCR clone 138382 (TRAV12-2, TRAJ48)
CAVTSEKLNF

SEQ ID NO: 276764 - protein, 17 aa, Homo sapiens
  CDR3 for beta chain variable domain of TCR clone 138382 (TRBV11-1, TRBJ2-7)
CASSLTGSFGLDYEQYF

SEQ ID NO: 276765 - protein, 13 aa, Homo sapiens
  CDR3 for alpha chain variable domain of TCR clone 138383 (TRAV13-1, TRAJ21)
CAASIYNFNKFYF

SEQ ID NO: 276766 - protein, 13 aa, Homo sapiens
  CDR3 for beta chain variable domain of TCR clone 138383 (TRBV27, TRBJ1-4)
CASILMGDEKLFF

SEQ ID NO: 276767 - protein, 13 aa, Homo sapiens
  CDR3 for alpha chain variable domain of TCR clone 138384 (TRAV3, TRAJ15)
CAVRDQAGTALIF

SEQ ID NO: 276768 - protein, 18 aa, Homo sapiens
  CDR3 for beta chain variable domain of TCR clone 138384 (TRBV23-1, TRBJ2-5)
PAPAVPERVLLIQETQYF

SEQ ID NO: 276769 - protein, 13 aa, Homo sapiens
  CDR3 for alpha chain variable domain of TCR clone 138385 (TRAV3, TRAJ31)
CAVREGNNARLMF

SEQ ID NO: 276770 - protein, 11 aa, Homo sapiens
  CDR3 for beta chain variable domain of TCR clone 138385 (TRBV12-4, TRBJ2-3)
CASTATDTRYF

SEQ ID NO: 276771 - protein, 18 aa, Homo sapiens
  CDR3 for alpha chain variable domain of TCR clone 138386 (TRAV9-2, TRAJ52)
SALSRHNAGGTSYGKLTF

SEQ ID NO: 276772 - protein, 13 aa, Homo sapiens
  CDR3 for beta chain variable domain of TCR clone 138386 (TRBV7-9, TRBJ1-2)
CASSLKQNYGYTF

SEQ ID NO: 276773 - protein, 15 aa, Homo sapiens
  CDR3 for alpha chain variable domain of TCR clone 138387 (TRAV8-6, TRAJ10)
CAVSDQAGGGNKLTF

SEQ ID NO: 276774 - protein, 14 aa, Homo sapiens
  CDR3 for beta chain variable domain of TCR clone 138387 (TRBV13, TRBJ2-1)
CASSAGQGAYEQFF

SEQ ID NO: 276775 - protein, 16 aa, Homo sapiens
  CDR3 for alpha chain variable domain of TCR clone 138388 (TRAV12-2, TRAJ43)
CAGDDMRVGAGTRLTV

SEQ ID NO: 276776 - protein, 16 aa, Homo sapiens
  CDR3 for beta chain variable domain of TCR clone 138388 (TRBV2, TRBJ2-4)
CASSEAPGGEQNIQYF

SEQ ID NO: 276777 - protein, 11 aa, Homo sapiens
  CDR3 for alpha chain variable domain of TCR clone 138389 (TRAV5, TRAJ3)
CGGSSASKIIF

SEQ ID NO: 276778 - protein, 17 aa, Homo sapiens
  CDR3 for beta chain variable domain of TCR clone 138389 (TRBV20-1, TRBJ2-1)
CSASSSGLAGSYNEQFF

SEQ ID NO: 276779 - protein, 14 aa, Homo sapiens
  CDR3 for alpha chain variable domain of TCR clone 138390 (TRAV26-1, TRAJ38)
CIADNAGNNRKRLW

SEQ ID NO: 276780 - protein, 13 aa, Homo sapiens
  CDR3 for beta chain variable domain of TCR clone 138390 (TRBV20-1, TRBJ1-1)
CSARGGGNTEAFF

SEQ ID NO: 276781 - protein, 16 aa, Homo sapiens
  CDR3 for alpha chain variable domain of TCR clone 138391 (TRAV26-1, TRAJ23)
CIVRVYPYNQGGKLIF

SEQ ID NO: 276782 - protein, 15 aa, Homo sapiens
  CDR3 for beta chain variable domain of TCR clone 138391 (TRBV5-7, TRBJ2-7)
CASSPYVEGSYEQYF

SEQ ID NO: 276783 - protein, 13 aa, Homo sapiens
  CDR3 for alpha chain variable domain of TCR clone 138392 (TRAV12-1, TRAJ12)
CVVNIESSYKLIF

SEQ ID NO: 276784 - protein, 15 aa, Homo sapiens
  CDR3 for beta chain variable domain of TCR clone 138392 (TRBV2, TRBJ2-5)
CASSSSIAGGETQYF

SEQ ID NO: 276785 - protein, 13 aa, Homo sapiens
  CDR3 for alpha chain variable domain of TCR clone 138393 (TRAV20, TRAJ37)
CAGCSSNTGKLIF

SEQ ID NO: 276786 - protein, 10 aa, Homo sapiens
  CDR3 for beta chain variable domain of TCR clone 138393 (TRBV4-2, TRBJ2-3)
CASNTRYAVF

SEQ ID NO: 276787 - protein, 13 aa, Homo sapiens
  CDR3 for alpha chain variable domain of TCR clone 138394 (TRAV17, TRAJ26)
CATVDNYGQNFVF

SEQ ID NO: 276788 - protein, 16 aa, Homo sapiens
  CDR3 for beta chain variable domain of TCR clone 138394 (TRBV2, TRBJ2-1)
CASSVGGCLSYNEQFF

SEQ ID NO: 276789 - protein, 15 aa, Homo sapiens
  CDR3 for alpha chain variable domain of TCR clone 138395 (TRAV41, TRAJ45)
CAASYSGGGADGLTF

SEQ ID NO: 276790 - protein, 16 aa, Homo sapiens
  CDR3 for beta chain variable domain of TCR clone 138395 (TRBV13, TRBJ2-2)
CASSPRTGEHTGELFF

SEQ ID NO: 276791 - protein, 16 aa, Homo sapiens
  CDR3 for alpha chain variable domain of TCR clone 138396 (TRAV23/DV6, TRAJ9)
CAASIGGNTGGFKTVF

SEQ ID NO: 276792 - protein, 13 aa, Homo sapiens
  CDR3 for beta chain variable domain of TCR clone 138396 (TRBV7-3, TRBJ1-1)
CASSQDWGAEAFF

SEQ ID NO: 276793 - protein, 15 aa, Homo sapiens
  CDR3 for alpha chain variable domain of TCR clone 138397 (TRAV8-3, TRAJ40)
CAAPSLGSGTYKYIF

SEQ ID NO: 276794 - protein, 16 aa, Homo sapiens
  CDR3 for beta chain variable domain of TCR clone 138397 (TRBV7-3, TRBJ2-3)
CASSLSVYRPEDTQYF

SEQ ID NO: 276795 - protein, 13 aa, Homo sapiens
  CDR3 for alpha chain variable domain of TCR clone 138398 (TRAV13-1, TRAJ43)
CAASMNNNNDMRF

SEQ ID NO: 276796 - protein, 17 aa, Homo sapiens
  CDR3 for beta chain variable domain of TCR clone 138398 (TRBV11-2, TRBJ2-1)
CASSLYPPGVEYNEQFF

SEQ ID NO: 276797 - protein, 14 aa, Homo sapiens
  CDR3 for alpha chain variable domain of TCR clone 138399 (TRAV4, TRAJ17)
CLVGDMSAGNKLTF

SEQ ID NO: 276798 - protein, 14 aa, Homo sapiens
  CDR3 for beta chain variable domain of TCR clone 138399 (TRBV4-1, TRBJ2-7)
CASSPVAGGDEQYF

SEQ ID NO: 276799 - protein, 16 aa, Homo sapiens
  CDR3 for alpha chain variable domain of TCR clone 138400 (TRAV12-1, TRAJ22)
CVVNTISSGSARQLTF

SEQ ID NO: 276800 - protein, 13 aa, Homo sapiens
  CDR3 for beta chain variable domain of TCR clone 138400 (TRBV19, TRBJ2-1)
CASNGGVFSDQFF

SEQ ID NO: 276801 - protein, 10 aa, Homo sapiens
  CDR3 for alpha chain variable domain of TCR clone 138401 (TRAV29/DV5, TRAJ52)
CAAGFRGAVV

SEQ ID NO: 276802 - protein, 16 aa, Homo sapiens
  CDR3 for beta chain variable domain of TCR clone 138401 (TRBV7-3, TRBJ2-2)
CASSLKRGTLSGELFF

SEQ ID NO: 276803 - protein, 13 aa, Homo sapiens
  CDR3 for alpha chain variable domain of TCR clone 138402 (TRAV3, TRAJ15)
CAVRDQAGTALIF

SEQ ID NO: 276804 - protein, 13 aa, Homo sapiens
  CDR3 for beta chain variable domain of TCR clone 138402 (TRBV15, TRBJ1-6)
CATSGGLNSPLHF

SEQ ID NO: 276805 - protein, 14 aa, Homo sapiens
  CDR3 for alpha chain variable domain of TCR clone 138403 (TRAV8-4, TRAJ13)
CAVTLSGGYQKVTF

SEQ ID NO: 276806 - protein, 16 aa, Homo sapiens
  CDR3 for beta chain variable domain of TCR clone 138403 (TRBV19, TRBJ2-1)
CASSKAGPNSYNEQFF

SEQ ID NO: 276807 - protein, 14 aa, Homo sapiens
  CDR3 for alpha chain variable domain of TCR clone 138404 (TRAV12-2, TRAJ17)
CAVLFKAAGNKLTF

SEQ ID NO: 276808 - protein, 16 aa, Homo sapiens
  CDR3 for beta chain variable domain of TCR clone 138404 (TRBV6-6, TRBJ2-3)
CASSLRLAGEGDTQYF

SEQ ID NO: 276809 - protein, 10 aa, Homo sapiens
  CDR3 for alpha chain variable domain of TCR clone 138405 (TRAV26-1, TRAJ40)
CIAGTYKYIF

SEQ ID NO: 276810 - protein, 15 aa, Homo sapiens
  CDR3 for beta chain variable domain of TCR clone 138405 (TRBV19, TRBJ2-1)
CASSSPGVPLDEQFG

SEQ ID NO: 276811 - protein, 14 aa, Homo sapiens
  CDR3 for alpha chain variable domain of TCR clone 138406 (TRAV17, TRAJ57)
CATDPQGGSEKLVF

SEQ ID NO: 276812 - protein, 13 aa, Homo sapiens
  CDR3 for beta chain variable domain of TCR clone 138406 (TRBV20-1, TRBJ1-1)
CSAPLGGGTEAFF

SEQ ID NO: 276813 - protein, 13 aa, Homo sapiens
  CDR3 for alpha chain variable domain of TCR clone 138407 (TRAV12-3, TRAJ13)
CAMTSGGYQKVTF

SEQ ID NO: 276814 - protein, 14 aa, Homo sapiens
  CDR3 for beta chain variable domain of TCR clone 138407 (TRBV11-2, TRBJ1-5)
CASSLDRGRQPQHF

SEQ ID NO: 276815 - protein, 12 aa, Homo sapiens
  CDR3 for alpha chain variable domain of TCR clone 138408 (TRAV17, TRAJ20)
CATDGDDNKLSF

SEQ ID NO: 276816 - protein, 12 aa, Homo sapiens
  CDR3 for beta chain variable domain of TCR clone 138408 (TRBV7-8, TRBJ2-7)
CASSLGDREQYF

SEQ ID NO: 276817 - protein, 14 aa, Homo sapiens
  CDR3 for alpha chain variable domain of TCR clone 138409 (TRAV1-2, TRAJ8)
CAVREDTGFKKLVF

SEQ ID NO: 276818 - protein, 13 aa, Homo sapiens
  CDR3 for beta chain variable domain of TCR clone 138409 (TRBV12-5, TRBJ2-3)
CASGDRQSDTQYF

SEQ ID NO: 276819 - protein, 14 aa, Homo sapiens
  CDR3 for alpha chain variable domain of TCR clone 138410 (TRAV12-3, TRAJ10)
SHLPLTGGGNKLTF

SEQ ID NO: 276820 - protein, 14 aa, Homo sapiens
  CDR3 for beta chain variable domain of TCR clone 138410 (TRBV6-1, TRBJ1-3)
CASVHGGGGNTMYF

SEQ ID NO: 276821 - protein, 15 aa, Homo sapiens
  CDR3 for alpha chain variable domain of TCR clone 138411 (TRAV3, TRAJ30)
CAVRDRVERGDNIIL

SEQ ID NO: 276822 - protein, 13 aa, Homo sapiens
  CDR3 for beta chain variable domain of TCR clone 138411 (TRBV29-1, TRBJ2-5)
CSACSSRRETQYF

SEQ ID NO: 276823 - protein, 12 aa, Homo sapiens
  CDR3 for alpha chain variable domain of TCR clone 138412 (TRAV2, TRAJ24)
CAATDSWGKFQF

SEQ ID NO: 276824 - protein, 18 aa, Homo sapiens
  CDR3 for beta chain variable domain of TCR clone 138412 (TRBV11-2, TRBJ2-3)
CASSLGGASRGAPNTQYF

SEQ ID NO: 276825 - protein, 14 aa, Homo sapiens
  CDR3 for alpha chain variable domain of TCR clone 138413 (TRAV20, TRAJ29)
CAVQAWVGNTPLVF

SEQ ID NO: 276826 - protein, 14 aa, Homo sapiens
  CDR3 for beta chain variable domain of TCR clone 138413 (TRBV7-2, TRBJ1-1)
CASSFLTGTTEAFF

SEQ ID NO: 276827 - protein, 14 aa, Homo sapiens
  CDR3 for alpha chain variable domain of TCR clone 138414 (TRAV13-1, TRAJ39)
CAASEGNAGNMLTF

SEQ ID NO: 276828 - protein, 16 aa, Homo sapiens
  CDR3 for beta chain variable domain of TCR clone 138414 (TRBV19, TRBJ2-1)
CASDLGRLSSYNEQFF

SEQ ID NO: 276829 - protein, 15 aa, Homo sapiens
  CDR3 for alpha chain variable domain of TCR clone 138415 (TRAV4, TRAJ39)
CLVGPNNNAGNMLTF

SEQ ID NO: 276830 - protein, 15 aa, Homo sapiens
  CDR3 for beta chain variable domain of TCR clone 138415 (TRBV20-1, TRBJ2-7)
GSARDRVSGMDEQYF

SEQ ID NO: 276831 - protein, 16 aa, Homo sapiens
  CDR3 for alpha chain variable domain of TCR clone 138416 (TRAV30, TRAJ24)
CGTEIVDANSWGKFQF

SEQ ID NO: 276832 - protein, 13 aa, Homo sapiens
  CDR3 for beta chain variable domain of TCR clone 138416 (TRBV28, TRBJ2-7)
CASTPGLAGEQYF

SEQ ID NO: 276833 - protein, 11 aa, Homo sapiens
  CDR3 for alpha chain variable domain of TCR clone 138417 (TRAV13-1, TRAJ5)
CAPKGRRALTF

SEQ ID NO: 276834 - protein, 15 aa, Homo sapiens
  CDR3 for beta chain variable domain of TCR clone 138417 (TRBV7-9, TRBJ1-4)
CASSRTGGFNEKLFF

SEQ ID NO: 276835 - protein, 12 aa, Homo sapiens
  CDR3 for alpha chain variable domain of TCR clone 138418 (TRAV21, TRAJ11)
CAVRGGKSTLTF

SEQ ID NO: 276836 - protein, 15 aa, Homo sapiens
  CDR3 for beta chain variable domain of TCR clone 138418 (TRBV6-1, TRBJ2-7)
CASSEPIAATTEQYF

SEQ ID NO: 276837 - protein, 15 aa, Homo sapiens
  CDR3 for alpha chain variable domain of TCR clone 138419 (TRAV21, TRAJ53)
CAVRQSGGSNYKLTF

SEQ ID NO: 276838 - protein, 15 aa, Homo sapiens
  CDR3 for beta chain variable domain of TCR clone 138419 (TRBV27, TRBJ1-4)
CASSAQQDLNEKLFF

SEQ ID NO: 276839 - protein, 13 aa, Homo sapiens
  CDR3 for alpha chain variable domain of TCR clone 138420 (TRAV3, TRAJ21)
CAVREPDFNKFYF

SEQ ID NO: 276840 - protein, 16 aa, Homo sapiens
  CDR3 for beta chain variable domain of TCR clone 138420 (TRBV19, TRBJ2-3)
CASSPGAASRTDTQYF

SEQ ID NO: 276841 - protein, 13 aa, Homo sapiens
  CDR3 for alpha chain variable domain of TCR clone 138421 (TRAV23/DV6, TRAJ43)
CAASMGGNNDMRF

SEQ ID NO: 276842 - protein, 13 aa, Homo sapiens
  CDR3 for beta chain variable domain of TCR clone 138421 (TRBV7-3, TRBJ1-1)
CASSQDWGAEAFF

SEQ ID NO: 276843 - protein, 15 aa, Homo sapiens
  CDR3 for alpha chain variable domain of TCR clone 138422 (TRAV13-1, TRAJ36)
CAASTRQTGANNLFF

SEQ ID NO: 276844 - protein, 14 aa, Homo sapiens
  CDR3 for beta chain variable domain of TCR clone 138422 (TRBV6-1, TRBJ1-3)
CASVQGGGGNTIYF

SEQ ID NO: 276845 - protein, 14 aa, Homo sapiens
  CDR3 for alpha chain variable domain of TCR clone 138423 (TRAV12-3, TRAJ42)
CAMNYGGSQGNLIF

SEQ ID NO: 276846 - protein, 13 aa, Homo sapiens
  CDR3 for beta chain variable domain of TCR clone 138423 (TRBV7-2, TRBJ1-4)
CASSLAGLEKLFF

SEQ ID NO: 276847 - protein, 21 aa, Homo sapiens
  CDR3 for alpha chain variable domain of TCR clone 138424 (TRAV1-1, TRAJ6)
CLLLLRCERLERTGGSYIPTF

SEQ ID NO: 276848 - protein, 11 aa, Homo sapiens
  CDR3 for beta chain variable domain of TCR clone 138424 (TRBV29-1, TRBJ2-5)
CSEDRTGTQYF

SEQ ID NO: 276849 - protein, 14 aa, Homo sapiens
  CDR3 for alpha chain variable domain of TCR clone 138425 (TRAV8-4, TRAJ16)
CAVSPVGRWPAAAL

SEQ ID NO: 276850 - protein, 15 aa, Homo sapiens
  CDR3 for beta chain variable domain of TCR clone 138425 (TRBV11-3, TRBJ2-7)
CASSPGPASSYEQYF

SEQ ID NO: 276851 - protein, 16 aa, Homo sapiens
  CDR3 for alpha chain variable domain of TCR clone 138426 (TRAV3, TRAJ10)
CALRDMRAGGGNKLTF

SEQ ID NO: 276852 - protein, 16 aa, Homo sapiens
  CDR3 for beta chain variable domain of TCR clone 138426 (TRBV12-5, TRBJ2-5)
CASGPRTSGNQETQYF

SEQ ID NO: 276853 - protein, 13 aa, Homo sapiens
  CDR3 for alpha chain variable domain of TCR clone 138427 (TRAV8-3, TRAJ44)
CAVVPGTASKFTF

SEQ ID NO: 276854 - protein, 14 aa, Homo sapiens
  CDR3 for beta chain variable domain of TCR clone 138427 (TRBV11-2, TRBJ2-3)
CASRRLARTDTQYF

SEQ ID NO: 276855 - protein, 10 aa, Homo sapiens
  CDR3 for alpha chain variable domain of TCR clone 138428 (TRAV16, TRAJ22)
SAMYLRQLTF

SEQ ID NO: 276856 - protein, 14 aa, Homo sapiens
  CDR3 for beta chain variable domain of TCR clone 138428 (TRBV7-3, TRBJ2-2)
CASSSGGYTGELFF

SEQ ID NO: 276857 - protein, 13 aa, Homo sapiens
  CDR3 for alpha chain variable domain of TCR clone 138429 (TRAV12-3, TRAJ33)
CAMSVNSNYQLIW

SEQ ID NO: 276858 - protein, 16 aa, Homo sapiens
  CDR3 for beta chain variable domain of TCR clone 138429 (TRBV13, TRBJ2-5)
CASSLRTGGSWETHYF

SEQ ID NO: 276859 - protein, 17 aa, Homo sapiens
  CDR3 for alpha chain variable domain of TCR clone 138430 (TRAV23/DV6, TRAJ57)
CAASSTLSQGGSEKLVF

SEQ ID NO: 276860 - protein, 15 aa, Homo sapiens
  CDR3 for beta chain variable domain of TCR clone 138430 (TRBV11-2, TRBJ2-1)
CASSLGTRGLNEQFF

SEQ ID NO: 276861 - protein, 16 aa, Homo sapiens
  CDR3 for alpha chain variable domain of TCR clone 138431 (TRAV30, TRAJ24)
CGTEIVDADSWGKFQF

SEQ ID NO: 276862 - protein, 17 aa, Homo sapiens
  CDR3 for beta chain variable domain of TCR clone 138431 (TRBV4-2, TRBJ1-1)
CASTQCGGGSGNTEAFF

SEQ ID NO: 276863 - protein, 12 aa, Homo sapiens
  CDR3 for alpha chain variable domain of TCR clone 138432 (TRAV13-1, TRAJ21)
CAAKEGFNNFYF

SEQ ID NO: 276864 - protein, 15 aa, Homo sapiens
  CDR3 for beta chain variable domain of TCR clone 138432 (TRBV15, TRBJ1-5)
CATSRDPVSNQPQHV

SEQ ID NO: 276865 - protein, 12 aa, Homo sapiens
  CDR3 for alpha chain variable domain of TCR clone 138433 (TRAV12-2, TRAJ10)
WGVTGGGNKLTF

SEQ ID NO: 276866 - protein, 13 aa, Homo sapiens
  CDR3 for beta chain variable domain of TCR clone 138433 (TRBV4-3, TRBJ2-1)
CASSQKLERQQFF

SEQ ID NO: 276867 - protein, 13 aa, Homo sapiens
  CDR3 for alpha chain variable domain of TCR clone 138434 (TRAV12-1, TRAJ39)
CVARSGAGNMLTF

SEQ ID NO: 276868 - protein, 12 aa, Homo sapiens
  CDR3 for beta chain variable domain of TCR clone 138434 (TRBV11-2, TRBJ2-5)
CASSLGQETQYF

SEQ ID NO: 276869 - protein, 12 aa, Homo sapiens
  CDR3 for alpha chain variable domain of TCR clone 138435 (TRAV2, TRAJ24)
CAATDSWGKFQF

SEQ ID NO: 276870 - protein, 14 aa, Homo sapiens
  CDR3 for beta chain variable domain of TCR clone 138435 (TRBV11-2, TRBJ2-7)
CASSLGAGAYEQYF

SEQ ID NO: 276871 - protein, 14 aa, Homo sapiens
  CDR3 for alpha chain variable domain of TCR clone 138436 (TRAV23/DV6, TRAJ4)
CAANISGGYNKLIF

SEQ ID NO: 276872 - protein, 14 aa, Homo sapiens
  CDR3 for beta chain variable domain of TCR clone 138436 (TRBV7-3, TRBJ2-1)
CASSLAGGTNEQFF

SEQ ID NO: 276873 - protein, 14 aa, Homo sapiens
  CDR3 for alpha chain variable domain of TCR clone 138437 (TRAV8-4, TRAJ54)
CAVSEVLGAQKLVF

SEQ ID NO: 276874 - protein, 16 aa, Homo sapiens
  CDR3 for beta chain variable domain of TCR clone 138437 (TRBV7-2, TRBJ2-5)
CASSPFPTGGEETQYF

SEQ ID NO: 276875 - protein, 18 aa, Homo sapiens
  CDR3 for alpha chain variable domain of TCR clone 138438 (TRAV21, TRAJ52)
CAVRPSPAGGTGYGKLTF

SEQ ID NO: 276876 - protein, 13 aa, Homo sapiens
  CDR3 for beta chain variable domain of TCR clone 138438 (TRBV20-1, TRBJ1-1)
CSARVGGNTEAFF

SEQ ID NO: 276877 - protein, 17 aa, Homo sapiens
  CDR3 for alpha chain variable domain of TCR clone 138439 (TRAV3, TRAJ42)
CAVRDRDYGGSQGNLIF

SEQ ID NO: 276878 - protein, 16 aa, Homo sapiens
  CDR3 for beta chain variable domain of TCR clone 138439 (TRBV5-5, TRBJ2-7)
CASSVRTSGRPYEQYC

SEQ ID NO: 276879 - protein, 14 aa, Homo sapiens
  CDR3 for alpha chain variable domain of TCR clone 138440 (TRAV13-1, TRAJ3)
CAASKSSSASKIIF

SEQ ID NO: 276880 - protein, 13 aa, Homo sapiens
  CDR3 for beta chain variable domain of TCR clone 138440 (TRBV5-5, TRBJ1-2)
CASSFWRGEDYTF

SEQ ID NO: 276881 - protein, 14 aa, Homo sapiens
  CDR3 for alpha chain variable domain of TCR clone 138441 (TRAV12-3, TRAJ37)
CVSEGSSNTGKQIF

SEQ ID NO: 276882 - protein, 14 aa, Homo sapiens
  CDR3 for beta chain variable domain of TCR clone 138441 (TRBV20-1, TRBJ1-1)
CSAQTRIGGTEAFF

SEQ ID NO: 276883 - protein, 14 aa, Homo sapiens
  CDR3 for alpha chain variable domain of TCR clone 138442 (TRAV12-2, TRAJ13)
CAVKKTGGYQKVNF

SEQ ID NO: 276884 - protein, 13 aa, Homo sapiens
  CDR3 for beta chain variable domain of TCR clone 138442 (TRBV20-1, TRBJ1-1)
CSARLGQGTEAFF

SEQ ID NO: 276885 - protein, 15 aa, Homo sapiens
  CDR3 for alpha chain variable domain of TCR clone 138443 (TRAV1-2, TRAJ30)
CAVRPHGNRDDKIIF

SEQ ID NO: 276886 - protein, 13 aa, Homo sapiens
  CDR3 for beta chain variable domain of TCR clone 138443 (TRBV20-1, TRBJ2-5)
CSAREAFQETQYF

SEQ ID NO: 276887 - protein, 14 aa, Homo sapiens
  CDR3 for alpha chain variable domain of TCR clone 138444 (TRAV12-3, TRAJ12)
CAMSEVDSSYKLIF

SEQ ID NO: 276888 - protein, 12 aa, Homo sapiens
  CDR3 for beta chain variable domain of TCR clone 138444 (TRBV18, TRBJ1-4)
CASSPSRAKLFF

SEQ ID NO: 276889 - protein, 15 aa, Homo sapiens
  CDR3 for alpha chain variable domain of TCR clone 138445 (TRAV8-4, TRAJ12)
CAVSDRVDSSYKLIF

SEQ ID NO: 276890 - protein, 15 aa, Homo sapiens
  CDR3 for beta chain variable domain of TCR clone 138445 (TRBV11-3, TRBJ2-1)
CDSSLAGQTYNEQFF

SEQ ID NO: 276891 - protein, 12 aa, Homo sapiens
  CDR3 for alpha chain variable domain of TCR clone 138446 (TRAV12-2, TRAJ43)
FAVNVNNNDMRF

SEQ ID NO: 276892 - protein, 14 aa, Homo sapiens
  CDR3 for beta chain variable domain of TCR clone 138446 (TRBV12-5, TRBJ2-5)
CASGSRTHQETQYF

SEQ ID NO: 276893 - protein, 14 aa, Homo sapiens
  CDR3 for alpha chain variable domain of TCR clone 138447 (TRAV12-2, TRAJ13)
GAVKKTGGYQKVTF

SEQ ID NO: 276894 - protein, 14 aa, Homo sapiens
  CDR3 for beta chain variable domain of TCR clone 138447 (TRBV5-1, TRBJ2-7)
CASSRGESLYEQYF

SEQ ID NO: 276895 - protein, 13 aa, Homo sapiens
  CDR3 for alpha chain variable domain of TCR clone 138448 (TRAV17, TRAJ22)
CAHHSGSSRQLTF

SEQ ID NO: 276896 - protein, 13 aa, Homo sapiens
  CDR3 for beta chain variable domain of TCR clone 138448 (TRBV19, TRBJ1-2)
CASSVPGQDGYTF

SEQ ID NO: 276897 - protein, 14 aa, Homo sapiens
  CDR3 for alpha chain variable domain of TCR clone 138449 (TRAV12-1, TRAJ30)
CVVNIGNRDDKIIV

SEQ ID NO: 276898 - protein, 14 aa, Homo sapiens
  CDR3 for beta chain variable domain of TCR clone 138449 (TRBV7-9, TRBJ2-5)
CASSPRPSGETQYF

SEQ ID NO: 276899 - protein, 10 aa, Homo sapiens
  CDR3 for alpha chain variable domain of TCR clone 138450 (TRAV8-4, TRAJ43)
CAVCADDMRF

SEQ ID NO: 276900 - protein, 15 aa, Homo sapiens
  CDR3 for beta chain variable domain of TCR clone 138450 (TRBV5-1, TRBJ2-3)
CASSVTSGSTDTQYF

SEQ ID NO: 276901 - protein, 17 aa, Homo sapiens
  CDR3 for alpha chain variable domain of TCR clone 138451 (TRAV12-3, TRAJ6)
CAMSARGGAGGSYIPTF

SEQ ID NO: 276902 - protein, 14 aa, Homo sapiens
  CDR3 for beta chain variable domain of TCR clone 138451 (TRBV7-2, TRBJ2-7)
CASRSQGAAYEQYF

SEQ ID NO: 276903 - protein, 15 aa, Homo sapiens
  CDR3 for alpha chain variable domain of TCR clone 138452 (TRAV16, TRAJ12)
CSKWPLRDSSYKLIF

SEQ ID NO: 276904 - protein, 14 aa, Homo sapiens
  CDR3 for beta chain variable domain of TCR clone 138452 (TRBV7-2, TRBJ2-7)
CASRSQGAAYEQYF

SEQ ID NO: 276905 - protein, 17 aa, Homo sapiens
  CDR3 for alpha chain variable domain of TCR clone 138453 (TRAV38-1, TRAJ28)
CAFMKPTSGAGCYQLTF

SEQ ID NO: 276906 - protein, 15 aa, Homo sapiens
  CDR3 for beta chain variable domain of TCR clone 138453 (TRBV5-1, TRBJ2-4)
CASSLGGGGSYIQYF

SEQ ID NO: 276907 - protein, 16 aa, Homo sapiens
  CDR3 for alpha chain variable domain of TCR clone 138454 (TRAV30, TRAJ24)
CGTEIVDADSWGKFQF

SEQ ID NO: 276908 - protein, 15 aa, Homo sapiens
  CDR3 for beta chain variable domain of TCR clone 138454 (TRBV20-1, TRBJ2-1)
CSASSAGSSYNEQFF

SEQ ID NO: 276909 - protein, 13 aa, Homo sapiens
  CDR3 for alpha chain variable domain of TCR clone 138455 (TRAV21, TRAJ20)
CAVSRLGEYKLSF

SEQ ID NO: 276910 - protein, 13 aa, Homo sapiens
  CDR3 for beta chain variable domain of TCR clone 138455 (TRBV7-3, TRBJ1-1)
CASSPAGGLEAFF

SEQ ID NO: 276911 - protein, 19 aa, Homo sapiens
  CDR3 for alpha chain variable domain of TCR clone 138456 (TRAV2, TRAJ32)
TTVLSTPPSQGGATNKLIF

SEQ ID NO: 276912 - protein, 12 aa, Homo sapiens
  CDR3 for beta chain variable domain of TCR clone 138456 (TRBV20-1, TRBJ2-7)
CSAITATKEQYF

SEQ ID NO: 276913 - protein, 14 aa, Homo sapiens
  CDR3 for alpha chain variable domain of TCR clone 138457 (TRAV2, TRAJ37)
CAVDFTSNTGKLIF

SEQ ID NO: 276914 - protein, 15 aa, Homo sapiens
  CDR3 for beta chain variable domain of TCR clone 138457 (TRBV28, TRBJ2-5)
CASSPPWSYQETQYF

SEQ ID NO: 276915 - protein, 16 aa, Homo sapiens
  CDR3 for alpha chain variable domain of TCR clone 138458 (TRAV12-1, TRAJ22)
CVVNLFLDRSARQLTF

SEQ ID NO: 276916 - protein, 19 aa, Homo sapiens
  CDR3 for beta chain variable domain of TCR clone 138458 (TRBV7-2, TRBJ2-3)
CASSFLSRNWGGGTDTQYF

SEQ ID NO: 276917 - protein, 15 aa, Homo sapiens
  CDR3 for alpha chain variable domain of TCR clone 138459 (TRAV8-1, TRAJ6)
CAVNTPPGGGYKPTF

SEQ ID NO: 276918 - protein, 15 aa, Homo sapiens
  CDR3 for beta chain variable domain of TCR clone 138459 (TRBV11-2, TRBJ2-2)
CASSSDRVNAGELFF

SEQ ID NO: 276919 - protein, 11 aa, Homo sapiens
  CDR3 for alpha chain variable domain of TCR clone 138460 (TRAV27, TRAJ20)
CAGADDYKLSF

SEQ ID NO: 276920 - protein, 13 aa, Homo sapiens
  CDR3 for beta chain variable domain of TCR clone 138460 (TRBV7-2, TRBJ2-2)
CASSSVRAGELFF

SEQ ID NO: 276921 - protein, 14 aa, Homo sapiens
  CDR3 for alpha chain variable domain of TCR clone 138461 (TRAV12-2, TRAJ13)
CAVKKTGGYQKGTF

SEQ ID NO: 276922 - protein, 15 aa, Homo sapiens
  CDR3 for beta chain variable domain of TCR clone 138461 (TRBV27, TRBJ2-1)
CASSNWGGSSNEQFF

SEQ ID NO: 276923 - protein, 14 aa, Homo sapiens
  CDR3 for alpha chain variable domain of TCR clone 138462 (TRAV9-2, TRAJ39)
CALYIYNAGNMLTF

SEQ ID NO: 276924 - protein, 14 aa, Homo sapiens
  CDR3 for beta chain variable domain of TCR clone 138462 (TRBV13, TRBJ2-5)
CASSLERVGETKYF

SEQ ID NO: 276925 - protein, 11 aa, Homo sapiens
  CDR3 for alpha chain variable domain of TCR clone 138463 (TRAV12-2, TRAJ43)
CASPIGNDMRF

SEQ ID NO: 276926 - protein, 12 aa, Homo sapiens
  CDR3 for beta chain variable domain of TCR clone 138463 (TRBV20-1, TRBJ2-7)
CSAELKMGEQYF

SEQ ID NO: 276927 - protein, 10 aa, Homo sapiens
  CDR3 for alpha chain variable domain of TCR clone 138464 (TRAV1-2, TRAJ20)
CACNDYKLSF

SEQ ID NO: 276928 - protein, 16 aa, Homo sapiens
  CDR3 for beta chain variable domain of TCR clone 138464 (TRBV7-2, TRBJ2-7)
CASSTGTSGHGGEQYF

SEQ ID NO: 276929 - protein, 13 aa, Homo sapiens
  CDR3 for alpha chain variable domain of TCR clone 138465 (TRAV12-2, TRAJ10)
CAVPTGGGDKLTC

SEQ ID NO: 276930 - protein, 14 aa, Homo sapiens
  CDR3 for beta chain variable domain of TCR clone 138465 (TRBV6-1, TRBJ1-3)
CASVQGGGGNTIYF

SEQ ID NO: 276931 - protein, 16 aa, Homo sapiens
  CDR3 for alpha chain variable domain of TCR clone 138466 (TRAV8-2, TRAJ45)
CVVSEGTGGGVDGLTF

SEQ ID NO: 276932 - protein, 15 aa, Homo sapiens
  CDR3 for beta chain variable domain of TCR clone 138466 (TRBV7-9, TRBJ2-5)
CASSLVAGGLETQYV

SEQ ID NO: 276933 - protein, 14 aa, Homo sapiens
  CDR3 for alpha chain variable domain of TCR clone 138467 (TRAV12-2, TRAJ40)
CAVKIPSGNYKYIF

SEQ ID NO: 276934 - protein, 13 aa, Homo sapiens
  CDR3 for beta chain variable domain of TCR clone 138467 (TRBV7-2, TRBJ2-2)
CASSSVRAGELFF

SEQ ID NO: 276935 - protein, 20 aa, Homo sapiens
  CDR3 for alpha chain variable domain of TCR clone 138468 (TRAV8-3, )
CAAGAGDIQNPAPAVYQLRD

SEQ ID NO: 276936 - protein, 14 aa, Homo sapiens
  CDR3 for beta chain variable domain of TCR clone 138468 (TRBV5-1, TRBJ1-5)
CASSLGQGAQPQHF

SEQ ID NO: 276937 - protein, 11 aa, Homo sapiens
  CDR3 for alpha chain variable domain of TCR clone 138469 (TRAV27, TRAJ40)
SLTSGTYKYIF

SEQ ID NO: 276938 - protein, 13 aa, Homo sapiens
  CDR3 for beta chain variable domain of TCR clone 138469 (TRBV2, TRBJ2-5)
CASGTPYQETQCF

SEQ ID NO: 276939 - protein, 14 aa, Homo sapiens
  CDR3 for alpha chain variable domain of TCR clone 138470 (TRAV23/DV6, TRAJ17)
CAASVQAAGNKLPF

SEQ ID NO: 276940 - protein, 18 aa, Homo sapiens
  CDR3 for beta chain variable domain of TCR clone 138470 (TRBV20-1, TRBJ2-7)
CSAGLPPRSGGSPYEQYF

SEQ ID NO: 276941 - protein, 13 aa, Homo sapiens
  CDR3 for alpha chain variable domain of TCR clone 138471 (TRAV12-1, TRAJ29)
CVVVVSGNTPLVF

SEQ ID NO: 276942 - protein, 14 aa, Homo sapiens
  CDR3 for beta chain variable domain of TCR clone 138471 (TRBV28, TRBJ2-7)
CASSLLRISYEQYF

SEQ ID NO: 276943 - protein, 13 aa, Homo sapiens
  CDR3 for alpha chain variable domain of TCR clone 138472 (TRAV27, TRAJ57)
CRSAQGGSEKLVF

SEQ ID NO: 276944 - protein, 11 aa, Homo sapiens
  CDR3 for beta chain variable domain of TCR clone 138472 (TRBV11-2, TRBJ1-1)
CASSINTEAFS

SEQ ID NO: 276945 - protein, 18 aa, Homo sapiens
  CDR3 for alpha chain variable domain of TCR clone 138473 (TRAV13-1, TRAJ37)
CAPPPGPHGSSNTGKLIF

SEQ ID NO: 276946 - protein, 12 aa, Homo sapiens
  CDR3 for beta chain variable domain of TCR clone 138473 (TRBV3-1, TRBJ2-7)
CASSQEAAARHF

SEQ ID NO: 276947 - protein, 10 aa, Homo sapiens
  CDR3 for alpha chain variable domain of TCR clone 138474 (TRAV23/DV6, TRAJ57)
CAASSTLSQG

SEQ ID NO: 276948 - protein, 14 aa, Homo sapiens
  CDR3 for beta chain variable domain of TCR clone 138474 (TRBV2, TRBJ2-7)
CASSLTSGGYEQYF

SEQ ID NO: 276949 - protein, 16 aa, Homo sapiens
  CDR3 for alpha chain variable domain of TCR clone 138475 (TRAV30, TRAJ24)
CGTEIVDADSWGKFQF

SEQ ID NO: 276950 - protein, 14 aa, Homo sapiens
  CDR3 for beta chain variable domain of TCR clone 138475 (TRBV19, TRBJ2-1)
CASSSGRDYNEQFF

SEQ ID NO: 276951 - protein, 13 aa, Homo sapiens
  CDR3 for alpha chain variable domain of TCR clone 138476 (TRAV27, TRAJ41)
CAGEGNSGYALNF

SEQ ID NO: 276952 - protein, 16 aa, Homo sapiens
  CDR3 for beta chain variable domain of TCR clone 138476 (TRBV24-1, TRBJ2-3)
CATSDPGTGATDTQYF

SEQ ID NO: 276953 - protein, 15 aa, Homo sapiens
  CDR3 for alpha chain variable domain of TCR clone 138477 (TRAV10, TRAJ39)
CVVSAPGNAGNMLTF

SEQ ID NO: 276954 - protein, 13 aa, Homo sapiens
  CDR3 for beta chain variable domain of TCR clone 138477 (TRBV18, TRBJ2-7)
CASQSGGGYEQYF

SEQ ID NO: 276955 - protein, 12 aa, Homo sapiens
  CDR3 for alpha chain variable domain of TCR clone 138478 (TRAV35, TRAJ30)
CAGQLADDKIIF

SEQ ID NO: 276956 - protein, 17 aa, Homo sapiens
  CDR3 for beta chain variable domain of TCR clone 138478 (TRBV4-2, TRBJ2-5)
CASSPGGWRNFQETQYF

SEQ ID NO: 276957 - protein, 15 aa, Homo sapiens
  CDR3 for alpha chain variable domain of TCR clone 138479 (TRAV38-2/DV8, TRAJ48)
CAYRSGGFGNEKLTS

SEQ ID NO: 276958 - protein, 16 aa, Homo sapiens
  CDR3 for beta chain variable domain of TCR clone 138479 (TRBV28, TRBJ2-7)
CASSPWVATGDRSQYF

SEQ ID NO: 276959 - protein, 13 aa, Homo sapiens
  CDR3 for alpha chain variable domain of TCR clone 138480 (TRAV27, TRAJ49)
CAPRPYTGNQFYF

SEQ ID NO: 276960 - protein, 18 aa, Homo sapiens
  CDR3 for beta chain variable domain of TCR clone 138480 (TRBV7-3, TRBJ2-5)
CASSLGGAAQGRWVTQYF

SEQ ID NO: 276961 - protein, 17 aa, Homo sapiens
  CDR3 for alpha chain variable domain of TCR clone 138481 (TRAV14/DV4, TRAJ4)
CAMREASGRGGDNKLIV

SEQ ID NO: 276962 - protein, 14 aa, Homo sapiens
  CDR3 for beta chain variable domain of TCR clone 138481 (TRBV19, TRBJ2-7)
CASSMGQGAIEQYF

SEQ ID NO: 276963 - protein, 15 aa, Homo sapiens
  CDR3 for alpha chain variable domain of TCR clone 138482 (TRAV17, TRAJ57)
CATGPSQGGSETLVF

SEQ ID NO: 276964 - protein, 14 aa, Homo sapiens
  CDR3 for beta chain variable domain of TCR clone 138482 (TRBV7-3, TRBJ1-1)
CASSLGTGYTESFF

SEQ ID NO: 276965 - protein, 18 aa, Homo sapiens
  CDR3 for alpha chain variable domain of TCR clone 138483 (TRAV21, TRAJ52)
CAVRPSPAGGTSYGKLTF

SEQ ID NO: 276966 - protein, 17 aa, Homo sapiens
  CDR3 for beta chain variable domain of TCR clone 138483 (TRBV13, TRBJ2-3)
RASSRSRVAGGRNTQYF

SEQ ID NO: 276967 - protein, 14 aa, Homo sapiens
  CDR3 for alpha chain variable domain of TCR clone 138484 (TRAV1-2, TRAJ6)
CAVRSSGGSYIPPF

SEQ ID NO: 276968 - protein, 18 aa, Homo sapiens
  CDR3 for beta chain variable domain of TCR clone 138484 (TRBV20-1, TRBJ2-3)
CSASGLAGGPGTTDTQYF

SEQ ID NO: 276969 - protein, 22 aa, Homo sapiens
  CDR3 for alpha chain variable domain of TCR clone 138485 (TRAV21, )
CAVRQDAGNNHIQNPDPAVYQL

SEQ ID NO: 276970 - protein, 16 aa, Homo sapiens
  CDR3 for beta chain variable domain of TCR clone 138485 (TRBV4-2, TRBJ1-1)
CASRPLDGGGDSEAFF

SEQ ID NO: 276971 - protein, 14 aa, Homo sapiens
  CDR3 for alpha chain variable domain of TCR clone 138486 (TRAV38-2/DV8, TRAJ23)
CAYRKPNQGGKLIF

SEQ ID NO: 276972 - protein, 18 aa, Homo sapiens
  CDR3 for beta chain variable domain of TCR clone 138486 (TRBV7-2, TRBJ2-2)
CASSLASRGAGGPGELFF

SEQ ID NO: 276973 - protein, 14 aa, Homo sapiens
  CDR3 for alpha chain variable domain of TCR clone 138487 (TRAV1-2, TRAJ16)
CAVNRFSDGQKLLF

SEQ ID NO: 276974 - protein, 15 aa, Homo sapiens
  CDR3 for beta chain variable domain of TCR clone 138487 (TRBV9, TRBJ1-6)
CASSVAGTGHSPLHF

SEQ ID NO: 276975 - protein, 14 aa, Homo sapiens
  CDR3 for alpha chain variable domain of TCR clone 138488 (TRAV12-2, TRAJ13)
CAVRKTGGYQKVTF

SEQ ID NO: 276976 - protein, 15 aa, Homo sapiens
  CDR3 for beta chain variable domain of TCR clone 138488 (TRBV27, TRBJ2-1)
CASSNGGVSSNEQFF

SEQ ID NO: 276977 - protein, 22 aa, Homo sapiens
  CDR3 for alpha chain variable domain of TCR clone 138489 (TRAV3, )
CAVRDCLNAVSNHIQNPDPAVY

SEQ ID NO: 276978 - protein, 19 aa, Homo sapiens
  CDR3 for beta chain variable domain of TCR clone 138489 (TRBV7-2, TRBJ2-3)
CASSFLSGNWGGGTDTQYF

SEQ ID NO: 276979 - protein, 17 aa, Homo sapiens
  CDR3 for alpha chain variable domain of TCR clone 138490 (TRAV27, TRAJ18)
CADLHRGRGSTLGRLYF

SEQ ID NO: 276980 - protein, 14 aa, Homo sapiens
  CDR3 for beta chain variable domain of TCR clone 138490 (TRBV20-1, TRBJ1-5)
CSARGRGSNQPQHF

SEQ ID NO: 276981 - protein, 11 aa, Homo sapiens
  CDR3 for alpha chain variable domain of TCR clone 138491 (TRAV1-1, TRAJ23)
CAVRQGGKIIF

SEQ ID NO: 276982 - protein, 20 aa, Homo sapiens
  CDR3 for beta chain variable domain of TCR clone 138491 (TRBV7-8, TRBJ2-2)
CASSHLFPGPTMHITGELFF

SEQ ID NO: 276983 - protein, 12 aa, Homo sapiens
  CDR3 for alpha chain variable domain of TCR clone 138492 (TRAV12-3, TRAJ17)
CAMTLTGNKLTF

SEQ ID NO: 276984 - protein, 15 aa, Homo sapiens
  CDR3 for beta chain variable domain of TCR clone 138492 (TRBV5-1, TRBJ1-1)
CASSWTGRGNTEAFF

SEQ ID NO: 276985 - protein, 16 aa, Homo sapiens
  CDR3 for alpha chain variable domain of TCR clone 138493 (TRAV30, TRAJ24)
CGTEIVDADSWGNFQF

SEQ ID NO: 276986 - protein, 14 aa, Homo sapiens
  CDR3 for beta chain variable domain of TCR clone 138493 (TRBV12-5, TRBJ2-5)
CSSGSRTHQETQYF

SEQ ID NO: 276987 - protein, 11 aa, Homo sapiens
  CDR3 for alpha chain variable domain of TCR clone 138494 (TRAV21, TRAJ11)
CAVNGYSTLTF

SEQ ID NO: 276988 - protein, 11 aa, Homo sapiens
  CDR3 for beta chain variable domain of TCR clone 138494 (TRBV19, TRBJ1-1)
CASSIGSESFF

SEQ ID NO: 276989 - protein, 17 aa, Homo sapiens
  CDR3 for alpha chain variable domain of TCR clone 138495 (TRAV3, TRAJ6)
CAVRDGPRVGGSYIPTF

SEQ ID NO: 276990 - protein, 16 aa, Homo sapiens
  CDR3 for beta chain variable domain of TCR clone 138495 (TRBV7-8, TRBJ2-3)
CASSTEGQRETDTQYF

SEQ ID NO: 276991 - protein, 16 aa, Homo sapiens
  CDR3 for alpha chain variable domain of TCR clone 138496 (TRAV21, TRAJ37)
CAVRTAGSSNTGKLIF

SEQ ID NO: 276992 - protein, 13 aa, Homo sapiens
  CDR3 for beta chain variable domain of TCR clone 138496 (TRBV7-9, TRBJ2-5)
CASLPSGREQQYF

SEQ ID NO: 276993 - protein, 16 aa, Homo sapiens
  CDR3 for alpha chain variable domain of TCR clone 138497 (TRAV26-1, TRAJ48)
CIVREPPNFGNEKLNF

SEQ ID NO: 276994 - protein, 15 aa, Homo sapiens
  CDR3 for beta chain variable domain of TCR clone 138497 (TRBV7-2, TRBJ2-6)
CASSLQEAGANVLTF

SEQ ID NO: 276995 - protein, 18 aa, Homo sapiens
  CDR3 for alpha chain variable domain of TCR clone 138498 (TRAV14/DV4, TRAJ15)
CAMREFPPTGQAGTALIF

SEQ ID NO: 276996 - protein, 13 aa, Homo sapiens
  CDR3 for beta chain variable domain of TCR clone 138498 (TRBV7-9, TRBJ1-2)
CASSLKQNYGYTF

SEQ ID NO: 276997 - protein, 14 aa, Homo sapiens
  CDR3 for alpha chain variable domain of TCR clone 138499 (TRAV12-2, TRAJ13)
CAVKKTGGYQKVTF

SEQ ID NO: 276998 - protein, 16 aa, Homo sapiens
  CDR3 for beta chain variable domain of TCR clone 138499 (TRBV11-2, TRBJ2-3)
CASSSELGSSTDTQYF

SEQ ID NO: 276999 - protein, 14 aa, Homo sapiens
  CDR3 for alpha chain variable domain of TCR clone 138500 (TRAV13-1, TRAJ12)
CSNYPMASSYKLIF

SEQ ID NO: 277000 - protein, 11 aa, Homo sapiens
  CDR3 for beta chain variable domain of TCR clone 138500 (TRBV20-1, TRBJ2-1)
CSLSSGSEQFF

SEQ ID NO: 277001 - protein, 14 aa, Homo sapiens
  CDR3 for alpha chain variable domain of TCR clone 138501 (TRAV8-4, TRAJ40)
CAVIPTSGTYKYIF

SEQ ID NO: 277002 - protein, 15 aa, Homo sapiens
  CDR3 for beta chain variable domain of TCR clone 138501 (TRBV7-2, TRBJ2-1)
CASASASGDYNEQFF

SEQ ID NO: 277003 - protein, 14 aa, Homo sapiens
  CDR3 for alpha chain variable domain of TCR clone 138502 (TRAV8-2, TRAJ4)
CVVSPSGGYNKRIF

SEQ ID NO: 277004 - protein, 15 aa, Homo sapiens
  CDR3 for beta chain variable domain of TCR clone 138502 (TRBV4-1, TRBJ1-4)
CASSDTGETNDKLFF

SEQ ID NO: 277005 - protein, 13 aa, Homo sapiens
  CDR3 for alpha chain variable domain of TCR clone 138503 (TRAV26-1, TRAJ29)
CIVRRSGNTPLVF

SEQ ID NO: 277006 - protein, 14 aa, Homo sapiens
  CDR3 for beta chain variable domain of TCR clone 138503 (TRBV20-1, TRBJ1-1)
CSAKTPGANAEAFF

SEQ ID NO: 277007 - protein, 11 aa, Homo sapiens
  CDR3 for alpha chain variable domain of TCR clone 138504 (TRAV21, TRAJ8)
CLEHRLSETLF

SEQ ID NO: 277008 - protein, 15 aa, Homo sapiens
  CDR3 for beta chain variable domain of TCR clone 138504 (TRBV7-2, TRBJ2-5)
CASSLRGASGETQYF

SEQ ID NO: 277009 - protein, 14 aa, Homo sapiens
  CDR3 for alpha chain variable domain of TCR clone 138505 (TRAV9-2, TRAJ39)
CALYIYNAGTMLTF

SEQ ID NO: 277010 - protein, 15 aa, Homo sapiens
  CDR3 for beta chain variable domain of TCR clone 138505 (TRBV5-5, TRBJ1-5)
CASSSTPGSNQPQHF

SEQ ID NO: 277011 - protein, 18 aa, Homo sapiens
  CDR3 for alpha chain variable domain of TCR clone 138506 (TRAV12-3, TRAJ52)
CAMSRTNAGGTSYGKMTF

SEQ ID NO: 277012 - protein, 17 aa, Homo sapiens
  CDR3 for beta chain variable domain of TCR clone 138506 (TRBV7-3, TRBJ2-3)
CASSLMKRMRGAGTQYF

SEQ ID NO: 277013 - protein, 15 aa, Homo sapiens
  CDR3 for alpha chain variable domain of TCR clone 138507 (TRAV17, TRAJ16)
CATALRFSDGQKMLF

SEQ ID NO: 277014 - protein, 15 aa, Homo sapiens
  CDR3 for beta chain variable domain of TCR clone 138507 (TRBV13, TRBJ1-5)
CASSFGQGGVQPQHF

SEQ ID NO: 277015 - protein, 13 aa, Homo sapiens
  CDR3 for alpha chain variable domain of TCR clone 138508 (TRAV1-2, TRAJ11)
CAVRDSGYSTLTF

SEQ ID NO: 277016 - protein, 15 aa, Homo sapiens
  CDR3 for beta chain variable domain of TCR clone 138508 (TRBV7-9, TRBJ1-4)
CASSRTGGFNEKLFF

SEQ ID NO: 277017 - protein, 12 aa, Homo sapiens
  CDR3 for alpha chain variable domain of TCR clone 138509 (TRAV21, TRAJ12)
CAVMDSSDKLIF

SEQ ID NO: 277018 - protein, 16 aa, Homo sapiens
  CDR3 for beta chain variable domain of TCR clone 138509 (TRBV7-9, TRBJ2-5)
CASRLEIGTRKETQYF

SEQ ID NO: 277019 - protein, 15 aa, Homo sapiens
  CDR3 for alpha chain variable domain of TCR clone 138510 (TRAV39, TRAJ32)
CAVDMEGGATNKLIF

SEQ ID NO: 277020 - protein, 14 aa, Homo sapiens
  CDR3 for beta chain variable domain of TCR clone 138510 (TRBV29-1, TRBJ2-5)
CSVETSGSGETQYF

SEQ ID NO: 277021 - protein, 14 aa, Homo sapiens
  CDR3 for alpha chain variable domain of TCR clone 138511 (TRAV13-1, TRAJ3)
CAAEGDSSASKIIF

SEQ ID NO: 277022 - protein, 14 aa, Homo sapiens
  CDR3 for beta chain variable domain of TCR clone 138511 (TRBV19, TRBJ2-5)
CASSSSGIQETQYF

SEQ ID NO: 277023 - protein, 13 aa, Homo sapiens
  CDR3 for alpha chain variable domain of TCR clone 138512 (TRAV21, TRAJ20)
CAVGLRGDYKLSF

SEQ ID NO: 277024 - protein, 15 aa, Homo sapiens
  CDR3 for beta chain variable domain of TCR clone 138512 (TRBV29-1, TRBJ2-1)
CSVPTGLALYNEQFF

SEQ ID NO: 277025 - protein, 11 aa, Homo sapiens
  CDR3 for alpha chain variable domain of TCR clone 138513 (TRAV23/DV6, TRAJ9)
CFHTGGFKTIF

SEQ ID NO: 277026 - protein, 13 aa, Homo sapiens
  CDR3 for beta chain variable domain of TCR clone 138513 (TRBV11-2, TRBJ2-5)
CASSSTGEETQYF

SEQ ID NO: 277027 - protein, 12 aa, Homo sapiens
  CDR3 for alpha chain variable domain of TCR clone 138514 (TRAV13-1, TRAJ21)
CAAKEGFNKFYF

SEQ ID NO: 277028 - protein, 14 aa, Homo sapiens
  CDR3 for beta chain variable domain of TCR clone 138514 (TRBV5-4, TRBJ1-1)
CISSLDSRRDEAFF

SEQ ID NO: 277029 - protein, 13 aa, Homo sapiens
  CDR3 for alpha chain variable domain of TCR clone 138515 (TRAV12-1, TRAJ31)
CVVIPNNNARLMF

SEQ ID NO: 277030 - protein, 18 aa, Homo sapiens
  CDR3 for beta chain variable domain of TCR clone 138515 (TRBV11-2, TRBJ2-3)
CASSLGGASRGAPNTQYF

SEQ ID NO: 277031 - protein, 11 aa, Homo sapiens
  CDR3 for alpha chain variable domain of TCR clone 138516 (TRAV23/DV6, TRAJ43)
CAASWNNDMRF

SEQ ID NO: 277032 - protein, 13 aa, Homo sapiens
  CDR3 for beta chain variable domain of TCR clone 138516 (TRBV11-2, TRBJ2-5)
CASSSTGEETKYF

SEQ ID NO: 277033 - protein, 12 aa, Homo sapiens
  CDR3 for alpha chain variable domain of TCR clone 138517 (TRAV8-6, TRAJ43)
CAGSNNNNDMRF

SEQ ID NO: 277034 - protein, 15 aa, Homo sapiens
  CDR3 for beta chain variable domain of TCR clone 138517 (TRBV7-3, TRBJ2-6)
CASSLGGSGANVLTF

SEQ ID NO: 277035 - protein, 12 aa, Homo sapiens
  CDR3 for alpha chain variable domain of TCR clone 138518 (TRAV23/DV6, TRAJ17)
CSRGSCRHQANF

SEQ ID NO: 277036 - protein, 14 aa, Homo sapiens
  CDR3 for beta chain variable domain of TCR clone 138518 (TRBV7-2, TRBJ1-2)
CASSQTGSTYGYTF

SEQ ID NO: 277037 - protein, 13 aa, Homo sapiens
  CDR3 for alpha chain variable domain of TCR clone 138519 (TRAV36/DV7, TRAJ21)
CAAEAYNFNKFYF

SEQ ID NO: 277038 - protein, 17 aa, Homo sapiens
  CDR3 for beta chain variable domain of TCR clone 138519 (TRBV7-9, TRBJ2-1)
CASRLVASYPSYNEQFF

SEQ ID NO: 277039 - protein, 11 aa, Homo sapiens
  CDR3 for alpha chain variable domain of TCR clone 138520 (TRAV27, TRAJ43)
CVRYNNNDMRF

SEQ ID NO: 277040 - protein, 14 aa, Homo sapiens
  CDR3 for beta chain variable domain of TCR clone 138520 (TRBV7-9, TRBJ2-1)
CASSSMVGFGEQFF

SEQ ID NO: 277041 - protein, 13 aa, Homo sapiens
  CDR3 for alpha chain variable domain of TCR clone 138521 (TRAV17, TRAJ5)
CAPMDTGRRALTF

SEQ ID NO: 277042 - protein, 13 aa, Homo sapiens
  CDR3 for beta chain variable domain of TCR clone 138521 (TRBV7-9, TRBJ1-2)
CASSVRQNYGYTF

SEQ ID NO: 277043 - protein, 14 aa, Homo sapiens
  CDR3 for alpha chain variable domain of TCR clone 138522 (TRAV4, TRAJ12)
CLVGDADSSYKLIF

SEQ ID NO: 277044 - protein, 17 aa, Homo sapiens
  CDR3 for beta chain variable domain of TCR clone 138522 (TRBV13, TRBJ2-3)
CASSRSRVAGGRNTQYF

SEQ ID NO: 277045 - protein, 13 aa, Homo sapiens
  CDR3 for alpha chain variable domain of TCR clone 138523 (TRAV27, TRAJ11)
CAGAGSGYSTLTF

SEQ ID NO: 277046 - protein, 16 aa, Homo sapiens
  CDR3 for beta chain variable domain of TCR clone 138523 (TRBV10-2, TRBJ2-2)
CASSESRDRGSGELFF

SEQ ID NO: 277047 - protein, 13 aa, Homo sapiens
  CDR3 for alpha chain variable domain of TCR clone 138524 (TRAV29/DV5, TRAJ58)
CAGEETSGSRLTL

SEQ ID NO: 277048 - protein, 15 aa, Homo sapiens
  CDR3 for beta chain variable domain of TCR clone 138524 (TRBV11-2, TRBJ1-6)
CASTGFGTAVSPLRF

SEQ ID NO: 277049 - protein, 14 aa, Homo sapiens
  CDR3 for alpha chain variable domain of TCR clone 138525 (TRAV8-3, TRAJ11)
CAVGADSGYSTLTF

SEQ ID NO: 277050 - protein, 14 aa, Homo sapiens
  CDR3 for beta chain variable domain of TCR clone 138525 (TRBV2, TRBJ2-2)
CASSLFGGNGELFF

SEQ ID NO: 277051 - protein, 14 aa, Homo sapiens
  CDR3 for alpha chain variable domain of TCR clone 138526 (TRAV13-1, TRAJ44)
CAAKATGTARKLTF

SEQ ID NO: 277052 - protein, 12 aa, Homo sapiens
  CDR3 for beta chain variable domain of TCR clone 138526 (TRBV7-8, TRBJ2-7)
CASSLGDREQYF

SEQ ID NO: 277053 - protein, 11 aa, Homo sapiens
  CDR3 for alpha chain variable domain of TCR clone 138527 (TRAV12-3, TRAJ27)
CAMANAGKSTF

SEQ ID NO: 277054 - protein, 13 aa, Homo sapiens
  CDR3 for beta chain variable domain of TCR clone 138527 (TRBV20-1, TRBJ1-1)
CSARVGGNTEEFF

SEQ ID NO: 277055 - protein, 13 aa, Homo sapiens
  CDR3 for alpha chain variable domain of TCR clone 138528 (TRAV17, TRAJ40)
CATDSSGTYKYIF

SEQ ID NO: 277056 - protein, 15 aa, Homo sapiens
  CDR3 for beta chain variable domain of TCR clone 138528 (TRBV4-1, TRBJ2-7)
CASSQQGQGFDEQYF

SEQ ID NO: 277057 - protein, 16 aa, Homo sapiens
  CDR3 for alpha chain variable domain of TCR clone 138529 (TRAV17, TRAJ48)
CATDASTNFGNEKLTF

SEQ ID NO: 277058 - protein, 12 aa, Homo sapiens
  CDR3 for beta chain variable domain of TCR clone 138529 (TRBV7-6, TRBJ2-3)
CASSFSVDTQYF

SEQ ID NO: 277059 - protein, 13 aa, Homo sapiens
  CDR3 for alpha chain variable domain of TCR clone 138530 (TRAV26-1, )
CIVSHRVEGFWNQ

SEQ ID NO: 277060 - protein, 14 aa, Homo sapiens
  CDR3 for beta chain variable domain of TCR clone 138530 (TRBV25-1, TRBJ1-1)
CASTHLGGNTEAFF

SEQ ID NO: 277061 - protein, 13 aa, Homo sapiens
  CDR3 for alpha chain variable domain of TCR clone 138531 (TRAV24, TRAJ42)
CAFSTGSQGNLIF

SEQ ID NO: 277062 - protein, 19 aa, Homo sapiens
  CDR3 for beta chain variable domain of TCR clone 138531 (TRBV19, TRBJ2-5)
CASSIGQVTDFFLGETQSF

SEQ ID NO: 277063 - protein, 17 aa, Homo sapiens
  CDR3 for alpha chain variable domain of TCR clone 138532 (TRAV3, TRAJ6)
CAVRDGPRAGGIYIPTF

SEQ ID NO: 277064 - protein, 14 aa, Homo sapiens
  CDR3 for beta chain variable domain of TCR clone 138532 (TRBV7-3, TRBJ2-1)
CASSTSGGWDEQFF

SEQ ID NO: 277065 - protein, 15 aa, Homo sapiens
  CDR3 for alpha chain variable domain of TCR clone 138533 (TRAV12-2, TRAJ53)
CAVNGGGGSNYKLTL

SEQ ID NO: 277066 - protein, 13 aa, Homo sapiens
  CDR3 for beta chain variable domain of TCR clone 138533 (TRBV3-1, TRBJ1-1)
CASSPGVIPEAFF

SEQ ID NO: 277067 - protein, 14 aa, Homo sapiens
  CDR3 for alpha chain variable domain of TCR clone 138534 (TRAV1-2, TRAJ8)
CAVREDTGFQKLVF

SEQ ID NO: 277068 - protein, 17 aa, Homo sapiens
  CDR3 for beta chain variable domain of TCR clone 138534 (TRBV25-1, TRBJ2-7)
CASSDARVVFSSYEQYF

SEQ ID NO: 277069 - protein, 14 aa, Homo sapiens
  CDR3 for alpha chain variable domain of TCR clone 138535 (TRAV26-1, TRAJ21)
CIVRPPYNFNKFYF

SEQ ID NO: 277070 - protein, 14 aa, Homo sapiens
  CDR3 for beta chain variable domain of TCR clone 138535 (TRBV4-2, TRBJ2-3)
CASRETRAPGMQYF

SEQ ID NO: 277071 - protein, 17 aa, Homo sapiens
  CDR3 for alpha chain variable domain of TCR clone 138536 (TRAV3, TRAJ42)
CAVRDRDYRGSQGNLIF

SEQ ID NO: 277072 - protein, 14 aa, Homo sapiens
  CDR3 for beta chain variable domain of TCR clone 138536 (TRBV20-1, TRBJ2-2)
CSVALVVNNGELFF

SEQ ID NO: 277073 - protein, 18 aa, Homo sapiens
  CDR3 for alpha chain variable domain of TCR clone 138537 (TRAV21, TRAJ52)
CAVRPPPAGGTSYGKLTF

SEQ ID NO: 277074 - protein, 16 aa, Homo sapiens
  CDR3 for beta chain variable domain of TCR clone 138537 (TRBV13, TRBJ2-3)
CQQPLQGSGGRNTQYF

SEQ ID NO: 277075 - protein, 14 aa, Homo sapiens
  CDR3 for alpha chain variable domain of TCR clone 138538 (TRAV38-1, TRAJ40)
CALRPTSGTYKYIF

SEQ ID NO: 277076 - protein, 14 aa, Homo sapiens
  CDR3 for beta chain variable domain of TCR clone 138538 (TRBV25-1, TRBJ1-1)
CASAHLGGNTEACF

SEQ ID NO: 277077 - protein, 15 aa, Homo sapiens
  CDR3 for alpha chain variable domain of TCR clone 138539 (TRAV1-2, TRAJ35)
CAVRAPGGFGNVLHC

SEQ ID NO: 277078 - protein, 14 aa, Homo sapiens
  CDR3 for beta chain variable domain of TCR clone 138539 (TRBV5-1, TRBJ2-1)
CASSLDDRFDEQFF

SEQ ID NO: 277079 - protein, 13 aa, Homo sapiens
  CDR3 for alpha chain variable domain of TCR clone 138540 (TRAV12-1, TRAJ39)
CVVNYNAGNMLTF

SEQ ID NO: 277080 - protein, 13 aa, Homo sapiens
  CDR3 for beta chain variable domain of TCR clone 138540 (TRBV14, TRBJ2-7)
CASSQDRRYEQYF

SEQ ID NO: 277081 - protein, 14 aa, Homo sapiens
  CDR3 for alpha chain variable domain of TCR clone 138541 (TRAV3, TRAJ34)
CAVRAPGNTDKLIF

SEQ ID NO: 277082 - protein, 14 aa, Homo sapiens
  CDR3 for beta chain variable domain of TCR clone 138541 (TRBV7-6, TRBJ2-3)
CASSLGTVTDTQYF

SEQ ID NO: 277083 - protein, 12 aa, Homo sapiens
  CDR3 for alpha chain variable domain of TCR clone 138542 (TRAV13-1, TRAJ21)
CAAKEGFNKFYF

SEQ ID NO: 277084 - protein, 15 aa, Homo sapiens
  CDR3 for beta chain variable domain of TCR clone 138542 (TRBV10-3, TRBJ2-5)
CAISEFGRGQETQYF

SEQ ID NO: 277085 - protein, 15 aa, Homo sapiens
  CDR3 for alpha chain variable domain of TCR clone 138543 (TRAV13-1, TRAJ52)
CALRTGGTSYGKLTF

SEQ ID NO: 277086 - protein, 13 aa, Homo sapiens
  CDR3 for beta chain variable domain of TCR clone 138543 (TRBV19, TRBJ1-2)
CASSVPGQDGYTF

SEQ ID NO: 277087 - protein, 13 aa, Homo sapiens
  CDR3 for alpha chain variable domain of TCR clone 138544 (TRAV36/DV7, TRAJ54)
CAVDIQGAQKLLF

SEQ ID NO: 277088 - protein, 14 aa, Homo sapiens
  CDR3 for beta chain variable domain of TCR clone 138544 (TRBV19, TRBJ2-7)
CSSNFRDTFTGMYF

SEQ ID NO: 277089 - protein, 15 aa, Homo sapiens
  CDR3 for alpha chain variable domain of TCR clone 138545 (TRAV12-2, TRAJ53)
WAVNGGGGSNYKLTF

SEQ ID NO: 277090 - protein, 12 aa, Homo sapiens
  CDR3 for beta chain variable domain of TCR clone 138545 (TRBV7-6, TRBJ2-5)
CASSLSQETQYF

SEQ ID NO: 277091 - protein, 13 aa, Homo sapiens
  CDR3 for alpha chain variable domain of TCR clone 138546 (TRAV26-2, TRAJ43)
CILRAVSNNDMRF

SEQ ID NO: 277092 - protein, 16 aa, Homo sapiens
  CDR3 for beta chain variable domain of TCR clone 138546 (TRBV28, TRBJ1-5)
CASSLTGQGWNQPQHF

SEQ ID NO: 277093 - protein, 14 aa, Homo sapiens
  CDR3 for alpha chain variable domain of TCR clone 138547 (TRAV12-2, TRAJ13)
SAVKKTGGYQQVTF

SEQ ID NO: 277094 - protein, 15 aa, Homo sapiens
  CDR3 for beta chain variable domain of TCR clone 138547 (TRBV27, TRBJ2-1)
CASSNGGGSSNEQFF

SEQ ID NO: 277095 - protein, 12 aa, Homo sapiens
  CDR3 for alpha chain variable domain of TCR clone 138548 (TRAV17, TRAJ49)
CATVTTGNQFYF

SEQ ID NO: 277096 - protein, 17 aa, Homo sapiens
  CDR3 for beta chain variable domain of TCR clone 138548 (TRBV4-1, TRBJ1-4)
CASSQEGPRGVEEKLFF

SEQ ID NO: 277097 - protein, 14 aa, Homo sapiens
  CDR3 for alpha chain variable domain of TCR clone 138549 (TRAV35, TRAJ10)
CAGILTGGGNKLTF

SEQ ID NO: 277098 - protein, 17 aa, Homo sapiens
  CDR3 for beta chain variable domain of TCR clone 138549 (TRBV28, TRBJ2-5)
CAISTPEGDALQETQYF

SEQ ID NO: 277099 - protein, 14 aa, Homo sapiens
  CDR3 for alpha chain variable domain of TCR clone 138550 (TRAV3, TRAJ22)
CAVRDYGSARQLTF

SEQ ID NO: 277100 - protein, 17 aa, Homo sapiens
  CDR3 for beta chain variable domain of TCR clone 138550 (TRBV25-1, TRBJ2-1)
CASSAYGQGRGVYEQFF

SEQ ID NO: 277101 - protein, 15 aa, Homo sapiens
  CDR3 for alpha chain variable domain of TCR clone 138551 (TRAV12-1, TRAJ4)
CVVNPFSGGYNKLIF

SEQ ID NO: 277102 - protein, 13 aa, Homo sapiens
  CDR3 for beta chain variable domain of TCR clone 138551 (TRBV20-1, TRBJ1-2)
CSARGTADYGETF

SEQ ID NO: 277103 - protein, 16 aa, Homo sapiens
  CDR3 for alpha chain variable domain of TCR clone 138552 (TRAV30, TRAJ26)
CGTEAVGDNYGQNFVF

SEQ ID NO: 277104 - protein, 13 aa, Homo sapiens
  CDR3 for beta chain variable domain of TCR clone 138552 (TRBV19, TRBJ1-2)
CASSISEDYGYTF

SEQ ID NO: 277105 - protein, 14 aa, Homo sapiens
  CDR3 for alpha chain variable domain of TCR clone 138553 (TRAV12-1, TRAJ12)
CVVTSGDSSYKLIF

SEQ ID NO: 277106 - protein, 13 aa, Homo sapiens
  CDR3 for beta chain variable domain of TCR clone 138553 (TRBV11-2, TRBJ2-5)
CASSFSSQETQYF

SEQ ID NO: 277107 - protein, 16 aa, Homo sapiens
  CDR3 for alpha chain variable domain of TCR clone 138554 (TRAV30, TRAJ24)
CGTEIVDADSWGEFQF

SEQ ID NO: 277108 - protein, 15 aa, Homo sapiens
  CDR3 for beta chain variable domain of TCR clone 138554 (TRBV6-3, TRBJ2-7)
CASSSPGTVFYEQYF

SEQ ID NO: 277109 - protein, 14 aa, Homo sapiens
  CDR3 for alpha chain variable domain of TCR clone 138555 (TRAV13-1, TRAJ35)
CAASKGGFGNVLHC

SEQ ID NO: 277110 - protein, 15 aa, Homo sapiens
  CDR3 for beta chain variable domain of TCR clone 138555 (TRBV28, TRBJ2-1)
CARSGLAEVDNEQFF

SEQ ID NO: 277111 - protein, 12 aa, Homo sapiens
  CDR3 for alpha chain variable domain of TCR clone 138556 (TRAV13-1, TRAJ49)
CAASPMGNQYYF

SEQ ID NO: 277112 - protein, 13 aa, Homo sapiens
  CDR3 for beta chain variable domain of TCR clone 138556 (TRBV20-1, TRBJ2-2)
CSASAAGTGELFF

SEQ ID NO: 277113 - protein, 16 aa, Homo sapiens
  CDR3 for alpha chain variable domain of TCR clone 138557 (TRAV39, TRAJ32)
CAVDMEYGGATNKLIF

SEQ ID NO: 277114 - protein, 16 aa, Homo sapiens
  CDR3 for beta chain variable domain of TCR clone 138557 (TRBV12-5, TRBJ2-5)
CASGPRTSGNQETQYF

SEQ ID NO: 277115 - protein, 13 aa, Homo sapiens
  CDR3 for alpha chain variable domain of TCR clone 138558 (TRAV8-1, TRAJ34)
CAVRPYNTDKLLF

SEQ ID NO: 277116 - protein, 15 aa, Homo sapiens
  CDR3 for beta chain variable domain of TCR clone 138558 (TRBV7-9, TRBJ1-3)
CASSLQSGSGNTIYF

SEQ ID NO: 277117 - protein, 12 aa, Homo sapiens
  CDR3 for alpha chain variable domain of TCR clone 138559 (TRAV13-1, TRAJ21)
CAAKEGFNKFYF

SEQ ID NO: 277118 - protein, 15 aa, Homo sapiens
  CDR3 for beta chain variable domain of TCR clone 138559 (TRBV11-2, TRBJ2-1)
CASSLTSGGYNEQFF

SEQ ID NO: 277119 - protein, 14 aa, Homo sapiens
  CDR3 for alpha chain variable domain of TCR clone 138560 (TRAV1-2, TRAJ8)
CAVREDTGSQKLVF

SEQ ID NO: 277120 - protein, 12 aa, Homo sapiens
  CDR3 for beta chain variable domain of TCR clone 138560 (TRBV27, TRBJ2-2)
CASKLFTGELFF

SEQ ID NO: 277121 - protein, 17 aa, Homo sapiens
  CDR3 for alpha chain variable domain of TCR clone 138561 (TRAV3, TRAJ6)
CAVTDGPRAGGSSIPTF

SEQ ID NO: 277122 - protein, 14 aa, Homo sapiens
  CDR3 for beta chain variable domain of TCR clone 138561 (TRBV7-2, TRBJ2-7)
CASSPKTSFYEQYF

SEQ ID NO: 277123 - protein, 14 aa, Homo sapiens
  CDR3 for alpha chain variable domain of TCR clone 138562 (TRAV2, TRAJ9)
FAVEDRSGGFKTIF

SEQ ID NO: 277124 - protein, 15 aa, Homo sapiens
  CDR3 for beta chain variable domain of TCR clone 138562 (TRBV6-6, TRBJ2-7)
CASSYSYGGSYEQYF

SEQ ID NO: 277125 - protein, 14 aa, Homo sapiens
  CDR3 for alpha chain variable domain of TCR clone 138563 (TRAV29/DV5, TRAJ44)
CAASALGTASKLTF

SEQ ID NO: 277126 - protein, 16 aa, Homo sapiens
  CDR3 for beta chain variable domain of TCR clone 138563 (TRBV4-3, TRBJ2-2)
CASSHLQGSGTGELFF

SEQ ID NO: 277127 - protein, 16 aa, Homo sapiens
  CDR3 for alpha chain variable domain of TCR clone 138564 (TRAV1-1, TRAJ29)
CAVRSTRNSGNTPLVF

SEQ ID NO: 277128 - protein, 16 aa, Homo sapiens
  CDR3 for beta chain variable domain of TCR clone 138564 (TRBV27, TRBJ1-1)
CASSPRGRTGYTEAFF

SEQ ID NO: 277129 - protein, 14 aa, Homo sapiens
  CDR3 for alpha chain variable domain of TCR clone 138565 (TRAV21, TRAJ38)
CAVANAGNNRKLIW

SEQ ID NO: 277130 - protein, 15 aa, Homo sapiens
  CDR3 for beta chain variable domain of TCR clone 138565 (TRBV10-3, TRBJ2-7)
CATSDMTALSYEQYF

SEQ ID NO: 277131 - protein, 12 aa, Homo sapiens
  CDR3 for alpha chain variable domain of TCR clone 138566 (TRAV12-2, TRAJ43)
CAVNVNNNEMRF

SEQ ID NO: 277132 - protein, 14 aa, Homo sapiens
  CDR3 for beta chain variable domain of TCR clone 138566 (TRBV7-2, TRBJ2-7)
CASSFLGRVYEQYF

SEQ ID NO: 277133 - protein, 13 aa, Homo sapiens
  CDR3 for alpha chain variable domain of TCR clone 138567 (TRAV8-6, TRAJ49)
CAVITNTANQIYF

SEQ ID NO: 277134 - protein, 14 aa, Homo sapiens
  CDR3 for beta chain variable domain of TCR clone 138567 (TRBV5-1, TRBJ2-7)
CASSRGESLYEQYF

SEQ ID NO: 277135 - protein, 12 aa, Homo sapiens
  CDR3 for alpha chain variable domain of TCR clone 138568 (TRAV12-3, TRAJ17)
CAMTLTGNKLTF

SEQ ID NO: 277136 - protein, 15 aa, Homo sapiens
  CDR3 for beta chain variable domain of TCR clone 138568 (TRBV4-3, TRBJ1-4)
CASSQETGSYEKLFF

SEQ ID NO: 277137 - protein, 11 aa, Homo sapiens
  CDR3 for alpha chain variable domain of TCR clone 138569 (TRAV35, TRAJ30)
CAPGGDDKIIF

SEQ ID NO: 277138 - protein, 14 aa, Homo sapiens
  CDR3 for beta chain variable domain of TCR clone 138569 (TRBV19, TRBJ2-7)
CASSIFAGTYEQYF

SEQ ID NO: 277139 - protein, 15 aa, Homo sapiens
  CDR3 for alpha chain variable domain of TCR clone 138570 (TRAV12-1, TRAJ47)
CVVTNRLKGGNKLVF

SEQ ID NO: 277140 - protein, 19 aa, Homo sapiens
  CDR3 for beta chain variable domain of TCR clone 138570 (TRBV20-1, TRBJ2-1)
CSARPQGLAGTSKSGTQYF

SEQ ID NO: 277141 - protein, 15 aa, Homo sapiens
  CDR3 for alpha chain variable domain of TCR clone 138571 (TRAV12-1, TRAJ47)
CVVTNRLKGGNKLVF

SEQ ID NO: 277142 - protein, 19 aa, Homo sapiens
  CDR3 for beta chain variable domain of TCR clone 138571 (TRBV20-1, TRBJ2-3)
CSARPQGLAGTSKSGTQYF

SEQ ID NO: 277143 - protein, 12 aa, Homo sapiens
  CDR3 for alpha chain variable domain of TCR clone 138572 (TRAV35, TRAJ40)
CAGRAGTYKYIF

SEQ ID NO: 277144 - protein, 12 aa, Homo sapiens
  CDR3 for beta chain variable domain of TCR clone 138572 (TRBV12-4, TRBJ2-7)
CASNPGGGEQYF

SEQ ID NO: 277145 - protein, 17 aa, Homo sapiens
  CDR3 for alpha chain variable domain of TCR clone 138573 (TRAV12-2, TRAJ6)
CAPQGPPRAGGSYIHTF

SEQ ID NO: 277146 - protein, 16 aa, Homo sapiens
  CDR3 for beta chain variable domain of TCR clone 138573 (TRBV19, TRBJ2-2)
CASSTARASNTGELFF

SEQ ID NO: 277147 - protein, 11 aa, Homo sapiens
  CDR3 for alpha chain variable domain of TCR clone 138574 (TRAV20, TRAJ34)
CRTKGTDKLIF

SEQ ID NO: 277148 - protein, 16 aa, Homo sapiens
  CDR3 for beta chain variable domain of TCR clone 138574 (TRBV24-1, TRBJ2-3)
CATSDPGTGATDTQYF

SEQ ID NO: 277149 - protein, 13 aa, Homo sapiens
  CDR3 for alpha chain variable domain of TCR clone 138575 (TRAV13-1, TRAJ5)
CAASDTGRRALTF

SEQ ID NO: 277150 - protein, 12 aa, Homo sapiens
  CDR3 for beta chain variable domain of TCR clone 138575 (TRBV28, TRBJ2-3)
CASILYRDTQYF

SEQ ID NO: 277151 - protein, 14 aa, Homo sapiens
  CDR3 for alpha chain variable domain of TCR clone 138576 (TRAV30, TRAJ33)
CGTERRFSNYKLIW

SEQ ID NO: 277152 - protein, 16 aa, Homo sapiens
  CDR3 for beta chain variable domain of TCR clone 138576 (TRBV7-3, TRBJ2-2)
CASSLKRGTLSGELFF

SEQ ID NO: 277153 - protein, 17 aa, Homo sapiens
  CDR3 for alpha chain variable domain of TCR clone 138577 (TRAV3, TRAJ7)
CAVRDMCPLEGTTDSLL

SEQ ID NO: 277154 - protein, 17 aa, Homo sapiens
  CDR3 for beta chain variable domain of TCR clone 138577 (TRBV15, TRBJ1-2)
CATSGREIDVVNYGYTF

SEQ ID NO: 277155 - protein, 18 aa, Homo sapiens
  CDR3 for alpha chain variable domain of TCR clone 138578 (TRAV26-1, TRAJ23)
CIVRVGLEVWNQGGKLIF

SEQ ID NO: 277156 - protein, 16 aa, Homo sapiens
  CDR3 for beta chain variable domain of TCR clone 138578 (TRBV12-4, TRBJ2-5)
CASSFSVRGRQETQYF

SEQ ID NO: 277157 - protein, 10 aa, Homo sapiens
  CDR3 for alpha chain variable domain of TCR clone 138579 (TRAV23/DV6, TRAJ22)
CAASSQGSRF

SEQ ID NO: 277158 - protein, 15 aa, Homo sapiens
  CDR3 for beta chain variable domain of TCR clone 138579 (TRBV10-3, TRBJ2-3)
CAIDTSGRRTDTQYF

SEQ ID NO: 277159 - protein, 18 aa, Homo sapiens
  CDR3 for alpha chain variable domain of TCR clone 138580 (TRAV26-2, TRAJ54)
CILRDVEVGIQGAQKLVF

SEQ ID NO: 277160 - protein, 13 aa, Homo sapiens
  CDR3 for beta chain variable domain of TCR clone 138580 (TRBV13, TRBJ2-2)
CASSPGLTGELFF

SEQ ID NO: 277161 - protein, 17 aa, Homo sapiens
  CDR3 for alpha chain variable domain of TCR clone 138581 (TRAV38-2/DV8, TRAJ38)
CAYRSARGAGNNSKLIW

SEQ ID NO: 277162 - protein, 13 aa, Homo sapiens
  CDR3 for beta chain variable domain of TCR clone 138581 (TRBV6-5, TRBJ2-1)
CASRGRVGNEQFF

SEQ ID NO: 277163 - protein, 17 aa, Homo sapiens
  CDR3 for alpha chain variable domain of TCR clone 138582 (TRAV2, TRAJ22)
ILQVREADAAEQRQLTF

SEQ ID NO: 277164 - protein, 13 aa, Homo sapiens
  CDR3 for beta chain variable domain of TCR clone 138582 (TRBV2, TRBJ2-7)
CASSVGGSGEQYF

SEQ ID NO: 277165 - protein, 13 aa, Homo sapiens
  CDR3 for alpha chain variable domain of TCR clone 138583 (TRAV13-1, TRAJ37)
CAARSGNTGKLIF

SEQ ID NO: 277166 - protein, 15 aa, Homo sapiens
  CDR3 for beta chain variable domain of TCR clone 138583 (TRBV10-1, TRBJ2-1)
CASSTGTELYNEQFF

SEQ ID NO: 277167 - protein, 11 aa, Homo sapiens
  CDR3 for alpha chain variable domain of TCR clone 138584 (TRAV35, TRAJ30)
CAGLRDDKIIF

SEQ ID NO: 277168 - protein, 15 aa, Homo sapiens
  CDR3 for beta chain variable domain of TCR clone 138584 (TRBV2, TRBJ1-3)
CASSISPRSGNTINF

SEQ ID NO: 277169 - protein, 18 aa, Homo sapiens
  CDR3 for alpha chain variable domain of TCR clone 138585 (TRAV12-2, )
CAVEDIQNPDPAVYQLRD

SEQ ID NO: 277170 - protein, 15 aa, Homo sapiens
  CDR3 for beta chain variable domain of TCR clone 138585 (TRBV11-1, TRBJ2-7)
CASSLNCGASYEQYF

SEQ ID NO: 277171 - protein, 12 aa, Homo sapiens
  CDR3 for alpha chain variable domain of TCR clone 138586 (TRAV8-3, TRAJ26)
CAGDNYGQNFVF

SEQ ID NO: 277172 - protein, 12 aa, Homo sapiens
  CDR3 for beta chain variable domain of TCR clone 138586 (TRBV11-3, TRBJ2-2)
CASSLGGGELFF

SEQ ID NO: 277173 - protein, 19 aa, Homo sapiens
  CDR3 for alpha chain variable domain of TCR clone 138587 (TRAV29/DV5, TRAJ49)
CSVLLCSKLTVDTGNQFYF

SEQ ID NO: 277174 - protein, 17 aa, Homo sapiens
  CDR3 for beta chain variable domain of TCR clone 138587 (TRBV13, TRBJ2-3)
CAGSLSRVAGGRNTQYF

SEQ ID NO: 277175 - protein, 13 aa, Homo sapiens
  CDR3 for alpha chain variable domain of TCR clone 138588 (TRAV13-2, TRAJ48)
CAEMDFGDEKLTF

SEQ ID NO: 277176 - protein, 15 aa, Homo sapiens
  CDR3 for beta chain variable domain of TCR clone 138588 (TRBV7-9, TRBJ1-6)
CASSSTGSGNSPLHF

SEQ ID NO: 277177 - protein, 13 aa, Homo sapiens
  CDR3 for alpha chain variable domain of TCR clone 138589 (TRAV3, TRAJ27)
CAVRPLGAGKSTF

SEQ ID NO: 277178 - protein, 11 aa, Homo sapiens
  CDR3 for beta chain variable domain of TCR clone 138589 (TRBV2, TRBJ2-1)
CASSEERDVFF

SEQ ID NO: 277179 - protein, 14 aa, Homo sapiens
  CDR3 for alpha chain variable domain of TCR clone 138590 (TRAV3, TRAJ34)
CAVRGPGNTDKLIF

SEQ ID NO: 277180 - protein, 17 aa, Homo sapiens
  CDR3 for beta chain variable domain of TCR clone 138590 (TRBV20-1, TRBJ2-7)
CSAAPGLARGISYEQYF

SEQ ID NO: 277181 - protein, 15 aa, Homo sapiens
  CDR3 for alpha chain variable domain of TCR clone 138591 (TRAV21, TRAJ53)
CATLTSGGSNYKLTF

SEQ ID NO: 277182 - protein, 13 aa, Homo sapiens
  CDR3 for beta chain variable domain of TCR clone 138591 (TRBV7-7, TRBJ1-1)
CASSLGANTEAFF

SEQ ID NO: 277183 - protein, 17 aa, Homo sapiens
  CDR3 for alpha chain variable domain of TCR clone 138592 (TRAV4, TRAJ17)
CLVGDTPGRAAGNKLTF

SEQ ID NO: 277184 - protein, 15 aa, Homo sapiens
  CDR3 for beta chain variable domain of TCR clone 138592 (TRBV28, TRBJ2-3)
CASSPDRQGANTQYF

SEQ ID NO: 277185 - protein, 13 aa, Homo sapiens
  CDR3 for alpha chain variable domain of TCR clone 138593 (TRAV40, TRAJ41)
CLLGAQSGYALNF

SEQ ID NO: 277186 - protein, 13 aa, Homo sapiens
  CDR3 for beta chain variable domain of TCR clone 138593 (TRBV29-1, TRBJ1-1)
CSVGDSRNTEAFF

SEQ ID NO: 277187 - protein, 15 aa, Homo sapiens
  CDR3 for alpha chain variable domain of TCR clone 138594 (TRAV3, TRAJ22)
CAMRDRGGSARQLTF

SEQ ID NO: 277188 - protein, 16 aa, Homo sapiens
  CDR3 for beta chain variable domain of TCR clone 138594 (TRBV11-2, TRBJ2-1)
CASARGSYSHHNEQFF

SEQ ID NO: 277189 - protein, 13 aa, Homo sapiens
  CDR3 for alpha chain variable domain of TCR clone 138595 (TRAV30, TRAJ24)
CGTVTDSCGKLQF

SEQ ID NO: 277190 - protein, 15 aa, Homo sapiens
  CDR3 for beta chain variable domain of TCR clone 138595 (TRBV19, TRBJ1-1)
CASTSGQIQNTEAFF

SEQ ID NO: 277191 - protein, 15 aa, Homo sapiens
  CDR3 for alpha chain variable domain of TCR clone 138596 (TRAV4, TRAJ10)
CLVGDEEGGGNKLTF

SEQ ID NO: 277192 - protein, 12 aa, Homo sapiens
  CDR3 for beta chain variable domain of TCR clone 138596 (TRBV7-8, TRBJ2-7)
CASSLGDREQYF

SEQ ID NO: 277193 - protein, 12 aa, Homo sapiens
  CDR3 for alpha chain variable domain of TCR clone 138597 (TRAV2, TRAJ33)
CAFMGSNYQLIW

SEQ ID NO: 277194 - protein, 18 aa, Homo sapiens
  CDR3 for beta chain variable domain of TCR clone 138597 (TRBV20-1, TRBJ2-6)
CSAETTPTHGSGANVLTF

SEQ ID NO: 277195 - protein, 13 aa, Homo sapiens
  CDR3 for alpha chain variable domain of TCR clone 138598 (TRAV27, TRAJ11)
CAGARSGYSTLTF

SEQ ID NO: 277196 - protein, 16 aa, Homo sapiens
  CDR3 for beta chain variable domain of TCR clone 138598 (TRBV10-2, TRBJ2-2)
CASSESRGRGSGELFF

SEQ ID NO: 277197 - protein, 12 aa, Homo sapiens
  CDR3 for alpha chain variable domain of TCR clone 138599 (TRAV20, TRAJ39)
CAVGNAGNMLTF

SEQ ID NO: 277198 - protein, 16 aa, Homo sapiens
  CDR3 for beta chain variable domain of TCR clone 138599 (TRBV15, TRBJ1-2)
CATSRGPRTGGGCYTF

SEQ ID NO: 277199 - protein, 17 aa, Homo sapiens
  CDR3 for alpha chain variable domain of TCR clone 138600 (TRAV4, TRAJ18)
CLVGERSVGPTLGGLYF

SEQ ID NO: 277200 - protein, 16 aa, Homo sapiens
  CDR3 for beta chain variable domain of TCR clone 138600 (TRBV15, TRBJ1-4)
CATSRDSPPGREKLFF

SEQ ID NO: 277201 - protein, 15 aa, Homo sapiens
  CDR3 for alpha chain variable domain of TCR clone 138601 (TRAV27, TRAJ38)
CAARRNAGNNRKLIW

SEQ ID NO: 277202 - protein, 16 aa, Homo sapiens
  CDR3 for beta chain variable domain of TCR clone 138601 (TRBV4-1, TRBJ1-4)
CASSQDLRRGGEKLFF

SEQ ID NO: 277203 - protein, 13 aa, Homo sapiens
  CDR3 for alpha chain variable domain of TCR clone 138602 (TRAV21, TRAJ20)
CAVGLRVDYKLSF

SEQ ID NO: 277204 - protein, 12 aa, Homo sapiens
  CDR3 for beta chain variable domain of TCR clone 138602 (TRBV5-7, TRBJ2-7)
CASSVQGGEQYF

SEQ ID NO: 277205 - protein, 14 aa, Homo sapiens
  CDR3 for alpha chain variable domain of TCR clone 138603 (TRAV12-1, TRAJ13)
CVVNKAGGYQKVTF

SEQ ID NO: 277206 - protein, 14 aa, Homo sapiens
  CDR3 for beta chain variable domain of TCR clone 138603 (TRBV20-1, TRBJ2-7)
CSAKRGRSSYEQYF

SEQ ID NO: 277207 - protein, 11 aa, Homo sapiens
  CDR3 for alpha chain variable domain of TCR clone 138604 (TRAV21, TRAJ34)
CAHYNTDKLIF

SEQ ID NO: 277208 - protein, 13 aa, Homo sapiens
  CDR3 for beta chain variable domain of TCR clone 138604 (TRBV7-6, TRBJ1-2)
CASSLVADNGYTF

SEQ ID NO: 277209 - protein, 11 aa, Homo sapiens
  CDR3 for alpha chain variable domain of TCR clone 138605 (TRAV12-1, TRAJ33)
CVVNSNYQLIW

SEQ ID NO: 277210 - protein, 13 aa, Homo sapiens
  CDR3 for beta chain variable domain of TCR clone 138605 (TRBV12-4, TRBJ2-7)
CASSLSGVYEQYF

SEQ ID NO: 277211 - protein, 17 aa, Homo sapiens
  CDR3 for alpha chain variable domain of TCR clone 138606 (TRAV23/DV6, TRAJ58)
CAARLLRGETSGSRLTF

SEQ ID NO: 277212 - protein, 16 aa, Homo sapiens
  CDR3 for beta chain variable domain of TCR clone 138606 (TRBV6-1, TRBJ2-5)
GASSETLDRGAETQYF

SEQ ID NO: 277213 - protein, 15 aa, Homo sapiens
  CDR3 for alpha chain variable domain of TCR clone 138607 (TRAV21, TRAJ53)
CATLNSGGGNYKLTF

SEQ ID NO: 277214 - protein, 15 aa, Homo sapiens
  CDR3 for beta chain variable domain of TCR clone 138607 (TRBV11-3, TRBJ2-7)
CASSPGPASSYEQYF

SEQ ID NO: 277215 - protein, 16 aa, Homo sapiens
  CDR3 for alpha chain variable domain of TCR clone 138608 (TRAV30, TRAJ24)
FGTEIVYSDSWGKFQF

SEQ ID NO: 277216 - protein, 14 aa, Homo sapiens
  CDR3 for beta chain variable domain of TCR clone 138608 (TRBV7-2, TRBJ2-7)
CASRSQGAAYEQYF

SEQ ID NO: 277217 - protein, 22 aa, Homo sapiens
  CDR3 for alpha chain variable domain of TCR clone 138609 (TRAV30, TRAJ48)
TASQLSYLVTYFCGIGNEKLTF

SEQ ID NO: 277218 - protein, 16 aa, Homo sapiens
  CDR3 for beta chain variable domain of TCR clone 138609 (TRBV20-1, TRBJ1-4)
CSAPGQGLLANEKLFF

SEQ ID NO: 277219 - protein, 10 aa, Homo sapiens
  CDR3 for alpha chain variable domain of TCR clone 138610 (TRAV3, TRAJ3)
CAVVQQCFQD

SEQ ID NO: 277220 - protein, 16 aa, Homo sapiens
  CDR3 for beta chain variable domain of TCR clone 138610 (TRBV4-1, TRBJ2-7)
CASSQEWTSGPLEQYF

SEQ ID NO: 277221 - protein, 15 aa, Homo sapiens
  CDR3 for alpha chain variable domain of TCR clone 138611 (TRAV3, TRAJ47)
CAVRDTGECGNRLVF

SEQ ID NO: 277222 - protein, 14 aa, Homo sapiens
  CDR3 for beta chain variable domain of TCR clone 138611 (TRBV13, TRBJ2-5)
CASSLERVGETQYS

SEQ ID NO: 277223 - protein, 12 aa, Homo sapiens
  CDR3 for alpha chain variable domain of TCR clone 138612 (TRAV1-1, TRAJ39)
CAVPVVGNMLTF

SEQ ID NO: 277224 - protein, 15 aa, Homo sapiens
  CDR3 for beta chain variable domain of TCR clone 138612 (TRBV19, TRBJ1-6)
CASSTQGSVGSPLHF

SEQ ID NO: 277225 - protein, 15 aa, Homo sapiens
  CDR3 for alpha chain variable domain of TCR clone 138613 (TRAV12-2, TRAJ50)
CAVNGLETSYDKVIF

SEQ ID NO: 277226 - protein, 15 aa, Homo sapiens
  CDR3 for beta chain variable domain of TCR clone 138613 (TRBV12-4, TRBJ2-5)
CASSPPTGLQETQYF

SEQ ID NO: 277227 - protein, 12 aa, Homo sapiens
  CDR3 for alpha chain variable domain of TCR clone 138614 (TRAV21, TRAJ12)
CAVMDSSYKLIF

SEQ ID NO: 277228 - protein, 13 aa, Homo sapiens
  CDR3 for beta chain variable domain of TCR clone 138614 (TRBV4-2, TRBJ1-1)
CASSQAGNTEAFF

SEQ ID NO: 277229 - protein, 15 aa, Homo sapiens
  CDR3 for alpha chain variable domain of TCR clone 138615 (TRAV12-3, TRAJ49)
CAMAVTPNTGNQFYF

SEQ ID NO: 277230 - protein, 14 aa, Homo sapiens
  CDR3 for beta chain variable domain of TCR clone 138615 (TRBV7-8, TRBJ2-3)
YASSLEAGTDTQYF

SEQ ID NO: 277231 - protein, 23 aa, Homo sapiens
  CDR3 for alpha chain variable domain of TCR clone 138616 (TRAV8-6, TRAJ38)
CAVRNAGNNHIQNPDPAVYQLRD

SEQ ID NO: 277232 - protein, 15 aa, Homo sapiens
  CDR3 for beta chain variable domain of TCR clone 138616 (TRBV4-1, TRBJ2-2)
CASSEGQGITGELFV

SEQ ID NO: 277233 - protein, 13 aa, Homo sapiens
  CDR3 for alpha chain variable domain of TCR clone 138617 (TRAV17, TRAJ6)
CATGFGGSYIPTF

SEQ ID NO: 277234 - protein, 12 aa, Homo sapiens
  CDR3 for beta chain variable domain of TCR clone 138617 (TRBV11-2, TRBJ2-2)
CASSLGGGELFF

SEQ ID NO: 277235 - protein, 14 aa, Homo sapiens
  CDR3 for alpha chain variable domain of TCR clone 138618 (TRAV12-3, TRAJ10)
SHLPLTGRGNKLTF

SEQ ID NO: 277236 - protein, 12 aa, Homo sapiens
  CDR3 for beta chain variable domain of TCR clone 138618 (TRBV7-9, TRBJ2-7)
CASSIKREEQYF

SEQ ID NO: 277237 - protein, 16 aa, Homo sapiens
  CDR3 for alpha chain variable domain of TCR clone 138619 (TRAV16, TRAJ42)
CVRKMNYGGSQGNLIF

SEQ ID NO: 277238 - protein, 15 aa, Homo sapiens
  CDR3 for beta chain variable domain of TCR clone 138619 (TRBV20-1, TRBJ2-7)
CSAREGRDSLYEQYF

SEQ ID NO: 277239 - protein, 15 aa, Homo sapiens
  CDR3 for alpha chain variable domain of TCR clone 138620 (TRAV27, TRAJ53)
CRAVNSGGSNYKLTF

SEQ ID NO: 277240 - protein, 14 aa, Homo sapiens
  CDR3 for beta chain variable domain of TCR clone 138620 (TRBV7-3, TRBJ2-1)
CASSLAGGTNEQFF

SEQ ID NO: 277241 - protein, 12 aa, Homo sapiens
  CDR3 for alpha chain variable domain of TCR clone 138621 (TRAV17, TRAJ12)
CAGGDSSYKLIF

SEQ ID NO: 277242 - protein, 12 aa, Homo sapiens
  CDR3 for beta chain variable domain of TCR clone 138621 (TRBV7-9, TRBJ2-7)
CASSIKREEQYF

SEQ ID NO: 277243 - protein, 14 aa, Homo sapiens
  CDR3 for alpha chain variable domain of TCR clone 138622 (TRAV12-3, TRAJ9)
CAMSPNTGGFNTIF

SEQ ID NO: 277244 - protein, 15 aa, Homo sapiens
  CDR3 for beta chain variable domain of TCR clone 138622 (TRBV6-5, TRBJ2-1)
CASSYDAGAGNEQFF

SEQ ID NO: 277245 - protein, 15 aa, Homo sapiens
  CDR3 for alpha chain variable domain of TCR clone 138623 (TRAV12-3, TRAJ47)
CAMSALVEYGNKLVF

SEQ ID NO: 277246 - protein, 14 aa, Homo sapiens
  CDR3 for beta chain variable domain of TCR clone 138623 (TRBV25-1, TRBJ2-1)
CASSEFIGDSKQFF

SEQ ID NO: 277247 - protein, 17 aa, Homo sapiens
  CDR3 for alpha chain variable domain of TCR clone 138624 (TRAV3, TRAJ6)
CAARDGPRAGGSYIPTF

SEQ ID NO: 277248 - protein, 14 aa, Homo sapiens
  CDR3 for beta chain variable domain of TCR clone 138624 (TRBV7-2, TRBJ2-7)
CASSPKTSFYEQYI

SEQ ID NO: 277249 - protein, 13 aa, Homo sapiens
  CDR3 for alpha chain variable domain of TCR clone 138625 (TRAV26-1, TRAJ29)
CIVRRSGNTPLVF

SEQ ID NO: 277250 - protein, 16 aa, Homo sapiens
  CDR3 for beta chain variable domain of TCR clone 138625 (TRBV11-2, TRBJ2-7)
CASSLDPTGVNYEQYF

SEQ ID NO: 277251 - protein, 14 aa, Homo sapiens
  CDR3 for alpha chain variable domain of TCR clone 138626 (TRAV12-2, TRAJ17)
CAGLFKAAGNKLTF

SEQ ID NO: 277252 - protein, 14 aa, Homo sapiens
  CDR3 for beta chain variable domain of TCR clone 138626 (TRBV29-1, TRBJ2-1)
CSVGAVAGGNEQFF

SEQ ID NO: 277253 - protein, 14 aa, Homo sapiens
  CDR3 for alpha chain variable domain of TCR clone 138627 (TRAV12-2, TRAJ45)
CAVNIGGGADGLTF

SEQ ID NO: 277254 - protein, 13 aa, Homo sapiens
  CDR3 for beta chain variable domain of TCR clone 138627 (TRBV19, TRBJ2-2)
CAGGIWSTGELFF

SEQ ID NO: 277255 - protein, 13 aa, Homo sapiens
  CDR3 for alpha chain variable domain of TCR clone 138628 (TRAV3, TRAJ20)
CAVRDGGDYKLSF

SEQ ID NO: 277256 - protein, 15 aa, Homo sapiens
  CDR3 for beta chain variable domain of TCR clone 138628 (TRBV10-1, TRBJ2-1)
CASSQLAGGPTEQFF

SEQ ID NO: 277257 - protein, 14 aa, Homo sapiens
  CDR3 for alpha chain variable domain of TCR clone 138629 (TRAV8-3, TRAJ9)
CAVVYNTGGFKTIV

SEQ ID NO: 277258 - protein, 14 aa, Homo sapiens
  CDR3 for beta chain variable domain of TCR clone 138629 (TRBV7-3, TRBJ2-2)
CASSSGGYTGELFF

SEQ ID NO: 277259 - protein, 12 aa, Homo sapiens
  CDR3 for alpha chain variable domain of TCR clone 138630 (TRAV2, TRAJ31)
CAVEEGNARLMF

SEQ ID NO: 277260 - protein, 15 aa, Homo sapiens
  CDR3 for beta chain variable domain of TCR clone 138630 (TRBV7-9, TRBJ1-6)
CASSSPGRGNSPLHF

SEQ ID NO: 277261 - protein, 13 aa, Homo sapiens
  CDR3 for alpha chain variable domain of TCR clone 138631 (TRAV21, TRAJ42)
CAVKGGSPGNLIF

SEQ ID NO: 277262 - protein, 17 aa, Homo sapiens
  CDR3 for beta chain variable domain of TCR clone 138631 (TRBV7-9, TRBJ2-6)
CASSPSQGLRGANGLTF

SEQ ID NO: 277263 - protein, 11 aa, Homo sapiens
  CDR3 for alpha chain variable domain of TCR clone 138632 (TRAV2, TRAJ23)
CAVETRGKLIF

SEQ ID NO: 277264 - protein, 14 aa, Homo sapiens
  CDR3 for beta chain variable domain of TCR clone 138632 (TRBV5-5, TRBJ1-2)
CASSLDPYNYGYTF

SEQ ID NO: 277265 - protein, 14 aa, Homo sapiens
  CDR3 for alpha chain variable domain of TCR clone 138633 (TRAV8-1, TRAJ24)
CAVNAADSWGKLQF

SEQ ID NO: 277266 - protein, 16 aa, Homo sapiens
  CDR3 for beta chain variable domain of TCR clone 138633 (TRBV4-3, TRBJ2-1)
CASSPALDRGVNEEFF

SEQ ID NO: 277267 - protein, 14 aa, Homo sapiens
  CDR3 for alpha chain variable domain of TCR clone 138634 (TRAV12-3, TRAJ53)
CAATSGGSNQKLTF

SEQ ID NO: 277268 - protein, 13 aa, Homo sapiens
  CDR3 for beta chain variable domain of TCR clone 138634 (TRBV19, TRBJ1-5)
CASSTQDGQPQHF

SEQ ID NO: 277269 - protein, 14 aa, Homo sapiens
  CDR3 for alpha chain variable domain of TCR clone 138635 (TRAV13-1, TRAJ24)
CAASRTGSWGKLQF

SEQ ID NO: 277270 - protein, 15 aa, Homo sapiens
  CDR3 for beta chain variable domain of TCR clone 138635 (TRBV7-9, TRBJ1-5)
CASSQGHQPNQPQHF

SEQ ID NO: 277271 - protein, 16 aa, Homo sapiens
  CDR3 for alpha chain variable domain of TCR clone 138636 (TRAV8-2, TRAJ7)
CVVSEGPYYGNNRLAF

SEQ ID NO: 277272 - protein, 12 aa, Homo sapiens
  CDR3 for beta chain variable domain of TCR clone 138636 (TRBV7-8, TRBJ2-7)
CASSLGDREQYF

SEQ ID NO: 277273 - protein, 14 aa, Homo sapiens
  CDR3 for alpha chain variable domain of TCR clone 138637 (TRAV12-3, TRAJ10)
SHLPLTGGGIKLTF

SEQ ID NO: 277274 - protein, 14 aa, Homo sapiens
  CDR3 for beta chain variable domain of TCR clone 138637 (TRBV7-3, TRBJ2-1)
CASSLSGSYNEQFF

SEQ ID NO: 277275 - protein, 14 aa, Homo sapiens
  CDR3 for alpha chain variable domain of TCR clone 138638 (TRAV2, TRAJ9)
CAVEDRSGGFKTIF

SEQ ID NO: 277276 - protein, 14 aa, Homo sapiens
  CDR3 for beta chain variable domain of TCR clone 138638 (TRBV19, TRBJ2-1)
CRFSPGQGPNEQFF

SEQ ID NO: 277277 - protein, 13 aa, Homo sapiens
  CDR3 for alpha chain variable domain of TCR clone 138639 (TRAV38-1, TRAJ42)
CAFRSGSQGNLIF

SEQ ID NO: 277278 - protein, 14 aa, Homo sapiens
  CDR3 for beta chain variable domain of TCR clone 138639 (TRBV12-5, TRBJ2-5)
CASGSRTHQETQYF

SEQ ID NO: 277279 - protein, 10 aa, Homo sapiens
  CDR3 for alpha chain variable domain of TCR clone 138640 (TRAV23/DV6, TRAJ57)
CAASSTLLQG

SEQ ID NO: 277280 - protein, 14 aa, Homo sapiens
  CDR3 for beta chain variable domain of TCR clone 138640 (TRBV25-1, TRBJ1-1)
CASTHLGGNTEAFF

SEQ ID NO: 277281 - protein, 16 aa, Homo sapiens
  CDR3 for alpha chain variable domain of TCR clone 138641 (TRAV3, TRAJ3)
CAVRDRAKSSASKIIF

SEQ ID NO: 277282 - protein, 16 aa, Homo sapiens
  CDR3 for beta chain variable domain of TCR clone 138641 (TRBV20-1, TRBJ2-4)
CSATPLAELAKSIQYF

SEQ ID NO: 277283 - protein, 14 aa, Homo sapiens
  CDR3 for alpha chain variable domain of TCR clone 138642 (TRAV13-2, TRAJ11)
CAETGNSGYSTLTF

SEQ ID NO: 277284 - protein, 11 aa, Homo sapiens
  CDR3 for beta chain variable domain of TCR clone 138642 (TRBV10-3, TRBJ2-7)
CTISEGLEQYF

SEQ ID NO: 277285 - protein, 12 aa, Homo sapiens
  CDR3 for alpha chain variable domain of TCR clone 138643 (TRAV12-3, TRAJ40)
CAMSSGTYKYIF

SEQ ID NO: 277286 - protein, 16 aa, Homo sapiens
  CDR3 for beta chain variable domain of TCR clone 138643 (TRBV7-3, TRBJ2-3)
CASSLSGYRPEDTQYF

SEQ ID NO: 277287 - protein, 10 aa, Homo sapiens
  CDR3 for alpha chain variable domain of TCR clone 138644 (TRAV12-3, TRAJ49)
CAMKDYQFYF

SEQ ID NO: 277288 - protein, 13 aa, Homo sapiens
  CDR3 for beta chain variable domain of TCR clone 138644 (TRBV12-4, TRBJ1-1)
CASSPGTGFEAFF

SEQ ID NO: 277289 - protein, 13 aa, Homo sapiens
  CDR3 for alpha chain variable domain of TCR clone 138645 (TRAV29/DV5, TRAJ47)
CAASAEYGNKLVF

SEQ ID NO: 277290 - protein, 15 aa, Homo sapiens
  CDR3 for beta chain variable domain of TCR clone 138645 (TRBV7-9, TRBJ1-4)
CASSARTGGDEKLFF

SEQ ID NO: 277291 - protein, 12 aa, Homo sapiens
  CDR3 for alpha chain variable domain of TCR clone 138646 (TRAV2, TRAJ9)
CAVWAGGFKTIF

SEQ ID NO: 277292 - protein, 16 aa, Homo sapiens
  CDR3 for beta chain variable domain of TCR clone 138646 (TRBV13, TRBJ2-2)
CASSPRTGGHTGELFF

SEQ ID NO: 277293 - protein, 12 aa, Homo sapiens
  CDR3 for alpha chain variable domain of TCR clone 138647 (TRAV12-1, TRAJ40)
CVVNGETYKYIF

SEQ ID NO: 277294 - protein, 14 aa, Homo sapiens
  CDR3 for beta chain variable domain of TCR clone 138647 (TRBV7-9, TRBJ1-1)
CHRRSTKGNPEAFF

SEQ ID NO: 277295 - protein, 13 aa, Homo sapiens
  CDR3 for alpha chain variable domain of TCR clone 138648 (TRAV36/DV7, TRAJ37)
CAVFSSNTGKLIF

SEQ ID NO: 277296 - protein, 15 aa, Homo sapiens
  CDR3 for beta chain variable domain of TCR clone 138648 (TRBV5-1, TRBJ2-2)
SPAAPKGGTPGELFF

SEQ ID NO: 277297 - protein, 14 aa, Homo sapiens
  CDR3 for alpha chain variable domain of TCR clone 138649 (TRAV1-2, TRAJ16)
CAVNRFSDGQELLF

SEQ ID NO: 277298 - protein, 14 aa, Homo sapiens
  CDR3 for beta chain variable domain of TCR clone 138649 (TRBV20-1, TRBJ2-1)
CSARGGSSYNEQFF

SEQ ID NO: 277299 - protein, 12 aa, Homo sapiens
  CDR3 for alpha chain variable domain of TCR clone 138650 (TRAV30, TRAJ24)
CGTVTDRGKLQF

SEQ ID NO: 277300 - protein, 14 aa, Homo sapiens
  CDR3 for beta chain variable domain of TCR clone 138650 (TRBV6-3, TRBJ2-2)
CASTYTPDTGELFF

SEQ ID NO: 277301 - protein, 14 aa, Homo sapiens
  CDR3 for alpha chain variable domain of TCR clone 138651 (TRAV1-2, TRAJ8)
CAAREDTGFQKLVF

SEQ ID NO: 277302 - protein, 13 aa, Homo sapiens
  CDR3 for beta chain variable domain of TCR clone 138651 (TRBV7-6, TRBJ1-2)
CASSLVADYGYTF

SEQ ID NO: 277303 - protein, 16 aa, Homo sapiens
  CDR3 for alpha chain variable domain of TCR clone 138652 (TRAV30, TRAJ24)
CGTEIVDTDSWGKFQC

SEQ ID NO: 277304 - protein, 13 aa, Homo sapiens
  CDR3 for beta chain variable domain of TCR clone 138652 (TRBV19, TRBJ1-2)
CASSVPGQDGYTF

SEQ ID NO: 277305 - protein, 15 aa, Homo sapiens
  CDR3 for alpha chain variable domain of TCR clone 138653 (TRAV8-3, TRAJ45)
CASSYSGGGANGLTF

SEQ ID NO: 277306 - protein, 12 aa, Homo sapiens
  CDR3 for beta chain variable domain of TCR clone 138653 (TRBV29-1, TRBJ2-3)
CSVTGGADTQYF

SEQ ID NO: 277307 - protein, 16 aa, Homo sapiens
  CDR3 for alpha chain variable domain of TCR clone 138654 (TRAV30, TRAJ24)
CCTEIVDADSWGKFQV

SEQ ID NO: 277308 - protein, 14 aa, Homo sapiens
  CDR3 for beta chain variable domain of TCR clone 138654 (TRBV12-5, TRBJ2-5)
CASGSRTHQETQYF

SEQ ID NO: 277309 - protein, 16 aa, Homo sapiens
  CDR3 for alpha chain variable domain of TCR clone 138655 (TRAV30, TRAJ24)
CGTEMVDADSWGKFQF

SEQ ID NO: 277310 - protein, 14 aa, Homo sapiens
  CDR3 for beta chain variable domain of TCR clone 138655 (TRBV20-1, TRBJ1-1)
CSAQTRIGGTEAFF

SEQ ID NO: 277311 - protein, 23 aa, Homo sapiens
  CDR3 for alpha chain variable domain of TCR clone 138656 (TRAV26-1, TRAJ38)
CIADNAGNNHIQNPDPAVYQLSD

SEQ ID NO: 277312 - protein, 12 aa, Homo sapiens
  CDR3 for beta chain variable domain of TCR clone 138656 (TRBV7-8, TRBJ2-7)
CASSLGDREQYF

SEQ ID NO: 277313 - protein, 15 aa, Homo sapiens
  CDR3 for alpha chain variable domain of TCR clone 138657 (TRAV8-3, TRAJ23)
CAVGAPYNQGGKLIF

SEQ ID NO: 277314 - protein, 12 aa, Homo sapiens
  CDR3 for beta chain variable domain of TCR clone 138657 (TRBV11-2, TRBJ2-2)
CASSLGGGELFF

SEQ ID NO: 277315 - protein, 16 aa, Homo sapiens
  CDR3 for alpha chain variable domain of TCR clone 138658 (TRAV3, TRAJ27)
RAVRDPQGTNAGKSTF

SEQ ID NO: 277316 - protein, 15 aa, Homo sapiens
  CDR3 for beta chain variable domain of TCR clone 138658 (TRBV20-1, TRBJ2-7)
CSARDRVSGMDEQYF

SEQ ID NO: 277317 - protein, 16 aa, Homo sapiens
  CDR3 for alpha chain variable domain of TCR clone 138659 (TRAV3, TRAJ37)
CAVRGKGSGNTGKRIF

SEQ ID NO: 277318 - protein, 15 aa, Homo sapiens
  CDR3 for beta chain variable domain of TCR clone 138659 (TRBV6-6, TRBJ2-5)
CASSYGKIIQGTQYF

SEQ ID NO: 277319 - protein, 14 aa, Homo sapiens
  CDR3 for alpha chain variable domain of TCR clone 138660 (TRAV26-1, TRAJ39)
CIVKGSRAGSMLTF

SEQ ID NO: 277320 - protein, 15 aa, Homo sapiens
  CDR3 for beta chain variable domain of TCR clone 138660 (TRBV7-9, TRBJ1-5)
CASSQGHQPNQPQHF

SEQ ID NO: 277321 - protein, 11 aa, Homo sapiens
  CDR3 for alpha chain variable domain of TCR clone 138661 (TRAV21, TRAJ34)
CAHYNTDRLIF

SEQ ID NO: 277322 - protein, 11 aa, Homo sapiens
  CDR3 for beta chain variable domain of TCR clone 138661 (TRBV29-1, TRBJ2-5)
CSEDRTGTQYF

SEQ ID NO: 277323 - protein, 15 aa, Homo sapiens
  CDR3 for alpha chain variable domain of TCR clone 138662 (TRAV5, TRAJ33)
CSEAPATDSNYQLIL

SEQ ID NO: 277324 - protein, 14 aa, Homo sapiens
  CDR3 for beta chain variable domain of TCR clone 138662 (TRBV4-1, TRBJ2-2)
CASSQAVNTGELFF

SEQ ID NO: 277325 - protein, 16 aa, Homo sapiens
  CDR3 for alpha chain variable domain of TCR clone 138663 (TRAV13-1, TRAJ38)
CAASTSNAGNNRKLIW

SEQ ID NO: 277326 - protein, 16 aa, Homo sapiens
  CDR3 for beta chain variable domain of TCR clone 138663 (TRBV12-4, TRBJ1-5)
CASSSGPRSSNQPQHF

SEQ ID NO: 277327 - protein, 11 aa, Homo sapiens
  CDR3 for alpha chain variable domain of TCR clone 138664 (TRAV12-3, TRAJ41)
CAMNAREALNF

SEQ ID NO: 277328 - protein, 15 aa, Homo sapiens
  CDR3 for beta chain variable domain of TCR clone 138664 (TRBV7-8, TRBJ2-3)
CASSTEGPGNRYAVF

SEQ ID NO: 277329 - protein, 15 aa, Homo sapiens
  CDR3 for alpha chain variable domain of TCR clone 138665 (TRAV2, TRAJ22)
CAVPSRGGSARQLTF

SEQ ID NO: 277330 - protein, 12 aa, Homo sapiens
  CDR3 for beta chain variable domain of TCR clone 138665 (TRBV12-4, TRBJ2-7)
CASSLGGYEQYF

SEQ ID NO: 277331 - protein, 14 aa, Homo sapiens
  CDR3 for alpha chain variable domain of TCR clone 138666 (TRAV12-2, TRAJ45)
CAVNIGGGADGLSF

SEQ ID NO: 277332 - protein, 13 aa, Homo sapiens
  CDR3 for beta chain variable domain of TCR clone 138666 (TRBV19, TRBJ2-2)
CASSIWSTGELFF

SEQ ID NO: 277333 - protein, 14 aa, Homo sapiens
  CDR3 for alpha chain variable domain of TCR clone 138667 (TRAV17, TRAJ54)
CATDANQGAQKLVF

SEQ ID NO: 277334 - protein, 15 aa, Homo sapiens
  CDR3 for beta chain variable domain of TCR clone 138667 (TRBV29-1, TRBJ2-1)
CSGRDRKSSYNEQFF

SEQ ID NO: 277335 - protein, 13 aa, Homo sapiens
  CDR3 for alpha chain variable domain of TCR clone 138668 (TRAV3, TRAJ21)
CAVREPDFNKFYF

SEQ ID NO: 277336 - protein, 16 aa, Homo sapiens
  CDR3 for beta chain variable domain of TCR clone 138668 (TRBV7-8, TRBJ2-6)
CQQRRDRGRWGNVLTF

SEQ ID NO: 277337 - protein, 16 aa, Homo sapiens
  CDR3 for alpha chain variable domain of TCR clone 138669 (TRAV21, TRAJ37)
CAFRTAGPSNTGKLIF

SEQ ID NO: 277338 - protein, 13 aa, Homo sapiens
  CDR3 for beta chain variable domain of TCR clone 138669 (TRBV7-9, TRBJ2-5)
CASLPSGRETQYF

SEQ ID NO: 277339 - protein, 15 aa, Homo sapiens
  CDR3 for alpha chain variable domain of TCR clone 138670 (TRAV21, TRAJ53)
CATLNSGGSNYKLTF

SEQ ID NO: 277340 - protein, 16 aa, Homo sapiens
  CDR3 for beta chain variable domain of TCR clone 138670 (TRBV11-2, TRBJ2-5)
CASSGQGYSPQETQYF

SEQ ID NO: 277341 - protein, 14 aa, Homo sapiens
  CDR3 for alpha chain variable domain of TCR clone 138671 (TRAV1-1, TRAJ27)
CAVIYNTNAGKSTF

SEQ ID NO: 277342 - protein, 13 aa, Homo sapiens
  CDR3 for beta chain variable domain of TCR clone 138671 (TRBV12-5, TRBJ1-2)
CASGVRTGNGYTC

SEQ ID NO: 277343 - protein, 13 aa, Homo sapiens
  CDR3 for alpha chain variable domain of TCR clone 138672 (TRAV22, TRAJ29)
CAVGGSGNTPLVF

SEQ ID NO: 277344 - protein, 13 aa, Homo sapiens
  CDR3 for beta chain variable domain of TCR clone 138672 (TRBV12-5, TRBJ2-3)
CASGDRQSDTQYF

SEQ ID NO: 277345 - protein, 14 aa, Homo sapiens
  CDR3 for alpha chain variable domain of TCR clone 138673 (TRAV1-2, TRAJ8)
CAVREDTGFQKLVL

SEQ ID NO: 277346 - protein, 20 aa, Homo sapiens
  CDR3 for beta chain variable domain of TCR clone 138673 (TRBV7-8, TRBJ2-2)
CASSHLFPGPTIHITGELFF

SEQ ID NO: 277347 - protein, 16 aa, Homo sapiens
  CDR3 for alpha chain variable domain of TCR clone 138674 (TRAV12-2, TRAJ6)
CAAPLAGSGGSYIPTF

SEQ ID NO: 277348 - protein, 10 aa, Homo sapiens
  CDR3 for beta chain variable domain of TCR clone 138674 (TRBV28, TRBJ1-2)
CASSSVRAVF

SEQ ID NO: 277349 - protein, 15 aa, Homo sapiens
  CDR3 for alpha chain variable domain of TCR clone 138675 (TRAV4, TRAJ36)
CLVVDRQTGANNLFF

SEQ ID NO: 277350 - protein, 15 aa, Homo sapiens
  CDR3 for beta chain variable domain of TCR clone 138675 (TRBV7-6, TRBJ2-1)
CASSSLAGEGNEQFF

SEQ ID NO: 277351 - protein, 17 aa, Homo sapiens
  CDR3 for alpha chain variable domain of TCR clone 138676 (TRAV8-3, TRAJ52)
CAVGAEAGGTSYGKLTF

SEQ ID NO: 277352 - protein, 17 aa, Homo sapiens
  CDR3 for beta chain variable domain of TCR clone 138676 (TRBV20-1, TRBJ2-7)
CSARDPEGDHREYEQYF

SEQ ID NO: 277353 - protein, 14 aa, Homo sapiens
  CDR3 for alpha chain variable domain of TCR clone 138677 (TRAV1-2, TRAJ8)
CAVREDTGFQKLGF

SEQ ID NO: 277354 - protein, 17 aa, Homo sapiens
  CDR3 for beta chain variable domain of TCR clone 138677 (TRBV20-1, TRBJ2-2)
CSASGSGQGGLTGELFF

SEQ ID NO: 277355 - protein, 14 aa, Homo sapiens
  CDR3 for alpha chain variable domain of TCR clone 138678 (TRAV38-1, TRAJ29)
CAFITPSGNTPLVF

SEQ ID NO: 277356 - protein, 16 aa, Homo sapiens
  CDR3 for beta chain variable domain of TCR clone 138678 (TRBV5-4, TRBJ2-3)
CASQQPGAGGADTQYF

SEQ ID NO: 277357 - protein, 14 aa, Homo sapiens
  CDR3 for alpha chain variable domain of TCR clone 138679 (TRAV1-1, TRAJ28)
CAAPSGAGSYQLTF

SEQ ID NO: 277358 - protein, 15 aa, Homo sapiens
  CDR3 for beta chain variable domain of TCR clone 138679 (TRBV4-1, TRBJ1-1)
CASSQEWGHYTEAFF

SEQ ID NO: 277359 - protein, 15 aa, Homo sapiens
  CDR3 for alpha chain variable domain of TCR clone 138680 (TRAV26-1, TRAJ29)
CIVRVEGSGTTPLVL

SEQ ID NO: 277360 - protein, 14 aa, Homo sapiens
  CDR3 for beta chain variable domain of TCR clone 138680 (TRBV18, TRBJ2-5)
CASSPGLSQETHYF

SEQ ID NO: 277361 - protein, 19 aa, Homo sapiens
  CDR3 for alpha chain variable domain of TCR clone 138681 (TRAV26-1, TRAJ52)
CIVRAHRHAGGTSYGKLTF

SEQ ID NO: 277362 - protein, 15 aa, Homo sapiens
  CDR3 for beta chain variable domain of TCR clone 138681 (TRBV29-1, TRBJ2-1)
CSGRDRKSSYNEQVF

SEQ ID NO: 277363 - protein, 17 aa, Homo sapiens
  CDR3 for alpha chain variable domain of TCR clone 138682 (TRAV3, TRAJ38)
CAVRDCLNAGNTRKLIW

SEQ ID NO: 277364 - protein, 13 aa, Homo sapiens
  CDR3 for beta chain variable domain of TCR clone 138682 (TRBV23-1, TRBJ1-4)
CASRGKFNEKLFF

SEQ ID NO: 277365 - protein, 18 aa, Homo sapiens
  CDR3 for alpha chain variable domain of TCR clone 138683 (TRAV9-2, TRAJ52)
CALIRHNAGGTSYGKLTF

SEQ ID NO: 277366 - protein, 13 aa, Homo sapiens
  CDR3 for beta chain variable domain of TCR clone 138683 (TRBV20-1, TRBJ1-1)
CSAPLGGGTEAFF

SEQ ID NO: 277367 - protein, 17 aa, Homo sapiens
  CDR3 for alpha chain variable domain of TCR clone 138684 (TRAV13-1, TRAJ28)
CAASPPYSGAGGYQLTF

SEQ ID NO: 277368 - protein, 14 aa, Homo sapiens
  CDR3 for beta chain variable domain of TCR clone 138684 (TRBV24-1, TRBJ1-1)
CATSIPRGDTEAFF

SEQ ID NO: 277369 - protein, 15 aa, Homo sapiens
  CDR3 for alpha chain variable domain of TCR clone 138685 (TRAV13-2, TRAJ23)
CAERGFYNQGGKLIF

SEQ ID NO: 277370 - protein, 14 aa, Homo sapiens
  CDR3 for beta chain variable domain of TCR clone 138685 (TRBV4-1, TRBJ2-3)
CASSQDWSTDTQYC

SEQ ID NO: 277371 - protein, 13 aa, Homo sapiens
  CDR3 for alpha chain variable domain of TCR clone 138686 (TRAV1-2, TRAJ7)
CAGPYYGNNGLAF

SEQ ID NO: 277372 - protein, 15 aa, Homo sapiens
  CDR3 for beta chain variable domain of TCR clone 138686 (TRBV9, TRBJ1-6)
CASSVAGTGDSPLHF

SEQ ID NO: 277373 - protein, 11 aa, Homo sapiens
  CDR3 for alpha chain variable domain of TCR clone 138687 (TRAV27, TRAJ45)
CAGAQEEVLTD

SEQ ID NO: 277374 - protein, 17 aa, Homo sapiens
  CDR3 for beta chain variable domain of TCR clone 138687 (TRBV11-2, TRBJ2-1)
CASSLCPPGVEYNEQFF

SEQ ID NO: 277375 - protein, 16 aa, Homo sapiens
  CDR3 for alpha chain variable domain of TCR clone 138688 (TRAV3, TRAJ37)
CAVRGKGSGNTGKIIF

SEQ ID NO: 277376 - protein, 16 aa, Homo sapiens
  CDR3 for beta chain variable domain of TCR clone 138688 (TRBV12-4, TRBJ1-5)
CASSRPVGGSNQPQHF

SEQ ID NO: 277377 - protein, 14 aa, Homo sapiens
  CDR3 for alpha chain variable domain of TCR clone 138689 (TRAV3, TRAJ17)
CAVRDAAAGNKQTF

SEQ ID NO: 277378 - protein, 15 aa, Homo sapiens
  CDR3 for beta chain variable domain of TCR clone 138689 (TRBV6-3, TRBJ2-5)
CASSLLRGDQEPQYF

SEQ ID NO: 277379 - protein, 11 aa, Homo sapiens
  CDR3 for alpha chain variable domain of TCR clone 138690 (TRAV3, TRAJ21)
CAVGNFNKFYF

SEQ ID NO: 277380 - protein, 14 aa, Homo sapiens
  CDR3 for beta chain variable domain of TCR clone 138690 (TRBV19, TRBJ2-1)
CARGAKSFQWEQFF

SEQ ID NO: 277381 - protein, 14 aa, Homo sapiens
  CDR3 for alpha chain variable domain of TCR clone 138691 (TRAV12-2, TRAJ24)
CAVTPADSWGKLQF

SEQ ID NO: 277382 - protein, 13 aa, Homo sapiens
  CDR3 for beta chain variable domain of TCR clone 138691 (TRBV27, TRBJ2-7)
CASSLRHRYEQYF

SEQ ID NO: 277383 - protein, 14 aa, Homo sapiens
  CDR3 for alpha chain variable domain of TCR clone 138692 (TRAV35, TRAJ44)
CAGRPSRTASKLTF

SEQ ID NO: 277384 - protein, 14 aa, Homo sapiens
  CDR3 for beta chain variable domain of TCR clone 138692 (TRBV7-2, TRBJ1-3)
CASSRGGTGNTIYL

SEQ ID NO: 277385 - protein, 14 aa, Homo sapiens
  CDR3 for alpha chain variable domain of TCR clone 138693 (TRAV23/DV6, TRAJ57)
CAASNQAGSEQLVF

SEQ ID NO: 277386 - protein, 13 aa, Homo sapiens
  CDR3 for beta chain variable domain of TCR clone 138693 (TRBV11-2, TRBJ2-7)
CASSSYPSYEQYF

SEQ ID NO: 277387 - protein, 12 aa, Homo sapiens
  CDR3 for alpha chain variable domain of TCR clone 138694 (TRAV4, TRAJ26)
CLVGDYGQNFVF

SEQ ID NO: 277388 - protein, 13 aa, Homo sapiens
  CDR3 for beta chain variable domain of TCR clone 138694 (TRBV20-1, TRBJ1-1)
CSARGGGNTEAFF

SEQ ID NO: 277389 - protein, 15 aa, Homo sapiens
  CDR3 for alpha chain variable domain of TCR clone 138695 (TRAV12-3, TRAJ27)
CAMRAYNTNAGKSTF

SEQ ID NO: 277390 - protein, 13 aa, Homo sapiens
  CDR3 for beta chain variable domain of TCR clone 138695 (TRBV11-2, TRBJ2-5)
CASSRGSSETQYF

SEQ ID NO: 277391 - protein, 14 aa, Homo sapiens
  CDR3 for alpha chain variable domain of TCR clone 138696 (TRAV26-1, TRAJ34)
CIVRVAYNTDKLIF

SEQ ID NO: 277392 - protein, 16 aa, Homo sapiens
  CDR3 for beta chain variable domain of TCR clone 138696 (TRBV10-3, TRBJ2-1)
CAISGVGDGGGGEQFF

SEQ ID NO: 277393 - protein, 13 aa, Homo sapiens
  CDR3 for alpha chain variable domain of TCR clone 138697 (TRAV8-1, TRAJ9)
CAVNSVGGFKTIF

SEQ ID NO: 277394 - protein, 15 aa, Homo sapiens
  CDR3 for beta chain variable domain of TCR clone 138697 (TRBV11-2, TRBJ2-3)
CASSGRDGLTDTKYF

SEQ ID NO: 277395 - protein, 14 aa, Homo sapiens
  CDR3 for alpha chain variable domain of TCR clone 138698 (TRAV12-2, TRAJ17)
CAALFKAAGNKLTF

SEQ ID NO: 277396 - protein, 16 aa, Homo sapiens
  CDR3 for beta chain variable domain of TCR clone 138698 (TRBV20-1, TRBJ2-2)
CSVSASGIPGAGELFF

SEQ ID NO: 277397 - protein, 13 aa, Homo sapiens
  CDR3 for alpha chain variable domain of TCR clone 138699 (TRAV12-1, TRAJ31)
CVVNMNNTDRLMF

SEQ ID NO: 277398 - protein, 15 aa, Homo sapiens
  CDR3 for beta chain variable domain of TCR clone 138699 (TRBV4-1, TRBJ1-2)
CASSQGQGAAYGYTF

SEQ ID NO: 277399 - protein, 15 aa, Homo sapiens
  CDR3 for alpha chain variable domain of TCR clone 138700 (TRAV26-1, TRAJ44)
CIVRANTGTASKLTF

SEQ ID NO: 277400 - protein, 16 aa, Homo sapiens
  CDR3 for beta chain variable domain of TCR clone 138700 (TRBV7-7, TRBJ2-5)
CASSLASGTSYNEQFF

SEQ ID NO: 277401 - protein, 15 aa, Homo sapiens
  CDR3 for alpha chain variable domain of TCR clone 138701 (TRAV26-1, TRAJ44)
CIVRANTGTASKLTF

SEQ ID NO: 277402 - protein, 16 aa, Homo sapiens
  CDR3 for beta chain variable domain of TCR clone 138701 (TRBV7-7, TRBJ2-7)
CASSLASGTSYNEQFF

SEQ ID NO: 277403 - protein, 14 aa, Homo sapiens
  CDR3 for alpha chain variable domain of TCR clone 138702 (TRAV22, TRAJ6)
CAGVGPGGSYIPTF

SEQ ID NO: 277404 - protein, 12 aa, Homo sapiens
  CDR3 for beta chain variable domain of TCR clone 138702 (TRBV20-1, TRBJ2-1)
CSARLGTDEQFF

SEQ ID NO: 277405 - protein, 16 aa, Homo sapiens
  CDR3 for alpha chain variable domain of TCR clone 138703 (TRAV30, TRAJ24)
CGTEIVDADSWWKFQF

SEQ ID NO: 277406 - protein, 15 aa, Homo sapiens
  CDR3 for beta chain variable domain of TCR clone 138703 (TRBV28, TRBJ2-1)
CASSIIAGGRSEQFF

SEQ ID NO: 277407 - protein, 15 aa, Homo sapiens
  CDR3 for alpha chain variable domain of TCR clone 138704 (TRAV17, TRAJ13)
CATDAGSGGYQKVTF

SEQ ID NO: 277408 - protein, 16 aa, Homo sapiens
  CDR3 for beta chain variable domain of TCR clone 138704 (TRBV2, TRBJ1-5)
CASSELHKSGFQPQHF

SEQ ID NO: 277409 - protein, 12 aa, Homo sapiens
  CDR3 for alpha chain variable domain of TCR clone 138705 (TRAV12-2, TRAJ43)
CAVNVNNNYMRF

SEQ ID NO: 277410 - protein, 14 aa, Homo sapiens
  CDR3 for beta chain variable domain of TCR clone 138705 (TRBV25-1, TRBJ2-2)
CAGSELGLPGELFF

SEQ ID NO: 277411 - protein, 15 aa, Homo sapiens
  CDR3 for alpha chain variable domain of TCR clone 138706 (TRAV29/DV5, TRAJ29)
CAASERSSGNTPIVF

SEQ ID NO: 277412 - protein, 12 aa, Homo sapiens
  CDR3 for beta chain variable domain of TCR clone 138706 (TRBV7-9, TRBJ1-4)
CASSTDREKLFF

SEQ ID NO: 277413 - protein, 16 aa, Homo sapiens
  CDR3 for alpha chain variable domain of TCR clone 138707 (TRAV26-1, TRAJ33)
CIVPFWGEDSNYQLIW

SEQ ID NO: 277414 - protein, 14 aa, Homo sapiens
  CDR3 for beta chain variable domain of TCR clone 138707 (TRBV12-5, TRBJ2-5)
CASGSRTHQETQYF

SEQ ID NO: 277415 - protein, 13 aa, Homo sapiens
  CDR3 for alpha chain variable domain of TCR clone 138708 (TRAV26-1, TRAJ33)
CIVRVESNYQLIW

SEQ ID NO: 277416 - protein, 16 aa, Homo sapiens
  CDR3 for beta chain variable domain of TCR clone 138708 (TRBV15, TRBJ2-7)
CATSRDRGRRRGEQYF

SEQ ID NO: 277417 - protein, 15 aa, Homo sapiens
  CDR3 for alpha chain variable domain of TCR clone 138709 (TRAV3, TRAJ17)
CAVSPKEAEGNKLTF

SEQ ID NO: 277418 - protein, 12 aa, Homo sapiens
  CDR3 for beta chain variable domain of TCR clone 138709 (TRBV7-9, TRBJ1-6)
CASSLMTSPLHF

SEQ ID NO: 277419 - protein, 17 aa, Homo sapiens
  CDR3 for alpha chain variable domain of TCR clone 138710 (TRAV17, TRAJ52)
CDTERPSGGTSYGKLTF

SEQ ID NO: 277420 - protein, 13 aa, Homo sapiens
  CDR3 for beta chain variable domain of TCR clone 138710 (TRBV6-4, TRBJ1-5)
CASSADLNQPQHF

SEQ ID NO: 277421 - protein, 14 aa, Homo sapiens
  CDR3 for alpha chain variable domain of TCR clone 138711 (TRAV12-2, TRAJ13)
CAVKKTGGYQKVTF

SEQ ID NO: 277422 - protein, 15 aa, Homo sapiens
  CDR3 for beta chain variable domain of TCR clone 138711 (TRBV6-6, TRBJ2-5)
CASSPGGGLEETQYF

SEQ ID NO: 277423 - protein, 14 aa, Homo sapiens
  CDR3 for alpha chain variable domain of TCR clone 138712 (TRAV12-1, TRAJ17)
CVANYKAAGNKLTF

SEQ ID NO: 277424 - protein, 17 aa, Homo sapiens
  CDR3 for beta chain variable domain of TCR clone 138712 (TRBV20-1, TRBJ2-1)
CSASSSGLAGSYKEQFF

SEQ ID NO: 277425 - protein, 13 aa, Homo sapiens
  CDR3 for alpha chain variable domain of TCR clone 138713 (TRAV12-3, TRAJ54)
CALVPQGPQKLLF

SEQ ID NO: 277426 - protein, 15 aa, Homo sapiens
  CDR3 for beta chain variable domain of TCR clone 138713 (TRBV4-1, TRBJ2-2)
CASSQDSRGTGELFF

SEQ ID NO: 277427 - protein, 14 aa, Homo sapiens
  CDR3 for alpha chain variable domain of TCR clone 138714 (TRAV12-2, TRAJ36)
CAVKISTGSNNLFF

SEQ ID NO: 277428 - protein, 14 aa, Homo sapiens
  CDR3 for beta chain variable domain of TCR clone 138714 (TRBV20-1, TRBJ2-3)
CSARGGTSTDTQYF

SEQ ID NO: 277429 - protein, 15 aa, Homo sapiens
  CDR3 for alpha chain variable domain of TCR clone 138715 (TRAV3, TRAJ45)
CASSYSGGGADGLTF

SEQ ID NO: 277430 - protein, 18 aa, Homo sapiens
  CDR3 for beta chain variable domain of TCR clone 138715 (TRBV18, TRBJ1-3)
CASSPRGGAGPSGNTMYF

SEQ ID NO: 277431 - protein, 13 aa, Homo sapiens
  CDR3 for alpha chain variable domain of TCR clone 138716 (TRAV8-3, TRAJ43)
CAVGPDNNNHMRF

SEQ ID NO: 277432 - protein, 12 aa, Homo sapiens
  CDR3 for beta chain variable domain of TCR clone 138716 (TRBV7-2, TRBJ1-6)
CASSLSSSPLHF

SEQ ID NO: 277433 - protein, 15 aa, Homo sapiens
  CDR3 for alpha chain variable domain of TCR clone 138717 (TRAV4, TRAJ15)
CLVGDGNQAGTALIF

SEQ ID NO: 277434 - protein, 12 aa, Homo sapiens
  CDR3 for beta chain variable domain of TCR clone 138717 (TRBV6-5, TRBJ2-7)
CASSDRRNEQYF

SEQ ID NO: 277435 - protein, 13 aa, Homo sapiens
  CDR3 for alpha chain variable domain of TCR clone 138718 (TRAV3, TRAJ4)
CAVRDGGYNKLIF

SEQ ID NO: 277436 - protein, 12 aa, Homo sapiens
  CDR3 for beta chain variable domain of TCR clone 138718 (TRBV11-2, TRBJ2-1)
CASSPGNNEQFF

SEQ ID NO: 277437 - protein, 13 aa, Homo sapiens
  CDR3 for alpha chain variable domain of TCR clone 138719 (TRAV2, TRAJ40)
CAVVTSGTYKYIF

SEQ ID NO: 277438 - protein, 10 aa, Homo sapiens
  CDR3 for beta chain variable domain of TCR clone 138719 (TRBV6-3, TRBJ2-7)
CASSSPGQFS

SEQ ID NO: 277439 - protein, 13 aa, Homo sapiens
  CDR3 for alpha chain variable domain of TCR clone 138720 (TRAV3, TRAJ27)
CAVRPLGAGKSTF

SEQ ID NO: 277440 - protein, 14 aa, Homo sapiens
  CDR3 for beta chain variable domain of TCR clone 138720 (TRBV19, TRBJ2-1)
CASRGDPTGNEQFF

SEQ ID NO: 277441 - protein, 11 aa, Homo sapiens
  CDR3 for alpha chain variable domain of TCR clone 138721 (TRAV4, TRAJ23)
CLVAPGGKLIF

SEQ ID NO: 277442 - protein, 16 aa, Homo sapiens
  CDR3 for beta chain variable domain of TCR clone 138721 (TRBV7-2, TRBJ2-6)
CAILSGVSSGANVLTF

SEQ ID NO: 277443 - protein, 12 aa, Homo sapiens
  CDR3 for alpha chain variable domain of TCR clone 138722 (TRAV12-1, TRAJ40)
CVVPSGTYNYIF

SEQ ID NO: 277444 - protein, 15 aa, Homo sapiens
  CDR3 for beta chain variable domain of TCR clone 138722 (TRBV12-4, TRBJ2-1)
CASSPLSGRNNEQFF

SEQ ID NO: 277445 - protein, 19 aa, Homo sapiens
  CDR3 for alpha chain variable domain of TCR clone 138723 (TRAV38-1, TRAJ53)
CAFMKHGLESGGRNDKLTF

SEQ ID NO: 277446 - protein, 13 aa, Homo sapiens
  CDR3 for beta chain variable domain of TCR clone 138723 (TRBV19, TRBJ1-2)
CASSVPGQDGYTF

SEQ ID NO: 277447 - protein, 14 aa, Homo sapiens
  CDR3 for alpha chain variable domain of TCR clone 138724 (TRAV8-4, TRAJ39)
CAVRLNNAGNILTF

SEQ ID NO: 277448 - protein, 16 aa, Homo sapiens
  CDR3 for beta chain variable domain of TCR clone 138724 (TRBV13, TRBJ2-7)
CASSSRESGRTYEQYF

SEQ ID NO: 277449 - protein, 13 aa, Homo sapiens
  CDR3 for alpha chain variable domain of TCR clone 138725 (TRAV27, TRAJ8)
CAGGPTGFQKLVF

SEQ ID NO: 277450 - protein, 15 aa, Homo sapiens
  CDR3 for beta chain variable domain of TCR clone 138725 (TRBV7-6, TRBJ2-2)
CASSSHGLASGELFF

SEQ ID NO: 277451 - protein, 12 aa, Homo sapiens
  CDR3 for alpha chain variable domain of TCR clone 138726 (TRAV2, TRAJ9)
CAVGAGGFKTIF

SEQ ID NO: 277452 - protein, 13 aa, Homo sapiens
  CDR3 for beta chain variable domain of TCR clone 138726 (TRBV5-1, TRBJ2-5)
CASSTPGAETQYF

SEQ ID NO: 277453 - protein, 14 aa, Homo sapiens
  CDR3 for alpha chain variable domain of TCR clone 138727 (TRAV13-1, TRAJ12)
CSNYPMDSSYKLTF

SEQ ID NO: 277454 - protein, 11 aa, Homo sapiens
  CDR3 for beta chain variable domain of TCR clone 138727 (TRBV20-1, TRBJ2-1)
CSLSSGSEQFF

SEQ ID NO: 277455 - protein, 16 aa, Homo sapiens
  CDR3 for alpha chain variable domain of TCR clone 138728 (TRAV4, TRAJ42)
CLVGDHYGGSQGNLIF

SEQ ID NO: 277456 - protein, 15 aa, Homo sapiens
  CDR3 for beta chain variable domain of TCR clone 138728 (TRBV9, TRBJ1-6)
CASSVAGTGDSPLHF

SEQ ID NO: 277457 - protein, 14 aa, Homo sapiens
  CDR3 for alpha chain variable domain of TCR clone 138729 (TRAV1-2, TRAJ16)
CAVNRFSDGQKLLF

SEQ ID NO: 277458 - protein, 16 aa, Homo sapiens
  CDR3 for beta chain variable domain of TCR clone 138729 (TRBV2, TRBJ2-7)
CASKSPPGQGPYEQYF

SEQ ID NO: 277459 - protein, 10 aa, Homo sapiens
  CDR3 for alpha chain variable domain of TCR clone 138730 (TRAV30, TRAJ16)
CGTGGQKLLS

SEQ ID NO: 277460 - protein, 14 aa, Homo sapiens
  CDR3 for beta chain variable domain of TCR clone 138730 (TRBV6-1, TRBJ1-2)
CASSTGWPPTGYTF

SEQ ID NO: 277461 - protein, 13 aa, Homo sapiens
  CDR3 for alpha chain variable domain of TCR clone 138731 (TRAV8-3, TRAJ40)
CAVGAQYLRNLQI

SEQ ID NO: 277462 - protein, 14 aa, Homo sapiens
  CDR3 for beta chain variable domain of TCR clone 138731 (TRBV20-1, TRBJ2-7)
CSAKRGRSSYEQYF

SEQ ID NO: 277463 - protein, 18 aa, Homo sapiens
  CDR3 for alpha chain variable domain of TCR clone 138732 (TRAV21, TRAJ52)
RAVRPSPAGGTSYGKLTF

SEQ ID NO: 277464 - protein, 13 aa, Homo sapiens
  CDR3 for beta chain variable domain of TCR clone 138732 (TRBV20-1, TRBJ2-5)
CSAREAFQETQYF

SEQ ID NO: 277465 - protein, 16 aa, Homo sapiens
  CDR3 for alpha chain variable domain of TCR clone 138733 (TRAV29/DV5, TRAJ54)
CAARAPLIQGAQKLVF

SEQ ID NO: 277466 - protein, 15 aa, Homo sapiens
  CDR3 for beta chain variable domain of TCR clone 138733 (TRBV6-1, TRBJ1-3)
CASSDFGFSGNTIYF

SEQ ID NO: 277467 - protein, 12 aa, Homo sapiens
  CDR3 for alpha chain variable domain of TCR clone 138734 (TRAV27, TRAJ13)
CAGVRGYQKVTF

SEQ ID NO: 277468 - protein, 16 aa, Homo sapiens
  CDR3 for beta chain variable domain of TCR clone 138734 (TRBV28, TRBJ2-1)
CASRSSYSGSLNEQFF

SEQ ID NO: 277469 - protein, 13 aa, Homo sapiens
  CDR3 for alpha chain variable domain of TCR clone 138735 (TRAV13-1, TRAJ5)
CAARVTGRRALTF

SEQ ID NO: 277470 - protein, 15 aa, Homo sapiens
  CDR3 for beta chain variable domain of TCR clone 138735 (TRBV19, TRBJ2-1)
CASSLETSGYNEQFF

SEQ ID NO: 277471 - protein, 14 aa, Homo sapiens
  CDR3 for alpha chain variable domain of TCR clone 138736 (TRAV12-2, TRAJ24)
CAVTPADSWGKLQF

SEQ ID NO: 277472 - protein, 12 aa, Homo sapiens
  CDR3 for beta chain variable domain of TCR clone 138736 (TRBV2, TRBJ2-1)
CAKREGYNEQFF

SEQ ID NO: 277473 - protein, 16 aa, Homo sapiens
  CDR3 for alpha chain variable domain of TCR clone 138737 (TRAV21, TRAJ37)
CAVRTAGSSNTGKLIF

SEQ ID NO: 277474 - protein, 13 aa, Homo sapiens
  CDR3 for beta chain variable domain of TCR clone 138737 (TRBV7-9, TRBJ2-5)
CASLPSGREPQYF

SEQ ID NO: 277475 - protein, 15 aa, Homo sapiens
  CDR3 for alpha chain variable domain of TCR clone 138738 (TRAV35, TRAJ52)
CAGPRGGTSYGKLTF

SEQ ID NO: 277476 - protein, 14 aa, Homo sapiens
  CDR3 for beta chain variable domain of TCR clone 138738 (TRBV20-1, TRBJ2-7)
CSAWTALSSYEEYF

SEQ ID NO: 277477 - protein, 15 aa, Homo sapiens
  CDR3 for alpha chain variable domain of TCR clone 138739 (TRAV3, TRAJ17)
CAVRDTGAAGNKLTF

SEQ ID NO: 277478 - protein, 14 aa, Homo sapiens
  CDR3 for beta chain variable domain of TCR clone 138739 (TRBV6-3, TRBJ1-1)
CASSNLVPGAEAFF

SEQ ID NO: 277479 - protein, 13 aa, Homo sapiens
  CDR3 for alpha chain variable domain of TCR clone 138740 (TRAV21, TRAJ27)
CAARPGNAGKSTF

SEQ ID NO: 277480 - protein, 16 aa, Homo sapiens
  CDR3 for beta chain variable domain of TCR clone 138740 (TRBV27, TRBJ2-2)
CASSFRGLVRTGELFF

SEQ ID NO: 277481 - protein, 14 aa, Homo sapiens
  CDR3 for alpha chain variable domain of TCR clone 138741 (TRAV12-2, TRAJ40)
CAVKIPSGTYKYIF

SEQ ID NO: 277482 - protein, 15 aa, Homo sapiens
  CDR3 for beta chain variable domain of TCR clone 138741 (TRBV28, TRBJ2-3)
CAPTFRDWSTDTQYF

SEQ ID NO: 277483 - protein, 17 aa, Homo sapiens
  CDR3 for alpha chain variable domain of TCR clone 138742 (TRAV3, TRAJ6)
GAVRDGPRAGGSYIPTF

SEQ ID NO: 277484 - protein, 13 aa, Homo sapiens
  CDR3 for beta chain variable domain of TCR clone 138742 (TRBV4-1, TRBJ2-2)
CASSQENTGELFF

SEQ ID NO: 277485 - protein, 13 aa, Homo sapiens
  CDR3 for alpha chain variable domain of TCR clone 138743 (TRAV27, TRAJ3)
ASLRGSSASKIIF

SEQ ID NO: 277486 - protein, 15 aa, Homo sapiens
  CDR3 for beta chain variable domain of TCR clone 138743 (TRBV28, TRBJ1-3)
CASSMAWASGDTIYF

SEQ ID NO: 277487 - protein, 21 aa, Homo sapiens
  CDR3 for alpha chain variable domain of TCR clone 138744 (TRAV6, TRAJ36)
CALQTTSSLGLERDSPLFPIS

SEQ ID NO: 277488 - protein, 14 aa, Homo sapiens
  CDR3 for beta chain variable domain of TCR clone 138744 (TRBV10-2, TRBJ1-5)
CASSSTGRNQPQHF

SEQ ID NO: 277489 - protein, 17 aa, Homo sapiens
  CDR3 for alpha chain variable domain of TCR clone 138745 (TRAV3, TRAJ6)
RAVRDGPRAGLSYIPPF

SEQ ID NO: 277490 - protein, 20 aa, Homo sapiens
  CDR3 for beta chain variable domain of TCR clone 138745 (TRBV28, TRBJ2-1)
CASTPIGRSPGLAGGNEQFF

SEQ ID NO: 277491 - protein, 13 aa, Homo sapiens
  CDR3 for alpha chain variable domain of TCR clone 138746 (TRAV23/DV6, TRAJ16)
CAASISDGQKLLF

SEQ ID NO: 277492 - protein, 18 aa, Homo sapiens
  CDR3 for beta chain variable domain of TCR clone 138746 (TRBV18, TRBJ1-3)
CASSPRGGAGPAGNTMYF

SEQ ID NO: 277493 - protein, 17 aa, Homo sapiens
  CDR3 for alpha chain variable domain of TCR clone 138747 (TRAV8-2, TRAJ17)
CVVSDRRFKAAGNKLTF

SEQ ID NO: 277494 - protein, 18 aa, Homo sapiens
  CDR3 for beta chain variable domain of TCR clone 138747 (TRBV7-9, TRBJ2-7)
CASSLTNSGSRTWYEQYF

SEQ ID NO: 277495 - protein, 16 aa, Homo sapiens
  CDR3 for alpha chain variable domain of TCR clone 138748 (TRAV3, TRAJ10)
CAVRDMRAGGGNKLTF

SEQ ID NO: 277496 - protein, 13 aa, Homo sapiens
  CDR3 for beta chain variable domain of TCR clone 138748 (TRBV6-1, TRBJ1-1)
CASSRQGNTEAFI

SEQ ID NO: 277497 - protein, 15 aa, Homo sapiens
  CDR3 for alpha chain variable domain of TCR clone 138749 (TRAV17, TRAJ22)
CATVVPSGSARQLTF

SEQ ID NO: 277498 - protein, 14 aa, Homo sapiens
  CDR3 for beta chain variable domain of TCR clone 138749 (TRBV4-1, TRBJ2-2)
CASSQAVNTGELFF

SEQ ID NO: 277499 - protein, 14 aa, Homo sapiens
  CDR3 for alpha chain variable domain of TCR clone 138750 (TRAV12-2, TRAJ13)
CAVKKTGGYQKVTF

SEQ ID NO: 277500 - protein, 16 aa, Homo sapiens
  CDR3 for beta chain variable domain of TCR clone 138750 (TRBV4-1, TRBJ1-1)
CASSYRQGTGDTEAFF

SEQ ID NO: 277501 - protein, 11 aa, Homo sapiens
  CDR3 for alpha chain variable domain of TCR clone 138751 (TRAV4, TRAJ23)
CLVAPGGKLIF

SEQ ID NO: 277502 - protein, 15 aa, Homo sapiens
  CDR3 for beta chain variable domain of TCR clone 138751 (TRBV28, TRBJ2-3)
CASSPDRQGANTQYF

SEQ ID NO: 277503 - protein, 16 aa, Homo sapiens
  CDR3 for alpha chain variable domain of TCR clone 138752 (TRAV14/DV4, TRAJ21)
CAMREGPENNFNKFYF

SEQ ID NO: 277504 - protein, 13 aa, Homo sapiens
  CDR3 for beta chain variable domain of TCR clone 138752 (TRBV20-1, TRBJ2-7)
CSATHTSGYEQYF

SEQ ID NO: 277505 - protein, 18 aa, Homo sapiens
  CDR3 for alpha chain variable domain of TCR clone 138753 (TRAV26-2, TRAJ45)
CILRVDKYSGGGADGLTF

SEQ ID NO: 277506 - protein, 14 aa, Homo sapiens
  CDR3 for beta chain variable domain of TCR clone 138753 (TRBV7-6, TRBJ2-3)
CASSLGTVTDTQYF

SEQ ID NO: 277507 - protein, 17 aa, Homo sapiens
  CDR3 for alpha chain variable domain of TCR clone 138754 (TRAV3, TRAJ12)
FAVRDGGRMDSIYKLIF

SEQ ID NO: 277508 - protein, 14 aa, Homo sapiens
  CDR3 for beta chain variable domain of TCR clone 138754 (TRBV7-9, TRBJ1-2)
CASSRQGANYGYTF

SEQ ID NO: 277509 - protein, 12 aa, Homo sapiens
  CDR3 for alpha chain variable domain of TCR clone 138755 (TRAV8-3, TRAJ34)
WAAGYNTDKLIF

SEQ ID NO: 277510 - protein, 13 aa, Homo sapiens
  CDR3 for beta chain variable domain of TCR clone 138755 (TRBV6-4, TRBJ2-3)
CASSVSWADTQYF

SEQ ID NO: 277511 - protein, 12 aa, Homo sapiens
  CDR3 for alpha chain variable domain of TCR clone 138756 (TRAV9-2, TRAJ36)
CALKKGANNLFF

SEQ ID NO: 277512 - protein, 13 aa, Homo sapiens
  CDR3 for beta chain variable domain of TCR clone 138756 (TRBV27, TRBJ1-1)
CASSLSIGAEAFL

SEQ ID NO: 277513 - protein, 14 aa, Homo sapiens
  CDR3 for alpha chain variable domain of TCR clone 138757 (TRAV35, TRAJ33)
CAGSSQDSNYQLIW

SEQ ID NO: 277514 - protein, 15 aa, Homo sapiens
  CDR3 for beta chain variable domain of TCR clone 138757 (TRBV4-1, TRBJ1-4)
CASSDTGGTNEKLFF

SEQ ID NO: 277515 - protein, 21 aa, Homo sapiens
  CDR3 for alpha chain variable domain of TCR clone 138758 (TRAV1-1, TRAJ6)
CAVRREEATYLHLEEEPAVLF

SEQ ID NO: 277516 - protein, 15 aa, Homo sapiens
  CDR3 for beta chain variable domain of TCR clone 138758 (TRBV6-6, TRBJ2-1)
CATRQGVSSYNEQFF

SEQ ID NO: 277517 - protein, 14 aa, Homo sapiens
  CDR3 for alpha chain variable domain of TCR clone 138759 (TRAV13-1, TRAJ35)
CAASKGGFGNVLHC

SEQ ID NO: 277518 - protein, 17 aa, Homo sapiens
  CDR3 for beta chain variable domain of TCR clone 138759 (TRBV7-9, TRBJ2-6)
CASSFGAGYSGANVLTF

SEQ ID NO: 277519 - protein, 14 aa, Homo sapiens
  CDR3 for alpha chain variable domain of TCR clone 138760 (TRAV21, TRAJ54)
CAVRPLQGAQKLVF

SEQ ID NO: 277520 - protein, 15 aa, Homo sapiens
  CDR3 for beta chain variable domain of TCR clone 138760 (TRBV20-1, TRBJ2-7)
CSARDRVSGMDEQYF

SEQ ID NO: 277521 - protein, 10 aa, Homo sapiens
  CDR3 for alpha chain variable domain of TCR clone 138761 (TRAV8-4, TRAJ43)
CAVSADDMRF

SEQ ID NO: 277522 - protein, 14 aa, Homo sapiens
  CDR3 for beta chain variable domain of TCR clone 138761 (TRBV5-4, TRBJ2-2)
CASRLDGGTGELFF

SEQ ID NO: 277523 - protein, 14 aa, Homo sapiens
  CDR3 for alpha chain variable domain of TCR clone 138762 (TRAV12-2, TRAJ11)
CAVSRESGYSTFTF

SEQ ID NO: 277524 - protein, 13 aa, Homo sapiens
  CDR3 for beta chain variable domain of TCR clone 138762 (TRBV9, TRBJ2-7)
CASSVAEYYEQYF

SEQ ID NO: 277525 - protein, 13 aa, Homo sapiens
  CDR3 for alpha chain variable domain of TCR clone 138763 (TRAV20, TRAJ37)
CAGCSSNTGKLIF

SEQ ID NO: 277526 - protein, 17 aa, Homo sapiens
  CDR3 for beta chain variable domain of TCR clone 138763 (TRBV20-1, TRBJ2-1)
CSAPPRLAGTRYNEQFF

SEQ ID NO: 277527 - protein, 14 aa, Homo sapiens
  CDR3 for alpha chain variable domain of TCR clone 138764 (TRAV13-1, TRAJ24)
CAASPADSWGKFQF

SEQ ID NO: 277528 - protein, 13 aa, Homo sapiens
  CDR3 for beta chain variable domain of TCR clone 138764 (TRBV10-3, TRBJ2-7)
CASKLAVNYEQYF

SEQ ID NO: 277529 - protein, 13 aa, Homo sapiens
  CDR3 for alpha chain variable domain of TCR clone 138765 (TRAV12-2, TRAJ28)
CAPHGAGSYQLTF

SEQ ID NO: 277530 - protein, 14 aa, Homo sapiens
  CDR3 for beta chain variable domain of TCR clone 138765 (TRBV2, TRBJ2-5)
CASSEGSYQETQYF

SEQ ID NO: 277531 - protein, 13 aa, Homo sapiens
  CDR3 for alpha chain variable domain of TCR clone 138766 (TRAV2, TRAJ40)
CAVVTSGTYKYIF

SEQ ID NO: 277532 - protein, 13 aa, Homo sapiens
  CDR3 for beta chain variable domain of TCR clone 138766 (TRBV7-9, TRBJ1-2)
CASSLEQNYGYTF

SEQ ID NO: 277533 - protein, 13 aa, Homo sapiens
  CDR3 for alpha chain variable domain of TCR clone 138767 (TRAV30, TRAJ6)
CGFIEGGSYIPTF

SEQ ID NO: 277534 - protein, 16 aa, Homo sapiens
  CDR3 for beta chain variable domain of TCR clone 138767 (TRBV7-6, TRBJ2-3)
CASSARTSRGTDTQYL

SEQ ID NO: 277535 - protein, 12 aa, Homo sapiens
  CDR3 for alpha chain variable domain of TCR clone 138768 (TRAV1-2, TRAJ42)
CVAGGSQGNLIF

SEQ ID NO: 277536 - protein, 13 aa, Homo sapiens
  CDR3 for beta chain variable domain of TCR clone 138768 (TRBV24-1, TRBJ2-2)
CATSDWSTGELFF

SEQ ID NO: 277537 - protein, 12 aa, Homo sapiens
  CDR3 for alpha chain variable domain of TCR clone 138769 (TRAV21, TRAJ56)
CAVYGATSKLTF

SEQ ID NO: 277538 - protein, 12 aa, Homo sapiens
  CDR3 for beta chain variable domain of TCR clone 138769 (TRBV12-4, TRBJ1-1)
CASSLAGLEAFF

SEQ ID NO: 277539 - protein, 12 aa, Homo sapiens
  CDR3 for alpha chain variable domain of TCR clone 138770 (TRAV29/DV5, TRAJ34)
CAASGNTDKLIL

SEQ ID NO: 277540 - protein, 15 aa, Homo sapiens
  CDR3 for beta chain variable domain of TCR clone 138770 (TRBV12-4, TRBJ2-7)
CASSQRTSGNYEQYL

SEQ ID NO: 277541 - protein, 11 aa, Homo sapiens
  CDR3 for alpha chain variable domain of TCR clone 138771 (TRAV8-6, TRAJ13)
CALGIYQKVTF

SEQ ID NO: 277542 - protein, 14 aa, Homo sapiens
  CDR3 for beta chain variable domain of TCR clone 138771 (TRBV6-1, TRBJ1-3)
CASVQGGGGNTMYF

SEQ ID NO: 277543 - protein, 10 aa, Homo sapiens
  CDR3 for alpha chain variable domain of TCR clone 138772 (TRAV8-4, TRAJ43)
CAVSADDMRF

SEQ ID NO: 277544 - protein, 17 aa, Homo sapiens
  CDR3 for beta chain variable domain of TCR clone 138772 (TRBV4-2, TRBJ1-1)
CASTQFGGGSGNTEAFF

SEQ ID NO: 277545 - protein, 13 aa, Homo sapiens
  CDR3 for alpha chain variable domain of TCR clone 138773 (TRAV26-2, TRAJ37)
CILGSSNTGKLIF

SEQ ID NO: 277546 - protein, 16 aa, Homo sapiens
  CDR3 for beta chain variable domain of TCR clone 138773 (TRBV7-2, TRBJ2-5)
CASSPGGARRGETQYF

SEQ ID NO: 277547 - protein, 10 aa, Homo sapiens
  CDR3 for alpha chain variable domain of TCR clone 138774 (TRAV16, TRAJ22)
SAMYLRQLTF

SEQ ID NO: 277548 - protein, 15 aa, Homo sapiens
  CDR3 for beta chain variable domain of TCR clone 138774 (TRBV13, TRBJ2-1)
CASSLLSGLNNEQFF

SEQ ID NO: 277549 - protein, 14 aa, Homo sapiens
  CDR3 for alpha chain variable domain of TCR clone 138775 (TRAV12-2, TRAJ45)
CAVNKGGGADGLIF

SEQ ID NO: 277550 - protein, 17 aa, Homo sapiens
  CDR3 for beta chain variable domain of TCR clone 138775 (TRBV9, TRBJ1-6)
CASGVAGQGIHPSTLGT

SEQ ID NO: 277551 - protein, 19 aa, Homo sapiens
  CDR3 for alpha chain variable domain of TCR clone 138776 (TRAV26-1, TRAJ50)
CCVLLHRQNPKTSYDKVIF

SEQ ID NO: 277552 - protein, 17 aa, Homo sapiens
  CDR3 for beta chain variable domain of TCR clone 138776 (TRBV4-1, TRBJ1-4)
CASSQEGPRGVEEKLIF

SEQ ID NO: 277553 - protein, 16 aa, Homo sapiens
  CDR3 for alpha chain variable domain of TCR clone 138777 (TRAV14/DV4, TRAJ53)
FAMREGGGGSNYKLTF

SEQ ID NO: 277554 - protein, 15 aa, Homo sapiens
  CDR3 for beta chain variable domain of TCR clone 138777 (TRBV12-4, TRBJ2-5)
CASSPPTGLQETQYF

SEQ ID NO: 277555 - protein, 12 aa, Homo sapiens
  CDR3 for alpha chain variable domain of TCR clone 138778 (TRAV17, TRAJ12)
CATLRSSYKLIF

SEQ ID NO: 277556 - protein, 14 aa, Homo sapiens
  CDR3 for beta chain variable domain of TCR clone 138778 (TRBV19, TRBJ2-1)
CARGARSFQWEQVF

SEQ ID NO: 277557 - protein, 15 aa, Homo sapiens
  CDR3 for alpha chain variable domain of TCR clone 138779 (TRAV4, TRAJ36)
CLVGDRQTGANNLFF

SEQ ID NO: 277558 - protein, 12 aa, Homo sapiens
  CDR3 for beta chain variable domain of TCR clone 138779 (TRBV7-9, TRBJ2-7)
CASSFGSYEQYF

SEQ ID NO: 277559 - protein, 22 aa, Homo sapiens
  CDR3 for alpha chain variable domain of TCR clone 138780 (TRAV27, )
CAVRTQMPDIQNPDPAVYQLRD

SEQ ID NO: 277560 - protein, 16 aa, Homo sapiens
  CDR3 for beta chain variable domain of TCR clone 138780 (TRBV5-1, TRBJ2-3)
CASSLGLAVYTDTQYF

SEQ ID NO: 277561 - protein, 11 aa, Homo sapiens
  CDR3 for alpha chain variable domain of TCR clone 138781 (TRAV17, TRAJ9)
CVTTGGFKTFF

SEQ ID NO: 277562 - protein, 14 aa, Homo sapiens
  CDR3 for beta chain variable domain of TCR clone 138781 (TRBV7-9, TRBJ2-2)
CASSGLADTGELFF

SEQ ID NO: 277563 - protein, 14 aa, Homo sapiens
  CDR3 for alpha chain variable domain of TCR clone 138782 (TRAV12-2, TRAJ40)
CAVKIPSGTSKYIF

SEQ ID NO: 277564 - protein, 17 aa, Homo sapiens
  CDR3 for beta chain variable domain of TCR clone 138782 (TRBV13, TRBJ2-3)
CASSLSRVAGGRNTQYF

SEQ ID NO: 277565 - protein, 13 aa, Homo sapiens
  CDR3 for alpha chain variable domain of TCR clone 138783 (TRAV17, TRAJ15)
CATYARSGTALIF

SEQ ID NO: 277566 - protein, 15 aa, Homo sapiens
  CDR3 for beta chain variable domain of TCR clone 138783 (TRBV20-1, TRBJ2-7)
CSAGDRVSWMDEQYF

SEQ ID NO: 277567 - protein, 16 aa, Homo sapiens
  CDR3 for alpha chain variable domain of TCR clone 138784 (TRAV30, TRAJ24)
CGTEIVDADSWGKFQF

SEQ ID NO: 277568 - protein, 14 aa, Homo sapiens
  CDR3 for beta chain variable domain of TCR clone 138784 (TRBV20-1, TRBJ2-4)
CSASGRVGENIQYF

SEQ ID NO: 277569 - protein, 17 aa, Homo sapiens
  CDR3 for alpha chain variable domain of TCR clone 138785 (TRAV3, TRAJ6)
CAVRDGPRAEGSYVPTF

SEQ ID NO: 277570 - protein, 16 aa, Homo sapiens
  CDR3 for beta chain variable domain of TCR clone 138785 (TRBV19, TRBJ2-1)
CASSKAGPSSYNEQFF

SEQ ID NO: 277571 - protein, 13 aa, Homo sapiens
  CDR3 for alpha chain variable domain of TCR clone 138786 (TRAV13-1, TRAJ21)
CAASIYNFNKFYF

SEQ ID NO: 277572 - protein, 20 aa, Homo sapiens
  CDR3 for beta chain variable domain of TCR clone 138786 (TRBV7-8, TRBJ2-2)
CASSHLFPGATIHITGELFV

SEQ ID NO: 277573 - protein, 13 aa, Homo sapiens
  CDR3 for alpha chain variable domain of TCR clone 138787 (TRAV30, TRAJ24)
CGTVTDSWGKLQF

SEQ ID NO: 277574 - protein, 13 aa, Homo sapiens
  CDR3 for beta chain variable domain of TCR clone 138787 (TRBV19, TRBJ2-7)
CASSAGHGYEQYF

SEQ ID NO: 277575 - protein, 13 aa, Homo sapiens
  CDR3 for alpha chain variable domain of TCR clone 138788 (TRAV20, TRAJ48)
CAVQGVGNEKLTF

SEQ ID NO: 277576 - protein, 19 aa, Homo sapiens
  CDR3 for beta chain variable domain of TCR clone 138788 (TRBV2, TRBJ2-2)
CAGSQPGRAGGGNTGELFF

SEQ ID NO: 277577 - protein, 14 aa, Homo sapiens
  CDR3 for alpha chain variable domain of TCR clone 138789 (TRAV12-3, TRAJ39)
SATYLSNAGNILTF

SEQ ID NO: 277578 - protein, 13 aa, Homo sapiens
  CDR3 for beta chain variable domain of TCR clone 138789 (TRBV28, TRBJ1-2)
CASSPGNRNGYTF

SEQ ID NO: 277579 - protein, 11 aa, Homo sapiens
  CDR3 for alpha chain variable domain of TCR clone 138790 (TRAV12-2, TRAJ3)
CAVKRASKIIF

SEQ ID NO: 277580 - protein, 14 aa, Homo sapiens
  CDR3 for beta chain variable domain of TCR clone 138790 (TRBV6-5, TRBJ1-1)
CASNRQRSDPEAFF

SEQ ID NO: 277581 - protein, 14 aa, Homo sapiens
  CDR3 for alpha chain variable domain of TCR clone 138791 (TRAV1-1, TRAJ27)
CAMIYNTNAGKSTF

SEQ ID NO: 277582 - protein, 13 aa, Homo sapiens
  CDR3 for beta chain variable domain of TCR clone 138791 (TRBV7-3, TRBJ1-1)
CASSQDWGAEAFF

SEQ ID NO: 277583 - protein, 10 aa, Homo sapiens
  CDR3 for alpha chain variable domain of TCR clone 138792 (TRAV8-4, TRAJ43)
CAVSADDMRF

SEQ ID NO: 277584 - protein, 13 aa, Homo sapiens
  CDR3 for beta chain variable domain of TCR clone 138792 (TRBV6-1, TRBJ1-1)
CASSRQGNTEAFF

SEQ ID NO: 277585 - protein, 11 aa, Homo sapiens
  CDR3 for alpha chain variable domain of TCR clone 138793 (TRAV26-1, TRAJ27)
CIDPNPGKSTF

SEQ ID NO: 277586 - protein, 18 aa, Homo sapiens
  CDR3 for beta chain variable domain of TCR clone 138793 (TRBV7-9, TRBJ2-6)
CASSFPGAGISGANVLTF

SEQ ID NO: 277587 - protein, 13 aa, Homo sapiens
  CDR3 for alpha chain variable domain of TCR clone 138794 (TRAV13-2, TRAJ13)
CADLSGGYQKVTF

SEQ ID NO: 277588 - protein, 11 aa, Homo sapiens
  CDR3 for beta chain variable domain of TCR clone 138794 (TRBV11-2, TRBJ1-1)
CASSINTEAFF

SEQ ID NO: 277589 - protein, 15 aa, Homo sapiens
  CDR3 for alpha chain variable domain of TCR clone 138795 (TRAV29/DV5, TRAJ29)
CAASERGSGNTPLVF

SEQ ID NO: 277590 - protein, 17 aa, Homo sapiens
  CDR3 for beta chain variable domain of TCR clone 138795 (TRBV4-1, TRBJ1-4)
CASSQEGPRGVEEKLFL

SEQ ID NO: 277591 - protein, 14 aa, Homo sapiens
  CDR3 for alpha chain variable domain of TCR clone 138796 (TRAV17, TRAJ6)
CVTDASGGSYIPTF

SEQ ID NO: 277592 - protein, 19 aa, Homo sapiens
  CDR3 for beta chain variable domain of TCR clone 138796 (TRBV4-3, TRBJ2-7)
CASSQEFIGWQVTPYEQYF

SEQ ID NO: 277593 - protein, 11 aa, Homo sapiens
  CDR3 for alpha chain variable domain of TCR clone 138797 (TRAV13-1, TRAJ15)
CAATPGTALIF

SEQ ID NO: 277594 - protein, 13 aa, Homo sapiens
  CDR3 for beta chain variable domain of TCR clone 138797 (TRBV7-2, TRBJ2-5)
CASSLYRQETQYF

SEQ ID NO: 277595 - protein, 18 aa, Homo sapiens
  CDR3 for alpha chain variable domain of TCR clone 138798 (TRAV35, TRAJ52)
CAGLLRYPGGTIYGKLTF

SEQ ID NO: 277596 - protein, 13 aa, Homo sapiens
  CDR3 for beta chain variable domain of TCR clone 138798 (TRBV2, TRBJ2-5)
CASGTPYQETQYF

SEQ ID NO: 277597 - protein, 14 aa, Homo sapiens
  CDR3 for alpha chain variable domain of TCR clone 138799 (TRAV12-2, TRAJ13)
CAVKKTGGYQKVTF

SEQ ID NO: 277598 - protein, 19 aa, Homo sapiens
  CDR3 for beta chain variable domain of TCR clone 138799 (TRBV7-2, TRBJ2-3)
CASSFLSRNWGGGTDTQNF

SEQ ID NO: 277599 - protein, 12 aa, Homo sapiens
  CDR3 for alpha chain variable domain of TCR clone 138800 (TRAV8-3, TRAJ20)
CAVDFNDYKPSF

SEQ ID NO: 277600 - protein, 17 aa, Homo sapiens
  CDR3 for beta chain variable domain of TCR clone 138800 (TRBV7-8, TRBJ2-6)
CASSAGTRGAGANVLTF

SEQ ID NO: 277601 - protein, 10 aa, Homo sapiens
  CDR3 for alpha chain variable domain of TCR clone 138801 (TRAV2, TRAJ34)
CAVVNVKLIF

SEQ ID NO: 277602 - protein, 20 aa, Homo sapiens
  CDR3 for beta chain variable domain of TCR clone 138801 (TRBV19, TRBJ2-1)
CASSISRTVTSTRLNNEQFF

SEQ ID NO: 277603 - protein, 14 aa, Homo sapiens
  CDR3 for alpha chain variable domain of TCR clone 138802 (TRAV8-3, TRAJ4)
CAVGAAGGYNKLIF

SEQ ID NO: 277604 - protein, 16 aa, Homo sapiens
  CDR3 for beta chain variable domain of TCR clone 138802 (TRBV19, TRBJ2-1)
CPSSKAGPSSYNEQFF

SEQ ID NO: 277605 - protein, 17 aa, Homo sapiens
  CDR3 for alpha chain variable domain of TCR clone 138803 (TRAV23/DV6, )
CAADIQKPDPAVYQLRD

SEQ ID NO: 277606 - protein, 14 aa, Homo sapiens
  CDR3 for beta chain variable domain of TCR clone 138803 (TRBV5-7, TRBJ1-6)
CASSFAGHNSPLHF

SEQ ID NO: 277607 - protein, 14 aa, Homo sapiens
  CDR3 for alpha chain variable domain of TCR clone 138804 (TRAV12-2, TRAJ17)
CAVLFKAAGDKLTF

SEQ ID NO: 277608 - protein, 14 aa, Homo sapiens
  CDR3 for beta chain variable domain of TCR clone 138804 (TRBV7-8, TRBJ2-5)
CASSATGGQETQYF

SEQ ID NO: 277609 - protein, 15 aa, Homo sapiens
  CDR3 for alpha chain variable domain of TCR clone 138805 (TRAV3, TRAJ29)
CAVRAPLSGNTPLVF

SEQ ID NO: 277610 - protein, 12 aa, Homo sapiens
  CDR3 for beta chain variable domain of TCR clone 138805 (TRBV7-9, TRBJ2-7)
CASSLEGYEQYF

SEQ ID NO: 277611 - protein, 14 aa, Homo sapiens
  CDR3 for alpha chain variable domain of TCR clone 138806 (TRAV13-1, TRAJ30)
CAASPQNRDDKIIF

SEQ ID NO: 277612 - protein, 14 aa, Homo sapiens
  CDR3 for beta chain variable domain of TCR clone 138806 (TRBV7-2, TRBJ2-7)
CASSPKTSFYEQYF

SEQ ID NO: 277613 - protein, 13 aa, Homo sapiens
  CDR3 for alpha chain variable domain of TCR clone 138807 (TRAV35, TRAJ48)
CSGHEFGNEKLTF

SEQ ID NO: 277614 - protein, 15 aa, Homo sapiens
  CDR3 for beta chain variable domain of TCR clone 138807 (TRBV27, TRBJ2-7)
CASSPQREGQREQYF

SEQ ID NO: 277615 - protein, 15 aa, Homo sapiens
  CDR3 for alpha chain variable domain of TCR clone 138808 (TRAV29/DV5, TRAJ29)
CAASERSSGNTPLLF

SEQ ID NO: 277616 - protein, 17 aa, Homo sapiens
  CDR3 for beta chain variable domain of TCR clone 138808 (TRBV4-1, TRBJ1-4)
CASSQEGPRGVEEKLFF

SEQ ID NO: 277617 - protein, 14 aa, Homo sapiens
  CDR3 for alpha chain variable domain of TCR clone 138809 (TRAV26-1, TRAJ34)
CIVRVAYNTDKLIF

SEQ ID NO: 277618 - protein, 15 aa, Homo sapiens
  CDR3 for beta chain variable domain of TCR clone 138809 (TRBV7-9, TRBJ2-3)
CASSHGDRVPDTQYF

SEQ ID NO: 277619 - protein, 17 aa, Homo sapiens
  CDR3 for alpha chain variable domain of TCR clone 138810 (TRAV2, TRAJ32)
CAFNPPESGWCYKQANL

SEQ ID NO: 277620 - protein, 12 aa, Homo sapiens
  CDR3 for beta chain variable domain of TCR clone 138810 (TRBV20-1, TRBJ2-7)
CSAITPTKEQYF

SEQ ID NO: 277621 - protein, 12 aa, Homo sapiens
  CDR3 for alpha chain variable domain of TCR clone 138811 (TRAV21, TRAJ31)
CVLAGNNARLMF

SEQ ID NO: 277622 - protein, 16 aa, Homo sapiens
  CDR3 for beta chain variable domain of TCR clone 138811 (TRBV27, TRBJ2-5)
CASSCGPGSTKETQYF

SEQ ID NO: 277623 - protein, 16 aa, Homo sapiens
  CDR3 for alpha chain variable domain of TCR clone 138812 (TRAV30, TRAJ24)
CGTEMVDADSWGKFQF

SEQ ID NO: 277624 - protein, 15 aa, Homo sapiens
  CDR3 for beta chain variable domain of TCR clone 138812 (TRBV18, TRBJ2-1)
CASLPDRGRDNEQFF

SEQ ID NO: 277625 - protein, 13 aa, Homo sapiens
  CDR3 for alpha chain variable domain of TCR clone 138813 (TRAV1-2, TRAJ36)
CAVDQTGAHNLFF

SEQ ID NO: 277626 - protein, 14 aa, Homo sapiens
  CDR3 for beta chain variable domain of TCR clone 138813 (TRBV20-1, TRBJ2-5)
CSAREMTKQEAQYF

SEQ ID NO: 277627 - protein, 16 aa, Homo sapiens
  CDR3 for alpha chain variable domain of TCR clone 138814 (TRAV30, TRAJ24)
CGTEITDADSWGKFQF

SEQ ID NO: 277628 - protein, 14 aa, Homo sapiens
  CDR3 for beta chain variable domain of TCR clone 138814 (TRBV12-5, TRBJ2-5)
CASGSRTHQETQYF

SEQ ID NO: 277629 - protein, 11 aa, Homo sapiens
  CDR3 for alpha chain variable domain of TCR clone 138815 (TRAV12-2, TRAJ31)
CAVTRSARLMF

SEQ ID NO: 277630 - protein, 15 aa, Homo sapiens
  CDR3 for beta chain variable domain of TCR clone 138815 (TRBV19, TRBJ2-7)
CASSIGGGLVNEQYF

SEQ ID NO: 277631 - protein, 17 aa, Homo sapiens
  CDR3 for alpha chain variable domain of TCR clone 138816 (TRAV3, TRAJ6)
CSVRDGPRAGGSYIPTF

SEQ ID NO: 277632 - protein, 16 aa, Homo sapiens
  CDR3 for beta chain variable domain of TCR clone 138816 (TRBV19, TRBJ2-1)
CASSKAGPSSYNEQFF

SEQ ID NO: 277633 - protein, 15 aa, Homo sapiens
  CDR3 for alpha chain variable domain of TCR clone 138817 (TRAV35, TRAJ24)
CAGQSAQGSWGKLQF

SEQ ID NO: 277634 - protein, 14 aa, Homo sapiens
  CDR3 for beta chain variable domain of TCR clone 138817 (TRBV15, TRBJ2-5)
CATSGDRGQETQYF

SEQ ID NO: 277635 - protein, 18 aa, Homo sapiens
  CDR3 for alpha chain variable domain of TCR clone 138818 (TRAV21, TRAJ52)
CAVRPSPAGGTSYGKLTF

SEQ ID NO: 277636 - protein, 14 aa, Homo sapiens
  CDR3 for beta chain variable domain of TCR clone 138818 (TRBV12-4, TRBJ2-5)
CASSFGASGGTQYF

SEQ ID NO: 277637 - protein, 14 aa, Homo sapiens
  CDR3 for alpha chain variable domain of TCR clone 138819 (TRAV16, TRAJ17)
CAPRIKAAGNKLTF

SEQ ID NO: 277638 - protein, 16 aa, Homo sapiens
  CDR3 for beta chain variable domain of TCR clone 138819 (TRBV7-3, TRBJ2-2)
CASSLKRGTLSGELFF

SEQ ID NO: 277639 - protein, 12 aa, Homo sapiens
  CDR3 for alpha chain variable domain of TCR clone 138820 (TRAV27, TRAJ42)
CAGGGSQGNLIF

SEQ ID NO: 277640 - protein, 13 aa, Homo sapiens
  CDR3 for beta chain variable domain of TCR clone 138820 (TRBV19, TRBJ2-7)
CASSIRSSYEQYC

SEQ ID NO: 277641 - protein, 11 aa, Homo sapiens
  CDR3 for alpha chain variable domain of TCR clone 138821 (TRAV12-1, TRAJ43)
CVEYEKNDMRF

SEQ ID NO: 277642 - protein, 16 aa, Homo sapiens
  CDR3 for beta chain variable domain of TCR clone 138821 (TRBV27, TRBJ2-2)
CASSSDRGTGTGELFF

SEQ ID NO: 277643 - protein, 14 aa, Homo sapiens
  CDR3 for alpha chain variable domain of TCR clone 138822 (TRAV27, TRAJ42)
FAGEKVGSQGNLIF

SEQ ID NO: 277644 - protein, 15 aa, Homo sapiens
  CDR3 for beta chain variable domain of TCR clone 138822 (TRBV7-2, TRBJ2-2)
CASSLVAGSAGELFF

SEQ ID NO: 277645 - protein, 15 aa, Homo sapiens
  CDR3 for alpha chain variable domain of TCR clone 138823 (TRAV17, TRAJ42)
CATDHYGGSQGNLIF

SEQ ID NO: 277646 - protein, 12 aa, Homo sapiens
  CDR3 for beta chain variable domain of TCR clone 138823 (TRBV5-5, TRBJ2-5)
CASSYFGETQYF

SEQ ID NO: 277647 - protein, 14 aa, Homo sapiens
  CDR3 for alpha chain variable domain of TCR clone 138824 (TRAV20, TRAJ20)
CAVLRGYNDYNLSF

SEQ ID NO: 277648 - protein, 13 aa, Homo sapiens
  CDR3 for beta chain variable domain of TCR clone 138824 (TRBV19, TRBJ2-5)
CASSETAPETQYF

SEQ ID NO: 277649 - protein, 14 aa, Homo sapiens
  CDR3 for alpha chain variable domain of TCR clone 138825 (TRAV17, TRAJ16)
CATADFSDGQKLLF

SEQ ID NO: 277650 - protein, 22 aa, Homo sapiens
  CDR3 for beta chain variable domain of TCR clone 138825 (TRBV19, TRBJ2-1)
CASSVRDRVTGTSGRIYNEQFF

SEQ ID NO: 277651 - protein, 23 aa, Homo sapiens
  CDR3 for alpha chain variable domain of TCR clone 138826 (TRAV1-1, TRAJ11)
LLQELQMKDSASYFCAGYSTLTF

SEQ ID NO: 277652 - protein, 15 aa, Homo sapiens
  CDR3 for beta chain variable domain of TCR clone 138826 (TRBV6-5, TRBJ2-1)
CASRGDFASYNEQFF

SEQ ID NO: 277653 - protein, 14 aa, Homo sapiens
  CDR3 for alpha chain variable domain of TCR clone 138827 (TRAV12-1, TRAJ30)
CVVNIGGRDGRIIF

SEQ ID NO: 277654 - protein, 14 aa, Homo sapiens
  CDR3 for beta chain variable domain of TCR clone 138827 (TRBV7-6, TRBJ2-3)
CASSLGTVTDTQYF

SEQ ID NO: 277655 - protein, 17 aa, Homo sapiens
  CDR3 for alpha chain variable domain of TCR clone 138828 (TRAV19, TRAJ58)
CALRGLRVGTSGSRLTF

SEQ ID NO: 277656 - protein, 15 aa, Homo sapiens
  CDR3 for beta chain variable domain of TCR clone 138828 (TRBV6-5, TRBJ2-1)
CASSYDAGAGNEQFF

SEQ ID NO: 277657 - protein, 15 aa, Homo sapiens
  CDR3 for alpha chain variable domain of TCR clone 138829 (TRAV26-1, TRAJ3)
FIVRSGYSSASKIIF

SEQ ID NO: 277658 - protein, 14 aa, Homo sapiens
  CDR3 for beta chain variable domain of TCR clone 138829 (TRBV13, TRBJ2-5)
CASYRRLAEETQYF

SEQ ID NO: 277659 - protein, 14 aa, Homo sapiens
  CDR3 for alpha chain variable domain of TCR clone 138830 (TRAV1-2, TRAJ8)
CAVRGDTGFQKLVF

SEQ ID NO: 277660 - protein, 15 aa, Homo sapiens
  CDR3 for beta chain variable domain of TCR clone 138830 (TRBV7-9, TRBJ1-4)
CASSARTGGNEKLFF

SEQ ID NO: 277661 - protein, 16 aa, Homo sapiens
  CDR3 for alpha chain variable domain of TCR clone 138831 (TRAV30, TRAJ24)
CGTEIVDADSWGKFQF

SEQ ID NO: 277662 - protein, 12 aa, Homo sapiens
  CDR3 for beta chain variable domain of TCR clone 138831 (TRBV12-4, TRBJ2-3)
CASSSTTDMQYF

SEQ ID NO: 277663 - protein, 17 aa, Homo sapiens
  CDR3 for alpha chain variable domain of TCR clone 138832 (TRAV2, TRAJ36)
CAVEDRENWGKQPLPWD

SEQ ID NO: 277664 - protein, 14 aa, Homo sapiens
  CDR3 for beta chain variable domain of TCR clone 138832 (TRBV7-9, TRBJ2-5)
CASSLDTAQETQYF

SEQ ID NO: 277665 - protein, 13 aa, Homo sapiens
  CDR3 for alpha chain variable domain of TCR clone 138833 (TRAV13-2, TRAJ53)
CAENMGSNYKLTF

SEQ ID NO: 277666 - protein, 14 aa, Homo sapiens
  CDR3 for beta chain variable domain of TCR clone 138833 (TRBV7-8, TRBJ2-3)
CASSLEAGTDTQYF

SEQ ID NO: 277667 - protein, 11 aa, Homo sapiens
  CDR3 for alpha chain variable domain of TCR clone 138834 (TRAV21, TRAJ39)
LLVNAGNMLTF

SEQ ID NO: 277668 - protein, 12 aa, Homo sapiens
  CDR3 for beta chain variable domain of TCR clone 138834 (TRBV3-1, TRBJ2-1)
CASSQGSSGQCF

SEQ ID NO: 277669 - protein, 12 aa, Homo sapiens
  CDR3 for alpha chain variable domain of TCR clone 138835 (TRAV12-2, TRAJ20)
CAVRPSDYKLSF

SEQ ID NO: 277670 - protein, 15 aa, Homo sapiens
  CDR3 for beta chain variable domain of TCR clone 138835 (TRBV11-2, TRBJ2-1)
CASSLGTSGLNEQFF

SEQ ID NO: 277671 - protein, 11 aa, Homo sapiens
  CDR3 for alpha chain variable domain of TCR clone 138836 (TRAV26-1, TRAJ27)
CIDPNAGKSTF

SEQ ID NO: 277672 - protein, 18 aa, Homo sapiens
  CDR3 for beta chain variable domain of TCR clone 138836 (TRBV7-9, TRBJ2-6)
CSSSFPGAGISGANVLIF

SEQ ID NO: 277673 - protein, 13 aa, Homo sapiens
  CDR3 for alpha chain variable domain of TCR clone 138837 (TRAV8-3, TRAJ7)
CAVVAYGNNRLAF

SEQ ID NO: 277674 - protein, 13 aa, Homo sapiens
  CDR3 for beta chain variable domain of TCR clone 138837 (TRBV7-3, TRBJ1-5)
CASSLDSNQPQHF

SEQ ID NO: 277675 - protein, 14 aa, Homo sapiens
  CDR3 for alpha chain variable domain of TCR clone 138838 (TRAV1-2, TRAJ8)
CAVREDTGFQKLVF

SEQ ID NO: 277676 - protein, 17 aa, Homo sapiens
  CDR3 for beta chain variable domain of TCR clone 138838 (TRBV13, TRBJ2-3)
CASSLSRVAGGRNTQDF

SEQ ID NO: 277677 - protein, 10 aa, Homo sapiens
  CDR3 for alpha chain variable domain of TCR clone 138839 (TRAV25, TRAJ20)
CAVNDYKLSF

SEQ ID NO: 277678 - protein, 15 aa, Homo sapiens
  CDR3 for beta chain variable domain of TCR clone 138839 (TRBV6-3, TRBJ2-7)
CASSSPGTVFYEQYF

SEQ ID NO: 277679 - protein, 13 aa, Homo sapiens
  CDR3 for alpha chain variable domain of TCR clone 138840 (TRAV13-1, TRAJ9)
CAARGTGGFKTIF

SEQ ID NO: 277680 - protein, 12 aa, Homo sapiens
  CDR3 for beta chain variable domain of TCR clone 138840 (TRBV2, TRBJ2-1)
YAYGPPGNEQFF

SEQ ID NO: 277681 - protein, 13 aa, Homo sapiens
  CDR3 for alpha chain variable domain of TCR clone 138841 (TRAV13-2, TRAJ13)
CAERPGGYQKVTF

SEQ ID NO: 277682 - protein, 14 aa, Homo sapiens
  CDR3 for beta chain variable domain of TCR clone 138841 (TRBV23-1, TRBJ2-5)
CASSFLRSQDTQYF

SEQ ID NO: 277683 - protein, 14 aa, Homo sapiens
  CDR3 for alpha chain variable domain of TCR clone 138842 (TRAV12-3, TRAJ10)
SHLPLTGGGNKLTF

SEQ ID NO: 277684 - protein, 11 aa, Homo sapiens
  CDR3 for beta chain variable domain of TCR clone 138842 (TRBV19, TRBJ1-1)
CASSNGSEAFF

SEQ ID NO: 277685 - protein, 10 aa, Homo sapiens
  CDR3 for alpha chain variable domain of TCR clone 138843 (TRAV23/DV6, TRAJ57)
CATSSTLSQG

SEQ ID NO: 277686 - protein, 15 aa, Homo sapiens
  CDR3 for beta chain variable domain of TCR clone 138843 (TRBV19, TRBJ1-2)
CASSVGQVLNYGYTF

SEQ ID NO: 277687 - protein, 15 aa, Homo sapiens
  CDR3 for alpha chain variable domain of TCR clone 138844 (TRAV17, TRAJ13)
CATDAGSGGDQKVTF

SEQ ID NO: 277688 - protein, 14 aa, Homo sapiens
  CDR3 for beta chain variable domain of TCR clone 138844 (TRBV12-4, TRBJ1-1)
CASSLRSSGTEAFF

SEQ ID NO: 277689 - protein, 11 aa, Homo sapiens
  CDR3 for alpha chain variable domain of TCR clone 138845 (TRAV21, TRAJ34)
CAVTNTDKLIF

SEQ ID NO: 277690 - protein, 15 aa, Homo sapiens
  CDR3 for beta chain variable domain of TCR clone 138845 (TRBV19, TRBJ1-1)
CASSIGGGRNTEAFF

SEQ ID NO: 277691 - protein, 15 aa, Homo sapiens
  CDR3 for alpha chain variable domain of TCR clone 138846 (TRAV23/DV6, TRAJ30)
CAASSQESRDDKIIL

SEQ ID NO: 277692 - protein, 17 aa, Homo sapiens
  CDR3 for beta chain variable domain of TCR clone 138846 (TRBV4-3, TRBJ2-1)
CASSQFSSGRESGEQFF

SEQ ID NO: 277693 - protein, 10 aa, Homo sapiens
  CDR3 for alpha chain variable domain of TCR clone 138847 (TRAV13-1, TRAJ27)
CAPLARQINL

SEQ ID NO: 277694 - protein, 13 aa, Homo sapiens
  CDR3 for beta chain variable domain of TCR clone 138847 (TRBV7-3, TRBJ1-1)
CASSQGWGAEAFF

SEQ ID NO: 277695 - protein, 16 aa, Homo sapiens
  CDR3 for alpha chain variable domain of TCR clone 138848 (TRAV30, TRAJ49)
SAAQRVGPNAGNQFYF

SEQ ID NO: 277696 - protein, 15 aa, Homo sapiens
  CDR3 for beta chain variable domain of TCR clone 138848 (TRBV2, TRBJ2-1)
CASSELAGSYNEQFF

SEQ ID NO: 277697 - protein, 12 aa, Homo sapiens
  CDR3 for alpha chain variable domain of TCR clone 138849 (TRAV36/DV7, TRAJ54)
CAVVRGAQKLVF

SEQ ID NO: 277698 - protein, 14 aa, Homo sapiens
  CDR3 for beta chain variable domain of TCR clone 138849 (TRBV7-9, TRBJ2-2)
CASSFDRGTGELFF

SEQ ID NO: 277699 - protein, 14 aa, Homo sapiens
  CDR3 for alpha chain variable domain of TCR clone 138850 (TRAV8-1, TRAJ5)
CAVRTDTGRRALTF

SEQ ID NO: 277700 - protein, 15 aa, Homo sapiens
  CDR3 for beta chain variable domain of TCR clone 138850 (TRBV7-3, TRBJ2-1)
CASSPTGGGEGEQFF

SEQ ID NO: 277701 - protein, 12 aa, Homo sapiens
  CDR3 for alpha chain variable domain of TCR clone 138851 (TRAV17, TRAJ12)
FATLRSSYKLNF

SEQ ID NO: 277702 - protein, 16 aa, Homo sapiens
  CDR3 for beta chain variable domain of TCR clone 138851 (TRBV28, TRBJ2-7)
CASSLFFETGGPEQYF

SEQ ID NO: 277703 - protein, 14 aa, Homo sapiens
  CDR3 for alpha chain variable domain of TCR clone 138852 (TRAV17, TRAJ31)
CATVLRNNNARLMF

SEQ ID NO: 277704 - protein, 15 aa, Homo sapiens
  CDR3 for beta chain variable domain of TCR clone 138852 (TRBV7-9, TRBJ1-6)
CASSSPGRGNSPLHF

SEQ ID NO: 277705 - protein, 14 aa, Homo sapiens
  CDR3 for alpha chain variable domain of TCR clone 138853 (TRAV3, TRAJ33)
CAVRDMDSNYQLIW

SEQ ID NO: 277706 - protein, 19 aa, Homo sapiens
  CDR3 for beta chain variable domain of TCR clone 138853 (TRBV7-3, TRBJ1-2)
CASSFRQGNDGELWLHLRF

SEQ ID NO: 277707 - protein, 14 aa, Homo sapiens
  CDR3 for alpha chain variable domain of TCR clone 138854 (TRAV4, TRAJ30)
WLVGDMNRDDKIIF

SEQ ID NO: 277708 - protein, 16 aa, Homo sapiens
  CDR3 for beta chain variable domain of TCR clone 138854 (TRBV20-1, TRBJ1-4)
CSAPGQGLLTNEKLFF

SEQ ID NO: 277709 - protein, 11 aa, Homo sapiens
  CDR3 for alpha chain variable domain of TCR clone 138855 (TRAV29/DV5, TRAJ47)
CAASGEIWKQT

SEQ ID NO: 277710 - protein, 16 aa, Homo sapiens
  CDR3 for beta chain variable domain of TCR clone 138855 (TRBV6-1, TRBJ2-5)
CASSETLDRGAETQYF

SEQ ID NO: 277711 - protein, 15 aa, Homo sapiens
  CDR3 for alpha chain variable domain of TCR clone 138856 (TRAV38-2/DV8, TRAJ45)
CAYWDSGGGADGLTF

SEQ ID NO: 277712 - protein, 13 aa, Homo sapiens
  CDR3 for beta chain variable domain of TCR clone 138856 (TRBV11-2, TRBJ2-5)
CASGHWAKETQYF

SEQ ID NO: 277713 - protein, 16 aa, Homo sapiens
  CDR3 for alpha chain variable domain of TCR clone 138857 (TRAV12-2, TRAJ32)
CAVNLGQGGATIKLIF

SEQ ID NO: 277714 - protein, 15 aa, Homo sapiens
  CDR3 for beta chain variable domain of TCR clone 138857 (TRBV20-1, TRBJ2-7)
CSARGPLAGGREQYF

SEQ ID NO: 277715 - protein, 14 aa, Homo sapiens
  CDR3 for alpha chain variable domain of TCR clone 138858 (TRAV12-3, TRAJ54)
GAMRGIQGAQKLLF

SEQ ID NO: 277716 - protein, 13 aa, Homo sapiens
  CDR3 for beta chain variable domain of TCR clone 138858 (TRBV19, TRBJ1-1)
CASSPSNGGEAFF

SEQ ID NO: 277717 - protein, 14 aa, Homo sapiens
  CDR3 for alpha chain variable domain of TCR clone 138859 (TRAV12-2, TRAJ13)
CAVAGSGGYQKVTF

SEQ ID NO: 277718 - protein, 15 aa, Homo sapiens
  CDR3 for beta chain variable domain of TCR clone 138859 (TRBV27, TRBJ2-1)
CASSNGGGSSNEQFF

SEQ ID NO: 277719 - protein, 14 aa, Homo sapiens
  CDR3 for alpha chain variable domain of TCR clone 138860 (TRAV8-1, TRAJ49)
CAASIANTGNQFYF

SEQ ID NO: 277720 - protein, 19 aa, Homo sapiens
  CDR3 for beta chain variable domain of TCR clone 138860 (TRBV23-1, TRBJ2-3)
TVSLRQQPRSTGSTDTQYF

SEQ ID NO: 277721 - protein, 15 aa, Homo sapiens
  CDR3 for alpha chain variable domain of TCR clone 138861 (TRAV17, TRAJ16)
CATALRFSDGQKLLF

SEQ ID NO: 277722 - protein, 16 aa, Homo sapiens
  CDR3 for beta chain variable domain of TCR clone 138861 (TRBV29-1, TRBJ2-7)
CSVEDAEGGTAYEQYF

SEQ ID NO: 277723 - protein, 14 aa, Homo sapiens
  CDR3 for alpha chain variable domain of TCR clone 138862 (TRAV1-2, TRAJ33)
CAVRAPDRNYQLIW

SEQ ID NO: 277724 - protein, 14 aa, Homo sapiens
  CDR3 for beta chain variable domain of TCR clone 138862 (TRBV11-3, TRBJ1-6)
CASSFSGGDSPLHF

SEQ ID NO: 277725 - protein, 18 aa, Homo sapiens
  CDR3 for alpha chain variable domain of TCR clone 138863 (TRAV13-1, TRAJ52)
CAAKNPNAGGTSYAKLTF

SEQ ID NO: 277726 - protein, 15 aa, Homo sapiens
  CDR3 for beta chain variable domain of TCR clone 138863 (TRBV28, TRBJ2-1)
CASSIIAGGRSEQFF

SEQ ID NO: 277727 - protein, 15 aa, Homo sapiens
  CDR3 for alpha chain variable domain of TCR clone 138864 (TRAV3, TRAJ22)
CAVRNRGGSARQLTF

SEQ ID NO: 277728 - protein, 15 aa, Homo sapiens
  CDR3 for beta chain variable domain of TCR clone 138864 (TRBV27, TRBJ2-1)
CASSNGGGSSNEQFF

SEQ ID NO: 277729 - protein, 12 aa, Homo sapiens
  CDR3 for alpha chain variable domain of TCR clone 138865 (TRAV21, TRAJ13)
PGPSGGYQNVTF

SEQ ID NO: 277730 - protein, 15 aa, Homo sapiens
  CDR3 for beta chain variable domain of TCR clone 138865 (TRBV7-9, TRBJ1-6)
CVSSSPGRGNSPLHF

SEQ ID NO: 277731 - protein, 14 aa, Homo sapiens
  CDR3 for alpha chain variable domain of TCR clone 138866 (TRAV1-2, TRAJ8)
CAVREDTGFQKLVF

SEQ ID NO: 277732 - protein, 16 aa, Homo sapiens
  CDR3 for beta chain variable domain of TCR clone 138866 (TRBV7-2, TRBJ2-7)
CASSLEAGGPWYEQYF

SEQ ID NO: 277733 - protein, 16 aa, Homo sapiens
  CDR3 for alpha chain variable domain of TCR clone 138867 (TRAV30, TRAJ24)
CGTEILDADSWGKLQF

SEQ ID NO: 277734 - protein, 14 aa, Homo sapiens
  CDR3 for beta chain variable domain of TCR clone 138867 (TRBV12-5, TRBJ2-5)
CASGSRTHQETQYF

SEQ ID NO: 277735 - protein, 13 aa, Homo sapiens
  CDR3 for alpha chain variable domain of TCR clone 138868 (TRAV35, TRAJ42)
YAGFPGSQGNLIF

SEQ ID NO: 277736 - protein, 14 aa, Homo sapiens
  CDR3 for beta chain variable domain of TCR clone 138868 (TRBV7-9, TRBJ2-3)
CASSLEDGTDTQYF

SEQ ID NO: 277737 - protein, 14 aa, Homo sapiens
  CDR3 for alpha chain variable domain of TCR clone 138869 (TRAV12-3, TRAJ10)
SHLPLTGGGNKLTF

SEQ ID NO: 277738 - protein, 13 aa, Homo sapiens
  CDR3 for beta chain variable domain of TCR clone 138869 (TRBV6-5, TRBJ2-5)
CATAPSPQETQCF

SEQ ID NO: 277739 - protein, 15 aa, Homo sapiens
  CDR3 for alpha chain variable domain of TCR clone 138870 (TRAV27, TRAJ38)
CAARRNAGNNRKLHW

SEQ ID NO: 277740 - protein, 13 aa, Homo sapiens
  CDR3 for beta chain variable domain of TCR clone 138870 (TRBV12-5, TRBJ2-3)
CASGDRQSDTQYF

SEQ ID NO: 277741 - protein, 14 aa, Homo sapiens
  CDR3 for alpha chain variable domain of TCR clone 138871 (TRAV26-1, TRAJ34)
CIVRVAYNTDKLIF

SEQ ID NO: 277742 - protein, 15 aa, Homo sapiens
  CDR3 for beta chain variable domain of TCR clone 138871 (TRBV20-1, TRBJ2-7)
CSARVPAVYFYEQYF

SEQ ID NO: 277743 - protein, 14 aa, Homo sapiens
  CDR3 for alpha chain variable domain of TCR clone 138872 (TRAV12-1, TRAJ12)
CVVTRMDSSYKLIF

SEQ ID NO: 277744 - protein, 18 aa, Homo sapiens
  CDR3 for beta chain variable domain of TCR clone 138872 (TRBV7-2, TRBJ2-7)
CASSLSGRGLAGGYEQYF

SEQ ID NO: 277745 - protein, 13 aa, Homo sapiens
  CDR3 for alpha chain variable domain of TCR clone 138873 (TRAV2, TRAJ16)
CAVEFGDGQKLLF

SEQ ID NO: 277746 - protein, 14 aa, Homo sapiens
  CDR3 for beta chain variable domain of TCR clone 138873 (TRBV6-3, TRBJ2-5)
CASSSSLREKTQYF

SEQ ID NO: 277747 - protein, 14 aa, Homo sapiens
  CDR3 for alpha chain variable domain of TCR clone 138874 (TRAV12-3, TRAJ10)
RHLPLTGGGNKLTF

SEQ ID NO: 277748 - protein, 15 aa, Homo sapiens
  CDR3 for beta chain variable domain of TCR clone 138874 (TRBV9, TRBJ1-6)
CASSVAGTGDSPLHF

SEQ ID NO: 277749 - protein, 14 aa, Homo sapiens
  CDR3 for alpha chain variable domain of TCR clone 138875 (TRAV12-3, TRAJ33)
CAMSVPGGNYQLIW

SEQ ID NO: 277750 - protein, 14 aa, Homo sapiens
  CDR3 for beta chain variable domain of TCR clone 138875 (TRBV4-2, TRBJ1-5)
CASSQDSINQPQHF

SEQ ID NO: 277751 - protein, 14 aa, Homo sapiens
  CDR3 for alpha chain variable domain of TCR clone 138876 (TRAV20, TRAJ42)
CAVQAGGNQGKLTF

SEQ ID NO: 277752 - protein, 14 aa, Homo sapiens
  CDR3 for beta chain variable domain of TCR clone 138876 (TRBV28, TRBJ1-2)
CASRIQGANYGYTF

SEQ ID NO: 277753 - protein, 14 aa, Homo sapiens
  CDR3 for alpha chain variable domain of TCR clone 138877 (TRAV13-2, TRAJ32)
CAESLGGATNKLIF

SEQ ID NO: 277754 - protein, 17 aa, Homo sapiens
  CDR3 for beta chain variable domain of TCR clone 138877 (TRBV7-3, TRBJ2-3)
CASSLMKRMRGADTQYF

SEQ ID NO: 277755 - protein, 16 aa, Homo sapiens
  CDR3 for alpha chain variable domain of TCR clone 138878 (TRAV30, TRAJ24)
CGTEVVDADSWGTFQF

SEQ ID NO: 277756 - protein, 14 aa, Homo sapiens
  CDR3 for beta chain variable domain of TCR clone 138878 (TRBV12-5, TRBJ2-5)
CASGSRTHQETQYF

SEQ ID NO: 277757 - protein, 13 aa, Homo sapiens
  CDR3 for alpha chain variable domain of TCR clone 138879 (TRAV12-1, TRAJ40)
CVVPTSGTYKYIF

SEQ ID NO: 277758 - protein, 16 aa, Homo sapiens
  CDR3 for beta chain variable domain of TCR clone 138879 (TRBV7-3, TRBJ2-1)
CASSKPLAGGYNEQFF

SEQ ID NO: 277759 - protein, 14 aa, Homo sapiens
  CDR3 for alpha chain variable domain of TCR clone 138880 (TRAV12-2, TRAJ13)
CSVKKTGGYQKVTF

SEQ ID NO: 277760 - protein, 18 aa, Homo sapiens
  CDR3 for beta chain variable domain of TCR clone 138880 (TRBV24-1, TRBJ2-2)
CATSDSGQGTANTGELFF

SEQ ID NO: 277761 - protein, 17 aa, Homo sapiens
  CDR3 for alpha chain variable domain of TCR clone 138881 (TRAV26-1, TRAJ11)
CIVRVDQSNAGYSTLTF

SEQ ID NO: 277762 - protein, 15 aa, Homo sapiens
  CDR3 for beta chain variable domain of TCR clone 138881 (TRBV27, TRBJ2-5)
CASSLIPSGGETQYF

SEQ ID NO: 277763 - protein, 14 aa, Homo sapiens
  CDR3 for alpha chain variable domain of TCR clone 138882 (TRAV12-3, TRAJ10)
SHLPLTGGGNKLTF

SEQ ID NO: 277764 - protein, 17 aa, Homo sapiens
  CDR3 for beta chain variable domain of TCR clone 138882 (TRBV7-9, TRBJ1-4)
CASSRTGGFNEKLFLAV

SEQ ID NO: 277765 - protein, 17 aa, Homo sapiens
  CDR3 for alpha chain variable domain of TCR clone 138883 (TRAV13-1, TRAJ52)
RAAGRNAGGTSYGKLTF

SEQ ID NO: 277766 - protein, 13 aa, Homo sapiens
  CDR3 for beta chain variable domain of TCR clone 138883 (TRBV7-2, TRBJ1-1)
CASNLKGAKVAFF

SEQ ID NO: 277767 - protein, 15 aa, Homo sapiens
  CDR3 for alpha chain variable domain of TCR clone 138884 (TRAV3, TRAJ5)
CAVRYLDTGRRALTF

SEQ ID NO: 277768 - protein, 13 aa, Homo sapiens
  CDR3 for beta chain variable domain of TCR clone 138884 (TRBV20-1, TRBJ2-5)
CSARDSKQATQYF

SEQ ID NO: 277769 - protein, 13 aa, Homo sapiens
  CDR3 for alpha chain variable domain of TCR clone 138885 (TRAV8-2, TRAJ43)
CVVSDQGDNEMRF

SEQ ID NO: 277770 - protein, 17 aa, Homo sapiens
  CDR3 for beta chain variable domain of TCR clone 138885 (TRBV7-8, TRBJ2-6)
CASSAGTGGAGANVLTF

SEQ ID NO: 277771 - protein, 14 aa, Homo sapiens
  CDR3 for alpha chain variable domain of TCR clone 138886 (TRAV8-1, TRAJ5)
CAVRTDTGRRALTF

SEQ ID NO: 277772 - protein, 16 aa, Homo sapiens
  CDR3 for beta chain variable domain of TCR clone 138886 (TRBV20-1, TRBJ2-1)
CSARDFSVRIGDEQFF

SEQ ID NO: 277773 - protein, 17 aa, Homo sapiens
  CDR3 for alpha chain variable domain of TCR clone 138887 (TRAV38-1, TRAJ45)
CAFMKHYMGGGADGLTF

SEQ ID NO: 277774 - protein, 15 aa, Homo sapiens
  CDR3 for beta chain variable domain of TCR clone 138887 (TRBV7-9, TRBJ1-6)
CASSSPGRGNSPLHF

SEQ ID NO: 277775 - protein, 13 aa, Homo sapiens
  CDR3 for alpha chain variable domain of TCR clone 138888 (TRAV36/DV7, TRAJ7)
CAGTRYGNNRLAF

SEQ ID NO: 277776 - protein, 17 aa, Homo sapiens
  CDR3 for beta chain variable domain of TCR clone 138888 (TRBV11-2, TRBJ2-1)
CASSLYPPGVEYNEQFF

SEQ ID NO: 277777 - protein, 15 aa, Homo sapiens
  CDR3 for alpha chain variable domain of TCR clone 138889 (TRAV17, TRAJ57)
CATGPSQGGSDKLVF

SEQ ID NO: 277778 - protein, 13 aa, Homo sapiens
  CDR3 for beta chain variable domain of TCR clone 138889 (TRBV27, TRBJ2-1)
CASRTLGVGEQFF

SEQ ID NO: 277779 - protein, 16 aa, Homo sapiens
  CDR3 for alpha chain variable domain of TCR clone 138890 (TRAV3, TRAJ23)
CAVKIGIYNQGGKLIF

SEQ ID NO: 277780 - protein, 12 aa, Homo sapiens
  CDR3 for beta chain variable domain of TCR clone 138890 (TRBV11-2, TRBJ2-2)
CASSLPTGELFF

SEQ ID NO: 277781 - protein, 16 aa, Homo sapiens
  CDR3 for alpha chain variable domain of TCR clone 138891 (TRAV30, TRAJ24)
CGTEIVDADSWGKFQF

SEQ ID NO: 277782 - protein, 17 aa, Homo sapiens
  CDR3 for beta chain variable domain of TCR clone 138891 (TRBV7-3, TRBJ2-3)
CASSLRKRMRGADTQYF

SEQ ID NO: 277783 - protein, 12 aa, Homo sapiens
  CDR3 for alpha chain variable domain of TCR clone 138892 (TRAV30, TRAJ43)
CGTEERGNDMRF

SEQ ID NO: 277784 - protein, 17 aa, Homo sapiens
  CDR3 for beta chain variable domain of TCR clone 138892 (TRBV7-8, TRBJ2-6)
CASSAGTGGAGANVLAF

SEQ ID NO: 277785 - protein, 14 aa, Homo sapiens
  CDR3 for alpha chain variable domain of TCR clone 138893 (TRAV13-2, TRAJ6)
CAERGSGGSYIPTF

SEQ ID NO: 277786 - protein, 13 aa, Homo sapiens
  CDR3 for beta chain variable domain of TCR clone 138893 (TRBV12-4, TRBJ2-5)
CASRLAVQETQYF

SEQ ID NO: 277787 - protein, 13 aa, Homo sapiens
  CDR3 for alpha chain variable domain of TCR clone 138894 (TRAV12-1, TRAJ26)
CVVRRNCGQNFVF

SEQ ID NO: 277788 - protein, 14 aa, Homo sapiens
  CDR3 for beta chain variable domain of TCR clone 138894 (TRBV4-2, TRBJ2-1)
CASGLDRASNEQFF

SEQ ID NO: 277789 - protein, 14 aa, Homo sapiens
  CDR3 for alpha chain variable domain of TCR clone 138895 (TRAV20, TRAJ42)
CAVQAGGSQGNLIF

SEQ ID NO: 277790 - protein, 14 aa, Homo sapiens
  CDR3 for beta chain variable domain of TCR clone 138895 (TRBV7-2, TRBJ1-1)
CASSFLTGTTEAFF

SEQ ID NO: 277791 - protein, 14 aa, Homo sapiens
  CDR3 for alpha chain variable domain of TCR clone 138896 (TRAV3, TRAJ37)
CAVKESGNTGKLIF

SEQ ID NO: 277792 - protein, 15 aa, Homo sapiens
  CDR3 for beta chain variable domain of TCR clone 138896 (TRBV7-9, TRBJ2-2)
CASRPEGTSTGELFF

SEQ ID NO: 277793 - protein, 13 aa, Homo sapiens
  CDR3 for alpha chain variable domain of TCR clone 138897 (TRAV27, TRAJ45)
CRSSGGGADGLTF

SEQ ID NO: 277794 - protein, 14 aa, Homo sapiens
  CDR3 for beta chain variable domain of TCR clone 138897 (TRBV7-3, TRBJ1-1)
CASSLGTGYTEAFF

SEQ ID NO: 277795 - protein, 15 aa, Homo sapiens
  CDR3 for alpha chain variable domain of TCR clone 138898 (TRAV29/DV5, TRAJ57)
CAASLLRGGSEKLVF

SEQ ID NO: 277796 - protein, 15 aa, Homo sapiens
  CDR3 for beta chain variable domain of TCR clone 138898 (TRBV20-1, TRBJ2-7)
CSARDRVSGMDEQYF

SEQ ID NO: 277797 - protein, 13 aa, Homo sapiens
  CDR3 for alpha chain variable domain of TCR clone 138899 (TRAV3, TRAJ15)
CAVRDQAGTALIF

SEQ ID NO: 277798 - protein, 15 aa, Homo sapiens
  CDR3 for beta chain variable domain of TCR clone 138899 (TRBV11-1, TRBJ2-7)
CASSLNYGASYEQYY

SEQ ID NO: 277799 - protein, 15 aa, Homo sapiens
  CDR3 for alpha chain variable domain of TCR clone 138900 (TRAV26-1, TRAJ37)
CIVRVATGNTGKLIF

SEQ ID NO: 277800 - protein, 12 aa, Homo sapiens
  CDR3 for beta chain variable domain of TCR clone 138900 (TRBV12-4, TRBJ1-1)
CASSLVDSEAFF

SEQ ID NO: 277801 - protein, 15 aa, Homo sapiens
  CDR3 for alpha chain variable domain of TCR clone 138901 (TRAV8-3, TRAJ45)
CASSYSGGGADGLTF

SEQ ID NO: 277802 - protein, 13 aa, Homo sapiens
  CDR3 for beta chain variable domain of TCR clone 138901 (TRBV10-3, TRBJ2-7)
CASPLAVNYEQYF

SEQ ID NO: 277803 - protein, 13 aa, Homo sapiens
  CDR3 for alpha chain variable domain of TCR clone 138902 (TRAV20, TRAJ37)
CAGCSSNTGKLIF

SEQ ID NO: 277804 - protein, 21 aa, Homo sapiens
  CDR3 for beta chain variable domain of TCR clone 138902 (TRBV4-2, TRBJ2-3)
PCSEKTRPCSSVPAAPDTQYF

SEQ ID NO: 277805 - protein, 15 aa, Homo sapiens
  CDR3 for alpha chain variable domain of TCR clone 138903 (TRAV26-1, TRAJ13)
CIVRASRGGYQKVTF

SEQ ID NO: 277806 - protein, 15 aa, Homo sapiens
  CDR3 for beta chain variable domain of TCR clone 138903 (TRBV2, TRBJ2-3)
CASSDFEKATDTQYF

SEQ ID NO: 277807 - protein, 14 aa, Homo sapiens
  CDR3 for alpha chain variable domain of TCR clone 138904 (TRAV8-2, TRAJ44)
CVVSLTGTSSKLTF

SEQ ID NO: 277808 - protein, 15 aa, Homo sapiens
  CDR3 for beta chain variable domain of TCR clone 138904 (TRBV7-2, TRBJ2-1)
CASSFSGGIYNEQFF

SEQ ID NO: 277809 - protein, 12 aa, Homo sapiens
  CDR3 for alpha chain variable domain of TCR clone 138905 (TRAV12-3, TRAJ17)
CAMTLTGNKLTF

SEQ ID NO: 277810 - protein, 14 aa, Homo sapiens
  CDR3 for beta chain variable domain of TCR clone 138905 (TRBV11-2, TRBJ2-3)
CASSTLARTDTQYF

SEQ ID NO: 277811 - protein, 14 aa, Homo sapiens
  CDR3 for alpha chain variable domain of TCR clone 138906 (TRAV8-3, TRAJ4)
CAVGAAGGYNKLIF

SEQ ID NO: 277812 - protein, 10 aa, Homo sapiens
  CDR3 for beta chain variable domain of TCR clone 138906 (TRBV10-3, TRBJ2-7)
CAATSNEQYF

SEQ ID NO: 277813 - protein, 14 aa, Homo sapiens
  CDR3 for alpha chain variable domain of TCR clone 138907 (TRAV4, TRAJ6)
CLVGEAGGSYIHTF

SEQ ID NO: 277814 - protein, 15 aa, Homo sapiens
  CDR3 for beta chain variable domain of TCR clone 138907 (TRBV9, TRBJ2-1)
CASSLAGSSYNEQFF

SEQ ID NO: 277815 - protein, 19 aa, Homo sapiens
  CDR3 for alpha chain variable domain of TCR clone 138908 (TRAV9-2, TRAJ52)
CALSFSLLSGVTSYGKLTF

SEQ ID NO: 277816 - protein, 14 aa, Homo sapiens
  CDR3 for beta chain variable domain of TCR clone 138908 (TRBV7-6, TRBJ2-7)
CASSLFQDSYEQYF

SEQ ID NO: 277817 - protein, 10 aa, Homo sapiens
  CDR3 for alpha chain variable domain of TCR clone 138909 (TRAV20, TRAJ48)
CAVGNEKLTF

SEQ ID NO: 277818 - protein, 14 aa, Homo sapiens
  CDR3 for beta chain variable domain of TCR clone 138909 (TRBV7-3, TRBJ2-2)
CASSLNSNTGELFF

SEQ ID NO: 277819 - protein, 14 aa, Homo sapiens
  CDR3 for alpha chain variable domain of TCR clone 138910 (TRAV12-3, TRAJ58)
CAMSTETSGSRLTF

SEQ ID NO: 277820 - protein, 15 aa, Homo sapiens
  CDR3 for beta chain variable domain of TCR clone 138910 (TRBV4-1, TRBJ1-4)
CASSDTGGTNEKLFW

SEQ ID NO: 277821 - protein, 14 aa, Homo sapiens
  CDR3 for alpha chain variable domain of TCR clone 138911 (TRAV13-1, TRAJ35)
CAESKGGFGNVLHW

SEQ ID NO: 277822 - protein, 13 aa, Homo sapiens
  CDR3 for beta chain variable domain of TCR clone 138911 (TRBV7-3, TRBJ1-1)
CASSQDWGAEAFF

SEQ ID NO: 277823 - protein, 14 aa, Homo sapiens
  CDR3 for alpha chain variable domain of TCR clone 138912 (TRAV8-3, TRAJ4)
CAVGAAGGYNKLIF

SEQ ID NO: 277824 - protein, 14 aa, Homo sapiens
  CDR3 for beta chain variable domain of TCR clone 138912 (TRBV20-1, TRBJ1-1)
CSARDRGQGSEAFF

SEQ ID NO: 277825 - protein, 13 aa, Homo sapiens
  CDR3 for alpha chain variable domain of TCR clone 138913 (TRAV20, TRAJ37)
CAGCSSNTGKLIF

SEQ ID NO: 277826 - protein, 16 aa, Homo sapiens
  CDR3 for beta chain variable domain of TCR clone 138913 (TRBV4-2, TRBJ1-5)
CASSQGQGASNQPQHF

SEQ ID NO: 277827 - protein, 13 aa, Homo sapiens
  CDR3 for alpha chain variable domain of TCR clone 138914 (TRAV8-4, TRAJ39)
STPPSDAGNMLTF

SEQ ID NO: 277828 - protein, 14 aa, Homo sapiens
  CDR3 for beta chain variable domain of TCR clone 138914 (TRBV20-1, TRBJ1-1)
CSAQTRIGGTEAFF

SEQ ID NO: 277829 - protein, 15 aa, Homo sapiens
  CDR3 for alpha chain variable domain of TCR clone 138915 (TRAV27, TRAJ38)
CAARRNAGNNRKLIW

SEQ ID NO: 277830 - protein, 16 aa, Homo sapiens
  CDR3 for beta chain variable domain of TCR clone 138915 (TRBV13, TRBJ2-2)
CASSPRTGEHTGELFF

SEQ ID NO: 277831 - protein, 17 aa, Homo sapiens
  CDR3 for alpha chain variable domain of TCR clone 138916 (TRAV4, TRAJ31)
CLVARMTDSCLEMELSW

SEQ ID NO: 277832 - protein, 15 aa, Homo sapiens
  CDR3 for beta chain variable domain of TCR clone 138916 (TRBV7-8, TRBJ1-2)
CASSLVRDGGLGYTF

SEQ ID NO: 277833 - protein, 15 aa, Homo sapiens
  CDR3 for alpha chain variable domain of TCR clone 138917 (TRAV27, TRAJ38)
CAARRNAGNNRKLIW

SEQ ID NO: 277834 - protein, 13 aa, Homo sapiens
  CDR3 for beta chain variable domain of TCR clone 138917 (TRBV28, TRBJ2-1)
CASSSPRRREQFF

SEQ ID NO: 277835 - protein, 16 aa, Homo sapiens
  CDR3 for alpha chain variable domain of TCR clone 138918 (TRAV30, TRAJ24)
CGTEIVDAESWGKFKF

SEQ ID NO: 277836 - protein, 14 aa, Homo sapiens
  CDR3 for beta chain variable domain of TCR clone 138918 (TRBV12-5, TRBJ2-5)
CASGSRTHQETQYF

SEQ ID NO: 277837 - protein, 16 aa, Homo sapiens
  CDR3 for alpha chain variable domain of TCR clone 138919 (TRAV26-2, TRAJ56)
CILRDVAAGANSKLTF

SEQ ID NO: 277838 - protein, 15 aa, Homo sapiens
  CDR3 for beta chain variable domain of TCR clone 138919 (TRBV20-1, TRBJ1-1)
CSASRGVTGNTEAFF

SEQ ID NO: 277839 - protein, 15 aa, Homo sapiens
  CDR3 for alpha chain variable domain of TCR clone 138920 (TRAV12-1, TRAJ15)
CVVTRANQAGTALIF

SEQ ID NO: 277840 - protein, 17 aa, Homo sapiens
  CDR3 for beta chain variable domain of TCR clone 138920 (TRBV11-2, TRBJ2-1)
CASSLYPPGVEYNEQFF

SEQ ID NO: 277841 - protein, 13 aa, Homo sapiens
  CDR3 for alpha chain variable domain of TCR clone 138921 (TRAV12-3, TRAJ33)
CAMSVNSNYQLIW

SEQ ID NO: 277842 - protein, 15 aa, Homo sapiens
  CDR3 for beta chain variable domain of TCR clone 138921 (TRBV4-1, TRBJ2-3)
CASSRGQGIPDTQYF

SEQ ID NO: 277843 - protein, 11 aa, Homo sapiens
  CDR3 for alpha chain variable domain of TCR clone 138922 (TRAV2, TRAJ13)
CASGGYQKGTF

SEQ ID NO: 277844 - protein, 11 aa, Homo sapiens
  CDR3 for beta chain variable domain of TCR clone 138922 (TRBV29-1, TRBJ2-5)
CSEDRTGTQYF

SEQ ID NO: 277845 - protein, 11 aa, Homo sapiens
  CDR3 for alpha chain variable domain of TCR clone 138923 (TRAV17, TRAJ29)
CYVATDSPLVF

SEQ ID NO: 277846 - protein, 12 aa, Homo sapiens
  CDR3 for beta chain variable domain of TCR clone 138923 (TRBV7-9, TRBJ2-7)
CASSIKREEQYF

SEQ ID NO: 277847 - protein, 14 aa, Homo sapiens
  CDR3 for alpha chain variable domain of TCR clone 138924 (TRAV20, TRAJ32)
CCGRYGGAANKLIF

SEQ ID NO: 277848 - protein, 16 aa, Homo sapiens
  CDR3 for beta chain variable domain of TCR clone 138924 (TRBV19, TRBJ2-2)
CASRSPGTGATGELFF

SEQ ID NO: 277849 - protein, 17 aa, Homo sapiens
  CDR3 for alpha chain variable domain of TCR clone 138925 (TRAV3, TRAJ38)
CAVKDCLNAGNNRKLIW

SEQ ID NO: 277850 - protein, 14 aa, Homo sapiens
  CDR3 for beta chain variable domain of TCR clone 138925 (TRBV5-5, TRBJ1-5)
CASSGQGVDQPQHF

SEQ ID NO: 277851 - protein, 15 aa, Homo sapiens
  CDR3 for alpha chain variable domain of TCR clone 138926 (TRAV35, TRAJ58)
CAGRRQETSGSRLTF

SEQ ID NO: 277852 - protein, 16 aa, Homo sapiens
  CDR3 for beta chain variable domain of TCR clone 138926 (TRBV4-1, TRBJ1-2)
CASSQDAGQVLYGYTF

SEQ ID NO: 277853 - protein, 12 aa, Homo sapiens
  CDR3 for alpha chain variable domain of TCR clone 138927 (TRAV13-2, TRAJ23)
CAERLRGGKLIF

SEQ ID NO: 277854 - protein, 16 aa, Homo sapiens
  CDR3 for beta chain variable domain of TCR clone 138927 (TRBV20-1, TRBJ1-4)
CSAPGQGLLTNDKLFF

SEQ ID NO: 277855 - protein, 16 aa, Homo sapiens
  CDR3 for alpha chain variable domain of TCR clone 138928 (TRAV8-3, TRAJ8)
CAVPGDGNTGFQKLVF

SEQ ID NO: 277856 - protein, 14 aa, Homo sapiens
  CDR3 for beta chain variable domain of TCR clone 138928 (TRBV4-1, TRBJ2-2)
CASSQAVNTGELFF

SEQ ID NO: 277857 - protein, 14 aa, Homo sapiens
  CDR3 for alpha chain variable domain of TCR clone 138929 (TRAV8-3, TRAJ3)
CAVGRGSSASKIIF

SEQ ID NO: 277858 - protein, 14 aa, Homo sapiens
  CDR3 for beta chain variable domain of TCR clone 138929 (TRBV12-5, TRBJ2-5)
CASGSRTHQETQYF

SEQ ID NO: 277859 - protein, 10 aa, Homo sapiens
  CDR3 for alpha chain variable domain of TCR clone 138930 (TRAV12-1, TRAJ43)
CLVHNNDMRF

SEQ ID NO: 277860 - protein, 13 aa, Homo sapiens
  CDR3 for beta chain variable domain of TCR clone 138930 (TRBV12-4, TRBJ1-2)
CASSSGLTVIATF

SEQ ID NO: 277861 - protein, 15 aa, Homo sapiens
  CDR3 for alpha chain variable domain of TCR clone 138931 (TRAV35, TRAJ40)
CAGQLVTSGTYTYIF

SEQ ID NO: 277862 - protein, 14 aa, Homo sapiens
  CDR3 for beta chain variable domain of TCR clone 138931 (TRBV7-3, TRBJ2-1)
CASSLAGGTNEQFF

SEQ ID NO: 277863 - protein, 17 aa, Homo sapiens
  CDR3 for alpha chain variable domain of TCR clone 138932 (TRAV23/DV6, TRAJ57)
CAASSTLSQGGSEKLVF

SEQ ID NO: 277864 - protein, 15 aa, Homo sapiens
  CDR3 for beta chain variable domain of TCR clone 138932 (TRBV19, TRBJ2-7)
CASSPAGSGEALRYF

SEQ ID NO: 277865 - protein, 14 aa, Homo sapiens
  CDR3 for alpha chain variable domain of TCR clone 138933 (TRAV38-1, TRAJ45)
CASHSGGGADGLTF

SEQ ID NO: 277866 - protein, 13 aa, Homo sapiens
  CDR3 for beta chain variable domain of TCR clone 138933 (TRBV7-3, TRBJ1-1)
CASSQDWGAEAFF

SEQ ID NO: 277867 - protein, 13 aa, Homo sapiens
  CDR3 for alpha chain variable domain of TCR clone 138934 (TRAV12-3, TRAJ43)
CAMIRSNNNDMRL

SEQ ID NO: 277868 - protein, 12 aa, Homo sapiens
  CDR3 for beta chain variable domain of TCR clone 138934 (TRBV11-2, TRBJ2-5)
CASSLGQETQYF

SEQ ID NO: 277869 - protein, 16 aa, Homo sapiens
  CDR3 for alpha chain variable domain of TCR clone 138935 (TRAV27, TRAJ53)
YAAPEGSGGSNYKLTF

SEQ ID NO: 277870 - protein, 15 aa, Homo sapiens
  CDR3 for beta chain variable domain of TCR clone 138935 (TRBV20-1, TRBJ1-1)
CSASRGVTGNTEAFF

SEQ ID NO: 277871 - protein, 16 aa, Homo sapiens
  CDR3 for alpha chain variable domain of TCR clone 138936 (TRAV23/DV6, TRAJ9)
CAASIGGNTGGFKTIF

SEQ ID NO: 277872 - protein, 14 aa, Homo sapiens
  CDR3 for beta chain variable domain of TCR clone 138936 (TRBV19, TRBJ2-1)
CASGKSTQYNEQFF

SEQ ID NO: 277873 - protein, 15 aa, Homo sapiens
  CDR3 for alpha chain variable domain of TCR clone 138937 (TRAV12-2, TRAJ43)
CAFDMRFGAGTRLTV

SEQ ID NO: 277874 - protein, 17 aa, Homo sapiens
  CDR3 for beta chain variable domain of TCR clone 138937 (TRBV13, TRBJ2-3)
CASSLSRVAGGRNTQYF

SEQ ID NO: 277875 - protein, 13 aa, Homo sapiens
  CDR3 for alpha chain variable domain of TCR clone 138938 (TRAV21, TRAJ27)
CAARPGNAGKSTF

SEQ ID NO: 277876 - protein, 15 aa, Homo sapiens
  CDR3 for beta chain variable domain of TCR clone 138938 (TRBV15, TRBJ2-1)
CATSRPGQGLHEQFF

SEQ ID NO: 277877 - protein, 13 aa, Homo sapiens
  CDR3 for alpha chain variable domain of TCR clone 138939 (TRAV2, TRAJ40)
CAVVTSGTYKCIF

SEQ ID NO: 277878 - protein, 14 aa, Homo sapiens
  CDR3 for beta chain variable domain of TCR clone 138939 (TRBV7-2, TRBJ1-1)
CASSFLTGTTEAFF

SEQ ID NO: 277879 - protein, 11 aa, Homo sapiens
  CDR3 for alpha chain variable domain of TCR clone 138940 (TRAV12-3, TRAJ43)
CAMSVSNDMRF

SEQ ID NO: 277880 - protein, 15 aa, Homo sapiens
  CDR3 for beta chain variable domain of TCR clone 138940 (TRBV10-2, TRBJ2-6)
CASSEQGTGANVLTL

SEQ ID NO: 277881 - protein, 13 aa, Homo sapiens
  CDR3 for alpha chain variable domain of TCR clone 138941 (TRAV13-1, TRAJ21)
CAASIYNFNKFYF

SEQ ID NO: 277882 - protein, 14 aa, Homo sapiens
  CDR3 for beta chain variable domain of TCR clone 138941 (TRBV20-1, TRBJ1-1)
SAVLHLGGGTEAFF

SEQ ID NO: 277883 - protein, 12 aa, Homo sapiens
  CDR3 for alpha chain variable domain of TCR clone 138942 (TRAV30, TRAJ53)
CSGGGSNYKLTF

SEQ ID NO: 277884 - protein, 12 aa, Homo sapiens
  CDR3 for beta chain variable domain of TCR clone 138942 (TRBV29-1, TRBJ1-2)
CSVANSAYGYTF

SEQ ID NO: 277885 - protein, 15 aa, Homo sapiens
  CDR3 for alpha chain variable domain of TCR clone 138943 (TRAV12-3, TRAJ49)
CAMAVTPNTGNQFYF

SEQ ID NO: 277886 - protein, 15 aa, Homo sapiens
  CDR3 for beta chain variable domain of TCR clone 138943 (TRBV2, TRBJ2-1)
CASSELAGSYNEQFF

SEQ ID NO: 277887 - protein, 14 aa, Homo sapiens
  CDR3 for alpha chain variable domain of TCR clone 138944 (TRAV22, TRAJ6)
CPGVGPGGSYIPTF

SEQ ID NO: 277888 - protein, 15 aa, Homo sapiens
  CDR3 for beta chain variable domain of TCR clone 138944 (TRBV2, TRBJ2-1)
CASSELAGSYNEQFF

SEQ ID NO: 277889 - protein, 13 aa, Homo sapiens
  CDR3 for alpha chain variable domain of TCR clone 138945 (TRAV8-3, TRAJ28)
CAVGAVGSYQLTF

SEQ ID NO: 277890 - protein, 14 aa, Homo sapiens
  CDR3 for beta chain variable domain of TCR clone 138945 (TRBV18, TRBJ2-7)
CASSRPGASYEQYF

SEQ ID NO: 277891 - protein, 14 aa, Homo sapiens
  CDR3 for alpha chain variable domain of TCR clone 138946 (TRAV35, TRAJ22)
SAVLRPGSARQLTF

SEQ ID NO: 277892 - protein, 15 aa, Homo sapiens
  CDR3 for beta chain variable domain of TCR clone 138946 (TRBV12-4, TRBJ2-5)
CASSPPTGLQETQYF

SEQ ID NO: 277893 - protein, 14 aa, Homo sapiens
  CDR3 for alpha chain variable domain of TCR clone 138947 (TRAV12-2, TRAJ15)
CAPHTGQAGTALIF

SEQ ID NO: 277894 - protein, 15 aa, Homo sapiens
  CDR3 for beta chain variable domain of TCR clone 138947 (TRBV7-3, TRBJ2-1)
CASSPTGGGEVEQFF

SEQ ID NO: 277895 - protein, 13 aa, Homo sapiens
  CDR3 for alpha chain variable domain of TCR clone 138948 (TRAV3, TRAJ30)
CAVRDGGDDKIIL

SEQ ID NO: 277896 - protein, 16 aa, Homo sapiens
  CDR3 for beta chain variable domain of TCR clone 138948 (TRBV7-3, TRBJ2-2)
CASSLKRGTLSGELFF

SEQ ID NO: 277897 - protein, 15 aa, Homo sapiens
  CDR3 for alpha chain variable domain of TCR clone 138949 (TRAV38-1, TRAJ37)
CAFIHGSGNTVKLIF

SEQ ID NO: 277898 - protein, 14 aa, Homo sapiens
  CDR3 for beta chain variable domain of TCR clone 138949 (TRBV29-1, TRBJ2-5)
CSVETSGSGETQYF

SEQ ID NO: 277899 - protein, 15 aa, Homo sapiens
  CDR3 for alpha chain variable domain of TCR clone 138950 (TRAV8-1, TRAJ34)
CAVNSRTYNTDKLIF

SEQ ID NO: 277900 - protein, 15 aa, Homo sapiens
  CDR3 for beta chain variable domain of TCR clone 138950 (TRBV28, TRBJ2-1)
CASSIIAGGRSEQFF

SEQ ID NO: 277901 - protein, 13 aa, Homo sapiens
  CDR3 for alpha chain variable domain of TCR clone 138951 (TRAV30, TRAJ16)
CGTFGGDGQKLLF

SEQ ID NO: 277902 - protein, 13 aa, Homo sapiens
  CDR3 for beta chain variable domain of TCR clone 138951 (TRBV7-3, TRBJ2-1)
CASSLESYNEQFF

SEQ ID NO: 277903 - protein, 13 aa, Homo sapiens
  CDR3 for alpha chain variable domain of TCR clone 138952 (TRAV12-1, TRAJ33)
CGDAPDSNYQLTW

SEQ ID NO: 277904 - protein, 14 aa, Homo sapiens
  CDR3 for beta chain variable domain of TCR clone 138952 (TRBV7-2, TRBJ2-7)
CASSPKTSFYEQYF

SEQ ID NO: 277905 - protein, 13 aa, Homo sapiens
  CDR3 for alpha chain variable domain of TCR clone 138953 (TRAV35, TRAJ36)
CAGPRIGANNLFF

SEQ ID NO: 277906 - protein, 15 aa, Homo sapiens
  CDR3 for beta chain variable domain of TCR clone 138953 (TRBV5-1, TRBJ2-1)
CASSPPRAPYNEQFF

SEQ ID NO: 277907 - protein, 13 aa, Homo sapiens
  CDR3 for alpha chain variable domain of TCR clone 138954 (TRAV30, TRAJ6)
CGFIEGGSYIPTF

SEQ ID NO: 277908 - protein, 16 aa, Homo sapiens
  CDR3 for beta chain variable domain of TCR clone 138954 (TRBV24-1, TRBJ2-3)
CATSDPGTGATDTQYF

SEQ ID NO: 277909 - protein, 13 aa, Homo sapiens
  CDR3 for alpha chain variable domain of TCR clone 138955 (TRAV1-1, TRAJ9)
CAAKNTGGFKTIF

SEQ ID NO: 277910 - protein, 16 aa, Homo sapiens
  CDR3 for beta chain variable domain of TCR clone 138955 (TRBV11-2, TRBJ1-2)
CASSLDRGGNNYGYTF

SEQ ID NO: 277911 - protein, 13 aa, Homo sapiens
  CDR3 for alpha chain variable domain of TCR clone 138956 (TRAV2, TRAJ40)
CAVVTSGTYTYIF

SEQ ID NO: 277912 - protein, 15 aa, Homo sapiens
  CDR3 for beta chain variable domain of TCR clone 138956 (TRBV7-2, TRBJ1-5)
CASSLDRGQDQPQHF

SEQ ID NO: 277913 - protein, 12 aa, Homo sapiens
  CDR3 for alpha chain variable domain of TCR clone 138957 (TRAV12-3, TRAJ17)
CAMTLTGNKLTF

SEQ ID NO: 277914 - protein, 14 aa, Homo sapiens
  CDR3 for beta chain variable domain of TCR clone 138957 (TRBV11-1, TRBJ2-7)
CASTFAVPSYEQYF

SEQ ID NO: 277915 - protein, 12 aa, Homo sapiens
  CDR3 for alpha chain variable domain of TCR clone 138958 (TRAV13-1, TRAJ21)
CAAKEGFNKFYF

SEQ ID NO: 277916 - protein, 15 aa, Homo sapiens
  CDR3 for beta chain variable domain of TCR clone 138958 (TRBV2, TRBJ2-7)
CASSENRQGKGEQYF

SEQ ID NO: 277917 - protein, 17 aa, Homo sapiens
  CDR3 for alpha chain variable domain of TCR clone 138959 (TRAV8-6, TRAJ58)
CAVSSWVGETSGSRLTF

SEQ ID NO: 277918 - protein, 17 aa, Homo sapiens
  CDR3 for beta chain variable domain of TCR clone 138959 (TRBV20-1, TRBJ2-2)
CSASGSGQGGLTGELFF

SEQ ID NO: 277919 - protein, 12 aa, Homo sapiens
  CDR3 for alpha chain variable domain of TCR clone 138960 (TRAV12-3, TRAJ17)
CTMTLTGNKLTF

SEQ ID NO: 277920 - protein, 13 aa, Homo sapiens
  CDR3 for beta chain variable domain of TCR clone 138960 (TRBV7-9, TRBJ1-2)
CASSLKQNYGYTF

SEQ ID NO: 277921 - protein, 12 aa, Homo sapiens
  CDR3 for alpha chain variable domain of TCR clone 138961 (TRAV12-2, TRAJ8)
CAVATGFQKLVF

SEQ ID NO: 277922 - protein, 12 aa, Homo sapiens
  CDR3 for beta chain variable domain of TCR clone 138961 (TRBV14, TRBJ1-1)
CASSQLKGRAFF

SEQ ID NO: 277923 - protein, 14 aa, Homo sapiens
  CDR3 for alpha chain variable domain of TCR clone 138962 (TRAV26-1, TRAJ52)
CIVRVGTSYGKLTF

SEQ ID NO: 277924 - protein, 13 aa, Homo sapiens
  CDR3 for beta chain variable domain of TCR clone 138962 (TRBV7-2, TRBJ1-1)
CASSLRASTEAFF

SEQ ID NO: 277925 - protein, 14 aa, Homo sapiens
  CDR3 for alpha chain variable domain of TCR clone 138963 (TRAV17, TRAJ4)
CATAPLGGYNKLSF

SEQ ID NO: 277926 - protein, 15 aa, Homo sapiens
  CDR3 for beta chain variable domain of TCR clone 138963 (TRBV11-3, TRBJ2-3)
CASLKDGREGDTQYF

SEQ ID NO: 277927 - protein, 13 aa, Homo sapiens
  CDR3 for alpha chain variable domain of TCR clone 138964 (TRAV2, TRAJ15)
CAVASQAGTALIF

SEQ ID NO: 277928 - protein, 14 aa, Homo sapiens
  CDR3 for beta chain variable domain of TCR clone 138964 (TRBV4-1, TRBJ2-7)
CASSPVAGGDEQYF

SEQ ID NO: 277929 - protein, 14 aa, Homo sapiens
  CDR3 for alpha chain variable domain of TCR clone 138965 (TRAV27, TRAJ23)
CAGLSYNQVGKLIF

SEQ ID NO: 277930 - protein, 15 aa, Homo sapiens
  CDR3 for beta chain variable domain of TCR clone 138965 (TRBV20-1, TRBJ2-7)
CSARDRVSGMDEQYF

SEQ ID NO: 277931 - protein, 17 aa, Homo sapiens
  CDR3 for alpha chain variable domain of TCR clone 138966 (TRAV3, TRAJ6)
CAVRDGPRAGGRYIPTF

SEQ ID NO: 277932 - protein, 14 aa, Homo sapiens
  CDR3 for beta chain variable domain of TCR clone 138966 (TRBV12-5, TRBJ2-5)
CASGSRTHQETQYF

SEQ ID NO: 277933 - protein, 14 aa, Homo sapiens
  CDR3 for alpha chain variable domain of TCR clone 138967 (TRAV1-2, TRAJ16)
CAVNRFSDGQQLLF

SEQ ID NO: 277934 - protein, 14 aa, Homo sapiens
  CDR3 for beta chain variable domain of TCR clone 138967 (TRBV12-5, TRBJ2-5)
CASGSRTHQETQYF

SEQ ID NO: 277935 - protein, 15 aa, Homo sapiens
  CDR3 for alpha chain variable domain of TCR clone 138968 (TRAV21, TRAJ18)
CAVRDRGSTLGRLYF

SEQ ID NO: 277936 - protein, 15 aa, Homo sapiens
  CDR3 for beta chain variable domain of TCR clone 138968 (TRBV12-4, TRBJ2-5)
CASNTLAGYQETQYF

SEQ ID NO: 277937 - protein, 13 aa, Homo sapiens
  CDR3 for alpha chain variable domain of TCR clone 138969 (TRAV17, TRAJ40)
CATRSPGTYKYIF

SEQ ID NO: 277938 - protein, 14 aa, Homo sapiens
  CDR3 for beta chain variable domain of TCR clone 138969 (TRBV7-8, TRBJ2-3)
CASSLEAGTDTQYF

SEQ ID NO: 277939 - protein, 13 aa, Homo sapiens
  CDR3 for alpha chain variable domain of TCR clone 138970 (TRAV13-2, TRAJ48)
CAEMDFGNEKLTF

SEQ ID NO: 277940 - protein, 13 aa, Homo sapiens
  CDR3 for beta chain variable domain of TCR clone 138970 (TRBV11-3, TRBJ2-3)
CASSFTGPDTQYF

SEQ ID NO: 277941 - protein, 12 aa, Homo sapiens
  CDR3 for alpha chain variable domain of TCR clone 138971 (TRAV2, TRAJ10)
CASTGGGNKLTF

SEQ ID NO: 277942 - protein, 14 aa, Homo sapiens
  CDR3 for beta chain variable domain of TCR clone 138971 (TRBV18, TRBJ2-7)
CASSPRGGAYEQYF

SEQ ID NO: 277943 - protein, 14 aa, Homo sapiens
  CDR3 for alpha chain variable domain of TCR clone 138972 (TRAV1-2, TRAJ8)
CAVREDTGFQKLVF

SEQ ID NO: 277944 - protein, 15 aa, Homo sapiens
  CDR3 for beta chain variable domain of TCR clone 138972 (TRBV2, TRBJ2-2)
CASSRQGPNTGELFF

SEQ ID NO: 277945 - protein, 16 aa, Homo sapiens
  CDR3 for alpha chain variable domain of TCR clone 138973 (TRAV3, TRAJ37)
CAVRGKGSGNTGKLIF

SEQ ID NO: 277946 - protein, 15 aa, Homo sapiens
  CDR3 for beta chain variable domain of TCR clone 138973 (TRBV19, TRBJ1-6)
CASSTQGAVGSPLHF

SEQ ID NO: 277947 - protein, 12 aa, Homo sapiens
  CDR3 for alpha chain variable domain of TCR clone 138974 (TRAV12-3, TRAJ4)
CAMTGAGTRLAV

SEQ ID NO: 277948 - protein, 14 aa, Homo sapiens
  CDR3 for beta chain variable domain of TCR clone 138974 (TRBV10-3, TRBJ1-1)
CAISVTDRGVEAFF

SEQ ID NO: 277949 - protein, 11 aa, Homo sapiens
  CDR3 for alpha chain variable domain of TCR clone 138975 (TRAV1-1, TRAJ23)
CAVRQGGKLIF

SEQ ID NO: 277950 - protein, 16 aa, Homo sapiens
  CDR3 for beta chain variable domain of TCR clone 138975 (TRBV6-5, TRBJ1-6)
CASSYSGESYNSPLHF

SEQ ID NO: 277951 - protein, 15 aa, Homo sapiens
  CDR3 for alpha chain variable domain of TCR clone 138976 (TRAV12-1, TRAJ33)
CVVNGNLDSNYQLIW

SEQ ID NO: 277952 - protein, 12 aa, Homo sapiens
  CDR3 for beta chain variable domain of TCR clone 138976 (TRBV7-8, TRBJ2-7)
CASSLGDREQYF

SEQ ID NO: 277953 - protein, 17 aa, Homo sapiens
  CDR3 for alpha chain variable domain of TCR clone 138977 (TRAV17, TRAJ53)
CATEPRNSGGSNYKLTF

SEQ ID NO: 277954 - protein, 15 aa, Homo sapiens
  CDR3 for beta chain variable domain of TCR clone 138977 (TRBV5-1, TRBJ2-7)
CASSSTSWTPYEQYF

SEQ ID NO: 277955 - protein, 15 aa, Homo sapiens
  CDR3 for alpha chain variable domain of TCR clone 138978 (TRAV3, TRAJ22)
CAVRDQGGSARQLTL

SEQ ID NO: 277956 - protein, 16 aa, Homo sapiens
  CDR3 for beta chain variable domain of TCR clone 138978 (TRBV5-4, TRBJ2-3)
CASQQPGAGGSDTQYF

SEQ ID NO: 277957 - protein, 13 aa, Homo sapiens
  CDR3 for alpha chain variable domain of TCR clone 138979 (TRAV17, TRAJ34)
CATVPYNTVKLIF

SEQ ID NO: 277958 - protein, 14 aa, Homo sapiens
  CDR3 for beta chain variable domain of TCR clone 138979 (TRBV9, TRBJ2-3)
CASSAGGGPDTQYF

SEQ ID NO: 277959 - protein, 14 aa, Homo sapiens
  CDR3 for alpha chain variable domain of TCR clone 138980 (TRAV26-1, TRAJ22)
CIVRVYGSARQLTF

SEQ ID NO: 277960 - protein, 17 aa, Homo sapiens
  CDR3 for beta chain variable domain of TCR clone 138980 (TRBV7-3, TRBJ2-3)
CASSPGGLAVFGDTQYF

SEQ ID NO: 277961 - protein, 12 aa, Homo sapiens
  CDR3 for alpha chain variable domain of TCR clone 138981 (TRAV21, TRAJ39)
CAAANAGNMLTF

SEQ ID NO: 277962 - protein, 15 aa, Homo sapiens
  CDR3 for beta chain variable domain of TCR clone 138981 (TRBV27, TRBJ2-1)
CASSNGGGSSNEQFF

SEQ ID NO: 277963 - protein, 15 aa, Homo sapiens
  CDR3 for alpha chain variable domain of TCR clone 138982 (TRAV12-2, TRAJ43)
CAFDMRFGAGTSLTV

SEQ ID NO: 277964 - protein, 17 aa, Homo sapiens
  CDR3 for beta chain variable domain of TCR clone 138982 (TRBV13, TRBJ2-3)
CASSLSRVAGGRNTQYF

SEQ ID NO: 277965 - protein, 14 aa, Homo sapiens
  CDR3 for alpha chain variable domain of TCR clone 138983 (TRAV8-1, TRAJ22)
CAAPSSGSARKLTF

SEQ ID NO: 277966 - protein, 14 aa, Homo sapiens
  CDR3 for beta chain variable domain of TCR clone 138983 (TRBV9, TRBJ2-2)
CASSVGQGAGELFF

SEQ ID NO: 277967 - protein, 14 aa, Homo sapiens
  CDR3 for alpha chain variable domain of TCR clone 138984 (TRAV16, TRAJ31)
CSKWRRGANARLMF

SEQ ID NO: 277968 - protein, 16 aa, Homo sapiens
  CDR3 for beta chain variable domain of TCR clone 138984 (TRBV28, TRBJ2-7)
CASSLFFETGGPEQYF

SEQ ID NO: 277969 - protein, 13 aa, Homo sapiens
  CDR3 for alpha chain variable domain of TCR clone 138985 (TRAV29/DV5, TRAJ33)
CAASVESNYQLIW

SEQ ID NO: 277970 - protein, 14 aa, Homo sapiens
  CDR3 for beta chain variable domain of TCR clone 138985 (TRBV5-6, TRBJ1-1)
CASGLAGDWTEAFF

SEQ ID NO: 277971 - protein, 15 aa, Homo sapiens
  CDR3 for alpha chain variable domain of TCR clone 138986 (TRAV13-2, TRAJ5)
CAENPHWTGRRALTF

SEQ ID NO: 277972 - protein, 14 aa, Homo sapiens
  CDR3 for beta chain variable domain of TCR clone 138986 (TRBV5-7, TRBJ2-7)
CAISFKGATGEQYF

SEQ ID NO: 277973 - protein, 12 aa, Homo sapiens
  CDR3 for alpha chain variable domain of TCR clone 138987 (TRAV13-1, TRAJ27)
CAAHTNAGKSTF

SEQ ID NO: 277974 - protein, 15 aa, Homo sapiens
  CDR3 for beta chain variable domain of TCR clone 138987 (TRBV7-9, TRBJ1-6)
CASSAPGRGNSPLHF

SEQ ID NO: 277975 - protein, 17 aa, Homo sapiens
  CDR3 for alpha chain variable domain of TCR clone 138988 (TRAV4, TRAJ18)
CLVGERSVGPTLGRLYF

SEQ ID NO: 277976 - protein, 16 aa, Homo sapiens
  CDR3 for beta chain variable domain of TCR clone 138988 (TRBV4-2, TRBJ1-1)
CASSPSPGRAAPEAFF

SEQ ID NO: 277977 - protein, 15 aa, Homo sapiens
  CDR3 for alpha chain variable domain of TCR clone 138989 (TRAV12-3, TRAJ6)
CAMSATTGGSYIPTF

SEQ ID NO: 277978 - protein, 16 aa, Homo sapiens
  CDR3 for beta chain variable domain of TCR clone 138989 (TRBV7-9, TRBJ2-6)
CASSLKGPLRANVLTF

SEQ ID NO: 277979 - protein, 13 aa, Homo sapiens
  CDR3 for alpha chain variable domain of TCR clone 138990 (TRAV12-2, TRAJ31)
CAVKADNNARLMF

SEQ ID NO: 277980 - protein, 16 aa, Homo sapiens
  CDR3 for beta chain variable domain of TCR clone 138990 (TRBV19, TRBJ2-1)
CASSMGGGSSYNEQFF

SEQ ID NO: 277981 - protein, 14 aa, Homo sapiens
  CDR3 for alpha chain variable domain of TCR clone 138991 (TRAV12-3, TRAJ10)
SHLPLTGGGNKLTF

SEQ ID NO: 277982 - protein, 16 aa, Homo sapiens
  CDR3 for beta chain variable domain of TCR clone 138991 (TRBV12-4, TRBJ2-5)
CASSWRPSGDLENQYF

SEQ ID NO: 277983 - protein, 14 aa, Homo sapiens
  CDR3 for alpha chain variable domain of TCR clone 138992 (TRAV8-3, TRAJ9)
CAVVYNTGGFKTIF

SEQ ID NO: 277984 - protein, 14 aa, Homo sapiens
  CDR3 for beta chain variable domain of TCR clone 138992 (TRBV7-3, TRBJ2-2)
CSSSSGGYTGELFF

SEQ ID NO: 277985 - protein, 15 aa, Homo sapiens
  CDR3 for alpha chain variable domain of TCR clone 138993 (TRAV26-1, TRAJ29)
CIVRVEGLGNTPLVF

SEQ ID NO: 277986 - protein, 16 aa, Homo sapiens
  CDR3 for beta chain variable domain of TCR clone 138993 (TRBV2, TRBJ1-5)
CASSESPQGLNQPQHF

SEQ ID NO: 277987 - protein, 14 aa, Homo sapiens
  CDR3 for alpha chain variable domain of TCR clone 138994 (TRAV12-1, TRAJ17)
CVVNPKAAGNRLTF

SEQ ID NO: 277988 - protein, 13 aa, Homo sapiens
  CDR3 for beta chain variable domain of TCR clone 138994 (TRBV7-3, TRBJ1-1)
CASSQDWGAEAFF

SEQ ID NO: 277989 - protein, 13 aa, Homo sapiens
  CDR3 for alpha chain variable domain of TCR clone 138995 (TRAV21, TRAJ20)
CAVGLRGDYKLSF

SEQ ID NO: 277990 - protein, 14 aa, Homo sapiens
  CDR3 for beta chain variable domain of TCR clone 138995 (TRBV6-1, TRBJ1-3)
CASVQGGGGNTIYF

SEQ ID NO: 277991 - protein, 18 aa, Homo sapiens
  CDR3 for alpha chain variable domain of TCR clone 138996 (TRAV4, TRAJ29)
CLVGAYRSQETHLWSLER

SEQ ID NO: 277992 - protein, 17 aa, Homo sapiens
  CDR3 for beta chain variable domain of TCR clone 138996 (TRBV25-1, TRBJ2-7)
CASSDARVVFSSYEQYF

SEQ ID NO: 277993 - protein, 17 aa, Homo sapiens
  CDR3 for alpha chain variable domain of TCR clone 138997 (TRAV12-3, TRAJ6)
CAMSARGGAGGSYIPTF

SEQ ID NO: 277994 - protein, 17 aa, Homo sapiens
  CDR3 for beta chain variable domain of TCR clone 138997 (TRBV15, TRBJ1-1)
CATSRVGGADGDTEAFF

SEQ ID NO: 277995 - protein, 10 aa, Homo sapiens
  CDR3 for alpha chain variable domain of TCR clone 138998 (TRAV1-2, TRAJ31)
CAFFDARLMF

SEQ ID NO: 277996 - protein, 15 aa, Homo sapiens
  CDR3 for beta chain variable domain of TCR clone 138998 (TRBV19, TRBJ1-6)
CASSTQGAVGSPLHF

SEQ ID NO: 277997 - protein, 15 aa, Homo sapiens
  CDR3 for alpha chain variable domain of TCR clone 138999 (TRAV23/DV6, TRAJ13)
CAAWPGGGGYQKVTF

SEQ ID NO: 277998 - protein, 14 aa, Homo sapiens
  CDR3 for beta chain variable domain of TCR clone 138999 (TRBV7-9, TRBJ1-2)
CASSSNRGGDGYTF

SEQ ID NO: 277999 - protein, 14 aa, Homo sapiens
  CDR3 for alpha chain variable domain of TCR clone 139000 (TRAV1-2, TRAJ15)
CAVRDRQAGTALIF

SEQ ID NO: 278000 - protein, 14 aa, Homo sapiens
  CDR3 for beta chain variable domain of TCR clone 139000 (TRBV25-1, TRBJ1-1)
CASTHLGGNTEAFF

SEQ ID NO: 278001 - protein, 15 aa, Homo sapiens
  CDR3 for alpha chain variable domain of TCR clone 139001 (TRAV23/DV6, TRAJ38)
CAARSTAGNNRKLIW

SEQ ID NO: 278002 - protein, 16 aa, Homo sapiens
  CDR3 for beta chain variable domain of TCR clone 139001 (TRBV10-2, TRBJ1-5)
CASSRDRDYSNQTQHF

SEQ ID NO: 278003 - protein, 15 aa, Homo sapiens
  CDR3 for alpha chain variable domain of TCR clone 139002 (TRAV21, TRAJ37)
CAVRPTLSNTGKLIF

SEQ ID NO: 278004 - protein, 16 aa, Homo sapiens
  CDR3 for beta chain variable domain of TCR clone 139002 (TRBV24-1, TRBJ2-3)
CATSDRREDLTDTQYF

SEQ ID NO: 278005 - protein, 17 aa, Homo sapiens
  CDR3 for alpha chain variable domain of TCR clone 139003 (TRAV4, TRAJ42)
CLVGVLNHGGSQGNLIF

SEQ ID NO: 278006 - protein, 14 aa, Homo sapiens
  CDR3 for beta chain variable domain of TCR clone 139003 (TRBV19, TRBJ2-2)
CASSGQGIAGELFF

SEQ ID NO: 278007 - protein, 14 aa, Homo sapiens
  CDR3 for alpha chain variable domain of TCR clone 139004 (TRAV16, TRAJ39)
CALGKNNAGNMLTF

SEQ ID NO: 278008 - protein, 13 aa, Homo sapiens
  CDR3 for beta chain variable domain of TCR clone 139004 (TRBV7-9, TRBJ1-2)
CASSLKQNYGYTF

SEQ ID NO: 278009 - protein, 13 aa, Homo sapiens
  CDR3 for alpha chain variable domain of TCR clone 139005 (TRAV4, TRAJ42)
CLVGGGSQGNLIF

SEQ ID NO: 278010 - protein, 16 aa, Homo sapiens
  CDR3 for beta chain variable domain of TCR clone 139005 (TRBV5-1, TRBJ2-3)
CASSLLGRVGAATQYF

SEQ ID NO: 278011 - protein, 12 aa, Homo sapiens
  CDR3 for alpha chain variable domain of TCR clone 139006 (TRAV9-2, TRAJ26)
CALRGYGQNVVF

SEQ ID NO: 278012 - protein, 12 aa, Homo sapiens
  CDR3 for beta chain variable domain of TCR clone 139006 (TRBV29-1, TRBJ2-3)
CSVTGGADTQYF

SEQ ID NO: 278013 - protein, 15 aa, Homo sapiens
  CDR3 for alpha chain variable domain of TCR clone 139007 (TRAV13-1, TRAJ27)
CAASGGNTNAGKSTF

SEQ ID NO: 278014 - protein, 15 aa, Homo sapiens
  CDR3 for beta chain variable domain of TCR clone 139007 (TRBV12-4, TRBJ1-5)
CAGTRQGSGNQPQHF

SEQ ID NO: 278015 - protein, 11 aa, Homo sapiens
  CDR3 for alpha chain variable domain of TCR clone 139008 (TRAV8-3, TRAJ18)
CAVGGRQRLNP

SEQ ID NO: 278016 - protein, 12 aa, Homo sapiens
  CDR3 for beta chain variable domain of TCR clone 139008 (TRBV28, TRBJ2-6)
CDIQAGANVLTF

SEQ ID NO: 278017 - protein, 11 aa, Homo sapiens
  CDR3 for alpha chain variable domain of TCR clone 139009 (TRAV2, TRAJ13)
CASGGYQKGTF

SEQ ID NO: 278018 - protein, 20 aa, Homo sapiens
  CDR3 for beta chain variable domain of TCR clone 139009 (TRBV28, TRBJ2-1)
CASTPIGRSPGLAGGNEQFF

SEQ ID NO: 278019 - protein, 10 aa, Homo sapiens
  CDR3 for alpha chain variable domain of TCR clone 139010 (TRAV23/DV6, TRAJ57)
CAAGSTLSQG

SEQ ID NO: 278020 - protein, 14 aa, Homo sapiens
  CDR3 for beta chain variable domain of TCR clone 139010 (TRBV25-1, TRBJ1-1)
CAITHLGGNTEAFF

SEQ ID NO: 278021 - protein, 13 aa, Homo sapiens
  CDR3 for alpha chain variable domain of TCR clone 139011 (TRAV27, TRAJ45)
CRSSGGGADGLTF

SEQ ID NO: 278022 - protein, 15 aa, Homo sapiens
  CDR3 for beta chain variable domain of TCR clone 139011 (TRBV11-2, TRBJ2-2)
CASSSDRVNAGELFF

SEQ ID NO: 278023 - protein, 21 aa, Homo sapiens
  CDR3 for alpha chain variable domain of TCR clone 139012 (TRAV8-3, TRAJ6)
CAVGGEEATYLHLAEEPAILF

SEQ ID NO: 278024 - protein, 14 aa, Homo sapiens
  CDR3 for beta chain variable domain of TCR clone 139012 (TRBV5-1, TRBJ2-7)
CASSRGESLYEQYF

SEQ ID NO: 278025 - protein, 16 aa, Homo sapiens
  CDR3 for alpha chain variable domain of TCR clone 139013 (TRAV8-3, TRAJ8)
CAVPRDGNTGFQKLVF

SEQ ID NO: 278026 - protein, 15 aa, Homo sapiens
  CDR3 for beta chain variable domain of TCR clone 139013 (TRBV6-1, TRBJ2-3)
CASSERGGITDTQYF

SEQ ID NO: 278027 - protein, 15 aa, Homo sapiens
  CDR3 for alpha chain variable domain of TCR clone 139014 (TRAV16, TRAJ16)
CALQGGGSDGQKLLF

SEQ ID NO: 278028 - protein, 14 aa, Homo sapiens
  CDR3 for beta chain variable domain of TCR clone 139014 (TRBV12-4, TRBJ1-4)
CASSRQGANEKLFF

SEQ ID NO: 278029 - protein, 13 aa, Homo sapiens
  CDR3 for alpha chain variable domain of TCR clone 139015 (TRAV12-3, TRAJ35)
CAMALGFGNVLHC

SEQ ID NO: 278030 - protein, 15 aa, Homo sapiens
  CDR3 for beta chain variable domain of TCR clone 139015 (TRBV20-1, TRBJ2-1)
CSARGSGTYYNEQFF

SEQ ID NO: 278031 - protein, 15 aa, Homo sapiens
  CDR3 for alpha chain variable domain of TCR clone 139016 (TRAV3, TRAJ4)
CAVRDGTGGSNKLIF

SEQ ID NO: 278032 - protein, 15 aa, Homo sapiens
  CDR3 for beta chain variable domain of TCR clone 139016 (TRBV9, TRBJ1-6)
CASSVAGTGDSPLHF

SEQ ID NO: 278033 - protein, 14 aa, Homo sapiens
  CDR3 for alpha chain variable domain of TCR clone 139017 (TRAV1-2, TRAJ16)
CAANRFSDGQKLLF

SEQ ID NO: 278034 - protein, 13 aa, Homo sapiens
  CDR3 for beta chain variable domain of TCR clone 139017 (TRBV19, TRBJ2-7)
CASSTRGSYEQYF

SEQ ID NO: 278035 - protein, 13 aa, Homo sapiens
  CDR3 for alpha chain variable domain of TCR clone 139018 (TRAV13-2, TRAJ40)
CAEFTSGTYQYIF

SEQ ID NO: 278036 - protein, 14 aa, Homo sapiens
  CDR3 for beta chain variable domain of TCR clone 139018 (TRBV10-2, TRBJ1-5)
CASSSTGRNQPQHF

SEQ ID NO: 278037 - protein, 15 aa, Homo sapiens
  CDR3 for alpha chain variable domain of TCR clone 139019 (TRAV2, TRAJ15)
CAVEDRGQAGTALIF

SEQ ID NO: 278038 - protein, 15 aa, Homo sapiens
  CDR3 for beta chain variable domain of TCR clone 139019 (TRBV20-1, TRBJ1-5)
WSATSDRGLGQPQHF

SEQ ID NO: 278039 - protein, 13 aa, Homo sapiens
  CDR3 for alpha chain variable domain of TCR clone 139020 (TRAV9-2, TRAJ53)
CALSGGSNYKLTL

SEQ ID NO: 278040 - protein, 17 aa, Homo sapiens
  CDR3 for beta chain variable domain of TCR clone 139020 (TRBV11-2, TRBJ2-1)
CASSLYPPGVEYNEQFF

SEQ ID NO: 278041 - protein, 12 aa, Homo sapiens
  CDR3 for alpha chain variable domain of TCR clone 139021 (TRAV12-3, TRAJ17)
CAMTLTGNNLTF

SEQ ID NO: 278042 - protein, 13 aa, Homo sapiens
  CDR3 for beta chain variable domain of TCR clone 139021 (TRBV5-1, TRBJ1-1)
CASSADWDTEAFF

SEQ ID NO: 278043 - protein, 14 aa, Homo sapiens
  CDR3 for alpha chain variable domain of TCR clone 139022 (TRAV3, TRAJ34)
CAVRDINNTDKLIF

SEQ ID NO: 278044 - protein, 14 aa, Homo sapiens
  CDR3 for beta chain variable domain of TCR clone 139022 (TRBV19, TRBJ2-1)
CASGKSTQYNEQFF

SEQ ID NO: 278045 - protein, 14 aa, Homo sapiens
  CDR3 for alpha chain variable domain of TCR clone 139023 (TRAV8-4, TRAJ5)
CAVSTDTGRRALTF

SEQ ID NO: 278046 - protein, 15 aa, Homo sapiens
  CDR3 for beta chain variable domain of TCR clone 139023 (TRBV9, TRBJ1-6)
CASSVAGTGDSPLHF

SEQ ID NO: 278047 - protein, 14 aa, Homo sapiens
  CDR3 for alpha chain variable domain of TCR clone 139024 (TRAV12-1, TRAJ6)
CVVARIRRKLHTYI

SEQ ID NO: 278048 - protein, 15 aa, Homo sapiens
  CDR3 for beta chain variable domain of TCR clone 139024 (TRBV7-3, TRBJ2-1)
CASSLKASEYNEQFF

SEQ ID NO: 278049 - protein, 14 aa, Homo sapiens
  CDR3 for alpha chain variable domain of TCR clone 139025 (TRAV12-3, TRAJ10)
SHLPLTGGGNKLTF

SEQ ID NO: 278050 - protein, 17 aa, Homo sapiens
  CDR3 for beta chain variable domain of TCR clone 139025 (TRBV4-3, TRBJ1-2)
CASSSRLQAGGSVGYTF

SEQ ID NO: 278051 - protein, 14 aa, Homo sapiens
  CDR3 for alpha chain variable domain of TCR clone 139026 (TRAV16, TRAJ33)
CALSAMDSNYQLIW

SEQ ID NO: 278052 - protein, 16 aa, Homo sapiens
  CDR3 for beta chain variable domain of TCR clone 139026 (TRBV18, TRBJ2-1)
CASSPTGASGGNEQFF

SEQ ID NO: 278053 - protein, 14 aa, Homo sapiens
  CDR3 for alpha chain variable domain of TCR clone 139027 (TRAV13-1, TRAJ10)
CAALFTGGGNKLTF

SEQ ID NO: 278054 - protein, 15 aa, Homo sapiens
  CDR3 for beta chain variable domain of TCR clone 139027 (TRBV10-3, TRBJ2-2)
CAISGGDRAAGELFF

SEQ ID NO: 278055 - protein, 11 aa, Homo sapiens
  CDR3 for alpha chain variable domain of TCR clone 139028 (TRAV16, TRAJ23)
CALGGGGKLIF

SEQ ID NO: 278056 - protein, 15 aa, Homo sapiens
  CDR3 for beta chain variable domain of TCR clone 139028 (TRBV25-1, TRBJ1-4)
CASSPGDSTNEKLFF

SEQ ID NO: 278057 - protein, 14 aa, Homo sapiens
  CDR3 for alpha chain variable domain of TCR clone 139029 (TRAV8-4, TRAJ9)
CAVRINTGGFKTIF

SEQ ID NO: 278058 - protein, 14 aa, Homo sapiens
  CDR3 for beta chain variable domain of TCR clone 139029 (TRBV5-4, TRBJ1-4)
CASSLNLGREKLFF

SEQ ID NO: 278059 - protein, 14 aa, Homo sapiens
  CDR3 for alpha chain variable domain of TCR clone 139030 (TRAV17, TRAJ34)
CATDSLEGTAKLIF

SEQ ID NO: 278060 - protein, 13 aa, Homo sapiens
  CDR3 for beta chain variable domain of TCR clone 139030 (TRBV11-2, TRBJ2-7)
CASSGARPYEQYF

SEQ ID NO: 278061 - protein, 13 aa, Homo sapiens
  CDR3 for alpha chain variable domain of TCR clone 139031 (TRAV12-3, TRAJ6)
CANPSGGSYIPTF

SEQ ID NO: 278062 - protein, 14 aa, Homo sapiens
  CDR3 for beta chain variable domain of TCR clone 139031 (TRBV19, TRBJ1-1)
CASSRDWDATEAFF

SEQ ID NO: 278063 - protein, 12 aa, Homo sapiens
  CDR3 for alpha chain variable domain of TCR clone 139032 (TRAV13-2, TRAJ8)
CAPWLGFQKLVF

SEQ ID NO: 278064 - protein, 15 aa, Homo sapiens
  CDR3 for beta chain variable domain of TCR clone 139032 (TRBV12-4, TRBJ2-5)
CASSRSGAFQETQYF

SEQ ID NO: 278065 - protein, 14 aa, Homo sapiens
  CDR3 for alpha chain variable domain of TCR clone 139033 (TRAV13-1, TRAJ44)
CAAKATGTASNLTF

SEQ ID NO: 278066 - protein, 12 aa, Homo sapiens
  CDR3 for beta chain variable domain of TCR clone 139033 (TRBV7-8, TRBJ2-7)
CASSLGDRGQYF

SEQ ID NO: 278067 - protein, 17 aa, Homo sapiens
  CDR3 for alpha chain variable domain of TCR clone 139034 (TRAV3, TRAJ13)
CAVRDMRRTVGYQKVTF

SEQ ID NO: 278068 - protein, 13 aa, Homo sapiens
  CDR3 for beta chain variable domain of TCR clone 139034 (TRBV12-4, TRBJ1-2)
CASSLRQGKGYTF

SEQ ID NO: 278069 - protein, 14 aa, Homo sapiens
  CDR3 for alpha chain variable domain of TCR clone 139035 (TRAV8-2, TRAJ37)
CVVSISGNTGKLIF

SEQ ID NO: 278070 - protein, 13 aa, Homo sapiens
  CDR3 for beta chain variable domain of TCR clone 139035 (TRBV27, TRBJ1-1)
CASSLSIGAEAFL

SEQ ID NO: 278071 - protein, 14 aa, Homo sapiens
  CDR3 for alpha chain variable domain of TCR clone 139036 (TRAV23/DV6, TRAJ21)
CAANLLYNFNKFYF

SEQ ID NO: 278072 - protein, 13 aa, Homo sapiens
  CDR3 for beta chain variable domain of TCR clone 139036 (TRBV20-1, TRBJ1-5)
CSARGHGRQPQHV

SEQ ID NO: 278073 - protein, 14 aa, Homo sapiens
  CDR3 for alpha chain variable domain of TCR clone 139037 (TRAV1-2, TRAJ16)
CAVRGFSDGQKLFF

SEQ ID NO: 278074 - protein, 12 aa, Homo sapiens
  CDR3 for beta chain variable domain of TCR clone 139037 (TRBV14, TRBJ2-7)
CASSRLKGEQYF

SEQ ID NO: 278075 - protein, 17 aa, Homo sapiens
  CDR3 for alpha chain variable domain of TCR clone 139038 (TRAV3, TRAJ6)
CAVRDGPRAGGSYIPTF

SEQ ID NO: 278076 - protein, 14 aa, Homo sapiens
  CDR3 for beta chain variable domain of TCR clone 139038 (TRBV13, TRBJ2-5)
CASYRRLAEETQYF

SEQ ID NO: 278077 - protein, 18 aa, Homo sapiens
  CDR3 for alpha chain variable domain of TCR clone 139039 (TRAV3, TRAJ17)
CAVRARRGGRSCRQQANF

SEQ ID NO: 278078 - protein, 18 aa, Homo sapiens
  CDR3 for beta chain variable domain of TCR clone 139039 (TRBV15, TRBJ2-3)
CATSRDGARSWDTDTQYF

SEQ ID NO: 278079 - protein, 16 aa, Homo sapiens
  CDR3 for alpha chain variable domain of TCR clone 139040 (TRAV13-1, TRAJ52)
CSKFRCWWYYYGKLTF

SEQ ID NO: 278080 - protein, 15 aa, Homo sapiens
  CDR3 for beta chain variable domain of TCR clone 139040 (TRBV2, TRBJ2-1)
CASSELAGSYNEQFF

SEQ ID NO: 278081 - protein, 13 aa, Homo sapiens
  CDR3 for alpha chain variable domain of TCR clone 139041 (TRAV21, TRAJ27)
CAARPGNAGKSTF

SEQ ID NO: 278082 - protein, 15 aa, Homo sapiens
  CDR3 for beta chain variable domain of TCR clone 139041 (TRBV20-1, TRBJ2-7)
CSARDRASGMDEQYF

SEQ ID NO: 278083 - protein, 12 aa, Homo sapiens
  CDR3 for alpha chain variable domain of TCR clone 139042 (TRAV8-3, TRAJ6)
CAVAGGSYIPTF

SEQ ID NO: 278084 - protein, 13 aa, Homo sapiens
  CDR3 for beta chain variable domain of TCR clone 139042 (TRBV27, TRBJ1-4)
CASSLMGDEKLFF

SEQ ID NO: 278085 - protein, 14 aa, Homo sapiens
  CDR3 for alpha chain variable domain of TCR clone 139043 (TRAV3, TRAJ8)
FAALMNTGFQKLVF

SEQ ID NO: 278086 - protein, 15 aa, Homo sapiens
  CDR3 for beta chain variable domain of TCR clone 139043 (TRBV28, TRBJ2-5)
CASSLGLGNQETQYF

SEQ ID NO: 278087 - protein, 15 aa, Homo sapiens
  CDR3 for alpha chain variable domain of TCR clone 139044 (TRAV2, TRAJ28)
CAVPYSGAGSYQPTF

SEQ ID NO: 278088 - protein, 10 aa, Homo sapiens
  CDR3 for beta chain variable domain of TCR clone 139044 (TRBV23-1, TRBJ2-1)
KWSSYNEQFF

SEQ ID NO: 278089 - protein, 14 aa, Homo sapiens
  CDR3 for alpha chain variable domain of TCR clone 139045 (TRAV8-3, TRAJ23)
CAVIIYNQGGKLIF

SEQ ID NO: 278090 - protein, 15 aa, Homo sapiens
  CDR3 for beta chain variable domain of TCR clone 139045 (TRBV18, TRBJ2-1)
CDSSPPSASYNEQFF

SEQ ID NO: 278091 - protein, 12 aa, Homo sapiens
  CDR3 for alpha chain variable domain of TCR clone 139046 (TRAV13-1, TRAJ27)
CAAHTNAGKSTF

SEQ ID NO: 278092 - protein, 14 aa, Homo sapiens
  CDR3 for beta chain variable domain of TCR clone 139046 (TRBV19, TRBJ2-2)
CASSGQGIAGELVF

SEQ ID NO: 278093 - protein, 12 aa, Homo sapiens
  CDR3 for alpha chain variable domain of TCR clone 139047 (TRAV38-2/DV8, TRAJ48)
CALLSGNEKLTF

SEQ ID NO: 278094 - protein, 17 aa, Homo sapiens
  CDR3 for beta chain variable domain of TCR clone 139047 (TRBV12-4, TRBJ2-3)
CASSGTGLAGGADTQYF

SEQ ID NO: 278095 - protein, 15 aa, Homo sapiens
  CDR3 for alpha chain variable domain of TCR clone 139048 (TRAV3, TRAJ22)
CAVRDRGGSARPLTF

SEQ ID NO: 278096 - protein, 16 aa, Homo sapiens
  CDR3 for beta chain variable domain of TCR clone 139048 (TRBV5-4, TRBJ2-3)
CASQQPGAGGSDTQYF

SEQ ID NO: 278097 - protein, 17 aa, Homo sapiens
  CDR3 for alpha chain variable domain of TCR clone 139049 (TRAV1-2, TRAJ6)
CAVRDTTRTGGSYIPTF

SEQ ID NO: 278098 - protein, 12 aa, Homo sapiens
  CDR3 for beta chain variable domain of TCR clone 139049 (TRBV24-1, TRBJ2-3)
CATSSGGDTRYF

SEQ ID NO: 278099 - protein, 13 aa, Homo sapiens
  CDR3 for alpha chain variable domain of TCR clone 139050 (TRAV26-1, TRAJ30)
CIVNMNRDDKIIF

SEQ ID NO: 278100 - protein, 16 aa, Homo sapiens
  CDR3 for beta chain variable domain of TCR clone 139050 (TRBV16, TRBJ2-7)
CASGRPAGGSSYGQYF

SEQ ID NO: 278101 - protein, 13 aa, Homo sapiens
  CDR3 for alpha chain variable domain of TCR clone 139051 (TRAV3, TRAJ27)
CAVRPLGAGKSTF

SEQ ID NO: 278102 - protein, 13 aa, Homo sapiens
  CDR3 for beta chain variable domain of TCR clone 139051 (TRBV7-2, TRBJ2-5)
CASSQTSVETQYF

SEQ ID NO: 278103 - protein, 14 aa, Homo sapiens
  CDR3 for alpha chain variable domain of TCR clone 139052 (TRAV8-3, TRAJ35)
CAVVPQGFGNVLHC

SEQ ID NO: 278104 - protein, 14 aa, Homo sapiens
  CDR3 for beta chain variable domain of TCR clone 139052 (TRBV4-1, TRBJ2-7)
CASIPSREGFEQYF

SEQ ID NO: 278105 - protein, 13 aa, Homo sapiens
  CDR3 for alpha chain variable domain of TCR clone 139053 (TRAV2, TRAJ40)
CAVVTSGTYIYIF

SEQ ID NO: 278106 - protein, 14 aa, Homo sapiens
  CDR3 for beta chain variable domain of TCR clone 139053 (TRBV19, TRBJ2-1)
CASPTVVLSGEQFF

SEQ ID NO: 278107 - protein, 15 aa, Homo sapiens
  CDR3 for alpha chain variable domain of TCR clone 139054 (TRAV17, TRAJ16)
CATALRFSDGQTLLF

SEQ ID NO: 278108 - protein, 15 aa, Homo sapiens
  CDR3 for beta chain variable domain of TCR clone 139054 (TRBV20-1, TRBJ1-1)
CSASRGVTGNTEAFF

SEQ ID NO: 278109 - protein, 19 aa, Homo sapiens
  CDR3 for alpha chain variable domain of TCR clone 139055 (TRAV1-2, TRAJ26)
CLLPLCCERPDNYGQNFVF

SEQ ID NO: 278110 - protein, 15 aa, Homo sapiens
  CDR3 for beta chain variable domain of TCR clone 139055 (TRBV9, TRBJ1-6)
CARSVAGTGDSPLHF

SEQ ID NO: 278111 - protein, 14 aa, Homo sapiens
  CDR3 for alpha chain variable domain of TCR clone 139056 (TRAV4, TRAJ26)
CLVGPHNYGQNFVF

SEQ ID NO: 278112 - protein, 17 aa, Homo sapiens
  CDR3 for beta chain variable domain of TCR clone 139056 (TRBV24-1, TRBJ2-1)
CATSDVATSGTYNEQFF

SEQ ID NO: 278113 - protein, 17 aa, Homo sapiens
  CDR3 for alpha chain variable domain of TCR clone 139057 (TRAV13-1, TRAJ52)
CAAGSNAGGTSYGKLTF

SEQ ID NO: 278114 - protein, 15 aa, Homo sapiens
  CDR3 for beta chain variable domain of TCR clone 139057 (TRBV6-3, TRBJ2-7)
CASSSPGTVFYEQYF

SEQ ID NO: 278115 - protein, 15 aa, Homo sapiens
  CDR3 for alpha chain variable domain of TCR clone 139058 (TRAV27, TRAJ38)
CAARRNAGNNRKLIW

SEQ ID NO: 278116 - protein, 12 aa, Homo sapiens
  CDR3 for beta chain variable domain of TCR clone 139058 (TRBV14, TRBJ1-1)
CASSQLKGLAFF

SEQ ID NO: 278117 - protein, 16 aa, Homo sapiens
  CDR3 for alpha chain variable domain of TCR clone 139059 (TRAV20, TRAJ53)
CDVQGNSGGSNYKLTF

SEQ ID NO: 278118 - protein, 13 aa, Homo sapiens
  CDR3 for beta chain variable domain of TCR clone 139059 (TRBV7-7, TRBJ2-2)
CASSLTSAGELFF

SEQ ID NO: 278119 - protein, 14 aa, Homo sapiens
  CDR3 for alpha chain variable domain of TCR clone 139060 (TRAV12-2, TRAJ13)
CAVKKTGGYQKVTF

SEQ ID NO: 278120 - protein, 15 aa, Homo sapiens
  CDR3 for beta chain variable domain of TCR clone 139060 (TRBV5-1, TRBJ2-1)
CASSPTRAPYNEQFF

SEQ ID NO: 278121 - protein, 14 aa, Homo sapiens
  CDR3 for alpha chain variable domain of TCR clone 139061 (TRAV2, TRAJ9)
CAVEDRSGGFKPIF

SEQ ID NO: 278122 - protein, 15 aa, Homo sapiens
  CDR3 for beta chain variable domain of TCR clone 139061 (TRBV7-2, TRBJ2-1)
CASSFQADEYNEQFF

SEQ ID NO: 278123 - protein, 15 aa, Homo sapiens
  CDR3 for alpha chain variable domain of TCR clone 139062 (TRAV12-3, TRAJ49)
CAMAVTPNTGNQFYF

SEQ ID NO: 278124 - protein, 13 aa, Homo sapiens
  CDR3 for beta chain variable domain of TCR clone 139062 (TRBV12-4, TRBJ1-1)
CASSPGTGFEAFF

SEQ ID NO: 278125 - protein, 13 aa, Homo sapiens
  CDR3 for alpha chain variable domain of TCR clone 139063 (TRAV21, TRAJ20)
CAVGLRVDYKLSF

SEQ ID NO: 278126 - protein, 15 aa, Homo sapiens
  CDR3 for beta chain variable domain of TCR clone 139063 (TRBV10-2, TRBJ2-5)
RASRGSGGPQETQYF

SEQ ID NO: 278127 - protein, 15 aa, Homo sapiens
  CDR3 for alpha chain variable domain of TCR clone 139064 (TRAV3, TRAJ13)
CAVRVYSGGYQTVTF

SEQ ID NO: 278128 - protein, 15 aa, Homo sapiens
  CDR3 for beta chain variable domain of TCR clone 139064 (TRBV5-7, TRBJ1-2)
CASSLGVAANYGDAF

SEQ ID NO: 278129 - protein, 15 aa, Homo sapiens
  CDR3 for alpha chain variable domain of TCR clone 139065 (TRAV21, TRAJ53)
CATLNSGGSNYKLTF

SEQ ID NO: 278130 - protein, 19 aa, Homo sapiens
  CDR3 for beta chain variable domain of TCR clone 139065 (TRBV5-1, TRBJ2-3)
CASSLWLAGGITTTDTQYF

SEQ ID NO: 278131 - protein, 16 aa, Homo sapiens
  CDR3 for alpha chain variable domain of TCR clone 139066 (TRAV8-3, TRAJ44)
CAVGTLMTGTASKLTF

SEQ ID NO: 278132 - protein, 15 aa, Homo sapiens
  CDR3 for beta chain variable domain of TCR clone 139066 (TRBV10-2, TRBJ2-6)
FASSEQGTGANVLTF

SEQ ID NO: 278133 - protein, 11 aa, Homo sapiens
  CDR3 for alpha chain variable domain of TCR clone 139067 (TRAV8-4, TRAJ34)
CAVSWTYKLIL

SEQ ID NO: 278134 - protein, 14 aa, Homo sapiens
  CDR3 for beta chain variable domain of TCR clone 139067 (TRBV7-9, TRBJ2-3)
CASSLEDGTDTQYF

SEQ ID NO: 278135 - protein, 12 aa, Homo sapiens
  CDR3 for alpha chain variable domain of TCR clone 139068 (TRAV12-1, TRAJ30)
CVVNPRDDKIIF

SEQ ID NO: 278136 - protein, 18 aa, Homo sapiens
  CDR3 for beta chain variable domain of TCR clone 139068 (TRBV5-1, TRBJ2-7)
CASSLAGFGGMSSYEQYL

SEQ ID NO: 278137 - protein, 10 aa, Homo sapiens
  CDR3 for alpha chain variable domain of TCR clone 139069 (TRAV30, TRAJ48)
CGIGNEKLTF

SEQ ID NO: 278138 - protein, 13 aa, Homo sapiens
  CDR3 for beta chain variable domain of TCR clone 139069 (TRBV7-2, TRBJ2-5)
CASSQTSVETQYF

SEQ ID NO: 278139 - protein, 10 aa, Homo sapiens
  CDR3 for alpha chain variable domain of TCR clone 139070 (TRAV1-2, TRAJ20)
CVPNDYKLSI

SEQ ID NO: 278140 - protein, 16 aa, Homo sapiens
  CDR3 for beta chain variable domain of TCR clone 139070 (TRBV20-1, TRBJ1-1)
CSARDRMGGMNTEAFF

SEQ ID NO: 278141 - protein, 14 aa, Homo sapiens
  CDR3 for alpha chain variable domain of TCR clone 139071 (TRAV12-3, TRAJ58)
CAMRTETSGSRLTF

SEQ ID NO: 278142 - protein, 13 aa, Homo sapiens
  CDR3 for beta chain variable domain of TCR clone 139071 (TRBV27, TRBJ2-3)
CASSWGRTDTQYF

SEQ ID NO: 278143 - protein, 10 aa, Homo sapiens
  CDR3 for alpha chain variable domain of TCR clone 139072 (TRAV13-2, TRAJ20)
CAENICRLQA

SEQ ID NO: 278144 - protein, 17 aa, Homo sapiens
  CDR3 for beta chain variable domain of TCR clone 139072 (TRBV4-1, TRBJ1-4)
CASSQEGPRGVEEKLFF

SEQ ID NO: 278145 - protein, 11 aa, Homo sapiens
  CDR3 for alpha chain variable domain of TCR clone 139073 (TRAV17, TRAJ31)
CATSNNPRLMF

SEQ ID NO: 278146 - protein, 14 aa, Homo sapiens
  CDR3 for beta chain variable domain of TCR clone 139073 (TRBV18, TRBJ2-7)
CASSPRGGAYEQYF

SEQ ID NO: 278147 - protein, 13 aa, Homo sapiens
  CDR3 for alpha chain variable domain of TCR clone 139074 (TRAV21, TRAJ20)
CAVGLRVDYKLSF

SEQ ID NO: 278148 - protein, 11 aa, Homo sapiens
  CDR3 for beta chain variable domain of TCR clone 139074 (TRBV25-1, TRBJ2-1)
CASTRISEQFF

SEQ ID NO: 278149 - protein, 14 aa, Homo sapiens
  CDR3 for alpha chain variable domain of TCR clone 139075 (TRAV2, TRAJ9)
CAVEDRSGGFKTIF

SEQ ID NO: 278150 - protein, 13 aa, Homo sapiens
  CDR3 for beta chain variable domain of TCR clone 139075 (TRBV12-4, TRBJ1-2)
CARTMTSNYGYTF

SEQ ID NO: 278151 - protein, 15 aa, Homo sapiens
  CDR3 for alpha chain variable domain of TCR clone 139076 (TRAV8-2, TRAJ15)
CVVTMGNQAGTALIF

SEQ ID NO: 278152 - protein, 14 aa, Homo sapiens
  CDR3 for beta chain variable domain of TCR clone 139076 (TRBV25-1, TRBJ1-1)
CASTHLGGNTEAFF

SEQ ID NO: 278153 - protein, 10 aa, Homo sapiens
  CDR3 for alpha chain variable domain of TCR clone 139077 (TRAV2, TRAJ34)
CAVVNDKLIF

SEQ ID NO: 278154 - protein, 20 aa, Homo sapiens
  CDR3 for beta chain variable domain of TCR clone 139077 (TRBV19, TRBJ2-1)
CASSISRTVTSTQLNNEQFF

SEQ ID NO: 278155 - protein, 15 aa, Homo sapiens
  CDR3 for alpha chain variable domain of TCR clone 139078 (TRAV3, TRAJ5)
CAVRDLATGRRALTF

SEQ ID NO: 278156 - protein, 13 aa, Homo sapiens
  CDR3 for beta chain variable domain of TCR clone 139078 (TRBV12-4, TRBJ2-7)
CASGPTETYEQYF

SEQ ID NO: 278157 - protein, 16 aa, Homo sapiens
  CDR3 for alpha chain variable domain of TCR clone 139079 (TRAV12-3, TRAJ53)
CAMSPGSGGSNYKLAF

SEQ ID NO: 278158 - protein, 13 aa, Homo sapiens
  CDR3 for beta chain variable domain of TCR clone 139079 (TRBV7-3, TRBJ1-1)
CASSQDWGAEAFF

SEQ ID NO: 278159 - protein, 23 aa, Homo sapiens
  CDR3 for alpha chain variable domain of TCR clone 139080 (TRAV26-1, )
CIADNAGDTHIQNPDPAVYQLRD

SEQ ID NO: 278160 - protein, 13 aa, Homo sapiens
  CDR3 for beta chain variable domain of TCR clone 139080 (TRBV20-1, TRBJ1-1)
CSARGGGNTEAFF

SEQ ID NO: 278161 - protein, 14 aa, Homo sapiens
  CDR3 for alpha chain variable domain of TCR clone 139081 (TRAV8-6, TRAJ5)
CAFSVDTGRRALTF

SEQ ID NO: 278162 - protein, 14 aa, Homo sapiens
  CDR3 for beta chain variable domain of TCR clone 139081 (TRBV6-1, TRBJ1-3)
CASVQGGGGNTIYF

SEQ ID NO: 278163 - protein, 16 aa, Homo sapiens
  CDR3 for alpha chain variable domain of TCR clone 139082 (TRAV26-1, TRAJ23)
CIVRVHPYNQGGKLIF

SEQ ID NO: 278164 - protein, 15 aa, Homo sapiens
  CDR3 for beta chain variable domain of TCR clone 139082 (TRBV7-2, TRBJ2-5)
CASTPRGASGETQYF

SEQ ID NO: 278165 - protein, 12 aa, Homo sapiens
  CDR3 for alpha chain variable domain of TCR clone 139083 (TRAV12-1, TRAJ40)
CVVYSGTYKYIF

SEQ ID NO: 278166 - protein, 15 aa, Homo sapiens
  CDR3 for beta chain variable domain of TCR clone 139083 (TRBV7-2, TRBJ2-1)
CASSFSGGIYNEQFF

SEQ ID NO: 278167 - protein, 13 aa, Homo sapiens
  CDR3 for alpha chain variable domain of TCR clone 139084 (TRAV1-2, TRAJ9)
CAVLNTGGFKTIF

SEQ ID NO: 278168 - protein, 13 aa, Homo sapiens
  CDR3 for beta chain variable domain of TCR clone 139084 (TRBV15, TRBJ2-7)
CATSTTGHYEQYF

SEQ ID NO: 278169 - protein, 12 aa, Homo sapiens
  CDR3 for alpha chain variable domain of TCR clone 139085 (TRAV3, TRAJ31)
CAVRDGNARLMF

SEQ ID NO: 278170 - protein, 18 aa, Homo sapiens
  CDR3 for beta chain variable domain of TCR clone 139085 (TRBV7-2, TRBJ2-3)
CASSLKRVGSGITDTQYF

SEQ ID NO: 278171 - protein, 14 aa, Homo sapiens
  CDR3 for alpha chain variable domain of TCR clone 139086 (TRAV12-2, TRAJ40)
CAVKIPPGTYKYVF

SEQ ID NO: 278172 - protein, 14 aa, Homo sapiens
  CDR3 for beta chain variable domain of TCR clone 139086 (TRBV20-1, TRBJ1-1)
CSAQTRIGGTEAFF

SEQ ID NO: 278173 - protein, 13 aa, Homo sapiens
  CDR3 for alpha chain variable domain of TCR clone 139087 (TRAV26-2, TRAJ43)
CILRAVNNNDMRF

SEQ ID NO: 278174 - protein, 15 aa, Homo sapiens
  CDR3 for beta chain variable domain of TCR clone 139087 (TRBV5-1, TRBJ2-7)
CASSLMTSGSNEQYF

SEQ ID NO: 278175 - protein, 16 aa, Homo sapiens
  CDR3 for alpha chain variable domain of TCR clone 139088 (TRAV3, TRAJ10)
CAVRDMRAGGGNKLHF

SEQ ID NO: 278176 - protein, 11 aa, Homo sapiens
  CDR3 for beta chain variable domain of TCR clone 139088 (TRBV12-4, TRBJ2-3)
CASTATDTQYF

SEQ ID NO: 278177 - protein, 12 aa, Homo sapiens
  CDR3 for alpha chain variable domain of TCR clone 139089 (TRAV17, TRAJ20)
CATDSNDYKLSF

SEQ ID NO: 278178 - protein, 14 aa, Homo sapiens
  CDR3 for beta chain variable domain of TCR clone 139089 (TRBV6-6, TRBJ1-3)
CASSRQGSGNTMYF

SEQ ID NO: 278179 - protein, 15 aa, Homo sapiens
  CDR3 for alpha chain variable domain of TCR clone 139090 (TRAV2, TRAJ28)
CAVSYSGAGSYQLTF

SEQ ID NO: 278180 - protein, 17 aa, Homo sapiens
  CDR3 for beta chain variable domain of TCR clone 139090 (TRBV20-1, TRBJ2-4)
CSARDWASGGRENIQYF

SEQ ID NO: 278181 - protein, 15 aa, Homo sapiens
  CDR3 for alpha chain variable domain of TCR clone 139091 (TRAV12-2, TRAJ53)
CAVNGGGGSNYKLTF

SEQ ID NO: 278182 - protein, 16 aa, Homo sapiens
  CDR3 for beta chain variable domain of TCR clone 139091 (TRBV9, TRBJ2-2)
CASSAMGKGNTGELFF

SEQ ID NO: 278183 - protein, 13 aa, Homo sapiens
  CDR3 for alpha chain variable domain of TCR clone 139092 (TRAV12-3, TRAJ47)
CAMKKEYGNKLVF

SEQ ID NO: 278184 - protein, 16 aa, Homo sapiens
  CDR3 for beta chain variable domain of TCR clone 139092 (TRBV3-1, TRBJ2-6)
CASSITWVSGANVLTF

SEQ ID NO: 278185 - protein, 15 aa, Homo sapiens
  CDR3 for alpha chain variable domain of TCR clone 139093 (TRAV23/DV6, TRAJ28)
CAALLAYSGAGRYQL

SEQ ID NO: 278186 - protein, 15 aa, Homo sapiens
  CDR3 for beta chain variable domain of TCR clone 139093 (TRBV7-2, TRBJ2-1)
CASSLVAGRYNEQFF

SEQ ID NO: 278187 - protein, 15 aa, Homo sapiens
  CDR3 for alpha chain variable domain of TCR clone 139094 (TRAV23/DV6, TRAJ33)
CAVSNSGGGNYQLIW

SEQ ID NO: 278188 - protein, 14 aa, Homo sapiens
  CDR3 for beta chain variable domain of TCR clone 139094 (TRBV7-2, TRBJ2-7)
CASSLYPGRYEQYF

SEQ ID NO: 278189 - protein, 15 aa, Homo sapiens
  CDR3 for alpha chain variable domain of TCR clone 139095 (TRAV26-1, TRAJ29)
CIVRVEGSGNTPLVF

SEQ ID NO: 278190 - protein, 12 aa, Homo sapiens
  CDR3 for beta chain variable domain of TCR clone 139095 (TRBV28, TRBJ2-7)
CASTWGGPEQYF

SEQ ID NO: 278191 - protein, 10 aa, Homo sapiens
  CDR3 for alpha chain variable domain of TCR clone 139096 (TRAV1-2, TRAJ34)
CAVNTDKLIF

SEQ ID NO: 278192 - protein, 17 aa, Homo sapiens
  CDR3 for beta chain variable domain of TCR clone 139096 (TRBV7-2, TRBJ1-2)
CASSSRAGRGIVYGYTF

SEQ ID NO: 278193 - protein, 17 aa, Homo sapiens
  CDR3 for alpha chain variable domain of TCR clone 139097 (TRAV26-1, TRAJ37)
CIVRVITVSSNTGQLIF

SEQ ID NO: 278194 - protein, 11 aa, Homo sapiens
  CDR3 for beta chain variable domain of TCR clone 139097 (TRBV29-1, TRBJ2-5)
CSEDRTGTQYF

SEQ ID NO: 278195 - protein, 12 aa, Homo sapiens
  CDR3 for alpha chain variable domain of TCR clone 139098 (TRAV3, TRAJ20)
CAVRDHAYKLSF

SEQ ID NO: 278196 - protein, 15 aa, Homo sapiens
  CDR3 for beta chain variable domain of TCR clone 139098 (TRBV9, TRBJ1-6)
CASSVAGTGDSPLHF

SEQ ID NO: 278197 - protein, 11 aa, Homo sapiens
  CDR3 for alpha chain variable domain of TCR clone 139099 (TRAV35, TRAJ30)
CAGPGDDKIIF

SEQ ID NO: 278198 - protein, 14 aa, Homo sapiens
  CDR3 for beta chain variable domain of TCR clone 139099 (TRBV7-6, TRBJ1-6)
CASRQAGGGSPLHF

SEQ ID NO: 278199 - protein, 15 aa, Homo sapiens
  CDR3 for alpha chain variable domain of TCR clone 139100 (TRAV3, TRAJ5)
CAVRDLDTGRRELTF

SEQ ID NO: 278200 - protein, 13 aa, Homo sapiens
  CDR3 for beta chain variable domain of TCR clone 139100 (TRBV12-3, TRBJ2-7)
CASSPTETYEQYF

SEQ ID NO: 278201 - protein, 15 aa, Homo sapiens
  CDR3 for alpha chain variable domain of TCR clone 139101 (TRAV16, TRAJ48)
CALSISNFGNEKLTF

SEQ ID NO: 278202 - protein, 14 aa, Homo sapiens
  CDR3 for beta chain variable domain of TCR clone 139101 (TRBV12-5, TRBJ2-5)
CASGSRTHQETQYF

SEQ ID NO: 278203 - protein, 14 aa, Homo sapiens
  CDR3 for alpha chain variable domain of TCR clone 139102 (TRAV1-2, TRAJ16)
CAVNRFLDGQKLLF

SEQ ID NO: 278204 - protein, 16 aa, Homo sapiens
  CDR3 for beta chain variable domain of TCR clone 139102 (TRBV9, TRBJ2-1)
CASSVGGGGNYNEQFF

SEQ ID NO: 278205 - protein, 11 aa, Homo sapiens
  CDR3 for alpha chain variable domain of TCR clone 139103 (TRAV8-3, TRAJ42)
NYGGSQGNPIF

SEQ ID NO: 278206 - protein, 17 aa, Homo sapiens
  CDR3 for beta chain variable domain of TCR clone 139103 (TRBV11-2, TRBJ2-1)
CASSLYPPGVEYNEQFF

SEQ ID NO: 278207 - protein, 13 aa, Homo sapiens
  CDR3 for alpha chain variable domain of TCR clone 139104 (TRAV21, TRAJ27)
CAARPGNAGKSTF

SEQ ID NO: 278208 - protein, 14 aa, Homo sapiens
  CDR3 for beta chain variable domain of TCR clone 139104 (TRBV6-1, TRBJ1-5)
CASSETGMEQPQHF

SEQ ID NO: 278209 - protein, 13 aa, Homo sapiens
  CDR3 for alpha chain variable domain of TCR clone 139105 (TRAV13-1, TRAJ21)
CAASIYNFNKFYF

SEQ ID NO: 278210 - protein, 16 aa, Homo sapiens
  CDR3 for beta chain variable domain of TCR clone 139105 (TRBV20-1, TRBJ1-4)
CSAPGQGLLTNEKLSF

SEQ ID NO: 278211 - protein, 11 aa, Homo sapiens
  CDR3 for alpha chain variable domain of TCR clone 139106 (TRAV23/DV6, TRAJ58)
CAARLLRGETS

SEQ ID NO: 278212 - protein, 17 aa, Homo sapiens
  CDR3 for beta chain variable domain of TCR clone 139106 (TRBV4-3, TRBJ2-1)
CASSQFSSGRASGEQFF

SEQ ID NO: 278213 - protein, 11 aa, Homo sapiens
  CDR3 for alpha chain variable domain of TCR clone 139107 (TRAV2, TRAJ13)
CASVGYQKVTF

SEQ ID NO: 278214 - protein, 16 aa, Homo sapiens
  CDR3 for beta chain variable domain of TCR clone 139107 (TRBV7-2, TRBJ1-4)
CASSLAPGRRDEKLFF

SEQ ID NO: 278215 - protein, 13 aa, Homo sapiens
  CDR3 for alpha chain variable domain of TCR clone 139108 (TRAV13-1, TRAJ11)
CSASIRGYSTLTF

SEQ ID NO: 278216 - protein, 14 aa, Homo sapiens
  CDR3 for beta chain variable domain of TCR clone 139108 (TRBV4-2, TRBJ2-1)
CASGLDRAYNEQFF

SEQ ID NO: 278217 - protein, 11 aa, Homo sapiens
  CDR3 for alpha chain variable domain of TCR clone 139109 (TRAV27, TRAJ20)
CAGLNDYKLSF

SEQ ID NO: 278218 - protein, 17 aa, Homo sapiens
  CDR3 for beta chain variable domain of TCR clone 139109 (TRBV7-8, TRBJ2-6)
CASSAGTGGAGANVLTF

SEQ ID NO: 278219 - protein, 10 aa, Homo sapiens
  CDR3 for alpha chain variable domain of TCR clone 139110 (TRAV30, TRAJ48)
CGIGNEKLTF

SEQ ID NO: 278220 - protein, 17 aa, Homo sapiens
  CDR3 for beta chain variable domain of TCR clone 139110 (TRBV20-1, TRBJ2-7)
CSARGTKTGYLSYEQYF

SEQ ID NO: 278221 - protein, 16 aa, Homo sapiens
  CDR3 for alpha chain variable domain of TCR clone 139111 (TRAV12-2, TRAJ18)
CAVTTDRRSTLGRLYF

SEQ ID NO: 278222 - protein, 13 aa, Homo sapiens
  CDR3 for beta chain variable domain of TCR clone 139111 (TRBV19, TRBJ2-3)
CATWDKITDTQYF

SEQ ID NO: 278223 - protein, 14 aa, Homo sapiens
  CDR3 for alpha chain variable domain of TCR clone 139112 (TRAV1-2, TRAJ6)
CAVSLSGGSYIPTF

SEQ ID NO: 278224 - protein, 17 aa, Homo sapiens
  CDR3 for beta chain variable domain of TCR clone 139112 (TRBV24-1, TRBJ2-3)
CATSDLPSGEDTDTQYF

SEQ ID NO: 278225 - protein, 11 aa, Homo sapiens
  CDR3 for alpha chain variable domain of TCR clone 139113 (TRAV12-2, TRAJ43)
CASPIGDDMRF

SEQ ID NO: 278226 - protein, 12 aa, Homo sapiens
  CDR3 for beta chain variable domain of TCR clone 139113 (TRBV20-1, TRBJ2-7)
CSAGLKMGEQYF

SEQ ID NO: 278227 - protein, 12 aa, Homo sapiens
  CDR3 for alpha chain variable domain of TCR clone 139114 (TRAV8-4, TRAJ37)
CAKSSNTGKLIF

SEQ ID NO: 278228 - protein, 15 aa, Homo sapiens
  CDR3 for beta chain variable domain of TCR clone 139114 (TRBV7-9, TRBJ2-7)
FASSSSGLAVYEQYF

SEQ ID NO: 278229 - protein, 15 aa, Homo sapiens
  CDR3 for alpha chain variable domain of TCR clone 139115 (TRAV13-2, TRAJ45)
CAENNSGGGADVLTF

SEQ ID NO: 278230 - protein, 13 aa, Homo sapiens
  CDR3 for beta chain variable domain of TCR clone 139115 (TRBV25-1, TRBJ2-6)
CASRGPGANVLTF

SEQ ID NO: 278231 - protein, 14 aa, Homo sapiens
  CDR3 for alpha chain variable domain of TCR clone 139116 (TRAV12-1, TRAJ24)
CVVRSTDSWGKFQF

SEQ ID NO: 278232 - protein, 13 aa, Homo sapiens
  CDR3 for beta chain variable domain of TCR clone 139116 (TRBV2, TRBJ2-3)
CASILAWGQGQYF

SEQ ID NO: 278233 - protein, 15 aa, Homo sapiens
  CDR3 for alpha chain variable domain of TCR clone 139117 (TRAV30, TRAJ57)
CGTAIPQGGSDKLVF

SEQ ID NO: 278234 - protein, 17 aa, Homo sapiens
  CDR3 for beta chain variable domain of TCR clone 139117 (TRBV11-2, TRBJ2-1)
CASSLHPPGVEYNEQFF

SEQ ID NO: 278235 - protein, 14 aa, Homo sapiens
  CDR3 for alpha chain variable domain of TCR clone 139118 (TRAV3, TRAJ22)
CAVRDYGSTRQLTF

SEQ ID NO: 278236 - protein, 13 aa, Homo sapiens
  CDR3 for beta chain variable domain of TCR clone 139118 (TRBV11-2, TRBJ2-5)
CASGHGAKETQYF

SEQ ID NO: 278237 - protein, 11 aa, Homo sapiens
  CDR3 for alpha chain variable domain of TCR clone 139119 (TRAV21, TRAJ34)
CAHYNTDKLIF

SEQ ID NO: 278238 - protein, 12 aa, Homo sapiens
  CDR3 for beta chain variable domain of TCR clone 139119 (TRBV3-1, TRBJ2-2)
CASSLFPGELFF

SEQ ID NO: 278239 - protein, 17 aa, Homo sapiens
  CDR3 for alpha chain variable domain of TCR clone 139120 (TRAV3, TRAJ12)
CCERRDGTMDSSYKLIF

SEQ ID NO: 278240 - protein, 15 aa, Homo sapiens
  CDR3 for beta chain variable domain of TCR clone 139120 (TRBV5-5, TRBJ1-5)
CASSLTGGGEQPQHF

SEQ ID NO: 278241 - protein, 15 aa, Homo sapiens
  CDR3 for alpha chain variable domain of TCR clone 139121 (TRAV38-2/DV8, TRAJ47)
CAYRSAKGYGNKLGF

SEQ ID NO: 278242 - protein, 16 aa, Homo sapiens
  CDR3 for beta chain variable domain of TCR clone 139121 (TRBV12-5, TRBJ2-5)
CASGPRTSGNQETQYF

SEQ ID NO: 278243 - protein, 14 aa, Homo sapiens
  CDR3 for alpha chain variable domain of TCR clone 139122 (TRAV9-2, TRAJ39)
CALYIYNAGNMLTF

SEQ ID NO: 278244 - protein, 15 aa, Homo sapiens
  CDR3 for beta chain variable domain of TCR clone 139122 (TRBV27, TRBJ1-6)
CASSFDRALGSPLHF

SEQ ID NO: 278245 - protein, 15 aa, Homo sapiens
  CDR3 for alpha chain variable domain of TCR clone 139123 (TRAV12-1, TRAJ44)
CVVDEYTGTASKLTF

SEQ ID NO: 278246 - protein, 14 aa, Homo sapiens
  CDR3 for beta chain variable domain of TCR clone 139123 (TRBV5-1, TRBJ1-2)
CASSLESVNYGYTF

SEQ ID NO: 278247 - protein, 14 aa, Homo sapiens
  CDR3 for alpha chain variable domain of TCR clone 139124 (TRAV12-1, TRAJ9)
CVVIPQGGGFKTIF

SEQ ID NO: 278248 - protein, 17 aa, Homo sapiens
  CDR3 for beta chain variable domain of TCR clone 139124 (TRBV11-2, TRBJ2-1)
CASSLYPPGVEYNEQFF

SEQ ID NO: 278249 - protein, 15 aa, Homo sapiens
  CDR3 for alpha chain variable domain of TCR clone 139125 (TRAV26-1, TRAJ56)
CIVRVETGANSKLTF

SEQ ID NO: 278250 - protein, 15 aa, Homo sapiens
  CDR3 for beta chain variable domain of TCR clone 139125 (TRBV27, TRBJ2-7)
CASSPQREGQREQYF

SEQ ID NO: 278251 - protein, 13 aa, Homo sapiens
  CDR3 for alpha chain variable domain of TCR clone 139126 (TRAV8-3, TRAJ43)
CAVVPYNNNDMRF

SEQ ID NO: 278252 - protein, 13 aa, Homo sapiens
  CDR3 for beta chain variable domain of TCR clone 139126 (TRBV10-3, TRBJ2-7)
CASKLAVNYEQYF

SEQ ID NO: 278253 - protein, 15 aa, Homo sapiens
  CDR3 for alpha chain variable domain of TCR clone 139127 (TRAV12-1, TRAJ42)
CVVTRDGGSQGNLIF

SEQ ID NO: 278254 - protein, 14 aa, Homo sapiens
  CDR3 for beta chain variable domain of TCR clone 139127 (TRBV12-4, TRBJ2-3)
CASTIAGWGDTQYF

SEQ ID NO: 278255 - protein, 15 aa, Homo sapiens
  CDR3 for alpha chain variable domain of TCR clone 139128 (TRAV26-1, TRAJ44)
CIVSANTGTASKLTF

SEQ ID NO: 278256 - protein, 16 aa, Homo sapiens
  CDR3 for beta chain variable domain of TCR clone 139128 (TRBV7-7, TRBJ2-1)
CASSLASGTSYNGQFF

SEQ ID NO: 278257 - protein, 14 aa, Homo sapiens
  CDR3 for alpha chain variable domain of TCR clone 139129 (TRAV17, TRAJ37)
CATDGSSNTGKLIF

SEQ ID NO: 278258 - protein, 17 aa, Homo sapiens
  CDR3 for beta chain variable domain of TCR clone 139129 (TRBV7-9, TRBJ2-1)
CASSLVASYPSYNEQFF

SEQ ID NO: 278259 - protein, 13 aa, Homo sapiens
  CDR3 for alpha chain variable domain of TCR clone 139130 (TRAV13-1, TRAJ20)
CAARVSNDYKLSF

SEQ ID NO: 278260 - protein, 15 aa, Homo sapiens
  CDR3 for beta chain variable domain of TCR clone 139130 (TRBV20-1, TRBJ2-2)
CSARDTRLNTGELFF

SEQ ID NO: 278261 - protein, 13 aa, Homo sapiens
  CDR3 for alpha chain variable domain of TCR clone 139131 (TRAV12-2, TRAJ12)
CAVNWDSSYKLIF

SEQ ID NO: 278262 - protein, 13 aa, Homo sapiens
  CDR3 for beta chain variable domain of TCR clone 139131 (TRBV12-5, TRBJ2-3)
CASGDRQSGTQYF

SEQ ID NO: 278263 - protein, 13 aa, Homo sapiens
  CDR3 for alpha chain variable domain of TCR clone 139132 (TRAV21, TRAJ20)
RAVGLRVYYKLSF

SEQ ID NO: 278264 - protein, 13 aa, Homo sapiens
  CDR3 for beta chain variable domain of TCR clone 139132 (TRBV6-1, TRBJ1-1)
CASSRQGNTEAFF

SEQ ID NO: 278265 - protein, 13 aa, Homo sapiens
  CDR3 for alpha chain variable domain of TCR clone 139133 (TRAV21, TRAJ27)
CAARPGNAGKSPF

SEQ ID NO: 278266 - protein, 15 aa, Homo sapiens
  CDR3 for beta chain variable domain of TCR clone 139133 (TRBV11-3, TRBJ2-7)
CASSPGPVSSYEQYF

SEQ ID NO: 278267 - protein, 11 aa, Homo sapiens
  CDR3 for alpha chain variable domain of TCR clone 139134 (TRAV3, TRAJ21)
CAVGNFNKFYF

SEQ ID NO: 278268 - protein, 14 aa, Homo sapiens
  CDR3 for beta chain variable domain of TCR clone 139134 (TRBV11-3, TRBJ2-1)
CASSATTSGSIQFF

SEQ ID NO: 278269 - protein, 15 aa, Homo sapiens
  CDR3 for alpha chain variable domain of TCR clone 139135 (TRAV21, TRAJ53)
CATLNSGCSNYKLTF

SEQ ID NO: 278270 - protein, 17 aa, Homo sapiens
  CDR3 for beta chain variable domain of TCR clone 139135 (TRBV20-1, TRBJ2-2)
CSASGSGQGGLTGELFF

SEQ ID NO: 278271 - protein, 12 aa, Homo sapiens
  CDR3 for alpha chain variable domain of TCR clone 139136 (TRAV8-4, TRAJ31)
CAVSDSNARLMF

SEQ ID NO: 278272 - protein, 14 aa, Homo sapiens
  CDR3 for beta chain variable domain of TCR clone 139136 (TRBV11-2, TRBJ2-5)
CASSRTGGIETQYF

SEQ ID NO: 278273 - protein, 10 aa, Homo sapiens
  CDR3 for alpha chain variable domain of TCR clone 139137 (TRAV21, TRAJ20)
CAVNVGRLQA

SEQ ID NO: 278274 - protein, 14 aa, Homo sapiens
  CDR3 for beta chain variable domain of TCR clone 139137 (TRBV7-2, TRBJ2-7)
CASSPKTSFYEQYF

SEQ ID NO: 278275 - protein, 13 aa, Homo sapiens
  CDR3 for alpha chain variable domain of TCR clone 139138 (TRAV12-3, TRAJ13)
CAMGAGGYQKVTF

SEQ ID NO: 278276 - protein, 14 aa, Homo sapiens
  CDR3 for beta chain variable domain of TCR clone 139138 (TRBV7-2, TRBJ2-5)
CASSTGGELKTQYF

SEQ ID NO: 278277 - protein, 11 aa, Homo sapiens
  CDR3 for alpha chain variable domain of TCR clone 139139 (TRAV1-2, TRAJ20)
CAVANDYKLSF

SEQ ID NO: 278278 - protein, 18 aa, Homo sapiens
  CDR3 for beta chain variable domain of TCR clone 139139 (TRBV20-1, TRBJ2-6)
CSAGTTPTHGSGANDLTF

SEQ ID NO: 278279 - protein, 21 aa, Homo sapiens
  CDR3 for alpha chain variable domain of TCR clone 139140 (TRAV3, )
CAVRPTPDIQNPDPAVYQLRD

SEQ ID NO: 278280 - protein, 12 aa, Homo sapiens
  CDR3 for beta chain variable domain of TCR clone 139140 (TRBV6-1, TRBJ2-1)
CATQKGGGHLFF

SEQ ID NO: 278281 - protein, 14 aa, Homo sapiens
  CDR3 for alpha chain variable domain of TCR clone 139141 (TRAV36/DV7, TRAJ40)
CAVETTSGTYKYIF

SEQ ID NO: 278282 - protein, 13 aa, Homo sapiens
  CDR3 for beta chain variable domain of TCR clone 139141 (TRBV10-3, TRBJ2-5)
CAMTRGAGETQYF

SEQ ID NO: 278283 - protein, 16 aa, Homo sapiens
  CDR3 for alpha chain variable domain of TCR clone 139142 (TRAV16, TRAJ52)
CALSAAGGTSYGKLTF

SEQ ID NO: 278284 - protein, 15 aa, Homo sapiens
  CDR3 for beta chain variable domain of TCR clone 139142 (TRBV4-1, TRBJ2-7)
CASSQNTGRLYEQYF

SEQ ID NO: 278285 - protein, 13 aa, Homo sapiens
  CDR3 for alpha chain variable domain of TCR clone 139143 (TRAV2, TRAJ15)
CAVASQAGTALIF

SEQ ID NO: 278286 - protein, 17 aa, Homo sapiens
  CDR3 for beta chain variable domain of TCR clone 139143 (TRBV5-5, TRBJ1-2)
CASSLGSLDGQSEGYTF

SEQ ID NO: 278287 - protein, 15 aa, Homo sapiens
  CDR3 for alpha chain variable domain of TCR clone 139144 (TRAV23/DV6, TRAJ18)
CAARYRGSTLGRLYF

SEQ ID NO: 278288 - protein, 13 aa, Homo sapiens
  CDR3 for beta chain variable domain of TCR clone 139144 (TRBV7-3, TRBJ2-1)
CASSLDSYNEQFF

SEQ ID NO: 278289 - protein, 14 aa, Homo sapiens
  CDR3 for alpha chain variable domain of TCR clone 139145 (TRAV12-3, TRAJ57)
CAMSAWGGSEKLVF

SEQ ID NO: 278290 - protein, 15 aa, Homo sapiens
  CDR3 for beta chain variable domain of TCR clone 139145 (TRBV5-1, TRBJ2-3)
CASSVTPGSTDTQYF

SEQ ID NO: 278291 - protein, 17 aa, Homo sapiens
  CDR3 for alpha chain variable domain of TCR clone 139146 (TRAV13-1, TRAJ52)
CAASPGAGGASYGKLTF

SEQ ID NO: 278292 - protein, 15 aa, Homo sapiens
  CDR3 for beta chain variable domain of TCR clone 139146 (TRBV2, TRBJ2-1)
CASSELAGSYNEQFF

SEQ ID NO: 278293 - protein, 14 aa, Homo sapiens
  CDR3 for alpha chain variable domain of TCR clone 139147 (TRAV26-1, TRAJ49)
CIVRVATGGNQFYF

SEQ ID NO: 278294 - protein, 14 aa, Homo sapiens
  CDR3 for beta chain variable domain of TCR clone 139147 (TRBV7-2, TRBJ2-7)
CASRSQVAAYEQYF

SEQ ID NO: 278295 - protein, 15 aa, Homo sapiens
  CDR3 for alpha chain variable domain of TCR clone 139148 (TRAV12-3, TRAJ27)
CAMRAYNINAGKSTF

SEQ ID NO: 278296 - protein, 13 aa, Homo sapiens
  CDR3 for beta chain variable domain of TCR clone 139148 (TRBV11-2, TRBJ2-5)
CASSRGPSETQYF

SEQ ID NO: 278297 - protein, 18 aa, Homo sapiens
  CDR3 for alpha chain variable domain of TCR clone 139149 (TRAV13-1, TRAJ52)
CAASKRSAGGTSYGKLTF

SEQ ID NO: 278298 - protein, 14 aa, Homo sapiens
  CDR3 for beta chain variable domain of TCR clone 139149 (TRBV11-2, TRBJ2-5)
CASSRTGGIETQYF

SEQ ID NO: 278299 - protein, 11 aa, Homo sapiens
  CDR3 for alpha chain variable domain of TCR clone 139150 (TRAV8-4, TRAJ34)
CAVSWTDKLIF

SEQ ID NO: 278300 - protein, 14 aa, Homo sapiens
  CDR3 for beta chain variable domain of TCR clone 139150 (TRBV7-9, TRBJ2-3)
CASGLEDGTDTQYF

SEQ ID NO: 278301 - protein, 13 aa, Homo sapiens
  CDR3 for alpha chain variable domain of TCR clone 139151 (TRAV27, TRAJ41)
CAGEGNSGYALNF

SEQ ID NO: 278302 - protein, 14 aa, Homo sapiens
  CDR3 for beta chain variable domain of TCR clone 139151 (TRBV25-1, TRBJ1-1)
CASTHLGGNTEAFV

SEQ ID NO: 278303 - protein, 12 aa, Homo sapiens
  CDR3 for alpha chain variable domain of TCR clone 139152 (TRAV13-1, TRAJ21)
CAAKEGFNKFYF

SEQ ID NO: 278304 - protein, 13 aa, Homo sapiens
  CDR3 for beta chain variable domain of TCR clone 139152 (TRBV5-4, TRBJ1-1)
CASSQAGNTEAFI

SEQ ID NO: 278305 - protein, 16 aa, Homo sapiens
  CDR3 for alpha chain variable domain of TCR clone 139153 (TRAV4, TRAJ18)
CCVLLIGGSTLGRLYF

SEQ ID NO: 278306 - protein, 12 aa, Homo sapiens
  CDR3 for beta chain variable domain of TCR clone 139153 (TRBV6-3, TRBJ2-7)
CASSLTPYKQYF

SEQ ID NO: 278307 - protein, 12 aa, Homo sapiens
  CDR3 for alpha chain variable domain of TCR clone 139154 (TRAV12-3, TRAJ32)
CSMPGATNKLIF

SEQ ID NO: 278308 - protein, 17 aa, Homo sapiens
  CDR3 for beta chain variable domain of TCR clone 139154 (TRBV13, TRBJ2-3)
CASSSLGTSGLTDTQYF

SEQ ID NO: 278309 - protein, 16 aa, Homo sapiens
  CDR3 for alpha chain variable domain of TCR clone 139155 (TRAV12-3, TRAJ45)
CAMGWGSGGGADGLTF

SEQ ID NO: 278310 - protein, 18 aa, Homo sapiens
  CDR3 for beta chain variable domain of TCR clone 139155 (TRBV12-4, TRBJ2-2)
CAISLVAGTRGRTGELFF

SEQ ID NO: 278311 - protein, 13 aa, Homo sapiens
  CDR3 for alpha chain variable domain of TCR clone 139156 (TRAV25, TRAJ54)
CAGTIQGAQKLGF

SEQ ID NO: 278312 - protein, 15 aa, Homo sapiens
  CDR3 for beta chain variable domain of TCR clone 139156 (TRBV19, TRBJ1-5)
CASSILTGENQPQHF

SEQ ID NO: 278313 - protein, 13 aa, Homo sapiens
  CDR3 for alpha chain variable domain of TCR clone 139157 (TRAV3, TRAJ8)
CAVRFTGFQNLVF

SEQ ID NO: 278314 - protein, 15 aa, Homo sapiens
  CDR3 for beta chain variable domain of TCR clone 139157 (TRBV20-1, TRBJ2-7)
CSARDRVSGMDEQYF

SEQ ID NO: 278315 - protein, 13 aa, Homo sapiens
  CDR3 for alpha chain variable domain of TCR clone 139158 (TRAV20, TRAJ34)
CAVSSFNPDKLIF

SEQ ID NO: 278316 - protein, 15 aa, Homo sapiens
  CDR3 for beta chain variable domain of TCR clone 139158 (TRBV20-1, TRBJ1-2)
CSAAGEGARIYGYTF

SEQ ID NO: 278317 - protein, 11 aa, Homo sapiens
  CDR3 for alpha chain variable domain of TCR clone 139159 (TRAV2, TRAJ13)
CASGGYQKVTF

SEQ ID NO: 278318 - protein, 13 aa, Homo sapiens
  CDR3 for beta chain variable domain of TCR clone 139159 (TRBV6-4, TRBJ1-5)
CASSADLNQPQHF

SEQ ID NO: 278319 - protein, 15 aa, Homo sapiens
  CDR3 for alpha chain variable domain of TCR clone 139160 (TRAV4, TRAJ39)
CLVGPNNNAGNMLTF

SEQ ID NO: 278320 - protein, 14 aa, Homo sapiens
  CDR3 for beta chain variable domain of TCR clone 139160 (TRBV12-4, TRBJ2-3)
CASSLSGATDTQYF

SEQ ID NO: 278321 - protein, 14 aa, Homo sapiens
  CDR3 for alpha chain variable domain of TCR clone 139161 (TRAV8-4, TRAJ45)
CASGGGGGDDGLTF

SEQ ID NO: 278322 - protein, 20 aa, Homo sapiens
  CDR3 for beta chain variable domain of TCR clone 139161 (TRBV4-3, TRBJ2-3)
CASSPRVEMRASGRPDTQYF

SEQ ID NO: 278323 - protein, 13 aa, Homo sapiens
  CDR3 for alpha chain variable domain of TCR clone 139162 (TRAV38-2/DV8, TRAJ34)
CAYRTWNTDKLIF

SEQ ID NO: 278324 - protein, 12 aa, Homo sapiens
  CDR3 for beta chain variable domain of TCR clone 139162 (TRBV6-1, TRBJ2-5)
CASSEGRETQYF

SEQ ID NO: 278325 - protein, 13 aa, Homo sapiens
  CDR3 for alpha chain variable domain of TCR clone 139163 (TRAV21, TRAJ37)
CAVSSGNTGKLIF

SEQ ID NO: 278326 - protein, 20 aa, Homo sapiens
  CDR3 for beta chain variable domain of TCR clone 139163 (TRBV28, TRBJ2-1)
CASTPIGRSPGLAGGNEQFF

SEQ ID NO: 278327 - protein, 14 aa, Homo sapiens
  CDR3 for alpha chain variable domain of TCR clone 139164 (TRAV1-2, TRAJ16)
CAVNRFSDGQKLLF

SEQ ID NO: 278328 - protein, 14 aa, Homo sapiens
  CDR3 for beta chain variable domain of TCR clone 139164 (TRBV13, TRBJ2-5)
CASSLGRGQESQYF

SEQ ID NO: 278329 - protein, 11 aa, Homo sapiens
  CDR3 for alpha chain variable domain of TCR clone 139165 (TRAV3, TRAJ21)
CAVGNFNKFYF

SEQ ID NO: 278330 - protein, 16 aa, Homo sapiens
  CDR3 for beta chain variable domain of TCR clone 139165 (TRBV20-1, TRBJ1-2)
CSASMGQGVANYGDTF

SEQ ID NO: 278331 - protein, 16 aa, Homo sapiens
  CDR3 for alpha chain variable domain of TCR clone 139166 (TRAV4, TRAJ22)
CLVGDLYSGSARQLTF

SEQ ID NO: 278332 - protein, 15 aa, Homo sapiens
  CDR3 for beta chain variable domain of TCR clone 139166 (TRBV6-3, TRBJ2-7)
CASSSPGTVFYEQYF

SEQ ID NO: 278333 - protein, 13 aa, Homo sapiens
  CDR3 for alpha chain variable domain of TCR clone 139167 (TRAV8-3, TRAJ28)
CAVGAVGSYQSLS

SEQ ID NO: 278334 - protein, 15 aa, Homo sapiens
  CDR3 for beta chain variable domain of TCR clone 139167 (TRBV7-9, TRBJ1-5)
CASSQGHQPNQPQHF

SEQ ID NO: 278335 - protein, 15 aa, Homo sapiens
  CDR3 for alpha chain variable domain of TCR clone 139168 (TRAV21, TRAJ40)
CAVRPQTSGTYKYIF

SEQ ID NO: 278336 - protein, 14 aa, Homo sapiens
  CDR3 for beta chain variable domain of TCR clone 139168 (TRBV28, TRBJ1-5)
CASSLGVLVKTQHF

SEQ ID NO: 278337 - protein, 14 aa, Homo sapiens
  CDR3 for alpha chain variable domain of TCR clone 139169 (TRAV12-2, TRAJ5)
CAVNRSTGRRALTF

SEQ ID NO: 278338 - protein, 12 aa, Homo sapiens
  CDR3 for beta chain variable domain of TCR clone 139169 (TRBV19, TRBJ1-5)
CASSIALQPQHF

SEQ ID NO: 278339 - protein, 14 aa, Homo sapiens
  CDR3 for alpha chain variable domain of TCR clone 139170 (TRAV3, TRAJ9)
CAVRDDTGGFKIIF

SEQ ID NO: 278340 - protein, 18 aa, Homo sapiens
  CDR3 for beta chain variable domain of TCR clone 139170 (TRBV20-1, TRBJ2-6)
CSAETTPTHGSGANVLTF

SEQ ID NO: 278341 - protein, 12 aa, Homo sapiens
  CDR3 for alpha chain variable domain of TCR clone 139171 (TRAV12-3, TRAJ34)
CAMGYNTDKIIF

SEQ ID NO: 278342 - protein, 14 aa, Homo sapiens
  CDR3 for beta chain variable domain of TCR clone 139171 (TRBV4-1, TRBJ2-2)
CASSQAVNTGELFF

SEQ ID NO: 278343 - protein, 14 aa, Homo sapiens
  CDR3 for alpha chain variable domain of TCR clone 139172 (TRAV1-2, TRAJ13)
CAVLNSGGYQKVTF

SEQ ID NO: 278344 - protein, 13 aa, Homo sapiens
  CDR3 for beta chain variable domain of TCR clone 139172 (TRBV6-1, TRBJ2-1)
CASEGSSYNEQFF

SEQ ID NO: 278345 - protein, 15 aa, Homo sapiens
  CDR3 for alpha chain variable domain of TCR clone 139173 (TRAV16, TRAJ4)
CALPSLSGGYNKLIF

SEQ ID NO: 278346 - protein, 13 aa, Homo sapiens
  CDR3 for beta chain variable domain of TCR clone 139173 (TRBV20-1, TRBJ1-1)
CSARVGGNTEAFF

SEQ ID NO: 278347 - protein, 16 aa, Homo sapiens
  CDR3 for alpha chain variable domain of TCR clone 139174 (TRAV3, TRAJ37)
CAVRGKGSGNTGKLIF

SEQ ID NO: 278348 - protein, 18 aa, Homo sapiens
  CDR3 for beta chain variable domain of TCR clone 139174 (TRBV28, TRBJ2-1)
CASSPRASGVSSYNEQFF

SEQ ID NO: 278349 - protein, 17 aa, Homo sapiens
  CDR3 for alpha chain variable domain of TCR clone 139175 (TRAV3, TRAJ12)
CAVRDGGRMDSSCKLIF

SEQ ID NO: 278350 - protein, 13 aa, Homo sapiens
  CDR3 for beta chain variable domain of TCR clone 139175 (TRBV4-2, TRBJ1-1)
CASSQAGNTEAFF

SEQ ID NO: 278351 - protein, 12 aa, Homo sapiens
  CDR3 for alpha chain variable domain of TCR clone 139176 (TRAV8-4, TRAJ20)
CAVSDDDYKLSF

SEQ ID NO: 278352 - protein, 18 aa, Homo sapiens
  CDR3 for beta chain variable domain of TCR clone 139176 (TRBV12-4, TRBJ2-6)
CASSRHQAGGAGANVLTF

SEQ ID NO: 278353 - protein, 13 aa, Homo sapiens
  CDR3 for alpha chain variable domain of TCR clone 139177 (TRAV30, TRAJ24)
CGTVTDSLGKLQF

SEQ ID NO: 278354 - protein, 15 aa, Homo sapiens
  CDR3 for beta chain variable domain of TCR clone 139177 (TRBV25-1, TRBJ1-4)
CASSPGDSTNEKLFF

SEQ ID NO: 278355 - protein, 13 aa, Homo sapiens
  CDR3 for alpha chain variable domain of TCR clone 139178 (TRAV2, TRAJ40)
CAVVTSGTYKYIF

SEQ ID NO: 278356 - protein, 14 aa, Homo sapiens
  CDR3 for beta chain variable domain of TCR clone 139178 (TRBV5-4, TRBJ2-2)
CASSLTSRTGELFF

SEQ ID NO: 278357 - protein, 15 aa, Homo sapiens
  CDR3 for alpha chain variable domain of TCR clone 139179 (TRAV12-3, TRAJ6)
CAMSATTGGSYIPTF

SEQ ID NO: 278358 - protein, 16 aa, Homo sapiens
  CDR3 for beta chain variable domain of TCR clone 139179 (TRBV11-2, TRBJ1-1)
CASSLRQGGEHSKAFF

SEQ ID NO: 278359 - protein, 15 aa, Homo sapiens
  CDR3 for alpha chain variable domain of TCR clone 139180 (TRAV8-3, TRAJ23)
CAVGDRYNQGGKLIF

SEQ ID NO: 278360 - protein, 17 aa, Homo sapiens
  CDR3 for beta chain variable domain of TCR clone 139180 (TRBV4-1, TRBJ1-4)
CASSQEAPRGVEENLFF

SEQ ID NO: 278361 - protein, 18 aa, Homo sapiens
  CDR3 for alpha chain variable domain of TCR clone 139181 (TRAV13-1, TRAJ52)
CAASKRGDGGTSYGKLTF

SEQ ID NO: 278362 - protein, 13 aa, Homo sapiens
  CDR3 for beta chain variable domain of TCR clone 139181 (TRBV7-2, TRBJ2-1)
CASSLGVYNEQFF

SEQ ID NO: 278363 - protein, 14 aa, Homo sapiens
  CDR3 for alpha chain variable domain of TCR clone 139182 (TRAV16, TRAJ3)
CALSQYSSASKIIF

SEQ ID NO: 278364 - protein, 14 aa, Homo sapiens
  CDR3 for beta chain variable domain of TCR clone 139182 (TRBV6-3, TRBJ2-1)
CASRHSAYYNEQFF

SEQ ID NO: 278365 - protein, 13 aa, Homo sapiens
  CDR3 for alpha chain variable domain of TCR clone 139183 (TRAV36/DV7, TRAJ7)
CAGTRYGNNRLAF

SEQ ID NO: 278366 - protein, 15 aa, Homo sapiens
  CDR3 for beta chain variable domain of TCR clone 139183 (TRBV11-3, TRBJ2-7)
CASSPGPASSDEQYF

SEQ ID NO: 278367 - protein, 14 aa, Homo sapiens
  CDR3 for alpha chain variable domain of TCR clone 139184 (TRAV26-1, TRAJ38)
YIADNAGNNRKLIW

SEQ ID NO: 278368 - protein, 16 aa, Homo sapiens
  CDR3 for beta chain variable domain of TCR clone 139184 (TRBV20-1, TRBJ2-7)
CSASTSGRLSSYEQYF

SEQ ID NO: 278369 - protein, 11 aa, Homo sapiens
  CDR3 for alpha chain variable domain of TCR clone 139185 (TRAV12-2, TRAJ31)
CAVTRWARLLF

SEQ ID NO: 278370 - protein, 15 aa, Homo sapiens
  CDR3 for beta chain variable domain of TCR clone 139185 (TRBV9, TRBJ1-6)
CASSVAETGDSPLHF

SEQ ID NO: 278371 - protein, 14 aa, Homo sapiens
  CDR3 for alpha chain variable domain of TCR clone 139186 (TRAV1-2, TRAJ16)
CAVNRFSDGQKMLF

SEQ ID NO: 278372 - protein, 13 aa, Homo sapiens
  CDR3 for beta chain variable domain of TCR clone 139186 (TRBV19, TRBJ1-2)
CASSVPGQDGYTF

SEQ ID NO: 278373 - protein, 16 aa, Homo sapiens
  CDR3 for alpha chain variable domain of TCR clone 139187 (TRAV12-3, TRAJ53)
CAMSPGSGGINYKLTF

SEQ ID NO: 278374 - protein, 12 aa, Homo sapiens
  CDR3 for beta chain variable domain of TCR clone 139187 (TRBV7-8, TRBJ2-7)
CASSLGDREQYF

SEQ ID NO: 278375 - protein, 14 aa, Homo sapiens
  CDR3 for alpha chain variable domain of TCR clone 139188 (TRAV9-2, TRAJ39)
CALYIYNAGNMLTF

SEQ ID NO: 278376 - protein, 14 aa, Homo sapiens
  CDR3 for beta chain variable domain of TCR clone 139188 (TRBV25-1, TRBJ1-1)
CASTHLGGNAEAFF

SEQ ID NO: 278377 - protein, 15 aa, Homo sapiens
  CDR3 for alpha chain variable domain of TCR clone 139189 (TRAV8-1, TRAJ6)
CAVNTPPGGSYIPTF

SEQ ID NO: 278378 - protein, 14 aa, Homo sapiens
  CDR3 for beta chain variable domain of TCR clone 139189 (TRBV12-4, TRBJ2-1)
CASSLRQGASEQFF

SEQ ID NO: 278379 - protein, 11 aa, Homo sapiens
  CDR3 for alpha chain variable domain of TCR clone 139190 (TRAV2, TRAJ13)
CASGGYQKVTF

SEQ ID NO: 278380 - protein, 16 aa, Homo sapiens
  CDR3 for beta chain variable domain of TCR clone 139190 (TRBV19, TRBJ2-1)
CASSKARPSSYNEQFF

SEQ ID NO: 278381 - protein, 10 aa, Homo sapiens
  CDR3 for alpha chain variable domain of TCR clone 139191 (TRAV13-1, TRAJ8)
CAAPFQKLVF

SEQ ID NO: 278382 - protein, 16 aa, Homo sapiens
  CDR3 for beta chain variable domain of TCR clone 139191 (TRBV2, TRBJ2-1)
CASSVGGSLSYNEQFF

SEQ ID NO: 278383 - protein, 17 aa, Homo sapiens
  CDR3 for alpha chain variable domain of TCR clone 139192 (TRAV8-6, TRAJ58)
CAVSAWVGETSGSRLTF

SEQ ID NO: 278384 - protein, 14 aa, Homo sapiens
  CDR3 for beta chain variable domain of TCR clone 139192 (TRBV4-2, TRBJ2-1)
CASGLDRAYNEQFF

SEQ ID NO: 278385 - protein, 16 aa, Homo sapiens
  CDR3 for alpha chain variable domain of TCR clone 139193 (TRAV13-1, TRAJ18)
CAASRMGGSTLGRLYF

SEQ ID NO: 278386 - protein, 16 aa, Homo sapiens
  CDR3 for beta chain variable domain of TCR clone 139193 (TRBV27, TRBJ1-1)
CASSSRGRTGYTEAFF

SEQ ID NO: 278387 - protein, 13 aa, Homo sapiens
  CDR3 for alpha chain variable domain of TCR clone 139194 (TRAV27, TRAJ6)
CAGGTRGSYIPTF

SEQ ID NO: 278388 - protein, 14 aa, Homo sapiens
  CDR3 for beta chain variable domain of TCR clone 139194 (TRBV12-4, TRBJ1-1)
CASSLRTGGTEAFF

SEQ ID NO: 278389 - protein, 15 aa, Homo sapiens
  CDR3 for alpha chain variable domain of TCR clone 139195 (TRAV23/DV6, TRAJ15)
CAALPAGRNCSDLWE

SEQ ID NO: 278390 - protein, 14 aa, Homo sapiens
  CDR3 for beta chain variable domain of TCR clone 139195 (TRBV7-9, TRBJ1-2)
CASSRQGANYGYIF

SEQ ID NO: 278391 - protein, 13 aa, Homo sapiens
  CDR3 for alpha chain variable domain of TCR clone 139196 (TRAV2, TRAJ15)
CAVASQAGTALIF

SEQ ID NO: 278392 - protein, 16 aa, Homo sapiens
  CDR3 for beta chain variable domain of TCR clone 139196 (TRBV2, TRBJ1-3)
CASSRTGGSTGNTIYF

SEQ ID NO: 278393 - protein, 14 aa, Homo sapiens
  CDR3 for alpha chain variable domain of TCR clone 139197 (TRAV23/DV6, TRAJ11)
CAALIGGGYSPLTF

SEQ ID NO: 278394 - protein, 13 aa, Homo sapiens
  CDR3 for beta chain variable domain of TCR clone 139197 (TRBV11-3, TRBJ1-1)
CASSLGGNTEAFF

SEQ ID NO: 278395 - protein, 19 aa, Homo sapiens
  CDR3 for alpha chain variable domain of TCR clone 139198 (TRAV26-1, TRAJ28)
CIVRVAHAYSGAGSYQLTF

SEQ ID NO: 278396 - protein, 16 aa, Homo sapiens
  CDR3 for beta chain variable domain of TCR clone 139198 (TRBV15, TRBJ2-7)
CATSARQARSSYEQYF

SEQ ID NO: 278397 - protein, 14 aa, Homo sapiens
  CDR3 for alpha chain variable domain of TCR clone 139199 (TRAV9-2, TRAJ39)
CALYIYNAGNMLTF

SEQ ID NO: 278398 - protein, 15 aa, Homo sapiens
  CDR3 for beta chain variable domain of TCR clone 139199 (TRBV6-3, TRBJ2-3)
RLIHYSVGQADTQYF

SEQ ID NO: 278399 - protein, 14 aa, Homo sapiens
  CDR3 for alpha chain variable domain of TCR clone 139200 (TRAV12-3, TRAJ10)
SHLPLTGGGTKLTF

SEQ ID NO: 278400 - protein, 15 aa, Homo sapiens
  CDR3 for beta chain variable domain of TCR clone 139200 (TRBV7-3, TRBJ2-2)
CAGSETGQGTGELFF

SEQ ID NO: 278401 - protein, 14 aa, Homo sapiens
  CDR3 for alpha chain variable domain of TCR clone 139201 (TRAV1-2, TRAJ8)
CAVREDTGFQKLVF

SEQ ID NO: 278402 - protein, 12 aa, Homo sapiens
  CDR3 for beta chain variable domain of TCR clone 139201 (TRBV7-8, TRBJ2-7)
CASSPGDREQYF

SEQ ID NO: 278403 - protein, 11 aa, Homo sapiens
  CDR3 for alpha chain variable domain of TCR clone 139202 (TRAV1-2, TRAJ40)
CAVPGTYKYIF

SEQ ID NO: 278404 - protein, 15 aa, Homo sapiens
  CDR3 for beta chain variable domain of TCR clone 139202 (TRBV6-6, TRBJ1-5)
CASSSIQGTNQPQHF

SEQ ID NO: 278405 - protein, 14 aa, Homo sapiens
  CDR3 for alpha chain variable domain of TCR clone 139203 (TRAV12-2, TRAJ6)
CAVIASGGSYIPTF

SEQ ID NO: 278406 - protein, 16 aa, Homo sapiens
  CDR3 for beta chain variable domain of TCR clone 139203 (TRBV7-2, TRBJ2-3)
CASSLAGAGGGDTQYF

SEQ ID NO: 278407 - protein, 16 aa, Homo sapiens
  CDR3 for alpha chain variable domain of TCR clone 139204 (TRAV36/DV7, TRAJ38)
CAVTTSNAGNNRKLIW

SEQ ID NO: 278408 - protein, 12 aa, Homo sapiens
  CDR3 for beta chain variable domain of TCR clone 139204 (TRBV20-1, TRBJ1-1)
CSASGYTLRAFF

SEQ ID NO: 278409 - protein, 14 aa, Homo sapiens
  CDR3 for alpha chain variable domain of TCR clone 139205 (TRAV17, TRAJ56)
CATVPAGANSKLTF

SEQ ID NO: 278410 - protein, 14 aa, Homo sapiens
  CDR3 for beta chain variable domain of TCR clone 139205 (TRBV7-9, TRBJ2-7)
CASSLEAVGDEQYF

SEQ ID NO: 278411 - protein, 15 aa, Homo sapiens
  CDR3 for alpha chain variable domain of TCR clone 139206 (TRAV3, TRAJ36)
FAVRASQTGANNLFF

SEQ ID NO: 278412 - protein, 13 aa, Homo sapiens
  CDR3 for beta chain variable domain of TCR clone 139206 (TRBV10-3, TRBJ1-2)
CAISERDSYGYTF

SEQ ID NO: 278413 - protein, 13 aa, Homo sapiens
  CDR3 for alpha chain variable domain of TCR clone 139207 (TRAV17, TRAJ5)
CATMDTGRRAPTF

SEQ ID NO: 278414 - protein, 15 aa, Homo sapiens
  CDR3 for beta chain variable domain of TCR clone 139207 (TRBV20-1, TRBJ2-5)
CSATRTSGSLETQYF

SEQ ID NO: 278415 - protein, 14 aa, Homo sapiens
  CDR3 for alpha chain variable domain of TCR clone 139208 (TRAV20, TRAJ49)
CAVQAVVAGNQFYF

SEQ ID NO: 278416 - protein, 14 aa, Homo sapiens
  CDR3 for beta chain variable domain of TCR clone 139208 (TRBV15, TRBJ2-1)
CATSGVEDYNEQFF

SEQ ID NO: 278417 - protein, 10 aa, Homo sapiens
  CDR3 for alpha chain variable domain of TCR clone 139209 (TRAV12-3, TRAJ49)
CAMNDDQFYF

SEQ ID NO: 278418 - protein, 17 aa, Homo sapiens
  CDR3 for beta chain variable domain of TCR clone 139209 (TRBV18, TRBJ2-3)
CQLIHWRAAGGTDTQYF

SEQ ID NO: 278419 - protein, 11 aa, Homo sapiens
  CDR3 for alpha chain variable domain of TCR clone 139210 (TRAV3, TRAJ21)
WAVGNFNKFYF

SEQ ID NO: 278420 - protein, 16 aa, Homo sapiens
  CDR3 for beta chain variable domain of TCR clone 139210 (TRBV19, TRBJ2-1)
CASSKAGPSSYNEHFF

SEQ ID NO: 278421 - protein, 13 aa, Homo sapiens
  CDR3 for alpha chain variable domain of TCR clone 139211 (TRAV17, TRAJ5)
CAPMDTGRRALTF

SEQ ID NO: 278422 - protein, 15 aa, Homo sapiens
  CDR3 for beta chain variable domain of TCR clone 139211 (TRBV28, TRBJ2-1)
CASSIIAGGRSEQFF

SEQ ID NO: 278423 - protein, 14 aa, Homo sapiens
  CDR3 for alpha chain variable domain of TCR clone 139212 (TRAV3, TRAJ6)
CAVRDPWGSYIPTL

SEQ ID NO: 278424 - protein, 16 aa, Homo sapiens
  CDR3 for beta chain variable domain of TCR clone 139212 (TRBV27, TRBJ2-5)
CASSLSRTAGGETQYF

SEQ ID NO: 278425 - protein, 14 aa, Homo sapiens
  CDR3 for alpha chain variable domain of TCR clone 139213 (TRAV13-1, TRAJ35)
CAASKGGFGNVLHV

SEQ ID NO: 278426 - protein, 15 aa, Homo sapiens
  CDR3 for beta chain variable domain of TCR clone 139213 (TRBV28, TRBJ2-1)
CASSGLAEVDNEQFF

SEQ ID NO: 278427 - protein, 14 aa, Homo sapiens
  CDR3 for alpha chain variable domain of TCR clone 139214 (TRAV12-3, TRAJ15)
CSMIPPQAGTALIF

SEQ ID NO: 278428 - protein, 12 aa, Homo sapiens
  CDR3 for beta chain variable domain of TCR clone 139214 (TRBV11-2, TRBJ2-2)
CASSFGGGELFF

SEQ ID NO: 278429 - protein, 13 aa, Homo sapiens
  CDR3 for alpha chain variable domain of TCR clone 139215 (TRAV12-2, TRAJ10)
CAVPTGGGNKLTF

SEQ ID NO: 278430 - protein, 13 aa, Homo sapiens
  CDR3 for beta chain variable domain of TCR clone 139215 (TRBV20-1, TRBJ1-1)
CSARVGGNTEAFF

SEQ ID NO: 278431 - protein, 12 aa, Homo sapiens
  CDR3 for alpha chain variable domain of TCR clone 139216 (TRAV2, TRAJ37)
CAVTMNTGKLIF

SEQ ID NO: 278432 - protein, 15 aa, Homo sapiens
  CDR3 for beta chain variable domain of TCR clone 139216 (TRBV5-1, TRBJ2-5)
CASSFGGPPQETQYV

SEQ ID NO: 278433 - protein, 14 aa, Homo sapiens
  CDR3 for alpha chain variable domain of TCR clone 139217 (TRAV29/DV5, TRAJ54)
CAASRSPGAQKLVF

SEQ ID NO: 278434 - protein, 13 aa, Homo sapiens
  CDR3 for beta chain variable domain of TCR clone 139217 (TRBV7-2, TRBJ2-5)
YASSQTSVETQYF

SEQ ID NO: 278435 - protein, 12 aa, Homo sapiens
  CDR3 for alpha chain variable domain of TCR clone 139218 (TRAV17, TRAJ30)
CDTDARDDKIIF

SEQ ID NO: 278436 - protein, 16 aa, Homo sapiens
  CDR3 for beta chain variable domain of TCR clone 139218 (TRBV5-7, TRBJ2-7)
CASSPTSGRELDEQYF

SEQ ID NO: 278437 - protein, 14 aa, Homo sapiens
  CDR3 for alpha chain variable domain of TCR clone 139219 (TRAV20, TRAJ40)
CAVSLTSGTYKYIF

SEQ ID NO: 278438 - protein, 14 aa, Homo sapiens
  CDR3 for beta chain variable domain of TCR clone 139219 (TRBV7-2, TRBJ2-7)
CASRSQGAAYEQYF

SEQ ID NO: 278439 - protein, 15 aa, Homo sapiens
  CDR3 for alpha chain variable domain of TCR clone 139220 (TRAV8-6, TRAJ37)
CAVIFSSGNTGKLIF

SEQ ID NO: 278440 - protein, 15 aa, Homo sapiens
  CDR3 for beta chain variable domain of TCR clone 139220 (TRBV25-1, TRBJ2-4)
CASSGTESAKNIQYF

SEQ ID NO: 278441 - protein, 14 aa, Homo sapiens
  CDR3 for alpha chain variable domain of TCR clone 139221 (TRAV12-2, TRAJ13)
CAVKKTGGYQKVIF

SEQ ID NO: 278442 - protein, 15 aa, Homo sapiens
  CDR3 for beta chain variable domain of TCR clone 139221 (TRBV27, TRBJ2-1)
CASSNGGGSSKEQFF

SEQ ID NO: 278443 - protein, 16 aa, Homo sapiens
  CDR3 for alpha chain variable domain of TCR clone 139222 (TRAV2, TRAJ4)
CAVEDRFSGGYNKLIF

SEQ ID NO: 278444 - protein, 13 aa, Homo sapiens
  CDR3 for beta chain variable domain of TCR clone 139222 (TRBV7-7, TRBJ2-5)
CASSRSGQETRYF

SEQ ID NO: 278445 - protein, 16 aa, Homo sapiens
  CDR3 for alpha chain variable domain of TCR clone 139223 (TRAV21, TRAJ17)
CAVRPGEEAAGNKLTF

SEQ ID NO: 278446 - protein, 16 aa, Homo sapiens
  CDR3 for beta chain variable domain of TCR clone 139223 (TRBV2, TRBJ2-7)
CASSEPWTGPSYDQYF

SEQ ID NO: 278447 - protein, 13 aa, Homo sapiens
  CDR3 for alpha chain variable domain of TCR clone 139224 (TRAV35, TRAJ27)
CAGQEGDAGKSTF

SEQ ID NO: 278448 - protein, 14 aa, Homo sapiens
  CDR3 for beta chain variable domain of TCR clone 139224 (TRBV7-8, TRBJ2-5)
CASSATGGQETQYF

SEQ ID NO: 278449 - protein, 11 aa, Homo sapiens
  CDR3 for alpha chain variable domain of TCR clone 139225 (TRAV2, TRAJ20)
CASGGYQKVTF

SEQ ID NO: 278450 - protein, 14 aa, Homo sapiens
  CDR3 for beta chain variable domain of TCR clone 139225 (TRBV11-1, TRBJ2-7)
CASTFAVPSYEQYF

SEQ ID NO: 278451 - protein, 11 aa, Homo sapiens
  CDR3 for alpha chain variable domain of TCR clone 139226 (TRAV3, TRAJ21)
CAVGNFNKFYF

SEQ ID NO: 278452 - protein, 14 aa, Homo sapiens
  CDR3 for beta chain variable domain of TCR clone 139226 (TRBV2, TRBJ2-5)
CASTWGRAQETQYF

SEQ ID NO: 278453 - protein, 13 aa, Homo sapiens
  CDR3 for alpha chain variable domain of TCR clone 139227 (TRAV1-2, TRAJ9)
CAALNTGGLKTIF

SEQ ID NO: 278454 - protein, 13 aa, Homo sapiens
  CDR3 for beta chain variable domain of TCR clone 139227 (TRBV19, TRBJ1-2)
CASSVPGQYGYTF

SEQ ID NO: 278455 - protein, 14 aa, Homo sapiens
  CDR3 for alpha chain variable domain of TCR clone 139228 (TRAV20, TRAJ37)
RAVQSSSNTGKLIF

SEQ ID NO: 278456 - protein, 14 aa, Homo sapiens
  CDR3 for beta chain variable domain of TCR clone 139228 (TRBV7-3, TRBJ2-2)
CASSLNSNTGELFF

SEQ ID NO: 278457 - protein, 14 aa, Homo sapiens
  CDR3 for alpha chain variable domain of TCR clone 139229 (TRAV2, TRAJ9)
CAVEDRSGGFKTIF

SEQ ID NO: 278458 - protein, 16 aa, Homo sapiens
  CDR3 for beta chain variable domain of TCR clone 139229 (TRBV7-3, TRBJ2-1)
CVSSLEGYRSYNEQFF

SEQ ID NO: 278459 - protein, 15 aa, Homo sapiens
  CDR3 for alpha chain variable domain of TCR clone 139230 (TRAV27, TRAJ38)
CAARRNAGNNRKLIW

SEQ ID NO: 278460 - protein, 17 aa, Homo sapiens
  CDR3 for beta chain variable domain of TCR clone 139230 (TRBV20-1, TRBJ2-1)
CSARDPLAGVWDNEQFF

SEQ ID NO: 278461 - protein, 10 aa, Homo sapiens
  CDR3 for alpha chain variable domain of TCR clone 139231 (TRAV6, TRAJ36)
PLCTANNLFF

SEQ ID NO: 278462 - protein, 14 aa, Homo sapiens
  CDR3 for beta chain variable domain of TCR clone 139231 (TRBV10-2, TRBJ1-5)
CASSSKGRNQPQHF

SEQ ID NO: 278463 - protein, 13 aa, Homo sapiens
  CDR3 for alpha chain variable domain of TCR clone 139232 (TRAV21, TRAJ57)
CAVTQGGSEKLVF

SEQ ID NO: 278464 - protein, 13 aa, Homo sapiens
  CDR3 for beta chain variable domain of TCR clone 139232 (TRBV7-9, TRBJ1-1)
CASSLSGETEAFF

SEQ ID NO: 278465 - protein, 10 aa, Homo sapiens
  CDR3 for alpha chain variable domain of TCR clone 139233 (TRAV20, TRAJ22)
CAAPARQLTF

SEQ ID NO: 278466 - protein, 14 aa, Homo sapiens
  CDR3 for beta chain variable domain of TCR clone 139233 (TRBV19, TRBJ2-1)
CASSMGSGATGQFF

SEQ ID NO: 278467 - protein, 12 aa, Homo sapiens
  CDR3 for alpha chain variable domain of TCR clone 139234 (TRAV12-3, TRAJ17)
CAMTLTGNNLTF

SEQ ID NO: 278468 - protein, 14 aa, Homo sapiens
  CDR3 for beta chain variable domain of TCR clone 139234 (TRBV4-1, TRBJ2-7)
CASSQDREHVEQYF

SEQ ID NO: 278469 - protein, 13 aa, Homo sapiens
  CDR3 for alpha chain variable domain of TCR clone 139235 (TRAV25, TRAJ35)
CAGGGGFGIVLHC

SEQ ID NO: 278470 - protein, 14 aa, Homo sapiens
  CDR3 for beta chain variable domain of TCR clone 139235 (TRBV6-1, TRBJ2-1)
CASAGGAIKNEQFF

SEQ ID NO: 278471 - protein, 15 aa, Homo sapiens
  CDR3 for alpha chain variable domain of TCR clone 139236 (TRAV14/DV4, TRAJ10)
CAMRELTGGGNKLTF

SEQ ID NO: 278472 - protein, 23 aa, Homo sapiens
  CDR3 for beta chain variable domain of TCR clone 139236 (TRBV7-8, TRBJ1-2)
RRTPPCISVPAASTGFINYGYTF

SEQ ID NO: 278473 - protein, 12 aa, Homo sapiens
  CDR3 for alpha chain variable domain of TCR clone 139237 (TRAV35, TRAJ31)
CATASNNARLMF

SEQ ID NO: 278474 - protein, 14 aa, Homo sapiens
  CDR3 for beta chain variable domain of TCR clone 139237 (TRBV2, TRBJ2-2)
CASSLFGGNGELFF

SEQ ID NO: 278475 - protein, 12 aa, Homo sapiens
  CDR3 for alpha chain variable domain of TCR clone 139238 (TRAV21, TRAJ49)
CAVNDGGNQFYF

SEQ ID NO: 278476 - protein, 14 aa, Homo sapiens
  CDR3 for beta chain variable domain of TCR clone 139238 (TRBV25-1, TRBJ1-1)
CASTHLGGNTEAFF

SEQ ID NO: 278477 - protein, 13 aa, Homo sapiens
  CDR3 for alpha chain variable domain of TCR clone 139239 (TRAV8-3, TRAJ48)
CAVVRFGNEKLTF

SEQ ID NO: 278478 - protein, 16 aa, Homo sapiens
  CDR3 for beta chain variable domain of TCR clone 139239 (TRBV20-1, TRBJ2-5)
CSARDFASGIQGTQYF

SEQ ID NO: 278479 - protein, 12 aa, Homo sapiens
  CDR3 for alpha chain variable domain of TCR clone 139240 (TRAV13-1, TRAJ21)
CAAKKGFNKFYF

SEQ ID NO: 278480 - protein, 12 aa, Homo sapiens
  CDR3 for beta chain variable domain of TCR clone 139240 (TRBV5-1, TRBJ2-3)
CASSLAADTQYF

SEQ ID NO: 278481 - protein, 15 aa, Homo sapiens
  CDR3 for alpha chain variable domain of TCR clone 139241 (TRAV8-2, TRAJ24)
CVVSDRTDSWGKLQF

SEQ ID NO: 278482 - protein, 14 aa, Homo sapiens
  CDR3 for beta chain variable domain of TCR clone 139241 (TRBV19, TRBJ2-1)
CASPTFVLSGEQFF

SEQ ID NO: 278483 - protein, 12 aa, Homo sapiens
  CDR3 for alpha chain variable domain of TCR clone 139242 (TRAV12-1, TRAJ40)
CVVYPGTYKYIF

SEQ ID NO: 278484 - protein, 18 aa, Homo sapiens
  CDR3 for beta chain variable domain of TCR clone 139242 (TRBV11-2, TRBJ2-3)
CASSLGGASRGAPNTKYF

SEQ ID NO: 278485 - protein, 14 aa, Homo sapiens
  CDR3 for alpha chain variable domain of TCR clone 139243 (TRAV12-1, TRAJ33)
CVVNPEDSNYQLIW

SEQ ID NO: 278486 - protein, 11 aa, Homo sapiens
  CDR3 for beta chain variable domain of TCR clone 139243 (TRBV7-6, TRBJ2-1)
CASSNYGEHFF

SEQ ID NO: 278487 - protein, 13 aa, Homo sapiens
  CDR3 for alpha chain variable domain of TCR clone 139244 (TRAV12-1, TRAJ16)
CVVNGPDGQKLLF

SEQ ID NO: 278488 - protein, 15 aa, Homo sapiens
  CDR3 for beta chain variable domain of TCR clone 139244 (TRBV6-3, TRBJ2-7)
CASSSPGTVSYEQYF

SEQ ID NO: 278489 - protein, 17 aa, Homo sapiens
  CDR3 for alpha chain variable domain of TCR clone 139245 (TRAV3, TRAJ38)
CAVRDCHNAGNKRKLIW

SEQ ID NO: 278490 - protein, 13 aa, Homo sapiens
  CDR3 for beta chain variable domain of TCR clone 139245 (TRBV23-1, TRBJ1-4)
CASRGKFNEKLFF

SEQ ID NO: 278491 - protein, 18 aa, Homo sapiens
  CDR3 for alpha chain variable domain of TCR clone 139246 (TRAV21, TRAJ52)
CAVRPSPAGGTSIGKLTF

SEQ ID NO: 278492 - protein, 16 aa, Homo sapiens
  CDR3 for beta chain variable domain of TCR clone 139246 (TRBV19, TRBJ2-1)
CASSKAGPSSYNEQFF

SEQ ID NO: 278493 - protein, 14 aa, Homo sapiens
  CDR3 for alpha chain variable domain of TCR clone 139247 (TRAV8-3, TRAJ4)
CAVGAAGGYNKLIF

SEQ ID NO: 278494 - protein, 14 aa, Homo sapiens
  CDR3 for beta chain variable domain of TCR clone 139247 (TRBV7-8, TRBJ2-3)
CASSFPDGQDTQYF

SEQ ID NO: 278495 - protein, 14 aa, Homo sapiens
  CDR3 for alpha chain variable domain of TCR clone 139248 (TRAV12-2, TRAJ40)
CAVKIPSGTYKYIF

SEQ ID NO: 278496 - protein, 15 aa, Homo sapiens
  CDR3 for beta chain variable domain of TCR clone 139248 (TRBV27, TRBJ2-7)
CASSPQREGQREQYF

SEQ ID NO: 278497 - protein, 16 aa, Homo sapiens
  CDR3 for alpha chain variable domain of TCR clone 139249 (TRAV21, TRAJ52)
CAVTNAGGTSYGKLKF

SEQ ID NO: 278498 - protein, 11 aa, Homo sapiens
  CDR3 for beta chain variable domain of TCR clone 139249 (TRBV2, TRBJ1-1)
CASREGTEAFF

SEQ ID NO: 278499 - protein, 15 aa, Homo sapiens
  CDR3 for alpha chain variable domain of TCR clone 139250 (TRAV16, TRAJ48)
CALFISNFGNEKLTF

SEQ ID NO: 278500 - protein, 14 aa, Homo sapiens
  CDR3 for beta chain variable domain of TCR clone 139250 (TRBV10-3, TRBJ1-1)
CAISDTDRGVEAFF

SEQ ID NO: 278501 - protein, 12 aa, Homo sapiens
  CDR3 for alpha chain variable domain of TCR clone 139251 (TRAV2, TRAJ36)
CAELTGANNLFF

SEQ ID NO: 278502 - protein, 18 aa, Homo sapiens
  CDR3 for beta chain variable domain of TCR clone 139251 (TRBV19, TRBJ1-1)
CASIIDGWDYTGNTEAFF

SEQ ID NO: 278503 - protein, 17 aa, Homo sapiens
  CDR3 for alpha chain variable domain of TCR clone 139252 (TRAV17, TRAJ13)
CATVPNSGGYRKLPLEL

SEQ ID NO: 278504 - protein, 13 aa, Homo sapiens
  CDR3 for beta chain variable domain of TCR clone 139252 (TRBV3-1, TRBJ1-5)
CASSQAGGQPQHF

SEQ ID NO: 278505 - protein, 14 aa, Homo sapiens
  CDR3 for alpha chain variable domain of TCR clone 139253 (TRAV9-2, TRAJ13)
CALGHSGGYQKVTF

SEQ ID NO: 278506 - protein, 22 aa, Homo sapiens
  CDR3 for beta chain variable domain of TCR clone 139253 (TRBV6-4, TRBJ2-6)
CASSETGRGGQRPDFRGRQQAD

SEQ ID NO: 278507 - protein, 15 aa, Homo sapiens
  CDR3 for alpha chain variable domain of TCR clone 139254 (TRAV21, TRAJ40)
CAVRPQTSGTYKYIF

SEQ ID NO: 278508 - protein, 16 aa, Homo sapiens
  CDR3 for beta chain variable domain of TCR clone 139254 (TRBV27, TRBJ2-2)
CASSFRGLVRTGELFF

SEQ ID NO: 278509 - protein, 12 aa, Homo sapiens
  CDR3 for alpha chain variable domain of TCR clone 139255 (TRAV12-3, TRAJ17)
CVMTLTGNKLTF

SEQ ID NO: 278510 - protein, 15 aa, Homo sapiens
  CDR3 for beta chain variable domain of TCR clone 139255 (TRBV27, TRBJ2-1)
CASSNGGGSSNEQFF

SEQ ID NO: 278511 - protein, 12 aa, Homo sapiens
  CDR3 for alpha chain variable domain of TCR clone 139256 (TRAV8-3, TRAJ40)
CAVTSGTYKYIF

SEQ ID NO: 278512 - protein, 14 aa, Homo sapiens
  CDR3 for beta chain variable domain of TCR clone 139256 (TRBV12-4, TRBJ2-3)
CASSGQGSTATQYF

SEQ ID NO: 278513 - protein, 13 aa, Homo sapiens
  CDR3 for alpha chain variable domain of TCR clone 139257 (TRAV21, TRAJ20)
CVVGLRVDYKLSF

SEQ ID NO: 278514 - protein, 15 aa, Homo sapiens
  CDR3 for beta chain variable domain of TCR clone 139257 (TRBV18, TRBJ1-1)
CASSPSSWVNTEAFF

SEQ ID NO: 278515 - protein, 12 aa, Homo sapiens
  CDR3 for alpha chain variable domain of TCR clone 139258 (TRAV12-3, TRAJ17)
CAMTLTGNKLTF

SEQ ID NO: 278516 - protein, 14 aa, Homo sapiens
  CDR3 for beta chain variable domain of TCR clone 139258 (TRBV19, TRBJ1-1)
CASSIEVSGGSAFF

SEQ ID NO: 278517 - protein, 12 aa, Homo sapiens
  CDR3 for alpha chain variable domain of TCR clone 139259 (TRAV17, TRAJ57)
CATDGGSEKLVF

SEQ ID NO: 278518 - protein, 13 aa, Homo sapiens
  CDR3 for beta chain variable domain of TCR clone 139259 (TRBV7-9, TRBJ2-7)
CASSFAGGYEQYF

SEQ ID NO: 278519 - protein, 15 aa, Homo sapiens
  CDR3 for alpha chain variable domain of TCR clone 139260 (TRAV26-1, TRAJ29)
CIVRVEGSGHTPLVF

SEQ ID NO: 278520 - protein, 15 aa, Homo sapiens
  CDR3 for beta chain variable domain of TCR clone 139260 (TRBV7-9, TRBJ1-5)
CASSQGRQPNQPQHF

SEQ ID NO: 278521 - protein, 14 aa, Homo sapiens
  CDR3 for alpha chain variable domain of TCR clone 139261 (TRAV20, TRAJ20)
CAVRKSGDDYKLSF

SEQ ID NO: 278522 - protein, 17 aa, Homo sapiens
  CDR3 for beta chain variable domain of TCR clone 139261 (TRBV20-1, TRBJ2-1)
CSASSSGLAGSYNEQFF

SEQ ID NO: 278523 - protein, 15 aa, Homo sapiens
  CDR3 for alpha chain variable domain of TCR clone 139262 (TRAV2, TRAJ22)
CAVPSRGGSARQLTF

SEQ ID NO: 278524 - protein, 11 aa, Homo sapiens
  CDR3 for beta chain variable domain of TCR clone 139262 (TRBV11-2, TRBJ2-2)
CASSLPGELFF

SEQ ID NO: 278525 - protein, 15 aa, Homo sapiens
  CDR3 for alpha chain variable domain of TCR clone 139263 (TRAV16, TRAJ12)
CSKWPLRDSSYKLIF

SEQ ID NO: 278526 - protein, 16 aa, Homo sapiens
  CDR3 for beta chain variable domain of TCR clone 139263 (TRBV4-1, TRBJ2-3)
CASSQSTSGAEDTQYF

SEQ ID NO: 278527 - protein, 15 aa, Homo sapiens
  CDR3 for alpha chain variable domain of TCR clone 139264 (TRAV13-1, TRAJ44)
CAASRGGGTASKLTF

SEQ ID NO: 278528 - protein, 12 aa, Homo sapiens
  CDR3 for beta chain variable domain of TCR clone 139264 (TRBV11-2, TRBJ2-2)
CASSLGGWELFF

SEQ ID NO: 278529 - protein, 13 aa, Homo sapiens
  CDR3 for alpha chain variable domain of TCR clone 139265 (TRAV13-1, TRAJ21)
CAASIYNFNKFYF

SEQ ID NO: 278530 - protein, 16 aa, Homo sapiens
  CDR3 for beta chain variable domain of TCR clone 139265 (TRBV23-1, TRBJ2-5)
CASSQISGKRQETQYF

SEQ ID NO: 278531 - protein, 15 aa, Homo sapiens
  CDR3 for alpha chain variable domain of TCR clone 139266 (TRAV27, TRAJ38)
CAARRNAGNNRKLIW

SEQ ID NO: 278532 - protein, 13 aa, Homo sapiens
  CDR3 for beta chain variable domain of TCR clone 139266 (TRBV7-3, TRBJ2-3)
CASSSWSTDTQYF

SEQ ID NO: 278533 - protein, 15 aa, Homo sapiens
  CDR3 for alpha chain variable domain of TCR clone 139267 (TRAV8-4, TRAJ8)
CSVSDLNTGFQKLVF

SEQ ID NO: 278534 - protein, 14 aa, Homo sapiens
  CDR3 for beta chain variable domain of TCR clone 139267 (TRBV7-2, TRBJ2-3)
CASSQTGSSYTQYF

SEQ ID NO: 278535 - protein, 12 aa, Homo sapiens
  CDR3 for alpha chain variable domain of TCR clone 139268 (TRAV3, TRAJ20)
CAVRDGDHKLSF

SEQ ID NO: 278536 - protein, 16 aa, Homo sapiens
  CDR3 for beta chain variable domain of TCR clone 139268 (TRBV6-6, TRBJ2-1)
CASSYSFSGSYNEQFF

SEQ ID NO: 278537 - protein, 16 aa, Homo sapiens
  CDR3 for alpha chain variable domain of TCR clone 139269 (TRAV17, TRAJ35)
CATAEGGIGFGNVLHC

SEQ ID NO: 278538 - protein, 13 aa, Homo sapiens
  CDR3 for beta chain variable domain of TCR clone 139269 (TRBV7-9, TRBJ1-2)
CASSLKQNYGYTF

SEQ ID NO: 278539 - protein, 13 aa, Homo sapiens
  CDR3 for alpha chain variable domain of TCR clone 139270 (TRAV1-2, TRAJ9)
CAVLNTGGFKTIF

SEQ ID NO: 278540 - protein, 17 aa, Homo sapiens
  CDR3 for beta chain variable domain of TCR clone 139270 (TRBV7-2, TRBJ2-3)
CANSLAGGLAGTAGQYF

SEQ ID NO: 278541 - protein, 15 aa, Homo sapiens
  CDR3 for alpha chain variable domain of TCR clone 139271 (TRAV20, TRAJ4)
CAVEGSSGGYNKLIF

SEQ ID NO: 278542 - protein, 14 aa, Homo sapiens
  CDR3 for beta chain variable domain of TCR clone 139271 (TRBV7-8, TRBJ2-7)
CASALGGALGEQYF

SEQ ID NO: 278543 - protein, 14 aa, Homo sapiens
  CDR3 for alpha chain variable domain of TCR clone 139272 (TRAV12-1, TRAJ12)
GVVNRPDSSYKLIF

SEQ ID NO: 278544 - protein, 15 aa, Homo sapiens
  CDR3 for beta chain variable domain of TCR clone 139272 (TRBV5-1, TRBJ1-1)
CASSLGMGTSTEAFF

SEQ ID NO: 278545 - protein, 15 aa, Homo sapiens
  CDR3 for alpha chain variable domain of TCR clone 139273 (TRAV38-2/DV8, TRAJ47)
CAYRSAKGYGNKLVC

SEQ ID NO: 278546 - protein, 15 aa, Homo sapiens
  CDR3 for beta chain variable domain of TCR clone 139273 (TRBV6-6, TRBJ2-7)
CASSYSYGGSYEQYF

SEQ ID NO: 278547 - protein, 14 aa, Homo sapiens
  CDR3 for alpha chain variable domain of TCR clone 139274 (TRAV1-2, TRAJ16)
CAVNRFSDGQKLLF

SEQ ID NO: 278548 - protein, 12 aa, Homo sapiens
  CDR3 for beta chain variable domain of TCR clone 139274 (TRBV6-5, TRBJ1-1)
TSVYFCALRAFF

SEQ ID NO: 278549 - protein, 16 aa, Homo sapiens
  CDR3 for alpha chain variable domain of TCR clone 139275 (TRAV16, TRAJ4)
CALSRMFSGGYNKLIF

SEQ ID NO: 278550 - protein, 17 aa, Homo sapiens
  CDR3 for beta chain variable domain of TCR clone 139275 (TRBV5-1, TRBJ2-2)
CASSLAGLSGGTGELFS

SEQ ID NO: 278551 - protein, 16 aa, Homo sapiens
  CDR3 for alpha chain variable domain of TCR clone 139276 (TRAV3, TRAJ5)
CAVRNLMDTGRRALTF

SEQ ID NO: 278552 - protein, 15 aa, Homo sapiens
  CDR3 for beta chain variable domain of TCR clone 139276 (TRBV10-3, TRBJ2-1)
CAISDVQDRAYEQFF

SEQ ID NO: 278553 - protein, 19 aa, Homo sapiens
  CDR3 for alpha chain variable domain of TCR clone 139277 (TRAV38-1, TRAJ43)
CAFMKHNSRRHALWSRDQT

SEQ ID NO: 278554 - protein, 11 aa, Homo sapiens
  CDR3 for beta chain variable domain of TCR clone 139277 (TRBV7-9, TRBJ2-3)
CASSYTDTQYF

SEQ ID NO: 278555 - protein, 14 aa, Homo sapiens
  CDR3 for alpha chain variable domain of TCR clone 139278 (TRAV8-3, TRAJ4)
CAVGAAGGYNKLIF

SEQ ID NO: 278556 - protein, 12 aa, Homo sapiens
  CDR3 for beta chain variable domain of TCR clone 139278 (TRBV11-2, TRBJ2-5)
CASSLGQETQYF

SEQ ID NO: 278557 - protein, 17 aa, Homo sapiens
  CDR3 for alpha chain variable domain of TCR clone 139279 (TRAV3, TRAJ6)
CAVRDGPRAGGSYIPTF

SEQ ID NO: 278558 - protein, 15 aa, Homo sapiens
  CDR3 for beta chain variable domain of TCR clone 139279 (TRBV7-6, TRBJ2-7)
CASSGRRDTFGEQYF

SEQ ID NO: 278559 - protein, 16 aa, Homo sapiens
  CDR3 for alpha chain variable domain of TCR clone 139280 (TRAV35, TRAJ28)
CAGQKYSGAGSYQLTF

SEQ ID NO: 278560 - protein, 13 aa, Homo sapiens
  CDR3 for beta chain variable domain of TCR clone 139280 (TRBV19, TRBJ1-2)
CASSQGQVYGYAF

SEQ ID NO: 278561 - protein, 15 aa, Homo sapiens
  CDR3 for alpha chain variable domain of TCR clone 139281 (TRAV3, TRAJ30)
CAVRDEYGSDDKIIF

SEQ ID NO: 278562 - protein, 16 aa, Homo sapiens
  CDR3 for beta chain variable domain of TCR clone 139281 (TRBV5-1, TRBJ2-5)
CASSLANHRGRETQYF

SEQ ID NO: 278563 - protein, 11 aa, Homo sapiens
  CDR3 for alpha chain variable domain of TCR clone 139282 (TRAV2, TRAJ13)
CASGGYQRVTF

SEQ ID NO: 278564 - protein, 16 aa, Homo sapiens
  CDR3 for beta chain variable domain of TCR clone 139282 (TRBV11-2, TRBJ2-7)
CASSPLAGGPRYEQYF

SEQ ID NO: 278565 - protein, 14 aa, Homo sapiens
  CDR3 for alpha chain variable domain of TCR clone 139283 (TRAV17, TRAJ54)
CATDGLQGAQKLVF

SEQ ID NO: 278566 - protein, 17 aa, Homo sapiens
  CDR3 for beta chain variable domain of TCR clone 139283 (TRBV5-5, TRBJ2-2)
CASSPPPGQGWPGELFF

SEQ ID NO: 278567 - protein, 12 aa, Homo sapiens
  CDR3 for alpha chain variable domain of TCR clone 139284 (TRAV12-3, TRAJ42)
CAPGGSQGNLIF

SEQ ID NO: 278568 - protein, 13 aa, Homo sapiens
  CDR3 for beta chain variable domain of TCR clone 139284 (TRBV5-7, TRBJ2-6)
CASISSGANVLTC

SEQ ID NO: 278569 - protein, 14 aa, Homo sapiens
  CDR3 for alpha chain variable domain of TCR clone 139285 (TRAV12-2, TRAJ13)
CAVKKTGGYQKVTF

SEQ ID NO: 278570 - protein, 14 aa, Homo sapiens
  CDR3 for beta chain variable domain of TCR clone 139285 (TRBV10-2, TRBJ1-5)
CASSSTGRNQPQHF

SEQ ID NO: 278571 - protein, 14 aa, Homo sapiens
  CDR3 for alpha chain variable domain of TCR clone 139286 (TRAV23/DV6, TRAJ22)
CAASVSGSARQLTF

SEQ ID NO: 278572 - protein, 16 aa, Homo sapiens
  CDR3 for beta chain variable domain of TCR clone 139286 (TRBV2, TRBJ2-1)
CASSVGGSLSYNEQFF

SEQ ID NO: 278573 - protein, 18 aa, Homo sapiens
  CDR3 for alpha chain variable domain of TCR clone 139287 (TRAV3, TRAJ10)
CTSVLRDMRAGGGNKLTF

SEQ ID NO: 278574 - protein, 13 aa, Homo sapiens
  CDR3 for beta chain variable domain of TCR clone 139287 (TRBV6-1, TRBJ1-1)
CASSRQGNTEAFF

SEQ ID NO: 278575 - protein, 15 aa, Homo sapiens
  CDR3 for alpha chain variable domain of TCR clone 139288 (TRAV21, TRAJ24)
CAARSSTDSWGKLKF

SEQ ID NO: 278576 - protein, 13 aa, Homo sapiens
  CDR3 for beta chain variable domain of TCR clone 139288 (TRBV11-2, TRBJ2-5)
CPSSSTGEETQYF

SEQ ID NO: 278577 - protein, 14 aa, Homo sapiens
  CDR3 for alpha chain variable domain of TCR clone 139289 (TRAV29/DV5, TRAJ36)
CAARRKAGANNLFF

SEQ ID NO: 278578 - protein, 13 aa, Homo sapiens
  CDR3 for beta chain variable domain of TCR clone 139289 (TRBV12-4, TRBJ1-2)
CASSLRQGKGDTF

SEQ ID NO: 278579 - protein, 17 aa, Homo sapiens
  CDR3 for alpha chain variable domain of TCR clone 139290 (TRAV14/DV4, TRAJ56)
CAMREGSSFGANSKLTF

SEQ ID NO: 278580 - protein, 15 aa, Homo sapiens
  CDR3 for beta chain variable domain of TCR clone 139290 (TRBV7-6, TRBJ2-3)
CASSLGGGSADTQYF

SEQ ID NO: 278581 - protein, 13 aa, Homo sapiens
  CDR3 for alpha chain variable domain of TCR clone 139291 (TRAV8-3, TRAJ43)
CAVGPDNNDDMRF

SEQ ID NO: 278582 - protein, 12 aa, Homo sapiens
  CDR3 for beta chain variable domain of TCR clone 139291 (TRBV7-2, TRBJ1-6)
CASSLSSSPLHF

SEQ ID NO: 278583 - protein, 14 aa, Homo sapiens
  CDR3 for alpha chain variable domain of TCR clone 139292 (TRAV30, TRAJ26)
CGTEIVSYGQNFVF

SEQ ID NO: 278584 - protein, 15 aa, Homo sapiens
  CDR3 for beta chain variable domain of TCR clone 139292 (TRBV29-1, TRBJ2-7)
CSVEFFDRGSYEQYF

SEQ ID NO: 278585 - protein, 14 aa, Homo sapiens
  CDR3 for alpha chain variable domain of TCR clone 139293 (TRAV35, TRAJ44)
CAGRPSRTASELTF

SEQ ID NO: 278586 - protein, 13 aa, Homo sapiens
  CDR3 for beta chain variable domain of TCR clone 139293 (TRBV12-4, TRBJ1-5)
CASSPDRAQPQHF

SEQ ID NO: 278587 - protein, 19 aa, Homo sapiens
  CDR3 for alpha chain variable domain of TCR clone 139294 (TRAV17, TRAJ17)
CATDGRPGVIKAAGNKLTF

SEQ ID NO: 278588 - protein, 18 aa, Homo sapiens
  CDR3 for beta chain variable domain of TCR clone 139294 (TRBV28, TRBJ2-1)
CASSSTSGRANSYNEQFF

SEQ ID NO: 278589 - protein, 14 aa, Homo sapiens
  CDR3 for alpha chain variable domain of TCR clone 139295 (TRAV8-4, TRAJ37)
CAVSEPSNTGKIIF

SEQ ID NO: 278590 - protein, 14 aa, Homo sapiens
  CDR3 for beta chain variable domain of TCR clone 139295 (TRBV28, TRBJ2-1)
CAIHRTGARTEQFF

SEQ ID NO: 278591 - protein, 11 aa, Homo sapiens
  CDR3 for alpha chain variable domain of TCR clone 139296 (TRAV12-1, TRAJ15)
CVVNAGTALIF

SEQ ID NO: 278592 - protein, 14 aa, Homo sapiens
  CDR3 for beta chain variable domain of TCR clone 139296 (TRBV25-1, TRBJ1-1)
CASTHLGGNTEAFF

SEQ ID NO: 278593 - protein, 15 aa, Homo sapiens
  CDR3 for alpha chain variable domain of TCR clone 139297 (TRAV12-3, TRAJ6)
CAMSATTGGSYIPTF

SEQ ID NO: 278594 - protein, 14 aa, Homo sapiens
  CDR3 for beta chain variable domain of TCR clone 139297 (TRBV25-1, TRBJ1-1)
CASTHLGGNTEAFF

SEQ ID NO: 278595 - protein, 15 aa, Homo sapiens
  CDR3 for alpha chain variable domain of TCR clone 139298 (TRAV12-2, TRAJ20)
CAVKGGFGAGTTVTV

SEQ ID NO: 278596 - protein, 15 aa, Homo sapiens
  CDR3 for beta chain variable domain of TCR clone 139298 (TRBV6-3, TRBJ2-7)
CASSSPGTVFYEQYF

SEQ ID NO: 278597 - protein, 16 aa, Homo sapiens
  CDR3 for alpha chain variable domain of TCR clone 139299 (TRAV3, TRAJ10)
CAVRDMRAGGGNKLTS

SEQ ID NO: 278598 - protein, 13 aa, Homo sapiens
  CDR3 for beta chain variable domain of TCR clone 139299 (TRBV2, TRBJ1-1)
CARNPTGGFHAFF

SEQ ID NO: 278599 - protein, 14 aa, Homo sapiens
  CDR3 for alpha chain variable domain of TCR clone 139300 (TRAV12-1, TRAJ12)
CVVSRMDSSYKLIF

SEQ ID NO: 278600 - protein, 13 aa, Homo sapiens
  CDR3 for beta chain variable domain of TCR clone 139300 (TRBV20-1, TRBJ1-1)
CSARGGGNTETFF

SEQ ID NO: 278601 - protein, 20 aa, Homo sapiens
  CDR3 for alpha chain variable domain of TCR clone 139301 (TRAV12-2, TRAJ52)
SPVIQPPARAGGTSYGKLTF

SEQ ID NO: 278602 - protein, 16 aa, Homo sapiens
  CDR3 for beta chain variable domain of TCR clone 139301 (TRBV15, TRBJ1-2)
CSTSRGPRTGGGGYTF

SEQ ID NO: 278603 - protein, 13 aa, Homo sapiens
  CDR3 for alpha chain variable domain of TCR clone 139302 (TRAV35, TRAJ33)
CAGLMDSNYQLIW

SEQ ID NO: 278604 - protein, 15 aa, Homo sapiens
  CDR3 for beta chain variable domain of TCR clone 139302 (TRBV4-1, TRBJ2-5)
CASSQWDLYQETQYF

SEQ ID NO: 278605 - protein, 16 aa, Homo sapiens
  CDR3 for alpha chain variable domain of TCR clone 139303 (TRAV3, TRAJ10)
CAVRDMRAGGGNKLTF

SEQ ID NO: 278606 - protein, 13 aa, Homo sapiens
  CDR3 for beta chain variable domain of TCR clone 139303 (TRBV6-1, TRBJ1-1)
CASSRQGNTEDFF

SEQ ID NO: 278607 - protein, 13 aa, Homo sapiens
  CDR3 for alpha chain variable domain of TCR clone 139304 (TRAV2, TRAJ29)
CAAGNSGNTPLVF

SEQ ID NO: 278608 - protein, 16 aa, Homo sapiens
  CDR3 for beta chain variable domain of TCR clone 139304 (TRBV7-9, TRBJ1-2)
CASSPGGGAITYGYTF

SEQ ID NO: 278609 - protein, 14 aa, Homo sapiens
  CDR3 for alpha chain variable domain of TCR clone 139305 (TRAV3, TRAJ6)
CAVRDSRRKLHTYI

SEQ ID NO: 278610 - protein, 15 aa, Homo sapiens
  CDR3 for beta chain variable domain of TCR clone 139305 (TRBV18, TRBJ2-7)
CASTPLQGRTYEQYF

SEQ ID NO: 278611 - protein, 16 aa, Homo sapiens
  CDR3 for alpha chain variable domain of TCR clone 139306 (TRAV30, TRAJ24)
CGTEIVDADSWGKFQF

SEQ ID NO: 278612 - protein, 14 aa, Homo sapiens
  CDR3 for beta chain variable domain of TCR clone 139306 (TRBV7-2, TRBJ1-1)
CASSLLTGTTEAFF

SEQ ID NO: 278613 - protein, 12 aa, Homo sapiens
  CDR3 for alpha chain variable domain of TCR clone 139307 (TRAV1-1, TRAJ39)
CAVPVVGNMLTF

SEQ ID NO: 278614 - protein, 13 aa, Homo sapiens
  CDR3 for beta chain variable domain of TCR clone 139307 (TRBV7-9, TRBJ2-1)
CASSSINFNEQFF

SEQ ID NO: 278615 - protein, 17 aa, Homo sapiens
  CDR3 for alpha chain variable domain of TCR clone 139308 (TRAV3, TRAJ42)
CAVRDRDYGGSQGNLIF

SEQ ID NO: 278616 - protein, 18 aa, Homo sapiens
  CDR3 for beta chain variable domain of TCR clone 139308 (TRBV12-4, TRBJ2-4)
CASSRTGAVDVAKNIQYF

SEQ ID NO: 278617 - protein, 14 aa, Homo sapiens
  CDR3 for alpha chain variable domain of TCR clone 139309 (TRAV36/DV7, TRAJ54)
CCGETGSGSQKLVF

SEQ ID NO: 278618 - protein, 14 aa, Homo sapiens
  CDR3 for beta chain variable domain of TCR clone 139309 (TRBV4-3, TRBJ2-2)
CASSQGHVTGELFF

SEQ ID NO: 278619 - protein, 13 aa, Homo sapiens
  CDR3 for alpha chain variable domain of TCR clone 139310 (TRAV1-2, TRAJ12)
CAVSMDSSYKLVF

SEQ ID NO: 278620 - protein, 15 aa, Homo sapiens
  CDR3 for beta chain variable domain of TCR clone 139310 (TRBV4-3, TRBJ2-7)
CASSQDLGSSYEQYF

SEQ ID NO: 278621 - protein, 18 aa, Homo sapiens
  CDR3 for alpha chain variable domain of TCR clone 139311 (TRAV21, TRAJ52)
CAVRPSPADGTSYGKLTF

SEQ ID NO: 278622 - protein, 17 aa, Homo sapiens
  CDR3 for beta chain variable domain of TCR clone 139311 (TRBV13, TRBJ2-3)
CASSLSRVAGGGNTQYF

SEQ ID NO: 278623 - protein, 14 aa, Homo sapiens
  CDR3 for alpha chain variable domain of TCR clone 139312 (TRAV29/DV5, TRAJ45)
CAASFRGGSDGLTF

SEQ ID NO: 278624 - protein, 15 aa, Homo sapiens
  CDR3 for beta chain variable domain of TCR clone 139312 (TRBV4-1, TRBJ2-7)
CASSQQGQGFDEQYF

SEQ ID NO: 278625 - protein, 15 aa, Homo sapiens
  CDR3 for alpha chain variable domain of TCR clone 139313 (TRAV8-3, TRAJ45)
CASSYSGGGADGLTF

SEQ ID NO: 278626 - protein, 17 aa, Homo sapiens
  CDR3 for beta chain variable domain of TCR clone 139313 (TRBV6-1, TRBJ1-5)
CASSEAEFIRARQPQHF

SEQ ID NO: 278627 - protein, 15 aa, Homo sapiens
  CDR3 for alpha chain variable domain of TCR clone 139314 (TRAV13-1, TRAJ17)
CAASIERAAGNKLTF

SEQ ID NO: 278628 - protein, 13 aa, Homo sapiens
  CDR3 for beta chain variable domain of TCR clone 139314 (TRBV7-7, TRBJ2-3)
WASSLSRADTQYF

SEQ ID NO: 278629 - protein, 12 aa, Homo sapiens
  CDR3 for alpha chain variable domain of TCR clone 139315 (TRAV12-1, TRAJ40)
CVFYSGTYKNIF

SEQ ID NO: 278630 - protein, 18 aa, Homo sapiens
  CDR3 for beta chain variable domain of TCR clone 139315 (TRBV12-4, TRBJ2-2)
CASSLVAGTRGRTGELFS

SEQ ID NO: 278631 - protein, 12 aa, Homo sapiens
  CDR3 for alpha chain variable domain of TCR clone 139316 (TRAV27, TRAJ9)
CAGESGGFKTIF

SEQ ID NO: 278632 - protein, 14 aa, Homo sapiens
  CDR3 for beta chain variable domain of TCR clone 139316 (TRBV5-1, TRBJ2-7)
CASSRGESLYEQYF

SEQ ID NO: 278633 - protein, 16 aa, Homo sapiens
  CDR3 for alpha chain variable domain of TCR clone 139317 (TRAV3, TRAJ37)
CAVRPHGSGNTGKLIF

SEQ ID NO: 278634 - protein, 15 aa, Homo sapiens
  CDR3 for beta chain variable domain of TCR clone 139317 (TRBV5-1, TRBJ2-6)
CASQQDSSGANVLTF

SEQ ID NO: 278635 - protein, 13 aa, Homo sapiens
  CDR3 for alpha chain variable domain of TCR clone 139318 (TRAV21, TRAJ56)
CAALTGANSKLTF

SEQ ID NO: 278636 - protein, 15 aa, Homo sapiens
  CDR3 for beta chain variable domain of TCR clone 139318 (TRBV7-9, TRBJ1-6)
CASSSPGRGNSPLHF

SEQ ID NO: 278637 - protein, 14 aa, Homo sapiens
  CDR3 for alpha chain variable domain of TCR clone 139319 (TRAV12-3, TRAJ20)
CAMSARRGDYKLSF

SEQ ID NO: 278638 - protein, 13 aa, Homo sapiens
  CDR3 for beta chain variable domain of TCR clone 139319 (TRBV19, TRBJ1-2)
CASSVPGQDGYTF

SEQ ID NO: 278639 - protein, 14 aa, Homo sapiens
  CDR3 for alpha chain variable domain of TCR clone 139320 (TRAV12-2, TRAJ40)
CAVKIPSGTYKYIF

SEQ ID NO: 278640 - protein, 13 aa, Homo sapiens
  CDR3 for beta chain variable domain of TCR clone 139320 (TRBV19, TRBJ2-2)
CASSIWSTGELFF

SEQ ID NO: 278641 - protein, 15 aa, Homo sapiens
  CDR3 for alpha chain variable domain of TCR clone 139321 (TRAV8-1, TRAJ23)
CAVNSHYNQGGKLIF

SEQ ID NO: 278642 - protein, 15 aa, Homo sapiens
  CDR3 for beta chain variable domain of TCR clone 139321 (TRBV11-2, TRBJ1-6)
CGSTLRGTGNSPLHF

SEQ ID NO: 278643 - protein, 15 aa, Homo sapiens
  CDR3 for alpha chain variable domain of TCR clone 139322 (TRAV12-1, TRAJ41)
CVVNSRTGSGYALNF

SEQ ID NO: 278644 - protein, 11 aa, Homo sapiens
  CDR3 for beta chain variable domain of TCR clone 139322 (TRBV6-4, TRBJ2-1)
CASSDSYAHFF

SEQ ID NO: 278645 - protein, 14 aa, Homo sapiens
  CDR3 for alpha chain variable domain of TCR clone 139323 (TRAV12-2, TRAJ17)
CAVLFKAAANKPTF

SEQ ID NO: 278646 - protein, 17 aa, Homo sapiens
  CDR3 for beta chain variable domain of TCR clone 139323 (TRBV20-1, TRBJ2-2)
CSASGSGQGGLTGELFF

SEQ ID NO: 278647 - protein, 13 aa, Homo sapiens
  CDR3 for alpha chain variable domain of TCR clone 139324 (TRAV16, TRAJ11)
CALTQSGYSTLTF

SEQ ID NO: 278648 - protein, 14 aa, Homo sapiens
  CDR3 for beta chain variable domain of TCR clone 139324 (TRBV19, TRBJ2-7)
CASSTPRSSYEQYF

SEQ ID NO: 278649 - protein, 12 aa, Homo sapiens
  CDR3 for alpha chain variable domain of TCR clone 139325 (TRAV13-2, TRAJ23)
CAERHRGGKLIF

SEQ ID NO: 278650 - protein, 16 aa, Homo sapiens
  CDR3 for beta chain variable domain of TCR clone 139325 (TRBV20-1, TRBJ1-4)
CSAPGQRLLTNEKLFF

SEQ ID NO: 278651 - protein, 14 aa, Homo sapiens
  CDR3 for alpha chain variable domain of TCR clone 139326 (TRAV12-2, TRAJ13)
CAVKKTGGYQKVTF

SEQ ID NO: 278652 - protein, 14 aa, Homo sapiens
  CDR3 for beta chain variable domain of TCR clone 139326 (TRBV25-1, TRBJ1-1)
CASTHLGVNTEAFF

SEQ ID NO: 278653 - protein, 15 aa, Homo sapiens
  CDR3 for alpha chain variable domain of TCR clone 139327 (TRAV26-2, TRAJ54)
CILRDVGQGAQKLVF

SEQ ID NO: 278654 - protein, 13 aa, Homo sapiens
  CDR3 for beta chain variable domain of TCR clone 139327 (TRBV7-9, TRBJ1-1)
CASSLAGVTEACF

SEQ ID NO: 278655 - protein, 13 aa, Homo sapiens
  CDR3 for alpha chain variable domain of TCR clone 139328 (TRAV17, TRAJ5)
CAPMDTGRRALTF

SEQ ID NO: 278656 - protein, 15 aa, Homo sapiens
  CDR3 for beta chain variable domain of TCR clone 139328 (TRBV6-6, TRBJ2-5)
CACSPGGGLEETQYF

SEQ ID NO: 278657 - protein, 11 aa, Homo sapiens
  CDR3 for alpha chain variable domain of TCR clone 139329 (TRAV12-1, TRAJ43)
CVEYDNNDMRF

SEQ ID NO: 278658 - protein, 16 aa, Homo sapiens
  CDR3 for beta chain variable domain of TCR clone 139329 (TRBV3-1, TRBJ2-5)
CASSPGQFNGFGTQYF

SEQ ID NO: 278659 - protein, 14 aa, Homo sapiens
  CDR3 for alpha chain variable domain of TCR clone 139330 (TRAV9-2, TRAJ39)
CALYIYNAGNMLTF

SEQ ID NO: 278660 - protein, 11 aa, Homo sapiens
  CDR3 for beta chain variable domain of TCR clone 139330 (TRBV7-8, TRBJ2-7)
CSSLGDREQYF

SEQ ID NO: 278661 - protein, 14 aa, Homo sapiens
  CDR3 for alpha chain variable domain of TCR clone 139331 (TRAV23/DV6, TRAJ8)
CAASKATGFQKLVF

SEQ ID NO: 278662 - protein, 13 aa, Homo sapiens
  CDR3 for beta chain variable domain of TCR clone 139331 (TRBV20-1, TRBJ1-6)
CSAPLGVGSPLHF

SEQ ID NO: 278663 - protein, 14 aa, Homo sapiens
  CDR3 for alpha chain variable domain of TCR clone 139332 (TRAV35, TRAJ22)
CAGLRPGPARQLTF

SEQ ID NO: 278664 - protein, 15 aa, Homo sapiens
  CDR3 for beta chain variable domain of TCR clone 139332 (TRBV12-4, TRBJ2-5)
CASSPPTGVQETQYF

SEQ ID NO: 278665 - protein, 15 aa, Homo sapiens
  CDR3 for alpha chain variable domain of TCR clone 139333 (TRAV26-1, TRAJ29)
CIVRVEGSGNTPLVF

SEQ ID NO: 278666 - protein, 14 aa, Homo sapiens
  CDR3 for beta chain variable domain of TCR clone 139333 (TRBV18, TRBJ2-5)
CASSPGVSKDTQYF

SEQ ID NO: 278667 - protein, 14 aa, Homo sapiens
  CDR3 for alpha chain variable domain of TCR clone 139334 (TRAV13-1, TRAJ35)
CAASKGGFWNVMHF

SEQ ID NO: 278668 - protein, 13 aa, Homo sapiens
  CDR3 for beta chain variable domain of TCR clone 139334 (TRBV7-3, TRBJ1-1)
CASSQDWGAEAFF

SEQ ID NO: 278669 - protein, 14 aa, Homo sapiens
  CDR3 for alpha chain variable domain of TCR clone 139335 (TRAV1-2, TRAJ16)
CAVNRFSDGQKLLF

SEQ ID NO: 278670 - protein, 14 aa, Homo sapiens
  CDR3 for beta chain variable domain of TCR clone 139335 (TRBV4-1, TRBJ2-2)
CASSQAVNTWELFF

SEQ ID NO: 278671 - protein, 15 aa, Homo sapiens
  CDR3 for alpha chain variable domain of TCR clone 139336 (TRAV1-2, TRAJ28)
CAVRYSVAGSYQLTF

SEQ ID NO: 278672 - protein, 13 aa, Homo sapiens
  CDR3 for beta chain variable domain of TCR clone 139336 (TRBV20-1, TRBJ2-7)
CSATHTSGYEQYF

SEQ ID NO: 278673 - protein, 15 aa, Homo sapiens
  CDR3 for alpha chain variable domain of TCR clone 139337 (TRAV35, TRAJ33)
CAGQPPRYSNYQLIW

SEQ ID NO: 278674 - protein, 15 aa, Homo sapiens
  CDR3 for beta chain variable domain of TCR clone 139337 (TRBV2, TRBJ2-1)
CASEGRVSAYNEQFF

SEQ ID NO: 278675 - protein, 13 aa, Homo sapiens
  CDR3 for alpha chain variable domain of TCR clone 139338 (TRAV2, TRAJ15)
CAVASQAGTALIF

SEQ ID NO: 278676 - protein, 15 aa, Homo sapiens
  CDR3 for beta chain variable domain of TCR clone 139338 (TRBV28, TRBJ2-1)
CASRVGLDEYNEQFF

SEQ ID NO: 278677 - protein, 16 aa, Homo sapiens
  CDR3 for alpha chain variable domain of TCR clone 139339 (TRAV30, TRAJ24)
CGTEIVDADGWGKFQF

SEQ ID NO: 278678 - protein, 14 aa, Homo sapiens
  CDR3 for beta chain variable domain of TCR clone 139339 (TRBV11-2, TRBJ2-5)
CASSRTGGIETQYF

SEQ ID NO: 278679 - protein, 15 aa, Homo sapiens
  CDR3 for alpha chain variable domain of TCR clone 139340 (TRAV12-1, TRAJ43)
CVVNRGRYNNNDMRF

SEQ ID NO: 278680 - protein, 16 aa, Homo sapiens
  CDR3 for beta chain variable domain of TCR clone 139340 (TRBV19, TRBJ2-3)
CASSLYTTGIGDTQYF

SEQ ID NO: 278681 - protein, 21 aa, Homo sapiens
  CDR3 for alpha chain variable domain of TCR clone 139341 (TRAV1-1, TRAJ22)
CLLLLRCERSGSSGSARQLTF

SEQ ID NO: 278682 - protein, 14 aa, Homo sapiens
  CDR3 for beta chain variable domain of TCR clone 139341 (TRBV12-5, TRBJ2-5)
CASGSRTHQETQYF

SEQ ID NO: 278683 - protein, 14 aa, Homo sapiens
  CDR3 for alpha chain variable domain of TCR clone 139342 (TRAV12-3, TRAJ7)
CAMSEIGGNNRLAF

SEQ ID NO: 278684 - protein, 11 aa, Homo sapiens
  CDR3 for beta chain variable domain of TCR clone 139342 (TRBV11-2, TRBJ2-2)
CASSLPGELFF

SEQ ID NO: 278685 - protein, 15 aa, Homo sapiens
  CDR3 for alpha chain variable domain of TCR clone 139343 (TRAV26-1, TRAJ29)
CIVRVEGSGNKPLAF

SEQ ID NO: 278686 - protein, 15 aa, Homo sapiens
  CDR3 for beta chain variable domain of TCR clone 139343 (TRBV7-9, TRBJ1-5)
CASSQGHQPNQPQHF

SEQ ID NO: 278687 - protein, 16 aa, Homo sapiens
  CDR3 for alpha chain variable domain of TCR clone 139344 (TRAV8-3, TRAJ8)
CAVPRDGNTGFQKLVF

SEQ ID NO: 278688 - protein, 15 aa, Homo sapiens
  CDR3 for beta chain variable domain of TCR clone 139344 (TRBV7-8, TRBJ2-1)
CASSLADSLYNEQFF

SEQ ID NO: 278689 - protein, 14 aa, Homo sapiens
  CDR3 for alpha chain variable domain of TCR clone 139345 (TRAV12-3, TRAJ10)
SHLPLTGGGNKLTF

SEQ ID NO: 278690 - protein, 15 aa, Homo sapiens
  CDR3 for beta chain variable domain of TCR clone 139345 (TRBV20-1, TRBJ2-7)
CSARVPAAYFYEQYF

SEQ ID NO: 278691 - protein, 12 aa, Homo sapiens
  CDR3 for alpha chain variable domain of TCR clone 139346 (TRAV12-1, TRAJ40)
CVFYSGTYKYIF

SEQ ID NO: 278692 - protein, 18 aa, Homo sapiens
  CDR3 for beta chain variable domain of TCR clone 139346 (TRBV12-4, TRBJ2-2)
CASGLVAGTRGRTGELFF

SEQ ID NO: 278693 - protein, 15 aa, Homo sapiens
  CDR3 for alpha chain variable domain of TCR clone 139347 (TRAV13-1, TRAJ45)
SAASGSGGGADGLTF

SEQ ID NO: 278694 - protein, 15 aa, Homo sapiens
  CDR3 for beta chain variable domain of TCR clone 139347 (TRBV3-1, TRBJ2-5)
CASSANLGGPETQYF

SEQ ID NO: 278695 - protein, 10 aa, Homo sapiens
  CDR3 for alpha chain variable domain of TCR clone 139348 (TRAV12-3, TRAJ49)
CAMTGDQFYF

SEQ ID NO: 278696 - protein, 13 aa, Homo sapiens
  CDR3 for beta chain variable domain of TCR clone 139348 (TRBV12-4, TRBJ1-1)
CASSPGTGFEAFF

SEQ ID NO: 278697 - protein, 16 aa, Homo sapiens
  CDR3 for alpha chain variable domain of TCR clone 139349 (TRAV13-1, TRAJ35)
CAASKGGFGNVRHCVS

SEQ ID NO: 278698 - protein, 13 aa, Homo sapiens
  CDR3 for beta chain variable domain of TCR clone 139349 (TRBV7-3, TRBJ1-1)
CASSQDWGAEAFF

SEQ ID NO: 278699 - protein, 17 aa, Homo sapiens
  CDR3 for alpha chain variable domain of TCR clone 139350 (TRAV12-3, TRAJ6)
CAMSARGGAGGSSIPTF

SEQ ID NO: 278700 - protein, 12 aa, Homo sapiens
  CDR3 for beta chain variable domain of TCR clone 139350 (TRBV12-4, TRBJ2-3)
CASSTLPDTQYF

SEQ ID NO: 278701 - protein, 22 aa, Homo sapiens
  CDR3 for alpha chain variable domain of TCR clone 139351 (TRAV3, )
CAVRYCLNAGSNHIQNPDPAVY

SEQ ID NO: 278702 - protein, 19 aa, Homo sapiens
  CDR3 for beta chain variable domain of TCR clone 139351 (TRBV7-2, TRBJ2-3)
CASSFLSRNWGGGTDTQYF

SEQ ID NO: 278703 - protein, 18 aa, Homo sapiens
  CDR3 for alpha chain variable domain of TCR clone 139352 (TRAV13-1, TRAJ52)
CAAKNPNARGTSYGKLTF

SEQ ID NO: 278704 - protein, 15 aa, Homo sapiens
  CDR3 for beta chain variable domain of TCR clone 139352 (TRBV6-1, TRBJ2-3)
CASSERGGITDTQYF

SEQ ID NO: 278705 - protein, 14 aa, Homo sapiens
  CDR3 for alpha chain variable domain of TCR clone 139353 (TRAV13-1, TRAJ13)
CAASRVGSYQKVTF

SEQ ID NO: 278706 - protein, 14 aa, Homo sapiens
  CDR3 for beta chain variable domain of TCR clone 139353 (TRBV5-1, TRBJ2-7)
CASSATGGYDEQYF

SEQ ID NO: 278707 - protein, 12 aa, Homo sapiens
  CDR3 for alpha chain variable domain of TCR clone 139354 (TRAV25, TRAJ38)
CAGTGNNRKLIW

SEQ ID NO: 278708 - protein, 15 aa, Homo sapiens
  CDR3 for beta chain variable domain of TCR clone 139354 (TRBV19, TRBJ1-1)
CASTSGQIQNTEAFF

SEQ ID NO: 278709 - protein, 12 aa, Homo sapiens
  CDR3 for alpha chain variable domain of TCR clone 139355 (TRAV3, TRAJ21)
CAVQYNFNKFYF

SEQ ID NO: 278710 - protein, 14 aa, Homo sapiens
  CDR3 for beta chain variable domain of TCR clone 139355 (TRBV7-8, TRBJ2-3)
CASSLEAGTDTQYF

SEQ ID NO: 278711 - protein, 14 aa, Homo sapiens
  CDR3 for alpha chain variable domain of TCR clone 139356 (TRAV1-2, TRAJ16)
CAVNRFSVGQKLLF

SEQ ID NO: 278712 - protein, 13 aa, Homo sapiens
  CDR3 for beta chain variable domain of TCR clone 139356 (TRBV10-2, TRBJ2-7)
CASGASGGYEQYF

SEQ ID NO: 278713 - protein, 17 aa, Homo sapiens
  CDR3 for alpha chain variable domain of TCR clone 139357 (TRAV3, TRAJ6)
CAVRDGPRAGGSYIPPF

SEQ ID NO: 278714 - protein, 13 aa, Homo sapiens
  CDR3 for beta chain variable domain of TCR clone 139357 (TRBV7-3, TRBJ1-1)
CASSQDWGAEAFF

SEQ ID NO: 278715 - protein, 14 aa, Homo sapiens
  CDR3 for alpha chain variable domain of TCR clone 139358 (TRAV12-1, TRAJ9)
CVVTGDTGGFKTIF

SEQ ID NO: 278716 - protein, 16 aa, Homo sapiens
  CDR3 for beta chain variable domain of TCR clone 139358 (TRBV29-1, TRBJ1-2)
CSVEAKRDIANYGYTF

SEQ ID NO: 278717 - protein, 16 aa, Homo sapiens
  CDR3 for alpha chain variable domain of TCR clone 139359 (TRAV26-1, TRAJ50)
CIVRVEAGTSYDKVRF

SEQ ID NO: 278718 - protein, 13 aa, Homo sapiens
  CDR3 for beta chain variable domain of TCR clone 139359 (TRBV25-1, TRBJ1-2)
CASSENMGRGYTF

SEQ ID NO: 278719 - protein, 13 aa, Homo sapiens
  CDR3 for alpha chain variable domain of TCR clone 139360 (TRAV8-2, TRAJ13)
GVVSDLRYQKVTF

SEQ ID NO: 278720 - protein, 14 aa, Homo sapiens
  CDR3 for beta chain variable domain of TCR clone 139360 (TRBV25-1, TRBJ1-1)
CASTHLGGNTEAFF

SEQ ID NO: 278721 - protein, 14 aa, Homo sapiens
  CDR3 for alpha chain variable domain of TCR clone 139361 (TRAV26-1, TRAJ45)
CIVRVVGGADGLTF

SEQ ID NO: 278722 - protein, 16 aa, Homo sapiens
  CDR3 for beta chain variable domain of TCR clone 139361 (TRBV7-9, TRBJ1-1)
CASSLTQVRSNTEVFF

SEQ ID NO: 278723 - protein, 15 aa, Homo sapiens
  CDR3 for alpha chain variable domain of TCR clone 139362 (TRAV17, TRAJ23)
CATDAEDNEGGKLIF

SEQ ID NO: 278724 - protein, 14 aa, Homo sapiens
  CDR3 for beta chain variable domain of TCR clone 139362 (TRBV6-1, TRBJ1-3)
CASVQGGGGNTIYF

SEQ ID NO: 278725 - protein, 13 aa, Homo sapiens
  CDR3 for alpha chain variable domain of TCR clone 139363 (TRAV29/DV5, TRAJ31)
CAASRNNNARLMF

SEQ ID NO: 278726 - protein, 12 aa, Homo sapiens
  CDR3 for beta chain variable domain of TCR clone 139363 (TRBV14, TRBJ2-7)
CASSLYNDEQYF

SEQ ID NO: 278727 - protein, 15 aa, Homo sapiens
  CDR3 for alpha chain variable domain of TCR clone 139364 (TRAV8-2, TRAJ40)
CVALGTTSGTYKYIF

SEQ ID NO: 278728 - protein, 14 aa, Homo sapiens
  CDR3 for beta chain variable domain of TCR clone 139364 (TRBV5-1, TRBJ1-4)
CASSLDKTHEKLFF

SEQ ID NO: 278729 - protein, 12 aa, Homo sapiens
  CDR3 for alpha chain variable domain of TCR clone 139365 (TRAV12-2, TRAJ4)
GWPEGGYNKLIF

SEQ ID NO: 278730 - protein, 12 aa, Homo sapiens
  CDR3 for beta chain variable domain of TCR clone 139365 (TRBV6-5, TRBJ2-5)
CASSEGSETQYF

SEQ ID NO: 278731 - protein, 14 aa, Homo sapiens
  CDR3 for alpha chain variable domain of TCR clone 139366 (TRAV2, TRAJ9)
CAVEDRGGGFKTIF

SEQ ID NO: 278732 - protein, 15 aa, Homo sapiens
  CDR3 for beta chain variable domain of TCR clone 139366 (TRBV19, TRBJ2-1)
CASSSPGVPLDEQFF

SEQ ID NO: 278733 - protein, 17 aa, Homo sapiens
  CDR3 for alpha chain variable domain of TCR clone 139367 (TRAV3, TRAJ42)
CAVRDRDYGGSQGNLIF

SEQ ID NO: 278734 - protein, 14 aa, Homo sapiens
  CDR3 for beta chain variable domain of TCR clone 139367 (TRBV4-2, TRBJ2-1)
CASRLDRAYNEQFF

SEQ ID NO: 278735 - protein, 11 aa, Homo sapiens
  CDR3 for alpha chain variable domain of TCR clone 139368 (TRAV2, TRAJ13)
CASVGYQKVTF

SEQ ID NO: 278736 - protein, 16 aa, Homo sapiens
  CDR3 for beta chain variable domain of TCR clone 139368 (TRBV6-1, TRBJ2-5)
CASSETLDRGADTQYF

SEQ ID NO: 278737 - protein, 15 aa, Homo sapiens
  CDR3 for alpha chain variable domain of TCR clone 139369 (TRAV8-3, TRAJ35)
CAVGATIGFGNVLHC

SEQ ID NO: 278738 - protein, 14 aa, Homo sapiens
  CDR3 for beta chain variable domain of TCR clone 139369 (TRBV25-1, TRBJ1-1)
CASTHLGGNTEAFF

SEQ ID NO: 278739 - protein, 11 aa, Homo sapiens
  CDR3 for alpha chain variable domain of TCR clone 139370 (TRAV2, TRAJ13)
CASGGYQKVTF

SEQ ID NO: 278740 - protein, 15 aa, Homo sapiens
  CDR3 for beta chain variable domain of TCR clone 139370 (TRBV5-4, TRBJ2-2)
CASSRRGGGTGELFF

SEQ ID NO: 278741 - protein, 13 aa, Homo sapiens
  CDR3 for alpha chain variable domain of TCR clone 139371 (TRAV21, TRAJ27)
CAALNTTAGNSTF

SEQ ID NO: 278742 - protein, 14 aa, Homo sapiens
  CDR3 for beta chain variable domain of TCR clone 139371 (TRBV27, TRBJ1-1)
CASSLLSGLSEAFC

SEQ ID NO: 278743 - protein, 15 aa, Homo sapiens
  CDR3 for alpha chain variable domain of TCR clone 139372 (TRAV26-1, TRAJ28)
CIVRVAGAGSYQLTF

SEQ ID NO: 278744 - protein, 19 aa, Homo sapiens
  CDR3 for beta chain variable domain of TCR clone 139372 (TRBV7-3, TRBJ2-7)
CVSSLTGVAGGWPSYEQYF

SEQ ID NO: 278745 - protein, 14 aa, Homo sapiens
  CDR3 for alpha chain variable domain of TCR clone 139373 (TRAV36/DV7, TRAJ13)
WGSGENGGDQKVTF

SEQ ID NO: 278746 - protein, 15 aa, Homo sapiens
  CDR3 for beta chain variable domain of TCR clone 139373 (TRBV19, TRBJ2-1)
CASSTGTSSYNEQFF

SEQ ID NO: 278747 - protein, 12 aa, Homo sapiens
  CDR3 for alpha chain variable domain of TCR clone 139374 (TRAV12-1, TRAJ40)
CVVYSGTYKYIF

SEQ ID NO: 278748 - protein, 15 aa, Homo sapiens
  CDR3 for beta chain variable domain of TCR clone 139374 (TRBV4-1, TRBJ1-1)
CASSYSGTGGTEAFF

SEQ ID NO: 278749 - protein, 20 aa, Homo sapiens
  CDR3 for alpha chain variable domain of TCR clone 139375 (TRAV12-3, TRAJ41)
SLFIRDSQPSDSATPEALNF

SEQ ID NO: 278750 - protein, 13 aa, Homo sapiens
  CDR3 for beta chain variable domain of TCR clone 139375 (TRBV19, TRBJ1-2)
CASSVPGQDGYTF

SEQ ID NO: 278751 - protein, 14 aa, Homo sapiens
  CDR3 for alpha chain variable domain of TCR clone 139376 (TRAV12-3, TRAJ6)
CEMSATGGSYIPTF

SEQ ID NO: 278752 - protein, 16 aa, Homo sapiens
  CDR3 for beta chain variable domain of TCR clone 139376 (TRBV4-2, TRBJ2-1)
CASSPRAGQGANEQFF

SEQ ID NO: 278753 - protein, 16 aa, Homo sapiens
  CDR3 for alpha chain variable domain of TCR clone 139377 (TRAV8-4, TRAJ9)
CAVTFNSGGFKNYLWS

SEQ ID NO: 278754 - protein, 15 aa, Homo sapiens
  CDR3 for beta chain variable domain of TCR clone 139377 (TRBV7-9, TRBJ2-2)
CASSPETGAGGELFF

SEQ ID NO: 278755 - protein, 18 aa, Homo sapiens
  CDR3 for alpha chain variable domain of TCR clone 139378 (TRAV12-2, )
CAVEDIQNPDPAVYQLRD

SEQ ID NO: 278756 - protein, 15 aa, Homo sapiens
  CDR3 for beta chain variable domain of TCR clone 139378 (TRBV7-9, TRBJ2-3)
CASSHGDRVPDTQYF

SEQ ID NO: 278757 - protein, 11 aa, Homo sapiens
  CDR3 for alpha chain variable domain of TCR clone 139379 (TRAV12-2, TRAJ31)
CAVTRWARPMF

SEQ ID NO: 278758 - protein, 17 aa, Homo sapiens
  CDR3 for beta chain variable domain of TCR clone 139379 (TRBV4-1, TRBJ2-7)
CASSQPGTGVNSYEQYF

SEQ ID NO: 278759 - protein, 11 aa, Homo sapiens
  CDR3 for alpha chain variable domain of TCR clone 139380 (TRAV21, TRAJ48)
CAVDGNEKLTF

SEQ ID NO: 278760 - protein, 16 aa, Homo sapiens
  CDR3 for beta chain variable domain of TCR clone 139380 (TRBV12-4, TRBJ1-5)
CASSSGPRGSNQPQDF

SEQ ID NO: 278761 - protein, 13 aa, Homo sapiens
  CDR3 for alpha chain variable domain of TCR clone 139381 (TRAV25, TRAJ24)
CAGGTDSWEKFQF

SEQ ID NO: 278762 - protein, 18 aa, Homo sapiens
  CDR3 for beta chain variable domain of TCR clone 139381 (TRBV23-1, TRBJ2-1)
CASGMFRLALSSYNEQFF

SEQ ID NO: 278763 - protein, 13 aa, Homo sapiens
  CDR3 for alpha chain variable domain of TCR clone 139382 (TRAV12-2, TRAJ18)
CAVRGSTLGRLYF

SEQ ID NO: 278764 - protein, 15 aa, Homo sapiens
  CDR3 for beta chain variable domain of TCR clone 139382 (TRBV5-1, TRBJ2-5)
CASSLGLAEQETQYF

SEQ ID NO: 278765 - protein, 18 aa, Homo sapiens
  CDR3 for alpha chain variable domain of TCR clone 139383 (TRAV13-1, TRAJ52)
CAASKRSACGTSYGKLTF

SEQ ID NO: 278766 - protein, 12 aa, Homo sapiens
  CDR3 for beta chain variable domain of TCR clone 139383 (TRBV29-1, TRBJ2-3)
CSVTGGADTQYF

SEQ ID NO: 278767 - protein, 14 aa, Homo sapiens
  CDR3 for alpha chain variable domain of TCR clone 139384 (TRAV12-3, TRAJ9)
RAMSPNTGGFKTIF

SEQ ID NO: 278768 - protein, 12 aa, Homo sapiens
  CDR3 for beta chain variable domain of TCR clone 139384 (TRBV11-2, TRBJ2-2)
CASSLGGGELFF

SEQ ID NO: 278769 - protein, 12 aa, Homo sapiens
  CDR3 for alpha chain variable domain of TCR clone 139385 (TRAV27, TRAJ35)
CAGADFGNVLHC

SEQ ID NO: 278770 - protein, 13 aa, Homo sapiens
  CDR3 for beta chain variable domain of TCR clone 139385 (TRBV4-1, TRBJ2-2)
CASSQENTGELFF

SEQ ID NO: 278771 - protein, 14 aa, Homo sapiens
  CDR3 for alpha chain variable domain of TCR clone 139386 (TRAV3, TRAJ5)
CAERQENGQESTYF

SEQ ID NO: 278772 - protein, 15 aa, Homo sapiens
  CDR3 for beta chain variable domain of TCR clone 139386 (TRBV7-8, TRBJ2-1)
CASSLADSLYNEQFF

SEQ ID NO: 278773 - protein, 14 aa, Homo sapiens
  CDR3 for alpha chain variable domain of TCR clone 139387 (TRAV1-2, TRAJ16)
CAVNRLSDGQKLLF

SEQ ID NO: 278774 - protein, 16 aa, Homo sapiens
  CDR3 for beta chain variable domain of TCR clone 139387 (TRBV11-2, TRBJ2-1)
CASSFGGSFVYNEQFF

SEQ ID NO: 278775 - protein, 15 aa, Homo sapiens
  CDR3 for alpha chain variable domain of TCR clone 139388 (TRAV16, TRAJ39)
CALNPSNNAGNMLTF

SEQ ID NO: 278776 - protein, 14 aa, Homo sapiens
  CDR3 for beta chain variable domain of TCR clone 139388 (TRBV7-7, TRBJ2-7)
CASSPGGPTYEQYF

SEQ ID NO: 278777 - protein, 13 aa, Homo sapiens
  CDR3 for alpha chain variable domain of TCR clone 139389 (TRAV26-1, )
CIVSHRVEGLWNQ

SEQ ID NO: 278778 - protein, 14 aa, Homo sapiens
  CDR3 for beta chain variable domain of TCR clone 139389 (TRBV20-1, TRBJ2-7)
RSAWTALSSYEQYF

SEQ ID NO: 278779 - protein, 14 aa, Homo sapiens
  CDR3 for alpha chain variable domain of TCR clone 139390 (TRAV8-4, TRAJ5)
CAVYTDTGRRALTF

SEQ ID NO: 278780 - protein, 14 aa, Homo sapiens
  CDR3 for beta chain variable domain of TCR clone 139390 (TRBV5-1, TRBJ2-2)
CASSLGGGSGELFF

SEQ ID NO: 278781 - protein, 12 aa, Homo sapiens
  CDR3 for alpha chain variable domain of TCR clone 139391 (TRAV21, TRAJ13)
PGPSGGYQKVTF

SEQ ID NO: 278782 - protein, 15 aa, Homo sapiens
  CDR3 for beta chain variable domain of TCR clone 139391 (TRBV7-9, TRBJ1-6)
CASTSPGRGNSPLHF

SEQ ID NO: 278783 - protein, 13 aa, Homo sapiens
  CDR3 for alpha chain variable domain of TCR clone 139392 (TRAV3, TRAJ21)
CAVREPDFNNFYF

SEQ ID NO: 278784 - protein, 18 aa, Homo sapiens
  CDR3 for beta chain variable domain of TCR clone 139392 (TRBV11-2, TRBJ2-3)
CASSLGGASRRAPNTQYF

SEQ ID NO: 278785 - protein, 13 aa, Homo sapiens
  CDR3 for alpha chain variable domain of TCR clone 139393 (TRAV13-2, TRAJ53)
CAANMGGNYKLTF

SEQ ID NO: 278786 - protein, 13 aa, Homo sapiens
  CDR3 for beta chain variable domain of TCR clone 139393 (TRBV4-1, TRBJ2-2)
CASSQENTGELFF

SEQ ID NO: 278787 - protein, 14 aa, Homo sapiens
  CDR3 for alpha chain variable domain of TCR clone 139394 (TRAV1-2, TRAJ8)
CAVREDTGFQKLVF

SEQ ID NO: 278788 - protein, 15 aa, Homo sapiens
  CDR3 for beta chain variable domain of TCR clone 139394 (TRBV6-3, TRBJ2-7)
CASSSPGTVLYDQYF

SEQ ID NO: 278789 - protein, 14 aa, Homo sapiens
  CDR3 for alpha chain variable domain of TCR clone 139395 (TRAV1-2, TRAJ16)
CSVNRFSDGQKLLF

SEQ ID NO: 278790 - protein, 16 aa, Homo sapiens
  CDR3 for beta chain variable domain of TCR clone 139395 (TRBV19, TRBJ2-1)
CASSKAGPSSYNEQFF

SEQ ID NO: 278791 - protein, 11 aa, Homo sapiens
  CDR3 for alpha chain variable domain of TCR clone 139396 (TRAV13-1, TRAJ49)
CACVGGNQFYF

SEQ ID NO: 278792 - protein, 16 aa, Homo sapiens
  CDR3 for beta chain variable domain of TCR clone 139396 (TRBV11-2, TRBJ2-2)
CASSLRTGSLIGELFF

SEQ ID NO: 278793 - protein, 11 aa, Homo sapiens
  CDR3 for alpha chain variable domain of TCR clone 139397 (TRAV2, TRAJ33)
CAVESNYQLIW

SEQ ID NO: 278794 - protein, 15 aa, Homo sapiens
  CDR3 for beta chain variable domain of TCR clone 139397 (TRBV7-3, TRBJ2-1)
CASSLGQGPFGEQFF

SEQ ID NO: 278795 - protein, 18 aa, Homo sapiens
  CDR3 for alpha chain variable domain of TCR clone 139398 (TRAV26-1, TRAJ52)
CIVRVEGAGGTSYGKLTF

SEQ ID NO: 278796 - protein, 15 aa, Homo sapiens
  CDR3 for beta chain variable domain of TCR clone 139398 (TRBV18, TRBJ2-1)
CASSPPSASYNEQFF

SEQ ID NO: 278797 - protein, 13 aa, Homo sapiens
  CDR3 for alpha chain variable domain of TCR clone 139399 (TRAV13-1, TRAJ20)
CAARVLNDYKLSF

SEQ ID NO: 278798 - protein, 12 aa, Homo sapiens
  CDR3 for beta chain variable domain of TCR clone 139399 (TRBV20-1, TRBJ2-1)
CSARLGTDEQFF

SEQ ID NO: 278799 - protein, 15 aa, Homo sapiens
  CDR3 for alpha chain variable domain of TCR clone 139400 (TRAV8-6, TRAJ45)
CAVSEQGEVADGLTF

SEQ ID NO: 278800 - protein, 14 aa, Homo sapiens
  CDR3 for beta chain variable domain of TCR clone 139400 (TRBV28, TRBJ2-5)
CASRGSSFWETQYF

SEQ ID NO: 278801 - protein, 13 aa, Homo sapiens
  CDR3 for alpha chain variable domain of TCR clone 139401 (TRAV3, TRAJ27)
CAVRPLGAGKSTF

SEQ ID NO: 278802 - protein, 15 aa, Homo sapiens
  CDR3 for beta chain variable domain of TCR clone 139401 (TRBV5-1, TRBJ2-7)
CASSLGDFTTYEQYF

SEQ ID NO: 278803 - protein, 13 aa, Homo sapiens
  CDR3 for alpha chain variable domain of TCR clone 139402 (TRAV12-2, TRAJ20)
CAVYPSNDYKLSF

SEQ ID NO: 278804 - protein, 17 aa, Homo sapiens
  CDR3 for beta chain variable domain of TCR clone 139402 (TRBV7-8, TRBJ2-6)
CASSAGTGGAGANVLTF

SEQ ID NO: 278805 - protein, 13 aa, Homo sapiens
  CDR3 for alpha chain variable domain of TCR clone 139403 (TRAV12-2, TRAJ10)
CAVPTGGGNKLTF

SEQ ID NO: 278806 - protein, 11 aa, Homo sapiens
  CDR3 for beta chain variable domain of TCR clone 139403 (TRBV6-1, TRBJ2-1)
CSSISSNEQFF

SEQ ID NO: 278807 - protein, 14 aa, Homo sapiens
  CDR3 for alpha chain variable domain of TCR clone 139404 (TRAV35, TRAJ33)
CAGSSQDSNYQLIW

SEQ ID NO: 278808 - protein, 15 aa, Homo sapiens
  CDR3 for beta chain variable domain of TCR clone 139404 (TRBV5-1, TRBJ2-1)
CASSPPRAPYNEQFF

SEQ ID NO: 278809 - protein, 13 aa, Homo sapiens
  CDR3 for alpha chain variable domain of TCR clone 139405 (TRAV20, TRAJ21)
CAVEGYNFNKFYF

SEQ ID NO: 278810 - protein, 14 aa, Homo sapiens
  CDR3 for beta chain variable domain of TCR clone 139405 (TRBV3-1, TRBJ2-5)
CAGSQGPDQETQYF

SEQ ID NO: 278811 - protein, 13 aa, Homo sapiens
  CDR3 for alpha chain variable domain of TCR clone 139406 (TRAV3, TRAJ21)
CAVREPDLNKFYF

SEQ ID NO: 278812 - protein, 17 aa, Homo sapiens
  CDR3 for beta chain variable domain of TCR clone 139406 (TRBV7-8, TRBJ2-6)
CASSAGTGGAGAYVLTF

SEQ ID NO: 278813 - protein, 14 aa, Homo sapiens
  CDR3 for alpha chain variable domain of TCR clone 139407 (TRAV17, TRAJ22)
CATVLSGSARQLTF

SEQ ID NO: 278814 - protein, 13 aa, Homo sapiens
  CDR3 for beta chain variable domain of TCR clone 139407 (TRBV4-2, TRBJ1-1)
CASSQAGNTEAFF

SEQ ID NO: 278815 - protein, 16 aa, Homo sapiens
  CDR3 for alpha chain variable domain of TCR clone 139408 (TRAV12-3, TRAJ10)
CAMKKGITGGGNKLTF

SEQ ID NO: 278816 - protein, 14 aa, Homo sapiens
  CDR3 for beta chain variable domain of TCR clone 139408 (TRBV19, TRBJ2-1)
CASPTFVLSGEQFF

SEQ ID NO: 278817 - protein, 10 aa, Homo sapiens
  CDR3 for alpha chain variable domain of TCR clone 139409 (TRAV16, TRAJ22)
SAMYLRQLTF

SEQ ID NO: 278818 - protein, 15 aa, Homo sapiens
  CDR3 for beta chain variable domain of TCR clone 139409 (TRBV7-9, TRBJ1-6)
CASSSPGRGNSRLHF

SEQ ID NO: 278819 - protein, 14 aa, Homo sapiens
  CDR3 for alpha chain variable domain of TCR clone 139410 (TRAV2, TRAJ37)
CAVDFTSNTGKLIF

SEQ ID NO: 278820 - protein, 13 aa, Homo sapiens
  CDR3 for beta chain variable domain of TCR clone 139410 (TRBV14, TRBJ2-7)
CASSQDRRYEQYF

SEQ ID NO: 278821 - protein, 14 aa, Homo sapiens
  CDR3 for alpha chain variable domain of TCR clone 139411 (TRAV12-1, TRAJ12)
CVVIAMDSSYKLIF

SEQ ID NO: 278822 - protein, 11 aa, Homo sapiens
  CDR3 for beta chain variable domain of TCR clone 139411 (TRBV20-1, TRBJ2-5)
CSADRAETQYF

SEQ ID NO: 278823 - protein, 12 aa, Homo sapiens
  CDR3 for alpha chain variable domain of TCR clone 139412 (TRAV12-1, TRAJ20)
CVVNPYDYKLSF

SEQ ID NO: 278824 - protein, 12 aa, Homo sapiens
  CDR3 for beta chain variable domain of TCR clone 139412 (TRBV11-2, TRBJ2-2)
CASSLGGGELFF

SEQ ID NO: 278825 - protein, 14 aa, Homo sapiens
  CDR3 for alpha chain variable domain of TCR clone 139413 (TRAV20, TRAJ42)
CAVQAGGSQGNLII

SEQ ID NO: 278826 - protein, 14 aa, Homo sapiens
  CDR3 for beta chain variable domain of TCR clone 139413 (TRBV28, TRBJ1-2)
CASRIQGANYGYTF

SEQ ID NO: 278827 - protein, 15 aa, Homo sapiens
  CDR3 for alpha chain variable domain of TCR clone 139414 (TRAV17, TRAJ57)
CATGPSQGGTEKLVF

SEQ ID NO: 278828 - protein, 13 aa, Homo sapiens
  CDR3 for beta chain variable domain of TCR clone 139414 (TRBV27, TRBJ2-1)
CASRTLGVGEQFF

SEQ ID NO: 278829 - protein, 17 aa, Homo sapiens
  CDR3 for alpha chain variable domain of TCR clone 139415 (TRAV4, TRAJ18)
CLVGERSVGSTLGRLYF

SEQ ID NO: 278830 - protein, 17 aa, Homo sapiens
  CDR3 for beta chain variable domain of TCR clone 139415 (TRBV7-8, TRBJ2-6)
CASSAGTGGAGANVLTF

SEQ ID NO: 278831 - protein, 11 aa, Homo sapiens
  CDR3 for alpha chain variable domain of TCR clone 139416 (TRAV20, TRAJ40)
CAVRRNTSLEQ

SEQ ID NO: 278832 - protein, 15 aa, Homo sapiens
  CDR3 for beta chain variable domain of TCR clone 139416 (TRBV6-3, TRBJ2-7)
CASSSPGTVFYEQYF

SEQ ID NO: 278833 - protein, 18 aa, Homo sapiens
  CDR3 for alpha chain variable domain of TCR clone 139417 (TRAV12-3, TRAJ52)
CAMSRTNAGGISYGKLTF

SEQ ID NO: 278834 - protein, 17 aa, Homo sapiens
  CDR3 for beta chain variable domain of TCR clone 139417 (TRBV7-3, TRBJ2-3)
CASSLMKWMRGADTQYF

SEQ ID NO: 278835 - protein, 21 aa, Homo sapiens
  CDR3 for alpha chain variable domain of TCR clone 139418 (TRAV1-1, TRAJ6)
CLLLLRCERLERTGGSYIPTF

SEQ ID NO: 278836 - protein, 19 aa, Homo sapiens
  CDR3 for beta chain variable domain of TCR clone 139418 (TRBV7-2, TRBJ2-5)
CASSLAGGGGDPVLRARHA

SEQ ID NO: 278837 - protein, 15 aa, Homo sapiens
  CDR3 for alpha chain variable domain of TCR clone 139419 (TRAV3, TRAJ47)
CAVRYIGEYGNKLGF

SEQ ID NO: 278838 - protein, 14 aa, Homo sapiens
  CDR3 for beta chain variable domain of TCR clone 139419 (TRBV13, TRBJ2-5)
CASSLERVGETQYF

SEQ ID NO: 278839 - protein, 15 aa, Homo sapiens
  CDR3 for alpha chain variable domain of TCR clone 139420 (TRAV8-3, TRAJ23)
CAVGDRYNQGGELIF

SEQ ID NO: 278840 - protein, 22 aa, Homo sapiens
  CDR3 for beta chain variable domain of TCR clone 139420 (TRBV29-1, TRBJ2-5)
TVSNMSPEDSSIYLCSAGTQYF

SEQ ID NO: 278841 - protein, 14 aa, Homo sapiens
  CDR3 for alpha chain variable domain of TCR clone 139421 (TRAV38-1, TRAJ40)
CALRPTSGTYKYIF

SEQ ID NO: 278842 - protein, 14 aa, Homo sapiens
  CDR3 for beta chain variable domain of TCR clone 139421 (TRBV25-1, TRBJ1-1)
CATTHLGGNTEAFF

SEQ ID NO: 278843 - protein, 13 aa, Homo sapiens
  CDR3 for alpha chain variable domain of TCR clone 139422 (TRAV27, TRAJ57)
CRRAQGGSDKLVF

SEQ ID NO: 278844 - protein, 11 aa, Homo sapiens
  CDR3 for beta chain variable domain of TCR clone 139422 (TRBV11-2, TRBJ1-1)
CASSINTEAFF

SEQ ID NO: 278845 - protein, 16 aa, Homo sapiens
  CDR3 for alpha chain variable domain of TCR clone 139423 (TRAV26-1, TRAJ23)
CIVRPHGNNQGGKLIF

SEQ ID NO: 278846 - protein, 16 aa, Homo sapiens
  CDR3 for beta chain variable domain of TCR clone 139423 (TRBV11-3, TRBJ2-5)
CASSSVVAGSTETQYF

SEQ ID NO: 278847 - protein, 14 aa, Homo sapiens
  CDR3 for alpha chain variable domain of TCR clone 139424 (TRAV16, TRAJ33)
CALSAMESNYQLIC

SEQ ID NO: 278848 - protein, 17 aa, Homo sapiens
  CDR3 for beta chain variable domain of TCR clone 139424 (TRBV4-1, TRBJ2-7)
CASSQPTSGSRGYEQYF

SEQ ID NO: 278849 - protein, 15 aa, Homo sapiens
  CDR3 for alpha chain variable domain of TCR clone 139425 (TRAV23/DV6, TRAJ57)
CAASPTLSPGGSEKL

SEQ ID NO: 278850 - protein, 14 aa, Homo sapiens
  CDR3 for beta chain variable domain of TCR clone 139425 (TRBV25-1, TRBJ1-1)
CASTHLGGNTEAFF

SEQ ID NO: 278851 - protein, 13 aa, Homo sapiens
  CDR3 for alpha chain variable domain of TCR clone 139426 (TRAV13-1, TRAJ5)
CAASDTGRRALTF

SEQ ID NO: 278852 - protein, 16 aa, Homo sapiens
  CDR3 for beta chain variable domain of TCR clone 139426 (TRBV12-5, TRBJ2-5)
CAIGPRTSGNQETQYF

SEQ ID NO: 278853 - protein, 14 aa, Homo sapiens
  CDR3 for alpha chain variable domain of TCR clone 139427 (TRAV1-2, TRAJ8)
CAGREDTGFQKLVF

SEQ ID NO: 278854 - protein, 18 aa, Homo sapiens
  CDR3 for beta chain variable domain of TCR clone 139427 (TRBV6-6, TRBJ1-3)
CASSYSKWDSISGNTIYF

SEQ ID NO: 278855 - protein, 19 aa, Homo sapiens
  CDR3 for alpha chain variable domain of TCR clone 139428 (TRAV2, TRAJ20)
ILQVREADAAVYRDRKLSF

SEQ ID NO: 278856 - protein, 15 aa, Homo sapiens
  CDR3 for beta chain variable domain of TCR clone 139428 (TRBV7-2, TRBJ2-1)
CASSSGLAGGNEQFF

SEQ ID NO: 278857 - protein, 14 aa, Homo sapiens
  CDR3 for alpha chain variable domain of TCR clone 139429 (TRAV12-1, TRAJ17)
CVVNYKAAGNKLTF

SEQ ID NO: 278858 - protein, 17 aa, Homo sapiens
  CDR3 for beta chain variable domain of TCR clone 139429 (TRBV20-1, TRBJ2-1)
CSASSSGLAGAYNEQLF

SEQ ID NO: 278859 - protein, 15 aa, Homo sapiens
  CDR3 for alpha chain variable domain of TCR clone 139430 (TRAV17, TRAJ23)
CATDAEDNQGGKLIF

SEQ ID NO: 278860 - protein, 15 aa, Homo sapiens
  CDR3 for beta chain variable domain of TCR clone 139430 (TRBV19, TRBJ1-1)
CASTSGQIQNTEAFF

SEQ ID NO: 278861 - protein, 17 aa, Homo sapiens
  CDR3 for alpha chain variable domain of TCR clone 139431 (TRAV3, TRAJ6)
CAVRDGPRAGGSYKPTF

SEQ ID NO: 278862 - protein, 15 aa, Homo sapiens
  CDR3 for beta chain variable domain of TCR clone 139431 (TRBV29-1, TRBJ2-5)
CSVEGLTVNQETQYF

SEQ ID NO: 278863 - protein, 20 aa, Homo sapiens
  CDR3 for alpha chain variable domain of TCR clone 139432 (TRAV2, TRAJ15)
ILQVREADAAVFSPRTALIL

SEQ ID NO: 278864 - protein, 15 aa, Homo sapiens
  CDR3 for beta chain variable domain of TCR clone 139432 (TRBV7-6, TRBJ2-3)
CASSSEGGLAHTQYF

SEQ ID NO: 278865 - protein, 11 aa, Homo sapiens
  CDR3 for alpha chain variable domain of TCR clone 139433 (TRAV2, TRAJ13)
CASGGYQKVTF

SEQ ID NO: 278866 - protein, 17 aa, Homo sapiens
  CDR3 for beta chain variable domain of TCR clone 139433 (TRBV20-1, TRBJ2-1)
CSARYPLAVVWDNEQFF

SEQ ID NO: 278867 - protein, 11 aa, Homo sapiens
  CDR3 for alpha chain variable domain of TCR clone 139434 (TRAV29/DV5, TRAJ43)
CAAKTNNDMRF

SEQ ID NO: 278868 - protein, 14 aa, Homo sapiens
  CDR3 for beta chain variable domain of TCR clone 139434 (TRBV11-2, TRBJ2-7)
FASSPSTTSYEQYF

SEQ ID NO: 278869 - protein, 10 aa, Homo sapiens
  CDR3 for alpha chain variable domain of TCR clone 139435 (TRAV1-2, TRAJ20)
CACNDYKLSF

SEQ ID NO: 278870 - protein, 16 aa, Homo sapiens
  CDR3 for beta chain variable domain of TCR clone 139435 (TRBV20-1, TRBJ2-1)
CSATDLKQGMNNEQFF

SEQ ID NO: 278871 - protein, 13 aa, Homo sapiens
  CDR3 for alpha chain variable domain of TCR clone 139436 (TRAV21, TRAJ27)
CAARPGNAGKSTF

SEQ ID NO: 278872 - protein, 13 aa, Homo sapiens
  CDR3 for beta chain variable domain of TCR clone 139436 (TRBV18, TRBJ2-7)
GASQSGGGYEQYF

SEQ ID NO: 278873 - protein, 13 aa, Homo sapiens
  CDR3 for alpha chain variable domain of TCR clone 139437 (TRAV13-2, TRAJ40)
CAEFTSGTYKYIY

SEQ ID NO: 278874 - protein, 14 aa, Homo sapiens
  CDR3 for beta chain variable domain of TCR clone 139437 (TRBV10-2, TRBJ1-5)
CASSSTGRNQPQHF

SEQ ID NO: 278875 - protein, 18 aa, Homo sapiens
  CDR3 for alpha chain variable domain of TCR clone 139438 (TRAV21, TRAJ52)
CAVRPSPAGGTGYGKLTF

SEQ ID NO: 278876 - protein, 13 aa, Homo sapiens
  CDR3 for beta chain variable domain of TCR clone 139438 (TRBV11-2, TRBJ2-1)
CASSSEAYNEQFF

SEQ ID NO: 278877 - protein, 15 aa, Homo sapiens
  CDR3 for alpha chain variable domain of TCR clone 139439 (TRAV12-1, TRAJ44)
CVDDLPTGTASKLTF

SEQ ID NO: 278878 - protein, 13 aa, Homo sapiens
  CDR3 for beta chain variable domain of TCR clone 139439 (TRBV6-5, TRBJ2-5)
CASSPQGGETQYF

SEQ ID NO: 278879 - protein, 14 aa, Homo sapiens
  CDR3 for alpha chain variable domain of TCR clone 139440 (TRAV13-1, TRAJ44)
CAAKATGTASKLTF

SEQ ID NO: 278880 - protein, 13 aa, Homo sapiens
  CDR3 for beta chain variable domain of TCR clone 139440 (TRBV12-4, TRBJ2-7)
CASSLERVREQYF

SEQ ID NO: 278881 - protein, 13 aa, Homo sapiens
  CDR3 for alpha chain variable domain of TCR clone 139441 (TRAV34, TRAJ33)
CGADMNSNYQLIW

SEQ ID NO: 278882 - protein, 15 aa, Homo sapiens
  CDR3 for beta chain variable domain of TCR clone 139441 (TRBV12-5, TRBJ2-2)
CASGRLGGNTGELFF

SEQ ID NO: 278883 - protein, 13 aa, Homo sapiens
  CDR3 for alpha chain variable domain of TCR clone 139442 (TRAV21, TRAJ20)
CAVGLRVDYKLSF

SEQ ID NO: 278884 - protein, 14 aa, Homo sapiens
  CDR3 for beta chain variable domain of TCR clone 139442 (TRBV28, TRBJ2-4)
CASTQVTGVNIQYF

SEQ ID NO: 278885 - protein, 18 aa, Homo sapiens
  CDR3 for alpha chain variable domain of TCR clone 139443 (TRAV21, TRAJ52)
CAVRPFPAGGTSYGKLTF

SEQ ID NO: 278886 - protein, 17 aa, Homo sapiens
  CDR3 for beta chain variable domain of TCR clone 139443 (TRBV13, TRBJ2-3)
CASSIARVAGGRNTQYF

SEQ ID NO: 278887 - protein, 15 aa, Homo sapiens
  CDR3 for alpha chain variable domain of TCR clone 139444 (TRAV8-3, TRAJ45)
CASSYSGGGADGLTS

SEQ ID NO: 278888 - protein, 15 aa, Homo sapiens
  CDR3 for beta chain variable domain of TCR clone 139444 (TRBV20-1, TRBJ2-7)
CSARDRVSGMDEQYF

SEQ ID NO: 278889 - protein, 14 aa, Homo sapiens
  CDR3 for alpha chain variable domain of TCR clone 139445 (TRAV35, TRAJ22)
CAGLRPGSARQLTF

SEQ ID NO: 278890 - protein, 14 aa, Homo sapiens
  CDR3 for beta chain variable domain of TCR clone 139445 (TRBV11-3, TRBJ2-3)
CASSSGQGPYTQYF

SEQ ID NO: 278891 - protein, 12 aa, Homo sapiens
  CDR3 for alpha chain variable domain of TCR clone 139446 (TRAV23/DV6, TRAJ16)
CAATGTGQKLLF

SEQ ID NO: 278892 - protein, 15 aa, Homo sapiens
  CDR3 for beta chain variable domain of TCR clone 139446 (TRBV20-1, TRBJ2-7)
CSARDRVSGMDEQYF

SEQ ID NO: 278893 - protein, 20 aa, Homo sapiens
  CDR3 for alpha chain variable domain of TCR clone 139447 (TRAV1-1, TRAJ39)
CLLLLRCESSAYNAGNMLTF

SEQ ID NO: 278894 - protein, 13 aa, Homo sapiens
  CDR3 for beta chain variable domain of TCR clone 139447 (TRBV12-4, TRBJ1-5)
CASSPDRAQPQHL

SEQ ID NO: 278895 - protein, 16 aa, Homo sapiens
  CDR3 for alpha chain variable domain of TCR clone 139448 (TRAV30, TRAJ24)
CGAEIVDADSWGKFQF

SEQ ID NO: 278896 - protein, 16 aa, Homo sapiens
  CDR3 for beta chain variable domain of TCR clone 139448 (TRBV28, TRBJ2-7)
CASSLFFETGGPEQYF

SEQ ID NO: 278897 - protein, 17 aa, Homo sapiens
  CDR3 for alpha chain variable domain of TCR clone 139449 (TRAV38-2/DV8, TRAJ57)
CAYRGFPLLGGSEKLVF

SEQ ID NO: 278898 - protein, 17 aa, Homo sapiens
  CDR3 for beta chain variable domain of TCR clone 139449 (TRBV11-1, TRBJ2-7)
CASSLTGSFGLDYEQYF

SEQ ID NO: 278899 - protein, 14 aa, Homo sapiens
  CDR3 for alpha chain variable domain of TCR clone 139450 (TRAV17, TRAJ56)
CATVPAGANSKLTF

SEQ ID NO: 278900 - protein, 12 aa, Homo sapiens
  CDR3 for beta chain variable domain of TCR clone 139450 (TRBV6-5, TRBJ2-5)
CASSEGSETQYF

SEQ ID NO: 278901 - protein, 11 aa, Homo sapiens
  CDR3 for alpha chain variable domain of TCR clone 139451 (TRAV12-1, TRAJ20)
CGPLNDYKLSF

SEQ ID NO: 278902 - protein, 13 aa, Homo sapiens
  CDR3 for beta chain variable domain of TCR clone 139451 (TRBV5-7, TRBJ2-5)
CASSLRLQETQYF

SEQ ID NO: 278903 - protein, 13 aa, Homo sapiens
  CDR3 for alpha chain variable domain of TCR clone 139452 (TRAV21, TRAJ10)
CAVRPGGRNKLTF

SEQ ID NO: 278904 - protein, 14 aa, Homo sapiens
  CDR3 for beta chain variable domain of TCR clone 139452 (TRBV5-4, TRBJ2-7)
CASSADAGSYEQYF

SEQ ID NO: 278905 - protein, 15 aa, Homo sapiens
  CDR3 for alpha chain variable domain of TCR clone 139453 (TRAV20, TRAJ43)
CAVQAGKSSNNDMRF

SEQ ID NO: 278906 - protein, 13 aa, Homo sapiens
  CDR3 for beta chain variable domain of TCR clone 139453 (TRBV27, TRBJ1-1)
CASSVSIGAEAFF

SEQ ID NO: 278907 - protein, 12 aa, Homo sapiens
  CDR3 for alpha chain variable domain of TCR clone 139454 (TRAV3, TRAJ43)
CAVRDPNNDMRF

SEQ ID NO: 278908 - protein, 14 aa, Homo sapiens
  CDR3 for beta chain variable domain of TCR clone 139454 (TRBV7-9, TRBJ1-4)
CAITEGEANETLFF

SEQ ID NO: 278909 - protein, 13 aa, Homo sapiens
  CDR3 for alpha chain variable domain of TCR clone 139455 (TRAV2, TRAJ40)
CAVVTSGTYKNIF

SEQ ID NO: 278910 - protein, 14 aa, Homo sapiens
  CDR3 for beta chain variable domain of TCR clone 139455 (TRBV19, TRBJ2-1)
CASPTFVLSGEQFF

SEQ ID NO: 278911 - protein, 16 aa, Homo sapiens
  CDR3 for alpha chain variable domain of TCR clone 139456 (TRAV22, TRAJ45)
CAVERGKRGGADGLTF

SEQ ID NO: 278912 - protein, 12 aa, Homo sapiens
  CDR3 for beta chain variable domain of TCR clone 139456 (TRBV28, TRBJ2-7)
CASTGNHYEQYF

SEQ ID NO: 278913 - protein, 12 aa, Homo sapiens
  CDR3 for alpha chain variable domain of TCR clone 139457 (TRAV20, TRAJ33)
CAVRGSNYQLIW

SEQ ID NO: 278914 - protein, 13 aa, Homo sapiens
  CDR3 for beta chain variable domain of TCR clone 139457 (TRBV4-3, TRBJ1-1)
CARSPTGNTEAFF

SEQ ID NO: 278915 - protein, 16 aa, Homo sapiens
  CDR3 for alpha chain variable domain of TCR clone 139458 (TRAV30, TRAJ24)
CGSEIVDADSWGKFPF

SEQ ID NO: 278916 - protein, 14 aa, Homo sapiens
  CDR3 for beta chain variable domain of TCR clone 139458 (TRBV12-5, TRBJ2-5)
CASGSRTHQETQYF

SEQ ID NO: 278917 - protein, 12 aa, Homo sapiens
  CDR3 for alpha chain variable domain of TCR clone 139459 (TRAV21, TRAJ33)
CAKMDSNYQLIW

SEQ ID NO: 278918 - protein, 15 aa, Homo sapiens
  CDR3 for beta chain variable domain of TCR clone 139459 (TRBV15, TRBJ2-7)
CATSRGVTPTYEQYF

SEQ ID NO: 278919 - protein, 15 aa, Homo sapiens
  CDR3 for alpha chain variable domain of TCR clone 139460 (TRAV14/DV4, TRAJ33)
CAMREGRDNNYQLIW

SEQ ID NO: 278920 - protein, 15 aa, Homo sapiens
  CDR3 for beta chain variable domain of TCR clone 139460 (TRBV5-5, TRBJ1-5)
CASSSTPGSNQPQHF

SEQ ID NO: 278921 - protein, 12 aa, Homo sapiens
  CDR3 for alpha chain variable domain of TCR clone 139461 (TRAV13-1, TRAJ21)
CAAKEGFNKFYL

SEQ ID NO: 278922 - protein, 14 aa, Homo sapiens
  CDR3 for beta chain variable domain of TCR clone 139461 (TRBV23-1, TRBJ2-5)
CASSFLRSQETQYF

SEQ ID NO: 278923 - protein, 13 aa, Homo sapiens
  CDR3 for alpha chain variable domain of TCR clone 139462 (TRAV17, TRAJ4)
CATKSGGYNRLIF

SEQ ID NO: 278924 - protein, 14 aa, Homo sapiens
  CDR3 for beta chain variable domain of TCR clone 139462 (TRBV20-1, TRBJ1-5)
CSARDDRGNQPQHF

SEQ ID NO: 278925 - protein, 16 aa, Homo sapiens
  CDR3 for alpha chain variable domain of TCR clone 139463 (TRAV3, TRAJ21)
CALRDIERGNFNKLYF

SEQ ID NO: 278926 - protein, 13 aa, Homo sapiens
  CDR3 for beta chain variable domain of TCR clone 139463 (TRBV27, TRBJ2-7)
CASSLTTGYEQYF

SEQ ID NO: 278927 - protein, 12 aa, Homo sapiens
  CDR3 for alpha chain variable domain of TCR clone 139464 (TRAV17, TRAJ4)
CALSGGYNKLIF

SEQ ID NO: 278928 - protein, 13 aa, Homo sapiens
  CDR3 for beta chain variable domain of TCR clone 139464 (TRBV6-1, TRBJ1-1)
CASSEGWGTEAFF

SEQ ID NO: 278929 - protein, 15 aa, Homo sapiens
  CDR3 for alpha chain variable domain of TCR clone 139465 (TRAV26-1, TRAJ44)
CIVRANTGTASKLTF

SEQ ID NO: 278930 - protein, 14 aa, Homo sapiens
  CDR3 for beta chain variable domain of TCR clone 139465 (TRBV7-3, TRBJ2-1)
CASSLSGSYNEQFF

SEQ ID NO: 278931 - protein, 13 aa, Homo sapiens
  CDR3 for alpha chain variable domain of TCR clone 139466 (TRAV13-1, TRAJ49)
CAAMLYTGNQFYF

SEQ ID NO: 278932 - protein, 15 aa, Homo sapiens
  CDR3 for beta chain variable domain of TCR clone 139466 (TRBV12-4, TRBJ1-5)
CASTRGSGFVQPQHF

SEQ ID NO: 278933 - protein, 16 aa, Homo sapiens
  CDR3 for alpha chain variable domain of TCR clone 139467 (TRAV12-3, TRAJ53)
CAMSPGSGGSNYKLTF

SEQ ID NO: 278934 - protein, 13 aa, Homo sapiens
  CDR3 for beta chain variable domain of TCR clone 139467 (TRBV19, TRBJ1-2)
CASSVLGQDGYTF

SEQ ID NO: 278935 - protein, 16 aa, Homo sapiens
  CDR3 for alpha chain variable domain of TCR clone 139468 (TRAV30, TRAJ24)
CGTEIVDADSWGKFQF

SEQ ID NO: 278936 - protein, 15 aa, Homo sapiens
  CDR3 for beta chain variable domain of TCR clone 139468 (TRBV7-9, TRBJ1-4)
CASSARTGGNEKLFL

SEQ ID NO: 278937 - protein, 14 aa, Homo sapiens
  CDR3 for alpha chain variable domain of TCR clone 139469 (TRAV12-2, TRAJ13)
CAVKKTGGHQKVTF

SEQ ID NO: 278938 - protein, 14 aa, Homo sapiens
  CDR3 for beta chain variable domain of TCR clone 139469 (TRBV19, TRBJ2-1)
CASPTVVLSSEQFF

SEQ ID NO: 278939 - protein, 18 aa, Homo sapiens
  CDR3 for alpha chain variable domain of TCR clone 139470 (TRAV21, TRAJ52)
CAVRPSPAGGTSYGKLTS

SEQ ID NO: 278940 - protein, 17 aa, Homo sapiens
  CDR3 for beta chain variable domain of TCR clone 139470 (TRBV13, TRBJ2-3)
CDSSLSRVAGGRNTQYF

SEQ ID NO: 278941 - protein, 12 aa, Homo sapiens
  CDR3 for alpha chain variable domain of TCR clone 139471 (TRAV21, TRAJ41)
CAVREFRVCTQL

SEQ ID NO: 278942 - protein, 16 aa, Homo sapiens
  CDR3 for beta chain variable domain of TCR clone 139471 (TRBV18, TRBJ1-5)
ISVPAHHRPGAISQHF

SEQ ID NO: 278943 - protein, 14 aa, Homo sapiens
  CDR3 for alpha chain variable domain of TCR clone 139472 (TRAV12-2, TRAJ53)
CAVKGGGSNYKLTF

SEQ ID NO: 278944 - protein, 14 aa, Homo sapiens
  CDR3 for beta chain variable domain of TCR clone 139472 (TRBV19, TRBJ2-1)
CASPTFVLSGGQFF

SEQ ID NO: 278945 - protein, 14 aa, Homo sapiens
  CDR3 for alpha chain variable domain of TCR clone 139473 (TRAV12-3, TRAJ10)
SHLALTGGGNKLTF

SEQ ID NO: 278946 - protein, 14 aa, Homo sapiens
  CDR3 for beta chain variable domain of TCR clone 139473 (TRBV7-2, TRBJ2-2)
CASSLNSNTGELFF

SEQ ID NO: 278947 - protein, 14 aa, Homo sapiens
  CDR3 for alpha chain variable domain of TCR clone 139474 (TRAV26-1, TRAJ38)
CIADNAGNNRRLIW

SEQ ID NO: 278948 - protein, 14 aa, Homo sapiens
  CDR3 for beta chain variable domain of TCR clone 139474 (TRBV7-2, TRBJ2-1)
CASSLGVGYNEQFF

SEQ ID NO: 278949 - protein, 13 aa, Homo sapiens
  CDR3 for alpha chain variable domain of TCR clone 139475 (TRAV16, TRAJ58)
CALSIPSGSRLTF

SEQ ID NO: 278950 - protein, 11 aa, Homo sapiens
  CDR3 for beta chain variable domain of TCR clone 139475 (TRBV11-2, TRBJ2-2)
CASSLPGELFF

SEQ ID NO: 278951 - protein, 14 aa, Homo sapiens
  CDR3 for alpha chain variable domain of TCR clone 139476 (TRAV1-2, TRAJ27)
CAPAEYTNAGKSTL

SEQ ID NO: 278952 - protein, 18 aa, Homo sapiens
  CDR3 for beta chain variable domain of TCR clone 139476 (TRBV28, TRBJ1-2)
CAIRQQQGKRGSNYGYTF

SEQ ID NO: 278953 - protein, 15 aa, Homo sapiens
  CDR3 for alpha chain variable domain of TCR clone 139477 (TRAV26-1, TRAJ38)
CIVRAEGGNNRKLIW

SEQ ID NO: 278954 - protein, 14 aa, Homo sapiens
  CDR3 for beta chain variable domain of TCR clone 139477 (TRBV7-6, TRBJ2-3)
CASSSPSGSETQYF

SEQ ID NO: 278955 - protein, 17 aa, Homo sapiens
  CDR3 for alpha chain variable domain of TCR clone 139478 (TRAV13-1, TRAJ52)
CAASSGAGVTSYGKLTV

SEQ ID NO: 278956 - protein, 15 aa, Homo sapiens
  CDR3 for beta chain variable domain of TCR clone 139478 (TRBV2, TRBJ2-1)
CASSELAGSYNEQFF

SEQ ID NO: 278957 - protein, 12 aa, Homo sapiens
  CDR3 for alpha chain variable domain of TCR clone 139479 (TRAV17, TRAJ10)
CANTGGGNKLTF

SEQ ID NO: 278958 - protein, 13 aa, Homo sapiens
  CDR3 for beta chain variable domain of TCR clone 139479 (TRBV19, TRBJ1-2)
CASSVPGQGGYTF

SEQ ID NO: 278959 - protein, 14 aa, Homo sapiens
  CDR3 for alpha chain variable domain of TCR clone 139480 (TRAV29/DV5, TRAJ36)
CAARCKTGANNPFF

SEQ ID NO: 278960 - protein, 14 aa, Homo sapiens
  CDR3 for beta chain variable domain of TCR clone 139480 (TRBV12-5, TRBJ2-5)
CASGSRTHQETQYF

SEQ ID NO: 278961 - protein, 16 aa, Homo sapiens
  CDR3 for alpha chain variable domain of TCR clone 139481 (TRAV3, TRAJ23)
CAVEPLIYNQGGKLIF

SEQ ID NO: 278962 - protein, 13 aa, Homo sapiens
  CDR3 for beta chain variable domain of TCR clone 139481 (TRBV14, TRBJ1-2)
CASSEDRRYGYTF

SEQ ID NO: 278963 - protein, 14 aa, Homo sapiens
  CDR3 for alpha chain variable domain of TCR clone 139482 (TRAV26-1, TRAJ49)
CIVRLTNTGNQFYF

SEQ ID NO: 278964 - protein, 13 aa, Homo sapiens
  CDR3 for beta chain variable domain of TCR clone 139482 (TRBV4-1, TRBJ2-7)
CASSQGQAYEQSF

SEQ ID NO: 278965 - protein, 13 aa, Homo sapiens
  CDR3 for alpha chain variable domain of TCR clone 139483 (TRAV17, TRAJ9)
CATAITGGFKTIL

SEQ ID NO: 278966 - protein, 16 aa, Homo sapiens
  CDR3 for beta chain variable domain of TCR clone 139483 (TRBV15, TRBJ2-1)
CATSRNLAGGYKEQFF

SEQ ID NO: 278967 - protein, 14 aa, Homo sapiens
  CDR3 for alpha chain variable domain of TCR clone 139484 (TRAV4, TRAJ13)
CLVGYSGGYQKVTF

SEQ ID NO: 278968 - protein, 18 aa, Homo sapiens
  CDR3 for beta chain variable domain of TCR clone 139484 (TRBV11-3, TRBJ2-1)
CASSSYPGGRDSYNEQFF

SEQ ID NO: 278969 - protein, 16 aa, Homo sapiens
  CDR3 for alpha chain variable domain of TCR clone 139485 (TRAV29/DV5, TRAJ40)
CAAPRFRTEGTYKYIF

SEQ ID NO: 278970 - protein, 13 aa, Homo sapiens
  CDR3 for beta chain variable domain of TCR clone 139485 (TRBV4-2, TRBJ1-1)
CASSQAGNTEAFF

SEQ ID NO: 278971 - protein, 16 aa, Homo sapiens
  CDR3 for alpha chain variable domain of TCR clone 139486 (TRAV2, TRAJ20)
TTVLWSFRSNDYELSF

SEQ ID NO: 278972 - protein, 12 aa, Homo sapiens
  CDR3 for beta chain variable domain of TCR clone 139486 (TRBV7-6, TRBJ2-3)
CASSTGTDTQYF

SEQ ID NO: 278973 - protein, 14 aa, Homo sapiens
  CDR3 for alpha chain variable domain of TCR clone 139487 (TRAV13-1, TRAJ35)
CAASKGGFGNVLHC

SEQ ID NO: 278974 - protein, 14 aa, Homo sapiens
  CDR3 for beta chain variable domain of TCR clone 139487 (TRBV7-9, TRBJ2-5)
CASSLDTAQETQYF

SEQ ID NO: 278975 - protein, 15 aa, Homo sapiens
  CDR3 for alpha chain variable domain of TCR clone 139488 (TRAV21, TRAJ24)
CAARSSTDSWGKLQF

SEQ ID NO: 278976 - protein, 11 aa, Homo sapiens
  CDR3 for beta chain variable domain of TCR clone 139488 (TRBV7-2, TRBJ2-7)
CASSSGLWQYF

SEQ ID NO: 278977 - protein, 14 aa, Homo sapiens
  CDR3 for alpha chain variable domain of TCR clone 139489 (TRAV13-1, TRAJ20)
CAARPGSNGYKLSF

SEQ ID NO: 278978 - protein, 13 aa, Homo sapiens
  CDR3 for beta chain variable domain of TCR clone 139489 (TRBV20-1, TRBJ1-1)
CSAPPGGHTEAFF

SEQ ID NO: 278979 - protein, 16 aa, Homo sapiens
  CDR3 for alpha chain variable domain of TCR clone 139490 (TRAV3, TRAJ21)
CAVRDIERGNFNKFYF

SEQ ID NO: 278980 - protein, 17 aa, Homo sapiens
  CDR3 for beta chain variable domain of TCR clone 139490 (TRBV28, TRBJ2-3)
CASSPTPAGGRVDTQYF

SEQ ID NO: 278981 - protein, 15 aa, Homo sapiens
  CDR3 for alpha chain variable domain of TCR clone 139491 (TRAV3, TRAJ17)
CAVSPKEAAGNKLTF

SEQ ID NO: 278982 - protein, 15 aa, Homo sapiens
  CDR3 for beta chain variable domain of TCR clone 139491 (TRBV7-8, TRBJ2-1)
CASSLHGGPYNEQFF

SEQ ID NO: 278983 - protein, 17 aa, Homo sapiens
  CDR3 for alpha chain variable domain of TCR clone 139492 (TRAV27, TRAJ42)
CAERVIYYGGSQGNLIF

SEQ ID NO: 278984 - protein, 15 aa, Homo sapiens
  CDR3 for beta chain variable domain of TCR clone 139492 (TRBV11-2, TRBJ2-1)
CASSKNRGLIYEQFF

SEQ ID NO: 278985 - protein, 15 aa, Homo sapiens
  CDR3 for alpha chain variable domain of TCR clone 139493 (TRAV26-1, TRAJ29)
CIVRVEGSGNRPLVF

SEQ ID NO: 278986 - protein, 14 aa, Homo sapiens
  CDR3 for beta chain variable domain of TCR clone 139493 (TRBV25-1, TRBJ1-1)
CASTHLGGNTEAFF

SEQ ID NO: 278987 - protein, 15 aa, Homo sapiens
  CDR3 for alpha chain variable domain of TCR clone 139494 (TRAV12-3, TRAJ27)
CAMRAYNTNAGKSTF

SEQ ID NO: 278988 - protein, 12 aa, Homo sapiens
  CDR3 for beta chain variable domain of TCR clone 139494 (TRBV3-1, TRBJ2-1)
CASSQGSSGQFF

SEQ ID NO: 278989 - protein, 14 aa, Homo sapiens
  CDR3 for alpha chain variable domain of TCR clone 139495 (TRAV8-4, TRAJ8)
CAVSEDTGFQKLVF

SEQ ID NO: 278990 - protein, 13 aa, Homo sapiens
  CDR3 for beta chain variable domain of TCR clone 139495 (TRBV7-8, TRBJ2-7)
CASSLTGGREQYF

SEQ ID NO: 278991 - protein, 12 aa, Homo sapiens
  CDR3 for alpha chain variable domain of TCR clone 139496 (TRAV21, TRAJ49)
CAVSWTGNQFYF

SEQ ID NO: 278992 - protein, 18 aa, Homo sapiens
  CDR3 for beta chain variable domain of TCR clone 139496 (TRBV7-8, TRBJ2-1)
CASSPAEGLAGGLNEQFF

SEQ ID NO: 278993 - protein, 13 aa, Homo sapiens
  CDR3 for alpha chain variable domain of TCR clone 139497 (TRAV41, TRAJ48)
SVPVNFGNGKLTF

SEQ ID NO: 278994 - protein, 16 aa, Homo sapiens
  CDR3 for beta chain variable domain of TCR clone 139497 (TRBV12-5, TRBJ2-5)
CASGPRTSGNQETQYF

SEQ ID NO: 278995 - protein, 17 aa, Homo sapiens
  CDR3 for alpha chain variable domain of TCR clone 139498 (TRAV2, TRAJ22)
ILQVREADAAEQRQLTF

SEQ ID NO: 278996 - protein, 15 aa, Homo sapiens
  CDR3 for beta chain variable domain of TCR clone 139498 (TRBV7-2, TRBJ2-3)
CASSLVVRGPDTQYF

SEQ ID NO: 278997 - protein, 15 aa, Homo sapiens
  CDR3 for alpha chain variable domain of TCR clone 139499 (TRAV2, TRAJ9)
CAVEDRGTGGFKPIF

SEQ ID NO: 278998 - protein, 14 aa, Homo sapiens
  CDR3 for beta chain variable domain of TCR clone 139499 (TRBV25-1, TRBJ1-1)
CASTHLGGNTEAFF

SEQ ID NO: 278999 - protein, 13 aa, Homo sapiens
  CDR3 for alpha chain variable domain of TCR clone 139500 (TRAV35, TRAJ42)
CAGFPGSQGNLIF

SEQ ID NO: 279000 - protein, 14 aa, Homo sapiens
  CDR3 for beta chain variable domain of TCR clone 139500 (TRBV4-1, TRBJ2-2)
CASSQAVNTEELFF

SEQ ID NO: 279001 - protein, 13 aa, Homo sapiens
  CDR3 for alpha chain variable domain of TCR clone 139501 (TRAV13-1, TRAJ49)
CAAMLYTGHQFYF

SEQ ID NO: 279002 - protein, 15 aa, Homo sapiens
  CDR3 for beta chain variable domain of TCR clone 139501 (TRBV12-4, TRBJ1-5)
CASTRGSGFGQPQHF

SEQ ID NO: 279003 - protein, 14 aa, Homo sapiens
  CDR3 for alpha chain variable domain of TCR clone 139502 (TRAV26-1, TRAJ38)
CIADNAGNNRKLIW

SEQ ID NO: 279004 - protein, 13 aa, Homo sapiens
  CDR3 for beta chain variable domain of TCR clone 139502 (TRBV7-9, TRBJ2-3)
CASSPGSKDTQYF

SEQ ID NO: 279005 - protein, 19 aa, Homo sapiens
  CDR3 for alpha chain variable domain of TCR clone 139503 (TRAV2, TRAJ20)
ILQVREADAAVYRDCKLSF

SEQ ID NO: 279006 - protein, 13 aa, Homo sapiens
  CDR3 for beta chain variable domain of TCR clone 139503 (TRBV15, TRBJ1-6)
CATSGGLNSPLYF

SEQ ID NO: 279007 - protein, 14 aa, Homo sapiens
  CDR3 for alpha chain variable domain of TCR clone 139504 (TRAV21, TRAJ35)
CAVMPIGFGNVLHC

SEQ ID NO: 279008 - protein, 18 aa, Homo sapiens
  CDR3 for beta chain variable domain of TCR clone 139504 (TRBV4-3, TRBJ2-6)
CASSQDIQGGPGANVLTF

SEQ ID NO: 279009 - protein, 15 aa, Homo sapiens
  CDR3 for alpha chain variable domain of TCR clone 139505 (TRAV8-4, TRAJ37)
CAVSVSPSNTGKLIF

SEQ ID NO: 279010 - protein, 13 aa, Homo sapiens
  CDR3 for beta chain variable domain of TCR clone 139505 (TRBV3-1, TRBJ1-1)
CASSPGVITEAFF

SEQ ID NO: 279011 - protein, 13 aa, Homo sapiens
  CDR3 for alpha chain variable domain of TCR clone 139506 (TRAV17, TRAJ9)
CATAITGGCKTIF

SEQ ID NO: 279012 - protein, 16 aa, Homo sapiens
  CDR3 for beta chain variable domain of TCR clone 139506 (TRBV15, TRBJ2-1)
CATSRNLAGGYNEQFF

SEQ ID NO: 279013 - protein, 14 aa, Homo sapiens
  CDR3 for alpha chain variable domain of TCR clone 139507 (TRAV35, TRAJ42)
CAGRYGGSQVNLIF

SEQ ID NO: 279014 - protein, 15 aa, Homo sapiens
  CDR3 for beta chain variable domain of TCR clone 139507 (TRBV7-9, TRBJ2-1)
CASSLGWGRANEQFF

SEQ ID NO: 279015 - protein, 12 aa, Homo sapiens
  CDR3 for alpha chain variable domain of TCR clone 139508 (TRAV16, TRAJ26)
CALRSYGQNFVF

SEQ ID NO: 279016 - protein, 10 aa, Homo sapiens
  CDR3 for beta chain variable domain of TCR clone 139508 (TRBV20-1, TRBJ2-5)
CSARFETQYF

SEQ ID NO: 279017 - protein, 16 aa, Homo sapiens
  CDR3 for alpha chain variable domain of TCR clone 139509 (TRAV30, TRAJ24)
CGTEIVDADSWGKFQF

SEQ ID NO: 279018 - protein, 16 aa, Homo sapiens
  CDR3 for beta chain variable domain of TCR clone 139509 (TRBV12-5, TRBJ2-5)
CASGPRTSGNQETQHF

SEQ ID NO: 279019 - protein, 18 aa, Homo sapiens
  CDR3 for alpha chain variable domain of TCR clone 139510 (TRAV8-6, TRAJ39)
CAVTPQGLIDNAGNILTF

SEQ ID NO: 279020 - protein, 15 aa, Homo sapiens
  CDR3 for beta chain variable domain of TCR clone 139510 (TRBV9, TRBJ2-1)
CASSVGSGFYNEQFF

SEQ ID NO: 279021 - protein, 14 aa, Homo sapiens
  CDR3 for alpha chain variable domain of TCR clone 139511 (TRAV1-2, TRAJ8)
CAVREDTGFHKLVF

SEQ ID NO: 279022 - protein, 15 aa, Homo sapiens
  CDR3 for beta chain variable domain of TCR clone 139511 (TRBV11-3, TRBJ2-1)
CASSLGDSSHNEQFF

SEQ ID NO: 279023 - protein, 14 aa, Homo sapiens
  CDR3 for alpha chain variable domain of TCR clone 139512 (TRAV16, TRAJ33)
YALSAMASNYQLIW

SEQ ID NO: 279024 - protein, 12 aa, Homo sapiens
  CDR3 for beta chain variable domain of TCR clone 139512 (TRBV5-1, TRBJ1-2)
CASSQDTYGYTF

SEQ ID NO: 279025 - protein, 19 aa, Homo sapiens
  CDR3 for alpha chain variable domain of TCR clone 139513 (TRAV26-1, TRAJ28)
CIVRVAHAYSGAGSYQPTF

SEQ ID NO: 279026 - protein, 15 aa, Homo sapiens
  CDR3 for beta chain variable domain of TCR clone 139513 (TRBV20-1, TRBJ1-1)
CSASRGVTGNTEAFF

SEQ ID NO: 279027 - protein, 13 aa, Homo sapiens
  CDR3 for alpha chain variable domain of TCR clone 139514 (TRAV3, TRAJ36)
CTVRDTGANNLFF

SEQ ID NO: 279028 - protein, 15 aa, Homo sapiens
  CDR3 for beta chain variable domain of TCR clone 139514 (TRBV24-1, TRBJ2-1)
CATSGSGGFYNEQFF

SEQ ID NO: 279029 - protein, 14 aa, Homo sapiens
  CDR3 for alpha chain variable domain of TCR clone 139515 (TRAV12-2, TRAJ13)
CAVKTTGGYQKVTF

SEQ ID NO: 279030 - protein, 15 aa, Homo sapiens
  CDR3 for beta chain variable domain of TCR clone 139515 (TRBV9, TRBJ1-6)
CASSVAGTGDSPLHF

SEQ ID NO: 279031 - protein, 14 aa, Homo sapiens
  CDR3 for alpha chain variable domain of TCR clone 139516 (TRAV2, TRAJ37)
CAVDFTSNTGTLIF

SEQ ID NO: 279032 - protein, 14 aa, Homo sapiens
  CDR3 for beta chain variable domain of TCR clone 139516 (TRBV7-7, TRBJ2-7)
CASSLGRGVGEQYF

SEQ ID NO: 279033 - protein, 13 aa, Homo sapiens
  CDR3 for alpha chain variable domain of TCR clone 139517 (TRAV1-2, TRAJ9)
CASLNTGGFKTIF

SEQ ID NO: 279034 - protein, 20 aa, Homo sapiens
  CDR3 for beta chain variable domain of TCR clone 139517 (TRBV28, TRBJ2-1)
CASTPIGRSPGLAGGNEQFF

SEQ ID NO: 279035 - protein, 13 aa, Homo sapiens
  CDR3 for alpha chain variable domain of TCR clone 139518 (TRAV12-2, TRAJ10)
CAVPTGGGNKLTF

SEQ ID NO: 279036 - protein, 12 aa, Homo sapiens
  CDR3 for beta chain variable domain of TCR clone 139518 (TRBV24-1, TRBJ1-1)
CATLYPDTEAFF

SEQ ID NO: 279037 - protein, 15 aa, Homo sapiens
  CDR3 for alpha chain variable domain of TCR clone 139519 (TRAV26-1, TRAJ40)
CIVKVTTSGTYKYIF

SEQ ID NO: 279038 - protein, 12 aa, Homo sapiens
  CDR3 for beta chain variable domain of TCR clone 139519 (TRBV7-9, TRBJ1-4)
CASSTDREKLFF

SEQ ID NO: 279039 - protein, 14 aa, Homo sapiens
  CDR3 for alpha chain variable domain of TCR clone 139520 (TRAV12-1, TRAJ30)
CVVYIGGRDDKIII

SEQ ID NO: 279040 - protein, 15 aa, Homo sapiens
  CDR3 for beta chain variable domain of TCR clone 139520 (TRBV18, TRBJ1-2)
CASSPSNTPNYGYTF

SEQ ID NO: 279041 - protein, 11 aa, Homo sapiens
  CDR3 for alpha chain variable domain of TCR clone 139521 (TRAV2, TRAJ13)
CASGGYQKVTF

SEQ ID NO: 279042 - protein, 15 aa, Homo sapiens
  CDR3 for beta chain variable domain of TCR clone 139521 (TRBV5-1, TRBJ2-7)
CASSLNGGPAREQYF

SEQ ID NO: 279043 - protein, 16 aa, Homo sapiens
  CDR3 for alpha chain variable domain of TCR clone 139522 (TRAV8-3, TRAJ42)
CAVGEGNGGSQGNLIF

SEQ ID NO: 279044 - protein, 14 aa, Homo sapiens
  CDR3 for beta chain variable domain of TCR clone 139522 (TRBV5-1, TRBJ2-7)
CASSLQGAVDEQYF

SEQ ID NO: 279045 - protein, 15 aa, Homo sapiens
  CDR3 for alpha chain variable domain of TCR clone 139523 (TRAV8-3, TRAJ27)
CAVGPSKTNAGKSTF

SEQ ID NO: 279046 - protein, 14 aa, Homo sapiens
  CDR3 for beta chain variable domain of TCR clone 139523 (TRBV9, TRBJ2-1)
CASSVDPGGKEQFF

SEQ ID NO: 279047 - protein, 20 aa, Homo sapiens
  CDR3 for alpha chain variable domain of TCR clone 139524 (TRAV4, TRAJ29)
CCVLLPRGGVPFSGNTPLVF

SEQ ID NO: 279048 - protein, 17 aa, Homo sapiens
  CDR3 for beta chain variable domain of TCR clone 139524 (TRBV25-1, TRBJ2-7)
CASSDARVVFSSYEQYF

SEQ ID NO: 279049 - protein, 15 aa, Homo sapiens
  CDR3 for alpha chain variable domain of TCR clone 139525 (TRAV21, TRAJ13)
CAVRPTSGGYQKVTF

SEQ ID NO: 279050 - protein, 18 aa, Homo sapiens
  CDR3 for beta chain variable domain of TCR clone 139525 (TRBV11-3, TRBJ2-1)
CASSSYPGGRVSYNEQFF

SEQ ID NO: 279051 - protein, 16 aa, Homo sapiens
  CDR3 for alpha chain variable domain of TCR clone 139526 (TRAV3, TRAJ10)
CAVRDMRAGGGNKLTF

SEQ ID NO: 279052 - protein, 17 aa, Homo sapiens
  CDR3 for beta chain variable domain of TCR clone 139526 (TRBV20-1, TRBJ2-2)
CSASGSGQGGLTRELFF

SEQ ID NO: 279053 - protein, 13 aa, Homo sapiens
  CDR3 for alpha chain variable domain of TCR clone 139527 (TRAV2, TRAJ40)
CAVVTSGTYKYIF

SEQ ID NO: 279054 - protein, 15 aa, Homo sapiens
  CDR3 for beta chain variable domain of TCR clone 139527 (TRBV11-3, TRBJ2-3)
CASLKDGREGDTQYI

SEQ ID NO: 279055 - protein, 15 aa, Homo sapiens
  CDR3 for alpha chain variable domain of TCR clone 139528 (TRAV26-1, TRAJ53)
CIVRVEGGSKYKLTF

SEQ ID NO: 279056 - protein, 14 aa, Homo sapiens
  CDR3 for beta chain variable domain of TCR clone 139528 (TRBV4-3, TRBJ2-1)
CASRQDRWRGEQFF

SEQ ID NO: 279057 - protein, 13 aa, Homo sapiens
  CDR3 for alpha chain variable domain of TCR clone 139529 (TRAV35, TRAJ48)
GRSRVFGNEKLTF

SEQ ID NO: 279058 - protein, 13 aa, Homo sapiens
  CDR3 for beta chain variable domain of TCR clone 139529 (TRBV19, TRBJ2-7)
CASSKQGGYEQYF

SEQ ID NO: 279059 - protein, 13 aa, Homo sapiens
  CDR3 for alpha chain variable domain of TCR clone 139530 (TRAV35, TRAJ42)
CAGFSGSQGNLIF

SEQ ID NO: 279060 - protein, 13 aa, Homo sapiens
  CDR3 for beta chain variable domain of TCR clone 139530 (TRBV29-1, TRBJ2-1)
CSVEGGRGNEQFF

SEQ ID NO: 279061 - protein, 19 aa, Homo sapiens
  CDR3 for alpha chain variable domain of TCR clone 139531 (TRAV13-1, TRAJ52)
CAASPYQNAGGTSYGKLTF

SEQ ID NO: 279062 - protein, 14 aa, Homo sapiens
  CDR3 for beta chain variable domain of TCR clone 139531 (TRBV4-1, TRBJ2-2)
CASSQAVNTGELFF

SEQ ID NO: 279063 - protein, 15 aa, Homo sapiens
  CDR3 for alpha chain variable domain of TCR clone 139532 (TRAV8-4, TRAJ15)
CAVSDPVQAGTALIF

SEQ ID NO: 279064 - protein, 14 aa, Homo sapiens
  CDR3 for beta chain variable domain of TCR clone 139532 (TRBV12-5, TRBJ2-5)
CASGSRTHQETQYF

SEQ ID NO: 279065 - protein, 13 aa, Homo sapiens
  CDR3 for alpha chain variable domain of TCR clone 139533 (TRAV17, TRAJ22)
CAGRRGSARQLTL

SEQ ID NO: 279066 - protein, 14 aa, Homo sapiens
  CDR3 for beta chain variable domain of TCR clone 139533 (TRBV19, TRBJ1-1)
CASSITGWETEAFF

SEQ ID NO: 279067 - protein, 17 aa, Homo sapiens
  CDR3 for alpha chain variable domain of TCR clone 139534 (TRAV13-1, TRAJ52)
WAAGRNAGGTSYGKLTC

SEQ ID NO: 279068 - protein, 12 aa, Homo sapiens
  CDR3 for beta chain variable domain of TCR clone 139534 (TRBV29-1, TRBJ1-3)
CSTRDSGNTIYF

SEQ ID NO: 279069 - protein, 17 aa, Homo sapiens
  CDR3 for alpha chain variable domain of TCR clone 139535 (TRAV21, TRAJ40)
CAVRPQSGTSGTYKYIF

SEQ ID NO: 279070 - protein, 13 aa, Homo sapiens
  CDR3 for beta chain variable domain of TCR clone 139535 (TRBV12-4, TRBJ2-7)
CARSPSRDTPRSF

SEQ ID NO: 279071 - protein, 15 aa, Homo sapiens
  CDR3 for alpha chain variable domain of TCR clone 139536 (TRAV2, TRAJ13)
CATPSYSGGYQKITF

SEQ ID NO: 279072 - protein, 17 aa, Homo sapiens
  CDR3 for beta chain variable domain of TCR clone 139536 (TRBV13, TRBJ2-3)
CASSLSRVAGGRNTQYF

SEQ ID NO: 279073 - protein, 12 aa, Homo sapiens
  CDR3 for alpha chain variable domain of TCR clone 139537 (TRAV16, TRAJ10)
CSRPGGGNKLTF

SEQ ID NO: 279074 - protein, 13 aa, Homo sapiens
  CDR3 for beta chain variable domain of TCR clone 139537 (TRBV15, TRBJ2-7)
CATSTTGHYEQYF

SEQ ID NO: 279075 - protein, 11 aa, Homo sapiens
  CDR3 for alpha chain variable domain of TCR clone 139538 (TRAV12-1, TRAJ21)
CVVYNFNKFYF

SEQ ID NO: 279076 - protein, 14 aa, Homo sapiens
  CDR3 for beta chain variable domain of TCR clone 139538 (TRBV19, TRBJ2-7)
CASSMGQGALEQYF

SEQ ID NO: 279077 - protein, 16 aa, Homo sapiens
  CDR3 for alpha chain variable domain of TCR clone 139539 (TRAV26-1, TRAJ32)
CIVRTNYGGATNKRIF

SEQ ID NO: 279078 - protein, 20 aa, Homo sapiens
  CDR3 for beta chain variable domain of TCR clone 139539 (TRBV7-8, TRBJ2-2)
CASSHLFPGPTIHITGELFF

SEQ ID NO: 279079 - protein, 14 aa, Homo sapiens
  CDR3 for alpha chain variable domain of TCR clone 139540 (TRAV13-1, TRAJ44)
CAAKATGTASKLTF

SEQ ID NO: 279080 - protein, 12 aa, Homo sapiens
  CDR3 for beta chain variable domain of TCR clone 139540 (TRBV12-4, TRBJ2-7)
CASSLGGYEQYF

SEQ ID NO: 279081 - protein, 17 aa, Homo sapiens
  CDR3 for alpha chain variable domain of TCR clone 139541 (TRAV36/DV7, TRAJ52)
CAVAQRAGGTSYGKLTF

SEQ ID NO: 279082 - protein, 21 aa, Homo sapiens
  CDR3 for beta chain variable domain of TCR clone 139541 (TRBV2, TRBJ2-7)
CASRGTTQLAALSTPFYEQYF

SEQ ID NO: 279083 - protein, 14 aa, Homo sapiens
  CDR3 for alpha chain variable domain of TCR clone 139542 (TRAV35, TRAJ33)
CAGSSQDSNYQLIW

SEQ ID NO: 279084 - protein, 15 aa, Homo sapiens
  CDR3 for beta chain variable domain of TCR clone 139542 (TRBV20-1, TRBJ2-7)
CSAESGTCGAYEQYF

SEQ ID NO: 279085 - protein, 12 aa, Homo sapiens
  CDR3 for alpha chain variable domain of TCR clone 139543 (TRAV21, TRAJ13)
PGPSGGYQKVTF

SEQ ID NO: 279086 - protein, 13 aa, Homo sapiens
  CDR3 for beta chain variable domain of TCR clone 139543 (TRBV19, TRBJ1-2)
CASSVPGQDGYTF

SEQ ID NO: 279087 - protein, 16 aa, Homo sapiens
  CDR3 for alpha chain variable domain of TCR clone 139544 (TRAV27, TRAJ52)
CAEAGAGGTSYGKLTF

SEQ ID NO: 279088 - protein, 17 aa, Homo sapiens
  CDR3 for beta chain variable domain of TCR clone 139544 (TRBV24-1, TRBJ2-3)
CATSDLPSGEDTDTQYF

SEQ ID NO: 279089 - protein, 14 aa, Homo sapiens
  CDR3 for alpha chain variable domain of TCR clone 139545 (TRAV1-2, TRAJ8)
CAVREDTGFQKLVF

SEQ ID NO: 279090 - protein, 15 aa, Homo sapiens
  CDR3 for beta chain variable domain of TCR clone 139545 (TRBV19, TRBJ2-1)
CASNARVGAYNEQFF

SEQ ID NO: 279091 - protein, 14 aa, Homo sapiens
  CDR3 for alpha chain variable domain of TCR clone 139546 (TRAV12-2, TRAJ11)
CAVEGGSGYSTLTF

SEQ ID NO: 279092 - protein, 15 aa, Homo sapiens
  CDR3 for beta chain variable domain of TCR clone 139546 (TRBV6-3, TRBJ2-7)
CASSSPGTVFYEQYF

SEQ ID NO: 279093 - protein, 14 aa, Homo sapiens
  CDR3 for alpha chain variable domain of TCR clone 139547 (TRAV12-3, TRAJ10)
SHLPLTGGGNKLTF

SEQ ID NO: 279094 - protein, 18 aa, Homo sapiens
  CDR3 for beta chain variable domain of TCR clone 139547 (TRBV4-1, TRBJ1-5)
CASSQGPRGQGLNQPQHF

SEQ ID NO: 279095 - protein, 13 aa, Homo sapiens
  CDR3 for alpha chain variable domain of TCR clone 139548 (TRAV12-3, TRAJ54)
CAMTLQGAQKLLF

SEQ ID NO: 279096 - protein, 14 aa, Homo sapiens
  CDR3 for beta chain variable domain of TCR clone 139548 (TRBV4-1, TRBJ2-2)
CASSQAVNTGELFF

SEQ ID NO: 279097 - protein, 14 aa, Homo sapiens
  CDR3 for alpha chain variable domain of TCR clone 139549 (TRAV36/DV7, TRAJ13)
WGSGENGGYQKVTF

SEQ ID NO: 279098 - protein, 15 aa, Homo sapiens
  CDR3 for beta chain variable domain of TCR clone 139549 (TRBV19, TRBJ2-1)
CASSTGTSSYNQQFF

SEQ ID NO: 279099 - protein, 14 aa, Homo sapiens
  CDR3 for alpha chain variable domain of TCR clone 139550 (TRAV8-4, TRAJ38)
CARLTAGNNRNLIW

SEQ ID NO: 279100 - protein, 12 aa, Homo sapiens
  CDR3 for beta chain variable domain of TCR clone 139550 (TRBV6-1, TRBJ2-7)
CASSEPLYEQYF

SEQ ID NO: 279101 - protein, 18 aa, Homo sapiens
  CDR3 for alpha chain variable domain of TCR clone 139551 (TRAV26-2, TRAJ54)
CILGDVEVGIQGAQKLVF

SEQ ID NO: 279102 - protein, 14 aa, Homo sapiens
  CDR3 for beta chain variable domain of TCR clone 139551 (TRBV28, TRBJ2-3)
CASSLTDLLDTQYF

SEQ ID NO: 279103 - protein, 14 aa, Homo sapiens
  CDR3 for alpha chain variable domain of TCR clone 139552 (TRAV2, TRAJ37)
CAVEDLGNTGKLIF

SEQ ID NO: 279104 - protein, 15 aa, Homo sapiens
  CDR3 for beta chain variable domain of TCR clone 139552 (TRBV25-1, TRBJ2-2)
CASSAQGDEHRGAVF

SEQ ID NO: 279105 - protein, 21 aa, Homo sapiens
  CDR3 for alpha chain variable domain of TCR clone 139553 (TRAV17, TRAJ57)
TASRAADTASYFRANPEKLVF

SEQ ID NO: 279106 - protein, 16 aa, Homo sapiens
  CDR3 for beta chain variable domain of TCR clone 139553 (TRBV11-2, TRBJ2-3)
CDSSFQGRGALDTQYF

SEQ ID NO: 279107 - protein, 13 aa, Homo sapiens
  CDR3 for alpha chain variable domain of TCR clone 139554 (TRAV8-3, TRAJ43)
CAVGADNNNDMRF

SEQ ID NO: 279108 - protein, 14 aa, Homo sapiens
  CDR3 for beta chain variable domain of TCR clone 139554 (TRBV20-1, TRBJ2-3)
CSARGGTSTDTQYF

SEQ ID NO: 279109 - protein, 15 aa, Homo sapiens
  CDR3 for alpha chain variable domain of TCR clone 139555 (TRAV3, TRAJ5)
CAVRDLDTGRRALTF

SEQ ID NO: 279110 - protein, 18 aa, Homo sapiens
  CDR3 for beta chain variable domain of TCR clone 139555 (TRBV11-2, TRBJ2-7)
CASSWRTVQTGQSYEQYF

SEQ ID NO: 279111 - protein, 13 aa, Homo sapiens
  CDR3 for alpha chain variable domain of TCR clone 139556 (TRAV13-1, TRAJ6)
CAARRGGSYIPTF

SEQ ID NO: 279112 - protein, 13 aa, Homo sapiens
  CDR3 for beta chain variable domain of TCR clone 139556 (TRBV15, TRBJ1-6)
CATSGGVNSPLHF

SEQ ID NO: 279113 - protein, 13 aa, Homo sapiens
  CDR3 for alpha chain variable domain of TCR clone 139557 (TRAV14/DV4, TRAJ16)
CAMRGTDGQKLPF

SEQ ID NO: 279114 - protein, 18 aa, Homo sapiens
  CDR3 for beta chain variable domain of TCR clone 139557 (TRBV4-1, TRBJ2-3)
CASSHQLAGGRSTDTQYF

SEQ ID NO: 279115 - protein, 11 aa, Homo sapiens
  CDR3 for alpha chain variable domain of TCR clone 139558 (TRAV2, TRAJ21)
CAVFNFNKFYF

SEQ ID NO: 279116 - protein, 16 aa, Homo sapiens
  CDR3 for beta chain variable domain of TCR clone 139558 (TRBV20-1, TRBJ1-2)
CSASMGQGVANYGYTF

SEQ ID NO: 279117 - protein, 12 aa, Homo sapiens
  CDR3 for alpha chain variable domain of TCR clone 139559 (TRAV3, TRAJ26)
CAVRDYGQNFVF

SEQ ID NO: 279118 - protein, 16 aa, Homo sapiens
  CDR3 for beta chain variable domain of TCR clone 139559 (TRBV11-2, TRBJ1-2)
CASSPSRREANYGYTF

SEQ ID NO: 279119 - protein, 14 aa, Homo sapiens
  CDR3 for alpha chain variable domain of TCR clone 139560 (TRAV26-1, TRAJ38)
RIADNAGNNRKLLW

SEQ ID NO: 279120 - protein, 13 aa, Homo sapiens
  CDR3 for beta chain variable domain of TCR clone 139560 (TRBV20-1, TRBJ1-1)
CSARGGGNTEAFF

SEQ ID NO: 279121 - protein, 11 aa, Homo sapiens
  CDR3 for alpha chain variable domain of TCR clone 139561 (TRAV27, TRAJ47)
CAGAYGNKLVF

SEQ ID NO: 279122 - protein, 14 aa, Homo sapiens
  CDR3 for beta chain variable domain of TCR clone 139561 (TRBV19, TRBJ2-1)
CASPTFVLSGEQFF

SEQ ID NO: 279123 - protein, 15 aa, Homo sapiens
  CDR3 for alpha chain variable domain of TCR clone 139562 (TRAV5, TRAJ47)
CAESINRGYGNKLVF

SEQ ID NO: 279124 - protein, 17 aa, Homo sapiens
  CDR3 for beta chain variable domain of TCR clone 139562 (TRBV20-1, TRBJ2-2)
CSASGSGQGGLTGELFF

SEQ ID NO: 279125 - protein, 12 aa, Homo sapiens
  CDR3 for alpha chain variable domain of TCR clone 139563 (TRAV3, TRAJ43)
CAVRDPNNDMCF

SEQ ID NO: 279126 - protein, 15 aa, Homo sapiens
  CDR3 for beta chain variable domain of TCR clone 139563 (TRBV27, TRBJ1-5)
CASSLGTGFDQHQHF

SEQ ID NO: 279127 - protein, 15 aa, Homo sapiens
  CDR3 for alpha chain variable domain of TCR clone 139564 (TRAV34, TRAJ38)
CGADFTPGNNRKLTW

SEQ ID NO: 279128 - protein, 16 aa, Homo sapiens
  CDR3 for beta chain variable domain of TCR clone 139564 (TRBV12-5, TRBJ2-5)
CASGPRTSGNQESQYF

SEQ ID NO: 279129 - protein, 14 aa, Homo sapiens
  CDR3 for alpha chain variable domain of TCR clone 139565 (TRAV12-2, TRAJ13)
CAVKKTGGYQNVTF

SEQ ID NO: 279130 - protein, 15 aa, Homo sapiens
  CDR3 for beta chain variable domain of TCR clone 139565 (TRBV27, TRBJ2-1)
CASSNGGGSYNEQFF

SEQ ID NO: 279131 - protein, 15 aa, Homo sapiens
  CDR3 for alpha chain variable domain of TCR clone 139566 (TRAV21, TRAJ53)
CATLNSGGSNYKLTF

SEQ ID NO: 279132 - protein, 16 aa, Homo sapiens
  CDR3 for beta chain variable domain of TCR clone 139566 (TRBV20-1, TRBJ1-4)
CSAPGQGLLTNDKLFF

SEQ ID NO: 279133 - protein, 15 aa, Homo sapiens
  CDR3 for alpha chain variable domain of TCR clone 139567 (TRAV8-6, TRAJ9)
CAVSDRDTGGFKTIF

SEQ ID NO: 279134 - protein, 16 aa, Homo sapiens
  CDR3 for beta chain variable domain of TCR clone 139567 (TRBV19, TRBJ2-3)
CASSPECDRGTDTQYF

SEQ ID NO: 279135 - protein, 17 aa, Homo sapiens
  CDR3 for alpha chain variable domain of TCR clone 139568 (TRAV3, TRAJ6)
CAVRDGPRAGGSYIPTF

SEQ ID NO: 279136 - protein, 14 aa, Homo sapiens
  CDR3 for beta chain variable domain of TCR clone 139568 (TRBV7-3, TRBJ1-1)
CASSRQGGDTEAFF

SEQ ID NO: 279137 - protein, 14 aa, Homo sapiens
  CDR3 for alpha chain variable domain of TCR clone 139569 (TRAV4, TRAJ43)
CPVGSMYNNNDMRF

SEQ ID NO: 279138 - protein, 21 aa, Homo sapiens
  CDR3 for beta chain variable domain of TCR clone 139569 (TRBV11-1, TRBJ2-1)
CASSARERLRPEGPSYNEQFF

SEQ ID NO: 279139 - protein, 14 aa, Homo sapiens
  CDR3 for alpha chain variable domain of TCR clone 139570 (TRAV1-2, TRAJ8)
CAVREDTGFQKLVF

SEQ ID NO: 279140 - protein, 15 aa, Homo sapiens
  CDR3 for beta chain variable domain of TCR clone 139570 (TRBV9, TRBJ1-6)
CASSVAWTGDSPLHF

SEQ ID NO: 279141 - protein, 17 aa, Homo sapiens
  CDR3 for alpha chain variable domain of TCR clone 139571 (TRAV27, TRAJ18)
CAGLHRGRGSTLGRLYL

SEQ ID NO: 279142 - protein, 14 aa, Homo sapiens
  CDR3 for beta chain variable domain of TCR clone 139571 (TRBV20-1, TRBJ1-5)
CSARGRGSNQPQHF

SEQ ID NO: 279143 - protein, 14 aa, Homo sapiens
  CDR3 for alpha chain variable domain of TCR clone 139572 (TRAV3, TRAJ28)
CAERRGAGSYQLTF

SEQ ID NO: 279144 - protein, 16 aa, Homo sapiens
  CDR3 for beta chain variable domain of TCR clone 139572 (TRBV4-1, TRBJ2-7)
CASSQEWTSGPLEQYF

SEQ ID NO: 279145 - protein, 15 aa, Homo sapiens
  CDR3 for alpha chain variable domain of TCR clone 139573 (TRAV17, TRAJ57)
CATGPFQGGSEKLVF

SEQ ID NO: 279146 - protein, 17 aa, Homo sapiens
  CDR3 for beta chain variable domain of TCR clone 139573 (TRBV20-1, TRBJ2-1)
CSASSSGLAGSYNEQFF

SEQ ID NO: 279147 - protein, 15 aa, Homo sapiens
  CDR3 for alpha chain variable domain of TCR clone 139574 (TRAV27, TRAJ50)
CAGRERGTSSDKVIF

SEQ ID NO: 279148 - protein, 16 aa, Homo sapiens
  CDR3 for beta chain variable domain of TCR clone 139574 (TRBV10-3, TRBJ1-5)
CAISDQVGAPNQPQHF

SEQ ID NO: 279149 - protein, 14 aa, Homo sapiens
  CDR3 for alpha chain variable domain of TCR clone 139575 (TRAV1-1, TRAJ23)
CAVSIYNQGGKLVF

SEQ ID NO: 279150 - protein, 16 aa, Homo sapiens
  CDR3 for beta chain variable domain of TCR clone 139575 (TRBV2, TRBJ1-3)
CASSRTGGSTGNTIYF

SEQ ID NO: 279151 - protein, 12 aa, Homo sapiens
  CDR3 for alpha chain variable domain of TCR clone 139576 (TRAV38-1, TRAJ34)
CAFMKETDKLIF

SEQ ID NO: 279152 - protein, 16 aa, Homo sapiens
  CDR3 for beta chain variable domain of TCR clone 139576 (TRBV7-8, TRBJ2-6)
CQQRRDRGPGANVLTF

SEQ ID NO: 279153 - protein, 16 aa, Homo sapiens
  CDR3 for alpha chain variable domain of TCR clone 139577 (TRAV20, TRAJ53)
CAVQAESGGSNYKLTF

SEQ ID NO: 279154 - protein, 16 aa, Homo sapiens
  CDR3 for beta chain variable domain of TCR clone 139577 (TRBV19, TRBJ1-6)
CASSVAPVAGNSPLHF

SEQ ID NO: 279155 - protein, 14 aa, Homo sapiens
  CDR3 for alpha chain variable domain of TCR clone 139578 (TRAV23/DV6, TRAJ11)
CAALIGGGNSTPPF

SEQ ID NO: 279156 - protein, 13 aa, Homo sapiens
  CDR3 for beta chain variable domain of TCR clone 139578 (TRBV11-3, TRBJ1-1)
CASSLGGNTEAFF

SEQ ID NO: 279157 - protein, 14 aa, Homo sapiens
  CDR3 for alpha chain variable domain of TCR clone 139579 (TRAV12-1, TRAJ27)
CGELIRTNAGKSTF

SEQ ID NO: 279158 - protein, 15 aa, Homo sapiens
  CDR3 for beta chain variable domain of TCR clone 139579 (TRBV19, TRBJ1-1)
CASTSGQIQNTEAFF

SEQ ID NO: 279159 - protein, 13 aa, Homo sapiens
  CDR3 for alpha chain variable domain of TCR clone 139580 (TRAV26-1, TRAJ29)
CIVRRSGNTPLVF

SEQ ID NO: 279160 - protein, 17 aa, Homo sapiens
  CDR3 for beta chain variable domain of TCR clone 139580 (TRBV19, TRBJ1-1)
CASSIAGRVLMNTEAFF

SEQ ID NO: 279161 - protein, 14 aa, Homo sapiens
  CDR3 for alpha chain variable domain of TCR clone 139581 (TRAV12-2, TRAJ53)
CHERGGGSNYKLTF

SEQ ID NO: 279162 - protein, 17 aa, Homo sapiens
  CDR3 for beta chain variable domain of TCR clone 139581 (TRBV7-3, TRBJ2-3)
RASSLMKRMRGAATQYF

SEQ ID NO: 279163 - protein, 15 aa, Homo sapiens
  CDR3 for alpha chain variable domain of TCR clone 139582 (TRAV17, TRAJ57)
CATGPSQAGSEKLVF

SEQ ID NO: 279164 - protein, 17 aa, Homo sapiens
  CDR3 for beta chain variable domain of TCR clone 139582 (TRBV20-1, TRBJ2-1)
CSASSSGLAGSYNEQFF

SEQ ID NO: 279165 - protein, 12 aa, Homo sapiens
  CDR3 for alpha chain variable domain of TCR clone 139583 (TRAV21, TRAJ37)
CAVRGNTGKLLF

SEQ ID NO: 279166 - protein, 14 aa, Homo sapiens
  CDR3 for beta chain variable domain of TCR clone 139583 (TRBV19, TRBJ2-1)
CASEVTGARNEQFF

SEQ ID NO: 279167 - protein, 17 aa, Homo sapiens
  CDR3 for alpha chain variable domain of TCR clone 139584 (TRAV3, TRAJ6)
CAVRDGARAGGSYIPTF

SEQ ID NO: 279168 - protein, 14 aa, Homo sapiens
  CDR3 for beta chain variable domain of TCR clone 139584 (TRBV7-2, TRBJ2-7)
CASSPKTSFYEQFF

SEQ ID NO: 279169 - protein, 17 aa, Homo sapiens
  CDR3 for alpha chain variable domain of TCR clone 139585 (TRAV3, TRAJ28)
CAVREAYSGAGSYQLTF

SEQ ID NO: 279170 - protein, 15 aa, Homo sapiens
  CDR3 for beta chain variable domain of TCR clone 139585 (TRBV19, TRBJ2-7)
CASSPAGSGEALRYF

SEQ ID NO: 279171 - protein, 13 aa, Homo sapiens
  CDR3 for alpha chain variable domain of TCR clone 139586 (TRAV30, TRAJ24)
RGTVTDSWGKLQF

SEQ ID NO: 279172 - protein, 15 aa, Homo sapiens
  CDR3 for beta chain variable domain of TCR clone 139586 (TRBV4-1, TRBJ2-1)
YASSQDPGNYNEQFF

SEQ ID NO: 279173 - protein, 15 aa, Homo sapiens
  CDR3 for alpha chain variable domain of TCR clone 139587 (TRAV3, TRAJ20)
CAVRDIKLSDYKLSF

SEQ ID NO: 279174 - protein, 15 aa, Homo sapiens
  CDR3 for beta chain variable domain of TCR clone 139587 (TRBV9, TRBJ1-6)
CASSVAETGDSPLHF

SEQ ID NO: 279175 - protein, 12 aa, Homo sapiens
  CDR3 for alpha chain variable domain of TCR clone 139588 (TRAV26-2, TRAJ21)
CILKGNFNKFYF

SEQ ID NO: 279176 - protein, 14 aa, Homo sapiens
  CDR3 for beta chain variable domain of TCR clone 139588 (TRBV7-9, TRBJ1-1)
CASTPLQAYTEAVF

SEQ ID NO: 279177 - protein, 15 aa, Homo sapiens
  CDR3 for alpha chain variable domain of TCR clone 139589 (TRAV12-1, TRAJ42)
CVVKTGGGSQGNLIF

SEQ ID NO: 279178 - protein, 13 aa, Homo sapiens
  CDR3 for beta chain variable domain of TCR clone 139589 (TRBV19, TRBJ1-2)
CASSQGQVYGYTF

SEQ ID NO: 279179 - protein, 16 aa, Homo sapiens
  CDR3 for alpha chain variable domain of TCR clone 139590 (TRAV14/DV4, TRAJ20)
CAIREGRSRDDYKLSF

SEQ ID NO: 279180 - protein, 15 aa, Homo sapiens
  CDR3 for beta chain variable domain of TCR clone 139590 (TRBV20-1, TRBJ2-1)
CNASSAGSSYNEQFF

SEQ ID NO: 279181 - protein, 13 aa, Homo sapiens
  CDR3 for alpha chain variable domain of TCR clone 139591 (TRAV3, TRAJ20)
CAVRDTPRYKLSF

SEQ ID NO: 279182 - protein, 15 aa, Homo sapiens
  CDR3 for beta chain variable domain of TCR clone 139591 (TRBV11-2, TRBJ2-2)
CASSSDRVNAGELFF

SEQ ID NO: 279183 - protein, 12 aa, Homo sapiens
  CDR3 for alpha chain variable domain of TCR clone 139592 (TRAV12-3, TRAJ17)
CAMTLTGNKLTF

SEQ ID NO: 279184 - protein, 16 aa, Homo sapiens
  CDR3 for beta chain variable domain of TCR clone 139592 (TRBV10-3, TRBJ1-6)
CAISERRGQGNSPLHF

SEQ ID NO: 279185 - protein, 12 aa, Homo sapiens
  CDR3 for alpha chain variable domain of TCR clone 139593 (TRAV27, TRAJ33)
CAGDGSNYQLIW

SEQ ID NO: 279186 - protein, 12 aa, Homo sapiens
  CDR3 for beta chain variable domain of TCR clone 139593 (TRBV11-2, TRBJ2-2)
CASSLGGGELFF

SEQ ID NO: 279187 - protein, 15 aa, Homo sapiens
  CDR3 for alpha chain variable domain of TCR clone 139594 (TRAV21, TRAJ24)
CAARCSTDSWGQLQF

SEQ ID NO: 279188 - protein, 15 aa, Homo sapiens
  CDR3 for beta chain variable domain of TCR clone 139594 (TRBV5-1, TRBJ2-1)
CASSPPRAPYNEQFF

SEQ ID NO: 279189 - protein, 16 aa, Homo sapiens
  CDR3 for alpha chain variable domain of TCR clone 139595 (TRAV1-2, TRAJ10)
CAVRGGLTGGGNKLTF

SEQ ID NO: 279190 - protein, 15 aa, Homo sapiens
  CDR3 for beta chain variable domain of TCR clone 139595 (TRBV29-1, TRBJ2-1)
CSVGRHALFYNEQFF

SEQ ID NO: 279191 - protein, 14 aa, Homo sapiens
  CDR3 for alpha chain variable domain of TCR clone 139596 (TRAV12-1, TRAJ12)
CVVTSGDSSYNLIF

SEQ ID NO: 279192 - protein, 16 aa, Homo sapiens
  CDR3 for beta chain variable domain of TCR clone 139596 (TRBV4-1, TRBJ2-3)
CASSQSTSGAEDTQYF

SEQ ID NO: 279193 - protein, 12 aa, Homo sapiens
  CDR3 for alpha chain variable domain of TCR clone 139597 (TRAV12-1, TRAJ6)
CVVSERSYIPTF

SEQ ID NO: 279194 - protein, 21 aa, Homo sapiens
  CDR3 for beta chain variable domain of TCR clone 139597 (TRBV7-3, TRBJ2-1)
CASSVGPSGSPVLRARDTAHR

SEQ ID NO: 279195 - protein, 12 aa, Homo sapiens
  CDR3 for alpha chain variable domain of TCR clone 139598 (TRAV13-1, TRAJ21)
CAAKEGFNKFYF

SEQ ID NO: 279196 - protein, 15 aa, Homo sapiens
  CDR3 for beta chain variable domain of TCR clone 139598 (TRBV13, TRBJ1-5)
CASSFGQGGVQPQHF

SEQ ID NO: 279197 - protein, 14 aa, Homo sapiens
  CDR3 for alpha chain variable domain of TCR clone 139599 (TRAV12-2, TRAJ13)
CAVNKTGGYQKVTF

SEQ ID NO: 279198 - protein, 15 aa, Homo sapiens
  CDR3 for beta chain variable domain of TCR clone 139599 (TRBV20-1, TRBJ2-7)
CSARDRVSGMDEQYF

SEQ ID NO: 279199 - protein, 16 aa, Homo sapiens
  CDR3 for alpha chain variable domain of TCR clone 139600 (TRAV30, TRAJ24)
CGTEIVDADSWWKFQF

SEQ ID NO: 279200 - protein, 12 aa, Homo sapiens
  CDR3 for beta chain variable domain of TCR clone 139600 (TRBV11-2, TRBJ2-2)
CASSLGGGELFF

SEQ ID NO: 279201 - protein, 12 aa, Homo sapiens
  CDR3 for alpha chain variable domain of TCR clone 139601 (TRAV17, TRAJ49)
CATVTTGNQFSF

SEQ ID NO: 279202 - protein, 18 aa, Homo sapiens
  CDR3 for beta chain variable domain of TCR clone 139601 (TRBV11-2, TRBJ2-6)
CASSLNPFLGTGANVLTF

SEQ ID NO: 279203 - protein, 14 aa, Homo sapiens
  CDR3 for alpha chain variable domain of TCR clone 139602 (TRAV8-4, TRAJ9)
CAVRINTGGFKTIF

SEQ ID NO: 279204 - protein, 15 aa, Homo sapiens
  CDR3 for beta chain variable domain of TCR clone 139602 (TRBV18, TRBJ1-1)
CASSPSSWVNTEAFF

SEQ ID NO: 279205 - protein, 14 aa, Homo sapiens
  CDR3 for alpha chain variable domain of TCR clone 139603 (TRAV12-2, TRAJ24)
CAVTPADSWGKLQL

SEQ ID NO: 279206 - protein, 13 aa, Homo sapiens
  CDR3 for beta chain variable domain of TCR clone 139603 (TRBV7-9, TRBJ1-2)
CASSVKQNYGYTF

SEQ ID NO: 279207 - protein, 12 aa, Homo sapiens
  CDR3 for alpha chain variable domain of TCR clone 139604 (TRAV12-1, TRAJ34)
CVVTFNTDKLIF

SEQ ID NO: 279208 - protein, 14 aa, Homo sapiens
  CDR3 for beta chain variable domain of TCR clone 139604 (TRBV19, TRBJ1-1)
CASLRTGLNIEAFF

SEQ ID NO: 279209 - protein, 16 aa, Homo sapiens
  CDR3 for alpha chain variable domain of TCR clone 139605 (TRAV17, TRAJ28)
CATASVPGAGSYQLTF

SEQ ID NO: 279210 - protein, 14 aa, Homo sapiens
  CDR3 for beta chain variable domain of TCR clone 139605 (TRBV19, TRBJ2-1)
CASEVTGARNEQFF

SEQ ID NO: 279211 - protein, 11 aa, Homo sapiens
  CDR3 for alpha chain variable domain of TCR clone 139606 (TRAV3, TRAJ21)
CAVGNFNKFYF

SEQ ID NO: 279212 - protein, 16 aa, Homo sapiens
  CDR3 for beta chain variable domain of TCR clone 139606 (TRBV5-1, TRBJ2-5)
CASSSSGLVGAETQYF

SEQ ID NO: 279213 - protein, 14 aa, Homo sapiens
  CDR3 for alpha chain variable domain of TCR clone 139607 (TRAV16, TRAJ26)
CALSSANYGQIFVF

SEQ ID NO: 279214 - protein, 16 aa, Homo sapiens
  CDR3 for beta chain variable domain of TCR clone 139607 (TRBV20-1, TRBJ1-4)
CSAPGQGLLTNEKLFF

SEQ ID NO: 279215 - protein, 16 aa, Homo sapiens
  CDR3 for alpha chain variable domain of TCR clone 139608 (TRAV12-2, TRAJ52)
CRLANAGGTSYGKLTF

SEQ ID NO: 279216 - protein, 14 aa, Homo sapiens
  CDR3 for beta chain variable domain of TCR clone 139608 (TRBV19, TRBJ2-1)
CASSAGLSGNEQFF

SEQ ID NO: 279217 - protein, 13 aa, Homo sapiens
  CDR3 for alpha chain variable domain of TCR clone 139609 (TRAV1-2, TRAJ9)
CAALNTGGFKTIF

SEQ ID NO: 279218 - protein, 13 aa, Homo sapiens
  CDR3 for beta chain variable domain of TCR clone 139609 (TRBV19, TRBJ1-6)
CASSVPGQDGYTF

SEQ ID NO: 279219 - protein, 12 aa, Homo sapiens
  CDR3 for alpha chain variable domain of TCR clone 139610 (TRAV13-1, TRAJ21)
CAAKEGFNKFYF

SEQ ID NO: 279220 - protein, 13 aa, Homo sapiens
  CDR3 for beta chain variable domain of TCR clone 139610 (TRBV7-3, TRBJ1-1)
CASSQDLGAEAFF

SEQ ID NO: 279221 - protein, 16 aa, Homo sapiens
  CDR3 for alpha chain variable domain of TCR clone 139611 (TRAV30, TRAJ24)
CGAEIVDADSWGKFQF

SEQ ID NO: 279222 - protein, 14 aa, Homo sapiens
  CDR3 for beta chain variable domain of TCR clone 139611 (TRBV7-2, TRBJ2-7)
CASSPKTSFYEQYF

SEQ ID NO: 279223 - protein, 14 aa, Homo sapiens
  CDR3 for alpha chain variable domain of TCR clone 139612 (TRAV12-1, TRAJ17)
CVVNPKAAGNKLTF

SEQ ID NO: 279224 - protein, 16 aa, Homo sapiens
  CDR3 for beta chain variable domain of TCR clone 139612 (TRBV20-1, TRBJ2-1)
FSASASGYSSYNEQFF

SEQ ID NO: 279225 - protein, 12 aa, Homo sapiens
  CDR3 for alpha chain variable domain of TCR clone 139613 (TRAV8-3, TRAJ26)
CSGYNYGQNFVF

SEQ ID NO: 279226 - protein, 15 aa, Homo sapiens
  CDR3 for beta chain variable domain of TCR clone 139613 (TRBV20-1, TRBJ2-3)
CSARRGEAITDTQYF

SEQ ID NO: 279227 - protein, 14 aa, Homo sapiens
  CDR3 for alpha chain variable domain of TCR clone 139614 (TRAV1-2, TRAJ29)
CAVRELTSATPLVV

SEQ ID NO: 279228 - protein, 14 aa, Homo sapiens
  CDR3 for beta chain variable domain of TCR clone 139614 (TRBV3-1, TRBJ2-5)
CASSQGPDQETQYF

SEQ ID NO: 279229 - protein, 14 aa, Homo sapiens
  CDR3 for alpha chain variable domain of TCR clone 139615 (TRAV3, TRAJ7)
CAVREEEREQQTRF

SEQ ID NO: 279230 - protein, 12 aa, Homo sapiens
  CDR3 for beta chain variable domain of TCR clone 139615 (TRBV7-8, TRBJ2-7)
CASSLGDSEQYF

SEQ ID NO: 279231 - protein, 10 aa, Homo sapiens
  CDR3 for alpha chain variable domain of TCR clone 139616 (TRAV1-2, TRAJ31)
CVSEDARLMF

SEQ ID NO: 279232 - protein, 13 aa, Homo sapiens
  CDR3 for beta chain variable domain of TCR clone 139616 (TRBV4-1, TRBJ2-7)
CASSQGQAYEQYF

SEQ ID NO: 279233 - protein, 14 aa, Homo sapiens
  CDR3 for alpha chain variable domain of TCR clone 139617 (TRAV34, TRAJ44)
CGADGTGTASKLTF

SEQ ID NO: 279234 - protein, 16 aa, Homo sapiens
  CDR3 for beta chain variable domain of TCR clone 139617 (TRBV5-1, TRBJ2-5)
CASSLALLRAGETQYF

SEQ ID NO: 279235 - protein, 16 aa, Homo sapiens
  CDR3 for alpha chain variable domain of TCR clone 139618 (TRAV3, TRAJ10)
CAVRDMRAGGGNKLTF

SEQ ID NO: 279236 - protein, 16 aa, Homo sapiens
  CDR3 for beta chain variable domain of TCR clone 139618 (TRBV28, TRBJ2-7)
CASSPWVATGDLSQYF

SEQ ID NO: 279237 - protein, 14 aa, Homo sapiens
  CDR3 for alpha chain variable domain of TCR clone 139619 (TRAV13-1, TRAJ9)
CAASALTGGFKTIF

SEQ ID NO: 279238 - protein, 13 aa, Homo sapiens
  CDR3 for beta chain variable domain of TCR clone 139619 (TRBV20-1, TRBJ1-1)
CSAGAVGNAEAFF

SEQ ID NO: 279239 - protein, 15 aa, Homo sapiens
  CDR3 for alpha chain variable domain of TCR clone 139620 (TRAV6, TRAJ4)
CALGGFSGGYNKLIF

SEQ ID NO: 279240 - protein, 13 aa, Homo sapiens
  CDR3 for beta chain variable domain of TCR clone 139620 (TRBV19, TRBJ1-2)
CASSVPGQDGYNF

SEQ ID NO: 279241 - protein, 12 aa, Homo sapiens
  CDR3 for alpha chain variable domain of TCR clone 139621 (TRAV30, TRAJ43)
CGTEERGNDMRF

SEQ ID NO: 279242 - protein, 14 aa, Homo sapiens
  CDR3 for beta chain variable domain of TCR clone 139621 (TRBV4-2, TRBJ2-1)
CASGLDRAYNEQFF

SEQ ID NO: 279243 - protein, 15 aa, Homo sapiens
  CDR3 for alpha chain variable domain of TCR clone 139622 (TRAV3, TRAJ12)
CAVRDIRDSSYNLIF

SEQ ID NO: 279244 - protein, 15 aa, Homo sapiens
  CDR3 for beta chain variable domain of TCR clone 139622 (TRBV27, TRBJ2-7)
CASSLRNEQGYEQYF

SEQ ID NO: 279245 - protein, 15 aa, Homo sapiens
  CDR3 for alpha chain variable domain of TCR clone 139623 (TRAV13-1, TRAJ52)
CAASSPSTSYGKLTF

SEQ ID NO: 279246 - protein, 13 aa, Homo sapiens
  CDR3 for beta chain variable domain of TCR clone 139623 (TRBV27, TRBJ2-5)
CASSLSSLETQYS

SEQ ID NO: 279247 - protein, 15 aa, Homo sapiens
  CDR3 for alpha chain variable domain of TCR clone 139624 (TRAV3, TRAJ32)
CAVSSYGGATNKLIF

SEQ ID NO: 279248 - protein, 13 aa, Homo sapiens
  CDR3 for beta chain variable domain of TCR clone 139624 (TRBV20-1, TRBJ2-7)
CSARPRTNYEQYF

SEQ ID NO: 279249 - protein, 13 aa, Homo sapiens
  CDR3 for alpha chain variable domain of TCR clone 139625 (TRAV3, TRAJ21)
CAVREPDFNKFYL

SEQ ID NO: 279250 - protein, 13 aa, Homo sapiens
  CDR3 for beta chain variable domain of TCR clone 139625 (TRBV9, TRBJ2-1)
CASSPSGGNEQFF

SEQ ID NO: 279251 - protein, 15 aa, Homo sapiens
  CDR3 for alpha chain variable domain of TCR clone 139626 (TRAV12-1, TRAJ10)
CGADILMGGGNKLTF

SEQ ID NO: 279252 - protein, 16 aa, Homo sapiens
  CDR3 for beta chain variable domain of TCR clone 139626 (TRBV20-1, TRBJ2-1)
CSARSTSESSYNEQFF

SEQ ID NO: 279253 - protein, 12 aa, Homo sapiens
  CDR3 for alpha chain variable domain of TCR clone 139627 (TRAV27, TRAJ42)
CAGGGSQGNLIF

SEQ ID NO: 279254 - protein, 16 aa, Homo sapiens
  CDR3 for beta chain variable domain of TCR clone 139627 (TRBV7-6, TRBJ2-1)
CASSAPGPSSYNEQFF

SEQ ID NO: 279255 - protein, 13 aa, Homo sapiens
  CDR3 for alpha chain variable domain of TCR clone 139628 (TRAV20, TRAJ37)
CAGCSSNKGKLIF

SEQ ID NO: 279256 - protein, 17 aa, Homo sapiens
  CDR3 for beta chain variable domain of TCR clone 139628 (TRBV11-2, TRBJ2-1)
CASSLYPPGVEYNEQFF

SEQ ID NO: 279257 - protein, 15 aa, Homo sapiens
  CDR3 for alpha chain variable domain of TCR clone 139629 (TRAV25, TRAJ52)
CAGTSGGTSYGKLTF

SEQ ID NO: 279258 - protein, 16 aa, Homo sapiens
  CDR3 for beta chain variable domain of TCR clone 139629 (TRBV15, TRBJ1-2)
CATSRGPRTGGGGHTF

SEQ ID NO: 279259 - protein, 15 aa, Homo sapiens
  CDR3 for alpha chain variable domain of TCR clone 139630 (TRAV2, TRAJ9)
CAVAALNTGGFKTIF

SEQ ID NO: 279260 - protein, 17 aa, Homo sapiens
  CDR3 for beta chain variable domain of TCR clone 139630 (TRBV24-1, TRBJ2-1)
CATSDVSTSGTYNEQFF

SEQ ID NO: 279261 - protein, 12 aa, Homo sapiens
  CDR3 for alpha chain variable domain of TCR clone 139631 (TRAV8-3, TRAJ26)
CAGDNYGQNFVF

SEQ ID NO: 279262 - protein, 16 aa, Homo sapiens
  CDR3 for beta chain variable domain of TCR clone 139631 (TRBV7-2, TRBJ2-1)
CASSLVAGAGYNEQFF

SEQ ID NO: 279263 - protein, 13 aa, Homo sapiens
  CDR3 for alpha chain variable domain of TCR clone 139632 (TRAV8-2, TRAJ15)
CVVSGPGRNCSDL

SEQ ID NO: 279264 - protein, 15 aa, Homo sapiens
  CDR3 for beta chain variable domain of TCR clone 139632 (TRBV7-9, TRBJ1-6)
CASSSPGRGNSPLHF

SEQ ID NO: 279265 - protein, 12 aa, Homo sapiens
  CDR3 for alpha chain variable domain of TCR clone 139633 (TRAV16, TRAJ10)
CSRTGGGNKLTF

SEQ ID NO: 279266 - protein, 13 aa, Homo sapiens
  CDR3 for beta chain variable domain of TCR clone 139633 (TRBV19, TRBJ2-7)
CASSPRQSYEQYF

SEQ ID NO: 279267 - protein, 15 aa, Homo sapiens
  CDR3 for alpha chain variable domain of TCR clone 139634 (TRAV35, TRAJ58)
CAGRRQETSGSRLTF

SEQ ID NO: 279268 - protein, 13 aa, Homo sapiens
  CDR3 for beta chain variable domain of TCR clone 139634 (TRBV23-1, TRBJ1-4)
CASRGKFNEKLFF

SEQ ID NO: 279269 - protein, 14 aa, Homo sapiens
  CDR3 for alpha chain variable domain of TCR clone 139635 (TRAV16, TRAJ37)
CALDISGNTGKLIF

SEQ ID NO: 279270 - protein, 16 aa, Homo sapiens
  CDR3 for beta chain variable domain of TCR clone 139635 (TRBV20-1, TRBJ1-4)
CSAPGQGLLTNEKLFF

SEQ ID NO: 279271 - protein, 12 aa, Homo sapiens
  CDR3 for alpha chain variable domain of TCR clone 139636 (TRAV13-1, TRAJ49)
CAASIRSNQFYF

SEQ ID NO: 279272 - protein, 14 aa, Homo sapiens
  CDR3 for beta chain variable domain of TCR clone 139636 (TRBV7-2, TRBJ2-1)
CASSPGLAGNAQFF

SEQ ID NO: 279273 - protein, 14 aa, Homo sapiens
  CDR3 for alpha chain variable domain of TCR clone 139637 (TRAV38-1, TRAJ43)
CAFMKNNNNNDMRF

SEQ ID NO: 279274 - protein, 14 aa, Homo sapiens
  CDR3 for beta chain variable domain of TCR clone 139637 (TRBV5-4, TRBJ1-1)
CASSLDSRRDEAFF

SEQ ID NO: 279275 - protein, 14 aa, Homo sapiens
  CDR3 for alpha chain variable domain of TCR clone 139638 (TRAV13-2, TRAJ17)
CAENSKAAGNKLTF

SEQ ID NO: 279276 - protein, 13 aa, Homo sapiens
  CDR3 for beta chain variable domain of TCR clone 139638 (TRBV20-1, TRBJ1-1)
CSAGTVGNTEAFF

SEQ ID NO: 279277 - protein, 14 aa, Homo sapiens
  CDR3 for alpha chain variable domain of TCR clone 139639 (TRAV16, TRAJ42)
CALLAGGSQGNLIF

SEQ ID NO: 279278 - protein, 13 aa, Homo sapiens
  CDR3 for beta chain variable domain of TCR clone 139639 (TRBV7-3, TRBJ1-1)
CASSQDWGAEAFF

SEQ ID NO: 279279 - protein, 14 aa, Homo sapiens
  CDR3 for alpha chain variable domain of TCR clone 139640 (TRAV26-1, TRAJ38)
CIADNAGNNRKLIW

SEQ ID NO: 279280 - protein, 12 aa, Homo sapiens
  CDR3 for beta chain variable domain of TCR clone 139640 (TRBV28, TRBJ2-7)
CASSFSSYEQYF

SEQ ID NO: 279281 - protein, 14 aa, Homo sapiens
  CDR3 for alpha chain variable domain of TCR clone 139641 (TRAV20, TRAJ6)
CAVQERGGSYIPTF

SEQ ID NO: 279282 - protein, 18 aa, Homo sapiens
  CDR3 for beta chain variable domain of TCR clone 139641 (TRBV11-2, TRBJ2-3)
CASSLGGASRGAPNTQYF

SEQ ID NO: 279283 - protein, 18 aa, Homo sapiens
  CDR3 for alpha chain variable domain of TCR clone 139642 (TRAV21, TRAJ52)
CAVRPSPAGGTSYGKLTF

SEQ ID NO: 279284 - protein, 14 aa, Homo sapiens
  CDR3 for beta chain variable domain of TCR clone 139642 (TRBV5-1, TRBJ1-2)
CASSLAADSNGDTF

SEQ ID NO: 279285 - protein, 16 aa, Homo sapiens
  CDR3 for alpha chain variable domain of TCR clone 139643 (TRAV4, TRAJ9)
CLVGDPKRPGGFKTIF

SEQ ID NO: 279286 - protein, 16 aa, Homo sapiens
  CDR3 for beta chain variable domain of TCR clone 139643 (TRBV28, TRBJ1-4)
CASSPPYRGRSEKLFF

SEQ ID NO: 279287 - protein, 14 aa, Homo sapiens
  CDR3 for alpha chain variable domain of TCR clone 139644 (TRAV16, TRAJ37)
CALDISGNTGKLIF

SEQ ID NO: 279288 - protein, 14 aa, Homo sapiens
  CDR3 for beta chain variable domain of TCR clone 139644 (TRBV7-6, TRBJ2-7)
FASSFRQGADEQYF

SEQ ID NO: 279289 - protein, 13 aa, Homo sapiens
  CDR3 for alpha chain variable domain of TCR clone 139645 (TRAV12-2, TRAJ17)
CAVKGAAGNKLTF

SEQ ID NO: 279290 - protein, 13 aa, Homo sapiens
  CDR3 for beta chain variable domain of TCR clone 139645 (TRBV4-1, TRBJ2-1)
CASSQSDGNEQFF

SEQ ID NO: 279291 - protein, 14 aa, Homo sapiens
  CDR3 for alpha chain variable domain of TCR clone 139646 (TRAV1-1, TRAJ23)
CAVSIYNQGGKLIF

SEQ ID NO: 279292 - protein, 15 aa, Homo sapiens
  CDR3 for beta chain variable domain of TCR clone 139646 (TRBV7-9, TRBJ1-5)
CASSQGHQPNQPQHF

SEQ ID NO: 279293 - protein, 11 aa, Homo sapiens
  CDR3 for alpha chain variable domain of TCR clone 139647 (TRAV3, TRAJ21)
CAVGNFNKFYF

SEQ ID NO: 279294 - protein, 14 aa, Homo sapiens
  CDR3 for beta chain variable domain of TCR clone 139647 (TRBV19, TRBJ2-5)
CASSIEHSQETQYF

SEQ ID NO: 279295 - protein, 13 aa, Homo sapiens
  CDR3 for alpha chain variable domain of TCR clone 139648 (TRAV16, TRAJ34)
CALTGYNTDKLIF

SEQ ID NO: 279296 - protein, 16 aa, Homo sapiens
  CDR3 for beta chain variable domain of TCR clone 139648 (TRBV11-2, TRBJ2-2)
CASSLRTGNLIGELFF

SEQ ID NO: 279297 - protein, 14 aa, Homo sapiens
  CDR3 for alpha chain variable domain of TCR clone 139649 (TRAV12-2, TRAJ44)
CAVNPAGTASKLTF

SEQ ID NO: 279298 - protein, 15 aa, Homo sapiens
  CDR3 for beta chain variable domain of TCR clone 139649 (TRBV20-1, TRBJ1-5)
CSATSDRGLGQPQHF

SEQ ID NO: 279299 - protein, 16 aa, Homo sapiens
  CDR3 for alpha chain variable domain of TCR clone 139650 (TRAV29/DV5, TRAJ52)
CAASGRRGTSYGKLTF

SEQ ID NO: 279300 - protein, 13 aa, Homo sapiens
  CDR3 for beta chain variable domain of TCR clone 139650 (TRBV7-2, TRBJ2-5)
CASSQTSVETQYF

SEQ ID NO: 279301 - protein, 12 aa, Homo sapiens
  CDR3 for alpha chain variable domain of TCR clone 139651 (TRAV12-3, TRAJ17)
CAMTLTGNKLTF

SEQ ID NO: 279302 - protein, 15 aa, Homo sapiens
  CDR3 for beta chain variable domain of TCR clone 139651 (TRBV10-2, TRBJ2-6)
CASSEQGTGARVLTF

SEQ ID NO: 279303 - protein, 13 aa, Homo sapiens
  CDR3 for alpha chain variable domain of TCR clone 139652 (TRAV13-1, TRAJ43)
CAASLSNNNDMRF

SEQ ID NO: 279304 - protein, 14 aa, Homo sapiens
  CDR3 for beta chain variable domain of TCR clone 139652 (TRBV28, TRBJ2-7)
CASSLLRISYEQYF

SEQ ID NO: 279305 - protein, 14 aa, Homo sapiens
  CDR3 for alpha chain variable domain of TCR clone 139653 (TRAV13-1, TRAJ45)
CAATSGGGAAGLTF

SEQ ID NO: 279306 - protein, 14 aa, Homo sapiens
  CDR3 for beta chain variable domain of TCR clone 139653 (TRBV19, TRBJ2-5)
CASSMTGQQETQYF

SEQ ID NO: 279307 - protein, 15 aa, Homo sapiens
  CDR3 for alpha chain variable domain of TCR clone 139654 (TRAV8-4, TRAJ37)
CAVSRGSGNTGKLIF

SEQ ID NO: 279308 - protein, 12 aa, Homo sapiens
  CDR3 for beta chain variable domain of TCR clone 139654 (TRBV7-8, TRBJ2-7)
CASSLGDREQYF

SEQ ID NO: 279309 - protein, 15 aa, Homo sapiens
  CDR3 for alpha chain variable domain of TCR clone 139655 (TRAV8-4, TRAJ9)
CAVSDLEGGGFKTIF

SEQ ID NO: 279310 - protein, 14 aa, Homo sapiens
  CDR3 for beta chain variable domain of TCR clone 139655 (TRBV19, TRBJ1-2)
CASSLQGQAYGYTF

SEQ ID NO: 279311 - protein, 15 aa, Homo sapiens
  CDR3 for alpha chain variable domain of TCR clone 139656 (TRAV3, TRAJ47)
CAVRDIGEYGNKLVF

SEQ ID NO: 279312 - protein, 12 aa, Homo sapiens
  CDR3 for beta chain variable domain of TCR clone 139656 (TRBV5-7, TRBJ1-2)
CASSDRIHGYTF

SEQ ID NO: 279313 - protein, 13 aa, Homo sapiens
  CDR3 for alpha chain variable domain of TCR clone 139657 (TRAV13-1, TRAJ21)
CAASICNFNKFYF

SEQ ID NO: 279314 - protein, 12 aa, Homo sapiens
  CDR3 for beta chain variable domain of TCR clone 139657 (TRBV11-2, TRBJ2-1)
CASSPGNNEQFF

SEQ ID NO: 279315 - protein, 16 aa, Homo sapiens
  CDR3 for alpha chain variable domain of TCR clone 139658 (TRAV26-1, TRAJ45)
CIVEKYSGGGADGLTF

SEQ ID NO: 279316 - protein, 15 aa, Homo sapiens
  CDR3 for beta chain variable domain of TCR clone 139658 (TRBV15, TRBJ2-7)
CHQQRPIQRAYEQYF

SEQ ID NO: 279317 - protein, 13 aa, Homo sapiens
  CDR3 for alpha chain variable domain of TCR clone 139659 (TRAV1-2, TRAJ27)
CAVFNTNAGKSTF

SEQ ID NO: 279318 - protein, 14 aa, Homo sapiens
  CDR3 for beta chain variable domain of TCR clone 139659 (TRBV5-4, TRBJ1-1)
CASSLDSRRDEAFF

SEQ ID NO: 279319 - protein, 10 aa, Homo sapiens
  CDR3 for alpha chain variable domain of TCR clone 139660 (TRAV1-2, TRAJ31)
CAFFDARLMF

SEQ ID NO: 279320 - protein, 13 aa, Homo sapiens
  CDR3 for beta chain variable domain of TCR clone 139660 (TRBV7-9, TRBJ1-2)
CASSLEQNYGYTF

SEQ ID NO: 279321 - protein, 13 aa, Homo sapiens
  CDR3 for alpha chain variable domain of TCR clone 139661 (TRAV8-4, TRAJ30)
CVTYKNRDDKIIF

SEQ ID NO: 279322 - protein, 11 aa, Homo sapiens
  CDR3 for beta chain variable domain of TCR clone 139661 (TRBV6-1, TRBJ2-1)
CASRGYNEQFF

SEQ ID NO: 279323 - protein, 15 aa, Homo sapiens
  CDR3 for alpha chain variable domain of TCR clone 139662 (TRAV8-2, TRAJ23)
CVVSPLITREESLSS

SEQ ID NO: 279324 - protein, 16 aa, Homo sapiens
  CDR3 for beta chain variable domain of TCR clone 139662 (TRBV20-1, TRBJ2-1)
CSARDHLAGGGGEQFF

SEQ ID NO: 279325 - protein, 13 aa, Homo sapiens
  CDR3 for alpha chain variable domain of TCR clone 139663 (TRAV14/DV4, TRAJ26)
CAMRGPSEFCLWF

SEQ ID NO: 279326 - protein, 14 aa, Homo sapiens
  CDR3 for beta chain variable domain of TCR clone 139663 (TRBV12-4, TRBJ1-3)
CASTLTGAGNTIYF

SEQ ID NO: 279327 - protein, 11 aa, Homo sapiens
  CDR3 for alpha chain variable domain of TCR clone 139664 (TRAV2, TRAJ23)
CAVETRGKLIF

SEQ ID NO: 279328 - protein, 14 aa, Homo sapiens
  CDR3 for beta chain variable domain of TCR clone 139664 (TRBV4-2, TRBJ1-5)
CASSRDRGNQPQHF

SEQ ID NO: 279329 - protein, 17 aa, Homo sapiens
  CDR3 for alpha chain variable domain of TCR clone 139665 (TRAV3, TRAJ6)
CAVSRRTDTGGSYKPTF

SEQ ID NO: 279330 - protein, 18 aa, Homo sapiens
  CDR3 for beta chain variable domain of TCR clone 139665 (TRBV7-2, TRBJ2-3)
CASSLETSRGRKADTQYF

SEQ ID NO: 279331 - protein, 14 aa, Homo sapiens
  CDR3 for alpha chain variable domain of TCR clone 139666 (TRAV2, TRAJ42)
CAVVGGGSQGNLIF

SEQ ID NO: 279332 - protein, 13 aa, Homo sapiens
  CDR3 for beta chain variable domain of TCR clone 139666 (TRBV11-2, TRBJ2-5)
CASSFSSQETQYF

SEQ ID NO: 279333 - protein, 14 aa, Homo sapiens
  CDR3 for alpha chain variable domain of TCR clone 139667 (TRAV12-3, TRAJ10)
NHLPLTGGGNKLTF

SEQ ID NO: 279334 - protein, 15 aa, Homo sapiens
  CDR3 for beta chain variable domain of TCR clone 139667 (TRBV27, TRBJ1-5)
CASSLGPGFDQPQHF

SEQ ID NO: 279335 - protein, 14 aa, Homo sapiens
  CDR3 for alpha chain variable domain of TCR clone 139668 (TRAV2, TRAJ37)
CAVDFTSTTGKLIF

SEQ ID NO: 279336 - protein, 13 aa, Homo sapiens
  CDR3 for beta chain variable domain of TCR clone 139668 (TRBV20-1, TRBJ1-1)
CSAPLGGGTEAFF

SEQ ID NO: 279337 - protein, 14 aa, Homo sapiens
  CDR3 for alpha chain variable domain of TCR clone 139669 (TRAV17, TRAJ45)
CATASGGGADGLTF

SEQ ID NO: 279338 - protein, 16 aa, Homo sapiens
  CDR3 for beta chain variable domain of TCR clone 139669 (TRBV4-3, TRBJ2-2)
CASSHLQGSGTGELFF

SEQ ID NO: 279339 - protein, 14 aa, Homo sapiens
  CDR3 for alpha chain variable domain of TCR clone 139670 (TRAV1-2, TRAJ16)
CAVNRFSDGQKLLF

SEQ ID NO: 279340 - protein, 16 aa, Homo sapiens
  CDR3 for beta chain variable domain of TCR clone 139670 (TRBV7-3, TRBJ2-3)
CASSLSGYRPEDTQYY

SEQ ID NO: 279341 - protein, 14 aa, Homo sapiens
  CDR3 for alpha chain variable domain of TCR clone 139671 (TRAV26-1, TRAJ38)
CLADNAGNNRKLIW

SEQ ID NO: 279342 - protein, 13 aa, Homo sapiens
  CDR3 for beta chain variable domain of TCR clone 139671 (TRBV2, TRBJ1-5)
CATAGPGNQPQHF

SEQ ID NO: 279343 - protein, 16 aa, Homo sapiens
  CDR3 for alpha chain variable domain of TCR clone 139672 (TRAV8-6, TRAJ4)
CAVTKILSGGYNKLIF

SEQ ID NO: 279344 - protein, 12 aa, Homo sapiens
  CDR3 for beta chain variable domain of TCR clone 139672 (TRBV19, TRBJ2-3)
CATTSSTDTQYF

SEQ ID NO: 279345 - protein, 12 aa, Homo sapiens
  CDR3 for alpha chain variable domain of TCR clone 139673 (TRAV26-1, TRAJ13)
CIVSRGYQKVTF

SEQ ID NO: 279346 - protein, 14 aa, Homo sapiens
  CDR3 for beta chain variable domain of TCR clone 139673 (TRBV7-2, TRBJ2-7)
CASSPKTSFYEQYV

SEQ ID NO: 279347 - protein, 15 aa, Homo sapiens
  CDR3 for alpha chain variable domain of TCR clone 139674 (TRAV3, TRAJ11)
CAVRDRGSGYSTLTF

SEQ ID NO: 279348 - protein, 13 aa, Homo sapiens
  CDR3 for beta chain variable domain of TCR clone 139674 (TRBV29-1, TRBJ2-7)
CSVKRGGNYEQYF

SEQ ID NO: 279349 - protein, 15 aa, Homo sapiens
  CDR3 for alpha chain variable domain of TCR clone 139675 (TRAV3, TRAJ15)
CAVRPANQAGTALIF

SEQ ID NO: 279350 - protein, 17 aa, Homo sapiens
  CDR3 for beta chain variable domain of TCR clone 139675 (TRBV7-8, TRBJ2-6)
CASSAGTGGAGANVLTF

SEQ ID NO: 279351 - protein, 14 aa, Homo sapiens
  CDR3 for alpha chain variable domain of TCR clone 139676 (TRAV17, TRAJ32)
CATDPGGATNKLIF

SEQ ID NO: 279352 - protein, 14 aa, Homo sapiens
  CDR3 for beta chain variable domain of TCR clone 139676 (TRBV2, TRBJ1-5)
CASSENSGGQPQHF

SEQ ID NO: 279353 - protein, 23 aa, Homo sapiens
  CDR3 for alpha chain variable domain of TCR clone 139677 (TRAV12-2, TRAJ36)
SLLIRDSQPSDSATLERANNLFF

SEQ ID NO: 279354 - protein, 17 aa, Homo sapiens
  CDR3 for beta chain variable domain of TCR clone 139677 (TRBV3-1, TRBJ2-3)
CASSQLLGRGHTDTQYF

SEQ ID NO: 279355 - protein, 14 aa, Homo sapiens
  CDR3 for alpha chain variable domain of TCR clone 139678 (TRAV38-1, TRAJ27)
CAFIHNTNACKSTF

SEQ ID NO: 279356 - protein, 12 aa, Homo sapiens
  CDR3 for beta chain variable domain of TCR clone 139678 (TRBV7-8, TRBJ2-7)
CASSLGDREQYF

SEQ ID NO: 279357 - protein, 14 aa, Homo sapiens
  CDR3 for alpha chain variable domain of TCR clone 139679 (TRAV14/DV4, TRAJ42)
CPRGSLRSQGNLIF

SEQ ID NO: 279358 - protein, 17 aa, Homo sapiens
  CDR3 for beta chain variable domain of TCR clone 139679 (TRBV7-8, TRBJ2-6)
CASSAGTGGAGANVLTF

SEQ ID NO: 279359 - protein, 15 aa, Homo sapiens
  CDR3 for alpha chain variable domain of TCR clone 139680 (TRAV23/DV6, TRAJ57)
CAASSTLSQGGYEKL

SEQ ID NO: 279360 - protein, 14 aa, Homo sapiens
  CDR3 for beta chain variable domain of TCR clone 139680 (TRBV25-1, TRBJ1-1)
CASTHLGGNTEAFF

SEQ ID NO: 279361 - protein, 12 aa, Homo sapiens
  CDR3 for alpha chain variable domain of TCR clone 139681 (TRAV8-3, TRAJ26)
CAGDNYGQNFVF

SEQ ID NO: 279362 - protein, 14 aa, Homo sapiens
  CDR3 for beta chain variable domain of TCR clone 139681 (TRBV4-1, TRBJ1-3)
CASSQRDSGNTIYF

SEQ ID NO: 279363 - protein, 13 aa, Homo sapiens
  CDR3 for alpha chain variable domain of TCR clone 139682 (TRAV21, TRAJ37)
CAVSSGNTGKLIF

SEQ ID NO: 279364 - protein, 14 aa, Homo sapiens
  CDR3 for beta chain variable domain of TCR clone 139682 (TRBV7-3, TRBJ2-1)
CASSLAGGTNEQFF

SEQ ID NO: 279365 - protein, 14 aa, Homo sapiens
  CDR3 for alpha chain variable domain of TCR clone 139683 (TRAV3, TRAJ17)
CAVRDAAAGNKLTF

SEQ ID NO: 279366 - protein, 15 aa, Homo sapiens
  CDR3 for beta chain variable domain of TCR clone 139683 (TRBV11-3, TRBJ2-7)
CASSPGPASSYEQYF

SEQ ID NO: 279367 - protein, 15 aa, Homo sapiens
  CDR3 for alpha chain variable domain of TCR clone 139684 (TRAV8-3, TRAJ45)
CASSYSGGGADGLTF

SEQ ID NO: 279368 - protein, 15 aa, Homo sapiens
  CDR3 for beta chain variable domain of TCR clone 139684 (TRBV20-1, TRBJ2-7)
CSARGFRPQTYEQYF

SEQ ID NO: 279369 - protein, 15 aa, Homo sapiens
  CDR3 for alpha chain variable domain of TCR clone 139685 (TRAV12-3, TRAJ6)
CAMSAASGGSYIPTF

SEQ ID NO: 279370 - protein, 13 aa, Homo sapiens
  CDR3 for beta chain variable domain of TCR clone 139685 (TRBV20-1, TRBJ1-2)
CSASPEFNYVYTF

SEQ ID NO: 279371 - protein, 11 aa, Homo sapiens
  CDR3 for alpha chain variable domain of TCR clone 139686 (TRAV12-3, TRAJ27)
CAMAKAGKSTF

SEQ ID NO: 279372 - protein, 13 aa, Homo sapiens
  CDR3 for beta chain variable domain of TCR clone 139686 (TRBV20-1, TRBJ1-1)
CSARVGGNTEAFF

SEQ ID NO: 279373 - protein, 15 aa, Homo sapiens
  CDR3 for alpha chain variable domain of TCR clone 139687 (TRAV23/DV6, TRAJ18)
CAARYRGSTLGRLYF

SEQ ID NO: 279374 - protein, 13 aa, Homo sapiens
  CDR3 for beta chain variable domain of TCR clone 139687 (TRBV7-2, TRBJ2-7)
CASSSPSGIEQYF

SEQ ID NO: 279375 - protein, 13 aa, Homo sapiens
  CDR3 for alpha chain variable domain of TCR clone 139688 (TRAV1-1, TRAJ23)
CAVVANQGGKLIF

SEQ ID NO: 279376 - protein, 15 aa, Homo sapiens
  CDR3 for beta chain variable domain of TCR clone 139688 (TRBV7-3, TRBJ2-2)
CASSETGQGTGELFF

SEQ ID NO: 279377 - protein, 15 aa, Homo sapiens
  CDR3 for alpha chain variable domain of TCR clone 139689 (TRAV3, TRAJ5)
CAVRDLYTGRRALTF

SEQ ID NO: 279378 - protein, 16 aa, Homo sapiens
  CDR3 for beta chain variable domain of TCR clone 139689 (TRBV20-1, TRBJ1-4)
CSAPGQGLLTIEKLFF

SEQ ID NO: 279379 - protein, 14 aa, Homo sapiens
  CDR3 for alpha chain variable domain of TCR clone 139690 (TRAV21, TRAJ48)
CAVRSNFGNEKLTF

SEQ ID NO: 279380 - protein, 14 aa, Homo sapiens
  CDR3 for beta chain variable domain of TCR clone 139690 (TRBV25-1, TRBJ1-1)
CASTHLGGNTEAFF

SEQ ID NO: 279381 - protein, 11 aa, Homo sapiens
  CDR3 for alpha chain variable domain of TCR clone 139691 (TRAV2, TRAJ33)
CAVDSNSQLIW

SEQ ID NO: 279382 - protein, 15 aa, Homo sapiens
  CDR3 for beta chain variable domain of TCR clone 139691 (TRBV19, TRBJ1-2)
CASSVGKVLNYGYTF

SEQ ID NO: 279383 - protein, 10 aa, Homo sapiens
  CDR3 for alpha chain variable domain of TCR clone 139692 (TRAV12-3, TRAJ49)
CAMNDDQFYF

SEQ ID NO: 279384 - protein, 20 aa, Homo sapiens
  CDR3 for beta chain variable domain of TCR clone 139692 (TRBV4-1, TRBJ2-2)
CASSQASPPGLASNTGELFF

SEQ ID NO: 279385 - protein, 18 aa, Homo sapiens
  CDR3 for alpha chain variable domain of TCR clone 139693 (TRAV3, TRAJ17)
CAVRARRGGRSCRQQANF

SEQ ID NO: 279386 - protein, 14 aa, Homo sapiens
  CDR3 for beta chain variable domain of TCR clone 139693 (TRBV4-1, TRBJ2-2)
CASSQAVDTGELFF

SEQ ID NO: 279387 - protein, 12 aa, Homo sapiens
  CDR3 for alpha chain variable domain of TCR clone 139694 (TRAV12-1, TRAJ40)
CVVYSGTYKYIV

SEQ ID NO: 279388 - protein, 15 aa, Homo sapiens
  CDR3 for beta chain variable domain of TCR clone 139694 (TRBV20-1, TRBJ2-7)
CSARDRVSGMDEQYF

SEQ ID NO: 279389 - protein, 13 aa, Homo sapiens
  CDR3 for alpha chain variable domain of TCR clone 139695 (TRAV17, TRAJ7)
CATDNYGNNRLAF

SEQ ID NO: 279390 - protein, 13 aa, Homo sapiens
  CDR3 for beta chain variable domain of TCR clone 139695 (TRBV7-2, TRBJ1-1)
CASNIKGAKVAFF

SEQ ID NO: 279391 - protein, 14 aa, Homo sapiens
  CDR3 for alpha chain variable domain of TCR clone 139696 (TRAV1-2, TRAJ16)
CAVNRFSDGQKLLF

SEQ ID NO: 279392 - protein, 11 aa, Homo sapiens
  CDR3 for beta chain variable domain of TCR clone 139696 (TRBV7-9, TRBJ2-3)
CASSPTDTQDF

SEQ ID NO: 279393 - protein, 13 aa, Homo sapiens
  CDR3 for alpha chain variable domain of TCR clone 139697 (TRAV26-1, TRAJ48)
CIGRVVGDEKLTF

SEQ ID NO: 279394 - protein, 16 aa, Homo sapiens
  CDR3 for beta chain variable domain of TCR clone 139697 (TRBV5-1, TRBJ2-2)
CASSSRTGGRTGELLF

SEQ ID NO: 279395 - protein, 15 aa, Homo sapiens
  CDR3 for alpha chain variable domain of TCR clone 139698 (TRAV8-1, TRAJ6)
CAMNTPPGGSYIPTF

SEQ ID NO: 279396 - protein, 14 aa, Homo sapiens
  CDR3 for beta chain variable domain of TCR clone 139698 (TRBV12-4, TRBJ2-1)
CASSLGQGASEQFF

SEQ ID NO: 279397 - protein, 13 aa, Homo sapiens
  CDR3 for alpha chain variable domain of TCR clone 139699 (TRAV2, TRAJ15)
CAVASQAGTALIF

SEQ ID NO: 279398 - protein, 15 aa, Homo sapiens
  CDR3 for beta chain variable domain of TCR clone 139699 (TRBV23-1, TRBJ1-5)
CASSQSRGQGWGAYI

SEQ ID NO: 279399 - protein, 13 aa, Homo sapiens
  CDR3 for alpha chain variable domain of TCR clone 139700 (TRAV30, TRAJ6)
CGFIEGGSYIPTF

SEQ ID NO: 279400 - protein, 17 aa, Homo sapiens
  CDR3 for beta chain variable domain of TCR clone 139700 (TRBV11-2, TRBJ2-1)
CASSLYPPGVEYNEQFF

SEQ ID NO: 279401 - protein, 15 aa, Homo sapiens
  CDR3 for alpha chain variable domain of TCR clone 139701 (TRAV23/DV6, TRAJ3)
CAASTADSSASKIIF

SEQ ID NO: 279402 - protein, 13 aa, Homo sapiens
  CDR3 for beta chain variable domain of TCR clone 139701 (TRBV7-9, TRBJ1-4)
CATQIGPNEKLFF

SEQ ID NO: 279403 - protein, 14 aa, Homo sapiens
  CDR3 for alpha chain variable domain of TCR clone 139702 (TRAV2, TRAJ9)
CAVEDRSGGFKTIF

SEQ ID NO: 279404 - protein, 12 aa, Homo sapiens
  CDR3 for beta chain variable domain of TCR clone 139702 (TRBV12-4, TRBJ2-4)
CASRSSGNIQYF

SEQ ID NO: 279405 - protein, 13 aa, Homo sapiens
  CDR3 for alpha chain variable domain of TCR clone 139703 (TRAV21, TRAJ27)
CAARPGNAGKSTS

SEQ ID NO: 279406 - protein, 13 aa, Homo sapiens
  CDR3 for beta chain variable domain of TCR clone 139703 (TRBV19, TRBJ1-2)
CASSVPGQDGYTF

SEQ ID NO: 279407 - protein, 13 aa, Homo sapiens
  CDR3 for alpha chain variable domain of TCR clone 139704 (TRAV23/DV6, TRAJ15)
CAALPAGRNCSDL

SEQ ID NO: 279408 - protein, 14 aa, Homo sapiens
  CDR3 for beta chain variable domain of TCR clone 139704 (TRBV7-9, TRBJ1-2)
CASSRQGSNYGYTF

SEQ ID NO: 279409 - protein, 15 aa, Homo sapiens
  CDR3 for alpha chain variable domain of TCR clone 139705 (TRAV17, TRAJ56)
CATEPFTGANSKLTF

SEQ ID NO: 279410 - protein, 20 aa, Homo sapiens
  CDR3 for beta chain variable domain of TCR clone 139705 (TRBV28, TRBJ2-1)
CASTPIGRSPGLAGGNEQFF

SEQ ID NO: 279411 - protein, 15 aa, Homo sapiens
  CDR3 for alpha chain variable domain of TCR clone 139706 (TRAV8-6, TRAJ23)
CAVRLIYNQGGKLIF

SEQ ID NO: 279412 - protein, 17 aa, Homo sapiens
  CDR3 for beta chain variable domain of TCR clone 139706 (TRBV24-1, TRBJ2-1)
CATSDVSTSGTYNEQFF

SEQ ID NO: 279413 - protein, 17 aa, Homo sapiens
  CDR3 for alpha chain variable domain of TCR clone 139707 (TRAV13-1, TRAJ52)
CSASSGAGSTSYGKLTF

SEQ ID NO: 279414 - protein, 15 aa, Homo sapiens
  CDR3 for beta chain variable domain of TCR clone 139707 (TRBV2, TRBJ2-1)
CASSELAGSYNEQFF

SEQ ID NO: 279415 - protein, 14 aa, Homo sapiens
  CDR3 for alpha chain variable domain of TCR clone 139708 (TRAV1-2, TRAJ16)
CAVNRFSDGQKLLF

SEQ ID NO: 279416 - protein, 13 aa, Homo sapiens
  CDR3 for beta chain variable domain of TCR clone 139708 (TRBV4-1, TRBJ2-1)
CDSSQAGGDEQFF

SEQ ID NO: 279417 - protein, 13 aa, Homo sapiens
  CDR3 for alpha chain variable domain of TCR clone 139709 (TRAV12-1, TRAJ22)
CVASGGSARQLTF

SEQ ID NO: 279418 - protein, 13 aa, Homo sapiens
  CDR3 for beta chain variable domain of TCR clone 139709 (TRBV20-1, TRBJ1-1)
CSARGGGNTEAFF

SEQ ID NO: 279419 - protein, 14 aa, Homo sapiens
  CDR3 for alpha chain variable domain of TCR clone 139710 (TRAV14/DV4, TRAJ32)
SSVLPLTPTNKLIF

SEQ ID NO: 279420 - protein, 17 aa, Homo sapiens
  CDR3 for beta chain variable domain of TCR clone 139710 (TRBV20-1, TRBJ2-1)
CSASSSGLAGSYNEQFF

SEQ ID NO: 279421 - protein, 13 aa, Homo sapiens
  CDR3 for alpha chain variable domain of TCR clone 139711 (TRAV13-2, TRAJ21)
CAENVGQLQQILL

SEQ ID NO: 279422 - protein, 15 aa, Homo sapiens
  CDR3 for beta chain variable domain of TCR clone 139711 (TRBV7-2, TRBJ2-1)
CASSLVAGRYNEQFF

SEQ ID NO: 279423 - protein, 18 aa, Homo sapiens
  CDR3 for alpha chain variable domain of TCR clone 139712 (TRAV21, TRAJ52)
CAVRPSPAGGTSYGQLTF

SEQ ID NO: 279424 - protein, 16 aa, Homo sapiens
  CDR3 for beta chain variable domain of TCR clone 139712 (TRBV7-3, TRBJ2-1)
CASSLEGYRSYNEQFF

SEQ ID NO: 279425 - protein, 15 aa, Homo sapiens
  CDR3 for alpha chain variable domain of TCR clone 139713 (TRAV40, )
CLPIPDIQNPDPAVY

SEQ ID NO: 279426 - protein, 15 aa, Homo sapiens
  CDR3 for beta chain variable domain of TCR clone 139713 (TRBV2, TRBJ1-2)
CASSEIGGANYGYTF

SEQ ID NO: 279427 - protein, 13 aa, Homo sapiens
  CDR3 for alpha chain variable domain of TCR clone 139714 (TRAV3, TRAJ20)
CAVRPLNDYKLSF

SEQ ID NO: 279428 - protein, 12 aa, Homo sapiens
  CDR3 for beta chain variable domain of TCR clone 139714 (TRBV6-1, TRBJ2-1)
CATYGLDNEQFF

SEQ ID NO: 279429 - protein, 12 aa, Homo sapiens
  CDR3 for alpha chain variable domain of TCR clone 139715 (TRAV12-1, TRAJ34)
CVVAGATDKLIF

SEQ ID NO: 279430 - protein, 12 aa, Homo sapiens
  CDR3 for beta chain variable domain of TCR clone 139715 (TRBV7-9, TRBJ1-1)
CASSLVRGEACF

SEQ ID NO: 279431 - protein, 12 aa, Homo sapiens
  CDR3 for alpha chain variable domain of TCR clone 139716 (TRAV17, TRAJ28)
WDSGAGSYQLTF

SEQ ID NO: 279432 - protein, 13 aa, Homo sapiens
  CDR3 for beta chain variable domain of TCR clone 139716 (TRBV4-2, TRBJ1-1)
CASSQAGNTEAFF

SEQ ID NO: 279433 - protein, 11 aa, Homo sapiens
  CDR3 for alpha chain variable domain of TCR clone 139717 (TRAV12-3, TRAJ16)
LTGGDGQKLLF

SEQ ID NO: 279434 - protein, 13 aa, Homo sapiens
  CDR3 for beta chain variable domain of TCR clone 139717 (TRBV12-4, TRBJ1-4)
CASAMGHNEKLLF

SEQ ID NO: 279435 - protein, 14 aa, Homo sapiens
  CDR3 for alpha chain variable domain of TCR clone 139718 (TRAV8-2, TRAJ4)
RVVSPSGGYNKLIF

SEQ ID NO: 279436 - protein, 15 aa, Homo sapiens
  CDR3 for beta chain variable domain of TCR clone 139718 (TRBV2, TRBJ2-1)
CASSELAGSYNEQLF

SEQ ID NO: 279437 - protein, 12 aa, Homo sapiens
  CDR3 for alpha chain variable domain of TCR clone 139719 (TRAV12-3, TRAJ17)
CAMTLTGNKLTF

SEQ ID NO: 279438 - protein, 16 aa, Homo sapiens
  CDR3 for beta chain variable domain of TCR clone 139719 (TRBV12-4, TRBJ2-5)
CASSFFVRGRQEPQFF

SEQ ID NO: 279439 - protein, 14 aa, Homo sapiens
  CDR3 for alpha chain variable domain of TCR clone 139720 (TRAV9-2, TRAJ39)
CALYIYNAGNMLTF

SEQ ID NO: 279440 - protein, 17 aa, Homo sapiens
  CDR3 for beta chain variable domain of TCR clone 139720 (TRBV9, TRBJ2-2)
CASSVGGQGTDTGELFF

SEQ ID NO: 279441 - protein, 18 aa, Homo sapiens
  CDR3 for alpha chain variable domain of TCR clone 139721 (TRAV13-1, TRAJ52)
CAAKNPNAGGTSYGKLTF

SEQ ID NO: 279442 - protein, 14 aa, Homo sapiens
  CDR3 for beta chain variable domain of TCR clone 139721 (TRBV4-2, TRBJ1-5)
CASSRDRGNQPQHF

SEQ ID NO: 279443 - protein, 13 aa, Homo sapiens
  CDR3 for alpha chain variable domain of TCR clone 139722 (TRAV8-6, TRAJ13)
CAVRDGGYQKVTF

SEQ ID NO: 279444 - protein, 15 aa, Homo sapiens
  CDR3 for beta chain variable domain of TCR clone 139722 (TRBV7-9, TRBJ2-2)
CASRPEGTSAGELFF

SEQ ID NO: 279445 - protein, 11 aa, Homo sapiens
  CDR3 for alpha chain variable domain of TCR clone 139723 (TRAV12-2, TRAJ33)
CAVTSNYQLIW

SEQ ID NO: 279446 - protein, 14 aa, Homo sapiens
  CDR3 for beta chain variable domain of TCR clone 139723 (TRBV12-4, TRBJ2-2)
CASNQGVNTGELFF

SEQ ID NO: 279447 - protein, 11 aa, Homo sapiens
  CDR3 for alpha chain variable domain of TCR clone 139724 (TRAV35, TRAJ57)
GPQGGSERLVF

SEQ ID NO: 279448 - protein, 13 aa, Homo sapiens
  CDR3 for beta chain variable domain of TCR clone 139724 (TRBV7-9, TRBJ1-2)
CASSLKQNYGYTF

SEQ ID NO: 279449 - protein, 14 aa, Homo sapiens
  CDR3 for alpha chain variable domain of TCR clone 139725 (TRAV8-3, TRAJ4)
CAVGAAGGYNKLIF

SEQ ID NO: 279450 - protein, 14 aa, Homo sapiens
  CDR3 for beta chain variable domain of TCR clone 139725 (TRBV11-2, TRBJ1-2)
CASSLGTANYGYTF

SEQ ID NO: 279451 - protein, 14 aa, Homo sapiens
  CDR3 for alpha chain variable domain of TCR clone 139726 (TRAV1-2, TRAJ16)
CAFNRFSDGQKLLF

SEQ ID NO: 279452 - protein, 14 aa, Homo sapiens
  CDR3 for beta chain variable domain of TCR clone 139726 (TRBV12-4, TRBJ2-3)
CASTIAGWGDTQYF

SEQ ID NO: 279453 - protein, 15 aa, Homo sapiens
  CDR3 for alpha chain variable domain of TCR clone 139727 (TRAV3, TRAJ13)
CAVRDIGGGYQKVTF

SEQ ID NO: 279454 - protein, 12 aa, Homo sapiens
  CDR3 for beta chain variable domain of TCR clone 139727 (TRBV11-2, TRBJ2-1)
CASSPGNNEQFF

SEQ ID NO: 279455 - protein, 14 aa, Homo sapiens
  CDR3 for alpha chain variable domain of TCR clone 139728 (TRAV1-2, TRAJ8)
CAVREDTGFQKLVF

SEQ ID NO: 279456 - protein, 13 aa, Homo sapiens
  CDR3 for beta chain variable domain of TCR clone 139728 (TRBV12-4, TRBJ2-7)
CASSFVPTAEQYF

SEQ ID NO: 279457 - protein, 14 aa, Homo sapiens
  CDR3 for alpha chain variable domain of TCR clone 139729 (TRAV13-1, TRAJ48)
CAASTDFGNEKLTI

SEQ ID NO: 279458 - protein, 13 aa, Homo sapiens
  CDR3 for beta chain variable domain of TCR clone 139729 (TRBV7-8, TRBJ2-7)
CASSLTGGREQYF

SEQ ID NO: 279459 - protein, 13 aa, Homo sapiens
  CDR3 for alpha chain variable domain of TCR clone 139730 (TRAV36/DV7, TRAJ49)
CAGDSNTGSQFYF

SEQ ID NO: 279460 - protein, 16 aa, Homo sapiens
  CDR3 for beta chain variable domain of TCR clone 139730 (TRBV5-1, TRBJ1-1)
CASSKTGTEVGTEAFF

SEQ ID NO: 279461 - protein, 14 aa, Homo sapiens
  CDR3 for alpha chain variable domain of TCR clone 139731 (TRAV12-2, TRAJ15)
CAPHTGQAGTALIF

SEQ ID NO: 279462 - protein, 14 aa, Homo sapiens
  CDR3 for beta chain variable domain of TCR clone 139731 (TRBV28, TRBJ2-1)
CASSLVAPYNEQFF

SEQ ID NO: 279463 - protein, 17 aa, Homo sapiens
  CDR3 for alpha chain variable domain of TCR clone 139732 (TRAV3, TRAJ6)
CAVRDGPRAGGSYIPPF

SEQ ID NO: 279464 - protein, 14 aa, Homo sapiens
  CDR3 for beta chain variable domain of TCR clone 139732 (TRBV7-2, TRBJ2-7)
CASCPKTSFYEQYF

SEQ ID NO: 279465 - protein, 12 aa, Homo sapiens
  CDR3 for alpha chain variable domain of TCR clone 139733 (TRAV3, TRAJ20)
CAVRDGDYKLSF

SEQ ID NO: 279466 - protein, 13 aa, Homo sapiens
  CDR3 for beta chain variable domain of TCR clone 139733 (TRBV7-2, TRBJ1-1)
CASSSQGVTEAFF

SEQ ID NO: 279467 - protein, 15 aa, Homo sapiens
  CDR3 for alpha chain variable domain of TCR clone 139734 (TRAV34, TRAJ38)
CGADFTPGNNRKLIW

SEQ ID NO: 279468 - protein, 17 aa, Homo sapiens
  CDR3 for beta chain variable domain of TCR clone 139734 (TRBV18, TRBJ2-3)
CASSPFGDGGFTDTQYF

SEQ ID NO: 279469 - protein, 14 aa, Homo sapiens
  CDR3 for alpha chain variable domain of TCR clone 139735 (TRAV13-1, TRAJ44)
CAAKATGTASKLTF

SEQ ID NO: 279470 - protein, 16 aa, Homo sapiens
  CDR3 for beta chain variable domain of TCR clone 139735 (TRBV2, TRBJ2-3)
CASSTSVEGVTGTQYF

SEQ ID NO: 279471 - protein, 13 aa, Homo sapiens
  CDR3 for alpha chain variable domain of TCR clone 139736 (TRAV8-6, TRAJ49)
CAVITNTGNKFYF

SEQ ID NO: 279472 - protein, 14 aa, Homo sapiens
  CDR3 for beta chain variable domain of TCR clone 139736 (TRBV7-9, TRBJ2-3)
CASSLEQGTNTQYF

SEQ ID NO: 279473 - protein, 14 aa, Homo sapiens
  CDR3 for alpha chain variable domain of TCR clone 139737 (TRAV17, TRAJ45)
CATDARGGADGLTV

SEQ ID NO: 279474 - protein, 11 aa, Homo sapiens
  CDR3 for beta chain variable domain of TCR clone 139737 (TRBV28, TRBJ2-5)
CATGNQETQYF

SEQ ID NO: 279475 - protein, 12 aa, Homo sapiens
  CDR3 for alpha chain variable domain of TCR clone 139738 (TRAV3, TRAJ31)
CAVRDGNARLMF

SEQ ID NO: 279476 - protein, 13 aa, Homo sapiens
  CDR3 for beta chain variable domain of TCR clone 139738 (TRBV12-4, TRBJ2-7)
CASSPTETYEQYF

SEQ ID NO: 279477 - protein, 13 aa, Homo sapiens
  CDR3 for alpha chain variable domain of TCR clone 139739 (TRAV27, TRAJ41)
CAGEGNPGYALNF

SEQ ID NO: 279478 - protein, 16 aa, Homo sapiens
  CDR3 for beta chain variable domain of TCR clone 139739 (TRBV29-1, TRBJ2-7)
CSVEVVGTSGSYEQYF

SEQ ID NO: 279479 - protein, 13 aa, Homo sapiens
  CDR3 for alpha chain variable domain of TCR clone 139740 (TRAV2, TRAJ40)
CAVVTAGTYKYIF

SEQ ID NO: 279480 - protein, 14 aa, Homo sapiens
  CDR3 for beta chain variable domain of TCR clone 139740 (TRBV19, TRBJ2-1)
CASPTFVLSGERFF

SEQ ID NO: 279481 - protein, 22 aa, Homo sapiens
  CDR3 for alpha chain variable domain of TCR clone 139741 (TRAV4, )
CLVDIQNPDPAVYQLRDSKSSD

SEQ ID NO: 279482 - protein, 15 aa, Homo sapiens
  CDR3 for beta chain variable domain of TCR clone 139741 (TRBV20-1, TRBJ1-5)
CSARVGRVVSQPQHF

SEQ ID NO: 279483 - protein, 14 aa, Homo sapiens
  CDR3 for alpha chain variable domain of TCR clone 139742 (TRAV16, TRAJ33)
CALSAMDSNYQLIW

SEQ ID NO: 279484 - protein, 12 aa, Homo sapiens
  CDR3 for beta chain variable domain of TCR clone 139742 (TRBV5-1, TRBJ1-2)
CASSQDTYGFTF

SEQ ID NO: 279485 - protein, 15 aa, Homo sapiens
  CDR3 for alpha chain variable domain of TCR clone 139743 (TRAV21, TRAJ53)
CATLNSGGSNYKLTF

SEQ ID NO: 279486 - protein, 14 aa, Homo sapiens
  CDR3 for beta chain variable domain of TCR clone 139743 (TRBV12-4, TRBJ1-1)
CASSSARGYTEAFF

SEQ ID NO: 279487 - protein, 13 aa, Homo sapiens
  CDR3 for alpha chain variable domain of TCR clone 139744 (TRAV1-2, TRAJ9)
CAALNTGGFQTIF

SEQ ID NO: 279488 - protein, 20 aa, Homo sapiens
  CDR3 for beta chain variable domain of TCR clone 139744 (TRBV28, TRBJ2-1)
CASTPIGRSPGLAGGNEQFF

SEQ ID NO: 279489 - protein, 14 aa, Homo sapiens
  CDR3 for alpha chain variable domain of TCR clone 139745 (TRAV17, TRAJ31)
CATVLRNNNARLMF

SEQ ID NO: 279490 - protein, 14 aa, Homo sapiens
  CDR3 for beta chain variable domain of TCR clone 139745 (TRBV7-2, TRBJ2-7)
CASNPKTSFYEQYF

SEQ ID NO: 279491 - protein, 15 aa, Homo sapiens
  CDR3 for alpha chain variable domain of TCR clone 139746 (TRAV12-2, TRAJ52)
CAVTSGGTSYGKLTF

SEQ ID NO: 279492 - protein, 15 aa, Homo sapiens
  CDR3 for beta chain variable domain of TCR clone 139746 (TRBV7-2, TRBJ2-1)
CASSAGFISGNEQFF

SEQ ID NO: 279493 - protein, 14 aa, Homo sapiens
  CDR3 for alpha chain variable domain of TCR clone 139747 (TRAV38-1, TRAJ45)
CASHSLGGADGLTF

SEQ ID NO: 279494 - protein, 13 aa, Homo sapiens
  CDR3 for beta chain variable domain of TCR clone 139747 (TRBV10-3, TRBJ1-2)
CAISERDSYGYTF

SEQ ID NO: 279495 - protein, 15 aa, Homo sapiens
  CDR3 for alpha chain variable domain of TCR clone 139748 (TRAV4, TRAJ42)
CLVGGYGGSQGNLIF

SEQ ID NO: 279496 - protein, 16 aa, Homo sapiens
  CDR3 for beta chain variable domain of TCR clone 139748 (TRBV27, TRBJ1-1)
CTSSTRTGGVGTEAFF

SEQ ID NO: 279497 - protein, 15 aa, Homo sapiens
  CDR3 for alpha chain variable domain of TCR clone 139749 (TRAV12-2, TRAJ53)
CAVNGGGGSNYKLTF

SEQ ID NO: 279498 - protein, 16 aa, Homo sapiens
  CDR3 for beta chain variable domain of TCR clone 139749 (TRBV19, TRBJ2-3)
CASSPGAASRTDTQYF

SEQ ID NO: 279499 - protein, 14 aa, Homo sapiens
  CDR3 for alpha chain variable domain of TCR clone 139750 (TRAV1-2, TRAJ8)
CAVGEDTGFQKLVF

SEQ ID NO: 279500 - protein, 15 aa, Homo sapiens
  CDR3 for beta chain variable domain of TCR clone 139750 (TRBV7-2, TRBJ2-3)
CASSLVVRGPDTQYF

SEQ ID NO: 279501 - protein, 15 aa, Homo sapiens
  CDR3 for alpha chain variable domain of TCR clone 139751 (TRAV4, TRAJ29)
CLVGATLIQETHLLS

SEQ ID NO: 279502 - protein, 14 aa, Homo sapiens
  CDR3 for beta chain variable domain of TCR clone 139751 (TRBV5-1, TRBJ2-3)
CASSFPGNTDTQYF

SEQ ID NO: 279503 - protein, 11 aa, Homo sapiens
  CDR3 for alpha chain variable domain of TCR clone 139752 (TRAV3, TRAJ21)
CAVGNFNKFYF

SEQ ID NO: 279504 - protein, 17 aa, Homo sapiens
  CDR3 for beta chain variable domain of TCR clone 139752 (TRBV19, TRBJ2-1)
CASSIWSAQPTHNEQFF

SEQ ID NO: 279505 - protein, 14 aa, Homo sapiens
  CDR3 for alpha chain variable domain of TCR clone 139753 (TRAV26-1, TRAJ45)
RIEVTGGGADGLTF

SEQ ID NO: 279506 - protein, 13 aa, Homo sapiens
  CDR3 for beta chain variable domain of TCR clone 139753 (TRBV10-2, TRBJ2-7)
CASGASGGYEQYF

SEQ ID NO: 279507 - protein, 13 aa, Homo sapiens
  CDR3 for alpha chain variable domain of TCR clone 139754 (TRAV27, TRAJ49)
CAPRPYTGNQFCF

SEQ ID NO: 279508 - protein, 16 aa, Homo sapiens
  CDR3 for beta chain variable domain of TCR clone 139754 (TRBV4-1, TRBJ1-2)
CASSQEAGQVLYGYTL

SEQ ID NO: 279509 - protein, 20 aa, Homo sapiens
  CDR3 for alpha chain variable domain of TCR clone 139755 (TRAV4, TRAJ29)
CCVLLPRGCVPFPGNTPLVF

SEQ ID NO: 279510 - protein, 17 aa, Homo sapiens
  CDR3 for beta chain variable domain of TCR clone 139755 (TRBV25-1, TRBJ2-7)
CASSDARVVFSSYEQYF

SEQ ID NO: 279511 - protein, 12 aa, Homo sapiens
  CDR3 for alpha chain variable domain of TCR clone 139756 (TRAV35, TRAJ43)
CAGTYNNNDMRF

SEQ ID NO: 279512 - protein, 14 aa, Homo sapiens
  CDR3 for beta chain variable domain of TCR clone 139756 (TRBV7-9, TRBJ2-1)
CASSFRDMVYEQFF

SEQ ID NO: 279513 - protein, 21 aa, Homo sapiens
  CDR3 for alpha chain variable domain of TCR clone 139757 (TRAV1-1, TRAJ27)
CAGSEMTRSSLEKGHDFIFSP

SEQ ID NO: 279514 - protein, 14 aa, Homo sapiens
  CDR3 for beta chain variable domain of TCR clone 139757 (TRBV11-3, TRBJ1-6)
CASSFSGGDSPLHF

SEQ ID NO: 279515 - protein, 14 aa, Homo sapiens
  CDR3 for alpha chain variable domain of TCR clone 139758 (TRAV1-2, TRAJ16)
CAVNRFSDGQKLLF

SEQ ID NO: 279516 - protein, 14 aa, Homo sapiens
  CDR3 for beta chain variable domain of TCR clone 139758 (TRBV7-2, TRBJ2-5)
CASSLYPGRYEQYF

SEQ ID NO: 279517 - protein, 11 aa, Homo sapiens
  CDR3 for alpha chain variable domain of TCR clone 139759 (TRAV13-2, TRAJ36)
CAETGANNLFF

SEQ ID NO: 279518 - protein, 16 aa, Homo sapiens
  CDR3 for beta chain variable domain of TCR clone 139759 (TRBV7-8, TRBJ2-5)
CASSLDGAGGLETQYF

SEQ ID NO: 279519 - protein, 12 aa, Homo sapiens
  CDR3 for alpha chain variable domain of TCR clone 139760 (TRAV1-2, TRAJ33)
CAVRDSNYQLIW

SEQ ID NO: 279520 - protein, 15 aa, Homo sapiens
  CDR3 for beta chain variable domain of TCR clone 139760 (TRBV28, TRBJ2-1)
CASSPPTRAHNEQFF

SEQ ID NO: 279521 - protein, 14 aa, Homo sapiens
  CDR3 for alpha chain variable domain of TCR clone 139761 (TRAV1-1, TRAJ35)
CAVRSIGFGNVLHC

SEQ ID NO: 279522 - protein, 14 aa, Homo sapiens
  CDR3 for beta chain variable domain of TCR clone 139761 (TRBV5-7, TRBJ2-7)
CASSGGLSSYEQYV

SEQ ID NO: 279523 - protein, 11 aa, Homo sapiens
  CDR3 for alpha chain variable domain of TCR clone 139762 (TRAV2, TRAJ33)
CVVESNYQLIW

SEQ ID NO: 279524 - protein, 12 aa, Homo sapiens
  CDR3 for beta chain variable domain of TCR clone 139762 (TRBV11-2, TRBJ2-2)
CASSLGGGELFF

SEQ ID NO: 279525 - protein, 17 aa, Homo sapiens
  CDR3 for alpha chain variable domain of TCR clone 139763 (TRAV27, TRAJ52)
CAGAGWAGGTSYGTLTF

SEQ ID NO: 279526 - protein, 16 aa, Homo sapiens
  CDR3 for beta chain variable domain of TCR clone 139763 (TRBV19, TRBJ2-1)
CASSKAGPSSYNEQFF

SEQ ID NO: 279527 - protein, 15 aa, Homo sapiens
  CDR3 for alpha chain variable domain of TCR clone 139764 (TRAV29/DV5, TRAJ40)
CAASAQGSGTYKYIF

SEQ ID NO: 279528 - protein, 15 aa, Homo sapiens
  CDR3 for beta chain variable domain of TCR clone 139764 (TRBV7-2, TRBJ2-3)
CARSLAGAFIDTQYF

SEQ ID NO: 279529 - protein, 13 aa, Homo sapiens
  CDR3 for alpha chain variable domain of TCR clone 139765 (TRAV20, TRAJ37)
CAGCSSNTGKLIF

SEQ ID NO: 279530 - protein, 12 aa, Homo sapiens
  CDR3 for beta chain variable domain of TCR clone 139765 (TRBV6-1, TRBJ1-1)
CASNSPTAEAFF

SEQ ID NO: 279531 - protein, 15 aa, Homo sapiens
  CDR3 for alpha chain variable domain of TCR clone 139766 (TRAV8-3, TRAJ15)
CAVGAPNQAGPALLF

SEQ ID NO: 279532 - protein, 14 aa, Homo sapiens
  CDR3 for beta chain variable domain of TCR clone 139766 (TRBV20-1, TRBJ2-1)
CSPNDEASYNEQFF

SEQ ID NO: 279533 - protein, 15 aa, Homo sapiens
  CDR3 for alpha chain variable domain of TCR clone 139767 (TRAV3, TRAJ22)
CAVRDRGGSARQLTI

SEQ ID NO: 279534 - protein, 13 aa, Homo sapiens
  CDR3 for beta chain variable domain of TCR clone 139767 (TRBV2, TRBJ1-5)
CATAGPGNQPQHF

SEQ ID NO: 279535 - protein, 13 aa, Homo sapiens
  CDR3 for alpha chain variable domain of TCR clone 139768 (TRAV12-1, TRAJ34)
CVVTGYNTDKLIF

SEQ ID NO: 279536 - protein, 13 aa, Homo sapiens
  CDR3 for beta chain variable domain of TCR clone 139768 (TRBV28, TRBJ2-7)
CASKAGGVFEQYF

SEQ ID NO: 279537 - protein, 13 aa, Homo sapiens
  CDR3 for alpha chain variable domain of TCR clone 139769 (TRAV13-1, TRAJ5)
CAASDTGRRALTF

SEQ ID NO: 279538 - protein, 12 aa, Homo sapiens
  CDR3 for beta chain variable domain of TCR clone 139769 (TRBV28, TRBJ2-3)
CASSLYQGTQYF

SEQ ID NO: 279539 - protein, 15 aa, Homo sapiens
  CDR3 for alpha chain variable domain of TCR clone 139770 (TRAV38-1, TRAJ30)
CAFMMSYGRDDKIIF

SEQ ID NO: 279540 - protein, 16 aa, Homo sapiens
  CDR3 for beta chain variable domain of TCR clone 139770 (TRBV7-9, TRBJ2-7)
CASSFGLAGPSYEQYF

SEQ ID NO: 279541 - protein, 12 aa, Homo sapiens
  CDR3 for alpha chain variable domain of TCR clone 139771 (TRAV12-3, TRAJ17)
CAMTLTGNKLTF

SEQ ID NO: 279542 - protein, 16 aa, Homo sapiens
  CDR3 for beta chain variable domain of TCR clone 139771 (TRBV12-4, TRBJ2-5)
RASSFFVRGRQETQYF

SEQ ID NO: 279543 - protein, 14 aa, Homo sapiens
  CDR3 for alpha chain variable domain of TCR clone 139772 (TRAV12-1, TRAJ17)
CVVNFKAAGNKLTF

SEQ ID NO: 279544 - protein, 17 aa, Homo sapiens
  CDR3 for beta chain variable domain of TCR clone 139772 (TRBV20-1, TRBJ2-1)
CSASASGLAGSYNEQVF

SEQ ID NO: 279545 - protein, 14 aa, Homo sapiens
  CDR3 for alpha chain variable domain of TCR clone 139773 (TRAV9-2, TRAJ39)
CALYIYNAGNMLTL

SEQ ID NO: 279546 - protein, 15 aa, Homo sapiens
  CDR3 for beta chain variable domain of TCR clone 139773 (TRBV27, TRBJ1-6)
CASSFDRGLGSPLHF

SEQ ID NO: 279547 - protein, 14 aa, Homo sapiens
  CDR3 for alpha chain variable domain of TCR clone 139774 (TRAV13-1, TRAJ44)
CAAKATGTASKLTF

SEQ ID NO: 279548 - protein, 14 aa, Homo sapiens
  CDR3 for beta chain variable domain of TCR clone 139774 (TRBV7-8, TRBJ2-7)
CASSPGLADYEQYF

SEQ ID NO: 279549 - protein, 10 aa, Homo sapiens
  CDR3 for alpha chain variable domain of TCR clone 139775 (TRAV1-2, TRAJ18)
CAVRGEAQPW

SEQ ID NO: 279550 - protein, 14 aa, Homo sapiens
  CDR3 for beta chain variable domain of TCR clone 139775 (TRBV7-9, TRBJ2-5)
CASSPAQDQETQYF

SEQ ID NO: 279551 - protein, 10 aa, Homo sapiens
  CDR3 for alpha chain variable domain of TCR clone 139776 (TRAV8-4, TRAJ43)
WAVSADDMRV

SEQ ID NO: 279552 - protein, 15 aa, Homo sapiens
  CDR3 for beta chain variable domain of TCR clone 139776 (TRBV5-1, TRBJ2-3)
CASSVTSGSTDTQYF

SEQ ID NO: 279553 - protein, 21 aa, Homo sapiens
  CDR3 for alpha chain variable domain of TCR clone 139777 (TRAV12-1, TRAJ32)
SSVIQPPTSMNYGGATNKIIF

SEQ ID NO: 279554 - protein, 18 aa, Homo sapiens
  CDR3 for beta chain variable domain of TCR clone 139777 (TRBV20-1, TRBJ2-3)
CSASGLAGGPGTTDTQYF

SEQ ID NO: 279555 - protein, 15 aa, Homo sapiens
  CDR3 for alpha chain variable domain of TCR clone 139778 (TRAV1-2, TRAJ30)
CAVRPHGNRDDKIIF

SEQ ID NO: 279556 - protein, 15 aa, Homo sapiens
  CDR3 for beta chain variable domain of TCR clone 139778 (TRBV4-1, TRBJ2-7)
CASSQGQAYESTSGR

SEQ ID NO: 279557 - protein, 13 aa, Homo sapiens
  CDR3 for alpha chain variable domain of TCR clone 139779 (TRAV3, TRAJ8)
CAVRFTGFQKLGF

SEQ ID NO: 279558 - protein, 15 aa, Homo sapiens
  CDR3 for beta chain variable domain of TCR clone 139779 (TRBV20-1, TRBJ2-7)
CSARDRVSGMDEQYF

SEQ ID NO: 279559 - protein, 17 aa, Homo sapiens
  CDR3 for alpha chain variable domain of TCR clone 139780 (TRAV3, TRAJ6)
CAVRDGPRAGGSYIPTF

SEQ ID NO: 279560 - protein, 18 aa, Homo sapiens
  CDR3 for beta chain variable domain of TCR clone 139780 (TRBV7-3, TRBJ2-3)
CASSSTGTYAGSTDTQYF

SEQ ID NO: 279561 - protein, 14 aa, Homo sapiens
  CDR3 for alpha chain variable domain of TCR clone 139781 (TRAV1-2, TRAJ16)
CAVNRFSDGQKLLF

SEQ ID NO: 279562 - protein, 15 aa, Homo sapiens
  CDR3 for beta chain variable domain of TCR clone 139781 (TRBV11-3, TRBJ2-7)
CASSLLSGSSYEQYF

SEQ ID NO: 279563 - protein, 15 aa, Homo sapiens
  CDR3 for alpha chain variable domain of TCR clone 139782 (TRAV26-1, TRAJ44)
CIVRANTGTASKLTF

SEQ ID NO: 279564 - protein, 16 aa, Homo sapiens
  CDR3 for beta chain variable domain of TCR clone 139782 (TRBV7-7, TRBJ2-1)
CASSLASWTSYNEQFF

SEQ ID NO: 279565 - protein, 19 aa, Homo sapiens
  CDR3 for alpha chain variable domain of TCR clone 139783 (TRAV38-1, TRAJ37)
CDVFCAFIFGSGNTGKLIF

SEQ ID NO: 279566 - protein, 16 aa, Homo sapiens
  CDR3 for beta chain variable domain of TCR clone 139783 (TRBV6-1, TRBJ2-3)
CASSEVIGQGTDTQYF

SEQ ID NO: 279567 - protein, 14 aa, Homo sapiens
  CDR3 for alpha chain variable domain of TCR clone 139784 (TRAV16, TRAJ17)
CAPRIKAEGNKLTF

SEQ ID NO: 279568 - protein, 17 aa, Homo sapiens
  CDR3 for beta chain variable domain of TCR clone 139784 (TRBV7-2, TRBJ2-3)
CDSSSYSGTRRADTQYF

SEQ ID NO: 279569 - protein, 17 aa, Homo sapiens
  CDR3 for alpha chain variable domain of TCR clone 139785 (TRAV1-1, TRAJ28)
CAVDPAYSGAGSYQLTF

SEQ ID NO: 279570 - protein, 14 aa, Homo sapiens
  CDR3 for beta chain variable domain of TCR clone 139785 (TRBV19, TRBJ2-1)
CASPTLVLSGEQFF

SEQ ID NO: 279571 - protein, 23 aa, Homo sapiens
  CDR3 for alpha chain variable domain of TCR clone 139786 (TRAV8-6, TRAJ26)
PLEETLSPYKRHGLVLLSQNFVF

SEQ ID NO: 279572 - protein, 15 aa, Homo sapiens
  CDR3 for beta chain variable domain of TCR clone 139786 (TRBV20-1, TRBJ2-1)
CSARCPGGPGNEQFF

SEQ ID NO: 279573 - protein, 14 aa, Homo sapiens
  CDR3 for alpha chain variable domain of TCR clone 139787 (TRAV12-2, TRAJ24)
CAVTPAGSWGKLQF

SEQ ID NO: 279574 - protein, 15 aa, Homo sapiens
  CDR3 for beta chain variable domain of TCR clone 139787 (TRBV15, TRBJ2-1)
CATSRPGQGLHEQFF

SEQ ID NO: 279575 - protein, 14 aa, Homo sapiens
  CDR3 for alpha chain variable domain of TCR clone 139788 (TRAV13-1, TRAJ9)
CAVEDRSGGFKSIF

SEQ ID NO: 279576 - protein, 14 aa, Homo sapiens
  CDR3 for beta chain variable domain of TCR clone 139788 (TRBV18, TRBJ1-5)
CASSRQQRNQPQHF

SEQ ID NO: 279577 - protein, 14 aa, Homo sapiens
  CDR3 for alpha chain variable domain of TCR clone 139789 (TRAV12-3, TRAJ10)
SHLPLTGGGNKLTF

SEQ ID NO: 279578 - protein, 16 aa, Homo sapiens
  CDR3 for beta chain variable domain of TCR clone 139789 (TRBV12-4, TRBJ2-2)
CASSFWIVGNTGELFF

SEQ ID NO: 279579 - protein, 15 aa, Homo sapiens
  CDR3 for alpha chain variable domain of TCR clone 139790 (TRAV26-1, TRAJ29)
CIVRVEGSGKTPPVF

SEQ ID NO: 279580 - protein, 14 aa, Homo sapiens
  CDR3 for beta chain variable domain of TCR clone 139790 (TRBV18, TRBJ2-5)
CASSPGVSQETQYF

SEQ ID NO: 279581 - protein, 15 aa, Homo sapiens
  CDR3 for alpha chain variable domain of TCR clone 139791 (TRAV3, TRAJ22)
CAVTDRGGSARQLTF

SEQ ID NO: 279582 - protein, 15 aa, Homo sapiens
  CDR3 for beta chain variable domain of TCR clone 139791 (TRBV9, TRBJ1-6)
CASSVAGTGDSPLHF

SEQ ID NO: 279583 - protein, 11 aa, Homo sapiens
  CDR3 for alpha chain variable domain of TCR clone 139792 (TRAV8-3, TRAJ4)
CAVVARPDFKR

SEQ ID NO: 279584 - protein, 13 aa, Homo sapiens
  CDR3 for beta chain variable domain of TCR clone 139792 (TRBV20-1, TRBJ1-2)
CSATGIQGSGYTF

SEQ ID NO: 279585 - protein, 15 aa, Homo sapiens
  CDR3 for alpha chain variable domain of TCR clone 139793 (TRAV3, TRAJ29)
CAVRAPLSVNTPPVF

SEQ ID NO: 279586 - protein, 15 aa, Homo sapiens
  CDR3 for beta chain variable domain of TCR clone 139793 (TRBV28, TRBJ1-1)
CASRIKGGLNTEAFF

SEQ ID NO: 279587 - protein, 15 aa, Homo sapiens
  CDR3 for alpha chain variable domain of TCR clone 139794 (TRAV12-3, TRAJ6)
CAMSATSGGSYITTF

SEQ ID NO: 279588 - protein, 11 aa, Homo sapiens
  CDR3 for beta chain variable domain of TCR clone 139794 (TRBV20-1, TRBJ1-5)
CSSQGDQPQHF

SEQ ID NO: 279589 - protein, 13 aa, Homo sapiens
  CDR3 for alpha chain variable domain of TCR clone 139795 (TRAV13-2, TRAJ8)
CAFINTGFQKLVF

SEQ ID NO: 279590 - protein, 15 aa, Homo sapiens
  CDR3 for beta chain variable domain of TCR clone 139795 (TRBV19, TRBJ2-3)
CAAGDTNAPNDTQYF

SEQ ID NO: 279591 - protein, 19 aa, Homo sapiens
  CDR3 for alpha chain variable domain of TCR clone 139796 (TRAV38-1, TRAJ57)
CDVFLCFHGLSGGSEKLVF

SEQ ID NO: 279592 - protein, 16 aa, Homo sapiens
  CDR3 for beta chain variable domain of TCR clone 139796 (TRBV10-3, TRBJ2-1)
CAIRGGGRGDYNEQFF

SEQ ID NO: 279593 - protein, 15 aa, Homo sapiens
  CDR3 for alpha chain variable domain of TCR clone 139797 (TRAV12-3, TRAJ6)
CAMSATTGGSYIPTF

SEQ ID NO: 279594 - protein, 15 aa, Homo sapiens
  CDR3 for beta chain variable domain of TCR clone 139797 (TRBV4-1, TRBJ1-2)
CASSQGQGAAYGYTF

SEQ ID NO: 279595 - protein, 12 aa, Homo sapiens
  CDR3 for alpha chain variable domain of TCR clone 139798 (TRAV13-1, TRAJ21)
CAAKEGFNKFYF

SEQ ID NO: 279596 - protein, 13 aa, Homo sapiens
  CDR3 for beta chain variable domain of TCR clone 139798 (TRBV19, TRBJ2-5)
CASSMGGAGTQYF

SEQ ID NO: 279597 - protein, 14 aa, Homo sapiens
  CDR3 for alpha chain variable domain of TCR clone 139799 (TRAV12-1, TRAJ33)
CVVNPEDSNYQVIW

SEQ ID NO: 279598 - protein, 11 aa, Homo sapiens
  CDR3 for beta chain variable domain of TCR clone 139799 (TRBV7-6, TRBJ2-1)
CASSNYGEQFF

SEQ ID NO: 279599 - protein, 14 aa, Homo sapiens
  CDR3 for alpha chain variable domain of TCR clone 139800 (TRAV30, TRAJ33)
CGTERRFSNYQLIW

SEQ ID NO: 279600 - protein, 15 aa, Homo sapiens
  CDR3 for beta chain variable domain of TCR clone 139800 (TRBV7-9, TRBJ2-2)
CASGPLDTFPGELFF

SEQ ID NO: 279601 - protein, 13 aa, Homo sapiens
  CDR3 for alpha chain variable domain of TCR clone 139801 (TRAV12-1, TRAJ36)
CGDAQTGANNLFF

SEQ ID NO: 279602 - protein, 12 aa, Homo sapiens
  CDR3 for beta chain variable domain of TCR clone 139801 (TRBV7-8, TRBJ2-7)
CASSLGDREQYF

SEQ ID NO: 279603 - protein, 14 aa, Homo sapiens
  CDR3 for alpha chain variable domain of TCR clone 139802 (TRAV2, TRAJ3)
CAVPPYSSASKIIF

SEQ ID NO: 279604 - protein, 14 aa, Homo sapiens
  CDR3 for beta chain variable domain of TCR clone 139802 (TRBV19, TRBJ2-1)
CASPTFVLSGEQFF

SEQ ID NO: 279605 - protein, 15 aa, Homo sapiens
  CDR3 for alpha chain variable domain of TCR clone 139803 (TRAV26-1, TRAJ44)
CIVRANTGAASKPTF

SEQ ID NO: 279606 - protein, 16 aa, Homo sapiens
  CDR3 for beta chain variable domain of TCR clone 139803 (TRBV7-7, TRBJ2-1)
CASSLASGTSYNEQFF

SEQ ID NO: 279607 - protein, 13 aa, Homo sapiens
  CDR3 for alpha chain variable domain of TCR clone 139804 (TRAV27, TRAJ49)
CAPRPYPGNQFYF

SEQ ID NO: 279608 - protein, 18 aa, Homo sapiens
  CDR3 for beta chain variable domain of TCR clone 139804 (TRBV7-3, TRBJ2-5)
CASSLGGAAQGRWETQYF

SEQ ID NO: 279609 - protein, 13 aa, Homo sapiens
  CDR3 for alpha chain variable domain of TCR clone 139805 (TRAV12-3, TRAJ33)
CAMSVNSNYQLIW

SEQ ID NO: 279610 - protein, 13 aa, Homo sapiens
  CDR3 for beta chain variable domain of TCR clone 139805 (TRBV2, TRBJ2-2)
CASRAWRTGELFF

SEQ ID NO: 279611 - protein, 12 aa, Homo sapiens
  CDR3 for alpha chain variable domain of TCR clone 139806 (TRAV8-3, TRAJ34)
WASVYNTDKLIF

SEQ ID NO: 279612 - protein, 13 aa, Homo sapiens
  CDR3 for beta chain variable domain of TCR clone 139806 (TRBV6-4, TRBJ2-3)
CASSVSWADTQYF

SEQ ID NO: 279613 - protein, 13 aa, Homo sapiens
  CDR3 for alpha chain variable domain of TCR clone 139807 (TRAV8-3, TRAJ48)
CCGCNFGNEKLTF

SEQ ID NO: 279614 - protein, 12 aa, Homo sapiens
  CDR3 for beta chain variable domain of TCR clone 139807 (TRBV7-2, TRBJ2-5)
CASSQDQETQYF

SEQ ID NO: 279615 - protein, 14 aa, Homo sapiens
  CDR3 for alpha chain variable domain of TCR clone 139808 (TRAV12-2, TRAJ9)
CAVNALEGGFKTIF

SEQ ID NO: 279616 - protein, 18 aa, Homo sapiens
  CDR3 for beta chain variable domain of TCR clone 139808 (TRBV6-6, TRBJ1-3)
CASSYSRWDSISGNAIYF

SEQ ID NO: 279617 - protein, 14 aa, Homo sapiens
  CDR3 for alpha chain variable domain of TCR clone 139809 (TRAV26-1, TRAJ45)
CIEGTGGGADGLTF

SEQ ID NO: 279618 - protein, 13 aa, Homo sapiens
  CDR3 for beta chain variable domain of TCR clone 139809 (TRBV7-6, TRBJ1-2)
CASSLVADYGYAF

SEQ ID NO: 279619 - protein, 14 aa, Homo sapiens
  CDR3 for alpha chain variable domain of TCR clone 139810 (TRAV8-1, TRAJ5)
CAVRTDTGRRALTF

SEQ ID NO: 279620 - protein, 11 aa, Homo sapiens
  CDR3 for beta chain variable domain of TCR clone 139810 (TRBV6-3, TRBJ2-3)
CATGQADTQYF

SEQ ID NO: 279621 - protein, 15 aa, Homo sapiens
  CDR3 for alpha chain variable domain of TCR clone 139811 (TRAV17, TRAJ16)
CATALRFSDGQKLLF

SEQ ID NO: 279622 - protein, 15 aa, Homo sapiens
  CDR3 for beta chain variable domain of TCR clone 139811 (TRBV7-2, TRBJ2-3)
CASSSTGLETDTQYF

SEQ ID NO: 279623 - protein, 14 aa, Homo sapiens
  CDR3 for alpha chain variable domain of TCR clone 139812 (TRAV13-1, TRAJ53)
CAASISCSNYKLTF

SEQ ID NO: 279624 - protein, 15 aa, Homo sapiens
  CDR3 for beta chain variable domain of TCR clone 139812 (TRBV4-1, TRBJ1-4)
CASSDTGGTNEKLFF

SEQ ID NO: 279625 - protein, 16 aa, Homo sapiens
  CDR3 for alpha chain variable domain of TCR clone 139813 (TRAV20, TRAJ53)
CAVQAESGGSNDKLTF

SEQ ID NO: 279626 - protein, 14 aa, Homo sapiens
  CDR3 for beta chain variable domain of TCR clone 139813 (TRBV27, TRBJ2-5)
CASSRTFLVDTQYF

SEQ ID NO: 279627 - protein, 14 aa, Homo sapiens
  CDR3 for alpha chain variable domain of TCR clone 139814 (TRAV12-2, TRAJ44)
CAVNPAGTASKLTF

SEQ ID NO: 279628 - protein, 16 aa, Homo sapiens
  CDR3 for beta chain variable domain of TCR clone 139814 (TRBV10-2, TRBJ2-7)
CASSESPGSSGFEQYF

SEQ ID NO: 279629 - protein, 13 aa, Homo sapiens
  CDR3 for alpha chain variable domain of TCR clone 139815 (TRAV21, TRAJ15)
CVVAYQAGTALIF

SEQ ID NO: 279630 - protein, 14 aa, Homo sapiens
  CDR3 for beta chain variable domain of TCR clone 139815 (TRBV27, TRBJ2-2)
CASSLGAATGELFF

SEQ ID NO: 279631 - protein, 17 aa, Homo sapiens
  CDR3 for alpha chain variable domain of TCR clone 139816 (TRAV4, TRAJ42)
CLVGVLNYEGSQGNLIF

SEQ ID NO: 279632 - protein, 12 aa, Homo sapiens
  CDR3 for beta chain variable domain of TCR clone 139816 (TRBV20-1, TRBJ2-1)
CSAQYTYNEQFF

SEQ ID NO: 279633 - protein, 13 aa, Homo sapiens
  CDR3 for alpha chain variable domain of TCR clone 139817 (TRAV13-1, TRAJ37)
CAAVSGNSGKLIF

SEQ ID NO: 279634 - protein, 17 aa, Homo sapiens
  CDR3 for beta chain variable domain of TCR clone 139817 (TRBV10-2, TRBJ1-6)
CASSENRGSSYNSPLHF

SEQ ID NO: 279635 - protein, 15 aa, Homo sapiens
  CDR3 for alpha chain variable domain of TCR clone 139818 (TRAV12-2, TRAJ32)
CAVNHYGGATNKLIF

SEQ ID NO: 279636 - protein, 15 aa, Homo sapiens
  CDR3 for beta chain variable domain of TCR clone 139818 (TRBV20-1, TRBJ2-7)
CSARDRVSGMDEQYF

SEQ ID NO: 279637 - protein, 11 aa, Homo sapiens
  CDR3 for alpha chain variable domain of TCR clone 139819 (TRAV35, TRAJ22)
CAGPGVGQLTF

SEQ ID NO: 279638 - protein, 15 aa, Homo sapiens
  CDR3 for beta chain variable domain of TCR clone 139819 (TRBV6-1, TRBJ2-3)
CASSERGGITDTQYF

SEQ ID NO: 279639 - protein, 13 aa, Homo sapiens
  CDR3 for alpha chain variable domain of TCR clone 139820 (TRAV36/DV7, TRAJ37)
CAVFSSNTGKLIF

SEQ ID NO: 279640 - protein, 19 aa, Homo sapiens
  CDR3 for beta chain variable domain of TCR clone 139820 (TRBV7-2, TRBJ2-3)
CASSFLSRNWGGGTDTQYF

SEQ ID NO: 279641 - protein, 15 aa, Homo sapiens
  CDR3 for alpha chain variable domain of TCR clone 139821 (TRAV21, TRAJ53)
CATLNSGGSNSKLTF

SEQ ID NO: 279642 - protein, 15 aa, Homo sapiens
  CDR3 for beta chain variable domain of TCR clone 139821 (TRBV18, TRBJ2-1)
CASSPPSASYNEQFF

SEQ ID NO: 279643 - protein, 13 aa, Homo sapiens
  CDR3 for alpha chain variable domain of TCR clone 139822 (TRAV12-1, TRAJ40)
CVVNSSGTYKYIF

SEQ ID NO: 279644 - protein, 14 aa, Homo sapiens
  CDR3 for beta chain variable domain of TCR clone 139822 (TRBV2, TRBJ1-6)
CASEVSSYKSTLHF

SEQ ID NO: 279645 - protein, 15 aa, Homo sapiens
  CDR3 for alpha chain variable domain of TCR clone 139823 (TRAV1-1, TRAJ23)
CAVREGDNHGGKLIF

SEQ ID NO: 279646 - protein, 13 aa, Homo sapiens
  CDR3 for beta chain variable domain of TCR clone 139823 (TRBV10-3, TRBJ2-7)
CAISEKGGYEQYF

SEQ ID NO: 279647 - protein, 11 aa, Homo sapiens
  CDR3 for alpha chain variable domain of TCR clone 139824 (TRAV1-2, TRAJ20)
CAVSNDYKLSF

SEQ ID NO: 279648 - protein, 15 aa, Homo sapiens
  CDR3 for beta chain variable domain of TCR clone 139824 (TRBV20-1, TRBJ2-7)
CSARVPAAYFYEQYF

SEQ ID NO: 279649 - protein, 13 aa, Homo sapiens
  CDR3 for alpha chain variable domain of TCR clone 139825 (TRAV27, TRAJ6)
CAGGTRGSYIPTF

SEQ ID NO: 279650 - protein, 13 aa, Homo sapiens
  CDR3 for beta chain variable domain of TCR clone 139825 (TRBV15, TRBJ1-6)
CATSGGLNSPLHF

SEQ ID NO: 279651 - protein, 12 aa, Homo sapiens
  CDR3 for alpha chain variable domain of TCR clone 139826 (TRAV13-1, TRAJ48)
CAANFGNEKLTF

SEQ ID NO: 279652 - protein, 15 aa, Homo sapiens
  CDR3 for beta chain variable domain of TCR clone 139826 (TRBV7-9, TRBJ2-1)
CASSLGLAGGTEQFF

SEQ ID NO: 279653 - protein, 13 aa, Homo sapiens
  CDR3 for alpha chain variable domain of TCR clone 139827 (TRAV27, TRAJ39)
CAGPNNAGNMLTF

SEQ ID NO: 279654 - protein, 17 aa, Homo sapiens
  CDR3 for beta chain variable domain of TCR clone 139827 (TRBV13, TRBJ2-3)
CASSLSRVAGGRNTQYF

SEQ ID NO: 279655 - protein, 11 aa, Homo sapiens
  CDR3 for alpha chain variable domain of TCR clone 139828 (TRAV1-1, TRAJ3)
CAVRSASKIIF

SEQ ID NO: 279656 - protein, 18 aa, Homo sapiens
  CDR3 for beta chain variable domain of TCR clone 139828 (TRBV12-4, TRBJ2-2)
CASSLVAVTRGRTGELFF

SEQ ID NO: 279657 - protein, 19 aa, Homo sapiens
  CDR3 for alpha chain variable domain of TCR clone 139829 (TRAV26-1, TRAJ50)
CCVLLHRQNPKTSYDKVIL

SEQ ID NO: 279658 - protein, 17 aa, Homo sapiens
  CDR3 for beta chain variable domain of TCR clone 139829 (TRBV4-1, TRBJ1-4)
CASSQEGPRGVEEKLFF

SEQ ID NO: 279659 - protein, 13 aa, Homo sapiens
  CDR3 for alpha chain variable domain of TCR clone 139830 (TRAV21, TRAJ20)
CAVGLRVGYKLSF

SEQ ID NO: 279660 - protein, 13 aa, Homo sapiens
  CDR3 for beta chain variable domain of TCR clone 139830 (TRBV6-1, TRBJ1-1)
CASSRQGNTEAFF

SEQ ID NO: 279661 - protein, 16 aa, Homo sapiens
  CDR3 for alpha chain variable domain of TCR clone 139831 (TRAV30, TRAJ24)
CGTEIVDADSWGKFQC

SEQ ID NO: 279662 - protein, 15 aa, Homo sapiens
  CDR3 for beta chain variable domain of TCR clone 139831 (TRBV27, TRBJ2-1)
CASSNGGGSSNEQFF

SEQ ID NO: 279663 - protein, 14 aa, Homo sapiens
  CDR3 for alpha chain variable domain of TCR clone 139832 (TRAV14/DV4, TRAJ54)
CSMREAPGAQKLVF

SEQ ID NO: 279664 - protein, 15 aa, Homo sapiens
  CDR3 for beta chain variable domain of TCR clone 139832 (TRBV5-1, TRBJ2-7)
CASSLNGGPAREQYF

SEQ ID NO: 279665 - protein, 15 aa, Homo sapiens
  CDR3 for alpha chain variable domain of TCR clone 139833 (TRAV21, TRAJ32)
CAVHPYGGATNKLIF

SEQ ID NO: 279666 - protein, 18 aa, Homo sapiens
  CDR3 for beta chain variable domain of TCR clone 139833 (TRBV7-9, TRBJ2-1)
CASSTGLAEGSSYNEQFF

SEQ ID NO: 279667 - protein, 13 aa, Homo sapiens
  CDR3 for alpha chain variable domain of TCR clone 139834 (TRAV13-1, TRAJ6)
CAASSGGSYIPTF

SEQ ID NO: 279668 - protein, 14 aa, Homo sapiens
  CDR3 for beta chain variable domain of TCR clone 139834 (TRBV20-1, TRBJ2-4)
CSGVAGGPGNIQYF

SEQ ID NO: 279669 - protein, 18 aa, Homo sapiens
  CDR3 for alpha chain variable domain of TCR clone 139835 (TRAV12-3, TRAJ52)
CAMSVGGAGGTSYGKLTF

SEQ ID NO: 279670 - protein, 14 aa, Homo sapiens
  CDR3 for beta chain variable domain of TCR clone 139835 (TRBV27, TRBJ1-6)
CSSFDRGLGSPLHF

SEQ ID NO: 279671 - protein, 16 aa, Homo sapiens
  CDR3 for alpha chain variable domain of TCR clone 139836 (TRAV12-1, TRAJ42)
CVVTLYYGGSQGNLIF

SEQ ID NO: 279672 - protein, 15 aa, Homo sapiens
  CDR3 for beta chain variable domain of TCR clone 139836 (TRBV4-3, TRBJ2-7)
CASSQGGRGIYEQYF

SEQ ID NO: 279673 - protein, 13 aa, Homo sapiens
  CDR3 for alpha chain variable domain of TCR clone 139837 (TRAV27, TRAJ29)
CAGAHSGNTPLVF

SEQ ID NO: 279674 - protein, 14 aa, Homo sapiens
  CDR3 for beta chain variable domain of TCR clone 139837 (TRBV7-9, TRBJ2-7)
CASSIGQGAGELYF

SEQ ID NO: 279675 - protein, 14 aa, Homo sapiens
  CDR3 for alpha chain variable domain of TCR clone 139838 (TRAV38-1, TRAJ45)
CAYYSGGGADGLTF

SEQ ID NO: 279676 - protein, 12 aa, Homo sapiens
  CDR3 for beta chain variable domain of TCR clone 139838 (TRBV11-2, TRBJ1-2)
CASSREGDGYTF

SEQ ID NO: 279677 - protein, 15 aa, Homo sapiens
  CDR3 for alpha chain variable domain of TCR clone 139839 (TRAV4, TRAJ39)
CLVGPNHNAGNMLTL

SEQ ID NO: 279678 - protein, 13 aa, Homo sapiens
  CDR3 for beta chain variable domain of TCR clone 139839 (TRBV11-2, TRBJ2-5)
CASSSTGEETQYF

SEQ ID NO: 279679 - protein, 13 aa, Homo sapiens
  CDR3 for alpha chain variable domain of TCR clone 139840 (TRAV35, TRAJ57)
CAGTQGGSEKMVF

SEQ ID NO: 279680 - protein, 13 aa, Homo sapiens
  CDR3 for beta chain variable domain of TCR clone 139840 (TRBV6-1, TRBJ2-7)
CASSELTVSEQYF

SEQ ID NO: 279681 - protein, 14 aa, Homo sapiens
  CDR3 for alpha chain variable domain of TCR clone 139841 (TRAV12-3, TRAJ10)
SHLPLTGGENKLTF

SEQ ID NO: 279682 - protein, 13 aa, Homo sapiens
  CDR3 for beta chain variable domain of TCR clone 139841 (TRBV7-9, TRBJ2-3)
CASSPGSTDTQYF

SEQ ID NO: 279683 - protein, 13 aa, Homo sapiens
  CDR3 for alpha chain variable domain of TCR clone 139842 (TRAV8-3, TRAJ28)
CAVGAVGSYQLTF

SEQ ID NO: 279684 - protein, 14 aa, Homo sapiens
  CDR3 for beta chain variable domain of TCR clone 139842 (TRBV7-2, TRBJ2-7)
CASRSHGAAYEQYF

SEQ ID NO: 279685 - protein, 10 aa, Homo sapiens
  CDR3 for alpha chain variable domain of TCR clone 139843 (TRAV23/DV6, TRAJ57)
CAASSTLSKG

SEQ ID NO: 279686 - protein, 14 aa, Homo sapiens
  CDR3 for beta chain variable domain of TCR clone 139843 (TRBV25-1, TRBJ1-1)
CASTHLGGNTEAFF

SEQ ID NO: 279687 - protein, 14 aa, Homo sapiens
  CDR3 for alpha chain variable domain of TCR clone 139844 (TRAV29/DV5, TRAJ49)
CAASLSNTGNQFYF

SEQ ID NO: 279688 - protein, 12 aa, Homo sapiens
  CDR3 for beta chain variable domain of TCR clone 139844 (TRBV9, TRBJ2-5)
CASRGRLAGGPE

SEQ ID NO: 279689 - protein, 14 aa, Homo sapiens
  CDR3 for alpha chain variable domain of TCR clone 139845 (TRAV26-1, TRAJ22)
CIVRVSGSARQLTF

SEQ ID NO: 279690 - protein, 14 aa, Homo sapiens
  CDR3 for beta chain variable domain of TCR clone 139845 (TRBV12-5, TRBJ2-5)
CASGSRTHQETQYF

SEQ ID NO: 279691 - protein, 14 aa, Homo sapiens
  CDR3 for alpha chain variable domain of TCR clone 139846 (TRAV21, TRAJ38)
CAVANAGNNRKLIW

SEQ ID NO: 279692 - protein, 16 aa, Homo sapiens
  CDR3 for beta chain variable domain of TCR clone 139846 (TRBV5-4, TRBJ2-1)
CPSSLALAGAYNEQFF

SEQ ID NO: 279693 - protein, 10 aa, Homo sapiens
  CDR3 for alpha chain variable domain of TCR clone 139847 (TRAV8-3, TRAJ43)
SAVALADMRF

SEQ ID NO: 279694 - protein, 17 aa, Homo sapiens
  CDR3 for beta chain variable domain of TCR clone 139847 (TRBV10-1, TRBJ2-1)
CASSPQRAGGPFNEQFF

SEQ ID NO: 279695 - protein, 11 aa, Homo sapiens
  CDR3 for alpha chain variable domain of TCR clone 139848 (TRAV12-1, TRAJ21)
CVVNNFNKFYF

SEQ ID NO: 279696 - protein, 14 aa, Homo sapiens
  CDR3 for beta chain variable domain of TCR clone 139848 (TRBV19, TRBJ1-1)
CASRLSLVNTEAFF

SEQ ID NO: 279697 - protein, 14 aa, Homo sapiens
  CDR3 for alpha chain variable domain of TCR clone 139849 (TRAV4, TRAJ17)
CLVGDMAAGNKLTF

SEQ ID NO: 279698 - protein, 14 aa, Homo sapiens
  CDR3 for beta chain variable domain of TCR clone 139849 (TRBV25-1, TRBJ1-1)
CASTHLGGNTEAFF

SEQ ID NO: 279699 - protein, 17 aa, Homo sapiens
  CDR3 for alpha chain variable domain of TCR clone 139850 (TRAV3, TRAJ28)
CAVREAYSGAGSYKPTF

SEQ ID NO: 279700 - protein, 18 aa, Homo sapiens
  CDR3 for beta chain variable domain of TCR clone 139850 (TRBV27, TRBJ2-1)
CASGNRAVGVGSKNEQFF

SEQ ID NO: 279701 - protein, 10 aa, Homo sapiens
  CDR3 for alpha chain variable domain of TCR clone 139851 (TRAV23/DV6, TRAJ57)
CAASSTLSQG

SEQ ID NO: 279702 - protein, 16 aa, Homo sapiens
  CDR3 for beta chain variable domain of TCR clone 139851 (TRBV12-4, TRBJ2-7)
CASSPEGQGSSYEQYF

SEQ ID NO: 279703 - protein, 13 aa, Homo sapiens
  CDR3 for alpha chain variable domain of TCR clone 139852 (TRAV27, TRAJ49)
CAPRPYTDNQFYF

SEQ ID NO: 279704 - protein, 16 aa, Homo sapiens
  CDR3 for beta chain variable domain of TCR clone 139852 (TRBV4-1, TRBJ1-2)
CASSQDAGQVLYGDTF

SEQ ID NO: 279705 - protein, 14 aa, Homo sapiens
  CDR3 for alpha chain variable domain of TCR clone 139853 (TRAV16, TRAJ48)
CALTPCFGNEKLTF

SEQ ID NO: 279706 - protein, 14 aa, Homo sapiens
  CDR3 for beta chain variable domain of TCR clone 139853 (TRBV7-2, TRBJ2-7)
CASSSISGFSEQYF

SEQ ID NO: 279707 - protein, 22 aa, Homo sapiens
  CDR3 for alpha chain variable domain of TCR clone 139854 (TRAV34, TRAJ52)
STSVEQTRRSNAGGTTYGKLTF

SEQ ID NO: 279708 - protein, 15 aa, Homo sapiens
  CDR3 for beta chain variable domain of TCR clone 139854 (TRBV5-1, TRBJ2-7)
CASSLNGGPAREQYF

SEQ ID NO: 279709 - protein, 16 aa, Homo sapiens
  CDR3 for alpha chain variable domain of TCR clone 139855 (TRAV3, TRAJ23)
CAVEPLIYNQGGKLIF

SEQ ID NO: 279710 - protein, 15 aa, Homo sapiens
  CDR3 for beta chain variable domain of TCR clone 139855 (TRBV19, TRBJ1-5)
CASSPEGRPKQPQHF

SEQ ID NO: 279711 - protein, 16 aa, Homo sapiens
  CDR3 for alpha chain variable domain of TCR clone 139856 (TRAV1-2, TRAJ18)
YAVRVERGSTLGRLYF

SEQ ID NO: 279712 - protein, 16 aa, Homo sapiens
  CDR3 for beta chain variable domain of TCR clone 139856 (TRBV20-1, TRBJ2-7)
CSASTSGRLSSYEQYF

SEQ ID NO: 279713 - protein, 14 aa, Homo sapiens
  CDR3 for alpha chain variable domain of TCR clone 139857 (TRAV25, TRAJ23)
CAGQGDNQGGKLIF

SEQ ID NO: 279714 - protein, 13 aa, Homo sapiens
  CDR3 for beta chain variable domain of TCR clone 139857 (TRBV7-6, TRBJ1-2)
CASSLVADYGYTF

SEQ ID NO: 279715 - protein, 17 aa, Homo sapiens
  CDR3 for alpha chain variable domain of TCR clone 139858 (TRAV12-3, TRAJ26)
CAMSGGRWDNYGQNFVF

SEQ ID NO: 279716 - protein, 12 aa, Homo sapiens
  CDR3 for beta chain variable domain of TCR clone 139858 (TRBV19, TRBJ1-1)
CASSTTGIEAFF

SEQ ID NO: 279717 - protein, 18 aa, Homo sapiens
  CDR3 for alpha chain variable domain of TCR clone 139859 (TRAV21, TRAJ52)
CAVRPSPAGGTSYGKLTF

SEQ ID NO: 279718 - protein, 15 aa, Homo sapiens
  CDR3 for beta chain variable domain of TCR clone 139859 (TRBV7-9, TRBJ1-5)
CASSHGHQPNQPQHF

SEQ ID NO: 279719 - protein, 17 aa, Homo sapiens
  CDR3 for alpha chain variable domain of TCR clone 139860 (TRAV3, TRAJ13)
CAVRDMRRTGGYQKVTF

SEQ ID NO: 279720 - protein, 14 aa, Homo sapiens
  CDR3 for beta chain variable domain of TCR clone 139860 (TRBV5-1, TRBJ2-7)
CASSLTGSGYEQYL

SEQ ID NO: 279721 - protein, 11 aa, Homo sapiens
  CDR3 for alpha chain variable domain of TCR clone 139861 (TRAV12-3, TRAJ27)
CAMANAGKSTF

SEQ ID NO: 279722 - protein, 13 aa, Homo sapiens
  CDR3 for beta chain variable domain of TCR clone 139861 (TRBV28, TRBJ1-1)
CASSKQGWTEAFF

SEQ ID NO: 279723 - protein, 15 aa, Homo sapiens
  CDR3 for alpha chain variable domain of TCR clone 139862 (TRAV21, TRAJ52)
CAVRGGGTSYGKLTF

SEQ ID NO: 279724 - protein, 16 aa, Homo sapiens
  CDR3 for beta chain variable domain of TCR clone 139862 (TRBV28, TRBJ2-7)
CASSLFFETGGPEQYF

SEQ ID NO: 279725 - protein, 14 aa, Homo sapiens
  CDR3 for alpha chain variable domain of TCR clone 139863 (TRAV12-2, TRAJ17)
CAVNIKAAGNKPTF

SEQ ID NO: 279726 - protein, 12 aa, Homo sapiens
  CDR3 for beta chain variable domain of TCR clone 139863 (TRBV7-8, TRBJ2-7)
CASSLGDREQYF

SEQ ID NO: 279727 - protein, 15 aa, Homo sapiens
  CDR3 for alpha chain variable domain of TCR clone 139864 (TRAV26-1, TRAJ29)
CIVRIEGSGNTPLAF

SEQ ID NO: 279728 - protein, 15 aa, Homo sapiens
  CDR3 for beta chain variable domain of TCR clone 139864 (TRBV7-9, TRBJ1-5)
CASSQGHQPNQPQHF

SEQ ID NO: 279729 - protein, 15 aa, Homo sapiens
  CDR3 for alpha chain variable domain of TCR clone 139865 (TRAV29/DV5, TRAJ24)
CAASGATDSWGKFQF

SEQ ID NO: 279730 - protein, 17 aa, Homo sapiens
  CDR3 for beta chain variable domain of TCR clone 139865 (TRBV7-8, TRBJ2-6)
CASSAGTGGAGANVLTF

SEQ ID NO: 279731 - protein, 13 aa, Homo sapiens
  CDR3 for alpha chain variable domain of TCR clone 139866 (TRAV27, TRAJ24)
CAGDRDSWGKLQF

SEQ ID NO: 279732 - protein, 14 aa, Homo sapiens
  CDR3 for beta chain variable domain of TCR clone 139866 (TRBV12-5, TRBJ2-5)
CASGSRTHQETQYF

SEQ ID NO: 279733 - protein, 14 aa, Homo sapiens
  CDR3 for alpha chain variable domain of TCR clone 139867 (TRAV12-3, TRAJ10)
SHLPLTGGGNKLTF

SEQ ID NO: 279734 - protein, 14 aa, Homo sapiens
  CDR3 for beta chain variable domain of TCR clone 139867 (TRBV5-1, TRBJ2-5)
CASSLAGKQETQYF

SEQ ID NO: 279735 - protein, 15 aa, Homo sapiens
  CDR3 for alpha chain variable domain of TCR clone 139868 (TRAV4, TRAJ39)
CLVGPNNNAGNMLTF

SEQ ID NO: 279736 - protein, 19 aa, Homo sapiens
  CDR3 for beta chain variable domain of TCR clone 139868 (TRBV14, TRBJ2-1)
CASSQDQRWEAPEYNEQFF

SEQ ID NO: 279737 - protein, 13 aa, Homo sapiens
  CDR3 for alpha chain variable domain of TCR clone 139869 (TRAV12-3, TRAJ33)
CAMSLNSNYQLIW

SEQ ID NO: 279738 - protein, 13 aa, Homo sapiens
  CDR3 for beta chain variable domain of TCR clone 139869 (TRBV7-2, TRBJ2-2)
CASSLAVTGELFC

SEQ ID NO: 279739 - protein, 16 aa, Homo sapiens
  CDR3 for alpha chain variable domain of TCR clone 139870 (TRAV35, TRAJ37)
CWAFLRGSSNTGKLIF

SEQ ID NO: 279740 - protein, 13 aa, Homo sapiens
  CDR3 for beta chain variable domain of TCR clone 139870 (TRBV2, TRBJ1-2)
CASSVRGKYGYTF

SEQ ID NO: 279741 - protein, 13 aa, Homo sapiens
  CDR3 for alpha chain variable domain of TCR clone 139871 (TRAV13-1, TRAJ48)
CARSNFGNEKLTF

SEQ ID NO: 279742 - protein, 14 aa, Homo sapiens
  CDR3 for beta chain variable domain of TCR clone 139871 (TRBV10-3, TRBJ2-1)
CAISSDLAFNEQFF

SEQ ID NO: 279743 - protein, 14 aa, Homo sapiens
  CDR3 for alpha chain variable domain of TCR clone 139872 (TRAV35, TRAJ22)
CAGLRPGSARQLTF

SEQ ID NO: 279744 - protein, 13 aa, Homo sapiens
  CDR3 for beta chain variable domain of TCR clone 139872 (TRBV7-9, TRBJ1-2)
CASGLKQNYGYTF

SEQ ID NO: 279745 - protein, 14 aa, Homo sapiens
  CDR3 for alpha chain variable domain of TCR clone 139873 (TRAV17, TRAJ22)
CATSPSGSATQLTF

SEQ ID NO: 279746 - protein, 15 aa, Homo sapiens
  CDR3 for beta chain variable domain of TCR clone 139873 (TRBV4-1, TRBJ2-5)
CASSQWDLYQETQYF

SEQ ID NO: 279747 - protein, 17 aa, Homo sapiens
  CDR3 for alpha chain variable domain of TCR clone 139874 (TRAV17, TRAJ28)
CATDARRGGAGSYKLTF

SEQ ID NO: 279748 - protein, 16 aa, Homo sapiens
  CDR3 for beta chain variable domain of TCR clone 139874 (TRBV25-1, TRBJ1-1)
CASSGDRDRGRIEAFF

SEQ ID NO: 279749 - protein, 14 aa, Homo sapiens
  CDR3 for alpha chain variable domain of TCR clone 139875 (TRAV1-1, TRAJ35)
CAVRSIGFGNVLHC

SEQ ID NO: 279750 - protein, 14 aa, Homo sapiens
  CDR3 for beta chain variable domain of TCR clone 139875 (TRBV7-2, TRBJ2-7)
CASSSISGFSEQYF

SEQ ID NO: 279751 - protein, 12 aa, Homo sapiens
  CDR3 for alpha chain variable domain of TCR clone 139876 (TRAV13-1, TRAJ53)
CAAGGSNYKLTF

SEQ ID NO: 279752 - protein, 11 aa, Homo sapiens
  CDR3 for beta chain variable domain of TCR clone 139876 (TRBV2, TRBJ1-1)
CASREGTESFF

SEQ ID NO: 279753 - protein, 18 aa, Homo sapiens
  CDR3 for alpha chain variable domain of TCR clone 139877 (TRAV12-3, TRAJ52)
FAMSVGGAGGTSYGKLTF

SEQ ID NO: 279754 - protein, 15 aa, Homo sapiens
  CDR3 for beta chain variable domain of TCR clone 139877 (TRBV27, TRBJ1-6)
CASSFDRGLGSPLHF

SEQ ID NO: 279755 - protein, 13 aa, Homo sapiens
  CDR3 for alpha chain variable domain of TCR clone 139878 (TRAV13-1, TRAJ49)
CAAMLYTGNQFYF

SEQ ID NO: 279756 - protein, 15 aa, Homo sapiens
  CDR3 for beta chain variable domain of TCR clone 139878 (TRBV12-4, TRBJ1-5)
CASTRGSGCGQPQHF

SEQ ID NO: 279757 - protein, 15 aa, Homo sapiens
  CDR3 for alpha chain variable domain of TCR clone 139879 (TRAV35, TRAJ58)
CAGRRPETSGSRLTF

SEQ ID NO: 279758 - protein, 16 aa, Homo sapiens
  CDR3 for beta chain variable domain of TCR clone 139879 (TRBV2, TRBJ2-1)
CASSVGGSLSYNEQFF

SEQ ID NO: 279759 - protein, 15 aa, Homo sapiens
  CDR3 for alpha chain variable domain of TCR clone 139880 (TRAV12-3, TRAJ4)
CAMTRGSGGYNKLIF

SEQ ID NO: 279760 - protein, 14 aa, Homo sapiens
  CDR3 for beta chain variable domain of TCR clone 139880 (TRBV4-3, TRBJ2-3)
CSSSQAETVDTQYF

SEQ ID NO: 279761 - protein, 15 aa, Homo sapiens
  CDR3 for alpha chain variable domain of TCR clone 139881 (TRAV12-3, TRAJ6)
CAMGATTGGSYIPTF

SEQ ID NO: 279762 - protein, 14 aa, Homo sapiens
  CDR3 for beta chain variable domain of TCR clone 139881 (TRBV14, TRBJ2-1)
CASSQVQGRGEQFF

SEQ ID NO: 279763 - protein, 14 aa, Homo sapiens
  CDR3 for alpha chain variable domain of TCR clone 139882 (TRAV8-4, TRAJ13)
CAVTLSGGYQKVTF

SEQ ID NO: 279764 - protein, 15 aa, Homo sapiens
  CDR3 for beta chain variable domain of TCR clone 139882 (TRBV4-3, TRBJ2-7)
CASSQGDWGDYEQYF

SEQ ID NO: 279765 - protein, 23 aa, Homo sapiens
  CDR3 for alpha chain variable domain of TCR clone 139883 (TRAV21, TRAJ9)
CAVEAVALEVSKLSLEQEQDYLL

SEQ ID NO: 279766 - protein, 13 aa, Homo sapiens
  CDR3 for beta chain variable domain of TCR clone 139883 (TRBV12-4, TRBJ1-2)
CASSSGLTVISTF

SEQ ID NO: 279767 - protein, 13 aa, Homo sapiens
  CDR3 for alpha chain variable domain of TCR clone 139884 (TRAV12-2, TRAJ52)
CAVGGTSYGKLTF

SEQ ID NO: 279768 - protein, 12 aa, Homo sapiens
  CDR3 for beta chain variable domain of TCR clone 139884 (TRBV11-2, TRBJ2-1)
CASSPGNNEQFF

SEQ ID NO: 279769 - protein, 14 aa, Homo sapiens
  CDR3 for alpha chain variable domain of TCR clone 139885 (TRAV26-1, TRAJ38)
CIADNAGNNRKLIL

SEQ ID NO: 279770 - protein, 15 aa, Homo sapiens
  CDR3 for beta chain variable domain of TCR clone 139885 (TRBV20-1, TRBJ2-7)
CSARDRVSGMDEQYF

SEQ ID NO: 279771 - protein, 13 aa, Homo sapiens
  CDR3 for alpha chain variable domain of TCR clone 139886 (TRAV12-2, TRAJ52)
CAVGGTCYGKLTF

SEQ ID NO: 279772 - protein, 18 aa, Homo sapiens
  CDR3 for beta chain variable domain of TCR clone 139886 (TRBV11-2, TRBJ2-3)
CASSLGGASRGAPNTQYF

SEQ ID NO: 279773 - protein, 14 aa, Homo sapiens
  CDR3 for alpha chain variable domain of TCR clone 139887 (TRAV35, TRAJ39)
CAGQLGNAGNMLTF

SEQ ID NO: 279774 - protein, 13 aa, Homo sapiens
  CDR3 for beta chain variable domain of TCR clone 139887 (TRBV6-1, TRBJ2-1)
CASCSLSGNEQFF

SEQ ID NO: 279775 - protein, 14 aa, Homo sapiens
  CDR3 for alpha chain variable domain of TCR clone 139888 (TRAV12-1, TRAJ39)
CVVKFNNAGNMLTF

SEQ ID NO: 279776 - protein, 14 aa, Homo sapiens
  CDR3 for beta chain variable domain of TCR clone 139888 (TRBV4-2, TRBJ2-1)
CASGLDRAYNEQFF

SEQ ID NO: 279777 - protein, 13 aa, Homo sapiens
  CDR3 for alpha chain variable domain of TCR clone 139889 (TRAV2, TRAJ16)
CAVEFGDGQKLLF

SEQ ID NO: 279778 - protein, 13 aa, Homo sapiens
  CDR3 for beta chain variable domain of TCR clone 139889 (TRBV18, TRBJ2-7)
CASQSGGGYEQYF

SEQ ID NO: 279779 - protein, 15 aa, Homo sapiens
  CDR3 for alpha chain variable domain of TCR clone 139890 (TRAV35, TRAJ32)
CWAAKDGVATNKLIF

SEQ ID NO: 279780 - protein, 15 aa, Homo sapiens
  CDR3 for beta chain variable domain of TCR clone 139890 (TRBV11-2, TRBJ1-1)
CASSPRSSLLLSLDK

SEQ ID NO: 279781 - protein, 13 aa, Homo sapiens
  CDR3 for alpha chain variable domain of TCR clone 139891 (TRAV21, TRAJ15)
CAVRNQAGTALIF

SEQ ID NO: 279782 - protein, 16 aa, Homo sapiens
  CDR3 for beta chain variable domain of TCR clone 139891 (TRBV20-1, TRBJ2-5)
CSPGGTSGGYMETQYC

SEQ ID NO: 279783 - protein, 18 aa, Homo sapiens
  CDR3 for alpha chain variable domain of TCR clone 139892 (TRAV21, TRAJ52)
CAVRPSPAGGTSYGKLTF

SEQ ID NO: 279784 - protein, 16 aa, Homo sapiens
  CDR3 for beta chain variable domain of TCR clone 139892 (TRBV15, TRBJ2-3)
CATSRDLGIVTDTQYF

SEQ ID NO: 279785 - protein, 17 aa, Homo sapiens
  CDR3 for alpha chain variable domain of TCR clone 139893 (TRAV3, TRAJ6)
CAVRDGPRAGGSYIPTL

SEQ ID NO: 279786 - protein, 14 aa, Homo sapiens
  CDR3 for beta chain variable domain of TCR clone 139893 (TRBV7-2, TRBJ2-7)
CASSPKTSFYEQNF

SEQ ID NO: 279787 - protein, 14 aa, Homo sapiens
  CDR3 for alpha chain variable domain of TCR clone 139894 (TRAV16, TRAJ39)
CALSKNNAGNMRTF

SEQ ID NO: 279788 - protein, 17 aa, Homo sapiens
  CDR3 for beta chain variable domain of TCR clone 139894 (TRBV13, TRBJ2-3)
CASSLSRVAGGRNTQYF

SEQ ID NO: 279789 - protein, 11 aa, Homo sapiens
  CDR3 for alpha chain variable domain of TCR clone 139895 (TRAV3, TRAJ13)
CAVTSYQKVTF

SEQ ID NO: 279790 - protein, 12 aa, Homo sapiens
  CDR3 for beta chain variable domain of TCR clone 139895 (TRBV6-3, TRBJ2-1)
CASSGSYNEQFF

SEQ ID NO: 279791 - protein, 12 aa, Homo sapiens
  CDR3 for alpha chain variable domain of TCR clone 139896 (TRAV1-1, TRAJ24)
CAATDSWGKLQF

SEQ ID NO: 279792 - protein, 15 aa, Homo sapiens
  CDR3 for beta chain variable domain of TCR clone 139896 (TRBV12-4, TRBJ1-6)
CASSLGGQGTSTLHF

SEQ ID NO: 279793 - protein, 11 aa, Homo sapiens
  CDR3 for alpha chain variable domain of TCR clone 139897 (TRAV12-3, TRAJ16)
LPGGDGQKLLF

SEQ ID NO: 279794 - protein, 13 aa, Homo sapiens
  CDR3 for beta chain variable domain of TCR clone 139897 (TRBV12-4, TRBJ1-4)
CASAMGHNEKLFF

SEQ ID NO: 279795 - protein, 14 aa, Homo sapiens
  CDR3 for alpha chain variable domain of TCR clone 139898 (TRAV1-2, TRAJ16)
CAVNRFSDGQKLLF

SEQ ID NO: 279796 - protein, 20 aa, Homo sapiens
  CDR3 for beta chain variable domain of TCR clone 139898 (TRBV28, TRBJ2-1)
CASTPIGRSTGLAGGNEQFF

SEQ ID NO: 279797 - protein, 14 aa, Homo sapiens
  CDR3 for alpha chain variable domain of TCR clone 139899 (TRAV26-1, TRAJ15)
CIEAGNQAGTALFF

SEQ ID NO: 279798 - protein, 16 aa, Homo sapiens
  CDR3 for beta chain variable domain of TCR clone 139899 (TRBV27, TRBJ2-7)
CASSWLGGRGSYEQYF

SEQ ID NO: 279799 - protein, 18 aa, Homo sapiens
  CDR3 for alpha chain variable domain of TCR clone 139900 (TRAV26-1, TRAJ23)
CIVRVGLAVWNQGGKLTF

SEQ ID NO: 279800 - protein, 16 aa, Homo sapiens
  CDR3 for beta chain variable domain of TCR clone 139900 (TRBV12-4, TRBJ2-5)
CASSFFVRGRQETQYF

SEQ ID NO: 279801 - protein, 13 aa, Homo sapiens
  CDR3 for alpha chain variable domain of TCR clone 139901 (TRAV12-2, TRAJ3)
CAFQYSSASKIIF

SEQ ID NO: 279802 - protein, 11 aa, Homo sapiens
  CDR3 for beta chain variable domain of TCR clone 139901 (TRBV20-1, TRBJ2-3)
CSGTSATTQYF

SEQ ID NO: 279803 - protein, 10 aa, Homo sapiens
  CDR3 for alpha chain variable domain of TCR clone 139902 (TRAV2, TRAJ43)
CCGNNNDMRF

SEQ ID NO: 279804 - protein, 14 aa, Homo sapiens
  CDR3 for beta chain variable domain of TCR clone 139902 (TRBV12-5, TRBJ2-5)
CASGSRTHQETQYF

SEQ ID NO: 279805 - protein, 15 aa, Homo sapiens
  CDR3 for alpha chain variable domain of TCR clone 139903 (TRAV13-1, TRAJ50)
CAAKGSETSYDKVTF

SEQ ID NO: 279806 - protein, 13 aa, Homo sapiens
  CDR3 for beta chain variable domain of TCR clone 139903 (TRBV20-1, TRBJ2-3)
CSARAGGRDTQYF

SEQ ID NO: 279807 - protein, 10 aa, Homo sapiens
  CDR3 for alpha chain variable domain of TCR clone 139904 (TRAV23/DV6, TRAJ57)
CAASSTLSQC

SEQ ID NO: 279808 - protein, 14 aa, Homo sapiens
  CDR3 for beta chain variable domain of TCR clone 139904 (TRBV7-8, TRBJ2-1)
CASSSQGAYNEQFF

SEQ ID NO: 279809 - protein, 12 aa, Homo sapiens
  CDR3 for alpha chain variable domain of TCR clone 139905 (TRAV12-3, TRAJ17)
CAMTLTGNKLTF

SEQ ID NO: 279810 - protein, 16 aa, Homo sapiens
  CDR3 for beta chain variable domain of TCR clone 139905 (TRBV7-8, TRBJ2-6)
CASRVGDSSGANALTF

SEQ ID NO: 279811 - protein, 14 aa, Homo sapiens
  CDR3 for alpha chain variable domain of TCR clone 139906 (TRAV12-1, TRAJ30)
CVVNIGGRDDKIIF

SEQ ID NO: 279812 - protein, 12 aa, Homo sapiens
  CDR3 for beta chain variable domain of TCR clone 139906 (TRBV12-4, TRBJ1-2)
CASSFIWLHLRF

SEQ ID NO: 279813 - protein, 18 aa, Homo sapiens
  CDR3 for alpha chain variable domain of TCR clone 139907 (TRAV29/DV5, TRAJ52)
CSAGFRGAGGTSYGKLTF

SEQ ID NO: 279814 - protein, 14 aa, Homo sapiens
  CDR3 for beta chain variable domain of TCR clone 139907 (TRBV5-1, TRBJ2-5)
CASSLAGKQETQYF

SEQ ID NO: 279815 - protein, 15 aa, Homo sapiens
  CDR3 for alpha chain variable domain of TCR clone 139908 (TRAV30, TRAJ32)
CGTEILGGATNKLIF

SEQ ID NO: 279816 - protein, 15 aa, Homo sapiens
  CDR3 for beta chain variable domain of TCR clone 139908 (TRBV11-2, TRBJ2-1)
CASSPAGQSLNEQFF

SEQ ID NO: 279817 - protein, 13 aa, Homo sapiens
  CDR3 for alpha chain variable domain of TCR clone 139909 (TRAV17, TRAJ9)
CATDYTGGFKTIF

SEQ ID NO: 279818 - protein, 16 aa, Homo sapiens
  CDR3 for beta chain variable domain of TCR clone 139909 (TRBV7-7, TRBJ2-1)
CASSLASGPSYNEQFF

SEQ ID NO: 279819 - protein, 14 aa, Homo sapiens
  CDR3 for alpha chain variable domain of TCR clone 139910 (TRAV12-2, TRAJ17)
CAVLFKAAGNKLTF

SEQ ID NO: 279820 - protein, 14 aa, Homo sapiens
  CDR3 for beta chain variable domain of TCR clone 139910 (TRBV5-4, TRBJ1-1)
CASSLDSRRDEAFF

SEQ ID NO: 279821 - protein, 16 aa, Homo sapiens
  CDR3 for alpha chain variable domain of TCR clone 139911 (TRAV12-3, TRAJ53)
CAMIPGSGGSNYKLTF

SEQ ID NO: 279822 - protein, 15 aa, Homo sapiens
  CDR3 for beta chain variable domain of TCR clone 139911 (TRBV18, TRBJ2-7)
CASSPSSTGNYEQYF

SEQ ID NO: 279823 - protein, 14 aa, Homo sapiens
  CDR3 for alpha chain variable domain of TCR clone 139912 (TRAV12-2, TRAJ24)
CAVTPADSWGKLQF

SEQ ID NO: 279824 - protein, 12 aa, Homo sapiens
  CDR3 for beta chain variable domain of TCR clone 139912 (TRBV3-1, TRBJ2-1)
CASSQGSSVQFF

SEQ ID NO: 279825 - protein, 12 aa, Homo sapiens
  CDR3 for alpha chain variable domain of TCR clone 139913 (TRAV14/DV4, TRAJ3)
CRYYSSASKIIF

SEQ ID NO: 279826 - protein, 18 aa, Homo sapiens
  CDR3 for beta chain variable domain of TCR clone 139913 (TRBV7-3, TRBJ2-1)
CASSLMLASGRAMVSSSS

SEQ ID NO: 279827 - protein, 12 aa, Homo sapiens
  CDR3 for alpha chain variable domain of TCR clone 139914 (TRAV8-2, TRAJ45)
CVQGGGADGLTF

SEQ ID NO: 279828 - protein, 18 aa, Homo sapiens
  CDR3 for beta chain variable domain of TCR clone 139914 (TRBV11-2, TRBJ2-3)
CASSLGGASRGAPNTQYF

SEQ ID NO: 279829 - protein, 23 aa, Homo sapiens
  CDR3 for alpha chain variable domain of TCR clone 139915 (TRAV26-1, TRAJ38)
CIADNAGNNHIQNPDPAVYQLRD

SEQ ID NO: 279830 - protein, 15 aa, Homo sapiens
  CDR3 for beta chain variable domain of TCR clone 139915 (TRBV7-9, TRBJ2-7)
CASSLALAEAYEQYF

SEQ ID NO: 279831 - protein, 12 aa, Homo sapiens
  CDR3 for alpha chain variable domain of TCR clone 139916 (TRAV12-3, TRAJ17)
CAMTLTGNKLTF

SEQ ID NO: 279832 - protein, 16 aa, Homo sapiens
  CDR3 for beta chain variable domain of TCR clone 139916 (TRBV7-3, TRBJ2-1)
CASSLEGYSSYNEQFF

SEQ ID NO: 279833 - protein, 14 aa, Homo sapiens
  CDR3 for alpha chain variable domain of TCR clone 139917 (TRAV1-2, TRAJ8)
CAVREDTGFQKLVF

SEQ ID NO: 279834 - protein, 15 aa, Homo sapiens
  CDR3 for beta chain variable domain of TCR clone 139917 (TRBV7-2, TRBJ2-5)
CASSFLRGGEETQYF

SEQ ID NO: 279835 - protein, 18 aa, Homo sapiens
  CDR3 for alpha chain variable domain of TCR clone 139918 (TRAV21, TRAJ52)
CAVRPSPAGGTSEGKLTF

SEQ ID NO: 279836 - protein, 15 aa, Homo sapiens
  CDR3 for beta chain variable domain of TCR clone 139918 (TRBV7-9, TRBJ2-7)
CASSSSGLAVYEQYF

SEQ ID NO: 279837 - protein, 12 aa, Homo sapiens
  CDR3 for alpha chain variable domain of TCR clone 139919 (TRAV3, TRAJ20)
CAVRDPDYKLSF

SEQ ID NO: 279838 - protein, 14 aa, Homo sapiens
  CDR3 for beta chain variable domain of TCR clone 139919 (TRBV20-1, TRBJ1-3)
CSASPTGAGNTIYF

SEQ ID NO: 279839 - protein, 12 aa, Homo sapiens
  CDR3 for alpha chain variable domain of TCR clone 139920 (TRAV21, TRAJ58)
CALSASGSRLTF

SEQ ID NO: 279840 - protein, 13 aa, Homo sapiens
  CDR3 for beta chain variable domain of TCR clone 139920 (TRBV5-7, TRBJ1-2)
CASSVGVFNGYSF

SEQ ID NO: 279841 - protein, 10 aa, Homo sapiens
  CDR3 for alpha chain variable domain of TCR clone 139921 (TRAV26-1, TRAJ22)
CIAGSRQLTF

SEQ ID NO: 279842 - protein, 17 aa, Homo sapiens
  CDR3 for beta chain variable domain of TCR clone 139921 (TRBV5-4, TRBJ1-1)
CASFLPKGRLQNTEAFF

SEQ ID NO: 279843 - protein, 11 aa, Homo sapiens
  CDR3 for alpha chain variable domain of TCR clone 139922 (TRAV2, TRAJ13)
CASGGYQKVTF

SEQ ID NO: 279844 - protein, 18 aa, Homo sapiens
  CDR3 for beta chain variable domain of TCR clone 139922 (TRBV25-1, TRBJ2-1)
CASSESRAGGPGYNEQFF

SEQ ID NO: 279845 - protein, 16 aa, Homo sapiens
  CDR3 for alpha chain variable domain of TCR clone 139923 (TRAV12-1, TRAJ48)
CVVNMVSNFGNEKLTF

SEQ ID NO: 279846 - protein, 16 aa, Homo sapiens
  CDR3 for beta chain variable domain of TCR clone 139923 (TRBV12-4, TRBJ1-5)
CASSRPVGGSNQPQHF

SEQ ID NO: 279847 - protein, 10 aa, Homo sapiens
  CDR3 for alpha chain variable domain of TCR clone 139924 (TRAV8-4, TRAJ43)
CAVSADDMRF

SEQ ID NO: 279848 - protein, 15 aa, Homo sapiens
  CDR3 for beta chain variable domain of TCR clone 139924 (TRBV4-1, TRBJ2-7)
CASSQQGQGFDEQYF

SEQ ID NO: 279849 - protein, 12 aa, Homo sapiens
  CDR3 for alpha chain variable domain of TCR clone 139925 (TRAV12-3, TRAJ17)
CAMTLTGNKLTF

SEQ ID NO: 279850 - protein, 13 aa, Homo sapiens
  CDR3 for beta chain variable domain of TCR clone 139925 (TRBV19, TRBJ1-2)
CACSQGQVYGYTF

SEQ ID NO: 279851 - protein, 12 aa, Homo sapiens
  CDR3 for alpha chain variable domain of TCR clone 139926 (TRAV1-1, TRAJ39)
CAVPVVGNMLTF

SEQ ID NO: 279852 - protein, 13 aa, Homo sapiens
  CDR3 for beta chain variable domain of TCR clone 139926 (TRBV11-2, TRBJ1-6)
CASSLAGTSPLHF

SEQ ID NO: 279853 - protein, 14 aa, Homo sapiens
  CDR3 for alpha chain variable domain of TCR clone 139927 (TRAV12-2, TRAJ40)
CAVKIPSGTYKYIF

SEQ ID NO: 279854 - protein, 15 aa, Homo sapiens
  CDR3 for beta chain variable domain of TCR clone 139927 (TRBV27, TRBJ2-3)
CASSLGLAATDTQYF

SEQ ID NO: 279855 - protein, 16 aa, Homo sapiens
  CDR3 for alpha chain variable domain of TCR clone 139928 (TRAV12-2, TRAJ10)
CAVNRVLTGGGNKLTF

SEQ ID NO: 279856 - protein, 16 aa, Homo sapiens
  CDR3 for beta chain variable domain of TCR clone 139928 (TRBV12-5, TRBJ2-5)
CASGRRTSGNQETQYF

SEQ ID NO: 279857 - protein, 16 aa, Homo sapiens
  CDR3 for alpha chain variable domain of TCR clone 139929 (TRAV12-3, TRAJ53)
CAMSPGSGGSNYKLTF

SEQ ID NO: 279858 - protein, 13 aa, Homo sapiens
  CDR3 for beta chain variable domain of TCR clone 139929 (TRBV7-9, TRBJ1-2)
CASSLKQNYGYPF

SEQ ID NO: 279859 - protein, 18 aa, Homo sapiens
  CDR3 for alpha chain variable domain of TCR clone 139930 (TRAV26-1, TRAJ22)
CIVRVSFWFCKATDLLIW

SEQ ID NO: 279860 - protein, 13 aa, Homo sapiens
  CDR3 for beta chain variable domain of TCR clone 139930 (TRBV7-9, TRBJ1-2)
CASCLKQNYGYTF

SEQ ID NO: 279861 - protein, 13 aa, Homo sapiens
  CDR3 for alpha chain variable domain of TCR clone 139931 (TRAV16, TRAJ10)
CALLTGGGNKLTF

SEQ ID NO: 279862 - protein, 12 aa, Homo sapiens
  CDR3 for beta chain variable domain of TCR clone 139931 (TRBV28, TRBJ2-7)
GASTGNHYEQYF

SEQ ID NO: 279863 - protein, 13 aa, Homo sapiens
  CDR3 for alpha chain variable domain of TCR clone 139932 (TRAV36/DV7, TRAJ49)
CAGDSNTGNQFYF

SEQ ID NO: 279864 - protein, 12 aa, Homo sapiens
  CDR3 for beta chain variable domain of TCR clone 139932 (TRBV11-2, TRBJ2-2)
CASSLGGGEPFF

SEQ ID NO: 279865 - protein, 13 aa, Homo sapiens
  CDR3 for alpha chain variable domain of TCR clone 139933 (TRAV8-3, TRAJ36)
CAVGATGANNLFF

SEQ ID NO: 279866 - protein, 17 aa, Homo sapiens
  CDR3 for beta chain variable domain of TCR clone 139933 (TRBV5-1, TRBJ2-2)
CASSLDLGQGNTGELFF

SEQ ID NO: 279867 - protein, 13 aa, Homo sapiens
  CDR3 for alpha chain variable domain of TCR clone 139934 (TRAV39, TRAJ17)
CAAQFTAGNKLTF

SEQ ID NO: 279868 - protein, 13 aa, Homo sapiens
  CDR3 for beta chain variable domain of TCR clone 139934 (TRBV2, TRBJ2-7)
CASTGGSSYEQYF

SEQ ID NO: 279869 - protein, 19 aa, Homo sapiens
  CDR3 for alpha chain variable domain of TCR clone 139935 (TRAV8-4, TRAJ3)
CAVTGENLVQQCSQDNLWI

SEQ ID NO: 279870 - protein, 16 aa, Homo sapiens
  CDR3 for beta chain variable domain of TCR clone 139935 (TRBV4-2, TRBJ1-1)
CASSQAGVGMNTEAFF

SEQ ID NO: 279871 - protein, 17 aa, Homo sapiens
  CDR3 for alpha chain variable domain of TCR clone 139936 (TRAV3, TRAJ6)
CAVRDGPRAGGGYIPTF

SEQ ID NO: 279872 - protein, 14 aa, Homo sapiens
  CDR3 for beta chain variable domain of TCR clone 139936 (TRBV19, TRBJ2-1)
CASPTFVLGGEQFF

SEQ ID NO: 279873 - protein, 12 aa, Homo sapiens
  CDR3 for alpha chain variable domain of TCR clone 139937 (TRAV12-2, TRAJ35)
CAVSGFGNLLHC

SEQ ID NO: 279874 - protein, 15 aa, Homo sapiens
  CDR3 for beta chain variable domain of TCR clone 139937 (TRBV6-6, TRBJ2-7)
CASSYSYGGSYEQYF

SEQ ID NO: 279875 - protein, 10 aa, Homo sapiens
  CDR3 for alpha chain variable domain of TCR clone 139938 (TRAV21, TRAJ31)
CAVDNARLMF

SEQ ID NO: 279876 - protein, 13 aa, Homo sapiens
  CDR3 for beta chain variable domain of TCR clone 139938 (TRBV4-1, TRBJ1-1)
CASSRKINTEAFF

SEQ ID NO: 279877 - protein, 12 aa, Homo sapiens
  CDR3 for alpha chain variable domain of TCR clone 139939 (TRAV3, TRAJ27)
RAVRDGAGKSTF

SEQ ID NO: 279878 - protein, 15 aa, Homo sapiens
  CDR3 for beta chain variable domain of TCR clone 139939 (TRBV13, TRBJ2-2)
CASGYRGRRTGELFF

SEQ ID NO: 279879 - protein, 14 aa, Homo sapiens
  CDR3 for alpha chain variable domain of TCR clone 139940 (TRAV4, TRAJ17)
CLVGDMAAGNKLTF

SEQ ID NO: 279880 - protein, 13 aa, Homo sapiens
  CDR3 for beta chain variable domain of TCR clone 139940 (TRBV11-2, TRBJ2-5)
CASSRGPSETQYF

SEQ ID NO: 279881 - protein, 14 aa, Homo sapiens
  CDR3 for alpha chain variable domain of TCR clone 139941 (TRAV8-6, TRAJ5)
CAVSVDTGRRALTF

SEQ ID NO: 279882 - protein, 11 aa, Homo sapiens
  CDR3 for beta chain variable domain of TCR clone 139941 (TRBV7-3, TRBJ2-5)
CDSSLSETQYF

SEQ ID NO: 279883 - protein, 11 aa, Homo sapiens
  CDR3 for alpha chain variable domain of TCR clone 139942 (TRAV23/DV6, TRAJ48)
CAPRWGEKLTF

SEQ ID NO: 279884 - protein, 15 aa, Homo sapiens
  CDR3 for beta chain variable domain of TCR clone 139942 (TRBV7-2, TRBJ2-1)
CASSLVAGGHNEQFF

SEQ ID NO: 279885 - protein, 14 aa, Homo sapiens
  CDR3 for alpha chain variable domain of TCR clone 139943 (TRAV1-2, TRAJ16)
CAVNRFSDGQKLLC

SEQ ID NO: 279886 - protein, 13 aa, Homo sapiens
  CDR3 for beta chain variable domain of TCR clone 139943 (TRBV7-2, TRBJ1-1)
CASNLKGAKVAFF

SEQ ID NO: 279887 - protein, 14 aa, Homo sapiens
  CDR3 for alpha chain variable domain of TCR clone 139944 (TRAV9-2, TRAJ39)
CALYIYNAGNMLTF

SEQ ID NO: 279888 - protein, 16 aa, Homo sapiens
  CDR3 for beta chain variable domain of TCR clone 139944 (TRBV28, TRBJ2-5)
CQQHARGDALQETQYF

SEQ ID NO: 279889 - protein, 14 aa, Homo sapiens
  CDR3 for alpha chain variable domain of TCR clone 139945 (TRAV8-3, TRAJ28)
CAVVPGAGSYQLTF

SEQ ID NO: 279890 - protein, 15 aa, Homo sapiens
  CDR3 for beta chain variable domain of TCR clone 139945 (TRBV9, TRBJ1-6)
CASSVAGTGDSPLHF

SEQ ID NO: 279891 - protein, 11 aa, Homo sapiens
  CDR3 for alpha chain variable domain of TCR clone 139946 (TRAV21, TRAJ39)
LLVNEGNMLTF

SEQ ID NO: 279892 - protein, 14 aa, Homo sapiens
  CDR3 for beta chain variable domain of TCR clone 139946 (TRBV7-2, TRBJ2-1)
CASSPRDSLYEQFF

SEQ ID NO: 279893 - protein, 13 aa, Homo sapiens
  CDR3 for alpha chain variable domain of TCR clone 139947 (TRAV3, TRAJ20)
CCEAFCNDYKLSF

SEQ ID NO: 279894 - protein, 13 aa, Homo sapiens
  CDR3 for beta chain variable domain of TCR clone 139947 (TRBV4-1, TRBJ2-1)
CASSQAGGDEQFF

SEQ ID NO: 279895 - protein, 14 aa, Homo sapiens
  CDR3 for alpha chain variable domain of TCR clone 139948 (TRAV35, TRAJ33)
CAGSSQDSNYQLIW

SEQ ID NO: 279896 - protein, 14 aa, Homo sapiens
  CDR3 for beta chain variable domain of TCR clone 139948 (TRBV19, TRBJ1-5)
CASGTEVYNQPQHF

SEQ ID NO: 279897 - protein, 12 aa, Homo sapiens
  CDR3 for alpha chain variable domain of TCR clone 139949 (TRAV29/DV5, TRAJ49)
CAATDTGNQFYF

SEQ ID NO: 279898 - protein, 15 aa, Homo sapiens
  CDR3 for beta chain variable domain of TCR clone 139949 (TRBV19, TRBJ2-1)
CASNAQGLAGREQFF

SEQ ID NO: 279899 - protein, 18 aa, Homo sapiens
  CDR3 for alpha chain variable domain of TCR clone 139950 (TRAV21, TRAJ52)
CAVRPSPAGGTSYGKLTF

SEQ ID NO: 279900 - protein, 13 aa, Homo sapiens
  CDR3 for beta chain variable domain of TCR clone 139950 (TRBV7-2, TRBJ2-7)
CASSSPSGREQYF

SEQ ID NO: 279901 - protein, 15 aa, Homo sapiens
  CDR3 for alpha chain variable domain of TCR clone 139951 (TRAV12-1, TRAJ33)
CVVNGNLDSNYQLIW

SEQ ID NO: 279902 - protein, 15 aa, Homo sapiens
  CDR3 for beta chain variable domain of TCR clone 139951 (TRBV9, TRBJ2-7)
CASSSSGLAVYEQYF

SEQ ID NO: 279903 - protein, 12 aa, Homo sapiens
  CDR3 for alpha chain variable domain of TCR clone 139952 (TRAV8-3, TRAJ26)
RAGDNYGQNFVF

SEQ ID NO: 279904 - protein, 15 aa, Homo sapiens
  CDR3 for beta chain variable domain of TCR clone 139952 (TRBV5-1, TRBJ2-1)
CASSPPRAPYNEQFF

SEQ ID NO: 279905 - protein, 18 aa, Homo sapiens
  CDR3 for alpha chain variable domain of TCR clone 139953 (TRAV29/DV5, TRAJ26)
CSVLVCSKRKPEGQNFVF

SEQ ID NO: 279906 - protein, 17 aa, Homo sapiens
  CDR3 for beta chain variable domain of TCR clone 139953 (TRBV20-1, TRBJ2-2)
CSASGSGQGGLTGELFF

SEQ ID NO: 279907 - protein, 16 aa, Homo sapiens
  CDR3 for alpha chain variable domain of TCR clone 139954 (TRAV1-2, TRAJ10)
CAVRGVLTGGGNKRTF

SEQ ID NO: 279908 - protein, 16 aa, Homo sapiens
  CDR3 for beta chain variable domain of TCR clone 139954 (TRBV24-1, TRBJ2-3)
CATSDAISGITDTQYF

SEQ ID NO: 279909 - protein, 12 aa, Homo sapiens
  CDR3 for alpha chain variable domain of TCR clone 139955 (TRAV12-3, TRAJ20)
CAMVRGDYKLSF

SEQ ID NO: 279910 - protein, 14 aa, Homo sapiens
  CDR3 for beta chain variable domain of TCR clone 139955 (TRBV7-2, TRBJ2-7)
CASSPKTSFYEHYF

SEQ ID NO: 279911 - protein, 18 aa, Homo sapiens
  CDR3 for alpha chain variable domain of TCR clone 139956 (TRAV29/DV5, TRAJ52)
CAAGFRGAGGISYGKLTF

SEQ ID NO: 279912 - protein, 13 aa, Homo sapiens
  CDR3 for beta chain variable domain of TCR clone 139956 (TRBV7-9, TRBJ1-2)
CASSLKQNYGYTL

SEQ ID NO: 279913 - protein, 14 aa, Homo sapiens
  CDR3 for alpha chain variable domain of TCR clone 139957 (TRAV17, TRAJ56)
CATEDTGANSKLTF

SEQ ID NO: 279914 - protein, 16 aa, Homo sapiens
  CDR3 for beta chain variable domain of TCR clone 139957 (TRBV19, TRBJ2-1)
FASSIKLAGSYNEQFF

SEQ ID NO: 279915 - protein, 12 aa, Homo sapiens
  CDR3 for alpha chain variable domain of TCR clone 139958 (TRAV13-1, TRAJ48)
CAANFGNEKLTF

SEQ ID NO: 279916 - protein, 17 aa, Homo sapiens
  CDR3 for beta chain variable domain of TCR clone 139958 (TRBV13, TRBJ2-3)
CASRLSRVAGGRNTQYF

SEQ ID NO: 279917 - protein, 14 aa, Homo sapiens
  CDR3 for alpha chain variable domain of TCR clone 139959 (TRAV35, TRAJ22)
CAGLRPGSARQLTC

SEQ ID NO: 279918 - protein, 13 aa, Homo sapiens
  CDR3 for beta chain variable domain of TCR clone 139959 (TRBV20-1, TRBJ1-1)
CSARGGGNTEAFF

SEQ ID NO: 279919 - protein, 14 aa, Homo sapiens
  CDR3 for alpha chain variable domain of TCR clone 139960 (TRAV13-2, TRAJ57)
CAESTQGGSEKLVF

SEQ ID NO: 279920 - protein, 14 aa, Homo sapiens
  CDR3 for beta chain variable domain of TCR clone 139960 (TRBV10-3, TRBJ2-2)
CAISEVSHAGELFF

SEQ ID NO: 279921 - protein, 13 aa, Homo sapiens
  CDR3 for alpha chain variable domain of TCR clone 139961 (TRAV27, TRAJ17)
CAGAATAGNKLTF

SEQ ID NO: 279922 - protein, 15 aa, Homo sapiens
  CDR3 for beta chain variable domain of TCR clone 139961 (TRBV5-1, TRBJ2-3)
CANRNQAGSTDTQYF

SEQ ID NO: 279923 - protein, 13 aa, Homo sapiens
  CDR3 for alpha chain variable domain of TCR clone 139962 (TRAV17, TRAJ26)
CATVDNYGQNFVF

SEQ ID NO: 279924 - protein, 16 aa, Homo sapiens
  CDR3 for beta chain variable domain of TCR clone 139962 (TRBV2, TRBJ2-1)
CASSVGGSLSYNKQFF

SEQ ID NO: 279925 - protein, 14 aa, Homo sapiens
  CDR3 for alpha chain variable domain of TCR clone 139963 (TRAV19, TRAJ15)
CALSEDQSGTALIF

SEQ ID NO: 279926 - protein, 16 aa, Homo sapiens
  CDR3 for beta chain variable domain of TCR clone 139963 (TRBV7-9, TRBJ2-3)
CASSPWREVGTDTQYF

SEQ ID NO: 279927 - protein, 13 aa, Homo sapiens
  CDR3 for alpha chain variable domain of TCR clone 139964 (TRAV13-2, TRAJ53)
CAENMGSNYKLTF

SEQ ID NO: 279928 - protein, 13 aa, Homo sapiens
  CDR3 for beta chain variable domain of TCR clone 139964 (TRBV4-1, TRBJ2-2)
CASSQENTGEPVF

SEQ ID NO: 279929 - protein, 15 aa, Homo sapiens
  CDR3 for alpha chain variable domain of TCR clone 139965 (TRAV10, TRAJ39)
CVVSASGNASNMLTF

SEQ ID NO: 279930 - protein, 13 aa, Homo sapiens
  CDR3 for beta chain variable domain of TCR clone 139965 (TRBV18, TRBJ2-7)
CASQSGGGYEQYF

SEQ ID NO: 279931 - protein, 16 aa, Homo sapiens
  CDR3 for alpha chain variable domain of TCR clone 139966 (TRAV21, TRAJ52)
CAVNNAGGTSYGKLTF

SEQ ID NO: 279932 - protein, 13 aa, Homo sapiens
  CDR3 for beta chain variable domain of TCR clone 139966 (TRBV7-3, TRBJ2-3)
CASSLGGSQTQYC

SEQ ID NO: 279933 - protein, 17 aa, Homo sapiens
  CDR3 for alpha chain variable domain of TCR clone 139967 (TRAV26-1, TRAJ46)
IASSESEKKSSGDKLTF

SEQ ID NO: 279934 - protein, 17 aa, Homo sapiens
  CDR3 for beta chain variable domain of TCR clone 139967 (TRBV7-3, TRBJ2-3)
CASSLMKRMRGADTQYF

SEQ ID NO: 279935 - protein, 14 aa, Homo sapiens
  CDR3 for alpha chain variable domain of TCR clone 139968 (TRAV17, TRAJ34)
CATGSLDGTDKLIF

SEQ ID NO: 279936 - protein, 13 aa, Homo sapiens
  CDR3 for beta chain variable domain of TCR clone 139968 (TRBV11-2, TRBJ2-7)
CASSGTRPYEQYF

SEQ ID NO: 279937 - protein, 13 aa, Homo sapiens
  CDR3 for alpha chain variable domain of TCR clone 139969 (TRAV12-1, TRAJ11)
CVVNRAGYSTLTF

SEQ ID NO: 279938 - protein, 19 aa, Homo sapiens
  CDR3 for beta chain variable domain of TCR clone 139969 (TRBV19, TRBJ2-5)
CASSIGQVTDFFLGETQYF

SEQ ID NO: 279939 - protein, 15 aa, Homo sapiens
  CDR3 for alpha chain variable domain of TCR clone 139970 (TRAV12-1, TRAJ23)
CGERSRCNQGGKLIF

SEQ ID NO: 279940 - protein, 16 aa, Homo sapiens
  CDR3 for beta chain variable domain of TCR clone 139970 (TRBV7-3, TRBJ2-2)
CASSLKRGTLSGELFF

SEQ ID NO: 279941 - protein, 13 aa, Homo sapiens
  CDR3 for alpha chain variable domain of TCR clone 139971 (TRAV22, TRAJ48)
CAVPNFGNEKLTF

SEQ ID NO: 279942 - protein, 17 aa, Homo sapiens
  CDR3 for beta chain variable domain of TCR clone 139971 (TRBV13, TRBJ2-3)
CASSLSRVAGGRNTQYF

SEQ ID NO: 279943 - protein, 13 aa, Homo sapiens
  CDR3 for alpha chain variable domain of TCR clone 139972 (TRAV2, TRAJ40)
CAVVTSGTYNYIF

SEQ ID NO: 279944 - protein, 16 aa, Homo sapiens
  CDR3 for beta chain variable domain of TCR clone 139972 (TRBV2, TRBJ2-1)
CASSVGWSLSYNEQFF

SEQ ID NO: 279945 - protein, 11 aa, Homo sapiens
  CDR3 for alpha chain variable domain of TCR clone 139973 (TRAV12-3, TRAJ27)
CPMANAGKSTF

SEQ ID NO: 279946 - protein, 13 aa, Homo sapiens
  CDR3 for beta chain variable domain of TCR clone 139973 (TRBV9, TRBJ2-7)
CASSVAEYYEQYF

SEQ ID NO: 279947 - protein, 14 aa, Homo sapiens
  CDR3 for alpha chain variable domain of TCR clone 139974 (TRAV1-2, TRAJ8)
CAVREDTGFQKLVF

SEQ ID NO: 279948 - protein, 16 aa, Homo sapiens
  CDR3 for beta chain variable domain of TCR clone 139974 (TRBV7-6, TRBJ2-6)
CANSLPGLSGANVLTF

SEQ ID NO: 279949 - protein, 14 aa, Homo sapiens
  CDR3 for alpha chain variable domain of TCR clone 139975 (TRAV13-2, TRAJ43)
CAEIPTYNNNVMRF

SEQ ID NO: 279950 - protein, 15 aa, Homo sapiens
  CDR3 for beta chain variable domain of TCR clone 139975 (TRBV7-9, TRBJ2-2)
CASGPLDTFPGELFF

SEQ ID NO: 279951 - protein, 13 aa, Homo sapiens
  CDR3 for alpha chain variable domain of TCR clone 139976 (TRAV12-1, TRAJ40)
CLVNSSGTYKYIF

SEQ ID NO: 279952 - protein, 14 aa, Homo sapiens
  CDR3 for beta chain variable domain of TCR clone 139976 (TRBV2, TRBJ1-6)
CASEVSSYNSPLHF

SEQ ID NO: 279953 - protein, 15 aa, Homo sapiens
  CDR3 for alpha chain variable domain of TCR clone 139977 (TRAV21, TRAJ37)
CAVRPTLSNTGKLIF

SEQ ID NO: 279954 - protein, 13 aa, Homo sapiens
  CDR3 for beta chain variable domain of TCR clone 139977 (TRBV7-2, TRBJ2-4)
CASSREHANIQYF

SEQ ID NO: 279955 - protein, 12 aa, Homo sapiens
  CDR3 for alpha chain variable domain of TCR clone 139978 (TRAV38-1, TRAJ30)
CAFMGRDDKIIF

SEQ ID NO: 279956 - protein, 16 aa, Homo sapiens
  CDR3 for beta chain variable domain of TCR clone 139978 (TRBV7-9, TRBJ2-1)
CASSDVAGGSYNEQFF

SEQ ID NO: 279957 - protein, 13 aa, Homo sapiens
  CDR3 for alpha chain variable domain of TCR clone 139979 (TRAV13-1, TRAJ12)
CAASPDSSYKLIF

SEQ ID NO: 279958 - protein, 13 aa, Homo sapiens
  CDR3 for beta chain variable domain of TCR clone 139979 (TRBV4-1, TRBJ2-5)
CASSQGHRETQYF

SEQ ID NO: 279959 - protein, 14 aa, Homo sapiens
  CDR3 for alpha chain variable domain of TCR clone 139980 (TRAV8-3, TRAJ17)
CCGCGKAAGNKLTF

SEQ ID NO: 279960 - protein, 12 aa, Homo sapiens
  CDR3 for beta chain variable domain of TCR clone 139980 (TRBV5-1, TRBJ1-2)
CASSQDTYGYTF

SEQ ID NO: 279961 - protein, 12 aa, Homo sapiens
  CDR3 for alpha chain variable domain of TCR clone 139981 (TRAV2, TRAJ29)
CFPNSGNTPLVF

SEQ ID NO: 279962 - protein, 14 aa, Homo sapiens
  CDR3 for beta chain variable domain of TCR clone 139981 (TRBV7-2, TRBJ1-2)
CASSQTGSTYGYTF

SEQ ID NO: 279963 - protein, 13 aa, Homo sapiens
  CDR3 for alpha chain variable domain of TCR clone 139982 (TRAV2, TRAJ16)
CAVEFGDGPKLLF

SEQ ID NO: 279964 - protein, 14 aa, Homo sapiens
  CDR3 for beta chain variable domain of TCR clone 139982 (TRBV6-3, TRBJ2-5)
CASSYSLREKTQYF

SEQ ID NO: 279965 - protein, 15 aa, Homo sapiens
  CDR3 for alpha chain variable domain of TCR clone 139983 (TRAV8-3, TRAJ27)
CAVGPSKTNAGKSTC

SEQ ID NO: 279966 - protein, 12 aa, Homo sapiens
  CDR3 for beta chain variable domain of TCR clone 139983 (TRBV11-2, TRBJ2-2)
CASSLGGGELFF

SEQ ID NO: 279967 - protein, 13 aa, Homo sapiens
  CDR3 for alpha chain variable domain of TCR clone 139984 (TRAV3, TRAJ5)
CGVRVLGRRALTF

SEQ ID NO: 279968 - protein, 15 aa, Homo sapiens
  CDR3 for beta chain variable domain of TCR clone 139984 (TRBV20-1, TRBJ1-1)
CSARLGTGEYTEAFF

SEQ ID NO: 279969 - protein, 14 aa, Homo sapiens
  CDR3 for alpha chain variable domain of TCR clone 139985 (TRAV8-1, TRAJ5)
CAVRTDTGRRALTF

SEQ ID NO: 279970 - protein, 14 aa, Homo sapiens
  CDR3 for beta chain variable domain of TCR clone 139985 (TRBV5-5, TRBJ1-2)
CASILDPYNYGYTF

SEQ ID NO: 279971 - protein, 15 aa, Homo sapiens
  CDR3 for alpha chain variable domain of TCR clone 139986 (TRAV17, TRAJ57)
CATGPSQGGSEKLVF

SEQ ID NO: 279972 - protein, 15 aa, Homo sapiens
  CDR3 for beta chain variable domain of TCR clone 139986 (TRBV7-2, TRBJ2-3)
CASSSTGLETDTQYL

SEQ ID NO: 279973 - protein, 13 aa, Homo sapiens
  CDR3 for alpha chain variable domain of TCR clone 139987 (TRAV17, TRAJ5)
CAPMDTGRRALTF

SEQ ID NO: 279974 - protein, 16 aa, Homo sapiens
  CDR3 for beta chain variable domain of TCR clone 139987 (TRBV27, TRBJ2-7)
CAISSERRDSAYEQYF

SEQ ID NO: 279975 - protein, 12 aa, Homo sapiens
  CDR3 for alpha chain variable domain of TCR clone 139988 (TRAV12-3, TRAJ17)
CAMTLTGNKLTF

SEQ ID NO: 279976 - protein, 15 aa, Homo sapiens
  CDR3 for beta chain variable domain of TCR clone 139988 (TRBV7-9, TRBJ1-6)
CASSSLGRGNSPLHF

SEQ ID NO: 279977 - protein, 11 aa, Homo sapiens
  CDR3 for alpha chain variable domain of TCR clone 139989 (TRAV1-2, TRAJ40)
CAVPGTYKYIF

SEQ ID NO: 279978 - protein, 11 aa, Homo sapiens
  CDR3 for beta chain variable domain of TCR clone 139989 (TRBV29-1, TRBJ2-7)
VGTSGSYEHYF

SEQ ID NO: 279979 - protein, 16 aa, Homo sapiens
  CDR3 for alpha chain variable domain of TCR clone 139990 (TRAV9-2, TRAJ53)
CALRNNSGGSNYKLTF

SEQ ID NO: 279980 - protein, 14 aa, Homo sapiens
  CDR3 for beta chain variable domain of TCR clone 139990 (TRBV28, TRBJ2-1)
CASSLNGRNNEQFF

SEQ ID NO: 279981 - protein, 12 aa, Homo sapiens
  CDR3 for alpha chain variable domain of TCR clone 139991 (TRAV35, TRAJ33)
CWAAPSNYQLIW

SEQ ID NO: 279982 - protein, 13 aa, Homo sapiens
  CDR3 for beta chain variable domain of TCR clone 139991 (TRBV19, TRBJ1-2)
CASSQGQVYGYTF

SEQ ID NO: 279983 - protein, 14 aa, Homo sapiens
  CDR3 for alpha chain variable domain of TCR clone 139992 (TRAV30, TRAJ39)
CGTEKVNAGNMLTF

SEQ ID NO: 279984 - protein, 14 aa, Homo sapiens
  CDR3 for beta chain variable domain of TCR clone 139992 (TRBV5-4, TRBJ1-1)
CASSLDSRRDEAFF

SEQ ID NO: 279985 - protein, 11 aa, Homo sapiens
  CDR3 for alpha chain variable domain of TCR clone 139993 (TRAV4, TRAJ31)
RLVGLNARLMF

SEQ ID NO: 279986 - protein, 16 aa, Homo sapiens
  CDR3 for beta chain variable domain of TCR clone 139993 (TRBV15, TRBJ2-6)
CATSVNGGFLANVLTF

SEQ ID NO: 279987 - protein, 11 aa, Homo sapiens
  CDR3 for alpha chain variable domain of TCR clone 139994 (TRAV13-1, TRAJ30)
CAASRDDKIIF

SEQ ID NO: 279988 - protein, 14 aa, Homo sapiens
  CDR3 for beta chain variable domain of TCR clone 139994 (TRBV18, TRBJ1-1)
CQLSIQLVNTEAFF

SEQ ID NO: 279989 - protein, 13 aa, Homo sapiens
  CDR3 for alpha chain variable domain of TCR clone 139995 (TRAV12-1, TRAJ33)
CGDAPDSNYQLIW

SEQ ID NO: 279990 - protein, 17 aa, Homo sapiens
  CDR3 for beta chain variable domain of TCR clone 139995 (TRBV13, TRBJ2-3)
CASSLSRVAGGRNTQYF

SEQ ID NO: 279991 - protein, 14 aa, Homo sapiens
  CDR3 for alpha chain variable domain of TCR clone 139996 (TRAV1-1, TRAJ5)
CAVRDGAGRRALNF

SEQ ID NO: 279992 - protein, 14 aa, Homo sapiens
  CDR3 for beta chain variable domain of TCR clone 139996 (TRBV28, TRBJ2-1)
CASSYYTAYNEQFF

SEQ ID NO: 279993 - protein, 14 aa, Homo sapiens
  CDR3 for alpha chain variable domain of TCR clone 139997 (TRAV13-1, TRAJ20)
CAARPGSNDYKLSF

SEQ ID NO: 279994 - protein, 13 aa, Homo sapiens
  CDR3 for beta chain variable domain of TCR clone 139997 (TRBV20-1, TRBJ1-1)
GSAPPGGHTEAFF

SEQ ID NO: 279995 - protein, 13 aa, Homo sapiens
  CDR3 for alpha chain variable domain of TCR clone 139998 (TRAV27, TRAJ58)
CAGAETSGTRLTF

SEQ ID NO: 279996 - protein, 13 aa, Homo sapiens
  CDR3 for beta chain variable domain of TCR clone 139998 (TRBV7-2, TRBJ2-1)
CASNRDRWNEQFF

SEQ ID NO: 279997 - protein, 10 aa, Homo sapiens
  CDR3 for alpha chain variable domain of TCR clone 139999 (TRAV13-1, TRAJ20)
ARVLTTKLSF

SEQ ID NO: 279998 - protein, 13 aa, Homo sapiens
  CDR3 for beta chain variable domain of TCR clone 139999 (TRBV20-1, TRBJ1-1)
CSAPPGGHTEAFF

SEQ ID NO: 279999 - protein, 12 aa, Homo sapiens
  CDR3 for alpha chain variable domain of TCR clone 140000 (TRAV27, TRAJ13)
CAGAGGYQKGTF

SEQ ID NO: 280000 - protein, 14 aa, Homo sapiens
  CDR3 for beta chain variable domain of TCR clone 140000 (TRBV12-5, TRBJ2-5)
CASGSRTHQETQYF

SEQ ID NO: 280001 - protein, 13 aa, Homo sapiens
  CDR3 for alpha chain variable domain of TCR clone 140001 (TRAV26-1, TRAJ29)
CIVRRSGNAPLVF

SEQ ID NO: 280002 - protein, 16 aa, Homo sapiens
  CDR3 for beta chain variable domain of TCR clone 140001 (TRBV11-2, TRBJ2-7)
CASSLAPTGVNYEQYF

SEQ ID NO: 280003 - protein, 16 aa, Homo sapiens
  CDR3 for alpha chain variable domain of TCR clone 140002 (TRAV3, TRAJ21)
CAVREIERGNFNKFYF

SEQ ID NO: 280004 - protein, 16 aa, Homo sapiens
  CDR3 for beta chain variable domain of TCR clone 140002 (TRBV11-2, TRBJ1-1)
CASSLRQGGEHSKAFF

SEQ ID NO: 280005 - protein, 12 aa, Homo sapiens
  CDR3 for alpha chain variable domain of TCR clone 140003 (TRAV16, TRAJ49)
CALNEGGNQFYF

SEQ ID NO: 280006 - protein, 15 aa, Homo sapiens
  CDR3 for beta chain variable domain of TCR clone 140003 (TRBV28, TRBJ2-5)
CASSPGQGSIETQYF

SEQ ID NO: 280007 - protein, 15 aa, Homo sapiens
  CDR3 for alpha chain variable domain of TCR clone 140004 (TRAV12-1, TRAJ15)
CVVTRANQAGTALIF

SEQ ID NO: 280008 - protein, 13 aa, Homo sapiens
  CDR3 for beta chain variable domain of TCR clone 140004 (TRBV7-3, TRBJ1-1)
CASSQDWGAEAFF

SEQ ID NO: 280009 - protein, 17 aa, Homo sapiens
  CDR3 for alpha chain variable domain of TCR clone 140005 (TRAV3, TRAJ42)
CAVRDRDYGGSQGNLIF

SEQ ID NO: 280010 - protein, 13 aa, Homo sapiens
  CDR3 for beta chain variable domain of TCR clone 140005 (TRBV10-3, TRBJ2-7)
SASKLAVNYEQYF

SEQ ID NO: 280011 - protein, 17 aa, Homo sapiens
  CDR3 for alpha chain variable domain of TCR clone 140006 (TRAV13-1, TRAJ52)
CAAGRNAGGTSYGKLTF

SEQ ID NO: 280012 - protein, 13 aa, Homo sapiens
  CDR3 for beta chain variable domain of TCR clone 140006 (TRBV4-1, TRBJ2-1)
CASSQEVQYEQFF

SEQ ID NO: 280013 - protein, 12 aa, Homo sapiens
  CDR3 for alpha chain variable domain of TCR clone 140007 (TRAV13-1, TRAJ21)
CAAKEGFNKFYF

SEQ ID NO: 280014 - protein, 16 aa, Homo sapiens
  CDR3 for beta chain variable domain of TCR clone 140007 (TRBV6-1, TRBJ1-2)
CASSEANSIINYGYTF

SEQ ID NO: 280015 - protein, 11 aa, Homo sapiens
  CDR3 for alpha chain variable domain of TCR clone 140008 (TRAV1-1, TRAJ23)
CAVRQGGKLIF

SEQ ID NO: 280016 - protein, 13 aa, Homo sapiens
  CDR3 for beta chain variable domain of TCR clone 140008 (TRBV27, TRBJ1-1)
CASSLSIGAEAFF

SEQ ID NO: 280017 - protein, 13 aa, Homo sapiens
  CDR3 for alpha chain variable domain of TCR clone 140009 (TRAV21, TRAJ27)
CAARPGNAGKSTF

SEQ ID NO: 280018 - protein, 14 aa, Homo sapiens
  CDR3 for beta chain variable domain of TCR clone 140009 (TRBV7-2, TRBJ2-7)
CASSPNTSFYEQYF

SEQ ID NO: 280019 - protein, 15 aa, Homo sapiens
  CDR3 for alpha chain variable domain of TCR clone 140010 (TRAV21, TRAJ53)
RATLNSGGSNYKLTF

SEQ ID NO: 280020 - protein, 13 aa, Homo sapiens
  CDR3 for beta chain variable domain of TCR clone 140010 (TRBV4-1, TRBJ2-2)
CASSQENTGELFF

SEQ ID NO: 280021 - protein, 13 aa, Homo sapiens
  CDR3 for alpha chain variable domain of TCR clone 140011 (TRAV12-2, TRAJ53)
CAGVGGSNYKLTF

SEQ ID NO: 280022 - protein, 12 aa, Homo sapiens
  CDR3 for beta chain variable domain of TCR clone 140011 (TRBV7-9, TRBJ2-7)
CASSIKREEQYF

SEQ ID NO: 280023 - protein, 14 aa, Homo sapiens
  CDR3 for alpha chain variable domain of TCR clone 140012 (TRAV12-1, TRAJ26)
CVVTGSNYGENFVF

SEQ ID NO: 280024 - protein, 17 aa, Homo sapiens
  CDR3 for beta chain variable domain of TCR clone 140012 (TRBV11-2, TRBJ2-6)
CASSHRDIFSGANDLTF

SEQ ID NO: 280025 - protein, 13 aa, Homo sapiens
  CDR3 for alpha chain variable domain of TCR clone 140013 (TRAV13-1, TRAJ5)
CAASDTGRKHLLL

SEQ ID NO: 280026 - protein, 12 aa, Homo sapiens
  CDR3 for beta chain variable domain of TCR clone 140013 (TRBV28, TRBJ2-3)
CASSLYRDTQYF

SEQ ID NO: 280027 - protein, 16 aa, Homo sapiens
  CDR3 for alpha chain variable domain of TCR clone 140014 (TRAV4, TRAJ9)
CLVGDPNRPGGFKTIF

SEQ ID NO: 280028 - protein, 14 aa, Homo sapiens
  CDR3 for beta chain variable domain of TCR clone 140014 (TRBV20-1, TRBJ1-1)
CSAQTRIGGTEAFC

SEQ ID NO: 280029 - protein, 16 aa, Homo sapiens
  CDR3 for alpha chain variable domain of TCR clone 140015 (TRAV23/DV6, TRAJ21)
CAASSGGGTTSTNFTL

SEQ ID NO: 280030 - protein, 12 aa, Homo sapiens
  CDR3 for beta chain variable domain of TCR clone 140015 (TRBV7-9, TRBJ2-7)
CASSIKREEQYF

SEQ ID NO: 280031 - protein, 15 aa, Homo sapiens
  CDR3 for alpha chain variable domain of TCR clone 140016 (TRAV8-3, TRAJ40)
CAAPSLGSGTYKYIF

SEQ ID NO: 280032 - protein, 16 aa, Homo sapiens
  CDR3 for beta chain variable domain of TCR clone 140016 (TRBV4-1, TRBJ1-2)
CASSQDAGQVLYGYTF

SEQ ID NO: 280033 - protein, 13 aa, Homo sapiens
  CDR3 for alpha chain variable domain of TCR clone 140017 (TRAV17, TRAJ9)
CATDYTGVFKTIF

SEQ ID NO: 280034 - protein, 14 aa, Homo sapiens
  CDR3 for beta chain variable domain of TCR clone 140017 (TRBV19, TRBJ2-5)
CASSTTGQQETQYF

SEQ ID NO: 280035 - protein, 11 aa, Homo sapiens
  CDR3 for alpha chain variable domain of TCR clone 140018 (TRAV13-1, TRAJ6)
CATLGSYIPIF

SEQ ID NO: 280036 - protein, 12 aa, Homo sapiens
  CDR3 for beta chain variable domain of TCR clone 140018 (TRBV11-2, TRBJ2-1)
CASSPGNNEQFF

SEQ ID NO: 280037 - protein, 12 aa, Homo sapiens
  CDR3 for alpha chain variable domain of TCR clone 140019 (TRAV13-1, TRAJ53)
CAAGGSNYKLTF

SEQ ID NO: 280038 - protein, 13 aa, Homo sapiens
  CDR3 for beta chain variable domain of TCR clone 140019 (TRBV12-4, TRBJ2-3)
CASSSPLGGTQYF

SEQ ID NO: 280039 - protein, 14 aa, Homo sapiens
  CDR3 for alpha chain variable domain of TCR clone 140020 (TRAV23/DV6, TRAJ24)
CAASLSYSWGKLQF

SEQ ID NO: 280040 - protein, 16 aa, Homo sapiens
  CDR3 for beta chain variable domain of TCR clone 140020 (TRBV7-9, TRBJ2-6)
CASSLKGPLRANVLTF

SEQ ID NO: 280041 - protein, 15 aa, Homo sapiens
  CDR3 for alpha chain variable domain of TCR clone 140021 (TRAV12-2, TRAJ8)
CAVREENTGFQKLVF

SEQ ID NO: 280042 - protein, 14 aa, Homo sapiens
  CDR3 for beta chain variable domain of TCR clone 140021 (TRBV20-1, TRBJ2-2)
CSAPDTANTGELFF

SEQ ID NO: 280043 - protein, 14 aa, Homo sapiens
  CDR3 for alpha chain variable domain of TCR clone 140022 (TRAV8-6, TRAJ54)
CAVSPALGAQKLVF

SEQ ID NO: 280044 - protein, 13 aa, Homo sapiens
  CDR3 for beta chain variable domain of TCR clone 140022 (TRBV27, TRBJ1-1)
CASSLSIGAEAFF

SEQ ID NO: 280045 - protein, 12 aa, Homo sapiens
  CDR3 for alpha chain variable domain of TCR clone 140023 (TRAV1-1, TRAJ43)
CAPRVSSNDMRF

SEQ ID NO: 280046 - protein, 13 aa, Homo sapiens
  CDR3 for beta chain variable domain of TCR clone 140023 (TRBV10-2, TRBJ2-5)
CASSVGPQETQYF

SEQ ID NO: 280047 - protein, 11 aa, Homo sapiens
  CDR3 for alpha chain variable domain of TCR clone 140024 (TRAV12-1, TRAJ8)
CVVTGFQKLVF

SEQ ID NO: 280048 - protein, 14 aa, Homo sapiens
  CDR3 for beta chain variable domain of TCR clone 140024 (TRBV19, TRBJ2-1)
CASGKSNQYNEQFF

SEQ ID NO: 280049 - protein, 12 aa, Homo sapiens
  CDR3 for alpha chain variable domain of TCR clone 140025 (TRAV8-3, TRAJ26)
CAGDNYGQNFVF

SEQ ID NO: 280050 - protein, 15 aa, Homo sapiens
  CDR3 for beta chain variable domain of TCR clone 140025 (TRBV28, TRBJ2-5)
CASSPPWSYQETQYF

SEQ ID NO: 280051 - protein, 12 aa, Homo sapiens
  CDR3 for alpha chain variable domain of TCR clone 140026 (TRAV20, TRAJ54)
CAVQEGAQKLVF

SEQ ID NO: 280052 - protein, 15 aa, Homo sapiens
  CDR3 for beta chain variable domain of TCR clone 140026 (TRBV7-3, TRBJ2-2)
CASSETGQGTGELFF

SEQ ID NO: 280053 - protein, 11 aa, Homo sapiens
  CDR3 for alpha chain variable domain of TCR clone 140027 (TRAV1-1, TRAJ23)
CAVRQGGKLIF

SEQ ID NO: 280054 - protein, 11 aa, Homo sapiens
  CDR3 for beta chain variable domain of TCR clone 140027 (TRBV7-2, TRBJ2-7)
CASSLGWEQYF

SEQ ID NO: 280055 - protein, 14 aa, Homo sapiens
  CDR3 for alpha chain variable domain of TCR clone 140028 (TRAV14/DV4, TRAJ26)
CAMREGTYGQTFVF

SEQ ID NO: 280056 - protein, 16 aa, Homo sapiens
  CDR3 for beta chain variable domain of TCR clone 140028 (TRBV9, TRBJ1-2)
CASSVEEKVSPYGYTF

SEQ ID NO: 280057 - protein, 11 aa, Homo sapiens
  CDR3 for alpha chain variable domain of TCR clone 140029 (TRAV21, TRAJ31)
CAVRNNARLMF

SEQ ID NO: 280058 - protein, 17 aa, Homo sapiens
  CDR3 for beta chain variable domain of TCR clone 140029 (TRBV4-1, TRBJ1-4)
CASSQEGPRGVEEKLFF

SEQ ID NO: 280059 - protein, 14 aa, Homo sapiens
  CDR3 for alpha chain variable domain of TCR clone 140030 (TRAV1-2, TRAJ16)
CAVNRFSDAQKLLF

SEQ ID NO: 280060 - protein, 13 aa, Homo sapiens
  CDR3 for beta chain variable domain of TCR clone 140030 (TRBV6-4, TRBJ1-5)
CASSADLNQPQHF

SEQ ID NO: 280061 - protein, 12 aa, Homo sapiens
  CDR3 for alpha chain variable domain of TCR clone 140031 (TRAV12-3, TRAJ17)
CAMTLTGNKLTF

SEQ ID NO: 280062 - protein, 13 aa, Homo sapiens
  CDR3 for beta chain variable domain of TCR clone 140031 (TRBV9, TRBJ2-1)
CASSPSGGSAQFF

SEQ ID NO: 280063 - protein, 14 aa, Homo sapiens
  CDR3 for alpha chain variable domain of TCR clone 140032 (TRAV12-1, TRAJ17)
CVVNYKAAGNKLTF

SEQ ID NO: 280064 - protein, 15 aa, Homo sapiens
  CDR3 for beta chain variable domain of TCR clone 140032 (TRBV12-4, TRBJ1-5)
CASARGSGFGQPQHF

SEQ ID NO: 280065 - protein, 14 aa, Homo sapiens
  CDR3 for alpha chain variable domain of TCR clone 140033 (TRAV8-4, TRAJ9)
CAVSINTGGYKTIF

SEQ ID NO: 280066 - protein, 15 aa, Homo sapiens
  CDR3 for beta chain variable domain of TCR clone 140033 (TRBV10-2, TRBJ2-6)
CASSEQGTGANVLTF

SEQ ID NO: 280067 - protein, 18 aa, Homo sapiens
  CDR3 for alpha chain variable domain of TCR clone 140034 (TRAV26-2, TRAJ45)
SILRVDKYSGGGADGLTF

SEQ ID NO: 280068 - protein, 16 aa, Homo sapiens
  CDR3 for beta chain variable domain of TCR clone 140034 (TRBV2, TRBJ1-4)
CASNLLQGATNEKLFF

SEQ ID NO: 280069 - protein, 12 aa, Homo sapiens
  CDR3 for alpha chain variable domain of TCR clone 140035 (TRAV21, TRAJ11)
CAATSGYSTLTF

SEQ ID NO: 280070 - protein, 14 aa, Homo sapiens
  CDR3 for beta chain variable domain of TCR clone 140035 (TRBV7-8, TRBJ2-3)
CASSSRDSTDTQYF

SEQ ID NO: 280071 - protein, 15 aa, Homo sapiens
  CDR3 for alpha chain variable domain of TCR clone 140036 (TRAV25, TRAJ53)
CPTSNSGGSNYKLTF

SEQ ID NO: 280072 - protein, 16 aa, Homo sapiens
  CDR3 for beta chain variable domain of TCR clone 140036 (TRBV2, TRBJ1-5)
CASSLALGLYNQPQHF

SEQ ID NO: 280073 - protein, 13 aa, Homo sapiens
  CDR3 for alpha chain variable domain of TCR clone 140037 (TRAV8-3, TRAJ28)
CAVGAVGSYQTHF

SEQ ID NO: 280074 - protein, 14 aa, Homo sapiens
  CDR3 for beta chain variable domain of TCR clone 140037 (TRBV7-2, TRBJ2-7)
CASRSQGAAYEQYF

SEQ ID NO: 280075 - protein, 14 aa, Homo sapiens
  CDR3 for alpha chain variable domain of TCR clone 140038 (TRAV8-2, TRAJ37)
CVVSISGNTGKLIF

SEQ ID NO: 280076 - protein, 13 aa, Homo sapiens
  CDR3 for beta chain variable domain of TCR clone 140038 (TRBV7-8, TRBJ2-7)
RRVRLTKMGEQYF

SEQ ID NO: 280077 - protein, 14 aa, Homo sapiens
  CDR3 for alpha chain variable domain of TCR clone 140039 (TRAV9-2, TRAJ39)
CALYTYNAGNMLTF

SEQ ID NO: 280078 - protein, 13 aa, Homo sapiens
  CDR3 for beta chain variable domain of TCR clone 140039 (TRBV11-3, TRBJ1-1)
CASSRQPNTEAFF

SEQ ID NO: 280079 - protein, 13 aa, Homo sapiens
  CDR3 for alpha chain variable domain of TCR clone 140040 (TRAV21, TRAJ20)
CAVGLRVDYKLSF

SEQ ID NO: 280080 - protein, 14 aa, Homo sapiens
  CDR3 for beta chain variable domain of TCR clone 140040 (TRBV20-1, TRBJ2-2)
CSAASGGNTGELFF

SEQ ID NO: 280081 - protein, 16 aa, Homo sapiens
  CDR3 for alpha chain variable domain of TCR clone 140041 (TRAV14/DV4, TRAJ53)
CAMREGGGGSNYKLTF

SEQ ID NO: 280082 - protein, 12 aa, Homo sapiens
  CDR3 for beta chain variable domain of TCR clone 140041 (TRBV24-1, TRBJ1-1)
CATSDSDRGAFF

SEQ ID NO: 280083 - protein, 12 aa, Homo sapiens
  CDR3 for alpha chain variable domain of TCR clone 140042 (TRAV3, TRAJ39)
CAVIEWSNMLTF

SEQ ID NO: 280084 - protein, 14 aa, Homo sapiens
  CDR3 for beta chain variable domain of TCR clone 140042 (TRBV7-8, TRBJ2-3)
CASSFPDGQDKQYF

SEQ ID NO: 280085 - protein, 14 aa, Homo sapiens
  CDR3 for alpha chain variable domain of TCR clone 140043 (TRAV26-1, TRAJ38)
CIADNAGNNRKLIR

SEQ ID NO: 280086 - protein, 15 aa, Homo sapiens
  CDR3 for beta chain variable domain of TCR clone 140043 (TRBV27, TRBJ2-7)
CASSTAGTGSYEQYF

SEQ ID NO: 280087 - protein, 14 aa, Homo sapiens
  CDR3 for alpha chain variable domain of TCR clone 140044 (TRAV23/DV6, TRAJ37)
CAASTSRNTGKLIF

SEQ ID NO: 280088 - protein, 13 aa, Homo sapiens
  CDR3 for beta chain variable domain of TCR clone 140044 (TRBV18, TRBJ2-5)
CASSPIPGETQYF

SEQ ID NO: 280089 - protein, 15 aa, Homo sapiens
  CDR3 for alpha chain variable domain of TCR clone 140045 (TRAV3, TRAJ3)
CAVRDRDSSASKIIF

SEQ ID NO: 280090 - protein, 16 aa, Homo sapiens
  CDR3 for beta chain variable domain of TCR clone 140045 (TRBV7-3, TRBJ2-1)
CASSLEGYRSYNEQFF

SEQ ID NO: 280091 - protein, 10 aa, Homo sapiens
  CDR3 for alpha chain variable domain of TCR clone 140046 (TRAV36/DV7, TRAJ49)
CALTGNQFYF

SEQ ID NO: 280092 - protein, 14 aa, Homo sapiens
  CDR3 for beta chain variable domain of TCR clone 140046 (TRBV7-3, TRBJ2-2)
CASSRGGDTGELFF

SEQ ID NO: 280093 - protein, 14 aa, Homo sapiens
  CDR3 for alpha chain variable domain of TCR clone 140047 (TRAV26-1, TRAJ38)
CIADNAGNNRKLIW

SEQ ID NO: 280094 - protein, 17 aa, Homo sapiens
  CDR3 for beta chain variable domain of TCR clone 140047 (TRBV4-1, TRBJ2-3)
CASSHGYVSGGTDTQYF

SEQ ID NO: 280095 - protein, 16 aa, Homo sapiens
  CDR3 for alpha chain variable domain of TCR clone 140048 (TRAV35, TRAJ28)
CAGQKYSGAGSYQLTF

SEQ ID NO: 280096 - protein, 16 aa, Homo sapiens
  CDR3 for beta chain variable domain of TCR clone 140048 (TRBV7-3, TRBJ2-2)
CASSLKLGTLSGELFF

SEQ ID NO: 280097 - protein, 13 aa, Homo sapiens
  CDR3 for alpha chain variable domain of TCR clone 140049 (TRAV6, TRAJ15)
CSRHSGEGTALIF

SEQ ID NO: 280098 - protein, 14 aa, Homo sapiens
  CDR3 for beta chain variable domain of TCR clone 140049 (TRBV20-1, TRBJ1-3)
CSASPTGAGNTIYF

SEQ ID NO: 280099 - protein, 11 aa, Homo sapiens
  CDR3 for alpha chain variable domain of TCR clone 140050 (TRAV1-2, TRAJ40)
CAVPGTYKYIF

SEQ ID NO: 280100 - protein, 15 aa, Homo sapiens
  CDR3 for beta chain variable domain of TCR clone 140050 (TRBV7-2, TRBJ2-3)
CASSSTGLETDTQYF

SEQ ID NO: 280101 - protein, 13 aa, Homo sapiens
  CDR3 for alpha chain variable domain of TCR clone 140051 (TRAV35, TRAJ22)
CAGLSGSARQLTF

SEQ ID NO: 280102 - protein, 16 aa, Homo sapiens
  CDR3 for beta chain variable domain of TCR clone 140051 (TRBV7-9, TRBJ2-1)
CASSLVLTGQGNVQFF

SEQ ID NO: 280103 - protein, 13 aa, Homo sapiens
  CDR3 for alpha chain variable domain of TCR clone 140052 (TRAV13-2, TRAJ48)
CAEMDFGNEKLTF

SEQ ID NO: 280104 - protein, 15 aa, Homo sapiens
  CDR3 for beta chain variable domain of TCR clone 140052 (TRBV7-3, TRBJ1-6)
CASSPTGAPNSPLHF

SEQ ID NO: 280105 - protein, 13 aa, Homo sapiens
  CDR3 for alpha chain variable domain of TCR clone 140053 (TRAV23/DV6, TRAJ3)
CAATYSSASKIIF

SEQ ID NO: 280106 - protein, 16 aa, Homo sapiens
  CDR3 for beta chain variable domain of TCR clone 140053 (TRBV27, TRBJ2-2)
CASSFRGLVRTGELFF

SEQ ID NO: 280107 - protein, 18 aa, Homo sapiens
  CDR3 for alpha chain variable domain of TCR clone 140054 (TRAV13-1, TRAJ52)
CAAKNPNAGGTSDGKMTF

SEQ ID NO: 280108 - protein, 11 aa, Homo sapiens
  CDR3 for beta chain variable domain of TCR clone 140054 (TRBV11-2, TRBJ2-2)
CASSLPGELFF

SEQ ID NO: 280109 - protein, 22 aa, Homo sapiens
  CDR3 for alpha chain variable domain of TCR clone 140055 (TRAV36/DV7, TRAJ38)
CVANAGNNHIQSPDPAVYQLRD

SEQ ID NO: 280110 - protein, 14 aa, Homo sapiens
  CDR3 for beta chain variable domain of TCR clone 140055 (TRBV7-2, TRBJ2-7)
CASSLRWEVNEQYF

SEQ ID NO: 280111 - protein, 12 aa, Homo sapiens
  CDR3 for alpha chain variable domain of TCR clone 140056 (TRAV12-2, TRAJ42)
CAVGGSQGNLIF

SEQ ID NO: 280112 - protein, 18 aa, Homo sapiens
  CDR3 for beta chain variable domain of TCR clone 140056 (TRBV6-6, TRBJ1-3)
CASSYSKWDSISGNTIYF

SEQ ID NO: 280113 - protein, 14 aa, Homo sapiens
  CDR3 for alpha chain variable domain of TCR clone 140057 (TRAV17, TRAJ57)
CATDSQGGSEKLVF

SEQ ID NO: 280114 - protein, 14 aa, Homo sapiens
  CDR3 for beta chain variable domain of TCR clone 140057 (TRBV7-3, TRBJ2-7)
CASSLSGVSYEQYF

SEQ ID NO: 280115 - protein, 12 aa, Homo sapiens
  CDR3 for alpha chain variable domain of TCR clone 140058 (TRAV12-3, TRAJ17)
CAMTLTGNKLTF

SEQ ID NO: 280116 - protein, 15 aa, Homo sapiens
  CDR3 for beta chain variable domain of TCR clone 140058 (TRBV6-3, TRBJ2-7)
CASSSPGTVFYEHYF

SEQ ID NO: 280117 - protein, 15 aa, Homo sapiens
  CDR3 for alpha chain variable domain of TCR clone 140059 (TRAV2, TRAJ36)
CAVDQTGANNLFFVL

SEQ ID NO: 280118 - protein, 12 aa, Homo sapiens
  CDR3 for beta chain variable domain of TCR clone 140059 (TRBV19, TRBJ1-1)
CASMNRYTEAFF

SEQ ID NO: 280119 - protein, 14 aa, Homo sapiens
  CDR3 for alpha chain variable domain of TCR clone 140060 (TRAV26-1, TRAJ21)
CIVRPPYNFNKFYF

SEQ ID NO: 280120 - protein, 14 aa, Homo sapiens
  CDR3 for beta chain variable domain of TCR clone 140060 (TRBV11-2, TRBJ2-5)
CASSRTGGIETQYF

SEQ ID NO: 280121 - protein, 11 aa, Homo sapiens
  CDR3 for alpha chain variable domain of TCR clone 140061 (TRAV1-2, TRAJ40)
CAVPGTYKYIF

SEQ ID NO: 280122 - protein, 15 aa, Homo sapiens
  CDR3 for beta chain variable domain of TCR clone 140061 (TRBV20-1, TRBJ1-1)
CSASRGVTGNTEAFF

SEQ ID NO: 280123 - protein, 19 aa, Homo sapiens
  CDR3 for alpha chain variable domain of TCR clone 140062 (TRAV3, TRAJ6)
CAVRDRNPSRSGGSYIPTF

SEQ ID NO: 280124 - protein, 15 aa, Homo sapiens
  CDR3 for beta chain variable domain of TCR clone 140062 (TRBV18, TRBJ2-7)
CASSPIFMDSYEQYF

SEQ ID NO: 280125 - protein, 11 aa, Homo sapiens
  CDR3 for alpha chain variable domain of TCR clone 140063 (TRAV12-2, TRAJ33)
CAVTSNYQLIW

SEQ ID NO: 280126 - protein, 14 aa, Homo sapiens
  CDR3 for beta chain variable domain of TCR clone 140063 (TRBV28, TRBJ2-2)
CASRIRSGTGQLFF

SEQ ID NO: 280127 - protein, 13 aa, Homo sapiens
  CDR3 for alpha chain variable domain of TCR clone 140064 (TRAV16, TRAJ20)
CALGPSNDYKLSF

SEQ ID NO: 280128 - protein, 15 aa, Homo sapiens
  CDR3 for beta chain variable domain of TCR clone 140064 (TRBV5-1, TRBJ2-2)
CASSRVGSATGELFF

SEQ ID NO: 280129 - protein, 14 aa, Homo sapiens
  CDR3 for alpha chain variable domain of TCR clone 140065 (TRAV12-2, TRAJ40)
CAVKIPSGTYKYIF

SEQ ID NO: 280130 - protein, 15 aa, Homo sapiens
  CDR3 for beta chain variable domain of TCR clone 140065 (TRBV4-2, TRBJ1-1)
CASSQRSSGRTEAFF

SEQ ID NO: 280131 - protein, 12 aa, Homo sapiens
  CDR3 for alpha chain variable domain of TCR clone 140066 (TRAV38-2/DV8, TRAJ48)
CALLSGNEELTF

SEQ ID NO: 280132 - protein, 14 aa, Homo sapiens
  CDR3 for beta chain variable domain of TCR clone 140066 (TRBV11-2, TRBJ2-3)
CASSRLARTDTQYF

SEQ ID NO: 280133 - protein, 14 aa, Homo sapiens
  CDR3 for alpha chain variable domain of TCR clone 140067 (TRAV1-1, TRAJ27)
CAVIHNTNAGTSTF

SEQ ID NO: 280134 - protein, 15 aa, Homo sapiens
  CDR3 for beta chain variable domain of TCR clone 140067 (TRBV6-3, TRBJ2-7)
CASSSPGTVFYEQYF

SEQ ID NO: 280135 - protein, 14 aa, Homo sapiens
  CDR3 for alpha chain variable domain of TCR clone 140068 (TRAV13-1, TRAJ29)
CAASSNSRNTPLVF

SEQ ID NO: 280136 - protein, 12 aa, Homo sapiens
  CDR3 for beta chain variable domain of TCR clone 140068 (TRBV12-5, TRBJ2-5)
CASGQGVETQYF

SEQ ID NO: 280137 - protein, 16 aa, Homo sapiens
  CDR3 for alpha chain variable domain of TCR clone 140069 (TRAV12-2, TRAJ32)
CAVNLGQGGSTNKHIF

SEQ ID NO: 280138 - protein, 15 aa, Homo sapiens
  CDR3 for beta chain variable domain of TCR clone 140069 (TRBV20-1, TRBJ2-7)
CSARGPLAGGREQYF

SEQ ID NO: 280139 - protein, 15 aa, Homo sapiens
  CDR3 for alpha chain variable domain of TCR clone 140070 (TRAV26-1, TRAJ29)
CIVRVEGSGNTPIVF

SEQ ID NO: 280140 - protein, 14 aa, Homo sapiens
  CDR3 for beta chain variable domain of TCR clone 140070 (TRBV18, TRBJ2-5)
CASSPGVSQGTQYF

SEQ ID NO: 280141 - protein, 14 aa, Homo sapiens
  CDR3 for alpha chain variable domain of TCR clone 140071 (TRAV12-2, TRAJ11)
CAVEGGSGYSTLTF

SEQ ID NO: 280142 - protein, 16 aa, Homo sapiens
  CDR3 for beta chain variable domain of TCR clone 140071 (TRBV6-1, TRBJ1-2)
CASSGACQGRSHGYTF

SEQ ID NO: 280143 - protein, 17 aa, Homo sapiens
  CDR3 for alpha chain variable domain of TCR clone 140072 (TRAV13-2, TRAJ42)
CAEKGKNYGGSQGNLIV

SEQ ID NO: 280144 - protein, 16 aa, Homo sapiens
  CDR3 for beta chain variable domain of TCR clone 140072 (TRBV7-9, TRBJ2-1)
CASSLGTGWDYNEQFF

SEQ ID NO: 280145 - protein, 15 aa, Homo sapiens
  CDR3 for alpha chain variable domain of TCR clone 140073 (TRAV29/DV5, TRAJ53)
CAASASGGINYKLTF

SEQ ID NO: 280146 - protein, 19 aa, Homo sapiens
  CDR3 for beta chain variable domain of TCR clone 140073 (TRBV5-1, TRBJ2-3)
CASSLWLAGGITTTDTQYF

SEQ ID NO: 280147 - protein, 15 aa, Homo sapiens
  CDR3 for alpha chain variable domain of TCR clone 140074 (TRAV14/DV4, TRAJ33)
CAMREGRDSNYQLIW

SEQ ID NO: 280148 - protein, 16 aa, Homo sapiens
  CDR3 for beta chain variable domain of TCR clone 140074 (TRBV12-5, TRBJ2-5)
CASGPRTSANQETQYF

SEQ ID NO: 280149 - protein, 11 aa, Homo sapiens
  CDR3 for alpha chain variable domain of TCR clone 140075 (TRAV12-3, TRAJ27)
CAMANAGKSTF

SEQ ID NO: 280150 - protein, 14 aa, Homo sapiens
  CDR3 for beta chain variable domain of TCR clone 140075 (TRBV7-9, TRBJ2-3)
CASSLEDGTDTQYF

SEQ ID NO: 280151 - protein, 12 aa, Homo sapiens
  CDR3 for alpha chain variable domain of TCR clone 140076 (TRAV26-1, TRAJ36)
CIVRVRADNLFF

SEQ ID NO: 280152 - protein, 14 aa, Homo sapiens
  CDR3 for beta chain variable domain of TCR clone 140076 (TRBV27, TRBJ2-7)
CASSFRDGPYEQYF

SEQ ID NO: 280153 - protein, 14 aa, Homo sapiens
  CDR3 for alpha chain variable domain of TCR clone 140077 (TRAV8-3, TRAJ39)
CAVGANNAGNMLTF

SEQ ID NO: 280154 - protein, 16 aa, Homo sapiens
  CDR3 for beta chain variable domain of TCR clone 140077 (TRBV6-1, TRBJ2-5)
CSSSETLDRGAETQYF

SEQ ID NO: 280155 - protein, 14 aa, Homo sapiens
  CDR3 for alpha chain variable domain of TCR clone 140078 (TRAV12-2, TRAJ11)
CAVEGGSGYSTLTF

SEQ ID NO: 280156 - protein, 12 aa, Homo sapiens
  CDR3 for beta chain variable domain of TCR clone 140078 (TRBV7-9, TRBJ1-5)
CASSPQGQPQHF

SEQ ID NO: 280157 - protein, 14 aa, Homo sapiens
  CDR3 for alpha chain variable domain of TCR clone 140079 (TRAV13-1, TRAJ26)
CAASSAHYGQKFVF

SEQ ID NO: 280158 - protein, 17 aa, Homo sapiens
  CDR3 for beta chain variable domain of TCR clone 140079 (TRBV25-1, TRBJ2-5)
CASSRRGGRGGQETQYF

SEQ ID NO: 280159 - protein, 11 aa, Homo sapiens
  CDR3 for alpha chain variable domain of TCR clone 140080 (TRAV2, TRAJ33)
CAVDSNYQLIW

SEQ ID NO: 280160 - protein, 15 aa, Homo sapiens
  CDR3 for beta chain variable domain of TCR clone 140080 (TRBV11-3, TRBJ2-1)
CASSLGDSSHNEQFF

SEQ ID NO: 280161 - protein, 13 aa, Homo sapiens
  CDR3 for alpha chain variable domain of TCR clone 140081 (TRAV23/DV6, TRAJ20)
CAAGGFHDYKLSV

SEQ ID NO: 280162 - protein, 14 aa, Homo sapiens
  CDR3 for beta chain variable domain of TCR clone 140081 (TRBV3-1, TRBJ2-7)
CASSQSGAHYEQYF

SEQ ID NO: 280163 - protein, 13 aa, Homo sapiens
  CDR3 for alpha chain variable domain of TCR clone 140082 (TRAV23/DV6, TRAJ35)
CAAQLGFGNVLHC

SEQ ID NO: 280164 - protein, 15 aa, Homo sapiens
  CDR3 for beta chain variable domain of TCR clone 140082 (TRBV27, TRBJ2-2)
YASSKQGASTGELFF

SEQ ID NO: 280165 - protein, 15 aa, Homo sapiens
  CDR3 for alpha chain variable domain of TCR clone 140083 (TRAV8-2, TRAJ40)
CVVLGTTSGTYKYIF

SEQ ID NO: 280166 - protein, 14 aa, Homo sapiens
  CDR3 for beta chain variable domain of TCR clone 140083 (TRBV7-9, TRBJ2-5)
CASSPAQDQETQYF

SEQ ID NO: 280167 - protein, 12 aa, Homo sapiens
  CDR3 for alpha chain variable domain of TCR clone 140084 (TRAV12-1, TRAJ6)
CVVSERSYIPTF

SEQ ID NO: 280168 - protein, 21 aa, Homo sapiens
  CDR3 for beta chain variable domain of TCR clone 140084 (TRBV7-3, TRBJ2-1)
GGTQPCISVPAAYGVAGAQFF

SEQ ID NO: 280169 - protein, 14 aa, Homo sapiens
  CDR3 for alpha chain variable domain of TCR clone 140085 (TRAV12-2, TRAJ40)
CAAKTPSGTYKYIF

SEQ ID NO: 280170 - protein, 14 aa, Homo sapiens
  CDR3 for beta chain variable domain of TCR clone 140085 (TRBV20-1, TRBJ1-1)
CSAQTRIGGTEAFF

SEQ ID NO: 280171 - protein, 13 aa, Homo sapiens
  CDR3 for alpha chain variable domain of TCR clone 140086 (TRAV13-1, TRAJ21)
CAASIYNFNKFYF

SEQ ID NO: 280172 - protein, 22 aa, Homo sapiens
  CDR3 for beta chain variable domain of TCR clone 140086 (TRBV19, TRBJ2-1)
CASSVRDRVTGTSGRIYNEQFF

SEQ ID NO: 280173 - protein, 15 aa, Homo sapiens
  CDR3 for alpha chain variable domain of TCR clone 140087 (TRAV2, TRAJ9)
CAVDDRGTGGFKTIC

SEQ ID NO: 280174 - protein, 16 aa, Homo sapiens
  CDR3 for beta chain variable domain of TCR clone 140087 (TRBV24-1, TRBJ2-3)
CATSDPGTGATDTQYF

SEQ ID NO: 280175 - protein, 13 aa, Homo sapiens
  CDR3 for alpha chain variable domain of TCR clone 140088 (TRAV12-3, TRAJ7)
CAMSASGNNRLAF

SEQ ID NO: 280176 - protein, 14 aa, Homo sapiens
  CDR3 for beta chain variable domain of TCR clone 140088 (TRBV13, TRBJ2-5)
CASSLGPRVETQYF

SEQ ID NO: 280177 - protein, 13 aa, Homo sapiens
  CDR3 for alpha chain variable domain of TCR clone 140089 (TRAV21, TRAJ17)
CAPVKAAGNKLTF

SEQ ID NO: 280178 - protein, 15 aa, Homo sapiens
  CDR3 for beta chain variable domain of TCR clone 140089 (TRBV4-1, TRBJ2-7)
CASSQQGQGFDEQYF

SEQ ID NO: 280179 - protein, 14 aa, Homo sapiens
  CDR3 for alpha chain variable domain of TCR clone 140090 (TRAV8-3, TRAJ4)
CAVGASGGYNELIF

SEQ ID NO: 280180 - protein, 17 aa, Homo sapiens
  CDR3 for beta chain variable domain of TCR clone 140090 (TRBV11-2, TRBJ2-1)
CASSLYPPGVEYNEQFF

SEQ ID NO: 280181 - protein, 11 aa, Homo sapiens
  CDR3 for alpha chain variable domain of TCR clone 140091 (TRAV27, TRAJ47)
SIVEYGNKLVF

SEQ ID NO: 280182 - protein, 18 aa, Homo sapiens
  CDR3 for beta chain variable domain of TCR clone 140091 (TRBV2, TRBJ2-1)
CASRGLAGGTRTYNEQFF

SEQ ID NO: 280183 - protein, 14 aa, Homo sapiens
  CDR3 for alpha chain variable domain of TCR clone 140092 (TRAV8-2, TRAJ23)
CVVSDDNQGGKLIF

SEQ ID NO: 280184 - protein, 12 aa, Homo sapiens
  CDR3 for beta chain variable domain of TCR clone 140092 (TRBV11-2, TRBJ2-2)
CASSLGGGELFF

SEQ ID NO: 280185 - protein, 14 aa, Homo sapiens
  CDR3 for alpha chain variable domain of TCR clone 140093 (TRAV1-2, TRAJ16)
CAVNRFSDGQKLLF

SEQ ID NO: 280186 - protein, 17 aa, Homo sapiens
  CDR3 for beta chain variable domain of TCR clone 140093 (TRBV15, TRBJ2-3)
CATSGTTSEEGTDTQYF

SEQ ID NO: 280187 - protein, 14 aa, Homo sapiens
  CDR3 for alpha chain variable domain of TCR clone 140094 (TRAV1-2, TRAJ16)
WAVNRFSDGQKLLF

SEQ ID NO: 280188 - protein, 12 aa, Homo sapiens
  CDR3 for beta chain variable domain of TCR clone 140094 (TRBV28, TRBJ2-6)
CAIQAGTNVLTF

SEQ ID NO: 280189 - protein, 15 aa, Homo sapiens
  CDR3 for alpha chain variable domain of TCR clone 140095 (TRAV17, TRAJ57)
CATGPSHGGSEKLVF

SEQ ID NO: 280190 - protein, 15 aa, Homo sapiens
  CDR3 for beta chain variable domain of TCR clone 140095 (TRBV12-4, TRBJ1-5)
CQQPTGRGVQSAQHF

SEQ ID NO: 280191 - protein, 15 aa, Homo sapiens
  CDR3 for alpha chain variable domain of TCR clone 140096 (TRAV38-1, TRAJ37)
CVFIFGSGNTGKLIF

SEQ ID NO: 280192 - protein, 12 aa, Homo sapiens
  CDR3 for beta chain variable domain of TCR clone 140096 (TRBV7-9, TRBJ2-7)
SASSLEGYEQYF

SEQ ID NO: 280193 - protein, 14 aa, Homo sapiens
  CDR3 for alpha chain variable domain of TCR clone 140097 (TRAV12-3, TRAJ10)
SHLPLTGGGNKLNF

SEQ ID NO: 280194 - protein, 12 aa, Homo sapiens
  CDR3 for beta chain variable domain of TCR clone 140097 (TRBV7-9, TRBJ2-7)
CASSIKREEQYF

SEQ ID NO: 280195 - protein, 12 aa, Homo sapiens
  CDR3 for alpha chain variable domain of TCR clone 140098 (TRAV16, TRAJ56)
CAPTGANSKPPF

SEQ ID NO: 280196 - protein, 17 aa, Homo sapiens
  CDR3 for beta chain variable domain of TCR clone 140098 (TRBV27, TRBJ2-6)
CASSLTGFASGANVLTF

SEQ ID NO: 280197 - protein, 15 aa, Homo sapiens
  CDR3 for alpha chain variable domain of TCR clone 140099 (TRAV12-3, TRAJ13)
CAMSARSGGYQKVTF

SEQ ID NO: 280198 - protein, 18 aa, Homo sapiens
  CDR3 for beta chain variable domain of TCR clone 140099 (TRBV3-1, TRBJ2-7)
CASSQGGGGRAGHYEQYF

SEQ ID NO: 280199 - protein, 16 aa, Homo sapiens
  CDR3 for alpha chain variable domain of TCR clone 140100 (TRAV1-2, TRAJ10)
CAVRGVLTGGGNKLTF

SEQ ID NO: 280200 - protein, 15 aa, Homo sapiens
  CDR3 for beta chain variable domain of TCR clone 140100 (TRBV7-2, TRBJ2-1)
CASTHGTGFYNEQFF

SEQ ID NO: 280201 - protein, 14 aa, Homo sapiens
  CDR3 for alpha chain variable domain of TCR clone 140101 (TRAV12-3, TRAJ58)
CAMSTETSGSRLTF

SEQ ID NO: 280202 - protein, 15 aa, Homo sapiens
  CDR3 for beta chain variable domain of TCR clone 140101 (TRBV7-9, TRBJ1-6)
CASSSPGRGNSPLHF

SEQ ID NO: 280203 - protein, 12 aa, Homo sapiens
  CDR3 for alpha chain variable domain of TCR clone 140102 (TRAV13-1, TRAJ21)
CAAKEGFNKFYF

SEQ ID NO: 280204 - protein, 16 aa, Homo sapiens
  CDR3 for beta chain variable domain of TCR clone 140102 (TRBV6-1, TRBJ2-5)
CASGETLDRGAETQYF

SEQ ID NO: 280205 - protein, 14 aa, Homo sapiens
  CDR3 for alpha chain variable domain of TCR clone 140103 (TRAV26-1, TRAJ15)
CIVRANQAGTALIF

SEQ ID NO: 280206 - protein, 16 aa, Homo sapiens
  CDR3 for beta chain variable domain of TCR clone 140103 (TRBV20-1, TRBJ1-4)
CSAIGGPRGDNEKLFF

SEQ ID NO: 280207 - protein, 15 aa, Homo sapiens
  CDR3 for alpha chain variable domain of TCR clone 140104 (TRAV26-1, TRAJ48)
CIVRVGDFGNEKLTF

SEQ ID NO: 280208 - protein, 13 aa, Homo sapiens
  CDR3 for beta chain variable domain of TCR clone 140104 (TRBV19, TRBJ1-3)
CASRLSLGNTIYF

SEQ ID NO: 280209 - protein, 11 aa, Homo sapiens
  CDR3 for alpha chain variable domain of TCR clone 140105 (TRAV12-1, TRAJ21)
CVVNNFNKFYF

SEQ ID NO: 280210 - protein, 14 aa, Homo sapiens
  CDR3 for beta chain variable domain of TCR clone 140105 (TRBV11-2, TRBJ2-7)
CASSLGAGAYEQYF

SEQ ID NO: 280211 - protein, 12 aa, Homo sapiens
  CDR3 for alpha chain variable domain of TCR clone 140106 (TRAV1-2, TRAJ26)
CAVRYYGQNFVF

SEQ ID NO: 280212 - protein, 15 aa, Homo sapiens
  CDR3 for beta chain variable domain of TCR clone 140106 (TRBV28, TRBJ2-1)
CASSIMAGGRSEQFF

SEQ ID NO: 280213 - protein, 12 aa, Homo sapiens
  CDR3 for alpha chain variable domain of TCR clone 140107 (TRAV13-1, TRAJ53)
AASGGSNYKLTF

SEQ ID NO: 280214 - protein, 15 aa, Homo sapiens
  CDR3 for beta chain variable domain of TCR clone 140107 (TRBV5-1, TRBJ2-1)
GASSPPSAPYNEQFF

SEQ ID NO: 280215 - protein, 16 aa, Homo sapiens
  CDR3 for alpha chain variable domain of TCR clone 140108 (TRAV12-2, TRAJ32)
CAVNLGQGGAPNKLLF

SEQ ID NO: 280216 - protein, 15 aa, Homo sapiens
  CDR3 for beta chain variable domain of TCR clone 140108 (TRBV20-1, TRBJ2-7)
CSARGPLAGGREQYF

SEQ ID NO: 280217 - protein, 12 aa, Homo sapiens
  CDR3 for alpha chain variable domain of TCR clone 140109 (TRAV12-2, TRAJ21)
CAVRYNFNKFYF

SEQ ID NO: 280218 - protein, 14 aa, Homo sapiens
  CDR3 for beta chain variable domain of TCR clone 140109 (TRBV28, TRBJ2-1)
CASSYYTAHNEQFF

SEQ ID NO: 280219 - protein, 17 aa, Homo sapiens
  CDR3 for alpha chain variable domain of TCR clone 140110 (TRAV3, TRAJ12)
CAVRDGGRMDSSYKLIF

SEQ ID NO: 280220 - protein, 14 aa, Homo sapiens
  CDR3 for beta chain variable domain of TCR clone 140110 (TRBV28, TRBJ2-7)
CASGTSGLIYEQYF

SEQ ID NO: 280221 - protein, 13 aa, Homo sapiens
  CDR3 for alpha chain variable domain of TCR clone 140111 (TRAV30, TRAJ24)
CGTVTDSWGKLKF

SEQ ID NO: 280222 - protein, 16 aa, Homo sapiens
  CDR3 for beta chain variable domain of TCR clone 140111 (TRBV15, TRBJ2-6)
CATSVNGGFLANVLTF

SEQ ID NO: 280223 - protein, 15 aa, Homo sapiens
  CDR3 for alpha chain variable domain of TCR clone 140112 (TRAV17, TRAJ4)
CDTGTWSGGYNKLIF

SEQ ID NO: 280224 - protein, 15 aa, Homo sapiens
  CDR3 for beta chain variable domain of TCR clone 140112 (TRBV7-2, TRBJ2-7)
CASSWGQGAIYEQYF

SEQ ID NO: 280225 - protein, 23 aa, Homo sapiens
  CDR3 for alpha chain variable domain of TCR clone 140113 (TRAV26-1, TRAJ38)
CIADNAGNNHIQNPDPAVYQLRD

SEQ ID NO: 280226 - protein, 13 aa, Homo sapiens
  CDR3 for beta chain variable domain of TCR clone 140113 (TRBV20-1, TRBJ2-2)
CSALSGGAGELFF

SEQ ID NO: 280227 - protein, 12 aa, Homo sapiens
  CDR3 for alpha chain variable domain of TCR clone 140114 (TRAV21, TRAJ33)
CAKMDSNYQLIW

SEQ ID NO: 280228 - protein, 17 aa, Homo sapiens
  CDR3 for beta chain variable domain of TCR clone 140114 (TRBV20-1, TRBJ2-2)
CSASRSGQGGLTGELFF

SEQ ID NO: 280229 - protein, 16 aa, Homo sapiens
  CDR3 for alpha chain variable domain of TCR clone 140115 (TRAV30, TRAJ24)
CGTEIVDADSWGKFQF

SEQ ID NO: 280230 - protein, 15 aa, Homo sapiens
  CDR3 for beta chain variable domain of TCR clone 140115 (TRBV4-1, TRBJ1-3)
CASSQELRVGNTIYF

SEQ ID NO: 280231 - protein, 14 aa, Homo sapiens
  CDR3 for alpha chain variable domain of TCR clone 140116 (TRAV29/DV5, TRAJ34)
CAASASGNTGKLIF

SEQ ID NO: 280232 - protein, 16 aa, Homo sapiens
  CDR3 for beta chain variable domain of TCR clone 140116 (TRBV7-2, TRBJ1-1)
CASSLGAGWTNTEAFF

SEQ ID NO: 280233 - protein, 17 aa, Homo sapiens
  CDR3 for alpha chain variable domain of TCR clone 140117 (TRAV27, TRAJ18)
CAGLHRGRGSTLGRLYF

SEQ ID NO: 280234 - protein, 14 aa, Homo sapiens
  CDR3 for beta chain variable domain of TCR clone 140117 (TRBV20-1, TRBJ1-5)
CSARSRGSNQHQHF

SEQ ID NO: 280235 - protein, 13 aa, Homo sapiens
  CDR3 for alpha chain variable domain of TCR clone 140118 (TRAV1-1, TRAJ9)
CAAKNTGGFNTIF

SEQ ID NO: 280236 - protein, 15 aa, Homo sapiens
  CDR3 for beta chain variable domain of TCR clone 140118 (TRBV20-1, TRBJ2-7)
CSAESGTSGAYEQYF

SEQ ID NO: 280237 - protein, 12 aa, Homo sapiens
  CDR3 for alpha chain variable domain of TCR clone 140119 (TRAV12-2, TRAJ10)
WGVTGGGNKLTF

SEQ ID NO: 280238 - protein, 14 aa, Homo sapiens
  CDR3 for beta chain variable domain of TCR clone 140119 (TRBV5-1, TRBJ2-3)
CASSLFGPTDTQYF

SEQ ID NO: 280239 - protein, 14 aa, Homo sapiens
  CDR3 for alpha chain variable domain of TCR clone 140120 (TRAV12-3, TRAJ39)
SATYLSNAGNMLTF

SEQ ID NO: 280240 - protein, 13 aa, Homo sapiens
  CDR3 for beta chain variable domain of TCR clone 140120 (TRBV28, TRBJ1-2)
CASRPGNRNGYTF

SEQ ID NO: 280241 - protein, 13 aa, Homo sapiens
  CDR3 for alpha chain variable domain of TCR clone 140121 (TRAV2, TRAJ40)
CAVVTSGTYKYIF

SEQ ID NO: 280242 - protein, 11 aa, Homo sapiens
  CDR3 for beta chain variable domain of TCR clone 140121 (TRBV7-9, TRBJ2-3)
CASSGPDTQYF

SEQ ID NO: 280243 - protein, 12 aa, Homo sapiens
  CDR3 for alpha chain variable domain of TCR clone 140122 (TRAV26-1, TRAJ26)
CIVYNYGQNFVF

SEQ ID NO: 280244 - protein, 15 aa, Homo sapiens
  CDR3 for beta chain variable domain of TCR clone 140122 (TRBV7-2, TRBJ2-3)
CASSLRGGSTATQYF

SEQ ID NO: 280245 - protein, 12 aa, Homo sapiens
  CDR3 for alpha chain variable domain of TCR clone 140123 (TRAV13-2, TRAJ8)
CAPWLGFQKLVF

SEQ ID NO: 280246 - protein, 13 aa, Homo sapiens
  CDR3 for beta chain variable domain of TCR clone 140123 (TRBV4-1, TRBJ2-1)
CASSQAGGDEQFF

SEQ ID NO: 280247 - protein, 15 aa, Homo sapiens
  CDR3 for alpha chain variable domain of TCR clone 140124 (TRAV26-1, TRAJ44)
RIVRANIGTASKLTF

SEQ ID NO: 280248 - protein, 12 aa, Homo sapiens
  CDR3 for beta chain variable domain of TCR clone 140124 (TRBV2, TRBJ2-1)
GRGLPSYNEQFF

SEQ ID NO: 280249 - protein, 16 aa, Homo sapiens
  CDR3 for alpha chain variable domain of TCR clone 140125 (TRAV30, TRAJ24)
CGTEIVDADSWGKFQF

SEQ ID NO: 280250 - protein, 14 aa, Homo sapiens
  CDR3 for beta chain variable domain of TCR clone 140125 (TRBV18, TRBJ2-7)
CASSPRGGAYVQYF

SEQ ID NO: 280251 - protein, 15 aa, Homo sapiens
  CDR3 for alpha chain variable domain of TCR clone 140126 (TRAV3, TRAJ22)
CAVRDRGGSARQLTF

SEQ ID NO: 280252 - protein, 13 aa, Homo sapiens
  CDR3 for beta chain variable domain of TCR clone 140126 (TRBV2, TRBJ1-5)
CTTAGPGNQPQHF

SEQ ID NO: 280253 - protein, 12 aa, Homo sapiens
  CDR3 for alpha chain variable domain of TCR clone 140127 (TRAV13-2, TRAJ23)
CAERHRGGKLIF

SEQ ID NO: 280254 - protein, 15 aa, Homo sapiens
  CDR3 for beta chain variable domain of TCR clone 140127 (TRBV5-1, TRBJ2-5)
CASSSGREMVETQYF

SEQ ID NO: 280255 - protein, 15 aa, Homo sapiens
  CDR3 for alpha chain variable domain of TCR clone 140128 (TRAV12-3, TRAJ13)
CAMSARSGGYQKVTF

SEQ ID NO: 280256 - protein, 13 aa, Homo sapiens
  CDR3 for beta chain variable domain of TCR clone 140128 (TRBV10-2, TRBJ2-7)
CASGANGGYEQYF

SEQ ID NO: 280257 - protein, 14 aa, Homo sapiens
  CDR3 for alpha chain variable domain of TCR clone 140129 (TRAV38-1, TRAJ40)
CALRPTSGTYKYIF

SEQ ID NO: 280258 - protein, 13 aa, Homo sapiens
  CDR3 for beta chain variable domain of TCR clone 140129 (TRBV19, TRBJ1-5)
CASSMRGYQPQHF

SEQ ID NO: 280259 - protein, 14 aa, Homo sapiens
  CDR3 for alpha chain variable domain of TCR clone 140130 (TRAV17, TRAJ32)
CATDPGGATNKLIF

SEQ ID NO: 280260 - protein, 12 aa, Homo sapiens
  CDR3 for beta chain variable domain of TCR clone 140130 (TRBV19, TRBJ2-1)
CASSMQDTEQFF

SEQ ID NO: 280261 - protein, 15 aa, Homo sapiens
  CDR3 for alpha chain variable domain of TCR clone 140131 (TRAV21, TRAJ24)
CAARSSTDSWGRWQF

SEQ ID NO: 280262 - protein, 15 aa, Homo sapiens
  CDR3 for beta chain variable domain of TCR clone 140131 (TRBV20-1, TRBJ1-1)
CSASRGVTGNTEAFF

SEQ ID NO: 280263 - protein, 11 aa, Homo sapiens
  CDR3 for alpha chain variable domain of TCR clone 140132 (TRAV1-2, TRAJ40)
CAVPGTYKYIF

SEQ ID NO: 280264 - protein, 18 aa, Homo sapiens
  CDR3 for beta chain variable domain of TCR clone 140132 (TRBV7-6, TRBJ2-1)
CASSPRTSGMSSYNEQFF

SEQ ID NO: 280265 - protein, 13 aa, Homo sapiens
  CDR3 for alpha chain variable domain of TCR clone 140133 (TRAV21, TRAJ44)
CAAHTGTASKLTF

SEQ ID NO: 280266 - protein, 19 aa, Homo sapiens
  CDR3 for beta chain variable domain of TCR clone 140133 (TRBV3-1, TRBJ2-1)
CASSCMIVPGLAGKNEQFF

SEQ ID NO: 280267 - protein, 15 aa, Homo sapiens
  CDR3 for alpha chain variable domain of TCR clone 140134 (TRAV27, TRAJ38)
CAGRFNAGNNRKLIW

SEQ ID NO: 280268 - protein, 12 aa, Homo sapiens
  CDR3 for beta chain variable domain of TCR clone 140134 (TRBV19, TRBJ2-7)
CASTDRGYEQYF

SEQ ID NO: 280269 - protein, 18 aa, Homo sapiens
  CDR3 for alpha chain variable domain of TCR clone 140135 (TRAV21, TRAJ52)
CAVSPSPAGGTSYGKLTF

SEQ ID NO: 280270 - protein, 15 aa, Homo sapiens
  CDR3 for beta chain variable domain of TCR clone 140135 (TRBV27, TRBJ2-1)
CASSNGGGSSNEQFF

SEQ ID NO: 280271 - protein, 15 aa, Homo sapiens
  CDR3 for alpha chain variable domain of TCR clone 140136 (TRAV12-1, TRAJ44)
CVADLPTGTASKLTF

SEQ ID NO: 280272 - protein, 13 aa, Homo sapiens
  CDR3 for beta chain variable domain of TCR clone 140136 (TRBV6-5, TRBJ2-5)
CASSPQGGETPYF

SEQ ID NO: 280273 - protein, 13 aa, Homo sapiens
  CDR3 for alpha chain variable domain of TCR clone 140137 (TRAV8-4, TRAJ30)
CAARVNRDDKIIF

SEQ ID NO: 280274 - protein, 13 aa, Homo sapiens
  CDR3 for beta chain variable domain of TCR clone 140137 (TRBV3-1, TRBJ2-2)
CASLARGSGELFF

SEQ ID NO: 280275 - protein, 20 aa, Homo sapiens
  CDR3 for alpha chain variable domain of TCR clone 140138 (TRAV25, TRAJ33)
TATQTTDIGTSRGSNYQLIW

SEQ ID NO: 280276 - protein, 14 aa, Homo sapiens
  CDR3 for beta chain variable domain of TCR clone 140138 (TRBV7-2, TRBJ2-5)
CASSTGGELKTQYF

SEQ ID NO: 280277 - protein, 13 aa, Homo sapiens
  CDR3 for alpha chain variable domain of TCR clone 140139 (TRAV12-2, TRAJ40)
CREDPLRTYKYIF

SEQ ID NO: 280278 - protein, 14 aa, Homo sapiens
  CDR3 for beta chain variable domain of TCR clone 140139 (TRBV20-1, TRBJ1-1)
CSAQTRIGGTEAFF

SEQ ID NO: 280279 - protein, 13 aa, Homo sapiens
  CDR3 for alpha chain variable domain of TCR clone 140140 (TRAV12-2, TRAJ39)
CAVNNNAGNMLTF

SEQ ID NO: 280280 - protein, 17 aa, Homo sapiens
  CDR3 for beta chain variable domain of TCR clone 140140 (TRBV24-1, TRBJ2-1)
CATSDVSTSGTYNEQFF

SEQ ID NO: 280281 - protein, 12 aa, Homo sapiens
  CDR3 for alpha chain variable domain of TCR clone 140141 (TRAV13-2, TRAJ23)
CAERHRGGKLSF

SEQ ID NO: 280282 - protein, 15 aa, Homo sapiens
  CDR3 for beta chain variable domain of TCR clone 140141 (TRBV6-3, TRBJ2-7)
CASSSPGTVFYEQYF

SEQ ID NO: 280283 - protein, 18 aa, Homo sapiens
  CDR3 for alpha chain variable domain of TCR clone 140142 (TRAV21, TRAJ52)
CAVSPSPAGGTSYGKLTF

SEQ ID NO: 280284 - protein, 14 aa, Homo sapiens
  CDR3 for beta chain variable domain of TCR clone 140142 (TRBV28, TRBJ1-1)
CASSPRTRWAEAFF

SEQ ID NO: 280285 - protein, 12 aa, Homo sapiens
  CDR3 for alpha chain variable domain of TCR clone 140143 (TRAV1-1, TRAJ39)
CSVPVVGNRLTF

SEQ ID NO: 280286 - protein, 15 aa, Homo sapiens
  CDR3 for beta chain variable domain of TCR clone 140143 (TRBV19, TRBJ1-6)
CASSTRGAVGSPLHF

SEQ ID NO: 280287 - protein, 13 aa, Homo sapiens
  CDR3 for alpha chain variable domain of TCR clone 140144 (TRAV13-2, TRAJ40)
CAENTSGTYKYIF

SEQ ID NO: 280288 - protein, 17 aa, Homo sapiens
  CDR3 for beta chain variable domain of TCR clone 140144 (TRBV12-4, TRBJ1-3)
CASRRSGTSSSGNTIYF

SEQ ID NO: 280289 - protein, 20 aa, Homo sapiens
  CDR3 for alpha chain variable domain of TCR clone 140145 (TRAV27, TRAJ41)
CAVRTQIPDIQNPDPAVYQL

SEQ ID NO: 280290 - protein, 15 aa, Homo sapiens
  CDR3 for beta chain variable domain of TCR clone 140145 (TRBV5-1, TRBJ2-3)
CASSLGLGIHRYAVF

SEQ ID NO: 280291 - protein, 16 aa, Homo sapiens
  CDR3 for alpha chain variable domain of TCR clone 140146 (TRAV30, TRAJ24)
CGTEIVDADSWGKFQF

SEQ ID NO: 280292 - protein, 12 aa, Homo sapiens
  CDR3 for beta chain variable domain of TCR clone 140146 (TRBV19, TRBJ2-1)
CASSPGTGRQFF

SEQ ID NO: 280293 - protein, 12 aa, Homo sapiens
  CDR3 for alpha chain variable domain of TCR clone 140147 (TRAV8-3, TRAJ20)
CAVGGGDYKFSF

SEQ ID NO: 280294 - protein, 14 aa, Homo sapiens
  CDR3 for beta chain variable domain of TCR clone 140147 (TRBV5-1, TRBJ2-7)
CASSRGESLYEQYF

SEQ ID NO: 280295 - protein, 13 aa, Homo sapiens
  CDR3 for alpha chain variable domain of TCR clone 140148 (TRAV21, TRAJ3)
CCEPYSSASKIIF

SEQ ID NO: 280296 - protein, 14 aa, Homo sapiens
  CDR3 for beta chain variable domain of TCR clone 140148 (TRBV19, TRBJ2-5)
CASSMTGQQETQYF

SEQ ID NO: 280297 - protein, 17 aa, Homo sapiens
  CDR3 for alpha chain variable domain of TCR clone 140149 (TRAV12-3, TRAJ6)
CAMSARGGAGGSSIPSF

SEQ ID NO: 280298 - protein, 12 aa, Homo sapiens
  CDR3 for beta chain variable domain of TCR clone 140149 (TRBV12-4, TRBJ2-3)
CASSTLPDTQYF

SEQ ID NO: 280299 - protein, 11 aa, Homo sapiens
  CDR3 for alpha chain variable domain of TCR clone 140150 (TRAV12-2, TRAJ27)
CAVNNAGKSTF

SEQ ID NO: 280300 - protein, 12 aa, Homo sapiens
  CDR3 for beta chain variable domain of TCR clone 140150 (TRBV29-1, TRBJ2-3)
CSVTGGADTQYF

SEQ ID NO: 280301 - protein, 16 aa, Homo sapiens
  CDR3 for alpha chain variable domain of TCR clone 140151 (TRAV23/DV6, TRAJ9)
CAASIGGNTGGFKTIF

SEQ ID NO: 280302 - protein, 11 aa, Homo sapiens
  CDR3 for beta chain variable domain of TCR clone 140151 (TRBV6-3, TRBJ2-3)
CATGQAGTQYF

SEQ ID NO: 280303 - protein, 14 aa, Homo sapiens
  CDR3 for alpha chain variable domain of TCR clone 140152 (TRAV12-3, TRAJ54)
CAMSALQGAQKLVF

SEQ ID NO: 280304 - protein, 15 aa, Homo sapiens
  CDR3 for beta chain variable domain of TCR clone 140152 (TRBV19, TRBJ2-4)
YASSTPGIAKNIQYF

SEQ ID NO: 280305 - protein, 14 aa, Homo sapiens
  CDR3 for alpha chain variable domain of TCR clone 140153 (TRAV36/DV7, TRAJ33)
CAVLPRDSNYHLIW

SEQ ID NO: 280306 - protein, 17 aa, Homo sapiens
  CDR3 for beta chain variable domain of TCR clone 140153 (TRBV23-1, TRBJ2-5)
CASSPTLNVIGVETQYF

SEQ ID NO: 280307 - protein, 14 aa, Homo sapiens
  CDR3 for alpha chain variable domain of TCR clone 140154 (TRAV1-2, TRAJ16)
CAVNRFSDGQKLLF

SEQ ID NO: 280308 - protein, 17 aa, Homo sapiens
  CDR3 for beta chain variable domain of TCR clone 140154 (TRBV7-6, TRBJ2-5)
CASSSPQAGDPSETQYF

SEQ ID NO: 280309 - protein, 12 aa, Homo sapiens
  CDR3 for alpha chain variable domain of TCR clone 140155 (TRAV1-2, TRAJ29)
CSVPSGNAPLVF

SEQ ID NO: 280310 - protein, 13 aa, Homo sapiens
  CDR3 for beta chain variable domain of TCR clone 140155 (TRBV5-4, TRBJ1-1)
CASSVDLGTEAFF

SEQ ID NO: 280311 - protein, 14 aa, Homo sapiens
  CDR3 for alpha chain variable domain of TCR clone 140156 (TRAV13-1, TRAJ35)
CAASKGGFGSVLHC

SEQ ID NO: 280312 - protein, 13 aa, Homo sapiens
  CDR3 for beta chain variable domain of TCR clone 140156 (TRBV7-3, TRBJ1-1)
CTSSQDWGAEAFF

SEQ ID NO: 280313 - protein, 15 aa, Homo sapiens
  CDR3 for alpha chain variable domain of TCR clone 140157 (TRAV14/DV4, TRAJ28)
CAMRETGAGSYQLTF

SEQ ID NO: 280314 - protein, 15 aa, Homo sapiens
  CDR3 for beta chain variable domain of TCR clone 140157 (TRBV20-1, TRBJ2-7)
CSARDRVSGMDEQYF

SEQ ID NO: 280315 - protein, 12 aa, Homo sapiens
  CDR3 for alpha chain variable domain of TCR clone 140158 (TRAV12-3, TRAJ17)
CAMTLTGNKLTF

SEQ ID NO: 280316 - protein, 17 aa, Homo sapiens
  CDR3 for beta chain variable domain of TCR clone 140158 (TRBV28, TRBJ2-3)
CASSFGLYVGGADTQYF

SEQ ID NO: 280317 - protein, 12 aa, Homo sapiens
  CDR3 for alpha chain variable domain of TCR clone 140159 (TRAV27, TRAJ35)
CAGADFGNVLHC

SEQ ID NO: 280318 - protein, 15 aa, Homo sapiens
  CDR3 for beta chain variable domain of TCR clone 140159 (TRBV4-1, TRBJ1-2)
CASSLTTGQGYGYTF

SEQ ID NO: 280319 - protein, 14 aa, Homo sapiens
  CDR3 for alpha chain variable domain of TCR clone 140160 (TRAV13-1, TRAJ40)
CAASMTSGTYKYIF

SEQ ID NO: 280320 - protein, 14 aa, Homo sapiens
  CDR3 for beta chain variable domain of TCR clone 140160 (TRBV7-3, TRBJ2-1)
CQQPDGGVEVEQFF

SEQ ID NO: 280321 - protein, 18 aa, Homo sapiens
  CDR3 for alpha chain variable domain of TCR clone 140161 (TRAV21, TRAJ52)
CVVRPSPAGGTSYGKLTF

SEQ ID NO: 280322 - protein, 14 aa, Homo sapiens
  CDR3 for beta chain variable domain of TCR clone 140161 (TRBV13, TRBJ2-5)
CASSLERVGETQYF

SEQ ID NO: 280323 - protein, 13 aa, Homo sapiens
  CDR3 for alpha chain variable domain of TCR clone 140162 (TRAV3, TRAJ15)
GAVRDQPGTALIF

SEQ ID NO: 280324 - protein, 15 aa, Homo sapiens
  CDR3 for beta chain variable domain of TCR clone 140162 (TRBV11-1, TRBJ2-7)
CASSLNYGASYEQYF

SEQ ID NO: 280325 - protein, 12 aa, Homo sapiens
  CDR3 for alpha chain variable domain of TCR clone 140163 (TRAV3, TRAJ7)
CADLLWEQQTRF

SEQ ID NO: 280326 - protein, 13 aa, Homo sapiens
  CDR3 for beta chain variable domain of TCR clone 140163 (TRBV7-3, TRBJ2-5)
CASSFWGGETQYF

SEQ ID NO: 280327 - protein, 15 aa, Homo sapiens
  CDR3 for alpha chain variable domain of TCR clone 140164 (TRAV27, TRAJ38)
CAARRNACNNRKRIW

SEQ ID NO: 280328 - protein, 13 aa, Homo sapiens
  CDR3 for beta chain variable domain of TCR clone 140164 (TRBV12-5, TRBJ2-3)
CASGDRQSDTQYF

SEQ ID NO: 280329 - protein, 14 aa, Homo sapiens
  CDR3 for alpha chain variable domain of TCR clone 140165 (TRAV3, TRAJ36)
CAVRDGTGATNLFF

SEQ ID NO: 280330 - protein, 16 aa, Homo sapiens
  CDR3 for beta chain variable domain of TCR clone 140165 (TRBV7-3, TRBJ2-5)
CASIQPGGSVQETQYF

SEQ ID NO: 280331 - protein, 13 aa, Homo sapiens
  CDR3 for alpha chain variable domain of TCR clone 140166 (TRAV38-2/DV8, TRAJ34)
CAYRTWNTDTLIF

SEQ ID NO: 280332 - protein, 18 aa, Homo sapiens
  CDR3 for beta chain variable domain of TCR clone 140166 (TRBV6-6, TRBJ1-3)
CASSYSKWDSISGNTIYF

SEQ ID NO: 280333 - protein, 12 aa, Homo sapiens
  CDR3 for alpha chain variable domain of TCR clone 140167 (TRAV13-1, TRAJ21)
CAAKEGFNKFYF

SEQ ID NO: 280334 - protein, 14 aa, Homo sapiens
  CDR3 for beta chain variable domain of TCR clone 140167 (TRBV18, TRBJ2-7)
CASSPRGGAYEQYF

SEQ ID NO: 280335 - protein, 14 aa, Homo sapiens
  CDR3 for alpha chain variable domain of TCR clone 140168 (TRAV16, TRAJ17)
CAPRIKAAGNELTF

SEQ ID NO: 280336 - protein, 17 aa, Homo sapiens
  CDR3 for beta chain variable domain of TCR clone 140168 (TRBV7-2, TRBJ2-3)
CASSSYSGTRRADTQYF

SEQ ID NO: 280337 - protein, 16 aa, Homo sapiens
  CDR3 for alpha chain variable domain of TCR clone 140169 (TRAV3, TRAJ37)
CAVRGEGSGNTGKLIF

SEQ ID NO: 280338 - protein, 13 aa, Homo sapiens
  CDR3 for beta chain variable domain of TCR clone 140169 (TRBV7-3, TRBJ1-1)
CASSQDWGAEAFF

SEQ ID NO: 280339 - protein, 17 aa, Homo sapiens
  CDR3 for alpha chain variable domain of TCR clone 140170 (TRAV4, TRAJ18)
CLVGERSVGSTLGRLYF

SEQ ID NO: 280340 - protein, 15 aa, Homo sapiens
  CDR3 for beta chain variable domain of TCR clone 140170 (TRBV7-2, TRBJ2-7)
CASSSRALSSNQQYF

SEQ ID NO: 280341 - protein, 13 aa, Homo sapiens
  CDR3 for alpha chain variable domain of TCR clone 140171 (TRAV8-2, TRAJ49)
CVVSPSTGNQFFF

SEQ ID NO: 280342 - protein, 14 aa, Homo sapiens
  CDR3 for beta chain variable domain of TCR clone 140171 (TRBV11-2, TRBJ2-7)
CAGSRSGGAGEQYF

SEQ ID NO: 280343 - protein, 13 aa, Homo sapiens
  CDR3 for alpha chain variable domain of TCR clone 140172 (TRAV17, TRAJ5)
CATMDTGRRALTF

SEQ ID NO: 280344 - protein, 18 aa, Homo sapiens
  CDR3 for beta chain variable domain of TCR clone 140172 (TRBV7-9, TRBJ2-7)
CASSLTTSGSRTWYEQYF

SEQ ID NO: 280345 - protein, 14 aa, Homo sapiens
  CDR3 for alpha chain variable domain of TCR clone 140173 (TRAV12-1, TRAJ17)
CVVNYKAAGNKLTF

SEQ ID NO: 280346 - protein, 18 aa, Homo sapiens
  CDR3 for beta chain variable domain of TCR clone 140173 (TRBV20-1, TRBJ2-6)
CSAETTPTHGSGANVLTS

SEQ ID NO: 280347 - protein, 16 aa, Homo sapiens
  CDR3 for alpha chain variable domain of TCR clone 140174 (TRAV30, TRAJ24)
CGTEIVDAGSWGKFQF

SEQ ID NO: 280348 - protein, 14 aa, Homo sapiens
  CDR3 for beta chain variable domain of TCR clone 140174 (TRBV7-8, TRBJ2-3)
CASSLEAGTDTQYF

SEQ ID NO: 280349 - protein, 17 aa, Homo sapiens
  CDR3 for alpha chain variable domain of TCR clone 140175 (TRAV26-1, TRAJ53)
CIVRVDDSGGSNYNMTF

SEQ ID NO: 280350 - protein, 15 aa, Homo sapiens
  CDR3 for beta chain variable domain of TCR clone 140175 (TRBV20-1, TRBJ2-7)
CSARVPAAYFYEQYF

SEQ ID NO: 280351 - protein, 14 aa, Homo sapiens
  CDR3 for alpha chain variable domain of TCR clone 140176 (TRAV17, TRAJ23)
CATALGGQGGKLIF

SEQ ID NO: 280352 - protein, 13 aa, Homo sapiens
  CDR3 for beta chain variable domain of TCR clone 140176 (TRBV12-4, TRBJ2-5)
CASSPGTEETQYF

SEQ ID NO: 280353 - protein, 15 aa, Homo sapiens
  CDR3 for alpha chain variable domain of TCR clone 140177 (TRAV26-2, TRAJ39)
CSLRGNNNAGNMLTF

SEQ ID NO: 280354 - protein, 16 aa, Homo sapiens
  CDR3 for beta chain variable domain of TCR clone 140177 (TRBV12-4, TRBJ2-5)
CASSFFVRGRQETQYF

SEQ ID NO: 280355 - protein, 14 aa, Homo sapiens
  CDR3 for alpha chain variable domain of TCR clone 140178 (TRAV38-1, TRAJ40)
CALRPTSGTYKSIF

SEQ ID NO: 280356 - protein, 14 aa, Homo sapiens
  CDR3 for beta chain variable domain of TCR clone 140178 (TRBV19, TRBJ2-1)
CVSPTFVLSCEQFF

SEQ ID NO: 280357 - protein, 11 aa, Homo sapiens
  CDR3 for alpha chain variable domain of TCR clone 140179 (TRAV17, TRAJ9)
CATTGGFKTIF

SEQ ID NO: 280358 - protein, 14 aa, Homo sapiens
  CDR3 for beta chain variable domain of TCR clone 140179 (TRBV25-1, TRBJ1-1)
CASTHLGGNTEAFF

SEQ ID NO: 280359 - protein, 14 aa, Homo sapiens
  CDR3 for alpha chain variable domain of TCR clone 140180 (TRAV14/DV4, TRAJ9)
CAMRESTGGFKTIF

SEQ ID NO: 280360 - protein, 19 aa, Homo sapiens
  CDR3 for beta chain variable domain of TCR clone 140180 (TRBV19, TRBJ2-2)
CASTRPGLAGGSVTGELFF

SEQ ID NO: 280361 - protein, 14 aa, Homo sapiens
  CDR3 for alpha chain variable domain of TCR clone 140181 (TRAV1-2, TRAJ16)
CAVNRFSDGQKLLL

SEQ ID NO: 280362 - protein, 17 aa, Homo sapiens
  CDR3 for beta chain variable domain of TCR clone 140181 (TRBV7-3, TRBJ2-3)
CASSLMKRMRGADTQYF

SEQ ID NO: 280363 - protein, 15 aa, Homo sapiens
  CDR3 for alpha chain variable domain of TCR clone 140182 (TRAV17, TRAJ13)
CSTDAGSGGYQKVTF

SEQ ID NO: 280364 - protein, 17 aa, Homo sapiens
  CDR3 for beta chain variable domain of TCR clone 140182 (TRBV11-2, TRBJ2-1)
CASSLSPPGVEYNEQFF

SEQ ID NO: 280365 - protein, 14 aa, Homo sapiens
  CDR3 for alpha chain variable domain of TCR clone 140183 (TRAV1-2, TRAJ16)
CAVNRFSDGQKLLF

SEQ ID NO: 280366 - protein, 13 aa, Homo sapiens
  CDR3 for beta chain variable domain of TCR clone 140183 (TRBV5-1, TRBJ1-1)
CATSTRDGTEAFF

SEQ ID NO: 280367 - protein, 14 aa, Homo sapiens
  CDR3 for alpha chain variable domain of TCR clone 140184 (TRAV35, TRAJ38)
SAGSNAGNNRKLIW

SEQ ID NO: 280368 - protein, 12 aa, Homo sapiens
  CDR3 for beta chain variable domain of TCR clone 140184 (TRBV19, TRBJ2-7)
CASTDRGYEQYF

SEQ ID NO: 280369 - protein, 14 aa, Homo sapiens
  CDR3 for alpha chain variable domain of TCR clone 140185 (TRAV17, TRAJ39)
CATDPVRAGNMPTF

SEQ ID NO: 280370 - protein, 13 aa, Homo sapiens
  CDR3 for beta chain variable domain of TCR clone 140185 (TRBV19, TRBJ1-2)
CASSVPGQDGYTF

SEQ ID NO: 280371 - protein, 13 aa, Homo sapiens
  CDR3 for alpha chain variable domain of TCR clone 140186 (TRAV8-2, TRAJ47)
CAVSEREGNKLVF

SEQ ID NO: 280372 - protein, 16 aa, Homo sapiens
  CDR3 for beta chain variable domain of TCR clone 140186 (TRBV5-1, TRBJ1-1)
CASSKTGTEVGTEAFF

SEQ ID NO: 280373 - protein, 18 aa, Homo sapiens
  CDR3 for alpha chain variable domain of TCR clone 140187 (TRAV13-1, TRAJ52)
CAAKNPNAGGTSYGKLTF

SEQ ID NO: 280374 - protein, 18 aa, Homo sapiens
  CDR3 for beta chain variable domain of TCR clone 140187 (TRBV12-4, TRBJ2-4)
CASSRTGAVYVAKNMQYF

SEQ ID NO: 280375 - protein, 15 aa, Homo sapiens
  CDR3 for alpha chain variable domain of TCR clone 140188 (TRAV8-3, TRAJ23)
CAVGDRYNQGGKLIF

SEQ ID NO: 280376 - protein, 20 aa, Homo sapiens
  CDR3 for beta chain variable domain of TCR clone 140188 (TRBV29-1, TRBJ2-5)
CNMSPEDSSIYLCSAGTQYF

SEQ ID NO: 280377 - protein, 13 aa, Homo sapiens
  CDR3 for alpha chain variable domain of TCR clone 140189 (TRAV12-2, TRAJ35)
CAGAGGFGNVLHC

SEQ ID NO: 280378 - protein, 15 aa, Homo sapiens
  CDR3 for beta chain variable domain of TCR clone 140189 (TRBV20-1, TRBJ1-1)
CSASRGVTGNTEAFF

SEQ ID NO: 280379 - protein, 12 aa, Homo sapiens
  CDR3 for alpha chain variable domain of TCR clone 140190 (TRAV26-1, TRAJ36)
CIVRVRADNLFF

SEQ ID NO: 280380 - protein, 13 aa, Homo sapiens
  CDR3 for beta chain variable domain of TCR clone 140190 (TRBV7-3, TRBJ2-7)
CASSQAGGYEQYF

SEQ ID NO: 280381 - protein, 15 aa, Homo sapiens
  CDR3 for alpha chain variable domain of TCR clone 140191 (TRAV4, TRAJ39)
CLVGPNNNAGNMLTF

SEQ ID NO: 280382 - protein, 14 aa, Homo sapiens
  CDR3 for beta chain variable domain of TCR clone 140191 (TRBV19, TRBJ2-1)
CASPTFVFSGEQFF

SEQ ID NO: 280383 - protein, 11 aa, Homo sapiens
  CDR3 for alpha chain variable domain of TCR clone 140192 (TRAV1-2, TRAJ34)
CAGYNTDKLIF

SEQ ID NO: 280384 - protein, 14 aa, Homo sapiens
  CDR3 for beta chain variable domain of TCR clone 140192 (TRBV6-1, TRBJ1-3)
CASVQGGGGNTIYF

SEQ ID NO: 280385 - protein, 12 aa, Homo sapiens
  CDR3 for alpha chain variable domain of TCR clone 140193 (TRAV12-2, TRAJ45)
CAVTGGADGLTF

SEQ ID NO: 280386 - protein, 17 aa, Homo sapiens
  CDR3 for beta chain variable domain of TCR clone 140193 (TRBV7-9, TRBJ2-3)
CASSLEEAGAYPDTQYF

SEQ ID NO: 280387 - protein, 15 aa, Homo sapiens
  CDR3 for alpha chain variable domain of TCR clone 140194 (TRAV3, TRAJ27)
CAVRDPLTNAGKSTF

SEQ ID NO: 280388 - protein, 15 aa, Homo sapiens
  CDR3 for beta chain variable domain of TCR clone 140194 (TRBV28, TRBJ2-1)
CASSIIAGGRSERFF

SEQ ID NO: 280389 - protein, 13 aa, Homo sapiens
  CDR3 for alpha chain variable domain of TCR clone 140195 (TRAV21, TRAJ27)
CAARPGNAGKSTF

SEQ ID NO: 280390 - protein, 13 aa, Homo sapiens
  CDR3 for beta chain variable domain of TCR clone 140195 (TRBV7-3, TRBJ1-1)
CASSQDWWAEAFF

SEQ ID NO: 280391 - protein, 16 aa, Homo sapiens
  CDR3 for alpha chain variable domain of TCR clone 140196 (TRAV14/DV4, TRAJ12)
CAMREVLMDSSYKLIF

SEQ ID NO: 280392 - protein, 14 aa, Homo sapiens
  CDR3 for beta chain variable domain of TCR clone 140196 (TRBV11-3, TRBJ1-1)
CASSPGAWNTEAFF

SEQ ID NO: 280393 - protein, 14 aa, Homo sapiens
  CDR3 for alpha chain variable domain of TCR clone 140197 (TRAV13-2, TRAJ39)
GDAVRNNAGNMLTF

SEQ ID NO: 280394 - protein, 13 aa, Homo sapiens
  CDR3 for beta chain variable domain of TCR clone 140197 (TRBV20-1, TRBJ2-7)
CSAPGLADYEQYF

SEQ ID NO: 280395 - protein, 15 aa, Homo sapiens
  CDR3 for alpha chain variable domain of TCR clone 140198 (TRAV17, TRAJ56)
TSVLRTPGANSKLTF

SEQ ID NO: 280396 - protein, 14 aa, Homo sapiens
  CDR3 for beta chain variable domain of TCR clone 140198 (TRBV7-2, TRBJ2-7)
CAIRSQGAAYEQYF

SEQ ID NO: 280397 - protein, 14 aa, Homo sapiens
  CDR3 for alpha chain variable domain of TCR clone 140199 (TRAV8-1, TRAJ23)
CAVGTYNQGGKLLF

SEQ ID NO: 280398 - protein, 16 aa, Homo sapiens
  CDR3 for beta chain variable domain of TCR clone 140199 (TRBV18, TRBJ1-5)
CASSPSTGNSNQPQHF

SEQ ID NO: 280399 - protein, 18 aa, Homo sapiens
  CDR3 for alpha chain variable domain of TCR clone 140200 (TRAV21, TRAJ52)
CAVRPSPAGGTSYGKLTF

SEQ ID NO: 280400 - protein, 14 aa, Homo sapiens
  CDR3 for beta chain variable domain of TCR clone 140200 (TRBV4-3, TRBJ2-7)
CASSQDVAGGEQYF

SEQ ID NO: 280401 - protein, 12 aa, Homo sapiens
  CDR3 for alpha chain variable domain of TCR clone 140201 (TRAV13-1, TRAJ15)
CAASQAGTALIF

SEQ ID NO: 280402 - protein, 14 aa, Homo sapiens
  CDR3 for beta chain variable domain of TCR clone 140201 (TRBV19, TRBJ2-2)
CASSTLHMSGELFF

SEQ ID NO: 280403 - protein, 14 aa, Homo sapiens
  CDR3 for alpha chain variable domain of TCR clone 140202 (TRAV13-1, TRAJ35)
WAASKGGFGNVLHC

SEQ ID NO: 280404 - protein, 13 aa, Homo sapiens
  CDR3 for beta chain variable domain of TCR clone 140202 (TRBV7-3, TRBJ1-1)
CASSQGWGAEAFF

SEQ ID NO: 280405 - protein, 11 aa, Homo sapiens
  CDR3 for alpha chain variable domain of TCR clone 140203 (TRAV12-1, TRAJ34)
CAVNKGRELIF

SEQ ID NO: 280406 - protein, 12 aa, Homo sapiens
  CDR3 for beta chain variable domain of TCR clone 140203 (TRBV2, TRBJ2-1)
CAYGPPGNEQFF

SEQ ID NO: 280407 - protein, 14 aa, Homo sapiens
  CDR3 for alpha chain variable domain of TCR clone 140204 (TRAV2, TRAJ37)
CAVDFTSNTGKLIF

SEQ ID NO: 280408 - protein, 15 aa, Homo sapiens
  CDR3 for beta chain variable domain of TCR clone 140204 (TRBV20-1, TRBJ1-1)
CSASPGVTGNTEAFF

SEQ ID NO: 280409 - protein, 12 aa, Homo sapiens
  CDR3 for alpha chain variable domain of TCR clone 140205 (TRAV12-2, TRAJ10)
WGVTGGGNKLTF

SEQ ID NO: 280410 - protein, 16 aa, Homo sapiens
  CDR3 for beta chain variable domain of TCR clone 140205 (TRBV2, TRBJ1-5)
CASSEGGFYSDQPQHF

SEQ ID NO: 280411 - protein, 13 aa, Homo sapiens
  CDR3 for alpha chain variable domain of TCR clone 140206 (TRAV12-3, TRAJ56)
CALATGANSKLTF

SEQ ID NO: 280412 - protein, 12 aa, Homo sapiens
  CDR3 for beta chain variable domain of TCR clone 140206 (TRBV10-2, TRBJ2-3)
CASGPESDTQYF

SEQ ID NO: 280413 - protein, 16 aa, Homo sapiens
  CDR3 for alpha chain variable domain of TCR clone 140207 (TRAV12-2, TRAJ32)
CAVNLGQGGATTKLSF

SEQ ID NO: 280414 - protein, 15 aa, Homo sapiens
  CDR3 for beta chain variable domain of TCR clone 140207 (TRBV20-1, TRBJ2-7)
CSARGPLAGGREQYF

SEQ ID NO: 280415 - protein, 19 aa, Homo sapiens
  CDR3 for alpha chain variable domain of TCR clone 140208 (TRAV27, TRAJ53)
ASASVQSRNSGGSNYKLTF

SEQ ID NO: 280416 - protein, 14 aa, Homo sapiens
  CDR3 for beta chain variable domain of TCR clone 140208 (TRBV11-1, TRBJ2-7)
CASTFAVPSYEQYS

SEQ ID NO: 280417 - protein, 10 aa, Homo sapiens
  CDR3 for alpha chain variable domain of TCR clone 140209 (TRAV8-1, TRAJ43)
CAVNVDDMRF

SEQ ID NO: 280418 - protein, 12 aa, Homo sapiens
  CDR3 for beta chain variable domain of TCR clone 140209 (TRBV5-5, TRBJ2-5)
CASSYFGETQYF

SEQ ID NO: 280419 - protein, 14 aa, Homo sapiens
  CDR3 for alpha chain variable domain of TCR clone 140210 (TRAV1-2, TRAJ16)
CAVNRFSDGQKLLF

SEQ ID NO: 280420 - protein, 18 aa, Homo sapiens
  CDR3 for beta chain variable domain of TCR clone 140210 (TRBV20-1, TRBJ2-6)
CSAETTPSHGSGANVLTF

SEQ ID NO: 280421 - protein, 11 aa, Homo sapiens
  CDR3 for alpha chain variable domain of TCR clone 140211 (TRAV2, TRAJ13)
CASGGYQKVTF

SEQ ID NO: 280422 - protein, 16 aa, Homo sapiens
  CDR3 for beta chain variable domain of TCR clone 140211 (TRBV4-1, TRBJ2-4)
CASSLLRGTAKNIQYF

SEQ ID NO: 280423 - protein, 12 aa, Homo sapiens
  CDR3 for alpha chain variable domain of TCR clone 140212 (TRAV12-1, TRAJ9)
CVVPWAGFKTIF

SEQ ID NO: 280424 - protein, 15 aa, Homo sapiens
  CDR3 for beta chain variable domain of TCR clone 140212 (TRBV10-2, TRBJ2-6)
CASSEQGTGANVLTF

SEQ ID NO: 280425 - protein, 14 aa, Homo sapiens
  CDR3 for alpha chain variable domain of TCR clone 140213 (TRAV35, TRAJ40)
CAGSTTSGTYKYIF

SEQ ID NO: 280426 - protein, 14 aa, Homo sapiens
  CDR3 for beta chain variable domain of TCR clone 140213 (TRBV20-1, TRBJ1-1)
CSAQTRIGGTEAFF

SEQ ID NO: 280427 - protein, 17 aa, Homo sapiens
  CDR3 for alpha chain variable domain of TCR clone 140214 (TRAV23/DV6, TRAJ57)
CAASSTLSQGGSEKLVF

SEQ ID NO: 280428 - protein, 14 aa, Homo sapiens
  CDR3 for beta chain variable domain of TCR clone 140214 (TRBV28, TRBJ1-5)
CASSGQALYQPQHF

SEQ ID NO: 280429 - protein, 14 aa, Homo sapiens
  CDR3 for alpha chain variable domain of TCR clone 140215 (TRAV12-2, TRAJ13)
CAVKKTVGYHKVTF

SEQ ID NO: 280430 - protein, 16 aa, Homo sapiens
  CDR3 for beta chain variable domain of TCR clone 140215 (TRBV12-4, TRBJ2-5)
CASSFFVRGRQETQYF

SEQ ID NO: 280431 - protein, 11 aa, Homo sapiens
  CDR3 for alpha chain variable domain of TCR clone 140216 (TRAV21, TRAJ9)
CAVPGGFKTIS

SEQ ID NO: 280432 - protein, 17 aa, Homo sapiens
  CDR3 for beta chain variable domain of TCR clone 140216 (TRBV7-9, TRBJ2-5)
CAASGGARDPVLRARHA

SEQ ID NO: 280433 - protein, 14 aa, Homo sapiens
  CDR3 for alpha chain variable domain of TCR clone 140217 (TRAV1-2, TRAJ8)
CAVREDTGSQKLVF

SEQ ID NO: 280434 - protein, 15 aa, Homo sapiens
  CDR3 for beta chain variable domain of TCR clone 140217 (TRBV7-9, TRBJ1-5)
CAGSQGHQPNQPQHF

SEQ ID NO: 280435 - protein, 13 aa, Homo sapiens
  CDR3 for alpha chain variable domain of TCR clone 140218 (TRAV27, TRAJ17)
RAGAATAGNKLTF

SEQ ID NO: 280436 - protein, 15 aa, Homo sapiens
  CDR3 for beta chain variable domain of TCR clone 140218 (TRBV5-1, TRBJ2-3)
CASRNQAGSTDTQYF

SEQ ID NO: 280437 - protein, 14 aa, Homo sapiens
  CDR3 for alpha chain variable domain of TCR clone 140219 (TRAV4, TRAJ43)
CLVGPMYNNNEMRF

SEQ ID NO: 280438 - protein, 14 aa, Homo sapiens
  CDR3 for beta chain variable domain of TCR clone 140219 (TRBV7-8, TRBJ2-3)
CASSLEAGTDTQYF

SEQ ID NO: 280439 - protein, 14 aa, Homo sapiens
  CDR3 for alpha chain variable domain of TCR clone 140220 (TRAV8-3, TRAJ6)
CAVGASGGSYIPTF

SEQ ID NO: 280440 - protein, 17 aa, Homo sapiens
  CDR3 for beta chain variable domain of TCR clone 140220 (TRBV18, TRBJ2-2)
CTSSPSDPWQNTGELFF

SEQ ID NO: 280441 - protein, 13 aa, Homo sapiens
  CDR3 for alpha chain variable domain of TCR clone 140221 (TRAV25, TRAJ30)
CAGRGDRDDKIIF

SEQ ID NO: 280442 - protein, 17 aa, Homo sapiens
  CDR3 for beta chain variable domain of TCR clone 140221 (TRBV7-9, TRBJ2-6)
CASSFGAGYSGANVLTF

SEQ ID NO: 280443 - protein, 14 aa, Homo sapiens
  CDR3 for alpha chain variable domain of TCR clone 140222 (TRAV9-2, TRAJ39)
CALYIYNAGNMLTF

SEQ ID NO: 280444 - protein, 15 aa, Homo sapiens
  CDR3 for beta chain variable domain of TCR clone 140222 (TRBV27, TRBJ1-6)
CASSCDRGLGSPLHF

SEQ ID NO: 280445 - protein, 11 aa, Homo sapiens
  CDR3 for alpha chain variable domain of TCR clone 140223 (TRAV17, TRAJ31)
CATSNNARLMF

SEQ ID NO: 280446 - protein, 16 aa, Homo sapiens
  CDR3 for beta chain variable domain of TCR clone 140223 (TRBV7-8, TRBJ2-4)
CASSGERTLAKNIQYF

SEQ ID NO: 280447 - protein, 12 aa, Homo sapiens
  CDR3 for alpha chain variable domain of TCR clone 140224 (TRAV8-3, TRAJ20)
CAVGANDYKLSF

SEQ ID NO: 280448 - protein, 16 aa, Homo sapiens
  CDR3 for beta chain variable domain of TCR clone 140224 (TRBV5-1, TRBJ2-7)
CASSWGTGGRAWEQYF

SEQ ID NO: 280449 - protein, 13 aa, Homo sapiens
  CDR3 for alpha chain variable domain of TCR clone 140225 (TRAV23/DV6, TRAJ47)
CAARIRNGIWKQT

SEQ ID NO: 280450 - protein, 13 aa, Homo sapiens
  CDR3 for beta chain variable domain of TCR clone 140225 (TRBV19, TRBJ1-2)
CASSQGQVYGYTF

SEQ ID NO: 280451 - protein, 13 aa, Homo sapiens
  CDR3 for alpha chain variable domain of TCR clone 140226 (TRAV20, TRAJ37)
CAGCSSNTGKLIF

SEQ ID NO: 280452 - protein, 15 aa, Homo sapiens
  CDR3 for beta chain variable domain of TCR clone 140226 (TRBV5-5, TRBJ1-5)
CASSSTPGSNQPQHF

SEQ ID NO: 280453 - protein, 16 aa, Homo sapiens
  CDR3 for alpha chain variable domain of TCR clone 140227 (TRAV20, TRAJ16)
CAVQDKRFSDGQKLLL

SEQ ID NO: 280454 - protein, 15 aa, Homo sapiens
  CDR3 for beta chain variable domain of TCR clone 140227 (TRBV27, TRBJ1-6)
CASSFDRGLGSPLHF

SEQ ID NO: 280455 - protein, 12 aa, Homo sapiens
  CDR3 for alpha chain variable domain of TCR clone 140228 (TRAV21, TRAJ33)
CAVQDSDYQLIW

SEQ ID NO: 280456 - protein, 14 aa, Homo sapiens
  CDR3 for beta chain variable domain of TCR clone 140228 (TRBV28, TRBJ2-1)
CASSPGEGVNEQFF

SEQ ID NO: 280457 - protein, 13 aa, Homo sapiens
  CDR3 for alpha chain variable domain of TCR clone 140229 (TRAV3, TRAJ21)
CAVREPDFNKFYF

SEQ ID NO: 280458 - protein, 16 aa, Homo sapiens
  CDR3 for beta chain variable domain of TCR clone 140229 (TRBV11-2, TRBJ2-2)
CASRKPGQGFTGELFF

SEQ ID NO: 280459 - protein, 15 aa, Homo sapiens
  CDR3 for alpha chain variable domain of TCR clone 140230 (TRAV2, TRAJ15)
CAVEDREQAGTALIF

SEQ ID NO: 280460 - protein, 14 aa, Homo sapiens
  CDR3 for beta chain variable domain of TCR clone 140230 (TRBV19, TRBJ2-1)
CASGRAGPGNEQFF

SEQ ID NO: 280461 - protein, 14 aa, Homo sapiens
  CDR3 for alpha chain variable domain of TCR clone 140231 (TRAV1-2, TRAJ8)
RAVREDTGFQKLVF

SEQ ID NO: 280462 - protein, 15 aa, Homo sapiens
  CDR3 for beta chain variable domain of TCR clone 140231 (TRBV11-3, TRBJ2-1)
CASSLGDSSHNEQFF

SEQ ID NO: 280463 - protein, 15 aa, Homo sapiens
  CDR3 for alpha chain variable domain of TCR clone 140232 (TRAV17, TRAJ35)
CATAFVIGVGNVLHC

SEQ ID NO: 280464 - protein, 15 aa, Homo sapiens
  CDR3 for beta chain variable domain of TCR clone 140232 (TRBV7-9, TRBJ2-7)
CASSLALAEAYEQYF

SEQ ID NO: 280465 - protein, 14 aa, Homo sapiens
  CDR3 for alpha chain variable domain of TCR clone 140233 (TRAV22, TRAJ21)
CACRGGYNFNKFYF

SEQ ID NO: 280466 - protein, 12 aa, Homo sapiens
  CDR3 for beta chain variable domain of TCR clone 140233 (TRBV7-9, TRBJ2-7)
CASSLEGYEQYF

SEQ ID NO: 280467 - protein, 16 aa, Homo sapiens
  CDR3 for alpha chain variable domain of TCR clone 140234 (TRAV12-2, TRAJ45)
CAVNRGSGGGADGLTF

SEQ ID NO: 280468 - protein, 15 aa, Homo sapiens
  CDR3 for beta chain variable domain of TCR clone 140234 (TRBV9, TRBJ1-4)
CASSGTGGAYETLLF

SEQ ID NO: 280469 - protein, 12 aa, Homo sapiens
  CDR3 for alpha chain variable domain of TCR clone 140235 (TRAV12-2, TRAJ44)
CADTGTASNLTF

SEQ ID NO: 280470 - protein, 17 aa, Homo sapiens
  CDR3 for beta chain variable domain of TCR clone 140235 (TRBV20-1, TRBJ1-1)
CSARGTGGAYGNTGAFF

SEQ ID NO: 280471 - protein, 13 aa, Homo sapiens
  CDR3 for alpha chain variable domain of TCR clone 140236 (TRAV8-6, TRAJ33)
CAVSEDSNYQLIW

SEQ ID NO: 280472 - protein, 14 aa, Homo sapiens
  CDR3 for beta chain variable domain of TCR clone 140236 (TRBV4-1, TRBJ2-2)
CASSQAVNTGELFF

SEQ ID NO: 280473 - protein, 14 aa, Homo sapiens
  CDR3 for alpha chain variable domain of TCR clone 140237 (TRAV16, TRAJ15)
CALSFNQAGTALIF

SEQ ID NO: 280474 - protein, 16 aa, Homo sapiens
  CDR3 for beta chain variable domain of TCR clone 140237 (TRBV27, TRBJ2-5)
CASSFGPGGTKETQYF

SEQ ID NO: 280475 - protein, 16 aa, Homo sapiens
  CDR3 for alpha chain variable domain of TCR clone 140238 (TRAV12-2, TRAJ40)
CAVIRGGTSGTYKYSF

SEQ ID NO: 280476 - protein, 14 aa, Homo sapiens
  CDR3 for beta chain variable domain of TCR clone 140238 (TRBV20-1, TRBJ2-5)
CSARDGRAGETQYF

SEQ ID NO: 280477 - protein, 11 aa, Homo sapiens
  CDR3 for alpha chain variable domain of TCR clone 140239 (TRAV21, TRAJ34)
CAHYNTDKLIF

SEQ ID NO: 280478 - protein, 22 aa, Homo sapiens
  CDR3 for beta chain variable domain of TCR clone 140239 (TRBV6-1, TRBJ1-3)
CASVQGGGWKHHIFWRGKLAHC

SEQ ID NO: 280479 - protein, 14 aa, Homo sapiens
  CDR3 for alpha chain variable domain of TCR clone 140240 (TRAV1-1, TRAJ27)
CAVIYNTKAGKSTF

SEQ ID NO: 280480 - protein, 15 aa, Homo sapiens
  CDR3 for beta chain variable domain of TCR clone 140240 (TRBV7-2, TRBJ2-1)
CASSSGLAGGNEQFF

SEQ ID NO: 280481 - protein, 12 aa, Homo sapiens
  CDR3 for alpha chain variable domain of TCR clone 140241 (TRAV27, TRAJ35)
CAGADFGNVLHC

SEQ ID NO: 280482 - protein, 16 aa, Homo sapiens
  CDR3 for beta chain variable domain of TCR clone 140241 (TRBV6-1, TRBJ2-1)
CVSISRQGSSYNEQFF

SEQ ID NO: 280483 - protein, 20 aa, Homo sapiens
  CDR3 for alpha chain variable domain of TCR clone 140242 (TRAV25, TRAJ21)
TATQTTDVGTSPLSFNKFYF

SEQ ID NO: 280484 - protein, 14 aa, Homo sapiens
  CDR3 for beta chain variable domain of TCR clone 140242 (TRBV6-1, TRBJ2-1)
CASAKDGFYNEQFF

SEQ ID NO: 280485 - protein, 13 aa, Homo sapiens
  CDR3 for alpha chain variable domain of TCR clone 140243 (TRAV36/DV7, TRAJ54)
CAVLIQGAQRLVF

SEQ ID NO: 280486 - protein, 13 aa, Homo sapiens
  CDR3 for beta chain variable domain of TCR clone 140243 (TRBV29-1, TRBJ2-4)
CSVGEGTKNIQYF

SEQ ID NO: 280487 - protein, 15 aa, Homo sapiens
  CDR3 for alpha chain variable domain of TCR clone 140244 (TRAV12-2, TRAJ53)
CAVNGGGGSNYKLTF

SEQ ID NO: 280488 - protein, 14 aa, Homo sapiens
  CDR3 for beta chain variable domain of TCR clone 140244 (TRBV5-4, TRBJ1-1)
CASSLDSRRDEAFF

SEQ ID NO: 280489 - protein, 14 aa, Homo sapiens
  CDR3 for alpha chain variable domain of TCR clone 140245 (TRAV27, TRAJ40)
CAGSLLRGTYKYIF

SEQ ID NO: 280490 - protein, 15 aa, Homo sapiens
  CDR3 for beta chain variable domain of TCR clone 140245 (TRBV6-3, TRBJ1-4)
CASSSPGQENEKLVF

SEQ ID NO: 280491 - protein, 17 aa, Homo sapiens
  CDR3 for alpha chain variable domain of TCR clone 140246 (TRAV3, TRAJ6)
CAVRDGPKAGGSYIPTF

SEQ ID NO: 280492 - protein, 13 aa, Homo sapiens
  CDR3 for beta chain variable domain of TCR clone 140246 (TRBV27, TRBJ2-1)
CASRTLGVGEQFF

SEQ ID NO: 280493 - protein, 15 aa, Homo sapiens
  CDR3 for alpha chain variable domain of TCR clone 140247 (TRAV12-1, TRAJ44)
CVVFVNTGTASKLTF

SEQ ID NO: 280494 - protein, 16 aa, Homo sapiens
  CDR3 for beta chain variable domain of TCR clone 140247 (TRBV12-5, TRBJ2-5)
CASGPRTSGNQETQYF

SEQ ID NO: 280495 - protein, 14 aa, Homo sapiens
  CDR3 for alpha chain variable domain of TCR clone 140248 (TRAV12-3, TRAJ42)
CAMNYGGSQGNLIF

SEQ ID NO: 280496 - protein, 15 aa, Homo sapiens
  CDR3 for beta chain variable domain of TCR clone 140248 (TRBV19, TRBJ1-1)
CASTSGQIQNTEAFF

SEQ ID NO: 280497 - protein, 17 aa, Homo sapiens
  CDR3 for alpha chain variable domain of TCR clone 140249 (TRAV3, TRAJ6)
CSVRDGPRAGGSYIPTF

SEQ ID NO: 280498 - protein, 14 aa, Homo sapiens
  CDR3 for beta chain variable domain of TCR clone 140249 (TRBV7-2, TRBJ2-7)
CASSPKTSFYEQYL

SEQ ID NO: 280499 - protein, 13 aa, Homo sapiens
  CDR3 for alpha chain variable domain of TCR clone 140250 (TRAV8-6, TRAJ8)
CAVSNTGFQKLVF

SEQ ID NO: 280500 - protein, 15 aa, Homo sapiens
  CDR3 for beta chain variable domain of TCR clone 140250 (TRBV28, TRBJ2-5)
GASSSGRTIQETQYF

SEQ ID NO: 280501 - protein, 13 aa, Homo sapiens
  CDR3 for alpha chain variable domain of TCR clone 140251 (TRAV13-1, TRAJ9)
CAASGTGGFKAIF

SEQ ID NO: 280502 - protein, 13 aa, Homo sapiens
  CDR3 for beta chain variable domain of TCR clone 140251 (TRBV12-4, TRBJ2-7)
CASSLEMVREQYF

SEQ ID NO: 280503 - protein, 15 aa, Homo sapiens
  CDR3 for alpha chain variable domain of TCR clone 140252 (TRAV16, TRAJ12)
CSKWPLRDSSYKLIF

SEQ ID NO: 280504 - protein, 14 aa, Homo sapiens
  CDR3 for beta chain variable domain of TCR clone 140252 (TRBV7-9, TRBJ2-2)
CASSLVQDTGELFF

SEQ ID NO: 280505 - protein, 12 aa, Homo sapiens
  CDR3 for alpha chain variable domain of TCR clone 140253 (TRAV12-3, TRAJ3)
CAIDSSASKIIV

SEQ ID NO: 280506 - protein, 17 aa, Homo sapiens
  CDR3 for beta chain variable domain of TCR clone 140253 (TRBV7-9, TRBJ2-3)
CASSLEEAGAYPDTQYF

SEQ ID NO: 280507 - protein, 14 aa, Homo sapiens
  CDR3 for alpha chain variable domain of TCR clone 140254 (TRAV26-1, TRAJ40)
CIANPYSGTYKYIF

SEQ ID NO: 280508 - protein, 16 aa, Homo sapiens
  CDR3 for beta chain variable domain of TCR clone 140254 (TRBV7-9, TRBJ2-2)
CASSGFGGANTGELFF

SEQ ID NO: 280509 - protein, 18 aa, Homo sapiens
  CDR3 for alpha chain variable domain of TCR clone 140255 (TRAV29/DV5, TRAJ52)
CVAGFRGASGTSYGKLTF

SEQ ID NO: 280510 - protein, 16 aa, Homo sapiens
  CDR3 for beta chain variable domain of TCR clone 140255 (TRBV7-3, TRBJ2-2)
CASSLKRGTLSGELFF

SEQ ID NO: 280511 - protein, 13 aa, Homo sapiens
  CDR3 for alpha chain variable domain of TCR clone 140256 (TRAV1-2, TRAJ9)
CAALNTGGFKTIF

SEQ ID NO: 280512 - protein, 16 aa, Homo sapiens
  CDR3 for beta chain variable domain of TCR clone 140256 (TRBV11-1, TRBJ1-1)
CASSPRGAHMNSEAFF

SEQ ID NO: 280513 - protein, 13 aa, Homo sapiens
  CDR3 for alpha chain variable domain of TCR clone 140257 (TRAV27, TRAJ41)
CAGEGNSGYALNF

SEQ ID NO: 280514 - protein, 14 aa, Homo sapiens
  CDR3 for beta chain variable domain of TCR clone 140257 (TRBV11-3, TRBJ1-5)
CASSSRTGNQPQHF

SEQ ID NO: 280515 - protein, 11 aa, Homo sapiens
  CDR3 for alpha chain variable domain of TCR clone 140258 (TRAV21, TRAJ34)
CAVTNTDKLIF

SEQ ID NO: 280516 - protein, 16 aa, Homo sapiens
  CDR3 for beta chain variable domain of TCR clone 140258 (TRBV18, TRBJ1-1)
CSSSPGVGGRGGEAFF

SEQ ID NO: 280517 - protein, 13 aa, Homo sapiens
  CDR3 for alpha chain variable domain of TCR clone 140259 (TRAV8-3, TRAJ48)
CAVVPFGNEKLTF

SEQ ID NO: 280518 - protein, 15 aa, Homo sapiens
  CDR3 for beta chain variable domain of TCR clone 140259 (TRBV20-1, TRBJ2-7)
CSARDRVSGMDEQYF

SEQ ID NO: 280519 - protein, 16 aa, Homo sapiens
  CDR3 for alpha chain variable domain of TCR clone 140260 (TRAV12-1, TRAJ43)
CVVNPHRFGAGTRLTV

SEQ ID NO: 280520 - protein, 13 aa, Homo sapiens
  CDR3 for beta chain variable domain of TCR clone 140260 (TRBV12-4, TRBJ1-2)
CASSSGPNYSYTF

SEQ ID NO: 280521 - protein, 23 aa, Homo sapiens
  CDR3 for alpha chain variable domain of TCR clone 140261 (TRAV1-1, TRAJ29)
LLQELQMKDSASYFLGGNTPLVF

SEQ ID NO: 280522 - protein, 13 aa, Homo sapiens
  CDR3 for beta chain variable domain of TCR clone 140261 (TRBV25-1, TRBJ2-7)
CASSEDGDYERYF

SEQ ID NO: 280523 - protein, 16 aa, Homo sapiens
  CDR3 for alpha chain variable domain of TCR clone 140262 (TRAV3, TRAJ21)
CSVRDIERGNFNKFYF

SEQ ID NO: 280524 - protein, 14 aa, Homo sapiens
  CDR3 for beta chain variable domain of TCR clone 140262 (TRBV12-4, TRBJ2-5)
CASSLSSGRETQYF

SEQ ID NO: 280525 - protein, 15 aa, Homo sapiens
  CDR3 for alpha chain variable domain of TCR clone 140263 (TRAV8-3, TRAJ45)
CASSYSGGGADGLTF

SEQ ID NO: 280526 - protein, 13 aa, Homo sapiens
  CDR3 for beta chain variable domain of TCR clone 140263 (TRBV19, TRBJ2-1)
CASSRAPYNEQFF

SEQ ID NO: 280527 - protein, 14 aa, Homo sapiens
  CDR3 for alpha chain variable domain of TCR clone 140264 (TRAV17, TRAJ49)
CASDARDTGNQFYF

SEQ ID NO: 280528 - protein, 14 aa, Homo sapiens
  CDR3 for beta chain variable domain of TCR clone 140264 (TRBV5-5, TRBJ1-2)
CASSFGQINYGYTF

SEQ ID NO: 280529 - protein, 14 aa, Homo sapiens
  CDR3 for alpha chain variable domain of TCR clone 140265 (TRAV25, TRAJ35)
CARRMEGFGNMLHC

SEQ ID NO: 280530 - protein, 13 aa, Homo sapiens
  CDR3 for beta chain variable domain of TCR clone 140265 (TRBV7-2, TRBJ1-4)
CASSLAGLEKLFF

SEQ ID NO: 280531 - protein, 12 aa, Homo sapiens
  CDR3 for alpha chain variable domain of TCR clone 140266 (TRAV12-3, TRAJ31)
CAMSVPNARLMF

SEQ ID NO: 280532 - protein, 12 aa, Homo sapiens
  CDR3 for beta chain variable domain of TCR clone 140266 (TRBV11-2, TRBJ2-1)
CASSVQRGGQFF

SEQ ID NO: 280533 - protein, 21 aa, Homo sapiens
  CDR3 for alpha chain variable domain of TCR clone 140267 (TRAV25, TRAJ53)
TATQTTDAGTGSGGSNYKLTF

SEQ ID NO: 280534 - protein, 16 aa, Homo sapiens
  CDR3 for beta chain variable domain of TCR clone 140267 (TRBV4-2, TRBJ2-3)
CASSLSSGGHTDTQYF

SEQ ID NO: 280535 - protein, 16 aa, Homo sapiens
  CDR3 for alpha chain variable domain of TCR clone 140268 (TRAV2, TRAJ10)
CCGGSTVTGGGNKLTF

SEQ ID NO: 280536 - protein, 13 aa, Homo sapiens
  CDR3 for beta chain variable domain of TCR clone 140268 (TRBV7-9, TRBJ1-2)
CASSLKQNYGYTF

SEQ ID NO: 280537 - protein, 14 aa, Homo sapiens
  CDR3 for alpha chain variable domain of TCR clone 140269 (TRAV8-4, TRAJ9)
CAVTFNTGGFKTIF

SEQ ID NO: 280538 - protein, 15 aa, Homo sapiens
  CDR3 for beta chain variable domain of TCR clone 140269 (TRBV7-9, TRBJ2-2)
CASSPETGAGGELFF

SEQ ID NO: 280539 - protein, 14 aa, Homo sapiens
  CDR3 for alpha chain variable domain of TCR clone 140270 (TRAV1-1, TRAJ27)
CAVIYNTNAGKSTF

SEQ ID NO: 280540 - protein, 16 aa, Homo sapiens
  CDR3 for beta chain variable domain of TCR clone 140270 (TRBV11-3, TRBJ2-6)
CASSQGAGAGANVLTF

SEQ ID NO: 280541 - protein, 15 aa, Homo sapiens
  CDR3 for alpha chain variable domain of TCR clone 140271 (TRAV3, TRAJ22)
CAVRDRGGSARQLTF

SEQ ID NO: 280542 - protein, 13 aa, Homo sapiens
  CDR3 for beta chain variable domain of TCR clone 140271 (TRBV7-3, TRBJ2-1)
CASSPVAYNEQLF

SEQ ID NO: 280543 - protein, 13 aa, Homo sapiens
  CDR3 for alpha chain variable domain of TCR clone 140272 (TRAV21, TRAJ27)
CAARPGNAGKSTF

SEQ ID NO: 280544 - protein, 13 aa, Homo sapiens
  CDR3 for beta chain variable domain of TCR clone 140272 (TRBV11-2, TRBJ2-5)
CASSRGPSETQYF

SEQ ID NO: 280545 - protein, 15 aa, Homo sapiens
  CDR3 for alpha chain variable domain of TCR clone 140273 (TRAV23/DV6, TRAJ18)
CAARYRGSILGRLYF

SEQ ID NO: 280546 - protein, 13 aa, Homo sapiens
  CDR3 for beta chain variable domain of TCR clone 140273 (TRBV7-2, TRBJ2-7)
CASSSPSGSEQYF

SEQ ID NO: 280547 - protein, 16 aa, Homo sapiens
  CDR3 for alpha chain variable domain of TCR clone 140274 (TRAV30, TRAJ24)
CGTEIVDADSWGKFQF

SEQ ID NO: 280548 - protein, 14 aa, Homo sapiens
  CDR3 for beta chain variable domain of TCR clone 140274 (TRBV12-4, TRBJ1-6)
CASNLQGKGSPLHF

SEQ ID NO: 280549 - protein, 15 aa, Homo sapiens
  CDR3 for alpha chain variable domain of TCR clone 140275 (TRAV4, TRAJ39)
CLVGPNNNADNMLTF

SEQ ID NO: 280550 - protein, 15 aa, Homo sapiens
  CDR3 for beta chain variable domain of TCR clone 140275 (TRBV7-9, TRBJ1-6)
CASSSPGRGNSPLHF

SEQ ID NO: 280551 - protein, 16 aa, Homo sapiens
  CDR3 for alpha chain variable domain of TCR clone 140276 (TRAV38-2/DV8, TRAJ28)
CFPDFILWAGSYQLTF

SEQ ID NO: 280552 - protein, 14 aa, Homo sapiens
  CDR3 for beta chain variable domain of TCR clone 140276 (TRBV7-2, TRBJ2-5)
CASSLSGGGETQYF

SEQ ID NO: 280553 - protein, 17 aa, Homo sapiens
  CDR3 for alpha chain variable domain of TCR clone 140277 (TRAV3, TRAJ6)
CAVRDGPRAGGSYIPTF

SEQ ID NO: 280554 - protein, 16 aa, Homo sapiens
  CDR3 for beta chain variable domain of TCR clone 140277 (TRBV7-9, TRBJ2-3)
CASSLPRTSSTDTQYF

SEQ ID NO: 280555 - protein, 13 aa, Homo sapiens
  CDR3 for alpha chain variable domain of TCR clone 140278 (TRAV21, TRAJ20)
CAVGLRVCYKLSF

SEQ ID NO: 280556 - protein, 14 aa, Homo sapiens
  CDR3 for beta chain variable domain of TCR clone 140278 (TRBV4-1, TRBJ2-2)
CASSQAVNTGELFF

SEQ ID NO: 280557 - protein, 15 aa, Homo sapiens
  CDR3 for alpha chain variable domain of TCR clone 140279 (TRAV8-4, TRAJ37)
CAVSRGSGNTGKLIS

SEQ ID NO: 280558 - protein, 14 aa, Homo sapiens
  CDR3 for beta chain variable domain of TCR clone 140279 (TRBV7-9, TRBJ2-5)
CASSLDTAQETQYF

SEQ ID NO: 280559 - protein, 15 aa, Homo sapiens
  CDR3 for alpha chain variable domain of TCR clone 140280 (TRAV8-3, TRAJ3)
CAVAHSGSSASKIIF

SEQ ID NO: 280560 - protein, 20 aa, Homo sapiens
  CDR3 for beta chain variable domain of TCR clone 140280 (TRBV28, TRBJ2-1)
CASTPIGRSPGLAGGNEQFF

SEQ ID NO: 280561 - protein, 13 aa, Homo sapiens
  CDR3 for alpha chain variable domain of TCR clone 140281 (TRAV12-1, TRAJ22)
CVVYSGSASQLTF

SEQ ID NO: 280562 - protein, 10 aa, Homo sapiens
  CDR3 for beta chain variable domain of TCR clone 140281 (TRBV6-3, TRBJ2-2)
CASRDGELFF

SEQ ID NO: 280563 - protein, 14 aa, Homo sapiens
  CDR3 for alpha chain variable domain of TCR clone 140282 (TRAV2, TRAJ37)
CAVDFTSNTGKLIF

SEQ ID NO: 280564 - protein, 16 aa, Homo sapiens
  CDR3 for beta chain variable domain of TCR clone 140282 (TRBV28, TRBJ2-1)
CASSSRVRDSYNEQFF

SEQ ID NO: 280565 - protein, 10 aa, Homo sapiens
  CDR3 for alpha chain variable domain of TCR clone 140283 (TRAV23/DV6, TRAJ22)
CVARSRGSRF

SEQ ID NO: 280566 - protein, 15 aa, Homo sapiens
  CDR3 for beta chain variable domain of TCR clone 140283 (TRBV10-3, TRBJ2-3)
CAIDTSGRRTDTQYF

SEQ ID NO: 280567 - protein, 13 aa, Homo sapiens
  CDR3 for alpha chain variable domain of TCR clone 140284 (TRAV29/DV5, TRAJ31)
CAARRNNNARLMF

SEQ ID NO: 280568 - protein, 15 aa, Homo sapiens
  CDR3 for beta chain variable domain of TCR clone 140284 (TRBV2, TRBJ2-1)
CASSELAGSYNEQFF

SEQ ID NO: 280569 - protein, 16 aa, Homo sapiens
  CDR3 for alpha chain variable domain of TCR clone 140285 (TRAV16, TRAJ24)
CALSGGSTYSWGKLQF

SEQ ID NO: 280570 - protein, 15 aa, Homo sapiens
  CDR3 for beta chain variable domain of TCR clone 140285 (TRBV27, TRBJ2-1)
CASSNGGGSSNEQFF

SEQ ID NO: 280571 - protein, 12 aa, Homo sapiens
  CDR3 for alpha chain variable domain of TCR clone 140286 (TRAV21, TRAJ3)
CCFYSSASKIIF

SEQ ID NO: 280572 - protein, 16 aa, Homo sapiens
  CDR3 for beta chain variable domain of TCR clone 140286 (TRBV29-1, TRBJ2-7)
CSVEDAEDGTAYEQYF

SEQ ID NO: 280573 - protein, 16 aa, Homo sapiens
  CDR3 for alpha chain variable domain of TCR clone 140287 (TRAV26-1, TRAJ52)
CVVSNAGGTSYGKLTF

SEQ ID NO: 280574 - protein, 16 aa, Homo sapiens
  CDR3 for beta chain variable domain of TCR clone 140287 (TRBV5-1, TRBJ2-1)
CASSLEGRGLYNEQFF

SEQ ID NO: 280575 - protein, 14 aa, Homo sapiens
  CDR3 for alpha chain variable domain of TCR clone 140288 (TRAV16, TRAJ39)
CATRRFNAGNMLTF

SEQ ID NO: 280576 - protein, 15 aa, Homo sapiens
  CDR3 for beta chain variable domain of TCR clone 140288 (TRBV20-1, TRBJ2-5)
CSAPPRTGFGETQYF

SEQ ID NO: 280577 - protein, 14 aa, Homo sapiens
  CDR3 for alpha chain variable domain of TCR clone 140289 (TRAV3, TRAJ30)
CAVRDPYRDDKIIF

SEQ ID NO: 280578 - protein, 15 aa, Homo sapiens
  CDR3 for beta chain variable domain of TCR clone 140289 (TRBV11-3, TRBJ2-3)
CASLKDGREGDTQYF

SEQ ID NO: 280579 - protein, 12 aa, Homo sapiens
  CDR3 for alpha chain variable domain of TCR clone 140290 (TRAV12-2, TRAJ9)
CAVYNGGFKTIF

SEQ ID NO: 280580 - protein, 13 aa, Homo sapiens
  CDR3 for beta chain variable domain of TCR clone 140290 (TRBV6-1, TRBJ1-1)
CASSRQGNTEAFF

SEQ ID NO: 280581 - protein, 12 aa, Homo sapiens
  CDR3 for alpha chain variable domain of TCR clone 140291 (TRAV27, TRAJ53)
CIQGGSNYKLTV

SEQ ID NO: 280582 - protein, 13 aa, Homo sapiens
  CDR3 for beta chain variable domain of TCR clone 140291 (TRBV29-1, TRBJ1-1)
CSVESGFGTEAFF

SEQ ID NO: 280583 - protein, 14 aa, Homo sapiens
  CDR3 for alpha chain variable domain of TCR clone 140292 (TRAV29/DV5, TRAJ45)
CRKGSGGGADGLPF

SEQ ID NO: 280584 - protein, 14 aa, Homo sapiens
  CDR3 for beta chain variable domain of TCR clone 140292 (TRBV10-3, TRBJ2-3)
CAISEKGLGDTQYF

SEQ ID NO: 280585 - protein, 15 aa, Homo sapiens
  CDR3 for alpha chain variable domain of TCR clone 140293 (TRAV8-3, TRAJ27)
CAVGPSKTNAGKSTF

SEQ ID NO: 280586 - protein, 12 aa, Homo sapiens
  CDR3 for beta chain variable domain of TCR clone 140293 (TRBV7-2, TRBJ2-5)
CASSQYQETQYF

SEQ ID NO: 280587 - protein, 21 aa, Homo sapiens
  CDR3 for alpha chain variable domain of TCR clone 140294 (TRAV3, TRAJ37)
CGETTWLWQHRQTNLWARDNF

SEQ ID NO: 280588 - protein, 13 aa, Homo sapiens
  CDR3 for beta chain variable domain of TCR clone 140294 (TRBV2, TRBJ1-5)
CASGTGGYQPQHF

SEQ ID NO: 280589 - protein, 14 aa, Homo sapiens
  CDR3 for alpha chain variable domain of TCR clone 140295 (TRAV1-2, TRAJ16)
CAVNRFSDGQKLLF

SEQ ID NO: 280590 - protein, 16 aa, Homo sapiens
  CDR3 for beta chain variable domain of TCR clone 140295 (TRBV11-3, TRBJ2-6)
CASSQGAGAGANVLTF

SEQ ID NO: 280591 - protein, 14 aa, Homo sapiens
  CDR3 for alpha chain variable domain of TCR clone 140296 (TRAV1-2, TRAJ8)
CAVREDTGFQKLVF

SEQ ID NO: 280592 - protein, 18 aa, Homo sapiens
  CDR3 for beta chain variable domain of TCR clone 140296 (TRBV28, TRBJ1-4)
CASSPPYRGEVKNCFLAV

SEQ ID NO: 280593 - protein, 14 aa, Homo sapiens
  CDR3 for alpha chain variable domain of TCR clone 140297 (TRAV12-3, TRAJ33)
CAMSVPGSNYKLIW

SEQ ID NO: 280594 - protein, 12 aa, Homo sapiens
  CDR3 for beta chain variable domain of TCR clone 140297 (TRBV7-8, TRBJ2-7)
CASSLGDREQYF

SEQ ID NO: 280595 - protein, 16 aa, Homo sapiens
  CDR3 for alpha chain variable domain of TCR clone 140298 (TRAV3, TRAJ22)
CAVRDMGSGSARQLTF

SEQ ID NO: 280596 - protein, 20 aa, Homo sapiens
  CDR3 for beta chain variable domain of TCR clone 140298 (TRBV7-8, TRBJ2-2)
CASSHLFPGPTIHITGELFF

SEQ ID NO: 280597 - protein, 14 aa, Homo sapiens
  CDR3 for alpha chain variable domain of TCR clone 140299 (TRAV8-2, TRAJ11)
CVVSEKSGYSTLTF

SEQ ID NO: 280598 - protein, 16 aa, Homo sapiens
  CDR3 for beta chain variable domain of TCR clone 140299 (TRBV28, TRBJ2-1)
CARSSPEYPRDNEQFY

SEQ ID NO: 280599 - protein, 15 aa, Homo sapiens
  CDR3 for alpha chain variable domain of TCR clone 140300 (TRAV25, TRAJ52)
CSGTSGGTSYGKLTF

SEQ ID NO: 280600 - protein, 16 aa, Homo sapiens
  CDR3 for beta chain variable domain of TCR clone 140300 (TRBV15, TRBJ1-2)
CATSRGPRTGGGGYTF

SEQ ID NO: 280601 - protein, 12 aa, Homo sapiens
  CDR3 for alpha chain variable domain of TCR clone 140301 (TRAV25, TRAJ11)
CAGAAGYSTLTF

SEQ ID NO: 280602 - protein, 14 aa, Homo sapiens
  CDR3 for beta chain variable domain of TCR clone 140301 (TRBV5-8, TRBJ2-3)
CASSLGQGTDTQYF

SEQ ID NO: 280603 - protein, 15 aa, Homo sapiens
  CDR3 for alpha chain variable domain of TCR clone 140302 (TRAV3, TRAJ36)
CAVRASPTGANNLFF

SEQ ID NO: 280604 - protein, 15 aa, Homo sapiens
  CDR3 for beta chain variable domain of TCR clone 140302 (TRBV3-1, TRBJ2-1)
CASSQDYTPRGEQFF

SEQ ID NO: 280605 - protein, 15 aa, Homo sapiens
  CDR3 for alpha chain variable domain of TCR clone 140303 (TRAV21, TRAJ53)
CATLNSGGSNYKLTF

SEQ ID NO: 280606 - protein, 12 aa, Homo sapiens
  CDR3 for beta chain variable domain of TCR clone 140303 (TRBV7-9, TRBJ1-5)
CASSPQGQPQHF

SEQ ID NO: 280607 - protein, 13 aa, Homo sapiens
  CDR3 for alpha chain variable domain of TCR clone 140304 (TRAV12-1, TRAJ35)
CVVRGGFGNVLHC

SEQ ID NO: 280608 - protein, 13 aa, Homo sapiens
  CDR3 for beta chain variable domain of TCR clone 140304 (TRBV7-9, TRBJ1-2)
CASSLKQNYGYTF

SEQ ID NO: 280609 - protein, 14 aa, Homo sapiens
  CDR3 for alpha chain variable domain of TCR clone 140305 (TRAV12-1, TRAJ17)
CVVNYKAAGNKLTF

SEQ ID NO: 280610 - protein, 14 aa, Homo sapiens
  CDR3 for beta chain variable domain of TCR clone 140305 (TRBV11-2, TRBJ1-2)
CASSLGTANYGYTF

SEQ ID NO: 280611 - protein, 15 aa, Homo sapiens
  CDR3 for alpha chain variable domain of TCR clone 140306 (TRAV3, TRAJ5)
SAVRDLDTGRRALTF

SEQ ID NO: 280612 - protein, 13 aa, Homo sapiens
  CDR3 for beta chain variable domain of TCR clone 140306 (TRBV20-1, TRBJ2-5)
CSARDSKQATQYF

SEQ ID NO: 280613 - protein, 16 aa, Homo sapiens
  CDR3 for alpha chain variable domain of TCR clone 140307 (TRAV30, TRAJ24)
CGTEIWMLAAGGNSSL

SEQ ID NO: 280614 - protein, 14 aa, Homo sapiens
  CDR3 for beta chain variable domain of TCR clone 140307 (TRBV12-5, TRBJ2-5)
CASGSRTHQETQYF

SEQ ID NO: 280615 - protein, 15 aa, Homo sapiens
  CDR3 for alpha chain variable domain of TCR clone 140308 (TRAV27, TRAJ38)
CAGRFNAGNNRKLIW

SEQ ID NO: 280616 - protein, 13 aa, Homo sapiens
  CDR3 for beta chain variable domain of TCR clone 140308 (TRBV6-1, TRBJ1-1)
CASSRQGNTEAFF

SEQ ID NO: 280617 - protein, 14 aa, Homo sapiens
  CDR3 for alpha chain variable domain of TCR clone 140309 (TRAV3, TRAJ6)
CAVRRTGGSYIPTF

SEQ ID NO: 280618 - protein, 15 aa, Homo sapiens
  CDR3 for beta chain variable domain of TCR clone 140309 (TRBV9, TRBJ1-6)
CASSVAGTGDSPLHF

SEQ ID NO: 280619 - protein, 21 aa, Homo sapiens
  CDR3 for alpha chain variable domain of TCR clone 140310 (TRAV1-1, TRAJ6)
CLLLLRCERLERTGGSYTPTF

SEQ ID NO: 280620 - protein, 13 aa, Homo sapiens
  CDR3 for beta chain variable domain of TCR clone 140310 (TRBV7-2, TRBJ2-5)
CQQLVRGGETQYF

SEQ ID NO: 280621 - protein, 14 aa, Homo sapiens
  CDR3 for alpha chain variable domain of TCR clone 140311 (TRAV27, TRAJ36)
CAGPPRRGANNLFF

SEQ ID NO: 280622 - protein, 15 aa, Homo sapiens
  CDR3 for beta chain variable domain of TCR clone 140311 (TRBV18, TRBJ2-7)
CASSPASTPNYEQYF

SEQ ID NO: 280623 - protein, 13 aa, Homo sapiens
  CDR3 for alpha chain variable domain of TCR clone 140312 (TRAV22, TRAJ29)
CAVGGSGNTALVF

SEQ ID NO: 280624 - protein, 13 aa, Homo sapiens
  CDR3 for beta chain variable domain of TCR clone 140312 (TRBV4-2, TRBJ1-1)
CASSQAGNTEAFF

SEQ ID NO: 280625 - protein, 15 aa, Homo sapiens
  CDR3 for alpha chain variable domain of TCR clone 140313 (TRAV21, TRAJ32)
CAVNSYGGATNKLIF

SEQ ID NO: 280626 - protein, 11 aa, Homo sapiens
  CDR3 for beta chain variable domain of TCR clone 140313 (TRBV29-1, TRBJ2-5)
CSEDRTGTQYF

SEQ ID NO: 280627 - protein, 15 aa, Homo sapiens
  CDR3 for alpha chain variable domain of TCR clone 140314 (TRAV3, TRAJ15)
CAVRPANQAGTALTF

SEQ ID NO: 280628 - protein, 14 aa, Homo sapiens
  CDR3 for beta chain variable domain of TCR clone 140314 (TRBV4-1, TRBJ2-2)
CASSQAVNTGELFF

SEQ ID NO: 280629 - protein, 12 aa, Homo sapiens
  CDR3 for alpha chain variable domain of TCR clone 140315 (TRAV26-2, TRAJ43)
CILRDVIGGMRF

SEQ ID NO: 280630 - protein, 13 aa, Homo sapiens
  CDR3 for beta chain variable domain of TCR clone 140315 (TRBV7-9, TRBJ1-2)
CASSPKTGYGYTF

SEQ ID NO: 280631 - protein, 13 aa, Homo sapiens
  CDR3 for alpha chain variable domain of TCR clone 140316 (TRAV29/DV5, TRAJ49)
CAASTNTGNQFHS

SEQ ID NO: 280632 - protein, 11 aa, Homo sapiens
  CDR3 for beta chain variable domain of TCR clone 140316 (TRBV6-1, TRBJ2-1)
CASISSNEQFF

SEQ ID NO: 280633 - protein, 18 aa, Homo sapiens
  CDR3 for alpha chain variable domain of TCR clone 140317 (TRAV12-3, TRAJ52)
CAMSAGGAGGTSYGKLTL

SEQ ID NO: 280634 - protein, 15 aa, Homo sapiens
  CDR3 for beta chain variable domain of TCR clone 140317 (TRBV27, TRBJ1-6)
CASSFDRGLGSPLHF

SEQ ID NO: 280635 - protein, 14 aa, Homo sapiens
  CDR3 for alpha chain variable domain of TCR clone 140318 (TRAV12-2, TRAJ13)
CAVKKTGGYQKVTF

SEQ ID NO: 280636 - protein, 13 aa, Homo sapiens
  CDR3 for beta chain variable domain of TCR clone 140318 (TRBV7-3, TRBJ2-3)
CASSLLGADTQYF

SEQ ID NO: 280637 - protein, 14 aa, Homo sapiens
  CDR3 for alpha chain variable domain of TCR clone 140319 (TRAV25, TRAJ52)
CGRPGGTSYGKLTF

SEQ ID NO: 280638 - protein, 17 aa, Homo sapiens
  CDR3 for beta chain variable domain of TCR clone 140319 (TRBV7-8, TRBJ2-6)
CASSAGTGGAGANVLTF

SEQ ID NO: 280639 - protein, 14 aa, Homo sapiens
  CDR3 for alpha chain variable domain of TCR clone 140320 (TRAV13-1, TRAJ40)
CAARSTSGTYKYIF

SEQ ID NO: 280640 - protein, 15 aa, Homo sapiens
  CDR3 for beta chain variable domain of TCR clone 140320 (TRBV18, TRBJ1-5)
CASSETVGNNQPQHF

SEQ ID NO: 280641 - protein, 12 aa, Homo sapiens
  CDR3 for alpha chain variable domain of TCR clone 140321 (TRAV8-4, TRAJ31)
CAVGDSNARLMF

SEQ ID NO: 280642 - protein, 15 aa, Homo sapiens
  CDR3 for beta chain variable domain of TCR clone 140321 (TRBV2, TRBJ2-3)
CASSDFEKATDTQYF

SEQ ID NO: 280643 - protein, 15 aa, Homo sapiens
  CDR3 for alpha chain variable domain of TCR clone 140322 (TRAV17, TRAJ57)
CATGPSQGGSEKLGF

SEQ ID NO: 280644 - protein, 15 aa, Homo sapiens
  CDR3 for beta chain variable domain of TCR clone 140322 (TRBV9, TRBJ1-6)
CASSVAGTGDSPLHF

SEQ ID NO: 280645 - protein, 10 aa, Homo sapiens
  CDR3 for alpha chain variable domain of TCR clone 140323 (TRAV1-2, TRAJ31)
CAFFRCQTHV

SEQ ID NO: 280646 - protein, 13 aa, Homo sapiens
  CDR3 for beta chain variable domain of TCR clone 140323 (TRBV7-9, TRBJ1-2)
CASSLKQNYGYTL

SEQ ID NO: 280647 - protein, 14 aa, Homo sapiens
  CDR3 for alpha chain variable domain of TCR clone 140324 (TRAV26-1, TRAJ54)
CIVRVPQGAQKLIF

SEQ ID NO: 280648 - protein, 15 aa, Homo sapiens
  CDR3 for beta chain variable domain of TCR clone 140324 (TRBV18, TRBJ2-7)
CASSPNSGSGNEQYF

SEQ ID NO: 280649 - protein, 13 aa, Homo sapiens
  CDR3 for alpha chain variable domain of TCR clone 140325 (TRAV27, TRAJ56)
CAGKPGANSQLTF

SEQ ID NO: 280650 - protein, 15 aa, Homo sapiens
  CDR3 for beta chain variable domain of TCR clone 140325 (TRBV6-1, TRBJ2-3)
CASSERWDSTDTQYF

SEQ ID NO: 280651 - protein, 17 aa, Homo sapiens
  CDR3 for alpha chain variable domain of TCR clone 140326 (TRAV3, TRAJ6)
CAVRDGPRAGGSHIPTF

SEQ ID NO: 280652 - protein, 19 aa, Homo sapiens
  CDR3 for beta chain variable domain of TCR clone 140326 (TRBV25-1, TRBJ2-2)
CAILVYRVDRGRKTGELFF

SEQ ID NO: 280653 - protein, 14 aa, Homo sapiens
  CDR3 for alpha chain variable domain of TCR clone 140327 (TRAV12-2, TRAJ45)
CALPEKGGADGLTF

SEQ ID NO: 280654 - protein, 14 aa, Homo sapiens
  CDR3 for beta chain variable domain of TCR clone 140327 (TRBV18, TRBJ1-5)
CASSPGNSNQPQHF

SEQ ID NO: 280655 - protein, 14 aa, Homo sapiens
  CDR3 for alpha chain variable domain of TCR clone 140328 (TRAV26-1, TRAJ45)
CIVRVVGGADELTF

SEQ ID NO: 280656 - protein, 16 aa, Homo sapiens
  CDR3 for beta chain variable domain of TCR clone 140328 (TRBV7-9, TRBJ1-1)
CASSLTQVRSNTEAFF

SEQ ID NO: 280657 - protein, 14 aa, Homo sapiens
  CDR3 for alpha chain variable domain of TCR clone 140329 (TRAV38-1, TRAJ45)
CAYYSGGGADGFTF

SEQ ID NO: 280658 - protein, 15 aa, Homo sapiens
  CDR3 for beta chain variable domain of TCR clone 140329 (TRBV15, TRBJ1-4)
CATSRDMGSYEKLFF

SEQ ID NO: 280659 - protein, 15 aa, Homo sapiens
  CDR3 for alpha chain variable domain of TCR clone 140330 (TRAV4, TRAJ28)
CLVEGSGAGSYQLTF

SEQ ID NO: 280660 - protein, 11 aa, Homo sapiens
  CDR3 for beta chain variable domain of TCR clone 140330 (TRBV12-4, TRBJ2-3)
CASTATDTQYF

SEQ ID NO: 280661 - protein, 12 aa, Homo sapiens
  CDR3 for alpha chain variable domain of TCR clone 140331 (TRAV9-2, TRAJ26)
CALRGYGQNFVF

SEQ ID NO: 280662 - protein, 14 aa, Homo sapiens
  CDR3 for beta chain variable domain of TCR clone 140331 (TRBV19, TRBJ2-1)
CASPTFVLSGEQFF

SEQ ID NO: 280663 - protein, 14 aa, Homo sapiens
  CDR3 for alpha chain variable domain of TCR clone 140332 (TRAV1-1, TRAJ27)
CAVIYNTNAGKSTF

SEQ ID NO: 280664 - protein, 15 aa, Homo sapiens
  CDR3 for beta chain variable domain of TCR clone 140332 (TRBV6-3, TRBJ2-7)
CASNSPGTVFYEQYF

SEQ ID NO: 280665 - protein, 13 aa, Homo sapiens
  CDR3 for alpha chain variable domain of TCR clone 140333 (TRAV8-3, TRAJ43)
CAVVPYNNNDMRF

SEQ ID NO: 280666 - protein, 14 aa, Homo sapiens
  CDR3 for beta chain variable domain of TCR clone 140333 (TRBV7-8, TRBJ1-5)
CASSTGTVGGPQHF

SEQ ID NO: 280667 - protein, 16 aa, Homo sapiens
  CDR3 for alpha chain variable domain of TCR clone 140334 (TRAV21, TRAJ37)
CAVRTAGSSNTGKLIF

SEQ ID NO: 280668 - protein, 13 aa, Homo sapiens
  CDR3 for beta chain variable domain of TCR clone 140334 (TRBV7-9, TRBJ2-5)
WASLPSGRETQYF

SEQ ID NO: 280669 - protein, 15 aa, Homo sapiens
  CDR3 for alpha chain variable domain of TCR clone 140335 (TRAV4, TRAJ4)
CLVGPLSGGYNKLLF

SEQ ID NO: 280670 - protein, 16 aa, Homo sapiens
  CDR3 for beta chain variable domain of TCR clone 140335 (TRBV7-8, TRBJ1-4)
CASSLGVGTSNEKLFF

SEQ ID NO: 280671 - protein, 14 aa, Homo sapiens
  CDR3 for alpha chain variable domain of TCR clone 140336 (TRAV12-2, TRAJ40)
CAVKIPSGTYTCIF

SEQ ID NO: 280672 - protein, 14 aa, Homo sapiens
  CDR3 for beta chain variable domain of TCR clone 140336 (TRBV20-1, TRBJ1-1)
CSAQTRIGGTEAFF

SEQ ID NO: 280673 - protein, 14 aa, Homo sapiens
  CDR3 for alpha chain variable domain of TCR clone 140337 (TRAV17, TRAJ32)
CATDPGGATNKRIF

SEQ ID NO: 280674 - protein, 12 aa, Homo sapiens
  CDR3 for beta chain variable domain of TCR clone 140337 (TRBV7-8, TRBJ2-7)
CASSLGDREQYF

SEQ ID NO: 280675 - protein, 13 aa, Homo sapiens
  CDR3 for alpha chain variable domain of TCR clone 140338 (TRAV26-2, TRAJ43)
CILRAVNNNDMRF

SEQ ID NO: 280676 - protein, 16 aa, Homo sapiens
  CDR3 for beta chain variable domain of TCR clone 140338 (TRBV4-1, TRBJ2-3)
CASSQRAGGLTDTQYF

SEQ ID NO: 280677 - protein, 15 aa, Homo sapiens
  CDR3 for alpha chain variable domain of TCR clone 140339 (TRAV21, TRAJ24)
CAARSSTDSWGQFQF

SEQ ID NO: 280678 - protein, 13 aa, Homo sapiens
  CDR3 for beta chain variable domain of TCR clone 140339 (TRBV11-2, TRBJ2-5)
CASSSTGEETQYF

SEQ ID NO: 280679 - protein, 12 aa, Homo sapiens
  CDR3 for alpha chain variable domain of TCR clone 140340 (TRAV12-3, TRAJ17)
CAMTLTGNKLTF

SEQ ID NO: 280680 - protein, 15 aa, Homo sapiens
  CDR3 for beta chain variable domain of TCR clone 140340 (TRBV11-3, TRBJ2-3)
CASSLSGQGPNTQYF

SEQ ID NO: 280681 - protein, 14 aa, Homo sapiens
  CDR3 for alpha chain variable domain of TCR clone 140341 (TRAV12-2, TRAJ36)
CTVKISTGANNLFF

SEQ ID NO: 280682 - protein, 14 aa, Homo sapiens
  CDR3 for beta chain variable domain of TCR clone 140341 (TRBV25-1, TRBJ1-2)
CASSDTTGVVGYTF

SEQ ID NO: 280683 - protein, 18 aa, Homo sapiens
  CDR3 for alpha chain variable domain of TCR clone 140342 (TRAV13-1, TRAJ45)
CAASIGAYSGGGADGLTF

SEQ ID NO: 280684 - protein, 13 aa, Homo sapiens
  CDR3 for beta chain variable domain of TCR clone 140342 (TRBV27, TRBJ1-1)
CASSYATNTEAFF

SEQ ID NO: 280685 - protein, 15 aa, Homo sapiens
  CDR3 for alpha chain variable domain of TCR clone 140343 (TRAV8-3, TRAJ11)
CAVGLLNSGYSTLTF

SEQ ID NO: 280686 - protein, 14 aa, Homo sapiens
  CDR3 for beta chain variable domain of TCR clone 140343 (TRBV7-3, TRBJ2-1)
CASSLAGGTNEQFF

SEQ ID NO: 280687 - protein, 13 aa, Homo sapiens
  CDR3 for alpha chain variable domain of TCR clone 140344 (TRAV23/DV6, TRAJ22)
CAPYSGSARQLTF

SEQ ID NO: 280688 - protein, 12 aa, Homo sapiens
  CDR3 for beta chain variable domain of TCR clone 140344 (TRBV6-5, TRBJ2-2)
CASRTGTGELFF

SEQ ID NO: 280689 - protein, 12 aa, Homo sapiens
  CDR3 for alpha chain variable domain of TCR clone 140345 (TRAV2, TRAJ31)
CAVEDNNARLTF

SEQ ID NO: 280690 - protein, 14 aa, Homo sapiens
  CDR3 for beta chain variable domain of TCR clone 140345 (TRBV28, TRBJ1-5)
CASSRTGLNQPQHF

SEQ ID NO: 280691 - protein, 12 aa, Homo sapiens
  CDR3 for alpha chain variable domain of TCR clone 140346 (TRAV1-2, TRAJ42)
CVAGGSQGNLIF

SEQ ID NO: 280692 - protein, 14 aa, Homo sapiens
  CDR3 for beta chain variable domain of TCR clone 140346 (TRBV7-2, TRBJ2-2)
CASRGQGAAGELFF

SEQ ID NO: 280693 - protein, 12 aa, Homo sapiens
  CDR3 for alpha chain variable domain of TCR clone 140347 (TRAV30, TRAJ43)
CGTEERGNDMRF

SEQ ID NO: 280694 - protein, 14 aa, Homo sapiens
  CDR3 for beta chain variable domain of TCR clone 140347 (TRBV7-2, TRBJ2-7)
CASSRKTSFYEQYF

SEQ ID NO: 280695 - protein, 17 aa, Homo sapiens
  CDR3 for alpha chain variable domain of TCR clone 140348 (TRAV4, TRAJ18)
CLVGERSVGATLGRLYF

SEQ ID NO: 280696 - protein, 16 aa, Homo sapiens
  CDR3 for beta chain variable domain of TCR clone 140348 (TRBV19, TRBJ2-1)
CASSKAGPSSYNEQFF

SEQ ID NO: 280697 - protein, 16 aa, Homo sapiens
  CDR3 for alpha chain variable domain of TCR clone 140349 (TRAV13-1, TRAJ48)
CAASIFGNFVNEKLTF

SEQ ID NO: 280698 - protein, 14 aa, Homo sapiens
  CDR3 for beta chain variable domain of TCR clone 140349 (TRBV24-1, TRBJ1-1)
CATSIPRGDTEAFF

SEQ ID NO: 280699 - protein, 15 aa, Homo sapiens
  CDR3 for alpha chain variable domain of TCR clone 140350 (TRAV30, TRAJ32)
CGTEILGGATNKLIF

SEQ ID NO: 280700 - protein, 13 aa, Homo sapiens
  CDR3 for beta chain variable domain of TCR clone 140350 (TRBV6-3, TRBJ2-7)
CASSFSGGYEQYV

SEQ ID NO: 280701 - protein, 17 aa, Homo sapiens
  CDR3 for alpha chain variable domain of TCR clone 140351 (TRAV23/DV6, TRAJ53)
CAASKLGSGGSNYKLTF

SEQ ID NO: 280702 - protein, 16 aa, Homo sapiens
  CDR3 for beta chain variable domain of TCR clone 140351 (TRBV29-1, TRBJ2-6)
CSVEDITYSGANVLTF

SEQ ID NO: 280703 - protein, 14 aa, Homo sapiens
  CDR3 for alpha chain variable domain of TCR clone 140352 (TRAV1-2, TRAJ16)
CAVNRFSDGQKLLF

SEQ ID NO: 280704 - protein, 20 aa, Homo sapiens
  CDR3 for beta chain variable domain of TCR clone 140352 (TRBV7-8, TRBJ2-2)
WASSHLFPGPTIHITGELFF

SEQ ID NO: 280705 - protein, 13 aa, Homo sapiens
  CDR3 for alpha chain variable domain of TCR clone 140353 (TRAV12-2, TRAJ20)
CAVYPSNDYKLSF

SEQ ID NO: 280706 - protein, 15 aa, Homo sapiens
  CDR3 for beta chain variable domain of TCR clone 140353 (TRBV18, TRBJ1-2)
CASSPGNRLGYGYTF

SEQ ID NO: 280707 - protein, 13 aa, Homo sapiens
  CDR3 for alpha chain variable domain of TCR clone 140354 (TRAV21, TRAJ44)
CAAYTGTASKLTF

SEQ ID NO: 280708 - protein, 15 aa, Homo sapiens
  CDR3 for beta chain variable domain of TCR clone 140354 (TRBV20-1, TRBJ2-7)
CSARDRVSGMDEQYF

SEQ ID NO: 280709 - protein, 14 aa, Homo sapiens
  CDR3 for alpha chain variable domain of TCR clone 140355 (TRAV26-1, TRAJ58)
CIVRVPTSGSRLTF

SEQ ID NO: 280710 - protein, 16 aa, Homo sapiens
  CDR3 for beta chain variable domain of TCR clone 140355 (TRBV6-1, TRBJ2-5)
CASGETLDRGAETQYF

SEQ ID NO: 280711 - protein, 15 aa, Homo sapiens
  CDR3 for alpha chain variable domain of TCR clone 140356 (TRAV27, TRAJ45)
CRSPQSGGGADGLTF

SEQ ID NO: 280712 - protein, 12 aa, Homo sapiens
  CDR3 for beta chain variable domain of TCR clone 140356 (TRBV24-1, TRBJ2-7)
CATSDPGYEQYC

SEQ ID NO: 280713 - protein, 15 aa, Homo sapiens
  CDR3 for alpha chain variable domain of TCR clone 140357 (TRAV8-4, TRAJ8)
CAVSDLNTGFQKLVF

SEQ ID NO: 280714 - protein, 15 aa, Homo sapiens
  CDR3 for beta chain variable domain of TCR clone 140357 (TRBV15, TRBJ1-4)
CATSRDMGSYEKLFF

SEQ ID NO: 280715 - protein, 13 aa, Homo sapiens
  CDR3 for alpha chain variable domain of TCR clone 140358 (TRAV1-2, TRAJ20)
CAVRDGNDYKLSF

SEQ ID NO: 280716 - protein, 14 aa, Homo sapiens
  CDR3 for beta chain variable domain of TCR clone 140358 (TRBV7-2, TRBJ2-3)
CQQLRGGGRDAQYF

SEQ ID NO: 280717 - protein, 17 aa, Homo sapiens
  CDR3 for alpha chain variable domain of TCR clone 140359 (TRAV8-6, TRAJ58)
CAVSSWVGETSGSRLTF

SEQ ID NO: 280718 - protein, 14 aa, Homo sapiens
  CDR3 for beta chain variable domain of TCR clone 140359 (TRBV5-1, TRBJ2-2)
CASSLGGGSGELFF

SEQ ID NO: 280719 - protein, 14 aa, Homo sapiens
  CDR3 for alpha chain variable domain of TCR clone 140360 (TRAV1-2, TRAJ16)
CAVNRFSDSQKVLF

SEQ ID NO: 280720 - protein, 15 aa, Homo sapiens
  CDR3 for beta chain variable domain of TCR clone 140360 (TRBV9, TRBJ1-6)
CASSVAGTGDSPLHF

SEQ ID NO: 280721 - protein, 14 aa, Homo sapiens
  CDR3 for alpha chain variable domain of TCR clone 140361 (TRAV14/DV4, TRAJ32)
SNVLPLTPTNKLIF

SEQ ID NO: 280722 - protein, 14 aa, Homo sapiens
  CDR3 for beta chain variable domain of TCR clone 140361 (TRBV19, TRBJ2-1)
CASPTFVLSGEQFF

SEQ ID NO: 280723 - protein, 14 aa, Homo sapiens
  CDR3 for alpha chain variable domain of TCR clone 140362 (TRAV1-2, TRAJ16)
CAVNRFSEGQKLLF

SEQ ID NO: 280724 - protein, 13 aa, Homo sapiens
  CDR3 for beta chain variable domain of TCR clone 140362 (TRBV7-2, TRBJ1-1)
CASNLKGAKVAFF

SEQ ID NO: 280725 - protein, 16 aa, Homo sapiens
  CDR3 for alpha chain variable domain of TCR clone 140363 (TRAV30, TRAJ24)
CGTEFVDADSWGKFQF

SEQ ID NO: 280726 - protein, 17 aa, Homo sapiens
  CDR3 for beta chain variable domain of TCR clone 140363 (TRBV20-1, TRBJ2-1)
CSASSSGLAGSYNEQFF

SEQ ID NO: 280727 - protein, 14 aa, Homo sapiens
  CDR3 for alpha chain variable domain of TCR clone 140364 (TRAV3, TRAJ24)
CAVILTDSWGKLQF

SEQ ID NO: 280728 - protein, 17 aa, Homo sapiens
  CDR3 for beta chain variable domain of TCR clone 140364 (TRBV24-1, TRBJ2-1)
CATSDVSTSGTYNEQFF

SEQ ID NO: 280729 - protein, 14 aa, Homo sapiens
  CDR3 for alpha chain variable domain of TCR clone 140365 (TRAV1-1, TRAJ30)
CAVRSLNRDDKIIF

SEQ ID NO: 280730 - protein, 14 aa, Homo sapiens
  CDR3 for beta chain variable domain of TCR clone 140365 (TRBV18, TRBJ2-5)
CASSPGVSQETQYF

SEQ ID NO: 280731 - protein, 12 aa, Homo sapiens
  CDR3 for alpha chain variable domain of TCR clone 140366 (TRAV13-1, TRAJ42)
VNYGGSKGNLIF

SEQ ID NO: 280732 - protein, 15 aa, Homo sapiens
  CDR3 for beta chain variable domain of TCR clone 140366 (TRBV20-1, TRBJ2-1)
CSASSARSSYNEQFF

SEQ ID NO: 280733 - protein, 13 aa, Homo sapiens
  CDR3 for alpha chain variable domain of TCR clone 140367 (TRAV2, TRAJ40)
CSVVTSGTYNYIF

SEQ ID NO: 280734 - protein, 14 aa, Homo sapiens
  CDR3 for beta chain variable domain of TCR clone 140367 (TRBV19, TRBJ2-1)
CASPTFVLSGEQFF

SEQ ID NO: 280735 - protein, 14 aa, Homo sapiens
  CDR3 for alpha chain variable domain of TCR clone 140368 (TRAV1-2, TRAJ27)
CAPAEYTNGGKSTF

SEQ ID NO: 280736 - protein, 18 aa, Homo sapiens
  CDR3 for beta chain variable domain of TCR clone 140368 (TRBV28, TRBJ1-2)
CASRQQQGKRGSNYGYTF

SEQ ID NO: 280737 - protein, 14 aa, Homo sapiens
  CDR3 for alpha chain variable domain of TCR clone 140369 (TRAV25, TRAJ6)
CAGRESGGSYIPTF

SEQ ID NO: 280738 - protein, 14 aa, Homo sapiens
  CDR3 for beta chain variable domain of TCR clone 140369 (TRBV7-7, TRBJ2-2)
CASSRDRSTGELFF

SEQ ID NO: 280739 - protein, 13 aa, Homo sapiens
  CDR3 for alpha chain variable domain of TCR clone 140370 (TRAV12-2, TRAJ15)
CAVFNQAGTALIF

SEQ ID NO: 280740 - protein, 15 aa, Homo sapiens
  CDR3 for beta chain variable domain of TCR clone 140370 (TRBV7-8, TRBJ1-5)
CASSRGGGADQPQHC

SEQ ID NO: 280741 - protein, 14 aa, Homo sapiens
  CDR3 for alpha chain variable domain of TCR clone 140371 (TRAV17, TRAJ31)
CATNAEDNNARLMF

SEQ ID NO: 280742 - protein, 13 aa, Homo sapiens
  CDR3 for beta chain variable domain of TCR clone 140371 (TRBV20-1, TRBJ2-3)
CSARLAGTDTQYF

SEQ ID NO: 280743 - protein, 14 aa, Homo sapiens
  CDR3 for alpha chain variable domain of TCR clone 140372 (TRAV38-1, TRAJ45)
CAYYSGGGADGLTF

SEQ ID NO: 280744 - protein, 14 aa, Homo sapiens
  CDR3 for beta chain variable domain of TCR clone 140372 (TRBV28, TRBJ2-1)
CASSLVAPYNEQFF

SEQ ID NO: 280745 - protein, 13 aa, Homo sapiens
  CDR3 for alpha chain variable domain of TCR clone 140373 (TRAV12-3, TRAJ13)
CAMGTGGYQKDTF

SEQ ID NO: 280746 - protein, 14 aa, Homo sapiens
  CDR3 for beta chain variable domain of TCR clone 140373 (TRBV7-2, TRBJ2-5)
CASSTGGELKTQYF

SEQ ID NO: 280747 - protein, 17 aa, Homo sapiens
  CDR3 for alpha chain variable domain of TCR clone 140374 (TRAV38-1, TRAJ54)
CAFMKPTGLQGAQKLVF

SEQ ID NO: 280748 - protein, 14 aa, Homo sapiens
  CDR3 for beta chain variable domain of TCR clone 140374 (TRBV7-6, TRBJ2-3)
CASSLGTVTDTQYF

SEQ ID NO: 280749 - protein, 17 aa, Homo sapiens
  CDR3 for alpha chain variable domain of TCR clone 140375 (TRAV21, TRAJ24)
CAGIRLRSTDSWGTLQF

SEQ ID NO: 280750 - protein, 15 aa, Homo sapiens
  CDR3 for beta chain variable domain of TCR clone 140375 (TRBV7-2, TRBJ2-3)
CASSPRGLSTDTQYF

SEQ ID NO: 280751 - protein, 14 aa, Homo sapiens
  CDR3 for alpha chain variable domain of TCR clone 140376 (TRAV12-3, TRAJ12)
CAKSEVDSSYKLIF

SEQ ID NO: 280752 - protein, 12 aa, Homo sapiens
  CDR3 for beta chain variable domain of TCR clone 140376 (TRBV18, TRBJ1-4)
CASSPSREKLFF

SEQ ID NO: 280753 - protein, 13 aa, Homo sapiens
  CDR3 for alpha chain variable domain of TCR clone 140377 (TRAV1-1, TRAJ11)
CSVLNSGYSTLTF

SEQ ID NO: 280754 - protein, 14 aa, Homo sapiens
  CDR3 for beta chain variable domain of TCR clone 140377 (TRBV4-1, TRBJ2-2)
CASSQAVNTGELFF

SEQ ID NO: 280755 - protein, 13 aa, Homo sapiens
  CDR3 for alpha chain variable domain of TCR clone 140378 (TRAV2, TRAJ40)
CAVVTSGTYKYIF

SEQ ID NO: 280756 - protein, 14 aa, Homo sapiens
  CDR3 for beta chain variable domain of TCR clone 140378 (TRBV19, TRBJ2-1)
CASPTFVLSCEQLF

SEQ ID NO: 280757 - protein, 16 aa, Homo sapiens
  CDR3 for alpha chain variable domain of TCR clone 140379 (TRAV30, TRAJ24)
CGTEIVDADSCGKFQF

SEQ ID NO: 280758 - protein, 14 aa, Homo sapiens
  CDR3 for beta chain variable domain of TCR clone 140379 (TRBV13, TRBJ2-1)
CASSPRPRYNEQFF

SEQ ID NO: 280759 - protein, 14 aa, Homo sapiens
  CDR3 for alpha chain variable domain of TCR clone 140380 (TRAV17, TRAJ6)
CATDASGGSYIPPF

SEQ ID NO: 280760 - protein, 15 aa, Homo sapiens
  CDR3 for beta chain variable domain of TCR clone 140380 (TRBV9, TRBJ2-1)
CASSLAGSSYNEQFF

SEQ ID NO: 280761 - protein, 13 aa, Homo sapiens
  CDR3 for alpha chain variable domain of TCR clone 140381 (TRAV13-1, TRAJ9)
CAARGTGGFKTIF

SEQ ID NO: 280762 - protein, 15 aa, Homo sapiens
  CDR3 for beta chain variable domain of TCR clone 140381 (TRBV27, TRBJ2-1)
CASSNGGGSSNEQFF

SEQ ID NO: 280763 - protein, 13 aa, Homo sapiens
  CDR3 for alpha chain variable domain of TCR clone 140382 (TRAV1-2, TRAJ9)
CAVLNTGGFQTIF

SEQ ID NO: 280764 - protein, 15 aa, Homo sapiens
  CDR3 for beta chain variable domain of TCR clone 140382 (TRBV7-3, TRBJ2-1)
CASSPTGGGEVEQFF

SEQ ID NO: 280765 - protein, 12 aa, Homo sapiens
  CDR3 for alpha chain variable domain of TCR clone 140383 (TRAV26-1, TRAJ43)
CIVRGNNTDMRF

SEQ ID NO: 280766 - protein, 13 aa, Homo sapiens
  CDR3 for beta chain variable domain of TCR clone 140383 (TRBV20-1, TRBJ2-3)
CSAIYPGADTQYF

SEQ ID NO: 280767 - protein, 14 aa, Homo sapiens
  CDR3 for alpha chain variable domain of TCR clone 140384 (TRAV12-2, TRAJ13)
CAVKKAGGYQKVTF

SEQ ID NO: 280768 - protein, 15 aa, Homo sapiens
  CDR3 for beta chain variable domain of TCR clone 140384 (TRBV12-4, TRBJ2-5)
CASSPPTGLQETQYF

SEQ ID NO: 280769 - protein, 13 aa, Homo sapiens
  CDR3 for alpha chain variable domain of TCR clone 140385 (TRAV8-3, TRAJ43)
CAVGPDNNNDMRF

SEQ ID NO: 280770 - protein, 13 aa, Homo sapiens
  CDR3 for beta chain variable domain of TCR clone 140385 (TRBV19, TRBJ2-7)
CASRKAGGSEQYF

SEQ ID NO: 280771 - protein, 17 aa, Homo sapiens
  CDR3 for alpha chain variable domain of TCR clone 140386 (TRAV3, TRAJ38)
CAVRDCLNAGNNRKLIW

SEQ ID NO: 280772 - protein, 15 aa, Homo sapiens
  CDR3 for beta chain variable domain of TCR clone 140386 (TRBV11-3, TRBJ2-3)
CASLKDGREGDTQYF

SEQ ID NO: 280773 - protein, 14 aa, Homo sapiens
  CDR3 for alpha chain variable domain of TCR clone 140387 (TRAV8-1, TRAJ13)
CAVKSSGGYQKVTF

SEQ ID NO: 280774 - protein, 15 aa, Homo sapiens
  CDR3 for beta chain variable domain of TCR clone 140387 (TRBV19, TRBJ2-7)
CASSIGGGLVNEQYF

SEQ ID NO: 280775 - protein, 14 aa, Homo sapiens
  CDR3 for alpha chain variable domain of TCR clone 140388 (TRAV1-2, TRAJ16)
CAVNRFSDGQKLIF

SEQ ID NO: 280776 - protein, 13 aa, Homo sapiens
  CDR3 for beta chain variable domain of TCR clone 140388 (TRBV29-1, TRBJ1-1)
CSVGDSRNTEAFF

SEQ ID NO: 280777 - protein, 16 aa, Homo sapiens
  CDR3 for alpha chain variable domain of TCR clone 140389 (TRAV36/DV7, TRAJ33)
WRPGNKVQDSNHQLIW

SEQ ID NO: 280778 - protein, 15 aa, Homo sapiens
  CDR3 for beta chain variable domain of TCR clone 140389 (TRBV29-1, TRBJ2-1)
CSVGRHALFYNEQFF

SEQ ID NO: 280779 - protein, 13 aa, Homo sapiens
  CDR3 for alpha chain variable domain of TCR clone 140390 (TRAV12-3, TRAJ40)
CAMSARGTYKYIF

SEQ ID NO: 280780 - protein, 16 aa, Homo sapiens
  CDR3 for beta chain variable domain of TCR clone 140390 (TRBV20-1, TRBJ2-3)
CSGEAGLAGGQDMQYF

SEQ ID NO: 280781 - protein, 14 aa, Homo sapiens
  CDR3 for alpha chain variable domain of TCR clone 140391 (TRAV1-2, TRAJ8)
CAVREDTGFQKLGF

SEQ ID NO: 280782 - protein, 14 aa, Homo sapiens
  CDR3 for beta chain variable domain of TCR clone 140391 (TRBV11-2, TRBJ2-3)
CASSRLARTDTQYF

SEQ ID NO: 280783 - protein, 15 aa, Homo sapiens
  CDR3 for alpha chain variable domain of TCR clone 140392 (TRAV21, TRAJ22)
CAVRLFFRFCKATDL

SEQ ID NO: 280784 - protein, 14 aa, Homo sapiens
  CDR3 for beta chain variable domain of TCR clone 140392 (TRBV19, TRBJ1-5)
CASRAPDSFLSQHF

SEQ ID NO: 280785 - protein, 14 aa, Homo sapiens
  CDR3 for alpha chain variable domain of TCR clone 140393 (TRAV12-1, TRAJ27)
CGEHIRTNAGKPTF

SEQ ID NO: 280786 - protein, 11 aa, Homo sapiens
  CDR3 for beta chain variable domain of TCR clone 140393 (TRBV12-4, TRBJ2-3)
CASTATDTQYF

SEQ ID NO: 280787 - protein, 16 aa, Homo sapiens
  CDR3 for alpha chain variable domain of TCR clone 140394 (TRAV36/DV7, TRAJ33)
WRPGNKVQDSNYQLIW

SEQ ID NO: 280788 - protein, 16 aa, Homo sapiens
  CDR3 for beta chain variable domain of TCR clone 140394 (TRBV4-2, TRBJ2-1)
CASSQETATPYNEQFF

SEQ ID NO: 280789 - protein, 14 aa, Homo sapiens
  CDR3 for alpha chain variable domain of TCR clone 140395 (TRAV17, TRAJ5)
CATVALTGRRALTF

SEQ ID NO: 280790 - protein, 15 aa, Homo sapiens
  CDR3 for beta chain variable domain of TCR clone 140395 (TRBV5-5, TRBJ1-5)
CASSSTPGSNQPQHF

SEQ ID NO: 280791 - protein, 12 aa, Homo sapiens
  CDR3 for alpha chain variable domain of TCR clone 140396 (TRAV22, TRAJ22)
CAPGGSARQLTF

SEQ ID NO: 280792 - protein, 15 aa, Homo sapiens
  CDR3 for beta chain variable domain of TCR clone 140396 (TRBV5-1, TRBJ2-1)
CASSLVANSYNEQFF

SEQ ID NO: 280793 - protein, 12 aa, Homo sapiens
  CDR3 for alpha chain variable domain of TCR clone 140397 (TRAV12-2, TRAJ7)
CAVMGGNNRLAF

SEQ ID NO: 280794 - protein, 17 aa, Homo sapiens
  CDR3 for beta chain variable domain of TCR clone 140397 (TRBV7-9, TRBJ2-3)
YASSPTVAGDLTDTQYF

SEQ ID NO: 280795 - protein, 18 aa, Homo sapiens
  CDR3 for alpha chain variable domain of TCR clone 140398 (TRAV12-3, TRAJ52)
CAMSQTNAGGTSYGKLTF

SEQ ID NO: 280796 - protein, 17 aa, Homo sapiens
  CDR3 for beta chain variable domain of TCR clone 140398 (TRBV7-3, TRBJ2-3)
CASSLMKRMRGADTQYF

SEQ ID NO: 280797 - protein, 14 aa, Homo sapiens
  CDR3 for alpha chain variable domain of TCR clone 140399 (TRAV12-2, TRAJ17)
CAVNIKAAGNKLTF

SEQ ID NO: 280798 - protein, 14 aa, Homo sapiens
  CDR3 for beta chain variable domain of TCR clone 140399 (TRBV19, TRBJ2-1)
CASSMGSGATEQFF

SEQ ID NO: 280799 - protein, 13 aa, Homo sapiens
  CDR3 for alpha chain variable domain of TCR clone 140400 (TRAV27, TRAJ45)
CRSSGGGADGLTF

SEQ ID NO: 280800 - protein, 13 aa, Homo sapiens
  CDR3 for beta chain variable domain of TCR clone 140400 (TRBV20-1, TRBJ1-1)
CSARVGGNTEAFF

SEQ ID NO: 280801 - protein, 14 aa, Homo sapiens
  CDR3 for alpha chain variable domain of TCR clone 140401 (TRAV12-2, TRAJ40)
CAVKIPSGTYKYIF

SEQ ID NO: 280802 - protein, 18 aa, Homo sapiens
  CDR3 for beta chain variable domain of TCR clone 140401 (TRBV11-2, TRBJ2-3)
CASSLGGAARGAPNTQYF

SEQ ID NO: 280803 - protein, 13 aa, Homo sapiens
  CDR3 for alpha chain variable domain of TCR clone 140402 (TRAV3, TRAJ21)
CAVREPDFNKFYF

SEQ ID NO: 280804 - protein, 19 aa, Homo sapiens
  CDR3 for beta chain variable domain of TCR clone 140402 (TRBV5-1, TRBJ2-4)
FAPAASRLAGEWTKNIQYF

SEQ ID NO: 280805 - protein, 11 aa, Homo sapiens
  CDR3 for alpha chain variable domain of TCR clone 140403 (TRAV2, TRAJ13)
CASGGYQKVTF

SEQ ID NO: 280806 - protein, 16 aa, Homo sapiens
  CDR3 for beta chain variable domain of TCR clone 140403 (TRBV19, TRBJ2-3)
CASSPGAASRTDTQYF

SEQ ID NO: 280807 - protein, 14 aa, Homo sapiens
  CDR3 for alpha chain variable domain of TCR clone 140404 (TRAV17, TRAJ33)
CATDARRSNYQLIW

SEQ ID NO: 280808 - protein, 14 aa, Homo sapiens
  CDR3 for beta chain variable domain of TCR clone 140404 (TRBV25-1, TRBJ1-4)
CASSGGGQHEKLFF

SEQ ID NO: 280809 - protein, 20 aa, Homo sapiens
  CDR3 for alpha chain variable domain of TCR clone 140405 (TRAV12-1, TRAJ42)
SSVIQPPTSVKGGSQGNLIF

SEQ ID NO: 280810 - protein, 14 aa, Homo sapiens
  CDR3 for beta chain variable domain of TCR clone 140405 (TRBV25-1, TRBJ1-1)
CASTHLGGNTEAVF

SEQ ID NO: 280811 - protein, 14 aa, Homo sapiens
  CDR3 for alpha chain variable domain of TCR clone 140406 (TRAV13-2, TRAJ11)
CAETGNSGYSTLTF

SEQ ID NO: 280812 - protein, 14 aa, Homo sapiens
  CDR3 for beta chain variable domain of TCR clone 140406 (TRBV4-1, TRBJ1-5)
CASSQGPTNQPQHF

SEQ ID NO: 280813 - protein, 12 aa, Homo sapiens
  CDR3 for alpha chain variable domain of TCR clone 140407 (TRAV12-3, TRAJ17)
CAMTLTGNKLTF

SEQ ID NO: 280814 - protein, 14 aa, Homo sapiens
  CDR3 for beta chain variable domain of TCR clone 140407 (TRBV2, TRBJ1-2)
CASNEGTGPYGYTF

SEQ ID NO: 280815 - protein, 12 aa, Homo sapiens
  CDR3 for alpha chain variable domain of TCR clone 140408 (TRAV21, TRAJ49)
CAVNDGGNQFYF

SEQ ID NO: 280816 - protein, 13 aa, Homo sapiens
  CDR3 for beta chain variable domain of TCR clone 140408 (TRBV7-2, TRBJ2-2)
CASSLAVTGELFF

SEQ ID NO: 280817 - protein, 11 aa, Homo sapiens
  CDR3 for alpha chain variable domain of TCR clone 140409 (TRAV29/DV5, TRAJ47)
CAATYGNKLVF

SEQ ID NO: 280818 - protein, 17 aa, Homo sapiens
  CDR3 for beta chain variable domain of TCR clone 140409 (TRBV7-9, TRBJ2-1)
CASSLGAGYPSYNEQFF

SEQ ID NO: 280819 - protein, 14 aa, Homo sapiens
  CDR3 for alpha chain variable domain of TCR clone 140410 (TRAV8-2, TRAJ4)
CVVSPSGGYNKLIF

SEQ ID NO: 280820 - protein, 15 aa, Homo sapiens
  CDR3 for beta chain variable domain of TCR clone 140410 (TRBV7-2, TRBJ2-7)
CASSLKGALTYEQYF

SEQ ID NO: 280821 - protein, 14 aa, Homo sapiens
  CDR3 for alpha chain variable domain of TCR clone 140411 (TRAV12-1, TRAJ34)
CVVNLDYSTDKLIF

SEQ ID NO: 280822 - protein, 17 aa, Homo sapiens
  CDR3 for beta chain variable domain of TCR clone 140411 (TRBV20-1, TRBJ2-7)
CSAAGTSGGGSSYEQYF

SEQ ID NO: 280823 - protein, 15 aa, Homo sapiens
  CDR3 for alpha chain variable domain of TCR clone 140412 (TRAV17, TRAJ13)
CATDAGSGGYPKVTF

SEQ ID NO: 280824 - protein, 10 aa, Homo sapiens
  CDR3 for beta chain variable domain of TCR clone 140412 (TRBV11-2, TRBJ2-1)
PGVEYNEQFF

SEQ ID NO: 280825 - protein, 13 aa, Homo sapiens
  CDR3 for alpha chain variable domain of TCR clone 140413 (TRAV27, TRAJ41)
CAGEGNSGYALNF

SEQ ID NO: 280826 - protein, 14 aa, Homo sapiens
  CDR3 for beta chain variable domain of TCR clone 140413 (TRBV20-1, TRBJ1-5)
CSAPGTGVGQPQHF

SEQ ID NO: 280827 - protein, 14 aa, Homo sapiens
  CDR3 for alpha chain variable domain of TCR clone 140414 (TRAV12-1, TRAJ26)
CVVKGGNYGQNFVS

SEQ ID NO: 280828 - protein, 17 aa, Homo sapiens
  CDR3 for beta chain variable domain of TCR clone 140414 (TRBV11-2, TRBJ2-6)
CASSQRDIFSGANVLTF

SEQ ID NO: 280829 - protein, 15 aa, Homo sapiens
  CDR3 for alpha chain variable domain of TCR clone 140415 (TRAV12-1, TRAJ9)
CVVSCGDTGVFKTIF

SEQ ID NO: 280830 - protein, 13 aa, Homo sapiens
  CDR3 for beta chain variable domain of TCR clone 140415 (TRBV2, TRBJ1-4)
CASSERAGEKLFF

SEQ ID NO: 280831 - protein, 13 aa, Homo sapiens
  CDR3 for alpha chain variable domain of TCR clone 140416 (TRAV36/DV7, TRAJ33)
CAVDMDSNYQLIW

SEQ ID NO: 280832 - protein, 16 aa, Homo sapiens
  CDR3 for beta chain variable domain of TCR clone 140416 (TRBV18, TRBJ1-1)
CASSPGVGGRGGEAFF

SEQ ID NO: 280833 - protein, 11 aa, Homo sapiens
  CDR3 for alpha chain variable domain of TCR clone 140417 (TRAV12-1, TRAJ21)
CVVNNFNKFYF

SEQ ID NO: 280834 - protein, 17 aa, Homo sapiens
  CDR3 for beta chain variable domain of TCR clone 140417 (TRBV4-1, TRBJ2-1)
CASSQGRGGGLYNEQFF

SEQ ID NO: 280835 - protein, 16 aa, Homo sapiens
  CDR3 for alpha chain variable domain of TCR clone 140418 (TRAV27, TRAJ13)
CAGAKSDSGGYQKVTF

SEQ ID NO: 280836 - protein, 15 aa, Homo sapiens
  CDR3 for beta chain variable domain of TCR clone 140418 (TRBV27, TRBJ2-1)
CASSNGGGSSNEQFF

SEQ ID NO: 280837 - protein, 14 aa, Homo sapiens
  CDR3 for alpha chain variable domain of TCR clone 140419 (TRAV12-2, TRAJ45)
CAVNIGGGADGRTF

SEQ ID NO: 280838 - protein, 17 aa, Homo sapiens
  CDR3 for beta chain variable domain of TCR clone 140419 (TRBV7-8, TRBJ2-6)
CASSAGTGGAGANVLTF

SEQ ID NO: 280839 - protein, 13 aa, Homo sapiens
  CDR3 for alpha chain variable domain of TCR clone 140420 (TRAV17, TRAJ5)
CALRGTGRRSLTF

SEQ ID NO: 280840 - protein, 12 aa, Homo sapiens
  CDR3 for beta chain variable domain of TCR clone 140420 (TRBV7-8, TRBJ2-7)
CASSLGDREQYF

SEQ ID NO: 280841 - protein, 17 aa, Homo sapiens
  CDR3 for alpha chain variable domain of TCR clone 140421 (TRAV12-3, TRAJ6)
CAMSARGGAGGSYIPTF

SEQ ID NO: 280842 - protein, 17 aa, Homo sapiens
  CDR3 for beta chain variable domain of TCR clone 140421 (TRBV13, TRBJ2-3)
CASSLSRVAGGRNTQYF

SEQ ID NO: 280843 - protein, 13 aa, Homo sapiens
  CDR3 for alpha chain variable domain of TCR clone 140422 (TRAV12-2, TRAJ12)
CAGPEDSSYKLIF

SEQ ID NO: 280844 - protein, 13 aa, Homo sapiens
  CDR3 for beta chain variable domain of TCR clone 140422 (TRBV28, TRBJ2-1)
CASSLSGRDEQFF

SEQ ID NO: 280845 - protein, 14 aa, Homo sapiens
  CDR3 for alpha chain variable domain of TCR clone 140423 (TRAV13-1, TRAJ35)
CAASKGGFGNVLHC

SEQ ID NO: 280846 - protein, 14 aa, Homo sapiens
  CDR3 for beta chain variable domain of TCR clone 140423 (TRBV7-2, TRBJ2-7)
CASSPKTSVYEQYF

SEQ ID NO: 280847 - protein, 16 aa, Homo sapiens
  CDR3 for alpha chain variable domain of TCR clone 140424 (TRAV8-3, TRAJ44)
CAVGTLMTGTASKPTF

SEQ ID NO: 280848 - protein, 15 aa, Homo sapiens
  CDR3 for beta chain variable domain of TCR clone 140424 (TRBV9, TRBJ1-6)
CASSVAGTGDSPLHF

SEQ ID NO: 280849 - protein, 14 aa, Homo sapiens
  CDR3 for alpha chain variable domain of TCR clone 140425 (TRAV12-2, TRAJ15)
CAPHTGQAGTALIF

SEQ ID NO: 280850 - protein, 18 aa, Homo sapiens
  CDR3 for beta chain variable domain of TCR clone 140425 (TRBV7-9, TRBJ2-7)
CASSLTTSGSRTWYEQYF

SEQ ID NO: 280851 - protein, 12 aa, Homo sapiens
  CDR3 for alpha chain variable domain of TCR clone 140426 (TRAV13-1, TRAJ21)
CAAKEGFNKFFF

SEQ ID NO: 280852 - protein, 15 aa, Homo sapiens
  CDR3 for beta chain variable domain of TCR clone 140426 (TRBV7-9, TRBJ1-6)
CASSSPGRGNSPLHF

SEQ ID NO: 280853 - protein, 16 aa, Homo sapiens
  CDR3 for alpha chain variable domain of TCR clone 140427 (TRAV20, TRAJ22)
CAVQASSSGSARQLTF

SEQ ID NO: 280854 - protein, 13 aa, Homo sapiens
  CDR3 for beta chain variable domain of TCR clone 140427 (TRBV7-2, TRBJ2-5)
CASSLTSVETQYF

SEQ ID NO: 280855 - protein, 12 aa, Homo sapiens
  CDR3 for alpha chain variable domain of TCR clone 140428 (TRAV12-3, TRAJ40)
CAMSSGTYKYIF

SEQ ID NO: 280856 - protein, 15 aa, Homo sapiens
  CDR3 for beta chain variable domain of TCR clone 140428 (TRBV7-3, TRBJ2-2)
CASSETGQGTGELFF

SEQ ID NO: 280857 - protein, 14 aa, Homo sapiens
  CDR3 for alpha chain variable domain of TCR clone 140429 (TRAV1-2, TRAJ16)
CAVNRFSDGPKLLF

SEQ ID NO: 280858 - protein, 15 aa, Homo sapiens
  CDR3 for beta chain variable domain of TCR clone 140429 (TRBV19, TRBJ1-1)
CASTSGQIQNTEAFF

SEQ ID NO: 280859 - protein, 14 aa, Homo sapiens
  CDR3 for alpha chain variable domain of TCR clone 140430 (TRAV13-1, TRAJ35)
CAASKGGFGNVLHC

SEQ ID NO: 280860 - protein, 16 aa, Homo sapiens
  CDR3 for beta chain variable domain of TCR clone 140430 (TRBV28, TRBJ1-5)
CASSLTGQGWNQPQHF

SEQ ID NO: 280861 - protein, 11 aa, Homo sapiens
  CDR3 for alpha chain variable domain of TCR clone 140431 (TRAV17, TRAJ49)
CAADAGNQFYF

SEQ ID NO: 280862 - protein, 16 aa, Homo sapiens
  CDR3 for beta chain variable domain of TCR clone 140431 (TRBV7-2, TRBJ1-2)
CASSPTSGTSLGGYTF

SEQ ID NO: 280863 - protein, 13 aa, Homo sapiens
  CDR3 for alpha chain variable domain of TCR clone 140432 (TRAV12-2, TRAJ6)
CAVNVSRKLHTYI

SEQ ID NO: 280864 - protein, 14 aa, Homo sapiens
  CDR3 for beta chain variable domain of TCR clone 140432 (TRBV7-8, TRBJ2-3)
CASSLEAGTDTQYF

SEQ ID NO: 280865 - protein, 12 aa, Homo sapiens
  CDR3 for alpha chain variable domain of TCR clone 140433 (TRAV13-1, TRAJ42)
VNYGGSQGNLIF

SEQ ID NO: 280866 - protein, 15 aa, Homo sapiens
  CDR3 for beta chain variable domain of TCR clone 140433 (TRBV20-1, TRBJ2-1)
CSASSAGRSYNEQFF

SEQ ID NO: 280867 - protein, 16 aa, Homo sapiens
  CDR3 for alpha chain variable domain of TCR clone 140434 (TRAV3, TRAJ37)
CAVRGKGSGNTGQLIF

SEQ ID NO: 280868 - protein, 13 aa, Homo sapiens
  CDR3 for beta chain variable domain of TCR clone 140434 (TRBV7-3, TRBJ1-1)
CASSQDWGAEAVF

SEQ ID NO: 280869 - protein, 16 aa, Homo sapiens
  CDR3 for alpha chain variable domain of TCR clone 140435 (TRAV14/DV4, TRAJ53)
CAMREGGGGSNYKLTF

SEQ ID NO: 280870 - protein, 16 aa, Homo sapiens
  CDR3 for beta chain variable domain of TCR clone 140435 (TRBV28, TRBJ2-1)
CASSSPEYPRDNEQFF

SEQ ID NO: 280871 - protein, 19 aa, Homo sapiens
  CDR3 for alpha chain variable domain of TCR clone 140436 (TRAV26-1, TRAJ52)
CIVRVANNAGGTSYGKLTF

SEQ ID NO: 280872 - protein, 12 aa, Homo sapiens
  CDR3 for beta chain variable domain of TCR clone 140436 (TRBV7-3, TRBJ2-1)
CASSFQSGPQFF

SEQ ID NO: 280873 - protein, 13 aa, Homo sapiens
  CDR3 for alpha chain variable domain of TCR clone 140437 (TRAV21, TRAJ15)
CAVRNQAGTALIF

SEQ ID NO: 280874 - protein, 16 aa, Homo sapiens
  CDR3 for beta chain variable domain of TCR clone 140437 (TRBV20-1, TRBJ2-5)
CSPGGTSGGYMEPQYF

SEQ ID NO: 280875 - protein, 15 aa, Homo sapiens
  CDR3 for alpha chain variable domain of TCR clone 140438 (TRAV8-6, TRAJ10)
CAVSDQAGGGNKLTF

SEQ ID NO: 280876 - protein, 12 aa, Homo sapiens
  CDR3 for beta chain variable domain of TCR clone 140438 (TRBV7-9, TRBJ1-6)
CASSLMTSPLHF

SEQ ID NO: 280877 - protein, 15 aa, Homo sapiens
  CDR3 for alpha chain variable domain of TCR clone 140439 (TRAV3, TRAJ17)
CAVRDTGAAGNKLTF

SEQ ID NO: 280878 - protein, 12 aa, Homo sapiens
  CDR3 for beta chain variable domain of TCR clone 140439 (TRBV11-2, TRBJ2-1)
CASSPGNNEQFF

SEQ ID NO: 280879 - protein, 13 aa, Homo sapiens
  CDR3 for alpha chain variable domain of TCR clone 140440 (TRAV1-2, TRAJ9)
CAVLNTGGFKTIF

SEQ ID NO: 280880 - protein, 16 aa, Homo sapiens
  CDR3 for beta chain variable domain of TCR clone 140440 (TRBV7-2, TRBJ2-3)
CQQLSRGTSGDSEQYF

SEQ ID NO: 280881 - protein, 15 aa, Homo sapiens
  CDR3 for alpha chain variable domain of TCR clone 140441 (TRAV8-3, TRAJ41)
CAVGSNANSGYALNF

SEQ ID NO: 280882 - protein, 17 aa, Homo sapiens
  CDR3 for beta chain variable domain of TCR clone 140441 (TRBV25-1, TRBJ2-1)
CASSASGQGRGVYEQFF

SEQ ID NO: 280883 - protein, 13 aa, Homo sapiens
  CDR3 for alpha chain variable domain of TCR clone 140442 (TRAV16, TRAJ54)
CALAKGGAQKLGF

SEQ ID NO: 280884 - protein, 12 aa, Homo sapiens
  CDR3 for beta chain variable domain of TCR clone 140442 (TRBV11-3, TRBJ1-1)
CASSHRQGEAFF

SEQ ID NO: 280885 - protein, 13 aa, Homo sapiens
  CDR3 for alpha chain variable domain of TCR clone 140443 (TRAV2, TRAJ40)
CAVVTLGTYKYIF

SEQ ID NO: 280886 - protein, 16 aa, Homo sapiens
  CDR3 for beta chain variable domain of TCR clone 140443 (TRBV19, TRBJ2-1)
CASSKAGPSSYNEQFF

SEQ ID NO: 280887 - protein, 16 aa, Homo sapiens
  CDR3 for alpha chain variable domain of TCR clone 140444 (TRAV30, TRAJ24)
CGTEIVDADSWGKFQF

SEQ ID NO: 280888 - protein, 14 aa, Homo sapiens
  CDR3 for beta chain variable domain of TCR clone 140444 (TRBV19, TRBJ2-1)
CASSAGLSGNEQFF

SEQ ID NO: 280889 - protein, 16 aa, Homo sapiens
  CDR3 for alpha chain variable domain of TCR clone 140445 (TRAV30, TRAJ24)
CGTEIGDADSWGKFQF

SEQ ID NO: 280890 - protein, 12 aa, Homo sapiens
  CDR3 for beta chain variable domain of TCR clone 140445 (TRBV7-8, TRBJ2-7)
CASSLGDREQYF

SEQ ID NO: 280891 - protein, 11 aa, Homo sapiens
  CDR3 for alpha chain variable domain of TCR clone 140446 (TRAV35, TRAJ34)
CWARNTDKLIF

SEQ ID NO: 280892 - protein, 17 aa, Homo sapiens
  CDR3 for beta chain variable domain of TCR clone 140446 (TRBV18, TRBJ2-1)
CASSPRVAGGSYNEQFF

SEQ ID NO: 280893 - protein, 15 aa, Homo sapiens
  CDR3 for alpha chain variable domain of TCR clone 140447 (TRAV26-2, TRAJ13)
CILRDLSGGYQKVTF

SEQ ID NO: 280894 - protein, 14 aa, Homo sapiens
  CDR3 for beta chain variable domain of TCR clone 140447 (TRBV4-1, TRBJ2-3)
CASSQEGSTETQYF

SEQ ID NO: 280895 - protein, 12 aa, Homo sapiens
  CDR3 for alpha chain variable domain of TCR clone 140448 (TRAV1-1, TRAJ24)
CAATDSWGKLQF

SEQ ID NO: 280896 - protein, 15 aa, Homo sapiens
  CDR3 for beta chain variable domain of TCR clone 140448 (TRBV6-3, TRBJ2-7)
CASSSPGTVLYEQYF

SEQ ID NO: 280897 - protein, 13 aa, Homo sapiens
  CDR3 for alpha chain variable domain of TCR clone 140449 (TRAV12-1, TRAJ26)
SATYLYYGQNFVY

SEQ ID NO: 280898 - protein, 16 aa, Homo sapiens
  CDR3 for beta chain variable domain of TCR clone 140449 (TRBV12-4, TRBJ2-7)
CASRSTGTGPSYEQYF

SEQ ID NO: 280899 - protein, 16 aa, Homo sapiens
  CDR3 for alpha chain variable domain of TCR clone 140450 (TRAV30, TRAJ24)
CGTEIVDADSWGKFQF

SEQ ID NO: 280900 - protein, 15 aa, Homo sapiens
  CDR3 for beta chain variable domain of TCR clone 140450 (TRBV20-1, TRBJ2-7)
FSARDRVSGMDEQYF

SEQ ID NO: 280901 - protein, 16 aa, Homo sapiens
  CDR3 for alpha chain variable domain of TCR clone 140451 (TRAV3, TRAJ37)
CAVRVRGSGNTGKLVF

SEQ ID NO: 280902 - protein, 13 aa, Homo sapiens
  CDR3 for beta chain variable domain of TCR clone 140451 (TRBV14, TRBJ2-1)
CSSSQDRRNEQFF

SEQ ID NO: 280903 - protein, 13 aa, Homo sapiens
  CDR3 for alpha chain variable domain of TCR clone 140452 (TRAV21, TRAJ37)
CAVSSGNTGKLIF

SEQ ID NO: 280904 - protein, 16 aa, Homo sapiens
  CDR3 for beta chain variable domain of TCR clone 140452 (TRBV27, TRBJ2-2)
CASSFRGLVRTGELFF

SEQ ID NO: 280905 - protein, 16 aa, Homo sapiens
  CDR3 for alpha chain variable domain of TCR clone 140453 (TRAV12-1, TRAJ53)
CVVTSVAGGSNYKLTF

SEQ ID NO: 280906 - protein, 13 aa, Homo sapiens
  CDR3 for beta chain variable domain of TCR clone 140453 (TRBV10-3, TRBJ2-7)
CASKLAVNYEQYF

SEQ ID NO: 280907 - protein, 16 aa, Homo sapiens
  CDR3 for alpha chain variable domain of TCR clone 140454 (TRAV8-3, TRAJ6)
CAVGAEHQEEATYLNL

SEQ ID NO: 280908 - protein, 14 aa, Homo sapiens
  CDR3 for beta chain variable domain of TCR clone 140454 (TRBV6-6, TRBJ2-7)
CASSDSGAGYEQYF

SEQ ID NO: 280909 - protein, 16 aa, Homo sapiens
  CDR3 for alpha chain variable domain of TCR clone 140455 (TRAV26-1, TRAJ23)
CIVRPRFYNQGGKLIF

SEQ ID NO: 280910 - protein, 17 aa, Homo sapiens
  CDR3 for beta chain variable domain of TCR clone 140455 (TRBV11-2, TRBJ2-1)
CASSLYPPGVEYNEQFF

SEQ ID NO: 280911 - protein, 13 aa, Homo sapiens
  CDR3 for alpha chain variable domain of TCR clone 140456 (TRAV12-3, TRAJ13)
CAMGTGGYQKVTF

SEQ ID NO: 280912 - protein, 16 aa, Homo sapiens
  CDR3 for beta chain variable domain of TCR clone 140456 (TRBV28, TRBJ2-7)
CASSPWVATGDLSQYF

SEQ ID NO: 280913 - protein, 13 aa, Homo sapiens
  CDR3 for alpha chain variable domain of TCR clone 140457 (TRAV17, TRAJ7)
CATDNYGNNRLAF

SEQ ID NO: 280914 - protein, 20 aa, Homo sapiens
  CDR3 for beta chain variable domain of TCR clone 140457 (TRBV19, TRBJ2-7)
CASTQVAPESLRAVLRAGHQ

SEQ ID NO: 280915 - protein, 11 aa, Homo sapiens
  CDR3 for alpha chain variable domain of TCR clone 140458 (TRAV3, TRAJ21)
CAVGNFNKFYF

SEQ ID NO: 280916 - protein, 16 aa, Homo sapiens
  CDR3 for beta chain variable domain of TCR clone 140458 (TRBV20-1, TRBJ1-2)
CSASMGQGVANYGYTL

SEQ ID NO: 280917 - protein, 21 aa, Homo sapiens
  CDR3 for alpha chain variable domain of TCR clone 140459 (TRAV26-1, )
CIADNAGNNHIQNPDPAVYQL

SEQ ID NO: 280918 - protein, 13 aa, Homo sapiens
  CDR3 for beta chain variable domain of TCR clone 140459 (TRBV20-1, TRBJ1-1)
CSARGGGNTEAFF

SEQ ID NO: 280919 - protein, 14 aa, Homo sapiens
  CDR3 for alpha chain variable domain of TCR clone 140460 (TRAV1-1, TRAJ35)
CAVRSIGFGNVLHC

SEQ ID NO: 280920 - protein, 15 aa, Homo sapiens
  CDR3 for beta chain variable domain of TCR clone 140460 (TRBV11-3, TRBJ2-3)
CASLKDGREGDTQYF

SEQ ID NO: 280921 - protein, 11 aa, Homo sapiens
  CDR3 for alpha chain variable domain of TCR clone 140461 (TRAV12-3, TRAJ49)
CAANTGNQFYF

SEQ ID NO: 280922 - protein, 16 aa, Homo sapiens
  CDR3 for beta chain variable domain of TCR clone 140461 (TRBV7-8, TRBJ2-4)
CASSAERTLAKNIQYF

SEQ ID NO: 280923 - protein, 15 aa, Homo sapiens
  CDR3 for alpha chain variable domain of TCR clone 140462 (TRAV21, TRAJ24)
CAARSSTDSGGKLQF

SEQ ID NO: 280924 - protein, 13 aa, Homo sapiens
  CDR3 for beta chain variable domain of TCR clone 140462 (TRBV11-2, TRBJ2-5)
CASSATGEETQYF

SEQ ID NO: 280925 - protein, 12 aa, Homo sapiens
  CDR3 for alpha chain variable domain of TCR clone 140463 (TRAV2, TRAJ9)
CAVGAGGFKTIF

SEQ ID NO: 280926 - protein, 13 aa, Homo sapiens
  CDR3 for beta chain variable domain of TCR clone 140463 (TRBV12-5, TRBJ2-1)
CASGLGRGNEQFF

SEQ ID NO: 280927 - protein, 11 aa, Homo sapiens
  CDR3 for alpha chain variable domain of TCR clone 140464 (TRAV29/DV5, TRAJ31)
CAASYRDRLMF

SEQ ID NO: 280928 - protein, 19 aa, Homo sapiens
  CDR3 for beta chain variable domain of TCR clone 140464 (TRBV19, TRBJ2-5)
CASSIGQVADFFLGETQYF

SEQ ID NO: 280929 - protein, 16 aa, Homo sapiens
  CDR3 for alpha chain variable domain of TCR clone 140465 (TRAV17, TRAJ28)
CATASVSGAGNYQLTF

SEQ ID NO: 280930 - protein, 14 aa, Homo sapiens
  CDR3 for beta chain variable domain of TCR clone 140465 (TRBV19, TRBJ2-1)
CASEVTGARNEQFF

SEQ ID NO: 280931 - protein, 13 aa, Homo sapiens
  CDR3 for alpha chain variable domain of TCR clone 140466 (TRAV3, TRAJ20)
CAVRSLNDYKLSF

SEQ ID NO: 280932 - protein, 13 aa, Homo sapiens
  CDR3 for beta chain variable domain of TCR clone 140466 (TRBV6-1, TRBJ2-1)
CAGMDPTNNEHFF

SEQ ID NO: 280933 - protein, 15 aa, Homo sapiens
  CDR3 for alpha chain variable domain of TCR clone 140467 (TRAV12-3, TRAJ27)
CAMRAYNTNAGKSTF

SEQ ID NO: 280934 - protein, 15 aa, Homo sapiens
  CDR3 for beta chain variable domain of TCR clone 140467 (TRBV12-4, TRBJ2-5)
CASSPPTGLQETQYF

SEQ ID NO: 280935 - protein, 16 aa, Homo sapiens
  CDR3 for alpha chain variable domain of TCR clone 140468 (TRAV25, TRAJ53)
CAGPKGRGGSNYKLTF

SEQ ID NO: 280936 - protein, 17 aa, Homo sapiens
  CDR3 for beta chain variable domain of TCR clone 140468 (TRBV11-3, TRBJ2-6)
CASKWGQGLSGANVLTF

SEQ ID NO: 280937 - protein, 15 aa, Homo sapiens
  CDR3 for alpha chain variable domain of TCR clone 140469 (TRAV12-2, TRAJ57)
CPVSRGQGGSEKLVF

SEQ ID NO: 280938 - protein, 14 aa, Homo sapiens
  CDR3 for beta chain variable domain of TCR clone 140469 (TRBV20-1, TRBJ2-1)
CSAHPGLPYNEQFF

SEQ ID NO: 280939 - protein, 12 aa, Homo sapiens
  CDR3 for alpha chain variable domain of TCR clone 140470 (TRAV12-1, TRAJ9)
CVVHTGGFKTIF

SEQ ID NO: 280940 - protein, 16 aa, Homo sapiens
  CDR3 for beta chain variable domain of TCR clone 140470 (TRBV6-1, TRBJ2-1)
CDSSARLAGSYNEQFF

SEQ ID NO: 280941 - protein, 14 aa, Homo sapiens
  CDR3 for alpha chain variable domain of TCR clone 140471 (TRAV13-1, TRAJ42)
CAALAGGSQGNLIF

SEQ ID NO: 280942 - protein, 15 aa, Homo sapiens
  CDR3 for beta chain variable domain of TCR clone 140471 (TRBV20-1, TRBJ2-7)
CSARDRVSGMDEQYF

SEQ ID NO: 280943 - protein, 14 aa, Homo sapiens
  CDR3 for alpha chain variable domain of TCR clone 140472 (TRAV2, TRAJ37)
CAVDFTSNTGKQIF

SEQ ID NO: 280944 - protein, 16 aa, Homo sapiens
  CDR3 for beta chain variable domain of TCR clone 140472 (TRBV29-1, TRBJ2-7)
CSVEVVGTSGSYEQYF

SEQ ID NO: 280945 - protein, 14 aa, Homo sapiens
  CDR3 for alpha chain variable domain of TCR clone 140473 (TRAV1-2, TRAJ16)
CAVNRFSDGQKLLF

SEQ ID NO: 280946 - protein, 11 aa, Homo sapiens
  CDR3 for beta chain variable domain of TCR clone 140473 (TRBV12-4, TRBJ2-3)
CASTATGTQYF

SEQ ID NO: 280947 - protein, 13 aa, Homo sapiens
  CDR3 for alpha chain variable domain of TCR clone 140474 (TRAV13-1, TRAJ37)
CATRSGNTGKLIF

SEQ ID NO: 280948 - protein, 14 aa, Homo sapiens
  CDR3 for beta chain variable domain of TCR clone 140474 (TRBV12-4, TRBJ2-3)
CASSLGQGTDTQYF

SEQ ID NO: 280949 - protein, 14 aa, Homo sapiens
  CDR3 for alpha chain variable domain of TCR clone 140475 (TRAV12-3, TRAJ10)
SHLPLTGGGNKLTF

SEQ ID NO: 280950 - protein, 12 aa, Homo sapiens
  CDR3 for beta chain variable domain of TCR clone 140475 (TRBV7-3, TRBJ2-5)
CASSSPGGTEYF

SEQ ID NO: 280951 - protein, 10 aa, Homo sapiens
  CDR3 for alpha chain variable domain of TCR clone 140476 (TRAV8-3, TRAJ43)
CAVALAGMRF

SEQ ID NO: 280952 - protein, 14 aa, Homo sapiens
  CDR3 for beta chain variable domain of TCR clone 140476 (TRBV4-2, TRBJ2-1)
CASGLDRAYNEQFF

SEQ ID NO: 280953 - protein, 13 aa, Homo sapiens
  CDR3 for alpha chain variable domain of TCR clone 140477 (TRAV3, TRAJ15)
CAVRDQAGNALIF

SEQ ID NO: 280954 - protein, 15 aa, Homo sapiens
  CDR3 for beta chain variable domain of TCR clone 140477 (TRBV7-3, TRBJ2-1)
CASSPTGGGEVEQFF

SEQ ID NO: 280955 - protein, 16 aa, Homo sapiens
  CDR3 for alpha chain variable domain of TCR clone 140478 (TRAV22, TRAJ45)
CAVGRGKRGGADGLTF

SEQ ID NO: 280956 - protein, 17 aa, Homo sapiens
  CDR3 for beta chain variable domain of TCR clone 140478 (TRBV20-1, TRBJ1-5)
CSAREIPQGVGNQPQHF

SEQ ID NO: 280957 - protein, 11 aa, Homo sapiens
  CDR3 for alpha chain variable domain of TCR clone 140479 (TRAV35, TRAJ34)
CWARNTDKLIF

SEQ ID NO: 280958 - protein, 11 aa, Homo sapiens
  CDR3 for beta chain variable domain of TCR clone 140479 (TRBV12-4, TRBJ2-3)
CASTATDTQYF

SEQ ID NO: 280959 - protein, 15 aa, Homo sapiens
  CDR3 for alpha chain variable domain of TCR clone 140480 (TRAV8-6, TRAJ11)
CAVNFMNSGYRTLTF

SEQ ID NO: 280960 - protein, 17 aa, Homo sapiens
  CDR3 for beta chain variable domain of TCR clone 140480 (TRBV3-1, TRBJ2-5)
CASSNWGGTSGQETQYF

SEQ ID NO: 280961 - protein, 12 aa, Homo sapiens
  CDR3 for alpha chain variable domain of TCR clone 140481 (TRAV14/DV4, TRAJ47)
CAIPGDGNKLVF

SEQ ID NO: 280962 - protein, 14 aa, Homo sapiens
  CDR3 for beta chain variable domain of TCR clone 140481 (TRBV12-5, TRBJ1-3)
CASGPAGSGNTMYF

SEQ ID NO: 280963 - protein, 16 aa, Homo sapiens
  CDR3 for alpha chain variable domain of TCR clone 140482 (TRAV30, TRAJ32)
CGTESSYGGATTKLIF

SEQ ID NO: 280964 - protein, 13 aa, Homo sapiens
  CDR3 for beta chain variable domain of TCR clone 140482 (TRBV7-9, TRBJ1-2)
CASSLKQNYGYTF

SEQ ID NO: 280965 - protein, 14 aa, Homo sapiens
  CDR3 for alpha chain variable domain of TCR clone 140483 (TRAV2, TRAJ39)
CAVEGDNAGNMLTF

SEQ ID NO: 280966 - protein, 14 aa, Homo sapiens
  CDR3 for beta chain variable domain of TCR clone 140483 (TRBV28, TRBJ2-7)
CASSLRARGNELYF

SEQ ID NO: 280967 - protein, 14 aa, Homo sapiens
  CDR3 for alpha chain variable domain of TCR clone 140484 (TRAV1-2, TRAJ16)
CAVNRLSDGQKLLF

SEQ ID NO: 280968 - protein, 15 aa, Homo sapiens
  CDR3 for beta chain variable domain of TCR clone 140484 (TRBV7-9, TRBJ1-6)
CASSSPGRGSSPLHF

SEQ ID NO: 280969 - protein, 15 aa, Homo sapiens
  CDR3 for alpha chain variable domain of TCR clone 140485 (TRAV3, TRAJ22)
CAVRDRGGSARHLTF

SEQ ID NO: 280970 - protein, 13 aa, Homo sapiens
  CDR3 for beta chain variable domain of TCR clone 140485 (TRBV7-3, TRBJ2-1)
CASSPVAYNEQFF

SEQ ID NO: 280971 - protein, 14 aa, Homo sapiens
  CDR3 for alpha chain variable domain of TCR clone 140486 (TRAV1-2, TRAJ8)
CAVREYTGFQKLVF

SEQ ID NO: 280972 - protein, 12 aa, Homo sapiens
  CDR3 for beta chain variable domain of TCR clone 140486 (TRBV29-1, TRBJ2-3)
CSVTGGADTQYF

SEQ ID NO: 280973 - protein, 14 aa, Homo sapiens
  CDR3 for alpha chain variable domain of TCR clone 140487 (TRAV13-2, TRAJ41)
CAEYLSNSGYALNF

SEQ ID NO: 280974 - protein, 19 aa, Homo sapiens
  CDR3 for beta chain variable domain of TCR clone 140487 (TRBV7-9, TRBJ2-6)
CASSLESATVLPGANVLTF

SEQ ID NO: 280975 - protein, 16 aa, Homo sapiens
  CDR3 for alpha chain variable domain of TCR clone 140488 (TRAV26-1, TRAJ31)
CIVRPPVLNNNARLMF

SEQ ID NO: 280976 - protein, 15 aa, Homo sapiens
  CDR3 for beta chain variable domain of TCR clone 140488 (TRBV5-8, TRBJ2-7)
CASSLGSGSSYEQYF

SEQ ID NO: 280977 - protein, 12 aa, Homo sapiens
  CDR3 for alpha chain variable domain of TCR clone 140489 (TRAV21, TRAJ37)
CAVAPVTGKLIF

SEQ ID NO: 280978 - protein, 13 aa, Homo sapiens
  CDR3 for beta chain variable domain of TCR clone 140489 (TRBV20-1, TRBJ2-7)
CSARIPPAYEQYF

SEQ ID NO: 280979 - protein, 18 aa, Homo sapiens
  CDR3 for alpha chain variable domain of TCR clone 140490 (TRAV13-1, TRAJ52)
CAARKRSAGGTSYGKLTF

SEQ ID NO: 280980 - protein, 15 aa, Homo sapiens
  CDR3 for beta chain variable domain of TCR clone 140490 (TRBV6-3, TRBJ2-7)
CASSSPGTVFYEQYF

SEQ ID NO: 280981 - protein, 13 aa, Homo sapiens
  CDR3 for alpha chain variable domain of TCR clone 140491 (TRAV12-1, TRAJ21)
CVVTLYNFNKFYF

SEQ ID NO: 280982 - protein, 17 aa, Homo sapiens
  CDR3 for beta chain variable domain of TCR clone 140491 (TRBV24-1, TRBJ2-1)
CATSDVSTSGTYNEQFF

SEQ ID NO: 280983 - protein, 15 aa, Homo sapiens
  CDR3 for alpha chain variable domain of TCR clone 140492 (TRAV8-1, TRAJ23)
CAVNSHYNQGGKLIF

SEQ ID NO: 280984 - protein, 15 aa, Homo sapiens
  CDR3 for beta chain variable domain of TCR clone 140492 (TRBV11-3, TRBJ2-3)
CASLKDGREGDTQYF

SEQ ID NO: 280985 - protein, 13 aa, Homo sapiens
  CDR3 for alpha chain variable domain of TCR clone 140493 (TRAV35, TRAJ40)
CAGQLSGTYKYIF

SEQ ID NO: 280986 - protein, 14 aa, Homo sapiens
  CDR3 for beta chain variable domain of TCR clone 140493 (TRBV3-1, TRBJ2-5)
CGSSLQLAGETQYF

SEQ ID NO: 280987 - protein, 13 aa, Homo sapiens
  CDR3 for alpha chain variable domain of TCR clone 140494 (TRAV21, TRAJ20)
CAVGLRVDYKLSF

SEQ ID NO: 280988 - protein, 15 aa, Homo sapiens
  CDR3 for beta chain variable domain of TCR clone 140494 (TRBV12-4, TRBJ1-2)
CASSFPRGLSYGYTF

SEQ ID NO: 280989 - protein, 14 aa, Homo sapiens
  CDR3 for alpha chain variable domain of TCR clone 140495 (TRAV23/DV6, TRAJ4)
CAANLSGGYNKLMF

SEQ ID NO: 280990 - protein, 11 aa, Homo sapiens
  CDR3 for beta chain variable domain of TCR clone 140495 (TRBV7-9, TRBJ2-3)
CASSPIDTQYF

SEQ ID NO: 280991 - protein, 15 aa, Homo sapiens
  CDR3 for alpha chain variable domain of TCR clone 140496 (TRAV26-1, TRAJ28)
CIVRVAGAGSYQLTF

SEQ ID NO: 280992 - protein, 16 aa, Homo sapiens
  CDR3 for beta chain variable domain of TCR clone 140496 (TRBV19, TRBJ2-7)
CASSLIAGTYFYEQYF

SEQ ID NO: 280993 - protein, 16 aa, Homo sapiens
  CDR3 for alpha chain variable domain of TCR clone 140497 (TRAV23/DV6, TRAJ3)
CAARAPQQCFQDNLCI

SEQ ID NO: 280994 - protein, 17 aa, Homo sapiens
  CDR3 for beta chain variable domain of TCR clone 140497 (TRBV7-9, TRBJ2-3)
CASSPTVAGDLTDTQYF

SEQ ID NO: 280995 - protein, 16 aa, Homo sapiens
  CDR3 for alpha chain variable domain of TCR clone 140498 (TRAV26-1, TRAJ36)
CIVRVPDQTGAINLFF

SEQ ID NO: 280996 - protein, 14 aa, Homo sapiens
  CDR3 for beta chain variable domain of TCR clone 140498 (TRBV7-2, TRBJ2-5)
CASSPRGSSETQYF

SEQ ID NO: 280997 - protein, 16 aa, Homo sapiens
  CDR3 for alpha chain variable domain of TCR clone 140499 (TRAV12-1, TRAJ48)
CVVNMRDNFGNEKLTF

SEQ ID NO: 280998 - protein, 16 aa, Homo sapiens
  CDR3 for beta chain variable domain of TCR clone 140499 (TRBV7-6, TRBJ2-1)
GASSSVVAGTYNEQFF

SEQ ID NO: 280999 - protein, 14 aa, Homo sapiens
  CDR3 for alpha chain variable domain of TCR clone 140500 (TRAV36/DV7, TRAJ57)
CAVGFPGGSEKLVF

SEQ ID NO: 281000 - protein, 12 aa, Homo sapiens
  CDR3 for beta chain variable domain of TCR clone 140500 (TRBV19, TRBJ2-7)
CASTSGTYEQYV

SEQ ID NO: 281001 - protein, 13 aa, Homo sapiens
  CDR3 for alpha chain variable domain of TCR clone 140501 (TRAV13-2, TRAJ40)
CAEFTSGTYNYIF

SEQ ID NO: 281002 - protein, 12 aa, Homo sapiens
  CDR3 for beta chain variable domain of TCR clone 140501 (TRBV11-2, TRBJ2-2)
CASSLGGGELFF

SEQ ID NO: 281003 - protein, 10 aa, Homo sapiens
  CDR3 for alpha chain variable domain of TCR clone 140502 (TRAV26-1, TRAJ22)
RSGSARQLTF

SEQ ID NO: 281004 - protein, 17 aa, Homo sapiens
  CDR3 for beta chain variable domain of TCR clone 140502 (TRBV7-3, TRBJ2-3)
CASSLMKRMRGADTQYF

SEQ ID NO: 281005 - protein, 16 aa, Homo sapiens
  CDR3 for alpha chain variable domain of TCR clone 140503 (TRAV26-1, TRAJ38)
FIVRVELGGNNRKLIW

SEQ ID NO: 281006 - protein, 14 aa, Homo sapiens
  CDR3 for beta chain variable domain of TCR clone 140503 (TRBV5-1, TRBJ2-3)
CASSPGLAADTQYF

SEQ ID NO: 281007 - protein, 14 aa, Homo sapiens
  CDR3 for alpha chain variable domain of TCR clone 140504 (TRAV16, TRAJ15)
CALRPNQAGTALIL

SEQ ID NO: 281008 - protein, 16 aa, Homo sapiens
  CDR3 for beta chain variable domain of TCR clone 140504 (TRBV6-5, TRBJ2-2)
CASSYGRVPDTGELFF

SEQ ID NO: 281009 - protein, 14 aa, Homo sapiens
  CDR3 for alpha chain variable domain of TCR clone 140505 (TRAV12-3, TRAJ10)
SHLPLTGGGNKLTF

SEQ ID NO: 281010 - protein, 15 aa, Homo sapiens
  CDR3 for beta chain variable domain of TCR clone 140505 (TRBV7-9, TRBJ1-6)
CASSTPGRGNSPLHF

SEQ ID NO: 281011 - protein, 14 aa, Homo sapiens
  CDR3 for alpha chain variable domain of TCR clone 140506 (TRAV12-3, TRAJ12)
CAMSEVDSSYNLIF

SEQ ID NO: 281012 - protein, 14 aa, Homo sapiens
  CDR3 for beta chain variable domain of TCR clone 140506 (TRBV18, TRBJ1-4)
CASSPSREKLFLAV

SEQ ID NO: 281013 - protein, 13 aa, Homo sapiens
  CDR3 for alpha chain variable domain of TCR clone 140507 (TRAV1-1, TRAJ10)
CAVNSGGYQRVTF

SEQ ID NO: 281014 - protein, 12 aa, Homo sapiens
  CDR3 for beta chain variable domain of TCR clone 140507 (TRBV28, TRBJ2-1)
CASSVQINEQFF

SEQ ID NO: 281015 - protein, 11 aa, Homo sapiens
  CDR3 for alpha chain variable domain of TCR clone 140508 (TRAV1-1, TRAJ23)
CALRQGGKLLF

SEQ ID NO: 281016 - protein, 15 aa, Homo sapiens
  CDR3 for beta chain variable domain of TCR clone 140508 (TRBV20-1, TRBJ1-1)
CSASRGVTGNTEAFF

SEQ ID NO: 281017 - protein, 15 aa, Homo sapiens
  CDR3 for alpha chain variable domain of TCR clone 140509 (TRAV2, TRAJ15)
CAVEDRGQAGTALIF

SEQ ID NO: 281018 - protein, 13 aa, Homo sapiens
  CDR3 for beta chain variable domain of TCR clone 140509 (TRBV10-2, TRBJ2-7)
CASGASGGDEQYF

SEQ ID NO: 281019 - protein, 16 aa, Homo sapiens
  CDR3 for alpha chain variable domain of TCR clone 140510 (TRAV27, TRAJ13)
CAGAKSDSGGYQKVTF

SEQ ID NO: 281020 - protein, 14 aa, Homo sapiens
  CDR3 for beta chain variable domain of TCR clone 140510 (TRBV15, TRBJ2-3)
CATRSGTSTDTQYF

SEQ ID NO: 281021 - protein, 14 aa, Homo sapiens
  CDR3 for alpha chain variable domain of TCR clone 140511 (TRAV12-1, TRAJ30)
CVPTGTNRDDKIIF

SEQ ID NO: 281022 - protein, 13 aa, Homo sapiens
  CDR3 for beta chain variable domain of TCR clone 140511 (TRBV7-9, TRBJ2-1)
CASSLDVGNEQFF

SEQ ID NO: 281023 - protein, 14 aa, Homo sapiens
  CDR3 for alpha chain variable domain of TCR clone 140512 (TRAV1-1, TRAJ27)
CAVIYNTNAGKSTF

SEQ ID NO: 281024 - protein, 16 aa, Homo sapiens
  CDR3 for beta chain variable domain of TCR clone 140512 (TRBV13, TRBJ2-2)
CASSEVFGANTGELFF

SEQ ID NO: 281025 - protein, 14 aa, Homo sapiens
  CDR3 for alpha chain variable domain of TCR clone 140513 (TRAV16, TRAJ26)
CITVPSAYGQNFVF

SEQ ID NO: 281026 - protein, 14 aa, Homo sapiens
  CDR3 for beta chain variable domain of TCR clone 140513 (TRBV7-2, TRBJ2-7)
CASRSQGAAYEQYF

SEQ ID NO: 281027 - protein, 14 aa, Homo sapiens
  CDR3 for alpha chain variable domain of TCR clone 140514 (TRAV17, TRAJ12)
CAILPMASSYKLIF

SEQ ID NO: 281028 - protein, 11 aa, Homo sapiens
  CDR3 for beta chain variable domain of TCR clone 140514 (TRBV19, TRBJ1-1)
CASSIGSEAFF

SEQ ID NO: 281029 - protein, 12 aa, Homo sapiens
  CDR3 for alpha chain variable domain of TCR clone 140515 (TRAV13-1, TRAJ20)
CAASMGDYKLSF

SEQ ID NO: 281030 - protein, 14 aa, Homo sapiens
  CDR3 for beta chain variable domain of TCR clone 140515 (TRBV20-1, TRBJ2-5)
RSASDSGSGETQYF

SEQ ID NO: 281031 - protein, 15 aa, Homo sapiens
  CDR3 for alpha chain variable domain of TCR clone 140516 (TRAV17, TRAJ57)
CATGPSQGGPETLVF

SEQ ID NO: 281032 - protein, 14 aa, Homo sapiens
  CDR3 for beta chain variable domain of TCR clone 140516 (TRBV12-5, TRBJ2-5)
CASGSRTHQETQYF

SEQ ID NO: 281033 - protein, 14 aa, Homo sapiens
  CDR3 for alpha chain variable domain of TCR clone 140517 (TRAV12-1, TRAJ17)
CVVNYKAAGNKLTF

SEQ ID NO: 281034 - protein, 15 aa, Homo sapiens
  CDR3 for beta chain variable domain of TCR clone 140517 (TRBV7-2, TRBJ2-1)
CASTHGKGIYNEQFF

SEQ ID NO: 281035 - protein, 15 aa, Homo sapiens
  CDR3 for alpha chain variable domain of TCR clone 140518 (TRAV8-3, TRAJ45)
CASSYSGVGADGLTF

SEQ ID NO: 281036 - protein, 16 aa, Homo sapiens
  CDR3 for beta chain variable domain of TCR clone 140518 (TRBV7-9, TRBJ2-2)
CASSGFGGANTGELFF

SEQ ID NO: 281037 - protein, 14 aa, Homo sapiens
  CDR3 for alpha chain variable domain of TCR clone 140519 (TRAV9-2, TRAJ38)
CALRGAGNNRKLIW

SEQ ID NO: 281038 - protein, 14 aa, Homo sapiens
  CDR3 for beta chain variable domain of TCR clone 140519 (TRBV13, TRBJ2-2)
CASSFQEGAGELFF

SEQ ID NO: 281039 - protein, 13 aa, Homo sapiens
  CDR3 for alpha chain variable domain of TCR clone 140520 (TRAV17, TRAJ9)
CATDYTVGFKTIF

SEQ ID NO: 281040 - protein, 16 aa, Homo sapiens
  CDR3 for beta chain variable domain of TCR clone 140520 (TRBV7-7, TRBJ2-1)
CASSVASGTSYNEQFF

SEQ ID NO: 281041 - protein, 15 aa, Homo sapiens
  CDR3 for alpha chain variable domain of TCR clone 140521 (TRAV13-2, TRAJ53)
CAETVSGGSNYKLTF

SEQ ID NO: 281042 - protein, 14 aa, Homo sapiens
  CDR3 for beta chain variable domain of TCR clone 140521 (TRBV7-8, TRBJ2-3)
CASSLEAGTDTQYF

SEQ ID NO: 281043 - protein, 16 aa, Homo sapiens
  CDR3 for alpha chain variable domain of TCR clone 140522 (TRAV30, TRAJ24)
CGTEIVDADSWGKFQV

SEQ ID NO: 281044 - protein, 12 aa, Homo sapiens
  CDR3 for beta chain variable domain of TCR clone 140522 (TRBV12-4, TRBJ2-7)
CASSLGGYEQYF

SEQ ID NO: 281045 - protein, 12 aa, Homo sapiens
  CDR3 for alpha chain variable domain of TCR clone 140523 (TRAV8-4, TRAJ31)
CAASDSNAKLMF

SEQ ID NO: 281046 - protein, 14 aa, Homo sapiens
  CDR3 for beta chain variable domain of TCR clone 140523 (TRBV20-1, TRBJ2-7)
CSAKRGRSSYEQYF

SEQ ID NO: 281047 - protein, 16 aa, Homo sapiens
  CDR3 for alpha chain variable domain of TCR clone 140524 (TRAV12-1, TRAJ45)
CVVNGGIGGGADGLTF

SEQ ID NO: 281048 - protein, 15 aa, Homo sapiens
  CDR3 for beta chain variable domain of TCR clone 140524 (TRBV27, TRBJ2-7)
CASSTAGTGSYEQYF

SEQ ID NO: 281049 - protein, 14 aa, Homo sapiens
  CDR3 for alpha chain variable domain of TCR clone 140525 (TRAV26-1, TRAJ39)
CIVFTNNAGNMLTF

SEQ ID NO: 281050 - protein, 15 aa, Homo sapiens
  CDR3 for beta chain variable domain of TCR clone 140525 (TRBV19, TRBJ2-7)
CASSLTGLTKNIQYF

SEQ ID NO: 281051 - protein, 18 aa, Homo sapiens
  CDR3 for alpha chain variable domain of TCR clone 140526 (TRAV3, TRAJ17)
CAVRARRGGRSCRQQANF

SEQ ID NO: 281052 - protein, 14 aa, Homo sapiens
  CDR3 for beta chain variable domain of TCR clone 140526 (TRBV4-1, TRBJ2-2)
CASTQAVNTGELFF

SEQ ID NO: 281053 - protein, 14 aa, Homo sapiens
  CDR3 for alpha chain variable domain of TCR clone 140527 (TRAV8-3, TRAJ6)
CAVGASGGSYIPTF

SEQ ID NO: 281054 - protein, 13 aa, Homo sapiens
  CDR3 for beta chain variable domain of TCR clone 140527 (TRBV15, TRBJ1-6)
CATSGGLNSPLHF

SEQ ID NO: 281055 - protein, 15 aa, Homo sapiens
  CDR3 for alpha chain variable domain of TCR clone 140528 (TRAV8-3, TRAJ45)
CASSYSGGGADGLTF

SEQ ID NO: 281056 - protein, 15 aa, Homo sapiens
  CDR3 for beta chain variable domain of TCR clone 140528 (TRBV2, TRBJ2-2)
CASSRETVGTGELFF

SEQ ID NO: 281057 - protein, 15 aa, Homo sapiens
  CDR3 for alpha chain variable domain of TCR clone 140529 (TRAV26-1, TRAJ29)
CIVRVEGSGTTPLVF

SEQ ID NO: 281058 - protein, 14 aa, Homo sapiens
  CDR3 for beta chain variable domain of TCR clone 140529 (TRBV18, TRBJ2-5)
RASSPGVSQETQYF

SEQ ID NO: 281059 - protein, 18 aa, Homo sapiens
  CDR3 for alpha chain variable domain of TCR clone 140530 (TRAV26-1, TRAJ52)
SIVRVAGAGGTSYGKLTF

SEQ ID NO: 281060 - protein, 13 aa, Homo sapiens
  CDR3 for beta chain variable domain of TCR clone 140530 (TRBV7-8, TRBJ1-2)
CASSAQSYYGYTF

SEQ ID NO: 281061 - protein, 14 aa, Homo sapiens
  CDR3 for alpha chain variable domain of TCR clone 140531 (TRAV4, TRAJ17)
CLVGDMAAGNKLTF

SEQ ID NO: 281062 - protein, 15 aa, Homo sapiens
  CDR3 for beta chain variable domain of TCR clone 140531 (TRBV10-3, TRBJ2-3)
CAISLTSGGTDTQYF

SEQ ID NO: 281063 - protein, 15 aa, Homo sapiens
  CDR3 for alpha chain variable domain of TCR clone 140532 (TRAV21, TRAJ53)
CATLNSGGSNYKLTF

SEQ ID NO: 281064 - protein, 15 aa, Homo sapiens
  CDR3 for beta chain variable domain of TCR clone 140532 (TRBV27, TRBJ2-1)
CASSLKYRESHEQFF

SEQ ID NO: 281065 - protein, 20 aa, Homo sapiens
  CDR3 for alpha chain variable domain of TCR clone 140533 (TRAV12-1, TRAJ42)
SSVIQPPTSVKGGSHGNLIF

SEQ ID NO: 281066 - protein, 18 aa, Homo sapiens
  CDR3 for beta chain variable domain of TCR clone 140533 (TRBV11-2, TRBJ2-3)
CASSLGGASRGAPNTQYF

SEQ ID NO: 281067 - protein, 12 aa, Homo sapiens
  CDR3 for alpha chain variable domain of TCR clone 140534 (TRAV21, TRAJ33)
CAKMDSNNQLIW

SEQ ID NO: 281068 - protein, 16 aa, Homo sapiens
  CDR3 for beta chain variable domain of TCR clone 140534 (TRBV27, TRBJ2-2)
CASSSDRGTGTGELFF

SEQ ID NO: 281069 - protein, 16 aa, Homo sapiens
  CDR3 for alpha chain variable domain of TCR clone 140535 (TRAV12-3, TRAJ53)
CAMSPGSGGSNYKLTF

SEQ ID NO: 281070 - protein, 16 aa, Homo sapiens
  CDR3 for beta chain variable domain of TCR clone 140535 (TRBV11-2, TRBJ2-7)
CASSTVTAPKTYEQYF

SEQ ID NO: 281071 - protein, 17 aa, Homo sapiens
  CDR3 for alpha chain variable domain of TCR clone 140536 (TRAV3, TRAJ6)
CAVRDGPRAGGSYIPTF

SEQ ID NO: 281072 - protein, 19 aa, Homo sapiens
  CDR3 for beta chain variable domain of TCR clone 140536 (TRBV4-3, TRBJ2-7)
CASSQEFIGWQVTPYEQYF

SEQ ID NO: 281073 - protein, 13 aa, Homo sapiens
  CDR3 for alpha chain variable domain of TCR clone 140537 (TRAV29/DV5, TRAJ31)
CAASRNNNARLMF

SEQ ID NO: 281074 - protein, 12 aa, Homo sapiens
  CDR3 for beta chain variable domain of TCR clone 140537 (TRBV14, TRBJ2-7)
WASSSLKGEQYF

SEQ ID NO: 281075 - protein, 19 aa, Homo sapiens
  CDR3 for alpha chain variable domain of TCR clone 140538 (TRAV1-2, TRAJ26)
CLLPLCCERPGNYGQNFVF

SEQ ID NO: 281076 - protein, 15 aa, Homo sapiens
  CDR3 for beta chain variable domain of TCR clone 140538 (TRBV9, TRBJ1-6)
CASSVAGTGDSPLHF

SEQ ID NO: 281077 - protein, 13 aa, Homo sapiens
  CDR3 for alpha chain variable domain of TCR clone 140539 (TRAV26-1, TRAJ41)
CIVRINSGYGLNF

SEQ ID NO: 281078 - protein, 13 aa, Homo sapiens
  CDR3 for beta chain variable domain of TCR clone 140539 (TRBV20-1, TRBJ1-5)
CSATAAGGQPQHF

SEQ ID NO: 281079 - protein, 13 aa, Homo sapiens
  CDR3 for alpha chain variable domain of TCR clone 140540 (TRAV17, TRAJ29)
CATFGSGNTPLVF

SEQ ID NO: 281080 - protein, 18 aa, Homo sapiens
  CDR3 for beta chain variable domain of TCR clone 140540 (TRBV4-1, TRBJ1-4)
CASSPRTGGAWTNEKLFF

SEQ ID NO: 281081 - protein, 14 aa, Homo sapiens
  CDR3 for alpha chain variable domain of TCR clone 140541 (TRAV8-3, TRAJ39)
CAVGALGAGNMLTF

SEQ ID NO: 281082 - protein, 16 aa, Homo sapiens
  CDR3 for beta chain variable domain of TCR clone 140541 (TRBV7-2, TRBJ1-3)
CASSSGRVLSGNTIYF

SEQ ID NO: 281083 - protein, 13 aa, Homo sapiens
  CDR3 for alpha chain variable domain of TCR clone 140542 (TRAV27, TRAJ45)
CRSSGGGADGLTF

SEQ ID NO: 281084 - protein, 13 aa, Homo sapiens
  CDR3 for beta chain variable domain of TCR clone 140542 (TRBV2, TRBJ1-1)
CASTLGLNTEAFF

SEQ ID NO: 281085 - protein, 14 aa, Homo sapiens
  CDR3 for alpha chain variable domain of TCR clone 140543 (TRAV1-2, TRAJ8)
CAVREDTGFQKLVF

SEQ ID NO: 281086 - protein, 14 aa, Homo sapiens
  CDR3 for beta chain variable domain of TCR clone 140543 (TRBV29-1, TRBJ2-3)
CSAGAGVGADTQDF

SEQ ID NO: 281087 - protein, 13 aa, Homo sapiens
  CDR3 for alpha chain variable domain of TCR clone 140544 (TRAV2, TRAJ32)
CCVVGGATNKLIF

SEQ ID NO: 281088 - protein, 12 aa, Homo sapiens
  CDR3 for beta chain variable domain of TCR clone 140544 (TRBV12-4, TRBJ2-3)
CASSSTTDTQYF

SEQ ID NO: 281089 - protein, 14 aa, Homo sapiens
  CDR3 for alpha chain variable domain of TCR clone 140545 (TRAV13-2, TRAJ17)
CAENSKVEGNKLTF

SEQ ID NO: 281090 - protein, 12 aa, Homo sapiens
  CDR3 for beta chain variable domain of TCR clone 140545 (TRBV14, TRBJ2-7)
CASSSLKGEQYF

SEQ ID NO: 281091 - protein, 11 aa, Homo sapiens
  CDR3 for alpha chain variable domain of TCR clone 140546 (TRAV8-3, TRAJ3)
CAATLKQCFQD

SEQ ID NO: 281092 - protein, 16 aa, Homo sapiens
  CDR3 for beta chain variable domain of TCR clone 140546 (TRBV6-5, TRBJ2-3)
CASRVHRGGGSDTQYF

SEQ ID NO: 281093 - protein, 10 aa, Homo sapiens
  CDR3 for alpha chain variable domain of TCR clone 140547 (TRAV27, TRAJ58)
SETSGSRLTF

SEQ ID NO: 281094 - protein, 14 aa, Homo sapiens
  CDR3 for beta chain variable domain of TCR clone 140547 (TRBV7-2, TRBJ2-7)
CASSPKTSLYEQYF

SEQ ID NO: 281095 - protein, 13 aa, Homo sapiens
  CDR3 for alpha chain variable domain of TCR clone 140548 (TRAV2, TRAJ12)
CAVGADSSYKLIF

SEQ ID NO: 281096 - protein, 13 aa, Homo sapiens
  CDR3 for beta chain variable domain of TCR clone 140548 (TRBV20-1, TRBJ2-1)
CSARSSSRDEQFF

SEQ ID NO: 281097 - protein, 12 aa, Homo sapiens
  CDR3 for alpha chain variable domain of TCR clone 140549 (TRAV17, TRAJ30)
CVPERRDDRIIF

SEQ ID NO: 281098 - protein, 13 aa, Homo sapiens
  CDR3 for beta chain variable domain of TCR clone 140549 (TRBV4-1, TRBJ2-2)
CASSQENTGELFF

SEQ ID NO: 281099 - protein, 13 aa, Homo sapiens
  CDR3 for alpha chain variable domain of TCR clone 140550 (TRAV13-2, TRAJ40)
CAEFTSGTYKYIF

SEQ ID NO: 281100 - protein, 14 aa, Homo sapiens
  CDR3 for beta chain variable domain of TCR clone 140550 (TRBV10-2, TRBJ1-5)
CASSSTGTNQPQHF

SEQ ID NO: 281101 - protein, 19 aa, Homo sapiens
  CDR3 for alpha chain variable domain of TCR clone 140551 (TRAV3, TRAJ6)
CAVRDRNPSRSGGSYIPTS

SEQ ID NO: 281102 - protein, 15 aa, Homo sapiens
  CDR3 for beta chain variable domain of TCR clone 140551 (TRBV18, TRBJ2-7)
CASSPTFMGSYEQYF

SEQ ID NO: 281103 - protein, 14 aa, Homo sapiens
  CDR3 for alpha chain variable domain of TCR clone 140552 (TRAV1-2, TRAJ16)
CAVKEGSDGQKLLF

SEQ ID NO: 281104 - protein, 14 aa, Homo sapiens
  CDR3 for beta chain variable domain of TCR clone 140552 (TRBV18, TRBJ2-7)
CASSPRGGAYEQYF

SEQ ID NO: 281105 - protein, 12 aa, Homo sapiens
  CDR3 for alpha chain variable domain of TCR clone 140553 (TRAV4, TRAJ6)
CLAPGGSYIPPF

SEQ ID NO: 281106 - protein, 12 aa, Homo sapiens
  CDR3 for beta chain variable domain of TCR clone 140553 (TRBV6-5, TRBJ2-3)
CASSDTTDTQYF

SEQ ID NO: 281107 - protein, 16 aa, Homo sapiens
  CDR3 for alpha chain variable domain of TCR clone 140554 (TRAV13-1, TRAJ37)
CAASIGGSSNTGKLIF

SEQ ID NO: 281108 - protein, 14 aa, Homo sapiens
  CDR3 for beta chain variable domain of TCR clone 140554 (TRBV7-2, TRBJ2-7)
CASSPKTSFYEQYF

SEQ ID NO: 281109 - protein, 16 aa, Homo sapiens
  CDR3 for alpha chain variable domain of TCR clone 140555 (TRAV26-2, TRAJ45)
CTTASPIGGGADGLTF

SEQ ID NO: 281110 - protein, 17 aa, Homo sapiens
  CDR3 for beta chain variable domain of TCR clone 140555 (TRBV13, TRBJ2-3)
CASSLSRVAGGRNTQYF

SEQ ID NO: 281111 - protein, 15 aa, Homo sapiens
  CDR3 for alpha chain variable domain of TCR clone 140556 (TRAV27, TRAJ38)
CAGRFNAGNNRKLIW

SEQ ID NO: 281112 - protein, 18 aa, Homo sapiens
  CDR3 for beta chain variable domain of TCR clone 140556 (TRBV11-2, TRBJ2-6)
CATSLNPFLGTGANVLTF

SEQ ID NO: 281113 - protein, 14 aa, Homo sapiens
  CDR3 for alpha chain variable domain of TCR clone 140557 (TRAV26-1, TRAJ22)
CIIRVYGSARQLTF

SEQ ID NO: 281114 - protein, 17 aa, Homo sapiens
  CDR3 for beta chain variable domain of TCR clone 140557 (TRBV7-3, TRBJ2-3)
CASSPGGLAGFGDTQYF

SEQ ID NO: 281115 - protein, 15 aa, Homo sapiens
  CDR3 for alpha chain variable domain of TCR clone 140558 (TRAV25, TRAJ52)
CAGRPGGTSYGKLTF

SEQ ID NO: 281116 - protein, 16 aa, Homo sapiens
  CDR3 for beta chain variable domain of TCR clone 140558 (TRBV7-8, TRBJ2-6)
CQQRRDRGRWGNVLTF

SEQ ID NO: 281117 - protein, 13 aa, Homo sapiens
  CDR3 for alpha chain variable domain of TCR clone 140559 (TRAV12-2, TRAJ52)
CAVGGTSYGKLTF

SEQ ID NO: 281118 - protein, 14 aa, Homo sapiens
  CDR3 for beta chain variable domain of TCR clone 140559 (TRBV19, TRBJ2-1)
CASPTFVLSGGQFF

SEQ ID NO: 281119 - protein, 15 aa, Homo sapiens
  CDR3 for alpha chain variable domain of TCR clone 140560 (TRAV13-1, TRAJ44)
CAASRGGGTASKLTF

SEQ ID NO: 281120 - protein, 14 aa, Homo sapiens
  CDR3 for beta chain variable domain of TCR clone 140560 (TRBV7-2, TRBJ2-5)
CASSPRGSSEAQYF

SEQ ID NO: 281121 - protein, 17 aa, Homo sapiens
  CDR3 for alpha chain variable domain of TCR clone 140561 (TRAV13-1, TRAJ52)
CAASLGAGGTSYGKLTF

SEQ ID NO: 281122 - protein, 15 aa, Homo sapiens
  CDR3 for beta chain variable domain of TCR clone 140561 (TRBV12-4, TRBJ1-5)
CANTRGSGFGQPQHF

SEQ ID NO: 281123 - protein, 15 aa, Homo sapiens
  CDR3 for alpha chain variable domain of TCR clone 140562 (TRAV35, TRAJ20)
CAGQLAWSNDYKLSF

SEQ ID NO: 281124 - protein, 15 aa, Homo sapiens
  CDR3 for beta chain variable domain of TCR clone 140562 (TRBV7-3, TRBJ2-1)
RASSPTGGGEVEQFF

SEQ ID NO: 281125 - protein, 15 aa, Homo sapiens
  CDR3 for alpha chain variable domain of TCR clone 140563 (TRAV17, TRAJ16)
CATALRFSDGQKLLV

SEQ ID NO: 281126 - protein, 12 aa, Homo sapiens
  CDR3 for beta chain variable domain of TCR clone 140563 (TRBV2, TRBJ2-7)
CASSDPDYEQYF

SEQ ID NO: 281127 - protein, 15 aa, Homo sapiens
  CDR3 for alpha chain variable domain of TCR clone 140564 (TRAV26-1, TRAJ56)
CIVSVATGANSKLPF

SEQ ID NO: 281128 - protein, 15 aa, Homo sapiens
  CDR3 for beta chain variable domain of TCR clone 140564 (TRBV27, TRBJ2-7)
CASSPQREGQREQYF

SEQ ID NO: 281129 - protein, 14 aa, Homo sapiens
  CDR3 for alpha chain variable domain of TCR clone 140565 (TRAV12-1, TRAJ30)
CVPTGTNRDDKIIF

SEQ ID NO: 281130 - protein, 11 aa, Homo sapiens
  CDR3 for beta chain variable domain of TCR clone 140565 (TRBV4-1, TRBJ2-2)
CASEHTEELFF

SEQ ID NO: 281131 - protein, 13 aa, Homo sapiens
  CDR3 for alpha chain variable domain of TCR clone 140566 (TRAV3, TRAJ20)
CAVRSLNDYKLSF

SEQ ID NO: 281132 - protein, 13 aa, Homo sapiens
  CDR3 for beta chain variable domain of TCR clone 140566 (TRBV6-1, TRBJ2-1)
CAGMDPTNDEQFF

SEQ ID NO: 281133 - protein, 15 aa, Homo sapiens
  CDR3 for alpha chain variable domain of TCR clone 140567 (TRAV14/DV4, TRAJ49)
CAMREGRDTGNQSYF

SEQ ID NO: 281134 - protein, 17 aa, Homo sapiens
  CDR3 for beta chain variable domain of TCR clone 140567 (TRBV12-4, TRBJ1-5)
CASSLRGDRGPNQPQHF

SEQ ID NO: 281135 - protein, 14 aa, Homo sapiens
  CDR3 for alpha chain variable domain of TCR clone 140568 (TRAV25, TRAJ23)
CAGQGDNQGGKVIF

SEQ ID NO: 281136 - protein, 12 aa, Homo sapiens
  CDR3 for beta chain variable domain of TCR clone 140568 (TRBV7-9, TRBJ1-1)
CASSLVRGEAFF

SEQ ID NO: 281137 - protein, 12 aa, Homo sapiens
  CDR3 for alpha chain variable domain of TCR clone 140569 (TRAV12-3, TRAJ3)
CAIDSSASMIIF

SEQ ID NO: 281138 - protein, 17 aa, Homo sapiens
  CDR3 for beta chain variable domain of TCR clone 140569 (TRBV7-9, TRBJ2-3)
CASSLEEAGAYPDTQYF

SEQ ID NO: 281139 - protein, 13 aa, Homo sapiens
  CDR3 for alpha chain variable domain of TCR clone 140570 (TRAV1-2, TRAJ9)
CAALNTGGFKTIY

SEQ ID NO: 281140 - protein, 16 aa, Homo sapiens
  CDR3 for beta chain variable domain of TCR clone 140570 (TRBV11-2, TRBJ2-1)
CASSPRLAGVYNEQFF

SEQ ID NO: 281141 - protein, 16 aa, Homo sapiens
  CDR3 for alpha chain variable domain of TCR clone 140571 (TRAV21, TRAJ37)
CAVRTAGSSNTGKLIF

SEQ ID NO: 281142 - protein, 12 aa, Homo sapiens
  CDR3 for beta chain variable domain of TCR clone 140571 (TRBV20-1, TRBJ2-7)
CSAITPTKEQYF

SEQ ID NO: 281143 - protein, 12 aa, Homo sapiens
  CDR3 for alpha chain variable domain of TCR clone 140572 (TRAV38-1, TRAJ47)
CAFETYGNKLVF

SEQ ID NO: 281144 - protein, 15 aa, Homo sapiens
  CDR3 for beta chain variable domain of TCR clone 140572 (TRBV5-7, TRBJ2-7)
CASSGGSPVPYEQYF

SEQ ID NO: 281145 - protein, 16 aa, Homo sapiens
  CDR3 for alpha chain variable domain of TCR clone 140573 (TRAV12-2, TRAJ32)
CAVNLGQGAATNKLIF

SEQ ID NO: 281146 - protein, 15 aa, Homo sapiens
  CDR3 for beta chain variable domain of TCR clone 140573 (TRBV20-1, TRBJ2-7)
CSARGPLAGGREQYF

SEQ ID NO: 281147 - protein, 12 aa, Homo sapiens
  CDR3 for alpha chain variable domain of TCR clone 140574 (TRAV21, TRAJ33)
CAKMDSNYQLIW

SEQ ID NO: 281148 - protein, 20 aa, Homo sapiens
  CDR3 for beta chain variable domain of TCR clone 140574 (TRBV28, TRBJ2-1)
CASTPIGRSPRLAGGNEQFF

SEQ ID NO: 281149 - protein, 14 aa, Homo sapiens
  CDR3 for alpha chain variable domain of TCR clone 140575 (TRAV23/DV6, TRAJ9)
CAAHPNTGGFKTIF

SEQ ID NO: 281150 - protein, 15 aa, Homo sapiens
  CDR3 for beta chain variable domain of TCR clone 140575 (TRBV7-9, TRBJ1-4)
CASSARTGGNEKLFF

SEQ ID NO: 281151 - protein, 13 aa, Homo sapiens
  CDR3 for alpha chain variable domain of TCR clone 140576 (TRAV12-1, TRAJ40)
CVVNSSGTYKYIL

SEQ ID NO: 281152 - protein, 14 aa, Homo sapiens
  CDR3 for beta chain variable domain of TCR clone 140576 (TRBV2, TRBJ1-6)
CASDVSSYNSPLHF

SEQ ID NO: 281153 - protein, 12 aa, Homo sapiens
  CDR3 for alpha chain variable domain of TCR clone 140577 (TRAV12-3, TRAJ17)
CAMTLTGNKLTF

SEQ ID NO: 281154 - protein, 14 aa, Homo sapiens
  CDR3 for beta chain variable domain of TCR clone 140577 (TRBV4-1, TRBJ2-7)
CASSQGREHVEQYF

SEQ ID NO: 281155 - protein, 13 aa, Homo sapiens
  CDR3 for alpha chain variable domain of TCR clone 140578 (TRAV13-2, TRAJ48)
CAEMDFGNEKLTF

SEQ ID NO: 281156 - protein, 16 aa, Homo sapiens
  CDR3 for beta chain variable domain of TCR clone 140578 (TRBV28, TRBJ2-2)
CASSLEGGSNTGELFF

SEQ ID NO: 281157 - protein, 16 aa, Homo sapiens
  CDR3 for alpha chain variable domain of TCR clone 140579 (TRAV4, TRAJ4)
CLVVPLFSGGYNKLIF

SEQ ID NO: 281158 - protein, 12 aa, Homo sapiens
  CDR3 for beta chain variable domain of TCR clone 140579 (TRBV11-2, TRBJ2-2)
CASSLGGGELFF

SEQ ID NO: 281159 - protein, 13 aa, Homo sapiens
  CDR3 for alpha chain variable domain of TCR clone 140580 (TRAV3, TRAJ15)
CAVRDQAGTALIF

SEQ ID NO: 281160 - protein, 15 aa, Homo sapiens
  CDR3 for beta chain variable domain of TCR clone 140580 (TRBV6-1, TRBJ2-3)
CASSERGGITDTQYF

SEQ ID NO: 281161 - protein, 13 aa, Homo sapiens
  CDR3 for alpha chain variable domain of TCR clone 140581 (TRAV27, TRAJ6)
CAGGTRGSYIPTF

SEQ ID NO: 281162 - protein, 12 aa, Homo sapiens
  CDR3 for beta chain variable domain of TCR clone 140581 (TRBV28, TRBJ2-3)
CASSLYRDTQYF

SEQ ID NO: 281163 - protein, 12 aa, Homo sapiens
  CDR3 for alpha chain variable domain of TCR clone 140582 (TRAV25, TRAJ11)
CAGASGYSTLTF

SEQ ID NO: 281164 - protein, 14 aa, Homo sapiens
  CDR3 for beta chain variable domain of TCR clone 140582 (TRBV5-8, TRBJ2-3)
CASSLGQGTNTQYF

SEQ ID NO: 281165 - protein, 12 aa, Homo sapiens
  CDR3 for alpha chain variable domain of TCR clone 140583 (TRAV8-3, TRAJ37)
CAVVGNPGKLIF

SEQ ID NO: 281166 - protein, 17 aa, Homo sapiens
  CDR3 for beta chain variable domain of TCR clone 140583 (TRBV12-4, TRBJ2-3)
CASSSGLAGGHFDTQYF

SEQ ID NO: 281167 - protein, 16 aa, Homo sapiens
  CDR3 for alpha chain variable domain of TCR clone 140584 (TRAV3, TRAJ10)
CAVRDMNAGGGNKLTF

SEQ ID NO: 281168 - protein, 16 aa, Homo sapiens
  CDR3 for beta chain variable domain of TCR clone 140584 (TRBV6-3, TRBJ1-2)
CGSSYSRRASNYGYTF

SEQ ID NO: 281169 - protein, 12 aa, Homo sapiens
  CDR3 for alpha chain variable domain of TCR clone 140585 (TRAV8-4, TRAJ43)
CAVSVNNNDMRF

SEQ ID NO: 281170 - protein, 14 aa, Homo sapiens
  CDR3 for beta chain variable domain of TCR clone 140585 (TRBV11-2, TRBJ1-2)
CASSLGAANYGYTF

SEQ ID NO: 281171 - protein, 11 aa, Homo sapiens
  CDR3 for alpha chain variable domain of TCR clone 140586 (TRAV23/DV6, TRAJ49)
CAARAGNQFYF

SEQ ID NO: 281172 - protein, 11 aa, Homo sapiens
  CDR3 for beta chain variable domain of TCR clone 140586 (TRBV27, TRBJ2-3)
CASSLGDTQYF

SEQ ID NO: 281173 - protein, 12 aa, Homo sapiens
  CDR3 for alpha chain variable domain of TCR clone 140587 (TRAV13-1, TRAJ21)
CAAKEGFNKFYF

SEQ ID NO: 281174 - protein, 14 aa, Homo sapiens
  CDR3 for beta chain variable domain of TCR clone 140587 (TRBV5-1, TRBJ2-7)
CSSSRGESLYEQYF

SEQ ID NO: 281175 - protein, 12 aa, Homo sapiens
  CDR3 for alpha chain variable domain of TCR clone 140588 (TRAV12-3, TRAJ39)
CAIENAGNMLTF

SEQ ID NO: 281176 - protein, 14 aa, Homo sapiens
  CDR3 for beta chain variable domain of TCR clone 140588 (TRBV7-2, TRBJ2-7)
CASRSQGAAYEQYF

SEQ ID NO: 281177 - protein, 14 aa, Homo sapiens
  CDR3 for alpha chain variable domain of TCR clone 140589 (TRAV26-1, TRAJ38)
CIADHAGNNRKLIW

SEQ ID NO: 281178 - protein, 15 aa, Homo sapiens
  CDR3 for beta chain variable domain of TCR clone 140589 (TRBV7-2, TRBJ2-1)
CASSSGLAGGNEQFF

SEQ ID NO: 281179 - protein, 14 aa, Homo sapiens
  CDR3 for alpha chain variable domain of TCR clone 140590 (TRAV35, TRAJ13)
CAGSPSGGYQKVTF

SEQ ID NO: 281180 - protein, 15 aa, Homo sapiens
  CDR3 for beta chain variable domain of TCR clone 140590 (TRBV19, TRBJ1-2)
CASSVGQVLNYGYTF

SEQ ID NO: 281181 - protein, 14 aa, Homo sapiens
  CDR3 for alpha chain variable domain of TCR clone 140591 (TRAV26-1, TRAJ52)
CIVKGGTSYGKLTF

SEQ ID NO: 281182 - protein, 14 aa, Homo sapiens
  CDR3 for beta chain variable domain of TCR clone 140591 (TRBV20-1, TRBJ1-1)
CSAQTRIGGTEAFF

SEQ ID NO: 281183 - protein, 15 aa, Homo sapiens
  CDR3 for alpha chain variable domain of TCR clone 140592 (TRAV14/DV4, TRAJ12)
CALREERDSSYKLIF

SEQ ID NO: 281184 - protein, 14 aa, Homo sapiens
  CDR3 for beta chain variable domain of TCR clone 140592 (TRBV12-5, TRBJ2-5)
CASGSRTHQETQYF

SEQ ID NO: 281185 - protein, 14 aa, Homo sapiens
  CDR3 for alpha chain variable domain of TCR clone 140593 (TRAV35, TRAJ10)
CAGILTGGGNKLTF

SEQ ID NO: 281186 - protein, 15 aa, Homo sapiens
  CDR3 for beta chain variable domain of TCR clone 140593 (TRBV28, TRBJ2-1)
CASSIIAGGRSEQFF

SEQ ID NO: 281187 - protein, 13 aa, Homo sapiens
  CDR3 for alpha chain variable domain of TCR clone 140594 (TRAV12-3, TRAJ9)
CAMRNTGGFKTIF

SEQ ID NO: 281188 - protein, 16 aa, Homo sapiens
  CDR3 for beta chain variable domain of TCR clone 140594 (TRBV11-2, TRBJ1-2)
CASSLDTGGADYGYTF

SEQ ID NO: 281189 - protein, 14 aa, Homo sapiens
  CDR3 for alpha chain variable domain of TCR clone 140595 (TRAV1-2, TRAJ16)
CAVNRFSVGQKLLF

SEQ ID NO: 281190 - protein, 13 aa, Homo sapiens
  CDR3 for beta chain variable domain of TCR clone 140595 (TRBV20-1, TRBJ1-1)
CSAPLGGGTEAFF

SEQ ID NO: 281191 - protein, 12 aa, Homo sapiens
  CDR3 for alpha chain variable domain of TCR clone 140596 (TRAV21, TRAJ33)
CAKMDSNYQLIW

SEQ ID NO: 281192 - protein, 16 aa, Homo sapiens
  CDR3 for beta chain variable domain of TCR clone 140596 (TRBV19, TRBJ2-3)
CASSPGAASRTDTQYF

SEQ ID NO: 281193 - protein, 13 aa, Homo sapiens
  CDR3 for alpha chain variable domain of TCR clone 140597 (TRAV21, TRAJ27)
CAARPGSAGKSTF

SEQ ID NO: 281194 - protein, 14 aa, Homo sapiens
  CDR3 for beta chain variable domain of TCR clone 140597 (TRBV7-7, TRBJ2-3)
CASSLGTVTDTQYF

SEQ ID NO: 281195 - protein, 13 aa, Homo sapiens
  CDR3 for alpha chain variable domain of TCR clone 140598 (TRAV14/DV4, TRAJ26)
CAMREAYGQNFVF

SEQ ID NO: 281196 - protein, 19 aa, Homo sapiens
  CDR3 for beta chain variable domain of TCR clone 140598 (TRBV13, TRBJ2-6)
CVSSLVHRDRGAGANVLTF

SEQ ID NO: 281197 - protein, 16 aa, Homo sapiens
  CDR3 for alpha chain variable domain of TCR clone 140599 (TRAV27, TRAJ52)
CAGAPAGGTSFGKRTF

SEQ ID NO: 281198 - protein, 12 aa, Homo sapiens
  CDR3 for beta chain variable domain of TCR clone 140599 (TRBV27, TRBJ2-1)
CASRGFYNEQFF

SEQ ID NO: 281199 - protein, 13 aa, Homo sapiens
  CDR3 for alpha chain variable domain of TCR clone 140600 (TRAV26-1, TRAJ29)
CIVRRSGNTPRVF

SEQ ID NO: 281200 - protein, 16 aa, Homo sapiens
  CDR3 for beta chain variable domain of TCR clone 140600 (TRBV11-2, TRBJ2-7)
CASSLAPTGVNYEQYF

SEQ ID NO: 281201 - protein, 17 aa, Homo sapiens
  CDR3 for alpha chain variable domain of TCR clone 140601 (TRAV26-1, TRAJ27)
CIVSTPWINTNAGKSTF

SEQ ID NO: 281202 - protein, 16 aa, Homo sapiens
  CDR3 for beta chain variable domain of TCR clone 140601 (TRBV7-9, TRBJ2-1)
CASSLGPGLAIDEQFF

SEQ ID NO: 281203 - protein, 14 aa, Homo sapiens
  CDR3 for alpha chain variable domain of TCR clone 140602 (TRAV12-2, TRAJ17)
CAALFKAAGNKITF

SEQ ID NO: 281204 - protein, 17 aa, Homo sapiens
  CDR3 for beta chain variable domain of TCR clone 140602 (TRBV20-1, TRBJ2-2)
CSASGSGQGGLTGELFF

SEQ ID NO: 281205 - protein, 12 aa, Homo sapiens
  CDR3 for alpha chain variable domain of TCR clone 140603 (TRAV13-1, TRAJ37)
CSPLCNTGKLIF

SEQ ID NO: 281206 - protein, 14 aa, Homo sapiens
  CDR3 for beta chain variable domain of TCR clone 140603 (TRBV12-4, TRBJ2-3)
CASSLGQGTDTQYF

SEQ ID NO: 281207 - protein, 14 aa, Homo sapiens
  CDR3 for alpha chain variable domain of TCR clone 140604 (TRAV26-1, TRAJ38)
CIADNAGNNRKLIW

SEQ ID NO: 281208 - protein, 17 aa, Homo sapiens
  CDR3 for beta chain variable domain of TCR clone 140604 (TRBV15, TRBJ1-5)
CATSRAPPGTRNQPQHF

SEQ ID NO: 281209 - protein, 15 aa, Homo sapiens
  CDR3 for alpha chain variable domain of TCR clone 140605 (TRAV25, TRAJ53)
CPTSNSGGSNYKLTF

SEQ ID NO: 281210 - protein, 12 aa, Homo sapiens
  CDR3 for beta chain variable domain of TCR clone 140605 (TRBV29-1, TRBJ2-3)
CSVTGGADTQYF

SEQ ID NO: 281211 - protein, 12 aa, Homo sapiens
  CDR3 for alpha chain variable domain of TCR clone 140606 (TRAV27, TRAJ35)
CAGADFGNVLHC

SEQ ID NO: 281212 - protein, 15 aa, Homo sapiens
  CDR3 for beta chain variable domain of TCR clone 140606 (TRBV7-2, TRBJ2-7)
CASSLTGQGTYEQYF

SEQ ID NO: 281213 - protein, 14 aa, Homo sapiens
  CDR3 for alpha chain variable domain of TCR clone 140607 (TRAV1-2, TRAJ8)
CAVREDTAFQKLVF

SEQ ID NO: 281214 - protein, 12 aa, Homo sapiens
  CDR3 for beta chain variable domain of TCR clone 140607 (TRBV11-2, TRBJ2-2)
CASSLGGGELFF

SEQ ID NO: 281215 - protein, 10 aa, Homo sapiens
  CDR3 for alpha chain variable domain of TCR clone 140608 (TRAV16, TRAJ22)
SAMYLRQLTF

SEQ ID NO: 281216 - protein, 15 aa, Homo sapiens
  CDR3 for beta chain variable domain of TCR clone 140608 (TRBV7-9, TRBJ1-6)
CANSSPGRGNSPLHF

SEQ ID NO: 281217 - protein, 15 aa, Homo sapiens
  CDR3 for alpha chain variable domain of TCR clone 140609 (TRAV26-2, TRAJ54)
CILRDVGQGAQKLVF

SEQ ID NO: 281218 - protein, 15 aa, Homo sapiens
  CDR3 for beta chain variable domain of TCR clone 140609 (TRBV12-4, TRBJ2-5)
CASSPPTGLQETQYF

SEQ ID NO: 281219 - protein, 12 aa, Homo sapiens
  CDR3 for alpha chain variable domain of TCR clone 140610 (TRAV17, TRAJ4)
CATRGGYNKLIF

SEQ ID NO: 281220 - protein, 15 aa, Homo sapiens
  CDR3 for beta chain variable domain of TCR clone 140610 (TRBV11-3, TRBJ2-3)
CASLKDGREGDTQYF

SEQ ID NO: 281221 - protein, 16 aa, Homo sapiens
  CDR3 for alpha chain variable domain of TCR clone 140611 (TRAV30, TRAJ24)
CGTENVDADSWGKLQF

SEQ ID NO: 281222 - protein, 14 aa, Homo sapiens
  CDR3 for beta chain variable domain of TCR clone 140611 (TRBV12-5, TRBJ2-5)
CASGSRTHQETQYF

SEQ ID NO: 281223 - protein, 12 aa, Homo sapiens
  CDR3 for alpha chain variable domain of TCR clone 140612 (TRAV21, TRAJ3)
CCFYSSASKIIF

SEQ ID NO: 281224 - protein, 14 aa, Homo sapiens
  CDR3 for beta chain variable domain of TCR clone 140612 (TRBV12-4, TRBJ1-1)
CASSSARGYTEAFF

SEQ ID NO: 281225 - protein, 12 aa, Homo sapiens
  CDR3 for alpha chain variable domain of TCR clone 140613 (TRAV8-4, TRAJ43)
CAVSVNNNDMRF

SEQ ID NO: 281226 - protein, 14 aa, Homo sapiens
  CDR3 for beta chain variable domain of TCR clone 140613 (TRBV11-2, TRBJ1-2)
CASSLGTSNYGYTF

SEQ ID NO: 281227 - protein, 13 aa, Homo sapiens
  CDR3 for alpha chain variable domain of TCR clone 140614 (TRAV38-1, TRAJ42)
CARWGGSQGNLIF

SEQ ID NO: 281228 - protein, 17 aa, Homo sapiens
  CDR3 for beta chain variable domain of TCR clone 140614 (TRBV20-1, TRBJ2-1)
CSARDPLAGVWDNEQVF

SEQ ID NO: 281229 - protein, 15 aa, Homo sapiens
  CDR3 for alpha chain variable domain of TCR clone 140615 (TRAV12-2, TRAJ8)
CAVREDNTGFQKLVF

SEQ ID NO: 281230 - protein, 15 aa, Homo sapiens
  CDR3 for beta chain variable domain of TCR clone 140615 (TRBV28, TRBJ2-4)
CAAGSGTLLMGIQYF

SEQ ID NO: 281231 - protein, 15 aa, Homo sapiens
  CDR3 for alpha chain variable domain of TCR clone 140616 (TRAV8-6, TRAJ6)
CAVSGESGGSYIPTF

SEQ ID NO: 281232 - protein, 12 aa, Homo sapiens
  CDR3 for beta chain variable domain of TCR clone 140616 (TRBV11-2, TRBJ2-2)
CASSLGGGELFF

SEQ ID NO: 281233 - protein, 14 aa, Homo sapiens
  CDR3 for alpha chain variable domain of TCR clone 140617 (TRAV8-4, TRAJ54)
CAVSEVLGAQKLVF

SEQ ID NO: 281234 - protein, 17 aa, Homo sapiens
  CDR3 for beta chain variable domain of TCR clone 140617 (TRBV4-1, TRGJ1)
CASSQEGPRGVEEKLFF

SEQ ID NO: 281235 - protein, 15 aa, Homo sapiens
  CDR3 for alpha chain variable domain of TCR clone 140618 (TRAV8-3, TRAJ45)
CASSYSGGGADGLTF

SEQ ID NO: 281236 - protein, 15 aa, Homo sapiens
  CDR3 for beta chain variable domain of TCR clone 140618 (TRBV12-4, TRBJ2-5)
CASSPPTGPQETQYF

SEQ ID NO: 281237 - protein, 15 aa, Homo sapiens
  CDR3 for alpha chain variable domain of TCR clone 140619 (TRAV12-2, TRAJ43)
CAFDMRFGAGTRLTV

SEQ ID NO: 281238 - protein, 13 aa, Homo sapiens
  CDR3 for beta chain variable domain of TCR clone 140619 (TRBV24-1, TRBJ2-1)
CATSAGPYNEQFF

SEQ ID NO: 281239 - protein, 16 aa, Homo sapiens
  CDR3 for alpha chain variable domain of TCR clone 140620 (TRAV26-1, TRAJ41)
CIVRVAVANSGYAFNF

SEQ ID NO: 281240 - protein, 15 aa, Homo sapiens
  CDR3 for beta chain variable domain of TCR clone 140620 (TRBV6-1, TRBJ1-1)
CASSEYPRMNTEAFF

SEQ ID NO: 281241 - protein, 10 aa, Homo sapiens
  CDR3 for alpha chain variable domain of TCR clone 140621 (TRAV12-1, TRAJ23)
CVVSGGKLIF

SEQ ID NO: 281242 - protein, 17 aa, Homo sapiens
  CDR3 for beta chain variable domain of TCR clone 140621 (TRBV25-1, TRBJ2-1)
CASSAYGQGPGVYEQFF

SEQ ID NO: 281243 - protein, 12 aa, Homo sapiens
  CDR3 for alpha chain variable domain of TCR clone 140622 (TRAV8-4, TRAJ9)
CAVNTGGFKTIF

SEQ ID NO: 281244 - protein, 15 aa, Homo sapiens
  CDR3 for beta chain variable domain of TCR clone 140622 (TRBV5-4, TRBJ2-1)
CASSSGIAELNERFF

SEQ ID NO: 281245 - protein, 20 aa, Homo sapiens
  CDR3 for alpha chain variable domain of TCR clone 140623 (TRAV8-3, TRAJ44)
LSTSVLWVRLYTGTASKLTF

SEQ ID NO: 281246 - protein, 14 aa, Homo sapiens
  CDR3 for beta chain variable domain of TCR clone 140623 (TRBV7-3, TRBJ1-1)
CASSLKGGNTEAFF

SEQ ID NO: 281247 - protein, 12 aa, Homo sapiens
  CDR3 for alpha chain variable domain of TCR clone 140624 (TRAV17, TRAJ20)
CATDSNDYKLSF

SEQ ID NO: 281248 - protein, 15 aa, Homo sapiens
  CDR3 for beta chain variable domain of TCR clone 140624 (TRBV11-1, TRBJ2-3)
CASSLLAGRTDTQYF

SEQ ID NO: 281249 - protein, 16 aa, Homo sapiens
  CDR3 for alpha chain variable domain of TCR clone 140625 (TRAV12-2, TRAJ18)
CAVTTDRGSTLGSLYF

SEQ ID NO: 281250 - protein, 14 aa, Homo sapiens
  CDR3 for beta chain variable domain of TCR clone 140625 (TRBV4-2, TRBJ1-5)
CASSQDSINQPQHF

SEQ ID NO: 281251 - protein, 14 aa, Homo sapiens
  CDR3 for alpha chain variable domain of TCR clone 140626 (TRAV12-2, TRAJ13)
CAVKKTGGYRKVTF

SEQ ID NO: 281252 - protein, 16 aa, Homo sapiens
  CDR3 for beta chain variable domain of TCR clone 140626 (TRBV12-5, TRBJ2-5)
CASGPRTSGNQETQYF

SEQ ID NO: 281253 - protein, 15 aa, Homo sapiens
  CDR3 for alpha chain variable domain of TCR clone 140627 (TRAV13-1, TRAJ5)
CAASSSDTGRRALTF

SEQ ID NO: 281254 - protein, 14 aa, Homo sapiens
  CDR3 for beta chain variable domain of TCR clone 140627 (TRBV13, TRBJ2-1)
CASSPRPRYNEQFF

SEQ ID NO: 281255 - protein, 12 aa, Homo sapiens
  CDR3 for alpha chain variable domain of TCR clone 140628 (TRAV2, TRAJ31)
CAVEDNNARLMF

SEQ ID NO: 281256 - protein, 16 aa, Homo sapiens
  CDR3 for beta chain variable domain of TCR clone 140628 (TRBV10-3, TRBJ2-1)
RAISGVGDGGGGEQFF

SEQ ID NO: 281257 - protein, 13 aa, Homo sapiens
  CDR3 for alpha chain variable domain of TCR clone 140629 (TRAV21, TRAJ32)
CAVSGGATNKLIF

SEQ ID NO: 281258 - protein, 15 aa, Homo sapiens
  CDR3 for beta chain variable domain of TCR clone 140629 (TRBV23-1, TRBJ2-1)
CASSQWRQLTMSSSS

SEQ ID NO: 281259 - protein, 12 aa, Homo sapiens
  CDR3 for alpha chain variable domain of TCR clone 140630 (TRAV12-2, TRAJ21)
CAPSDNFNKFSF

SEQ ID NO: 281260 - protein, 14 aa, Homo sapiens
  CDR3 for beta chain variable domain of TCR clone 140630 (TRBV12-4, TRBJ1-1)
CASSLRSSGTEAFF

SEQ ID NO: 281261 - protein, 14 aa, Homo sapiens
  CDR3 for alpha chain variable domain of TCR clone 140631 (TRAV1-2, TRAJ6)
CTVSLSGGSYIPTF

SEQ ID NO: 281262 - protein, 14 aa, Homo sapiens
  CDR3 for beta chain variable domain of TCR clone 140631 (TRBV13, TRBJ2-7)
CASSLSRISYEQYF

SEQ ID NO: 281263 - protein, 13 aa, Homo sapiens
  CDR3 for alpha chain variable domain of TCR clone 140632 (TRAV13-2, TRAJ53)
CAENMGSNYKLTF

SEQ ID NO: 281264 - protein, 17 aa, Homo sapiens
  CDR3 for beta chain variable domain of TCR clone 140632 (TRBV20-1, TRBJ2-2)
CSASGSGQGGLTGELFF

SEQ ID NO: 281265 - protein, 14 aa, Homo sapiens
  CDR3 for alpha chain variable domain of TCR clone 140633 (TRAV36/DV7, TRAJ44)
CCGANTGTASKLTF

SEQ ID NO: 281266 - protein, 16 aa, Homo sapiens
  CDR3 for beta chain variable domain of TCR clone 140633 (TRBV7-9, TRBJ1-2)
CASSLGFSSGEYGYTF

SEQ ID NO: 281267 - protein, 14 aa, Homo sapiens
  CDR3 for alpha chain variable domain of TCR clone 140634 (TRAV12-2, TRAJ13)
CAVKKPGGYQKVTF

SEQ ID NO: 281268 - protein, 14 aa, Homo sapiens
  CDR3 for beta chain variable domain of TCR clone 140634 (TRBV12-5, TRBJ2-5)
CASGSRTHQETQYF

SEQ ID NO: 281269 - protein, 13 aa, Homo sapiens
  CDR3 for alpha chain variable domain of TCR clone 140635 (TRAV2, TRAJ15)
CTVAPQAGTALIF

SEQ ID NO: 281270 - protein, 16 aa, Homo sapiens
  CDR3 for beta chain variable domain of TCR clone 140635 (TRBV7-3, TRBJ2-2)
CASSLKRGTLSGELFF

SEQ ID NO: 281271 - protein, 13 aa, Homo sapiens
  CDR3 for alpha chain variable domain of TCR clone 140636 (TRAV6, TRAJ4)
CALLRGGYNKLIF

SEQ ID NO: 281272 - protein, 16 aa, Homo sapiens
  CDR3 for beta chain variable domain of TCR clone 140636 (TRBV5-1, TRBJ2-1)
CASSIRSGGAYNEQFF

SEQ ID NO: 281273 - protein, 15 aa, Homo sapiens
  CDR3 for alpha chain variable domain of TCR clone 140637 (TRAV13-1, TRAJ43)
RAARGGFGAGTRPTV

SEQ ID NO: 281274 - protein, 18 aa, Homo sapiens
  CDR3 for beta chain variable domain of TCR clone 140637 (TRBV11-2, TRBJ1-6)
CASSLAVQGLSLNSPLHF

SEQ ID NO: 281275 - protein, 13 aa, Homo sapiens
  CDR3 for alpha chain variable domain of TCR clone 140638 (TRAV26-1, TRAJ34)
CIVRPWITDKLIF

SEQ ID NO: 281276 - protein, 14 aa, Homo sapiens
  CDR3 for beta chain variable domain of TCR clone 140638 (TRBV7-2, TRBJ2-7)
CASRSQGAAYERYF

SEQ ID NO: 281277 - protein, 16 aa, Homo sapiens
  CDR3 for alpha chain variable domain of TCR clone 140639 (TRAV30, TRAJ24)
CGTEIVDADSWGKFQS

SEQ ID NO: 281278 - protein, 14 aa, Homo sapiens
  CDR3 for beta chain variable domain of TCR clone 140639 (TRBV12-5, TRBJ2-5)
CASGSRTHQETKYF

SEQ ID NO: 281279 - protein, 13 aa, Homo sapiens
  CDR3 for alpha chain variable domain of TCR clone 140640 (TRAV8-4, TRAJ4)
CAVSDIGNNKLIF

SEQ ID NO: 281280 - protein, 13 aa, Homo sapiens
  CDR3 for beta chain variable domain of TCR clone 140640 (TRBV19, TRBJ1-2)
CASSQGQVYGYTF

SEQ ID NO: 281281 - protein, 14 aa, Homo sapiens
  CDR3 for alpha chain variable domain of TCR clone 140641 (TRAV13-1, TRAJ44)
CAAKATGTASKLPF

SEQ ID NO: 281282 - protein, 16 aa, Homo sapiens
  CDR3 for beta chain variable domain of TCR clone 140641 (TRBV15, TRBJ1-2)
CATSRGPRTGGGGYTF

SEQ ID NO: 281283 - protein, 13 aa, Homo sapiens
  CDR3 for alpha chain variable domain of TCR clone 140642 (TRAV38-2/DV8, TRAJ34)
CAYRTWNTDKLIF

SEQ ID NO: 281284 - protein, 16 aa, Homo sapiens
  CDR3 for beta chain variable domain of TCR clone 140642 (TRBV20-1, TRBJ1-2)
CSASMGQGAANYGYTF

SEQ ID NO: 281285 - protein, 14 aa, Homo sapiens
  CDR3 for alpha chain variable domain of TCR clone 140643 (TRAV17, TRAJ37)
CATDGSSNTCKLIF

SEQ ID NO: 281286 - protein, 13 aa, Homo sapiens
  CDR3 for beta chain variable domain of TCR clone 140643 (TRBV11-2, TRBJ2-1)
CASSLDVVNEQFF

SEQ ID NO: 281287 - protein, 12 aa, Homo sapiens
  CDR3 for alpha chain variable domain of TCR clone 140644 (TRAV12-3, TRAJ40)
CEVSSGTYKYIF

SEQ ID NO: 281288 - protein, 15 aa, Homo sapiens
  CDR3 for beta chain variable domain of TCR clone 140644 (TRBV7-9, TRBJ2-7)
CASSPGGGLTYEQYF

SEQ ID NO: 281289 - protein, 12 aa, Homo sapiens
  CDR3 for alpha chain variable domain of TCR clone 140645 (TRAV8-3, TRAJ20)
CAVGANDYKLSF

SEQ ID NO: 281290 - protein, 13 aa, Homo sapiens
  CDR3 for beta chain variable domain of TCR clone 140645 (TRBV20-1, TRBJ1-1)
CSARVGGNTEAFF

SEQ ID NO: 281291 - protein, 13 aa, Homo sapiens
  CDR3 for alpha chain variable domain of TCR clone 140646 (TRAV8-3, TRAJ28)
RAVGAVGSYQLTF

SEQ ID NO: 281292 - protein, 13 aa, Homo sapiens
  CDR3 for beta chain variable domain of TCR clone 140646 (TRBV29-1, TRBJ2-1)
CSVEGGRVNEQFF

SEQ ID NO: 281293 - protein, 16 aa, Homo sapiens
  CDR3 for alpha chain variable domain of TCR clone 140647 (TRAV1-2, TRAJ27)
CAVREPQTPMQANPPL

SEQ ID NO: 281294 - protein, 13 aa, Homo sapiens
  CDR3 for beta chain variable domain of TCR clone 140647 (TRBV6-1, TRBJ1-2)
CASSAREGYGYTF

SEQ ID NO: 281295 - protein, 16 aa, Homo sapiens
  CDR3 for alpha chain variable domain of TCR clone 140648 (TRAV12-3, TRAJ53)
CAMSPGSGGSNYKLTF

SEQ ID NO: 281296 - protein, 11 aa, Homo sapiens
  CDR3 for beta chain variable domain of TCR clone 140648 (TRBV19, TRBJ1-1)
CASSIGGEAFF

SEQ ID NO: 281297 - protein, 14 aa, Homo sapiens
  CDR3 for alpha chain variable domain of TCR clone 140649 (TRAV12-2, TRAJ13)
CAVAGSGGYQKVTF

SEQ ID NO: 281298 - protein, 13 aa, Homo sapiens
  CDR3 for beta chain variable domain of TCR clone 140649 (TRBV7-9, TRBJ1-2)
CASSLKQNYGYTF

SEQ ID NO: 281299 - protein, 12 aa, Homo sapiens
  CDR3 for alpha chain variable domain of TCR clone 140650 (TRAV26-1, TRAJ13)
CIVSRRYQKVTF

SEQ ID NO: 281300 - protein, 14 aa, Homo sapiens
  CDR3 for beta chain variable domain of TCR clone 140650 (TRBV7-2, TRBJ2-7)
CASSPKTSFYEQYF

SEQ ID NO: 281301 - protein, 16 aa, Homo sapiens
  CDR3 for alpha chain variable domain of TCR clone 140651 (TRAV3, TRAJ28)
CAVLPRSGPGSYQLTF

SEQ ID NO: 281302 - protein, 18 aa, Homo sapiens
  CDR3 for beta chain variable domain of TCR clone 140651 (TRBV23-1, TRBJ2-7)
CASSQYRRTDSTSSTSGR

SEQ ID NO: 281303 - protein, 13 aa, Homo sapiens
  CDR3 for alpha chain variable domain of TCR clone 140652 (TRAV17, TRAJ5)
CAPMDTGRRALTF

SEQ ID NO: 281304 - protein, 13 aa, Homo sapiens
  CDR3 for beta chain variable domain of TCR clone 140652 (TRBV20-1, TRBJ1-1)
CSARGGGNTEAFF

SEQ ID NO: 281305 - protein, 11 aa, Homo sapiens
  CDR3 for alpha chain variable domain of TCR clone 140653 (TRAV3, TRAJ21)
CAVGNFNKFHF

SEQ ID NO: 281306 - protein, 16 aa, Homo sapiens
  CDR3 for beta chain variable domain of TCR clone 140653 (TRBV19, TRBJ2-1)
CVSSTAGPSSYNEQFF

SEQ ID NO: 281307 - protein, 16 aa, Homo sapiens
  CDR3 for alpha chain variable domain of TCR clone 140654 (TRAV3, TRAJ37)
CAVRVRGSGNTGKLIF

SEQ ID NO: 281308 - protein, 13 aa, Homo sapiens
  CDR3 for beta chain variable domain of TCR clone 140654 (TRBV7-9, TRBJ1-2)
CASSLKQNYGYSF

SEQ ID NO: 281309 - protein, 14 aa, Homo sapiens
  CDR3 for alpha chain variable domain of TCR clone 140655 (TRAV3, TRAJ6)
CAVRDSRRKLHTFI

SEQ ID NO: 281310 - protein, 15 aa, Homo sapiens
  CDR3 for beta chain variable domain of TCR clone 140655 (TRBV18, TRBJ2-7)
CASSPLQGRTYEQYF

SEQ ID NO: 281311 - protein, 13 aa, Homo sapiens
  CDR3 for alpha chain variable domain of TCR clone 140656 (TRAV12-2, TRAJ6)
CAVHVSRKLHTYI

SEQ ID NO: 281312 - protein, 12 aa, Homo sapiens
  CDR3 for beta chain variable domain of TCR clone 140656 (TRBV29-1, TRBJ2-3)
CSVTGGADTQYF

SEQ ID NO: 281313 - protein, 12 aa, Homo sapiens
  CDR3 for alpha chain variable domain of TCR clone 140657 (TRAV12-2, TRAJ52)
IGGGTSYGKLTF

SEQ ID NO: 281314 - protein, 15 aa, Homo sapiens
  CDR3 for beta chain variable domain of TCR clone 140657 (TRBV5-1, TRBJ2-1)
CASSPPRAPYNEQFF

SEQ ID NO: 281315 - protein, 16 aa, Homo sapiens
  CDR3 for alpha chain variable domain of TCR clone 140658 (TRAV30, TRAJ24)
CGPEIVDADSWGKFQF

SEQ ID NO: 281316 - protein, 14 aa, Homo sapiens
  CDR3 for beta chain variable domain of TCR clone 140658 (TRBV12-5, TRBJ2-5)
CASGSRTHQGTKYL

SEQ ID NO: 281317 - protein, 15 aa, Homo sapiens
  CDR3 for alpha chain variable domain of TCR clone 140659 (TRAV29/DV5, TRAJ24)
CAASGATDRWGKFQF

SEQ ID NO: 281318 - protein, 13 aa, Homo sapiens
  CDR3 for beta chain variable domain of TCR clone 140659 (TRBV19, TRBJ1-2)
CASSVPGQDVYTF

SEQ ID NO: 281319 - protein, 15 aa, Homo sapiens
  CDR3 for alpha chain variable domain of TCR clone 140660 (TRAV3, TRAJ9)
CAVRARNTGGFKTIF

SEQ ID NO: 281320 - protein, 17 aa, Homo sapiens
  CDR3 for beta chain variable domain of TCR clone 140660 (TRBV6-1, TRBJ1-5)
CASSEAEFIRARQPQHF

SEQ ID NO: 281321 - protein, 15 aa, Homo sapiens
  CDR3 for alpha chain variable domain of TCR clone 140661 (TRAV21, TRAJ37)
CAVRPTLSNTGKLIF

SEQ ID NO: 281322 - protein, 15 aa, Homo sapiens
  CDR3 for beta chain variable domain of TCR clone 140661 (TRBV7-9, TRBJ1-1)
CASSLLEQGGTEAFF

SEQ ID NO: 281323 - protein, 16 aa, Homo sapiens
  CDR3 for alpha chain variable domain of TCR clone 140662 (TRAV30, TRAJ24)
CGTEIVDADSWGKFQF

SEQ ID NO: 281324 - protein, 14 aa, Homo sapiens
  CDR3 for beta chain variable domain of TCR clone 140662 (TRBV7-2, TRBJ2-7)
CASRSQGAAYEPYF

SEQ ID NO: 281325 - protein, 11 aa, Homo sapiens
  CDR3 for alpha chain variable domain of TCR clone 140663 (TRAV12-1, TRAJ37)
RVVYNTGKLIF

SEQ ID NO: 281326 - protein, 12 aa, Homo sapiens
  CDR3 for beta chain variable domain of TCR clone 140663 (TRBV7-2, TRBJ2-5)
CASSLGPETQYF

SEQ ID NO: 281327 - protein, 16 aa, Homo sapiens
  CDR3 for alpha chain variable domain of TCR clone 140664 (TRAV30, TRAJ24)
CGTEIVDVDSWGKFQF

SEQ ID NO: 281328 - protein, 19 aa, Homo sapiens
  CDR3 for beta chain variable domain of TCR clone 140664 (TRBV25-1, TRBJ2-2)
CAILVYRVDRGRKTGELFF

SEQ ID NO: 281329 - protein, 18 aa, Homo sapiens
  CDR3 for alpha chain variable domain of TCR clone 140665 (TRAV13-1, TRAJ52)
CVAKNPNAGGTSYGKLTF

SEQ ID NO: 281330 - protein, 15 aa, Homo sapiens
  CDR3 for beta chain variable domain of TCR clone 140665 (TRBV2, TRBJ2-2)
CASSRETVGTGELFF

SEQ ID NO: 281331 - protein, 13 aa, Homo sapiens
  CDR3 for alpha chain variable domain of TCR clone 140666 (TRAV29/DV5, TRAJ33)
CAASVESNYQLIR

SEQ ID NO: 281332 - protein, 13 aa, Homo sapiens
  CDR3 for beta chain variable domain of TCR clone 140666 (TRBV5-1, TRBJ1-5)
CASSLGSNQPQHF

SEQ ID NO: 281333 - protein, 16 aa, Homo sapiens
  CDR3 for alpha chain variable domain of TCR clone 140667 (TRAV23/DV6, TRAJ9)
CAASIGGNTGGFKPIF

SEQ ID NO: 281334 - protein, 14 aa, Homo sapiens
  CDR3 for beta chain variable domain of TCR clone 140667 (TRBV6-1, TRBJ2-5)
CASSYAGGEETQYF

SEQ ID NO: 281335 - protein, 14 aa, Homo sapiens
  CDR3 for alpha chain variable domain of TCR clone 140668 (TRAV8-2, TRAJ23)
WVVSDDNQGGKLIF

SEQ ID NO: 281336 - protein, 16 aa, Homo sapiens
  CDR3 for beta chain variable domain of TCR clone 140668 (TRBV4-2, TRBJ2-5)
CASSQELVGSQETQYF

SEQ ID NO: 281337 - protein, 14 aa, Homo sapiens
  CDR3 for alpha chain variable domain of TCR clone 140669 (TRAV12-3, TRAJ10)
SHLPLTGGGNKLTF

SEQ ID NO: 281338 - protein, 14 aa, Homo sapiens
  CDR3 for beta chain variable domain of TCR clone 140669 (TRBV19, TRBJ2-1)
CASPTFVLSGEQFY

SEQ ID NO: 281339 - protein, 13 aa, Homo sapiens
  CDR3 for alpha chain variable domain of TCR clone 140670 (TRAV25, TRAJ26)
CAGLDNYGQNFVF

SEQ ID NO: 281340 - protein, 17 aa, Homo sapiens
  CDR3 for beta chain variable domain of TCR clone 140670 (TRBV7-8, TRBJ2-6)
CASSAGTGGAGANVLTF

SEQ ID NO: 281341 - protein, 14 aa, Homo sapiens
  CDR3 for alpha chain variable domain of TCR clone 140671 (TRAV35, TRAJ33)
CAGSSQDSNYQLIW

SEQ ID NO: 281342 - protein, 14 aa, Homo sapiens
  CDR3 for beta chain variable domain of TCR clone 140671 (TRBV5-1, TRBJ1-4)
APSAWKDGNEKLFF

SEQ ID NO: 281343 - protein, 15 aa, Homo sapiens
  CDR3 for alpha chain variable domain of TCR clone 140672 (TRAV36/DV7, TRAJ21)
CALKFYFGSGTKLNV

SEQ ID NO: 281344 - protein, 15 aa, Homo sapiens
  CDR3 for beta chain variable domain of TCR clone 140672 (TRBV11-1, TRBJ2-1)
CASHTGLAGSNEQFF

SEQ ID NO: 281345 - protein, 14 aa, Homo sapiens
  CDR3 for alpha chain variable domain of TCR clone 140673 (TRAV12-2, TRAJ48)
CAVNAFFGNEKLTF

SEQ ID NO: 281346 - protein, 14 aa, Homo sapiens
  CDR3 for beta chain variable domain of TCR clone 140673 (TRBV19, TRBJ2-1)
CASPTFVLSGEQFF

SEQ ID NO: 281347 - protein, 15 aa, Homo sapiens
  CDR3 for alpha chain variable domain of TCR clone 140674 (TRAV23/DV6, TRAJ45)
CAAKNGGGGADGLTF

SEQ ID NO: 281348 - protein, 20 aa, Homo sapiens
  CDR3 for beta chain variable domain of TCR clone 140674 (TRBV7-8, TRBJ2-2)
CASSHLFPGPTIHITGELFF

SEQ ID NO: 281349 - protein, 12 aa, Homo sapiens
  CDR3 for alpha chain variable domain of TCR clone 140675 (TRAV29/DV5, TRAJ43)
CAAPYNNNDMRF

SEQ ID NO: 281350 - protein, 16 aa, Homo sapiens
  CDR3 for beta chain variable domain of TCR clone 140675 (TRBV12-5, TRBJ2-5)
CASGPRTSGNQETQYF

SEQ ID NO: 281351 - protein, 12 aa, Homo sapiens
  CDR3 for alpha chain variable domain of TCR clone 140676 (TRAV12-1, TRAJ40)
CVVSSGTYKYIF

SEQ ID NO: 281352 - protein, 14 aa, Homo sapiens
  CDR3 for beta chain variable domain of TCR clone 140676 (TRBV14, TRBJ2-5)
CASSPQRHYETQYF

SEQ ID NO: 281353 - protein, 12 aa, Homo sapiens
  CDR3 for alpha chain variable domain of TCR clone 140677 (TRAV12-3, TRAJ17)
CAMTLTGNKLTF

SEQ ID NO: 281354 - protein, 15 aa, Homo sapiens
  CDR3 for beta chain variable domain of TCR clone 140677 (TRBV20-1, TRBJ2-7)
SSARDRFSGMDEQYF

SEQ ID NO: 281355 - protein, 11 aa, Homo sapiens
  CDR3 for alpha chain variable domain of TCR clone 140678 (TRAV21, TRAJ34)
CAHYNTDKLIF

SEQ ID NO: 281356 - protein, 15 aa, Homo sapiens
  CDR3 for beta chain variable domain of TCR clone 140678 (TRBV7-9, TRBJ1-6)
CASSSPGRGNSPLHF

SEQ ID NO: 281357 - protein, 12 aa, Homo sapiens
  CDR3 for alpha chain variable domain of TCR clone 140679 (TRAV12-3, TRAJ17)
CAMTLTGNKLIF

SEQ ID NO: 281358 - protein, 14 aa, Homo sapiens
  CDR3 for beta chain variable domain of TCR clone 140679 (TRBV7-2, TRBJ2-7)
CASSPKTSFYEQYF

SEQ ID NO: 281359 - protein, 16 aa, Homo sapiens
  CDR3 for alpha chain variable domain of TCR clone 140680 (TRAV13-2, TRAJ28)
CAEKSYSGAWSYQLTF

SEQ ID NO: 281360 - protein, 16 aa, Homo sapiens
  CDR3 for beta chain variable domain of TCR clone 140680 (TRBV19, TRBJ2-1)
CASSKAGPSSYNEQFF

SEQ ID NO: 281361 - protein, 14 aa, Homo sapiens
  CDR3 for alpha chain variable domain of TCR clone 140681 (TRAV3, TRAJ21)
CAVRDAYNFNKFYF

SEQ ID NO: 281362 - protein, 14 aa, Homo sapiens
  CDR3 for beta chain variable domain of TCR clone 140681 (TRBV7-2, TRBJ1-1)
CASSFLTGTTEAFF

SEQ ID NO: 281363 - protein, 17 aa, Homo sapiens
  CDR3 for alpha chain variable domain of TCR clone 140682 (TRAV3, TRAJ42)
CAVKDRDYGGSQGNLIF

SEQ ID NO: 281364 - protein, 15 aa, Homo sapiens
  CDR3 for beta chain variable domain of TCR clone 140682 (TRBV6-6, TRBJ2-7)
CASSYSYGGSNEQYF

SEQ ID NO: 281365 - protein, 14 aa, Homo sapiens
  CDR3 for alpha chain variable domain of TCR clone 140683 (TRAV1-2, TRAJ16)
CAVNRFSDGQKLPF

SEQ ID NO: 281366 - protein, 22 aa, Homo sapiens
  CDR3 for beta chain variable domain of TCR clone 140683 (TRBV6-1, TRBJ1-3)
CASVQGGGWKHHIFWRGKLAHC

SEQ ID NO: 281367 - protein, 14 aa, Homo sapiens
  CDR3 for alpha chain variable domain of TCR clone 140684 (TRAV23/DV6, TRAJ4)
CAAPSSGGYNKLIF

SEQ ID NO: 281368 - protein, 11 aa, Homo sapiens
  CDR3 for beta chain variable domain of TCR clone 140684 (TRBV29-1, TRBJ2-5)
CSEDRTGTQYF

SEQ ID NO: 281369 - protein, 11 aa, Homo sapiens
  CDR3 for alpha chain variable domain of TCR clone 140685 (TRAV26-2, TRAJ8)
CILTGFQKLVF

SEQ ID NO: 281370 - protein, 15 aa, Homo sapiens
  CDR3 for beta chain variable domain of TCR clone 140685 (TRBV7-9, TRBJ1-6)
CASSSPGRGNSPLHF

SEQ ID NO: 281371 - protein, 13 aa, Homo sapiens
  CDR3 for alpha chain variable domain of TCR clone 140686 (TRAV41, TRAJ48)
SVPVNFGNEKLTF

SEQ ID NO: 281372 - protein, 15 aa, Homo sapiens
  CDR3 for beta chain variable domain of TCR clone 140686 (TRBV28, TRBJ2-3)
CASSPPTGSTDTQYF

SEQ ID NO: 281373 - protein, 13 aa, Homo sapiens
  CDR3 for alpha chain variable domain of TCR clone 140687 (TRAV1-2, TRAJ27)
CAVFNTNAGKSTF

SEQ ID NO: 281374 - protein, 16 aa, Homo sapiens
  CDR3 for beta chain variable domain of TCR clone 140687 (TRBV19, TRBJ2-1)
CASSKAGPSSYNEQFF

SEQ ID NO: 281375 - protein, 13 aa, Homo sapiens
  CDR3 for alpha chain variable domain of TCR clone 140688 (TRAV38-2/DV8, TRAJ34)
CAYRNYNTDKLIF

SEQ ID NO: 281376 - protein, 11 aa, Homo sapiens
  CDR3 for beta chain variable domain of TCR clone 140688 (TRBV29-1, TRBJ2-5)
CSEDRTGTHYF

SEQ ID NO: 281377 - protein, 13 aa, Homo sapiens
  CDR3 for alpha chain variable domain of TCR clone 140689 (TRAV13-1, TRAJ10)
CAALEGGGNNLTL

SEQ ID NO: 281378 - protein, 17 aa, Homo sapiens
  CDR3 for beta chain variable domain of TCR clone 140689 (TRBV7-3, TRBJ2-2)
CASSLSGTSGGTGELFF

SEQ ID NO: 281379 - protein, 13 aa, Homo sapiens
  CDR3 for alpha chain variable domain of TCR clone 140690 (TRAV2, TRAJ15)
CAVASQAGTALIF

SEQ ID NO: 281380 - protein, 16 aa, Homo sapiens
  CDR3 for beta chain variable domain of TCR clone 140690 (TRBV20-1, TRBJ1-4)
CSAPGQGLLSNEKLFF

SEQ ID NO: 281381 - protein, 13 aa, Homo sapiens
  CDR3 for alpha chain variable domain of TCR clone 140691 (TRAV8-6, TRAJ16)
CAVSSPDSQKLLF

SEQ ID NO: 281382 - protein, 16 aa, Homo sapiens
  CDR3 for beta chain variable domain of TCR clone 140691 (TRBV5-7, TRBJ2-3)
CASSSLGGAITDTQYF

SEQ ID NO: 281383 - protein, 23 aa, Homo sapiens
  CDR3 for alpha chain variable domain of TCR clone 140692 (TRAV26-1, TRAJ38)
CIADNAGNNHIQNPDPAVYPLRD

SEQ ID NO: 281384 - protein, 15 aa, Homo sapiens
  CDR3 for beta chain variable domain of TCR clone 140692 (TRBV27, TRBJ2-1)
CASSNGGGSSNEQFF

SEQ ID NO: 281385 - protein, 13 aa, Homo sapiens
  CDR3 for alpha chain variable domain of TCR clone 140693 (TRAV27, TRAJ41)
RAGEGNSGYALNF

SEQ ID NO: 281386 - protein, 14 aa, Homo sapiens
  CDR3 for beta chain variable domain of TCR clone 140693 (TRBV7-2, TRBJ1-1)
CASSFLTGTTEAFY

SEQ ID NO: 281387 - protein, 18 aa, Homo sapiens
  CDR3 for alpha chain variable domain of TCR clone 140694 (TRAV1-2, TRAJ18)
CAVRDMGDRGSTLGRLFF

SEQ ID NO: 281388 - protein, 16 aa, Homo sapiens
  CDR3 for beta chain variable domain of TCR clone 140694 (TRBV29-1, TRBJ1-2)
CSVDANRDIANYGYTF

SEQ ID NO: 281389 - protein, 14 aa, Homo sapiens
  CDR3 for alpha chain variable domain of TCR clone 140695 (TRAV35, TRAJ40)
CAGSTTSGTYKYIF

SEQ ID NO: 281390 - protein, 12 aa, Homo sapiens
  CDR3 for beta chain variable domain of TCR clone 140695 (TRBV12-4, TRBJ2-7)
CASSLGGYEQYF

SEQ ID NO: 281391 - protein, 16 aa, Homo sapiens
  CDR3 for alpha chain variable domain of TCR clone 140696 (TRAV12-1, TRAJ12)
CVVNTLLMDSSYKLIF

SEQ ID NO: 281392 - protein, 15 aa, Homo sapiens
  CDR3 for beta chain variable domain of TCR clone 140696 (TRBV4-3, TRBJ2-7)
CASSQDLGSSYEQYF

SEQ ID NO: 281393 - protein, 11 aa, Homo sapiens
  CDR3 for alpha chain variable domain of TCR clone 140697 (TRAV2, TRAJ33)
CAVESNYQLIW

SEQ ID NO: 281394 - protein, 17 aa, Homo sapiens
  CDR3 for beta chain variable domain of TCR clone 140697 (TRBV5-1, TRBJ2-2)
CASSLAGLSGGTGELFF

SEQ ID NO: 281395 - protein, 17 aa, Homo sapiens
  CDR3 for alpha chain variable domain of TCR clone 140698 (TRAV26-1, TRAJ58)
CIVRVGAEETSGSRLTV

SEQ ID NO: 281396 - protein, 13 aa, Homo sapiens
  CDR3 for beta chain variable domain of TCR clone 140698 (TRBV12-5, TRBJ1-2)
CASGVRTGNGYTF

SEQ ID NO: 281397 - protein, 12 aa, Homo sapiens
  CDR3 for alpha chain variable domain of TCR clone 140699 (TRAV12-3, TRAJ32)
CAGGGATNKLIF

SEQ ID NO: 281398 - protein, 13 aa, Homo sapiens
  CDR3 for beta chain variable domain of TCR clone 140699 (TRBV7-9, TRBJ1-2)
CASSLKQNYGYTF

SEQ ID NO: 281399 - protein, 12 aa, Homo sapiens
  CDR3 for alpha chain variable domain of TCR clone 140700 (TRAV23/DV6, TRAJ8)
CAAIKATGFQKL

SEQ ID NO: 281400 - protein, 15 aa, Homo sapiens
  CDR3 for beta chain variable domain of TCR clone 140700 (TRBV28, TRBJ2-3)
CASSPDRQGANTQYF

SEQ ID NO: 281401 - protein, 16 aa, Homo sapiens
  CDR3 for alpha chain variable domain of TCR clone 140701 (TRAV10, TRAJ15)
CVVSAPSDQAGTALIF

SEQ ID NO: 281402 - protein, 16 aa, Homo sapiens
  CDR3 for beta chain variable domain of TCR clone 140701 (TRBV2, TRBJ2-3)
CASSTSVEGVTDTQYF

SEQ ID NO: 281403 - protein, 14 aa, Homo sapiens
  CDR3 for alpha chain variable domain of TCR clone 140702 (TRAV12-2, TRAJ9)
CAVNALEGAFKTIF

SEQ ID NO: 281404 - protein, 16 aa, Homo sapiens
  CDR3 for beta chain variable domain of TCR clone 140702 (TRBV19, TRBJ1-6)
CASSVAPVAGNSPLHF

SEQ ID NO: 281405 - protein, 11 aa, Homo sapiens
  CDR3 for alpha chain variable domain of TCR clone 140703 (TRAV29/DV5, TRAJ49)
CAAVPGNQFYF

SEQ ID NO: 281406 - protein, 17 aa, Homo sapiens
  CDR3 for beta chain variable domain of TCR clone 140703 (TRBV4-2, TRBJ1-1)
CASTQFGGGSGNTEDFF

SEQ ID NO: 281407 - protein, 13 aa, Homo sapiens
  CDR3 for alpha chain variable domain of TCR clone 140704 (TRAV12-3, TRAJ13)
CAMSSGGYQKVTF

SEQ ID NO: 281408 - protein, 16 aa, Homo sapiens
  CDR3 for beta chain variable domain of TCR clone 140704 (TRBV4-1, TRBJ2-7)
CASSRGGILNSYEQYF

SEQ ID NO: 281409 - protein, 17 aa, Homo sapiens
  CDR3 for alpha chain variable domain of TCR clone 140705 (TRAV8-6, TRAJ58)
CAVRSWVGETSGSRLTF

SEQ ID NO: 281410 - protein, 17 aa, Homo sapiens
  CDR3 for beta chain variable domain of TCR clone 140705 (TRBV11-2, TRBJ2-1)
CASSLYPPGVEYNEQFF

SEQ ID NO: 281411 - protein, 17 aa, Homo sapiens
  CDR3 for alpha chain variable domain of TCR clone 140706 (TRAV3, TRAJ12)
CAVRDGGRMDSSHKLIF

SEQ ID NO: 281412 - protein, 12 aa, Homo sapiens
  CDR3 for beta chain variable domain of TCR clone 140706 (TRBV11-2, TRBJ2-2)
CASSLGGGELFL

SEQ ID NO: 281413 - protein, 12 aa, Homo sapiens
  CDR3 for alpha chain variable domain of TCR clone 140707 (TRAV21, TRAJ37)
CAVRGNTGKLIF

SEQ ID NO: 281414 - protein, 11 aa, Homo sapiens
  CDR3 for beta chain variable domain of TCR clone 140707 (TRBV12-4, TRBJ2-3)
CASTATDTQYF

SEQ ID NO: 281415 - protein, 15 aa, Homo sapiens
  CDR3 for alpha chain variable domain of TCR clone 140708 (TRAV3, TRAJ20)
CAVRDINLSDYKPSF

SEQ ID NO: 281416 - protein, 15 aa, Homo sapiens
  CDR3 for beta chain variable domain of TCR clone 140708 (TRBV7-9, TRBJ1-6)
CASSSPGRGNSPLHF

SEQ ID NO: 281417 - protein, 13 aa, Homo sapiens
  CDR3 for alpha chain variable domain of TCR clone 140709 (TRAV13-1, TRAJ6)
CAASRGGIYIPTF

SEQ ID NO: 281418 - protein, 15 aa, Homo sapiens
  CDR3 for beta chain variable domain of TCR clone 140709 (TRBV25-1, TRBJ2-5)
CASSDTGTHQETQYF

SEQ ID NO: 281419 - protein, 11 aa, Homo sapiens
  CDR3 for alpha chain variable domain of TCR clone 140710 (TRAV27, TRAJ47)
CRSNQGNKLVF

SEQ ID NO: 281420 - protein, 14 aa, Homo sapiens
  CDR3 for beta chain variable domain of TCR clone 140710 (TRBV7-9, TRBJ2-2)
CASSGLADTGELFF

SEQ ID NO: 281421 - protein, 20 aa, Homo sapiens
  CDR3 for alpha chain variable domain of TCR clone 140711 (TRAV26-1, TRAJ42)
CCVLFHRQTYYGGSQGNLIS

SEQ ID NO: 281422 - protein, 16 aa, Homo sapiens
  CDR3 for beta chain variable domain of TCR clone 140711 (TRBV7-3, TRBJ2-2)
CASSLKRGTLSGELFF

SEQ ID NO: 281423 - protein, 14 aa, Homo sapiens
  CDR3 for alpha chain variable domain of TCR clone 140712 (TRAV13-1, TRAJ45)
CAAIGGGGADVLTF

SEQ ID NO: 281424 - protein, 16 aa, Homo sapiens
  CDR3 for beta chain variable domain of TCR clone 140712 (TRBV7-2, TRBJ1-1)
CASSLGAGWTNTEAFF

SEQ ID NO: 281425 - protein, 11 aa, Homo sapiens
  CDR3 for alpha chain variable domain of TCR clone 140713 (TRAV9-2, TRAJ58)
CALTSGSRLTF

SEQ ID NO: 281426 - protein, 20 aa, Homo sapiens
  CDR3 for beta chain variable domain of TCR clone 140713 (TRBV20-1, TRBJ2-5)
CSARDLQGARPSGREETQYF

SEQ ID NO: 281427 - protein, 12 aa, Homo sapiens
  CDR3 for alpha chain variable domain of TCR clone 140714 (TRAV12-3, TRAJ17)
CAMTLPGNKLTF

SEQ ID NO: 281428 - protein, 16 aa, Homo sapiens
  CDR3 for beta chain variable domain of TCR clone 140714 (TRBV12-4, TRBJ2-5)
CASSFFVRGRQETQYF

SEQ ID NO: 281429 - protein, 15 aa, Homo sapiens
  CDR3 for alpha chain variable domain of TCR clone 140715 (TRAV22, TRAJ56)
CAVEEYTGANSKLTF

SEQ ID NO: 281430 - protein, 15 aa, Homo sapiens
  CDR3 for beta chain variable domain of TCR clone 140715 (TRBV11-2, TRBJ1-2)
CASSLEGVQRNGYTF

SEQ ID NO: 281431 - protein, 18 aa, Homo sapiens
  CDR3 for alpha chain variable domain of TCR clone 140716 (TRAV26-1, TRAJ23)
CIVRVGLEVGNQGGKLIF

SEQ ID NO: 281432 - protein, 13 aa, Homo sapiens
  CDR3 for beta chain variable domain of TCR clone 140716 (TRBV7-2, TRBJ2-2)
CASSLAVTGELFF

SEQ ID NO: 281433 - protein, 12 aa, Homo sapiens
  CDR3 for alpha chain variable domain of TCR clone 140717 (TRAV26-1, TRAJ26)
CIVFNYGQNFVF

SEQ ID NO: 281434 - protein, 15 aa, Homo sapiens
  CDR3 for beta chain variable domain of TCR clone 140717 (TRBV7-2, TRBJ2-3)
CASSLRGGSTDTQYF

SEQ ID NO: 281435 - protein, 16 aa, Homo sapiens
  CDR3 for alpha chain variable domain of TCR clone 140718 (TRAV12-2, TRAJ18)
CAVFAGRGSTLGGLYF

SEQ ID NO: 281436 - protein, 17 aa, Homo sapiens
  CDR3 for beta chain variable domain of TCR clone 140718 (TRBV20-1, TRBJ1-5)
CSASLSPGQGGNQPQHF

SEQ ID NO: 281437 - protein, 14 aa, Homo sapiens
  CDR3 for alpha chain variable domain of TCR clone 140719 (TRAV26-1, TRAJ38)
CIAANAGNNRKLIW

SEQ ID NO: 281438 - protein, 13 aa, Homo sapiens
  CDR3 for beta chain variable domain of TCR clone 140719 (TRBV19, TRBJ1-2)
CASSVPGQDGYIF

SEQ ID NO: 281439 - protein, 14 aa, Homo sapiens
  CDR3 for alpha chain variable domain of TCR clone 140720 (TRAV4, TRAJ17)
CLVGDPLVGNKLTF

SEQ ID NO: 281440 - protein, 20 aa, Homo sapiens
  CDR3 for beta chain variable domain of TCR clone 140720 (TRBV20-1, TRBJ2-1)
CSARPYAVAGGPSYYNEQFF

SEQ ID NO: 281441 - protein, 16 aa, Homo sapiens
  CDR3 for alpha chain variable domain of TCR clone 140721 (TRAV36/DV7, TRAJ33)
WRPGNKVQASNYQLIW

SEQ ID NO: 281442 - protein, 15 aa, Homo sapiens
  CDR3 for beta chain variable domain of TCR clone 140721 (TRBV29-1, TRBJ2-1)
CSVGRHALFYNEQFF

SEQ ID NO: 281443 - protein, 13 aa, Homo sapiens
  CDR3 for alpha chain variable domain of TCR clone 140722 (TRAV16, TRAJ28)
CSPTGAGSYQLTF

SEQ ID NO: 281444 - protein, 16 aa, Homo sapiens
  CDR3 for beta chain variable domain of TCR clone 140722 (TRBV28, TRBJ1-5)
CASSLTGQGWDQPQHF

SEQ ID NO: 281445 - protein, 12 aa, Homo sapiens
  CDR3 for alpha chain variable domain of TCR clone 140723 (TRAV12-3, TRAJ17)
CAMTLTGNKLAF

SEQ ID NO: 281446 - protein, 15 aa, Homo sapiens
  CDR3 for beta chain variable domain of TCR clone 140723 (TRBV20-1, TRBJ2-7)
WSARDRVSGMDEQYF

SEQ ID NO: 281447 - protein, 12 aa, Homo sapiens
  CDR3 for alpha chain variable domain of TCR clone 140724 (TRAV21, TRAJ42)
CAVGGSQGNLIF

SEQ ID NO: 281448 - protein, 12 aa, Homo sapiens
  CDR3 for beta chain variable domain of TCR clone 140724 (TRBV19, TRBJ2-1)
CASSPQGAEQFF

SEQ ID NO: 281449 - protein, 14 aa, Homo sapiens
  CDR3 for alpha chain variable domain of TCR clone 140725 (TRAV12-2, TRAJ53)
CAGKGGGSNYKLTL

SEQ ID NO: 281450 - protein, 14 aa, Homo sapiens
  CDR3 for beta chain variable domain of TCR clone 140725 (TRBV19, TRBJ2-1)
CASPTFVLSGEQFF

SEQ ID NO: 281451 - protein, 14 aa, Homo sapiens
  CDR3 for alpha chain variable domain of TCR clone 140726 (TRAV12-3, TRAJ56)
CAMSVTGANSKLTF

SEQ ID NO: 281452 - protein, 16 aa, Homo sapiens
  CDR3 for beta chain variable domain of TCR clone 140726 (TRBV19, TRBJ2-1)
CASSKAGPSSYNEQFF

SEQ ID NO: 281453 - protein, 11 aa, Homo sapiens
  CDR3 for alpha chain variable domain of TCR clone 140727 (TRAV12-3, TRAJ43)
CAMSVSNDMRF

SEQ ID NO: 281454 - protein, 16 aa, Homo sapiens
  CDR3 for beta chain variable domain of TCR clone 140727 (TRBV15, TRBJ2-1)
CATSRERLAGAYEQFF

SEQ ID NO: 281455 - protein, 14 aa, Homo sapiens
  CDR3 for alpha chain variable domain of TCR clone 140728 (TRAV26-1, TRAJ48)
CIVRVGYGNEKLTF

SEQ ID NO: 281456 - protein, 13 aa, Homo sapiens
  CDR3 for beta chain variable domain of TCR clone 140728 (TRBV11-3, TRBJ2-3)
CASSHDTKDTQYF

SEQ ID NO: 281457 - protein, 15 aa, Homo sapiens
  CDR3 for alpha chain variable domain of TCR clone 140729 (TRAV41, TRAJ45)
CAASYSGGGADGLTF

SEQ ID NO: 281458 - protein, 16 aa, Homo sapiens
  CDR3 for beta chain variable domain of TCR clone 140729 (TRBV12-5, TRBJ2-5)
CASGPRTSGNQETQYF

SEQ ID NO: 281459 - protein, 13 aa, Homo sapiens
  CDR3 for alpha chain variable domain of TCR clone 140730 (TRAV2, TRAJ15)
CAVASQAGTALIF

SEQ ID NO: 281460 - protein, 15 aa, Homo sapiens
  CDR3 for beta chain variable domain of TCR clone 140730 (TRBV7-3, TRBJ2-1)
CASSPTGGGEVEQFF

SEQ ID NO: 281461 - protein, 14 aa, Homo sapiens
  CDR3 for alpha chain variable domain of TCR clone 140731 (TRAV12-2, TRAJ15)
CAPHTGQAGTALIF

SEQ ID NO: 281462 - protein, 17 aa, Homo sapiens
  CDR3 for beta chain variable domain of TCR clone 140731 (TRBV5-5, TRBJ1-2)
CASSLGSLDGQSEVYAF

SEQ ID NO: 281463 - protein, 12 aa, Homo sapiens
  CDR3 for alpha chain variable domain of TCR clone 140732 (TRAV13-1, TRAJ49)
CAASPMGNQLYF

SEQ ID NO: 281464 - protein, 17 aa, Homo sapiens
  CDR3 for beta chain variable domain of TCR clone 140732 (TRBV11-2, TRBJ2-1)
CASSLYPPGVEYNEQFF

SEQ ID NO: 281465 - protein, 17 aa, Homo sapiens
  CDR3 for alpha chain variable domain of TCR clone 140733 (TRAV13-1, TRAJ52)
CAASSGAGGTSYGKLTF

SEQ ID NO: 281466 - protein, 14 aa, Homo sapiens
  CDR3 for beta chain variable domain of TCR clone 140733 (TRBV7-2, TRBJ2-1)
CASSLGVGYNEQFF

SEQ ID NO: 281467 - protein, 12 aa, Homo sapiens
  CDR3 for alpha chain variable domain of TCR clone 140734 (TRAV12-3, TRAJ53)
CAMKGSNYKLTF

SEQ ID NO: 281468 - protein, 11 aa, Homo sapiens
  CDR3 for beta chain variable domain of TCR clone 140734 (TRBV7-6, TRBJ2-7)
CASSQGYEQYF

SEQ ID NO: 281469 - protein, 17 aa, Homo sapiens
  CDR3 for alpha chain variable domain of TCR clone 140735 (TRAV3, TRAJ42)
CAVRDRDYGGSQGNPIF

SEQ ID NO: 281470 - protein, 15 aa, Homo sapiens
  CDR3 for beta chain variable domain of TCR clone 140735 (TRBV6-6, TRBJ2-7)
CASSYSYGGSYEQHF

SEQ ID NO: 281471 - protein, 17 aa, Homo sapiens
  CDR3 for alpha chain variable domain of TCR clone 140736 (TRAV13-2, TRAJ42)
CAEKGKNYGGSQGNLIF

SEQ ID NO: 281472 - protein, 13 aa, Homo sapiens
  CDR3 for beta chain variable domain of TCR clone 140736 (TRBV24-1, TRBJ2-1)
CATSAGPYNEQFF

SEQ ID NO: 281473 - protein, 13 aa, Homo sapiens
  CDR3 for alpha chain variable domain of TCR clone 140737 (TRAV17, TRAJ26)
CATVDNYGQNFVF

SEQ ID NO: 281474 - protein, 16 aa, Homo sapiens
  CDR3 for beta chain variable domain of TCR clone 140737 (TRBV2, TRBJ2-1)
CASSVGGSPSYNEHFF

SEQ ID NO: 281475 - protein, 16 aa, Homo sapiens
  CDR3 for alpha chain variable domain of TCR clone 140738 (TRAV26-1, TRAJ32)
CIVRTNYGGATNKLIF

SEQ ID NO: 281476 - protein, 14 aa, Homo sapiens
  CDR3 for beta chain variable domain of TCR clone 140738 (TRBV27, TRBJ1-1)
CASSLLSGISEAFF

SEQ ID NO: 281477 - protein, 14 aa, Homo sapiens
  CDR3 for alpha chain variable domain of TCR clone 140739 (TRAV14/DV4, TRAJ32)
SNVLPLTPTNKLIF

SEQ ID NO: 281478 - protein, 17 aa, Homo sapiens
  CDR3 for beta chain variable domain of TCR clone 140739 (TRBV20-1, TRBJ2-1)
GSASSSGLAGSYNEQFF

SEQ ID NO: 281479 - protein, 16 aa, Homo sapiens
  CDR3 for alpha chain variable domain of TCR clone 140740 (TRAV4, TRAJ9)
CLVGNPNRPGGFKTIF

SEQ ID NO: 281480 - protein, 16 aa, Homo sapiens
  CDR3 for beta chain variable domain of TCR clone 140740 (TRBV28, TRBJ1-4)
CASSPPYRGRSEKLFF

SEQ ID NO: 281481 - protein, 16 aa, Homo sapiens
  CDR3 for alpha chain variable domain of TCR clone 140741 (TRAV30, TRAJ24)
CGTEIVDADSWGKFQF

SEQ ID NO: 281482 - protein, 15 aa, Homo sapiens
  CDR3 for beta chain variable domain of TCR clone 140741 (TRBV11-2, TRBJ2-1)
CASSLGPDSYNEQFF

SEQ ID NO: 281483 - protein, 12 aa, Homo sapiens
  CDR3 for alpha chain variable domain of TCR clone 140742 (TRAV21, TRAJ31)
CAVWGNNARLMF

SEQ ID NO: 281484 - protein, 14 aa, Homo sapiens
  CDR3 for beta chain variable domain of TCR clone 140742 (TRBV6-1, TRBJ1-3)
CASVQGGGGNTIYS

SEQ ID NO: 281485 - protein, 13 aa, Homo sapiens
  CDR3 for alpha chain variable domain of TCR clone 140743 (TRAV17, TRAJ34)
FATDLYNTYKLIF

SEQ ID NO: 281486 - protein, 12 aa, Homo sapiens
  CDR3 for beta chain variable domain of TCR clone 140743 (TRBV11-2, TRBJ2-2)
CASSLGGGELFF

SEQ ID NO: 281487 - protein, 15 aa, Homo sapiens
  CDR3 for alpha chain variable domain of TCR clone 140744 (TRAV26-1, TRAJ29)
CIVRVEGSGNTPLVF

SEQ ID NO: 281488 - protein, 15 aa, Homo sapiens
  CDR3 for beta chain variable domain of TCR clone 140744 (TRBV7-9, TRBJ1-5)
CASSQGHHPNQTQHF

SEQ ID NO: 281489 - protein, 16 aa, Homo sapiens
  CDR3 for alpha chain variable domain of TCR clone 140745 (TRAV1-1, TRAJ29)
CAVRSTRNSGNTPLVF

SEQ ID NO: 281490 - protein, 15 aa, Homo sapiens
  CDR3 for beta chain variable domain of TCR clone 140745 (TRBV29-1, TRBJ2-1)
CSVGRHSLFYNEQFF

SEQ ID NO: 281491 - protein, 14 aa, Homo sapiens
  CDR3 for alpha chain variable domain of TCR clone 140746 (TRAV13-1, TRAJ44)
CAAKATGTASKLTF

SEQ ID NO: 281492 - protein, 13 aa, Homo sapiens
  CDR3 for beta chain variable domain of TCR clone 140746 (TRBV11-2, TRBJ2-7)
CASSSYPSYEQYF

SEQ ID NO: 281493 - protein, 14 aa, Homo sapiens
  CDR3 for alpha chain variable domain of TCR clone 140747 (TRAV27, TRAJ12)
CAGARMDSSYKLIF

SEQ ID NO: 281494 - protein, 18 aa, Homo sapiens
  CDR3 for beta chain variable domain of TCR clone 140747 (TRBV10-3, TRBJ2-7)
CAISESGRPSGGRVEQSF

SEQ ID NO: 281495 - protein, 17 aa, Homo sapiens
  CDR3 for alpha chain variable domain of TCR clone 140748 (TRAV1-1, TRAJ13)
CAVRGNLGVTRKLPLEL

SEQ ID NO: 281496 - protein, 11 aa, Homo sapiens
  CDR3 for beta chain variable domain of TCR clone 140748 (TRBV29-1, TRBJ2-5)
CSEDRTGTQYF

SEQ ID NO: 281497 - protein, 13 aa, Homo sapiens
  CDR3 for alpha chain variable domain of TCR clone 140749 (TRAV8-3, TRAJ28)
CAVGAVGSYQLNF

SEQ ID NO: 281498 - protein, 14 aa, Homo sapiens
  CDR3 for beta chain variable domain of TCR clone 140749 (TRBV15, TRBJ2-1)
CATSGVEDYNEQFF

SEQ ID NO: 281499 - protein, 12 aa, Homo sapiens
  CDR3 for alpha chain variable domain of TCR clone 140750 (TRAV26-1, TRAJ36)
CIVRVRSDNLFF

SEQ ID NO: 281500 - protein, 13 aa, Homo sapiens
  CDR3 for beta chain variable domain of TCR clone 140750 (TRBV11-2, TRBJ2-5)
CASSRGPSDTQYF

SEQ ID NO: 281501 - protein, 17 aa, Homo sapiens
  CDR3 for alpha chain variable domain of TCR clone 140751 (TRAV8-6, TRAJ58)
CAVSSWVGETSGSRLTF

SEQ ID NO: 281502 - protein, 16 aa, Homo sapiens
  CDR3 for beta chain variable domain of TCR clone 140751 (TRBV5-4, TRBJ2-3)
CASQQPGAGGADTQYF

SEQ ID NO: 281503 - protein, 14 aa, Homo sapiens
  CDR3 for alpha chain variable domain of TCR clone 140752 (TRAV35, TRAJ13)
CAGSPSGGYQKVTF

SEQ ID NO: 281504 - protein, 17 aa, Homo sapiens
  CDR3 for beta chain variable domain of TCR clone 140752 (TRBV7-6, TRBJ2-5)
CAISPGLADPWGETQYF

SEQ ID NO: 281505 - protein, 18 aa, Homo sapiens
  CDR3 for alpha chain variable domain of TCR clone 140753 (TRAV21, TRAJ52)
CAVRPSPAGGTSHGKLTF

SEQ ID NO: 281506 - protein, 13 aa, Homo sapiens
  CDR3 for beta chain variable domain of TCR clone 140753 (TRBV19, TRBJ1-2)
CASSVPGQDGYTF

SEQ ID NO: 281507 - protein, 14 aa, Homo sapiens
  CDR3 for alpha chain variable domain of TCR clone 140754 (TRAV23/DV6, TRAJ37)
CAASTSSNTGKLIF

SEQ ID NO: 281508 - protein, 13 aa, Homo sapiens
  CDR3 for beta chain variable domain of TCR clone 140754 (TRBV7-7, TRBJ1-1)
CASSLGAYTEAFF

SEQ ID NO: 281509 - protein, 15 aa, Homo sapiens
  CDR3 for alpha chain variable domain of TCR clone 140755 (TRAV27, TRAJ38)
CAARRNAGNNRKLIW

SEQ ID NO: 281510 - protein, 15 aa, Homo sapiens
  CDR3 for beta chain variable domain of TCR clone 140755 (TRBV12-4, TRBJ2-5)
CASSPPTGLEETQYF

SEQ ID NO: 281511 - protein, 15 aa, Homo sapiens
  CDR3 for alpha chain variable domain of TCR clone 140756 (TRAV26-2, TRAJ13)
CILRDLSGGYQKVTI

SEQ ID NO: 281512 - protein, 11 aa, Homo sapiens
  CDR3 for beta chain variable domain of TCR clone 140756 (TRBV7-9, TRBJ2-3)
CASSYTDAQYF

SEQ ID NO: 281513 - protein, 14 aa, Homo sapiens
  CDR3 for alpha chain variable domain of TCR clone 140757 (TRAV8-4, TRAJ48)
CAVSETFGNEKLTF

SEQ ID NO: 281514 - protein, 14 aa, Homo sapiens
  CDR3 for beta chain variable domain of TCR clone 140757 (TRBV13, TRBJ2-7)
CASSLKGASYEQYV

SEQ ID NO: 281515 - protein, 17 aa, Homo sapiens
  CDR3 for alpha chain variable domain of TCR clone 140758 (TRAV3, TRAJ6)
CAVRDGPRAGGSYIPTL

SEQ ID NO: 281516 - protein, 14 aa, Homo sapiens
  CDR3 for beta chain variable domain of TCR clone 140758 (TRBV6-1, TRBJ1-3)
CTSVQGGGGNTIYF

SEQ ID NO: 281517 - protein, 14 aa, Homo sapiens
  CDR3 for alpha chain variable domain of TCR clone 140759 (TRAV13-1, TRAJ26)
CAASSAHYGQNFVF

SEQ ID NO: 281518 - protein, 15 aa, Homo sapiens
  CDR3 for beta chain variable domain of TCR clone 140759 (TRBV18, TRBJ1-5)
CASSPSDRSNQPQHF

SEQ ID NO: 281519 - protein, 13 aa, Homo sapiens
  CDR3 for alpha chain variable domain of TCR clone 140760 (TRAV1-1, TRAJ9)
CAAKNTGGFKTIF

SEQ ID NO: 281520 - protein, 16 aa, Homo sapiens
  CDR3 for beta chain variable domain of TCR clone 140760 (TRBV12-5, TRBJ2-5)
CASGPRTGGNQATQYF

SEQ ID NO: 281521 - protein, 14 aa, Homo sapiens
  CDR3 for alpha chain variable domain of TCR clone 140761 (TRAV29/DV5, TRAJ48)
CAAMALFGNEKLTF

SEQ ID NO: 281522 - protein, 19 aa, Homo sapiens
  CDR3 for beta chain variable domain of TCR clone 140761 (TRBV30, TRBJ2-1)
CHTPGTEIHGTGIYNEQFF

SEQ ID NO: 281523 - protein, 13 aa, Homo sapiens
  CDR3 for alpha chain variable domain of TCR clone 140762 (TRAV3, TRAJ20)
CAVRDTPRYKLSF

SEQ ID NO: 281524 - protein, 14 aa, Homo sapiens
  CDR3 for beta chain variable domain of TCR clone 140762 (TRBV6-1, TRBJ1-3)
CASVQGGGGNTMYF

SEQ ID NO: 281525 - protein, 14 aa, Homo sapiens
  CDR3 for alpha chain variable domain of TCR clone 140763 (TRAV8-2, TRAJ4)
CVVSPSGGYNKLIF

SEQ ID NO: 281526 - protein, 15 aa, Homo sapiens
  CDR3 for beta chain variable domain of TCR clone 140763 (TRBV4-1, TRBJ1-4)
CAGSDTGETNEKLFF

SEQ ID NO: 281527 - protein, 14 aa, Homo sapiens
  CDR3 for alpha chain variable domain of TCR clone 140764 (TRAV23/DV6, TRAJ41)
CAASMENSGYALNF

SEQ ID NO: 281528 - protein, 15 aa, Homo sapiens
  CDR3 for beta chain variable domain of TCR clone 140764 (TRBV7-9, TRBJ1-6)
CASSSPGRGNSPLHF

SEQ ID NO: 281529 - protein, 13 aa, Homo sapiens
  CDR3 for alpha chain variable domain of TCR clone 140765 (TRAV16, TRAJ48)
CSPLNFGNEKLTF

SEQ ID NO: 281530 - protein, 11 aa, Homo sapiens
  CDR3 for beta chain variable domain of TCR clone 140765 (TRBV7-9, TRBJ2-3)
CASCPTDTQYF

SEQ ID NO: 281531 - protein, 14 aa, Homo sapiens
  CDR3 for alpha chain variable domain of TCR clone 140766 (TRAV1-2, TRAJ16)
CAVNRFSDGQKLLF

SEQ ID NO: 281532 - protein, 15 aa, Homo sapiens
  CDR3 for beta chain variable domain of TCR clone 140766 (TRBV6-5, TRBJ1-1)
CASSYLRGSVPEAFF

SEQ ID NO: 281533 - protein, 12 aa, Homo sapiens
  CDR3 for alpha chain variable domain of TCR clone 140767 (TRAV1-1, TRAJ23)
CAVTNQGGKFIF

SEQ ID NO: 281534 - protein, 14 aa, Homo sapiens
  CDR3 for beta chain variable domain of TCR clone 140767 (TRBV12-5, TRBJ2-5)
CASGSRTHQETQYF

SEQ ID NO: 281535 - protein, 14 aa, Homo sapiens
  CDR3 for alpha chain variable domain of TCR clone 140768 (TRAV3, TRAJ36)
CAVRDGTGANNLFF

SEQ ID NO: 281536 - protein, 16 aa, Homo sapiens
  CDR3 for beta chain variable domain of TCR clone 140768 (TRBV20-1, TRBJ2-6)
CSAREVPGVGANVLTF

SEQ ID NO: 281537 - protein, 23 aa, Homo sapiens
  CDR3 for alpha chain variable domain of TCR clone 140769 (TRAV26-1, TRAJ38)
CIADNAGNNHLQNPDPAVYQLRD

SEQ ID NO: 281538 - protein, 12 aa, Homo sapiens
  CDR3 for beta chain variable domain of TCR clone 140769 (TRBV11-2, TRBJ2-2)
CASSLGGGELFF

SEQ ID NO: 281539 - protein, 14 aa, Homo sapiens
  CDR3 for alpha chain variable domain of TCR clone 140770 (TRAV12-2, TRAJ13)
CAVKKTGGYQKGTF

SEQ ID NO: 281540 - protein, 15 aa, Homo sapiens
  CDR3 for beta chain variable domain of TCR clone 140770 (TRBV11-3, TRBJ2-3)
CASLKDGREGDTQYF

SEQ ID NO: 281541 - protein, 13 aa, Homo sapiens
  CDR3 for alpha chain variable domain of TCR clone 140771 (TRAV30, TRAJ24)
CGTVTDSWGKLQF

SEQ ID NO: 281542 - protein, 15 aa, Homo sapiens
  CDR3 for beta chain variable domain of TCR clone 140771 (TRBV11-3, TRBJ2-7)
CASSPGPASSYEQYF

SEQ ID NO: 281543 - protein, 15 aa, Homo sapiens
  CDR3 for alpha chain variable domain of TCR clone 140772 (TRAV17, TRAJ45)
CATAELGGGADGLTF

SEQ ID NO: 281544 - protein, 14 aa, Homo sapiens
  CDR3 for beta chain variable domain of TCR clone 140772 (TRBV3-1, TRBJ2-5)
CASSQAVRQETQYY

SEQ ID NO: 281545 - protein, 14 aa, Homo sapiens
  CDR3 for alpha chain variable domain of TCR clone 140773 (TRAV1-2, TRAJ16)
CAVNRFSDGQKLLF

SEQ ID NO: 281546 - protein, 16 aa, Homo sapiens
  CDR3 for beta chain variable domain of TCR clone 140773 (TRBV20-1, TRBJ1-4)
CSAPGQGLLTNQKLFF

SEQ ID NO: 281547 - protein, 17 aa, Homo sapiens
  CDR3 for alpha chain variable domain of TCR clone 140774 (TRAV3, TRAJ6)
CAVSRRTDTGGSYIPTF

SEQ ID NO: 281548 - protein, 18 aa, Homo sapiens
  CDR3 for beta chain variable domain of TCR clone 140774 (TRBV7-2, TRBJ2-3)
CASSLETSQGRKADTQYF

SEQ ID NO: 281549 - protein, 14 aa, Homo sapiens
  CDR3 for alpha chain variable domain of TCR clone 140775 (TRAV17, TRAJ57)
CATDPQGGSEKLVF

SEQ ID NO: 281550 - protein, 14 aa, Homo sapiens
  CDR3 for beta chain variable domain of TCR clone 140775 (TRBV11-2, TRBJ2-7)
CASSSTGEGYEQYF

SEQ ID NO: 281551 - protein, 13 aa, Homo sapiens
  CDR3 for alpha chain variable domain of TCR clone 140776 (TRAV12-3, TRAJ50)
CARGGTSYDKVIF

SEQ ID NO: 281552 - protein, 20 aa, Homo sapiens
  CDR3 for beta chain variable domain of TCR clone 140776 (TRBV6-4, TRBJ2-7)
CASSDSSVSGQVPTSYEQYF

SEQ ID NO: 281553 - protein, 15 aa, Homo sapiens
  CDR3 for alpha chain variable domain of TCR clone 140777 (TRAV35, TRAJ58)
CAGRRQETSGSRLTF

SEQ ID NO: 281554 - protein, 13 aa, Homo sapiens
  CDR3 for beta chain variable domain of TCR clone 140777 (TRBV14, TRBJ1-2)
CASSEDRRYGYTF

SEQ ID NO: 281555 - protein, 12 aa, Homo sapiens
  CDR3 for alpha chain variable domain of TCR clone 140778 (TRAV16, TRAJ10)
CSRTGGGNKLTF

SEQ ID NO: 281556 - protein, 17 aa, Homo sapiens
  CDR3 for beta chain variable domain of TCR clone 140778 (TRBV15, TRBJ1-2)
CATSGREIDVVNYGYTF

SEQ ID NO: 281557 - protein, 16 aa, Homo sapiens
  CDR3 for alpha chain variable domain of TCR clone 140779 (TRAV20, TRAJ53)
CAVQGNSGGSNYKLTF

SEQ ID NO: 281558 - protein, 16 aa, Homo sapiens
  CDR3 for beta chain variable domain of TCR clone 140779 (TRBV29-1, TRBJ2-6)
CSVEDITDSGANVLTF

SEQ ID NO: 281559 - protein, 19 aa, Homo sapiens
  CDR3 for alpha chain variable domain of TCR clone 140780 (TRAV13-1, TRAJ52)
CAASPYQNAGGTSYGKLTF

SEQ ID NO: 281560 - protein, 14 aa, Homo sapiens
  CDR3 for beta chain variable domain of TCR clone 140780 (TRBV19, TRBJ2-7)
CASTVQSRPYEQYF

SEQ ID NO: 281561 - protein, 16 aa, Homo sapiens
  CDR3 for alpha chain variable domain of TCR clone 140781 (TRAV12-2, TRAJ10)
CAVNRVLTGGGNKLTF

SEQ ID NO: 281562 - protein, 16 aa, Homo sapiens
  CDR3 for beta chain variable domain of TCR clone 140781 (TRBV12-5, TRBJ2-5)
CVSGPRTSGNQGTQYF

SEQ ID NO: 281563 - protein, 13 aa, Homo sapiens
  CDR3 for alpha chain variable domain of TCR clone 140782 (TRAV35, TRAJ42)
CAGFPGSQGNLIF

SEQ ID NO: 281564 - protein, 12 aa, Homo sapiens
  CDR3 for beta chain variable domain of TCR clone 140782 (TRBV7-8, TRBJ1-1)
CASSSLGGEAFF

SEQ ID NO: 281565 - protein, 14 aa, Homo sapiens
  CDR3 for alpha chain variable domain of TCR clone 140783 (TRAV1-2, TRAJ6)
CAVSLSGGSYIPTF

SEQ ID NO: 281566 - protein, 16 aa, Homo sapiens
  CDR3 for beta chain variable domain of TCR clone 140783 (TRBV19, TRBJ2-2)
CASRSPGTGATGELFF

SEQ ID NO: 281567 - protein, 17 aa, Homo sapiens
  CDR3 for alpha chain variable domain of TCR clone 140784 (TRAV13-1, TRAJ31)
CAPRDRLMFGDGTQLVV

SEQ ID NO: 281568 - protein, 12 aa, Homo sapiens
  CDR3 for beta chain variable domain of TCR clone 140784 (TRBV7-9, TRBJ2-7)
CASSVEGYEQYV

SEQ ID NO: 281569 - protein, 14 aa, Homo sapiens
  CDR3 for alpha chain variable domain of TCR clone 140785 (TRAV12-1, TRAJ24)
CVLRSTDSWGKFQF

SEQ ID NO: 281570 - protein, 13 aa, Homo sapiens
  CDR3 for beta chain variable domain of TCR clone 140785 (TRBV2, TRBJ2-3)
CASILAGGQGQYF

SEQ ID NO: 281571 - protein, 15 aa, Homo sapiens
  CDR3 for alpha chain variable domain of TCR clone 140786 (TRAV3, TRAJ22)
CAVRDRGGSAKQLTF

SEQ ID NO: 281572 - protein, 14 aa, Homo sapiens
  CDR3 for beta chain variable domain of TCR clone 140786 (TRBV19, TRBJ1-5)
CASSLGLIGQPQHF

SEQ ID NO: 281573 - protein, 18 aa, Homo sapiens
  CDR3 for alpha chain variable domain of TCR clone 140787 (TRAV8-6, TRAJ52)
CAVSRSNAGGTSYGNLTF

SEQ ID NO: 281574 - protein, 19 aa, Homo sapiens
  CDR3 for beta chain variable domain of TCR clone 140787 (TRBV7-2, TRBJ2-3)
CASSSQGGPRLAGADTQYF

SEQ ID NO: 281575 - protein, 13 aa, Homo sapiens
  CDR3 for alpha chain variable domain of TCR clone 140788 (TRAV38-1, TRAJ42)
CTRWGGSQGNLIF

SEQ ID NO: 281576 - protein, 16 aa, Homo sapiens
  CDR3 for beta chain variable domain of TCR clone 140788 (TRBV4-2, TRBJ2-3)
CASSQELAGDTDTQYF

SEQ ID NO: 281577 - protein, 15 aa, Homo sapiens
  CDR3 for alpha chain variable domain of TCR clone 140789 (TRAV8-3, TRAJ27)
CAVGYSKTNAGKSTF

SEQ ID NO: 281578 - protein, 12 aa, Homo sapiens
  CDR3 for beta chain variable domain of TCR clone 140789 (TRBV11-2, TRBJ2-2)
CASSLGGGELFF

SEQ ID NO: 281579 - protein, 14 aa, Homo sapiens
  CDR3 for alpha chain variable domain of TCR clone 140790 (TRAV12-2, TRAJ13)
CAVKKTGGYQKVTF

SEQ ID NO: 281580 - protein, 15 aa, Homo sapiens
  CDR3 for beta chain variable domain of TCR clone 140790 (TRBV20-1, TRBJ2-7)
CSDRDRVSGMDEQYF

SEQ ID NO: 281581 - protein, 19 aa, Homo sapiens
  CDR3 for alpha chain variable domain of TCR clone 140791 (TRAV2, TRAJ20)
ILQVREADAVVYRDCKLSF

SEQ ID NO: 281582 - protein, 15 aa, Homo sapiens
  CDR3 for beta chain variable domain of TCR clone 140791 (TRBV7-9, TRBJ1-4)
CASSRTGGFNEKLFF

SEQ ID NO: 281583 - protein, 16 aa, Homo sapiens
  CDR3 for alpha chain variable domain of TCR clone 140792 (TRAV12-3, TRAJ53)
CAMSPGSGGSNYKLPF

SEQ ID NO: 281584 - protein, 17 aa, Homo sapiens
  CDR3 for beta chain variable domain of TCR clone 140792 (TRBV20-1, TRBJ2-2)
CSASGSGQGGLTGELFF

SEQ ID NO: 281585 - protein, 12 aa, Homo sapiens
  CDR3 for alpha chain variable domain of TCR clone 140793 (TRAV12-3, TRAJ40)
CAMSSGTYKYIF

SEQ ID NO: 281586 - protein, 15 aa, Homo sapiens
  CDR3 for beta chain variable domain of TCR clone 140793 (TRBV7-3, TRBJ2-2)
CASSESGQGTGELFF

SEQ ID NO: 281587 - protein, 15 aa, Homo sapiens
  CDR3 for alpha chain variable domain of TCR clone 140794 (TRAV35, TRAJ58)
CAGRRQETSGSRLTF

SEQ ID NO: 281588 - protein, 16 aa, Homo sapiens
  CDR3 for beta chain variable domain of TCR clone 140794 (TRBV2, TRBJ2-1)
CASSVRGSLSYNEQFF

SEQ ID NO: 281589 - protein, 13 aa, Homo sapiens
  CDR3 for alpha chain variable domain of TCR clone 140795 (TRAV13-1, TRAJ21)
CAASIYNFNKFYF

SEQ ID NO: 281590 - protein, 15 aa, Homo sapiens
  CDR3 for beta chain variable domain of TCR clone 140795 (TRBV7-2, TRBJ1-2)
CASSLVSGGDYGYTF

SEQ ID NO: 281591 - protein, 12 aa, Homo sapiens
  CDR3 for alpha chain variable domain of TCR clone 140796 (TRAV13-1, TRAJ16)
CAAVSDGQKLLF

SEQ ID NO: 281592 - protein, 16 aa, Homo sapiens
  CDR3 for beta chain variable domain of TCR clone 140796 (TRBV7-2, TRBJ2-1)
CANSLVAGAGYNEQFF

SEQ ID NO: 281593 - protein, 17 aa, Homo sapiens
  CDR3 for alpha chain variable domain of TCR clone 140797 (TRAV13-1, TRAJ53)
CAASWKSSGGSNYKLTF

SEQ ID NO: 281594 - protein, 19 aa, Homo sapiens
  CDR3 for beta chain variable domain of TCR clone 140797 (TRBV7-9, TRBJ2-1)
CASSHNRGALPRSYNEQFF

SEQ ID NO: 281595 - protein, 12 aa, Homo sapiens
  CDR3 for alpha chain variable domain of TCR clone 140798 (TRAV13-2, TRAJ23)
CAERHRGGKLIF

SEQ ID NO: 281596 - protein, 14 aa, Homo sapiens
  CDR3 for beta chain variable domain of TCR clone 140798 (TRBV20-1, TRBJ1-3)
CSASPTGAGNTIYF

SEQ ID NO: 281597 - protein, 20 aa, Homo sapiens
  CDR3 for alpha chain variable domain of TCR clone 140799 (TRAV25, TRAJ33)
TATQTTDVGTSRGSNYQLIW

SEQ ID NO: 281598 - protein, 12 aa, Homo sapiens
  CDR3 for beta chain variable domain of TCR clone 140799 (TRBV7-6, TRBJ2-3)
CASSTGTDTQYF

SEQ ID NO: 281599 - protein, 15 aa, Homo sapiens
  CDR3 for alpha chain variable domain of TCR clone 140800 (TRAV12-1, TRAJ44)
CVVDTPQGTASKLTF

SEQ ID NO: 281600 - protein, 14 aa, Homo sapiens
  CDR3 for beta chain variable domain of TCR clone 140800 (TRBV7-9, TRBJ2-1)
CVSSPRDSLYEQFF

SEQ ID NO: 281601 - protein, 10 aa, Homo sapiens
  CDR3 for alpha chain variable domain of TCR clone 140801 (TRAV1-2, TRAJ31)
RVSEDARLMF

SEQ ID NO: 281602 - protein, 14 aa, Homo sapiens
  CDR3 for beta chain variable domain of TCR clone 140801 (TRBV20-1, TRBJ1-3)
CSASPTGAGNTIYF

SEQ ID NO: 281603 - protein, 15 aa, Homo sapiens
  CDR3 for alpha chain variable domain of TCR clone 140802 (TRAV17, TRAJ10)
CATVLLTGGGNKLTF

SEQ ID NO: 281604 - protein, 16 aa, Homo sapiens
  CDR3 for beta chain variable domain of TCR clone 140802 (TRBV7-9, TRBJ2-3)
CASSPWREVGTDTHYF

SEQ ID NO: 281605 - protein, 14 aa, Homo sapiens
  CDR3 for alpha chain variable domain of TCR clone 140803 (TRAV35, TRAJ22)
CAGLRPGSARQLTF

SEQ ID NO: 281606 - protein, 17 aa, Homo sapiens
  CDR3 for beta chain variable domain of TCR clone 140803 (TRBV9, TRBJ1-6)
CASSVAGTGDSPLHLGT

SEQ ID NO: 281607 - protein, 16 aa, Homo sapiens
  CDR3 for alpha chain variable domain of TCR clone 140804 (TRAV3, TRAJ18)
CAVRDGRGSTLGRLYF

SEQ ID NO: 281608 - protein, 15 aa, Homo sapiens
  CDR3 for beta chain variable domain of TCR clone 140804 (TRBV7-9, TRBJ1-6)
CASSSPGRGNSPRLF

SEQ ID NO: 281609 - protein, 14 aa, Homo sapiens
  CDR3 for alpha chain variable domain of TCR clone 140805 (TRAV35, TRAJ13)
CAGSPSGGDQKVTF

SEQ ID NO: 281610 - protein, 13 aa, Homo sapiens
  CDR3 for beta chain variable domain of TCR clone 140805 (TRBV29-1, TRBJ1-1)
CSVRDSRNTEAFF

SEQ ID NO: 281611 - protein, 12 aa, Homo sapiens
  CDR3 for alpha chain variable domain of TCR clone 140806 (TRAV1-2, TRAJ26)
CAVRYYGQNFVF

SEQ ID NO: 281612 - protein, 13 aa, Homo sapiens
  CDR3 for beta chain variable domain of TCR clone 140806 (TRBV13, TRBJ2-5)
CASSPEVGETQYF

SEQ ID NO: 281613 - protein, 10 aa, Homo sapiens
  CDR3 for alpha chain variable domain of TCR clone 140807 (TRAV1-2, TRAJ20)
CAVTDYKLSF

SEQ ID NO: 281614 - protein, 20 aa, Homo sapiens
  CDR3 for beta chain variable domain of TCR clone 140807 (TRBV7-8, TRBJ2-2)
CASSHLFPGPTIHITGELFF

SEQ ID NO: 281615 - protein, 14 aa, Homo sapiens
  CDR3 for alpha chain variable domain of TCR clone 140808 (TRAV8-2, TRAJ37)
CVVSISGNTGKLIF

SEQ ID NO: 281616 - protein, 15 aa, Homo sapiens
  CDR3 for beta chain variable domain of TCR clone 140808 (TRBV7-9, TRBJ1-2)
CASSDIGGIVYGYTF

SEQ ID NO: 281617 - protein, 22 aa, Homo sapiens
  CDR3 for alpha chain variable domain of TCR clone 140809 (TRAV34, TRAJ52)
STSVEQTRRSNAGGTSYGKLTF

SEQ ID NO: 281618 - protein, 14 aa, Homo sapiens
  CDR3 for beta chain variable domain of TCR clone 140809 (TRBV12-5, TRBJ2-5)
CASGSRTHQETQYF

SEQ ID NO: 281619 - protein, 14 aa, Homo sapiens
  CDR3 for alpha chain variable domain of TCR clone 140810 (TRAV8-1, TRAJ5)
CAVRTDTGRRALTF

SEQ ID NO: 281620 - protein, 14 aa, Homo sapiens
  CDR3 for beta chain variable domain of TCR clone 140810 (TRBV12-4, TRBJ2-5)
CASSAGLVSETQYF

SEQ ID NO: 281621 - protein, 13 aa, Homo sapiens
  CDR3 for alpha chain variable domain of TCR clone 140811 (TRAV27, TRAJ41)
CAGEGNAGYALNF

SEQ ID NO: 281622 - protein, 16 aa, Homo sapiens
  CDR3 for beta chain variable domain of TCR clone 140811 (TRBV29-1, TRBJ2-7)
CSVEVVGTSGSYEQYF

SEQ ID NO: 281623 - protein, 12 aa, Homo sapiens
  CDR3 for alpha chain variable domain of TCR clone 140812 (TRAV1-1, TRAJ9)
CAANTGGFKTIF

SEQ ID NO: 281624 - protein, 16 aa, Homo sapiens
  CDR3 for beta chain variable domain of TCR clone 140812 (TRBV7-3, TRBJ2-2)
CASSLKRGTLSGELFF

SEQ ID NO: 281625 - protein, 15 aa, Homo sapiens
  CDR3 for alpha chain variable domain of TCR clone 140813 (TRAV23/DV6, TRAJ18)
CAARYRGSTLGRLYF

SEQ ID NO: 281626 - protein, 15 aa, Homo sapiens
  CDR3 for beta chain variable domain of TCR clone 140813 (TRBV7-3, TRBJ2-1)
CASSPTGGGEVEQFF

SEQ ID NO: 281627 - protein, 11 aa, Homo sapiens
  CDR3 for alpha chain variable domain of TCR clone 140814 (TRAV23/DV6, TRAJ21)
CAANNFNKFYF

SEQ ID NO: 281628 - protein, 17 aa, Homo sapiens
  CDR3 for beta chain variable domain of TCR clone 140814 (TRBV20-1, TRBJ2-1)
CSASSSGLAGSYNEQFF

SEQ ID NO: 281629 - protein, 14 aa, Homo sapiens
  CDR3 for alpha chain variable domain of TCR clone 140815 (TRAV3, TRAJ6)
CAVRDWGGRYIPTF

SEQ ID NO: 281630 - protein, 15 aa, Homo sapiens
  CDR3 for beta chain variable domain of TCR clone 140815 (TRBV5-1, TRBJ2-1)
CASSPPRAPYNEQFF

SEQ ID NO: 281631 - protein, 10 aa, Homo sapiens
  CDR3 for alpha chain variable domain of TCR clone 140816 (TRAV12-2, TRAJ52)
RSTSYGKLTF

SEQ ID NO: 281632 - protein, 14 aa, Homo sapiens
  CDR3 for beta chain variable domain of TCR clone 140816 (TRBV19, TRBJ2-5)
CASSMTGQQETQYF

SEQ ID NO: 281633 - protein, 11 aa, Homo sapiens
  CDR3 for alpha chain variable domain of TCR clone 140817 (TRAV27, TRAJ20)
CAGADDYKLSF

SEQ ID NO: 281634 - protein, 12 aa, Homo sapiens
  CDR3 for beta chain variable domain of TCR clone 140817 (TRBV7-9, TRBJ2-7)
CASSFGSYEQYF

SEQ ID NO: 281635 - protein, 16 aa, Homo sapiens
  CDR3 for alpha chain variable domain of TCR clone 140818 (TRAV30, TRAJ24)
CGTEIVDADSWGKFQF

SEQ ID NO: 281636 - protein, 15 aa, Homo sapiens
  CDR3 for beta chain variable domain of TCR clone 140818 (TRBV27, TRBJ2-1)
CASSDGGGSSNEQFF

SEQ ID NO: 281637 - protein, 11 aa, Homo sapiens
  CDR3 for alpha chain variable domain of TCR clone 140819 (TRAV2, TRAJ33)
CAVESNYRLIW

SEQ ID NO: 281638 - protein, 15 aa, Homo sapiens
  CDR3 for beta chain variable domain of TCR clone 140819 (TRBV19, TRBJ1-1)
CASTSGQIQNTEAFV

SEQ ID NO: 281639 - protein, 18 aa, Homo sapiens
  CDR3 for alpha chain variable domain of TCR clone 140820 (TRAV29/DV5, TRAJ52)
CAAGFRGAGGTSYGKLTF

SEQ ID NO: 281640 - protein, 15 aa, Homo sapiens
  CDR3 for beta chain variable domain of TCR clone 140820 (TRBV12-5, TRBJ2-2)
CASGFQGSGTGELFF

SEQ ID NO: 281641 - protein, 14 aa, Homo sapiens
  CDR3 for alpha chain variable domain of TCR clone 140821 (TRAV12-2, TRAJ11)
CAVNSESGYSTLTF

SEQ ID NO: 281642 - protein, 10 aa, Homo sapiens
  CDR3 for beta chain variable domain of TCR clone 140821 (TRBV20-1, TRBJ2-5)
CSARFETQYF

SEQ ID NO: 281643 - protein, 15 aa, Homo sapiens
  CDR3 for alpha chain variable domain of TCR clone 140822 (TRAV3, TRAJ47)
CAVRDIGEYGNKLVF

SEQ ID NO: 281644 - protein, 13 aa, Homo sapiens
  CDR3 for beta chain variable domain of TCR clone 140822 (TRBV29-1, TRBJ2-2)
CSTTGVNTGELFF

SEQ ID NO: 281645 - protein, 11 aa, Homo sapiens
  CDR3 for alpha chain variable domain of TCR clone 140823 (TRAV20, TRAJ31)
CAVQMRARLMF

SEQ ID NO: 281646 - protein, 15 aa, Homo sapiens
  CDR3 for beta chain variable domain of TCR clone 140823 (TRBV4-1, TRBJ2-7)
CASSQQGQGFDEQYF

SEQ ID NO: 281647 - protein, 15 aa, Homo sapiens
  CDR3 for alpha chain variable domain of TCR clone 140824 (TRAV27, TRAJ38)
CAARRNAGNNRKLIW

SEQ ID NO: 281648 - protein, 13 aa, Homo sapiens
  CDR3 for beta chain variable domain of TCR clone 140824 (TRBV20-1, TRBJ1-1)
CSASAGGNTEAFF

SEQ ID NO: 281649 - protein, 12 aa, Homo sapiens
  CDR3 for alpha chain variable domain of TCR clone 140825 (TRAV26-1, TRAJ21)
CIAHTTSTNFTL

SEQ ID NO: 281650 - protein, 15 aa, Homo sapiens
  CDR3 for beta chain variable domain of TCR clone 140825 (TRBV20-1, TRBJ2-7)
CSARDRVSGMDEQYF

SEQ ID NO: 281651 - protein, 13 aa, Homo sapiens
  CDR3 for alpha chain variable domain of TCR clone 140826 (TRAV1-2, TRAJ9)
CAALNTGGFKTIF

SEQ ID NO: 281652 - protein, 14 aa, Homo sapiens
  CDR3 for beta chain variable domain of TCR clone 140826 (TRBV13, TRBJ2-3)
CASSSASPTDTQYF

SEQ ID NO: 281653 - protein, 10 aa, Homo sapiens
  CDR3 for alpha chain variable domain of TCR clone 140827 (TRAV1-2, TRAJ31)
CAFFDARLMF

SEQ ID NO: 281654 - protein, 17 aa, Homo sapiens
  CDR3 for beta chain variable domain of TCR clone 140827 (TRBV13, TRBJ2-3)
CASSLARVAGGRNTQYF

SEQ ID NO: 281655 - protein, 13 aa, Homo sapiens
  CDR3 for alpha chain variable domain of TCR clone 140828 (TRAV21, TRAJ27)
CAARPGNAGKSTF

SEQ ID NO: 281656 - protein, 17 aa, Homo sapiens
  CDR3 for beta chain variable domain of TCR clone 140828 (TRBV7-7, TRBJ2-2)
CASSSVPAGGEIGELFF

SEQ ID NO: 281657 - protein, 13 aa, Homo sapiens
  CDR3 for alpha chain variable domain of TCR clone 140829 (TRAV12-3, TRAJ33)
CAMSVNSNYQLIW

SEQ ID NO: 281658 - protein, 16 aa, Homo sapiens
  CDR3 for beta chain variable domain of TCR clone 140829 (TRBV7-8, TRBJ2-6)
CASRVGDSSGANVLTF

SEQ ID NO: 281659 - protein, 12 aa, Homo sapiens
  CDR3 for alpha chain variable domain of TCR clone 140830 (TRAV12-2, TRAJ36)
CAAPRGANNLFF

SEQ ID NO: 281660 - protein, 12 aa, Homo sapiens
  CDR3 for beta chain variable domain of TCR clone 140830 (TRBV24-1, TRBJ1-1)
CATLYPDTEAFF

SEQ ID NO: 281661 - protein, 13 aa, Homo sapiens
  CDR3 for alpha chain variable domain of TCR clone 140831 (TRAV38-1, TRAJ42)
CARWGGSQGNLIF

SEQ ID NO: 281662 - protein, 16 aa, Homo sapiens
  CDR3 for beta chain variable domain of TCR clone 140831 (TRBV24-1, TRBJ2-3)
CATSDPGTGATDTQYF

SEQ ID NO: 281663 - protein, 11 aa, Homo sapiens
  CDR3 for alpha chain variable domain of TCR clone 140832 (TRAV4, TRAJ20)
CLVGDKVRTTS

SEQ ID NO: 281664 - protein, 15 aa, Homo sapiens
  CDR3 for beta chain variable domain of TCR clone 140832 (TRBV18, TRBJ2-7)
CASSPSSTGNYEQYF

SEQ ID NO: 281665 - protein, 18 aa, Homo sapiens
  CDR3 for alpha chain variable domain of TCR clone 140833 (TRAV12-3, TRAJ52)
CAMSRTNAGGTSYGKLTF

SEQ ID NO: 281666 - protein, 20 aa, Homo sapiens
  CDR3 for beta chain variable domain of TCR clone 140833 (TRBV7-8, TRBJ2-2)
CASSHLFPGPTIHITGELFF

SEQ ID NO: 281667 - protein, 14 aa, Homo sapiens
  CDR3 for alpha chain variable domain of TCR clone 140834 (TRAV1-2, TRAJ16)
CAVNRFSDGQKLLL

SEQ ID NO: 281668 - protein, 14 aa, Homo sapiens
  CDR3 for beta chain variable domain of TCR clone 140834 (TRBV7-2, TRBJ1-2)
CASSQTGSTYGYTF

SEQ ID NO: 281669 - protein, 13 aa, Homo sapiens
  CDR3 for alpha chain variable domain of TCR clone 140835 (TRAV12-3, TRAJ43)
CAMIRPNNNDMRF

SEQ ID NO: 281670 - protein, 16 aa, Homo sapiens
  CDR3 for beta chain variable domain of TCR clone 140835 (TRBV19, TRBJ2-2)
CASRSPGTGATGELFF

SEQ ID NO: 281671 - protein, 13 aa, Homo sapiens
  CDR3 for alpha chain variable domain of TCR clone 140836 (TRAV35, TRAJ42)
CAGFPGSQGNLIF

SEQ ID NO: 281672 - protein, 14 aa, Homo sapiens
  CDR3 for beta chain variable domain of TCR clone 140836 (TRBV19, TRBJ2-1)
CASPTFVVSGEQFS

SEQ ID NO: 281673 - protein, 13 aa, Homo sapiens
  CDR3 for alpha chain variable domain of TCR clone 140837 (TRAV13-2, TRAJ8)
CAESYTGFQKLVF

SEQ ID NO: 281674 - protein, 13 aa, Homo sapiens
  CDR3 for beta chain variable domain of TCR clone 140837 (TRBV27, TRBJ1-1)
CASSLSIGAEAFF

SEQ ID NO: 281675 - protein, 15 aa, Homo sapiens
  CDR3 for alpha chain variable domain of TCR clone 140838 (TRAV3, TRAJ9)
CAVRARNTAGFKTIF

SEQ ID NO: 281676 - protein, 12 aa, Homo sapiens
  CDR3 for beta chain variable domain of TCR clone 140838 (TRBV11-2, TRBJ2-7)
CASSLPTYEQYF

SEQ ID NO: 281677 - protein, 23 aa, Homo sapiens
  CDR3 for alpha chain variable domain of TCR clone 140839 (TRAV38-1, TRAJ24)
VIRQEAYKQQNATENRFSVKFQF

SEQ ID NO: 281678 - protein, 15 aa, Homo sapiens
  CDR3 for beta chain variable domain of TCR clone 140839 (TRBV7-9, TRBJ1-4)
CASSARTGGNEKLFF

SEQ ID NO: 281679 - protein, 10 aa, Homo sapiens
  CDR3 for alpha chain variable domain of TCR clone 140840 (TRAV39, TRAJ49)
CAVAGNQFYF

SEQ ID NO: 281680 - protein, 14 aa, Homo sapiens
  CDR3 for beta chain variable domain of TCR clone 140840 (TRBV7-8, TRBJ2-7)
CASSPRDRVHEQYF

SEQ ID NO: 281681 - protein, 16 aa, Homo sapiens
  CDR3 for alpha chain variable domain of TCR clone 140841 (TRAV17, TRAJ52)
CATSNAGGTSYGKLTF

SEQ ID NO: 281682 - protein, 13 aa, Homo sapiens
  CDR3 for beta chain variable domain of TCR clone 140841 (TRBV7-9, TRBJ2-3)
CASSPGSTDTQYF

SEQ ID NO: 281683 - protein, 15 aa, Homo sapiens
  CDR3 for alpha chain variable domain of TCR clone 140842 (TRAV29/DV5, TRAJ40)
CAASAQGSGTYKYIF

SEQ ID NO: 281684 - protein, 15 aa, Homo sapiens
  CDR3 for beta chain variable domain of TCR clone 140842 (TRBV20-1, TRBJ2-7)
CSARDPTEVGHEQYF

SEQ ID NO: 281685 - protein, 16 aa, Homo sapiens
  CDR3 for alpha chain variable domain of TCR clone 140843 (TRAV3, TRAJ18)
CAVRDGRGPTLGRRYF

SEQ ID NO: 281686 - protein, 17 aa, Homo sapiens
  CDR3 for beta chain variable domain of TCR clone 140843 (TRBV5-1, TRBJ2-3)
CASSKIGLADRTDTQYF

SEQ ID NO: 281687 - protein, 13 aa, Homo sapiens
  CDR3 for alpha chain variable domain of TCR clone 140844 (TRAV27, TRAJ56)
CAGKPGANSKLTF

SEQ ID NO: 281688 - protein, 17 aa, Homo sapiens
  CDR3 for beta chain variable domain of TCR clone 140844 (TRBV11-2, TRBJ2-3)
CASSLGASRGAPNTQYF

SEQ ID NO: 281689 - protein, 12 aa, Homo sapiens
  CDR3 for alpha chain variable domain of TCR clone 140845 (TRAV17, TRAJ36)
CATLTGANNLFF

SEQ ID NO: 281690 - protein, 15 aa, Homo sapiens
  CDR3 for beta chain variable domain of TCR clone 140845 (TRBV19, TRBJ1-2)
CASSTKTDTNYGHTF

SEQ ID NO: 281691 - protein, 13 aa, Homo sapiens
  CDR3 for alpha chain variable domain of TCR clone 140846 (TRAV27, TRAJ6)
CAGGTRGSYIPTF

SEQ ID NO: 281692 - protein, 11 aa, Homo sapiens
  CDR3 for beta chain variable domain of TCR clone 140846 (TRBV25-1, TRBJ2-4)
CQSRDQNIQYF

SEQ ID NO: 281693 - protein, 14 aa, Homo sapiens
  CDR3 for alpha chain variable domain of TCR clone 140847 (TRAV29/DV5, TRAJ32)
CAAAYGGAPNKLIF

SEQ ID NO: 281694 - protein, 15 aa, Homo sapiens
  CDR3 for beta chain variable domain of TCR clone 140847 (TRBV27, TRBJ2-7)
CASSAAGTGSYEQYF

SEQ ID NO: 281695 - protein, 14 aa, Homo sapiens
  CDR3 for alpha chain variable domain of TCR clone 140848 (TRAV29/DV5, TRAJ32)
CAAAYGGATNKFIF

SEQ ID NO: 281696 - protein, 15 aa, Homo sapiens
  CDR3 for beta chain variable domain of TCR clone 140848 (TRBV27, TRBJ2-7)
CASSTAGTGSYEQYF

SEQ ID NO: 281697 - protein, 13 aa, Homo sapiens
  CDR3 for alpha chain variable domain of TCR clone 140849 (TRAV8-6, TRAJ8)
CAVSNTGFQKLVF

SEQ ID NO: 281698 - protein, 12 aa, Homo sapiens
  CDR3 for beta chain variable domain of TCR clone 140849 (TRBV11-2, TRBJ2-2)
CASSLPTGELFF

SEQ ID NO: 281699 - protein, 14 aa, Homo sapiens
  CDR3 for alpha chain variable domain of TCR clone 140850 (TRAV26-2, TRAJ38)
CILYNAGNNRKLIW

SEQ ID NO: 281700 - protein, 14 aa, Homo sapiens
  CDR3 for beta chain variable domain of TCR clone 140850 (TRBV19, TRBJ2-1)
CASPTVVVSGEQFF

SEQ ID NO: 281701 - protein, 12 aa, Homo sapiens
  CDR3 for alpha chain variable domain of TCR clone 140851 (TRAV3, TRAJ20)
CAVRDPDYKLSF

SEQ ID NO: 281702 - protein, 14 aa, Homo sapiens
  CDR3 for beta chain variable domain of TCR clone 140851 (TRBV4-2, TRBJ2-1)
CASGLARAYNEQFF

SEQ ID NO: 281703 - protein, 14 aa, Homo sapiens
  CDR3 for alpha chain variable domain of TCR clone 140852 (TRAV35, TRAJ22)
CAGLRPGSARQRTF

SEQ ID NO: 281704 - protein, 15 aa, Homo sapiens
  CDR3 for beta chain variable domain of TCR clone 140852 (TRBV12-4, TRBJ2-5)
CARSPPTGLQETQYF

SEQ ID NO: 281705 - protein, 14 aa, Homo sapiens
  CDR3 for alpha chain variable domain of TCR clone 140853 (TRAV12-2, TRAJ40)
CAVKIPSGPYKYIF

SEQ ID NO: 281706 - protein, 15 aa, Homo sapiens
  CDR3 for beta chain variable domain of TCR clone 140853 (TRBV7-3, TRBJ2-3)
CASSRTGVSTDTQYF

SEQ ID NO: 281707 - protein, 15 aa, Homo sapiens
  CDR3 for alpha chain variable domain of TCR clone 140854 (TRAV26-1, TRAJ29)
CIVRVEGAGNTPLVL

SEQ ID NO: 281708 - protein, 14 aa, Homo sapiens
  CDR3 for beta chain variable domain of TCR clone 140854 (TRBV18, TRBJ2-5)
CASSPGVSQETQYF

SEQ ID NO: 281709 - protein, 15 aa, Homo sapiens
  CDR3 for alpha chain variable domain of TCR clone 140855 (TRAV13-1, TRAJ10)
CAATILTGGGNKLTF

SEQ ID NO: 281710 - protein, 15 aa, Homo sapiens
  CDR3 for beta chain variable domain of TCR clone 140855 (TRBV2, TRBJ2-7)
CASTLLGSGSTEQYF

SEQ ID NO: 281711 - protein, 15 aa, Homo sapiens
  CDR3 for alpha chain variable domain of TCR clone 140856 (TRAV8-1, TRAJ6)
CAVNAGAGESYIPTV

SEQ ID NO: 281712 - protein, 14 aa, Homo sapiens
  CDR3 for beta chain variable domain of TCR clone 140856 (TRBV25-1, TRBJ1-6)
CASSLSADISPLHF

SEQ ID NO: 281713 - protein, 14 aa, Homo sapiens
  CDR3 for alpha chain variable domain of TCR clone 140857 (TRAV21, TRAJ45)
CAVSSGGCADGLTF

SEQ ID NO: 281714 - protein, 15 aa, Homo sapiens
  CDR3 for beta chain variable domain of TCR clone 140857 (TRBV6-1, TRBJ2-4)
CASSEAVWTINIQYF

SEQ ID NO: 281715 - protein, 13 aa, Homo sapiens
  CDR3 for alpha chain variable domain of TCR clone 140858 (TRAV2, TRAJ21)
CAVEDLNFNKFYF

SEQ ID NO: 281716 - protein, 15 aa, Homo sapiens
  CDR3 for beta chain variable domain of TCR clone 140858 (TRBV28, TRBJ2-5)
CASIPGQGSIETQYF

SEQ ID NO: 281717 - protein, 14 aa, Homo sapiens
  CDR3 for alpha chain variable domain of TCR clone 140859 (TRAV12-2, TRAJ40)
CAAKIPSGTHKYIF

SEQ ID NO: 281718 - protein, 17 aa, Homo sapiens
  CDR3 for beta chain variable domain of TCR clone 140859 (TRBV13, TRBJ2-3)
CASSLSRVAGGRNTQYF

SEQ ID NO: 281719 - protein, 16 aa, Homo sapiens
  CDR3 for alpha chain variable domain of TCR clone 140860 (TRAV16, TRAJ52)
CALSAAGGTSYGKLTY

SEQ ID NO: 281720 - protein, 13 aa, Homo sapiens
  CDR3 for beta chain variable domain of TCR clone 140860 (TRBV3-1, TRBJ1-5)
CASSQFGDQPQHF

SEQ ID NO: 281721 - protein, 15 aa, Homo sapiens
  CDR3 for alpha chain variable domain of TCR clone 140861 (TRAV3, TRAJ4)
CAVRDGTGGYNKLIF

SEQ ID NO: 281722 - protein, 13 aa, Homo sapiens
  CDR3 for beta chain variable domain of TCR clone 140861 (TRBV12-5, TRBJ1-2)
CAGGVRTGNGYTF

SEQ ID NO: 281723 - protein, 13 aa, Homo sapiens
  CDR3 for alpha chain variable domain of TCR clone 140862 (TRAV17, TRAJ39)
CATDYGAGNMLTF

SEQ ID NO: 281724 - protein, 14 aa, Homo sapiens
  CDR3 for beta chain variable domain of TCR clone 140862 (TRBV7-7, TRBJ2-7)
CASSLGRGVGEQYF

SEQ ID NO: 281725 - protein, 16 aa, Homo sapiens
  CDR3 for alpha chain variable domain of TCR clone 140863 (TRAV26-2, TRAJ45)
CTTASPIGGGADGLTF

SEQ ID NO: 281726 - protein, 20 aa, Homo sapiens
  CDR3 for beta chain variable domain of TCR clone 140863 (TRBV28, TRBJ2-1)
CVSTPIGRSPGLAGGNEQFF

SEQ ID NO: 281727 - protein, 20 aa, Homo sapiens
  CDR3 for alpha chain variable domain of TCR clone 140864 (TRAV12-1, TRAJ32)
SVIQPPTSMNYGGATNKLIF

SEQ ID NO: 281728 - protein, 15 aa, Homo sapiens
  CDR3 for beta chain variable domain of TCR clone 140864 (TRBV7-9, TRBJ2-2)
CASGPLDTFPGELFF

SEQ ID NO: 281729 - protein, 10 aa, Homo sapiens
  CDR3 for alpha chain variable domain of TCR clone 140865 (TRAV23/DV6, TRAJ57)
CAARSTLSQG

SEQ ID NO: 281730 - protein, 14 aa, Homo sapiens
  CDR3 for beta chain variable domain of TCR clone 140865 (TRBV25-1, TRBJ1-1)
CASTHLGGNTEAFL

SEQ ID NO: 281731 - protein, 15 aa, Homo sapiens
  CDR3 for alpha chain variable domain of TCR clone 140866 (TRAV4, TRAJ39)
CLVGPNNSAGNMLTF

SEQ ID NO: 281732 - protein, 16 aa, Homo sapiens
  CDR3 for beta chain variable domain of TCR clone 140866 (TRBV13, TRBJ2-2)
CASSPRTGEHTGELSF

SEQ ID NO: 281733 - protein, 14 aa, Homo sapiens
  CDR3 for alpha chain variable domain of TCR clone 140867 (TRAV27, TRAJ23)
CAGLSYNQGGKLIF

SEQ ID NO: 281734 - protein, 15 aa, Homo sapiens
  CDR3 for beta chain variable domain of TCR clone 140867 (TRBV19, TRBJ2-2)
CANSLNRGVTGELFF

SEQ ID NO: 281735 - protein, 17 aa, Homo sapiens
  CDR3 for alpha chain variable domain of TCR clone 140868 (TRAV14/DV4, TRAJ12)
CAMRELPWMDSSYKLIF

SEQ ID NO: 281736 - protein, 16 aa, Homo sapiens
  CDR3 for beta chain variable domain of TCR clone 140868 (TRBV19, TRBJ2-1)
CASSKAGPSSYNEQFF

SEQ ID NO: 281737 - protein, 14 aa, Homo sapiens
  CDR3 for alpha chain variable domain of TCR clone 140869 (TRAV1-2, TRAJ8)
CAVREDTGFQKLLF

SEQ ID NO: 281738 - protein, 14 aa, Homo sapiens
  CDR3 for beta chain variable domain of TCR clone 140869 (TRBV12-5, TRBJ2-5)
CASGSRTHQETQYF

SEQ ID NO: 281739 - protein, 14 aa, Homo sapiens
  CDR3 for alpha chain variable domain of TCR clone 140870 (TRAV12-2, TRAJ13)
CAVKKTGGYQKVTL

SEQ ID NO: 281740 - protein, 10 aa, Homo sapiens
  CDR3 for beta chain variable domain of TCR clone 140870 (TRBV12-4, TRBJ1-2)
CASSFIWLHL

SEQ ID NO: 281741 - protein, 16 aa, Homo sapiens
  CDR3 for alpha chain variable domain of TCR clone 140871 (TRAV16, TRAJ4)
CALSRMFSGGYNKLIF

SEQ ID NO: 281742 - protein, 19 aa, Homo sapiens
  CDR3 for beta chain variable domain of TCR clone 140871 (TRBV28, TRBJ2-7)
CASSYYGTSRLGWVYEQYF

SEQ ID NO: 281743 - protein, 11 aa, Homo sapiens
  CDR3 for alpha chain variable domain of TCR clone 140872 (TRAV27, TRAJ47)
CAGAYGNKLVF

SEQ ID NO: 281744 - protein, 14 aa, Homo sapiens
  CDR3 for beta chain variable domain of TCR clone 140872 (TRBV15, TRBJ2-1)
CATSGVEDYNEQFF

SEQ ID NO: 281745 - protein, 14 aa, Homo sapiens
  CDR3 for alpha chain variable domain of TCR clone 140873 (TRAV1-2, TRAJ6)
CAVSLSGGSYIPTF

SEQ ID NO: 281746 - protein, 13 aa, Homo sapiens
  CDR3 for beta chain variable domain of TCR clone 140873 (TRBV4-1, TRBJ2-1)
CASSQEVQYEQFF

SEQ ID NO: 281747 - protein, 14 aa, Homo sapiens
  CDR3 for alpha chain variable domain of TCR clone 140874 (TRAV8-3, TRAJ31)
CAVGRGLNNASLMF

SEQ ID NO: 281748 - protein, 15 aa, Homo sapiens
  CDR3 for beta chain variable domain of TCR clone 140874 (TRBV7-2, TRBJ2-2)
CASSLAGGLTGELFF

SEQ ID NO: 281749 - protein, 14 aa, Homo sapiens
  CDR3 for alpha chain variable domain of TCR clone 140875 (TRAV1-2, TRAJ8)
CAVREDTCFKKLVF

SEQ ID NO: 281750 - protein, 15 aa, Homo sapiens
  CDR3 for beta chain variable domain of TCR clone 140875 (TRBV6-3, TRBJ2-7)
CASSSPGTVFYEQYF

SEQ ID NO: 281751 - protein, 14 aa, Homo sapiens
  CDR3 for alpha chain variable domain of TCR clone 140876 (TRAV38-2/DV8, TRAJ54)
CAYRRIQGAQKLVF

SEQ ID NO: 281752 - protein, 15 aa, Homo sapiens
  CDR3 for beta chain variable domain of TCR clone 140876 (TRBV6-5, TRBJ2-5)
CASREASGGMETQYF

SEQ ID NO: 281753 - protein, 22 aa, Homo sapiens
  CDR3 for alpha chain variable domain of TCR clone 140877 (TRAV16, )
CALRTQIPDIQNPDPAVYQLRD

SEQ ID NO: 281754 - protein, 12 aa, Homo sapiens
  CDR3 for beta chain variable domain of TCR clone 140877 (TRBV11-3, TRBJ2-1)
CASSPGNNEQFF

SEQ ID NO: 281755 - protein, 14 aa, Homo sapiens
  CDR3 for alpha chain variable domain of TCR clone 140878 (TRAV26-1, TRAJ38)
CISDNAGNNRKLIW

SEQ ID NO: 281756 - protein, 13 aa, Homo sapiens
  CDR3 for beta chain variable domain of TCR clone 140878 (TRBV7-3, TRBJ1-1)
CASSQDWGAEAFF

SEQ ID NO: 281757 - protein, 18 aa, Homo sapiens
  CDR3 for alpha chain variable domain of TCR clone 140879 (TRAV13-1, TRAJ52)
CAAKNPNAGGTSYGKLTF

SEQ ID NO: 281758 - protein, 15 aa, Homo sapiens
  CDR3 for beta chain variable domain of TCR clone 140879 (TRBV20-1, TRBJ2-7)
CSARDRVSGMDEQHF

SEQ ID NO: 281759 - protein, 13 aa, Homo sapiens
  CDR3 for alpha chain variable domain of TCR clone 140880 (TRAV12-2, TRAJ52)
CAVSGTSYGKLTF

SEQ ID NO: 281760 - protein, 17 aa, Homo sapiens
  CDR3 for beta chain variable domain of TCR clone 140880 (TRBV11-2, TRBJ2-1)
CASSLYPPGVEYNGQFF

SEQ ID NO: 281761 - protein, 17 aa, Homo sapiens
  CDR3 for alpha chain variable domain of TCR clone 140881 (TRAV3, TRAJ42)
CAVIDRDYGGSQGNLIF

SEQ ID NO: 281762 - protein, 12 aa, Homo sapiens
  CDR3 for beta chain variable domain of TCR clone 140881 (TRBV11-2, TRBJ2-1)
CASSPGNNEQFF

SEQ ID NO: 281763 - protein, 14 aa, Homo sapiens
  CDR3 for alpha chain variable domain of TCR clone 140882 (TRAV13-1, TRAJ17)
CAASRDAAGNKLTF

SEQ ID NO: 281764 - protein, 15 aa, Homo sapiens
  CDR3 for beta chain variable domain of TCR clone 140882 (TRBV20-1, TRBJ2-7)
CSARDRVSGMDEQYF

SEQ ID NO: 281765 - protein, 15 aa, Homo sapiens
  CDR3 for alpha chain variable domain of TCR clone 140883 (TRAV27, TRAJ38)
CAARRNAGNNRKLIW

SEQ ID NO: 281766 - protein, 13 aa, Homo sapiens
  CDR3 for beta chain variable domain of TCR clone 140883 (TRBV28, TRBJ2-7)
CASKAGGVYEQYF

SEQ ID NO: 281767 - protein, 11 aa, Homo sapiens
  CDR3 for alpha chain variable domain of TCR clone 140884 (TRAV27, TRAJ37)
CAGTQGGKLIF

SEQ ID NO: 281768 - protein, 15 aa, Homo sapiens
  CDR3 for beta chain variable domain of TCR clone 140884 (TRBV6-3, TRBJ2-7)
CASSSPGTVFYEQYF

SEQ ID NO: 281769 - protein, 13 aa, Homo sapiens
  CDR3 for alpha chain variable domain of TCR clone 140885 (TRAV13-1, TRAJ39)
CAASIWAGNMLTF

SEQ ID NO: 281770 - protein, 15 aa, Homo sapiens
  CDR3 for beta chain variable domain of TCR clone 140885 (TRBV7-9, TRBJ1-4)
CASSRTGGFNEKLFF

SEQ ID NO: 281771 - protein, 15 aa, Homo sapiens
  CDR3 for alpha chain variable domain of TCR clone 140886 (TRAV34, TRAJ38)
CGADFTPGNNRKLIW

SEQ ID NO: 281772 - protein, 16 aa, Homo sapiens
  CDR3 for beta chain variable domain of TCR clone 140886 (TRBV4-1, TRBJ2-1)
CASSQQGAWESNEQFF

SEQ ID NO: 281773 - protein, 12 aa, Homo sapiens
  CDR3 for alpha chain variable domain of TCR clone 140887 (TRAV8-3, TRAJ26)
CAGDNYGQNFVF

SEQ ID NO: 281774 - protein, 15 aa, Homo sapiens
  CDR3 for beta chain variable domain of TCR clone 140887 (TRBV19, TRBJ1-1)
CASTSVQIQNTEAFF

SEQ ID NO: 281775 - protein, 12 aa, Homo sapiens
  CDR3 for alpha chain variable domain of TCR clone 140888 (TRAV21, TRAJ42)
CAVGGSQGNLIF

SEQ ID NO: 281776 - protein, 14 aa, Homo sapiens
  CDR3 for beta chain variable domain of TCR clone 140888 (TRBV12-4, TRBJ1-1)
CASSLGTGGTDAFF

SEQ ID NO: 281777 - protein, 14 aa, Homo sapiens
  CDR3 for alpha chain variable domain of TCR clone 140889 (TRAV13-1, TRAJ20)
CAARPGSHDYKLSF

SEQ ID NO: 281778 - protein, 13 aa, Homo sapiens
  CDR3 for beta chain variable domain of TCR clone 140889 (TRBV20-1, TRBJ1-1)
CSAPPGGHTEAFF

SEQ ID NO: 281779 - protein, 14 aa, Homo sapiens
  CDR3 for alpha chain variable domain of TCR clone 140890 (TRAV8-3, TRAJ4)
CAVGASGGYNKLIF

SEQ ID NO: 281780 - protein, 16 aa, Homo sapiens
  CDR3 for beta chain variable domain of TCR clone 140890 (TRBV4-3, TRBJ2-2)
CASSHLQGSGTGEMFF

SEQ ID NO: 281781 - protein, 12 aa, Homo sapiens
  CDR3 for alpha chain variable domain of TCR clone 140891 (TRAV13-1, TRAJ15)
CAANQAGTALIF

SEQ ID NO: 281782 - protein, 16 aa, Homo sapiens
  CDR3 for beta chain variable domain of TCR clone 140891 (TRBV19, TRBJ2-1)
CASSKAGPSSYNEQFF

SEQ ID NO: 281783 - protein, 11 aa, Homo sapiens
  CDR3 for alpha chain variable domain of TCR clone 140892 (TRAV1-2, TRAJ20)
CAVSNDYKLSF

SEQ ID NO: 281784 - protein, 16 aa, Homo sapiens
  CDR3 for beta chain variable domain of TCR clone 140892 (TRBV29-1, TRBJ2-6)
CSVEDITDAGANDLTF

SEQ ID NO: 281785 - protein, 13 aa, Homo sapiens
  CDR3 for alpha chain variable domain of TCR clone 140893 (TRAV12-1, TRAJ7)
CVVNMRGNNRLAF

SEQ ID NO: 281786 - protein, 15 aa, Homo sapiens
  CDR3 for beta chain variable domain of TCR clone 140893 (TRBV27, TRBJ2-3)
CASSLGLAAIDTQYF

SEQ ID NO: 281787 - protein, 13 aa, Homo sapiens
  CDR3 for alpha chain variable domain of TCR clone 140894 (TRAV12-1, TRAJ6)
CAVNVSRKLHTYI

SEQ ID NO: 281788 - protein, 12 aa, Homo sapiens
  CDR3 for beta chain variable domain of TCR clone 140894 (TRBV29-1, TRBJ2-3)
CSVTGGADTQYF

SEQ ID NO: 281789 - protein, 15 aa, Homo sapiens
  CDR3 for alpha chain variable domain of TCR clone 140895 (TRAV8-3, TRAJ40)
CAAPSLGSGTYKYIF

SEQ ID NO: 281790 - protein, 12 aa, Homo sapiens
  CDR3 for beta chain variable domain of TCR clone 140895 (TRBV18, TRBJ2-1)
CASSSDEDEQFF

SEQ ID NO: 281791 - protein, 15 aa, Homo sapiens
  CDR3 for alpha chain variable domain of TCR clone 140896 (TRAV17, TRAJ57)
CATGPSQGGSEKLVF

SEQ ID NO: 281792 - protein, 14 aa, Homo sapiens
  CDR3 for beta chain variable domain of TCR clone 140896 (TRBV12-4, TRBJ2-5)
CASGSRTHQETQYF

SEQ ID NO: 281793 - protein, 17 aa, Homo sapiens
  CDR3 for alpha chain variable domain of TCR clone 140897 (TRAV35, TRAJ28)
CAGLQVYSGAGSYQLTF

SEQ ID NO: 281794 - protein, 15 aa, Homo sapiens
  CDR3 for beta chain variable domain of TCR clone 140897 (TRBV2, TRBJ1-2)
CASREIGGANYGYTF

SEQ ID NO: 281795 - protein, 20 aa, Homo sapiens
  CDR3 for alpha chain variable domain of TCR clone 140898 (TRAV12-1, TRAJ42)
SSVIQPPTSVKGGSQGNLIF

SEQ ID NO: 281796 - protein, 15 aa, Homo sapiens
  CDR3 for beta chain variable domain of TCR clone 140898 (TRBV4-1, TRBJ1-4)
CASSDTGGTNEKLFF

SEQ ID NO: 281797 - protein, 13 aa, Homo sapiens
  CDR3 for alpha chain variable domain of TCR clone 140899 (TRAV16, TRAJ31)
CALSTHNNARLMF

SEQ ID NO: 281798 - protein, 17 aa, Homo sapiens
  CDR3 for beta chain variable domain of TCR clone 140899 (TRBV12-4, TRBJ2-1)
CASSPGLAGGRINEQFF

SEQ ID NO: 281799 - protein, 13 aa, Homo sapiens
  CDR3 for alpha chain variable domain of TCR clone 140900 (TRAV13-1, TRAJ15)
CSKYPQAGTALIF

SEQ ID NO: 281800 - protein, 18 aa, Homo sapiens
  CDR3 for beta chain variable domain of TCR clone 140900 (TRBV20-1, TRBJ2-3)
CSASGLAGGPGTTDTQYF

SEQ ID NO: 281801 - protein, 11 aa, Homo sapiens
  CDR3 for alpha chain variable domain of TCR clone 140901 (TRAV14/DV4, TRAJ26)
CAMRGPSEFCL

SEQ ID NO: 281802 - protein, 14 aa, Homo sapiens
  CDR3 for beta chain variable domain of TCR clone 140901 (TRBV12-4, TRBJ1-3)
CASTLTGAGNTIYC

SEQ ID NO: 281803 - protein, 12 aa, Homo sapiens
  CDR3 for alpha chain variable domain of TCR clone 140902 (TRAV8-3, TRAJ40)
CAVTSGTYKYIF

SEQ ID NO: 281804 - protein, 14 aa, Homo sapiens
  CDR3 for beta chain variable domain of TCR clone 140902 (TRBV5-4, TRBJ2-2)
CASSLEANTGELFF

SEQ ID NO: 281805 - protein, 12 aa, Homo sapiens
  CDR3 for alpha chain variable domain of TCR clone 140903 (TRAV38-1, TRAJ34)
CAFMKETDKLIF

SEQ ID NO: 281806 - protein, 16 aa, Homo sapiens
  CDR3 for beta chain variable domain of TCR clone 140903 (TRBV7-8, TRBJ2-6)
CQQRRTGGAGANVLTF

SEQ ID NO: 281807 - protein, 14 aa, Homo sapiens
  CDR3 for alpha chain variable domain of TCR clone 140904 (TRAV35, TRAJ22)
CAGLRPGSARQLTF

SEQ ID NO: 281808 - protein, 18 aa, Homo sapiens
  CDR3 for beta chain variable domain of TCR clone 140904 (TRBV28, TRBJ2-1)
CASSSTSGRANSYNEQFF

SEQ ID NO: 281809 - protein, 14 aa, Homo sapiens
  CDR3 for alpha chain variable domain of TCR clone 140905 (TRAV1-2, TRAJ8)
CAVREDTGFRKLVF

SEQ ID NO: 281810 - protein, 15 aa, Homo sapiens
  CDR3 for beta chain variable domain of TCR clone 140905 (TRBV28, TRBJ2-4)
CAAGSGTLLMGIQYF

SEQ ID NO: 281811 - protein, 13 aa, Homo sapiens
  CDR3 for alpha chain variable domain of TCR clone 140906 (TRAV2, TRAJ40)
CAVVTSRTYKYIF

SEQ ID NO: 281812 - protein, 15 aa, Homo sapiens
  CDR3 for beta chain variable domain of TCR clone 140906 (TRBV6-3, TRBJ2-7)
CASSSPGTVFYEQYF

SEQ ID NO: 281813 - protein, 12 aa, Homo sapiens
  CDR3 for alpha chain variable domain of TCR clone 140907 (TRAV13-1, TRAJ49)
CAASPMGNQLYF

SEQ ID NO: 281814 - protein, 17 aa, Homo sapiens
  CDR3 for beta chain variable domain of TCR clone 140907 (TRBV11-2, TRBJ2-1)
CASSLYPPGVGYNEQFF

SEQ ID NO: 281815 - protein, 12 aa, Homo sapiens
  CDR3 for alpha chain variable domain of TCR clone 140908 (TRAV12-3, TRAJ17)
CAMTLTGNKLTF

SEQ ID NO: 281816 - protein, 15 aa, Homo sapiens
  CDR3 for beta chain variable domain of TCR clone 140908 (TRBV19, TRBJ2-1)
CGSSILGEGRNEQFF

SEQ ID NO: 281817 - protein, 14 aa, Homo sapiens
  CDR3 for alpha chain variable domain of TCR clone 140909 (TRAV20, TRAJ29)
CAVQAWVGNTPLVF

SEQ ID NO: 281818 - protein, 15 aa, Homo sapiens
  CDR3 for beta chain variable domain of TCR clone 140909 (TRBV7-3, TRBJ2-2)
CASSETGQGTGELFF

SEQ ID NO: 281819 - protein, 12 aa, Homo sapiens
  CDR3 for alpha chain variable domain of TCR clone 140910 (TRAV35, TRAJ49)
CAGWNTGNQFYY

SEQ ID NO: 281820 - protein, 16 aa, Homo sapiens
  CDR3 for beta chain variable domain of TCR clone 140910 (TRBV5-1, TRBJ2-2)
CASSLWDTTNTGELFF

SEQ ID NO: 281821 - protein, 14 aa, Homo sapiens
  CDR3 for alpha chain variable domain of TCR clone 140911 (TRAV2, TRAJ9)
CAVEDRSGGFKTIF

SEQ ID NO: 281822 - protein, 18 aa, Homo sapiens
  CDR3 for beta chain variable domain of TCR clone 140911 (TRBV11-2, TRBJ2-3)
CASSLGWASRGAPNTQYF

SEQ ID NO: 281823 - protein, 15 aa, Homo sapiens
  CDR3 for alpha chain variable domain of TCR clone 140912 (TRAV3, TRAJ22)
CAVRDRGGSARTLTF

SEQ ID NO: 281824 - protein, 16 aa, Homo sapiens
  CDR3 for beta chain variable domain of TCR clone 140912 (TRBV5-4, TRBJ2-3)
CASQQPGAGGADTQYF

SEQ ID NO: 281825 - protein, 15 aa, Homo sapiens
  CDR3 for alpha chain variable domain of TCR clone 140913 (TRAV17, TRAJ35)
CATAFVIGFGNVLNC

SEQ ID NO: 281826 - protein, 15 aa, Homo sapiens
  CDR3 for beta chain variable domain of TCR clone 140913 (TRBV7-9, TRBJ2-7)
CASSLALAEAYEQYF

SEQ ID NO: 281827 - protein, 12 aa, Homo sapiens
  CDR3 for alpha chain variable domain of TCR clone 140914 (TRAV1-2, TRAJ37)
CAFPGNTGKLIF

SEQ ID NO: 281828 - protein, 13 aa, Homo sapiens
  CDR3 for beta chain variable domain of TCR clone 140914 (TRBV7-3, TRBJ2-5)
CASSSDREETQYF

SEQ ID NO: 281829 - protein, 14 aa, Homo sapiens
  CDR3 for alpha chain variable domain of TCR clone 140915 (TRAV8-2, TRAJ4)
CVVSPSGGYTKLIF

SEQ ID NO: 281830 - protein, 15 aa, Homo sapiens
  CDR3 for beta chain variable domain of TCR clone 140915 (TRBV10-2, TRBJ2-5)
CASRGSGGPQETQYF

SEQ ID NO: 281831 - protein, 13 aa, Homo sapiens
  CDR3 for alpha chain variable domain of TCR clone 140916 (TRAV13-1, TRAJ43)
CAASLSNNNDMRF

SEQ ID NO: 281832 - protein, 15 aa, Homo sapiens
  CDR3 for beta chain variable domain of TCR clone 140916 (TRBV19, TRBJ1-1)
CASSIRSGGRTEAFF

SEQ ID NO: 281833 - protein, 13 aa, Homo sapiens
  CDR3 for alpha chain variable domain of TCR clone 140917 (TRAV27, TRAJ45)
CRSSGGGADGLTF

SEQ ID NO: 281834 - protein, 16 aa, Homo sapiens
  CDR3 for beta chain variable domain of TCR clone 140917 (TRBV12-5, TRBJ2-5)
CASGPRTNGNQETQYF

SEQ ID NO: 281835 - protein, 14 aa, Homo sapiens
  CDR3 for alpha chain variable domain of TCR clone 140918 (TRAV14/DV4, TRAJ34)
CALREGRPHRQAHL

SEQ ID NO: 281836 - protein, 14 aa, Homo sapiens
  CDR3 for beta chain variable domain of TCR clone 140918 (TRBV19, TRBJ2-1)
CASPTFVVSGEQFF

SEQ ID NO: 281837 - protein, 13 aa, Homo sapiens
  CDR3 for alpha chain variable domain of TCR clone 140919 (TRAV8-2, TRAJ9)
CVVRATGGFKTIF

SEQ ID NO: 281838 - protein, 12 aa, Homo sapiens
  CDR3 for beta chain variable domain of TCR clone 140919 (TRBV11-2, TRBJ2-2)
CASSLGGVELFL

SEQ ID NO: 281839 - protein, 14 aa, Homo sapiens
  CDR3 for alpha chain variable domain of TCR clone 140920 (TRAV1-2, TRAJ13)
CAVLNSGGYQKVTF

SEQ ID NO: 281840 - protein, 13 aa, Homo sapiens
  CDR3 for beta chain variable domain of TCR clone 140920 (TRBV5-1, TRBJ1-1)
CASSLGSDTEAFF

SEQ ID NO: 281841 - protein, 14 aa, Homo sapiens
  CDR3 for alpha chain variable domain of TCR clone 140921 (TRAV12-3, TRAJ58)
CAMSTETSSSRVTF

SEQ ID NO: 281842 - protein, 13 aa, Homo sapiens
  CDR3 for beta chain variable domain of TCR clone 140921 (TRBV27, TRBJ2-3)
CASSWGRADTQYF

SEQ ID NO: 281843 - protein, 11 aa, Homo sapiens
  CDR3 for alpha chain variable domain of TCR clone 140922 (TRAV3, TRAJ32)
CAVREGIMVVL

SEQ ID NO: 281844 - protein, 15 aa, Homo sapiens
  CDR3 for beta chain variable domain of TCR clone 140922 (TRBV19, TRBJ2-1)
CASNARVGAYNEQFF

SEQ ID NO: 281845 - protein, 14 aa, Homo sapiens
  CDR3 for alpha chain variable domain of TCR clone 140923 (TRAV20, TRAJ37)
CAVQEASNTGKLIF

SEQ ID NO: 281846 - protein, 15 aa, Homo sapiens
  CDR3 for beta chain variable domain of TCR clone 140923 (TRBV10-3, TRBJ2-5)
CAISESRDSGETQYF

SEQ ID NO: 281847 - protein, 13 aa, Homo sapiens
  CDR3 for alpha chain variable domain of TCR clone 140924 (TRAV17, TRAJ5)
CAPMDTGRRALTF

SEQ ID NO: 281848 - protein, 13 aa, Homo sapiens
  CDR3 for beta chain variable domain of TCR clone 140924 (TRBV20-1, TRBJ2-1)
CSASGLAGNEQFF

SEQ ID NO: 281849 - protein, 15 aa, Homo sapiens
  CDR3 for alpha chain variable domain of TCR clone 140925 (TRAV26-1, TRAJ22)
CIVRVSFWFCKATDL

SEQ ID NO: 281850 - protein, 14 aa, Homo sapiens
  CDR3 for beta chain variable domain of TCR clone 140925 (TRBV23-1, TRBJ2-5)
CASSFLRSQETQYF

SEQ ID NO: 281851 - protein, 12 aa, Homo sapiens
  CDR3 for alpha chain variable domain of TCR clone 140926 (TRAV12-2, TRAJ9)
CAVNTGGFKTIF

SEQ ID NO: 281852 - protein, 15 aa, Homo sapiens
  CDR3 for beta chain variable domain of TCR clone 140926 (TRBV7-9, TRBJ1-6)
CASSSPGRGNSPLHF

SEQ ID NO: 281853 - protein, 14 aa, Homo sapiens
  CDR3 for alpha chain variable domain of TCR clone 140927 (TRAV12-3, TRAJ11)
CAMTTNSGYSTLTF

SEQ ID NO: 281854 - protein, 14 aa, Homo sapiens
  CDR3 for beta chain variable domain of TCR clone 140927 (TRBV6-1, TRBJ1-3)
CASVQGGGGNTIYF

SEQ ID NO: 281855 - protein, 17 aa, Homo sapiens
  CDR3 for alpha chain variable domain of TCR clone 140928 (TRAV36/DV7, TRAJ52)
CAAAQRAGGTSYGKLTF

SEQ ID NO: 281856 - protein, 14 aa, Homo sapiens
  CDR3 for beta chain variable domain of TCR clone 140928 (TRBV20-1, TRBJ2-3)
CSARGGTSTDTQYF

SEQ ID NO: 281857 - protein, 14 aa, Homo sapiens
  CDR3 for alpha chain variable domain of TCR clone 140929 (TRAV35, TRAJ41)
CAGQASVRRNARNF

SEQ ID NO: 281858 - protein, 14 aa, Homo sapiens
  CDR3 for beta chain variable domain of TCR clone 140929 (TRBV20-1, TRBJ1-2)
CSASEQGAVYGYTF

SEQ ID NO: 281859 - protein, 13 aa, Homo sapiens
  CDR3 for alpha chain variable domain of TCR clone 140930 (TRAV36/DV7, TRAJ37)
CAVFSSNTGKLIF

SEQ ID NO: 281860 - protein, 13 aa, Homo sapiens
  CDR3 for beta chain variable domain of TCR clone 140930 (TRBV11-2, TRBJ2-1)
CASSLGLAGGRFF

SEQ ID NO: 281861 - protein, 12 aa, Homo sapiens
  CDR3 for alpha chain variable domain of TCR clone 140931 (TRAV29/DV5, TRAJ15)
CAASGEGTALIF

SEQ ID NO: 281862 - protein, 15 aa, Homo sapiens
  CDR3 for beta chain variable domain of TCR clone 140931 (TRBV4-3, TRBJ1-5)
CASSHDSGGGQPQHF

SEQ ID NO: 281863 - protein, 12 aa, Homo sapiens
  CDR3 for alpha chain variable domain of TCR clone 140932 (TRAV3, TRAJ31)
CAAQRANATLMF

SEQ ID NO: 281864 - protein, 14 aa, Homo sapiens
  CDR3 for beta chain variable domain of TCR clone 140932 (TRBV5-5, TRBJ1-5)
CASSGQGVDQPQHF

SEQ ID NO: 281865 - protein, 14 aa, Homo sapiens
  CDR3 for alpha chain variable domain of TCR clone 140933 (TRAV26-1, TRAJ34)
CIVRVAYNTDKLIF

SEQ ID NO: 281866 - protein, 14 aa, Homo sapiens
  CDR3 for beta chain variable domain of TCR clone 140933 (TRBV7-2, TRBJ1-1)
CASSFLTGTTEAFF

SEQ ID NO: 281867 - protein, 14 aa, Homo sapiens
  CDR3 for alpha chain variable domain of TCR clone 140934 (TRAV17, TRAJ16)
CATADFSDGQKLLF

SEQ ID NO: 281868 - protein, 13 aa, Homo sapiens
  CDR3 for beta chain variable domain of TCR clone 140934 (TRBV20-1, TRBJ2-5)
CSAREAFQETQYF

SEQ ID NO: 281869 - protein, 14 aa, Homo sapiens
  CDR3 for alpha chain variable domain of TCR clone 140935 (TRAV16, TRAJ22)
CALRGQGSARQLTF

SEQ ID NO: 281870 - protein, 16 aa, Homo sapiens
  CDR3 for beta chain variable domain of TCR clone 140935 (TRBV7-9, TRBJ2-1)
CASSDVAGGSYNEQFF

SEQ ID NO: 281871 - protein, 16 aa, Homo sapiens
  CDR3 for alpha chain variable domain of TCR clone 140936 (TRAV30, TRAJ48)
CGTEIKSNFGNEKLTF

SEQ ID NO: 281872 - protein, 17 aa, Homo sapiens
  CDR3 for beta chain variable domain of TCR clone 140936 (TRBV27, TRBJ2-1)
CASISERVGQSEDEQFF

SEQ ID NO: 281873 - protein, 17 aa, Homo sapiens
  CDR3 for alpha chain variable domain of TCR clone 140937 (TRAV36/DV7, TRAJ52)
CAVAQRAGGTSYGKLTF

SEQ ID NO: 281874 - protein, 12 aa, Homo sapiens
  CDR3 for beta chain variable domain of TCR clone 140937 (TRBV5-4, TRBJ2-5)
CASSSTRETQYF

SEQ ID NO: 281875 - protein, 11 aa, Homo sapiens
  CDR3 for alpha chain variable domain of TCR clone 140938 (TRAV13-1, TRAJ39)
CASHAGNMLTF

SEQ ID NO: 281876 - protein, 14 aa, Homo sapiens
  CDR3 for beta chain variable domain of TCR clone 140938 (TRBV20-1, TRBJ1-5)
CSARGRGSNQPQHF

SEQ ID NO: 281877 - protein, 16 aa, Homo sapiens
  CDR3 for alpha chain variable domain of TCR clone 140939 (TRAV12-3, TRAJ53)
CAMSPGSGGSNSKLTF

SEQ ID NO: 281878 - protein, 14 aa, Homo sapiens
  CDR3 for beta chain variable domain of TCR clone 140939 (TRBV4-2, TRBJ2-1)
CASGLDRAYNEQFF

SEQ ID NO: 281879 - protein, 14 aa, Homo sapiens
  CDR3 for alpha chain variable domain of TCR clone 140940 (TRAV21, TRAJ52)
CGRAGGTSDGKLTC

SEQ ID NO: 281880 - protein, 14 aa, Homo sapiens
  CDR3 for beta chain variable domain of TCR clone 140940 (TRBV19, TRBJ1-2)
CASSVLGYNYGYTF

SEQ ID NO: 281881 - protein, 15 aa, Homo sapiens
  CDR3 for alpha chain variable domain of TCR clone 140941 (TRAV35, TRAJ23)
CAGQRGYNQGGKLIF

SEQ ID NO: 281882 - protein, 16 aa, Homo sapiens
  CDR3 for beta chain variable domain of TCR clone 140941 (TRBV27, TRBJ2-1)
CASSSRLAGHYNEQFF

SEQ ID NO: 281883 - protein, 15 aa, Homo sapiens
  CDR3 for alpha chain variable domain of TCR clone 140942 (TRAV20, TRAJ43)
CAVQAGKSSNNDMRF

SEQ ID NO: 281884 - protein, 13 aa, Homo sapiens
  CDR3 for beta chain variable domain of TCR clone 140942 (TRBV27, TRBJ1-1)
CASSLSIGAGAFF

SEQ ID NO: 281885 - protein, 15 aa, Homo sapiens
  CDR3 for alpha chain variable domain of TCR clone 140943 (TRAV4, TRAJ3)
CLVGDSDSSASKIIF

SEQ ID NO: 281886 - protein, 14 aa, Homo sapiens
  CDR3 for beta chain variable domain of TCR clone 140943 (TRBV12-5, TRBJ2-5)
CASGSRTHQETQYF

SEQ ID NO: 281887 - protein, 10 aa, Homo sapiens
  CDR3 for alpha chain variable domain of TCR clone 140944 (TRAV3, TRAJ21)
CAGQLQQILL

SEQ ID NO: 281888 - protein, 16 aa, Homo sapiens
  CDR3 for beta chain variable domain of TCR clone 140944 (TRBV19, TRBJ2-1)
CASSKAGPSSYNEQFF

SEQ ID NO: 281889 - protein, 13 aa, Homo sapiens
  CDR3 for alpha chain variable domain of TCR clone 140945 (TRAV8-3, TRAJ44)
CAVVPGTASKLTF

SEQ ID NO: 281890 - protein, 13 aa, Homo sapiens
  CDR3 for beta chain variable domain of TCR clone 140945 (TRBV5-5, TRBJ1-2)
CASSFWRGEDYTF

SEQ ID NO: 281891 - protein, 18 aa, Homo sapiens
  CDR3 for alpha chain variable domain of TCR clone 140946 (TRAV26-1, TRAJ57)
CIVRVALRFQGGSEKLVF

SEQ ID NO: 281892 - protein, 14 aa, Homo sapiens
  CDR3 for beta chain variable domain of TCR clone 140946 (TRBV19, TRBJ2-2)
CATTGHANTGELFF

SEQ ID NO: 281893 - protein, 10 aa, Homo sapiens
  CDR3 for alpha chain variable domain of TCR clone 140947 (TRAV35, TRAJ10)
CWAARRKLTF

SEQ ID NO: 281894 - protein, 14 aa, Homo sapiens
  CDR3 for beta chain variable domain of TCR clone 140947 (TRBV7-2, TRBJ2-7)
CASRSQGAAYEQYF

SEQ ID NO: 281895 - protein, 15 aa, Homo sapiens
  CDR3 for alpha chain variable domain of TCR clone 140948 (TRAV12-3, TRAJ6)
CPMSAASGGSYIPTF

SEQ ID NO: 281896 - protein, 13 aa, Homo sapiens
  CDR3 for beta chain variable domain of TCR clone 140948 (TRBV20-1, TRBJ1-2)
CSASPEFNYGYTF

SEQ ID NO: 281897 - protein, 13 aa, Homo sapiens
  CDR3 for alpha chain variable domain of TCR clone 140949 (TRAV13-1, TRAJ39)
CSKYSNAGNMLTF

SEQ ID NO: 281898 - protein, 14 aa, Homo sapiens
  CDR3 for beta chain variable domain of TCR clone 140949 (TRBV7-2, TRBJ2-7)
CASSLYPGRYEQYF

SEQ ID NO: 281899 - protein, 17 aa, Homo sapiens
  CDR3 for alpha chain variable domain of TCR clone 140950 (TRAV3, TRAJ6)
CAVRDGPRAGGSYLPTL

SEQ ID NO: 281900 - protein, 14 aa, Homo sapiens
  CDR3 for beta chain variable domain of TCR clone 140950 (TRBV7-2, TRBJ2-7)
CASSPKTSFYEQYF

SEQ ID NO: 281901 - protein, 14 aa, Homo sapiens
  CDR3 for alpha chain variable domain of TCR clone 140951 (TRAV29/DV5, TRAJ20)
CAASAPIEDYKLSF

SEQ ID NO: 281902 - protein, 16 aa, Homo sapiens
  CDR3 for beta chain variable domain of TCR clone 140951 (TRBV28, TRBJ2-7)
CASSLFFETGGPEQYF

SEQ ID NO: 281903 - protein, 15 aa, Homo sapiens
  CDR3 for alpha chain variable domain of TCR clone 140952 (TRAV23/DV6, TRAJ44)
CAASGGTGTASKLTF

SEQ ID NO: 281904 - protein, 13 aa, Homo sapiens
  CDR3 for beta chain variable domain of TCR clone 140952 (TRBV7-9, TRBJ1-2)
CASSLKQNYGYTF

SEQ ID NO: 281905 - protein, 11 aa, Homo sapiens
  CDR3 for alpha chain variable domain of TCR clone 140953 (TRAV2, TRAJ13)
CASGGYPKVTF

SEQ ID NO: 281906 - protein, 15 aa, Homo sapiens
  CDR3 for beta chain variable domain of TCR clone 140953 (TRBV20-1, TRBJ2-7)
CSARDRVSGMDEQYF

SEQ ID NO: 281907 - protein, 14 aa, Homo sapiens
  CDR3 for alpha chain variable domain of TCR clone 140954 (TRAV14/DV4, TRAJ41)
CARGGHDSGYALNF

SEQ ID NO: 281908 - protein, 15 aa, Homo sapiens
  CDR3 for beta chain variable domain of TCR clone 140954 (TRBV19, TRBJ2-1)
CASSIQATSYNEQFF

SEQ ID NO: 281909 - protein, 14 aa, Homo sapiens
  CDR3 for alpha chain variable domain of TCR clone 140955 (TRAV26-1, TRAJ38)
CIADNAGHNRKLIW

SEQ ID NO: 281910 - protein, 15 aa, Homo sapiens
  CDR3 for beta chain variable domain of TCR clone 140955 (TRBV7-6, TRBJ1-4)
CASSLGAGAGEKLFF

SEQ ID NO: 281911 - protein, 14 aa, Homo sapiens
  CDR3 for alpha chain variable domain of TCR clone 140956 (TRAV38-1, TRAJ40)
CALRPTSGTYKYIF

SEQ ID NO: 281912 - protein, 15 aa, Homo sapiens
  CDR3 for beta chain variable domain of TCR clone 140956 (TRBV7-3, TRBJ2-2)
CASSETGQGTGELFF

SEQ ID NO: 281913 - protein, 15 aa, Homo sapiens
  CDR3 for alpha chain variable domain of TCR clone 140957 (TRAV8-4, TRAJ9)
CAVTFNTGGFKNYLW

SEQ ID NO: 281914 - protein, 15 aa, Homo sapiens
  CDR3 for beta chain variable domain of TCR clone 140957 (TRBV7-9, TRBJ2-2)
CASSHETGAGGELFF

SEQ ID NO: 281915 - protein, 10 aa, Homo sapiens
  CDR3 for alpha chain variable domain of TCR clone 140958 (TRAV12-3, TRAJ6)
TTGGSYIPTF

SEQ ID NO: 281916 - protein, 16 aa, Homo sapiens
  CDR3 for beta chain variable domain of TCR clone 140958 (TRBV27, TRBJ2-5)
CASSFGPGGTKETQYF

SEQ ID NO: 281917 - protein, 14 aa, Homo sapiens
  CDR3 for alpha chain variable domain of TCR clone 140959 (TRAV35, TRAJ22)
CAGLRPGSARQLTF

SEQ ID NO: 281918 - protein, 12 aa, Homo sapiens
  CDR3 for beta chain variable domain of TCR clone 140959 (TRBV7-9, TRBJ2-7)
CASSIKREEQYF

SEQ ID NO: 281919 - protein, 16 aa, Homo sapiens
  CDR3 for alpha chain variable domain of TCR clone 140960 (TRAV12-3, TRAJ53)
CAVSTGSGGSNYKLTF

SEQ ID NO: 281920 - protein, 14 aa, Homo sapiens
  CDR3 for beta chain variable domain of TCR clone 140960 (TRBV4-1, TRBJ2-7)
CASSPVAGGDEQYF

SEQ ID NO: 281921 - protein, 14 aa, Homo sapiens
  CDR3 for alpha chain variable domain of TCR clone 140961 (TRAV1-2, TRAJ8)
CAVREDTGFQKLVF

SEQ ID NO: 281922 - protein, 14 aa, Homo sapiens
  CDR3 for beta chain variable domain of TCR clone 140961 (TRBV7-9, TRBJ2-2)
CASSGLADTGELFF

SEQ ID NO: 281923 - protein, 15 aa, Homo sapiens
  CDR3 for alpha chain variable domain of TCR clone 140962 (TRAV23/DV6, TRAJ18)
CAASFRGSTLARLYF

SEQ ID NO: 281924 - protein, 13 aa, Homo sapiens
  CDR3 for beta chain variable domain of TCR clone 140962 (TRBV28, TRBJ2-7)
CAILDRAGGEQYF

SEQ ID NO: 281925 - protein, 14 aa, Homo sapiens
  CDR3 for alpha chain variable domain of TCR clone 140963 (TRAV12-3, TRAJ6)
CAVTASGGSYIPTF

SEQ ID NO: 281926 - protein, 16 aa, Homo sapiens
  CDR3 for beta chain variable domain of TCR clone 140963 (TRBV7-2, TRBJ2-3)
CASSLAGAGSGDTQYF

SEQ ID NO: 281927 - protein, 14 aa, Homo sapiens
  CDR3 for alpha chain variable domain of TCR clone 140964 (TRAV8-4, TRAJ54)
CAVSEVMGAQKLGF

SEQ ID NO: 281928 - protein, 15 aa, Homo sapiens
  CDR3 for beta chain variable domain of TCR clone 140964 (TRBV6-1, TRBJ2-6)
CASSSRPSGANVLTF

SEQ ID NO: 281929 - protein, 13 aa, Homo sapiens
  CDR3 for alpha chain variable domain of TCR clone 140965 (TRAV20, TRAJ54)
CCAGWSGSQKLVF

SEQ ID NO: 281930 - protein, 16 aa, Homo sapiens
  CDR3 for beta chain variable domain of TCR clone 140965 (TRBV28, TRBJ2-6)
CASSNRRGSGANVLTF

SEQ ID NO: 281931 - protein, 12 aa, Homo sapiens
  CDR3 for alpha chain variable domain of TCR clone 140966 (TRAV2, TRAJ33)
CAVPDSNYQLIW

SEQ ID NO: 281932 - protein, 16 aa, Homo sapiens
  CDR3 for beta chain variable domain of TCR clone 140966 (TRBV7-2, TRBJ1-2)
CASSSNQDRRGHGYTF

SEQ ID NO: 281933 - protein, 14 aa, Homo sapiens
  CDR3 for alpha chain variable domain of TCR clone 140967 (TRAV3, TRAJ20)
CAVPPAPNDYKLSF

SEQ ID NO: 281934 - protein, 16 aa, Homo sapiens
  CDR3 for beta chain variable domain of TCR clone 140967 (TRBV4-3, TRBJ1-6)
CASSAQPGGEGSPLHF

SEQ ID NO: 281935 - protein, 16 aa, Homo sapiens
  CDR3 for alpha chain variable domain of TCR clone 140968 (TRAV17, TRAJ53)
CATDALSGGSNYKLTF

SEQ ID NO: 281936 - protein, 12 aa, Homo sapiens
  CDR3 for beta chain variable domain of TCR clone 140968 (TRBV5-1, TRBJ2-7)
FASSFRGYEQYF

SEQ ID NO: 281937 - protein, 14 aa, Homo sapiens
  CDR3 for alpha chain variable domain of TCR clone 140969 (TRAV9-2, TRAJ39)
CALYIYNAGNMLTF

SEQ ID NO: 281938 - protein, 14 aa, Homo sapiens
  CDR3 for beta chain variable domain of TCR clone 140969 (TRBV2, TRBJ1-5)
CANSGTVSNQPQHF

SEQ ID NO: 281939 - protein, 16 aa, Homo sapiens
  CDR3 for alpha chain variable domain of TCR clone 140970 (TRAV14/DV4, TRAJ21)
CAMREGPENNFNTFYF

SEQ ID NO: 281940 - protein, 12 aa, Homo sapiens
  CDR3 for beta chain variable domain of TCR clone 140970 (TRBV29-1, TRBJ2-2)
CSVDKYTGELFF

SEQ ID NO: 281941 - protein, 15 aa, Homo sapiens
  CDR3 for alpha chain variable domain of TCR clone 140971 (TRAV26-1, TRAJ44)
CIVRANTGTASKITF

SEQ ID NO: 281942 - protein, 15 aa, Homo sapiens
  CDR3 for beta chain variable domain of TCR clone 140971 (TRBV15, TRBJ1-5)
CATSREQGGNQPQHF

SEQ ID NO: 281943 - protein, 14 aa, Homo sapiens
  CDR3 for alpha chain variable domain of TCR clone 140972 (TRAV12-3, TRAJ22)
CAMSLFGSARQLTF

SEQ ID NO: 281944 - protein, 17 aa, Homo sapiens
  CDR3 for beta chain variable domain of TCR clone 140972 (TRBV7-9, TRBJ1-4)
CASSSGQLGGRSEKLFF

SEQ ID NO: 281945 - protein, 11 aa, Homo sapiens
  CDR3 for alpha chain variable domain of TCR clone 140973 (TRAV2, TRAJ13)
CASGGYQKVTF

SEQ ID NO: 281946 - protein, 15 aa, Homo sapiens
  CDR3 for beta chain variable domain of TCR clone 140973 (TRBV5-4, TRBJ2-7)
CASSRFGTGSYERYF

SEQ ID NO: 281947 - protein, 16 aa, Homo sapiens
  CDR3 for alpha chain variable domain of TCR clone 140974 (TRAV30, TRAJ24)
CGTEIVDADSWGKFQF

SEQ ID NO: 281948 - protein, 14 aa, Homo sapiens
  CDR3 for beta chain variable domain of TCR clone 140974 (TRBV11-2, TRBJ1-5)
CASSLYRGRQPQHF

SEQ ID NO: 281949 - protein, 16 aa, Homo sapiens
  CDR3 for alpha chain variable domain of TCR clone 140975 (TRAV21, TRAJ52)
CAVTNAGGTSYGKLTF

SEQ ID NO: 281950 - protein, 15 aa, Homo sapiens
  CDR3 for beta chain variable domain of TCR clone 140975 (TRBV19, TRBJ1-1)
CASSIGGGRNTEAFF

SEQ ID NO: 281951 - protein, 14 aa, Homo sapiens
  CDR3 for alpha chain variable domain of TCR clone 140976 (TRAV13-2, TRAJ43)
CAEIPTYNNNDMRF

SEQ ID NO: 281952 - protein, 14 aa, Homo sapiens
  CDR3 for beta chain variable domain of TCR clone 140976 (TRBV7-3, TRBJ1-1)
CASSLKGGNTEAFF

SEQ ID NO: 281953 - protein, 14 aa, Homo sapiens
  CDR3 for alpha chain variable domain of TCR clone 140977 (TRAV35, TRAJ13)
CAGSPSGGYQQVTF

SEQ ID NO: 281954 - protein, 14 aa, Homo sapiens
  CDR3 for beta chain variable domain of TCR clone 140977 (TRBV19, TRBJ2-1)
CASPTFVLSGEQFF

SEQ ID NO: 281955 - protein, 13 aa, Homo sapiens
  CDR3 for alpha chain variable domain of TCR clone 140978 (TRAV12-3, TRAJ56)
CAMSVGANSKLTF

SEQ ID NO: 281956 - protein, 13 aa, Homo sapiens
  CDR3 for beta chain variable domain of TCR clone 140978 (TRBV7-7, TRBJ1-1)
CASSLGANTEAFF

SEQ ID NO: 281957 - protein, 15 aa, Homo sapiens
  CDR3 for alpha chain variable domain of TCR clone 140979 (TRAV3, TRAJ20)
CAVRDIKLSDYKLSF

SEQ ID NO: 281958 - protein, 15 aa, Homo sapiens
  CDR3 for beta chain variable domain of TCR clone 140979 (TRBV10-2, TRBJ2-6)
CASSEQGTGANVLTF

SEQ ID NO: 281959 - protein, 15 aa, Homo sapiens
  CDR3 for alpha chain variable domain of TCR clone 140980 (TRAV8-4, TRAJ7)
CAVSGGNYGNNRLAF

SEQ ID NO: 281960 - protein, 11 aa, Homo sapiens
  CDR3 for beta chain variable domain of TCR clone 140980 (TRBV20-1, TRBJ2-1)
CSRSSGSEQFF

SEQ ID NO: 281961 - protein, 11 aa, Homo sapiens
  CDR3 for alpha chain variable domain of TCR clone 140981 (TRAV26-1, TRAJ37)
CIVRVGRKLIF

SEQ ID NO: 281962 - protein, 16 aa, Homo sapiens
  CDR3 for beta chain variable domain of TCR clone 140981 (TRBV27, TRBJ2-7)
CASSSERRDSAYEQYF

SEQ ID NO: 281963 - protein, 16 aa, Homo sapiens
  CDR3 for alpha chain variable domain of TCR clone 140982 (TRAV1-2, TRAJ10)
CAVRGVLTGGGKKLTF

SEQ ID NO: 281964 - protein, 12 aa, Homo sapiens
  CDR3 for beta chain variable domain of TCR clone 140982 (TRBV12-4, TRBJ2-7)
CASSLGGYEQYF

SEQ ID NO: 281965 - protein, 16 aa, Homo sapiens
  CDR3 for alpha chain variable domain of TCR clone 140983 (TRAV1-2, TRAJ10)
CAVRGVLTGGGNKLTF

SEQ ID NO: 281966 - protein, 18 aa, Homo sapiens
  CDR3 for beta chain variable domain of TCR clone 140983 (TRBV12-4, TRBJ2-2)
CASSRSGGAIPNTGELFF

SEQ ID NO: 281967 - protein, 22 aa, Homo sapiens
  CDR3 for alpha chain variable domain of TCR clone 140984 (TRAV2, TRAJ38)
CAVEDFPNAGNNHIQHPDPAVY

SEQ ID NO: 281968 - protein, 14 aa, Homo sapiens
  CDR3 for beta chain variable domain of TCR clone 140984 (TRBV29-1, TRBJ1-4)
CSVSGRQGGEKLFF

SEQ ID NO: 281969 - protein, 17 aa, Homo sapiens
  CDR3 for alpha chain variable domain of TCR clone 140985 (TRAV3, TRAJ6)
CAVRDGPRAGGSYIPTY

SEQ ID NO: 281970 - protein, 13 aa, Homo sapiens
  CDR3 for beta chain variable domain of TCR clone 140985 (TRBV19, TRBJ2-7)
CASSIDRTYEQYF

SEQ ID NO: 281971 - protein, 14 aa, Homo sapiens
  CDR3 for alpha chain variable domain of TCR clone 140986 (TRAV9-2, TRAJ39)
CALYIYNAGNMLTF

SEQ ID NO: 281972 - protein, 14 aa, Homo sapiens
  CDR3 for beta chain variable domain of TCR clone 140986 (TRBV5-1, TRBJ2-7)
CASSPKTSFYEQYF

SEQ ID NO: 281973 - protein, 13 aa, Homo sapiens
  CDR3 for alpha chain variable domain of TCR clone 140987 (TRAV3, TRAJ43)
CAVRDTRGGDMRF

SEQ ID NO: 281974 - protein, 15 aa, Homo sapiens
  CDR3 for beta chain variable domain of TCR clone 140987 (TRBV6-5, TRBJ1-5)
CASSYSRMSNQPQHF

SEQ ID NO: 281975 - protein, 15 aa, Homo sapiens
  CDR3 for alpha chain variable domain of TCR clone 140988 (TRAV35, TRAJ50)
CAGQLRKTSHNKVIF

SEQ ID NO: 281976 - protein, 12 aa, Homo sapiens
  CDR3 for beta chain variable domain of TCR clone 140988 (TRBV5-1, TRBJ2-5)
CASSLGLETQYF

SEQ ID NO: 281977 - protein, 12 aa, Homo sapiens
  CDR3 for alpha chain variable domain of TCR clone 140989 (TRAV12-2, TRAJ21)
CAVRYNFNKFYF

SEQ ID NO: 281978 - protein, 13 aa, Homo sapiens
  CDR3 for beta chain variable domain of TCR clone 140989 (TRBV28, TRBJ2-1)
CQQLYTAYNEQFF

SEQ ID NO: 281979 - protein, 20 aa, Homo sapiens
  CDR3 for alpha chain variable domain of TCR clone 140990 (TRAV1-2, TRAJ8)
CAVREDTGFQTCIWNWHPTS

SEQ ID NO: 281980 - protein, 14 aa, Homo sapiens
  CDR3 for beta chain variable domain of TCR clone 140990 (TRBV29-1, TRBJ2-3)
CSAGAGVGADTQYF

SEQ ID NO: 281981 - protein, 15 aa, Homo sapiens
  CDR3 for alpha chain variable domain of TCR clone 140991 (TRAV25, TRAJ10)
CAGPLLTGGGNKLTS

SEQ ID NO: 281982 - protein, 15 aa, Homo sapiens
  CDR3 for beta chain variable domain of TCR clone 140991 (TRBV12-5, TRBJ2-2)
CASGRLGGNTGELFF

SEQ ID NO: 281983 - protein, 15 aa, Homo sapiens
  CDR3 for alpha chain variable domain of TCR clone 140992 (TRAV17, TRAJ57)
CATGPSQGGSEKLFF

SEQ ID NO: 281984 - protein, 16 aa, Homo sapiens
  CDR3 for beta chain variable domain of TCR clone 140992 (TRBV20-1, TRBJ2-2)
CSASASGIPGAGELFF

SEQ ID NO: 281985 - protein, 17 aa, Homo sapiens
  CDR3 for alpha chain variable domain of TCR clone 140993 (TRAV3, TRAJ6)
CAVRDGPRAGGSDITTF

SEQ ID NO: 281986 - protein, 14 aa, Homo sapiens
  CDR3 for beta chain variable domain of TCR clone 140993 (TRBV7-2, TRBJ2-7)
CASSPKTSFYEQYF

SEQ ID NO: 281987 - protein, 15 aa, Homo sapiens
  CDR3 for alpha chain variable domain of TCR clone 140994 (TRAV21, TRAJ57)
CAVIITQGGSEKLVF

SEQ ID NO: 281988 - protein, 14 aa, Homo sapiens
  CDR3 for beta chain variable domain of TCR clone 140994 (TRBV7-3, TRBJ1-1)
CASSRQGGDTEAFF

SEQ ID NO: 281989 - protein, 13 aa, Homo sapiens
  CDR3 for alpha chain variable domain of TCR clone 140995 (TRAV8-1, TRAJ23)
CAVTGGQGGKLIF

SEQ ID NO: 281990 - protein, 14 aa, Homo sapiens
  CDR3 for beta chain variable domain of TCR clone 140995 (TRBV20-1, TRBJ1-1)
CSAQTRTGGTEAFF

SEQ ID NO: 281991 - protein, 13 aa, Homo sapiens
  CDR3 for alpha chain variable domain of TCR clone 140996 (TRAV1-2, TRAJ9)
CAALNTGGFKTIF

SEQ ID NO: 281992 - protein, 16 aa, Homo sapiens
  CDR3 for beta chain variable domain of TCR clone 140996 (TRBV7-3, TRBJ2-1)
CASSLEGYRSYNEQFF

SEQ ID NO: 281993 - protein, 14 aa, Homo sapiens
  CDR3 for alpha chain variable domain of TCR clone 140997 (TRAV1-2, TRAJ29)
CAVRELTSATPLVF

SEQ ID NO: 281994 - protein, 14 aa, Homo sapiens
  CDR3 for beta chain variable domain of TCR clone 140997 (TRBV7-6, TRBJ2-3)
CASSLGTVTDTQYF

SEQ ID NO: 281995 - protein, 12 aa, Homo sapiens
  CDR3 for alpha chain variable domain of TCR clone 140998 (TRAV8-3, TRAJ4)
PAFSGGYNKLIF

SEQ ID NO: 281996 - protein, 14 aa, Homo sapiens
  CDR3 for beta chain variable domain of TCR clone 140998 (TRBV9, TRBJ2-3)
CASSVGLSTDTQYF

SEQ ID NO: 281997 - protein, 15 aa, Homo sapiens
  CDR3 for alpha chain variable domain of TCR clone 140999 (TRAV8-3, TRAJ11)
CAVGLLNSGYSTLTF

SEQ ID NO: 281998 - protein, 13 aa, Homo sapiens
  CDR3 for beta chain variable domain of TCR clone 140999 (TRBV2, TRBJ1-4)
CASSERAGEKLFF

SEQ ID NO: 281999 - protein, 17 aa, Homo sapiens
  CDR3 for alpha chain variable domain of TCR clone 141000 (TRAV29/DV5, TRAJ52)
CAASARAGGTSYGKLTF

SEQ ID NO: 282000 - protein, 17 aa, Homo sapiens
  CDR3 for beta chain variable domain of TCR clone 141000 (TRBV27, TRBJ2-3)
CASSLNLLQGRPDTQYF

SEQ ID NO: 282001 - protein, 12 aa, Homo sapiens
  CDR3 for alpha chain variable domain of TCR clone 141001 (TRAV3, TRAJ20)
CAVRDPDYKLSF

SEQ ID NO: 282002 - protein, 11 aa, Homo sapiens
  CDR3 for beta chain variable domain of TCR clone 141001 (TRBV20-1, TRBJ2-1)
CSLSSGSEQFF

SEQ ID NO: 282003 - protein, 14 aa, Homo sapiens
  CDR3 for alpha chain variable domain of TCR clone 141002 (TRAV20, TRAJ56)
CAVQFGGANSKLTF

SEQ ID NO: 282004 - protein, 12 aa, Homo sapiens
  CDR3 for beta chain variable domain of TCR clone 141002 (TRBV7-8, TRBJ2-7)
CASEGGPHGQYF

SEQ ID NO: 282005 - protein, 14 aa, Homo sapiens
  CDR3 for alpha chain variable domain of TCR clone 141003 (TRAV8-6, TRAJ54)
CAASDFQGAQKLVF

SEQ ID NO: 282006 - protein, 14 aa, Homo sapiens
  CDR3 for beta chain variable domain of TCR clone 141003 (TRBV18, TRBJ2-7)
CARSPRGGAYEQYF

SEQ ID NO: 282007 - protein, 14 aa, Homo sapiens
  CDR3 for alpha chain variable domain of TCR clone 141004 (TRAV17, TRAJ57)
CATDPQGGSAKLVF

SEQ ID NO: 282008 - protein, 15 aa, Homo sapiens
  CDR3 for beta chain variable domain of TCR clone 141004 (TRBV5-1, TRBJ2-7)
CASSLDLTSPYEQYF

SEQ ID NO: 282009 - protein, 13 aa, Homo sapiens
  CDR3 for alpha chain variable domain of TCR clone 141005 (TRAV20, TRAJ9)
CAVPDTGGFKTIF

SEQ ID NO: 282010 - protein, 14 aa, Homo sapiens
  CDR3 for beta chain variable domain of TCR clone 141005 (TRBV7-2, TRBJ2-5)
CASSPRGSSEAQYF

SEQ ID NO: 282011 - protein, 14 aa, Homo sapiens
  CDR3 for alpha chain variable domain of TCR clone 141006 (TRAV1-2, TRAJ16)
CAVNRFSDGQKLLF

SEQ ID NO: 282012 - protein, 14 aa, Homo sapiens
  CDR3 for beta chain variable domain of TCR clone 141006 (TRBV4-2, TRBJ2-1)
CASGLDMAYNEQFF

SEQ ID NO: 282013 - protein, 13 aa, Homo sapiens
  CDR3 for alpha chain variable domain of TCR clone 141007 (TRAV1-1, TRAJ9)
CAAKNTGGFNTIF

SEQ ID NO: 282014 - protein, 14 aa, Homo sapiens
  CDR3 for beta chain variable domain of TCR clone 141007 (TRBV20-1, TRBJ2-1)
CSAQIGGSAYEQFF

SEQ ID NO: 282015 - protein, 11 aa, Homo sapiens
  CDR3 for alpha chain variable domain of TCR clone 141008 (TRAV17, TRAJ9)
CATTGGFKTIF

SEQ ID NO: 282016 - protein, 12 aa, Homo sapiens
  CDR3 for beta chain variable domain of TCR clone 141008 (TRBV7-9, TRBJ2-7)
CASSIKREEQYS

SEQ ID NO: 282017 - protein, 14 aa, Homo sapiens
  CDR3 for alpha chain variable domain of TCR clone 141009 (TRAV13-1, TRAJ20)
CAARPGANDYKPSF

SEQ ID NO: 282018 - protein, 15 aa, Homo sapiens
  CDR3 for beta chain variable domain of TCR clone 141009 (TRBV2, TRBJ2-1)
CASSELAGSYNEQFF

SEQ ID NO: 282019 - protein, 16 aa, Homo sapiens
  CDR3 for alpha chain variable domain of TCR clone 141010 (TRAV30, TRAJ24)
CGTEIVDADSWGKFQF

SEQ ID NO: 282020 - protein, 15 aa, Homo sapiens
  CDR3 for beta chain variable domain of TCR clone 141010 (TRBV7-2, TRBJ2-7)
CASSLSSGRTYEQYF

SEQ ID NO: 282021 - protein, 15 aa, Homo sapiens
  CDR3 for alpha chain variable domain of TCR clone 141011 (TRAV20, TRAJ23)
CAVQVVRNQGGKLIF

SEQ ID NO: 282022 - protein, 16 aa, Homo sapiens
  CDR3 for beta chain variable domain of TCR clone 141011 (TRBV27, TRBJ2-7)
CASSKQGRGWAYEQYF

SEQ ID NO: 282023 - protein, 14 aa, Homo sapiens
  CDR3 for alpha chain variable domain of TCR clone 141012 (TRAV23/DV6, TRAJ40)
SAASLTSGTYKYIF

SEQ ID NO: 282024 - protein, 14 aa, Homo sapiens
  CDR3 for beta chain variable domain of TCR clone 141012 (TRBV5-1, TRBJ2-3)
CASSRGQGGGTQYF

SEQ ID NO: 282025 - protein, 14 aa, Homo sapiens
  CDR3 for alpha chain variable domain of TCR clone 141013 (TRAV13-1, TRAJ35)
GAASKGGFGNVLHC

SEQ ID NO: 282026 - protein, 13 aa, Homo sapiens
  CDR3 for beta chain variable domain of TCR clone 141013 (TRBV7-3, TRBJ1-1)
CASSQDWGAAAFF

SEQ ID NO: 282027 - protein, 18 aa, Homo sapiens
  CDR3 for alpha chain variable domain of TCR clone 141014 (TRAV13-1, TRAJ52)
CAAKNPNAGGTSYGKLTF

SEQ ID NO: 282028 - protein, 14 aa, Homo sapiens
  CDR3 for beta chain variable domain of TCR clone 141014 (TRBV19, TRBJ2-7)
CASSMGQGAIEQYF

SEQ ID NO: 282029 - protein, 14 aa, Homo sapiens
  CDR3 for alpha chain variable domain of TCR clone 141015 (TRAV8-6, TRAJ48)
CAVSESFGNEKLTF

SEQ ID NO: 282030 - protein, 14 aa, Homo sapiens
  CDR3 for beta chain variable domain of TCR clone 141015 (TRBV18, TRBJ2-5)
CASSPGVSQETQYF

SEQ ID NO: 282031 - protein, 13 aa, Homo sapiens
  CDR3 for alpha chain variable domain of TCR clone 141016 (TRAV26-1, TRAJ30)
CIVRVESNDKIIF

SEQ ID NO: 282032 - protein, 15 aa, Homo sapiens
  CDR3 for beta chain variable domain of TCR clone 141016 (TRBV7-3, TRBJ2-3)
CASSLGLTLGDTQYF

SEQ ID NO: 282033 - protein, 15 aa, Homo sapiens
  CDR3 for alpha chain variable domain of TCR clone 141017 (TRAV34, TRAJ38)
CGADSTPGNNRKLIW

SEQ ID NO: 282034 - protein, 16 aa, Homo sapiens
  CDR3 for beta chain variable domain of TCR clone 141017 (TRBV12-5, TRBJ2-5)
CASGPRTSGNQETQYF

SEQ ID NO: 282035 - protein, 17 aa, Homo sapiens
  CDR3 for alpha chain variable domain of TCR clone 141018 (TRAV23/DV6, TRAJ57)
CAASSTLSQGGSEKRVF

SEQ ID NO: 282036 - protein, 14 aa, Homo sapiens
  CDR3 for beta chain variable domain of TCR clone 141018 (TRBV7-8, TRBJ2-5)
CASSATGGQEAQYF

SEQ ID NO: 282037 - protein, 17 aa, Homo sapiens
  CDR3 for alpha chain variable domain of TCR clone 141019 (TRAV13-1, TRAJ52)
CAAGRNAGGTSYGKLTF

SEQ ID NO: 282038 - protein, 11 aa, Homo sapiens
  CDR3 for beta chain variable domain of TCR clone 141019 (TRBV7-2, TRBJ2-7)
CASSSGLWQYF

SEQ ID NO: 282039 - protein, 14 aa, Homo sapiens
  CDR3 for alpha chain variable domain of TCR clone 141020 (TRAV1-2, TRAJ8)
CAVREDTGFQKLVF

SEQ ID NO: 282040 - protein, 14 aa, Homo sapiens
  CDR3 for beta chain variable domain of TCR clone 141020 (TRBV7-6, TRBJ2-3)
CASSLWTVTDTQYF

SEQ ID NO: 282041 - protein, 14 aa, Homo sapiens
  CDR3 for alpha chain variable domain of TCR clone 141021 (TRAV29/DV5, TRAJ32)
CAAAYGGATNKLIF

SEQ ID NO: 282042 - protein, 20 aa, Homo sapiens
  CDR3 for beta chain variable domain of TCR clone 141021 (TRBV20-1, TRBJ1-5)
CSARGPGTGGLLHSNQPQHF

SEQ ID NO: 282043 - protein, 15 aa, Homo sapiens
  CDR3 for alpha chain variable domain of TCR clone 141022 (TRAV21, TRAJ52)
CAVRGGGTSYGKLTF

SEQ ID NO: 282044 - protein, 14 aa, Homo sapiens
  CDR3 for beta chain variable domain of TCR clone 141022 (TRBV19, TRBJ2-1)
CASSRLASINEQFF

SEQ ID NO: 282045 - protein, 18 aa, Homo sapiens
  CDR3 for alpha chain variable domain of TCR clone 141023 (TRAV26-1, TRAJ34)
CCVLFIVRVAYNTDKLIF

SEQ ID NO: 282046 - protein, 15 aa, Homo sapiens
  CDR3 for beta chain variable domain of TCR clone 141023 (TRBV20-1, TRBJ2-7)
CSARVPAAYFYEQYF

SEQ ID NO: 282047 - protein, 14 aa, Homo sapiens
  CDR3 for alpha chain variable domain of TCR clone 141024 (TRAV1-2, TRAJ8)
CAVREDTGFQTLVF

SEQ ID NO: 282048 - protein, 16 aa, Homo sapiens
  CDR3 for beta chain variable domain of TCR clone 141024 (TRBV4-1, TRBJ2-3)
CASSQSTSGAEDTQYF

SEQ ID NO: 282049 - protein, 12 aa, Homo sapiens
  CDR3 for alpha chain variable domain of TCR clone 141025 (TRAV12-3, TRAJ39)
CAIENAGNMLTF

SEQ ID NO: 282050 - protein, 15 aa, Homo sapiens
  CDR3 for beta chain variable domain of TCR clone 141025 (TRBV11-3, TRBJ2-2)
CASSPSGSVTGELFF

SEQ ID NO: 282051 - protein, 13 aa, Homo sapiens
  CDR3 for alpha chain variable domain of TCR clone 141026 (TRAV8-3, TRAJ28)
CAVGAVGSYQLTF

SEQ ID NO: 282052 - protein, 14 aa, Homo sapiens
  CDR3 for beta chain variable domain of TCR clone 141026 (TRBV7-2, TRBJ2-7)
CASRSQGAAYEKYF

SEQ ID NO: 282053 - protein, 10 aa, Homo sapiens
  CDR3 for alpha chain variable domain of TCR clone 141027 (TRAV23/DV6, TRAJ57)
CAASSTLSQG

SEQ ID NO: 282054 - protein, 14 aa, Homo sapiens
  CDR3 for beta chain variable domain of TCR clone 141027 (TRBV25-1, TRBJ1-1)
CASTHLGANTEAFF

SEQ ID NO: 282055 - protein, 17 aa, Homo sapiens
  CDR3 for alpha chain variable domain of TCR clone 141028 (TRAV3, TRAJ42)
CAVRDRDYGGSQGNLIF

SEQ ID NO: 282056 - protein, 15 aa, Homo sapiens
  CDR3 for beta chain variable domain of TCR clone 141028 (TRBV6-5, TRBJ1-6)
CASSYGGYYNSPLHF

SEQ ID NO: 282057 - protein, 13 aa, Homo sapiens
  CDR3 for alpha chain variable domain of TCR clone 141029 (TRAV13-1, TRAJ12)
CAASPDSSYKLNF

SEQ ID NO: 282058 - protein, 16 aa, Homo sapiens
  CDR3 for beta chain variable domain of TCR clone 141029 (TRBV15, TRBJ2-1)
CATSRERLAGAYEQFF

SEQ ID NO: 282059 - protein, 12 aa, Homo sapiens
  CDR3 for alpha chain variable domain of TCR clone 141030 (TRAV9-2, TRAJ3)
CALYSSASKIIF

SEQ ID NO: 282060 - protein, 16 aa, Homo sapiens
  CDR3 for beta chain variable domain of TCR clone 141030 (TRBV10-2, TRBJ1-5)
CASSVRDRASKQPQHF

SEQ ID NO: 282061 - protein, 12 aa, Homo sapiens
  CDR3 for alpha chain variable domain of TCR clone 141031 (TRAV12-3, TRAJ17)
CAMTLTGNKLTF

SEQ ID NO: 282062 - protein, 13 aa, Homo sapiens
  CDR3 for beta chain variable domain of TCR clone 141031 (TRBV12-4, TRBJ1-1)
CASSLGGTTEAFF

SEQ ID NO: 282063 - protein, 13 aa, Homo sapiens
  CDR3 for alpha chain variable domain of TCR clone 141032 (TRAV12-3, TRAJ33)
CAMSLNSNYQLIW

SEQ ID NO: 282064 - protein, 14 aa, Homo sapiens
  CDR3 for beta chain variable domain of TCR clone 141032 (TRBV11-3, TRBJ1-6)
CASSFSGGDSPLHF

SEQ ID NO: 282065 - protein, 15 aa, Homo sapiens
  CDR3 for alpha chain variable domain of TCR clone 141033 (TRAV12-2, TRAJ50)
CAVNGLETTYDKVIF

SEQ ID NO: 282066 - protein, 16 aa, Homo sapiens
  CDR3 for beta chain variable domain of TCR clone 141033 (TRBV5-4, TRBJ2-3)
CASQQPGAGGADTQYF

SEQ ID NO: 282067 - protein, 14 aa, Homo sapiens
  CDR3 for alpha chain variable domain of TCR clone 141034 (TRAV35, TRAJ50)
CAGHRKTSYDKVIF

SEQ ID NO: 282068 - protein, 17 aa, Homo sapiens
  CDR3 for beta chain variable domain of TCR clone 141034 (TRBV15, TRBJ1-5)
CATSRAPPGTRNQPQHF

SEQ ID NO: 282069 - protein, 13 aa, Homo sapiens
  CDR3 for alpha chain variable domain of TCR clone 141035 (TRAV21, TRAJ10)
CAVPTGGGNKLTF

SEQ ID NO: 282070 - protein, 15 aa, Homo sapiens
  CDR3 for beta chain variable domain of TCR clone 141035 (TRBV12-4, TRBJ2-5)
CASSPPTGLQETQYF

SEQ ID NO: 282071 - protein, 14 aa, Homo sapiens
  CDR3 for alpha chain variable domain of TCR clone 141036 (TRAV17, TRAJ4)
CATAPLGGYNKLIF

SEQ ID NO: 282072 - protein, 13 aa, Homo sapiens
  CDR3 for beta chain variable domain of TCR clone 141036 (TRBV11-3, TRBJ1-1)
CASTGSLNTEAFF

SEQ ID NO: 282073 - protein, 12 aa, Homo sapiens
  CDR3 for alpha chain variable domain of TCR clone 141037 (TRAV29/DV5, TRAJ49)
CAATDTGNQFYF

SEQ ID NO: 282074 - protein, 13 aa, Homo sapiens
  CDR3 for beta chain variable domain of TCR clone 141037 (TRBV18, TRBJ2-7)
CASQSGGGYEQYF

SEQ ID NO: 282075 - protein, 16 aa, Homo sapiens
  CDR3 for alpha chain variable domain of TCR clone 141038 (TRAV30, TRAJ24)
CGTEIVDADSWGKFQF

SEQ ID NO: 282076 - protein, 15 aa, Homo sapiens
  CDR3 for beta chain variable domain of TCR clone 141038 (TRBV18, TRBJ2-1)
CASFPDRGRDNEQFF

SEQ ID NO: 282077 - protein, 16 aa, Homo sapiens
  CDR3 for alpha chain variable domain of TCR clone 141039 (TRAV30, TRAJ24)
CGTEIVDAESWGKFQF

SEQ ID NO: 282078 - protein, 16 aa, Homo sapiens
  CDR3 for beta chain variable domain of TCR clone 141039 (TRBV12-5, TRBJ2-5)
CASGPRTSGNQETQYF

SEQ ID NO: 282079 - protein, 15 aa, Homo sapiens
  CDR3 for alpha chain variable domain of TCR clone 141040 (TRAV23/DV6, TRAJ37)
FAAGEGSSNTGKLIF

SEQ ID NO: 282080 - protein, 17 aa, Homo sapiens
  CDR3 for beta chain variable domain of TCR clone 141040 (TRBV20-1, TRBJ2-7)
CSATRAGGVAGVEEQYF

SEQ ID NO: 282081 - protein, 16 aa, Homo sapiens
  CDR3 for alpha chain variable domain of TCR clone 141041 (TRAV12-3, TRAJ53)
CAISPGSGGSNYKLTF

SEQ ID NO: 282082 - protein, 11 aa, Homo sapiens
  CDR3 for beta chain variable domain of TCR clone 141041 (TRBV29-1, TRBJ2-5)
CSEDRTGTQHF

SEQ ID NO: 282083 - protein, 12 aa, Homo sapiens
  CDR3 for alpha chain variable domain of TCR clone 141042 (TRAV9-2, TRAJ5)
CVVDTGRRALTF

SEQ ID NO: 282084 - protein, 14 aa, Homo sapiens
  CDR3 for beta chain variable domain of TCR clone 141042 (TRBV5-1, TRBJ2-7)
CASNTGTGFYEQYF

SEQ ID NO: 282085 - protein, 16 aa, Homo sapiens
  CDR3 for alpha chain variable domain of TCR clone 141043 (TRAV3, TRAJ37)
CAVRGKGSGNQGKLIF

SEQ ID NO: 282086 - protein, 15 aa, Homo sapiens
  CDR3 for beta chain variable domain of TCR clone 141043 (TRBV7-9, TRBJ1-6)
CASSSPGRGNSPLHF

SEQ ID NO: 282087 - protein, 14 aa, Homo sapiens
  CDR3 for alpha chain variable domain of TCR clone 141044 (TRAV1-2, TRAJ16)
CSVNRFSAGQKLLF

SEQ ID NO: 282088 - protein, 15 aa, Homo sapiens
  CDR3 for beta chain variable domain of TCR clone 141044 (TRBV9, TRBJ1-6)
CASSVAGTGDSPLHF

SEQ ID NO: 282089 - protein, 13 aa, Homo sapiens
  CDR3 for alpha chain variable domain of TCR clone 141045 (TRAV8-3, TRAJ47)
CAVSMAYGNKLVF

SEQ ID NO: 282090 - protein, 13 aa, Homo sapiens
  CDR3 for beta chain variable domain of TCR clone 141045 (TRBV7-9, TRBJ2-5)
CASSLVFGETQYF

SEQ ID NO: 282091 - protein, 19 aa, Homo sapiens
  CDR3 for alpha chain variable domain of TCR clone 141046 (TRAV13-1, TRAJ52)
CAASPYQNAGGTSYGKLTF

SEQ ID NO: 282092 - protein, 12 aa, Homo sapiens
  CDR3 for beta chain variable domain of TCR clone 141046 (TRBV12-4, TRBJ2-7)
CASSLGGYEQYF

SEQ ID NO: 282093 - protein, 11 aa, Homo sapiens
  CDR3 for alpha chain variable domain of TCR clone 141047 (TRAV1-2, TRAJ31)
CAVNNNARLMF

SEQ ID NO: 282094 - protein, 16 aa, Homo sapiens
  CDR3 for beta chain variable domain of TCR clone 141047 (TRBV7-3, TRBJ2-2)
CASSLKRGTLSGELFF

SEQ ID NO: 282095 - protein, 14 aa, Homo sapiens
  CDR3 for alpha chain variable domain of TCR clone 141048 (TRAV12-3, TRAJ9)
CAMSPNTGGFKTIF

SEQ ID NO: 282096 - protein, 12 aa, Homo sapiens
  CDR3 for beta chain variable domain of TCR clone 141048 (TRBV19, TRBJ1-5)
CATSIAQQPQHF

SEQ ID NO: 282097 - protein, 15 aa, Homo sapiens
  CDR3 for alpha chain variable domain of TCR clone 141049 (TRAV13-1, TRAJ44)
CAASRGGGTANKLTF

SEQ ID NO: 282098 - protein, 12 aa, Homo sapiens
  CDR3 for beta chain variable domain of TCR clone 141049 (TRBV11-2, TRBJ2-2)
CASSLGGGELFF

SEQ ID NO: 282099 - protein, 14 aa, Homo sapiens
  CDR3 for alpha chain variable domain of TCR clone 141050 (TRAV12-2, TRAJ33)
CAVKRARRNYQLIW

SEQ ID NO: 282100 - protein, 14 aa, Homo sapiens
  CDR3 for beta chain variable domain of TCR clone 141050 (TRBV13, TRBJ2-7)
CASSLKGASYEQYF

SEQ ID NO: 282101 - protein, 11 aa, Homo sapiens
  CDR3 for alpha chain variable domain of TCR clone 141051 (TRAV1-2, TRAJ20)
CAVANDYKPSF

SEQ ID NO: 282102 - protein, 14 aa, Homo sapiens
  CDR3 for beta chain variable domain of TCR clone 141051 (TRBV12-5, TRBJ2-5)
CASGSRTHQETQYF

SEQ ID NO: 282103 - protein, 14 aa, Homo sapiens
  CDR3 for alpha chain variable domain of TCR clone 141052 (TRAV21, TRAJ15)
CAVSLNQAGTALIF

SEQ ID NO: 282104 - protein, 13 aa, Homo sapiens
  CDR3 for beta chain variable domain of TCR clone 141052 (TRBV10-3, TRBJ1-2)
CAISERDSYGYTF

SEQ ID NO: 282105 - protein, 22 aa, Homo sapiens
  CDR3 for alpha chain variable domain of TCR clone 141053 (TRAV2, TRAJ10)
CAVEDQRSREEKQTHLWDRHSA

SEQ ID NO: 282106 - protein, 16 aa, Homo sapiens
  CDR3 for beta chain variable domain of TCR clone 141053 (TRBV18, TRBJ1-5)
CASSPSTGNSNQPQHF

SEQ ID NO: 282107 - protein, 15 aa, Homo sapiens
  CDR3 for alpha chain variable domain of TCR clone 141054 (TRAV27, TRAJ38)
CAARRNAGNNRKLIW

SEQ ID NO: 282108 - protein, 17 aa, Homo sapiens
  CDR3 for beta chain variable domain of TCR clone 141054 (TRBV20-1, TRBJ2-2)
CSASGSGQGGLTGGLFF

SEQ ID NO: 282109 - protein, 13 aa, Homo sapiens
  CDR3 for alpha chain variable domain of TCR clone 141055 (TRAV26-1, TRAJ41)
CIARINSGYALNF

SEQ ID NO: 282110 - protein, 13 aa, Homo sapiens
  CDR3 for beta chain variable domain of TCR clone 141055 (TRBV20-1, TRBJ1-5)
CSATAAGGQPQHF

SEQ ID NO: 282111 - protein, 15 aa, Homo sapiens
  CDR3 for alpha chain variable domain of TCR clone 141056 (TRAV17, TRAJ4)
CVTGTWSGGYNKLIF

SEQ ID NO: 282112 - protein, 13 aa, Homo sapiens
  CDR3 for beta chain variable domain of TCR clone 141056 (TRBV6-6, TRBJ2-7)
CASSPKHLAEQYF

SEQ ID NO: 282113 - protein, 16 aa, Homo sapiens
  CDR3 for alpha chain variable domain of TCR clone 141057 (TRAV27, TRAJ13)
CAGAKSDSGGYQKVTF

SEQ ID NO: 282114 - protein, 18 aa, Homo sapiens
  CDR3 for beta chain variable domain of TCR clone 141057 (TRBV7-9, TRBJ1-1)
CASSPRVGTRILRAEAFF

SEQ ID NO: 282115 - protein, 14 aa, Homo sapiens
  CDR3 for alpha chain variable domain of TCR clone 141058 (TRAV8-3, TRAJ4)
CAVGAAGGYNKLTF

SEQ ID NO: 282116 - protein, 14 aa, Homo sapiens
  CDR3 for beta chain variable domain of TCR clone 141058 (TRBV12-4, TRBJ2-7)
CASSRQGRSYEQYF

SEQ ID NO: 282117 - protein, 12 aa, Homo sapiens
  CDR3 for alpha chain variable domain of TCR clone 141059 (TRAV13-2, TRAJ23)
CAERHRGGKLTF

SEQ ID NO: 282118 - protein, 16 aa, Homo sapiens
  CDR3 for beta chain variable domain of TCR clone 141059 (TRBV20-1, TRBJ1-4)
FSAPGQGLLTNEKLFF

SEQ ID NO: 282119 - protein, 13 aa, Homo sapiens
  CDR3 for alpha chain variable domain of TCR clone 141060 (TRAV27, TRAJ40)
CAGPPSVTYKYIF

SEQ ID NO: 282120 - protein, 13 aa, Homo sapiens
  CDR3 for beta chain variable domain of TCR clone 141060 (TRBV28, TRBJ1-2)
CAGRDRGNYGYTF

SEQ ID NO: 282121 - protein, 15 aa, Homo sapiens
  CDR3 for alpha chain variable domain of TCR clone 141061 (TRAV8-3, TRAJ15)
CAVGAPNQEGTALIL

SEQ ID NO: 282122 - protein, 14 aa, Homo sapiens
  CDR3 for beta chain variable domain of TCR clone 141061 (TRBV20-1, TRBJ2-1)
CSPNDEASYNEQFF

SEQ ID NO: 282123 - protein, 15 aa, Homo sapiens
  CDR3 for alpha chain variable domain of TCR clone 141062 (TRAV12-1, TRAJ15)
CVVTRANQAGTALIF

SEQ ID NO: 282124 - protein, 14 aa, Homo sapiens
  CDR3 for beta chain variable domain of TCR clone 141062 (TRBV5-1, TRBJ1-1)
CASSLVAINTEAFC

SEQ ID NO: 282125 - protein, 13 aa, Homo sapiens
  CDR3 for alpha chain variable domain of TCR clone 141063 (TRAV2, TRAJ40)
CAVVTSGTYKYIF

SEQ ID NO: 282126 - protein, 14 aa, Homo sapiens
  CDR3 for beta chain variable domain of TCR clone 141063 (TRBV19, TRBJ2-1)
CVSPTVVLSGEQFF

SEQ ID NO: 282127 - protein, 18 aa, Homo sapiens
  CDR3 for alpha chain variable domain of TCR clone 141064 (TRAV21, TRAJ52)
CAVRPSPAGGTSYGQLTF

SEQ ID NO: 282128 - protein, 17 aa, Homo sapiens
  CDR3 for beta chain variable domain of TCR clone 141064 (TRBV13, TRBJ2-3)
WASSLSRVAGGRNTQYC

SEQ ID NO: 282129 - protein, 15 aa, Homo sapiens
  CDR3 for alpha chain variable domain of TCR clone 141065 (TRAV34, TRAJ38)
CGGDFTPGNNRKLLW

SEQ ID NO: 282130 - protein, 16 aa, Homo sapiens
  CDR3 for beta chain variable domain of TCR clone 141065 (TRBV12-5, TRBJ2-5)
CASGPRTSGNQETQYF

SEQ ID NO: 282131 - protein, 10 aa, Homo sapiens
  CDR3 for alpha chain variable domain of TCR clone 141066 (TRAV2, TRAJ34)
CAVVNDMLIF

SEQ ID NO: 282132 - protein, 14 aa, Homo sapiens
  CDR3 for beta chain variable domain of TCR clone 141066 (TRBV11-2, TRBJ2-3)
CASSRLARTDTQYF

SEQ ID NO: 282133 - protein, 10 aa, Homo sapiens
  CDR3 for alpha chain variable domain of TCR clone 141067 (TRAV12-2, TRAJ52)
RSTSYGKLTF

SEQ ID NO: 282134 - protein, 14 aa, Homo sapiens
  CDR3 for beta chain variable domain of TCR clone 141067 (TRBV12-5, TRBJ2-5)
CASGSRTHQETQYF

SEQ ID NO: 282135 - protein, 15 aa, Homo sapiens
  CDR3 for alpha chain variable domain of TCR clone 141068 (TRAV3, TRAJ20)
CAVRDIKLSDYKLSF

SEQ ID NO: 282136 - protein, 17 aa, Homo sapiens
  CDR3 for beta chain variable domain of TCR clone 141068 (TRBV20-1, TRBJ2-2)
CSASGSGQGGLTGELFF

SEQ ID NO: 282137 - protein, 15 aa, Homo sapiens
  CDR3 for alpha chain variable domain of TCR clone 141069 (TRAV26-1, TRAJ23)
CIVRVAGYQEGKLIF

SEQ ID NO: 282138 - protein, 18 aa, Homo sapiens
  CDR3 for beta chain variable domain of TCR clone 141069 (TRBV28, TRBJ2-1)
CASSSTSGRANSYNEQFF

SEQ ID NO: 282139 - protein, 13 aa, Homo sapiens
  CDR3 for alpha chain variable domain of TCR clone 141070 (TRAV2, TRAJ15)
CAVASQAGTALIF

SEQ ID NO: 282140 - protein, 13 aa, Homo sapiens
  CDR3 for beta chain variable domain of TCR clone 141070 (TRBV12-4, TRBJ1-2)
CASSFIWLHLRFG

SEQ ID NO: 282141 - protein, 12 aa, Homo sapiens
  CDR3 for alpha chain variable domain of TCR clone 141071 (TRAV16, TRAJ49)
CALNEGGNQFYF

SEQ ID NO: 282142 - protein, 14 aa, Homo sapiens
  CDR3 for beta chain variable domain of TCR clone 141071 (TRBV7-9, TRBJ2-1)
YASRPTGLRNEQFF

SEQ ID NO: 282143 - protein, 16 aa, Homo sapiens
  CDR3 for alpha chain variable domain of TCR clone 141072 (TRAV14/DV4, TRAJ54)
CAMREGRIQVAQKLVF

SEQ ID NO: 282144 - protein, 15 aa, Homo sapiens
  CDR3 for beta chain variable domain of TCR clone 141072 (TRBV3-1, TRBJ2-1)
CASSQQPSGGNEQFF

SEQ ID NO: 282145 - protein, 14 aa, Homo sapiens
  CDR3 for alpha chain variable domain of TCR clone 141073 (TRAV27, TRAJ36)
CAGPPTRGANNLFF

SEQ ID NO: 282146 - protein, 15 aa, Homo sapiens
  CDR3 for beta chain variable domain of TCR clone 141073 (TRBV18, TRBJ2-7)
CASSPASTPNYEQYF

SEQ ID NO: 282147 - protein, 10 aa, Homo sapiens
  CDR3 for alpha chain variable domain of TCR clone 141074 (TRAV23/DV6, TRAJ57)
CAASSILSQV

SEQ ID NO: 282148 - protein, 14 aa, Homo sapiens
  CDR3 for beta chain variable domain of TCR clone 141074 (TRBV25-1, TRBJ1-1)
CASTHLGGNTEAFF

SEQ ID NO: 282149 - protein, 13 aa, Homo sapiens
  CDR3 for alpha chain variable domain of TCR clone 141075 (TRAV30, TRAJ49)
CGTESQPVTSSIL

SEQ ID NO: 282150 - protein, 11 aa, Homo sapiens
  CDR3 for beta chain variable domain of TCR clone 141075 (TRBV3-1, TRBJ2-7)
CASTSLGEQYF

SEQ ID NO: 282151 - protein, 14 aa, Homo sapiens
  CDR3 for alpha chain variable domain of TCR clone 141076 (TRAV12-2, TRAJ13)
CAVKKNGGYQKVNF

SEQ ID NO: 282152 - protein, 14 aa, Homo sapiens
  CDR3 for beta chain variable domain of TCR clone 141076 (TRBV27, TRBJ2-1)
CQSNGGGSSNEQFF

SEQ ID NO: 282153 - protein, 11 aa, Homo sapiens
  CDR3 for alpha chain variable domain of TCR clone 141077 (TRAV6, TRAJ4)
PISVGYNKLIF

SEQ ID NO: 282154 - protein, 13 aa, Homo sapiens
  CDR3 for beta chain variable domain of TCR clone 141077 (TRBV11-3, TRBJ2-7)
CASSLDKLYEQYF

SEQ ID NO: 282155 - protein, 14 aa, Homo sapiens
  CDR3 for alpha chain variable domain of TCR clone 141078 (TRAV21, TRAJ35)
CAVMPIGFGNVLHC

SEQ ID NO: 282156 - protein, 14 aa, Homo sapiens
  CDR3 for beta chain variable domain of TCR clone 141078 (TRBV11-2, TRBJ2-5)
CASSRTGGIETQYF

SEQ ID NO: 282157 - protein, 17 aa, Homo sapiens
  CDR3 for alpha chain variable domain of TCR clone 141079 (TRAV26-1, TRAJ36)
CIVRPPGDQTGANNLFV

SEQ ID NO: 282158 - protein, 15 aa, Homo sapiens
  CDR3 for beta chain variable domain of TCR clone 141079 (TRBV10-3, TRBJ2-6)
CATPAAASGANVLTF

SEQ ID NO: 282159 - protein, 16 aa, Homo sapiens
  CDR3 for alpha chain variable domain of TCR clone 141080 (TRAV12-3, TRAJ45)
CAMGWGSGGGADGLTF

SEQ ID NO: 282160 - protein, 16 aa, Homo sapiens
  CDR3 for beta chain variable domain of TCR clone 141080 (TRBV4-1, TRBJ2-7)
CASRPSGGGADNEQYF

SEQ ID NO: 282161 - protein, 12 aa, Homo sapiens
  CDR3 for alpha chain variable domain of TCR clone 141081 (TRAV12-3, TRAJ40)
CAVSSGTYKYIF

SEQ ID NO: 282162 - protein, 16 aa, Homo sapiens
  CDR3 for beta chain variable domain of TCR clone 141081 (TRBV12-4, TRBJ1-5)
CASSRPVGGSNQPQHF

SEQ ID NO: 282163 - protein, 14 aa, Homo sapiens
  CDR3 for alpha chain variable domain of TCR clone 141082 (TRAV35, TRAJ41)
CAGQASVRRNALNF

SEQ ID NO: 282164 - protein, 14 aa, Homo sapiens
  CDR3 for beta chain variable domain of TCR clone 141082 (TRBV20-1, TRBJ1-2)
CSASEQGAVYGCTF

SEQ ID NO: 282165 - protein, 12 aa, Homo sapiens
  CDR3 for alpha chain variable domain of TCR clone 141083 (TRAV17, TRAJ12)
CATLRSSYKLIF

SEQ ID NO: 282166 - protein, 17 aa, Homo sapiens
  CDR3 for beta chain variable domain of TCR clone 141083 (TRBV11-2, TRBJ2-1)
CASSLYPPGVEYNEQFF

SEQ ID NO: 282167 - protein, 22 aa, Homo sapiens
  CDR3 for alpha chain variable domain of TCR clone 141084 (TRAV4, )
CLVGPHNYDIQDPDPAVYQLRD

SEQ ID NO: 282168 - protein, 17 aa, Homo sapiens
  CDR3 for beta chain variable domain of TCR clone 141084 (TRBV24-1, TRBJ2-1)
CATSDVSTSGTYNEQFF

SEQ ID NO: 282169 - protein, 17 aa, Homo sapiens
  CDR3 for alpha chain variable domain of TCR clone 141085 (TRAV26-1, TRAJ53)
CIVRVDDSGGSNYKLTF

SEQ ID NO: 282170 - protein, 16 aa, Homo sapiens
  CDR3 for beta chain variable domain of TCR clone 141085 (TRBV2, TRBJ2-3)
CASSTSVEGVTDTQYF

SEQ ID NO: 282171 - protein, 14 aa, Homo sapiens
  CDR3 for alpha chain variable domain of TCR clone 141086 (TRAV17, TRAJ57)
CATDPQGGSEKLDF

SEQ ID NO: 282172 - protein, 15 aa, Homo sapiens
  CDR3 for beta chain variable domain of TCR clone 141086 (TRBV12-4, TRBJ1-2)
CASRLGVAGNYGYTF

SEQ ID NO: 282173 - protein, 13 aa, Homo sapiens
  CDR3 for alpha chain variable domain of TCR clone 141087 (TRAV30, TRAJ49)
CGTESQPVTSSIL

SEQ ID NO: 282174 - protein, 14 aa, Homo sapiens
  CDR3 for beta chain variable domain of TCR clone 141087 (TRBV4-2, TRBJ1-2)
CASSPGGSNYGYTF

SEQ ID NO: 282175 - protein, 13 aa, Homo sapiens
  CDR3 for alpha chain variable domain of TCR clone 141088 (TRAV12-3, TRAJ13)
CAMTSGGYQKVTF

SEQ ID NO: 282176 - protein, 13 aa, Homo sapiens
  CDR3 for beta chain variable domain of TCR clone 141088 (TRBV20-1, TRBJ2-2)
CSVLSGGAGELFF

SEQ ID NO: 282177 - protein, 12 aa, Homo sapiens
  CDR3 for alpha chain variable domain of TCR clone 141089 (TRAV8-3, TRAJ40)
CAMTSGTYKYIF

SEQ ID NO: 282178 - protein, 14 aa, Homo sapiens
  CDR3 for beta chain variable domain of TCR clone 141089 (TRBV12-4, TRBJ2-3)
CASSGQGSTDTQYF

SEQ ID NO: 282179 - protein, 18 aa, Homo sapiens
  CDR3 for alpha chain variable domain of TCR clone 141090 (TRAV26-2, TRAJ54)
CILGDVEVGIQGAQKLGF

SEQ ID NO: 282180 - protein, 17 aa, Homo sapiens
  CDR3 for beta chain variable domain of TCR clone 141090 (TRBV20-1, TRBJ1-5)
CSASLSPGQGGNQPQHF

SEQ ID NO: 282181 - protein, 16 aa, Homo sapiens
  CDR3 for alpha chain variable domain of TCR clone 141091 (TRAV30, TRAJ24)
CGTEIVDADSWGKFQF

SEQ ID NO: 282182 - protein, 14 aa, Homo sapiens
  CDR3 for beta chain variable domain of TCR clone 141091 (TRBV20-1, TRBJ1-5)
CSARGDGNFQPQHF

SEQ ID NO: 282183 - protein, 12 aa, Homo sapiens
  CDR3 for alpha chain variable domain of TCR clone 141092 (TRAV17, TRAJ53)
CATEGSNYNLTF

SEQ ID NO: 282184 - protein, 19 aa, Homo sapiens
  CDR3 for beta chain variable domain of TCR clone 141092 (TRBV5-1, TRBJ2-3)
CASSLWTSGGITTPDTQYF

SEQ ID NO: 282185 - protein, 14 aa, Homo sapiens
  CDR3 for alpha chain variable domain of TCR clone 141093 (TRAV12-2, TRAJ40)
CAVTIPSGTYKYIF

SEQ ID NO: 282186 - protein, 17 aa, Homo sapiens
  CDR3 for beta chain variable domain of TCR clone 141093 (TRBV20-1, TRBJ2-1)
CSAFSGTSGSLYNEQFF

SEQ ID NO: 282187 - protein, 14 aa, Homo sapiens
  CDR3 for alpha chain variable domain of TCR clone 141094 (TRAV2, TRAJ9)
CTVEDRSGGFKTIF

SEQ ID NO: 282188 - protein, 15 aa, Homo sapiens
  CDR3 for beta chain variable domain of TCR clone 141094 (TRBV28, TRBJ1-3)
CASSMGWASGNTIYF

SEQ ID NO: 282189 - protein, 16 aa, Homo sapiens
  CDR3 for alpha chain variable domain of TCR clone 141095 (TRAV12-2, TRAJ18)
CAVTTDRGSTLGRLYF

SEQ ID NO: 282190 - protein, 15 aa, Homo sapiens
  CDR3 for beta chain variable domain of TCR clone 141095 (TRBV7-6, TRBJ2-5)
CASSKPTGPQETQYF

SEQ ID NO: 282191 - protein, 16 aa, Homo sapiens
  CDR3 for alpha chain variable domain of TCR clone 141096 (TRAV1-2, TRAJ35)
CAVRGLTIGFGNVLHC

SEQ ID NO: 282192 - protein, 13 aa, Homo sapiens
  CDR3 for beta chain variable domain of TCR clone 141096 (TRBV19, TRBJ1-2)
CASSVPGQDGYTF

SEQ ID NO: 282193 - protein, 12 aa, Homo sapiens
  CDR3 for alpha chain variable domain of TCR clone 141097 (TRAV13-2, TRAJ20)
LQRISADYKLSF

SEQ ID NO: 282194 - protein, 12 aa, Homo sapiens
  CDR3 for beta chain variable domain of TCR clone 141097 (TRBV14, TRBJ2-7)
CASSRLKGEQYF

SEQ ID NO: 282195 - protein, 14 aa, Homo sapiens
  CDR3 for alpha chain variable domain of TCR clone 141098 (TRAV23/DV6, TRAJ22)
CAASRSGSARQLTF

SEQ ID NO: 282196 - protein, 13 aa, Homo sapiens
  CDR3 for beta chain variable domain of TCR clone 141098 (TRBV15, TRBJ1-6)
CATSGGRNSPLHF

SEQ ID NO: 282197 - protein, 12 aa, Homo sapiens
  CDR3 for alpha chain variable domain of TCR clone 141099 (TRAV13-1, TRAJ20)
CAASRGDYKLSF

SEQ ID NO: 282198 - protein, 15 aa, Homo sapiens
  CDR3 for beta chain variable domain of TCR clone 141099 (TRBV2, TRBJ2-1)
CASSELAGSYNEQFF

SEQ ID NO: 282199 - protein, 12 aa, Homo sapiens
  CDR3 for alpha chain variable domain of TCR clone 141100 (TRAV21, TRAJ31)
WAVSPARGRLMF

SEQ ID NO: 282200 - protein, 14 aa, Homo sapiens
  CDR3 for beta chain variable domain of TCR clone 141100 (TRBV28, TRBJ2-7)
CASSLLGISYEQYF

SEQ ID NO: 282201 - protein, 11 aa, Homo sapiens
  CDR3 for alpha chain variable domain of TCR clone 141101 (TRAV13-1, TRAJ39)
CASHAGNMLTV

SEQ ID NO: 282202 - protein, 14 aa, Homo sapiens
  CDR3 for beta chain variable domain of TCR clone 141101 (TRBV11-2, TRBJ1-5)
CASSLDRGRQPQHF

SEQ ID NO: 282203 - protein, 18 aa, Homo sapiens
  CDR3 for alpha chain variable domain of TCR clone 141102 (TRAV12-2, TRAJ52)
CAVRPSPAGGTSYGKLTF

SEQ ID NO: 282204 - protein, 13 aa, Homo sapiens
  CDR3 for beta chain variable domain of TCR clone 141102 (TRBV7-3, TRBJ1-1)
CASSQDWGAEAFF

SEQ ID NO: 282205 - protein, 15 aa, Homo sapiens
  CDR3 for alpha chain variable domain of TCR clone 141103 (TRAV17, TRAJ4)
CATGTWSGGYNKLIF

SEQ ID NO: 282206 - protein, 14 aa, Homo sapiens
  CDR3 for beta chain variable domain of TCR clone 141103 (TRBV4-1, TRBJ2-2)
CASSQAVNTGELFF

SEQ ID NO: 282207 - protein, 18 aa, Homo sapiens
  CDR3 for alpha chain variable domain of TCR clone 141104 (TRAV21, TRAJ52)
CAVRPSPAGGTSYGKLTF

SEQ ID NO: 282208 - protein, 15 aa, Homo sapiens
  CDR3 for beta chain variable domain of TCR clone 141104 (TRBV11-3, TRBJ2-3)
CASLKDGREGDTQYL

SEQ ID NO: 282209 - protein, 16 aa, Homo sapiens
  CDR3 for alpha chain variable domain of TCR clone 141105 (TRAV12-2, TRAJ45)
CAVIFLSGGGADGLTF

SEQ ID NO: 282210 - protein, 13 aa, Homo sapiens
  CDR3 for beta chain variable domain of TCR clone 141105 (TRBV7-2, TRBJ2-2)
CASSSVRAGELFF

SEQ ID NO: 282211 - protein, 14 aa, Homo sapiens
  CDR3 for alpha chain variable domain of TCR clone 141106 (TRAV17, TRAJ57)
CATDPQGGSEKLVF

SEQ ID NO: 282212 - protein, 15 aa, Homo sapiens
  CDR3 for beta chain variable domain of TCR clone 141106 (TRBV5-5, TRBJ1-5)
CASSSTPGSNQPQHF

SEQ ID NO: 282213 - protein, 10 aa, Homo sapiens
  CDR3 for alpha chain variable domain of TCR clone 141107 (TRAV2, TRAJ29)
CAPGNTPLVF

SEQ ID NO: 282214 - protein, 19 aa, Homo sapiens
  CDR3 for beta chain variable domain of TCR clone 141107 (TRBV23-1, TRBJ2-7)
CASILLRDRARAVLRAGHQ

SEQ ID NO: 282215 - protein, 15 aa, Homo sapiens
  CDR3 for alpha chain variable domain of TCR clone 141108 (TRAV38-1, TRAJ57)
CAFMESQGGSEKLVF

SEQ ID NO: 282216 - protein, 16 aa, Homo sapiens
  CDR3 for beta chain variable domain of TCR clone 141108 (TRBV10-3, TRBJ2-1)
CAIRGGGRGDYSEQFF

SEQ ID NO: 282217 - protein, 15 aa, Homo sapiens
  CDR3 for alpha chain variable domain of TCR clone 141109 (TRAV17, TRAJ6)
CAKDLPSGGSYIPTF

SEQ ID NO: 282218 - protein, 16 aa, Homo sapiens
  CDR3 for beta chain variable domain of TCR clone 141109 (TRBV4-1, TRBJ2-7)
CASSQDPTGYSYEQYF

SEQ ID NO: 282219 - protein, 12 aa, Homo sapiens
  CDR3 for alpha chain variable domain of TCR clone 141110 (TRAV20, TRAJ39)
CAVGNAGNMLTF

SEQ ID NO: 282220 - protein, 17 aa, Homo sapiens
  CDR3 for beta chain variable domain of TCR clone 141110 (TRBV5-1, TRBJ2-3)
CASSLGASTSGTDTQYF

SEQ ID NO: 282221 - protein, 14 aa, Homo sapiens
  CDR3 for alpha chain variable domain of TCR clone 141111 (TRAV8-2, TRAJ23)
RVVSDDNQGGKLIF

SEQ ID NO: 282222 - protein, 16 aa, Homo sapiens
  CDR3 for beta chain variable domain of TCR clone 141111 (TRBV4-2, TRBJ2-5)
CASSQELVGSRETQYF

SEQ ID NO: 282223 - protein, 12 aa, Homo sapiens
  CDR3 for alpha chain variable domain of TCR clone 141112 (TRAV2, TRAJ5)
CALDTGRRALTF

SEQ ID NO: 282224 - protein, 15 aa, Homo sapiens
  CDR3 for beta chain variable domain of TCR clone 141112 (TRBV10-3, TRBJ2-1)
CAISDVQDRVYEQFF

SEQ ID NO: 282225 - protein, 12 aa, Homo sapiens
  CDR3 for alpha chain variable domain of TCR clone 141113 (TRAV29/DV5, TRAJ49)
CAATDTGNPFYF

SEQ ID NO: 282226 - protein, 15 aa, Homo sapiens
  CDR3 for beta chain variable domain of TCR clone 141113 (TRBV20-1, TRBJ1-5)
CSAREGGYSNQPQHF

SEQ ID NO: 282227 - protein, 14 aa, Homo sapiens
  CDR3 for alpha chain variable domain of TCR clone 141114 (TRAV23/DV6, TRAJ23)
CSAGPYNQGGKLIF

SEQ ID NO: 282228 - protein, 17 aa, Homo sapiens
  CDR3 for beta chain variable domain of TCR clone 141114 (TRBV4-2, TRBJ1-1)
CASSQVATGGMSTGAFF

SEQ ID NO: 282229 - protein, 13 aa, Homo sapiens
  CDR3 for alpha chain variable domain of TCR clone 141115 (TRAV26-1, TRAJ33)
CIVPMDSNYQLIW

SEQ ID NO: 282230 - protein, 14 aa, Homo sapiens
  CDR3 for beta chain variable domain of TCR clone 141115 (TRBV18, TRBJ2-5)
RASSPGVSQETQYF

SEQ ID NO: 282231 - protein, 16 aa, Homo sapiens
  CDR3 for alpha chain variable domain of TCR clone 141116 (TRAV16, TRAJ4)
CALSRMFSGGYNKLIF

SEQ ID NO: 282232 - protein, 13 aa, Homo sapiens
  CDR3 for beta chain variable domain of TCR clone 141116 (TRBV20-1, TRBJ1-1)
CSAPPGGHTEAFF

SEQ ID NO: 282233 - protein, 12 aa, Homo sapiens
  CDR3 for alpha chain variable domain of TCR clone 141117 (TRAV12-3, TRAJ17)
CAMTLTGNKLTF

SEQ ID NO: 282234 - protein, 14 aa, Homo sapiens
  CDR3 for beta chain variable domain of TCR clone 141117 (TRBV11-2, TRBJ2-3)
CARSRLARTDTQYF

SEQ ID NO: 282235 - protein, 15 aa, Homo sapiens
  CDR3 for alpha chain variable domain of TCR clone 141118 (TRAV27, TRAJ38)
CAARRNVGNNRKLIW

SEQ ID NO: 282236 - protein, 13 aa, Homo sapiens
  CDR3 for beta chain variable domain of TCR clone 141118 (TRBV12-5, TRBJ2-3)
CASGDRQSDTQYF

SEQ ID NO: 282237 - protein, 14 aa, Homo sapiens
  CDR3 for alpha chain variable domain of TCR clone 141119 (TRAV30, TRAJ22)
CGTEPSGSARQLTF

SEQ ID NO: 282238 - protein, 13 aa, Homo sapiens
  CDR3 for beta chain variable domain of TCR clone 141119 (TRBV10-3, TRBJ1-2)
CAISERDSYGYTF

SEQ ID NO: 282239 - protein, 15 aa, Homo sapiens
  CDR3 for alpha chain variable domain of TCR clone 141120 (TRAV13-2, TRAJ5)
CAENPHWTGRRAITF

SEQ ID NO: 282240 - protein, 16 aa, Homo sapiens
  CDR3 for beta chain variable domain of TCR clone 141120 (TRBV7-9, TRBJ1-3)
CASSQTSGLRMGTIYF

SEQ ID NO: 282241 - protein, 14 aa, Homo sapiens
  CDR3 for alpha chain variable domain of TCR clone 141121 (TRAV16, TRAJ21)
FACGWATTSTNFTF

SEQ ID NO: 282242 - protein, 15 aa, Homo sapiens
  CDR3 for beta chain variable domain of TCR clone 141121 (TRBV19, TRBJ2-1)
CASSIQATSYNEQFF

SEQ ID NO: 282243 - protein, 13 aa, Homo sapiens
  CDR3 for alpha chain variable domain of TCR clone 141122 (TRAV3, TRAJ20)
CAVRSLNDYKLSF

SEQ ID NO: 282244 - protein, 15 aa, Homo sapiens
  CDR3 for beta chain variable domain of TCR clone 141122 (TRBV6-3, TRBJ2-7)
CASSSPGTVFYEQYF

SEQ ID NO: 282245 - protein, 11 aa, Homo sapiens
  CDR3 for alpha chain variable domain of TCR clone 141123 (TRAV17, TRAJ31)
FATDRTARLMF

SEQ ID NO: 282246 - protein, 14 aa, Homo sapiens
  CDR3 for beta chain variable domain of TCR clone 141123 (TRBV4-1, TRBJ2-2)
CASSQAVNTGELFF

SEQ ID NO: 282247 - protein, 13 aa, Homo sapiens
  CDR3 for alpha chain variable domain of TCR clone 141124 (TRAV12-3, TRAJ7)
CAMTPYGNNRLAF

SEQ ID NO: 282248 - protein, 15 aa, Homo sapiens
  CDR3 for beta chain variable domain of TCR clone 141124 (TRBV20-1, TRBJ1-4)
CSARPYGGELNEKLF

SEQ ID NO: 282249 - protein, 14 aa, Homo sapiens
  CDR3 for alpha chain variable domain of TCR clone 141125 (TRAV12-1, TRAJ37)
CVVTGSSNTGKLIF

SEQ ID NO: 282250 - protein, 20 aa, Homo sapiens
  CDR3 for beta chain variable domain of TCR clone 141125 (TRBV23-1, TRBJ2-5)
CISAPAVPERVLLIQENQYF

SEQ ID NO: 282251 - protein, 16 aa, Homo sapiens
  CDR3 for alpha chain variable domain of TCR clone 141126 (TRAV2, TRAJ4)
CAVEDRFSGGYNKLIF

SEQ ID NO: 282252 - protein, 15 aa, Homo sapiens
  CDR3 for beta chain variable domain of TCR clone 141126 (TRBV7-9, TRBJ1-2)
CASSSFGDTNYGYTF

SEQ ID NO: 282253 - protein, 13 aa, Homo sapiens
  CDR3 for alpha chain variable domain of TCR clone 141127 (TRAV26-1, TRAJ48)
CIVRVVGDEKLTF

SEQ ID NO: 282254 - protein, 13 aa, Homo sapiens
  CDR3 for beta chain variable domain of TCR clone 141127 (TRBV19, TRBJ2-7)
CASSPRQSYEQYF

SEQ ID NO: 282255 - protein, 17 aa, Homo sapiens
  CDR3 for alpha chain variable domain of TCR clone 141128 (TRAV13-1, TRAJ28)
CAASPPYSGAGSYQLTF

SEQ ID NO: 282256 - protein, 15 aa, Homo sapiens
  CDR3 for beta chain variable domain of TCR clone 141128 (TRBV6-3, TRBJ2-2)
CASSFLAALTGELFF

SEQ ID NO: 282257 - protein, 17 aa, Homo sapiens
  CDR3 for alpha chain variable domain of TCR clone 141129 (TRAV26-1, TRAJ37)
CIVRVITVSSNTGKLIF

SEQ ID NO: 282258 - protein, 14 aa, Homo sapiens
  CDR3 for beta chain variable domain of TCR clone 141129 (TRBV4-1, TRBJ2-3)
CASSQEGSTDTQYF

SEQ ID NO: 282259 - protein, 14 aa, Homo sapiens
  CDR3 for alpha chain variable domain of TCR clone 141130 (TRAV1-2, TRAJ16)
CAVNRFSDGQKLLF

SEQ ID NO: 282260 - protein, 15 aa, Homo sapiens
  CDR3 for beta chain variable domain of TCR clone 141130 (TRBV20-1, TRBJ2-7)
CSDRDRVSGMDEQYI

SEQ ID NO: 282261 - protein, 14 aa, Homo sapiens
  CDR3 for alpha chain variable domain of TCR clone 141131 (TRAV12-3, TRAJ9)
FARSPNTGGFKTIF

SEQ ID NO: 282262 - protein, 12 aa, Homo sapiens
  CDR3 for beta chain variable domain of TCR clone 141131 (TRBV19, TRBJ1-5)
CASSIAQQPQHF

SEQ ID NO: 282263 - protein, 11 aa, Homo sapiens
  CDR3 for alpha chain variable domain of TCR clone 141132 (TRAV1-1, TRAJ20)
CAVFNDYKLSF

SEQ ID NO: 282264 - protein, 15 aa, Homo sapiens
  CDR3 for beta chain variable domain of TCR clone 141132 (TRBV7-2, TRBJ2-1)
CASSSGLAGGNEQLF

SEQ ID NO: 282265 - protein, 12 aa, Homo sapiens
  CDR3 for alpha chain variable domain of TCR clone 141133 (TRAV3, TRAJ39)
CALIKWSNMLTF

SEQ ID NO: 282266 - protein, 14 aa, Homo sapiens
  CDR3 for beta chain variable domain of TCR clone 141133 (TRBV7-8, TRBJ2-3)
CASSCPDGQDTQYF

SEQ ID NO: 282267 - protein, 14 aa, Homo sapiens
  CDR3 for alpha chain variable domain of TCR clone 141134 (TRAV26-1, TRAJ38)
CIADNAGNKRKLIW

SEQ ID NO: 282268 - protein, 13 aa, Homo sapiens
  CDR3 for beta chain variable domain of TCR clone 141134 (TRBV20-1, TRBJ1-1)
CSARGGGSTEAFF

SEQ ID NO: 282269 - protein, 11 aa, Homo sapiens
  CDR3 for alpha chain variable domain of TCR clone 141135 (TRAV2, TRAJ4)
CAVGWYNKLIF

SEQ ID NO: 282270 - protein, 15 aa, Homo sapiens
  CDR3 for beta chain variable domain of TCR clone 141135 (TRBV7-2, TRBJ2-2)
CATSFQRGETGELFF

SEQ ID NO: 282271 - protein, 12 aa, Homo sapiens
  CDR3 for alpha chain variable domain of TCR clone 141136 (TRAV2, TRAJ5)
CALDTGRRALNF

SEQ ID NO: 282272 - protein, 15 aa, Homo sapiens
  CDR3 for beta chain variable domain of TCR clone 141136 (TRBV10-3, TRBJ2-1)
CAISDVQDRAYEQFF

SEQ ID NO: 282273 - protein, 15 aa, Homo sapiens
  CDR3 for alpha chain variable domain of TCR clone 141137 (TRAV16, TRAJ17)
CALSGNKAAGNKLTI

SEQ ID NO: 282274 - protein, 16 aa, Homo sapiens
  CDR3 for beta chain variable domain of TCR clone 141137 (TRBV7-6, TRBJ1-6)
CASSSLPAGEYSPLHF

SEQ ID NO: 282275 - protein, 18 aa, Homo sapiens
  CDR3 for alpha chain variable domain of TCR clone 141138 (TRAV12-3, TRAJ52)
CAMSVGGAGGTSYGKLTF

SEQ ID NO: 282276 - protein, 16 aa, Homo sapiens
  CDR3 for beta chain variable domain of TCR clone 141138 (TRBV2, TRBJ2-3)
CASSTSVEGVTDTQYF

SEQ ID NO: 282277 - protein, 16 aa, Homo sapiens
  CDR3 for alpha chain variable domain of TCR clone 141139 (TRAV3, TRAJ21)
CAVRDIEGGNLNKFYF

SEQ ID NO: 282278 - protein, 13 aa, Homo sapiens
  CDR3 for beta chain variable domain of TCR clone 141139 (TRBV27, TRBJ2-7)
CASSLTTGYEQYF

SEQ ID NO: 282279 - protein, 13 aa, Homo sapiens
  CDR3 for alpha chain variable domain of TCR clone 141140 (TRAV8-2, TRAJ49)
CVVSPSTGNLFYF

SEQ ID NO: 282280 - protein, 14 aa, Homo sapiens
  CDR3 for beta chain variable domain of TCR clone 141140 (TRBV11-2, TRBJ2-7)
CASSRSGGAGEQYF

SEQ ID NO: 282281 - protein, 15 aa, Homo sapiens
  CDR3 for alpha chain variable domain of TCR clone 141141 (TRAV13-1, TRAJ32)
CAASIYGGATNKLIF

SEQ ID NO: 282282 - protein, 14 aa, Homo sapiens
  CDR3 for beta chain variable domain of TCR clone 141141 (TRBV7-9, TRBJ1-1)
CASTPLQSYTEAFF

SEQ ID NO: 282283 - protein, 14 aa, Homo sapiens
  CDR3 for alpha chain variable domain of TCR clone 141142 (TRAV34, TRAJ44)
CGADGTGTASKLTF

SEQ ID NO: 282284 - protein, 15 aa, Homo sapiens
  CDR3 for beta chain variable domain of TCR clone 141142 (TRBV5-1, TRBJ2-1)
CASSPPRAPYKEQFF

SEQ ID NO: 282285 - protein, 13 aa, Homo sapiens
  CDR3 for alpha chain variable domain of TCR clone 141143 (TRAV12-1, TRAJ40)
CVVPTSGTYKYIF

SEQ ID NO: 282286 - protein, 18 aa, Homo sapiens
  CDR3 for beta chain variable domain of TCR clone 141143 (TRBV7-6, TRBJ2-1)
CASSPRTSLMSSYNEQFF

SEQ ID NO: 282287 - protein, 14 aa, Homo sapiens
  CDR3 for alpha chain variable domain of TCR clone 141144 (TRAV8-3, TRAJ4)
CAVGAAGGYSKLFF

SEQ ID NO: 282288 - protein, 17 aa, Homo sapiens
  CDR3 for beta chain variable domain of TCR clone 141144 (TRBV20-1, TRBJ2-2)
CSASGSGQGGLTGELFF

SEQ ID NO: 282289 - protein, 23 aa, Homo sapiens
  CDR3 for alpha chain variable domain of TCR clone 141145 (TRAV26-1, TRAJ38)
CIADNAGNNHIQNPDPAVYQLRD

SEQ ID NO: 282290 - protein, 15 aa, Homo sapiens
  CDR3 for beta chain variable domain of TCR clone 141145 (TRBV20-1, TRBJ1-1)
CSARGGGILKLSLDK

SEQ ID NO: 282291 - protein, 13 aa, Homo sapiens
  CDR3 for alpha chain variable domain of TCR clone 141146 (TRAV12-3, TRAJ5)
CSMIYTGRRALTF

SEQ ID NO: 282292 - protein, 12 aa, Homo sapiens
  CDR3 for beta chain variable domain of TCR clone 141146 (TRBV18, TRBJ1-4)
CASSPSREKLFF

SEQ ID NO: 282293 - protein, 14 aa, Homo sapiens
  CDR3 for alpha chain variable domain of TCR clone 141147 (TRAV1-2, TRAJ8)
CAVREDTGFQKLVF

SEQ ID NO: 282294 - protein, 18 aa, Homo sapiens
  CDR3 for beta chain variable domain of TCR clone 141147 (TRBV11-2, TRBJ2-3)
CVSSLGGASRGAPNTQYF

SEQ ID NO: 282295 - protein, 14 aa, Homo sapiens
  CDR3 for alpha chain variable domain of TCR clone 141148 (TRAV8-1, TRAJ5)
CAVRTDTGRRALTF

SEQ ID NO: 282296 - protein, 13 aa, Homo sapiens
  CDR3 for beta chain variable domain of TCR clone 141148 (TRBV20-1, TRBJ1-1)
CSARGGGNTEAFF

SEQ ID NO: 282297 - protein, 14 aa, Homo sapiens
  CDR3 for alpha chain variable domain of TCR clone 141149 (TRAV1-2, TRAJ8)
CAVREDTGFQKLVF

SEQ ID NO: 282298 - protein, 12 aa, Homo sapiens
  CDR3 for beta chain variable domain of TCR clone 141149 (TRBV7-9, TRBJ1-1)
CASSLGDTEAFF

SEQ ID NO: 282299 - protein, 12 aa, Homo sapiens
  CDR3 for alpha chain variable domain of TCR clone 141150 (TRAV13-1, TRAJ49)
CAASPMCNQFYF

SEQ ID NO: 282300 - protein, 17 aa, Homo sapiens
  CDR3 for beta chain variable domain of TCR clone 141150 (TRBV11-2, TRBJ2-1)
CASSLYPPGVEYNEQFF

SEQ ID NO: 282301 - protein, 14 aa, Homo sapiens
  CDR3 for alpha chain variable domain of TCR clone 141151 (TRAV1-1, TRAJ23)
CAVSIYNQGGKLIF

SEQ ID NO: 282302 - protein, 14 aa, Homo sapiens
  CDR3 for beta chain variable domain of TCR clone 141151 (TRBV2, TRBJ2-1)
CASRTGSSYNEQFF

SEQ ID NO: 282303 - protein, 14 aa, Homo sapiens
  CDR3 for alpha chain variable domain of TCR clone 141152 (TRAV8-2, TRAJ4)
CVVSPSGGYNKLIF

SEQ ID NO: 282304 - protein, 15 aa, Homo sapiens
  CDR3 for beta chain variable domain of TCR clone 141152 (TRBV2, TRBJ2-1)
CASSELAGSYNEQIF

SEQ ID NO: 282305 - protein, 13 aa, Homo sapiens
  CDR3 for alpha chain variable domain of TCR clone 141153 (TRAV12-1, TRAJ39)
CVARSGAGNMLTF

SEQ ID NO: 282306 - protein, 16 aa, Homo sapiens
  CDR3 for beta chain variable domain of TCR clone 141153 (TRBV7-3, TRBJ2-2)
CASSLKRGTLSGELFF

SEQ ID NO: 282307 - protein, 14 aa, Homo sapiens
  CDR3 for alpha chain variable domain of TCR clone 141154 (TRAV12-2, TRAJ53)
CAVKGGGSNYKLTF

SEQ ID NO: 282308 - protein, 14 aa, Homo sapiens
  CDR3 for beta chain variable domain of TCR clone 141154 (TRBV7-7, TRBJ2-2)
CATHQDSDTGELFF

SEQ ID NO: 282309 - protein, 16 aa, Homo sapiens
  CDR3 for alpha chain variable domain of TCR clone 141155 (TRAV3, TRAJ10)
FAVRDMRAGGGNKLTF

SEQ ID NO: 282310 - protein, 14 aa, Homo sapiens
  CDR3 for beta chain variable domain of TCR clone 141155 (TRBV5-1, TRBJ1-1)
CASSFTGRNTEAFF

SEQ ID NO: 282311 - protein, 15 aa, Homo sapiens
  CDR3 for alpha chain variable domain of TCR clone 141156 (TRAV12-2, TRAJ56)
CAVNPFTGANSKLTF

SEQ ID NO: 282312 - protein, 13 aa, Homo sapiens
  CDR3 for beta chain variable domain of TCR clone 141156 (TRBV20-1, TRBJ1-2)
CSAGDRVYGGYTL

SEQ ID NO: 282313 - protein, 11 aa, Homo sapiens
  CDR3 for alpha chain variable domain of TCR clone 141157 (TRAV3, TRAJ21)
CAVGNFNKFYF

SEQ ID NO: 282314 - protein, 15 aa, Homo sapiens
  CDR3 for beta chain variable domain of TCR clone 141157 (TRBV5-1, TRBJ2-3)
CASSVTAGSTDTQYF

SEQ ID NO: 282315 - protein, 16 aa, Homo sapiens
  CDR3 for alpha chain variable domain of TCR clone 141158 (TRAV3, TRAJ21)
CAVRDIERGNFNKFYF

SEQ ID NO: 282316 - protein, 15 aa, Homo sapiens
  CDR3 for beta chain variable domain of TCR clone 141158 (TRBV10-2, TRBJ2-6)
CASSEQGTGANVLTF

SEQ ID NO: 282317 - protein, 12 aa, Homo sapiens
  CDR3 for alpha chain variable domain of TCR clone 141159 (TRAV3, TRAJ39)
CAVIEWSNMLTF

SEQ ID NO: 282318 - protein, 14 aa, Homo sapiens
  CDR3 for beta chain variable domain of TCR clone 141159 (TRBV20-1, TRBJ1-1)
CSAQTRIGGTEAFF

SEQ ID NO: 282319 - protein, 13 aa, Homo sapiens
  CDR3 for alpha chain variable domain of TCR clone 141160 (TRAV8-6, TRAJ24)
CAVSPDSWGKLQF

SEQ ID NO: 282320 - protein, 15 aa, Homo sapiens
  CDR3 for beta chain variable domain of TCR clone 141160 (TRBV5-1, TRBJ2-1)
CASSPPRAPYNEQFF

SEQ ID NO: 282321 - protein, 11 aa, Homo sapiens
  CDR3 for alpha chain variable domain of TCR clone 141161 (TRAV21, TRAJ23)
CAPQRRGKLIF

SEQ ID NO: 282322 - protein, 13 aa, Homo sapiens
  CDR3 for beta chain variable domain of TCR clone 141161 (TRBV4-1, TRBJ2-5)
CASSLTRGETQYF

SEQ ID NO: 282323 - protein, 12 aa, Homo sapiens
  CDR3 for alpha chain variable domain of TCR clone 141162 (TRAV12-3, TRAJ17)
CAMTLTGNKLTF

SEQ ID NO: 282324 - protein, 13 aa, Homo sapiens
  CDR3 for beta chain variable domain of TCR clone 141162 (TRBV27, TRBJ2-1)
CASRTLGVCEQFF

SEQ ID NO: 282325 - protein, 14 aa, Homo sapiens
  CDR3 for alpha chain variable domain of TCR clone 141163 (TRAV8-3, TRAJ4)
CAVGAAGGYNKLIF

SEQ ID NO: 282326 - protein, 13 aa, Homo sapiens
  CDR3 for beta chain variable domain of TCR clone 141163 (TRBV6-5, TRBJ2-1)
CASSYDAERVMSS

SEQ ID NO: 282327 - protein, 12 aa, Homo sapiens
  CDR3 for alpha chain variable domain of TCR clone 141164 (TRAV4, TRAJ26)
CLVGDYGQNFVF

SEQ ID NO: 282328 - protein, 15 aa, Homo sapiens
  CDR3 for beta chain variable domain of TCR clone 141164 (TRBV7-9, TRBJ1-6)
CASSSPGRGNSPLHF

SEQ ID NO: 282329 - protein, 18 aa, Homo sapiens
  CDR3 for alpha chain variable domain of TCR clone 141165 (TRAV13-1, TRAJ52)
CAAKNPNAGGTSHGKLTF

SEQ ID NO: 282330 - protein, 14 aa, Homo sapiens
  CDR3 for beta chain variable domain of TCR clone 141165 (TRBV7-3, TRBJ2-1)
CASSLAGGTNEQFF

SEQ ID NO: 282331 - protein, 15 aa, Homo sapiens
  CDR3 for alpha chain variable domain of TCR clone 141166 (TRAV29/DV5, TRAJ29)
CAATESSSGNTPLVF

SEQ ID NO: 282332 - protein, 17 aa, Homo sapiens
  CDR3 for beta chain variable domain of TCR clone 141166 (TRBV4-1, TRBJ1-4)
CASSQEGPRGVEEKLFF

SEQ ID NO: 282333 - protein, 14 aa, Homo sapiens
  CDR3 for alpha chain variable domain of TCR clone 141167 (TRAV12-2, TRAJ40)
CAVKIPSGSYKYIF

SEQ ID NO: 282334 - protein, 11 aa, Homo sapiens
  CDR3 for beta chain variable domain of TCR clone 141167 (TRBV19, TRBJ1-1)
CASSIGSEAFF

SEQ ID NO: 282335 - protein, 14 aa, Homo sapiens
  CDR3 for alpha chain variable domain of TCR clone 141168 (TRAV8-3, TRAJ37)
CAVGSSGNTGKLIF

SEQ ID NO: 282336 - protein, 16 aa, Homo sapiens
  CDR3 for beta chain variable domain of TCR clone 141168 (TRBV4-1, TRBJ2-5)
CASSSGLAGVLGTQYF

SEQ ID NO: 282337 - protein, 12 aa, Homo sapiens
  CDR3 for alpha chain variable domain of TCR clone 141169 (TRAV13-1, TRAJ34)
CAASKGTDKLIF

SEQ ID NO: 282338 - protein, 16 aa, Homo sapiens
  CDR3 for beta chain variable domain of TCR clone 141169 (TRBV7-3, TRBJ2-2)
CASSLKRGTLSGELFF

SEQ ID NO: 282339 - protein, 17 aa, Homo sapiens
  CDR3 for alpha chain variable domain of TCR clone 141170 (TRAV4, )
CLVDIQNPDPAMYQLRD

SEQ ID NO: 282340 - protein, 12 aa, Homo sapiens
  CDR3 for beta chain variable domain of TCR clone 141170 (TRBV6-1, TRBJ2-7)
CASSDYSYEQYF

SEQ ID NO: 282341 - protein, 16 aa, Homo sapiens
  CDR3 for alpha chain variable domain of TCR clone 141171 (TRAV12-3, TRAJ53)
CAMSPGSGGSNCKLPF

SEQ ID NO: 282342 - protein, 16 aa, Homo sapiens
  CDR3 for beta chain variable domain of TCR clone 141171 (TRBV4-2, TRBJ1-1)
CASSQAGFGMNTEAFF

SEQ ID NO: 282343 - protein, 18 aa, Homo sapiens
  CDR3 for alpha chain variable domain of TCR clone 141172 (TRAV13-1, TRAJ52)
CAAKNPNAGGTSYGKLTF

SEQ ID NO: 282344 - protein, 15 aa, Homo sapiens
  CDR3 for beta chain variable domain of TCR clone 141172 (TRBV28, TRBJ2-1)
CASSIIAGGRSEQCF

SEQ ID NO: 282345 - protein, 23 aa, Homo sapiens
  CDR3 for alpha chain variable domain of TCR clone 141173 (TRAV8-3, TRAJ38)
CAVGASNAGNNHIQNPDPAWYQL

SEQ ID NO: 282346 - protein, 15 aa, Homo sapiens
  CDR3 for beta chain variable domain of TCR clone 141173 (TRBV11-3, TRBJ1-3)
CASSLFGPSGNTIYF

SEQ ID NO: 282347 - protein, 21 aa, Homo sapiens
  CDR3 for alpha chain variable domain of TCR clone 141174 (TRAV12-1, TRAJ32)
SSVIQPPTSMNYGGAKNKLIF

SEQ ID NO: 282348 - protein, 18 aa, Homo sapiens
  CDR3 for beta chain variable domain of TCR clone 141174 (TRBV20-1, TRBJ2-3)
CSASGLAGGPGTTDTQYF

SEQ ID NO: 282349 - protein, 14 aa, Homo sapiens
  CDR3 for alpha chain variable domain of TCR clone 141175 (TRAV38-1, TRAJ39)
CAFAYNNAGNMLTF

SEQ ID NO: 282350 - protein, 15 aa, Homo sapiens
  CDR3 for beta chain variable domain of TCR clone 141175 (TRBV19, TRBJ2-6)
CASSIGPSGENVLTF

SEQ ID NO: 282351 - protein, 18 aa, Homo sapiens
  CDR3 for alpha chain variable domain of TCR clone 141176 (TRAV26-2, TRAJ54)
CILRDVEVGIQGAQKLVF

SEQ ID NO: 282352 - protein, 12 aa, Homo sapiens
  CDR3 for beta chain variable domain of TCR clone 141176 (TRBV7-9, TRBJ1-4)
CASSTDREKLFF

SEQ ID NO: 282353 - protein, 15 aa, Homo sapiens
  CDR3 for alpha chain variable domain of TCR clone 141177 (TRAV8-3, TRAJ45)
CASSYSGGGADGLTF

SEQ ID NO: 282354 - protein, 13 aa, Homo sapiens
  CDR3 for beta chain variable domain of TCR clone 141177 (TRBV20-1, TRBJ1-1)
CSAFDKENTEAVF

SEQ ID NO: 282355 - protein, 11 aa, Homo sapiens
  CDR3 for alpha chain variable domain of TCR clone 141178 (TRAV35, TRAJ30)
CAGERDDEIIF

SEQ ID NO: 282356 - protein, 14 aa, Homo sapiens
  CDR3 for beta chain variable domain of TCR clone 141178 (TRBV15, TRBJ2-5)
CATSGDRGQETQYF

SEQ ID NO: 282357 - protein, 12 aa, Homo sapiens
  CDR3 for alpha chain variable domain of TCR clone 141179 (TRAV12-3, TRAJ17)
CAMTLTGNKLTF

SEQ ID NO: 282358 - protein, 15 aa, Homo sapiens
  CDR3 for beta chain variable domain of TCR clone 141179 (TRBV5-1, TRBJ2-3)
CASSSTSGSTDTQYF

SEQ ID NO: 282359 - protein, 17 aa, Homo sapiens
  CDR3 for alpha chain variable domain of TCR clone 141180 (TRAV12-3, TRAJ18)
CAMIRADRGSTLGRLYF

SEQ ID NO: 282360 - protein, 14 aa, Homo sapiens
  CDR3 for beta chain variable domain of TCR clone 141180 (TRBV5-7, TRBJ1-6)
CASTPWPADSTRLF

SEQ ID NO: 282361 - protein, 12 aa, Homo sapiens
  CDR3 for alpha chain variable domain of TCR clone 141181 (TRAV13-1, TRAJ3)
CAATGVQQCFQD

SEQ ID NO: 282362 - protein, 16 aa, Homo sapiens
  CDR3 for beta chain variable domain of TCR clone 141181 (TRBV7-3, TRBJ2-2)
CASSVKRGTLSGELFF

SEQ ID NO: 282363 - protein, 14 aa, Homo sapiens
  CDR3 for alpha chain variable domain of TCR clone 141182 (TRAV34, TRAJ44)
CGADGTGTASKLTF

SEQ ID NO: 282364 - protein, 17 aa, Homo sapiens
  CDR3 for beta chain variable domain of TCR clone 141182 (TRBV28, TRBJ2-5)
CASGRQGGLAGAETQYF

SEQ ID NO: 282365 - protein, 10 aa, Homo sapiens
  CDR3 for alpha chain variable domain of TCR clone 141183 (TRAV1-2, TRAJ31)
CAFFDARLMF

SEQ ID NO: 282366 - protein, 13 aa, Homo sapiens
  CDR3 for beta chain variable domain of TCR clone 141183 (TRBV7-9, TRBJ1-2)
CASSLKQNYGDTF

SEQ ID NO: 282367 - protein, 16 aa, Homo sapiens
  CDR3 for alpha chain variable domain of TCR clone 141184 (TRAV20, TRAJ52)
CAVLPDGGTSYGRLTF

SEQ ID NO: 282368 - protein, 12 aa, Homo sapiens
  CDR3 for beta chain variable domain of TCR clone 141184 (TRBV19, TRBJ2-1)
CASSQISNEQFF

SEQ ID NO: 282369 - protein, 12 aa, Homo sapiens
  CDR3 for alpha chain variable domain of TCR clone 141185 (TRAV13-1, TRAJ49)
CAAPNTGNQFYF

SEQ ID NO: 282370 - protein, 17 aa, Homo sapiens
  CDR3 for beta chain variable domain of TCR clone 141185 (TRBV25-1, TRBJ2-7)
CASSDARVVFSPYEQYF

SEQ ID NO: 282371 - protein, 11 aa, Homo sapiens
  CDR3 for alpha chain variable domain of TCR clone 141186 (TRAV1-1, TRAJ23)
CAVRQGGKLIF

SEQ ID NO: 282372 - protein, 14 aa, Homo sapiens
  CDR3 for beta chain variable domain of TCR clone 141186 (TRBV15, TRBJ2-5)
CATSRGLAVETQYF

SEQ ID NO: 282373 - protein, 12 aa, Homo sapiens
  CDR3 for alpha chain variable domain of TCR clone 141187 (TRAV12-2, TRAJ21)
CAPSDNFSKFYF

SEQ ID NO: 282374 - protein, 14 aa, Homo sapiens
  CDR3 for beta chain variable domain of TCR clone 141187 (TRBV12-4, TRBJ1-1)
CASSLRSSGTEAFF

SEQ ID NO: 282375 - protein, 16 aa, Homo sapiens
  CDR3 for alpha chain variable domain of TCR clone 141188 (TRAV30, TRAJ24)
CGTEIVDAESWGKFQF

SEQ ID NO: 282376 - protein, 14 aa, Homo sapiens
  CDR3 for beta chain variable domain of TCR clone 141188 (TRBV2, TRBJ2-1)
CASSVGRSGNEQFF

SEQ ID NO: 282377 - protein, 11 aa, Homo sapiens
  CDR3 for alpha chain variable domain of TCR clone 141189 (TRAV21, TRAJ34)
CAVTNTDKLIF

SEQ ID NO: 282378 - protein, 17 aa, Homo sapiens
  CDR3 for beta chain variable domain of TCR clone 141189 (TRBV20-1, TRBJ2-2)
CSASGSGRGGLTGELFF

SEQ ID NO: 282379 - protein, 20 aa, Homo sapiens
  CDR3 for alpha chain variable domain of TCR clone 141190 (TRAV4, TRAJ37)
CCVLLPRGWFGSSNTGKLIF

SEQ ID NO: 282380 - protein, 15 aa, Homo sapiens
  CDR3 for beta chain variable domain of TCR clone 141190 (TRBV12-4, TRBJ2-3)
CASSLAERPTDTQYF

SEQ ID NO: 282381 - protein, 12 aa, Homo sapiens
  CDR3 for alpha chain variable domain of TCR clone 141191 (TRAV8-3, TRAJ26)
CAGDNYGQNFVF

SEQ ID NO: 282382 - protein, 11 aa, Homo sapiens
  CDR3 for beta chain variable domain of TCR clone 141191 (TRBV7-9, TRBJ2-3)
CASSGPDTQYF

SEQ ID NO: 282383 - protein, 13 aa, Homo sapiens
  CDR3 for alpha chain variable domain of TCR clone 141192 (TRAV16, TRAJ58)
CALSIPSGSRLTF

SEQ ID NO: 282384 - protein, 14 aa, Homo sapiens
  CDR3 for beta chain variable domain of TCR clone 141192 (TRBV6-5, TRBJ2-7)
CASSPHRGMREQYF

SEQ ID NO: 282385 - protein, 12 aa, Homo sapiens
  CDR3 for alpha chain variable domain of TCR clone 141193 (TRAV27, TRAJ35)
CAGADFGNVLHC

SEQ ID NO: 282386 - protein, 16 aa, Homo sapiens
  CDR3 for beta chain variable domain of TCR clone 141193 (TRBV6-4, TRBJ1-2)
CASSEAVGDPNYGYTF

SEQ ID NO: 282387 - protein, 11 aa, Homo sapiens
  CDR3 for alpha chain variable domain of TCR clone 141194 (TRAV17, TRAJ43)
CATPRSNDMRF

SEQ ID NO: 282388 - protein, 14 aa, Homo sapiens
  CDR3 for beta chain variable domain of TCR clone 141194 (TRBV20-1, TRBJ1-1)
CSAQTRIGGTAAFF

SEQ ID NO: 282389 - protein, 11 aa, Homo sapiens
  CDR3 for alpha chain variable domain of TCR clone 141195 (TRAV12-1, TRAJ34)
CVVNKGRELIF

SEQ ID NO: 282390 - protein, 18 aa, Homo sapiens
  CDR3 for beta chain variable domain of TCR clone 141195 (TRBV4-2, TRBJ2-6)
CASSQLQGVLTGANVLTF

SEQ ID NO: 282391 - protein, 14 aa, Homo sapiens
  CDR3 for alpha chain variable domain of TCR clone 141196 (TRAV29/DV5, TRAJ36)
CAARRKTGANNLFF

SEQ ID NO: 282392 - protein, 15 aa, Homo sapiens
  CDR3 for beta chain variable domain of TCR clone 141196 (TRBV7-9, TRBJ1-4)
CASSATGGNNEKLFF

SEQ ID NO: 282393 - protein, 17 aa, Homo sapiens
  CDR3 for alpha chain variable domain of TCR clone 141197 (TRAV4, TRAJ18)
CLVGERSVGSTLGRLYF

SEQ ID NO: 282394 - protein, 14 aa, Homo sapiens
  CDR3 for beta chain variable domain of TCR clone 141197 (TRBV6-5, TRBJ1-2)
CASSYDGAGGGVTV

SEQ ID NO: 282395 - protein, 17 aa, Homo sapiens
  CDR3 for alpha chain variable domain of TCR clone 141198 (TRAV27, TRAJ26)
CAGARAPLDNYGQNFVF

SEQ ID NO: 282396 - protein, 15 aa, Homo sapiens
  CDR3 for beta chain variable domain of TCR clone 141198 (TRBV11-2, TRBJ2-5)
CASSPRSAGLETQYF

SEQ ID NO: 282397 - protein, 14 aa, Homo sapiens
  CDR3 for alpha chain variable domain of TCR clone 141199 (TRAV16, TRAJ37)
CALDISGNTGKLIF

SEQ ID NO: 282398 - protein, 12 aa, Homo sapiens
  CDR3 for beta chain variable domain of TCR clone 141199 (TRBV5-4, TRBJ2-7)
CASSWAGQGENF

SEQ ID NO: 282399 - protein, 13 aa, Homo sapiens
  CDR3 for alpha chain variable domain of TCR clone 141200 (TRAV2, TRAJ15)
CAVASQAGTALIF

SEQ ID NO: 282400 - protein, 16 aa, Homo sapiens
  CDR3 for beta chain variable domain of TCR clone 141200 (TRBV5-1, TRBJ1-1)
CAGSSGGNFLNTEAFF

SEQ ID NO: 282401 - protein, 16 aa, Homo sapiens
  CDR3 for alpha chain variable domain of TCR clone 141201 (TRAV30, TRAJ24)
CGTEIVDADSWGKFQL

SEQ ID NO: 282402 - protein, 14 aa, Homo sapiens
  CDR3 for beta chain variable domain of TCR clone 141201 (TRBV7-2, TRBJ1-2)
CASSQTGSTYGYTF

SEQ ID NO: 282403 - protein, 15 aa, Homo sapiens
  CDR3 for alpha chain variable domain of TCR clone 141202 (TRAV21, TRAJ53)
CATLNSGGSNYKLTF

SEQ ID NO: 282404 - protein, 12 aa, Homo sapiens
  CDR3 for beta chain variable domain of TCR clone 141202 (TRBV5-4, TRBJ2-5)
CASSSTRETQYF

SEQ ID NO: 282405 - protein, 15 aa, Homo sapiens
  CDR3 for alpha chain variable domain of TCR clone 141203 (TRAV21, TRAJ53)
CATLNSGGSNYKLTF

SEQ ID NO: 282406 - protein, 11 aa, Homo sapiens
  CDR3 for beta chain variable domain of TCR clone 141203 (TRBV7-8, TRBJ2-7)
CASSLSLEQYF

SEQ ID NO: 282407 - protein, 16 aa, Homo sapiens
  CDR3 for alpha chain variable domain of TCR clone 141204 (TRAV3, TRAJ10)
CAVRDMRAGGGNKLTF

SEQ ID NO: 282408 - protein, 17 aa, Homo sapiens
  CDR3 for beta chain variable domain of TCR clone 141204 (TRBV28, TRBJ2-5)
RASSTPEGDALQETQYF

SEQ ID NO: 282409 - protein, 13 aa, Homo sapiens
  CDR3 for alpha chain variable domain of TCR clone 141205 (TRAV2, TRAJ40)
CAVVTSGTYKYIF

SEQ ID NO: 282410 - protein, 16 aa, Homo sapiens
  CDR3 for beta chain variable domain of TCR clone 141205 (TRBV19, TRBJ2-1)
CASSRAGPSSYNEQFF

SEQ ID NO: 282411 - protein, 14 aa, Homo sapiens
  CDR3 for alpha chain variable domain of TCR clone 141206 (TRAV17, TRAJ15)
CATTTNQAGTALIF

SEQ ID NO: 282412 - protein, 15 aa, Homo sapiens
  CDR3 for beta chain variable domain of TCR clone 141206 (TRBV19, TRBJ1-2)
CASNLGGETPYGYTF

SEQ ID NO: 282413 - protein, 17 aa, Homo sapiens
  CDR3 for alpha chain variable domain of TCR clone 141207 (TRAV26-1, TRAJ53)
CIVRVDDSGGSNYKLTF

SEQ ID NO: 282414 - protein, 16 aa, Homo sapiens
  CDR3 for beta chain variable domain of TCR clone 141207 (TRBV14, TRBJ1-5)
CASSLSRVHSNQPQHF

SEQ ID NO: 282415 - protein, 14 aa, Homo sapiens
  CDR3 for alpha chain variable domain of TCR clone 141208 (TRAV13-1, TRAJ40)
CAASMTSGTYKYIF

SEQ ID NO: 282416 - protein, 13 aa, Homo sapiens
  CDR3 for beta chain variable domain of TCR clone 141208 (TRBV19, TRBJ1-2)
CASSVPGQDGYTF

SEQ ID NO: 282417 - protein, 13 aa, Homo sapiens
  CDR3 for alpha chain variable domain of TCR clone 141209 (TRAV1-1, TRAJ9)
CAAKNTGGFKTNF

SEQ ID NO: 282418 - protein, 14 aa, Homo sapiens
  CDR3 for beta chain variable domain of TCR clone 141209 (TRBV20-1, TRBJ2-1)
CSAQIGGSANEQLF

SEQ ID NO: 282419 - protein, 13 aa, Homo sapiens
  CDR3 for alpha chain variable domain of TCR clone 141210 (TRAV2, TRAJ15)
CAVASQAGTALIF

SEQ ID NO: 282420 - protein, 16 aa, Homo sapiens
  CDR3 for beta chain variable domain of TCR clone 141210 (TRBV5-1, TRBJ1-1)
CASISGGNSLNTEAFF

SEQ ID NO: 282421 - protein, 14 aa, Homo sapiens
  CDR3 for alpha chain variable domain of TCR clone 141211 (TRAV1-2, TRAJ28)
CVARSGAGSYQLTF

SEQ ID NO: 282422 - protein, 16 aa, Homo sapiens
  CDR3 for beta chain variable domain of TCR clone 141211 (TRBV5-1, TRBJ2-5)
CASSLRRSSGQETQYF

SEQ ID NO: 282423 - protein, 11 aa, Homo sapiens
  CDR3 for alpha chain variable domain of TCR clone 141212 (TRAV2, TRAJ23)
CAVETRGTLIF

SEQ ID NO: 282424 - protein, 14 aa, Homo sapiens
  CDR3 for beta chain variable domain of TCR clone 141212 (TRBV2, TRBJ2-3)
CASSGGQNTDTQYF

SEQ ID NO: 282425 - protein, 17 aa, Homo sapiens
  CDR3 for alpha chain variable domain of TCR clone 141213 (TRAV13-1, TRAJ52)
CAASSGSGGTIYGKLTF

SEQ ID NO: 282426 - protein, 15 aa, Homo sapiens
  CDR3 for beta chain variable domain of TCR clone 141213 (TRBV2, TRBJ2-1)
CASSKLAGSYNEQFF

SEQ ID NO: 282427 - protein, 13 aa, Homo sapiens
  CDR3 for alpha chain variable domain of TCR clone 141214 (TRAV21, TRAJ57)
CAVIEGGSEKLVF

SEQ ID NO: 282428 - protein, 13 aa, Homo sapiens
  CDR3 for beta chain variable domain of TCR clone 141214 (TRBV4-1, TRBJ2-2)
CASSQENTGELFF

SEQ ID NO: 282429 - protein, 15 aa, Homo sapiens
  CDR3 for alpha chain variable domain of TCR clone 141215 (TRAV26-1, TRAJ22)
CIVRVSFWFCKATDL

SEQ ID NO: 282430 - protein, 13 aa, Homo sapiens
  CDR3 for beta chain variable domain of TCR clone 141215 (TRBV11-2, TRBJ2-7)
CASSGTRPYEQYF

SEQ ID NO: 282431 - protein, 16 aa, Homo sapiens
  CDR3 for alpha chain variable domain of TCR clone 141216 (TRAV1-2, TRAJ10)
CAVRGVLTGGGNKLTF

SEQ ID NO: 282432 - protein, 15 aa, Homo sapiens
  CDR3 for beta chain variable domain of TCR clone 141216 (TRBV6-1, TRBJ2-2)
CASSRLRGNTGELFF

SEQ ID NO: 282433 - protein, 11 aa, Homo sapiens
  CDR3 for alpha chain variable domain of TCR clone 141217 (TRAV21, TRAJ11)
CAVNGYSTLTF

SEQ ID NO: 282434 - protein, 16 aa, Homo sapiens
  CDR3 for beta chain variable domain of TCR clone 141217 (TRBV29-1, TRBJ2-7)
CSVEDAEDGTAYEQYF

SEQ ID NO: 282435 - protein, 15 aa, Homo sapiens
  CDR3 for alpha chain variable domain of TCR clone 141218 (TRAV8-3, TRAJ11)
CAVGLLNPGDSTLTF

SEQ ID NO: 282436 - protein, 15 aa, Homo sapiens
  CDR3 for beta chain variable domain of TCR clone 141218 (TRBV13, TRBJ2-1)
CASSLLSGLNNEQFF

SEQ ID NO: 282437 - protein, 16 aa, Homo sapiens
  CDR3 for alpha chain variable domain of TCR clone 141219 (TRAV1-2, TRAJ16)
CAVTGFQMARSCSLQG

SEQ ID NO: 282438 - protein, 14 aa, Homo sapiens
  CDR3 for beta chain variable domain of TCR clone 141219 (TRBV19, TRBJ2-3)
CASSIRLAGDTQYF

SEQ ID NO: 282439 - protein, 16 aa, Homo sapiens
  CDR3 for alpha chain variable domain of TCR clone 141220 (TRAV12-3, TRAJ53)
CAMSPGSGGSSYKLTF

SEQ ID NO: 282440 - protein, 16 aa, Homo sapiens
  CDR3 for beta chain variable domain of TCR clone 141220 (TRBV4-2, TRBJ1-1)
CASSQAGCGMNTEAFF

SEQ ID NO: 282441 - protein, 14 aa, Homo sapiens
  CDR3 for alpha chain variable domain of TCR clone 141221 (TRAV12-2, TRAJ13)
CAVQKTGGYQKVTF

SEQ ID NO: 282442 - protein, 16 aa, Homo sapiens
  CDR3 for beta chain variable domain of TCR clone 141221 (TRBV20-1, TRBJ1-4)
CSAPGQGLLTNEKLFF

SEQ ID NO: 282443 - protein, 23 aa, Homo sapiens
  CDR3 for alpha chain variable domain of TCR clone 141222 (TRAV26-1, TRAJ38)
CIVRPLNAGNNHVQNPDPAVYQL

SEQ ID NO: 282444 - protein, 13 aa, Homo sapiens
  CDR3 for beta chain variable domain of TCR clone 141222 (TRBV18, TRBJ1-1)
CASSPNGDTEAFF

SEQ ID NO: 282445 - protein, 14 aa, Homo sapiens
  CDR3 for alpha chain variable domain of TCR clone 141223 (TRAV1-2, TRAJ16)
CAVRSASDGQKLLF

SEQ ID NO: 282446 - protein, 13 aa, Homo sapiens
  CDR3 for beta chain variable domain of TCR clone 141223 (TRBV6-3, TRBJ1-4)
CASSPGPGEKLFC

SEQ ID NO: 282447 - protein, 14 aa, Homo sapiens
  CDR3 for alpha chain variable domain of TCR clone 141224 (TRAV13-2, TRAJ22)
CADGTLGSARQLTF

SEQ ID NO: 282448 - protein, 15 aa, Homo sapiens
  CDR3 for beta chain variable domain of TCR clone 141224 (TRBV2, TRBJ2-3)
CASSDFEKATDTQYF

SEQ ID NO: 282449 - protein, 13 aa, Homo sapiens
  CDR3 for alpha chain variable domain of TCR clone 141225 (TRAV23/DV6, TRAJ22)
CASRAGSARQLTF

SEQ ID NO: 282450 - protein, 13 aa, Homo sapiens
  CDR3 for beta chain variable domain of TCR clone 141225 (TRBV7-3, TRBJ1-1)
CASSQDWGAEAFF

SEQ ID NO: 282451 - protein, 15 aa, Homo sapiens
  CDR3 for alpha chain variable domain of TCR clone 141226 (TRAV12-1, TRAJ4)
CVVNPFSGGYNKLLF

SEQ ID NO: 282452 - protein, 13 aa, Homo sapiens
  CDR3 for beta chain variable domain of TCR clone 141226 (TRBV20-1, TRBJ1-2)
CSARGTADYGYAF

SEQ ID NO: 282453 - protein, 14 aa, Homo sapiens
  CDR3 for alpha chain variable domain of TCR clone 141227 (TRAV9-2, TRAJ39)
CALYIYNAGNMLTF

SEQ ID NO: 282454 - protein, 15 aa, Homo sapiens
  CDR3 for beta chain variable domain of TCR clone 141227 (TRBV10-3, TRBJ2-1)
CATNGGPGQGDEQFF

SEQ ID NO: 282455 - protein, 13 aa, Homo sapiens
  CDR3 for alpha chain variable domain of TCR clone 141228 (TRAV12-3, TRAJ5)
CALIYTGRRALTF

SEQ ID NO: 282456 - protein, 12 aa, Homo sapiens
  CDR3 for beta chain variable domain of TCR clone 141228 (TRBV18, TRBJ1-4)
CASSPSREKLFF

SEQ ID NO: 282457 - protein, 12 aa, Homo sapiens
  CDR3 for alpha chain variable domain of TCR clone 141229 (TRAV13-2, TRAJ39)
CAESREGNMPTF

SEQ ID NO: 282458 - protein, 15 aa, Homo sapiens
  CDR3 for beta chain variable domain of TCR clone 141229 (TRBV10-2, TRBJ2-6)
CASSEQGTGANVLTF

SEQ ID NO: 282459 - protein, 15 aa, Homo sapiens
  CDR3 for alpha chain variable domain of TCR clone 141230 (TRAV8-4, TRAJ37)
CAVSRGSGNTGKLIF

SEQ ID NO: 282460 - protein, 15 aa, Homo sapiens
  CDR3 for beta chain variable domain of TCR clone 141230 (TRBV5-1, TRBJ2-7)
CASSLDLTSSYVQYF

SEQ ID NO: 282461 - protein, 16 aa, Homo sapiens
  CDR3 for alpha chain variable domain of TCR clone 141231 (TRAV23/DV6, TRAJ9)
CAASIGGNTGGFKTIF

SEQ ID NO: 282462 - protein, 12 aa, Homo sapiens
  CDR3 for beta chain variable domain of TCR clone 141231 (TRBV18, TRBJ2-1)
CASSSDEDEQFF

SEQ ID NO: 282463 - protein, 20 aa, Homo sapiens
  CDR3 for alpha chain variable domain of TCR clone 141232 (TRAV13-1, )
CAASPMDIQNPDPAVYQLRD

SEQ ID NO: 282464 - protein, 13 aa, Homo sapiens
  CDR3 for beta chain variable domain of TCR clone 141232 (TRBV20-1, TRBJ2-2)
CSASAAGPGELFF

SEQ ID NO: 282465 - protein, 21 aa, Homo sapiens
  CDR3 for alpha chain variable domain of TCR clone 141233 (TRAV3, TRAJ26)
CAVVRILSLVPEPDCPCCPIS

SEQ ID NO: 282466 - protein, 15 aa, Homo sapiens
  CDR3 for beta chain variable domain of TCR clone 141233 (TRBV6-6, TRBJ2-7)
CASSYSYGGSYEQYF

SEQ ID NO: 282467 - protein, 11 aa, Homo sapiens
  CDR3 for alpha chain variable domain of TCR clone 141234 (TRAV21, TRAJ48)
CAVDGNEKLTF

SEQ ID NO: 282468 - protein, 14 aa, Homo sapiens
  CDR3 for beta chain variable domain of TCR clone 141234 (TRBV28, TRBJ1-2)
CASRIQGANYGYTF

SEQ ID NO: 282469 - protein, 12 aa, Homo sapiens
  CDR3 for alpha chain variable domain of TCR clone 141235 (TRAV12-1, TRAJ38)
CVVPAGNNRKLI

SEQ ID NO: 282470 - protein, 17 aa, Homo sapiens
  CDR3 for beta chain variable domain of TCR clone 141235 (TRBV4-1, TRBJ2-3)
CASSQSATGGPVDTQYF

SEQ ID NO: 282471 - protein, 16 aa, Homo sapiens
  CDR3 for alpha chain variable domain of TCR clone 141236 (TRAV3, TRAJ10)
CAVRDMRAGGGNKLTF

SEQ ID NO: 282472 - protein, 14 aa, Homo sapiens
  CDR3 for beta chain variable domain of TCR clone 141236 (TRBV25-1, TRBJ1-1)
CASTHLGGNTDAFF

SEQ ID NO: 282473 - protein, 12 aa, Homo sapiens
  CDR3 for alpha chain variable domain of TCR clone 141237 (TRAV17, TRAJ4)
CATDGGYNKLIF

SEQ ID NO: 282474 - protein, 16 aa, Homo sapiens
  CDR3 for beta chain variable domain of TCR clone 141237 (TRBV10-3, TRBJ2-7)
CAISADFADRPYEQYF

SEQ ID NO: 282475 - protein, 17 aa, Homo sapiens
  CDR3 for alpha chain variable domain of TCR clone 141238 (TRAV3, TRAJ6)
CAVRDGPRAGGSYIPTF

SEQ ID NO: 282476 - protein, 17 aa, Homo sapiens
  CDR3 for beta chain variable domain of TCR clone 141238 (TRBV7-2, TRBJ2-7)
CASSLEAIAGGSYEQYF

SEQ ID NO: 282477 - protein, 17 aa, Homo sapiens
  CDR3 for alpha chain variable domain of TCR clone 141239 (TRAV23/DV6, TRAJ12)
CAAIDLGAMDSSYKLIF

SEQ ID NO: 282478 - protein, 14 aa, Homo sapiens
  CDR3 for beta chain variable domain of TCR clone 141239 (TRBV20-1, TRBJ2-1)
CGARRGGSYNEQFF

SEQ ID NO: 282479 - protein, 16 aa, Homo sapiens
  CDR3 for alpha chain variable domain of TCR clone 141240 (TRAV14/DV4, TRAJ21)
CAMREGPENKFNKFYF

SEQ ID NO: 282480 - protein, 12 aa, Homo sapiens
  CDR3 for beta chain variable domain of TCR clone 141240 (TRBV29-1, TRBJ2-2)
CSVDKYTGELFF

SEQ ID NO: 282481 - protein, 17 aa, Homo sapiens
  CDR3 for alpha chain variable domain of TCR clone 141241 (TRAV17, TRAJ4)
CFLLLCYEVCGYNKLIF

SEQ ID NO: 282482 - protein, 14 aa, Homo sapiens
  CDR3 for beta chain variable domain of TCR clone 141241 (TRBV20-1, TRBJ1-5)
CSARDDRGNQPQHF

SEQ ID NO: 282483 - protein, 12 aa, Homo sapiens
  CDR3 for alpha chain variable domain of TCR clone 141242 (TRAV17, TRAJ30)
CVPERRDDEIIF

SEQ ID NO: 282484 - protein, 13 aa, Homo sapiens
  CDR3 for beta chain variable domain of TCR clone 141242 (TRBV7-7, TRBJ2-2)
CQQPGQEHRELFF

SEQ ID NO: 282485 - protein, 13 aa, Homo sapiens
  CDR3 for alpha chain variable domain of TCR clone 141243 (TRAV12-2, TRAJ5)
CREQATGRRALTF

SEQ ID NO: 282486 - protein, 12 aa, Homo sapiens
  CDR3 for beta chain variable domain of TCR clone 141243 (TRBV19, TRBJ1-5)
CASSIAQQPQHF

SEQ ID NO: 282487 - protein, 18 aa, Homo sapiens
  CDR3 for alpha chain variable domain of TCR clone 141244 (TRAV2, TRAJ32)
CCLLLCFHYVGATNKLIF

SEQ ID NO: 282488 - protein, 16 aa, Homo sapiens
  CDR3 for beta chain variable domain of TCR clone 141244 (TRBV7-9, TRBJ2-7)
CASSYPDREGGYEQYF

SEQ ID NO: 282489 - protein, 15 aa, Homo sapiens
  CDR3 for alpha chain variable domain of TCR clone 141245 (TRAV3, TRAJ4)
CAVRDGSGDYNKLIF

SEQ ID NO: 282490 - protein, 16 aa, Homo sapiens
  CDR3 for beta chain variable domain of TCR clone 141245 (TRBV27, TRBJ2-2)
CASSSSGVSNTGELFF

SEQ ID NO: 282491 - protein, 11 aa, Homo sapiens
  CDR3 for alpha chain variable domain of TCR clone 141246 (TRAV35, TRAJ34)
CWARNTDKLIF

SEQ ID NO: 282492 - protein, 15 aa, Homo sapiens
  CDR3 for beta chain variable domain of TCR clone 141246 (TRBV11-2, TRBJ2-1)
CASSLAPRAHNEQFF

SEQ ID NO: 282493 - protein, 14 aa, Homo sapiens
  CDR3 for alpha chain variable domain of TCR clone 141247 (TRAV26-1, TRAJ31)
CIALPPNNNARLMF

SEQ ID NO: 282494 - protein, 16 aa, Homo sapiens
  CDR3 for beta chain variable domain of TCR clone 141247 (TRBV10-2, TRBJ2-7)
CASSESPGSSGSEQYF

SEQ ID NO: 282495 - protein, 14 aa, Homo sapiens
  CDR3 for alpha chain variable domain of TCR clone 141248 (TRAV17, TRAJ40)
CATALTSGTYKYIF

SEQ ID NO: 282496 - protein, 16 aa, Homo sapiens
  CDR3 for beta chain variable domain of TCR clone 141248 (TRBV20-1, TRBJ2-1)
CSALTWTSGSYNEQFF

SEQ ID NO: 282497 - protein, 13 aa, Homo sapiens
  CDR3 for alpha chain variable domain of TCR clone 141249 (TRAV36/DV7, TRAJ33)
CAVDMDSNYQVIW

SEQ ID NO: 282498 - protein, 16 aa, Homo sapiens
  CDR3 for beta chain variable domain of TCR clone 141249 (TRBV15, TRBJ2-3)
CATRLSGGRAPDTQYF

SEQ ID NO: 282499 - protein, 15 aa, Homo sapiens
  CDR3 for alpha chain variable domain of TCR clone 141250 (TRAV26-1, TRAJ56)
FIVRVDNGANSKLTF

SEQ ID NO: 282500 - protein, 14 aa, Homo sapiens
  CDR3 for beta chain variable domain of TCR clone 141250 (TRBV5-1, TRBJ2-7)
CASSRGESLYEQYF

SEQ ID NO: 282501 - protein, 13 aa, Homo sapiens
  CDR3 for alpha chain variable domain of TCR clone 141251 (TRAV2, TRAJ40)
CAVVTSGTYKYIF

SEQ ID NO: 282502 - protein, 16 aa, Homo sapiens
  CDR3 for beta chain variable domain of TCR clone 141251 (TRBV7-3, TRBJ2-1)
CASSLEGYRSYDEQFF

SEQ ID NO: 282503 - protein, 15 aa, Homo sapiens
  CDR3 for alpha chain variable domain of TCR clone 141252 (TRAV26-2, TRAJ13)
CILRDLSGGYQKVSF

SEQ ID NO: 282504 - protein, 11 aa, Homo sapiens
  CDR3 for beta chain variable domain of TCR clone 141252 (TRBV7-9, TRBJ2-5)
CASSLSATQYF

SEQ ID NO: 282505 - protein, 12 aa, Homo sapiens
  CDR3 for alpha chain variable domain of TCR clone 141253 (TRAV12-3, TRAJ17)
CAMTLTGNTLTF

SEQ ID NO: 282506 - protein, 15 aa, Homo sapiens
  CDR3 for beta chain variable domain of TCR clone 141253 (TRBV6-6, TRBJ2-5)
CASSPGGGLEETQYF

SEQ ID NO: 282507 - protein, 16 aa, Homo sapiens
  CDR3 for alpha chain variable domain of TCR clone 141254 (TRAV22, TRAJ45)
CAVGRGKRGGSDGLTF

SEQ ID NO: 282508 - protein, 13 aa, Homo sapiens
  CDR3 for beta chain variable domain of TCR clone 141254 (TRBV27, TRBJ1-1)
CASSLSIGAEAFF

SEQ ID NO: 282509 - protein, 12 aa, Homo sapiens
  CDR3 for alpha chain variable domain of TCR clone 141255 (TRAV17, TRAJ20)
CATQSNDYKLSF

SEQ ID NO: 282510 - protein, 13 aa, Homo sapiens
  CDR3 for beta chain variable domain of TCR clone 141255 (TRBV10-3, TRBJ1-1)
CAIIPAGGTEAFF

SEQ ID NO: 282511 - protein, 15 aa, Homo sapiens
  CDR3 for alpha chain variable domain of TCR clone 141256 (TRAV12-1, TRAJ4)
CVVTPWMGGYNKLIF

SEQ ID NO: 282512 - protein, 18 aa, Homo sapiens
  CDR3 for beta chain variable domain of TCR clone 141256 (TRBV11-2, TRBJ2-3)
CASSVRTSGSKKADTQYF

SEQ ID NO: 282513 - protein, 11 aa, Homo sapiens
  CDR3 for alpha chain variable domain of TCR clone 141257 (TRAV2, TRAJ13)
CASGGYQKVTF

SEQ ID NO: 282514 - protein, 14 aa, Homo sapiens
  CDR3 for beta chain variable domain of TCR clone 141257 (TRBV4-1, TRBJ1-1)
CASSRSGQSFEAFF

SEQ ID NO: 282515 - protein, 15 aa, Homo sapiens
  CDR3 for alpha chain variable domain of TCR clone 141258 (TRAV14/DV4, TRAJ22)
CNERGPPGSARQLTF

SEQ ID NO: 282516 - protein, 16 aa, Homo sapiens
  CDR3 for beta chain variable domain of TCR clone 141258 (TRBV19, TRBJ1-6)
CASSVAPVAGNSPLLF

SEQ ID NO: 282517 - protein, 15 aa, Homo sapiens
  CDR3 for alpha chain variable domain of TCR clone 141259 (TRAV2, TRAJ15)
CAVEYREQAGTALIF

SEQ ID NO: 282518 - protein, 15 aa, Homo sapiens
  CDR3 for beta chain variable domain of TCR clone 141259 (TRBV3-1, TRBJ1-2)
CASSHPGTPGYGYTF

SEQ ID NO: 282519 - protein, 14 aa, Homo sapiens
  CDR3 for alpha chain variable domain of TCR clone 141260 (TRAV1-2, TRAJ16)
CAVNRFSDGQKLLF

SEQ ID NO: 282520 - protein, 16 aa, Homo sapiens
  CDR3 for beta chain variable domain of TCR clone 141260 (TRBV4-3, TRBJ2-1)
CTSSPALDRGVNEQFF

SEQ ID NO: 282521 - protein, 14 aa, Homo sapiens
  CDR3 for alpha chain variable domain of TCR clone 141261 (TRAV1-2, TRAJ8)
CAVREDTGFQKLVF

SEQ ID NO: 282522 - protein, 14 aa, Homo sapiens
  CDR3 for beta chain variable domain of TCR clone 141261 (TRBV5-4, TRBJ2-5)
CASSLVRGQETQYF

SEQ ID NO: 282523 - protein, 14 aa, Homo sapiens
  CDR3 for alpha chain variable domain of TCR clone 141262 (TRAV20, TRAJ29)
CAVQAWVGNTPLVF

SEQ ID NO: 282524 - protein, 14 aa, Homo sapiens
  CDR3 for beta chain variable domain of TCR clone 141262 (TRBV11-2, TRBJ1-2)
CASSLGRANYGYTF

SEQ ID NO: 282525 - protein, 14 aa, Homo sapiens
  CDR3 for alpha chain variable domain of TCR clone 141263 (TRAV17, TRAJ31)
CATVLRNNNVRLMF

SEQ ID NO: 282526 - protein, 14 aa, Homo sapiens
  CDR3 for beta chain variable domain of TCR clone 141263 (TRBV12-4, TRBJ2-5)
CASSLWQKQETQYF

SEQ ID NO: 282527 - protein, 18 aa, Homo sapiens
  CDR3 for alpha chain variable domain of TCR clone 141264 (TRAV12-3, TRAJ52)
CAMSVGGAGGTSYGKLTF

SEQ ID NO: 282528 - protein, 16 aa, Homo sapiens
  CDR3 for beta chain variable domain of TCR clone 141264 (TRBV3-1, TRBJ2-1)
CASSQVAASSYNEQFF

SEQ ID NO: 282529 - protein, 13 aa, Homo sapiens
  CDR3 for alpha chain variable domain of TCR clone 141265 (TRAV12-2, TRAJ20)
CAVYPSNDYKLSF

SEQ ID NO: 282530 - protein, 15 aa, Homo sapiens
  CDR3 for beta chain variable domain of TCR clone 141265 (TRBV7-3, TRBJ2-1)
CASSPTGGGEVEQFF

SEQ ID NO: 282531 - protein, 13 aa, Homo sapiens
  CDR3 for alpha chain variable domain of TCR clone 141266 (TRAV12-1, TRAJ11)
CVVTRGGYSTLNF

SEQ ID NO: 282532 - protein, 16 aa, Homo sapiens
  CDR3 for beta chain variable domain of TCR clone 141266 (TRBV7-3, TRBJ2-2)
CASSLKRGTLSGELFF

SEQ ID NO: 282533 - protein, 13 aa, Homo sapiens
  CDR3 for alpha chain variable domain of TCR clone 141267 (TRAV12-3, TRAJ41)
CAIVPNSGYALNF

SEQ ID NO: 282534 - protein, 14 aa, Homo sapiens
  CDR3 for beta chain variable domain of TCR clone 141267 (TRBV7-2, TRBJ1-3)
CASSLGTAGNTIYF

SEQ ID NO: 282535 - protein, 14 aa, Homo sapiens
  CDR3 for alpha chain variable domain of TCR clone 141268 (TRAV12-2, TRAJ15)
CAPHTGQAGTALIF

SEQ ID NO: 282536 - protein, 22 aa, Homo sapiens
  CDR3 for beta chain variable domain of TCR clone 141268 (TRBV19, TRBJ2-1)
CASSVRDRVTGTSGRIYNEQFF

SEQ ID NO: 282537 - protein, 14 aa, Homo sapiens
  CDR3 for alpha chain variable domain of TCR clone 141269 (TRAV9-2, TRAJ39)
CALYIYNAGNMLTF

SEQ ID NO: 282538 - protein, 16 aa, Homo sapiens
  CDR3 for beta chain variable domain of TCR clone 141269 (TRBV19, TRBJ2-2)
CASSTARASNTGELFF

SEQ ID NO: 282539 - protein, 11 aa, Homo sapiens
  CDR3 for alpha chain variable domain of TCR clone 141270 (TRAV21, TRAJ48)
CAVDGNEKLTF

SEQ ID NO: 282540 - protein, 15 aa, Homo sapiens
  CDR3 for beta chain variable domain of TCR clone 141270 (TRBV6-3, TRBJ2-2)
CASSFLATLTGELFF

SEQ ID NO: 282541 - protein, 11 aa, Homo sapiens
  CDR3 for alpha chain variable domain of TCR clone 141271 (TRAV3, TRAJ17)
PRGAAGNKLTF

SEQ ID NO: 282542 - protein, 13 aa, Homo sapiens
  CDR3 for beta chain variable domain of TCR clone 141271 (TRBV19, TRBJ1-5)
CASSITGGQPQHF

SEQ ID NO: 282543 - protein, 14 aa, Homo sapiens
  CDR3 for alpha chain variable domain of TCR clone 141272 (TRAV13-1, TRAJ9)
CAAMALTGGFKTIF

SEQ ID NO: 282544 - protein, 13 aa, Homo sapiens
  CDR3 for beta chain variable domain of TCR clone 141272 (TRBV20-1, TRBJ1-1)
CSAGTVGNTEAFF

SEQ ID NO: 282545 - protein, 19 aa, Homo sapiens
  CDR3 for alpha chain variable domain of TCR clone 141273 (TRAV2, TRAJ20)
ILQVREADAAVYRDCKLSF

SEQ ID NO: 282546 - protein, 12 aa, Homo sapiens
  CDR3 for beta chain variable domain of TCR clone 141273 (TRBV6-3, TRBJ2-7)
CASSEPGFEQYF

SEQ ID NO: 282547 - protein, 15 aa, Homo sapiens
  CDR3 for alpha chain variable domain of TCR clone 141274 (TRAV17, TRAJ57)
CATGPSQGGSEKLIF

SEQ ID NO: 282548 - protein, 14 aa, Homo sapiens
  CDR3 for beta chain variable domain of TCR clone 141274 (TRBV11-2, TRBJ1-2)
CASSLYRGNYGYTF

SEQ ID NO: 282549 - protein, 13 aa, Homo sapiens
  CDR3 for alpha chain variable domain of TCR clone 141275 (TRAV14/DV4, TRAJ16)
CEMREGSGQKLLF

SEQ ID NO: 282550 - protein, 15 aa, Homo sapiens
  CDR3 for beta chain variable domain of TCR clone 141275 (TRBV7-9, TRBJ2-7)
CASSLDLDRGYEQYF

SEQ ID NO: 282551 - protein, 15 aa, Homo sapiens
  CDR3 for alpha chain variable domain of TCR clone 141276 (TRAV17, TRAJ57)
CATGPSQGGSEKLVF

SEQ ID NO: 282552 - protein, 16 aa, Homo sapiens
  CDR3 for beta chain variable domain of TCR clone 141276 (TRBV12-4, TRBJ1-5)
CSSSRPGGGSNQPQHF

SEQ ID NO: 282553 - protein, 13 aa, Homo sapiens
  CDR3 for alpha chain variable domain of TCR clone 141277 (TRAV16, TRAJ9)
CALRATGGFKTIF

SEQ ID NO: 282554 - protein, 14 aa, Homo sapiens
  CDR3 for beta chain variable domain of TCR clone 141277 (TRBV28, TRBJ2-7)
CASTFYGRAHEQYF

SEQ ID NO: 282555 - protein, 14 aa, Homo sapiens
  CDR3 for alpha chain variable domain of TCR clone 141278 (TRAV38-1, TRAJ45)
CAYYSGGGADGLTF

SEQ ID NO: 282556 - protein, 16 aa, Homo sapiens
  CDR3 for beta chain variable domain of TCR clone 141278 (TRBV7-3, TRBJ2-1)
CASSLEGYRSYNGQFF

SEQ ID NO: 282557 - protein, 14 aa, Homo sapiens
  CDR3 for alpha chain variable domain of TCR clone 141279 (TRAV2, TRAJ37)
CAVDFTSNTGKLIF

SEQ ID NO: 282558 - protein, 18 aa, Homo sapiens
  CDR3 for beta chain variable domain of TCR clone 141279 (TRBV25-1, TRBJ1-2)
CASSGLQNGQGLIFGYTF

SEQ ID NO: 282559 - protein, 16 aa, Homo sapiens
  CDR3 for alpha chain variable domain of TCR clone 141280 (TRAV1-2, TRAJ10)
CAVRGVLTGGGNKLTF

SEQ ID NO: 282560 - protein, 13 aa, Homo sapiens
  CDR3 for beta chain variable domain of TCR clone 141280 (TRBV7-2, TRBJ2-4)
CASSREHANIQYF

SEQ ID NO: 282561 - protein, 14 aa, Homo sapiens
  CDR3 for alpha chain variable domain of TCR clone 141281 (TRAV23/DV6, TRAJ37)
CAASTTGNTGKLAF

SEQ ID NO: 282562 - protein, 16 aa, Homo sapiens
  CDR3 for beta chain variable domain of TCR clone 141281 (TRBV24-1, TRBJ2-1)
CATSDLAGPTYNEQFF

SEQ ID NO: 282563 - protein, 11 aa, Homo sapiens
  CDR3 for alpha chain variable domain of TCR clone 141282 (TRAV23/DV6, TRAJ49)
CAVAPVTSSIL

SEQ ID NO: 282564 - protein, 17 aa, Homo sapiens
  CDR3 for beta chain variable domain of TCR clone 141282 (TRBV13, TRBJ2-3)
CASSLSRVAGGRNTQYF

SEQ ID NO: 282565 - protein, 15 aa, Homo sapiens
  CDR3 for alpha chain variable domain of TCR clone 141283 (TRAV13-1, TRAJ42)
CAASDLWGSQGNLIF

SEQ ID NO: 282566 - protein, 15 aa, Homo sapiens
  CDR3 for beta chain variable domain of TCR clone 141283 (TRBV20-1, TRBJ2-1)
CSASSAGSSYNEQFF

SEQ ID NO: 282567 - protein, 16 aa, Homo sapiens
  CDR3 for alpha chain variable domain of TCR clone 141284 (TRAV30, TRAJ48)
CGTESKSNFGNEKLTF

SEQ ID NO: 282568 - protein, 17 aa, Homo sapiens
  CDR3 for beta chain variable domain of TCR clone 141284 (TRBV27, TRBJ2-1)
CASSSERGGQSADEQFF

SEQ ID NO: 282569 - protein, 14 aa, Homo sapiens
  CDR3 for alpha chain variable domain of TCR clone 141285 (TRAV8-3, TRAJ30)
CAGGDMNRDDKIIF

SEQ ID NO: 282570 - protein, 17 aa, Homo sapiens
  CDR3 for beta chain variable domain of TCR clone 141285 (TRBV19, TRBJ2-2)
CASSRNPGGFGTGELSF

SEQ ID NO: 282571 - protein, 13 aa, Homo sapiens
  CDR3 for alpha chain variable domain of TCR clone 141286 (TRAV12-2, TRAJ4)
CAGFSGGYNKLMF

SEQ ID NO: 282572 - protein, 14 aa, Homo sapiens
  CDR3 for beta chain variable domain of TCR clone 141286 (TRBV24-1, TRBJ1-1)
CATSIPRGDTEAFF

SEQ ID NO: 282573 - protein, 16 aa, Homo sapiens
  CDR3 for alpha chain variable domain of TCR clone 141287 (TRAV26-1, TRAJ53)
CIVRVAMGGSNYKLTF

SEQ ID NO: 282574 - protein, 15 aa, Homo sapiens
  CDR3 for beta chain variable domain of TCR clone 141287 (TRBV7-9, TRBJ2-3)
CASLKDGREGDTQYF

SEQ ID NO: 282575 - protein, 12 aa, Homo sapiens
  CDR3 for alpha chain variable domain of TCR clone 141288 (TRAV8-3, TRAJ26)
CAGDNYGHNFVF

SEQ ID NO: 282576 - protein, 13 aa, Homo sapiens
  CDR3 for beta chain variable domain of TCR clone 141288 (TRBV10-3, TRBJ2-7)
CASKLTVNYEQYF

SEQ ID NO: 282577 - protein, 12 aa, Homo sapiens
  CDR3 for alpha chain variable domain of TCR clone 141289 (TRAV13-1, TRAJ5)
CAAKAGRRALTF

SEQ ID NO: 282578 - protein, 14 aa, Homo sapiens
  CDR3 for beta chain variable domain of TCR clone 141289 (TRBV25-1, TRBJ1-1)
CASTHLGGNTEAFF

SEQ ID NO: 282579 - protein, 12 aa, Homo sapiens
  CDR3 for alpha chain variable domain of TCR clone 141290 (TRAV24, TRAJ16)
CAFFPDGQKLLF

SEQ ID NO: 282580 - protein, 14 aa, Homo sapiens
  CDR3 for beta chain variable domain of TCR clone 141290 (TRBV20-1, TRBJ1-1)
CSARKVGHTSEAFF

SEQ ID NO: 282581 - protein, 16 aa, Homo sapiens
  CDR3 for alpha chain variable domain of TCR clone 141291 (TRAV12-3, TRAJ10)
FAMKKGITGGGNKLTF

SEQ ID NO: 282582 - protein, 12 aa, Homo sapiens
  CDR3 for beta chain variable domain of TCR clone 141291 (TRBV20-1, TRBJ2-7)
CSAITPTKEQYF

SEQ ID NO: 282583 - protein, 13 aa, Homo sapiens
  CDR3 for alpha chain variable domain of TCR clone 141292 (TRAV13-1, TRAJ17)
CAADGAEGNKLTL

SEQ ID NO: 282584 - protein, 14 aa, Homo sapiens
  CDR3 for beta chain variable domain of TCR clone 141292 (TRBV11-2, TRBJ1-3)
CASSLTQGRNTIYF

SEQ ID NO: 282585 - protein, 13 aa, Homo sapiens
  CDR3 for alpha chain variable domain of TCR clone 141293 (TRAV3, TRAJ21)
CAVREPGFNKFYF

SEQ ID NO: 282586 - protein, 22 aa, Homo sapiens
  CDR3 for beta chain variable domain of TCR clone 141293 (TRBV6-1, TRBJ1-3)
CASVQGGGWKHHIFWRGKLAHC

SEQ ID NO: 282587 - protein, 13 aa, Homo sapiens
  CDR3 for alpha chain variable domain of TCR clone 141294 (TRAV30, TRAJ39)
CGTEQNAGNMLTF

SEQ ID NO: 282588 - protein, 12 aa, Homo sapiens
  CDR3 for beta chain variable domain of TCR clone 141294 (TRBV12-4, TRBJ2-5)
CASSSAQETQYF

SEQ ID NO: 282589 - protein, 14 aa, Homo sapiens
  CDR3 for alpha chain variable domain of TCR clone 141295 (TRAV12-2, TRAJ40)
CAVKIPSGTYKYIL

SEQ ID NO: 282590 - protein, 12 aa, Homo sapiens
  CDR3 for beta chain variable domain of TCR clone 141295 (TRBV11-2, TRBJ2-2)
CASSLGGGELFF

SEQ ID NO: 282591 - protein, 14 aa, Homo sapiens
  CDR3 for alpha chain variable domain of TCR clone 141296 (TRAV3, TRAJ21)
CAVVPLYNFNKFYF

SEQ ID NO: 282592 - protein, 14 aa, Homo sapiens
  CDR3 for beta chain variable domain of TCR clone 141296 (TRBV5-1, TRBJ2-7)
CASRWDWQFHEQYF

SEQ ID NO: 282593 - protein, 14 aa, Homo sapiens
  CDR3 for alpha chain variable domain of TCR clone 141297 (TRAV2, TRAJ9)
CAVEDRSGGFKTIF

SEQ ID NO: 282594 - protein, 15 aa, Homo sapiens
  CDR3 for beta chain variable domain of TCR clone 141297 (TRBV19, TRBJ2-1)
CASSSPGVPIDEQFF

SEQ ID NO: 282595 - protein, 17 aa, Homo sapiens
  CDR3 for alpha chain variable domain of TCR clone 141298 (TRAV13-1, TRAJ31)
CAPRDRLMFGDGTKPVV

SEQ ID NO: 282596 - protein, 12 aa, Homo sapiens
  CDR3 for beta chain variable domain of TCR clone 141298 (TRBV7-9, TRBJ2-7)
CASSLEGYEQYF

SEQ ID NO: 282597 - protein, 16 aa, Homo sapiens
  CDR3 for alpha chain variable domain of TCR clone 141299 (TRAV3, TRAJ28)
CAVFPRSGAGSYQLPF

SEQ ID NO: 282598 - protein, 13 aa, Homo sapiens
  CDR3 for beta chain variable domain of TCR clone 141299 (TRBV12-4, TRBJ2-5)
CASRLAVQETQYF

SEQ ID NO: 282599 - protein, 11 aa, Homo sapiens
  CDR3 for alpha chain variable domain of TCR clone 141300 (TRAV3, TRAJ17)
CAEAAGNKLTF

SEQ ID NO: 282600 - protein, 11 aa, Homo sapiens
  CDR3 for beta chain variable domain of TCR clone 141300 (TRBV11-2, TRBJ2-2)
CASSLPGELFF

SEQ ID NO: 282601 - protein, 13 aa, Homo sapiens
  CDR3 for alpha chain variable domain of TCR clone 141301 (TRAV2, TRAJ40)
CAVVTSGTYKYIF

SEQ ID NO: 282602 - protein, 13 aa, Homo sapiens
  CDR3 for beta chain variable domain of TCR clone 141301 (TRBV7-9, TRBJ1-4)
CASSLPGIEKLFF

SEQ ID NO: 282603 - protein, 14 aa, Homo sapiens
  CDR3 for alpha chain variable domain of TCR clone 141302 (TRAV8-4, TRAJ15)
CAVILNQAGTALIF

SEQ ID NO: 282604 - protein, 15 aa, Homo sapiens
  CDR3 for beta chain variable domain of TCR clone 141302 (TRBV10-3, TRBJ1-3)
CAISDSQGAGNTIYF

SEQ ID NO: 282605 - protein, 13 aa, Homo sapiens
  CDR3 for alpha chain variable domain of TCR clone 141303 (TRAV30, TRAJ16)
CVTFGGDGQKLLF

SEQ ID NO: 282606 - protein, 13 aa, Homo sapiens
  CDR3 for beta chain variable domain of TCR clone 141303 (TRBV7-3, TRBJ2-1)
CASSLDSYNEQFF

SEQ ID NO: 282607 - protein, 13 aa, Homo sapiens
  CDR3 for alpha chain variable domain of TCR clone 141304 (TRAV12-1, TRAJ53)
CVVNAESNYKLTF

SEQ ID NO: 282608 - protein, 13 aa, Homo sapiens
  CDR3 for beta chain variable domain of TCR clone 141304 (TRBV12-4, TRBJ1-2)
CASSLRQGKGYTF

SEQ ID NO: 282609 - protein, 15 aa, Homo sapiens
  CDR3 for alpha chain variable domain of TCR clone 141305 (TRAV8-3, TRAJ45)
CASSYSGGGADGIPF

SEQ ID NO: 282610 - protein, 13 aa, Homo sapiens
  CDR3 for beta chain variable domain of TCR clone 141305 (TRBV10-3, TRBJ2-7)
CASKLAVNYEQYF

SEQ ID NO: 282611 - protein, 17 aa, Homo sapiens
  CDR3 for alpha chain variable domain of TCR clone 141306 (TRAV12-2, TRAJ48)
CASNEKLTFGIGTRLTI

SEQ ID NO: 282612 - protein, 16 aa, Homo sapiens
  CDR3 for beta chain variable domain of TCR clone 141306 (TRBV7-3, TRBJ2-2)
CASSLKRGTLSGELFF

SEQ ID NO: 282613 - protein, 15 aa, Homo sapiens
  CDR3 for alpha chain variable domain of TCR clone 141307 (TRAV21, TRAJ32)
CAAAPYGSATNKLIF

SEQ ID NO: 282614 - protein, 17 aa, Homo sapiens
  CDR3 for beta chain variable domain of TCR clone 141307 (TRBV18, TRBJ2-3)
CASSPFGDGGFTDTQYF

SEQ ID NO: 282615 - protein, 12 aa, Homo sapiens
  CDR3 for alpha chain variable domain of TCR clone 141308 (TRAV1-1, TRAJ39)
CAVPVVGNMLTF

SEQ ID NO: 282616 - protein, 17 aa, Homo sapiens
  CDR3 for beta chain variable domain of TCR clone 141308 (TRBV7-3, TRBJ2-3)
CASSLMKRMRGADTQYF

SEQ ID NO: 282617 - protein, 17 aa, Homo sapiens
  CDR3 for alpha chain variable domain of TCR clone 141309 (TRAV8-3, TRAJ42)
CAVGNPEERRSQGNLIF

SEQ ID NO: 282618 - protein, 14 aa, Homo sapiens
  CDR3 for beta chain variable domain of TCR clone 141309 (TRBV7-2, TRBJ2-7)
CASSPKTSFYEQYF

SEQ ID NO: 282619 - protein, 18 aa, Homo sapiens
  CDR3 for alpha chain variable domain of TCR clone 141310 (TRAV26-2, TRAJ54)
CILRDVEVGIQGVQKLVF

SEQ ID NO: 282620 - protein, 15 aa, Homo sapiens
  CDR3 for beta chain variable domain of TCR clone 141310 (TRBV5-1, TRBJ2-7)
CASSLYPDGGYEQYF

SEQ ID NO: 282621 - protein, 15 aa, Homo sapiens
  CDR3 for alpha chain variable domain of TCR clone 141311 (TRAV27, TRAJ38)
CAARRNAGNNRKLIW

SEQ ID NO: 282622 - protein, 14 aa, Homo sapiens
  CDR3 for beta chain variable domain of TCR clone 141311 (TRBV7-8, TRBJ2-3)
CASSLEAGTYTQYF

SEQ ID NO: 282623 - protein, 14 aa, Homo sapiens
  CDR3 for alpha chain variable domain of TCR clone 141312 (TRAV12-3, TRAJ10)
SHLPLTGGGNKLTF

SEQ ID NO: 282624 - protein, 15 aa, Homo sapiens
  CDR3 for beta chain variable domain of TCR clone 141312 (TRBV28, TRBJ2-3)
CASSPDRQGANTQYF

SEQ ID NO: 282625 - protein, 18 aa, Homo sapiens
  CDR3 for alpha chain variable domain of TCR clone 141313 (TRAV1-2, TRAJ10)
CAVRALTPVTGGGSKLTF

SEQ ID NO: 282626 - protein, 14 aa, Homo sapiens
  CDR3 for beta chain variable domain of TCR clone 141313 (TRBV4-1, TRBJ1-1)
CASSQQGNGNEAFF

SEQ ID NO: 282627 - protein, 13 aa, Homo sapiens
  CDR3 for alpha chain variable domain of TCR clone 141314 (TRAV2, TRAJ40)
CAVVTSGTYNYLF

SEQ ID NO: 282628 - protein, 15 aa, Homo sapiens
  CDR3 for beta chain variable domain of TCR clone 141314 (TRBV11-3, TRBJ2-3)
CASLKDGREGDTQYF

SEQ ID NO: 282629 - protein, 11 aa, Homo sapiens
  CDR3 for alpha chain variable domain of TCR clone 141315 (TRAV1-2, TRAJ40)
CAVPGTYKYMF

SEQ ID NO: 282630 - protein, 16 aa, Homo sapiens
  CDR3 for beta chain variable domain of TCR clone 141315 (TRBV29-1, TRBJ2-7)
CSVEVVGTSGSYEQYF

SEQ ID NO: 282631 - protein, 14 aa, Homo sapiens
  CDR3 for alpha chain variable domain of TCR clone 141316 (TRAV8-1, TRAJ5)
CAVRTDTGRRALTF

SEQ ID NO: 282632 - protein, 13 aa, Homo sapiens
  CDR3 for beta chain variable domain of TCR clone 141316 (TRBV7-2, TRBJ2-2)
CASSLAVTGELFF

SEQ ID NO: 282633 - protein, 12 aa, Homo sapiens
  CDR3 for alpha chain variable domain of TCR clone 141317 (TRAV16, TRAJ56)
CAPTGANSKLTF

SEQ ID NO: 282634 - protein, 17 aa, Homo sapiens
  CDR3 for beta chain variable domain of TCR clone 141317 (TRBV27, TRBJ2-6)
CASSLTGFASRAIVLTF

SEQ ID NO: 282635 - protein, 14 aa, Homo sapiens
  CDR3 for alpha chain variable domain of TCR clone 141318 (TRAV12-2, TRAJ13)
CAVKKTGGYQKVTS

SEQ ID NO: 282636 - protein, 17 aa, Homo sapiens
  CDR3 for beta chain variable domain of TCR clone 141318 (TRBV20-1, TRBJ2-2)
CSASGSGQGGLTGELFF

SEQ ID NO: 282637 - protein, 11 aa, Homo sapiens
  CDR3 for alpha chain variable domain of TCR clone 141319 (TRAV4, TRAJ31)
CLVGLNARLMF

SEQ ID NO: 282638 - protein, 15 aa, Homo sapiens
  CDR3 for beta chain variable domain of TCR clone 141319 (TRBV7-2, TRBJ2-1)
CASSSGLAGGNEQFF

SEQ ID NO: 282639 - protein, 14 aa, Homo sapiens
  CDR3 for alpha chain variable domain of TCR clone 141320 (TRAV2, TRAJ37)
CAVDFTSNTGKLIF

SEQ ID NO: 282640 - protein, 15 aa, Homo sapiens
  CDR3 for beta chain variable domain of TCR clone 141320 (TRBV10-3, TRBJ2-3)
CAISLTSGGTDTQYF

SEQ ID NO: 282641 - protein, 11 aa, Homo sapiens
  CDR3 for alpha chain variable domain of TCR clone 141321 (TRAV2, TRAJ13)
CASGGYQKVTF

SEQ ID NO: 282642 - protein, 14 aa, Homo sapiens
  CDR3 for beta chain variable domain of TCR clone 141321 (TRBV11-2, TRBJ2-1)
CASSLSGPYNEQFF

SEQ ID NO: 282643 - protein, 13 aa, Homo sapiens
  CDR3 for alpha chain variable domain of TCR clone 141322 (TRAV35, TRAJ42)
CAGFPGSQGNLIF

SEQ ID NO: 282644 - protein, 16 aa, Homo sapiens
  CDR3 for beta chain variable domain of TCR clone 141322 (TRBV2, TRBJ2-3)
CASSTSVEGVTDTQYF

SEQ ID NO: 282645 - protein, 14 aa, Homo sapiens
  CDR3 for alpha chain variable domain of TCR clone 141323 (TRAV21, TRAJ11)
CAVRRDSGYSTLTF

SEQ ID NO: 282646 - protein, 11 aa, Homo sapiens
  CDR3 for beta chain variable domain of TCR clone 141323 (TRBV11-2, TRBJ1-1)
CASSINTEAFF

SEQ ID NO: 282647 - protein, 14 aa, Homo sapiens
  CDR3 for alpha chain variable domain of TCR clone 141324 (TRAV8-4, TRAJ40)
CAVLPTSGTYKYIF

SEQ ID NO: 282648 - protein, 15 aa, Homo sapiens
  CDR3 for beta chain variable domain of TCR clone 141324 (TRBV7-2, TRBJ2-1)
CASTSASGDYNEQFF

SEQ ID NO: 282649 - protein, 14 aa, Homo sapiens
  CDR3 for alpha chain variable domain of TCR clone 141325 (TRAV26-1, TRAJ49)
CIVRLTNTGNQVYF

SEQ ID NO: 282650 - protein, 11 aa, Homo sapiens
  CDR3 for beta chain variable domain of TCR clone 141325 (TRBV29-1, TRBJ2-5)
CSEDRTGTQYF

SEQ ID NO: 282651 - protein, 14 aa, Homo sapiens
  CDR3 for alpha chain variable domain of TCR clone 141326 (TRAV2, TRAJ20)
CAVDLRRHDYKLSF

SEQ ID NO: 282652 - protein, 15 aa, Homo sapiens
  CDR3 for beta chain variable domain of TCR clone 141326 (TRBV11-3, TRBJ2-7)
CASSLLSGSSYEQYF

SEQ ID NO: 282653 - protein, 14 aa, Homo sapiens
  CDR3 for alpha chain variable domain of TCR clone 141327 (TRAV1-2, TRAJ16)
CAVNRFSDGQKLLF

SEQ ID NO: 282654 - protein, 14 aa, Homo sapiens
  CDR3 for beta chain variable domain of TCR clone 141327 (TRBV7-2, TRBJ2-1)
CASSSMVGFGEQFF

SEQ ID NO: 282655 - protein, 13 aa, Homo sapiens
  CDR3 for alpha chain variable domain of TCR clone 141328 (TRAV8-3, TRAJ44)
CAVVPGTASKLTF

SEQ ID NO: 282656 - protein, 13 aa, Homo sapiens
  CDR3 for beta chain variable domain of TCR clone 141328 (TRBV12-4, TRBJ2-1)
CASSLAENNEQFF

SEQ ID NO: 282657 - protein, 15 aa, Homo sapiens
  CDR3 for alpha chain variable domain of TCR clone 141329 (TRAV3, TRAJ5)
CAVRDRKTGRRTLPF

SEQ ID NO: 282658 - protein, 15 aa, Homo sapiens
  CDR3 for beta chain variable domain of TCR clone 141329 (TRBV7-8, TRBJ2-1)
CASSLADSLYNEQFF

SEQ ID NO: 282659 - protein, 12 aa, Homo sapiens
  CDR3 for alpha chain variable domain of TCR clone 141330 (TRAV25, TRAJ29)
CAGPRGDTPLVF

SEQ ID NO: 282660 - protein, 13 aa, Homo sapiens
  CDR3 for beta chain variable domain of TCR clone 141330 (TRBV7-3, TRBJ2-5)
CASSFRGGETQYF

SEQ ID NO: 282661 - protein, 14 aa, Homo sapiens
  CDR3 for alpha chain variable domain of TCR clone 141331 (TRAV12-2, TRAJ17)
CAVLFKAAGNKLTF

SEQ ID NO: 282662 - protein, 19 aa, Homo sapiens
  CDR3 for beta chain variable domain of TCR clone 141331 (TRBV7-9, TRBJ2-1)
CASSHNRGALLRSYNEQFF

SEQ ID NO: 282663 - protein, 12 aa, Homo sapiens
  CDR3 for alpha chain variable domain of TCR clone 141332 (TRAV21, TRAJ11)
CAATSGYSTLTF

SEQ ID NO: 282664 - protein, 13 aa, Homo sapiens
  CDR3 for beta chain variable domain of TCR clone 141332 (TRBV4-1, TRBJ2-7)
CASSQGQAYEQYF

SEQ ID NO: 282665 - protein, 18 aa, Homo sapiens
  CDR3 for alpha chain variable domain of TCR clone 141333 (TRAV13-1, TRAJ52)
CAASKRSAGGTSYGKLTF

SEQ ID NO: 282666 - protein, 13 aa, Homo sapiens
  CDR3 for beta chain variable domain of TCR clone 141333 (TRBV10-2, TRBJ2-7)
CASGASGGYEQYF

SEQ ID NO: 282667 - protein, 13 aa, Homo sapiens
  CDR3 for alpha chain variable domain of TCR clone 141334 (TRAV1-1, TRAJ9)
CAANNTGGFNTIF

SEQ ID NO: 282668 - protein, 14 aa, Homo sapiens
  CDR3 for beta chain variable domain of TCR clone 141334 (TRBV20-1, TRBJ2-1)
CSAQIGGSANEQFF

SEQ ID NO: 282669 - protein, 14 aa, Homo sapiens
  CDR3 for alpha chain variable domain of TCR clone 141335 (TRAV8-3, TRAJ9)
CAMVYNTEGFKTIF

SEQ ID NO: 282670 - protein, 14 aa, Homo sapiens
  CDR3 for beta chain variable domain of TCR clone 141335 (TRBV7-3, TRBJ2-2)
CASSSGGYTGELFF

SEQ ID NO: 282671 - protein, 14 aa, Homo sapiens
  CDR3 for alpha chain variable domain of TCR clone 141336 (TRAV29/DV5, TRAJ36)
CAARRKTGANNLFF

SEQ ID NO: 282672 - protein, 11 aa, Homo sapiens
  CDR3 for beta chain variable domain of TCR clone 141336 (TRBV6-3, TRBJ2-3)
CATGQADTQYF

SEQ ID NO: 282673 - protein, 16 aa, Homo sapiens
  CDR3 for alpha chain variable domain of TCR clone 141337 (TRAV26-1, TRAJ22)
CIVRVPSSGSARQLTF

SEQ ID NO: 282674 - protein, 14 aa, Homo sapiens
  CDR3 for beta chain variable domain of TCR clone 141337 (TRBV7-2, TRBJ1-1)
CASSFLTGTTEAFF

SEQ ID NO: 282675 - protein, 13 aa, Homo sapiens
  CDR3 for alpha chain variable domain of TCR clone 141338 (TRAV13-1, TRAJ6)
CARGSGGSYIPTF

SEQ ID NO: 282676 - protein, 13 aa, Homo sapiens
  CDR3 for beta chain variable domain of TCR clone 141338 (TRBV7-9, TRBJ2-5)
CASLPSGRETQYF

SEQ ID NO: 282677 - protein, 15 aa, Homo sapiens
  CDR3 for alpha chain variable domain of TCR clone 141339 (TRAV8-2, TRAJ40)
CVVLGTTSGTYKYIF

SEQ ID NO: 282678 - protein, 15 aa, Homo sapiens
  CDR3 for beta chain variable domain of TCR clone 141339 (TRBV2, TRBJ2-1)
CASSEEREGDNEQFF

SEQ ID NO: 282679 - protein, 15 aa, Homo sapiens
  CDR3 for alpha chain variable domain of TCR clone 141340 (TRAV26-2, TRAJ50)
CILRDEETSYDKVIF

SEQ ID NO: 282680 - protein, 12 aa, Homo sapiens
  CDR3 for beta chain variable domain of TCR clone 141340 (TRBV5-7, TRBJ1-2)
CASSDVPYGYTF

SEQ ID NO: 282681 - protein, 12 aa, Homo sapiens
  CDR3 for alpha chain variable domain of TCR clone 141341 (TRAV23/DV6, TRAJ31)
CSARRIGARLMF

SEQ ID NO: 282682 - protein, 13 aa, Homo sapiens
  CDR3 for beta chain variable domain of TCR clone 141341 (TRBV28, TRBJ2-7)
CASKAGGVYEQYF

SEQ ID NO: 282683 - protein, 13 aa, Homo sapiens
  CDR3 for alpha chain variable domain of TCR clone 141342 (TRAV16, TRAJ11)
CALSGPSYSTLTF

SEQ ID NO: 282684 - protein, 17 aa, Homo sapiens
  CDR3 for beta chain variable domain of TCR clone 141342 (TRBV7-3, TRBJ2-5)
CASSLGSGRSGSETQYF

SEQ ID NO: 282685 - protein, 13 aa, Homo sapiens
  CDR3 for alpha chain variable domain of TCR clone 141343 (TRAV2, TRAJ15)
CAVASQAGTALIF

SEQ ID NO: 282686 - protein, 16 aa, Homo sapiens
  CDR3 for beta chain variable domain of TCR clone 141343 (TRBV7-3, TRBJ2-2)
CASSFLPSGYTGELFF

SEQ ID NO: 282687 - protein, 11 aa, Homo sapiens
  CDR3 for alpha chain variable domain of TCR clone 141344 (TRAV3, TRAJ21)
CAVGNFNKFYF

SEQ ID NO: 282688 - protein, 16 aa, Homo sapiens
  CDR3 for beta chain variable domain of TCR clone 141344 (TRBV2, TRBJ1-4)
CASNLLQGATNEKLFF

SEQ ID NO: 282689 - protein, 12 aa, Homo sapiens
  CDR3 for alpha chain variable domain of TCR clone 141345 (TRAV12-3, TRAJ17)
CAMTLPGNKLTF

SEQ ID NO: 282690 - protein, 15 aa, Homo sapiens
  CDR3 for beta chain variable domain of TCR clone 141345 (TRBV19, TRBJ2-1)
CASSILGEGRNEQFF

SEQ ID NO: 282691 - protein, 14 aa, Homo sapiens
  CDR3 for alpha chain variable domain of TCR clone 141346 (TRAV14/DV4, TRAJ54)
CAMREAPGAQKLVF

SEQ ID NO: 282692 - protein, 16 aa, Homo sapiens
  CDR3 for beta chain variable domain of TCR clone 141346 (TRBV7-3, TRBJ2-2)
CASSLKRGTLSGELFF

SEQ ID NO: 282693 - protein, 17 aa, Homo sapiens
  CDR3 for alpha chain variable domain of TCR clone 141347 (TRAV4, TRAJ18)
CLVGERSVGSTLGRLYF

SEQ ID NO: 282694 - protein, 14 aa, Homo sapiens
  CDR3 for beta chain variable domain of TCR clone 141347 (TRBV6-5, TRBJ1-2)
CASSYDSTGGGYTF

SEQ ID NO: 282695 - protein, 13 aa, Homo sapiens
  CDR3 for alpha chain variable domain of TCR clone 141348 (TRAV1-2, TRAJ9)
YAALNTGGFKTIF

SEQ ID NO: 282696 - protein, 13 aa, Homo sapiens
  CDR3 for beta chain variable domain of TCR clone 141348 (TRBV19, TRBJ1-2)
CASSVPGQDGHTF

SEQ ID NO: 282697 - protein, 13 aa, Homo sapiens
  CDR3 for alpha chain variable domain of TCR clone 141349 (TRAV8-4, TRAJ9)
CAVSETGGFKTIF

SEQ ID NO: 282698 - protein, 12 aa, Homo sapiens
  CDR3 for beta chain variable domain of TCR clone 141349 (TRBV7-8, TRBJ2-7)
CASSLGDREQYF

SEQ ID NO: 282699 - protein, 16 aa, Homo sapiens
  CDR3 for alpha chain variable domain of TCR clone 141350 (TRAV30, TRAJ26)
CGTESVRDNYGQNFVF

SEQ ID NO: 282700 - protein, 13 aa, Homo sapiens
  CDR3 for beta chain variable domain of TCR clone 141350 (TRBV19, TRBJ1-2)
CASNISEDYGYTF

SEQ ID NO: 282701 - protein, 10 aa, Homo sapiens
  CDR3 for alpha chain variable domain of TCR clone 141351 (TRAV8-4, TRAJ43)
CAVSADDMRF

SEQ ID NO: 282702 - protein, 15 aa, Homo sapiens
  CDR3 for beta chain variable domain of TCR clone 141351 (TRBV28, TRBJ2-7)
CASSQLGAGGNEQYF

SEQ ID NO: 282703 - protein, 12 aa, Homo sapiens
  CDR3 for alpha chain variable domain of TCR clone 141352 (TRAV13-1, TRAJ53)
CAAGGSNYKLTF

SEQ ID NO: 282704 - protein, 13 aa, Homo sapiens
  CDR3 for beta chain variable domain of TCR clone 141352 (TRBV7-9, TRBJ2-3)
CASSPGSTDTQYF

SEQ ID NO: 282705 - protein, 15 aa, Homo sapiens
  CDR3 for alpha chain variable domain of TCR clone 141353 (TRAV8-3, TRAJ11)
CAVGLLNSGYSTRTV

SEQ ID NO: 282706 - protein, 16 aa, Homo sapiens
  CDR3 for beta chain variable domain of TCR clone 141353 (TRBV7-9, TRBJ1-2)
CASSLGFSSGEDGYTF

SEQ ID NO: 282707 - protein, 23 aa, Homo sapiens
  CDR3 for alpha chain variable domain of TCR clone 141354 (TRAV1-1, TRAJ4)
LTMELQMKDFASYFCALYNKLIF

SEQ ID NO: 282708 - protein, 16 aa, Homo sapiens
  CDR3 for beta chain variable domain of TCR clone 141354 (TRBV7-3, TRBJ2-2)
CASSLKRGTLSGELFF

SEQ ID NO: 282709 - protein, 13 aa, Homo sapiens
  CDR3 for alpha chain variable domain of TCR clone 141355 (TRAV36/DV7, TRAJ37)
CAVFSSNTGKLIF

SEQ ID NO: 282710 - protein, 14 aa, Homo sapiens
  CDR3 for beta chain variable domain of TCR clone 141355 (TRBV18, TRBJ2-7)
CASSPRGGAYEQYF

SEQ ID NO: 282711 - protein, 12 aa, Homo sapiens
  CDR3 for alpha chain variable domain of TCR clone 141356 (TRAV13-2, TRAJ8)
FAPWLGFQKLVS

SEQ ID NO: 282712 - protein, 13 aa, Homo sapiens
  CDR3 for beta chain variable domain of TCR clone 141356 (TRBV12-4, TRBJ1-5)
CASSPDRAQPQHF

SEQ ID NO: 282713 - protein, 14 aa, Homo sapiens
  CDR3 for alpha chain variable domain of TCR clone 141357 (TRAV3, TRAJ33)
CAVRDMDSNYQLIW

SEQ ID NO: 282714 - protein, 17 aa, Homo sapiens
  CDR3 for beta chain variable domain of TCR clone 141357 (TRBV7-3, TRBJ1-2)
CASSFPQGNGGELWLHL

SEQ ID NO: 282715 - protein, 15 aa, Homo sapiens
  CDR3 for alpha chain variable domain of TCR clone 141358 (TRAV3, TRAJ17)
CAVRDGPAAGNKLTF

SEQ ID NO: 282716 - protein, 12 aa, Homo sapiens
  CDR3 for beta chain variable domain of TCR clone 141358 (TRBV12-4, TRBJ2-1)
CASSPGRNEQFY

SEQ ID NO: 282717 - protein, 11 aa, Homo sapiens
  CDR3 for alpha chain variable domain of TCR clone 141359 (TRAV1-1, TRAJ37)
CAVSPQGKLIF

SEQ ID NO: 282718 - protein, 14 aa, Homo sapiens
  CDR3 for beta chain variable domain of TCR clone 141359 (TRBV7-2, TRBJ2-7)
CASSLYPGRYEQYF

SEQ ID NO: 282719 - protein, 16 aa, Homo sapiens
  CDR3 for alpha chain variable domain of TCR clone 141360 (TRAV30, TRAJ24)
CSTEIVDADSWGKFQF

SEQ ID NO: 282720 - protein, 13 aa, Homo sapiens
  CDR3 for beta chain variable domain of TCR clone 141360 (TRBV7-9, TRBJ1-2)
CASSLKQNYGYTF

SEQ ID NO: 282721 - protein, 14 aa, Homo sapiens
  CDR3 for alpha chain variable domain of TCR clone 141361 (TRAV13-2, TRAJ11)
CAETGNSGYSTLTF

SEQ ID NO: 282722 - protein, 16 aa, Homo sapiens
  CDR3 for beta chain variable domain of TCR clone 141361 (TRBV7-8, TRBJ2-6)
CASRVGDSSGANVLTF

SEQ ID NO: 282723 - protein, 15 aa, Homo sapiens
  CDR3 for alpha chain variable domain of TCR clone 141362 (TRAV8-3, TRAJ23)
CALGDRYNQGGKLIF

SEQ ID NO: 282724 - protein, 22 aa, Homo sapiens
  CDR3 for beta chain variable domain of TCR clone 141362 (TRBV29-1, TRBJ2-5)
TVSNMSPEDSSIYLCSAGTQYF

SEQ ID NO: 282725 - protein, 16 aa, Homo sapiens
  CDR3 for alpha chain variable domain of TCR clone 141363 (TRAV12-3, TRAJ53)
CAMSPGSGGSNYKLKF

SEQ ID NO: 282726 - protein, 12 aa, Homo sapiens
  CDR3 for beta chain variable domain of TCR clone 141363 (TRBV11-2, TRBJ2-2)
CASSLGGGEPFF

SEQ ID NO: 282727 - protein, 12 aa, Homo sapiens
  CDR3 for alpha chain variable domain of TCR clone 141364 (TRAV13-1, TRAJ48)
CAANFGTEKLTF

SEQ ID NO: 282728 - protein, 12 aa, Homo sapiens
  CDR3 for beta chain variable domain of TCR clone 141364 (TRBV12-4, TRBJ2-7)
CASSLGGYEQYF

SEQ ID NO: 282729 - protein, 17 aa, Homo sapiens
  CDR3 for alpha chain variable domain of TCR clone 141365 (TRAV26-1, TRAJ37)
CIVRVITVSSNTGKLIF

SEQ ID NO: 282730 - protein, 13 aa, Homo sapiens
  CDR3 for beta chain variable domain of TCR clone 141365 (TRBV19, TRBJ2-7)
CASSLTTSYEQYF

SEQ ID NO: 282731 - protein, 12 aa, Homo sapiens
  CDR3 for alpha chain variable domain of TCR clone 141366 (TRAV8-6, TRAJ43)
CAVSTNNTDIRF

SEQ ID NO: 282732 - protein, 15 aa, Homo sapiens
  CDR3 for beta chain variable domain of TCR clone 141366 (TRBV7-3, TRBJ2-6)
CASSLGGSGANVLTF

SEQ ID NO: 282733 - protein, 13 aa, Homo sapiens
  CDR3 for alpha chain variable domain of TCR clone 141367 (TRAV36/DV7, TRAJ38)
CVANAGNNRKLIW

SEQ ID NO: 282734 - protein, 14 aa, Homo sapiens
  CDR3 for beta chain variable domain of TCR clone 141367 (TRBV7-2, TRBJ2-7)
CASSLRWEVNEQCF

SEQ ID NO: 282735 - protein, 15 aa, Homo sapiens
  CDR3 for alpha chain variable domain of TCR clone 141368 (TRAV21, TRAJ24)
CAARSSTDSWWKLQF

SEQ ID NO: 282736 - protein, 15 aa, Homo sapiens
  CDR3 for beta chain variable domain of TCR clone 141368 (TRBV5-1, TRBJ2-1)
CASSPPRAPYNEQFF

SEQ ID NO: 282737 - protein, 17 aa, Homo sapiens
  CDR3 for alpha chain variable domain of TCR clone 141369 (TRAV3, TRAJ42)
CAVRDRDYGGSQGNLIF

SEQ ID NO: 282738 - protein, 15 aa, Homo sapiens
  CDR3 for beta chain variable domain of TCR clone 141369 (TRBV6-6, TRBJ2-7)
SASSYSYGGSYEQYF

SEQ ID NO: 282739 - protein, 16 aa, Homo sapiens
  CDR3 for alpha chain variable domain of TCR clone 141370 (TRAV38-2/DV8, TRAJ47)
CAYRSAIMEYGNKLVF

SEQ ID NO: 282740 - protein, 14 aa, Homo sapiens
  CDR3 for beta chain variable domain of TCR clone 141370 (TRBV19, TRBJ2-7)
CASSIFAGTCEQYF

SEQ ID NO: 282741 - protein, 16 aa, Homo sapiens
  CDR3 for alpha chain variable domain of TCR clone 141371 (TRAV3, TRAJ37)
CAVRPHGSGNTGKLIF

SEQ ID NO: 282742 - protein, 16 aa, Homo sapiens
  CDR3 for beta chain variable domain of TCR clone 141371 (TRBV9, TRBJ1-2)
CASSVEEKVSPFGYTF

SEQ ID NO: 282743 - protein, 15 aa, Homo sapiens
  CDR3 for alpha chain variable domain of TCR clone 141372 (TRAV26-1, TRAJ15)
CIVRAANQAGPALIF

SEQ ID NO: 282744 - protein, 15 aa, Homo sapiens
  CDR3 for beta chain variable domain of TCR clone 141372 (TRBV20-1, TRBJ1-1)
CSARSAATSNTEAFF

SEQ ID NO: 282745 - protein, 14 aa, Homo sapiens
  CDR3 for alpha chain variable domain of TCR clone 141373 (TRAV8-3, TRAJ4)
CAVGASGGYTTLIF

SEQ ID NO: 282746 - protein, 16 aa, Homo sapiens
  CDR3 for beta chain variable domain of TCR clone 141373 (TRBV4-3, TRBJ2-2)
CASSHLQGSGTGELFF

SEQ ID NO: 282747 - protein, 16 aa, Homo sapiens
  CDR3 for alpha chain variable domain of TCR clone 141374 (TRAV12-3, TRAJ53)
CAMSPGSGGSNYKLTF

SEQ ID NO: 282748 - protein, 14 aa, Homo sapiens
  CDR3 for beta chain variable domain of TCR clone 141374 (TRBV12-5, TRBJ2-5)
CASGSRTHQETQYC

SEQ ID NO: 282749 - protein, 13 aa, Homo sapiens
  CDR3 for alpha chain variable domain of TCR clone 141375 (TRAV17, TRAJ22)
CSGRRGSARQLTF

SEQ ID NO: 282750 - protein, 14 aa, Homo sapiens
  CDR3 for beta chain variable domain of TCR clone 141375 (TRBV19, TRBJ1-1)
CASSITGWETEAFF

SEQ ID NO: 282751 - protein, 14 aa, Homo sapiens
  CDR3 for alpha chain variable domain of TCR clone 141376 (TRAV19, TRAJ22)
CALSDSGSARQLTF

SEQ ID NO: 282752 - protein, 14 aa, Homo sapiens
  CDR3 for beta chain variable domain of TCR clone 141376 (TRBV20-1, TRBJ2-1)
CSAPPGLPYNEQFF

SEQ ID NO: 282753 - protein, 14 aa, Homo sapiens
  CDR3 for alpha chain variable domain of TCR clone 141377 (TRAV16, TRAJ4)
CALHFSGGYNKLIF

SEQ ID NO: 282754 - protein, 12 aa, Homo sapiens
  CDR3 for beta chain variable domain of TCR clone 141377 (TRBV11-2, TRBJ2-1)
CASSPGNNEQFF

SEQ ID NO: 282755 - protein, 15 aa, Homo sapiens
  CDR3 for alpha chain variable domain of TCR clone 141378 (TRAV12-3, TRAJ42)
CAMSGHGGSQGNLIF

SEQ ID NO: 282756 - protein, 12 aa, Homo sapiens
  CDR3 for beta chain variable domain of TCR clone 141378 (TRBV11-2, TRBJ2-1)
CASSPGNNEQFF

SEQ ID NO: 282757 - protein, 13 aa, Homo sapiens
  CDR3 for alpha chain variable domain of TCR clone 141379 (TRAV25, TRAJ44)
LILGTGTASKLTF

SEQ ID NO: 282758 - protein, 12 aa, Homo sapiens
  CDR3 for beta chain variable domain of TCR clone 141379 (TRBV29-1, TRBJ1-3)
CSTRDSGNTMYF

SEQ ID NO: 282759 - protein, 11 aa, Homo sapiens
  CDR3 for alpha chain variable domain of TCR clone 141380 (TRAV2, TRAJ33)
CAVDSNYQLIW

SEQ ID NO: 282760 - protein, 14 aa, Homo sapiens
  CDR3 for beta chain variable domain of TCR clone 141380 (TRBV11-2, TRBJ2-3)
YASSRLARTDTQYF

SEQ ID NO: 282761 - protein, 12 aa, Homo sapiens
  CDR3 for alpha chain variable domain of TCR clone 141381 (TRAV12-2, TRAJ10)
WGVTGGGNKLTF

SEQ ID NO: 282762 - protein, 16 aa, Homo sapiens
  CDR3 for beta chain variable domain of TCR clone 141381 (TRBV6-4, TRBJ1-2)
CASSEAVGDPNYRHTF

SEQ ID NO: 282763 - protein, 13 aa, Homo sapiens
  CDR3 for alpha chain variable domain of TCR clone 141382 (TRAV12-1, TRAJ26)
CVVRRNYGQNFVF

SEQ ID NO: 282764 - protein, 16 aa, Homo sapiens
  CDR3 for beta chain variable domain of TCR clone 141382 (TRBV6-1, TRBJ1-2)
CASSEANSIINYGYTF

SEQ ID NO: 282765 - protein, 13 aa, Homo sapiens
  CDR3 for alpha chain variable domain of TCR clone 141383 (TRAV1-2, TRAJ9)
CAALNTGGFKTIF

SEQ ID NO: 282766 - protein, 14 aa, Homo sapiens
  CDR3 for beta chain variable domain of TCR clone 141383 (TRBV13, TRBJ2-3)
CASSSGSPTDKQYF

SEQ ID NO: 282767 - protein, 11 aa, Homo sapiens
  CDR3 for alpha chain variable domain of TCR clone 141384 (TRAV22, TRAJ49)
CAVLTGDQFYF

SEQ ID NO: 282768 - protein, 11 aa, Homo sapiens
  CDR3 for beta chain variable domain of TCR clone 141384 (TRBV5-7, TRBJ2-1)
CASSLGGEQFF

SEQ ID NO: 282769 - protein, 13 aa, Homo sapiens
  CDR3 for alpha chain variable domain of TCR clone 141385 (TRAV4, TRAJ36)
CLVGPTGANNLFF

SEQ ID NO: 282770 - protein, 15 aa, Homo sapiens
  CDR3 for beta chain variable domain of TCR clone 141385 (TRBV5-1, TRBJ2-1)
CASSPPRAPYNEQFF

SEQ ID NO: 282771 - protein, 15 aa, Homo sapiens
  CDR3 for alpha chain variable domain of TCR clone 141386 (TRAV20, TRAJ28)
CAVQGTGAGSYQLTF

SEQ ID NO: 282772 - protein, 12 aa, Homo sapiens
  CDR3 for beta chain variable domain of TCR clone 141386 (TRBV5-1, TRBJ1-2)
CASSLDGKGYTF

SEQ ID NO: 282773 - protein, 15 aa, Homo sapiens
  CDR3 for alpha chain variable domain of TCR clone 141387 (TRAV27, TRAJ39)
ASTSVQENAGNMLTF

SEQ ID NO: 282774 - protein, 14 aa, Homo sapiens
  CDR3 for beta chain variable domain of TCR clone 141387 (TRBV7-6, TRBJ2-3)
CASSVAGGTDTQYF

SEQ ID NO: 282775 - protein, 13 aa, Homo sapiens
  CDR3 for alpha chain variable domain of TCR clone 141388 (TRAV1-1, TRAJ13)
CAVNSGGYQQVTF

SEQ ID NO: 282776 - protein, 12 aa, Homo sapiens
  CDR3 for beta chain variable domain of TCR clone 141388 (TRBV28, TRBJ2-1)
CASSVQINEQFF

SEQ ID NO: 282777 - protein, 12 aa, Homo sapiens
  CDR3 for alpha chain variable domain of TCR clone 141389 (TRAV27, TRAJ9)
CAGESGGFKTIF

SEQ ID NO: 282778 - protein, 14 aa, Homo sapiens
  CDR3 for beta chain variable domain of TCR clone 141389 (TRBV6-1, TRBJ2-1)
CASAKDGVYNEQFF

SEQ ID NO: 282779 - protein, 14 aa, Homo sapiens
  CDR3 for alpha chain variable domain of TCR clone 141390 (TRAV20, TRAJ13)
CAVLNSGGYQKVTF

SEQ ID NO: 282780 - protein, 13 aa, Homo sapiens
  CDR3 for beta chain variable domain of TCR clone 141390 (TRBV24-1, TRBJ2-2)
CATSDWSTGELFF

SEQ ID NO: 282781 - protein, 11 aa, Homo sapiens
  CDR3 for alpha chain variable domain of TCR clone 141391 (TRAV2, TRAJ33)
CAVDSNNQLIW

SEQ ID NO: 282782 - protein, 12 aa, Homo sapiens
  CDR3 for beta chain variable domain of TCR clone 141391 (TRBV11-2, TRBJ2-2)
CASSLGGGELFF

SEQ ID NO: 282783 - protein, 15 aa, Homo sapiens
  CDR3 for alpha chain variable domain of TCR clone 141392 (TRAV3, TRAJ20)
CAVRDIKLSDYKLSF

SEQ ID NO: 282784 - protein, 15 aa, Homo sapiens
  CDR3 for beta chain variable domain of TCR clone 141392 (TRBV7-9, TRBJ1-6)
CVSSSPGRGNSPLHF

SEQ ID NO: 282785 - protein, 12 aa, Homo sapiens
  CDR3 for alpha chain variable domain of TCR clone 141393 (TRAV21, TRAJ11)
CAATSGYSTLTF

SEQ ID NO: 282786 - protein, 12 aa, Homo sapiens
  CDR3 for beta chain variable domain of TCR clone 141393 (TRBV29-1, TRBJ2-3)
CSVTGGADTQYF

SEQ ID NO: 282787 - protein, 15 aa, Homo sapiens
  CDR3 for alpha chain variable domain of TCR clone 141394 (TRAV12-2, TRAJ53)
CAVNGGGGSNYKLTF

SEQ ID NO: 282788 - protein, 15 aa, Homo sapiens
  CDR3 for beta chain variable domain of TCR clone 141394 (TRBV28, TRBJ2-1)
CASRKTGTAYNEQFF

SEQ ID NO: 282789 - protein, 11 aa, Homo sapiens
  CDR3 for alpha chain variable domain of TCR clone 141395 (TRAV1-1, TRAJ20)
CAVFNDYKLSF

SEQ ID NO: 282790 - protein, 13 aa, Homo sapiens
  CDR3 for beta chain variable domain of TCR clone 141395 (TRBV19, TRBJ2-2)
CASSIWSTGELFF

SEQ ID NO: 282791 - protein, 14 aa, Homo sapiens
  CDR3 for alpha chain variable domain of TCR clone 141396 (TRAV16, TRAJ17)
CALSGRAAGNKLTF

SEQ ID NO: 282792 - protein, 17 aa, Homo sapiens
  CDR3 for beta chain variable domain of TCR clone 141396 (TRBV18, TRBJ2-6)
CASSPRKGAVGANVLTF

SEQ ID NO: 282793 - protein, 13 aa, Homo sapiens
  CDR3 for alpha chain variable domain of TCR clone 141397 (TRAV12-1, TRAJ26)
SATYPYYGQNFVF

SEQ ID NO: 282794 - protein, 15 aa, Homo sapiens
  CDR3 for beta chain variable domain of TCR clone 141397 (TRBV5-1, TRBJ2-6)
CASSLDPSGADVLTF

SEQ ID NO: 282795 - protein, 14 aa, Homo sapiens
  CDR3 for alpha chain variable domain of TCR clone 141398 (TRAV23/DV6, TRAJ28)
CAARSGAGSYQLTF

SEQ ID NO: 282796 - protein, 14 aa, Homo sapiens
  CDR3 for beta chain variable domain of TCR clone 141398 (TRBV7-2, TRBJ2-7)
CASRSQGAAYEQYF

SEQ ID NO: 282797 - protein, 22 aa, Homo sapiens
  CDR3 for alpha chain variable domain of TCR clone 141399 (TRAV27, TRAJ41)
CAVRTQIPDIQNPDPPVYQLRH

SEQ ID NO: 282798 - protein, 16 aa, Homo sapiens
  CDR3 for beta chain variable domain of TCR clone 141399 (TRBV5-1, TRBJ2-3)
CASSLGLAVYTDTQYF

SEQ ID NO: 282799 - protein, 14 aa, Homo sapiens
  CDR3 for alpha chain variable domain of TCR clone 141400 (TRAV1-2, TRAJ16)
CAVNRFSDGQKLLF

SEQ ID NO: 282800 - protein, 15 aa, Homo sapiens
  CDR3 for beta chain variable domain of TCR clone 141400 (TRBV18, TRBJ1-4)
CQLSSNGGDNEKLFF

SEQ ID NO: 282801 - protein, 15 aa, Homo sapiens
  CDR3 for alpha chain variable domain of TCR clone 141401 (TRAV41, TRAJ45)
CAASYSGGGADGLTF

SEQ ID NO: 282802 - protein, 15 aa, Homo sapiens
  CDR3 for beta chain variable domain of TCR clone 141401 (TRBV20-1, TRBJ2-3)
CSATGTSGFTDTQYF

SEQ ID NO: 282803 - protein, 12 aa, Homo sapiens
  CDR3 for alpha chain variable domain of TCR clone 141402 (TRAV21, TRAJ49)
CAVNDGGNQFYF

SEQ ID NO: 282804 - protein, 14 aa, Homo sapiens
  CDR3 for beta chain variable domain of TCR clone 141402 (TRBV18, TRBJ2-7)
RASSPRGGSYEQYF

SEQ ID NO: 282805 - protein, 13 aa, Homo sapiens
  CDR3 for alpha chain variable domain of TCR clone 141403 (TRAV13-2, TRAJ48)
CAEMDFGNEKLTL

SEQ ID NO: 282806 - protein, 13 aa, Homo sapiens
  CDR3 for beta chain variable domain of TCR clone 141403 (TRBV7-9, TRBJ1-2)
CASSLKQNYGYTF

SEQ ID NO: 282807 - protein, 14 aa, Homo sapiens
  CDR3 for alpha chain variable domain of TCR clone 141404 (TRAV27, TRAJ45)
CAGAQEEVLTDALL

SEQ ID NO: 282808 - protein, 15 aa, Homo sapiens
  CDR3 for beta chain variable domain of TCR clone 141404 (TRBV20-1, TRBJ2-7)
CSARDRVSGMDEQYF

SEQ ID NO: 282809 - protein, 16 aa, Homo sapiens
  CDR3 for alpha chain variable domain of TCR clone 141405 (TRAV35, TRAJ28)
CAGQKYSGAGSYQLTS

SEQ ID NO: 282810 - protein, 13 aa, Homo sapiens
  CDR3 for beta chain variable domain of TCR clone 141405 (TRBV19, TRBJ1-2)
CASSQGQVYGYTF

SEQ ID NO: 282811 - protein, 14 aa, Homo sapiens
  CDR3 for alpha chain variable domain of TCR clone 141406 (TRAV1-2, TRAJ16)
CAVNRFSDGQKLLF

SEQ ID NO: 282812 - protein, 13 aa, Homo sapiens
  CDR3 for beta chain variable domain of TCR clone 141406 (TRBV11-2, TRBJ2-7)
CASSLGDSYEQYF

SEQ ID NO: 282813 - protein, 13 aa, Homo sapiens
  CDR3 for alpha chain variable domain of TCR clone 141407 (TRAV21, TRAJ27)
CAARPGNAGKSTF

SEQ ID NO: 282814 - protein, 14 aa, Homo sapiens
  CDR3 for beta chain variable domain of TCR clone 141407 (TRBV7-8, TRBJ1-2)
CASSPDSLSYGYTF

SEQ ID NO: 282815 - protein, 13 aa, Homo sapiens
  CDR3 for alpha chain variable domain of TCR clone 141408 (TRAV21, TRAJ57)
CAVTQGGSEKLVF

SEQ ID NO: 282816 - protein, 15 aa, Homo sapiens
  CDR3 for beta chain variable domain of TCR clone 141408 (TRBV3-1, TRBJ2-5)
CASSANLGGPETQYF

SEQ ID NO: 282817 - protein, 14 aa, Homo sapiens
  CDR3 for alpha chain variable domain of TCR clone 141409 (TRAV1-2, TRAJ8)
CAVREDTGFQKLVF

SEQ ID NO: 282818 - protein, 13 aa, Homo sapiens
  CDR3 for beta chain variable domain of TCR clone 141409 (TRBV7-1, TRBJ2-7)
CASSLTTGYEKYF

SEQ ID NO: 282819 - protein, 15 aa, Homo sapiens
  CDR3 for alpha chain variable domain of TCR clone 141410 (TRAV21, TRAJ53)
CATLISGGSNYKLTF

SEQ ID NO: 282820 - protein, 16 aa, Homo sapiens
  CDR3 for beta chain variable domain of TCR clone 141410 (TRBV29-1, TRBJ1-2)
CSVEANRDIANYGYTF

SEQ ID NO: 282821 - protein, 11 aa, Homo sapiens
  CDR3 for alpha chain variable domain of TCR clone 141411 (TRAV2, TRAJ33)
CAVDINYQLIW

SEQ ID NO: 282822 - protein, 14 aa, Homo sapiens
  CDR3 for beta chain variable domain of TCR clone 141411 (TRBV19, TRBJ2-1)
CASPTFVLSGEQFF

SEQ ID NO: 282823 - protein, 15 aa, Homo sapiens
  CDR3 for alpha chain variable domain of TCR clone 141412 (TRAV26-1, TRAJ29)
CIVRVEGSVNTPIVF

SEQ ID NO: 282824 - protein, 15 aa, Homo sapiens
  CDR3 for beta chain variable domain of TCR clone 141412 (TRBV7-9, TRBJ1-5)
CASSQGHQPNQPQHF

SEQ ID NO: 282825 - protein, 16 aa, Homo sapiens
  CDR3 for alpha chain variable domain of TCR clone 141413 (TRAV17, TRAJ57)
CFLLLCYGRGSEKLVF

SEQ ID NO: 282826 - protein, 13 aa, Homo sapiens
  CDR3 for beta chain variable domain of TCR clone 141413 (TRBV7-9, TRBJ2-7)
CASSFAGAYEQYF

SEQ ID NO: 282827 - protein, 15 aa, Homo sapiens
  CDR3 for alpha chain variable domain of TCR clone 141414 (TRAV3, TRAJ30)
CAVRDPMNRDDKIIF

SEQ ID NO: 282828 - protein, 13 aa, Homo sapiens
  CDR3 for beta chain variable domain of TCR clone 141414 (TRBV5-5, TRBJ1-2)
CASSFWRGEDYTF

SEQ ID NO: 282829 - protein, 12 aa, Homo sapiens
  CDR3 for alpha chain variable domain of TCR clone 141415 (TRAV10, TRAJ34)
CVVSGKHRQAHL

SEQ ID NO: 282830 - protein, 14 aa, Homo sapiens
  CDR3 for beta chain variable domain of TCR clone 141415 (TRBV19, TRBJ2-1)
CASPTFILSGEQFF

SEQ ID NO: 282831 - protein, 12 aa, Homo sapiens
  CDR3 for alpha chain variable domain of TCR clone 141416 (TRAV12-3, TRAJ40)
CAMSPGTYKYIF

SEQ ID NO: 282832 - protein, 20 aa, Homo sapiens
  CDR3 for beta chain variable domain of TCR clone 141416 (TRBV7-3, TRBJ2-2)
CASSHLFPGPTIHIAGELFF

SEQ ID NO: 282833 - protein, 14 aa, Homo sapiens
  CDR3 for alpha chain variable domain of TCR clone 141417 (TRAV12-3, TRAJ10)
SHLPLTGGGNKLTF

SEQ ID NO: 282834 - protein, 13 aa, Homo sapiens
  CDR3 for beta chain variable domain of TCR clone 141417 (TRBV2, TRBJ1-6)
CADSGSYDSPLHF

SEQ ID NO: 282835 - protein, 12 aa, Homo sapiens
  CDR3 for alpha chain variable domain of TCR clone 141418 (TRAV30, TRAJ43)
CGTEERGNDMRF

SEQ ID NO: 282836 - protein, 15 aa, Homo sapiens
  CDR3 for beta chain variable domain of TCR clone 141418 (TRBV3-1, TRBJ2-2)
CASSQDWTRAGELFF

SEQ ID NO: 282837 - protein, 15 aa, Homo sapiens
  CDR3 for alpha chain variable domain of TCR clone 141419 (TRAV23/DV6, TRAJ44)
CAAMKPTGTASKLTF

SEQ ID NO: 282838 - protein, 16 aa, Homo sapiens
  CDR3 for beta chain variable domain of TCR clone 141419 (TRBV28, TRBJ2-5)
CATSGWPSRLKETEYF

SEQ ID NO: 282839 - protein, 12 aa, Homo sapiens
  CDR3 for alpha chain variable domain of TCR clone 141420 (TRAV20, TRAJ56)
CAVTGANSKLTF

SEQ ID NO: 282840 - protein, 11 aa, Homo sapiens
  CDR3 for beta chain variable domain of TCR clone 141420 (TRBV7-8, TRBJ2-7)
CASSLSLEQYF

SEQ ID NO: 282841 - protein, 12 aa, Homo sapiens
  CDR3 for alpha chain variable domain of TCR clone 141421 (TRAV3, TRAJ27)
CAVRDKAGKSTF

SEQ ID NO: 282842 - protein, 14 aa, Homo sapiens
  CDR3 for beta chain variable domain of TCR clone 141421 (TRBV5-1, TRBJ1-2)
CSSSVDSTNYGYTF

SEQ ID NO: 282843 - protein, 14 aa, Homo sapiens
  CDR3 for alpha chain variable domain of TCR clone 141422 (TRAV29/DV5, TRAJ20)
CAATIRSNAYKLSF

SEQ ID NO: 282844 - protein, 15 aa, Homo sapiens
  CDR3 for beta chain variable domain of TCR clone 141422 (TRBV20-1, TRBJ2-1)
CSASSAGSSYNEQFF

SEQ ID NO: 282845 - protein, 15 aa, Homo sapiens
  CDR3 for alpha chain variable domain of TCR clone 141423 (TRAV26-1, TRAJ21)
CIVRVPNYNFNKCYF

SEQ ID NO: 282846 - protein, 16 aa, Homo sapiens
  CDR3 for beta chain variable domain of TCR clone 141423 (TRBV7-9, TRBJ2-3)
CASSVQGNPGTDTQYF

SEQ ID NO: 282847 - protein, 14 aa, Homo sapiens
  CDR3 for alpha chain variable domain of TCR clone 141424 (TRAV8-1, TRAJ36)
CAVDSPTGANNLFF

SEQ ID NO: 282848 - protein, 13 aa, Homo sapiens
  CDR3 for beta chain variable domain of TCR clone 141424 (TRBV15, TRBJ2-7)
CATSTTGHYEQYF

SEQ ID NO: 282849 - protein, 12 aa, Homo sapiens
  CDR3 for alpha chain variable domain of TCR clone 141425 (TRAV20, TRAJ33)
CAVRGSNYQLIW

SEQ ID NO: 282850 - protein, 13 aa, Homo sapiens
  CDR3 for beta chain variable domain of TCR clone 141425 (TRBV4-3, TRBJ1-1)
CSSSPTGNTEAFF

SEQ ID NO: 282851 - protein, 14 aa, Homo sapiens
  CDR3 for alpha chain variable domain of TCR clone 141426 (TRAV12-2, TRAJ40)
CAVKIPSGTYKYIF

SEQ ID NO: 282852 - protein, 15 aa, Homo sapiens
  CDR3 for beta chain variable domain of TCR clone 141426 (TRBV19, TRBJ2-7)
CASSPAGSGEALRYF

SEQ ID NO: 282853 - protein, 12 aa, Homo sapiens
  CDR3 for alpha chain variable domain of TCR clone 141427 (TRAV21, TRAJ31)
CAVSPARGRLMF

SEQ ID NO: 282854 - protein, 14 aa, Homo sapiens
  CDR3 for beta chain variable domain of TCR clone 141427 (TRBV28, TRBJ2-7)
CASSLLRISYEPYF

SEQ ID NO: 282855 - protein, 18 aa, Homo sapiens
  CDR3 for alpha chain variable domain of TCR clone 141428 (TRAV26-1, TRAJ52)
CIVRVAGAGGTSYGKLTF

SEQ ID NO: 282856 - protein, 13 aa, Homo sapiens
  CDR3 for beta chain variable domain of TCR clone 141428 (TRBV7-8, TRBJ1-2)
CASSAQSYYGYTC

SEQ ID NO: 282857 - protein, 16 aa, Homo sapiens
  CDR3 for alpha chain variable domain of TCR clone 141429 (TRAV30, TRAJ24)
CGTEIVDADSWGKFQF

SEQ ID NO: 282858 - protein, 17 aa, Homo sapiens
  CDR3 for beta chain variable domain of TCR clone 141429 (TRBV4-1, TRBJ2-3)
CASSQDPAGGPLDTQYF

SEQ ID NO: 282859 - protein, 15 aa, Homo sapiens
  CDR3 for alpha chain variable domain of TCR clone 141430 (TRAV12-2, TRAJ53)
CAVNGGGGSNYKLTF

SEQ ID NO: 282860 - protein, 18 aa, Homo sapiens
  CDR3 for beta chain variable domain of TCR clone 141430 (TRBV11-2, TRBJ2-5)
CASSRTGALRPSTSGQAR

SEQ ID NO: 282861 - protein, 16 aa, Homo sapiens
  CDR3 for alpha chain variable domain of TCR clone 141431 (TRAV8-6, TRAJ28)
CAVTSKPGAGSYQLTF

SEQ ID NO: 282862 - protein, 16 aa, Homo sapiens
  CDR3 for beta chain variable domain of TCR clone 141431 (TRBV12-4, TRBJ2-5)
CASSCRPSGDLETQYF

SEQ ID NO: 282863 - protein, 14 aa, Homo sapiens
  CDR3 for alpha chain variable domain of TCR clone 141432 (TRAV1-2, TRAJ16)
CAVNRFSDGQKLVF

SEQ ID NO: 282864 - protein, 15 aa, Homo sapiens
  CDR3 for beta chain variable domain of TCR clone 141432 (TRBV9, TRBJ1-6)
CASSVAGTGDSPRHF

SEQ ID NO: 282865 - protein, 14 aa, Homo sapiens
  CDR3 for alpha chain variable domain of TCR clone 141433 (TRAV12-3, TRAJ10)
SHLPLTGGGDKLTF

SEQ ID NO: 282866 - protein, 15 aa, Homo sapiens
  CDR3 for beta chain variable domain of TCR clone 141433 (TRBV2, TRBJ2-1)
CASSELAGSYNEQFF

SEQ ID NO: 282867 - protein, 13 aa, Homo sapiens
  CDR3 for alpha chain variable domain of TCR clone 141434 (TRAV26-1, TRAJ35)
CIVSRRVGERLHC

SEQ ID NO: 282868 - protein, 17 aa, Homo sapiens
  CDR3 for beta chain variable domain of TCR clone 141434 (TRBV7-9, TRBJ2-7)
CASSFDGSRGGAYEQYF

SEQ ID NO: 282869 - protein, 13 aa, Homo sapiens
  CDR3 for alpha chain variable domain of TCR clone 141435 (TRAV2, TRAJ40)
CAVVTSGTYKYIF

SEQ ID NO: 282870 - protein, 16 aa, Homo sapiens
  CDR3 for beta chain variable domain of TCR clone 141435 (TRBV29-1, TRBJ2-6)
CSVEDITYSGANGLTF

SEQ ID NO: 282871 - protein, 11 aa, Homo sapiens
  CDR3 for alpha chain variable domain of TCR clone 141436 (TRAV12-3, TRAJ27)
CAMANAGKSTF

SEQ ID NO: 282872 - protein, 14 aa, Homo sapiens
  CDR3 for beta chain variable domain of TCR clone 141436 (TRBV4-1, TRBJ2-2)
CASSQAVNIGELFF

SEQ ID NO: 282873 - protein, 17 aa, Homo sapiens
  CDR3 for alpha chain variable domain of TCR clone 141437 (TRAV3, TRAJ38)
CAVRGCLNAGSNRKLIW

SEQ ID NO: 282874 - protein, 16 aa, Homo sapiens
  CDR3 for beta chain variable domain of TCR clone 141437 (TRBV20-1, TRBJ1-4)
CSAPGQGLLTNEKLFF

SEQ ID NO: 282875 - protein, 13 aa, Homo sapiens
  CDR3 for alpha chain variable domain of TCR clone 141438 (TRAV23/DV6, TRAJ12)
CAPGGDSSYKLIF

SEQ ID NO: 282876 - protein, 14 aa, Homo sapiens
  CDR3 for beta chain variable domain of TCR clone 141438 (TRBV11-2, TRBJ2-5)
CASRPLAGRETQYF

SEQ ID NO: 282877 - protein, 16 aa, Homo sapiens
  CDR3 for alpha chain variable domain of TCR clone 141439 (TRAV26-1, TRAJ32)
CIVRTNYGGATNKLIF

SEQ ID NO: 282878 - protein, 14 aa, Homo sapiens
  CDR3 for beta chain variable domain of TCR clone 141439 (TRBV27, TRBJ1-5)
CASSLSVSNQPQHF

SEQ ID NO: 282879 - protein, 13 aa, Homo sapiens
  CDR3 for alpha chain variable domain of TCR clone 141440 (TRAV13-2, TRAJ40)
CTEFTSGTYKYIF

SEQ ID NO: 282880 - protein, 14 aa, Homo sapiens
  CDR3 for beta chain variable domain of TCR clone 141440 (TRBV10-2, TRBJ1-5)
CASSSTGRNQPQHF

SEQ ID NO: 282881 - protein, 11 aa, Homo sapiens
  CDR3 for alpha chain variable domain of TCR clone 141441 (TRAV1-2, TRAJ40)
CAVPGTYIYIF

SEQ ID NO: 282882 - protein, 16 aa, Homo sapiens
  CDR3 for beta chain variable domain of TCR clone 141441 (TRBV7-3, TRBJ2-2)
CASSLKRGTLSGELFF

SEQ ID NO: 282883 - protein, 14 aa, Homo sapiens
  CDR3 for alpha chain variable domain of TCR clone 141442 (TRAV1-2, TRAJ8)
CAVREDTGRQKLVF

SEQ ID NO: 282884 - protein, 15 aa, Homo sapiens
  CDR3 for beta chain variable domain of TCR clone 141442 (TRBV6-3, TRBJ2-7)
CASSSPGTVFYEQYF

SEQ ID NO: 282885 - protein, 13 aa, Homo sapiens
  CDR3 for alpha chain variable domain of TCR clone 141443 (TRAV12-3, TRAJ54)
CAMTLQGAQKLGF

SEQ ID NO: 282886 - protein, 14 aa, Homo sapiens
  CDR3 for beta chain variable domain of TCR clone 141443 (TRBV4-1, TRBJ2-2)
CASSQAVNTGELFF

SEQ ID NO: 282887 - protein, 19 aa, Homo sapiens
  CDR3 for alpha chain variable domain of TCR clone 141444 (TRAV1-2, TRAJ26)
CLLPLCCERPDNYGQNYVF

SEQ ID NO: 282888 - protein, 15 aa, Homo sapiens
  CDR3 for beta chain variable domain of TCR clone 141444 (TRBV9, TRBJ1-6)
CASSVAGTGDSPLHF

SEQ ID NO: 282889 - protein, 14 aa, Homo sapiens
  CDR3 for alpha chain variable domain of TCR clone 141445 (TRAV13-1, TRAJ36)
CAAIYQTGANNLFF

SEQ ID NO: 282890 - protein, 15 aa, Homo sapiens
  CDR3 for beta chain variable domain of TCR clone 141445 (TRBV5-1, TRBJ2-7)
CASSLNGGPAREQYF

SEQ ID NO: 282891 - protein, 16 aa, Homo sapiens
  CDR3 for alpha chain variable domain of TCR clone 141446 (TRAV21, TRAJ45)
CAVSWGSGGGADGLTF

SEQ ID NO: 282892 - protein, 13 aa, Homo sapiens
  CDR3 for beta chain variable domain of TCR clone 141446 (TRBV12-4, TRBJ2-7)
CASSPTETYEQYF

SEQ ID NO: 282893 - protein, 14 aa, Homo sapiens
  CDR3 for alpha chain variable domain of TCR clone 141447 (TRAV2, TRAJ12)
CAVDARDSSYKLIF

SEQ ID NO: 282894 - protein, 13 aa, Homo sapiens
  CDR3 for beta chain variable domain of TCR clone 141447 (TRBV19, TRBJ2-1)
CASKVGAGGEQFF

SEQ ID NO: 282895 - protein, 14 aa, Homo sapiens
  CDR3 for alpha chain variable domain of TCR clone 141448 (TRAV26-2, TRAJ32)
CCVGYGGATNKLIF

SEQ ID NO: 282896 - protein, 12 aa, Homo sapiens
  CDR3 for beta chain variable domain of TCR clone 141448 (TRBV11-2, TRBJ2-1)
CASSPGNNEQFF

SEQ ID NO: 282897 - protein, 23 aa, Homo sapiens
  CDR3 for alpha chain variable domain of TCR clone 141449 (TRAV8-4, TRAJ32)
CAAYMVVLQTSSSLELALFLLSS

SEQ ID NO: 282898 - protein, 16 aa, Homo sapiens
  CDR3 for beta chain variable domain of TCR clone 141449 (TRBV27, TRBJ2-2)
CASSPLAAANTGELFF

SEQ ID NO: 282899 - protein, 15 aa, Homo sapiens
  CDR3 for alpha chain variable domain of TCR clone 141450 (TRAV13-1, TRAJ5)
CAVYIRDTGRRALTS

SEQ ID NO: 282900 - protein, 11 aa, Homo sapiens
  CDR3 for beta chain variable domain of TCR clone 141450 (TRBV25-1, TRBJ1-1)
PTWGGNTEAFF

SEQ ID NO: 282901 - protein, 14 aa, Homo sapiens
  CDR3 for alpha chain variable domain of TCR clone 141451 (TRAV1-2, TRAJ8)
CAVREDKGFQKLVF

SEQ ID NO: 282902 - protein, 14 aa, Homo sapiens
  CDR3 for beta chain variable domain of TCR clone 141451 (TRBV28, TRBJ2-1)
CASSFDSVSDEQFF

SEQ ID NO: 282903 - protein, 20 aa, Homo sapiens
  CDR3 for alpha chain variable domain of TCR clone 141452 (TRAV26-1, TRAJ38)
CIADNAGNNHIQNPDPAVYQ

SEQ ID NO: 282904 - protein, 13 aa, Homo sapiens
  CDR3 for beta chain variable domain of TCR clone 141452 (TRBV10-3, TRBJ2-7)
CASKLAVNYEQYF

SEQ ID NO: 282905 - protein, 12 aa, Homo sapiens
  CDR3 for alpha chain variable domain of TCR clone 141453 (TRAV12-2, TRAJ36)
CAAPRGANNLFF

SEQ ID NO: 282906 - protein, 15 aa, Homo sapiens
  CDR3 for beta chain variable domain of TCR clone 141453 (TRBV11-2, TRBJ1-3)
CASSLDGTVGNTIYV

SEQ ID NO: 282907 - protein, 14 aa, Homo sapiens
  CDR3 for alpha chain variable domain of TCR clone 141454 (TRAV35, TRAJ22)
CAGLRPGSIRQLTF

SEQ ID NO: 282908 - protein, 15 aa, Homo sapiens
  CDR3 for beta chain variable domain of TCR clone 141454 (TRBV12-4, TRBJ2-5)
CASSPPTGLQETQYF

SEQ ID NO: 282909 - protein, 13 aa, Homo sapiens
  CDR3 for alpha chain variable domain of TCR clone 141455 (TRAV12-1, TRAJ53)
CVVNAESNYKLTF

SEQ ID NO: 282910 - protein, 13 aa, Homo sapiens
  CDR3 for beta chain variable domain of TCR clone 141455 (TRBV7-9, TRBJ1-2)
CASSLKQNYGYTF

SEQ ID NO: 282911 - protein, 15 aa, Homo sapiens
  CDR3 for alpha chain variable domain of TCR clone 141456 (TRAV2, TRAJ39)
CAVEDRRNAGNMLNF

SEQ ID NO: 282912 - protein, 16 aa, Homo sapiens
  CDR3 for beta chain variable domain of TCR clone 141456 (TRBV7-8, TRBJ2-7)
CASSLASGTSVYEQYF

SEQ ID NO: 282913 - protein, 12 aa, Homo sapiens
  CDR3 for alpha chain variable domain of TCR clone 141457 (TRAV12-2, TRAJ16)
CAVAPDGQKLLF

SEQ ID NO: 282914 - protein, 16 aa, Homo sapiens
  CDR3 for beta chain variable domain of TCR clone 141457 (TRBV6-6, TRBJ2-1)
CASSLLSDSSYNEQFF

SEQ ID NO: 282915 - protein, 11 aa, Homo sapiens
  CDR3 for alpha chain variable domain of TCR clone 141458 (TRAV35, TRAJ52)
CAGTPKGKLTF

SEQ ID NO: 282916 - protein, 17 aa, Homo sapiens
  CDR3 for beta chain variable domain of TCR clone 141458 (TRBV7-9, TRBJ2-1)
CASSLVASYPSYNEQFF

SEQ ID NO: 282917 - protein, 13 aa, Homo sapiens
  CDR3 for alpha chain variable domain of TCR clone 141459 (TRAV1-2, TRAJ9)
CAALNTGGFKTIF

SEQ ID NO: 282918 - protein, 15 aa, Homo sapiens
  CDR3 for beta chain variable domain of TCR clone 141459 (TRBV6-3, TRBJ2-7)
CASSSHGTVFYEQYF

SEQ ID NO: 282919 - protein, 17 aa, Homo sapiens
  CDR3 for alpha chain variable domain of TCR clone 141460 (TRAV26-1, TRAJ37)
CIVRVITVSSNTGKLIF

SEQ ID NO: 282920 - protein, 15 aa, Homo sapiens
  CDR3 for beta chain variable domain of TCR clone 141460 (TRBV7-2, TRBJ2-1)
CASSLVRGGQNEQFF

SEQ ID NO: 282921 - protein, 16 aa, Homo sapiens
  CDR3 for alpha chain variable domain of TCR clone 141461 (TRAV12-3, TRAJ53)
CAMSPGSGGSNYKLTF

SEQ ID NO: 282922 - protein, 13 aa, Homo sapiens
  CDR3 for beta chain variable domain of TCR clone 141461 (TRBV7-2, TRBJ2-5)
CASSQTSVETKYF

SEQ ID NO: 282923 - protein, 12 aa, Homo sapiens
  CDR3 for alpha chain variable domain of TCR clone 141462 (TRAV17, TRAJ57)
CATDGGSEKLVF

SEQ ID NO: 282924 - protein, 14 aa, Homo sapiens
  CDR3 for beta chain variable domain of TCR clone 141462 (TRBV19, TRBJ2-1)
CASEVTGARNEQFF

SEQ ID NO: 282925 - protein, 12 aa, Homo sapiens
  CDR3 for alpha chain variable domain of TCR clone 141463 (TRAV8-3, TRAJ26)
CAGDNYGQNFVF

SEQ ID NO: 282926 - protein, 13 aa, Homo sapiens
  CDR3 for beta chain variable domain of TCR clone 141463 (TRBV19, TRBJ1-2)
CASSVPGQDGYSF

SEQ ID NO: 282927 - protein, 13 aa, Homo sapiens
  CDR3 for alpha chain variable domain of TCR clone 141464 (TRAV1-2, TRAJ9)
CAALNTGGFTTIF

SEQ ID NO: 282928 - protein, 12 aa, Homo sapiens
  CDR3 for beta chain variable domain of TCR clone 141464 (TRBV11-2, TRBJ2-2)
CASSLGGGELFF

SEQ ID NO: 282929 - protein, 14 aa, Homo sapiens
  CDR3 for alpha chain variable domain of TCR clone 141465 (TRAV8-3, TRAJ10)
CAVGNAGGGNKLTF

SEQ ID NO: 282930 - protein, 13 aa, Homo sapiens
  CDR3 for beta chain variable domain of TCR clone 141465 (TRBV19, TRBJ1-5)
CASSTRRDQPQHF

SEQ ID NO: 282931 - protein, 12 aa, Homo sapiens
  CDR3 for alpha chain variable domain of TCR clone 141466 (TRAV35, TRAJ30)
CAGQLADDKIIF

SEQ ID NO: 282932 - protein, 17 aa, Homo sapiens
  CDR3 for beta chain variable domain of TCR clone 141466 (TRBV4-2, TRBJ2-5)
CASSPGRWGNFQETQYF

SEQ ID NO: 282933 - protein, 13 aa, Homo sapiens
  CDR3 for alpha chain variable domain of TCR clone 141467 (TRAV3, TRAJ33)
CAVRDRSNYPLIW

SEQ ID NO: 282934 - protein, 16 aa, Homo sapiens
  CDR3 for beta chain variable domain of TCR clone 141467 (TRBV4-2, TRBJ2-7)
CASSQDRGTSSYEQYF

SEQ ID NO: 282935 - protein, 12 aa, Homo sapiens
  CDR3 for alpha chain variable domain of TCR clone 141468 (TRAV8-3, TRAJ26)
CAGDNYGQNFVF

SEQ ID NO: 282936 - protein, 16 aa, Homo sapiens
  CDR3 for beta chain variable domain of TCR clone 141468 (TRBV20-1, TRBJ1-2)
CSASMGQGVANYGYTF

SEQ ID NO: 282937 - protein, 13 aa, Homo sapiens
  CDR3 for alpha chain variable domain of TCR clone 141469 (TRAV12-2, TRAJ53)
CREGRSSNYKLTF

SEQ ID NO: 282938 - protein, 12 aa, Homo sapiens
  CDR3 for beta chain variable domain of TCR clone 141469 (TRBV28, TRBJ2-3)
CASSLYRDTQYF

SEQ ID NO: 282939 - protein, 14 aa, Homo sapiens
  CDR3 for alpha chain variable domain of TCR clone 141470 (TRAV27, TRAJ15)
CAGFDNQAGTSLIF

SEQ ID NO: 282940 - protein, 11 aa, Homo sapiens
  CDR3 for beta chain variable domain of TCR clone 141470 (TRBV29-1, TRBJ1-1)
CSVEVGTRTFF

SEQ ID NO: 282941 - protein, 15 aa, Homo sapiens
  CDR3 for alpha chain variable domain of TCR clone 141471 (TRAV23/DV6, TRAJ4)
CAASPLRGGYNKLIF

SEQ ID NO: 282942 - protein, 15 aa, Homo sapiens
  CDR3 for beta chain variable domain of TCR clone 141471 (TRBV7-9, TRBJ1-6)
GASSSPGRGNSPLHF

SEQ ID NO: 282943 - protein, 13 aa, Homo sapiens
  CDR3 for alpha chain variable domain of TCR clone 141472 (TRAV35, TRAJ48)
GRSRVFGNEKLTF

SEQ ID NO: 282944 - protein, 13 aa, Homo sapiens
  CDR3 for beta chain variable domain of TCR clone 141472 (TRBV7-7, TRBJ2-3)
CASSLSRADTQYF

SEQ ID NO: 282945 - protein, 12 aa, Homo sapiens
  CDR3 for alpha chain variable domain of TCR clone 141473 (TRAV12-3, TRAJ20)
CEMVIGDYKLSF

SEQ ID NO: 282946 - protein, 12 aa, Homo sapiens
  CDR3 for beta chain variable domain of TCR clone 141473 (TRBV6-1, TRBJ2-7)
CASSDYSYEQYF

SEQ ID NO: 282947 - protein, 14 aa, Homo sapiens
  CDR3 for alpha chain variable domain of TCR clone 141474 (TRAV26-1, TRAJ38)
CIADNAGNNRKLIW

SEQ ID NO: 282948 - protein, 17 aa, Homo sapiens
  CDR3 for beta chain variable domain of TCR clone 141474 (TRBV20-1, TRBJ2-3)
CSARGTGGPTGTDTQYF

SEQ ID NO: 282949 - protein, 12 aa, Homo sapiens
  CDR3 for alpha chain variable domain of TCR clone 141475 (TRAV3, TRAJ20)
CALRDPDYKLSF

SEQ ID NO: 282950 - protein, 13 aa, Homo sapiens
  CDR3 for beta chain variable domain of TCR clone 141475 (TRBV9, TRBJ2-1)
CASSVGQGGEQFF

SEQ ID NO: 282951 - protein, 12 aa, Homo sapiens
  CDR3 for alpha chain variable domain of TCR clone 141476 (TRAV16, TRAJ21)
CALLGNFNKFYF

SEQ ID NO: 282952 - protein, 15 aa, Homo sapiens
  CDR3 for beta chain variable domain of TCR clone 141476 (TRBV11-2, TRBJ2-2)
CASSSDRVNAGELFF

SEQ ID NO: 282953 - protein, 15 aa, Homo sapiens
  CDR3 for alpha chain variable domain of TCR clone 141477 (TRAV8-3, TRAJ45)
CASSYSGGGADGLTL

SEQ ID NO: 282954 - protein, 13 aa, Homo sapiens
  CDR3 for beta chain variable domain of TCR clone 141477 (TRBV10-3, TRBJ2-7)
CASELAVNYEQYF

SEQ ID NO: 282955 - protein, 11 aa, Homo sapiens
  CDR3 for alpha chain variable domain of TCR clone 141478 (TRAV2, TRAJ13)
CASGGYQKVTF

SEQ ID NO: 282956 - protein, 15 aa, Homo sapiens
  CDR3 for beta chain variable domain of TCR clone 141478 (TRBV29-1, TRBJ2-7)
CSVEFFDRGPYEQYF

SEQ ID NO: 282957 - protein, 13 aa, Homo sapiens
  CDR3 for alpha chain variable domain of TCR clone 141479 (TRAV22, TRAJ29)
FAVGGSGNTSLVF

SEQ ID NO: 282958 - protein, 13 aa, Homo sapiens
  CDR3 for beta chain variable domain of TCR clone 141479 (TRBV4-2, TRBJ1-1)
CASSQAGNTEAFF

SEQ ID NO: 282959 - protein, 14 aa, Homo sapiens
  CDR3 for alpha chain variable domain of TCR clone 141480 (TRAV26-1, TRAJ22)
CNVRVYGSARQLTF

SEQ ID NO: 282960 - protein, 17 aa, Homo sapiens
  CDR3 for beta chain variable domain of TCR clone 141480 (TRBV7-3, TRBJ2-3)
CASSPGGLAGFGDTQYF

SEQ ID NO: 282961 - protein, 14 aa, Homo sapiens
  CDR3 for alpha chain variable domain of TCR clone 141481 (TRAV12-2, TRAJ36)
CAVKIFTGANNLFF

SEQ ID NO: 282962 - protein, 14 aa, Homo sapiens
  CDR3 for beta chain variable domain of TCR clone 141481 (TRBV25-1, TRBJ1-2)
CASSDTTGVGGYSF

SEQ ID NO: 282963 - protein, 15 aa, Homo sapiens
  CDR3 for alpha chain variable domain of TCR clone 141482 (TRAV12-3, TRAJ6)
CAMSATSGGSYIPTF

SEQ ID NO: 282964 - protein, 11 aa, Homo sapiens
  CDR3 for beta chain variable domain of TCR clone 141482 (TRBV20-1, TRBJ1-5)
CSAQGHQPQHF

SEQ ID NO: 282965 - protein, 17 aa, Homo sapiens
  CDR3 for alpha chain variable domain of TCR clone 141483 (TRAV26-2, TRAJ42)
CILRDVGYGGSQGNLIF

SEQ ID NO: 282966 - protein, 16 aa, Homo sapiens
  CDR3 for beta chain variable domain of TCR clone 141483 (TRBV6-1, TRBJ2-5)
CASSERTGGTWETQYF

SEQ ID NO: 282967 - protein, 20 aa, Homo sapiens
  CDR3 for alpha chain variable domain of TCR clone 141484 (TRAV14/DV4, TRAJ22)
CAMREGPFSISSSSARQLTF

SEQ ID NO: 282968 - protein, 13 aa, Homo sapiens
  CDR3 for beta chain variable domain of TCR clone 141484 (TRBV4-2, TRBJ2-3)
CASSQDWQHTQYF

SEQ ID NO: 282969 - protein, 17 aa, Homo sapiens
  CDR3 for alpha chain variable domain of TCR clone 141485 (TRAV23/DV6, TRAJ57)
CAASSTLSHGGSEKLVF

SEQ ID NO: 282970 - protein, 14 aa, Homo sapiens
  CDR3 for beta chain variable domain of TCR clone 141485 (TRBV7-8, TRBJ2-5)
CASSATGGQETQYF

SEQ ID NO: 282971 - protein, 11 aa, Homo sapiens
  CDR3 for alpha chain variable domain of TCR clone 141486 (TRAV12-3, TRAJ43)
CAMSVSNDMRF

SEQ ID NO: 282972 - protein, 13 aa, Homo sapiens
  CDR3 for beta chain variable domain of TCR clone 141486 (TRBV20-1, TRBJ1-1)
CSAPRGGGTKAFF

SEQ ID NO: 282973 - protein, 16 aa, Homo sapiens
  CDR3 for alpha chain variable domain of TCR clone 141487 (TRAV21, TRAJ37)
CAVRTAGSSNTGKLIF

SEQ ID NO: 282974 - protein, 13 aa, Homo sapiens
  CDR3 for beta chain variable domain of TCR clone 141487 (TRBV7-9, TRBJ2-5)
CASLPSGRDTQYL

SEQ ID NO: 282975 - protein, 18 aa, Homo sapiens
  CDR3 for alpha chain variable domain of TCR clone 141488 (TRAV26-2, TRAJ45)
CILRVDKYSGGGADGLTF

SEQ ID NO: 282976 - protein, 16 aa, Homo sapiens
  CDR3 for beta chain variable domain of TCR clone 141488 (TRBV2, TRBJ1-4)
CASNLLQGATNEVLFF

SEQ ID NO: 282977 - protein, 12 aa, Homo sapiens
  CDR3 for alpha chain variable domain of TCR clone 141489 (TRAV13-1, TRAJ48)
CAANFGNEKLTL

SEQ ID NO: 282978 - protein, 13 aa, Homo sapiens
  CDR3 for beta chain variable domain of TCR clone 141489 (TRBV7-3, TRBJ1-1)
CASSQDWGAEAFF

SEQ ID NO: 282979 - protein, 14 aa, Homo sapiens
  CDR3 for alpha chain variable domain of TCR clone 141490 (TRAV17, TRAJ15)
CATDRGQAGTALIF

SEQ ID NO: 282980 - protein, 17 aa, Homo sapiens
  CDR3 for beta chain variable domain of TCR clone 141490 (TRBV29-1, TRBJ2-1)
CSVVGRAGAYSYNEQFF

SEQ ID NO: 282981 - protein, 12 aa, Homo sapiens
  CDR3 for alpha chain variable domain of TCR clone 141491 (TRAV13-1, TRAJ21)
CAAKEGFNKFYF

SEQ ID NO: 282982 - protein, 12 aa, Homo sapiens
  CDR3 for beta chain variable domain of TCR clone 141491 (TRBV7-9, TRBJ2-7)
CASSFGSYEQYF

SEQ ID NO: 282983 - protein, 11 aa, Homo sapiens
  CDR3 for alpha chain variable domain of TCR clone 141492 (TRAV12-1, TRAJ40)
CVVPGTYKYIF

SEQ ID NO: 282984 - protein, 16 aa, Homo sapiens
  CDR3 for beta chain variable domain of TCR clone 141492 (TRBV7-6, TRBJ2-1)
CASSAPGPSSYNEQFF

SEQ ID NO: 282985 - protein, 12 aa, Homo sapiens
  CDR3 for alpha chain variable domain of TCR clone 141493 (TRAV12-3, TRAJ17)
CAMTLTGNKLTF

SEQ ID NO: 282986 - protein, 16 aa, Homo sapiens
  CDR3 for beta chain variable domain of TCR clone 141493 (TRBV5-1, TRBJ2-3)
CASSLGLAVYTDTQYV

SEQ ID NO: 282987 - protein, 14 aa, Homo sapiens
  CDR3 for alpha chain variable domain of TCR clone 141494 (TRAV2, TRAJ9)
SAVEDRSGGFKTIF

SEQ ID NO: 282988 - protein, 18 aa, Homo sapiens
  CDR3 for beta chain variable domain of TCR clone 141494 (TRBV11-2, TRBJ2-3)
CASSLGGASRGAPNTQYF

SEQ ID NO: 282989 - protein, 14 aa, Homo sapiens
  CDR3 for alpha chain variable domain of TCR clone 141495 (TRAV12-3, TRAJ56)
CAMSVTGANSKLTF

SEQ ID NO: 282990 - protein, 17 aa, Homo sapiens
  CDR3 for beta chain variable domain of TCR clone 141495 (TRBV20-1, TRBJ2-3)
CSASLLGRCGSADTQYF

SEQ ID NO: 282991 - protein, 14 aa, Homo sapiens
  CDR3 for alpha chain variable domain of TCR clone 141496 (TRAV23/DV6, TRAJ13)
CAASETGGYQKVTF

SEQ ID NO: 282992 - protein, 14 aa, Homo sapiens
  CDR3 for beta chain variable domain of TCR clone 141496 (TRBV12-5, TRBJ2-5)
CASGSRTHQETQYF

SEQ ID NO: 282993 - protein, 16 aa, Homo sapiens
  CDR3 for alpha chain variable domain of TCR clone 141497 (TRAV14/DV4, TRAJ20)
CAMREGRSRADYKLSF

SEQ ID NO: 282994 - protein, 17 aa, Homo sapiens
  CDR3 for beta chain variable domain of TCR clone 141497 (TRBV15, TRBJ1-1)
CATSRVGGADGDTEAFF

SEQ ID NO: 282995 - protein, 14 aa, Homo sapiens
  CDR3 for alpha chain variable domain of TCR clone 141498 (TRAV12-2, TRAJ12)
CAVINRDSSYKLIF

SEQ ID NO: 282996 - protein, 15 aa, Homo sapiens
  CDR3 for beta chain variable domain of TCR clone 141498 (TRBV28, TRBJ2-1)
CASSLYTSSYNEQFF

SEQ ID NO: 282997 - protein, 13 aa, Homo sapiens
  CDR3 for alpha chain variable domain of TCR clone 141499 (TRAV8-3, TRAJ44)
CAVVPGTASKLTL

SEQ ID NO: 282998 - protein, 12 aa, Homo sapiens
  CDR3 for beta chain variable domain of TCR clone 141499 (TRBV11-2, TRBJ2-2)
CASSLGGGELFF

SEQ ID NO: 282999 - protein, 13 aa, Homo sapiens
  CDR3 for alpha chain variable domain of TCR clone 141500 (TRAV22, TRAJ29)
CAVGGSGNTPLVF

SEQ ID NO: 283000 - protein, 13 aa, Homo sapiens
  CDR3 for beta chain variable domain of TCR clone 141500 (TRBV19, TRBJ2-7)
CTSRKAGGSEQYF

SEQ ID NO: 283001 - protein, 17 aa, Homo sapiens
  CDR3 for alpha chain variable domain of TCR clone 141501 (TRAV27, TRAJ52)
CAGAGWAGGTSYGKLPF

SEQ ID NO: 283002 - protein, 16 aa, Homo sapiens
  CDR3 for beta chain variable domain of TCR clone 141501 (TRBV19, TRBJ2-1)
CASSKAGPSSYNEQFF

SEQ ID NO: 283003 - protein, 15 aa, Homo sapiens
  CDR3 for alpha chain variable domain of TCR clone 141502 (TRAV3, TRAJ32)
CAVSSYGGATHKLIF

SEQ ID NO: 283004 - protein, 13 aa, Homo sapiens
  CDR3 for beta chain variable domain of TCR clone 141502 (TRBV20-1, TRBJ2-7)
CSARPSTNYEQYF

SEQ ID NO: 283005 - protein, 14 aa, Homo sapiens
  CDR3 for alpha chain variable domain of TCR clone 141503 (TRAV8-1, TRAJ24)
CAVNAADSWGKLQF

SEQ ID NO: 283006 - protein, 16 aa, Homo sapiens
  CDR3 for beta chain variable domain of TCR clone 141503 (TRBV4-3, TRBJ2-1)
CASSPAPDRGVNEQLF

SEQ ID NO: 283007 - protein, 14 aa, Homo sapiens
  CDR3 for alpha chain variable domain of TCR clone 141504 (TRAV8-2, TRAJ4)
CVVSPSGGYNKVIF

SEQ ID NO: 283008 - protein, 15 aa, Homo sapiens
  CDR3 for beta chain variable domain of TCR clone 141504 (TRBV4-1, TRBJ1-4)
CASSDTGGTNEKLFF

SEQ ID NO: 283009 - protein, 18 aa, Homo sapiens
  CDR3 for alpha chain variable domain of TCR clone 141505 (TRAV21, TRAJ52)
CAVRPSPAGGTSYGKLTL

SEQ ID NO: 283010 - protein, 14 aa, Homo sapiens
  CDR3 for beta chain variable domain of TCR clone 141505 (TRBV12-5, TRBJ2-5)
CASGSRTHQETQYF

SEQ ID NO: 283011 - protein, 14 aa, Homo sapiens
  CDR3 for alpha chain variable domain of TCR clone 141506 (TRAV8-2, TRAJ37)
CVVSISGNTGKLIF

SEQ ID NO: 283012 - protein, 13 aa, Homo sapiens
  CDR3 for beta chain variable domain of TCR clone 141506 (TRBV7-7, TRBJ2-3)
CASSLSRADTQYF

SEQ ID NO: 283013 - protein, 14 aa, Homo sapiens
  CDR3 for alpha chain variable domain of TCR clone 141507 (TRAV3, TRAJ26)
CAVRDYNYGQNFVF

SEQ ID NO: 283014 - protein, 15 aa, Homo sapiens
  CDR3 for beta chain variable domain of TCR clone 141507 (TRBV20-1, TRBJ2-5)
CSANPPGRGGETQYF

SEQ ID NO: 283015 - protein, 16 aa, Homo sapiens
  CDR3 for alpha chain variable domain of TCR clone 141508 (TRAV26-1, TRAJ45)
CIVEKYSGGGADGLTF

SEQ ID NO: 283016 - protein, 16 aa, Homo sapiens
  CDR3 for beta chain variable domain of TCR clone 141508 (TRBV4-2, TRBJ1-1)
CASSPSPGRAAPEAFF

SEQ ID NO: 283017 - protein, 13 aa, Homo sapiens
  CDR3 for alpha chain variable domain of TCR clone 141509 (TRAV13-2, TRAJ22)
CRDPSGSARQLTL

SEQ ID NO: 283018 - protein, 15 aa, Homo sapiens
  CDR3 for beta chain variable domain of TCR clone 141509 (TRBV7-2, TRBJ2-7)
CASSLAVGQVYEQYF

SEQ ID NO: 283019 - protein, 14 aa, Homo sapiens
  CDR3 for alpha chain variable domain of TCR clone 141510 (TRAV12-1, TRAJ17)
CVVNYKAAGNKLTF

SEQ ID NO: 283020 - protein, 17 aa, Homo sapiens
  CDR3 for beta chain variable domain of TCR clone 141510 (TRBV20-1, TRBJ2-1)
CSASSSGLAGAYNEPFF

SEQ ID NO: 283021 - protein, 15 aa, Homo sapiens
  CDR3 for alpha chain variable domain of TCR clone 141511 (TRAV22, TRAJ43)
CAFDMRFGAGTRLTV

SEQ ID NO: 283022 - protein, 18 aa, Homo sapiens
  CDR3 for beta chain variable domain of TCR clone 141511 (TRBV20-1, TRBJ2-3)
CSASGLAGGPGTTDTQYF

SEQ ID NO: 283023 - protein, 12 aa, Homo sapiens
  CDR3 for alpha chain variable domain of TCR clone 141512 (TRAV12-1, TRAJ34)
CVVAGATDKLIF

SEQ ID NO: 283024 - protein, 16 aa, Homo sapiens
  CDR3 for beta chain variable domain of TCR clone 141512 (TRBV9, TRBJ2-2)
CASSAMGKGNTGELFF

SEQ ID NO: 283025 - protein, 13 aa, Homo sapiens
  CDR3 for alpha chain variable domain of TCR clone 141513 (TRAV13-2, TRAJ8)
CAFMNTGFQKLVL

SEQ ID NO: 283026 - protein, 15 aa, Homo sapiens
  CDR3 for beta chain variable domain of TCR clone 141513 (TRBV19, TRBJ2-3)
CAAGDTNAPNDTQYF

SEQ ID NO: 283027 - protein, 13 aa, Homo sapiens
  CDR3 for alpha chain variable domain of TCR clone 141514 (TRAV21, TRAJ27)
CAARPGNAGKSTF

SEQ ID NO: 283028 - protein, 13 aa, Homo sapiens
  CDR3 for beta chain variable domain of TCR clone 141514 (TRBV7-3, TRBJ2-7)
CASSQAGVYEQYF

SEQ ID NO: 283029 - protein, 14 aa, Homo sapiens
  CDR3 for alpha chain variable domain of TCR clone 141515 (TRAV17, TRAJ24)
CATLTTDSWGKFPF

SEQ ID NO: 283030 - protein, 16 aa, Homo sapiens
  CDR3 for beta chain variable domain of TCR clone 141515 (TRBV4-2, TRBJ2-7)
CASSQDGGSLRGEQYF

SEQ ID NO: 283031 - protein, 11 aa, Homo sapiens
  CDR3 for alpha chain variable domain of TCR clone 141516 (TRAV1-2, TRAJ20)
CAVSNDYKLSF

SEQ ID NO: 283032 - protein, 15 aa, Homo sapiens
  CDR3 for beta chain variable domain of TCR clone 141516 (TRBV5-1, TRBJ2-2)
CASSSQGGNTGELSF

SEQ ID NO: 283033 - protein, 10 aa, Homo sapiens
  CDR3 for alpha chain variable domain of TCR clone 141517 (TRAV17, TRAJ52)
SATSYGKLTF

SEQ ID NO: 283034 - protein, 13 aa, Homo sapiens
  CDR3 for beta chain variable domain of TCR clone 141517 (TRBV29-1, TRBJ2-5)
CSVGGTSAETQYC

SEQ ID NO: 283035 - protein, 15 aa, Homo sapiens
  CDR3 for alpha chain variable domain of TCR clone 141518 (TRAV3, TRAJ13)
CAVRVYSGGYHKVTF

SEQ ID NO: 283036 - protein, 15 aa, Homo sapiens
  CDR3 for beta chain variable domain of TCR clone 141518 (TRBV5-7, TRBJ1-2)
CASSLGVAANYGYTF

SEQ ID NO: 283037 - protein, 15 aa, Homo sapiens
  CDR3 for alpha chain variable domain of TCR clone 141519 (TRAV34, TRAJ38)
CGADFTPGNNRKLIW

SEQ ID NO: 283038 - protein, 14 aa, Homo sapiens
  CDR3 for beta chain variable domain of TCR clone 141519 (TRBV18, TRBJ2-7)
CASSPPAGAPEQYF

SEQ ID NO: 283039 - protein, 14 aa, Homo sapiens
  CDR3 for alpha chain variable domain of TCR clone 141520 (TRAV2, TRAJ29)
CAVEDRVGNTPLVF

SEQ ID NO: 283040 - protein, 14 aa, Homo sapiens
  CDR3 for beta chain variable domain of TCR clone 141520 (TRBV11-2, TRBJ2-5)
CASSRTGGIETQYF

SEQ ID NO: 283041 - protein, 14 aa, Homo sapiens
  CDR3 for alpha chain variable domain of TCR clone 141521 (TRAV9-2, TRAJ33)
CALSIMDSNYQLIW

SEQ ID NO: 283042 - protein, 14 aa, Homo sapiens
  CDR3 for beta chain variable domain of TCR clone 141521 (TRBV7-8, TRBJ1-2)
CASSPDSLSYGYTF

SEQ ID NO: 283043 - protein, 18 aa, Homo sapiens
  CDR3 for alpha chain variable domain of TCR clone 141522 (TRAV21, TRAJ52)
CAVGPSPAGGTSNGKLTF

SEQ ID NO: 283044 - protein, 12 aa, Homo sapiens
  CDR3 for beta chain variable domain of TCR clone 141522 (TRBV11-2, TRBJ2-2)
CASSLGGGELFF

SEQ ID NO: 283045 - protein, 14 aa, Homo sapiens
  CDR3 for alpha chain variable domain of TCR clone 141523 (TRAV12-3, TRAJ10)
SHLPLTGGGNKLTF

SEQ ID NO: 283046 - protein, 16 aa, Homo sapiens
  CDR3 for beta chain variable domain of TCR clone 141523 (TRBV6-6, TRBJ1-5)
CASSYSTLVGNQPQHF

SEQ ID NO: 283047 - protein, 14 aa, Homo sapiens
  CDR3 for alpha chain variable domain of TCR clone 141524 (TRAV23/DV6, TRAJ22)
CAASVSGFARQLTF

SEQ ID NO: 283048 - protein, 16 aa, Homo sapiens
  CDR3 for beta chain variable domain of TCR clone 141524 (TRBV19, TRBJ2-2)
CASSFPGQGLAGELFF

SEQ ID NO: 283049 - protein, 21 aa, Homo sapiens
  CDR3 for alpha chain variable domain of TCR clone 141525 (TRAV30, TRAJ43)
GLPAQLLRNLLPIIELNDMRF

SEQ ID NO: 283050 - protein, 12 aa, Homo sapiens
  CDR3 for beta chain variable domain of TCR clone 141525 (TRBV7-9, TRBJ1-4)
CASSTDREKLFF

SEQ ID NO: 283051 - protein, 11 aa, Homo sapiens
  CDR3 for alpha chain variable domain of TCR clone 141526 (TRAV2, TRAJ13)
CASGGYQKVTF

SEQ ID NO: 283052 - protein, 15 aa, Homo sapiens
  CDR3 for beta chain variable domain of TCR clone 141526 (TRBV5-4, TRBJ2-7)
CASSRFGTGSYEQYV

SEQ ID NO: 283053 - protein, 12 aa, Homo sapiens
  CDR3 for alpha chain variable domain of TCR clone 141527 (TRAV13-2, TRAJ23)
CAERHRGGKLIF

SEQ ID NO: 283054 - protein, 12 aa, Homo sapiens
  CDR3 for beta chain variable domain of TCR clone 141527 (TRBV27, TRBJ2-2)
CASKLFTGELFF

SEQ ID NO: 283055 - protein, 16 aa, Homo sapiens
  CDR3 for alpha chain variable domain of TCR clone 141528 (TRAV26-1, TRAJ47)
CIVRVVLSQYGNKLDF

SEQ ID NO: 283056 - protein, 16 aa, Homo sapiens
  CDR3 for beta chain variable domain of TCR clone 141528 (TRBV5-1, TRBJ2-1)
CASSCGVSGSYNEQFF

SEQ ID NO: 283057 - protein, 18 aa, Homo sapiens
  CDR3 for alpha chain variable domain of TCR clone 141529 (TRAV26-2, TRAJ45)
CILRVDKYSGGGADGLTF

SEQ ID NO: 283058 - protein, 14 aa, Homo sapiens
  CDR3 for beta chain variable domain of TCR clone 141529 (TRBV7-2, TRBJ2-7)
CASSPKTSFYEQYF

SEQ ID NO: 283059 - protein, 14 aa, Homo sapiens
  CDR3 for alpha chain variable domain of TCR clone 141530 (TRAV13-1, TRAJ26)
CAASSAHYGQNFVF

SEQ ID NO: 283060 - protein, 17 aa, Homo sapiens
  CDR3 for beta chain variable domain of TCR clone 141530 (TRBV25-1, TRBJ2-5)
CASSRRGGRGGQETQHF

SEQ ID NO: 283061 - protein, 14 aa, Homo sapiens
  CDR3 for alpha chain variable domain of TCR clone 141531 (TRAV26-1, TRAJ38)
CIADNAGNNRKLIW

SEQ ID NO: 283062 - protein, 15 aa, Homo sapiens
  CDR3 for beta chain variable domain of TCR clone 141531 (TRBV11-3, TRBJ2-7)
CASSPGPASSYEQYC

SEQ ID NO: 283063 - protein, 13 aa, Homo sapiens
  CDR3 for alpha chain variable domain of TCR clone 141532 (TRAV8-3, TRAJ37)
CAVPSSYTGKLIF

SEQ ID NO: 283064 - protein, 12 aa, Homo sapiens
  CDR3 for beta chain variable domain of TCR clone 141532 (TRBV11-2, TRBJ2-1)
CASSPGNNEQFF

SEQ ID NO: 283065 - protein, 14 aa, Homo sapiens
  CDR3 for alpha chain variable domain of TCR clone 141533 (TRAV9-2, TRAJ39)
CALYIYNAGNMLTF

SEQ ID NO: 283066 - protein, 15 aa, Homo sapiens
  CDR3 for beta chain variable domain of TCR clone 141533 (TRBV13, TRBJ1-2)
CASSSKIQGNYGYTF

SEQ ID NO: 283067 - protein, 14 aa, Homo sapiens
  CDR3 for alpha chain variable domain of TCR clone 141534 (TRAV8-6, TRAJ29)
CAVSRASGNTPLVF

SEQ ID NO: 283068 - protein, 14 aa, Homo sapiens
  CDR3 for beta chain variable domain of TCR clone 141534 (TRBV25-1, TRBJ1-4)
CASSAHKTNEKLFF

SEQ ID NO: 283069 - protein, 18 aa, Homo sapiens
  CDR3 for alpha chain variable domain of TCR clone 141535 (TRAV16, TRAJ45)
CAQASYPSSGRGAYGLTF

SEQ ID NO: 283070 - protein, 16 aa, Homo sapiens
  CDR3 for beta chain variable domain of TCR clone 141535 (TRBV4-1, TRBJ2-5)
CASSSGLAGVLGTQYF

SEQ ID NO: 283071 - protein, 13 aa, Homo sapiens
  CDR3 for alpha chain variable domain of TCR clone 141536 (TRAV21, TRAJ27)
CAARPGNAGKSTF

SEQ ID NO: 283072 - protein, 13 aa, Homo sapiens
  CDR3 for beta chain variable domain of TCR clone 141536 (TRBV18, TRBJ2-7)
CASQSWGGYEQYF

SEQ ID NO: 283073 - protein, 15 aa, Homo sapiens
  CDR3 for alpha chain variable domain of TCR clone 141537 (TRAV13-2, TRAJ5)
CAENPHWTGRRALTF

SEQ ID NO: 283074 - protein, 16 aa, Homo sapiens
  CDR3 for beta chain variable domain of TCR clone 141537 (TRBV20-1, TRBJ1-2)
CSASMGQGVANYGYTF

SEQ ID NO: 283075 - protein, 14 aa, Homo sapiens
  CDR3 for alpha chain variable domain of TCR clone 141538 (TRAV12-2, TRAJ45)
YAVNIGGGADGLTF

SEQ ID NO: 283076 - protein, 17 aa, Homo sapiens
  CDR3 for beta chain variable domain of TCR clone 141538 (TRBV4-2, TRBJ1-1)
CASTQFGGGSGNTEAFF

SEQ ID NO: 283077 - protein, 14 aa, Homo sapiens
  CDR3 for alpha chain variable domain of TCR clone 141539 (TRAV1-2, TRAJ8)
CAVREDTGFQKLVV

SEQ ID NO: 283078 - protein, 16 aa, Homo sapiens
  CDR3 for beta chain variable domain of TCR clone 141539 (TRBV19, TRBJ2-1)
CASSKAGPSSYNEQFF

SEQ ID NO: 283079 - protein, 14 aa, Homo sapiens
  CDR3 for alpha chain variable domain of TCR clone 141540 (TRAV29/DV5, TRAJ36)
CAARRKTGANNLFF

SEQ ID NO: 283080 - protein, 17 aa, Homo sapiens
  CDR3 for beta chain variable domain of TCR clone 141540 (TRBV19, TRBJ1-5)
CASSRDRILSRFQPQHF

SEQ ID NO: 283081 - protein, 11 aa, Homo sapiens
  CDR3 for alpha chain variable domain of TCR clone 141541 (TRAV23/DV6, TRAJ58)
CAARLLRGETS

SEQ ID NO: 283082 - protein, 13 aa, Homo sapiens
  CDR3 for beta chain variable domain of TCR clone 141541 (TRBV18, TRBJ2-1)
CASGLASNNEQFF

SEQ ID NO: 283083 - protein, 15 aa, Homo sapiens
  CDR3 for alpha chain variable domain of TCR clone 141542 (TRAV12-1, TRAJ40)
CVVNRDTAGTYQYIF

SEQ ID NO: 283084 - protein, 13 aa, Homo sapiens
  CDR3 for beta chain variable domain of TCR clone 141542 (TRBV6-1, TRBJ2-1)
CASEGSSYNEQFC

SEQ ID NO: 283085 - protein, 16 aa, Homo sapiens
  CDR3 for alpha chain variable domain of TCR clone 141543 (TRAV38-1, TRAJ32)
CAFMPFLGGAINKLIF

SEQ ID NO: 283086 - protein, 13 aa, Homo sapiens
  CDR3 for beta chain variable domain of TCR clone 141543 (TRBV7-9, TRBJ2-7)
CASSFAGAYEQYF

SEQ ID NO: 283087 - protein, 16 aa, Homo sapiens
  CDR3 for alpha chain variable domain of TCR clone 141544 (TRAV12-3, TRAJ53)
CAMSVGSGGSNYKLTF

SEQ ID NO: 283088 - protein, 11 aa, Homo sapiens
  CDR3 for beta chain variable domain of TCR clone 141544 (TRBV29-1, TRBJ2-5)
CSVASGESQYF

SEQ ID NO: 283089 - protein, 12 aa, Homo sapiens
  CDR3 for alpha chain variable domain of TCR clone 141545 (TRAV16, TRAJ10)
CSRTGGGNKLTF

SEQ ID NO: 283090 - protein, 13 aa, Homo sapiens
  CDR3 for beta chain variable domain of TCR clone 141545 (TRBV15, TRBJ2-7)
CTTSTTGHYEQYF

SEQ ID NO: 283091 - protein, 15 aa, Homo sapiens
  CDR3 for alpha chain variable domain of TCR clone 141546 (TRAV3, TRAJ13)
CAVRDIAGGYQKVTF

SEQ ID NO: 283092 - protein, 13 aa, Homo sapiens
  CDR3 for beta chain variable domain of TCR clone 141546 (TRBV2, TRBJ2-2)
CTSSKKNTGELFF

SEQ ID NO: 283093 - protein, 14 aa, Homo sapiens
  CDR3 for alpha chain variable domain of TCR clone 141547 (TRAV1-2, TRAJ8)
CAVREDTGFQKLVF

SEQ ID NO: 283094 - protein, 16 aa, Homo sapiens
  CDR3 for beta chain variable domain of TCR clone 141547 (TRBV7-7, TRBJ2-1)
CASSLASGTAYNEQFF

SEQ ID NO: 283095 - protein, 14 aa, Homo sapiens
  CDR3 for alpha chain variable domain of TCR clone 141548 (TRAV13-1, TRAJ35)
RAASKGGFGNVLHC

SEQ ID NO: 283096 - protein, 13 aa, Homo sapiens
  CDR3 for beta chain variable domain of TCR clone 141548 (TRBV7-3, TRBJ1-1)
CASSQDWGAEASF

SEQ ID NO: 283097 - protein, 15 aa, Homo sapiens
  CDR3 for alpha chain variable domain of TCR clone 141549 (TRAV17, TRAJ23)
CATDAEDNQGGKLIF

SEQ ID NO: 283098 - protein, 14 aa, Homo sapiens
  CDR3 for beta chain variable domain of TCR clone 141549 (TRBV6-1, TRBJ1-3)
CGSVQGGGGNTIYF

SEQ ID NO: 283099 - protein, 13 aa, Homo sapiens
  CDR3 for alpha chain variable domain of TCR clone 141550 (TRAV2, TRAJ24)
CAVSTDSWGELQF

SEQ ID NO: 283100 - protein, 13 aa, Homo sapiens
  CDR3 for beta chain variable domain of TCR clone 141550 (TRBV20-1, TRBJ2-2)
CSASAAGTGELFF

SEQ ID NO: 283101 - protein, 14 aa, Homo sapiens
  CDR3 for alpha chain variable domain of TCR clone 141551 (TRAV16, TRAJ33)
CALSAMDSNYQLIW

SEQ ID NO: 283102 - protein, 12 aa, Homo sapiens
  CDR3 for beta chain variable domain of TCR clone 141551 (TRBV5-1, TRBJ1-2)
CASSQDTYGYPF

SEQ ID NO: 283103 - protein, 15 aa, Homo sapiens
  CDR3 for alpha chain variable domain of TCR clone 141552 (TRAV12-1, TRAJ37)
CVVNLPTSNTGKLIF

SEQ ID NO: 283104 - protein, 16 aa, Homo sapiens
  CDR3 for beta chain variable domain of TCR clone 141552 (TRBV19, TRBJ1-2)
CASSIGLFRDAYGYTF

SEQ ID NO: 283105 - protein, 13 aa, Homo sapiens
  CDR3 for alpha chain variable domain of TCR clone 141553 (TRAV21, TRAJ36)
CAVIKTGANNLFF

SEQ ID NO: 283106 - protein, 13 aa, Homo sapiens
  CDR3 for beta chain variable domain of TCR clone 141553 (TRBV29-1, TRBJ2-3)
CSATRGGRVTQYF

SEQ ID NO: 283107 - protein, 14 aa, Homo sapiens
  CDR3 for alpha chain variable domain of TCR clone 141554 (TRAV12-1, TRAJ17)
CVVNYKTAGNKLTF

SEQ ID NO: 283108 - protein, 16 aa, Homo sapiens
  CDR3 for beta chain variable domain of TCR clone 141554 (TRBV12-5, TRBJ2-5)
CASGPRTSGNQETQYF

SEQ ID NO: 283109 - protein, 16 aa, Homo sapiens
  CDR3 for alpha chain variable domain of TCR clone 141555 (TRAV30, TRAJ24)
CGTEIVDADSWGKFQF

SEQ ID NO: 283110 - protein, 16 aa, Homo sapiens
  CDR3 for beta chain variable domain of TCR clone 141555 (TRBV6-5, TRBJ2-7)
CASSYFRVGISDEQYF

SEQ ID NO: 283111 - protein, 11 aa, Homo sapiens
  CDR3 for alpha chain variable domain of TCR clone 141556 (TRAV3, TRAJ21)
CAVGNFNKFYL

SEQ ID NO: 283112 - protein, 14 aa, Homo sapiens
  CDR3 for beta chain variable domain of TCR clone 141556 (TRBV19, TRBJ2-3)
CASSAPRGTDTQYF

SEQ ID NO: 283113 - protein, 12 aa, Homo sapiens
  CDR3 for alpha chain variable domain of TCR clone 141557 (TRAV12-3, TRAJ20)
CAMVRGDYKLSF

SEQ ID NO: 283114 - protein, 11 aa, Homo sapiens
  CDR3 for beta chain variable domain of TCR clone 141557 (TRBV3-1, TRBJ2-7)
CASTSLGEQYF

SEQ ID NO: 283115 - protein, 12 aa, Homo sapiens
  CDR3 for alpha chain variable domain of TCR clone 141558 (TRAV1-1, TRAJ9)
CAVDTGGFKTIF

SEQ ID NO: 283116 - protein, 13 aa, Homo sapiens
  CDR3 for beta chain variable domain of TCR clone 141558 (TRBV29-1, TRBJ2-1)
CSVEGGRVNEQFF

SEQ ID NO: 283117 - protein, 13 aa, Homo sapiens
  CDR3 for alpha chain variable domain of TCR clone 141559 (TRAV6, TRAJ16)
CALDDSDGQKLLF

SEQ ID NO: 283118 - protein, 16 aa, Homo sapiens
  CDR3 for beta chain variable domain of TCR clone 141559 (TRBV12-4, TRBJ1-6)
CASNLQGKGSPLRLGT

SEQ ID NO: 283119 - protein, 16 aa, Homo sapiens
  CDR3 for alpha chain variable domain of TCR clone 141560 (TRAV13-1, TRAJ35)
CAASKGGFGNVLHCVS

SEQ ID NO: 283120 - protein, 16 aa, Homo sapiens
  CDR3 for beta chain variable domain of TCR clone 141560 (TRBV2, TRBJ1-4)
CASNLLQGATNEKLFF

SEQ ID NO: 283121 - protein, 12 aa, Homo sapiens
  CDR3 for alpha chain variable domain of TCR clone 141561 (TRAV3, TRAJ20)
CAVSDGDYKLSF

SEQ ID NO: 283122 - protein, 16 aa, Homo sapiens
  CDR3 for beta chain variable domain of TCR clone 141561 (TRBV4-1, TRBJ2-3)
CASSQSTSGAEDTQYF

SEQ ID NO: 283123 - protein, 15 aa, Homo sapiens
  CDR3 for alpha chain variable domain of TCR clone 141562 (TRAV12-1, TRAJ44)
CVVVVNTGTASKLTF

SEQ ID NO: 283124 - protein, 16 aa, Homo sapiens
  CDR3 for beta chain variable domain of TCR clone 141562 (TRBV20-1, TRBJ2-5)
CSPGGTSGGYMETQYF

SEQ ID NO: 283125 - protein, 16 aa, Homo sapiens
  CDR3 for alpha chain variable domain of TCR clone 141563 (TRAV16, TRAJ42)
CALSGYYGGSQGNLIF

SEQ ID NO: 283126 - protein, 13 aa, Homo sapiens
  CDR3 for beta chain variable domain of TCR clone 141563 (TRBV12-5, TRBJ2-1)
CASGLGRGNEQFF

SEQ ID NO: 283127 - protein, 15 aa, Homo sapiens
  CDR3 for alpha chain variable domain of TCR clone 141564 (TRAV4, TRAJ39)
CLVGPNNNGGNMLTF

SEQ ID NO: 283128 - protein, 19 aa, Homo sapiens
  CDR3 for beta chain variable domain of TCR clone 141564 (TRBV14, TRBJ2-1)
CASSQDQLWEAPEYNEQFF

SEQ ID NO: 283129 - protein, 16 aa, Homo sapiens
  CDR3 for alpha chain variable domain of TCR clone 141565 (TRAV1-2, TRAJ6)
CAVRDQGTGESYIPTF

SEQ ID NO: 283130 - protein, 13 aa, Homo sapiens
  CDR3 for beta chain variable domain of TCR clone 141565 (TRBV28, TRBJ2-7)
CASTPGLAGEQYF

SEQ ID NO: 283131 - protein, 16 aa, Homo sapiens
  CDR3 for alpha chain variable domain of TCR clone 141566 (TRAV2, TRAJ13)
CAARILGVTRKLPLEL

SEQ ID NO: 283132 - protein, 14 aa, Homo sapiens
  CDR3 for beta chain variable domain of TCR clone 141566 (TRBV19, TRBJ2-1)
CASEVRGARNEQFF

SEQ ID NO: 283133 - protein, 14 aa, Homo sapiens
  CDR3 for alpha chain variable domain of TCR clone 141567 (TRAV12-1, TRAJ41)
CVVLNSNSVYALNF

SEQ ID NO: 283134 - protein, 14 aa, Homo sapiens
  CDR3 for beta chain variable domain of TCR clone 141567 (TRBV5-1, TRBJ2-7)
CASSRGESLYEQYF

SEQ ID NO: 283135 - protein, 10 aa, Homo sapiens
  CDR3 for alpha chain variable domain of TCR clone 141568 (TRAV26-1, TRAJ40)
CIAGTYKYIF

SEQ ID NO: 283136 - protein, 15 aa, Homo sapiens
  CDR3 for beta chain variable domain of TCR clone 141568 (TRBV7-3, TRBJ2-7)
CASSLTPTGYDEQYF

SEQ ID NO: 283137 - protein, 16 aa, Homo sapiens
  CDR3 for alpha chain variable domain of TCR clone 141569 (TRAV14/DV4, TRAJ54)
CAMREGRIQGATKLVF

SEQ ID NO: 283138 - protein, 18 aa, Homo sapiens
  CDR3 for beta chain variable domain of TCR clone 141569 (TRBV18, TRBJ1-3)
CASSPRGGAGPSGNTIYF

SEQ ID NO: 283139 - protein, 14 aa, Homo sapiens
  CDR3 for alpha chain variable domain of TCR clone 141570 (TRAV8-4, TRAJ37)
CAVREPSNTGKLIF

SEQ ID NO: 283140 - protein, 14 aa, Homo sapiens
  CDR3 for beta chain variable domain of TCR clone 141570 (TRBV28, TRBJ2-1)
RAIHRTGARTEQFF

SEQ ID NO: 283141 - protein, 12 aa, Homo sapiens
  CDR3 for alpha chain variable domain of TCR clone 141571 (TRAV3, TRAJ27)
CAVRDGAGKSTF

SEQ ID NO: 283142 - protein, 13 aa, Homo sapiens
  CDR3 for beta chain variable domain of TCR clone 141571 (TRBV7-9, TRBJ1-2)
CASSLKQNYGYTF

SEQ ID NO: 283143 - protein, 16 aa, Homo sapiens
  CDR3 for alpha chain variable domain of TCR clone 141572 (TRAV30, TRAJ24)
CGTEIVDADSWGKFQF

SEQ ID NO: 283144 - protein, 15 aa, Homo sapiens
  CDR3 for beta chain variable domain of TCR clone 141572 (TRBV11-2, TRBJ2-7)
CASSLTVGGSYEQYF

SEQ ID NO: 283145 - protein, 12 aa, Homo sapiens
  CDR3 for alpha chain variable domain of TCR clone 141573 (TRAV12-3, TRAJ17)
CAMTLTGNKLTF

SEQ ID NO: 283146 - protein, 17 aa, Homo sapiens
  CDR3 for beta chain variable domain of TCR clone 141573 (TRBV11-2, TRBJ2-1)
CASSLYPPGVEYNEQLF

SEQ ID NO: 283147 - protein, 13 aa, Homo sapiens
  CDR3 for alpha chain variable domain of TCR clone 141574 (TRAV21, TRAJ20)
CAGGLRVDYKLSF

SEQ ID NO: 283148 - protein, 13 aa, Homo sapiens
  CDR3 for beta chain variable domain of TCR clone 141574 (TRBV6-1, TRBJ1-1)
CASSRQGNTEAFF

SEQ ID NO: 283149 - protein, 11 aa, Homo sapiens
  CDR3 for alpha chain variable domain of TCR clone 141575 (TRAV1-2, TRAJ20)
CAVSNDYKISF

SEQ ID NO: 283150 - protein, 14 aa, Homo sapiens
  CDR3 for beta chain variable domain of TCR clone 141575 (TRBV19, TRBJ2-1)
CASPTFVLSGEQFF

SEQ ID NO: 283151 - protein, 11 aa, Homo sapiens
  CDR3 for alpha chain variable domain of TCR clone 141576 (TRAV3, TRAJ21)
CAVGNFNKFYF

SEQ ID NO: 283152 - protein, 15 aa, Homo sapiens
  CDR3 for beta chain variable domain of TCR clone 141576 (TRBV19, TRBJ1-2)
CASSVGQVLNYGDTF

SEQ ID NO: 283153 - protein, 12 aa, Homo sapiens
  CDR3 for alpha chain variable domain of TCR clone 141577 (TRAV21, TRAJ39)
CAADNEGNMLTF

SEQ ID NO: 283154 - protein, 13 aa, Homo sapiens
  CDR3 for beta chain variable domain of TCR clone 141577 (TRBV6-1, TRBJ1-1)
CASSRQGNTEAFF

SEQ ID NO: 283155 - protein, 15 aa, Homo sapiens
  CDR3 for alpha chain variable domain of TCR clone 141578 (TRAV4, TRAJ4)
CLVGPLSGDYNKLIF

SEQ ID NO: 283156 - protein, 16 aa, Homo sapiens
  CDR3 for beta chain variable domain of TCR clone 141578 (TRBV7-8, TRBJ1-4)
CASSLGVGTSNERLFF

SEQ ID NO: 283157 - protein, 14 aa, Homo sapiens
  CDR3 for alpha chain variable domain of TCR clone 141579 (TRAV26-1, TRAJ5)
CIVRFRFSRRALTF

SEQ ID NO: 283158 - protein, 17 aa, Homo sapiens
  CDR3 for beta chain variable domain of TCR clone 141579 (TRBV29-1, TRBJ2-3)
CSVEVLAGETSTDTQYF

SEQ ID NO: 283159 - protein, 16 aa, Homo sapiens
  CDR3 for alpha chain variable domain of TCR clone 141580 (TRAV12-2, TRAJ32)
CAVNLGQGGATNKLIF

SEQ ID NO: 283160 - protein, 13 aa, Homo sapiens
  CDR3 for beta chain variable domain of TCR clone 141580 (TRBV19, TRBJ2-5)
CASSETAPETQYF

SEQ ID NO: 283161 - protein, 15 aa, Homo sapiens
  CDR3 for alpha chain variable domain of TCR clone 141581 (TRAV12-2, TRAJ53)
CAERGSRGSNYKLTF

SEQ ID NO: 283162 - protein, 14 aa, Homo sapiens
  CDR3 for beta chain variable domain of TCR clone 141581 (TRBV4-1, TRBJ2-2)
CASSQYPDTGELFF

SEQ ID NO: 283163 - protein, 13 aa, Homo sapiens
  CDR3 for alpha chain variable domain of TCR clone 141582 (TRAV20, TRAJ26)
CAVPTSYGQNFDF

SEQ ID NO: 283164 - protein, 16 aa, Homo sapiens
  CDR3 for beta chain variable domain of TCR clone 141582 (TRBV28, TRBJ2-7)
CASSSPQGRDVYEQYF

SEQ ID NO: 283165 - protein, 12 aa, Homo sapiens
  CDR3 for alpha chain variable domain of TCR clone 141583 (TRAV21, TRAJ31)
CAVWGNNARLMF

SEQ ID NO: 283166 - protein, 16 aa, Homo sapiens
  CDR3 for beta chain variable domain of TCR clone 141583 (TRBV27, TRBJ2-5)
CASSYGPGGQKETQNF

SEQ ID NO: 283167 - protein, 14 aa, Homo sapiens
  CDR3 for alpha chain variable domain of TCR clone 141584 (TRAV38-1, TRAJ28)
CAFTSGAGSYQLTF

SEQ ID NO: 283168 - protein, 12 aa, Homo sapiens
  CDR3 for beta chain variable domain of TCR clone 141584 (TRBV7-8, TRBJ2-7)
CASSLGDREQYF

SEQ ID NO: 283169 - protein, 14 aa, Homo sapiens
  CDR3 for alpha chain variable domain of TCR clone 141585 (TRAV12-2, TRAJ40)
CAVKLPSGTYKYIF

SEQ ID NO: 283170 - protein, 15 aa, Homo sapiens
  CDR3 for beta chain variable domain of TCR clone 141585 (TRBV2, TRBJ2-7)
CASSEGLARSYEQYF

SEQ ID NO: 283171 - protein, 15 aa, Homo sapiens
  CDR3 for alpha chain variable domain of TCR clone 141586 (TRAV8-6, TRAJ10)
CAVSDQAGGGNKLTF

SEQ ID NO: 283172 - protein, 22 aa, Homo sapiens
  CDR3 for beta chain variable domain of TCR clone 141586 (TRBV6-1, TRBJ1-3)
CASVQGGGWKHHIFWRGKLAHC

SEQ ID NO: 283173 - protein, 13 aa, Homo sapiens
  CDR3 for alpha chain variable domain of TCR clone 141587 (TRAV1-1, TRAJ9)
CAAKNTGGFKTIF

SEQ ID NO: 283174 - protein, 14 aa, Homo sapiens
  CDR3 for beta chain variable domain of TCR clone 141587 (TRBV20-1, TRBJ2-1)
CSAQIGGSAIEQFF

SEQ ID NO: 283175 - protein, 11 aa, Homo sapiens
  CDR3 for alpha chain variable domain of TCR clone 141588 (TRAV12-1, TRAJ31)
CVGRVQCQTHV

SEQ ID NO: 283176 - protein, 14 aa, Homo sapiens
  CDR3 for beta chain variable domain of TCR clone 141588 (TRBV12-5, TRBJ2-5)
CASGSRTHQETQYF

SEQ ID NO: 283177 - protein, 13 aa, Homo sapiens
  CDR3 for alpha chain variable domain of TCR clone 141589 (TRAV13-1, TRAJ5)
CAAEHTGRRALTF

SEQ ID NO: 283178 - protein, 13 aa, Homo sapiens
  CDR3 for beta chain variable domain of TCR clone 141589 (TRBV6-1, TRBJ1-1)
CASSRQGNTEAFF

SEQ ID NO: 283179 - protein, 11 aa, Homo sapiens
  CDR3 for alpha chain variable domain of TCR clone 141590 (TRAV17, TRAJ9)
CATTEGFKTIF

SEQ ID NO: 283180 - protein, 13 aa, Homo sapiens
  CDR3 for beta chain variable domain of TCR clone 141590 (TRBV20-1, TRBJ1-1)
CSAPLGGGTEAFF

SEQ ID NO: 283181 - protein, 11 aa, Homo sapiens
  CDR3 for alpha chain variable domain of TCR clone 141591 (TRAV17, TRAJ36)
CAPTGANKLFF

SEQ ID NO: 283182 - protein, 13 aa, Homo sapiens
  CDR3 for beta chain variable domain of TCR clone 141591 (TRBV20-1, TRBJ1-1)
CSAPPGGHTEAFF

SEQ ID NO: 283183 - protein, 16 aa, Homo sapiens
  CDR3 for alpha chain variable domain of TCR clone 141592 (TRAV30, TRAJ24)
CGTEIVDADSWGKFQF

SEQ ID NO: 283184 - protein, 17 aa, Homo sapiens
  CDR3 for beta chain variable domain of TCR clone 141592 (TRBV18, TRBJ2-3)
CASSSRGPASSTDTQYS

SEQ ID NO: 283185 - protein, 16 aa, Homo sapiens
  CDR3 for alpha chain variable domain of TCR clone 141593 (TRAV8-3, TRAJ28)
CAVGATLGLGVTNSLS

SEQ ID NO: 283186 - protein, 13 aa, Homo sapiens
  CDR3 for beta chain variable domain of TCR clone 141593 (TRBV7-2, TRBJ2-1)
CQQLGVGYNEQFF

SEQ ID NO: 283187 - protein, 16 aa, Homo sapiens
  CDR3 for alpha chain variable domain of TCR clone 141594 (TRAV20, TRAJ22)
CAVQASSSGSARQLTF

SEQ ID NO: 283188 - protein, 14 aa, Homo sapiens
  CDR3 for beta chain variable domain of TCR clone 141594 (TRBV7-2, TRBJ2-1)
CASGLDRAYNEQFF

SEQ ID NO: 283189 - protein, 16 aa, Homo sapiens
  CDR3 for alpha chain variable domain of TCR clone 141595 (TRAV3, TRAJ21)
CAVRDIERGNFNKFYF

SEQ ID NO: 283190 - protein, 16 aa, Homo sapiens
  CDR3 for beta chain variable domain of TCR clone 141595 (TRBV4-1, TRBJ2-5)
CASSQAIAASSATQYF

SEQ ID NO: 283191 - protein, 16 aa, Homo sapiens
  CDR3 for alpha chain variable domain of TCR clone 141596 (TRAV38-2/DV8, TRAJ57)
CAYRSVGQGGSEKLVF

SEQ ID NO: 283192 - protein, 14 aa, Homo sapiens
  CDR3 for beta chain variable domain of TCR clone 141596 (TRBV19, TRBJ2-2)
CASSIAGAFGELFF

SEQ ID NO: 283193 - protein, 14 aa, Homo sapiens
  CDR3 for alpha chain variable domain of TCR clone 141597 (TRAV8-4, TRAJ43)
CAVSDPGNNNDMRF

SEQ ID NO: 283194 - protein, 16 aa, Homo sapiens
  CDR3 for beta chain variable domain of TCR clone 141597 (TRBV2, TRBJ2-3)
CASSTSVEGVTDTQYF

SEQ ID NO: 283195 - protein, 14 aa, Homo sapiens
  CDR3 for alpha chain variable domain of TCR clone 141598 (TRAV1-2, TRAJ16)
CAVNRCSDGQKLLF

SEQ ID NO: 283196 - protein, 14 aa, Homo sapiens
  CDR3 for beta chain variable domain of TCR clone 141598 (TRBV19, TRBJ2-1)
CASPTFVLSGEQFF

SEQ ID NO: 283197 - protein, 14 aa, Homo sapiens
  CDR3 for alpha chain variable domain of TCR clone 141599 (TRAV34, TRAJ44)
CGADGTGTASKLTF

SEQ ID NO: 283198 - protein, 11 aa, Homo sapiens
  CDR3 for beta chain variable domain of TCR clone 141599 (TRBV11-2, TRBJ1-1)
CASSINTEAFF

SEQ ID NO: 283199 - protein, 13 aa, Homo sapiens
  CDR3 for alpha chain variable domain of TCR clone 141600 (TRAV27, TRAJ8)
CAGGPTGFQKLVF

SEQ ID NO: 283200 - protein, 14 aa, Homo sapiens
  CDR3 for beta chain variable domain of TCR clone 141600 (TRBV19, TRBJ2-3)
CASSIDLGGDTQYF

SEQ ID NO: 283201 - protein, 16 aa, Homo sapiens
  CDR3 for alpha chain variable domain of TCR clone 141601 (TRAV27, TRAJ53)
CAAPEGRGGSHYKLTF

SEQ ID NO: 283202 - protein, 15 aa, Homo sapiens
  CDR3 for beta chain variable domain of TCR clone 141601 (TRBV20-1, TRBJ1-1)
CSASRGVTGNTEAFF

SEQ ID NO: 283203 - protein, 14 aa, Homo sapiens
  CDR3 for alpha chain variable domain of TCR clone 141602 (TRAV12-3, TRAJ7)
CAMSEIGGNNRLAF

SEQ ID NO: 283204 - protein, 14 aa, Homo sapiens
  CDR3 for beta chain variable domain of TCR clone 141602 (TRBV7-2, TRBJ2-7)
CASSPKTSFYDQYF

SEQ ID NO: 283205 - protein, 17 aa, Homo sapiens
  CDR3 for alpha chain variable domain of TCR clone 141603 (TRAV3, TRAJ6)
CAVRDDPRAGGTYIPTF

SEQ ID NO: 283206 - protein, 14 aa, Homo sapiens
  CDR3 for beta chain variable domain of TCR clone 141603 (TRBV7-2, TRBJ2-7)
CASSPKTSFYEQYF

SEQ ID NO: 283207 - protein, 12 aa, Homo sapiens
  CDR3 for alpha chain variable domain of TCR clone 141604 (TRAV13-2, TRAJ58)
CAERRLDSRLTF

SEQ ID NO: 283208 - protein, 15 aa, Homo sapiens
  CDR3 for beta chain variable domain of TCR clone 141604 (TRBV5-1, TRBJ2-5)
CASSSGREMVETLYL

SEQ ID NO: 283209 - protein, 13 aa, Homo sapiens
  CDR3 for alpha chain variable domain of TCR clone 141605 (TRAV8-3, TRAJ21)
CAVGLDNFNKFYF

SEQ ID NO: 283210 - protein, 17 aa, Homo sapiens
  CDR3 for beta chain variable domain of TCR clone 141605 (TRBV7-8, TRBJ2-6)
CASSAGTGGAGANVLTF

SEQ ID NO: 283211 - protein, 16 aa, Homo sapiens
  CDR3 for alpha chain variable domain of TCR clone 141606 (TRAV20, TRAJ10)
CAVLRGLTGGGNKLNF

SEQ ID NO: 283212 - protein, 14 aa, Homo sapiens
  CDR3 for beta chain variable domain of TCR clone 141606 (TRBV19, TRBJ1-5)
CASRAPDSFLSQHF

SEQ ID NO: 283213 - protein, 14 aa, Homo sapiens
  CDR3 for alpha chain variable domain of TCR clone 141607 (TRAV12-2, TRAJ6)
CASKWGGGSYIPTF

SEQ ID NO: 283214 - protein, 13 aa, Homo sapiens
  CDR3 for beta chain variable domain of TCR clone 141607 (TRBV2, TRBJ1-1)
CANSEGGNTEAFF

SEQ ID NO: 283215 - protein, 19 aa, Homo sapiens
  CDR3 for alpha chain variable domain of TCR clone 141608 (TRAV26-1, TRAJ52)
CIVRAHRNAGGTSDGKLTL

SEQ ID NO: 283216 - protein, 15 aa, Homo sapiens
  CDR3 for beta chain variable domain of TCR clone 141608 (TRBV29-1, TRBJ2-1)
CSGRDRKSSYNEQFF

SEQ ID NO: 283217 - protein, 14 aa, Homo sapiens
  CDR3 for alpha chain variable domain of TCR clone 141609 (TRAV1-2, TRAJ8)
CAVREDTGFQKLVF

SEQ ID NO: 283218 - protein, 13 aa, Homo sapiens
  CDR3 for beta chain variable domain of TCR clone 141609 (TRBV19, TRBJ1-2)
CASSVSGQDGYTF

SEQ ID NO: 283219 - protein, 15 aa, Homo sapiens
  CDR3 for alpha chain variable domain of TCR clone 141610 (TRAV21, TRAJ13)
CAVPRSFWGLPESYL

SEQ ID NO: 283220 - protein, 15 aa, Homo sapiens
  CDR3 for beta chain variable domain of TCR clone 141610 (TRBV7-9, TRBJ1-6)
CASSSPGRGNSPLLF

SEQ ID NO: 283221 - protein, 12 aa, Homo sapiens
  CDR3 for alpha chain variable domain of TCR clone 141611 (TRAV1-2, TRAJ24)
CAVGGSWGKFQF

SEQ ID NO: 283222 - protein, 13 aa, Homo sapiens
  CDR3 for beta chain variable domain of TCR clone 141611 (TRBV12-4, TRBJ1-1)
CASSSRAGAEAFF

SEQ ID NO: 283223 - protein, 14 aa, Homo sapiens
  CDR3 for alpha chain variable domain of TCR clone 141612 (TRAV8-6, TRAJ53)
CAALVLGSNYKLTF

SEQ ID NO: 283224 - protein, 15 aa, Homo sapiens
  CDR3 for beta chain variable domain of TCR clone 141612 (TRBV20-1, TRBJ2-3)
CSAEPLARHGDTQYF

SEQ ID NO: 283225 - protein, 17 aa, Homo sapiens
  CDR3 for alpha chain variable domain of TCR clone 141613 (TRAV3, TRAJ42)
CAVRDRDYGGSQGNLIF

SEQ ID NO: 283226 - protein, 17 aa, Homo sapiens
  CDR3 for beta chain variable domain of TCR clone 141613 (TRBV7-9, TRBJ2-3)
CASSPIVAGDLTDTQYF

SEQ ID NO: 283227 - protein, 13 aa, Homo sapiens
  CDR3 for alpha chain variable domain of TCR clone 141614 (TRAV12-1, TRAJ43)
CVVSHPNNNDMRF

SEQ ID NO: 283228 - protein, 14 aa, Homo sapiens
  CDR3 for beta chain variable domain of TCR clone 141614 (TRBV5-5, TRBJ2-2)
CASSLLGDTGELFF

SEQ ID NO: 283229 - protein, 15 aa, Homo sapiens
  CDR3 for alpha chain variable domain of TCR clone 141615 (TRAV21, TRAJ53)
CATLNSGGSNYKLTF

SEQ ID NO: 283230 - protein, 13 aa, Homo sapiens
  CDR3 for beta chain variable domain of TCR clone 141615 (TRBV7-9, TRBJ2-3)
CASSAGSTDTQYF

SEQ ID NO: 283231 - protein, 16 aa, Homo sapiens
  CDR3 for alpha chain variable domain of TCR clone 141616 (TRAV12-3, TRAJ53)
CTMSPGSGGSNDKLTF

SEQ ID NO: 283232 - protein, 16 aa, Homo sapiens
  CDR3 for beta chain variable domain of TCR clone 141616 (TRBV4-2, TRBJ1-1)
CASSQAGFGMNTEAFF

SEQ ID NO: 283233 - protein, 14 aa, Homo sapiens
  CDR3 for alpha chain variable domain of TCR clone 141617 (TRAV12-1, TRAJ17)
CVENYKAAGNKLTF

SEQ ID NO: 283234 - protein, 14 aa, Homo sapiens
  CDR3 for beta chain variable domain of TCR clone 141617 (TRBV7-2, TRBJ2-7)
CASRSQGAAYEQYF

SEQ ID NO: 283235 - protein, 11 aa, Homo sapiens
  CDR3 for alpha chain variable domain of TCR clone 141618 (TRAV1-2, TRAJ40)
CAVPGTYKYIF

SEQ ID NO: 283236 - protein, 18 aa, Homo sapiens
  CDR3 for beta chain variable domain of TCR clone 141618 (TRBV12-4, TRBJ2-2)
CASSLVAGTRGRTGELFF

SEQ ID NO: 283237 - protein, 14 aa, Homo sapiens
  CDR3 for alpha chain variable domain of TCR clone 141619 (TRAV8-3, TRAJ22)
CAVKPPGSARQLTF

SEQ ID NO: 283238 - protein, 15 aa, Homo sapiens
  CDR3 for beta chain variable domain of TCR clone 141619 (TRBV19, TRBJ2-1)
CASSSPGVPLDEQFF

SEQ ID NO: 283239 - protein, 16 aa, Homo sapiens
  CDR3 for alpha chain variable domain of TCR clone 141620 (TRAV12-2, TRAJ28)
CAAITDSGAGSYQLTF

SEQ ID NO: 283240 - protein, 14 aa, Homo sapiens
  CDR3 for beta chain variable domain of TCR clone 141620 (TRBV25-1, TRBJ1-1)
CASTHLGGNTEAFF

SEQ ID NO: 283241 - protein, 16 aa, Homo sapiens
  CDR3 for alpha chain variable domain of TCR clone 141621 (TRAV30, TRAJ24)
CGTEIVDADSWGKLQS

SEQ ID NO: 283242 - protein, 14 aa, Homo sapiens
  CDR3 for beta chain variable domain of TCR clone 141621 (TRBV12-5, TRBJ2-5)
CTSGSRTHQETQYF

SEQ ID NO: 283243 - protein, 13 aa, Homo sapiens
  CDR3 for alpha chain variable domain of TCR clone 141622 (TRAV8-4, TRAJ48)
CAVSLFGNEKLTL

SEQ ID NO: 283244 - protein, 14 aa, Homo sapiens
  CDR3 for beta chain variable domain of TCR clone 141622 (TRBV20-1, TRBJ2-7)
CSAKRGRSSYEQYF

SEQ ID NO: 283245 - protein, 16 aa, Homo sapiens
  CDR3 for alpha chain variable domain of TCR clone 141623 (TRAV13-1, TRAJ48)
CSKYRESNFVNEKLTF

SEQ ID NO: 283246 - protein, 17 aa, Homo sapiens
  CDR3 for beta chain variable domain of TCR clone 141623 (TRBV28, TRBJ2-1)
CASSSARQALTYKEQFF

SEQ ID NO: 283247 - protein, 14 aa, Homo sapiens
  CDR3 for alpha chain variable domain of TCR clone 141624 (TRAV35, TRAJ33)
CAGSSQDSNYQLIW

SEQ ID NO: 283248 - protein, 13 aa, Homo sapiens
  CDR3 for beta chain variable domain of TCR clone 141624 (TRBV24-1, TRBJ1-2)
CATSGTALDGYTF

SEQ ID NO: 283249 - protein, 15 aa, Homo sapiens
  CDR3 for alpha chain variable domain of TCR clone 141625 (TRAV12-2, TRAJ23)
CAVKPIYNQGGKLIF

SEQ ID NO: 283250 - protein, 15 aa, Homo sapiens
  CDR3 for beta chain variable domain of TCR clone 141625 (TRBV5-1, TRBJ1-2)
CASSLVGGQSQGHTF

SEQ ID NO: 283251 - protein, 12 aa, Homo sapiens
  CDR3 for alpha chain variable domain of TCR clone 141626 (TRAV38-2/DV8, TRAJ57)
CAWKGGSEKLVL

SEQ ID NO: 283252 - protein, 13 aa, Homo sapiens
  CDR3 for beta chain variable domain of TCR clone 141626 (TRBV5-1, TRBJ1-5)
CASSLAQDQPQHF

SEQ ID NO: 283253 - protein, 13 aa, Homo sapiens
  CDR3 for alpha chain variable domain of TCR clone 141627 (TRAV8-3, TRAJ48)
CAVVPCGNEKLTV

SEQ ID NO: 283254 - protein, 15 aa, Homo sapiens
  CDR3 for beta chain variable domain of TCR clone 141627 (TRBV11-2, TRBJ2-1)
CASSSPSTRYNEQFF

SEQ ID NO: 283255 - protein, 15 aa, Homo sapiens
  CDR3 for alpha chain variable domain of TCR clone 141628 (TRAV8-3, TRAJ40)
CAAPSLGSGTYRYIF

SEQ ID NO: 283256 - protein, 16 aa, Homo sapiens
  CDR3 for beta chain variable domain of TCR clone 141628 (TRBV7-3, TRBJ2-3)
CASSLSGYRPEDTQYL

SEQ ID NO: 283257 - protein, 14 aa, Homo sapiens
  CDR3 for alpha chain variable domain of TCR clone 141629 (TRAV26-1, TRAJ38)
CIADNAGTNRKLIW

SEQ ID NO: 283258 - protein, 16 aa, Homo sapiens
  CDR3 for beta chain variable domain of TCR clone 141629 (TRBV20-1, TRBJ2-7)
CSASTSGRLSSYEQYF

SEQ ID NO: 283259 - protein, 11 aa, Homo sapiens
  CDR3 for alpha chain variable domain of TCR clone 141630 (TRAV12-3, TRAJ43)
CSMSVSNDMRF

SEQ ID NO: 283260 - protein, 12 aa, Homo sapiens
  CDR3 for beta chain variable domain of TCR clone 141630 (TRBV20-1, TRBJ1-1)
QCSTWGGTEAFF

SEQ ID NO: 283261 - protein, 16 aa, Homo sapiens
  CDR3 for alpha chain variable domain of TCR clone 141631 (TRAV13-1, TRAJ18)
CAASRMRGSTLGRLYF

SEQ ID NO: 283262 - protein, 16 aa, Homo sapiens
  CDR3 for beta chain variable domain of TCR clone 141631 (TRBV27, TRBJ1-1)
CAISSRGRTGYTEAFF

SEQ ID NO: 283263 - protein, 14 aa, Homo sapiens
  CDR3 for alpha chain variable domain of TCR clone 141632 (TRAV3, TRAJ34)
CAVRAPGNTDKLIF

SEQ ID NO: 283264 - protein, 17 aa, Homo sapiens
  CDR3 for beta chain variable domain of TCR clone 141632 (TRBV20-1, TRBJ2-7)
CSAAPGLARGSSYEQYV

SEQ ID NO: 283265 - protein, 15 aa, Homo sapiens
  CDR3 for alpha chain variable domain of TCR clone 141633 (TRAV12-3, TRAJ6)
CAMSATTGGSYIPTF

SEQ ID NO: 283266 - protein, 16 aa, Homo sapiens
  CDR3 for beta chain variable domain of TCR clone 141633 (TRBV20-1, TRBJ1-2)
CSASMGQGVADYGDTF

SEQ ID NO: 283267 - protein, 14 aa, Homo sapiens
  CDR3 for alpha chain variable domain of TCR clone 141634 (TRAV26-1, TRAJ34)
FIVIVAYNTDKLIF

SEQ ID NO: 283268 - protein, 15 aa, Homo sapiens
  CDR3 for beta chain variable domain of TCR clone 141634 (TRBV20-1, TRBJ2-7)
CSARVPAAYFYEQYF

SEQ ID NO: 283269 - protein, 16 aa, Homo sapiens
  CDR3 for alpha chain variable domain of TCR clone 141635 (TRAV26-1, TRAJ37)
YIVRGDGSGNTGKLIF

SEQ ID NO: 283270 - protein, 14 aa, Homo sapiens
  CDR3 for beta chain variable domain of TCR clone 141635 (TRBV12-5, TRBJ2-5)
CASGSRTHQETQYF

SEQ ID NO: 283271 - protein, 16 aa, Homo sapiens
  CDR3 for alpha chain variable domain of TCR clone 141636 (TRAV30, TRAJ24)
CGTEIVDADSWGKFQF

SEQ ID NO: 283272 - protein, 13 aa, Homo sapiens
  CDR3 for beta chain variable domain of TCR clone 141636 (TRBV20-1, TRBJ1-1)
SSAPPGGHTEAFF

SEQ ID NO: 283273 - protein, 14 aa, Homo sapiens
  CDR3 for alpha chain variable domain of TCR clone 141637 (TRAV29/DV5, TRAJ49)
CAASLSNTGNQFYL

SEQ ID NO: 283274 - protein, 15 aa, Homo sapiens
  CDR3 for beta chain variable domain of TCR clone 141637 (TRBV20-1, TRBJ2-1)
CSARGIGGTYNEQFF

SEQ ID NO: 283275 - protein, 13 aa, Homo sapiens
  CDR3 for alpha chain variable domain of TCR clone 141638 (TRAV23/DV6, TRAJ58)
CAARLIRGSRLTF

SEQ ID NO: 283276 - protein, 20 aa, Homo sapiens
  CDR3 for beta chain variable domain of TCR clone 141638 (TRBV2, TRBJ1-6)
CADSGSYNSPPLWERDQAHC

SEQ ID NO: 283277 - protein, 14 aa, Homo sapiens
  CDR3 for alpha chain variable domain of TCR clone 141639 (TRAV8-6, TRAJ9)
CAVSSYTEGFKTIF

SEQ ID NO: 283278 - protein, 15 aa, Homo sapiens
  CDR3 for beta chain variable domain of TCR clone 141639 (TRBV2, TRBJ1-2)
CASSESRTVNYGYTF

SEQ ID NO: 283279 - protein, 11 aa, Homo sapiens
  CDR3 for alpha chain variable domain of TCR clone 141640 (TRAV12-2, TRAJ49)
CAVWAGNQFYF

SEQ ID NO: 283280 - protein, 15 aa, Homo sapiens
  CDR3 for beta chain variable domain of TCR clone 141640 (TRBV7-8, TRBJ2-7)
CASSLERAGSYEQYF

SEQ ID NO: 283281 - protein, 11 aa, Homo sapiens
  CDR3 for alpha chain variable domain of TCR clone 141641 (TRAV2, TRAJ13)
CASGGYQKVTF

SEQ ID NO: 283282 - protein, 16 aa, Homo sapiens
  CDR3 for beta chain variable domain of TCR clone 141641 (TRBV6-1, TRBJ2-5)
YASSETLDRGAETQFF

SEQ ID NO: 283283 - protein, 18 aa, Homo sapiens
  CDR3 for alpha chain variable domain of TCR clone 141642 (TRAV13-1, TRAJ52)
WAASKRSAGGTSSGKLTF

SEQ ID NO: 283284 - protein, 13 aa, Homo sapiens
  CDR3 for beta chain variable domain of TCR clone 141642 (TRBV12-4, TRBJ1-2)
CASSLRQGKGYTF

SEQ ID NO: 283285 - protein, 13 aa, Homo sapiens
  CDR3 for alpha chain variable domain of TCR clone 141643 (TRAV8-4, TRAJ34)
GAVTLYNTDELIF

SEQ ID NO: 283286 - protein, 17 aa, Homo sapiens
  CDR3 for beta chain variable domain of TCR clone 141643 (TRBV7-2, TRBJ2-2)
CASSPSWRGGGTGELFF

SEQ ID NO: 283287 - protein, 11 aa, Homo sapiens
  CDR3 for alpha chain variable domain of TCR clone 141644 (TRAV12-1, TRAJ21)
CVVNNFNKFYF

SEQ ID NO: 283288 - protein, 19 aa, Homo sapiens
  CDR3 for beta chain variable domain of TCR clone 141644 (TRBV7-8, TRBJ2-1)
CISVPSPPTGTLAHNEQFF

SEQ ID NO: 283289 - protein, 11 aa, Homo sapiens
  CDR3 for alpha chain variable domain of TCR clone 141645 (TRAV17, TRAJ31)
CATPNNARLMF

SEQ ID NO: 283290 - protein, 16 aa, Homo sapiens
  CDR3 for beta chain variable domain of TCR clone 141645 (TRBV7-8, TRBJ2-4)
CASSAERALAKNIQYF

SEQ ID NO: 283291 - protein, 14 aa, Homo sapiens
  CDR3 for alpha chain variable domain of TCR clone 141646 (TRAV1-2, TRAJ8)
CAVREDTGFQKLVF

SEQ ID NO: 283292 - protein, 15 aa, Homo sapiens
  CDR3 for beta chain variable domain of TCR clone 141646 (TRBV19, TRBJ2-4)
CASRGPRRGENIQYF

SEQ ID NO: 283293 - protein, 14 aa, Homo sapiens
  CDR3 for alpha chain variable domain of TCR clone 141647 (TRAV1-2, TRAJ16)
CAVRSASDGQKLLF

SEQ ID NO: 283294 - protein, 17 aa, Homo sapiens
  CDR3 for beta chain variable domain of TCR clone 141647 (TRBV7-8, TRBJ2-6)
CASSAGTGGAGANVLTF

SEQ ID NO: 283295 - protein, 14 aa, Homo sapiens
  CDR3 for alpha chain variable domain of TCR clone 141648 (TRAV8-3, TRAJ13)
RAVGAQEGYQKVTF

SEQ ID NO: 283296 - protein, 13 aa, Homo sapiens
  CDR3 for beta chain variable domain of TCR clone 141648 (TRBV11-2, TRBJ2-5)
CASSSTWEEAQYF

SEQ ID NO: 283297 - protein, 14 aa, Homo sapiens
  CDR3 for alpha chain variable domain of TCR clone 141649 (TRAV1-2, TRAJ16)
CAVNRFSDGQKMLF

SEQ ID NO: 283298 - protein, 15 aa, Homo sapiens
  CDR3 for beta chain variable domain of TCR clone 141649 (TRBV20-1, TRBJ2-7)
CSARKGLAESYEQYF

SEQ ID NO: 283299 - protein, 11 aa, Homo sapiens
  CDR3 for alpha chain variable domain of TCR clone 141650 (TRAV21, TRAJ11)
CAVNGYSTLTF

SEQ ID NO: 283300 - protein, 13 aa, Homo sapiens
  CDR3 for beta chain variable domain of TCR clone 141650 (TRBV4-2, TRBJ1-1)
CASSQAGNAEAFF

SEQ ID NO: 283301 - protein, 15 aa, Homo sapiens
  CDR3 for alpha chain variable domain of TCR clone 141651 (TRAV21, TRAJ24)
CAARSSTDSWGKLQF

SEQ ID NO: 283302 - protein, 13 aa, Homo sapiens
  CDR3 for beta chain variable domain of TCR clone 141651 (TRBV12-4, TRBJ1-2)
CASSLRQGRGYTF

SEQ ID NO: 283303 - protein, 16 aa, Homo sapiens
  CDR3 for alpha chain variable domain of TCR clone 141652 (TRAV30, TRAJ24)
CGTEIVDADSWGKFQF

SEQ ID NO: 283304 - protein, 18 aa, Homo sapiens
  CDR3 for beta chain variable domain of TCR clone 141652 (TRBV11-2, TRBJ2-3)
CASSLRGASRGAPNTQYF

SEQ ID NO: 283305 - protein, 14 aa, Homo sapiens
  CDR3 for alpha chain variable domain of TCR clone 141653 (TRAV12-2, TRAJ6)
CASKWGGGSYIPTF

SEQ ID NO: 283306 - protein, 13 aa, Homo sapiens
  CDR3 for beta chain variable domain of TCR clone 141653 (TRBV2, TRBJ1-1)
CDSSEGGNTEAFF

SEQ ID NO: 283307 - protein, 15 aa, Homo sapiens
  CDR3 for alpha chain variable domain of TCR clone 141654 (TRAV25, TRAJ53)
CAATGGGGSNYKLTF

SEQ ID NO: 283308 - protein, 16 aa, Homo sapiens
  CDR3 for beta chain variable domain of TCR clone 141654 (TRBV20-1, TRBJ2-1)
CSASASGYSSYNEQFF

SEQ ID NO: 283309 - protein, 18 aa, Homo sapiens
  CDR3 for alpha chain variable domain of TCR clone 141655 (TRAV21, TRAJ52)
CAVRPSPAGGTSYGKLTF

SEQ ID NO: 283310 - protein, 15 aa, Homo sapiens
  CDR3 for beta chain variable domain of TCR clone 141655 (TRBV15, TRBJ2-3)
CATSRDPRGTDTQYF

SEQ ID NO: 283311 - protein, 12 aa, Homo sapiens
  CDR3 for alpha chain variable domain of TCR clone 141656 (TRAV12-2, TRAJ45)
CAVTGGADGLTF

SEQ ID NO: 283312 - protein, 14 aa, Homo sapiens
  CDR3 for beta chain variable domain of TCR clone 141656 (TRBV5-5, TRBJ2-7)
CASSVGQGTYEQYF

SEQ ID NO: 283313 - protein, 13 aa, Homo sapiens
  CDR3 for alpha chain variable domain of TCR clone 141657 (TRAV13-1, TRAJ21)
CAASIYNFNKFYF

SEQ ID NO: 283314 - protein, 12 aa, Homo sapiens
  CDR3 for beta chain variable domain of TCR clone 141657 (TRBV12-4, TRBJ2-7)
CASSLGGYEQYF

SEQ ID NO: 283315 - protein, 14 aa, Homo sapiens
  CDR3 for alpha chain variable domain of TCR clone 141658 (TRAV12-1, TRAJ17)
CVVNYKAAGNNLTF

SEQ ID NO: 283316 - protein, 15 aa, Homo sapiens
  CDR3 for beta chain variable domain of TCR clone 141658 (TRBV20-1, TRBJ2-7)
CSARDRVSGMDEQYF

SEQ ID NO: 283317 - protein, 17 aa, Homo sapiens
  CDR3 for alpha chain variable domain of TCR clone 141659 (TRAV13-1, TRAJ52)
CAASSGAGGTSYGKLTF

SEQ ID NO: 283318 - protein, 15 aa, Homo sapiens
  CDR3 for beta chain variable domain of TCR clone 141659 (TRBV2, TRBJ2-1)
CASGELAGGYNEQFF

SEQ ID NO: 283319 - protein, 15 aa, Homo sapiens
  CDR3 for alpha chain variable domain of TCR clone 141660 (TRAV21, TRAJ53)
CATLNSGGSNSKRTF

SEQ ID NO: 283320 - protein, 13 aa, Homo sapiens
  CDR3 for beta chain variable domain of TCR clone 141660 (TRBV9, TRBJ2-1)
CASSPSGGNEQFF

SEQ ID NO: 283321 - protein, 13 aa, Homo sapiens
  CDR3 for alpha chain variable domain of TCR clone 141661 (TRAV8-3, TRAJ28)
CAVGAVGSYQLTF

SEQ ID NO: 283322 - protein, 14 aa, Homo sapiens
  CDR3 for beta chain variable domain of TCR clone 141661 (TRBV12-4, TRBJ1-2)
CASSNLRGNYGYTF

SEQ ID NO: 283323 - protein, 14 aa, Homo sapiens
  CDR3 for alpha chain variable domain of TCR clone 141662 (TRAV13-1, TRAJ35)
CSASKGGFGNVLHC

SEQ ID NO: 283324 - protein, 13 aa, Homo sapiens
  CDR3 for beta chain variable domain of TCR clone 141662 (TRBV7-3, TRBJ1-1)
CASSQDWEAEAFF

SEQ ID NO: 283325 - protein, 17 aa, Homo sapiens
  CDR3 for alpha chain variable domain of TCR clone 141663 (TRAV3, TRAJ42)
CAVRGRDYGGSQGTLIF

SEQ ID NO: 283326 - protein, 15 aa, Homo sapiens
  CDR3 for beta chain variable domain of TCR clone 141663 (TRBV3-1, TRBJ2-1)
CASSQVVDDGEEQFF

SEQ ID NO: 283327 - protein, 13 aa, Homo sapiens
  CDR3 for alpha chain variable domain of TCR clone 141664 (TRAV12-3, TRAJ33)
CAMSVKSNYQLIW

SEQ ID NO: 283328 - protein, 13 aa, Homo sapiens
  CDR3 for beta chain variable domain of TCR clone 141664 (TRBV7-2, TRBJ2-2)
CASSLAVTGELFF

SEQ ID NO: 283329 - protein, 13 aa, Homo sapiens
  CDR3 for alpha chain variable domain of TCR clone 141665 (TRAV29/DV5, TRAJ31)
CAASRNNNARLMF

SEQ ID NO: 283330 - protein, 11 aa, Homo sapiens
  CDR3 for beta chain variable domain of TCR clone 141665 (TRBV14, TRBJ2-5)
CSSQLKETQYF

SEQ ID NO: 283331 - protein, 16 aa, Homo sapiens
  CDR3 for alpha chain variable domain of TCR clone 141666 (TRAV3, TRAJ13)
CVVRDPNSGGYQKVTF

SEQ ID NO: 283332 - protein, 13 aa, Homo sapiens
  CDR3 for beta chain variable domain of TCR clone 141666 (TRBV7-9, TRBJ2-7)
CASSLQGSYEQYF

SEQ ID NO: 283333 - protein, 13 aa, Homo sapiens
  CDR3 for alpha chain variable domain of TCR clone 141667 (TRAV12-1, TRAJ6)
CVVFPGGSDLPTF

SEQ ID NO: 283334 - protein, 14 aa, Homo sapiens
  CDR3 for beta chain variable domain of TCR clone 141667 (TRBV20-1, TRBJ1-3)
CSASPTGAGNTIYF

SEQ ID NO: 283335 - protein, 11 aa, Homo sapiens
  CDR3 for alpha chain variable domain of TCR clone 141668 (TRAV21, TRAJ11)
CAVNGYSTLTF

SEQ ID NO: 283336 - protein, 14 aa, Homo sapiens
  CDR3 for beta chain variable domain of TCR clone 141668 (TRBV20-1, TRBJ2-7)
CSAKRGRSSYEQYF

SEQ ID NO: 283337 - protein, 17 aa, Homo sapiens
  CDR3 for alpha chain variable domain of TCR clone 141669 (TRAV13-1, TRAJ28)
CAASPPYSGAGSYQLTF

SEQ ID NO: 283338 - protein, 18 aa, Homo sapiens
  CDR3 for beta chain variable domain of TCR clone 141669 (TRBV4-1, TRBJ1-5)
CASSQDPRGQGLNQPQHF

SEQ ID NO: 283339 - protein, 12 aa, Homo sapiens
  CDR3 for alpha chain variable domain of TCR clone 141670 (TRAV25, TRAJ45)
DYSGGGADGLTF

SEQ ID NO: 283340 - protein, 19 aa, Homo sapiens
  CDR3 for beta chain variable domain of TCR clone 141670 (TRBV28, TRBJ2-7)
CASSYSGTSRLGWVHEQYF

SEQ ID NO: 283341 - protein, 18 aa, Homo sapiens
  CDR3 for alpha chain variable domain of TCR clone 141671 (TRAV13-1, TRAJ45)
CAASIGVYSGGGADGLTF

SEQ ID NO: 283342 - protein, 17 aa, Homo sapiens
  CDR3 for beta chain variable domain of TCR clone 141671 (TRBV28, TRBJ2-5)
CASSRQGGLAGAETQYF

SEQ ID NO: 283343 - protein, 14 aa, Homo sapiens
  CDR3 for alpha chain variable domain of TCR clone 141672 (TRAV17, TRAJ57)
CATDPQGGSEKLVF

SEQ ID NO: 283344 - protein, 15 aa, Homo sapiens
  CDR3 for beta chain variable domain of TCR clone 141672 (TRBV7-3, TRBJ2-1)
CASSQRGGALIEQFF

SEQ ID NO: 283345 - protein, 12 aa, Homo sapiens
  CDR3 for alpha chain variable domain of TCR clone 141673 (TRAV1-2, TRAJ33)
CAALDSNYQLIW

SEQ ID NO: 283346 - protein, 13 aa, Homo sapiens
  CDR3 for beta chain variable domain of TCR clone 141673 (TRBV4-1, TRBJ2-2)
CASSQENTGELFF

SEQ ID NO: 283347 - protein, 13 aa, Homo sapiens
  CDR3 for alpha chain variable domain of TCR clone 141674 (TRAV27, TRAJ6)
CAGGTRGSYIPTF

SEQ ID NO: 283348 - protein, 14 aa, Homo sapiens
  CDR3 for beta chain variable domain of TCR clone 141674 (TRBV20-1, TRBJ2-4)
CSASGMVGENMQYF

SEQ ID NO: 283349 - protein, 14 aa, Homo sapiens
  CDR3 for alpha chain variable domain of TCR clone 141675 (TRAV8-2, TRAJ4)
CVVGPSGGYNKLIF

SEQ ID NO: 283350 - protein, 11 aa, Homo sapiens
  CDR3 for beta chain variable domain of TCR clone 141675 (TRBV29-1, TRBJ2-5)
CSEDRTGTQYF

SEQ ID NO: 283351 - protein, 12 aa, Homo sapiens
  CDR3 for alpha chain variable domain of TCR clone 141676 (TRAV12-3, TRAJ17)
CAMTLTGNKLTF

SEQ ID NO: 283352 - protein, 16 aa, Homo sapiens
  CDR3 for beta chain variable domain of TCR clone 141676 (TRBV4-1, TRBJ2-7)
CASSQEWTSGPLEQYF

SEQ ID NO: 283353 - protein, 15 aa, Homo sapiens
  CDR3 for alpha chain variable domain of TCR clone 141677 (TRAV2, TRAJ22)
CAVPSRGGSARHLTF

SEQ ID NO: 283354 - protein, 14 aa, Homo sapiens
  CDR3 for beta chain variable domain of TCR clone 141677 (TRBV25-1, TRBJ1-1)
CASTHLGGNTEAFF

SEQ ID NO: 283355 - protein, 14 aa, Homo sapiens
  CDR3 for alpha chain variable domain of TCR clone 141678 (TRAV1-2, TRAJ16)
CAVNRFSDGQKLLL

SEQ ID NO: 283356 - protein, 12 aa, Homo sapiens
  CDR3 for beta chain variable domain of TCR clone 141678 (TRBV5-1, TRBJ2-5)
CASSWDQETQYF

SEQ ID NO: 283357 - protein, 14 aa, Homo sapiens
  CDR3 for alpha chain variable domain of TCR clone 141679 (TRAV1-2, TRAJ8)
CAVREDTVFQKLVF

SEQ ID NO: 283358 - protein, 12 aa, Homo sapiens
  CDR3 for beta chain variable domain of TCR clone 141679 (TRBV11-2, TRBJ2-2)
CASSLPTGELFF

SEQ ID NO: 283359 - protein, 15 aa, Homo sapiens
  CDR3 for alpha chain variable domain of TCR clone 141680 (TRAV8-3, TRAJ40)
CAAPSLGSGTYKYIF

SEQ ID NO: 283360 - protein, 16 aa, Homo sapiens
  CDR3 for beta chain variable domain of TCR clone 141680 (TRBV7-3, TRBJ2-3)
CASSLNGYRPEDTQYF

SEQ ID NO: 283361 - protein, 15 aa, Homo sapiens
  CDR3 for alpha chain variable domain of TCR clone 141681 (TRAV16, TRAJ48)
CALFISNFGNEKLTF

SEQ ID NO: 283362 - protein, 13 aa, Homo sapiens
  CDR3 for beta chain variable domain of TCR clone 141681 (TRBV7-9, TRBJ1-2)
CASSLTQNYGYTF

SEQ ID NO: 283363 - protein, 14 aa, Homo sapiens
  CDR3 for alpha chain variable domain of TCR clone 141682 (TRAV19, TRAJ5)
CALKKDTGRRALTF

SEQ ID NO: 283364 - protein, 15 aa, Homo sapiens
  CDR3 for beta chain variable domain of TCR clone 141682 (TRBV7-9, TRBJ1-6)
CASSSPGRGNSPLHF

SEQ ID NO: 283365 - protein, 15 aa, Homo sapiens
  CDR3 for alpha chain variable domain of TCR clone 141683 (TRAV3, TRAJ22)
CAVRDRGGSARQLTV

SEQ ID NO: 283366 - protein, 13 aa, Homo sapiens
  CDR3 for beta chain variable domain of TCR clone 141683 (TRBV2, TRBJ1-5)
CATAGPGNQPQHF

SEQ ID NO: 283367 - protein, 16 aa, Homo sapiens
  CDR3 for alpha chain variable domain of TCR clone 141684 (TRAV12-2, TRAJ40)
CAVIRGGTSGTYKYIF

SEQ ID NO: 283368 - protein, 16 aa, Homo sapiens
  CDR3 for beta chain variable domain of TCR clone 141684 (TRBV7-9, TRBJ2-1)
CASSDGAGGSYNEQFF

SEQ ID NO: 283369 - protein, 23 aa, Homo sapiens
  CDR3 for alpha chain variable domain of TCR clone 141685 (TRAV26-1, )
CIADDAGNNHIQNPDPAVYHLRD

SEQ ID NO: 283370 - protein, 13 aa, Homo sapiens
  CDR3 for beta chain variable domain of TCR clone 141685 (TRBV20-1, TRBJ1-1)
CSARGGGNTEAFF

SEQ ID NO: 283371 - protein, 13 aa, Homo sapiens
  CDR3 for alpha chain variable domain of TCR clone 141686 (TRAV8-3, TRAJ43)
CAVGPDNINDMRF

SEQ ID NO: 283372 - protein, 13 aa, Homo sapiens
  CDR3 for beta chain variable domain of TCR clone 141686 (TRBV29-1, TRBJ2-1)
CSVEGGRVNEQFF

SEQ ID NO: 283373 - protein, 13 aa, Homo sapiens
  CDR3 for alpha chain variable domain of TCR clone 141687 (TRAV12-2, TRAJ39)
CAVNNNAGNMLTF

SEQ ID NO: 283374 - protein, 14 aa, Homo sapiens
  CDR3 for beta chain variable domain of TCR clone 141687 (TRBV28, TRBJ2-2)
CASSLSSSTGELFF

SEQ ID NO: 283375 - protein, 17 aa, Homo sapiens
  CDR3 for alpha chain variable domain of TCR clone 141688 (TRAV3, TRAJ42)
CAVRDRDYGGSQGNLIF

SEQ ID NO: 283376 - protein, 15 aa, Homo sapiens
  CDR3 for beta chain variable domain of TCR clone 141688 (TRBV6-6, TRBJ2-7)
CASSYSYGGYYKQYF

SEQ ID NO: 283377 - protein, 15 aa, Homo sapiens
  CDR3 for alpha chain variable domain of TCR clone 141689 (TRAV10, TRAJ3)
CVVSVRYSSASKIIF

SEQ ID NO: 283378 - protein, 14 aa, Homo sapiens
  CDR3 for beta chain variable domain of TCR clone 141689 (TRBV4-1, TRBJ2-2)
CASSQAVNTGELFF

SEQ ID NO: 283379 - protein, 18 aa, Homo sapiens
  CDR3 for alpha chain variable domain of TCR clone 141690 (TRAV12-1, TRAJ52)
CVVKLINAGRTSYGKLTF

SEQ ID NO: 283380 - protein, 16 aa, Homo sapiens
  CDR3 for beta chain variable domain of TCR clone 141690 (TRBV7-6, TRBJ2-7)
CASSGGTGALSYEQYF

SEQ ID NO: 283381 - protein, 16 aa, Homo sapiens
  CDR3 for alpha chain variable domain of TCR clone 141691 (TRAV30, TRAJ24)
CGTEIVDADSWGKFQF

SEQ ID NO: 283382 - protein, 18 aa, Homo sapiens
  CDR3 for beta chain variable domain of TCR clone 141691 (TRBV7-9, TRBJ2-7)
CASSLTTSGSRTSYEQYF

SEQ ID NO: 283383 - protein, 14 aa, Homo sapiens
  CDR3 for alpha chain variable domain of TCR clone 141692 (TRAV12-2, TRAJ17)
CSVLFKAAGNKLTF

SEQ ID NO: 283384 - protein, 15 aa, Homo sapiens
  CDR3 for beta chain variable domain of TCR clone 141692 (TRBV6-1, TRBJ2-3)
CASSERGGITDTQYF

SEQ ID NO: 283385 - protein, 16 aa, Homo sapiens
  CDR3 for alpha chain variable domain of TCR clone 141693 (TRAV8-3, TRAJ48)
CAVGLISYFGNEKLTF

SEQ ID NO: 283386 - protein, 13 aa, Homo sapiens
  CDR3 for beta chain variable domain of TCR clone 141693 (TRBV20-1, TRBJ1-5)
CSASWGRSQPQHF

SEQ ID NO: 283387 - protein, 14 aa, Homo sapiens
  CDR3 for alpha chain variable domain of TCR clone 141694 (TRAV1-2, TRAJ15)
CAVRDRQAGTALIV

SEQ ID NO: 283388 - protein, 14 aa, Homo sapiens
  CDR3 for beta chain variable domain of TCR clone 141694 (TRBV7-8, TRBJ2-7)
CASSPRDRVYEQYF

SEQ ID NO: 283389 - protein, 16 aa, Homo sapiens
  CDR3 for alpha chain variable domain of TCR clone 141695 (TRAV3, TRAJ37)
CAVRGKGSGNTGKLLF

SEQ ID NO: 283390 - protein, 13 aa, Homo sapiens
  CDR3 for beta chain variable domain of TCR clone 141695 (TRBV7-2, TRBJ2-2)
CASSSVRAGELFF

SEQ ID NO: 283391 - protein, 15 aa, Homo sapiens
  CDR3 for alpha chain variable domain of TCR clone 141696 (TRAV26-1, TRAJ40)
CIVSFATSGTYKYIF

SEQ ID NO: 283392 - protein, 15 aa, Homo sapiens
  CDR3 for beta chain variable domain of TCR clone 141696 (TRBV5-7, TRBJ2-3)
CASSPGLATTDKQYF

SEQ ID NO: 283393 - protein, 13 aa, Homo sapiens
  CDR3 for alpha chain variable domain of TCR clone 141697 (TRAV36/DV7, TRAJ49)
GAVEANTGNQFYF

SEQ ID NO: 283394 - protein, 14 aa, Homo sapiens
  CDR3 for beta chain variable domain of TCR clone 141697 (TRBV20-1, TRBJ2-5)
CSASSGRAAETQYF

SEQ ID NO: 283395 - protein, 17 aa, Homo sapiens
  CDR3 for alpha chain variable domain of TCR clone 141698 (TRAV3, TRAJ12)
CAVRDGGRMDSSYKLIF

SEQ ID NO: 283396 - protein, 14 aa, Homo sapiens
  CDR3 for beta chain variable domain of TCR clone 141698 (TRBV7-9, TRBJ2-2)
CASSLVQDTGELFF

SEQ ID NO: 283397 - protein, 12 aa, Homo sapiens
  CDR3 for alpha chain variable domain of TCR clone 141699 (TRAV35, TRAJ49)
CAGWNTGNQFYF

SEQ ID NO: 283398 - protein, 14 aa, Homo sapiens
  CDR3 for beta chain variable domain of TCR clone 141699 (TRBV7-8, TRBJ2-3)
CASSLEAGTDTQYF

SEQ ID NO: 283399 - protein, 15 aa, Homo sapiens
  CDR3 for alpha chain variable domain of TCR clone 141700 (TRAV12-3, TRAJ13)
CAMSARSGGYQKVTF

SEQ ID NO: 283400 - protein, 16 aa, Homo sapiens
  CDR3 for beta chain variable domain of TCR clone 141700 (TRBV12-4, TRBJ1-5)
CASSRPVGGSNQTQHF

SEQ ID NO: 283401 - protein, 20 aa, Homo sapiens
  CDR3 for alpha chain variable domain of TCR clone 141701 (TRAV26-1, TRAJ42)
CCVLLQRQTYYGGSQGNLIF

SEQ ID NO: 283402 - protein, 16 aa, Homo sapiens
  CDR3 for beta chain variable domain of TCR clone 141701 (TRBV7-3, TRBJ2-2)
CASSLERGTLSGELFF

SEQ ID NO: 283403 - protein, 12 aa, Homo sapiens
  CDR3 for alpha chain variable domain of TCR clone 141702 (TRAV35, TRAJ39)
RAPNNAGNMLTF

SEQ ID NO: 283404 - protein, 16 aa, Homo sapiens
  CDR3 for beta chain variable domain of TCR clone 141702 (TRBV2, TRBJ2-3)
CASSTSVEGVTDTQYF

SEQ ID NO: 283405 - protein, 13 aa, Homo sapiens
  CDR3 for alpha chain variable domain of TCR clone 141703 (TRAV13-1, TRAJ39)
CSKYSNAGDMLTF

SEQ ID NO: 283406 - protein, 18 aa, Homo sapiens
  CDR3 for beta chain variable domain of TCR clone 141703 (TRBV10-2, TRBJ2-2)
CISAPAVHRQADAGELFF

SEQ ID NO: 283407 - protein, 18 aa, Homo sapiens
  CDR3 for alpha chain variable domain of TCR clone 141704 (TRAV20, TRAJ4)
CAVQPYYMFSGGYNKLIF

SEQ ID NO: 283408 - protein, 12 aa, Homo sapiens
  CDR3 for beta chain variable domain of TCR clone 141704 (TRBV11-2, TRBJ2-2)
CASSLGGGELFF

SEQ ID NO: 283409 - protein, 12 aa, Homo sapiens
  CDR3 for alpha chain variable domain of TCR clone 141705 (TRAV20, TRAJ33)
CAVRGSNYQLIW

SEQ ID NO: 283410 - protein, 15 aa, Homo sapiens
  CDR3 for beta chain variable domain of TCR clone 141705 (TRBV11-3, TRBJ2-3)
CASLKGGREGDTQYF

SEQ ID NO: 283411 - protein, 12 aa, Homo sapiens
  CDR3 for alpha chain variable domain of TCR clone 141706 (TRAV2, TRAJ9)
CAVGAGGFKTIF

SEQ ID NO: 283412 - protein, 13 aa, Homo sapiens
  CDR3 for beta chain variable domain of TCR clone 141706 (TRBV20-1, TRBJ1-1)
CSARVGGNTEAFF

SEQ ID NO: 283413 - protein, 14 aa, Homo sapiens
  CDR3 for alpha chain variable domain of TCR clone 141707 (TRAV1-2, TRAJ16)
CAVNRFSDGQKLLF

SEQ ID NO: 283414 - protein, 15 aa, Homo sapiens
  CDR3 for beta chain variable domain of TCR clone 141707 (TRBV9, TRBJ1-6)
CAGSVAGTGDLPLHF

SEQ ID NO: 283415 - protein, 12 aa, Homo sapiens
  CDR3 for alpha chain variable domain of TCR clone 141708 (TRAV8-6, TRAJ22)
CALNPGTRQLTF

SEQ ID NO: 283416 - protein, 11 aa, Homo sapiens
  CDR3 for beta chain variable domain of TCR clone 141708 (TRBV29-1, TRBJ2-5)
CSEDRTGTQYF

SEQ ID NO: 283417 - protein, 17 aa, Homo sapiens
  CDR3 for alpha chain variable domain of TCR clone 141709 (TRAV23/DV6, TRAJ57)
CAASSTLSQGGSEKLVF

SEQ ID NO: 283418 - protein, 14 aa, Homo sapiens
  CDR3 for beta chain variable domain of TCR clone 141709 (TRBV25-1, TRBJ1-1)
CASTHLGGNTKAFF

SEQ ID NO: 283419 - protein, 16 aa, Homo sapiens
  CDR3 for alpha chain variable domain of TCR clone 141710 (TRAV8-2, TRAJ7)
CVVSEGPYYGNNRLAF

SEQ ID NO: 283420 - protein, 18 aa, Homo sapiens
  CDR3 for beta chain variable domain of TCR clone 141710 (TRBV4-1, TRBJ1-5)
CASSQDPRGQGLNQPQHF

SEQ ID NO: 283421 - protein, 12 aa, Homo sapiens
  CDR3 for alpha chain variable domain of TCR clone 141711 (TRAV12-3, TRAJ17)
CAMTLTGNKLTF

SEQ ID NO: 283422 - protein, 14 aa, Homo sapiens
  CDR3 for beta chain variable domain of TCR clone 141711 (TRBV19, TRBJ2-2)
CASSTLHRSGELFI

SEQ ID NO: 283423 - protein, 12 aa, Homo sapiens
  CDR3 for alpha chain variable domain of TCR clone 141712 (TRAV21, TRAJ49)
CAVNDGGYQFYF

SEQ ID NO: 283424 - protein, 14 aa, Homo sapiens
  CDR3 for beta chain variable domain of TCR clone 141712 (TRBV18, TRBJ2-7)
CASSPRGGSYEQYF

SEQ ID NO: 283425 - protein, 17 aa, Homo sapiens
  CDR3 for alpha chain variable domain of TCR clone 141713 (TRAV13-1, TRAJ52)
CAAGRNAGGTSYGKLTF

SEQ ID NO: 283426 - protein, 13 aa, Homo sapiens
  CDR3 for beta chain variable domain of TCR clone 141713 (TRBV6-9, TRBJ2-5)
CASKGDGRRTQYF

SEQ ID NO: 283427 - protein, 14 aa, Homo sapiens
  CDR3 for alpha chain variable domain of TCR clone 141714 (TRAV13-2, TRAJ17)
CAENSNAAGNKLTF

SEQ ID NO: 283428 - protein, 11 aa, Homo sapiens
  CDR3 for beta chain variable domain of TCR clone 141714 (TRBV6-3, TRBJ2-3)
CATGQADTQYF

SEQ ID NO: 283429 - protein, 12 aa, Homo sapiens
  CDR3 for alpha chain variable domain of TCR clone 141715 (TRAV1-1, TRAJ24)
CAVRGSWGKFQF

SEQ ID NO: 283430 - protein, 14 aa, Homo sapiens
  CDR3 for beta chain variable domain of TCR clone 141715 (TRBV28, TRBJ1-1)
CASSESGRGTEAFF

SEQ ID NO: 283431 - protein, 13 aa, Homo sapiens
  CDR3 for alpha chain variable domain of TCR clone 141716 (TRAV3, TRAJ41)
CAVSSNSGYAPNF

SEQ ID NO: 283432 - protein, 13 aa, Homo sapiens
  CDR3 for beta chain variable domain of TCR clone 141716 (TRBV20-1, TRBJ2-2)
CSALSGGAGELFF

SEQ ID NO: 283433 - protein, 14 aa, Homo sapiens
  CDR3 for alpha chain variable domain of TCR clone 141717 (TRAV12-2, TRAJ13)
CAVKKTGGYQKVTF

SEQ ID NO: 283434 - protein, 14 aa, Homo sapiens
  CDR3 for beta chain variable domain of TCR clone 141717 (TRBV5-5, TRBJ2-7)
CDSSLGQGTYEQYF

SEQ ID NO: 283435 - protein, 15 aa, Homo sapiens
  CDR3 for alpha chain variable domain of TCR clone 141718 (TRAV12-2, TRAJ13)
CRESLGSGGYQKVTF

SEQ ID NO: 283436 - protein, 15 aa, Homo sapiens
  CDR3 for beta chain variable domain of TCR clone 141718 (TRBV6-5, TRBJ2-1)
CASRRAQLSYNEHFF

SEQ ID NO: 283437 - protein, 16 aa, Homo sapiens
  CDR3 for alpha chain variable domain of TCR clone 141719 (TRAV3, TRAJ5)
CAVRNLMETGRRGITF

SEQ ID NO: 283438 - protein, 16 aa, Homo sapiens
  CDR3 for beta chain variable domain of TCR clone 141719 (TRBV4-2, TRBJ2-7)
CASSQEGLANSYEQYF

SEQ ID NO: 283439 - protein, 12 aa, Homo sapiens
  CDR3 for alpha chain variable domain of TCR clone 141720 (TRAV27, TRAJ21)
CAGVRQLQQILL

SEQ ID NO: 283440 - protein, 14 aa, Homo sapiens
  CDR3 for beta chain variable domain of TCR clone 141720 (TRBV7-9, TRBJ1-4)
CASSLEGQSGKLFF

SEQ ID NO: 283441 - protein, 14 aa, Homo sapiens
  CDR3 for alpha chain variable domain of TCR clone 141721 (TRAV1-2, TRAJ12)
CAVSGTDSSYKLIF

SEQ ID NO: 283442 - protein, 11 aa, Homo sapiens
  CDR3 for beta chain variable domain of TCR clone 141721 (TRBV2, TRBJ2-4)
AGLTAKNIQYF

SEQ ID NO: 283443 - protein, 16 aa, Homo sapiens
  CDR3 for alpha chain variable domain of TCR clone 141722 (TRAV26-2, TRAJ52)
CIRGPAGGTSYGKLTF

SEQ ID NO: 283444 - protein, 15 aa, Homo sapiens
  CDR3 for beta chain variable domain of TCR clone 141722 (TRBV5-1, TRBJ2-1)
CASSWGPGPCGEQFF

SEQ ID NO: 283445 - protein, 14 aa, Homo sapiens
  CDR3 for alpha chain variable domain of TCR clone 141723 (TRAV13-1, TRAJ39)
CAASKNNAGNMLTF

SEQ ID NO: 283446 - protein, 15 aa, Homo sapiens
  CDR3 for beta chain variable domain of TCR clone 141723 (TRBV7-9, TRBJ1-6)
CASSSPGRGNSHLHF

SEQ ID NO: 283447 - protein, 14 aa, Homo sapiens
  CDR3 for alpha chain variable domain of TCR clone 141724 (TRAV16, TRAJ32)
CALKSGGATNKLIF

SEQ ID NO: 283448 - protein, 13 aa, Homo sapiens
  CDR3 for beta chain variable domain of TCR clone 141724 (TRBV19, TRBJ2-7)
CASSPRQSYEQYF

SEQ ID NO: 283449 - protein, 14 aa, Homo sapiens
  CDR3 for alpha chain variable domain of TCR clone 141725 (TRAV29/DV5, TRAJ44)
CAAILVGTASKLTF

SEQ ID NO: 283450 - protein, 15 aa, Homo sapiens
  CDR3 for beta chain variable domain of TCR clone 141725 (TRBV7-3, TRBJ2-2)
CASSETGQGTGELFF

SEQ ID NO: 283451 - protein, 13 aa, Homo sapiens
  CDR3 for alpha chain variable domain of TCR clone 141726 (TRAV21, TRAJ20)
CAVGLRVDYKLSF

SEQ ID NO: 283452 - protein, 13 aa, Homo sapiens
  CDR3 for beta chain variable domain of TCR clone 141726 (TRBV10-3, TRBJ2-7)
CASKLVVNYEQYF

SEQ ID NO: 283453 - protein, 15 aa, Homo sapiens
  CDR3 for alpha chain variable domain of TCR clone 141727 (TRAV13-1, TRAJ32)
CAASIYGGATNKLIF

SEQ ID NO: 283454 - protein, 17 aa, Homo sapiens
  CDR3 for beta chain variable domain of TCR clone 141727 (TRBV7-3, TRBJ2-5)
CASRLGSGRSGSETQYF

SEQ ID NO: 283455 - protein, 14 aa, Homo sapiens
  CDR3 for alpha chain variable domain of TCR clone 141728 (TRAV12-3, TRAJ10)
SHLPLTGGGNKLTF

SEQ ID NO: 283456 - protein, 14 aa, Homo sapiens
  CDR3 for beta chain variable domain of TCR clone 141728 (TRBV7-2, TRBJ2-5)
CASSLSGGGETQYF

SEQ ID NO: 283457 - protein, 13 aa, Homo sapiens
  CDR3 for alpha chain variable domain of TCR clone 141729 (TRAV26-1, TRAJ35)
CIVGRRVGEMLHC

SEQ ID NO: 283458 - protein, 17 aa, Homo sapiens
  CDR3 for beta chain variable domain of TCR clone 141729 (TRBV7-9, TRBJ2-7)
CASSFDGSRGGAYEQYF

SEQ ID NO: 283459 - protein, 11 aa, Homo sapiens
  CDR3 for alpha chain variable domain of TCR clone 141730 (TRAV35, TRAJ34)
CWARNTDKLIF

SEQ ID NO: 283460 - protein, 14 aa, Homo sapiens
  CDR3 for beta chain variable domain of TCR clone 141730 (TRBV7-3, TRBJ1-1)
CASSLKGGNTEAFF

SEQ ID NO: 283461 - protein, 15 aa, Homo sapiens
  CDR3 for alpha chain variable domain of TCR clone 141731 (TRAV17, TRAJ22)
CATVAPSGSARQLTF

SEQ ID NO: 283462 - protein, 13 aa, Homo sapiens
  CDR3 for beta chain variable domain of TCR clone 141731 (TRBV4-1, TRBJ2-2)
CASSQENTGELFF

SEQ ID NO: 283463 - protein, 17 aa, Homo sapiens
  CDR3 for alpha chain variable domain of TCR clone 141732 (TRAV3, TRAJ42)
CAVRDRDYGGSQGNLVF

SEQ ID NO: 283464 - protein, 15 aa, Homo sapiens
  CDR3 for beta chain variable domain of TCR clone 141732 (TRBV6-6, TRBJ2-7)
CASSYSYGGSYEQYF

SEQ ID NO: 283465 - protein, 15 aa, Homo sapiens
  CDR3 for alpha chain variable domain of TCR clone 141733 (TRAV29/DV5, TRAJ29)
CSASERSSGNTSPVF

SEQ ID NO: 283466 - protein, 12 aa, Homo sapiens
  CDR3 for beta chain variable domain of TCR clone 141733 (TRBV7-9, TRBJ1-4)
CASSTDREKLFF

SEQ ID NO: 283467 - protein, 13 aa, Homo sapiens
  CDR3 for alpha chain variable domain of TCR clone 141734 (TRAV8-3, TRAJ28)
CAVGAVGSYQLTF

SEQ ID NO: 283468 - protein, 15 aa, Homo sapiens
  CDR3 for beta chain variable domain of TCR clone 141734 (TRBV7-9, TRBJ1-6)
CASSSPGRGNSPLHF

SEQ ID NO: 283469 - protein, 11 aa, Homo sapiens
  CDR3 for alpha chain variable domain of TCR clone 141735 (TRAV17, TRAJ9)
CGFTGGFKTIF

SEQ ID NO: 283470 - protein, 16 aa, Homo sapiens
  CDR3 for beta chain variable domain of TCR clone 141735 (TRBV11-2, TRBJ1-1)
CASSGRGLWTNTEAFF

SEQ ID NO: 283471 - protein, 14 aa, Homo sapiens
  CDR3 for alpha chain variable domain of TCR clone 141736 (TRAV2, TRAJ31)
CAVVDLRITMPDSF

SEQ ID NO: 283472 - protein, 15 aa, Homo sapiens
  CDR3 for beta chain variable domain of TCR clone 141736 (TRBV14, TRBJ2-1)
CASSLLAGIYNEQFF

SEQ ID NO: 283473 - protein, 15 aa, Homo sapiens
  CDR3 for alpha chain variable domain of TCR clone 141737 (TRAV14/DV4, TRAJ33)
CAMREGRDSNYQLIG

SEQ ID NO: 283474 - protein, 16 aa, Homo sapiens
  CDR3 for beta chain variable domain of TCR clone 141737 (TRBV12-5, TRBJ2-5)
CASGPRTSGNQETQYF

SEQ ID NO: 283475 - protein, 14 aa, Homo sapiens
  CDR3 for alpha chain variable domain of TCR clone 141738 (TRAV1-2, TRAJ8)
CAVREDTGFQKLVF

SEQ ID NO: 283476 - protein, 18 aa, Homo sapiens
  CDR3 for beta chain variable domain of TCR clone 141738 (TRBV11-2, TRBJ2-3)
CASSLGGASRGSPNTQYF

SEQ ID NO: 283477 - protein, 14 aa, Homo sapiens
  CDR3 for alpha chain variable domain of TCR clone 141739 (TRAV12-2, TRAJ45)
CAVNKGGGADGLTF

SEQ ID NO: 283478 - protein, 13 aa, Homo sapiens
  CDR3 for beta chain variable domain of TCR clone 141739 (TRBV4-1, TRBJ1-1)
CASSRKMNTEAFF

SEQ ID NO: 283479 - protein, 13 aa, Homo sapiens
  CDR3 for alpha chain variable domain of TCR clone 141740 (TRAV12-3, TRAJ7)
CAMTPYGNNRLAF

SEQ ID NO: 283480 - protein, 16 aa, Homo sapiens
  CDR3 for beta chain variable domain of TCR clone 141740 (TRBV20-1, TRBJ1-4)
CSARPYGGELNDELFF

SEQ ID NO: 283481 - protein, 17 aa, Homo sapiens
  CDR3 for alpha chain variable domain of TCR clone 141741 (TRAV3, TRAJ6)
CAVRDGPRAGGSYKPTF

SEQ ID NO: 283482 - protein, 18 aa, Homo sapiens
  CDR3 for beta chain variable domain of TCR clone 141741 (TRBV7-9, TRBJ2-7)
CASSLTTSGSRTWYEQYF

SEQ ID NO: 283483 - protein, 10 aa, Homo sapiens
  CDR3 for alpha chain variable domain of TCR clone 141742 (TRAV26-1, TRAJ40)
CIAGTYKYIF

SEQ ID NO: 283484 - protein, 15 aa, Homo sapiens
  CDR3 for beta chain variable domain of TCR clone 141742 (TRBV5-1, TRBJ2-1)
CASSPPRAPYNEQFF

SEQ ID NO: 283485 - protein, 10 aa, Homo sapiens
  CDR3 for alpha chain variable domain of TCR clone 141743 (TRAV1-2, TRAJ23)
CSGQGGKLIF

SEQ ID NO: 283486 - protein, 14 aa, Homo sapiens
  CDR3 for beta chain variable domain of TCR clone 141743 (TRBV6-1, TRBJ1-3)
CASVQGGGGNTIYF

SEQ ID NO: 283487 - protein, 11 aa, Homo sapiens
  CDR3 for alpha chain variable domain of TCR clone 141744 (TRAV3, TRAJ21)
CAVGNFNKFYF

SEQ ID NO: 283488 - protein, 15 aa, Homo sapiens
  CDR3 for beta chain variable domain of TCR clone 141744 (TRBV28, TRBJ2-3)
CAPTFRDWSTDTQYF

SEQ ID NO: 283489 - protein, 16 aa, Homo sapiens
  CDR3 for alpha chain variable domain of TCR clone 141745 (TRAV12-2, TRAJ18)
CAVTTDRGSTLGRLYF

SEQ ID NO: 283490 - protein, 13 aa, Homo sapiens
  CDR3 for beta chain variable domain of TCR clone 141745 (TRBV19, TRBJ2-3)
CATGDKITDTQYF

SEQ ID NO: 283491 - protein, 16 aa, Homo sapiens
  CDR3 for alpha chain variable domain of TCR clone 141746 (TRAV3, TRAJ37)
CAVRGRGSGNTGKRIF

SEQ ID NO: 283492 - protein, 13 aa, Homo sapiens
  CDR3 for beta chain variable domain of TCR clone 141746 (TRBV14, TRBJ2-7)
CASSQDRRGEQYF

SEQ ID NO: 283493 - protein, 12 aa, Homo sapiens
  CDR3 for alpha chain variable domain of TCR clone 141747 (TRAV3, TRAJ31)
CAVGPRGPRLMF

SEQ ID NO: 283494 - protein, 17 aa, Homo sapiens
  CDR3 for beta chain variable domain of TCR clone 141747 (TRBV7-9, TRBJ1-5)
CASSASEGGYSNQPQHF

SEQ ID NO: 283495 - protein, 12 aa, Homo sapiens
  CDR3 for alpha chain variable domain of TCR clone 141748 (TRAV3, TRAJ31)
CAGRDGNARLMF

SEQ ID NO: 283496 - protein, 18 aa, Homo sapiens
  CDR3 for beta chain variable domain of TCR clone 141748 (TRBV7-2, TRBJ2-3)
CASSLKREGSGIPDTQYF

SEQ ID NO: 283497 - protein, 14 aa, Homo sapiens
  CDR3 for alpha chain variable domain of TCR clone 141749 (TRAV1-2, TRAJ8)
CAVREDTGSQKLVF

SEQ ID NO: 283498 - protein, 14 aa, Homo sapiens
  CDR3 for beta chain variable domain of TCR clone 141749 (TRBV7-6, TRBJ2-3)
CDSSLGTVTDTQYF

SEQ ID NO: 283499 - protein, 13 aa, Homo sapiens
  CDR3 for alpha chain variable domain of TCR clone 141750 (TRAV29/DV5, TRAJ31)
CAASRNNNARLIF

SEQ ID NO: 283500 - protein, 12 aa, Homo sapiens
  CDR3 for beta chain variable domain of TCR clone 141750 (TRBV14, TRBJ2-5)
CASSQLKETQYF

SEQ ID NO: 283501 - protein, 12 aa, Homo sapiens
  CDR3 for alpha chain variable domain of TCR clone 141751 (TRAV2, TRAJ10)
CASTGVGNKLTS

SEQ ID NO: 283502 - protein, 14 aa, Homo sapiens
  CDR3 for beta chain variable domain of TCR clone 141751 (TRBV7-2, TRBJ2-2)
CASRGQGAAGELFF

SEQ ID NO: 283503 - protein, 11 aa, Homo sapiens
  CDR3 for alpha chain variable domain of TCR clone 141752 (TRAV2, TRAJ13)
CASGGYQKVTF

SEQ ID NO: 283504 - protein, 14 aa, Homo sapiens
  CDR3 for beta chain variable domain of TCR clone 141752 (TRBV11-2, TRBJ2-5)
CASSRTGGIETQYF

SEQ ID NO: 283505 - protein, 15 aa, Homo sapiens
  CDR3 for alpha chain variable domain of TCR clone 141753 (TRAV12-2, TRAJ53)
CAVNGGGGSNYKLTF

SEQ ID NO: 283506 - protein, 14 aa, Homo sapiens
  CDR3 for beta chain variable domain of TCR clone 141753 (TRBV18, TRBJ2-7)
CASSPRGEAYEQYF

SEQ ID NO: 283507 - protein, 14 aa, Homo sapiens
  CDR3 for alpha chain variable domain of TCR clone 141754 (TRAV1-1, TRAJ30)
CAVRSLNRDDKIIF

SEQ ID NO: 283508 - protein, 14 aa, Homo sapiens
  CDR3 for beta chain variable domain of TCR clone 141754 (TRBV7-8, TRBJ2-3)
CASSLEAGTDMQYF

SEQ ID NO: 283509 - protein, 19 aa, Homo sapiens
  CDR3 for alpha chain variable domain of TCR clone 141755 (TRAV26-1, TRAJ52)
CIVKAHRNAGGTSYGKLTF

SEQ ID NO: 283510 - protein, 15 aa, Homo sapiens
  CDR3 for beta chain variable domain of TCR clone 141755 (TRBV29-1, TRBJ2-1)
CSGRDRKSSYNEQFF

SEQ ID NO: 283511 - protein, 15 aa, Homo sapiens
  CDR3 for alpha chain variable domain of TCR clone 141756 (TRAV23/DV6, TRAJ48)
CAASKTNFGNEKLTF

SEQ ID NO: 283512 - protein, 14 aa, Homo sapiens
  CDR3 for beta chain variable domain of TCR clone 141756 (TRBV5-4, TRBJ1-1)
CASSLDSRGDEAFF

SEQ ID NO: 283513 - protein, 11 aa, Homo sapiens
  CDR3 for alpha chain variable domain of TCR clone 141757 (TRAV27, TRAJ36)
CRDDWGKHLFF

SEQ ID NO: 283514 - protein, 14 aa, Homo sapiens
  CDR3 for beta chain variable domain of TCR clone 141757 (TRBV12-4, TRBJ2-3)
CASSLVPSTDTQYF

SEQ ID NO: 283515 - protein, 14 aa, Homo sapiens
  CDR3 for alpha chain variable domain of TCR clone 141758 (TRAV1-2, TRAJ16)
CAVNRFSDGQRLLF

SEQ ID NO: 283516 - protein, 13 aa, Homo sapiens
  CDR3 for beta chain variable domain of TCR clone 141758 (TRBV10-3, TRBJ2-7)
CASRLAVNYEQYF

SEQ ID NO: 283517 - protein, 15 aa, Homo sapiens
  CDR3 for alpha chain variable domain of TCR clone 141759 (TRAV16, TRAJ12)
CSKWPLRDSSYKLIF

SEQ ID NO: 283518 - protein, 13 aa, Homo sapiens
  CDR3 for beta chain variable domain of TCR clone 141759 (TRBV4-2, TRBJ1-1)
CASRQAGNTEAFF

SEQ ID NO: 283519 - protein, 12 aa, Homo sapiens
  CDR3 for alpha chain variable domain of TCR clone 141760 (TRAV26-1, TRAJ35)
CIGLSFGNVLHC

SEQ ID NO: 283520 - protein, 12 aa, Homo sapiens
  CDR3 for beta chain variable domain of TCR clone 141760 (TRBV14, TRBJ2-5)
CASSQLKETQYF

SEQ ID NO: 283521 - protein, 14 aa, Homo sapiens
  CDR3 for alpha chain variable domain of TCR clone 141761 (TRAV1-2, TRAJ8)
CAVREDTGFQKLVF

SEQ ID NO: 283522 - protein, 10 aa, Homo sapiens
  CDR3 for beta chain variable domain of TCR clone 141761 (TRBV7-9, TRBJ2-2)
CASGPLDTFP

SEQ ID NO: 283523 - protein, 14 aa, Homo sapiens
  CDR3 for alpha chain variable domain of TCR clone 141762 (TRAV3, TRAJ28)
CAVRRGAGSFQLTF

SEQ ID NO: 283524 - protein, 16 aa, Homo sapiens
  CDR3 for beta chain variable domain of TCR clone 141762 (TRBV4-1, TRBJ2-7)
CASSQEWTSGPLEQYF

SEQ ID NO: 283525 - protein, 12 aa, Homo sapiens
  CDR3 for alpha chain variable domain of TCR clone 141763 (TRAV17, TRAJ30)
CATDARDDKIIF

SEQ ID NO: 283526 - protein, 16 aa, Homo sapiens
  CDR3 for beta chain variable domain of TCR clone 141763 (TRBV7-2, TRBJ2-7)
RASTSQAASGGYEQYF

SEQ ID NO: 283527 - protein, 10 aa, Homo sapiens
  CDR3 for alpha chain variable domain of TCR clone 141764 (TRAV2, TRAJ15)
RDQAGTALIF

SEQ ID NO: 283528 - protein, 13 aa, Homo sapiens
  CDR3 for beta chain variable domain of TCR clone 141764 (TRBV10-3, TRBJ2-7)
CASKLAVNYEQYF

SEQ ID NO: 283529 - protein, 13 aa, Homo sapiens
  CDR3 for alpha chain variable domain of TCR clone 141765 (TRAV2, TRAJ40)
CAVVTSGTYKYIF

SEQ ID NO: 283530 - protein, 15 aa, Homo sapiens
  CDR3 for beta chain variable domain of TCR clone 141765 (TRBV7-2, TRBJ2-1)
CASSFQADEYNEQFF

SEQ ID NO: 283531 - protein, 13 aa, Homo sapiens
  CDR3 for alpha chain variable domain of TCR clone 141766 (TRAV35, TRAJ57)
CAGSQGGSEKLVF

SEQ ID NO: 283532 - protein, 14 aa, Homo sapiens
  CDR3 for beta chain variable domain of TCR clone 141766 (TRBV7-9, TRBJ2-2)
CASSGLADTGELFF

SEQ ID NO: 283533 - protein, 14 aa, Homo sapiens
  CDR3 for alpha chain variable domain of TCR clone 141767 (TRAV26-1, TRAJ29)
CIVRVEPGNTPLVF

SEQ ID NO: 283534 - protein, 17 aa, Homo sapiens
  CDR3 for beta chain variable domain of TCR clone 141767 (TRBV13, TRBJ2-3)
CASSLSRVAGGRNTQYF

SEQ ID NO: 283535 - protein, 11 aa, Homo sapiens
  CDR3 for alpha chain variable domain of TCR clone 141768 (TRAV12-1, TRAJ21)
CVVNNFNKFYF

SEQ ID NO: 283536 - protein, 11 aa, Homo sapiens
  CDR3 for beta chain variable domain of TCR clone 141768 (TRBV20-1, TRBJ2-7)
CSARTSYEQYF

SEQ ID NO: 283537 - protein, 14 aa, Homo sapiens
  CDR3 for alpha chain variable domain of TCR clone 141769 (TRAV13-1, TRAJ44)
CAVKATGTASKLTF

SEQ ID NO: 283538 - protein, 13 aa, Homo sapiens
  CDR3 for beta chain variable domain of TCR clone 141769 (TRBV5-5, TRBJ1-2)
CASSFWRGEDDTF

SEQ ID NO: 283539 - protein, 13 aa, Homo sapiens
  CDR3 for alpha chain variable domain of TCR clone 141770 (TRAV3, TRAJ20)
YAVRDTPRYKLSF

SEQ ID NO: 283540 - protein, 16 aa, Homo sapiens
  CDR3 for beta chain variable domain of TCR clone 141770 (TRBV20-1, TRBJ2-7)
CSARAPGLALSYEQYF

SEQ ID NO: 283541 - protein, 13 aa, Homo sapiens
  CDR3 for alpha chain variable domain of TCR clone 141771 (TRAV3, TRAJ30)
CALRDRGDDKIIL

SEQ ID NO: 283542 - protein, 14 aa, Homo sapiens
  CDR3 for beta chain variable domain of TCR clone 141771 (TRBV5-1, TRBJ1-1)
CASSRTTGDTEAFF

SEQ ID NO: 283543 - protein, 13 aa, Homo sapiens
  CDR3 for alpha chain variable domain of TCR clone 141772 (TRAV3, TRAJ27)
CAVRPRGAGKATF

SEQ ID NO: 283544 - protein, 13 aa, Homo sapiens
  CDR3 for beta chain variable domain of TCR clone 141772 (TRBV7-9, TRBJ2-3)
CASSPGSTDTQYL

SEQ ID NO: 283545 - protein, 17 aa, Homo sapiens
  CDR3 for alpha chain variable domain of TCR clone 141773 (TRAV3, TRAJ12)
CAVRDGGRMDSSYKLIF

SEQ ID NO: 283546 - protein, 14 aa, Homo sapiens
  CDR3 for beta chain variable domain of TCR clone 141773 (TRBV7-9, TRBJ1-2)
CASSRQGANDGYTF

SEQ ID NO: 283547 - protein, 12 aa, Homo sapiens
  CDR3 for alpha chain variable domain of TCR clone 141774 (TRAV12-3, TRAJ3)
CAIDSSASRIIF

SEQ ID NO: 283548 - protein, 17 aa, Homo sapiens
  CDR3 for beta chain variable domain of TCR clone 141774 (TRBV7-9, TRBJ2-3)
CASSLEEAGAYPDTQYF

SEQ ID NO: 283549 - protein, 14 aa, Homo sapiens
  CDR3 for alpha chain variable domain of TCR clone 141775 (TRAV16, TRAJ29)
CALTRNSGNTPLVF

SEQ ID NO: 283550 - protein, 12 aa, Homo sapiens
  CDR3 for beta chain variable domain of TCR clone 141775 (TRBV2, TRBJ2-1)
CAKREGYNEHFF

SEQ ID NO: 283551 - protein, 12 aa, Homo sapiens
  CDR3 for alpha chain variable domain of TCR clone 141776 (TRAV30, TRAJ43)
CGTEERGNDMRF

SEQ ID NO: 283552 - protein, 13 aa, Homo sapiens
  CDR3 for beta chain variable domain of TCR clone 141776 (TRBV27, TRBJ2-7)
CARSFSQGYEQYF

SEQ ID NO: 283553 - protein, 15 aa, Homo sapiens
  CDR3 for alpha chain variable domain of TCR clone 141777 (TRAV17, TRAJ56)
CATEPFTGANSKLTF

SEQ ID NO: 283554 - protein, 15 aa, Homo sapiens
  CDR3 for beta chain variable domain of TCR clone 141777 (TRBV28, TRBJ1-5)
CASSRTGAYVQPQHF

SEQ ID NO: 283555 - protein, 17 aa, Homo sapiens
  CDR3 for alpha chain variable domain of TCR clone 141778 (TRAV13-1, TRAJ28)
CAASPPYSGAGSYQLTY

SEQ ID NO: 283556 - protein, 19 aa, Homo sapiens
  CDR3 for beta chain variable domain of TCR clone 141778 (TRBV25-1, TRBJ2-2)
CAILVYRVDRGRKTGELFF

SEQ ID NO: 283557 - protein, 13 aa, Homo sapiens
  CDR3 for alpha chain variable domain of TCR clone 141779 (TRAV30, TRAJ34)
CGTVGYNTDKTIF

SEQ ID NO: 283558 - protein, 16 aa, Homo sapiens
  CDR3 for beta chain variable domain of TCR clone 141779 (TRBV7-9, TRBJ1-2)
CASSLGFSSGEDGYTF

SEQ ID NO: 283559 - protein, 13 aa, Homo sapiens
  CDR3 for alpha chain variable domain of TCR clone 141780 (TRAV17, TRAJ5)
CALRGTGRRALTF

SEQ ID NO: 283560 - protein, 15 aa, Homo sapiens
  CDR3 for beta chain variable domain of TCR clone 141780 (TRBV6-1, TRBJ1-5)
CTSSELREGNQPQHF

SEQ ID NO: 283561 - protein, 15 aa, Homo sapiens
  CDR3 for alpha chain variable domain of TCR clone 141781 (TRAV12-2, TRAJ43)
CAFDMRFGAGTRLTV

SEQ ID NO: 283562 - protein, 12 aa, Homo sapiens
  CDR3 for beta chain variable domain of TCR clone 141781 (TRBV4-2, TRBJ2-5)
CASGGAQETQYF

SEQ ID NO: 283563 - protein, 11 aa, Homo sapiens
  CDR3 for alpha chain variable domain of TCR clone 141782 (TRAV17, TRAJ31)
CATSNNARLMF

SEQ ID NO: 283564 - protein, 16 aa, Homo sapiens
  CDR3 for beta chain variable domain of TCR clone 141782 (TRBV12-4, TRBJ1-5)
CASRQPVEGSNQPQHF

SEQ ID NO: 283565 - protein, 15 aa, Homo sapiens
  CDR3 for alpha chain variable domain of TCR clone 141783 (TRAV35, TRAJ42)
CAGRLYGGSQGNLIF

SEQ ID NO: 283566 - protein, 15 aa, Homo sapiens
  CDR3 for beta chain variable domain of TCR clone 141783 (TRBV5-1, TRBJ2-7)
CASSPGAGNSYEQYF

SEQ ID NO: 283567 - protein, 12 aa, Homo sapiens
  CDR3 for alpha chain variable domain of TCR clone 141784 (TRAV8-4, TRAJ43)
CAVSVNNNDMRF

SEQ ID NO: 283568 - protein, 13 aa, Homo sapiens
  CDR3 for beta chain variable domain of TCR clone 141784 (TRBV7-9, TRBJ1-2)
CASNLKQNYGYTF

SEQ ID NO: 283569 - protein, 14 aa, Homo sapiens
  CDR3 for alpha chain variable domain of TCR clone 141785 (TRAV8-2, TRAJ45)
CVMSAGGGADGLTF

SEQ ID NO: 283570 - protein, 12 aa, Homo sapiens
  CDR3 for beta chain variable domain of TCR clone 141785 (TRBV12-4, TRBJ2-1)
CASSLVRVEQFF

SEQ ID NO: 283571 - protein, 16 aa, Homo sapiens
  CDR3 for alpha chain variable domain of TCR clone 141786 (TRAV21, TRAJ45)
CAVSWGSGGGADGVTF

SEQ ID NO: 283572 - protein, 13 aa, Homo sapiens
  CDR3 for beta chain variable domain of TCR clone 141786 (TRBV7-3, TRBJ1-1)
CASSQDWGAEAFF

SEQ ID NO: 283573 - protein, 14 aa, Homo sapiens
  CDR3 for alpha chain variable domain of TCR clone 141787 (TRAV1-1, TRAJ27)
CAVRDTTNAGKSTF

SEQ ID NO: 283574 - protein, 13 aa, Homo sapiens
  CDR3 for beta chain variable domain of TCR clone 141787 (TRBV7-9, TRBJ1-2)
CASSLKQNYGYTF

SEQ ID NO: 283575 - protein, 15 aa, Homo sapiens
  CDR3 for alpha chain variable domain of TCR clone 141788 (TRAV8-3, TRAJ45)
CASSYSGGGADGLTF

SEQ ID NO: 283576 - protein, 18 aa, Homo sapiens
  CDR3 for beta chain variable domain of TCR clone 141788 (TRBV18, TRBJ1-3)
CASSPRGGAGPSGTTIYF

SEQ ID NO: 283577 - protein, 16 aa, Homo sapiens
  CDR3 for alpha chain variable domain of TCR clone 141789 (TRAV3, TRAJ10)
CAVRDMRAGGGNKLTF

SEQ ID NO: 283578 - protein, 16 aa, Homo sapiens
  CDR3 for beta chain variable domain of TCR clone 141789 (TRBV7-9, TRBJ2-1)
CASSLVSGPSYNEQFF

SEQ ID NO: 283579 - protein, 14 aa, Homo sapiens
  CDR3 for alpha chain variable domain of TCR clone 141790 (TRAV35, TRAJ22)
CAGLRPGSARQLTF

SEQ ID NO: 283580 - protein, 13 aa, Homo sapiens
  CDR3 for beta chain variable domain of TCR clone 141790 (TRBV11-2, TRBJ1-6)
CASSLAGTSPLHF

SEQ ID NO: 283581 - protein, 17 aa, Homo sapiens
  CDR3 for alpha chain variable domain of TCR clone 141791 (TRAV3, TRAJ6)
CAVREVPRAGGSYIPPF

SEQ ID NO: 283582 - protein, 14 aa, Homo sapiens
  CDR3 for beta chain variable domain of TCR clone 141791 (TRBV7-2, TRBJ2-7)
CASSPKTSFYEQYF

SEQ ID NO: 283583 - protein, 13 aa, Homo sapiens
  CDR3 for alpha chain variable domain of TCR clone 141792 (TRAV25, TRAJ30)
CAGRVDRDDKIIV

SEQ ID NO: 283584 - protein, 16 aa, Homo sapiens
  CDR3 for beta chain variable domain of TCR clone 141792 (TRBV7-9, TRBJ2-1)
CASSPRASSSYNEQFF

SEQ ID NO: 283585 - protein, 13 aa, Homo sapiens
  CDR3 for alpha chain variable domain of TCR clone 141793 (TRAV3, TRAJ21)
CAVREPDFNNFYF

SEQ ID NO: 283586 - protein, 16 aa, Homo sapiens
  CDR3 for beta chain variable domain of TCR clone 141793 (TRBV19, TRBJ2-1)
CASSMGGGSSYNEQFF

SEQ ID NO: 283587 - protein, 17 aa, Homo sapiens
  CDR3 for alpha chain variable domain of TCR clone 141794 (TRAV26-1, TRAJ27)
CIVSTPWINTNACKSTF

SEQ ID NO: 283588 - protein, 16 aa, Homo sapiens
  CDR3 for beta chain variable domain of TCR clone 141794 (TRBV7-9, TRBJ2-1)
CASSLDPGLAIDEQFF

SEQ ID NO: 283589 - protein, 13 aa, Homo sapiens
  CDR3 for alpha chain variable domain of TCR clone 141795 (TRAV3, TRAJ21)
CPVREPDFNKFYF

SEQ ID NO: 283590 - protein, 13 aa, Homo sapiens
  CDR3 for beta chain variable domain of TCR clone 141795 (TRBV9, TRBJ2-1)
CASSPSGGNEQFF

SEQ ID NO: 283591 - protein, 15 aa, Homo sapiens
  CDR3 for alpha chain variable domain of TCR clone 141796 (TRAV26-1, TRAJ39)
CIVRDGSNVGNMLTF

SEQ ID NO: 283592 - protein, 14 aa, Homo sapiens
  CDR3 for beta chain variable domain of TCR clone 141796 (TRBV10-3, TRBJ1-2)
CAIRAGTGDYGYTF

SEQ ID NO: 283593 - protein, 14 aa, Homo sapiens
  CDR3 for alpha chain variable domain of TCR clone 141797 (TRAV16, TRAJ57)
CALSGQGGSEKLGF

SEQ ID NO: 283594 - protein, 13 aa, Homo sapiens
  CDR3 for beta chain variable domain of TCR clone 141797 (TRBV5-4, TRBJ2-1)
CASSLQGPREQFF

SEQ ID NO: 283595 - protein, 13 aa, Homo sapiens
  CDR3 for alpha chain variable domain of TCR clone 141798 (TRAV12-1, TRAJ26)
CVVRRNYGQNFVF

SEQ ID NO: 283596 - protein, 14 aa, Homo sapiens
  CDR3 for beta chain variable domain of TCR clone 141798 (TRBV6-3, TRBJ1-1)
CASKYTGESTEAFF

SEQ ID NO: 283597 - protein, 10 aa, Homo sapiens
  CDR3 for alpha chain variable domain of TCR clone 141799 (TRAV12-3, TRAJ49)
CAMNDDQFYF

SEQ ID NO: 283598 - protein, 15 aa, Homo sapiens
  CDR3 for beta chain variable domain of TCR clone 141799 (TRBV7-9, TRBJ2-7)
CASSSSGLAVYEQYF

SEQ ID NO: 283599 - protein, 16 aa, Homo sapiens
  CDR3 for alpha chain variable domain of TCR clone 141800 (TRAV3, TRAJ21)
CAVRDIERGNFNKFYF

SEQ ID NO: 283600 - protein, 16 aa, Homo sapiens
  CDR3 for beta chain variable domain of TCR clone 141800 (TRBV12-4, TRBJ2-7)
CASSLIGGTGTYEQYF

SEQ ID NO: 283601 - protein, 13 aa, Homo sapiens
  CDR3 for alpha chain variable domain of TCR clone 141801 (TRAV1-2, TRAJ9)
CAALTTGSFKTIF

SEQ ID NO: 283602 - protein, 15 aa, Homo sapiens
  CDR3 for beta chain variable domain of TCR clone 141801 (TRBV24-1, TRBJ2-1)
CATSGSGGFYNEQFF

SEQ ID NO: 283603 - protein, 14 aa, Homo sapiens
  CDR3 for alpha chain variable domain of TCR clone 141802 (TRAV29/DV5, TRAJ45)
CAASFRGGAHGLTF

SEQ ID NO: 283604 - protein, 11 aa, Homo sapiens
  CDR3 for beta chain variable domain of TCR clone 141802 (TRBV11-2, TRBJ2-2)
CASSLPGELFF

SEQ ID NO: 283605 - protein, 17 aa, Homo sapiens
  CDR3 for alpha chain variable domain of TCR clone 141803 (TRAV17, TRAJ29)
CFLLLCYASSGNTPLVF

SEQ ID NO: 283606 - protein, 13 aa, Homo sapiens
  CDR3 for beta chain variable domain of TCR clone 141803 (TRBV14, TRBJ2-7)
CASSQDRRYEQYF

SEQ ID NO: 283607 - protein, 15 aa, Homo sapiens
  CDR3 for alpha chain variable domain of TCR clone 141804 (TRAV25, TRAJ53)
CAATGGGGSNYKLTF

SEQ ID NO: 283608 - protein, 13 aa, Homo sapiens
  CDR3 for beta chain variable domain of TCR clone 141804 (TRBV7-9, TRBJ2-3)
CASSPGSTDTQYF

SEQ ID NO: 283609 - protein, 15 aa, Homo sapiens
  CDR3 for alpha chain variable domain of TCR clone 141805 (TRAV9-2, TRAJ49)
CALSPPDHTGNQFYF

SEQ ID NO: 283610 - protein, 14 aa, Homo sapiens
  CDR3 for beta chain variable domain of TCR clone 141805 (TRBV12-5, TRBJ2-5)
CASGSRTQQETQYF

SEQ ID NO: 283611 - protein, 14 aa, Homo sapiens
  CDR3 for alpha chain variable domain of TCR clone 141806 (TRAV3, TRAJ9)
CAVRLNTGGFKTIF

SEQ ID NO: 283612 - protein, 15 aa, Homo sapiens
  CDR3 for beta chain variable domain of TCR clone 141806 (TRBV7-2, TRBJ2-5)
CASSLASGRVNEQFF

SEQ ID NO: 283613 - protein, 13 aa, Homo sapiens
  CDR3 for alpha chain variable domain of TCR clone 141807 (TRAV17, TRAJ45)
CATPGGGADGLTF

SEQ ID NO: 283614 - protein, 14 aa, Homo sapiens
  CDR3 for beta chain variable domain of TCR clone 141807 (TRBV4-1, TRBJ1-1)
CASSPTGIHTEAVF

SEQ ID NO: 283615 - protein, 10 aa, Homo sapiens
  CDR3 for alpha chain variable domain of TCR clone 141808 (TRAV13-1, TRAJ7)
LIGGNKRLAF

SEQ ID NO: 283616 - protein, 16 aa, Homo sapiens
  CDR3 for beta chain variable domain of TCR clone 141808 (TRBV4-1, TRBJ1-2)
CASSQDAGQVLYGYTF

SEQ ID NO: 283617 - protein, 13 aa, Homo sapiens
  CDR3 for alpha chain variable domain of TCR clone 141809 (TRAV12-3, TRAJ33)
CAMSVNSNYQLIW

SEQ ID NO: 283618 - protein, 13 aa, Homo sapiens
  CDR3 for beta chain variable domain of TCR clone 141809 (TRBV2, TRBJ2-7)
CASSVGGSGEQYF

SEQ ID NO: 283619 - protein, 12 aa, Homo sapiens
  CDR3 for alpha chain variable domain of TCR clone 141810 (TRAV12-1, TRAJ33)
CAKMDSNYQLIW

SEQ ID NO: 283620 - protein, 14 aa, Homo sapiens
  CDR3 for beta chain variable domain of TCR clone 141810 (TRBV2, TRBJ2-7)
CASSLTSGGYEQYF

SEQ ID NO: 283621 - protein, 10 aa, Homo sapiens
  CDR3 for alpha chain variable domain of TCR clone 141811 (TRAV12-2, TRAJ52)
CAANRWWYLL

SEQ ID NO: 283622 - protein, 13 aa, Homo sapiens
  CDR3 for beta chain variable domain of TCR clone 141811 (TRBV15, TRBJ2-7)
CATSTTGHYEQYF

SEQ ID NO: 283623 - protein, 15 aa, Homo sapiens
  CDR3 for alpha chain variable domain of TCR clone 141812 (TRAV8-4, TRAJ3)
CAVTGENLVQQCFQD

SEQ ID NO: 283624 - protein, 13 aa, Homo sapiens
  CDR3 for beta chain variable domain of TCR clone 141812 (TRBV10-3, TRBJ2-5)
CAMTSGAGETQYF

SEQ ID NO: 283625 - protein, 14 aa, Homo sapiens
  CDR3 for alpha chain variable domain of TCR clone 141813 (TRAV13-1, TRAJ35)
CAASKGGFGNVLRF

SEQ ID NO: 283626 - protein, 13 aa, Homo sapiens
  CDR3 for beta chain variable domain of TCR clone 141813 (TRBV7-3, TRBJ1-1)
CASSQDWGAEAFF

SEQ ID NO: 283627 - protein, 12 aa, Homo sapiens
  CDR3 for alpha chain variable domain of TCR clone 141814 (TRAV4, TRAJ3)
CLVGDTQQCFQD

SEQ ID NO: 283628 - protein, 13 aa, Homo sapiens
  CDR3 for beta chain variable domain of TCR clone 141814 (TRBV7-3, TRBJ1-1)
CASSQDWGAEAFF

SEQ ID NO: 283629 - protein, 13 aa, Homo sapiens
  CDR3 for alpha chain variable domain of TCR clone 141815 (TRAV35, TRAJ36)
CAGPRIGANNLFF

SEQ ID NO: 283630 - protein, 17 aa, Homo sapiens
  CDR3 for beta chain variable domain of TCR clone 141815 (TRBV15, TRBJ1-4)
CATSRYGTGDPNEKLFF

SEQ ID NO: 283631 - protein, 13 aa, Homo sapiens
  CDR3 for alpha chain variable domain of TCR clone 141816 (TRAV21, TRAJ20)
CAVGLRVDYKLGF

SEQ ID NO: 283632 - protein, 14 aa, Homo sapiens
  CDR3 for beta chain variable domain of TCR clone 141816 (TRBV7-8, TRBJ2-3)
CASSLEAGTDTQYF

SEQ ID NO: 283633 - protein, 12 aa, Homo sapiens
  CDR3 for alpha chain variable domain of TCR clone 141817 (TRAV8-3, TRAJ26)
CAGDNYGKNFVF

SEQ ID NO: 283634 - protein, 12 aa, Homo sapiens
  CDR3 for beta chain variable domain of TCR clone 141817 (TRBV11-2, TRBJ2-2)
CASSLGGGELFF

SEQ ID NO: 283635 - protein, 21 aa, Homo sapiens
  CDR3 for alpha chain variable domain of TCR clone 141818 (TRAV41, TRAJ45)
TASHPRDSAGASGGGADGLTF

SEQ ID NO: 283636 - protein, 16 aa, Homo sapiens
  CDR3 for beta chain variable domain of TCR clone 141818 (TRBV5-5, TRBJ2-2)
CASSGRRKGATGELFF

SEQ ID NO: 283637 - protein, 14 aa, Homo sapiens
  CDR3 for alpha chain variable domain of TCR clone 141819 (TRAV12-2, TRAJ13)
CAVKKTGGYQKGTF

SEQ ID NO: 283638 - protein, 14 aa, Homo sapiens
  CDR3 for beta chain variable domain of TCR clone 141819 (TRBV10-3, TRBJ2-1)
CAISSDLAYNEQFF

SEQ ID NO: 283639 - protein, 11 aa, Homo sapiens
  CDR3 for alpha chain variable domain of TCR clone 141820 (TRAV2, TRAJ20)
CAALNDYKLSF

SEQ ID NO: 283640 - protein, 16 aa, Homo sapiens
  CDR3 for beta chain variable domain of TCR clone 141820 (TRBV11-1, TRBJ2-2)
CASSAEGLKNTGELFF

SEQ ID NO: 283641 - protein, 12 aa, Homo sapiens
  CDR3 for alpha chain variable domain of TCR clone 141821 (TRAV12-2, TRAJ9)
CAVYNGGFNTIF

SEQ ID NO: 283642 - protein, 14 aa, Homo sapiens
  CDR3 for beta chain variable domain of TCR clone 141821 (TRBV6-1, TRBJ1-5)
CASSETGMEQPQHF

SEQ ID NO: 283643 - protein, 15 aa, Homo sapiens
  CDR3 for alpha chain variable domain of TCR clone 141822 (TRAV21, TRAJ6)
CAVPPPFGGSYIPTF

SEQ ID NO: 283644 - protein, 14 aa, Homo sapiens
  CDR3 for beta chain variable domain of TCR clone 141822 (TRBV28, TRBJ2-2)
CASRIRSGTGELFF

SEQ ID NO: 283645 - protein, 12 aa, Homo sapiens
  CDR3 for alpha chain variable domain of TCR clone 141823 (TRAV1-1, TRAJ39)
CAVPVVGNMLTF

SEQ ID NO: 283646 - protein, 14 aa, Homo sapiens
  CDR3 for beta chain variable domain of TCR clone 141823 (TRBV19, TRBJ2-5)
CASSMTGQQETQYF

SEQ ID NO: 283647 - protein, 12 aa, Homo sapiens
  CDR3 for alpha chain variable domain of TCR clone 141824 (TRAV26-1, TRAJ43)
CIVRPRGDDMRF

SEQ ID NO: 283648 - protein, 13 aa, Homo sapiens
  CDR3 for beta chain variable domain of TCR clone 141824 (TRBV7-8, TRBJ2-7)
RRVRLTEMGEQYV

SEQ ID NO: 283649 - protein, 14 aa, Homo sapiens
  CDR3 for alpha chain variable domain of TCR clone 141825 (TRAV12-2, TRAJ53)
CAVKAGGSNYKLTF

SEQ ID NO: 283650 - protein, 14 aa, Homo sapiens
  CDR3 for beta chain variable domain of TCR clone 141825 (TRBV7-7, TRBJ2-2)
CATRQDSDTGELFF

SEQ ID NO: 283651 - protein, 15 aa, Homo sapiens
  CDR3 for alpha chain variable domain of TCR clone 141826 (TRAV13-1, TRAJ32)
CAASNGWWFYKQAHL

SEQ ID NO: 283652 - protein, 15 aa, Homo sapiens
  CDR3 for beta chain variable domain of TCR clone 141826 (TRBV20-1, TRBJ1-2)
CSAIRTGAFNYGYTF

SEQ ID NO: 283653 - protein, 15 aa, Homo sapiens
  CDR3 for alpha chain variable domain of TCR clone 141827 (TRAV3, TRAJ22)
CAVRDRGGSARQLTF

SEQ ID NO: 283654 - protein, 16 aa, Homo sapiens
  CDR3 for beta chain variable domain of TCR clone 141827 (TRBV7-3, TRBJ2-1)
CASSLEGYRSYNEQFF

SEQ ID NO: 283655 - protein, 11 aa, Homo sapiens
  CDR3 for alpha chain variable domain of TCR clone 141828 (TRAV35, TRAJ30)
CAGPGDDEIIF

SEQ ID NO: 283656 - protein, 14 aa, Homo sapiens
  CDR3 for beta chain variable domain of TCR clone 141828 (TRBV7-6, TRBJ1-6)
CASSQAGGGSPLHF

SEQ ID NO: 283657 - protein, 12 aa, Homo sapiens
  CDR3 for alpha chain variable domain of TCR clone 141829 (TRAV10, TRAJ33)
CVSGDSNYQLIW

SEQ ID NO: 283658 - protein, 14 aa, Homo sapiens
  CDR3 for beta chain variable domain of TCR clone 141829 (TRBV19, TRBJ2-1)
CASPTFVLSGEQFF

SEQ ID NO: 283659 - protein, 12 aa, Homo sapiens
  CDR3 for alpha chain variable domain of TCR clone 141830 (TRAV3, TRAJ27)
CAVRDGSGKSTF

SEQ ID NO: 283660 - protein, 13 aa, Homo sapiens
  CDR3 for beta chain variable domain of TCR clone 141830 (TRBV10-3, TRBJ1-2)
CAINADLNYGYTF

SEQ ID NO: 283661 - protein, 14 aa, Homo sapiens
  CDR3 for alpha chain variable domain of TCR clone 141831 (TRAV8-3, TRAJ39)
CAVGANNAGNMLTF

SEQ ID NO: 283662 - protein, 12 aa, Homo sapiens
  CDR3 for beta chain variable domain of TCR clone 141831 (TRBV28, TRBJ1-3)
CASVSFGNTIYF

SEQ ID NO: 283663 - protein, 13 aa, Homo sapiens
  CDR3 for alpha chain variable domain of TCR clone 141832 (TRAV3, TRAJ21)
CAGREPDFNKFYF

SEQ ID NO: 283664 - protein, 13 aa, Homo sapiens
  CDR3 for beta chain variable domain of TCR clone 141832 (TRBV9, TRBJ2-1)
CASSPSGGKEQFF

SEQ ID NO: 283665 - protein, 16 aa, Homo sapiens
  CDR3 for alpha chain variable domain of TCR clone 141833 (TRAV26-1, TRAJ36)
CIVRVSYQTGPNNLFF

SEQ ID NO: 283666 - protein, 13 aa, Homo sapiens
  CDR3 for beta chain variable domain of TCR clone 141833 (TRBV5-5, TRBJ1-5)
CASSLGIGGDQHF

SEQ ID NO: 283667 - protein, 12 aa, Homo sapiens
  CDR3 for alpha chain variable domain of TCR clone 141834 (TRAV12-1, TRAJ40)
CVVYSGTYKYIF

SEQ ID NO: 283668 - protein, 15 aa, Homo sapiens
  CDR3 for beta chain variable domain of TCR clone 141834 (TRBV10-2, TRBJ2-6)
CASSEQGTGANVLTF

SEQ ID NO: 283669 - protein, 13 aa, Homo sapiens
  CDR3 for alpha chain variable domain of TCR clone 141835 (TRAV2, TRAJ40)
CAVVTSGTYKYIF

SEQ ID NO: 283670 - protein, 15 aa, Homo sapiens
  CDR3 for beta chain variable domain of TCR clone 141835 (TRBV27, TRBJ2-5)
CASSLIPSGGETQYF

SEQ ID NO: 283671 - protein, 13 aa, Homo sapiens
  CDR3 for alpha chain variable domain of TCR clone 141836 (TRAV21, TRAJ36)
CAVIRTGANNLFF

SEQ ID NO: 283672 - protein, 13 aa, Homo sapiens
  CDR3 for beta chain variable domain of TCR clone 141836 (TRBV29-1, TRBJ2-3)
CSAARGGRDTQYF

SEQ ID NO: 283673 - protein, 14 aa, Homo sapiens
  CDR3 for alpha chain variable domain of TCR clone 141837 (TRAV39, TRAJ54)
CAVVLIQGAQKLVF

SEQ ID NO: 283674 - protein, 17 aa, Homo sapiens
  CDR3 for beta chain variable domain of TCR clone 141837 (TRBV20-1, TRBJ2-1)
CSASSSGLAGSYNEQFF

SEQ ID NO: 283675 - protein, 11 aa, Homo sapiens
  CDR3 for alpha chain variable domain of TCR clone 141838 (TRAV13-1, TRAJ20)
CAASNDYKLSF

SEQ ID NO: 283676 - protein, 15 aa, Homo sapiens
  CDR3 for beta chain variable domain of TCR clone 141838 (TRBV6-3, TRBJ2-7)
CASSSPGTVFYEQYL

SEQ ID NO: 283677 - protein, 17 aa, Homo sapiens
  CDR3 for alpha chain variable domain of TCR clone 141839 (TRAV13-1, TRAJ28)
CAASPPYSGAGSYQLTF

SEQ ID NO: 283678 - protein, 13 aa, Homo sapiens
  CDR3 for beta chain variable domain of TCR clone 141839 (TRBV12-5, TRBJ2-3)
CASGERQSDTQYF

SEQ ID NO: 283679 - protein, 13 aa, Homo sapiens
  CDR3 for alpha chain variable domain of TCR clone 141840 (TRAV13-1, TRAJ39)
CSKYSNAGHMLTF

SEQ ID NO: 283680 - protein, 13 aa, Homo sapiens
  CDR3 for beta chain variable domain of TCR clone 141840 (TRBV20-1, TRBJ1-1)
CSARGGGNTEAFF

SEQ ID NO: 283681 - protein, 13 aa, Homo sapiens
  CDR3 for alpha chain variable domain of TCR clone 141841 (TRAV8-6, TRAJ40)
CAVSVTGTYKYIF

SEQ ID NO: 283682 - protein, 15 aa, Homo sapiens
  CDR3 for beta chain variable domain of TCR clone 141841 (TRBV4-1, TRBJ2-3)
CASGRGQGIPDTQYV

SEQ ID NO: 283683 - protein, 18 aa, Homo sapiens
  CDR3 for alpha chain variable domain of TCR clone 141842 (TRAV21, TRAJ52)
CAVRPSPAGGTSYGKLTF

SEQ ID NO: 283684 - protein, 13 aa, Homo sapiens
  CDR3 for beta chain variable domain of TCR clone 141842 (TRBV7-3, TRBJ1-1)
CASSQDWGAEAYF

SEQ ID NO: 283685 - protein, 12 aa, Homo sapiens
  CDR3 for alpha chain variable domain of TCR clone 141843 (TRAV1-1, TRAJ23)
CAVTNQGGKLIF

SEQ ID NO: 283686 - protein, 17 aa, Homo sapiens
  CDR3 for beta chain variable domain of TCR clone 141843 (TRBV4-1, TRBJ2-5)
CASSHAPSGGPQETQYF

SEQ ID NO: 283687 - protein, 13 aa, Homo sapiens
  CDR3 for alpha chain variable domain of TCR clone 141844 (TRAV12-3, TRAJ33)
CAMSVNSNYQLIW

SEQ ID NO: 283688 - protein, 15 aa, Homo sapiens
  CDR3 for beta chain variable domain of TCR clone 141844 (TRBV7-2, TRBJ2-6)
CASSLQEAGANVLTF

SEQ ID NO: 283689 - protein, 17 aa, Homo sapiens
  CDR3 for alpha chain variable domain of TCR clone 141845 (TRAV8-6, TRAJ22)
CAVSLYPSSGSARQLTF

SEQ ID NO: 283690 - protein, 12 aa, Homo sapiens
  CDR3 for beta chain variable domain of TCR clone 141845 (TRBV7-9, TRBJ2-7)
CASSLEGYEQYF

SEQ ID NO: 283691 - protein, 16 aa, Homo sapiens
  CDR3 for alpha chain variable domain of TCR clone 141846 (TRAV4, TRAJ22)
CLVGDLYSGSARQLTF

SEQ ID NO: 283692 - protein, 13 aa, Homo sapiens
  CDR3 for beta chain variable domain of TCR clone 141846 (TRBV7-2, TRBJ2-5)
CASSQTSVETQYF

SEQ ID NO: 283693 - protein, 13 aa, Homo sapiens
  CDR3 for alpha chain variable domain of TCR clone 141847 (TRAV17, TRAJ9)
CATFLTGGFKTIF

SEQ ID NO: 283694 - protein, 16 aa, Homo sapiens
  CDR3 for beta chain variable domain of TCR clone 141847 (TRBV28, TRBJ2-7)
CASSFPDRRLTYEQYF

SEQ ID NO: 283695 - protein, 13 aa, Homo sapiens
  CDR3 for alpha chain variable domain of TCR clone 141848 (TRAV13-1, TRAJ43)
CAVSENNHNDMRF

SEQ ID NO: 283696 - protein, 14 aa, Homo sapiens
  CDR3 for beta chain variable domain of TCR clone 141848 (TRBV14, TRBJ2-1)
CASSQVQGRGEQFF

SEQ ID NO: 283697 - protein, 16 aa, Homo sapiens
  CDR3 for alpha chain variable domain of TCR clone 141849 (TRAV17, TRAJ28)
CASYAYSGAGSSQLTF

SEQ ID NO: 283698 - protein, 15 aa, Homo sapiens
  CDR3 for beta chain variable domain of TCR clone 141849 (TRBV4-2, TRBJ2-1)
CASSPSGGLYNEQFF

SEQ ID NO: 283699 - protein, 16 aa, Homo sapiens
  CDR3 for alpha chain variable domain of TCR clone 141850 (TRAV3, TRAJ18)
CAVRDGRGSTLGRLYF

SEQ ID NO: 283700 - protein, 16 aa, Homo sapiens
  CDR3 for beta chain variable domain of TCR clone 141850 (TRBV28, TRBJ2-1)
CASSSPEYPRDNEQFF

SEQ ID NO: 283701 - protein, 12 aa, Homo sapiens
  CDR3 for alpha chain variable domain of TCR clone 141851 (TRAV12-2, TRAJ10)
WGVTVGGNKLTF

SEQ ID NO: 283702 - protein, 13 aa, Homo sapiens
  CDR3 for beta chain variable domain of TCR clone 141851 (TRBV5-5, TRBJ2-1)
CASTPGEGNEQFF

SEQ ID NO: 283703 - protein, 13 aa, Homo sapiens
  CDR3 for alpha chain variable domain of TCR clone 141852 (TRAV12-2, TRAJ34)
CAVRGYNTGKLIF

SEQ ID NO: 283704 - protein, 18 aa, Homo sapiens
  CDR3 for beta chain variable domain of TCR clone 141852 (TRBV11-2, TRBJ2-3)
CASSLGGASRGAPNTQYF

SEQ ID NO: 283705 - protein, 13 aa, Homo sapiens
  CDR3 for alpha chain variable domain of TCR clone 141853 (TRAV13-2, TRAJ53)
CAEDMGGNYKLTF

SEQ ID NO: 283706 - protein, 13 aa, Homo sapiens
  CDR3 for beta chain variable domain of TCR clone 141853 (TRBV4-1, TRBJ2-2)
CASSQENTGELFF

SEQ ID NO: 283707 - protein, 14 aa, Homo sapiens
  CDR3 for alpha chain variable domain of TCR clone 141854 (TRAV1-2, TRAJ16)
CAVNRFSGGQKLLF

SEQ ID NO: 283708 - protein, 14 aa, Homo sapiens
  CDR3 for beta chain variable domain of TCR clone 141854 (TRBV19, TRBJ2-1)
CASPTFVLSGEQFF

SEQ ID NO: 283709 - protein, 15 aa, Homo sapiens
  CDR3 for alpha chain variable domain of TCR clone 141855 (TRAV25, TRAJ52)
CAGRPGGTSYGKLTF

SEQ ID NO: 283710 - protein, 13 aa, Homo sapiens
  CDR3 for beta chain variable domain of TCR clone 141855 (TRBV7-7, TRBJ2-2)
CASSLTSAGELFF

SEQ ID NO: 283711 - protein, 13 aa, Homo sapiens
  CDR3 for alpha chain variable domain of TCR clone 141856 (TRAV17, TRAJ54)
CAAGIQGAQKLVF

SEQ ID NO: 283712 - protein, 14 aa, Homo sapiens
  CDR3 for beta chain variable domain of TCR clone 141856 (TRBV12-4, TRBJ1-1)
CTSSPIRRTGEAFF

SEQ ID NO: 283713 - protein, 23 aa, Homo sapiens
  CDR3 for alpha chain variable domain of TCR clone 141857 (TRAV8-3, TRAJ38)
CVVGASNAGNNHIQNPDPAVYQL

SEQ ID NO: 283714 - protein, 15 aa, Homo sapiens
  CDR3 for beta chain variable domain of TCR clone 141857 (TRBV11-3, TRBJ1-3)
CASSLFGPSGNTIYF

SEQ ID NO: 283715 - protein, 14 aa, Homo sapiens
  CDR3 for alpha chain variable domain of TCR clone 141858 (TRAV1-2, TRAJ16)
CAVNRLSDGQKLLF

SEQ ID NO: 283716 - protein, 16 aa, Homo sapiens
  CDR3 for beta chain variable domain of TCR clone 141858 (TRBV12-4, TRBJ2-1)
CASSAVGQGNGDEQFF

SEQ ID NO: 283717 - protein, 11 aa, Homo sapiens
  CDR3 for alpha chain variable domain of TCR clone 141859 (TRAV35, TRAJ30)
CAPGGDDMIIF

SEQ ID NO: 283718 - protein, 14 aa, Homo sapiens
  CDR3 for beta chain variable domain of TCR clone 141859 (TRBV7-6, TRBJ2-1)
CASSLGGGADEQFF

SEQ ID NO: 283719 - protein, 14 aa, Homo sapiens
  CDR3 for alpha chain variable domain of TCR clone 141860 (TRAV12-2, TRAJ17)
CAVLFKDAGNKITF

SEQ ID NO: 283720 - protein, 14 aa, Homo sapiens
  CDR3 for beta chain variable domain of TCR clone 141860 (TRBV20-1, TRBJ2-5)
CSAHRQGLWETQYF

SEQ ID NO: 283721 - protein, 16 aa, Homo sapiens
  CDR3 for alpha chain variable domain of TCR clone 141861 (TRAV3, TRAJ6)
CAVRDGMGRRKLHTYI

SEQ ID NO: 283722 - protein, 15 aa, Homo sapiens
  CDR3 for beta chain variable domain of TCR clone 141861 (TRBV5-1, TRBJ2-7)
CASSLGDFTTYEQCF

SEQ ID NO: 283723 - protein, 12 aa, Homo sapiens
  CDR3 for alpha chain variable domain of TCR clone 141862 (TRAV17, TRAJ4)
CATDGGYNKLIF

SEQ ID NO: 283724 - protein, 15 aa, Homo sapiens
  CDR3 for beta chain variable domain of TCR clone 141862 (TRBV9, TRBJ1-6)
CASSVAGTGDSPLHF

SEQ ID NO: 283725 - protein, 13 aa, Homo sapiens
  CDR3 for alpha chain variable domain of TCR clone 141863 (TRAV3, TRAJ9)
CAFWNTGGFKTIF

SEQ ID NO: 283726 - protein, 12 aa, Homo sapiens
  CDR3 for beta chain variable domain of TCR clone 141863 (TRBV7-8, TRBJ2-7)
CASSLGDREQYF

SEQ ID NO: 283727 - protein, 12 aa, Homo sapiens
  CDR3 for alpha chain variable domain of TCR clone 141864 (TRAV12-3, TRAJ17)
FAMALTGNKLTF

SEQ ID NO: 283728 - protein, 12 aa, Homo sapiens
  CDR3 for beta chain variable domain of TCR clone 141864 (TRBV2, TRBJ2-1)
CAYGPPGNEQFF

SEQ ID NO: 283729 - protein, 12 aa, Homo sapiens
  CDR3 for alpha chain variable domain of TCR clone 141865 (TRAV12-3, TRAJ17)
CAMTLTGDKLTF

SEQ ID NO: 283730 - protein, 15 aa, Homo sapiens
  CDR3 for beta chain variable domain of TCR clone 141865 (TRBV20-1, TRBJ2-7)
CSARDRVSGMDEQCF

SEQ ID NO: 283731 - protein, 16 aa, Homo sapiens
  CDR3 for alpha chain variable domain of TCR clone 141866 (TRAV12-3, TRAJ53)
CAMSPGSGGSNFKLTF

SEQ ID NO: 283732 - protein, 12 aa, Homo sapiens
  CDR3 for beta chain variable domain of TCR clone 141866 (TRBV7-8, TRBJ2-7)
CASSLGDREQYF

SEQ ID NO: 283733 - protein, 15 aa, Homo sapiens
  CDR3 for alpha chain variable domain of TCR clone 141867 (TRAV25, TRAJ52)
CEGRPGGTSYGKLTF

SEQ ID NO: 283734 - protein, 14 aa, Homo sapiens
  CDR3 for beta chain variable domain of TCR clone 141867 (TRBV7-8, TRBJ2-7)
CASSVGQGAYEQYF

SEQ ID NO: 283735 - protein, 14 aa, Homo sapiens
  CDR3 for alpha chain variable domain of TCR clone 141868 (TRAV1-2, TRAJ8)
CAVREDTGFQKLVF

SEQ ID NO: 283736 - protein, 14 aa, Homo sapiens
  CDR3 for beta chain variable domain of TCR clone 141868 (TRBV29-1, TRBJ2-3)
CSTGAGVGADTQYF

SEQ ID NO: 283737 - protein, 15 aa, Homo sapiens
  CDR3 for alpha chain variable domain of TCR clone 141869 (TRAV3, TRAJ17)
CAWRDTGASGNKLTF

SEQ ID NO: 283738 - protein, 14 aa, Homo sapiens
  CDR3 for beta chain variable domain of TCR clone 141869 (TRBV6-3, TRBJ1-1)
CASSNLLPGAESFF

SEQ ID NO: 283739 - protein, 11 aa, Homo sapiens
  CDR3 for alpha chain variable domain of TCR clone 141870 (TRAV12-1, TRAJ21)
CVVNNFNKFYF

SEQ ID NO: 283740 - protein, 17 aa, Homo sapiens
  CDR3 for beta chain variable domain of TCR clone 141870 (TRBV7-8, TRBJ2-1)
CPSSPPTGTLAYNEQFF

SEQ ID NO: 283741 - protein, 14 aa, Homo sapiens
  CDR3 for alpha chain variable domain of TCR clone 141871 (TRAV12-2, TRAJ17)
CAVLFKAAGNELTF

SEQ ID NO: 283742 - protein, 15 aa, Homo sapiens
  CDR3 for beta chain variable domain of TCR clone 141871 (TRBV19, TRBJ2-1)
CASSIGLAGWDEQFF

SEQ ID NO: 283743 - protein, 13 aa, Homo sapiens
  CDR3 for alpha chain variable domain of TCR clone 141872 (TRAV21, TRAJ20)
CAVGLRVDYKLSF

SEQ ID NO: 283744 - protein, 15 aa, Homo sapiens
  CDR3 for beta chain variable domain of TCR clone 141872 (TRBV18, TRBJ2-2)
CASSPTDDSSGELFF

SEQ ID NO: 283745 - protein, 15 aa, Homo sapiens
  CDR3 for alpha chain variable domain of TCR clone 141873 (TRAV8-3, TRAJ45)
CASSYPGGGADGLTF

SEQ ID NO: 283746 - protein, 13 aa, Homo sapiens
  CDR3 for beta chain variable domain of TCR clone 141873 (TRBV10-3, TRBJ2-7)
CASKLAVNYGQYF

SEQ ID NO: 283747 - protein, 10 aa, Homo sapiens
  CDR3 for alpha chain variable domain of TCR clone 141874 (TRAV26-2, TRAJ49)
RLNTGNQFYF

SEQ ID NO: 283748 - protein, 14 aa, Homo sapiens
  CDR3 for beta chain variable domain of TCR clone 141874 (TRBV20-1, TRBJ2-3)
CSARVRGSTDTQYF

SEQ ID NO: 283749 - protein, 17 aa, Homo sapiens
  CDR3 for alpha chain variable domain of TCR clone 141875 (TRAV27, TRAJ18)
CAGLHRGRGSPLGRLYF

SEQ ID NO: 283750 - protein, 14 aa, Homo sapiens
  CDR3 for beta chain variable domain of TCR clone 141875 (TRBV20-1, TRBJ1-5)
CSARGRGSNQPQHF

SEQ ID NO: 283751 - protein, 14 aa, Homo sapiens
  CDR3 for alpha chain variable domain of TCR clone 141876 (TRAV12-2, TRAJ18)
CAVKRGSTLGRLYF

SEQ ID NO: 283752 - protein, 16 aa, Homo sapiens
  CDR3 for beta chain variable domain of TCR clone 141876 (TRBV27, TRBJ2-3)
CASSFRGQLLRDTQYF

SEQ ID NO: 283753 - protein, 14 aa, Homo sapiens
  CDR3 for alpha chain variable domain of TCR clone 141877 (TRAV17, TRAJ31)
CATVLRNSNARLMF

SEQ ID NO: 283754 - protein, 14 aa, Homo sapiens
  CDR3 for beta chain variable domain of TCR clone 141877 (TRBV12-4, TRBJ2-5)
CASSLWQKQETQYF

SEQ ID NO: 283755 - protein, 14 aa, Homo sapiens
  CDR3 for alpha chain variable domain of TCR clone 141878 (TRAV1-2, TRAJ29)
CAVRELTSATPLVF

SEQ ID NO: 283756 - protein, 14 aa, Homo sapiens
  CDR3 for beta chain variable domain of TCR clone 141878 (TRBV2, TRBJ2-5)
CASSEVLAQETQYF

SEQ ID NO: 283757 - protein, 12 aa, Homo sapiens
  CDR3 for alpha chain variable domain of TCR clone 141879 (TRAV3, TRAJ20)
CAVRPSVTTTSS

SEQ ID NO: 283758 - protein, 15 aa, Homo sapiens
  CDR3 for beta chain variable domain of TCR clone 141879 (TRBV19, TRBJ2-6)
CASVRRDSGANVLTF

SEQ ID NO: 283759 - protein, 13 aa, Homo sapiens
  CDR3 for alpha chain variable domain of TCR clone 141880 (TRAV23/DV6, TRAJ44)
TRGNTGTASKLTF

SEQ ID NO: 283760 - protein, 16 aa, Homo sapiens
  CDR3 for beta chain variable domain of TCR clone 141880 (TRBV7-2, TRBJ1-2)
CASSSNQDRRGHGYTF

SEQ ID NO: 283761 - protein, 11 aa, Homo sapiens
  CDR3 for alpha chain variable domain of TCR clone 141881 (TRAV25, TRAJ5)
CGGGGRGALTF

SEQ ID NO: 283762 - protein, 15 aa, Homo sapiens
  CDR3 for beta chain variable domain of TCR clone 141881 (TRBV19, TRBJ2-4)
CASRGPRRGENIQYF

SEQ ID NO: 283763 - protein, 14 aa, Homo sapiens
  CDR3 for alpha chain variable domain of TCR clone 141882 (TRAV12-1, TRAJ26)
CVVKGSNYGQNFVF

SEQ ID NO: 283764 - protein, 14 aa, Homo sapiens
  CDR3 for beta chain variable domain of TCR clone 141882 (TRBV7-9, TRBJ2-1)
CASSQGQAEAEQFF

SEQ ID NO: 283765 - protein, 16 aa, Homo sapiens
  CDR3 for alpha chain variable domain of TCR clone 141883 (TRAV8-4, TRAJ52)
CAVRKGGGTSYGKLTF

SEQ ID NO: 283766 - protein, 15 aa, Homo sapiens
  CDR3 for beta chain variable domain of TCR clone 141883 (TRBV6-5, TRBJ2-1)
CASSYDAGAGNEQFF

SEQ ID NO: 283767 - protein, 17 aa, Homo sapiens
  CDR3 for alpha chain variable domain of TCR clone 141884 (TRAV3, TRAJ37)
CAVRDMRTPGTTGKLIF

SEQ ID NO: 283768 - protein, 14 aa, Homo sapiens
  CDR3 for beta chain variable domain of TCR clone 141884 (TRBV7-2, TRBJ2-7)
CASSPKTSFYEQYF

SEQ ID NO: 283769 - protein, 21 aa, Homo sapiens
  CDR3 for alpha chain variable domain of TCR clone 141885 (TRAV25, TRAJ53)
TATQTTEVGTGSGGSNYKLTF

SEQ ID NO: 283770 - protein, 16 aa, Homo sapiens
  CDR3 for beta chain variable domain of TCR clone 141885 (TRBV4-2, TRBJ2-3)
CASSLSSGGHTDTQYF

SEQ ID NO: 283771 - protein, 12 aa, Homo sapiens
  CDR3 for alpha chain variable domain of TCR clone 141886 (TRAV13-2, TRAJ23)
CAERHRGGKLIF

SEQ ID NO: 283772 - protein, 16 aa, Homo sapiens
  CDR3 for beta chain variable domain of TCR clone 141886 (TRBV20-1, TRBJ1-4)
CSDPGQGLLTNEKLFF

SEQ ID NO: 283773 - protein, 14 aa, Homo sapiens
  CDR3 for alpha chain variable domain of TCR clone 141887 (TRAV12-2, TRAJ13)
CAVTKTGGYQKVTF

SEQ ID NO: 283774 - protein, 15 aa, Homo sapiens
  CDR3 for beta chain variable domain of TCR clone 141887 (TRBV20-1, TRBJ2-7)
CSARDRVSGMDEQYF

SEQ ID NO: 283775 - protein, 14 aa, Homo sapiens
  CDR3 for alpha chain variable domain of TCR clone 141888 (TRAV22, TRAJ6)
CSGVGPGGSYIPTF

SEQ ID NO: 283776 - protein, 14 aa, Homo sapiens
  CDR3 for beta chain variable domain of TCR clone 141888 (TRBV9, TRBJ2-7)
CASSVGVGSYEQYF

SEQ ID NO: 283777 - protein, 12 aa, Homo sapiens
  CDR3 for alpha chain variable domain of TCR clone 141889 (TRAV2, TRAJ31)
CAVEDNNARLMF

SEQ ID NO: 283778 - protein, 15 aa, Homo sapiens
  CDR3 for beta chain variable domain of TCR clone 141889 (TRBV4-3, TRBJ2-1)
CASSQMRGAHNEQFF

SEQ ID NO: 283779 - protein, 14 aa, Homo sapiens
  CDR3 for alpha chain variable domain of TCR clone 141890 (TRAV1-2, TRAJ16)
CAVNRFSDGQKLLF

SEQ ID NO: 283780 - protein, 16 aa, Homo sapiens
  CDR3 for beta chain variable domain of TCR clone 141890 (TRBV28, TRBJ1-2)
CASNHGQGVYKDGYTF

SEQ ID NO: 283781 - protein, 16 aa, Homo sapiens
  CDR3 for alpha chain variable domain of TCR clone 141891 (TRAV30, TRAJ24)
CGTEIVDADSWGKFQF

SEQ ID NO: 283782 - protein, 15 aa, Homo sapiens
  CDR3 for beta chain variable domain of TCR clone 141891 (TRBV4-1, TRBJ1-2)
CASSLNTGQGYGYTF

SEQ ID NO: 283783 - protein, 13 aa, Homo sapiens
  CDR3 for alpha chain variable domain of TCR clone 141892 (TRAV2, TRAJ29)
CAAGNSGNTPLVF

SEQ ID NO: 283784 - protein, 16 aa, Homo sapiens
  CDR3 for beta chain variable domain of TCR clone 141892 (TRBV7-9, TRBJ1-2)
CASSPGGGPINYGYTF

SEQ ID NO: 283785 - protein, 15 aa, Homo sapiens
  CDR3 for alpha chain variable domain of TCR clone 141893 (TRAV4, TRAJ39)
CLVGPNNNAGNMLTF

SEQ ID NO: 283786 - protein, 12 aa, Homo sapiens
  CDR3 for beta chain variable domain of TCR clone 141893 (TRBV12-4, TRBJ1-2)
CASSFIWLHLRF

SEQ ID NO: 283787 - protein, 18 aa, Homo sapiens
  CDR3 for alpha chain variable domain of TCR clone 141894 (TRAV13-1, TRAJ52)
CAAKNPNAGGTSYGKLTF

SEQ ID NO: 283788 - protein, 14 aa, Homo sapiens
  CDR3 for beta chain variable domain of TCR clone 141894 (TRBV6-5, TRBJ1-1)
CASSFGQGLTETFF

SEQ ID NO: 283789 - protein, 14 aa, Homo sapiens
  CDR3 for alpha chain variable domain of TCR clone 141895 (TRAV8-3, TRAJ39)
CAVGANNAGDMLTF

SEQ ID NO: 283790 - protein, 16 aa, Homo sapiens
  CDR3 for beta chain variable domain of TCR clone 141895 (TRBV6-1, TRBJ2-5)
CASSETLDRGAETKYF

SEQ ID NO: 283791 - protein, 16 aa, Homo sapiens
  CDR3 for alpha chain variable domain of TCR clone 141896 (TRAV26-1, TRAJ37)
CIVRGDGSGNTGKLIF

SEQ ID NO: 283792 - protein, 17 aa, Homo sapiens
  CDR3 for beta chain variable domain of TCR clone 141896 (TRBV19, TRBJ2-7)
CASSISFCDSYPYEQYF

SEQ ID NO: 283793 - protein, 15 aa, Homo sapiens
  CDR3 for alpha chain variable domain of TCR clone 141897 (TRAV13-2, TRAJ10)
CAENRDTGGGNKLTF

SEQ ID NO: 283794 - protein, 20 aa, Homo sapiens
  CDR3 for beta chain variable domain of TCR clone 141897 (TRBV28, TRBJ2-1)
CASTPIGRSPGLAGGNEQFL

SEQ ID NO: 283795 - protein, 14 aa, Homo sapiens
  CDR3 for alpha chain variable domain of TCR clone 141898 (TRAV8-3, TRAJ4)
CAVGASGGDNKLIF

SEQ ID NO: 283796 - protein, 17 aa, Homo sapiens
  CDR3 for beta chain variable domain of TCR clone 141898 (TRBV11-2, TRBJ2-1)
YASSLYPPGVEYNEQFF

SEQ ID NO: 283797 - protein, 15 aa, Homo sapiens
  CDR3 for alpha chain variable domain of TCR clone 141899 (TRAV3, TRAJ42)
CAVRGGTGSQGNLIF

SEQ ID NO: 283798 - protein, 13 aa, Homo sapiens
  CDR3 for beta chain variable domain of TCR clone 141899 (TRBV10-3, TRBJ2-7)
CASKLAVNYEQYF

SEQ ID NO: 283799 - protein, 17 aa, Homo sapiens
  CDR3 for alpha chain variable domain of TCR clone 141900 (TRAV8-6, TRAJ58)
CAVSSWVGETSGSRLTF

SEQ ID NO: 283800 - protein, 16 aa, Homo sapiens
  CDR3 for beta chain variable domain of TCR clone 141900 (TRBV11-2, TRBJ1-2)
CASSLDRGGNNYGYTF

SEQ ID NO: 283801 - protein, 14 aa, Homo sapiens
  CDR3 for alpha chain variable domain of TCR clone 141901 (TRAV35, TRAJ50)
CAGHRKTSYDKVIF

SEQ ID NO: 283802 - protein, 15 aa, Homo sapiens
  CDR3 for beta chain variable domain of TCR clone 141901 (TRBV7-9, TRBJ1-2)
CASSLDREPNYGYTF

SEQ ID NO: 283803 - protein, 15 aa, Homo sapiens
  CDR3 for alpha chain variable domain of TCR clone 141902 (TRAV3, TRAJ47)
CAVRDIGEYGNKLVF

SEQ ID NO: 283804 - protein, 14 aa, Homo sapiens
  CDR3 for beta chain variable domain of TCR clone 141902 (TRBV13, TRBJ2-5)
CASSLERVGETQYP

SEQ ID NO: 283805 - protein, 16 aa, Homo sapiens
  CDR3 for alpha chain variable domain of TCR clone 141903 (TRAV3, TRAJ10)
CALRDMRAGGGNKLTF

SEQ ID NO: 283806 - protein, 15 aa, Homo sapiens
  CDR3 for beta chain variable domain of TCR clone 141903 (TRBV11-2, TRBJ1-6)
CASTGFGTAVSPLHF

SEQ ID NO: 283807 - protein, 12 aa, Homo sapiens
  CDR3 for alpha chain variable domain of TCR clone 141904 (TRAV13-1, TRAJ21)
CAPPLQLQQILL

SEQ ID NO: 283808 - protein, 18 aa, Homo sapiens
  CDR3 for beta chain variable domain of TCR clone 141904 (TRBV4-2, TRBJ2-6)
CASSQLQGVLTGANVLTF

SEQ ID NO: 283809 - protein, 10 aa, Homo sapiens
  CDR3 for alpha chain variable domain of TCR clone 141905 (TRAV12-1, TRAJ43)
CVVHNNDMRF

SEQ ID NO: 283810 - protein, 12 aa, Homo sapiens
  CDR3 for beta chain variable domain of TCR clone 141905 (TRBV29-1, TRBJ2-3)
CSVTGGADTQYF

SEQ ID NO: 283811 - protein, 17 aa, Homo sapiens
  CDR3 for alpha chain variable domain of TCR clone 141906 (TRAV3, TRAJ6)
CAVSDGPRAGGSYIPTF

SEQ ID NO: 283812 - protein, 12 aa, Homo sapiens
  CDR3 for beta chain variable domain of TCR clone 141906 (TRBV7-9, TRBJ1-1)
AYSNRGGTEAFF

SEQ ID NO: 283813 - protein, 10 aa, Homo sapiens
  CDR3 for alpha chain variable domain of TCR clone 141907 (TRAV30, TRAJ48)
CGIGNEKLTF

SEQ ID NO: 283814 - protein, 16 aa, Homo sapiens
  CDR3 for beta chain variable domain of TCR clone 141907 (TRBV2, TRBJ1-4)
CASNLLQGATNEKLFF

SEQ ID NO: 283815 - protein, 16 aa, Homo sapiens
  CDR3 for alpha chain variable domain of TCR clone 141908 (TRAV26-1, TRAJ41)
CIVRVAVANSGYALNF

SEQ ID NO: 283816 - protein, 11 aa, Homo sapiens
  CDR3 for beta chain variable domain of TCR clone 141908 (TRBV12-4, TRBJ2-3)
CASTATDTQYF

SEQ ID NO: 283817 - protein, 16 aa, Homo sapiens
  CDR3 for alpha chain variable domain of TCR clone 141909 (TRAV30, TRAJ24)
CGTEIVDADSWGKFQY

SEQ ID NO: 283818 - protein, 15 aa, Homo sapiens
  CDR3 for beta chain variable domain of TCR clone 141909 (TRBV27, TRBJ2-1)
CASSNGGGSSNEQFF

SEQ ID NO: 283819 - protein, 11 aa, Homo sapiens
  CDR3 for alpha chain variable domain of TCR clone 141910 (TRAV3, TRAJ21)
RAVVNFNKFYF

SEQ ID NO: 283820 - protein, 16 aa, Homo sapiens
  CDR3 for beta chain variable domain of TCR clone 141910 (TRBV19, TRBJ2-1)
CASSKAGPSSYNEQFF

SEQ ID NO: 283821 - protein, 17 aa, Homo sapiens
  CDR3 for alpha chain variable domain of TCR clone 141911 (TRAV26-2, TRAJ42)
CILRDVGYGGSQGNLIF

SEQ ID NO: 283822 - protein, 16 aa, Homo sapiens
  CDR3 for beta chain variable domain of TCR clone 141911 (TRBV12-4, TRBJ2-7)
CASSLIGGTGTYEQSF

SEQ ID NO: 283823 - protein, 13 aa, Homo sapiens
  CDR3 for alpha chain variable domain of TCR clone 141912 (TRAV27, TRAJ45)
CRSSGGGADGLTF

SEQ ID NO: 283824 - protein, 13 aa, Homo sapiens
  CDR3 for beta chain variable domain of TCR clone 141912 (TRBV11-2, TRBJ1-6)
CASSLAGTSPLHF

SEQ ID NO: 283825 - protein, 14 aa, Homo sapiens
  CDR3 for alpha chain variable domain of TCR clone 141913 (TRAV12-3, TRAJ10)
SHLPLPGGGNKLTF

SEQ ID NO: 283826 - protein, 13 aa, Homo sapiens
  CDR3 for beta chain variable domain of TCR clone 141913 (TRBV5-1, TRBJ1-1)
CASSLTRESDAFF

SEQ ID NO: 283827 - protein, 11 aa, Homo sapiens
  CDR3 for alpha chain variable domain of TCR clone 141914 (TRAV1-1, TRAJ23)
RAVRQGGKLIF

SEQ ID NO: 283828 - protein, 14 aa, Homo sapiens
  CDR3 for beta chain variable domain of TCR clone 141914 (TRBV19, TRBJ2-1)
CASPTFVLSGEQFF

SEQ ID NO: 283829 - protein, 16 aa, Homo sapiens
  CDR3 for alpha chain variable domain of TCR clone 141915 (TRAV3, TRAJ6)
CAVRDGMGRMKIHTYI

SEQ ID NO: 283830 - protein, 15 aa, Homo sapiens
  CDR3 for beta chain variable domain of TCR clone 141915 (TRBV9, TRBJ2-1)
CASSLAGSSYNEQFF

SEQ ID NO: 283831 - protein, 14 aa, Homo sapiens
  CDR3 for alpha chain variable domain of TCR clone 141916 (TRAV12-3, TRAJ9)
CAMSPNTGGFKTIF

SEQ ID NO: 283832 - protein, 18 aa, Homo sapiens
  CDR3 for beta chain variable domain of TCR clone 141916 (TRBV20-1, TRBJ2-6)
CSARTLAGGPSGANVLTF

SEQ ID NO: 283833 - protein, 14 aa, Homo sapiens
  CDR3 for alpha chain variable domain of TCR clone 141917 (TRAV1-2, TRAJ8)
CAVREDTGFQKLVF

SEQ ID NO: 283834 - protein, 16 aa, Homo sapiens
  CDR3 for beta chain variable domain of TCR clone 141917 (TRBV7-6, TRBJ2-6)
CASSLPGLSGANVLTS

SEQ ID NO: 283835 - protein, 11 aa, Homo sapiens
  CDR3 for alpha chain variable domain of TCR clone 141918 (TRAV16, TRAJ49)
CSLNTGNQFYF

SEQ ID NO: 283836 - protein, 13 aa, Homo sapiens
  CDR3 for beta chain variable domain of TCR clone 141918 (TRBV7-3, TRBJ1-1)
CASSQDWGAEAFF

SEQ ID NO: 283837 - protein, 16 aa, Homo sapiens
  CDR3 for alpha chain variable domain of TCR clone 141919 (TRAV26-1, TRAJ58)
IASSESGETRGSRLTF

SEQ ID NO: 283838 - protein, 14 aa, Homo sapiens
  CDR3 for beta chain variable domain of TCR clone 141919 (TRBV9, TRBJ2-1)
CASSVDPRGKEQFF

SEQ ID NO: 283839 - protein, 23 aa, Homo sapiens
  CDR3 for alpha chain variable domain of TCR clone 141920 (TRAV9-2, TRAJ4)
CQTQRCTSVLWVIRSGGYNKLIF

SEQ ID NO: 283840 - protein, 12 aa, Homo sapiens
  CDR3 for beta chain variable domain of TCR clone 141920 (TRBV11-2, TRBJ2-2)
CASRLGGGELFF

SEQ ID NO: 283841 - protein, 11 aa, Homo sapiens
  CDR3 for alpha chain variable domain of TCR clone 141921 (TRAV17, TRAJ21)
CATGNFNKFYF

SEQ ID NO: 283842 - protein, 16 aa, Homo sapiens
  CDR3 for beta chain variable domain of TCR clone 141921 (TRBV2, TRBJ2-1)
FASSANPRDWQAEQFF

SEQ ID NO: 283843 - protein, 16 aa, Homo sapiens
  CDR3 for alpha chain variable domain of TCR clone 141922 (TRAV12-3, TRAJ53)
CAMSPGSGGSNFKMTF

SEQ ID NO: 283844 - protein, 11 aa, Homo sapiens
  CDR3 for beta chain variable domain of TCR clone 141922 (TRBV29-1, TRBJ2-5)
CSEDRTGTQYF

SEQ ID NO: 283845 - protein, 11 aa, Homo sapiens
  CDR3 for alpha chain variable domain of TCR clone 141923 (TRAV21, TRAJ20)
CAVRDDYKLSF

SEQ ID NO: 283846 - protein, 16 aa, Homo sapiens
  CDR3 for beta chain variable domain of TCR clone 141923 (TRBV12-5, TRBJ2-5)
CASGPRTSGNQETQYF

SEQ ID NO: 283847 - protein, 19 aa, Homo sapiens
  CDR3 for alpha chain variable domain of TCR clone 141924 (TRAV25, TRAJ20)
TATQTTDVGILPHDYKLSF

SEQ ID NO: 283848 - protein, 17 aa, Homo sapiens
  CDR3 for beta chain variable domain of TCR clone 141924 (TRBV7-6, TRBJ2-1)
CASSLEPTGAAYNEQFF

SEQ ID NO: 283849 - protein, 16 aa, Homo sapiens
  CDR3 for alpha chain variable domain of TCR clone 141925 (TRAV21, TRAJ45)
CAVSWGSGGGADGLTF

SEQ ID NO: 283850 - protein, 14 aa, Homo sapiens
  CDR3 for beta chain variable domain of TCR clone 141925 (TRBV4-2, TRBJ1-2)
RASSPGGSNYGYTF

SEQ ID NO: 283851 - protein, 11 aa, Homo sapiens
  CDR3 for alpha chain variable domain of TCR clone 141926 (TRAV29/DV5, TRAJ31)
CAAMNNARLMF

SEQ ID NO: 283852 - protein, 14 aa, Homo sapiens
  CDR3 for beta chain variable domain of TCR clone 141926 (TRBV20-1, TRBJ1-1)
CSAQTRIGGTEAFF

SEQ ID NO: 283853 - protein, 14 aa, Homo sapiens
  CDR3 for alpha chain variable domain of TCR clone 141927 (TRAV14/DV4, TRAJ15)
CAMRRDQAGTALIF

SEQ ID NO: 283854 - protein, 14 aa, Homo sapiens
  CDR3 for beta chain variable domain of TCR clone 141927 (TRBV18, TRBJ2-5)
CASSPLRVQETQYF

SEQ ID NO: 283855 - protein, 14 aa, Homo sapiens
  CDR3 for alpha chain variable domain of TCR clone 141928 (TRAV13-1, TRAJ6)
CAASITGGSYIPTF

SEQ ID NO: 283856 - protein, 16 aa, Homo sapiens
  CDR3 for beta chain variable domain of TCR clone 141928 (TRBV19, TRBJ2-1)
CASSKAGPSSYNEQFF

SEQ ID NO: 283857 - protein, 11 aa, Homo sapiens
  CDR3 for alpha chain variable domain of TCR clone 141929 (TRAV17, TRAJ9)
CGFTGGFKTIF

SEQ ID NO: 283858 - protein, 16 aa, Homo sapiens
  CDR3 for beta chain variable domain of TCR clone 141929 (TRBV7-3, TRBJ2-1)
CASSLEGYRSYNEQFF

SEQ ID NO: 283859 - protein, 16 aa, Homo sapiens
  CDR3 for alpha chain variable domain of TCR clone 141930 (TRAV26-1, TRAJ53)
CIVRVALGGSKYKLTF

SEQ ID NO: 283860 - protein, 12 aa, Homo sapiens
  CDR3 for beta chain variable domain of TCR clone 141930 (TRBV7-9, TRBJ1-5)
CASSPQGQPQHF

SEQ ID NO: 283861 - protein, 13 aa, Homo sapiens
  CDR3 for alpha chain variable domain of TCR clone 141931 (TRAV3, TRAJ15)
CAVRDQAGTALIF

SEQ ID NO: 283862 - protein, 15 aa, Homo sapiens
  CDR3 for beta chain variable domain of TCR clone 141931 (TRBV11-1, TRBJ2-7)
CASTLNYGASYEQYF

SEQ ID NO: 283863 - protein, 15 aa, Homo sapiens
  CDR3 for alpha chain variable domain of TCR clone 141932 (TRAV2, TRAJ11)
CAVGGRNSGYSTLTF

SEQ ID NO: 283864 - protein, 15 aa, Homo sapiens
  CDR3 for beta chain variable domain of TCR clone 141932 (TRBV11-3, TRBJ2-3)
CASLKDGREGDTQYF

SEQ ID NO: 283865 - protein, 11 aa, Homo sapiens
  CDR3 for alpha chain variable domain of TCR clone 141933 (TRAV17, TRAJ43)
CATPRSNDMRF

SEQ ID NO: 283866 - protein, 15 aa, Homo sapiens
  CDR3 for beta chain variable domain of TCR clone 141933 (TRBV10-3, TRBJ2-2)
CAIRTDREDTGELFF

SEQ ID NO: 283867 - protein, 11 aa, Homo sapiens
  CDR3 for alpha chain variable domain of TCR clone 141934 (TRAV23/DV6, TRAJ11)
CAVGGYSTLTF

SEQ ID NO: 283868 - protein, 11 aa, Homo sapiens
  CDR3 for beta chain variable domain of TCR clone 141934 (TRBV7-8, TRBJ2-7)
CASSLSLEQYF

SEQ ID NO: 283869 - protein, 14 aa, Homo sapiens
  CDR3 for alpha chain variable domain of TCR clone 141935 (TRAV16, TRAJ33)
CALSAMDSNYQLIW

SEQ ID NO: 283870 - protein, 15 aa, Homo sapiens
  CDR3 for beta chain variable domain of TCR clone 141935 (TRBV11-3, TRBJ1-1)
CASSLGGPGDTEAFF

SEQ ID NO: 283871 - protein, 14 aa, Homo sapiens
  CDR3 for alpha chain variable domain of TCR clone 141936 (TRAV29/DV5, TRAJ49)
CAASLSNTGNQFYS

SEQ ID NO: 283872 - protein, 15 aa, Homo sapiens
  CDR3 for beta chain variable domain of TCR clone 141936 (TRBV20-1, TRBJ2-1)
CSARGIGGTYNEQFF

SEQ ID NO: 283873 - protein, 12 aa, Homo sapiens
  CDR3 for alpha chain variable domain of TCR clone 141937 (TRAV12-2, TRAJ36)
CAAPRGANNLFF

SEQ ID NO: 283874 - protein, 15 aa, Homo sapiens
  CDR3 for beta chain variable domain of TCR clone 141937 (TRBV11-2, TRBJ1-3)
CASSFDGTVGNTIYF

SEQ ID NO: 283875 - protein, 21 aa, Homo sapiens
  CDR3 for alpha chain variable domain of TCR clone 141938 (TRAV3, )
CAVRPTPDIQNPDPAVYQLRD

SEQ ID NO: 283876 - protein, 15 aa, Homo sapiens
  CDR3 for beta chain variable domain of TCR clone 141938 (TRBV11-3, TRBJ2-5)
CASSDNSGGIETQYF

SEQ ID NO: 283877 - protein, 15 aa, Homo sapiens
  CDR3 for alpha chain variable domain of TCR clone 141939 (TRAV26-2, TRAJ39)
CSLSGNNNACNMLTF

SEQ ID NO: 283878 - protein, 15 aa, Homo sapiens
  CDR3 for beta chain variable domain of TCR clone 141939 (TRBV5-4, TRBJ1-1)
CASSSLGWANTEAFF

SEQ ID NO: 283879 - protein, 15 aa, Homo sapiens
  CDR3 for alpha chain variable domain of TCR clone 141940 (TRAV26-1, TRAJ37)
CIVRVADGNTGKPIF

SEQ ID NO: 283880 - protein, 14 aa, Homo sapiens
  CDR3 for beta chain variable domain of TCR clone 141940 (TRBV10-3, TRBJ2-2)
CATFGQLNTGELFF

SEQ ID NO: 283881 - protein, 14 aa, Homo sapiens
  CDR3 for alpha chain variable domain of TCR clone 141941 (TRAV12-2, TRAJ17)
CAVLFKAAGNKLTF

SEQ ID NO: 283882 - protein, 12 aa, Homo sapiens
  CDR3 for beta chain variable domain of TCR clone 141941 (TRBV5-1, TRBJ2-7)
CASSFRGCEQYF

SEQ ID NO: 283883 - protein, 16 aa, Homo sapiens
  CDR3 for alpha chain variable domain of TCR clone 141942 (TRAV3, TRAJ10)
CAVRDMRAGGGNKPTF

SEQ ID NO: 283884 - protein, 17 aa, Homo sapiens
  CDR3 for beta chain variable domain of TCR clone 141942 (TRBV28, TRBJ2-5)
CASSTPEGDALQETQYF

SEQ ID NO: 283885 - protein, 13 aa, Homo sapiens
  CDR3 for alpha chain variable domain of TCR clone 141943 (TRAV2, TRAJ40)
CAVVPSGTYKYIF

SEQ ID NO: 283886 - protein, 16 aa, Homo sapiens
  CDR3 for beta chain variable domain of TCR clone 141943 (TRBV29-1, TRBJ1-2)
CSVEANRDIANYGYTF

SEQ ID NO: 283887 - protein, 14 aa, Homo sapiens
  CDR3 for alpha chain variable domain of TCR clone 141944 (TRAV9-2, TRAJ39)
CALYIYNAGNMLTF

SEQ ID NO: 283888 - protein, 12 aa, Homo sapiens
  CDR3 for beta chain variable domain of TCR clone 141944 (TRBV11-2, TRBJ2-2)
CASSRGGGELFF

SEQ ID NO: 283889 - protein, 13 aa, Homo sapiens
  CDR3 for alpha chain variable domain of TCR clone 141945 (TRAV20, TRAJ20)
CAVQALNDYKLSF

SEQ ID NO: 283890 - protein, 14 aa, Homo sapiens
  CDR3 for beta chain variable domain of TCR clone 141945 (TRBV4-1, TRBJ2-2)
CASSQAVNTGELFF

SEQ ID NO: 283891 - protein, 15 aa, Homo sapiens
  CDR3 for alpha chain variable domain of TCR clone 141946 (TRAV23/DV6, TRAJ18)
CAARYRGSTLGRLYF

SEQ ID NO: 283892 - protein, 14 aa, Homo sapiens
  CDR3 for beta chain variable domain of TCR clone 141946 (TRBV5-1, TRBJ2-3)
CASSLFGPTDTQYF

SEQ ID NO: 283893 - protein, 13 aa, Homo sapiens
  CDR3 for alpha chain variable domain of TCR clone 141947 (TRAV21, TRAJ37)
CAVSSGNTGKLIF

SEQ ID NO: 283894 - protein, 13 aa, Homo sapiens
  CDR3 for beta chain variable domain of TCR clone 141947 (TRBV19, TRBJ1-2)
CASSVPGQDGYTF

SEQ ID NO: 283895 - protein, 13 aa, Homo sapiens
  CDR3 for alpha chain variable domain of TCR clone 141948 (TRAV5, TRAJ32)
CADYGGATNKLIF

SEQ ID NO: 283896 - protein, 18 aa, Homo sapiens
  CDR3 for beta chain variable domain of TCR clone 141948 (TRBV20-1, TRBJ2-3)
CSASGLAGGPGTTDTQYF

SEQ ID NO: 283897 - protein, 12 aa, Homo sapiens
  CDR3 for alpha chain variable domain of TCR clone 141949 (TRAV13-2, TRAJ23)
CSERHWGGKLIF

SEQ ID NO: 283898 - protein, 16 aa, Homo sapiens
  CDR3 for beta chain variable domain of TCR clone 141949 (TRBV20-1, TRBJ1-4)
CSAPGQGLLTNEKLFF

SEQ ID NO: 283899 - protein, 14 aa, Homo sapiens
  CDR3 for alpha chain variable domain of TCR clone 141950 (TRAV38-1, TRAJ45)
CAYYSGGGADGLTF

SEQ ID NO: 283900 - protein, 13 aa, Homo sapiens
  CDR3 for beta chain variable domain of TCR clone 141950 (TRBV19, TRBJ1-1)
CASTRRGDTEAFF

SEQ ID NO: 283901 - protein, 16 aa, Homo sapiens
  CDR3 for alpha chain variable domain of TCR clone 141951 (TRAV12-2, TRAJ32)
CAVNLGQGGATNKLIF

SEQ ID NO: 283902 - protein, 12 aa, Homo sapiens
  CDR3 for beta chain variable domain of TCR clone 141951 (TRBV29-1, TRBJ2-3)
CSVTGGAYTQYF

SEQ ID NO: 283903 - protein, 13 aa, Homo sapiens
  CDR3 for alpha chain variable domain of TCR clone 141952 (TRAV1-2, TRAJ9)
CAVLNTGGFKTIF

SEQ ID NO: 283904 - protein, 12 aa, Homo sapiens
  CDR3 for beta chain variable domain of TCR clone 141952 (TRBV7-2, TRBJ1-2)
CASRDSIYGYTF

SEQ ID NO: 283905 - protein, 12 aa, Homo sapiens
  CDR3 for alpha chain variable domain of TCR clone 141953 (TRAV3, TRAJ43)
CAVRDPNNDMRF

SEQ ID NO: 283906 - protein, 15 aa, Homo sapiens
  CDR3 for beta chain variable domain of TCR clone 141953 (TRBV27, TRBJ1-5)
CASSLGTGFYQPQHF

SEQ ID NO: 283907 - protein, 15 aa, Homo sapiens
  CDR3 for alpha chain variable domain of TCR clone 141954 (TRAV12-3, TRAJ6)
CAMSATTGGSYIPTF

SEQ ID NO: 283908 - protein, 14 aa, Homo sapiens
  CDR3 for beta chain variable domain of TCR clone 141954 (TRBV11-2, TRBJ2-1)
CASSLSGPYNEQFF

SEQ ID NO: 283909 - protein, 14 aa, Homo sapiens
  CDR3 for alpha chain variable domain of TCR clone 141955 (TRAV8-6, TRAJ49)
CAVRVRYTGNQFYF

SEQ ID NO: 283910 - protein, 11 aa, Homo sapiens
  CDR3 for beta chain variable domain of TCR clone 141955 (TRBV20-1, TRBJ1-2)
CSVQGAGGYTF

SEQ ID NO: 283911 - protein, 12 aa, Homo sapiens
  CDR3 for alpha chain variable domain of TCR clone 141956 (TRAV8-3, TRAJ26)
CAGDNYGQTFVF

SEQ ID NO: 283912 - protein, 15 aa, Homo sapiens
  CDR3 for beta chain variable domain of TCR clone 141956 (TRBV9, TRBJ2-1)
CASILAGSSYNEQFF

SEQ ID NO: 283913 - protein, 15 aa, Homo sapiens
  CDR3 for alpha chain variable domain of TCR clone 141957 (TRAV12-3, TRAJ27)
CAMRAYNTNAGKSTF

SEQ ID NO: 283914 - protein, 15 aa, Homo sapiens
  CDR3 for beta chain variable domain of TCR clone 141957 (TRBV7-2, TRBJ2-1)
CASSLVAGRYNEQFF

SEQ ID NO: 283915 - protein, 13 aa, Homo sapiens
  CDR3 for alpha chain variable domain of TCR clone 141958 (TRAV17, TRAJ7)
CATDNYGNNRLAF

SEQ ID NO: 283916 - protein, 16 aa, Homo sapiens
  CDR3 for beta chain variable domain of TCR clone 141958 (TRBV4-1, TRBJ2-5)
CASSQAIAASSATHYF

SEQ ID NO: 283917 - protein, 12 aa, Homo sapiens
  CDR3 for alpha chain variable domain of TCR clone 141959 (TRAV19, TRAJ30)
CALSDRDDKIIL

SEQ ID NO: 283918 - protein, 15 aa, Homo sapiens
  CDR3 for beta chain variable domain of TCR clone 141959 (TRBV29-1, TRBJ2-5)
CSVAPGQGARETQYF

SEQ ID NO: 283919 - protein, 14 aa, Homo sapiens
  CDR3 for alpha chain variable domain of TCR clone 141960 (TRAV13-1, TRAJ10)
SAAKEPGGGNKLTF

SEQ ID NO: 283920 - protein, 15 aa, Homo sapiens
  CDR3 for beta chain variable domain of TCR clone 141960 (TRBV27, TRBJ2-1)
CASSNGGGSSNEQFF

SEQ ID NO: 283921 - protein, 11 aa, Homo sapiens
  CDR3 for alpha chain variable domain of TCR clone 141961 (TRAV35, TRAJ30)
RAPGGDDKIIF

SEQ ID NO: 283922 - protein, 13 aa, Homo sapiens
  CDR3 for beta chain variable domain of TCR clone 141961 (TRBV7-6, TRBJ2-1)
CQQLGGGADEQFF

SEQ ID NO: 283923 - protein, 14 aa, Homo sapiens
  CDR3 for alpha chain variable domain of TCR clone 141962 (TRAV8-4, TRAJ38)
CARLNAGNNRKLIW

SEQ ID NO: 283924 - protein, 12 aa, Homo sapiens
  CDR3 for beta chain variable domain of TCR clone 141962 (TRBV6-1, TRBJ2-7)
CASSEPLDEQYF

SEQ ID NO: 283925 - protein, 18 aa, Homo sapiens
  CDR3 for alpha chain variable domain of TCR clone 141963 (TRAV12-3, TRAJ52)
CAMSVGGAGGTSYGKLPF

SEQ ID NO: 283926 - protein, 15 aa, Homo sapiens
  CDR3 for beta chain variable domain of TCR clone 141963 (TRBV27, TRBJ1-6)
CASGFDRGLGSPLHF

SEQ ID NO: 283927 - protein, 15 aa, Homo sapiens
  CDR3 for alpha chain variable domain of TCR clone 141964 (TRAV8-4, TRAJ13)
CAVSDWGGGYQKVTF

SEQ ID NO: 283928 - protein, 12 aa, Homo sapiens
  CDR3 for beta chain variable domain of TCR clone 141964 (TRBV6-5, TRBJ1-2)
CASTDPGYGYTF

SEQ ID NO: 283929 - protein, 15 aa, Homo sapiens
  CDR3 for alpha chain variable domain of TCR clone 141965 (TRAV35, TRAJ23)
CAGPLGNNQGGKLIF

SEQ ID NO: 283930 - protein, 14 aa, Homo sapiens
  CDR3 for beta chain variable domain of TCR clone 141965 (TRBV7-9, TRBJ1-1)
CASTPHQSYTEAFF

SEQ ID NO: 283931 - protein, 12 aa, Homo sapiens
  CDR3 for alpha chain variable domain of TCR clone 141966 (TRAV13-1, TRAJ21)
CAAKEGFNKFYF

SEQ ID NO: 283932 - protein, 13 aa, Homo sapiens
  CDR3 for beta chain variable domain of TCR clone 141966 (TRBV19, TRBJ1-2)
CASSVPGLDGYTF

SEQ ID NO: 283933 - protein, 13 aa, Homo sapiens
  CDR3 for alpha chain variable domain of TCR clone 141967 (TRAV26-1, )
CIVSHRVEGFWNH

SEQ ID NO: 283934 - protein, 14 aa, Homo sapiens
  CDR3 for beta chain variable domain of TCR clone 141967 (TRBV20-1, TRBJ2-7)
CSAWTALSSYEQYF

SEQ ID NO: 283935 - protein, 13 aa, Homo sapiens
  CDR3 for alpha chain variable domain of TCR clone 141968 (TRAV12-2, TRAJ9)
CTVLETGGFKTIF

SEQ ID NO: 283936 - protein, 15 aa, Homo sapiens
  CDR3 for beta chain variable domain of TCR clone 141968 (TRBV6-3, TRBJ2-7)
CASSRTGVNLYEQYF

SEQ ID NO: 283937 - protein, 12 aa, Homo sapiens
  CDR3 for alpha chain variable domain of TCR clone 141969 (TRAV17, TRAJ12)
CATLRSSYKLIF

SEQ ID NO: 283938 - protein, 14 aa, Homo sapiens
  CDR3 for beta chain variable domain of TCR clone 141969 (TRBV20-1, TRBJ2-1)
CSAQIGGSANEQFF

SEQ ID NO: 283939 - protein, 17 aa, Homo sapiens
  CDR3 for alpha chain variable domain of TCR clone 141970 (TRAV23/DV6, TRAJ57)
CAASSTLSQGGSEKLVF

SEQ ID NO: 283940 - protein, 15 aa, Homo sapiens
  CDR3 for beta chain variable domain of TCR clone 141970 (TRBV7-2, TRBJ2-1)
CASTHGTGIYNEQFF

SEQ ID NO: 283941 - protein, 14 aa, Homo sapiens
  CDR3 for alpha chain variable domain of TCR clone 141971 (TRAV12-3, TRAJ13)
CAMRNSWGYQKVTF

SEQ ID NO: 283942 - protein, 14 aa, Homo sapiens
  CDR3 for beta chain variable domain of TCR clone 141971 (TRBV4-1, TRBJ1-6)
CASSPGSDSPPLHF

SEQ ID NO: 283943 - protein, 11 aa, Homo sapiens
  CDR3 for alpha chain variable domain of TCR clone 141972 (TRAV2, TRAJ13)
CDSGGYQKVTF

SEQ ID NO: 283944 - protein, 14 aa, Homo sapiens
  CDR3 for beta chain variable domain of TCR clone 141972 (TRBV7-3, TRBJ2-1)
CASSLAGGTNEQFF

SEQ ID NO: 283945 - protein, 14 aa, Homo sapiens
  CDR3 for alpha chain variable domain of TCR clone 141973 (TRAV1-2, TRAJ16)
CAVNRFSDCQKLLF

SEQ ID NO: 283946 - protein, 13 aa, Homo sapiens
  CDR3 for beta chain variable domain of TCR clone 141973 (TRBV20-1, TRBJ2-1)
CSARSSPRDEQFF

SEQ ID NO: 283947 - protein, 16 aa, Homo sapiens
  CDR3 for alpha chain variable domain of TCR clone 141974 (TRAV16, TRAJ4)
CALSRMFSGGYNKLIF

SEQ ID NO: 283948 - protein, 18 aa, Homo sapiens
  CDR3 for beta chain variable domain of TCR clone 141974 (TRBV24-1, TRBJ2-3)
SGWGWQTLGTGATDTQYF

SEQ ID NO: 283949 - protein, 14 aa, Homo sapiens
  CDR3 for alpha chain variable domain of TCR clone 141975 (TRAV20, TRAJ56)
CAVQFGGANSKLTF

SEQ ID NO: 283950 - protein, 14 aa, Homo sapiens
  CDR3 for beta chain variable domain of TCR clone 141975 (TRBV7-2, TRBJ1-1)
CASSFLTETTEAFF

SEQ ID NO: 283951 - protein, 14 aa, Homo sapiens
  CDR3 for alpha chain variable domain of TCR clone 141976 (TRAV20, TRAJ22)
CAVALGGSARPLTF

SEQ ID NO: 283952 - protein, 15 aa, Homo sapiens
  CDR3 for beta chain variable domain of TCR clone 141976 (TRBV7-2, TRBJ1-1)
CASSFAGDRDTEAFF

SEQ ID NO: 283953 - protein, 11 aa, Homo sapiens
  CDR3 for alpha chain variable domain of TCR clone 141977 (TRAV8-3, TRAJ15)
CAVGPGTALIF

SEQ ID NO: 283954 - protein, 15 aa, Homo sapiens
  CDR3 for beta chain variable domain of TCR clone 141977 (TRBV5-1, TRBJ2-6)
CASSLDPSGANVLTF

SEQ ID NO: 283955 - protein, 11 aa, Homo sapiens
  CDR3 for alpha chain variable domain of TCR clone 141978 (TRAV35, TRAJ34)
CWARNTDKLIF

SEQ ID NO: 283956 - protein, 23 aa, Homo sapiens
  CDR3 for beta chain variable domain of TCR clone 141978 (TRBV5-1, TRBJ2-7)
GAGGLGPLSFRQQQGESLYEQYF

SEQ ID NO: 283957 - protein, 11 aa, Homo sapiens
  CDR3 for alpha chain variable domain of TCR clone 141979 (TRAV13-1, TRAJ39)
CASHAGNMLTF

SEQ ID NO: 283958 - protein, 11 aa, Homo sapiens
  CDR3 for beta chain variable domain of TCR clone 141979 (TRBV29-1, TRBJ2-5)
CSEDRTGTQYF

SEQ ID NO: 283959 - protein, 17 aa, Homo sapiens
  CDR3 for alpha chain variable domain of TCR clone 141980 (TRAV38-2/DV8, TRAJ28)
CAYRFAYSGAGSYQLTF

SEQ ID NO: 283960 - protein, 10 aa, Homo sapiens
  CDR3 for beta chain variable domain of TCR clone 141980 (TRBV4-3, TRBJ2-2)
CASSQDTSAR

SEQ ID NO: 283961 - protein, 14 aa, Homo sapiens
  CDR3 for alpha chain variable domain of TCR clone 141981 (TRAV8-1, TRAJ23)
CAVGTYNQGGKLIF

SEQ ID NO: 283962 - protein, 16 aa, Homo sapiens
  CDR3 for beta chain variable domain of TCR clone 141981 (TRBV18, TRBJ1-5)
CASSPSTGNSSQPQHF

SEQ ID NO: 283963 - protein, 11 aa, Homo sapiens
  CDR3 for alpha chain variable domain of TCR clone 141982 (TRAV9-2, TRAJ43)
CALNNNNDMRF

SEQ ID NO: 283964 - protein, 15 aa, Homo sapiens
  CDR3 for beta chain variable domain of TCR clone 141982 (TRBV18, TRBJ2-7)
CASSPTFMDSYEQYF

SEQ ID NO: 283965 - protein, 14 aa, Homo sapiens
  CDR3 for alpha chain variable domain of TCR clone 141983 (TRAV14/DV4, TRAJ49)
FAMREGVNGNQFYF

SEQ ID NO: 283966 - protein, 14 aa, Homo sapiens
  CDR3 for beta chain variable domain of TCR clone 141983 (TRBV5-1, TRBJ1-5)
CASSLESGSRPQHF

SEQ ID NO: 283967 - protein, 13 aa, Homo sapiens
  CDR3 for alpha chain variable domain of TCR clone 141984 (TRAV26-1, TRAJ33)
CIFRVDSNYQLIW

SEQ ID NO: 283968 - protein, 15 aa, Homo sapiens
  CDR3 for beta chain variable domain of TCR clone 141984 (TRBV7-2, TRBJ1-5)
CASSFSAGINQPQHF

SEQ ID NO: 283969 - protein, 15 aa, Homo sapiens
  CDR3 for alpha chain variable domain of TCR clone 141985 (TRAV9-2, TRAJ9)
CALSLTNTGGFKTIF

SEQ ID NO: 283970 - protein, 13 aa, Homo sapiens
  CDR3 for beta chain variable domain of TCR clone 141985 (TRBV7-9, TRBJ1-2)
CASSLKQNYGYTF

SEQ ID NO: 283971 - protein, 12 aa, Homo sapiens
  CDR3 for alpha chain variable domain of TCR clone 141986 (TRAV12-3, TRAJ17)
CAMTLTGNKLTF

SEQ ID NO: 283972 - protein, 11 aa, Homo sapiens
  CDR3 for beta chain variable domain of TCR clone 141986 (TRBV5-1, TRBJ2-1)
CASSIGQEQFF

SEQ ID NO: 283973 - protein, 12 aa, Homo sapiens
  CDR3 for alpha chain variable domain of TCR clone 141987 (TRAV12-1, TRAJ15)
CLVNQAGTALIF

SEQ ID NO: 283974 - protein, 14 aa, Homo sapiens
  CDR3 for beta chain variable domain of TCR clone 141987 (TRBV11-3, TRBJ2-1)
CASSLAVSYNEQFF

SEQ ID NO: 283975 - protein, 10 aa, Homo sapiens
  CDR3 for alpha chain variable domain of TCR clone 141988 (TRAV26-1, TRAJ22)
CIAGSRQLTF

SEQ ID NO: 283976 - protein, 15 aa, Homo sapiens
  CDR3 for beta chain variable domain of TCR clone 141988 (TRBV5-1, TRBJ2-1)
CASSPPRAPYNEQFF

SEQ ID NO: 283977 - protein, 14 aa, Homo sapiens
  CDR3 for alpha chain variable domain of TCR clone 141989 (TRAV17, TRAJ9)
CATVTLGGGFKTIF

SEQ ID NO: 283978 - protein, 15 aa, Homo sapiens
  CDR3 for beta chain variable domain of TCR clone 141989 (TRBV7-9, TRBJ1-5)
CASSQGHQPNQPQHF

SEQ ID NO: 283979 - protein, 12 aa, Homo sapiens
  CDR3 for alpha chain variable domain of TCR clone 141990 (TRAV27, TRAJ37)
CADSGSTGNLIF

SEQ ID NO: 283980 - protein, 18 aa, Homo sapiens
  CDR3 for beta chain variable domain of TCR clone 141990 (TRBV7-9, TRBJ1-1)
CASSKPWDTMGMNAEAFF

SEQ ID NO: 283981 - protein, 13 aa, Homo sapiens
  CDR3 for alpha chain variable domain of TCR clone 141991 (TRAV2, TRAJ29)
CAAQNSGNTPLVF

SEQ ID NO: 283982 - protein, 18 aa, Homo sapiens
  CDR3 for beta chain variable domain of TCR clone 141991 (TRBV20-1, TRBJ2-6)
CSAETTPTHGSGANVLTF

SEQ ID NO: 283983 - protein, 15 aa, Homo sapiens
  CDR3 for alpha chain variable domain of TCR clone 141992 (TRAV3, TRAJ47)
CAVRDIGEYGNKLVF

SEQ ID NO: 283984 - protein, 15 aa, Homo sapiens
  CDR3 for beta chain variable domain of TCR clone 141992 (TRBV6-3, TRBJ2-7)
CASSSPGTVFYEQYF

SEQ ID NO: 283985 - protein, 13 aa, Homo sapiens
  CDR3 for alpha chain variable domain of TCR clone 141993 (TRAV13-2, TRAJ48)
CAEMDFGNEKLTF

SEQ ID NO: 283986 - protein, 15 aa, Homo sapiens
  CDR3 for beta chain variable domain of TCR clone 141993 (TRBV20-1, TRBJ2-7)
FSARDRVSGMDEQYF

SEQ ID NO: 283987 - protein, 16 aa, Homo sapiens
  CDR3 for alpha chain variable domain of TCR clone 141994 (TRAV4, TRAJ5)
CLVGPAHGHGQESTYF

SEQ ID NO: 283988 - protein, 17 aa, Homo sapiens
  CDR3 for beta chain variable domain of TCR clone 141994 (TRBV11-2, TRBJ2-1)
CASSLYPPGVEYNEQFF

SEQ ID NO: 283989 - protein, 12 aa, Homo sapiens
  CDR3 for alpha chain variable domain of TCR clone 141995 (TRAV3, TRAJ43)
CAVRDPNNDMRF

SEQ ID NO: 283990 - protein, 12 aa, Homo sapiens
  CDR3 for beta chain variable domain of TCR clone 141995 (TRBV6-1, TRBJ2-7)
CASSEPLYEQYF

SEQ ID NO: 283991 - protein, 14 aa, Homo sapiens
  CDR3 for alpha chain variable domain of TCR clone 141996 (TRAV12-3, TRAJ12)
CAMSEVDSGYKLIF

SEQ ID NO: 283992 - protein, 12 aa, Homo sapiens
  CDR3 for beta chain variable domain of TCR clone 141996 (TRBV18, TRBJ1-4)
CASSPSREKLFF

SEQ ID NO: 283993 - protein, 18 aa, Homo sapiens
  CDR3 for alpha chain variable domain of TCR clone 141997 (TRAV21, TRAJ52)
CAVRPSPAGGTSDGKLAF

SEQ ID NO: 283994 - protein, 17 aa, Homo sapiens
  CDR3 for beta chain variable domain of TCR clone 141997 (TRBV13, TRBJ2-3)
CASSLSRVAGGRNTQYF

SEQ ID NO: 283995 - protein, 11 aa, Homo sapiens
  CDR3 for alpha chain variable domain of TCR clone 141998 (TRAV22, TRAJ47)
CAVLYGNKLVF

SEQ ID NO: 283996 - protein, 15 aa, Homo sapiens
  CDR3 for beta chain variable domain of TCR clone 141998 (TRBV2, TRBJ2-1)
CASSELAGSYNEQFF

SEQ ID NO: 283997 - protein, 14 aa, Homo sapiens
  CDR3 for alpha chain variable domain of TCR clone 141999 (TRAV13-1, TRAJ26)
CAASSAHYGQNFVF

SEQ ID NO: 283998 - protein, 17 aa, Homo sapiens
  CDR3 for beta chain variable domain of TCR clone 141999 (TRBV25-1, TRBJ2-5)
CASSRRGGRGSQETQYF

SEQ ID NO: 283999 - protein, 12 aa, Homo sapiens
  CDR3 for alpha chain variable domain of TCR clone 142000 (TRAV8-6, TRAJ20)
CAGSSNDYKLSF

SEQ ID NO: 284000 - protein, 14 aa, Homo sapiens
  CDR3 for beta chain variable domain of TCR clone 142000 (TRBV6-1, TRBJ1-3)
CASVQGGGGNTIYF

SEQ ID NO: 284001 - protein, 11 aa, Homo sapiens
  CDR3 for alpha chain variable domain of TCR clone 142001 (TRAV17, TRAJ53)
CATGSNYKLTF

SEQ ID NO: 284002 - protein, 15 aa, Homo sapiens
  CDR3 for beta chain variable domain of TCR clone 142001 (TRBV11-3, TRBJ2-3)
CASLKDGREGDTQYF

SEQ ID NO: 284003 - protein, 11 aa, Homo sapiens
  CDR3 for alpha chain variable domain of TCR clone 142002 (TRAV17, TRAJ31)
CVTDRTARLMF

SEQ ID NO: 284004 - protein, 12 aa, Homo sapiens
  CDR3 for beta chain variable domain of TCR clone 142002 (TRBV29-1, TRBJ2-3)
CSVTGGADTQYF

SEQ ID NO: 284005 - protein, 13 aa, Homo sapiens
  CDR3 for alpha chain variable domain of TCR clone 142003 (TRAV35, TRAJ44)
CAGLSGTASKLTF

SEQ ID NO: 284006 - protein, 17 aa, Homo sapiens
  CDR3 for beta chain variable domain of TCR clone 142003 (TRBV7-8, TRBJ1-2)
CANSLRPLQGHLYGYTF

SEQ ID NO: 284007 - protein, 15 aa, Homo sapiens
  CDR3 for alpha chain variable domain of TCR clone 142004 (TRAV1-2, TRAJ15)
CAVDVMGSAGTALIF

SEQ ID NO: 284008 - protein, 19 aa, Homo sapiens
  CDR3 for beta chain variable domain of TCR clone 142004 (TRBV7-2, TRBJ2-3)
CASSFLSRNWGGGTDTQYF

SEQ ID NO: 284009 - protein, 16 aa, Homo sapiens
  CDR3 for alpha chain variable domain of TCR clone 142005 (TRAV30, TRAJ24)
CGTEIVDADRWGKFQF

SEQ ID NO: 284010 - protein, 17 aa, Homo sapiens
  CDR3 for beta chain variable domain of TCR clone 142005 (TRBV20-1, TRBJ2-1)
CSAPPRLAGTRYNEQFF

SEQ ID NO: 284011 - protein, 14 aa, Homo sapiens
  CDR3 for alpha chain variable domain of TCR clone 142006 (TRAV12-3, TRAJ57)
CAMSAWGGSEKLVF

SEQ ID NO: 284012 - protein, 15 aa, Homo sapiens
  CDR3 for beta chain variable domain of TCR clone 142006 (TRBV11-2, TRBJ2-1)
CASSKNRGLIYEQFF

SEQ ID NO: 284013 - protein, 18 aa, Homo sapiens
  CDR3 for alpha chain variable domain of TCR clone 142007 (TRAV13-1, TRAJ52)
CAANNPNAGGTSYGKLTF

SEQ ID NO: 284014 - protein, 15 aa, Homo sapiens
  CDR3 for beta chain variable domain of TCR clone 142007 (TRBV6-1, TRBJ2-3)
CASSERGGITDTQYS

SEQ ID NO: 284015 - protein, 10 aa, Homo sapiens
  CDR3 for alpha chain variable domain of TCR clone 142008 (TRAV9-2, TRAJ49)
CALIGNQFYF

SEQ ID NO: 284016 - protein, 16 aa, Homo sapiens
  CDR3 for beta chain variable domain of TCR clone 142008 (TRBV19, TRBJ2-3)
CASSPGAASRTDTQYF

SEQ ID NO: 284017 - protein, 18 aa, Homo sapiens
  CDR3 for alpha chain variable domain of TCR clone 142009 (TRAV14/DV4, TRAJ15)
CAMREFPPTGQAGTALIF

SEQ ID NO: 284018 - protein, 14 aa, Homo sapiens
  CDR3 for beta chain variable domain of TCR clone 142009 (TRBV6-1, TRBJ1-3)
CASVQGGGGNTIYF

SEQ ID NO: 284019 - protein, 11 aa, Homo sapiens
  CDR3 for alpha chain variable domain of TCR clone 142010 (TRAV1-1, TRAJ16)
CAAGDGQKLLF

SEQ ID NO: 284020 - protein, 15 aa, Homo sapiens
  CDR3 for beta chain variable domain of TCR clone 142010 (TRBV7-3, TRBJ2-2)
CQQLKAGTLSGELFF

SEQ ID NO: 284021 - protein, 14 aa, Homo sapiens
  CDR3 for alpha chain variable domain of TCR clone 142011 (TRAV12-2, TRAJ44)
CAVNPAGTASKLTF

SEQ ID NO: 284022 - protein, 15 aa, Homo sapiens
  CDR3 for beta chain variable domain of TCR clone 142011 (TRBV28, TRBJ2-7)
CASSPGGRGFYEQYF

SEQ ID NO: 284023 - protein, 14 aa, Homo sapiens
  CDR3 for alpha chain variable domain of TCR clone 142012 (TRAV2, TRAJ9)
CAVEDRSGGFKTIF

SEQ ID NO: 284024 - protein, 14 aa, Homo sapiens
  CDR3 for beta chain variable domain of TCR clone 142012 (TRBV5-5, TRBJ1-5)
CASSGQGVDQPQHF

SEQ ID NO: 284025 - protein, 14 aa, Homo sapiens
  CDR3 for alpha chain variable domain of TCR clone 142013 (TRAV35, TRAJ34)
CAERGTPTSSSLGL

SEQ ID NO: 284026 - protein, 14 aa, Homo sapiens
  CDR3 for beta chain variable domain of TCR clone 142013 (TRBV5-1, TRBJ2-7)
CASSRGESLYEQYF

SEQ ID NO: 284027 - protein, 20 aa, Homo sapiens
  CDR3 for alpha chain variable domain of TCR clone 142014 (TRAV26-1, TRAJ57)
CCVLLHRQMETQGGSEKLVF

SEQ ID NO: 284028 - protein, 16 aa, Homo sapiens
  CDR3 for beta chain variable domain of TCR clone 142014 (TRBV4-2, TRBJ2-7)
CASSQEELAGTYEQYF

SEQ ID NO: 284029 - protein, 15 aa, Homo sapiens
  CDR3 for alpha chain variable domain of TCR clone 142015 (TRAV3, TRAJ22)
CAVRDRGGSARQLTF

SEQ ID NO: 284030 - protein, 17 aa, Homo sapiens
  CDR3 for beta chain variable domain of TCR clone 142015 (TRBV28, TRBJ2-5)
CASSTPEGDALQETQYL

SEQ ID NO: 284031 - protein, 16 aa, Homo sapiens
  CDR3 for alpha chain variable domain of TCR clone 142016 (TRAV12-3, TRAJ53)
CAMSPGSGGINYKLTF

SEQ ID NO: 284032 - protein, 14 aa, Homo sapiens
  CDR3 for beta chain variable domain of TCR clone 142016 (TRBV7-2, TRBJ1-1)
CASSFLTGTTEAFF

SEQ ID NO: 284033 - protein, 13 aa, Homo sapiens
  CDR3 for alpha chain variable domain of TCR clone 142017 (TRAV12-2, TRAJ34)
CAVRGYNTDKLIF

SEQ ID NO: 284034 - protein, 14 aa, Homo sapiens
  CDR3 for beta chain variable domain of TCR clone 142017 (TRBV28, TRBJ2-1)
CSRTGAGVIARQFF

SEQ ID NO: 284035 - protein, 14 aa, Homo sapiens
  CDR3 for alpha chain variable domain of TCR clone 142018 (TRAV12-1, TRAJ17)
CVLNPKAAGNKLTF

SEQ ID NO: 284036 - protein, 16 aa, Homo sapiens
  CDR3 for beta chain variable domain of TCR clone 142018 (TRBV20-1, TRBJ2-1)
CSASASGYSSYNEQFF

SEQ ID NO: 284037 - protein, 12 aa, Homo sapiens
  CDR3 for alpha chain variable domain of TCR clone 142019 (TRAV12-2, TRAJ8)
CAANTGFQKLVF

SEQ ID NO: 284038 - protein, 14 aa, Homo sapiens
  CDR3 for beta chain variable domain of TCR clone 142019 (TRBV20-1, TRBJ1-1)
CSAQTRIGGTEAFF

SEQ ID NO: 284039 - protein, 15 aa, Homo sapiens
  CDR3 for alpha chain variable domain of TCR clone 142020 (TRAV3, TRAJ32)
CAVSSYGGATNKLIL

SEQ ID NO: 284040 - protein, 13 aa, Homo sapiens
  CDR3 for beta chain variable domain of TCR clone 142020 (TRBV20-1, TRBJ2-7)
CSARPSTNYEQYF

SEQ ID NO: 284041 - protein, 21 aa, Homo sapiens
  CDR3 for alpha chain variable domain of TCR clone 142021 (TRAV12-1, TRAJ32)
SSVIQPPTSMSYGGATNKLIF

SEQ ID NO: 284042 - protein, 15 aa, Homo sapiens
  CDR3 for beta chain variable domain of TCR clone 142021 (TRBV7-9, TRBJ2-2)
CASGPLDTFPGELFF

SEQ ID NO: 284043 - protein, 14 aa, Homo sapiens
  CDR3 for alpha chain variable domain of TCR clone 142022 (TRAV13-1, TRAJ6)
CAASITGGSYIPTF

SEQ ID NO: 284044 - protein, 14 aa, Homo sapiens
  CDR3 for beta chain variable domain of TCR clone 142022 (TRBV6-3, TRBJ2-1)
CASRHSAYYNEQFF

SEQ ID NO: 284045 - protein, 15 aa, Homo sapiens
  CDR3 for alpha chain variable domain of TCR clone 142023 (TRAV26-1, TRAJ3)
CIVRSGDSRASKIIF

SEQ ID NO: 284046 - protein, 14 aa, Homo sapiens
  CDR3 for beta chain variable domain of TCR clone 142023 (TRBV13, TRBJ2-5)
CASYRRLAEETQYF

SEQ ID NO: 284047 - protein, 16 aa, Homo sapiens
  CDR3 for alpha chain variable domain of TCR clone 142024 (TRAV27, TRAJ13)
CAGAKSDSGGYQKVTF

SEQ ID NO: 284048 - protein, 15 aa, Homo sapiens
  CDR3 for beta chain variable domain of TCR clone 142024 (TRBV29-1, TRBJ2-1)
CSVGRHALFYTEQFF

SEQ ID NO: 284049 - protein, 13 aa, Homo sapiens
  CDR3 for alpha chain variable domain of TCR clone 142025 (TRAV8-3, TRAJ12)
WVLRMDSSYKLIF

SEQ ID NO: 284050 - protein, 12 aa, Homo sapiens
  CDR3 for beta chain variable domain of TCR clone 142025 (TRBV10-3, TRBJ2-7)
CARDGRLYEQYF

SEQ ID NO: 284051 - protein, 13 aa, Homo sapiens
  CDR3 for alpha chain variable domain of TCR clone 142026 (TRAV25, TRAJ10)
CAGRTGGGNKLTI

SEQ ID NO: 284052 - protein, 15 aa, Homo sapiens
  CDR3 for beta chain variable domain of TCR clone 142026 (TRBV19, TRBJ2-1)
CASSSPGVRLDEQFF

SEQ ID NO: 284053 - protein, 12 aa, Homo sapiens
  CDR3 for alpha chain variable domain of TCR clone 142027 (TRAV4, TRAJ6)
CLAPGGSYIPTF

SEQ ID NO: 284054 - protein, 12 aa, Homo sapiens
  CDR3 for beta chain variable domain of TCR clone 142027 (TRBV11-2, TRBJ2-2)
CASSLPTGELFF
